United States Patent Application Publication US 2005/0244851 A1 - sequence listing, part 128

SEQ ID NO: 4995279 - DNA, 25 bp, Homo sapien
tggagtcgtagtggatacttgtgat

SEQ ID NO: 4995280 - DNA, 25 bp, Homo sapien
cttgatgtgggtagagacttcatta

SEQ ID NO: 4995281 - DNA, 25 bp, Homo sapien
tcattaagaagttttttggcctgga

SEQ ID NO: 4995282 - DNA, 25 bp, Homo sapien
tcattcactattacttcctgagcac

SEQ ID NO: 4995283 - DNA, 25 bp, Homo sapien
tggcctggaaattgttagctgtaaa

SEQ ID NO: 4995284 - DNA, 25 bp, Homo sapien
tcctgagttccactgagttgtcaca

SEQ ID NO: 4995285 - DNA, 25 bp, Homo sapien
tgggtaaggcacaacaccagttcct

SEQ ID NO: 4995286 - DNA, 25 bp, Homo sapien
gggaattgtccctgtcacatcaata

SEQ ID NO: 4995287 - DNA, 25 bp, Homo sapien
cacaagtgggtgtgggaattgtccc

SEQ ID NO: 4995288 - DNA, 25 bp, Homo sapien
tcaggcagcgattccatcatcagcc

SEQ ID NO: 4995289 - DNA, 25 bp, Homo sapien
gattccatcatcagccaaacccagt

SEQ ID NO: 4995290 - DNA, 25 bp, Homo sapien
tccatcatcagccaaacccagtggg

SEQ ID NO: 4995291 - DNA, 25 bp, Homo sapien
caggcagcgattccatcatcagcca

SEQ ID NO: 4995292 - DNA, 25 bp, Homo sapien
gggatagagttttccatgactggga

SEQ ID NO: 4995293 - DNA, 25 bp, Homo sapien
gagttttccatgactgggaggagat

SEQ ID NO: 4995294 - DNA, 25 bp, Homo sapien
tctgaagacaaatctaaagaagtag

SEQ ID NO: 4995295 - DNA, 25 bp, Homo sapien
atctaaagaagtagagattgggaac

SEQ ID NO: 4995296 - DNA, 25 bp, Homo sapien
caagcagtcagaattgcaggcagct

SEQ ID NO: 4995297 - DNA, 25 bp, Homo sapien
tcaggacaacccaccaagcagtcag

SEQ ID NO: 4995298 - DNA, 25 bp, Homo sapien
aagcagtcagaattgcaggcagctt

SEQ ID NO: 4995299 - DNA, 25 bp, Homo sapien
tgagaacttcacagatgggcagcac

SEQ ID NO: 4995300 - DNA, 25 bp, Homo sapien
catgcttcccataagtccagtgtga

SEQ ID NO: 4995301 - DNA, 25 bp, Homo sapien
tacccctgggcattaaggcaacatg

SEQ ID NO: 4995302 - DNA, 25 bp, Homo sapien
tccagtgtgaaaatggctcgatagc

SEQ ID NO: 4995303 - DNA, 25 bp, Homo sapien
tcctggtgttaggtcaagagagact

SEQ ID NO: 4995304 - DNA, 25 bp, Homo sapien
aaagccacgacaactgttctgggca

SEQ ID NO: 4995305 - DNA, 25 bp, Homo sapien
tgctccaaaacttgatacagtcctc

SEQ ID NO: 4995306 - DNA, 25 bp, Homo sapien
gagactttagcacctacctcagggc

SEQ ID NO: 4995307 - DNA, 25 bp, Homo sapien
tccctcatccagataattagcaact

SEQ ID NO: 4995308 - DNA, 25 bp, Homo sapien
caataattcagaacactatggtgga

SEQ ID NO: 4995309 - DNA, 25 bp, Homo sapien
tctgttaattgaggacaaatatgcc

SEQ ID NO: 4995310 - DNA, 25 bp, Homo sapien
tggaaaaggcaagctcagggagcca

SEQ ID NO: 4995311 - DNA, 25 bp, Homo sapien
taaacatgcaccaaatagatgcccc

SEQ ID NO: 4995312 - DNA, 25 bp, Homo sapien
ttgctagcatgtagacaggcaaacc

SEQ ID NO: 4995313 - DNA, 25 bp, Homo sapien
agagcctcacaagaccttccgaagg

SEQ ID NO: 4995314 - DNA, 25 bp, Homo sapien
gctgtcttcagagatttgctagcat

SEQ ID NO: 4995315 - DNA, 25 bp, Homo sapien
ggttcccaccaccatacaatggcaa

SEQ ID NO: 4995316 - DNA, 25 bp, Homo sapien
gttcccaccaccatacaatggcaat

SEQ ID NO: 4995317 - DNA, 25 bp, Homo sapien
tggttcccaccaccatacaatggca

SEQ ID NO: 4995318 - DNA, 25 bp, Homo sapien
tgcagatgatcaaattaggaaaatc

SEQ ID NO: 4995319 - DNA, 25 bp, Homo sapien
agtgcagatgatcaaattaggaaaa

SEQ ID NO: 4995320 - DNA, 25 bp, Homo sapien
ctggaatgtctgcatttagaggctg

SEQ ID NO: 4995321 - DNA, 25 bp, Homo sapien
tggaatgtctgcatttagaggctgt

SEQ ID NO: 4995322 - DNA, 25 bp, Homo sapien
ctcaaattaagagcctcagcatctt

SEQ ID NO: 4995323 - DNA, 25 bp, Homo sapien
tctttactgtggatttttgcaataa

SEQ ID NO: 4995324 - DNA, 25 bp, Homo sapien
gaattgctactagactgtccccacc

SEQ ID NO: 4995325 - DNA, 25 bp, Homo sapien
gaatttcagactcacatccgaattg

SEQ ID NO: 4995326 - DNA, 25 bp, Homo sapien
gcatgaaggtgttctctggctgtca

SEQ ID NO: 4995327 - DNA, 25 bp, Homo sapien
caggaactgattgagcatgaaggtg

SEQ ID NO: 4995328 - DNA, 25 bp, Homo sapien
tctcattagcaggaactgattgagc

SEQ ID NO: 4995329 - DNA, 25 bp, Homo sapien
atcttgtctcattagcaggaactga

SEQ ID NO: 4995330 - DNA, 25 bp, Homo sapien
tgggtcccttctgaccgtacacgtg

SEQ ID NO: 4995331 - DNA, 25 bp, Homo sapien
tgtaggcacacagatccatcctgtg

SEQ ID NO: 4995332 - DNA, 25 bp, Homo sapien
gctctccactgagagtgcccagttt

SEQ ID NO: 4995333 - DNA, 25 bp, Homo sapien
tacacgtgtgtgttgtctcaagtcc

SEQ ID NO: 4995334 - DNA, 25 bp, Homo sapien
taaatcctgtttgcaaactgagctc

SEQ ID NO: 4995335 - DNA, 25 bp, Homo sapien
tatagtctccataaatcctgtttgc

SEQ ID NO: 4995336 - DNA, 25 bp, Homo sapien
tctggactctctatagtctccataa

SEQ ID NO: 4995337 - DNA, 25 bp, Homo sapien
tccataaatcctgtttgcaaactga

SEQ ID NO: 4995338 - DNA, 25 bp, Homo sapien
attgtgattaataaatatctgtcca

SEQ ID NO: 4995339 - DNA, 25 bp, Homo sapien
ttaattgtgattaataaatatctgt

SEQ ID NO: 4995340 - DNA, 25 bp, Homo sapien
ttgtgattaataaatatctgtccat

SEQ ID NO: 4995341 - DNA, 25 bp, Homo sapien
aattgtgattaataaatatctgtcc

SEQ ID NO: 4995342 - DNA, 25 bp, Homo sapien
ttttggataagacataaaaaggaga

SEQ ID NO: 4995343 - DNA, 25 bp, Homo sapien
catggcaaatgtaaatttgcttccg

SEQ ID NO: 4995344 - DNA, 25 bp, Homo sapien
ttgcttccgagagaagaataaaagc

SEQ ID NO: 4995345 - DNA, 25 bp, Homo sapien
aatgtaaatttgcttccgagagaag

SEQ ID NO: 4995346 - DNA, 25 bp, Homo sapien
gagattgacacaccaagattggcca

SEQ ID NO: 4995347 - DNA, 25 bp, Homo sapien
gactctactgggaagggacacttgg

SEQ ID NO: 4995348 - DNA, 25 bp, Homo sapien
cattccctgtgttactgacccctag

SEQ ID NO: 4995349 - DNA, 25 bp, Homo sapien
gaagaattaagcatgtccccaagtg

SEQ ID NO: 4995350 - DNA, 25 bp, Homo sapien
ttgctgtctttcagttgatgaaaag

SEQ ID NO: 4995351 - DNA, 25 bp, Homo sapien
ggattgtgatggagtccttgactcc

SEQ ID NO: 4995352 - DNA, 25 bp, Homo sapien
gcctttttctagttgaggattgtga

SEQ ID NO: 4995353 - DNA, 25 bp, Homo sapien
ctgtctttcagttgatgaaaaggcc

SEQ ID NO: 4995354 - DNA, 25 bp, Homo sapien
gtaatctacattcattgagtaaaat

SEQ ID NO: 4995355 - DNA, 25 bp, Homo sapien
aagacaaattgtgctgctccagtac

SEQ ID NO: 4995356 - DNA, 25 bp, Homo sapien
tctacattcattgagtaaaatttgt

SEQ ID NO: 4995357 - DNA, 25 bp, Homo sapien
gccagatgcaagacaaattgtgctg

SEQ ID NO: 4995358 - DNA, 25 bp, Homo sapien
catcataagtcgttttggtaccgag

SEQ ID NO: 4995359 - DNA, 25 bp, Homo sapien
tgatcatttctcttggtaaaggacc

SEQ ID NO: 4995360 - DNA, 25 bp, Homo sapien
ggtaaaggacccatagcttttcaca

SEQ ID NO: 4995361 - DNA, 25 bp, Homo sapien
taccgagtttgttcttagatttgag

SEQ ID NO: 4995362 - DNA, 25 bp, Homo sapien
gggcccgctgggctgagaaatgtct

SEQ ID NO: 4995363 - DNA, 25 bp, Homo sapien
gttccaaagagggcccgctgggctg

SEQ ID NO: 4995364 - DNA, 25 bp, Homo sapien
ttccaaagagggcccgctgggctga

SEQ ID NO: 4995365 - DNA, 25 bp, Homo sapien
cccgctgggctgagaaatgtctttt

SEQ ID NO: 4995366 - DNA, 25 bp, Homo sapien
tgtacctgaattgcggggaatgctt

SEQ ID NO: 4995367 - DNA, 25 bp, Homo sapien
ttgcggggaatgctttctgagatat

SEQ ID NO: 4995368 - DNA, 25 bp, Homo sapien
gaattgcggggaatgctttctgaga

SEQ ID NO: 4995369 - DNA, 25 bp, Homo sapien
ctgaattgcggggaatgctttctga

SEQ ID NO: 4995370 - DNA, 25 bp, Homo sapien
tgaaggagttgtcccaagtaggcga

SEQ ID NO: 4995371 - DNA, 25 bp, Homo sapien
acttgtgtgtgcacctcgcgctgag

SEQ ID NO: 4995372 - DNA, 25 bp, Homo sapien
cccctagggaggacaactgaatgaa

SEQ ID NO: 4995373 - DNA, 25 bp, Homo sapien
taatgcaggcgctaagttattcgct

SEQ ID NO: 4995374 - DNA, 25 bp, Homo sapien
tgaagtgagctttgtaggactcggc

SEQ ID NO: 4995375 - DNA, 25 bp, Homo sapien
gcagtatggtgaaccccacacctag

SEQ ID NO: 4995376 - DNA, 25 bp, Homo sapien
gatgacaaaacgacgccgaaaggct

SEQ ID NO: 4995377 - DNA, 25 bp, Homo sapien
ctcctcatgagcccacacatgtgga

SEQ ID NO: 4995378 - DNA, 25 bp, Homo sapien
tactgcgccttggaccccgcagtgg

SEQ ID NO: 4995379 - DNA, 25 bp, Homo sapien
caacttcaaggtcaatgtgcctctg

SEQ ID NO: 4995380 - DNA, 25 bp, Homo sapien
ccgagtgggcgagtcaagtgcaact

SEQ ID NO: 4995381 - DNA, 25 bp, Homo sapien
ccagaaacgatattccgggttggat

SEQ ID NO: 4995382 - DNA, 25 bp, Homo sapien
gagctgttctcaagcaaagttgtca

SEQ ID NO: 4995383 - DNA, 25 bp, Homo sapien
ttttccagagctgttctcaagcaaa

SEQ ID NO: 4995384 - DNA, 25 bp, Homo sapien
tggcggagaattcccacggctctca

SEQ ID NO: 4995385 - DNA, 25 bp, Homo sapien
tctcagtggattcgcttttccagag

SEQ ID NO: 4995386 - DNA, 25 bp, Homo sapien
tataatttggtatccaacacccggc

SEQ ID NO: 4995387 - DNA, 25 bp, Homo sapien
aaagcagtaggtgtattccctcccg

SEQ ID NO: 4995388 - DNA, 25 bp, Homo sapien
ttggtccctggagtgtcccgagctg

SEQ ID NO: 4995389 - DNA, 25 bp, Homo sapien
catctttacacaaggtgctctggcg

SEQ ID NO: 4995390 - DNA, 25 bp, Homo sapien
tgagtcagaagatttcgccgtggcc

SEQ ID NO: 4995391 - DNA, 25 bp, Homo sapien
cttagggctggcgacgattaaacca

SEQ ID NO: 4995392 - DNA, 25 bp, Homo sapien
ggagccaagttcgagcgcacagatt

SEQ ID NO: 4995393 - DNA, 25 bp, Homo sapien
ttgccagttccatcaggagcccgga

SEQ ID NO: 4995394 - DNA, 25 bp, Homo sapien
tataaggccggtatttagagcttcc

SEQ ID NO: 4995395 - DNA, 25 bp, Homo sapien
agcgactattaagcagccacctcct

SEQ ID NO: 4995396 - DNA, 25 bp, Homo sapien
gagcttccataaattcttcggcctt

SEQ ID NO: 4995397 - DNA, 25 bp, Homo sapien
aaagttttcagcgactattaagcag

SEQ ID NO: 4995398 - DNA, 25 bp, Homo sapien
gggccacgagatgcgctcaagtgtt

SEQ ID NO: 4995399 - DNA, 25 bp, Homo sapien
tcaagtgtttgttgcctaagggcga

SEQ ID NO: 4995400 - DNA, 25 bp, Homo sapien
gatcctgggtctagctgagctggca

SEQ ID NO: 4995401 - DNA, 25 bp, Homo sapien
agacaaaggtcctgcgaagatcctg

SEQ ID NO: 4995402 - DNA, 25 bp, Homo sapien
tcaagtacggcgaaagcgcgagccg

SEQ ID NO: 4995403 - DNA, 25 bp, Homo sapien
cctgggctgcttcgagccggctgac

SEQ ID NO: 4995404 - DNA, 25 bp, Homo sapien
tgtccccgggctgctagtaggttca

SEQ ID NO: 4995405 - DNA, 25 bp, Homo sapien
cctccaagcgcttggaagcggcttt

SEQ ID NO: 4995406 - DNA, 25 bp, Homo sapien
ggcgctcggcgcctacgagcaggca

SEQ ID NO: 4995407 - DNA, 25 bp, Homo sapien
ggctacccgttcagcgccggactgc

SEQ ID NO: 4995408 - DNA, 25 bp, Homo sapien
gctcggcgcctacgagcaggcagcc

SEQ ID NO: 4995409 - DNA, 25 bp, Homo sapien
agcaggcagccggctacccgttcag

SEQ ID NO: 4995410 - DNA, 25 bp, Homo sapien
tgttactttctactctgcaatgatg

SEQ ID NO: 4995411 - DNA, 25 bp, Homo sapien
gctcaaagttttggcgagagtgata

SEQ ID NO: 4995412 - DNA, 25 bp, Homo sapien
aaagtcatgggtcttatgtgcagat

SEQ ID NO: 4995413 - DNA, 25 bp, Homo sapien
attgcttcagtccaaaaattacagg

SEQ ID NO: 4995414 - DNA, 25 bp, Homo sapien
gaagggttagctttgcgtgtacgac

SEQ ID NO: 4995415 - DNA, 25 bp, Homo sapien
tgtacgactgcaggaccagcaaatg

SEQ ID NO: 4995416 - DNA, 25 bp, Homo sapien
tgcaagggtatcttggccacccctg

SEQ ID NO: 4995417 - DNA, 25 bp, Homo sapien
tattctcacttagggtcccgtcgcc

SEQ ID NO: 4995418 - DNA, 25 bp, Homo sapien
agtgggagggaacaactacacaaag

SEQ ID NO: 4995419 - DNA, 25 bp, Homo sapien
tttaatgaaaacgtgattcacatgg

SEQ ID NO: 4995420 - DNA, 25 bp, Homo sapien
gaacaactacacaaaggtgccttta

SEQ ID NO: 4995421 - DNA, 25 bp, Homo sapien
gcaaaacctgactatcagaaacatg

SEQ ID NO: 4995422 - DNA, 25 bp, Homo sapien
ccattcctctagtttctcctgtgag

SEQ ID NO: 4995423 - DNA, 25 bp, Homo sapien
cattcctctagtttctcctgtgagc

SEQ ID NO: 4995424 - DNA, 25 bp, Homo sapien
tccattcctctagtttctcctgtga

SEQ ID NO: 4995425 - DNA, 25 bp, Homo sapien
ggaacttccactttaggcaacatgg

SEQ ID NO: 4995426 - DNA, 25 bp, Homo sapien
taagccagttatgtcacagccagaa

SEQ ID NO: 4995427 - DNA, 25 bp, Homo sapien
gcaacatggcgaactagacgtccaa

SEQ ID NO: 4995428 - DNA, 25 bp, Homo sapien
caatggataccttaagaacgggcaa

SEQ ID NO: 4995429 - DNA, 25 bp, Homo sapien
cccaatctattggtgtgaaggtaca

SEQ ID NO: 4995430 - DNA, 25 bp, Homo sapien
tgttagactgtgtccatttccagca

SEQ ID NO: 4995431 - DNA, 25 bp, Homo sapien
tgtgactaaggacaaactggactga

SEQ ID NO: 4995432 - DNA, 25 bp, Homo sapien
cattttcatccagtgtaactcatgg

SEQ ID NO: 4995433 - DNA, 25 bp, Homo sapien
gaatctggatactgaataccaaaca

SEQ ID NO: 4995434 - DNA, 25 bp, Homo sapien
tgaataccaaacaacaagcggctgt

SEQ ID NO: 4995435 - DNA, 25 bp, Homo sapien
gtcctatgggcttatcatcaattat

SEQ ID NO: 4995436 - DNA, 25 bp, Homo sapien
cggctgtagtttagtcctatgggct

SEQ ID NO: 4995437 - DNA, 25 bp, Homo sapien
ttgctggttccagttccaaacggca

SEQ ID NO: 4995438 - DNA, 25 bp, Homo sapien
taagtgcaaaaaatcggcctggaca

SEQ ID NO: 4995439 - DNA, 25 bp, Homo sapien
cggcattaggtaacacttcagcttt

SEQ ID NO: 4995440 - DNA, 25 bp, Homo sapien
tcttctataaaacgatcatatctaa

SEQ ID NO: 4995441 - DNA, 25 bp, Homo sapien
ctcagagcttcacccgtgagcagca

SEQ ID NO: 4995442 - DNA, 25 bp, Homo sapien
tatatgggcttaactacagcaatga

SEQ ID NO: 4995443 - DNA, 25 bp, Homo sapien
tgagcagcagctttacaatctcaag

SEQ ID NO: 4995444 - DNA, 25 bp, Homo sapien
taagaggtggaaaagtatatgggct

SEQ ID NO: 4995445 - DNA, 25 bp, Homo sapien
aagtctccctttcgcacacagtagt

SEQ ID NO: 4995446 - DNA, 25 bp, Homo sapien
tcctcctcaacaaaacgaatggtgg

SEQ ID NO: 4995447 - DNA, 25 bp, Homo sapien
taggactggaggaaagatggctacc

SEQ ID NO: 4995448 - DNA, 25 bp, Homo sapien
agtagtccccggtctctgaactgag

SEQ ID NO: 4995449 - DNA, 25 bp, Homo sapien
ttttgtaggagagggtgatctgcta

SEQ ID NO: 4995450 - DNA, 25 bp, Homo sapien
gtggtctggctccagcaaggcttgg

SEQ ID NO: 4995451 - DNA, 25 bp, Homo sapien
tctgctagagaggaatgttgtgtta

SEQ ID NO: 4995452 - DNA, 25 bp, Homo sapien
cacagctggtgagtcattccacaaa

SEQ ID NO: 4995453 - DNA, 25 bp, Homo sapien
aggaattcctttgggaataatatgc

SEQ ID NO: 4995454 - DNA, 25 bp, Homo sapien
cagattttatggctaatttccggca

SEQ ID NO: 4995455 - DNA, 25 bp, Homo sapien
tttactcctagcacgacagatttta

SEQ ID NO: 4995456 - DNA, 25 bp, Homo sapien
gctaatttccggcaatttatcctgg

SEQ ID NO: 4995457 - DNA, 25 bp, Homo sapien
cataccaagggataaccaagcaaca

SEQ ID NO: 4995458 - DNA, 25 bp, Homo sapien
tttgtgcaagcactccatgaaagag

SEQ ID NO: 4995459 - DNA, 25 bp, Homo sapien
tgtgctagtgccgaacaaacaaggc

SEQ ID NO: 4995460 - DNA, 25 bp, Homo sapien
tgcacggtagagcaacatctgtttc

SEQ ID NO: 4995461 - DNA, 25 bp, Homo sapien
tcaagcatttgtcttccaatttcca

SEQ ID NO: 4995462 - DNA, 25 bp, Homo sapien
agcatttgtcttccaatttccactg

SEQ ID NO: 4995463 - DNA, 25 bp, Homo sapien
ccaatttccactgaataaatgcgta

SEQ ID NO: 4995464 - DNA, 25 bp, Homo sapien
catttgtcttccaatttccactgaa

SEQ ID NO: 4995465 - DNA, 25 bp, Homo sapien
tgtcaatcatccagccaaaacaggg

SEQ ID NO: 4995466 - DNA, 25 bp, Homo sapien
aaacagcaagctgtcaatcatccag

SEQ ID NO: 4995467 - DNA, 25 bp, Homo sapien
caccagcttgtgataggcgggcaaa

SEQ ID NO: 4995468 - DNA, 25 bp, Homo sapien
ttgggtctggcctgccaccagcttg

SEQ ID NO: 4995469 - DNA, 25 bp, Homo sapien
tcaatgggccttagcctgagaagtg

SEQ ID NO: 4995470 - DNA, 25 bp, Homo sapien
ttagcctgagaagtgagaacaatct

SEQ ID NO: 4995471 - DNA, 25 bp, Homo sapien
tggccactgagggtgaacattgacc

SEQ ID NO: 4995472 - DNA, 25 bp, Homo sapien
gctcctgaaaggtcccattaaagaa

SEQ ID NO: 4995473 - DNA, 25 bp, Homo sapien
gctgccatagcttctgggtgccgca

SEQ ID NO: 4995474 - DNA, 25 bp, Homo sapien
gcagcaaacggtcaatttcgtcacg

SEQ ID NO: 4995475 - DNA, 25 bp, Homo sapien
tttgacctgttgactgcagcaaacg

SEQ ID NO: 4995476 - DNA, 25 bp, Homo sapien
gggtgccgcagaagataatacattg

SEQ ID NO: 4995477 - DNA, 25 bp, Homo sapien
cgtgcacataatatttctccaggac

SEQ ID NO: 4995478 - DNA, 25 bp, Homo sapien
tcctatttcaaggtcctcgtgcaca

SEQ ID NO: 4995479 - DNA, 25 bp, Homo sapien
ttcaaggtcctcgtgcacataatat

SEQ ID NO: 4995480 - DNA, 25 bp, Homo sapien
ggtcctcgtgcacataatatttctc

SEQ ID NO: 4995481 - DNA, 25 bp, Homo sapien
caaaaattgatagcagaggtgaagc

SEQ ID NO: 4995482 - DNA, 25 bp, Homo sapien
ccaagagtatgtccaaagatttgcc

SEQ ID NO: 4995483 - DNA, 25 bp, Homo sapien
ggatacagttctgccgtgtcccaac

SEQ ID NO: 4995484 - DNA, 25 bp, Homo sapien
gacatttcctagaagctcaatgggt

SEQ ID NO: 4995485 - DNA, 25 bp, Homo sapien
gaaggggtccaggataaatgttatg

SEQ ID NO: 4995486 - DNA, 25 bp, Homo sapien
ttattgagatgtgaattggttcaga

SEQ ID NO: 4995487 - DNA, 25 bp, Homo sapien
attgagatgtgaattggttcagaag

SEQ ID NO: 4995488 - DNA, 25 bp, Homo sapien
ttgagatgtgaattggttcagaaga

SEQ ID NO: 4995489 - DNA, 25 bp, Homo sapien
tattgagatgtgaattggttcagaa

SEQ ID NO: 4995490 - DNA, 25 bp, Homo sapien
gaagccaaccttttatcaatggagg

SEQ ID NO: 4995491 - DNA, 25 bp, Homo sapien
gaactgtgaaagtgtcaccatgttg

SEQ ID NO: 4995492 - DNA, 25 bp, Homo sapien
tatcaatggaggctcaccgggtctc

SEQ ID NO: 4995493 - DNA, 25 bp, Homo sapien
gtaagttcaggaccactccaagata

SEQ ID NO: 4995494 - DNA, 25 bp, Homo sapien
tccagagcataactcttcaagccat

SEQ ID NO: 4995495 - DNA, 25 bp, Homo sapien
tctgtagaatgtgccttgtaaactc

SEQ ID NO: 4995496 - DNA, 25 bp, Homo sapien
actcttcaagccatataccagctga

SEQ ID NO: 4995497 - DNA, 25 bp, Homo sapien
taccagctgaatctttagctgtcag

SEQ ID NO: 4995498 - DNA, 25 bp, Homo sapien
tgagcccagaggtgataatcctata

SEQ ID NO: 4995499 - DNA, 25 bp, Homo sapien
gataatcctataaagtaaataagca

SEQ ID NO: 4995500 - DNA, 25 bp, Homo sapien
cccatagggcaacttctatttgtgg

SEQ ID NO: 4995501 - DNA, 25 bp, Homo sapien
atgttttgcacttgtgatgagccca

SEQ ID NO: 4995502 - DNA, 25 bp, Homo sapien
aggctgatgacattgtccaactcaa

SEQ ID NO: 4995503 - DNA, 25 bp, Homo sapien
tgatgacattgtccaactcaacatc

SEQ ID NO: 4995504 - DNA, 25 bp, Homo sapien
gatgacattgtccaactcaacatcc

SEQ ID NO: 4995505 - DNA, 25 bp, Homo sapien
gctgatgacattgtccaactcaaca

SEQ ID NO: 4995506 - DNA, 25 bp, Homo sapien
tctgaatgatacattggtcagtgct

SEQ ID NO: 4995507 - DNA, 25 bp, Homo sapien
tcatagacacaaggagagcaggatc

SEQ ID NO: 4995508 - DNA, 25 bp, Homo sapien
tgctactctgcgtcaactaaacttt

SEQ ID NO: 4995509 - DNA, 25 bp, Homo sapien
tagatgatgtgtcttcccacctggg

SEQ ID NO: 4995510 - DNA, 25 bp, Homo sapien
tggaggtgaccgattaaggtgttta

SEQ ID NO: 4995511 - DNA, 25 bp, Homo sapien
gactcatttgaaagcaatatagaca

SEQ ID NO: 4995512 - DNA, 25 bp, Homo sapien
ctcacttgattaatgaatggaggtg

SEQ ID NO: 4995513 - DNA, 25 bp, Homo sapien
taaggtgtttaaggtatgcaattgc

SEQ ID NO: 4995514 - DNA, 25 bp, Homo sapien
tctgcataatgtatactccgttttt

SEQ ID NO: 4995515 - DNA, 25 bp, Homo sapien
cctgttctgcataatgtatactccg

SEQ ID NO: 4995516 - DNA, 25 bp, Homo sapien
tgttctgcataatgtatactccgtt

SEQ ID NO: 4995517 - DNA, 25 bp, Homo sapien
atcctgttctgcataatgtatactc

SEQ ID NO: 4995518 - DNA, 25 bp, Homo sapien
tgttcaggaattggaatgcttttgc

SEQ ID NO: 4995519 - DNA, 25 bp, Homo sapien
tcaggaattggaatgcttttgccat

SEQ ID NO: 4995520 - DNA, 25 bp, Homo sapien
cagctctgttcaggaattggaatgc

SEQ ID NO: 4995521 - DNA, 25 bp, Homo sapien
ctctgttcaggaattggaatgcttt

SEQ ID NO: 4995522 - DNA, 25 bp, Homo sapien
tgtggctgctgcattaacactatag

SEQ ID NO: 4995523 - DNA, 25 bp, Homo sapien
taacgactttccactgtgaacaaga

SEQ ID NO: 4995524 - DNA, 25 bp, Homo sapien
agcctgtagcttatgctcccctgct

SEQ ID NO: 4995525 - DNA, 25 bp, Homo sapien
tccccattaacgactttccactgtg

SEQ ID NO: 4995526 - DNA, 25 bp, Homo sapien
taggaagaatcggcacaaagaaatt

SEQ ID NO: 4995527 - DNA, 25 bp, Homo sapien
aggaagaatcggcacaaagaaatta

SEQ ID NO: 4995528 - DNA, 25 bp, Homo sapien
tcatttttctccccagtgttgcaca

SEQ ID NO: 4995529 - DNA, 25 bp, Homo sapien
cttcatttttctccccagtgttgca

SEQ ID NO: 4995530 - DNA, 25 bp, Homo sapien
catttttctccccagtgttgcacat

SEQ ID NO: 4995531 - DNA, 25 bp, Homo sapien
ttcatttttctccccagtgttgcac

SEQ ID NO: 4995532 - DNA, 25 bp, Homo sapien
taatgaacccagtgacagttaatgt

SEQ ID NO: 4995533 - DNA, 25 bp, Homo sapien
gcagactccctctagtggtcaaagt

SEQ ID NO: 4995534 - DNA, 25 bp, Homo sapien
tgcatatgatatcgtggacagacaa

SEQ ID NO: 4995535 - DNA, 25 bp, Homo sapien
tgtgtcatcagcacccgaaaacagc

SEQ ID NO: 4995536 - DNA, 25 bp, Homo sapien
taatgtacggcaataatatcgggca

SEQ ID NO: 4995537 - DNA, 25 bp, Homo sapien
cgggcatgcagaacctaatgtatta

SEQ ID NO: 4995538 - DNA, 25 bp, Homo sapien
ttatcatcattctcaggacccaggt

SEQ ID NO: 4995539 - DNA, 25 bp, Homo sapien
gacccaggtttatgtggttgccacc

SEQ ID NO: 4995540 - DNA, 25 bp, Homo sapien
cagggttatccttttgtttgctgca

SEQ ID NO: 4995541 - DNA, 25 bp, Homo sapien
tcctgacaggagattagacaaagca

SEQ ID NO: 4995542 - DNA, 25 bp, Homo sapien
aatctggttctctctttacaacaag

SEQ ID NO: 4995543 - DNA, 25 bp, Homo sapien
gcgatttgaactatagaaggacttc

SEQ ID NO: 4995544 - DNA, 25 bp, Homo sapien
cactgagctgtgttactccaattgg

SEQ ID NO: 4995545 - DNA, 25 bp, Homo sapien
actaatcttgagaaaggggccgcag

SEQ ID NO: 4995546 - DNA, 25 bp, Homo sapien
tgtgctctgaagacacaatcatttc

SEQ ID NO: 4995547 - DNA, 25 bp, Homo sapien
cttctctatcagctctgcaccagag

SEQ ID NO: 4995548 - DNA, 25 bp, Homo sapien
tttgcaaggccaaaggatacttctc

SEQ ID NO: 4995549 - DNA, 25 bp, Homo sapien
ttgcaaggccaaaggatacttctct

SEQ ID NO: 4995550 - DNA, 25 bp, Homo sapien
tggacacgacaacatcccatttctg

SEQ ID NO: 4995551 - DNA, 25 bp, Homo sapien
ctcagtgatggacaggtctggacac

SEQ ID NO: 4995552 - DNA, 25 bp, Homo sapien
gaaaactgatgtccccatcatctac

SEQ ID NO: 4995553 - DNA, 25 bp, Homo sapien
tctggttctgtgtcatgtaacgtat

SEQ ID NO: 4995554 - DNA, 25 bp, Homo sapien
agttcatatattccacccttaatga

SEQ ID NO: 4995555 - DNA, 25 bp, Homo sapien
aattataatatagacatgaaacaat

SEQ ID NO: 4995556 - DNA, 25 bp, Homo sapien
tgcagccattatgttcacctccagg

SEQ ID NO: 4995557 - DNA, 25 bp, Homo sapien
tcgtcaggactaagcaccagggttt

SEQ ID NO: 4995558 - DNA, 25 bp, Homo sapien
cagagtggtccattccaggcagact

SEQ ID NO: 4995559 - DNA, 25 bp, Homo sapien
tgttcaacagtaagaagtccccttc

SEQ ID NO: 4995560 - DNA, 25 bp, Homo sapien
gccactcatttggacaatagggtca

SEQ ID NO: 4995561 - DNA, 25 bp, Homo sapien
agtacctgctgtggtacacattctt

SEQ ID NO: 4995562 - DNA, 25 bp, Homo sapien
ggtttagcatgcagtacctgctgtg

SEQ ID NO: 4995563 - DNA, 25 bp, Homo sapien
ggagaagttatgcttgccactcatt

SEQ ID NO: 4995564 - DNA, 25 bp, Homo sapien
actcttcatccctaaggaactgtct

SEQ ID NO: 4995565 - DNA, 25 bp, Homo sapien
tggcaggtgaatcttttgagtccag

SEQ ID NO: 4995566 - DNA, 25 bp, Homo sapien
gccatggcaggtgaatcttttgagt

SEQ ID NO: 4995567 - DNA, 25 bp, Homo sapien
catggcaggtgaatcttttgagtcc

SEQ ID NO: 4995568 - DNA, 25 bp, Homo sapien
aggccatggcaggtgaatcttttga

SEQ ID NO: 4995569 - DNA, 25 bp, Homo sapien
tgattgttaagttttctgaggtctc

SEQ ID NO: 4995570 - DNA, 25 bp, Homo sapien
ctgaggtctccccagttgtgctaaa

SEQ ID NO: 4995571 - DNA, 25 bp, Homo sapien
cctgctgccctgtgatgaaggatgt

SEQ ID NO: 4995572 - DNA, 25 bp, Homo sapien
gctgccctgtgatgaaggatgtgtt

SEQ ID NO: 4995573 - DNA, 25 bp, Homo sapien
ggttctcccaccctttcataaggca

SEQ ID NO: 4995574 - DNA, 25 bp, Homo sapien
accctttcataaggcattaatccat

SEQ ID NO: 4995575 - DNA, 25 bp, Homo sapien
ctggttctcccaccctttcataagg

SEQ ID NO: 4995576 - DNA, 25 bp, Homo sapien
ccaccctttcataaggcattaatcc

SEQ ID NO: 4995577 - DNA, 25 bp, Homo sapien
gtatctctgcttctaaaaggcacct

SEQ ID NO: 4995578 - DNA, 25 bp, Homo sapien
tggtatctctgcttctaaaaggcac

SEQ ID NO: 4995579 - DNA, 25 bp, Homo sapien
ctctgcttctaaaaggcaccttgaa

SEQ ID NO: 4995580 - DNA, 25 bp, Homo sapien
ggtatctctgcttctaaaaggcacc

SEQ ID NO: 4995581 - DNA, 25 bp, Homo sapien
tccagaaaaacagatggtttcagca

SEQ ID NO: 4995582 - DNA, 25 bp, Homo sapien
cagaaaaacagatggtttcagcatt

SEQ ID NO: 4995583 - DNA, 25 bp, Homo sapien
cctgacaacgtccagaaaaacagat

SEQ ID NO: 4995584 - DNA, 25 bp, Homo sapien
gaaaaacagatggtttcagcattca

SEQ ID NO: 4995585 - DNA, 25 bp, Homo sapien
tatactaaagcacctagccagatct

SEQ ID NO: 4995586 - DNA, 25 bp, Homo sapien
gctgcagacaatctccatcaactga

SEQ ID NO: 4995587 - DNA, 25 bp, Homo sapien
aaattcatttgctatcttgggtcca

SEQ ID NO: 4995588 - DNA, 25 bp, Homo sapien
cctgtaacaaatgtcactggctgaa

SEQ ID NO: 4995589 - DNA, 25 bp, Homo sapien
ccaaacaccatggagtcctgctgta

SEQ ID NO: 4995590 - DNA, 25 bp, Homo sapien
gaccaagaagttcaccaaacaccat

SEQ ID NO: 4995591 - DNA, 25 bp, Homo sapien
caaagtgattgtgttgatgaccaag

SEQ ID NO: 4995592 - DNA, 25 bp, Homo sapien
ctacagcatgacaaactcaaagtga

SEQ ID NO: 4995593 - DNA, 25 bp, Homo sapien
tagtgctattctgttagaaaaaggt

SEQ ID NO: 4995594 - DNA, 25 bp, Homo sapien
acattcaaactgtagtggcaactgc

SEQ ID NO: 4995595 - DNA, 25 bp, Homo sapien
tctcaattaccacacaaagttccga

SEQ ID NO: 4995596 - DNA, 25 bp, Homo sapien
cagacctagacaggacgatagatgg

SEQ ID NO: 4995597 - DNA, 25 bp, Homo sapien
aaaagaatcctgcagccaatggcct

SEQ ID NO: 4995598 - DNA, 25 bp, Homo sapien
tacttacaggtgtctggcttctacc

SEQ ID NO: 4995599 - DNA, 25 bp, Homo sapien
tgagacttgaactgccgcactaact

SEQ ID NO: 4995600 - DNA, 25 bp, Homo sapien
tccatggactttgagtaggacagat

SEQ ID NO: 4995601 - DNA, 25 bp, Homo sapien
ttgggaaatcggtgaagtacaactc

SEQ ID NO: 4995602 - DNA, 25 bp, Homo sapien
ggaaatcggtgaagtacaactccca

SEQ ID NO: 4995603 - DNA, 25 bp, Homo sapien
aatcggtgaagtacaactcccattc

SEQ ID NO: 4995604 - DNA, 25 bp, Homo sapien
tcggtgaagtacaactcccattccc

SEQ ID NO: 4995605 - DNA, 25 bp, Homo sapien
tataatgatatgtatgtcgggtgag

SEQ ID NO: 4995606 - DNA, 25 bp, Homo sapien
ataatgatatgtatgtcgggtgaga

SEQ ID NO: 4995607 - DNA, 25 bp, Homo sapien
atgatatgtatgtcgggtgagaggg

SEQ ID NO: 4995608 - DNA, 25 bp, Homo sapien
taatgatatgtatgtcgggtgagag

SEQ ID NO: 4995609 - DNA, 25 bp, Homo sapien
gagacaaatgcaaagcctgagagta

SEQ ID NO: 4995610 - DNA, 25 bp, Homo sapien
aaagagtttctggttagtgccaagg

SEQ ID NO: 4995611 - DNA, 25 bp, Homo sapien
ggaaacccaatgtgcaagctgactg

SEQ ID NO: 4995612 - DNA, 25 bp, Homo sapien
ggaagtctcattcattactggtagg

SEQ ID NO: 4995613 - DNA, 25 bp, Homo sapien
atatgtccttctttatgtggcggca

SEQ ID NO: 4995614 - DNA, 25 bp, Homo sapien
ccttggagccaatctactgtattag

SEQ ID NO: 4995615 - DNA, 25 bp, Homo sapien
tgggaatctgtatagcagtgcccca

SEQ ID NO: 4995616 - DNA, 25 bp, Homo sapien
gccagcaggagaaatatcagatgct

SEQ ID NO: 4995617 - DNA, 25 bp, Homo sapien
aaaggcaacctggaagcgcacattc

SEQ ID NO: 4995618 - DNA, 25 bp, Homo sapien
aggcaacctggaagcgcacattcca

SEQ ID NO: 4995619 - DNA, 25 bp, Homo sapien
aaggcaacctggaagcgcacattcc

SEQ ID NO: 4995620 - DNA, 25 bp, Homo sapien
gctccagcgaaaagcggcccgtggc

SEQ ID NO: 4995621 - DNA, 25 bp, Homo sapien
gaggcccaaccgctccagcgaaaag

SEQ ID NO: 4995622 - DNA, 25 bp, Homo sapien
gaaaagcggcccgtggccgcggaca

SEQ ID NO: 4995623 - DNA, 25 bp, Homo sapien
ctggtgcgccggacaagcaagcaga

SEQ ID NO: 4995624 - DNA, 25 bp, Homo sapien
cggcgcgcgctaggccgcggtgggc

SEQ ID NO: 4995625 - DNA, 25 bp, Homo sapien
ggcgcgcgctaggccgcggtgggca

SEQ ID NO: 4995626 - DNA, 25 bp, Homo sapien
ctgcgaacagcgcggtcggcgactc

SEQ ID NO: 4995627 - DNA, 25 bp, Homo sapien
gcgactctgcagcctgcggcggctt

SEQ ID NO: 4995628 - DNA, 25 bp, Homo sapien
gaacagcgcggtcggcgactctgca

SEQ ID NO: 4995629 - DNA, 25 bp, Homo sapien
agcgcggtcggcgactctgcagcct

SEQ ID NO: 4995630 - DNA, 25 bp, Homo sapien
gacaggaatgtcaccgtggtctccc

SEQ ID NO: 4995631 - DNA, 25 bp, Homo sapien
atgacaaaagttcgtggactgcccc

SEQ ID NO: 4995632 - DNA, 25 bp, Homo sapien
gctgaatgacaaaagttcgtggact

SEQ ID NO: 4995633 - DNA, 25 bp, Homo sapien
tgaatgacaaaagttcgtggactgc

SEQ ID NO: 4995634 - DNA, 25 bp, Homo sapien
cgtttccgacccggcagcttctgga

SEQ ID NO: 4995635 - DNA, 25 bp, Homo sapien
tttccgacccggcagcttctggaaa

SEQ ID NO: 4995636 - DNA, 25 bp, Homo sapien
accgtttccgacccggcagcttctg

SEQ ID NO: 4995637 - DNA, 25 bp, Homo sapien
caccgtttccgacccggcagcttct

SEQ ID NO: 4995638 - DNA, 25 bp, Homo sapien
gtcctattcgaggacttgtgtgctc

SEQ ID NO: 4995639 - DNA, 25 bp, Homo sapien
ttctaaccacggtcctattcgagga

SEQ ID NO: 4995640 - DNA, 25 bp, Homo sapien
tgtgtgctctgtcaatgcaacactt

SEQ ID NO: 4995641 - DNA, 25 bp, Homo sapien
ccactgataaatatcggccgttcta

SEQ ID NO: 4995642 - DNA, 25 bp, Homo sapien
gagtgctttccgtcactgctgggac

SEQ ID NO: 4995643 - DNA, 25 bp, Homo sapien
tgagtgctttccgtcactgctggga

SEQ ID NO: 4995644 - DNA, 25 bp, Homo sapien
agtgctttccgtcactgctgggaca

SEQ ID NO: 4995645 - DNA, 25 bp, Homo sapien
attgagtgctttccgtcactgctgg

SEQ ID NO: 4995646 - DNA, 25 bp, Homo sapien
acactacttcacttcagcctaggca

SEQ ID NO: 4995647 - DNA, 25 bp, Homo sapien
cgagatcacactacttcacttcagc

SEQ ID NO: 4995648 - DNA, 25 bp, Homo sapien
tcacactacttcacttcagcctagg

SEQ ID NO: 4995649 - DNA, 25 bp, Homo sapien
gatcacactacttcacttcagccta

SEQ ID NO: 4995650 - DNA, 25 bp, Homo sapien
ttgccctccttagagttttcgttca

SEQ ID NO: 4995651 - DNA, 25 bp, Homo sapien
tgccctccttagagttttcgttcac

SEQ ID NO: 4995652 - DNA, 25 bp, Homo sapien
taccttaggttgtccataaccgctc

SEQ ID NO: 4995653 - DNA, 25 bp, Homo sapien
ttatggatccagttattaccttagg

SEQ ID NO: 4995654 - DNA, 25 bp, Homo sapien
tcttccatctttatggatccagtta

SEQ ID NO: 4995655 - DNA, 25 bp, Homo sapien
tccagttattaccttaggttgtcca

SEQ ID NO: 4995656 - DNA, 25 bp, Homo sapien
gagggacattatcgtaaaagagtgt

SEQ ID NO: 4995657 - DNA, 25 bp, Homo sapien
cctgttacagttcaggtcccaggaa

SEQ ID NO: 4995658 - DNA, 25 bp, Homo sapien
aaaattcggctaggtcagtactccg

SEQ ID NO: 4995659 - DNA, 25 bp, Homo sapien
tcagtactccgagaagcaaagaccc

SEQ ID NO: 4995660 - DNA, 25 bp, Homo sapien
taatatgtggaactcaggtagccct

SEQ ID NO: 4995661 - DNA, 25 bp, Homo sapien
gaattgtcccaagatgaggtgcagg

SEQ ID NO: 4995662 - DNA, 25 bp, Homo sapien
gaggcaatcctagagcttggagcaa

SEQ ID NO: 4995663 - DNA, 25 bp, Homo sapien
tagctaagagtgagtcctgaaacag

SEQ ID NO: 4995664 - DNA, 25 bp, Homo sapien
agaaacccaaacacagcaggcacca

SEQ ID NO: 4995665 - DNA, 25 bp, Homo sapien
cacttgtttctgcaagaaacccaaa

SEQ ID NO: 4995666 - DNA, 25 bp, Homo sapien
cttgtttctgcaagaaacccaaaca

SEQ ID NO: 4995667 - DNA, 25 bp, Homo sapien
cttcacttgtttctgcaagaaaccc

SEQ ID NO: 4995668 - DNA, 25 bp, Homo sapien
gaagattaataacatgcagatgtgg

SEQ ID NO: 4995669 - DNA, 25 bp, Homo sapien
gctgaggctgttctttgggcagcaa

SEQ ID NO: 4995670 - DNA, 25 bp, Homo sapien
gatgtggaatatccatccctaccac

SEQ ID NO: 4995671 - DNA, 25 bp, Homo sapien
ggaaaaaggctgcttatcatgatct

SEQ ID NO: 4995672 - DNA, 25 bp, Homo sapien
ccagatacgaaggtggttgcaactt

SEQ ID NO: 4995673 - DNA, 25 bp, Homo sapien
ccagtcagggatcctatcattacta

SEQ ID NO: 4995674 - DNA, 25 bp, Homo sapien
ctatcattactactgaatccaagga

SEQ ID NO: 4995675 - DNA, 25 bp, Homo sapien
ttgcaacttgttccctgccagtcag

SEQ ID NO: 4995676 - DNA, 25 bp, Homo sapien
cattccgcacaggaccactgtgtag

SEQ ID NO: 4995677 - DNA, 25 bp, Homo sapien
acaggaccactgtgtagatgctttc

SEQ ID NO: 4995678 - DNA, 25 bp, Homo sapien
cttttaggctctgccattccgcaca

SEQ ID NO: 4995679 - DNA, 25 bp, Homo sapien
cactgtgtagatgctttcttcatcc

SEQ ID NO: 4995680 - DNA, 25 bp, Homo sapien
aaaaactaagtggtctgccggcata

SEQ ID NO: 4995681 - DNA, 25 bp, Homo sapien
tatagcgagaaataaacatggtcct

SEQ ID NO: 4995682 - DNA, 25 bp, Homo sapien
cagatgttgttgagtgcagcaatgc

SEQ ID NO: 4995683 - DNA, 25 bp, Homo sapien
tagctaacagctgggaatccttcgt

SEQ ID NO: 4995684 - DNA, 25 bp, Homo sapien
cagcagcttatgtgatggcctcata

SEQ ID NO: 4995685 - DNA, 25 bp, Homo sapien
ggcatgactatcttttcagggaagc

SEQ ID NO: 4995686 - DNA, 25 bp, Homo sapien
gatgaaggctgcagttgcactgaca

SEQ ID NO: 4995687 - DNA, 25 bp, Homo sapien
acaaggttgacgaataatatctggc

SEQ ID NO: 4995688 - DNA, 25 bp, Homo sapien
taatgtaagcaaaaggtgccttggg

SEQ ID NO: 4995689 - DNA, 25 bp, Homo sapien
taagagtcacttctttcaaaccagc

SEQ ID NO: 4995690 - DNA, 25 bp, Homo sapien
taacttctggtgctattggtcctga

SEQ ID NO: 4995691 - DNA, 25 bp, Homo sapien
gtatactccccctagggtgcaaata

SEQ ID NO: 4995692 - DNA, 25 bp, Homo sapien
gaatgtagtaattagtctaacagca

SEQ ID NO: 4995693 - DNA, 25 bp, Homo sapien
tatataattgtgagcttgaaggaga

SEQ ID NO: 4995694 - DNA, 25 bp, Homo sapien
tctaacagcagatatgacagttgaa

SEQ ID NO: 4995695 - DNA, 25 bp, Homo sapien
taaaacgtaagtgacatataaaaca

SEQ ID NO: 4995696 - DNA, 25 bp, Homo sapien
tacagggtgctttctctttaccaag

SEQ ID NO: 4995697 - DNA, 25 bp, Homo sapien
ctttaccaagagttatttagagagt

SEQ ID NO: 4995698 - DNA, 25 bp, Homo sapien
cacaagttctatatattcttgcaaa

SEQ ID NO: 4995699 - DNA, 25 bp, Homo sapien
ttatattgtaaacccagaatgttgt

SEQ ID NO: 4995700 - DNA, 25 bp, Homo sapien
gaatcattcaatgctaagctctcct

SEQ ID NO: 4995701 - DNA, 25 bp, Homo sapien
tggaatcattcaatgctaagctctc

SEQ ID NO: 4995702 - DNA, 25 bp, Homo sapien
aatcattcaatgctaagctctcctt

SEQ ID NO: 4995703 - DNA, 25 bp, Homo sapien
attggaatcattcaatgctaagctc

SEQ ID NO: 4995704 - DNA, 25 bp, Homo sapien
gaacattaattctggagcatgtgtg

SEQ ID NO: 4995705 - DNA, 25 bp, Homo sapien
cacattgctacaaattactggactc

SEQ ID NO: 4995706 - DNA, 25 bp, Homo sapien
cctaatgaagaacattaattctgga

SEQ ID NO: 4995707 - DNA, 25 bp, Homo sapien
tgaagaacattaattctggagcatg

SEQ ID NO: 4995708 - DNA, 25 bp, Homo sapien
catgattacttggttaaaataccct

SEQ ID NO: 4995709 - DNA, 25 bp, Homo sapien
gacacttcctgtgctttcagtgcct

SEQ ID NO: 4995710 - DNA, 25 bp, Homo sapien
gcatccgagctgttgttttcagtaa

SEQ ID NO: 4995711 - DNA, 25 bp, Homo sapien
gaagccagcgaaaaagcatccgagc

SEQ ID NO: 4995712 - DNA, 25 bp, Homo sapien
gatgcttagtaaacaatgccgcttt

SEQ ID NO: 4995713 - DNA, 25 bp, Homo sapien
atgcttagtaaacaatgccgctttg

SEQ ID NO: 4995714 - DNA, 25 bp, Homo sapien
tgcttagtaaacaatgccgctttgt

SEQ ID NO: 4995715 - DNA, 25 bp, Homo sapien
caacatcctctttagcatgaggaaa

SEQ ID NO: 4995716 - DNA, 25 bp, Homo sapien
tggagtgtatgccttaattctccct

SEQ ID NO: 4995717 - DNA, 25 bp, Homo sapien
agtgtatgccttaattctccctgat

SEQ ID NO: 4995718 - DNA, 25 bp, Homo sapien
caatggagtgtatgccttaattctc

SEQ ID NO: 4995719 - DNA, 25 bp, Homo sapien
acaatggagtgtatgccttaattct

SEQ ID NO: 4995720 - DNA, 25 bp, Homo sapien
gatgggctccctattgatatttggg

SEQ ID NO: 4995721 - DNA, 25 bp, Homo sapien
ttggagttagtagtgaaggtttcca

SEQ ID NO: 4995722 - DNA, 25 bp, Homo sapien
tttaatagtgatgggctccctattg

SEQ ID NO: 4995723 - DNA, 25 bp, Homo sapien
gagttagtagtgaaggtttccattg

SEQ ID NO: 4995724 - DNA, 25 bp, Homo sapien
cagctggttgattagctgctggtag

SEQ ID NO: 4995725 - DNA, 25 bp, Homo sapien
ctgaccacagctggttgattagctg

SEQ ID NO: 4995726 - DNA, 25 bp, Homo sapien
gaccacagctggttgattagctgct

SEQ ID NO: 4995727 - DNA, 25 bp, Homo sapien
cacagctggttgattagctgctggt

SEQ ID NO: 4995728 - DNA, 25 bp, Homo sapien
acaaggtacacttatccatgaaggg

SEQ ID NO: 4995729 - DNA, 25 bp, Homo sapien
aggtacacttatccatgaaggggtc

SEQ ID NO: 4995730 - DNA, 25 bp, Homo sapien
ccacaaggtacacttatccatgaag

SEQ ID NO: 4995731 - DNA, 25 bp, Homo sapien
caaggtacacttatccatgaagggg

SEQ ID NO: 4995732 - DNA, 25 bp, Homo sapien
gacatgaggctctctagacttcctg

SEQ ID NO: 4995733 - DNA, 25 bp, Homo sapien
aaacctataggtgaactgacatgag

SEQ ID NO: 4995734 - DNA, 25 bp, Homo sapien
cagccaaatgatgatacaaatggca

SEQ ID NO: 4995735 - DNA, 25 bp, Homo sapien
gccctttgttcccatgcccagtgtt

SEQ ID NO: 4995736 - DNA, 25 bp, Homo sapien
tcaagttgaagtgaaccaattgctt

SEQ ID NO: 4995737 - DNA, 25 bp, Homo sapien
tttcccattgtctaaatcttctatt

SEQ ID NO: 4995738 - DNA, 25 bp, Homo sapien
tccttcactcaagttgaagtgaacc

SEQ ID NO: 4995739 - DNA, 25 bp, Homo sapien
tctcggcctgtgatagcttttcagc

SEQ ID NO: 4995740 - DNA, 25 bp, Homo sapien
acctacccatctccactggtgaaaa

SEQ ID NO: 4995741 - DNA, 25 bp, Homo sapien
cactggtgaaaatccaattctccca

SEQ ID NO: 4995742 - DNA, 25 bp, Homo sapien
actggtgaaaatccaattctcccat

SEQ ID NO: 4995743 - DNA, 25 bp, Homo sapien
gccacctacccatctccactggtga

SEQ ID NO: 4995744 - DNA, 25 bp, Homo sapien
ctaaatcatctgctgtacagcaaag

SEQ ID NO: 4995745 - DNA, 25 bp, Homo sapien
aatcatctgctgtacagcaaaggcg

SEQ ID NO: 4995746 - DNA, 25 bp, Homo sapien
catctgctgtacagcaaaggcgatg

SEQ ID NO: 4995747 - DNA, 25 bp, Homo sapien
cagcaaaggcgatgatcctttcagc

SEQ ID NO: 4995748 - DNA, 25 bp, Homo sapien
cagtcactgatacagtgtcaggatc

SEQ ID NO: 4995749 - DNA, 25 bp, Homo sapien
tgatcagtggtagaaacaagaaaga

SEQ ID NO: 4995750 - DNA, 25 bp, Homo sapien
tttatctgagcctttctaatgatca

SEQ ID NO: 4995751 - DNA, 25 bp, Homo sapien
cattgggatgcatttcggttttgaa

SEQ ID NO: 4995752 - DNA, 25 bp, Homo sapien
ggagcttgccaatgatcctcgtcct

SEQ ID NO: 4995753 - DNA, 25 bp, Homo sapien
tcttcataacattccagagattcca

SEQ ID NO: 4995754 - DNA, 25 bp, Homo sapien
gtcttcctcttcataacattccaga

SEQ ID NO: 4995755 - DNA, 25 bp, Homo sapien
tacttttatgtcacccgagtcttcc

SEQ ID NO: 4995756 - DNA, 25 bp, Homo sapien
gtcttcaaagttgtccactaaattg

SEQ ID NO: 4995757 - DNA, 25 bp, Homo sapien
caaagttgtccactaaattgaaagc

SEQ ID NO: 4995758 - DNA, 25 bp, Homo sapien
ttagtcttcaaagttgtccactaaa

SEQ ID NO: 4995759 - DNA, 25 bp, Homo sapien
gcttctgctgctagctgggtccttg

SEQ ID NO: 4995760 - DNA, 25 bp, Homo sapien
acagaagtggccaacccactgcagg

SEQ ID NO: 4995761 - DNA, 25 bp, Homo sapien
ctagcaaatgaatggcccacagaag

SEQ ID NO: 4995762 - DNA, 25 bp, Homo sapien
gcagtgtgctctacagcttttagtg

SEQ ID NO: 4995763 - DNA, 25 bp, Homo sapien
gcttttagtgaataactgctgtagg

SEQ ID NO: 4995764 - DNA, 25 bp, Homo sapien
gcagggcacaccaaacgggaaagtc

SEQ ID NO: 4995765 - DNA, 25 bp, Homo sapien
tgagcagggcacaccaaacgggaaa

SEQ ID NO: 4995766 - DNA, 25 bp, Homo sapien
gttgagcagggcacaccaaacggga

SEQ ID NO: 4995767 - DNA, 25 bp, Homo sapien
gctctgagtctgttgagcagggcac

SEQ ID NO: 4995768 - DNA, 25 bp, Homo sapien
ccctgtggatgtttaggctcatatt

SEQ ID NO: 4995769 - DNA, 25 bp, Homo sapien
cccattcacctttgacagtgaactt

SEQ ID NO: 4995770 - DNA, 25 bp, Homo sapien
catattatctttaaccccattcacc

SEQ ID NO: 4995771 - DNA, 25 bp, Homo sapien
tgctacatgatctgctatccctgtg

SEQ ID NO: 4995772 - DNA, 25 bp, Homo sapien
gctgctttggccaagagaggatctg

SEQ ID NO: 4995773 - DNA, 25 bp, Homo sapien
tcgggaatctcaatcggtctctgtc

SEQ ID NO: 4995774 - DNA, 25 bp, Homo sapien
gagtttagaccagtaggtgcaccca

SEQ ID NO: 4995775 - DNA, 25 bp, Homo sapien
cagtggatccgggtctcgggaatct

SEQ ID NO: 4995776 - DNA, 25 bp, Homo sapien
tttgaaaaaattcatccttcagaag

SEQ ID NO: 4995777 - DNA, 25 bp, Homo sapien
gatcccctcttagagaactcacatg

SEQ ID NO: 4995778 - DNA, 25 bp, Homo sapien
tgaaaaaattcatccttcagaagat

SEQ ID NO: 4995779 - DNA, 25 bp, Homo sapien
aagatcccctcttagagaactcaca

SEQ ID NO: 4995780 - DNA, 25 bp, Homo sapien
tctcagttagtaatgtaaaagtgaa

SEQ ID NO: 4995781 - DNA, 25 bp, Homo sapien
taaaggtggaagacactctcttctt

SEQ ID NO: 4995782 - DNA, 25 bp, Homo sapien
ttagtaatgtaaaagtgaaagctat

SEQ ID NO: 4995783 - DNA, 25 bp, Homo sapien
gcttctctctcagttagtaatgtaa

SEQ ID NO: 4995784 - DNA, 25 bp, Homo sapien
acttgttgtaagtaatggtcatttg

SEQ ID NO: 4995785 - DNA, 25 bp, Homo sapien
cttgaatcaacacaattagttccac

SEQ ID NO: 4995786 - DNA, 25 bp, Homo sapien
taagtgtctggggacttgttgtaag

SEQ ID NO: 4995787 - DNA, 25 bp, Homo sapien
aattatcttgaatcaacacaattag

SEQ ID NO: 4995788 - DNA, 25 bp, Homo sapien
ctccgagcacacagtcattatgttg

SEQ ID NO: 4995789 - DNA, 25 bp, Homo sapien
tagggactccgagcacacagtcatt

SEQ ID NO: 4995790 - DNA, 25 bp, Homo sapien
acacagtcattatgttgtcctctgc

SEQ ID NO: 4995791 - DNA, 25 bp, Homo sapien
aagatagggactccgagcacacagt

SEQ ID NO: 4995792 - DNA, 25 bp, Homo sapien
ttctaggcaaactgctgaggactgc

SEQ ID NO: 4995793 - DNA, 25 bp, Homo sapien
tacgctgtgttctgccctacatttg

SEQ ID NO: 4995794 - DNA, 25 bp, Homo sapien
gactatcgcaagtgaggcaaacttt

SEQ ID NO: 4995795 - DNA, 25 bp, Homo sapien
gaggactgccaatttaacaagctgt

SEQ ID NO: 4995796 - DNA, 25 bp, Homo sapien
ccaaaacaggtagtggtccggatgt

SEQ ID NO: 4995797 - DNA, 25 bp, Homo sapien
taatcctggactagggtgaatccaa

SEQ ID NO: 4995798 - DNA, 25 bp, Homo sapien
tctgacagtcactccagaatgaggg

SEQ ID NO: 4995799 - DNA, 25 bp, Homo sapien
taggcacacaactccaggatctggg

SEQ ID NO: 4995800 - DNA, 25 bp, Homo sapien
gtttcagctcctaaacttctagtgt

SEQ ID NO: 4995801 - DNA, 25 bp, Homo sapien
gaaactaccattgattccacagtct

SEQ ID NO: 4995802 - DNA, 25 bp, Homo sapien
cttctagtgtttactgttgatggca

SEQ ID NO: 4995803 - DNA, 25 bp, Homo sapien
atggcagcaacggcagcagagaaag

SEQ ID NO: 4995804 - DNA, 25 bp, Homo sapien
agagccttgggctttccatggaaca

SEQ ID NO: 4995805 - DNA, 25 bp, Homo sapien
ctgtaaggtaatatatatcttggat

SEQ ID NO: 4995806 - DNA, 25 bp, Homo sapien
gtaaggtaatatatatcttggatga

SEQ ID NO: 4995807 - DNA, 25 bp, Homo sapien
atatcttggatgactaagcactttg

SEQ ID NO: 4995808 - DNA, 25 bp, Homo sapien
ccggcactcacaatcacggattcag

SEQ ID NO: 4995809 - DNA, 25 bp, Homo sapien
tagagccggcactcacaatcacgga

SEQ ID NO: 4995810 - DNA, 25 bp, Homo sapien
cactcacaatcacggattcagaaag

SEQ ID NO: 4995811 - DNA, 25 bp, Homo sapien
cacaatcacggattcagaaagctct

SEQ ID NO: 4995812 - DNA, 25 bp, Homo sapien
tcaaaaccttgcagtttatgttcca

SEQ ID NO: 4995813 - DNA, 25 bp, Homo sapien
ttgcagtttatgttccaagaagcca

SEQ ID NO: 4995814 - DNA, 25 bp, Homo sapien
tggtctcaaatccatcaactggttt

SEQ ID NO: 4995815 - DNA, 25 bp, Homo sapien
tattgcatggcaactctcaaaacct

SEQ ID NO: 4995816 - DNA, 25 bp, Homo sapien
cttccagtagagttccatagtcctg

SEQ ID NO: 4995817 - DNA, 25 bp, Homo sapien
ccagtagagttccatagtcctgtga

SEQ ID NO: 4995818 - DNA, 25 bp, Homo sapien
ccatagtcctgtgacataagagaag

SEQ ID NO: 4995819 - DNA, 25 bp, Homo sapien
tgtgacataagagaagtgccctgct

SEQ ID NO: 4995820 - DNA, 25 bp, Homo sapien
ctgaaatgggtgggatgaaggatcc

SEQ ID NO: 4995821 - DNA, 25 bp, Homo sapien
tgggtgggatgaaggatccatttct

SEQ ID NO: 4995822 - DNA, 25 bp, Homo sapien
atgggtgggatgaaggatccatttc

SEQ ID NO: 4995823 - DNA, 25 bp, Homo sapien
aaatgggtgggatgaaggatccatt

SEQ ID NO: 4995824 - DNA, 25 bp, Homo sapien
cttgggcttcccatagcatggtgtt

SEQ ID NO: 4995825 - DNA, 25 bp, Homo sapien
gtggtctcttgctcgacacaatgaa

SEQ ID NO: 4995826 - DNA, 25 bp, Homo sapien
tttcctacagagcatctggtttctc

SEQ ID NO: 4995827 - DNA, 25 bp, Homo sapien
gcatggtgtttgcaggaccgttgca

SEQ ID NO: 4995828 - DNA, 25 bp, Homo sapien
ggttaaggggcatccaatagctgtg

SEQ ID NO: 4995829 - DNA, 25 bp, Homo sapien
tcttcaaatatttgagccctaagtc

SEQ ID NO: 4995830 - DNA, 25 bp, Homo sapien
ctagttagtgtcagtcagatctgaa

SEQ ID NO: 4995831 - DNA, 25 bp, Homo sapien
agatctgaaatcctggtctcctgac

SEQ ID NO: 4995832 - DNA, 25 bp, Homo sapien
catggtgaatcttagagtgaattct

SEQ ID NO: 4995833 - DNA, 25 bp, Homo sapien
tcagctgtgttagataggcagatgg

SEQ ID NO: 4995834 - DNA, 25 bp, Homo sapien
gactagtaaacatccatggtgaatc

SEQ ID NO: 4995835 - DNA, 25 bp, Homo sapien
gtttgggacatcaagttgactagta

SEQ ID NO: 4995836 - DNA, 25 bp, Homo sapien
taatggtcgctgatttcttacagca

SEQ ID NO: 4995837 - DNA, 25 bp, Homo sapien
ctccattaaaatgtgtaatggtcgc

SEQ ID NO: 4995838 - DNA, 25 bp, Homo sapien
gcactgtgcaaatattaccaagctg

SEQ ID NO: 4995839 - DNA, 25 bp, Homo sapien
atattaccaagctgtaagacagctg

SEQ ID NO: 4995840 - DNA, 25 bp, Homo sapien
tggttgagccatgcggctgtggcac

SEQ ID NO: 4995841 - DNA, 25 bp, Homo sapien
ttaagtagtgcctaaggataattct

SEQ ID NO: 4995842 - DNA, 25 bp, Homo sapien
ggtgctgtgttacttattgtccaga

SEQ ID NO: 4995843 - DNA, 25 bp, Homo sapien
taaggataattcttctggtgctgtg

SEQ ID NO: 4995844 - DNA, 25 bp, Homo sapien
tattagcaaaccactatgtgtccag

SEQ ID NO: 4995845 - DNA, 25 bp, Homo sapien
tgcatacgaaaggaccagacagctg

SEQ ID NO: 4995846 - DNA, 25 bp, Homo sapien
tttaacctgggattagttgctcacc

SEQ ID NO: 4995847 - DNA, 25 bp, Homo sapien
tgtcagcctacatttcctgggagac

SEQ ID NO: 4995848 - DNA, 25 bp, Homo sapien
tcggtgccaacagtagttcaaaatc

SEQ ID NO: 4995849 - DNA, 25 bp, Homo sapien
ttgcatagtctgctacggcctccaa

SEQ ID NO: 4995850 - DNA, 25 bp, Homo sapien
tggtggcagtgtaaatggcataccc

SEQ ID NO: 4995851 - DNA, 25 bp, Homo sapien
tcagcttctaaaaggaggaggttgg

SEQ ID NO: 4995852 - DNA, 25 bp, Homo sapien
aaggatagtgtatgaattctgcatc

SEQ ID NO: 4995853 - DNA, 25 bp, Homo sapien
tgaagtgtgtctagatttcttatcc

SEQ ID NO: 4995854 - DNA, 25 bp, Homo sapien
tgcaagtatattcatatttggtgtc

SEQ ID NO: 4995855 - DNA, 25 bp, Homo sapien
ttcctaattccatcttcttcaagta

SEQ ID NO: 4995856 - DNA, 25 bp, Homo sapien
tgttattgagttgattcccatagag

SEQ ID NO: 4995857 - DNA, 25 bp, Homo sapien
gcatgcaaggtgcttcgtacaaaga

SEQ ID NO: 4995858 - DNA, 25 bp, Homo sapien
tgagttgattcccatagagtgcagc

SEQ ID NO: 4995859 - DNA, 25 bp, Homo sapien
tcagttcaactcaacaaatgttatt

SEQ ID NO: 4995860 - DNA, 25 bp, Homo sapien
agagaggatgactggttaatgacaa

SEQ ID NO: 4995861 - DNA, 25 bp, Homo sapien
cctgataaaatcctgccttaggaaa

SEQ ID NO: 4995862 - DNA, 25 bp, Homo sapien
ctgagtctgacatgtagtgaggtaa

SEQ ID NO: 4995863 - DNA, 25 bp, Homo sapien
tctgacatgtagtgaggtaatgaaa

SEQ ID NO: 4995864 - DNA, 25 bp, Homo sapien
cttctgctccctgataaaatcctgc

SEQ ID NO: 4995865 - DNA, 25 bp, Homo sapien
tatctgaacgtgtagaaggttgcat

SEQ ID NO: 4995866 - DNA, 25 bp, Homo sapien
tttatctgaacgtgtagaaggttgc

SEQ ID NO: 4995867 - DNA, 25 bp, Homo sapien
aggcttttatctgaacgtgtagaag

SEQ ID NO: 4995868 - DNA, 25 bp, Homo sapien
gcttttatctgaacgtgtagaaggt

SEQ ID NO: 4995869 - DNA, 25 bp, Homo sapien
agctgtccttacattctgctgtcca

SEQ ID NO: 4995870 - DNA, 25 bp, Homo sapien
tccacccgagaagcacgctgctggc

SEQ ID NO: 4995871 - DNA, 25 bp, Homo sapien
cagcatgctctccacccgagaagca

SEQ ID NO: 4995872 - DNA, 25 bp, Homo sapien
tcccaatcagaggtgttttcagaag

SEQ ID NO: 4995873 - DNA, 25 bp, Homo sapien
ggtgaactttggcagagggcagatg

SEQ ID NO: 4995874 - DNA, 25 bp, Homo sapien
aggcaggtgggtgaactttggcaga

SEQ ID NO: 4995875 - DNA, 25 bp, Homo sapien
tgctgaagctattgttgctcctggg

SEQ ID NO: 4995876 - DNA, 25 bp, Homo sapien
gcagatgtaagatttcgatggcagc

SEQ ID NO: 4995877 - DNA, 25 bp, Homo sapien
taagacagctcaacttggttatcct

SEQ ID NO: 4995878 - DNA, 25 bp, Homo sapien
agacagctcaacttggttatcctca

SEQ ID NO: 4995879 - DNA, 25 bp, Homo sapien
ctaagacagctcaacttggttatcc

SEQ ID NO: 4995880 - DNA, 25 bp, Homo sapien
gacagctcaacttggttatcctcac

SEQ ID NO: 4995881 - DNA, 25 bp, Homo sapien
tcgcaacctgcctttcattagagcc

SEQ ID NO: 4995882 - DNA, 25 bp, Homo sapien
gaaatcatgtcgactttcccgactg

SEQ ID NO: 4995883 - DNA, 25 bp, Homo sapien
cgactgcagcgttcttgacatgaca

SEQ ID NO: 4995884 - DNA, 25 bp, Homo sapien
gcagcccacactgatattagggagt

SEQ ID NO: 4995885 - DNA, 25 bp, Homo sapien
ctgctgttccaatgtaacagcagcc

SEQ ID NO: 4995886 - DNA, 25 bp, Homo sapien
gcccacacctgctgttccaatgtaa

SEQ ID NO: 4995887 - DNA, 25 bp, Homo sapien
cacacctgctgttccaatgtaacag

SEQ ID NO: 4995888 - DNA, 25 bp, Homo sapien
ttttgtaagcaacaatttgtaatcc

SEQ ID NO: 4995889 - DNA, 25 bp, Homo sapien
ctcctgggtagaatcaggtgtggca

SEQ ID NO: 4995890 - DNA, 25 bp, Homo sapien
tgggactgcttatggaaactggcaa

SEQ ID NO: 4995891 - DNA, 25 bp, Homo sapien
gcaccaaggatgtaggaaccaactg

SEQ ID NO: 4995892 - DNA, 25 bp, Homo sapien
gacgccctccccaatgttcatgaaa

SEQ ID NO: 4995893 - DNA, 25 bp, Homo sapien
ggtgaggaagatcacatggatgcta

SEQ ID NO: 4995894 - DNA, 25 bp, Homo sapien
gctatcttcagcagttccgctctgc

SEQ ID NO: 4995895 - DNA, 25 bp, Homo sapien
cgctctgccctctcagcaattcctc

SEQ ID NO: 4995896 - DNA, 25 bp, Homo sapien
agatcacatggatgctatcttcagc

SEQ ID NO: 4995897 - DNA, 25 bp, Homo sapien
tccttgggcagctaataagtactct

SEQ ID NO: 4995898 - DNA, 25 bp, Homo sapien
gaatcctgtgcagagtcattggctc

SEQ ID NO: 4995899 - DNA, 25 bp, Homo sapien
gaggagctgttgcacttgcccagta

SEQ ID NO: 4995900 - DNA, 25 bp, Homo sapien
tgatccacatacaagaagttccctg

SEQ ID NO: 4995901 - DNA, 25 bp, Homo sapien
cacccaataggtggtaaaagcctgg

SEQ ID NO: 4995902 - DNA, 25 bp, Homo sapien
tgttagaatggcgtcgctggaccca

SEQ ID NO: 4995903 - DNA, 25 bp, Homo sapien
ccccatatgtttaggagggcacaaa

SEQ ID NO: 4995904 - DNA, 25 bp, Homo sapien
cagatatcactgtgctgagggagac

SEQ ID NO: 4995905 - DNA, 25 bp, Homo sapien
ggttgctatagcacgcagactggct

SEQ ID NO: 4995906 - DNA, 25 bp, Homo sapien
gttgctatagcacgcagactggctg

SEQ ID NO: 4995907 - DNA, 25 bp, Homo sapien
gtggttgctatagcacgcagactgg

SEQ ID NO: 4995908 - DNA, 25 bp, Homo sapien
tgctatagcacgcagactggctggg

SEQ ID NO: 4995909 - DNA, 25 bp, Homo sapien
acctagattggtagcctgagctgcc

SEQ ID NO: 4995910 - DNA, 25 bp, Homo sapien
gaattgtgctatccctattgcaggc

SEQ ID NO: 4995911 - DNA, 25 bp, Homo sapien
tgaattaggagtttaggctaccgcc

SEQ ID NO: 4995912 - DNA, 25 bp, Homo sapien
taatattgtggtgcagcagaccctc

SEQ ID NO: 4995913 - DNA, 25 bp, Homo sapien
tcagaggacgcgcttggatcagtca

SEQ ID NO: 4995914 - DNA, 25 bp, Homo sapien
gtaaatgacattcggcagccgggcc

SEQ ID NO: 4995915 - DNA, 25 bp, Homo sapien
cagccgggcctagatctcccataag

SEQ ID NO: 4995916 - DNA, 25 bp, Homo sapien
cataagctccacatattgttgaggc

SEQ ID NO: 4995917 - DNA, 25 bp, Homo sapien
gtatgattgctttgttgtgtaggga

SEQ ID NO: 4995918 - DNA, 25 bp, Homo sapien
aaggaactctatgctgtatgattgc

SEQ ID NO: 4995919 - DNA, 25 bp, Homo sapien
tgtagggattcagtgatagaagcca

SEQ ID NO: 4995920 - DNA, 25 bp, Homo sapien
cctgttgaatactagcattcaaagg

SEQ ID NO: 4995921 - DNA, 25 bp, Homo sapien
gcttccatatatgggtgaggaatac

SEQ ID NO: 4995922 - DNA, 25 bp, Homo sapien
ggtgaggaatacacctgcctgcagg

SEQ ID NO: 4995923 - DNA, 25 bp, Homo sapien
cgggttcttccataggcttccatat

SEQ ID NO: 4995924 - DNA, 25 bp, Homo sapien
ttccataggcttccatatatgggtg

SEQ ID NO: 4995925 - DNA, 25 bp, Homo sapien
tttttgacttagtagaattcacagc

SEQ ID NO: 4995926 - DNA, 25 bp, Homo sapien
tcccgacacactgaggagcaacagt

SEQ ID NO: 4995927 - DNA, 25 bp, Homo sapien
ctgaggagcaacagtgacctgtctt

SEQ ID NO: 4995928 - DNA, 25 bp, Homo sapien
aacttcatgttcatcccgacacact

SEQ ID NO: 4995929 - DNA, 25 bp, Homo sapien
tgttcatcccgacacactgaggagc

SEQ ID NO: 4995930 - DNA, 25 bp, Homo sapien
ggaacttagagtagtccaatttata

SEQ ID NO: 4995931 - DNA, 25 bp, Homo sapien
gtactatgccacttacacgaggaac

SEQ ID NO: 4995932 - DNA, 25 bp, Homo sapien
gaagttgttattaatgggttcagag

SEQ ID NO: 4995933 - DNA, 25 bp, Homo sapien
aagacaaatagtgtactatgccact

SEQ ID NO: 4995934 - DNA, 25 bp, Homo sapien
caggttcaaatgcacctgtggaaat

SEQ ID NO: 4995935 - DNA, 25 bp, Homo sapien
aaacccactccagacaaggcctgca

SEQ ID NO: 4995936 - DNA, 25 bp, Homo sapien
ggagactcattagtgcaaccgcaaa

SEQ ID NO: 4995937 - DNA, 25 bp, Homo sapien
tcataatcgcttatcaaacccactc

SEQ ID NO: 4995938 - DNA, 25 bp, Homo sapien
gagaaaggtgacgtgtgttataccc

SEQ ID NO: 4995939 - DNA, 25 bp, Homo sapien
acagcttgagcagtcatagcccagg

SEQ ID NO: 4995940 - DNA, 25 bp, Homo sapien
tacccacagcttgagcagtcatagc

SEQ ID NO: 4995941 - DNA, 25 bp, Homo sapien
aggtgacgtgtgttatacccacagc

SEQ ID NO: 4995942 - DNA, 25 bp, Homo sapien
cactggcacggcgaacaattccgaa

SEQ ID NO: 4995943 - DNA, 25 bp, Homo sapien
cacggcgaacaattccgaatattaa

SEQ ID NO: 4995944 - DNA, 25 bp, Homo sapien
ttccactggcacggcgaacaattcc

SEQ ID NO: 4995945 - DNA, 25 bp, Homo sapien
ggcacggcgaacaattccgaatatt

SEQ ID NO: 4995946 - DNA, 25 bp, Homo sapien
ctggctcgagcattggctctacctg

SEQ ID NO: 4995947 - DNA, 25 bp, Homo sapien
cgagcattggctctacctggaaatt

SEQ ID NO: 4995948 - DNA, 25 bp, Homo sapien
agcattggctctacctggaaattca

SEQ ID NO: 4995949 - DNA, 25 bp, Homo sapien
ggctcgagcattggctctacctgga

SEQ ID NO: 4995950 - DNA, 25 bp, Homo sapien
tagatcacgatcagactccttgaga

SEQ ID NO: 4995951 - DNA, 25 bp, Homo sapien
gaagtgctctctccaggaccaatat

SEQ ID NO: 4995952 - DNA, 25 bp, Homo sapien
aatctgttgtgctctgtcatctgcc

SEQ ID NO: 4995953 - DNA, 25 bp, Homo sapien
gatagacaagcttccagatcctaag

SEQ ID NO: 4995954 - DNA, 25 bp, Homo sapien
gcccactcgcaacagaaaaagacat

SEQ ID NO: 4995955 - DNA, 25 bp, Homo sapien
tcagcccactcgcaacagaaaaaga

SEQ ID NO: 4995956 - DNA, 25 bp, Homo sapien
gctcagcccactcgcaacagaaaaa

SEQ ID NO: 4995957 - DNA, 25 bp, Homo sapien
gatgctcagcccactcgcaacagaa

SEQ ID NO: 4995958 - DNA, 25 bp, Homo sapien
aaaggatctccagtaggtcaactga

SEQ ID NO: 4995959 - DNA, 25 bp, Homo sapien
tcccgacgatgccaatgatgctggt

SEQ ID NO: 4995960 - DNA, 25 bp, Homo sapien
gtctctgttctactttgtgactgaa

SEQ ID NO: 4995961 - DNA, 25 bp, Homo sapien
cctgcaagtgtctctgttctacttt

SEQ ID NO: 4995962 - DNA, 25 bp, Homo sapien
gtgtaatacaaatttgcagtccagg

SEQ ID NO: 4995963 - DNA, 25 bp, Homo sapien
aactcaggaaagacaccgtatctct

SEQ ID NO: 4995964 - DNA, 25 bp, Homo sapien
gcaaagactttgagccatgcaggct

SEQ ID NO: 4995965 - DNA, 25 bp, Homo sapien
catgcgtgagctgcacaactcagga

SEQ ID NO: 4995966 - DNA, 25 bp, Homo sapien
acagactctggttagccggtttcat

SEQ ID NO: 4995967 - DNA, 25 bp, Homo sapien
tctggttagccggtttcattaaggc

SEQ ID NO: 4995968 - DNA, 25 bp, Homo sapien
tcacagactctggttagccggtttc

SEQ ID NO: 4995969 - DNA, 25 bp, Homo sapien
agactctggttagccggtttcatta

SEQ ID NO: 4995970 - DNA, 25 bp, Homo sapien
gacagcttccagagcatcaattctg

SEQ ID NO: 4995971 - DNA, 25 bp, Homo sapien
tctggacaggattccgacagcttcc

SEQ ID NO: 4995972 - DNA, 25 bp, Homo sapien
aaaagctccctgtcatttctggaca

SEQ ID NO: 4995973 - DNA, 25 bp, Homo sapien
tgtcccgtccgtcagttacagtcac

SEQ ID NO: 4995974 - DNA, 25 bp, Homo sapien
acataagattgtattaacttaacca

SEQ ID NO: 4995975 - DNA, 25 bp, Homo sapien
cataagattgtattaacttaaccag

SEQ ID NO: 4995976 - DNA, 25 bp, Homo sapien
taaccaggctagagaccttcttgtt

SEQ ID NO: 4995977 - DNA, 25 bp, Homo sapien
cttaaccaggctagagaccttcttg

SEQ ID NO: 4995978 - DNA, 25 bp, Homo sapien
caacaattcggtagagtctcactga

SEQ ID NO: 4995979 - DNA, 25 bp, Homo sapien
gacactcaaggttctcccacatggg

SEQ ID NO: 4995980 - DNA, 25 bp, Homo sapien
tgtactcgatactagcgccaaggaa

SEQ ID NO: 4995981 - DNA, 25 bp, Homo sapien
caaggaacgtggtttctacctgcta

SEQ ID NO: 4995982 - DNA, 25 bp, Homo sapien
tgagatcatgcagggacccacattc

SEQ ID NO: 4995983 - DNA, 25 bp, Homo sapien
aaagctagctaaccaccaccatggc

SEQ ID NO: 4995984 - DNA, 25 bp, Homo sapien
gacagtcctgagagtcagcagctct

SEQ ID NO: 4995985 - DNA, 25 bp, Homo sapien
ttgtccccactgtatccaaaagttg

SEQ ID NO: 4995986 - DNA, 25 bp, Homo sapien
ttcagtcattcagcacatgtactgg

SEQ ID NO: 4995987 - DNA, 25 bp, Homo sapien
gggaaactcctgcatggtgctataa

SEQ ID NO: 4995988 - DNA, 25 bp, Homo sapien
ggtgctataatcaatttccacgttt

SEQ ID NO: 4995989 - DNA, 25 bp, Homo sapien
gggactctgcccctattcagtcatt

SEQ ID NO: 4995990 - DNA, 25 bp, Homo sapien
aagaagacattcgtgcaattgtttc

SEQ ID NO: 4995991 - DNA, 25 bp, Homo sapien
tgattggccacatctagaaatccaa

SEQ ID NO: 4995992 - DNA, 25 bp, Homo sapien
aaatccaagaaaagaagacattcgt

SEQ ID NO: 4995993 - DNA, 25 bp, Homo sapien
tccaagaaaagaagacattcgtgca

SEQ ID NO: 4995994 - DNA, 25 bp, Homo sapien
gtcttccctcatattgagaagagtt

SEQ ID NO: 4995995 - DNA, 25 bp, Homo sapien
gagaagagttcattatcatttccat

SEQ ID NO: 4995996 - DNA, 25 bp, Homo sapien
tgaaagcctgtcttccctcatattg

SEQ ID NO: 4995997 - DNA, 25 bp, Homo sapien
tgagaagagttcattatcatttcca

SEQ ID NO: 4995998 - DNA, 25 bp, Homo sapien
agggaatagattagatacatttttt

SEQ ID NO: 4995999 - DNA, 25 bp, Homo sapien
gagggaatagattagatacattttt

SEQ ID NO: 4996000 - DNA, 25 bp, Homo sapien
ggagggaatagattagatacatttt

SEQ ID NO: 4996001 - DNA, 25 bp, Homo sapien
ggaatagattagatacattttttta

SEQ ID NO: 4996002 - DNA, 25 bp, Homo sapien
tctagaatttgagggcaagatgttg

SEQ ID NO: 4996003 - DNA, 25 bp, Homo sapien
tccaagaagtattgaggaggaagtt

SEQ ID NO: 4996004 - DNA, 25 bp, Homo sapien
gagaaatcatcttctctcattgaat

SEQ ID NO: 4996005 - DNA, 25 bp, Homo sapien
tgagggcaagatgttgagaaatcat

SEQ ID NO: 4996006 - DNA, 25 bp, Homo sapien
ttgacattgtggtttgtcagccctg

SEQ ID NO: 4996007 - DNA, 25 bp, Homo sapien
gaagtcacagccgttacttggccat

SEQ ID NO: 4996008 - DNA, 25 bp, Homo sapien
tcagccctgggtgagaagtcacagc

SEQ ID NO: 4996009 - DNA, 25 bp, Homo sapien
cattgtggtttgtcagccctgggtg

SEQ ID NO: 4996010 - DNA, 25 bp, Homo sapien
aggaaggaaaggtcttgctctctgt

SEQ ID NO: 4996011 - DNA, 25 bp, Homo sapien
gacacctgctgtcatgaaaggacct

SEQ ID NO: 4996012 - DNA, 25 bp, Homo sapien
tcaggtgtcaccaaatagtagttta

SEQ ID NO: 4996013 - DNA, 25 bp, Homo sapien
tcatatagatcctgttccaactctg

SEQ ID NO: 4996014 - DNA, 25 bp, Homo sapien
gacacacacatcgaagactttgacg

SEQ ID NO: 4996015 - DNA, 25 bp, Homo sapien
aaactgctgtggaaagttcacatgg

SEQ ID NO: 4996016 - DNA, 25 bp, Homo sapien
ctgtggaaagttcacatggattctg

SEQ ID NO: 4996017 - DNA, 25 bp, Homo sapien
tgacgtccagtcaacattgagaaaa

SEQ ID NO: 4996018 - DNA, 25 bp, Homo sapien
gttcgcccctccgtgtgaagtggca

SEQ ID NO: 4996019 - DNA, 25 bp, Homo sapien
cataaggcgaccactcaggaaaacg

SEQ ID NO: 4996020 - DNA, 25 bp, Homo sapien
aaacaatactttgccagcgttcgcc

SEQ ID NO: 4996021 - DNA, 25 bp, Homo sapien
agagtcctgcgtgcctccttgacaa

SEQ ID NO: 4996022 - DNA, 25 bp, Homo sapien
acacaatggtggcattatctcgact

SEQ ID NO: 4996023 - DNA, 25 bp, Homo sapien
tatctcgacttcacagatgctctcc

SEQ ID NO: 4996024 - DNA, 25 bp, Homo sapien
ggtggcattatctcgacttcacaga

SEQ ID NO: 4996025 - DNA, 25 bp, Homo sapien
acaatacacaatggtggcattatct

SEQ ID NO: 4996026 - DNA, 25 bp, Homo sapien
catatgtgtaagtatagcataggct

SEQ ID NO: 4996027 - DNA, 25 bp, Homo sapien
cattttcctcttagttccagttctt

SEQ ID NO: 4996028 - DNA, 25 bp, Homo sapien
ctcccatgttcccatatgtgtaagt

SEQ ID NO: 4996029 - DNA, 25 bp, Homo sapien
tgttcccatatgtgtaagtatagca

SEQ ID NO: 4996030 - DNA, 25 bp, Homo sapien
ggcacagatgtgaccctgggtgatc

SEQ ID NO: 4996031 - DNA, 25 bp, Homo sapien
acagggtcgcgtctgtgcactgctc

SEQ ID NO: 4996032 - DNA, 25 bp, Homo sapien
ccagtttgtccccagcgtgtacaca

SEQ ID NO: 4996033 - DNA, 25 bp, Homo sapien
accctgggtgatcgctggcagctgc

SEQ ID NO: 4996034 - DNA, 25 bp, Homo sapien
aggttaatcccagagcccctctgca

SEQ ID NO: 4996035 - DNA, 25 bp, Homo sapien
ttaggttaatcccagagcccctctg

SEQ ID NO: 4996036 - DNA, 25 bp, Homo sapien
ggttaatcccagagcccctctgcat

SEQ ID NO: 4996037 - DNA, 25 bp, Homo sapien
taggttaatcccagagcccctctgc

SEQ ID NO: 4996038 - DNA, 25 bp, Homo sapien
tatagatacttgcacctacatatgc

SEQ ID NO: 4996039 - DNA, 25 bp, Homo sapien
cttaagcattctggccaggattgtc

SEQ ID NO: 4996040 - DNA, 25 bp, Homo sapien
ttaagtagtctacagcattcatctg

SEQ ID NO: 4996041 - DNA, 25 bp, Homo sapien
taataatgagattgcctccgtagag

SEQ ID NO: 4996042 - DNA, 25 bp, Homo sapien
cctgggctgcatataagcataacca

SEQ ID NO: 4996043 - DNA, 25 bp, Homo sapien
tgatgtgcaagaactacgtcatgct

SEQ ID NO: 4996044 - DNA, 25 bp, Homo sapien
gaaactctggttcagttgtctgcag

SEQ ID NO: 4996045 - DNA, 25 bp, Homo sapien
ttaaggtaacaggtctcagaagatc

SEQ ID NO: 4996046 - DNA, 25 bp, Homo sapien
gagcctatctacataaaaaatacaa

SEQ ID NO: 4996047 - DNA, 25 bp, Homo sapien
tgagagcctatctacataaaaaata

SEQ ID NO: 4996048 - DNA, 25 bp, Homo sapien
gagagcctatctacataaaaaatac

SEQ ID NO: 4996049 - DNA, 25 bp, Homo sapien
agagcctatctacataaaaaataca

SEQ ID NO: 4996050 - DNA, 25 bp, Homo sapien
gcactgagaggtgatgactcatttt

SEQ ID NO: 4996051 - DNA, 25 bp, Homo sapien
cactgagaggtgatgactcattttt

SEQ ID NO: 4996052 - DNA, 25 bp, Homo sapien
tgagaggtgatgactcatttttccc

SEQ ID NO: 4996053 - DNA, 25 bp, Homo sapien
ctgagaggtgatgactcatttttcc

SEQ ID NO: 4996054 - DNA, 25 bp, Homo sapien
tgaaaatgttgccaatgtaaaaaaa

SEQ ID NO: 4996055 - DNA, 25 bp, Homo sapien
ccagccctggatgcctatttttaca

SEQ ID NO: 4996056 - DNA, 25 bp, Homo sapien
gccctggatgcctatttttacaaga

SEQ ID NO: 4996057 - DNA, 25 bp, Homo sapien
ttctggatgcctattttgaaaatgt

SEQ ID NO: 4996058 - DNA, 25 bp, Homo sapien
ccagaccagatacaagccaaagggt

SEQ ID NO: 4996059 - DNA, 25 bp, Homo sapien
ctgagtttctgactgctaacaggta

SEQ ID NO: 4996060 - DNA, 25 bp, Homo sapien
caggtacctgaattaagtcaccaga

SEQ ID NO: 4996061 - DNA, 25 bp, Homo sapien
caagccaaagggtctggactagaag

SEQ ID NO: 4996062 - DNA, 25 bp, Homo sapien
gcagctctacatgttgatgaaaaga

SEQ ID NO: 4996063 - DNA, 25 bp, Homo sapien
tgtgcgtgtcacttgaatcagaaac

SEQ ID NO: 4996064 - DNA, 25 bp, Homo sapien
gctgtaatacctacttgtcctgaaa

SEQ ID NO: 4996065 - DNA, 25 bp, Homo sapien
gaactcaagactctcactgatgatg

SEQ ID NO: 4996066 - DNA, 25 bp, Homo sapien
catatatgtaattagcacttatcta

SEQ ID NO: 4996067 - DNA, 25 bp, Homo sapien
tatgtaattagcacttatctaccaa

SEQ ID NO: 4996068 - DNA, 25 bp, Homo sapien
tatatgtaattagcacttatctacc

SEQ ID NO: 4996069 - DNA, 25 bp, Homo sapien
ttagcacttatctaccaaaaaaaca

SEQ ID NO: 4996070 - DNA, 25 bp, Homo sapien
tctagccggagataacgtataatca

SEQ ID NO: 4996071 - DNA, 25 bp, Homo sapien
tgttggttcacacagtccttgagcc

SEQ ID NO: 4996072 - DNA, 25 bp, Homo sapien
gaagtcaactagaaccacatttggt

SEQ ID NO: 4996073 - DNA, 25 bp, Homo sapien
tgtcctttctataaacacggttggc

SEQ ID NO: 4996074 - DNA, 25 bp, Homo sapien
tgatctggataaaaagtttgcagct

SEQ ID NO: 4996075 - DNA, 25 bp, Homo sapien
tcaccaataaaatgatctggataaa

SEQ ID NO: 4996076 - DNA, 25 bp, Homo sapien
gctgtgctaagccagctagctccac

SEQ ID NO: 4996077 - DNA, 25 bp, Homo sapien
aaagtttgcagctgtgctaagccag

SEQ ID NO: 4996078 - DNA, 25 bp, Homo sapien
gtgttctgttcaacttccacaggag

SEQ ID NO: 4996079 - DNA, 25 bp, Homo sapien
cgggacaccgctttgtcctgttcct

SEQ ID NO: 4996080 - DNA, 25 bp, Homo sapien
cataaccttggttgatgctattgct

SEQ ID NO: 4996081 - DNA, 25 bp, Homo sapien
ataaccttggttgatgctattgctg

SEQ ID NO: 4996082 - DNA, 25 bp, Homo sapien
tcataaccttggttgatgctattgc

SEQ ID NO: 4996083 - DNA, 25 bp, Homo sapien
tctgaacggattcgcaccacacacc

SEQ ID NO: 4996084 - DNA, 25 bp, Homo sapien
aatctgaacggattcgcaccacaca

SEQ ID NO: 4996085 - DNA, 25 bp, Homo sapien
gaacggattcgcaccacacaccttt

SEQ ID NO: 4996086 - DNA, 25 bp, Homo sapien
tgaacggattcgcaccacacacctt

SEQ ID NO: 4996087 - DNA, 25 bp, Homo sapien
tgacaatatgcatatggaaggctta

SEQ ID NO: 4996088 - DNA, 25 bp, Homo sapien
tctagaaattgccttgtgaccccac

SEQ ID NO: 4996089 - DNA, 25 bp, Homo sapien
tgagcctaagcacctaaacacaact

SEQ ID NO: 4996090 - DNA, 25 bp, Homo sapien
tttactaaaccccatatcctgagcc

SEQ ID NO: 4996091 - DNA, 25 bp, Homo sapien
aaatgtgctatttagctaggtgcag

SEQ ID NO: 4996092 - DNA, 25 bp, Homo sapien
gaaatgtgctatttagctaggtgca

SEQ ID NO: 4996093 - DNA, 25 bp, Homo sapien
aatgtgctatttagctaggtgcagt

SEQ ID NO: 4996094 - DNA, 25 bp, Homo sapien
agaaatgtgctatttagctaggtgc

SEQ ID NO: 4996095 - DNA, 25 bp, Homo sapien
cactgttttggcacgtttgtttgta

SEQ ID NO: 4996096 - DNA, 25 bp, Homo sapien
aattgagctttccttcgacgtgaat

SEQ ID NO: 4996097 - DNA, 25 bp, Homo sapien
ggccatctatatgcaaaaccactgt

SEQ ID NO: 4996098 - DNA, 25 bp, Homo sapien
tcgacgtgaattcatctcattaaaa

SEQ ID NO: 4996099 - DNA, 25 bp, Homo sapien
tttctctgtttgcacggcattctgc

SEQ ID NO: 4996100 - DNA, 25 bp, Homo sapien
gcacggcattctgccaagtatcgaa

SEQ ID NO: 4996101 - DNA, 25 bp, Homo sapien
ggcattctgccaagtatcgaagagc

SEQ ID NO: 4996102 - DNA, 25 bp, Homo sapien
tgtttgcacggcattctgccaagta

SEQ ID NO: 4996103 - DNA, 25 bp, Homo sapien
taactaccgatagagcgtcaggctc

SEQ ID NO: 4996104 - DNA, 25 bp, Homo sapien
tctgctgctagatcccgtaactggt

SEQ ID NO: 4996105 - DNA, 25 bp, Homo sapien
cctgatcctggacgatggctcttct

SEQ ID NO: 4996106 - DNA, 25 bp, Homo sapien
tcaggctcttcactcatggtggaag

SEQ ID NO: 4996107 - DNA, 25 bp, Homo sapien
atgccatgcacatgaataaaatctt

SEQ ID NO: 4996108 - DNA, 25 bp, Homo sapien
gccatgcacatgaataaaatcttaa

SEQ ID NO: 4996109 - DNA, 25 bp, Homo sapien
ctatgccatgcacatgaataaaatc

SEQ ID NO: 4996110 - DNA, 25 bp, Homo sapien
catgcacatgaataaaatcttaaat

SEQ ID NO: 4996111 - DNA, 25 bp, Homo sapien
tctcttgtttagttcaacttggaca

SEQ ID NO: 4996112 - DNA, 25 bp, Homo sapien
gagcactctggtcagttaaaggttc

SEQ ID NO: 4996113 - DNA, 25 bp, Homo sapien
tgacaaagaatacttctcatcgttt

SEQ ID NO: 4996114 - DNA, 25 bp, Homo sapien
tgtttagttcaacttggacaaacaa

SEQ ID NO: 4996115 - DNA, 25 bp, Homo sapien
tagagcgtgctaaagcgcctcactg

SEQ ID NO: 4996116 - DNA, 25 bp, Homo sapien
gagatgaaaagatgagatgacaccc

SEQ ID NO: 4996117 - DNA, 25 bp, Homo sapien
tcactgggacccactactggatctg

SEQ ID NO: 4996118 - DNA, 25 bp, Homo sapien
aaagctaacagattcacgggacacg

SEQ ID NO: 4996119 - DNA, 25 bp, Homo sapien
caaccggactaactcagggagccaa

SEQ ID NO: 4996120 - DNA, 25 bp, Homo sapien
ggagcgagcccttcggttcgcagcc

SEQ ID NO: 4996121 - DNA, 25 bp, Homo sapien
cacctacggatgaggtagagaccca

SEQ ID NO: 4996122 - DNA, 25 bp, Homo sapien
gcggcgatcgcaagcaaccggacta

SEQ ID NO: 4996123 - DNA, 25 bp, Homo sapien
tgatgaagtcggctgcaggcctgac

SEQ ID NO: 4996124 - DNA, 25 bp, Homo sapien
gaactcggaaaagcggttggctagc

SEQ ID NO: 4996125 - DNA, 25 bp, Homo sapien
cacgggacagccaagctagaagcct

SEQ ID NO: 4996126 - DNA, 25 bp, Homo sapien
gattggctgattggcagcaacgcca

SEQ ID NO: 4996127 - DNA, 25 bp, Homo sapien
ggctcccttgggtgctgcgccctta

SEQ ID NO: 4996128 - DNA, 25 bp, Homo sapien
gcccttaacgggctcaggagccgga

SEQ ID NO: 4996129 - DNA, 25 bp, Homo sapien
cttcgcggcggctcccttgggtgct

SEQ ID NO: 4996130 - DNA, 25 bp, Homo sapien
gggtgctgcgcccttaacgggctca

SEQ ID NO: 4996131 - DNA, 25 bp, Homo sapien
ctgcgcgggtgcaccgccagccggc

SEQ ID NO: 4996132 - DNA, 25 bp, Homo sapien
agccaccatgtctggcctatagtac

SEQ ID NO: 4996133 - DNA, 25 bp, Homo sapien
gagccaccatgtctggcctatagta

SEQ ID NO: 4996134 - DNA, 25 bp, Homo sapien
tttgaagtgatgatagacttcattt

SEQ ID NO: 4996135 - DNA, 25 bp, Homo sapien
tgatagacttcattttccatgggtt

SEQ ID NO: 4996136 - DNA, 25 bp, Homo sapien
tccatgggtttgttttcttgggcca

SEQ ID NO: 4996137 - DNA, 25 bp, Homo sapien
gtgatgatagacttcattttccatg

SEQ ID NO: 4996138 - DNA, 25 bp, Homo sapien
gcccagctactgaactattctttta

SEQ ID NO: 4996139 - DNA, 25 bp, Homo sapien
tccattgggcttttgatcatttgtt

SEQ ID NO: 4996140 - DNA, 25 bp, Homo sapien
taaaatgcctactgacgtactatgc

SEQ ID NO: 4996141 - DNA, 25 bp, Homo sapien
gaagtggtaattactgcccagctac

SEQ ID NO: 4996142 - DNA, 25 bp, Homo sapien
cctgcaacatgcgtagtgaagaatg

SEQ ID NO: 4996143 - DNA, 25 bp, Homo sapien
tcaccctgcaacatgcgtagtgaag

SEQ ID NO: 4996144 - DNA, 25 bp, Homo sapien
caacatgcgtagtgaagaatgctaa

SEQ ID NO: 4996145 - DNA, 25 bp, Homo sapien
caccctgcaacatgcgtagtgaaga

SEQ ID NO: 4996146 - DNA, 25 bp, Homo sapien
catctccagacaagacctttgcttg

SEQ ID NO: 4996147 - DNA, 25 bp, Homo sapien
tcatctccagacaagacctttgctt

SEQ ID NO: 4996148 - DNA, 25 bp, Homo sapien
ttcatctccagacaagacctttgct

SEQ ID NO: 4996149 - DNA, 25 bp, Homo sapien
catataagttgctttccgtcattgg

SEQ ID NO: 4996150 - DNA, 25 bp, Homo sapien
tttggatagccactctgttcccctg

SEQ ID NO: 4996151 - DNA, 25 bp, Homo sapien
ccgtcattggtttcaagatcagcat

SEQ ID NO: 4996152 - DNA, 25 bp, Homo sapien
tatttttagatctctgtggatgcca

SEQ ID NO: 4996153 - DNA, 25 bp, Homo sapien
aagaatggccacgggcgtgcaccta

SEQ ID NO: 4996154 - DNA, 25 bp, Homo sapien
gaatggccacgggcgtgcacctaca

SEQ ID NO: 4996155 - DNA, 25 bp, Homo sapien
ctaagaatggccacgggcgtgcacc

SEQ ID NO: 4996156 - DNA, 25 bp, Homo sapien
taagaatggccacgggcgtgcacct

SEQ ID NO: 4996157 - DNA, 25 bp, Homo sapien
tgaatgatggcaacgagggcactgt

SEQ ID NO: 4996158 - DNA, 25 bp, Homo sapien
catgtttctaatatgtggccagggc

SEQ ID NO: 4996159 - DNA, 25 bp, Homo sapien
caatgagctgcgaaaagactcctgg

SEQ ID NO: 4996160 - DNA, 25 bp, Homo sapien
ggccagggcgttcagatttccagtt

SEQ ID NO: 4996161 - DNA, 25 bp, Homo sapien
gctgctttcacgtcattgccatcca

SEQ ID NO: 4996162 - DNA, 25 bp, Homo sapien
cactgctgaaattccataatgcttc

SEQ ID NO: 4996163 - DNA, 25 bp, Homo sapien
tgccatccagtactgacagggaaga

SEQ ID NO: 4996164 - DNA, 25 bp, Homo sapien
cccattgaagggaagttgagaacca

SEQ ID NO: 4996165 - DNA, 25 bp, Homo sapien
tacttcctggctgggagtattagga

SEQ ID NO: 4996166 - DNA, 25 bp, Homo sapien
tacactcagctatagttaataccag

SEQ ID NO: 4996167 - DNA, 25 bp, Homo sapien
tattacgcaacataaaccataggtg

SEQ ID NO: 4996168 - DNA, 25 bp, Homo sapien
taataccagagtatcctaccaggag

SEQ ID NO: 4996169 - DNA, 25 bp, Homo sapien
tcacctgaaacgtattttgacctaa

SEQ ID NO: 4996170 - DNA, 25 bp, Homo sapien
agtattgaattttggacagtgcccc

SEQ ID NO: 4996171 - DNA, 25 bp, Homo sapien
cagtgcccccatataaggaagttac

SEQ ID NO: 4996172 - DNA, 25 bp, Homo sapien
tcagaaaattcacctgaaacgtatt

SEQ ID NO: 4996173 - DNA, 25 bp, Homo sapien
tgggaaatcattacagtctcctgct

SEQ ID NO: 4996174 - DNA, 25 bp, Homo sapien
gctttacaggacatggctcaacaat

SEQ ID NO: 4996175 - DNA, 25 bp, Homo sapien
gcaaagacttattgatgggaccagt

SEQ ID NO: 4996176 - DNA, 25 bp, Homo sapien
caaatctgtgttccgaaatgtcatg

SEQ ID NO: 4996177 - DNA, 25 bp, Homo sapien
tcagactttaaggtgggtttcagga

SEQ ID NO: 4996178 - DNA, 25 bp, Homo sapien
cccaccatcctatcagactttaagg

SEQ ID NO: 4996179 - DNA, 25 bp, Homo sapien
gtttcaggacaagttaggacatgta

SEQ ID NO: 4996180 - DNA, 25 bp, Homo sapien
tacctaaagtagcatattgaacatt

SEQ ID NO: 4996181 - DNA, 25 bp, Homo sapien
tactgataccatacagaaacccgcc

SEQ ID NO: 4996182 - DNA, 25 bp, Homo sapien
tcctaaacaacccaacactactgat

SEQ ID NO: 4996183 - DNA, 25 bp, Homo sapien
gaaacccgccatattatataacatg

SEQ ID NO: 4996184 - DNA, 25 bp, Homo sapien
caagaattactagatatggtgtcat

SEQ ID NO: 4996185 - DNA, 25 bp, Homo sapien
taagtggagctataggcctgatgca

SEQ ID NO: 4996186 - DNA, 25 bp, Homo sapien
ggaccttttactcctagagcagaga

SEQ ID NO: 4996187 - DNA, 25 bp, Homo sapien
tcagctcactcccaagtggtggtca

SEQ ID NO: 4996188 - DNA, 25 bp, Homo sapien
cacctgtagaccatgggctcttggg

SEQ ID NO: 4996189 - DNA, 25 bp, Homo sapien
tgaggtgggaggattgcttgagcct

SEQ ID NO: 4996190 - DNA, 25 bp, Homo sapien
gggtggtgtggtggcactcaggagg

SEQ ID NO: 4996191 - DNA, 25 bp, Homo sapien
tgggtggtgtggtggcactcaggag

SEQ ID NO: 4996192 - DNA, 25 bp, Homo sapien
ggtggtgtggtggcactcaggaggc

SEQ ID NO: 4996193 - DNA, 25 bp, Homo sapien
tattatatgtgtaggcaggaaatgg

SEQ ID NO: 4996194 - DNA, 25 bp, Homo sapien
atagaaggtgattcccacatataca

SEQ ID NO: 4996195 - DNA, 25 bp, Homo sapien
cttttcaatgggtttattatatgtg

SEQ ID NO: 4996196 - DNA, 25 bp, Homo sapien
tagaaggtgattcccacatatacat

SEQ ID NO: 4996197 - DNA, 25 bp, Homo sapien
ttcagtttcaaactataagagaaac

SEQ ID NO: 4996198 - DNA, 25 bp, Homo sapien
tttcagtttcaaactataagagaaa

SEQ ID NO: 4996199 - DNA, 25 bp, Homo sapien
ttttcagtttcaaactataagagaa

SEQ ID NO: 4996200 - DNA, 25 bp, Homo sapien
cttttcagtttcaaactataagaga

SEQ ID NO: 4996201 - DNA, 25 bp, Homo sapien
tcagaagctgatgtagagaagcaac

SEQ ID NO: 4996202 - DNA, 25 bp, Homo sapien
catgggtgcacgaggcaacttgctt

SEQ ID NO: 4996203 - DNA, 25 bp, Homo sapien
agagggtaccctggtccacaaacat

SEQ ID NO: 4996204 - DNA, 25 bp, Homo sapien
gcccaggtaagctcaactgaaacaa

SEQ ID NO: 4996205 - DNA, 25 bp, Homo sapien
caaggtatggccatctcacgagagt

SEQ ID NO: 4996206 - DNA, 25 bp, Homo sapien
cacgagagtgaccagctgaccatat

SEQ ID NO: 4996207 - DNA, 25 bp, Homo sapien
ccttctaatgagttggacctgggaa

SEQ ID NO: 4996208 - DNA, 25 bp, Homo sapien
tgggtgcctgagatatgactagtcc

SEQ ID NO: 4996209 - DNA, 25 bp, Homo sapien
caagacttgctgatgtcttatgcag

SEQ ID NO: 4996210 - DNA, 25 bp, Homo sapien
taaaaaggccaatgattgatagaaa

SEQ ID NO: 4996211 - DNA, 25 bp, Homo sapien
gtattttagtacttgcaagacttgc

SEQ ID NO: 4996212 - DNA, 25 bp, Homo sapien
gctgatgtcttatgcagttcaccac

SEQ ID NO: 4996213 - DNA, 25 bp, Homo sapien
tccaaaagattgagttataaggtaa

SEQ ID NO: 4996214 - DNA, 25 bp, Homo sapien
aagagccaagaagctaactttgatt

SEQ ID NO: 4996215 - DNA, 25 bp, Homo sapien
tgagttataaggtaaatgtcaaaga

SEQ ID NO: 4996216 - DNA, 25 bp, Homo sapien
gcattgtgttttccaaaagattgag

SEQ ID NO: 4996217 - DNA, 25 bp, Homo sapien
tctcgcatgtgcaggtcaagtgtac

SEQ ID NO: 4996218 - DNA, 25 bp, Homo sapien
tctgttcacatcaaaaggcccgtca

SEQ ID NO: 4996219 - DNA, 25 bp, Homo sapien
cactggagtgaaagcttggcggtac

SEQ ID NO: 4996220 - DNA, 25 bp, Homo sapien
gattggcaaataccctgagctgatt

SEQ ID NO: 4996221 - DNA, 25 bp, Homo sapien
tcactgctcgactgttctctctgca

SEQ ID NO: 4996222 - DNA, 25 bp, Homo sapien
tcctgaggtaataactgtgagttca

SEQ ID NO: 4996223 - DNA, 25 bp, Homo sapien
ccacgtgtccaagcattgtctggga

SEQ ID NO: 4996224 - DNA, 25 bp, Homo sapien
ttccagctggctttattcagcccca

SEQ ID NO: 4996225 - DNA, 25 bp, Homo sapien
tgtaaataaaggctccactaggtaa

SEQ ID NO: 4996226 - DNA, 25 bp, Homo sapien
aataaaggctccactaggtaagtca

SEQ ID NO: 4996227 - DNA, 25 bp, Homo sapien
gtagtctactgctttacccctcagg

SEQ ID NO: 4996228 - DNA, 25 bp, Homo sapien
tagcccaattcgaggcagagttgca

SEQ ID NO: 4996229 - DNA, 25 bp, Homo sapien
aactctgaggatactcgggcatagc

SEQ ID NO: 4996230 - DNA, 25 bp, Homo sapien
gggatggaatcttcatgcctggtca

SEQ ID NO: 4996231 - DNA, 25 bp, Homo sapien
aatgaacagaccagagccatggacc

SEQ ID NO: 4996232 - DNA, 25 bp, Homo sapien
gctgttaactgcatgaagtgggcaa

SEQ ID NO: 4996233 - DNA, 25 bp, Homo sapien
ttcacagatttcacaggacgccttg

SEQ ID NO: 4996234 - DNA, 25 bp, Homo sapien
taattagtacctcgaacacagctgt

SEQ ID NO: 4996235 - DNA, 25 bp, Homo sapien
tctacgaggcacatggaaagcactg

SEQ ID NO: 4996236 - DNA, 25 bp, Homo sapien
tatacttgggaaacacagaagcgtc

SEQ ID NO: 4996237 - DNA, 25 bp, Homo sapien
tatgatcaggctcagtgggtcacca

SEQ ID NO: 4996238 - DNA, 25 bp, Homo sapien
tggtgctaggctccaggaatccaca

SEQ ID NO: 4996239 - DNA, 25 bp, Homo sapien
cagctatatctaaatatgtatagtt

SEQ ID NO: 4996240 - DNA, 25 bp, Homo sapien
agctatatctaaatatgtatagtta

SEQ ID NO: 4996241 - DNA, 25 bp, Homo sapien
gctatatctaaatatgtatagttac

SEQ ID NO: 4996242 - DNA, 25 bp, Homo sapien
tagattcagtgtgacgatcgcaaag

SEQ ID NO: 4996243 - DNA, 25 bp, Homo sapien
tcagtgtgacgatcgcaaagtggac

SEQ ID NO: 4996244 - DNA, 25 bp, Homo sapien
ctggatgttggcaatagattcagtg

SEQ ID NO: 4996245 - DNA, 25 bp, Homo sapien
cgatcgcaaagtggactcacaccca

SEQ ID NO: 4996246 - DNA, 25 bp, Homo sapien
tatataattaaaggcttgaacatac

SEQ ID NO: 4996247 - DNA, 25 bp, Homo sapien
taaaggcttgaacatacctgtgcat

SEQ ID NO: 4996248 - DNA, 25 bp, Homo sapien
taattaaaggcttgaacatacctgt

SEQ ID NO: 4996249 - DNA, 25 bp, Homo sapien
ggcttgaacatacctgtgcatttct

SEQ ID NO: 4996250 - DNA, 25 bp, Homo sapien
tgatggaagaattcctccgttactt

SEQ ID NO: 4996251 - DNA, 25 bp, Homo sapien
ttgatggaagaattcctccgttact

SEQ ID NO: 4996252 - DNA, 25 bp, Homo sapien
taattcccacgtccgacatgggtta

SEQ ID NO: 4996253 - DNA, 25 bp, Homo sapien
cccacgtccgacatgggttacaaat

SEQ ID NO: 4996254 - DNA, 25 bp, Homo sapien
ttgcttaattcccacgtccgacatg

SEQ ID NO: 4996255 - DNA, 25 bp, Homo sapien
ccactgcttgcttaattcccacgtc

SEQ ID NO: 4996256 - DNA, 25 bp, Homo sapien
cattctggcgactgatgtctgtggc

SEQ ID NO: 4996257 - DNA, 25 bp, Homo sapien
taaatcacctctatccaaatgggac

SEQ ID NO: 4996258 - DNA, 25 bp, Homo sapien
tgtctgtggctagtatcagagcacc

SEQ ID NO: 4996259 - DNA, 25 bp, Homo sapien
tgggacctaaacaaagacagatact

SEQ ID NO: 4996260 - DNA, 25 bp, Homo sapien
atctgtcttaattttaagaacccat

SEQ ID NO: 4996261 - DNA, 25 bp, Homo sapien
atacagtgtgtttaagcaattttcg

SEQ ID NO: 4996262 - DNA, 25 bp, Homo sapien
cagtgtgtttaagcaattttcgtat

SEQ ID NO: 4996263 - DNA, 25 bp, Homo sapien
ttcgtatttgtactacagcaaaaaa

SEQ ID NO: 4996264 - DNA, 25 bp, Homo sapien
agcctgattctctcaataagcccac

SEQ ID NO: 4996265 - DNA, 25 bp, Homo sapien
tctaatggcagatgtgagaataagc

SEQ ID NO: 4996266 - DNA, 25 bp, Homo sapien
tttctaatggcagatgtgagaataa

SEQ ID NO: 4996267 - DNA, 25 bp, Homo sapien
ttctaatggcagatgtgagaataag

SEQ ID NO: 4996268 - DNA, 25 bp, Homo sapien
ttaagctcagcaagatatcccaagg

SEQ ID NO: 4996269 - DNA, 25 bp, Homo sapien
ggttgattaacacctggatgatcca

SEQ ID NO: 4996270 - DNA, 25 bp, Homo sapien
tgagtggcagctgcaattaagctca

SEQ ID NO: 4996271 - DNA, 25 bp, Homo sapien
tatcccaaggagttacagaattggc

SEQ ID NO: 4996272 - DNA, 25 bp, Homo sapien
ggcttgaatctcctggaaaactgta

SEQ ID NO: 4996273 - DNA, 25 bp, Homo sapien
ctactccctgtgttaagttcatctc

SEQ ID NO: 4996274 - DNA, 25 bp, Homo sapien
tcactgtctgagggcttgaatctcc

SEQ ID NO: 4996275 - DNA, 25 bp, Homo sapien
tactccctgtgttaagttcatctca

SEQ ID NO: 4996276 - DNA, 25 bp, Homo sapien
catgccctgcctagtgaagacagat

SEQ ID NO: 4996277 - DNA, 25 bp, Homo sapien
tggcactatcatggaggagagcagt

SEQ ID NO: 4996278 - DNA, 25 bp, Homo sapien
tacctgagatactggtggcttgctg

SEQ ID NO: 4996279 - DNA, 25 bp, Homo sapien
tacatctgttaagagctgacaacaa

SEQ ID NO: 4996280 - DNA, 25 bp, Homo sapien
agccagcacacttcttataagaatc

SEQ ID NO: 4996281 - DNA, 25 bp, Homo sapien
aggaaatattgtcttccgtgaaact

SEQ ID NO: 4996282 - DNA, 25 bp, Homo sapien
aaacccagccaatgataaagcccat

SEQ ID NO: 4996283 - DNA, 25 bp, Homo sapien
actagcaattagcatctactcagag

SEQ ID NO: 4996284 - DNA, 25 bp, Homo sapien
gggccaaaattcctatcttactcat

SEQ ID NO: 4996285 - DNA, 25 bp, Homo sapien
taacagctcatattgaccaagtacc

SEQ ID NO: 4996286 - DNA, 25 bp, Homo sapien
aaatgctttataatccacatgagtt

SEQ ID NO: 4996287 - DNA, 25 bp, Homo sapien
ggagactttgggctcaacttgaaca

SEQ ID NO: 4996288 - DNA, 25 bp, Homo sapien
gggctcaacttgaacaaaatgcttt

SEQ ID NO: 4996289 - DNA, 25 bp, Homo sapien
tgctttataatccacatgagttcag

SEQ ID NO: 4996290 - DNA, 25 bp, Homo sapien
taagtgacttgtgatcaccctatct

SEQ ID NO: 4996291 - DNA, 25 bp, Homo sapien
ttttccacatagacaagagtccaag

SEQ ID NO: 4996292 - DNA, 25 bp, Homo sapien
gttatgtactgtccacttaagtgac

SEQ ID NO: 4996293 - DNA, 25 bp, Homo sapien
tgtacttggactttcttatggctga

SEQ ID NO: 4996294 - DNA, 25 bp, Homo sapien
cagtcctgggtgactccattttaaa

SEQ ID NO: 4996295 - DNA, 25 bp, Homo sapien
taagtattatcagaactccacaggc

SEQ ID NO: 4996296 - DNA, 25 bp, Homo sapien
taaaatgttcactatgataagggag

SEQ ID NO: 4996297 - DNA, 25 bp, Homo sapien
gaagccttgggtaaagtgttcactg

SEQ ID NO: 4996298 - DNA, 25 bp, Homo sapien
ggcacaagccagtttggtcatcctg

SEQ ID NO: 4996299 - DNA, 25 bp, Homo sapien
tttcccgcctaacaccttagccaga

SEQ ID NO: 4996300 - DNA, 25 bp, Homo sapien
ggcatcaatgggcacaagccagttt

SEQ ID NO: 4996301 - DNA, 25 bp, Homo sapien
ggtcatcctgtttcccgcctaacac

SEQ ID NO: 4996302 - DNA, 25 bp, Homo sapien
ttaggttcctttaagtaacagtgca

SEQ ID NO: 4996303 - DNA, 25 bp, Homo sapien
tatggtaaggattttgactgtggta

SEQ ID NO: 4996304 - DNA, 25 bp, Homo sapien
tttaagtaacagtgcatggcctgag

SEQ ID NO: 4996305 - DNA, 25 bp, Homo sapien
tggcctgagtaacatccgcagcgtg

SEQ ID NO: 4996306 - DNA, 25 bp, Homo sapien
gaaccaactaggagaaactggtgcc

SEQ ID NO: 4996307 - DNA, 25 bp, Homo sapien
tcaaactcagagcagcaaatgcagg

SEQ ID NO: 4996308 - DNA, 25 bp, Homo sapien
gaagttctcctatccacctaaagga

SEQ ID NO: 4996309 - DNA, 25 bp, Homo sapien
gaaatattaaatgtccccaccagca

SEQ ID NO: 4996310 - DNA, 25 bp, Homo sapien
catatctaaatggaagtactcaatt

SEQ ID NO: 4996311 - DNA, 25 bp, Homo sapien
ggaagtactcaattaatccatgaag

SEQ ID NO: 4996312 - DNA, 25 bp, Homo sapien
ctaaaaatctacgaagtttcatcat

SEQ ID NO: 4996313 - DNA, 25 bp, Homo sapien
agtttcatcatatctaaatggaagt

SEQ ID NO: 4996314 - DNA, 25 bp, Homo sapien
gtctatcaaatagaaagatatcaaa

SEQ ID NO: 4996315 - DNA, 25 bp, Homo sapien
tagtctatcaaatagaaagatatca

SEQ ID NO: 4996316 - DNA, 25 bp, Homo sapien
catttgttagtctatcaaatagaaa

SEQ ID NO: 4996317 - DNA, 25 bp, Homo sapien
ttgttagtctatcaaatagaaagat

SEQ ID NO: 4996318 - DNA, 25 bp, Homo sapien
catttctactgtaatttaatttcaa

SEQ ID NO: 4996319 - DNA, 25 bp, Homo sapien
tgaaaaccaaacatttctactgtaa

SEQ ID NO: 4996320 - DNA, 25 bp, Homo sapien
aatgaaaaccaaacatttctactgt

SEQ ID NO: 4996321 - DNA, 25 bp, Homo sapien
tgaaatgaaaaccaaacatttctac

SEQ ID NO: 4996322 - DNA, 25 bp, Homo sapien
gacactgataccacaccatgcttaa

SEQ ID NO: 4996323 - DNA, 25 bp, Homo sapien
tagaacctaggcatctgacactgat

SEQ ID NO: 4996324 - DNA, 25 bp, Homo sapien
cattttagggacgtagaaacaagca

SEQ ID NO: 4996325 - DNA, 25 bp, Homo sapien
aacttgctcagctataaagtgatag

SEQ ID NO: 4996326 - DNA, 25 bp, Homo sapien
tggcttgtccattataatcatcatc

SEQ ID NO: 4996327 - DNA, 25 bp, Homo sapien
cgctggaaacttagtagccttctga

SEQ ID NO: 4996328 - DNA, 25 bp, Homo sapien
accgcagtaccacgaaaaaagcgtg

SEQ ID NO: 4996329 - DNA, 25 bp, Homo sapien
gaagatctaagatatcgctggaaac

SEQ ID NO: 4996330 - DNA, 25 bp, Homo sapien
aaagtgggcagacattagagtcctg

SEQ ID NO: 4996331 - DNA, 25 bp, Homo sapien
ccccaaggtatagggcaagactctc

SEQ ID NO: 4996332 - DNA, 25 bp, Homo sapien
cctgaatgcggtcctcttgggtttt

SEQ ID NO: 4996333 - DNA, 25 bp, Homo sapien
gaggcctgacacactcaacattaca

SEQ ID NO: 4996334 - DNA, 25 bp, Homo sapien
tcatacagtcattgtaataaagaca

SEQ ID NO: 4996335 - DNA, 25 bp, Homo sapien
cagattatatggagagaactacaaa

SEQ ID NO: 4996336 - DNA, 25 bp, Homo sapien
aaaatctaactgtaggagatacaca

SEQ ID NO: 4996337 - DNA, 25 bp, Homo sapien
agccatagtcaattcaatgcaataa

SEQ ID NO: 4996338 - DNA, 25 bp, Homo sapien
tggaacatgactgtgtcccaagagt

SEQ ID NO: 4996339 - DNA, 25 bp, Homo sapien
gactggaacatgactgtgtcccaag

SEQ ID NO: 4996340 - DNA, 25 bp, Homo sapien
atggactggaacatgactgtgtccc

SEQ ID NO: 4996341 - DNA, 25 bp, Homo sapien
acatgactgtgtcccaagagtaaaa

SEQ ID NO: 4996342 - DNA, 25 bp, Homo sapien
taaccctgagagcatatttgtacca

SEQ ID NO: 4996343 - DNA, 25 bp, Homo sapien
aatatgtgatctagactgggtgcgg

SEQ ID NO: 4996344 - DNA, 25 bp, Homo sapien
aatccctctatcttgtgtaaccacg

SEQ ID NO: 4996345 - DNA, 25 bp, Homo sapien
tatgaaagtctgcatgatacggcca

SEQ ID NO: 4996346 - DNA, 25 bp, Homo sapien
aaaccatctgtttctggcaatctca

SEQ ID NO: 4996347 - DNA, 25 bp, Homo sapien
tctatattcatgagcgatttggctg

SEQ ID NO: 4996348 - DNA, 25 bp, Homo sapien
gtagtatcaagattacatgctagcc

SEQ ID NO: 4996349 - DNA, 25 bp, Homo sapien
gctagccttacgtaacaaattgtga

SEQ ID NO: 4996350 - DNA, 25 bp, Homo sapien
tgctcggctccttacacgtacatct

SEQ ID NO: 4996351 - DNA, 25 bp, Homo sapien
attcaaatcctgctcggctccttac

SEQ ID NO: 4996352 - DNA, 25 bp, Homo sapien
gaaaatacgaaaatcaatatatggg

SEQ ID NO: 4996353 - DNA, 25 bp, Homo sapien
gaaaatcaatatatgggtgagaacc

SEQ ID NO: 4996354 - DNA, 25 bp, Homo sapien
tattaagagccgactctgtgcctag

SEQ ID NO: 4996355 - DNA, 25 bp, Homo sapien
gcacaaaactttagaaagctgcaga

SEQ ID NO: 4996356 - DNA, 25 bp, Homo sapien
tgtgcctagcactatactatgggct

SEQ ID NO: 4996357 - DNA, 25 bp, Homo sapien
ggccattgggaagcaatatctgttt

SEQ ID NO: 4996358 - DNA, 25 bp, Homo sapien
tttctctgagtaggaccatgacttc

SEQ ID NO: 4996359 - DNA, 25 bp, Homo sapien
tctgagtaggaccatgacttcctcc

SEQ ID NO: 4996360 - DNA, 25 bp, Homo sapien
ccaaggctcacttcatcgactataa

SEQ ID NO: 4996361 - DNA, 25 bp, Homo sapien
tcgactataattccatcccacaatg

SEQ ID NO: 4996362 - DNA, 25 bp, Homo sapien
cgaatgtataatgcagtctgatcag

SEQ ID NO: 4996363 - DNA, 25 bp, Homo sapien
taatgcagtctgatcagaactgtca

SEQ ID NO: 4996364 - DNA, 25 bp, Homo sapien
tgtataatgcagtctgatcagaact

SEQ ID NO: 4996365 - DNA, 25 bp, Homo sapien
tagcatacgaatgtataatgcagtc

SEQ ID NO: 4996366 - DNA, 25 bp, Homo sapien
gaaataactgagaggcttctactcg

SEQ ID NO: 4996367 - DNA, 25 bp, Homo sapien
gtgaatggaaataactgagaggctt

SEQ ID NO: 4996368 - DNA, 25 bp, Homo sapien
ggcttctactcgtgacttttctaat

SEQ ID NO: 4996369 - DNA, 25 bp, Homo sapien
taactgagaggcttctactcgtgac

SEQ ID NO: 4996370 - DNA, 25 bp, Homo sapien
agacaccagatcaatgtaattccca

SEQ ID NO: 4996371 - DNA, 25 bp, Homo sapien
caaggccagacaccagatcaatgta

SEQ ID NO: 4996372 - DNA, 25 bp, Homo sapien
aagaaccaaggccagacaccagatc

SEQ ID NO: 4996373 - DNA, 25 bp, Homo sapien
ccacttgataagaaccaaggccaga

SEQ ID NO: 4996374 - DNA, 25 bp, Homo sapien
tggatcaatcaaaagcccgctgcat

SEQ ID NO: 4996375 - DNA, 25 bp, Homo sapien
tcttctactagggagcaaggaaaac

SEQ ID NO: 4996376 - DNA, 25 bp, Homo sapien
ctactagggagcaaggaaaacttct

SEQ ID NO: 4996377 - DNA, 25 bp, Homo sapien
tctctcttctactagggagcaagga

SEQ ID NO: 4996378 - DNA, 25 bp, Homo sapien
ctgactgccttggacctcaagcagc

SEQ ID NO: 4996379 - DNA, 25 bp, Homo sapien
aaaagagaggggacactgactgcct

SEQ ID NO: 4996380 - DNA, 25 bp, Homo sapien
aaagagaggggacactgactgcctt

SEQ ID NO: 4996381 - DNA, 25 bp, Homo sapien
actgccttggacctcaagcagctgc

SEQ ID NO: 4996382 - DNA, 25 bp, Homo sapien
caatggtccatgaagggaacttgca

SEQ ID NO: 4996383 - DNA, 25 bp, Homo sapien
gaagggaacttgcactgtgtttgca

SEQ ID NO: 4996384 - DNA, 25 bp, Homo sapien
tgcaatcacaatggtccatgaaggg

SEQ ID NO: 4996385 - DNA, 25 bp, Homo sapien
cttaactctagacctaactgcaatc

SEQ ID NO: 4996386 - DNA, 25 bp, Homo sapien
tcaaagctggtaacaacataagcat

SEQ ID NO: 4996387 - DNA, 25 bp, Homo sapien
ggagcaattagaacgctcatgctaa

SEQ ID NO: 4996388 - DNA, 25 bp, Homo sapien
tctcgtgttatcaaggatgtggagc

SEQ ID NO: 4996389 - DNA, 25 bp, Homo sapien
gccaatatgcatatggatgctcaac

SEQ ID NO: 4996390 - DNA, 25 bp, Homo sapien
cacaccaagctagctttttctattt

SEQ ID NO: 4996391 - DNA, 25 bp, Homo sapien
ctgaggtcacacctgtgtaccacca

SEQ ID NO: 4996392 - DNA, 25 bp, Homo sapien
tgaggtcacacctgtgtaccaccat

SEQ ID NO: 4996393 - DNA, 25 bp, Homo sapien
caccacaccaagctagctttttcta

SEQ ID NO: 4996394 - DNA, 25 bp, Homo sapien
gtcctctctttaatcgtctggtagt

SEQ ID NO: 4996395 - DNA, 25 bp, Homo sapien
gtagtcaaatcaggctcccttacag

SEQ ID NO: 4996396 - DNA, 25 bp, Homo sapien
taatatcacacccatgaacttcata

SEQ ID NO: 4996397 - DNA, 25 bp, Homo sapien
tcttcaactgtcaatagctttgagt

SEQ ID NO: 4996398 - DNA, 25 bp, Homo sapien
taagatctggcagtacaagtaggac

SEQ ID NO: 4996399 - DNA, 25 bp, Homo sapien
tctgtggcaactgcacctagcaagt

SEQ ID NO: 4996400 - DNA, 25 bp, Homo sapien
gggcgccatgaaacttgtccacata

SEQ ID NO: 4996401 - DNA, 25 bp, Homo sapien
ggaaagtccatcaatgcagcaaatg

SEQ ID NO: 4996402 - DNA, 25 bp, Homo sapien
caagaacatcagcctccacaccagc

SEQ ID NO: 4996403 - DNA, 25 bp, Homo sapien
aagaacatcagcctccacaccagca

SEQ ID NO: 4996404 - DNA, 25 bp, Homo sapien
agaacatcagcctccacaccagcat

SEQ ID NO: 4996405 - DNA, 25 bp, Homo sapien
gagaatcaaatccagttgctacctg

SEQ ID NO: 4996406 - DNA, 25 bp, Homo sapien
ctaaattcgtaagtgaggtttctca

SEQ ID NO: 4996407 - DNA, 25 bp, Homo sapien
tatgcatacaacctagaagaatggg

SEQ ID NO: 4996408 - DNA, 25 bp, Homo sapien
tatcccactgaaaacgcatttctga

SEQ ID NO: 4996409 - DNA, 25 bp, Homo sapien
caaagtaggaagagtgcacagcaat

SEQ ID NO: 4996410 - DNA, 25 bp, Homo sapien
taccctcctagaacatggcatttag

SEQ ID NO: 4996411 - DNA, 25 bp, Homo sapien
aatcctggaagacagcaatgctctg

SEQ ID NO: 4996412 - DNA, 25 bp, Homo sapien
cctgctggctaaaatctgagacttt

SEQ ID NO: 4996413 - DNA, 25 bp, Homo sapien
taccggcagctggtaacacacttcc

SEQ ID NO: 4996414 - DNA, 25 bp, Homo sapien
tcctcggcggctgaggacgtgctgg

SEQ ID NO: 4996415 - DNA, 25 bp, Homo sapien
gggcagccgaagagagcggagctgg

SEQ ID NO: 4996416 - DNA, 25 bp, Homo sapien
gggcagtaccggcagctggtaacac

SEQ ID NO: 4996417 - DNA, 25 bp, Homo sapien
tgcctccgcgcggcgcccgccctgc

SEQ ID NO: 4996418 - DNA, 25 bp, Homo sapien
gcctccgcgcggcgcccgccctgcc

SEQ ID NO: 4996419 - DNA, 25 bp, Homo sapien
ctccgcgcggcgcccgccctgccgc

SEQ ID NO: 4996420 - DNA, 25 bp, Homo sapien
ctgcctccgcgcggcgcccgccctg

SEQ ID NO: 4996421 - DNA, 25 bp, Homo sapien
tgggaagccgcgctcacgcctcccc

SEQ ID NO: 4996422 - DNA, 25 bp, Homo sapien
ggaagccgcgctcacgcctccccaa

SEQ ID NO: 4996423 - DNA, 25 bp, Homo sapien
gaagccgcgctcacgcctccccaac

SEQ ID NO: 4996424 - DNA, 25 bp, Homo sapien
gggaagccgcgctcacgcctcccca

SEQ ID NO: 4996425 - DNA, 25 bp, Homo sapien
caggtacccggactgcagagttcga

SEQ ID NO: 4996426 - DNA, 25 bp, Homo sapien
cacgaacggagcaaagcagtgcaag

SEQ ID NO: 4996427 - DNA, 25 bp, Homo sapien
cagcacaggcaaagtcggaaaggga

SEQ ID NO: 4996428 - DNA, 25 bp, Homo sapien
gtaattcacactttgcagccgcgga

SEQ ID NO: 4996429 - DNA, 25 bp, Homo sapien
tccagcgctcgcctggcagatgcgg

SEQ ID NO: 4996430 - DNA, 25 bp, Homo sapien
cccattcatgggtttcgctagagac

SEQ ID NO: 4996431 - DNA, 25 bp, Homo sapien
tacgtcactgccagtccctcggtgg

SEQ ID NO: 4996432 - DNA, 25 bp, Homo sapien
tcgtcccgcgctagaggcggcgttc

SEQ ID NO: 4996433 - DNA, 25 bp, Homo sapien
caaatgcacataatccggtaaatga

SEQ ID NO: 4996434 - DNA, 25 bp, Homo sapien
aatgcacataatccggtaaatgagc

SEQ ID NO: 4996435 - DNA, 25 bp, Homo sapien
aaatgcacataatccggtaaatgag

SEQ ID NO: 4996436 - DNA, 25 bp, Homo sapien
ggtgtggtgacttctaaattgctaa

SEQ ID NO: 4996437 - DNA, 25 bp, Homo sapien
tcatggagcctcagtgggagtccac

SEQ ID NO: 4996438 - DNA, 25 bp, Homo sapien
tggagaaccaggatgggcgccttaa

SEQ ID NO: 4996439 - DNA, 25 bp, Homo sapien
tgcacataattggagacacaactgg

SEQ ID NO: 4996440 - DNA, 25 bp, Homo sapien
catgaaacaactatagcggctaaaa

SEQ ID NO: 4996441 - DNA, 25 bp, Homo sapien
gaaacaactatagcggctaaaacta

SEQ ID NO: 4996442 - DNA, 25 bp, Homo sapien
accttccatgaaacaactatagcgg

SEQ ID NO: 4996443 - DNA, 25 bp, Homo sapien
tattcaatgaaaccttccatgaaac

SEQ ID NO: 4996444 - DNA, 25 bp, Homo sapien
cttgtggccgttgttctagacatgc

SEQ ID NO: 4996445 - DNA, 25 bp, Homo sapien
gtactctatgttcccagctctctga

SEQ ID NO: 4996446 - DNA, 25 bp, Homo sapien
catgctcctgctggcgtgtttcgtc

SEQ ID NO: 4996447 - DNA, 25 bp, Homo sapien
ggcgtgtttcgtctcacaattctgt

SEQ ID NO: 4996448 - DNA, 25 bp, Homo sapien
tcagagtagttggtctttacccagc

SEQ ID NO: 4996449 - DNA, 25 bp, Homo sapien
gcacagcgtggaagcctcaggactg

SEQ ID NO: 4996450 - DNA, 25 bp, Homo sapien
tcaaaagtgcacagcgtggaagcct

SEQ ID NO: 4996451 - DNA, 25 bp, Homo sapien
aaagtgcacagcgtggaagcctcag

SEQ ID NO: 4996452 - DNA, 25 bp, Homo sapien
tttcaaaagtgcacagcgtggaagc

SEQ ID NO: 4996453 - DNA, 25 bp, Homo sapien
atgctctcaagagtaacttcagttc

SEQ ID NO: 4996454 - DNA, 25 bp, Homo sapien
cagaattcacaacaaagagacgtcc

SEQ ID NO: 4996455 - DNA, 25 bp, Homo sapien
gatgctctcaagagtaacttcagtt

SEQ ID NO: 4996456 - DNA, 25 bp, Homo sapien
ctccatttccttgctgtgttgtcat

SEQ ID NO: 4996457 - DNA, 25 bp, Homo sapien
gctccatttccttgctgtgttgtca

SEQ ID NO: 4996458 - DNA, 25 bp, Homo sapien
ggtgctccatttccttgctgtgttg

SEQ ID NO: 4996459 - DNA, 25 bp, Homo sapien
caaaggtgctccatttccttgctgt

SEQ ID NO: 4996460 - DNA, 25 bp, Homo sapien
tgctagacagttcggatccaacaga

SEQ ID NO: 4996461 - DNA, 25 bp, Homo sapien
agttcggatccaacagatccccagg

SEQ ID NO: 4996462 - DNA, 25 bp, Homo sapien
tctagcacgtgtgctcccgcgacgt

SEQ ID NO: 4996463 - DNA, 25 bp, Homo sapien
tcccgcgacgtccatgctagacagt

SEQ ID NO: 4996464 - DNA, 25 bp, Homo sapien
ctctgtaggtcttctgaggaaggaa

SEQ ID NO: 4996465 - DNA, 25 bp, Homo sapien
gaaatgtgtttgcaactagagtggg

SEQ ID NO: 4996466 - DNA, 25 bp, Homo sapien
gttaagagaaataagtctctgtagg

SEQ ID NO: 4996467 - DNA, 25 bp, Homo sapien
tatgggtagatccttgagaaggctg

SEQ ID NO: 4996468 - DNA, 25 bp, Homo sapien
cttttttccctgaacctgagctgtt

SEQ ID NO: 4996469 - DNA, 25 bp, Homo sapien
cctgaacctgagctgttggacgact

SEQ ID NO: 4996470 - DNA, 25 bp, Homo sapien
ttttccctgaacctgagctgttgga

SEQ ID NO: 4996471 - DNA, 25 bp, Homo sapien
tccctgaacctgagctgttggacga

SEQ ID NO: 4996472 - DNA, 25 bp, Homo sapien
gggtgagctgtgtttccggtcttac

SEQ ID NO: 4996473 - DNA, 25 bp, Homo sapien
tacatccttctcaacaggctggtgg

SEQ ID NO: 4996474 - DNA, 25 bp, Homo sapien
tgtaagtctgaacatctggtagagt

SEQ ID NO: 4996475 - DNA, 25 bp, Homo sapien
tgtgtttccggtcttacatccttct

SEQ ID NO: 4996476 - DNA, 25 bp, Homo sapien
tgttccttccacagcgccgcctggc

SEQ ID NO: 4996477 - DNA, 25 bp, Homo sapien
tgtgtttctgtctgagtgccttgcc

SEQ ID NO: 4996478 - DNA, 25 bp, Homo sapien
cttgccagcagtctgatgcaacttc

SEQ ID NO: 4996479 - DNA, 25 bp, Homo sapien
gcctgtctcggcttgtatcttccct

SEQ ID NO: 4996480 - DNA, 25 bp, Homo sapien
attttacggccatttaggcatacag

SEQ ID NO: 4996481 - DNA, 25 bp, Homo sapien
tgcagggagattttacggccattta

SEQ ID NO: 4996482 - DNA, 25 bp, Homo sapien
cagggagattttacggccatttagg

SEQ ID NO: 4996483 - DNA, 25 bp, Homo sapien
agattttacggccatttaggcatac

SEQ ID NO: 4996484 - DNA, 25 bp, Homo sapien
gatggcccctcagcaagttggccaa

SEQ ID NO: 4996485 - DNA, 25 bp, Homo sapien
tctgatggcccctcagcaagttggc

SEQ ID NO: 4996486 - DNA, 25 bp, Homo sapien
gcccctcagcaagttggccaactgt

SEQ ID NO: 4996487 - DNA, 25 bp, Homo sapien
cctcagcaagttggccaactgtggt

SEQ ID NO: 4996488 - DNA, 25 bp, Homo sapien
gcatatgctccattgacaatggatc

SEQ ID NO: 4996489 - DNA, 25 bp, Homo sapien
ctctttgatgagcatatgctccatt

SEQ ID NO: 4996490 - DNA, 25 bp, Homo sapien
tgatgagcatatgctccattgacaa

SEQ ID NO: 4996491 - DNA, 25 bp, Homo sapien
tttgatgagcatatgctccattgac

SEQ ID NO: 4996492 - DNA, 25 bp, Homo sapien
gactttagggttctctgttgctgca

SEQ ID NO: 4996493 - DNA, 25 bp, Homo sapien
ccctaaggagagtggcataggcaca

SEQ ID NO: 4996494 - DNA, 25 bp, Homo sapien
cacagctgatctgcagcggatgcat

SEQ ID NO: 4996495 - DNA, 25 bp, Homo sapien
gttttcagacactcagactttaggg

SEQ ID NO: 4996496 - DNA, 25 bp, Homo sapien
tgtccccaaattgtgcaattcatgt

SEQ ID NO: 4996497 - DNA, 25 bp, Homo sapien
catgtggcagagacttattgcttat

SEQ ID NO: 4996498 - DNA, 25 bp, Homo sapien
tagaagcatgtgttagttgccattg

SEQ ID NO: 4996499 - DNA, 25 bp, Homo sapien
gaaattcacttgaagtcaaaggcag

SEQ ID NO: 4996500 - DNA, 25 bp, Homo sapien
ttattcctttacttgacactttggc

SEQ ID NO: 4996501 - DNA, 25 bp, Homo sapien
tattcctttacttgacactttggcc

SEQ ID NO: 4996502 - DNA, 25 bp, Homo sapien
tcttccttgtgactactctggggcc

SEQ ID NO: 4996503 - DNA, 25 bp, Homo sapien
ttgtgactactctggggccctatta

SEQ ID NO: 4996504 - DNA, 25 bp, Homo sapien
cacaggtctggaggcataggaagaa

SEQ ID NO: 4996505 - DNA, 25 bp, Homo sapien
gctgaaagggccaacgtagagttca

SEQ ID NO: 4996506 - DNA, 25 bp, Homo sapien
tgtcttcagatggtgcgagccccaa

SEQ ID NO: 4996507 - DNA, 25 bp, Homo sapien
caagagacttgatgccctgcgttcc

SEQ ID NO: 4996508 - DNA, 25 bp, Homo sapien
ggtctgtacttgtcaaaagtgaggc

SEQ ID NO: 4996509 - DNA, 25 bp, Homo sapien
tattggacgtaaagtataatgcccc

SEQ ID NO: 4996510 - DNA, 25 bp, Homo sapien
cagtatgttcagtggaggcctacgg

SEQ ID NO: 4996511 - DNA, 25 bp, Homo sapien
aaatggagcctacgggatattggac

SEQ ID NO: 4996512 - DNA, 25 bp, Homo sapien
caactctccacatagctcctgtgtt

SEQ ID NO: 4996513 - DNA, 25 bp, Homo sapien
ctgcctggaatgtccctccatcaac

SEQ ID NO: 4996514 - DNA, 25 bp, Homo sapien
ccttcaaggcctttgtgtttgctgt

SEQ ID NO: 4996515 - DNA, 25 bp, Homo sapien
ccctccatcaactctccacatagct

SEQ ID NO: 4996516 - DNA, 25 bp, Homo sapien
gctgaaggtggctggccttgataaa

SEQ ID NO: 4996517 - DNA, 25 bp, Homo sapien
tacagtagttggaaggtctgctccc

SEQ ID NO: 4996518 - DNA, 25 bp, Homo sapien
gtcggagactgtgcgttcggtcccc

SEQ ID NO: 4996519 - DNA, 25 bp, Homo sapien
ctgatgggtgcacactcccacagtg

SEQ ID NO: 4996520 - DNA, 25 bp, Homo sapien
ccatgcccttcacgggactaccact

SEQ ID NO: 4996521 - DNA, 25 bp, Homo sapien
tgcccttcacgggactaccacttct

SEQ ID NO: 4996522 - DNA, 25 bp, Homo sapien
ccttcacgggactaccacttcttgc

SEQ ID NO: 4996523 - DNA, 25 bp, Homo sapien
ttcacgggactaccacttcttgcct

SEQ ID NO: 4996524 - DNA, 25 bp, Homo sapien
ttccacaaggcgcccctgcagtgtg

SEQ ID NO: 4996525 - DNA, 25 bp, Homo sapien
tccacaaggcgcccctgcagtgtgc

SEQ ID NO: 4996526 - DNA, 25 bp, Homo sapien
cccttccacaaggcgcccctgcagt

SEQ ID NO: 4996527 - DNA, 25 bp, Homo sapien
cttccacaaggcgcccctgcagtgt

SEQ ID NO: 4996528 - DNA, 25 bp, Homo sapien
tgtgtcagggacagttccctgatgg

SEQ ID NO: 4996529 - DNA, 25 bp, Homo sapien
tgatggtcccctgtgtagaacatgg

SEQ ID NO: 4996530 - DNA, 25 bp, Homo sapien
actgtcattaccactgggtaagacc

SEQ ID NO: 4996531 - DNA, 25 bp, Homo sapien
gcccacctcatgggtttctggcaag

SEQ ID NO: 4996532 - DNA, 25 bp, Homo sapien
gaccttgagttttgtgagattcccc

SEQ ID NO: 4996533 - DNA, 25 bp, Homo sapien
agtcactcacaaggccactctcttg

SEQ ID NO: 4996534 - DNA, 25 bp, Homo sapien
cttggctggcttgagttagtttgat

SEQ ID NO: 4996535 - DNA, 25 bp, Homo sapien
tactgtgcagccaattgctcattcc

SEQ ID NO: 4996536 - DNA, 25 bp, Homo sapien
tagtacaggatttaagtggatgcag

SEQ ID NO: 4996537 - DNA, 25 bp, Homo sapien
tgtgttcgaaggtttaattcatttc

SEQ ID NO: 4996538 - DNA, 25 bp, Homo sapien
gatttcagtttcatggtccgtggca

SEQ ID NO: 4996539 - DNA, 25 bp, Homo sapien
gacagaggcatctcttagtacagga

SEQ ID NO: 4996540 - DNA, 25 bp, Homo sapien
ttggggagtttgtgggtagtacatg

SEQ ID NO: 4996541 - DNA, 25 bp, Homo sapien
caagattgaaaagttacttgttcat

SEQ ID NO: 4996542 - DNA, 25 bp, Homo sapien
aagattgaaaagttacttgttcatt

SEQ ID NO: 4996543 - DNA, 25 bp, Homo sapien
agattgaaaagttacttgttcattt

SEQ ID NO: 4996544 - DNA, 25 bp, Homo sapien
tgttcaatgactgcaaaccacttga

SEQ ID NO: 4996545 - DNA, 25 bp, Homo sapien
tgactgcaaaccacttgaacaagtt

SEQ ID NO: 4996546 - DNA, 25 bp, Homo sapien
gctgatctatgttcaatgactgcaa

SEQ ID NO: 4996547 - DNA, 25 bp, Homo sapien
tttcataggagctgatctatgttca

SEQ ID NO: 4996548 - DNA, 25 bp, Homo sapien
gtctaagactaaggcactggccttg

SEQ ID NO: 4996549 - DNA, 25 bp, Homo sapien
ttccagcccttttataaggcactaa

SEQ ID NO: 4996550 - DNA, 25 bp, Homo sapien
ctctggaagggtcaaacgctgtgtc

SEQ ID NO: 4996551 - DNA, 25 bp, Homo sapien
caaggtggtgccttatggccacatc

SEQ ID NO: 4996552 - DNA, 25 bp, Homo sapien
gttgttatgctgacactggtttcca

SEQ ID NO: 4996553 - DNA, 25 bp, Homo sapien
gctgacactggtttccagtgggtca

SEQ ID NO: 4996554 - DNA, 25 bp, Homo sapien
gctctcgtaactgttgttatgctga

SEQ ID NO: 4996555 - DNA, 25 bp, Homo sapien
tattttgtaggtttagctctcgtaa

SEQ ID NO: 4996556 - DNA, 25 bp, Homo sapien
tagactacgagcattttagtggaaa

SEQ ID NO: 4996557 - DNA, 25 bp, Homo sapien
gaatggatggacatagactacgagc

SEQ ID NO: 4996558 - DNA, 25 bp, Homo sapien
tggacatagactacgagcattttag

SEQ ID NO: 4996559 - DNA, 25 bp, Homo sapien
gaagtatcctgaatggatggacata

SEQ ID NO: 4996560 - DNA, 25 bp, Homo sapien
tgcagagtgcctgcttctgaagagc

SEQ ID NO: 4996561 - DNA, 25 bp, Homo sapien
tcatcactgccataggggactgaag

SEQ ID NO: 4996562 - DNA, 25 bp, Homo sapien
gagctatgcaggcttccctcatcac

SEQ ID NO: 4996563 - DNA, 25 bp, Homo sapien
tgtgctccaggtgtgaggctttgcc

SEQ ID NO: 4996564 - DNA, 25 bp, Homo sapien
gtgaggattccactctgtgacatca

SEQ ID NO: 4996565 - DNA, 25 bp, Homo sapien
atcacaatatccagcccaggtttga

SEQ ID NO: 4996566 - DNA, 25 bp, Homo sapien
gagaggaagtgttgtccaagagggc

SEQ ID NO: 4996567 - DNA, 25 bp, Homo sapien
aatatccagcccaggtttgaccttg

SEQ ID NO: 4996568 - DNA, 25 bp, Homo sapien
tctgtttaccagtggggcggagcat

SEQ ID NO: 4996569 - DNA, 25 bp, Homo sapien
tctgagtgacggcaaagaactgttc

SEQ ID NO: 4996570 - DNA, 25 bp, Homo sapien
tgccttggggttttggcttctacaa

SEQ ID NO: 4996571 - DNA, 25 bp, Homo sapien
caaagaactgttctgtttaccagtg

SEQ ID NO: 4996572 - DNA, 25 bp, Homo sapien
actgcgaccccggagttggagcaca

SEQ ID NO: 4996573 - DNA, 25 bp, Homo sapien
gcacactgcgaccccggagttggag

SEQ ID NO: 4996574 - DNA, 25 bp, Homo sapien
acactgcgaccccggagttggagca

SEQ ID NO: 4996575 - DNA, 25 bp, Homo sapien
ctgcgaccccggagttggagcacag

SEQ ID NO: 4996576 - DNA, 25 bp, Homo sapien
gccttggcaggcggccacactggat

SEQ ID NO: 4996577 - DNA, 25 bp, Homo sapien
cactggatctccgacacgcgcagga

SEQ ID NO: 4996578 - DNA, 25 bp, Homo sapien
tctcctcttgctgccgtcccctgag

SEQ ID NO: 4996579 - DNA, 25 bp, Homo sapien
acacgcgcaggacactgcctgtcat

SEQ ID NO: 4996580 - DNA, 25 bp, Homo sapien
cttctccatgacatcttggtgggtc

SEQ ID NO: 4996581 - DNA, 25 bp, Homo sapien
catgggatgatgtttccagatcaga

SEQ ID NO: 4996582 - DNA, 25 bp, Homo sapien
tggatccacccagcggattcttctc

SEQ ID NO: 4996583 - DNA, 25 bp, Homo sapien
tggtgggtctccagacacgcatttg

SEQ ID NO: 4996584 - DNA, 25 bp, Homo sapien
gcacctccagcacatgttttcttta

SEQ ID NO: 4996585 - DNA, 25 bp, Homo sapien
tctttaccatgatctggtccttccc

SEQ ID NO: 4996586 - DNA, 25 bp, Homo sapien
tgtctctgctcctaggggaccttcc

SEQ ID NO: 4996587 - DNA, 25 bp, Homo sapien
ccattaggtgccaagtattgtgggt

SEQ ID NO: 4996588 - DNA, 25 bp, Homo sapien
cggcagctctcgtcatcttaggtgg

SEQ ID NO: 4996589 - DNA, 25 bp, Homo sapien
aactctagtttcagaagaatgcacc

SEQ ID NO: 4996590 - DNA, 25 bp, Homo sapien
aatgcaccaagagggcggcgtcctc

SEQ ID NO: 4996591 - DNA, 25 bp, Homo sapien
ggcgtcctctccagacatgacctgc

SEQ ID NO: 4996592 - DNA, 25 bp, Homo sapien
attttctgtaggctcctaaaaggct

SEQ ID NO: 4996593 - DNA, 25 bp, Homo sapien
cagagctactgagggcatgagaggc

SEQ ID NO: 4996594 - DNA, 25 bp, Homo sapien
tctgtgaaggggtagctgggctgac

SEQ ID NO: 4996595 - DNA, 25 bp, Homo sapien
gtaggctcctaaaaggctctggaag

SEQ ID NO: 4996596 - DNA, 25 bp, Homo sapien
tcagtgtcagccatacggttttggg

SEQ ID NO: 4996597 - DNA, 25 bp, Homo sapien
cattctaacctctgggacggtccac

SEQ ID NO: 4996598 - DNA, 25 bp, Homo sapien
tgggaaccttccgatgacactcagc

SEQ ID NO: 4996599 - DNA, 25 bp, Homo sapien
gacacaactcattcagacaggggct

SEQ ID NO: 4996600 - DNA, 25 bp, Homo sapien
ggagtcttcctttgtgaaaagcatg

SEQ ID NO: 4996601 - DNA, 25 bp, Homo sapien
gatactggacaggattcaggcaccc

SEQ ID NO: 4996602 - DNA, 25 bp, Homo sapien
gcatgaatgctaacgttaggctgct

SEQ ID NO: 4996603 - DNA, 25 bp, Homo sapien
tcacagacattggtgtacccagtaa

SEQ ID NO: 4996604 - DNA, 25 bp, Homo sapien
aatggagagttttgcagtcaggcct

SEQ ID NO: 4996605 - DNA, 25 bp, Homo sapien
ggtatagtcgtatgcgcccaacctt

SEQ ID NO: 4996606 - DNA, 25 bp, Homo sapien
ggtgagcacctaagtgaggccaaga

SEQ ID NO: 4996607 - DNA, 25 bp, Homo sapien
gactctctgtgtgatagactgtgaa

SEQ ID NO: 4996608 - DNA, 25 bp, Homo sapien
tcttctgatgcgtggtcagacacgt

SEQ ID NO: 4996609 - DNA, 25 bp, Homo sapien
tggtcagacacgttatcccttgcgc

SEQ ID NO: 4996610 - DNA, 25 bp, Homo sapien
ggagctggacctacaatcttctgat

SEQ ID NO: 4996611 - DNA, 25 bp, Homo sapien
cctacaatcttctgatgcgtggtca

SEQ ID NO: 4996612 - DNA, 25 bp, Homo sapien
ccagggtagtaccaagctgagtctt

SEQ ID NO: 4996613 - DNA, 25 bp, Homo sapien
gagtgggccgcagagatttgacaac

SEQ ID NO: 4996614 - DNA, 25 bp, Homo sapien
tccctttagccagcatcagaggaca

SEQ ID NO: 4996615 - DNA, 25 bp, Homo sapien
tctcagggctttaccggagatgtct

SEQ ID NO: 4996616 - DNA, 25 bp, Homo sapien
tctccgactttatgaatccctcttg

SEQ ID NO: 4996617 - DNA, 25 bp, Homo sapien
aggtctccgactttatgaatccctc

SEQ ID NO: 4996618 - DNA, 25 bp, Homo sapien
gatcagtttaggtggctcatctgga

SEQ ID NO: 4996619 - DNA, 25 bp, Homo sapien
ttcagatcagtttaggtggctcatc

SEQ ID NO: 4996620 - DNA, 25 bp, Homo sapien
aggggcacttccagatggccaccct

SEQ ID NO: 4996621 - DNA, 25 bp, Homo sapien
ggcacttccagatggccaccctgtg

SEQ ID NO: 4996622 - DNA, 25 bp, Homo sapien
gggtgatctcccagagccagttcca

SEQ ID NO: 4996623 - DNA, 25 bp, Homo sapien
tgtgcatctgtcatcgctggggtga

SEQ ID NO: 4996624 - DNA, 25 bp, Homo sapien
gcccagaggctcagcttcttgccag

SEQ ID NO: 4996625 - DNA, 25 bp, Homo sapien
caaagcccagaggctcagcttcttg

SEQ ID NO: 4996626 - DNA, 25 bp, Homo sapien
tcagtgggcaaagcccagaggctca

SEQ ID NO: 4996627 - DNA, 25 bp, Homo sapien
aaagcccagaggctcagcttcttgc

SEQ ID NO: 4996628 - DNA, 25 bp, Homo sapien
ctgcaaggcaggacaacatgcagca

SEQ ID NO: 4996629 - DNA, 25 bp, Homo sapien
gcaaggcaggacaacatgcagcaaa

SEQ ID NO: 4996630 - DNA, 25 bp, Homo sapien
tgcaaggcaggacaacatgcagcaa

SEQ ID NO: 4996631 - DNA, 25 bp, Homo sapien
caaggcaggacaacatgcagcaaac

SEQ ID NO: 4996632 - DNA, 25 bp, Homo sapien
gcagtgaaatggtcctagcttgaga

SEQ ID NO: 4996633 - DNA, 25 bp, Homo sapien
aatggtcctagcttgagagcctggt

SEQ ID NO: 4996634 - DNA, 25 bp, Homo sapien
tggcttgcagtgaaatggtcctagc

SEQ ID NO: 4996635 - DNA, 25 bp, Homo sapien
ggtccttggcttgcagtgaaatggt

SEQ ID NO: 4996636 - DNA, 25 bp, Homo sapien
tcagggccacagagctcttgtgtct

SEQ ID NO: 4996637 - DNA, 25 bp, Homo sapien
gagctcttgtgtctctggttctgcc

SEQ ID NO: 4996638 - DNA, 25 bp, Homo sapien
agggtcagggccacagagctcttgt

SEQ ID NO: 4996639 - DNA, 25 bp, Homo sapien
gccacagagctcttgtgtctctggt

SEQ ID NO: 4996640 - DNA, 25 bp, Homo sapien
aagacgttccctgaactccggactg

SEQ ID NO: 4996641 - DNA, 25 bp, Homo sapien
gagtggcttggcctaagacgttccc

SEQ ID NO: 4996642 - DNA, 25 bp, Homo sapien
ggcttggcctaagacgttccctgaa

SEQ ID NO: 4996643 - DNA, 25 bp, Homo sapien
tgaactccggactgcaggctgatgg

SEQ ID NO: 4996644 - DNA, 25 bp, Homo sapien
gatctgaaggttcacttgcctttct

SEQ ID NO: 4996645 - DNA, 25 bp, Homo sapien
gaaggttcacttgcctttctaggcc

SEQ ID NO: 4996646 - DNA, 25 bp, Homo sapien
gcatgatctgaaggttcacttgcct

SEQ ID NO: 4996647 - DNA, 25 bp, Homo sapien
cccagcatgatctgaaggttcactt

SEQ ID NO: 4996648 - DNA, 25 bp, Homo sapien
gagcagtggtcattgttgctttagg

SEQ ID NO: 4996649 - DNA, 25 bp, Homo sapien
agtggtcattgttgctttaggtttt

SEQ ID NO: 4996650 - DNA, 25 bp, Homo sapien
atggtaagagcagtggtcattgttg

SEQ ID NO: 4996651 - DNA, 25 bp, Homo sapien
gcagtggtcattgttgctttaggtt

SEQ ID NO: 4996652 - DNA, 25 bp, Homo sapien
actgagcccatgtcatgtatgctga

SEQ ID NO: 4996653 - DNA, 25 bp, Homo sapien
tgtatgctgacatccacgtgcctgc

SEQ ID NO: 4996654 - DNA, 25 bp, Homo sapien
tgcttcaaggctgtgatccactgag

SEQ ID NO: 4996655 - DNA, 25 bp, Homo sapien
tgtgatccactgagcccatgtcatg

SEQ ID NO: 4996656 - DNA, 25 bp, Homo sapien
cctaggcactcatttagctgaatgt

SEQ ID NO: 4996657 - DNA, 25 bp, Homo sapien
agatttctccctaggcactcattta

SEQ ID NO: 4996658 - DNA, 25 bp, Homo sapien
aaccattttccagatttctccctag

SEQ ID NO: 4996659 - DNA, 25 bp, Homo sapien
tgaatgtttacacagctgctattac

SEQ ID NO: 4996660 - DNA, 25 bp, Homo sapien
cttcagattccatgaactccacagc

SEQ ID NO: 4996661 - DNA, 25 bp, Homo sapien
cgcctaaagttacttacagacctca

SEQ ID NO: 4996662 - DNA, 25 bp, Homo sapien
atgactccactctgaagtcgcctaa

SEQ ID NO: 4996663 - DNA, 25 bp, Homo sapien
gaagtcgcctaaagttacttacaga

SEQ ID NO: 4996664 - DNA, 25 bp, Homo sapien
ccactctgaagtcgcctaaagttac

SEQ ID NO: 4996665 - DNA, 25 bp, Homo sapien
tagatcggcacagcctcacaagaac

SEQ ID NO: 4996666 - DNA, 25 bp, Homo sapien
ccactcctggcagggatgtagctgt

SEQ ID NO: 4996667 - DNA, 25 bp, Homo sapien
caggtgggtcgtttctaggcctcca

SEQ ID NO: 4996668 - DNA, 25 bp, Homo sapien
cactcaggatagatcggcacagcct

SEQ ID NO: 4996669 - DNA, 25 bp, Homo sapien
agggcgagccgatccttcagttgca

SEQ ID NO: 4996670 - DNA, 25 bp, Homo sapien
ctgcaaatgagggcgagccgatcct

SEQ ID NO: 4996671 - DNA, 25 bp, Homo sapien
tgagggcgagccgatccttcagttg

SEQ ID NO: 4996672 - DNA, 25 bp, Homo sapien
aaatgagggcgagccgatccttcag

SEQ ID NO: 4996673 - DNA, 25 bp, Homo sapien
gcttcatagaacatcactattccca

SEQ ID NO: 4996674 - DNA, 25 bp, Homo sapien
catagaacatcactattcccaagaa

SEQ ID NO: 4996675 - DNA, 25 bp, Homo sapien
tagaacatcactattcccaagaaat

SEQ ID NO: 4996676 - DNA, 25 bp, Homo sapien
gttctgcttcatagaacatcactat

SEQ ID NO: 4996677 - DNA, 25 bp, Homo sapien
ccccactctggtactggcttttctt

SEQ ID NO: 4996678 - DNA, 25 bp, Homo sapien
tgaaagatagcattggtccatattg

SEQ ID NO: 4996679 - DNA, 25 bp, Homo sapien
catattgtttggaggaaaacttaat

SEQ ID NO: 4996680 - DNA, 25 bp, Homo sapien
caggataacctctgctattggataa

SEQ ID NO: 4996681 - DNA, 25 bp, Homo sapien
tgactggaccaatccaaaaagaaca

SEQ ID NO: 4996682 - DNA, 25 bp, Homo sapien
aagtgactggaccaatccaaaaaga

SEQ ID NO: 4996683 - DNA, 25 bp, Homo sapien
gaaaagtgactggaccaatccaaaa

SEQ ID NO: 4996684 - DNA, 25 bp, Homo sapien
agaaaagtgactggaccaatccaaa

SEQ ID NO: 4996685 - DNA, 25 bp, Homo sapien
gagccagctcgccatatcttctcct

SEQ ID NO: 4996686 - DNA, 25 bp, Homo sapien
ttggatttgaggctcctcccctcca

SEQ ID NO: 4996687 - DNA, 25 bp, Homo sapien
gctccagcgagtggcagtggagctg

SEQ ID NO: 4996688 - DNA, 25 bp, Homo sapien
tcttccattgcagattggatttgag

SEQ ID NO: 4996689 - DNA, 25 bp, Homo sapien
attcaacattctcttacacaaccaa

SEQ ID NO: 4996690 - DNA, 25 bp, Homo sapien
catgattacctttgcaacttttatt

SEQ ID NO: 4996691 - DNA, 25 bp, Homo sapien
tataagtattcaacattctcttaca

SEQ ID NO: 4996692 - DNA, 25 bp, Homo sapien
cattctcttacacaaccaaactgac

SEQ ID NO: 4996693 - DNA, 25 bp, Homo sapien
cacaggtctacattctctttaaaac

SEQ ID NO: 4996694 - DNA, 25 bp, Homo sapien
caattgagtgacttctgtctgcttt

SEQ ID NO: 4996695 - DNA, 25 bp, Homo sapien
gtcttacccacccaagagaatggca

SEQ ID NO: 4996696 - DNA, 25 bp, Homo sapien
tgctgctgcacgtgaatacactttg

SEQ ID NO: 4996697 - DNA, 25 bp, Homo sapien
agattctttttggccaaacgcaccg

SEQ ID NO: 4996698 - DNA, 25 bp, Homo sapien
cagcgctatggtacagaatactgta

SEQ ID NO: 4996699 - DNA, 25 bp, Homo sapien
taagagcagcgctatggtacagaat

SEQ ID NO: 4996700 - DNA, 25 bp, Homo sapien
tggcataagagcagcgctatggtac

SEQ ID NO: 4996701 - DNA, 25 bp, Homo sapien
tgctgcagcaacacgcggaaaaagt

SEQ ID NO: 4996702 - DNA, 25 bp, Homo sapien
atgggaggctcctcggaccgccttt

SEQ ID NO: 4996703 - DNA, 25 bp, Homo sapien
ctcttgttgaggttccccaggcgga

SEQ ID NO: 4996704 - DNA, 25 bp, Homo sapien
ttgctgtgctaactgctcggccctg

SEQ ID NO: 4996705 - DNA, 25 bp, Homo sapien
ttaaggaatagtccgcgaacacgcg

SEQ ID NO: 4996706 - DNA, 25 bp, Homo sapien
ctggcagcacgggtaacgaagagca

SEQ ID NO: 4996707 - DNA, 25 bp, Homo sapien
gcagctcaggcaacgcaaagttggt

SEQ ID NO: 4996708 - DNA, 25 bp, Homo sapien
aaagttggtggcgtgttccgtccag

SEQ ID NO: 4996709 - DNA, 25 bp, Homo sapien
tctcttgacagctcgattgcgtgct

SEQ ID NO: 4996710 - DNA, 25 bp, Homo sapien
tcctgcataaatcatagggccctgc

SEQ ID NO: 4996711 - DNA, 25 bp, Homo sapien
tagtgtcgaccctcttcaaaaacca

SEQ ID NO: 4996712 - DNA, 25 bp, Homo sapien
catttgcctaataagctgacgctct

SEQ ID NO: 4996713 - DNA, 25 bp, Homo sapien
gctgcttcctttgtagctaatgtga

SEQ ID NO: 4996714 - DNA, 25 bp, Homo sapien
gctaatgtgacaaatgatgcaatgc

SEQ ID NO: 4996715 - DNA, 25 bp, Homo sapien
tcagagttgtttatcggaaatttcc

SEQ ID NO: 4996716 - DNA, 25 bp, Homo sapien
gggtctataccaatccacaactgct

SEQ ID NO: 4996717 - DNA, 25 bp, Homo sapien
cagctcgtggtgaacaaacaccatc

SEQ ID NO: 4996718 - DNA, 25 bp, Homo sapien
catctccaagttggctaacagaaac

SEQ ID NO: 4996719 - DNA, 25 bp, Homo sapien
cttcacaagcttctattagcacagc

SEQ ID NO: 4996720 - DNA, 25 bp, Homo sapien
gaatctactgtttccaatgagagcc

SEQ ID NO: 4996721 - DNA, 25 bp, Homo sapien
tcagcacccatgagtcatcactgag

SEQ ID NO: 4996722 - DNA, 25 bp, Homo sapien
cagccacatcgctgtccacggtttg

SEQ ID NO: 4996723 - DNA, 25 bp, Homo sapien
gtcagcacccatgagtcatcactga

SEQ ID NO: 4996724 - DNA, 25 bp, Homo sapien
acatcgctgtccacggtttggtggg

SEQ ID NO: 4996725 - DNA, 25 bp, Homo sapien
ttttccataagttgagaagtaactg

SEQ ID NO: 4996726 - DNA, 25 bp, Homo sapien
tttccataagttgagaagtaactga

SEQ ID NO: 4996727 - DNA, 25 bp, Homo sapien
gactttgttacctgtgcatctattt

SEQ ID NO: 4996728 - DNA, 25 bp, Homo sapien
gagaaaatggcaaggactttgttac

SEQ ID NO: 4996729 - DNA, 25 bp, Homo sapien
ctcttctgtaaaaaccatgctcaac

SEQ ID NO: 4996730 - DNA, 25 bp, Homo sapien
ccatagtaattcttctgtttgctgc

SEQ ID NO: 4996731 - DNA, 25 bp, Homo sapien
aattttaatccttacacctcttctg

SEQ ID NO: 4996732 - DNA, 25 bp, Homo sapien
ctgggtttccttcatcaattttaat

SEQ ID NO: 4996733 - DNA, 25 bp, Homo sapien
ccgtggactgggagccaattgaact

SEQ ID NO: 4996734 - DNA, 25 bp, Homo sapien
caagttagtggcaatggccgtggac

SEQ ID NO: 4996735 - DNA, 25 bp, Homo sapien
gaacccactgtggatgcaggacatc

SEQ ID NO: 4996736 - DNA, 25 bp, Homo sapien
catgttaccaatgtcgtcacgctga

SEQ ID NO: 4996737 - DNA, 25 bp, Homo sapien
ttgaggatcagtccaagaggcccca

SEQ ID NO: 4996738 - DNA, 25 bp, Homo sapien
cacatctgatcaataggagtgacaa

SEQ ID NO: 4996739 - DNA, 25 bp, Homo sapien
tgagcccgaaattctaatagtaggt

SEQ ID NO: 4996740 - DNA, 25 bp, Homo sapien
gaattatcgcaaaggattgtcccag

SEQ ID NO: 4996741 - DNA, 25 bp, Homo sapien
tacccaagtgctcaagttgacaact

SEQ ID NO: 4996742 - DNA, 25 bp, Homo sapien
catcagccacactaggtcagagaag

SEQ ID NO: 4996743 - DNA, 25 bp, Homo sapien
gaacttcaaccagcatcagacctct

SEQ ID NO: 4996744 - DNA, 25 bp, Homo sapien
tctgggattcatgccttgggtggtt

SEQ ID NO: 4996745 - DNA, 25 bp, Homo sapien
cccacgtgggtccatgaattttgta

SEQ ID NO: 4996746 - DNA, 25 bp, Homo sapien
tagtgcctggacattatgaagaaag

SEQ ID NO: 4996747 - DNA, 25 bp, Homo sapien
catgactggagatatggaattagcc

SEQ ID NO: 4996748 - DNA, 25 bp, Homo sapien
caataaaacactataccccacgtgg

SEQ ID NO: 4996749 - DNA, 25 bp, Homo sapien
tcttaacagtttcaaggtcaagctc

SEQ ID NO: 4996750 - DNA, 25 bp, Homo sapien
gattacagcccaatgacaaatgtag

SEQ ID NO: 4996751 - DNA, 25 bp, Homo sapien
ccagtctagatgtcaaccagtgttg

SEQ ID NO: 4996752 - DNA, 25 bp, Homo sapien
cctgtggaatggagagttactgatc

SEQ ID NO: 4996753 - DNA, 25 bp, Homo sapien
tgagaccatttagaccccaactgag

SEQ ID NO: 4996754 - DNA, 25 bp, Homo sapien
tccaaagggcactggatgagaccat

SEQ ID NO: 4996755 - DNA, 25 bp, Homo sapien
caagtcgtgatgagacactcctgca

SEQ ID NO: 4996756 - DNA, 25 bp, Homo sapien
acacagtgtgcagcatccaaagggc

SEQ ID NO: 4996757 - DNA, 25 bp, Homo sapien
gaactccaggaacactcttgagatg

SEQ ID NO: 4996758 - DNA, 25 bp, Homo sapien
ctccaggaacactcttgagatgcca

SEQ ID NO: 4996759 - DNA, 25 bp, Homo sapien
gagtgggaactccaggaacactctt

SEQ ID NO: 4996760 - DNA, 25 bp, Homo sapien
gggaactccaggaacactcttgaga

SEQ ID NO: 4996761 - DNA, 25 bp, Homo sapien
cactcaagttacctgcatcaaactc

SEQ ID NO: 4996762 - DNA, 25 bp, Homo sapien
ctgcatcaaactcatgcttggtgct

SEQ ID NO: 4996763 - DNA, 25 bp, Homo sapien
ttacctgcatcaaactcatgcttgg

SEQ ID NO: 4996764 - DNA, 25 bp, Homo sapien
tcaagttacctgcatcaaactcatg

SEQ ID NO: 4996765 - DNA, 25 bp, Homo sapien
tactccaagtggatctgccacatgg

SEQ ID NO: 4996766 - DNA, 25 bp, Homo sapien
tgccacatgggtaattgcagcctcg

SEQ ID NO: 4996767 - DNA, 25 bp, Homo sapien
tccatgaaacactggacagagctta

SEQ ID NO: 4996768 - DNA, 25 bp, Homo sapien
gcctcgtagcaaccttgtgaagtca

SEQ ID NO: 4996769 - DNA, 25 bp, Homo sapien
tatgggtccacttagcaatagctac

SEQ ID NO: 4996770 - DNA, 25 bp, Homo sapien
cagatggctgagtatttaaagaagc

SEQ ID NO: 4996771 - DNA, 25 bp, Homo sapien
tttctacctgaaatccagagcccca

SEQ ID NO: 4996772 - DNA, 25 bp, Homo sapien
cagaagtaattctgcagaatcctgc

SEQ ID NO: 4996773 - DNA, 25 bp, Homo sapien
caaatatggtctagagaaatccgaa

SEQ ID NO: 4996774 - DNA, 25 bp, Homo sapien
tcttcctcggagattgtgtcccatt

SEQ ID NO: 4996775 - DNA, 25 bp, Homo sapien
tctgctccttgggtagaatttagaa

SEQ ID NO: 4996776 - DNA, 25 bp, Homo sapien
cacagccgattcaattcagcagcag

SEQ ID NO: 4996777 - DNA, 25 bp, Homo sapien
ttgattagaagtagcactcgaaccc

SEQ ID NO: 4996778 - DNA, 25 bp, Homo sapien
tatgcctcccaacagttctatgagg

SEQ ID NO: 4996779 - DNA, 25 bp, Homo sapien
taggactatgtgactctgaaagaac

SEQ ID NO: 4996780 - DNA, 25 bp, Homo sapien
gaccactatcgggttccaaagctta

SEQ ID NO: 4996781 - DNA, 25 bp, Homo sapien
tgatgtacaatgcacttttaggcag

SEQ ID NO: 4996782 - DNA, 25 bp, Homo sapien
tttaggcagtctataaatggcactg

SEQ ID NO: 4996783 - DNA, 25 bp, Homo sapien
gctgcgtcttttgagcaattcacct

SEQ ID NO: 4996784 - DNA, 25 bp, Homo sapien
gataagacaggaccaagtcacagct

SEQ ID NO: 4996785 - DNA, 25 bp, Homo sapien
tatccaagagtctccagcaagtgtt

SEQ ID NO: 4996786 - DNA, 25 bp, Homo sapien
tctacaatgttgtgtgaggcacgca

SEQ ID NO: 4996787 - DNA, 25 bp, Homo sapien
ggataacaaacaccatgggaaaggc

SEQ ID NO: 4996788 - DNA, 25 bp, Homo sapien
gctgctagatgcaaaccctgctcag

SEQ ID NO: 4996789 - DNA, 25 bp, Homo sapien
ttctgatgcgaagacatctcttttc

SEQ ID NO: 4996790 - DNA, 25 bp, Homo sapien
ttcctcattagtaaccaatctgctt

SEQ ID NO: 4996791 - DNA, 25 bp, Homo sapien
aaaccattctgatgcgaagacatct

SEQ ID NO: 4996792 - DNA, 25 bp, Homo sapien
gacagtgcctcacagtttgcatcca

SEQ ID NO: 4996793 - DNA, 25 bp, Homo sapien
tcccagtgctcaggacagcctgagc

SEQ ID NO: 4996794 - DNA, 25 bp, Homo sapien
aatggttaccggcactgatgggaaa

SEQ ID NO: 4996795 - DNA, 25 bp, Homo sapien
tccccggaatggttaccggcactga

SEQ ID NO: 4996796 - DNA, 25 bp, Homo sapien
ctcccagtgctcaggacagcctgag

SEQ ID NO: 4996797 - DNA, 25 bp, Homo sapien
tgtcagaatgccctaaggtgcctgt

SEQ ID NO: 4996798 - DNA, 25 bp, Homo sapien
gccaagttctaacagcgctaagcga

SEQ ID NO: 4996799 - DNA, 25 bp, Homo sapien
tcctcgagcaagataagatgtgtgc

SEQ ID NO: 4996800 - DNA, 25 bp, Homo sapien
tgctcaggaatgtatgggaaacacc

SEQ ID NO: 4996801 - DNA, 25 bp, Homo sapien
tttatgccccaggcaccaacgctgt

SEQ ID NO: 4996802 - DNA, 25 bp, Homo sapien
tacactaagaattgcacagaactgg

SEQ ID NO: 4996803 - DNA, 25 bp, Homo sapien
atgattgaatttggtctccctccag

SEQ ID NO: 4996804 - DNA, 25 bp, Homo sapien
caggaggcagacttgtcatgtgctg

SEQ ID NO: 4996805 - DNA, 25 bp, Homo sapien
cagcatagagtcccattccatcact

SEQ ID NO: 4996806 - DNA, 25 bp, Homo sapien
agcatagagtcccattccatcactg

SEQ ID NO: 4996807 - DNA, 25 bp, Homo sapien
tactttacacagattcaggaagcag

SEQ ID NO: 4996808 - DNA, 25 bp, Homo sapien
tcacagttacccacacggcaagatc

SEQ ID NO: 4996809 - DNA, 25 bp, Homo sapien
gggctgtcagtcaatgttctctgca

SEQ ID NO: 4996810 - DNA, 25 bp, Homo sapien
gagatccgaggtctgagttgtgcct

SEQ ID NO: 4996811 - DNA, 25 bp, Homo sapien
agaagagcaccatcaacaagccctg

SEQ ID NO: 4996812 - DNA, 25 bp, Homo sapien
ctcagaagagcaccatcaacaagcc

SEQ ID NO: 4996813 - DNA, 25 bp, Homo sapien
gaagagcaccatcaacaagccctgt

SEQ ID NO: 4996814 - DNA, 25 bp, Homo sapien
gagcaccatcaacaagccctgtaga

SEQ ID NO: 4996815 - DNA, 25 bp, Homo sapien
agaagtgtgagagcaaattgtcgtt

SEQ ID NO: 4996816 - DNA, 25 bp, Homo sapien
tattgtataatccaacagaatcaac

SEQ ID NO: 4996817 - DNA, 25 bp, Homo sapien
gacattctcattgaatgcattgaga

SEQ ID NO: 4996818 - DNA, 25 bp, Homo sapien
tgcaggtggctaggcagtatttact

SEQ ID NO: 4996819 - DNA, 25 bp, Homo sapien
taaattccctcactgttgagttctg

SEQ ID NO: 4996820 - DNA, 25 bp, Homo sapien
ggaggtaaattccctcactgttgag

SEQ ID NO: 4996821 - DNA, 25 bp, Homo sapien
ctcactgttgagttctggtcagcaa

SEQ ID NO: 4996822 - DNA, 25 bp, Homo sapien
aaattccctcactgttgagttctgg

SEQ ID NO: 4996823 - DNA, 25 bp, Homo sapien
atctcagacaccacagccatcacca

SEQ ID NO: 4996824 - DNA, 25 bp, Homo sapien
ccacatctcagacaccacagccatc

SEQ ID NO: 4996825 - DNA, 25 bp, Homo sapien
tctcagacaccacagccatcaccat

SEQ ID NO: 4996826 - DNA, 25 bp, Homo sapien
acatctcagacaccacagccatcac

SEQ ID NO: 4996827 - DNA, 25 bp, Homo sapien
gtttcatgttaggtttttagcagcc

SEQ ID NO: 4996828 - DNA, 25 bp, Homo sapien
tcatgttaggtttttagcagcctga

SEQ ID NO: 4996829 - DNA, 25 bp, Homo sapien
tgtttcatgttaggtttttagcagc

SEQ ID NO: 4996830 - DNA, 25 bp, Homo sapien
ttcatgttaggtttttagcagcctg

SEQ ID NO: 4996831 - DNA, 25 bp, Homo sapien
tctggatcgtgatgaggctgtgcca

SEQ ID NO: 4996832 - DNA, 25 bp, Homo sapien
gggcacttggtaaattgtgaatgta

SEQ ID NO: 4996833 - DNA, 25 bp, Homo sapien
agagccggtgccctcttgggcactt

SEQ ID NO: 4996834 - DNA, 25 bp, Homo sapien
ccaagcttctgctaagggggaatcc

SEQ ID NO: 4996835 - DNA, 25 bp, Homo sapien
tgtacagttgtgaggcgcttctcct

SEQ ID NO: 4996836 - DNA, 25 bp, Homo sapien
gtgtggccaaatccctctgcaatct

SEQ ID NO: 4996837 - DNA, 25 bp, Homo sapien
cagagaggtcaaagcattttcctgt

SEQ ID NO: 4996838 - DNA, 25 bp, Homo sapien
gagttgaaaacaatacagcaggctt

SEQ ID NO: 4996839 - DNA, 25 bp, Homo sapien
caatcattgacgcagatggtgggat

SEQ ID NO: 4996840 - DNA, 25 bp, Homo sapien
aactggactgaatcttcctcaattg

SEQ ID NO: 4996841 - DNA, 25 bp, Homo sapien
tgtcctccaatcattgacgcagatg

SEQ ID NO: 4996842 - DNA, 25 bp, Homo sapien
tgactgacataactggactgaatct

SEQ ID NO: 4996843 - DNA, 25 bp, Homo sapien
gtgctcctgggcttctgtagattct

SEQ ID NO: 4996844 - DNA, 25 bp, Homo sapien
cagcccaggtcacggccacacctgt

SEQ ID NO: 4996845 - DNA, 25 bp, Homo sapien
tgtagattctctaacacgtctttct

SEQ ID NO: 4996846 - DNA, 25 bp, Homo sapien
gtcatgaagtctgcaccgtgtggct

SEQ ID NO: 4996847 - DNA, 25 bp, Homo sapien
tacaagttagcagggcaattactct

SEQ ID NO: 4996848 - DNA, 25 bp, Homo sapien
gaaagctgaaaagacttacaagtta

SEQ ID NO: 4996849 - DNA, 25 bp, Homo sapien
ggtgaaggaaagctgaaaagactta

SEQ ID NO: 4996850 - DNA, 25 bp, Homo sapien
gaaaagacttacaagttagcagggc

SEQ ID NO: 4996851 - DNA, 25 bp, Homo sapien
caccactgaagctttctatccctgc

SEQ ID NO: 4996852 - DNA, 25 bp, Homo sapien
agcaccactgaagctttctatccct

SEQ ID NO: 4996853 - DNA, 25 bp, Homo sapien
tctgctgtcttgggatatgccattg

SEQ ID NO: 4996854 - DNA, 25 bp, Homo sapien
tgctgtcttgggatatgccattgct

SEQ ID NO: 4996855 - DNA, 25 bp, Homo sapien
taaccaggtggcaagtggctagctt

SEQ ID NO: 4996856 - DNA, 25 bp, Homo sapien
ctggagctcccttctttaaacgtgg

SEQ ID NO: 4996857 - DNA, 25 bp, Homo sapien
tagcatattcaggtataaccaggtg

SEQ ID NO: 4996858 - DNA, 25 bp, Homo sapien
tgcaaactcacaaggagtcatgcct

SEQ ID NO: 4996859 - DNA, 25 bp, Homo sapien
tacgctgaatggaacaaaggctgtc

SEQ ID NO: 4996860 - DNA, 25 bp, Homo sapien
gagagcaggctcacattctttagga

SEQ ID NO: 4996861 - DNA, 25 bp, Homo sapien
gtcaggagcacaatactagaggccc

SEQ ID NO: 4996862 - DNA, 25 bp, Homo sapien
tagaggcccttcatcttacgctgaa

SEQ ID NO: 4996863 - DNA, 25 bp, Homo sapien
catggctggggaggctttagaaagc

SEQ ID NO: 4996864 - DNA, 25 bp, Homo sapien
gggaggctttagaaagcttacaatc

SEQ ID NO: 4996865 - DNA, 25 bp, Homo sapien
tggctggggaggctttagaaagctt

SEQ ID NO: 4996866 - DNA, 25 bp, Homo sapien
gctggggaggctttagaaagcttac

SEQ ID NO: 4996867 - DNA, 25 bp, Homo sapien
tgtttgtaagagtggactaaggtct

SEQ ID NO: 4996868 - DNA, 25 bp, Homo sapien
gcagagagactcaattgtttgtaag

SEQ ID NO: 4996869 - DNA, 25 bp, Homo sapien
gactgctgccctagtgtaatgccca

SEQ ID NO: 4996870 - DNA, 25 bp, Homo sapien
ttcttcagctgacaaagtggcaaaa

SEQ ID NO: 4996871 - DNA, 25 bp, Homo sapien
agggaaccacggcttttctgatgca

SEQ ID NO: 4996872 - DNA, 25 bp, Homo sapien
tgcctcttttaggtcacagggaacc

SEQ ID NO: 4996873 - DNA, 25 bp, Homo sapien
ttctgatgcagtcaatcaacttgga

SEQ ID NO: 4996874 - DNA, 25 bp, Homo sapien
tgtgcagcaggagctaaggctgtat

SEQ ID NO: 4996875 - DNA, 25 bp, Homo sapien
ggtctgtatcttaattgagatggta

SEQ ID NO: 4996876 - DNA, 25 bp, Homo sapien
ccagtggtctgtatcttaattgaga

SEQ ID NO: 4996877 - DNA, 25 bp, Homo sapien
tattatatgagcatatgcatttgtc

SEQ ID NO: 4996878 - DNA, 25 bp, Homo sapien
gatggtattatatgagcatatgcat

SEQ ID NO: 4996879 - DNA, 25 bp, Homo sapien
ggagtgtatgtcaaaacccaccatt

SEQ ID NO: 4996880 - DNA, 25 bp, Homo sapien
tgtcgctccaacaaatagtgtccgt

SEQ ID NO: 4996881 - DNA, 25 bp, Homo sapien
gatttagtctagcactgcggcagcc

SEQ ID NO: 4996882 - DNA, 25 bp, Homo sapien
taactattgtggtaccaagaacact

SEQ ID NO: 4996883 - DNA, 25 bp, Homo sapien
cttctcttttatggtggctgtgaat

SEQ ID NO: 4996884 - DNA, 25 bp, Homo sapien
gtataatctgtattgaccttttctg

SEQ ID NO: 4996885 - DNA, 25 bp, Homo sapien
tgaaagcatggagaaggtgtttgcc

SEQ ID NO: 4996886 - DNA, 25 bp, Homo sapien
tctctttactgggataatttagctg

SEQ ID NO: 4996887 - DNA, 25 bp, Homo sapien
ttgttccttcagtgcggacaccctg

SEQ ID NO: 4996888 - DNA, 25 bp, Homo sapien
agcctagctgctcatccgcccaacg

SEQ ID NO: 4996889 - DNA, 25 bp, Homo sapien
aggcttgttccttcagtgcggacac

SEQ ID NO: 4996890 - DNA, 25 bp, Homo sapien
cgatccgtgactgggctacttggtg

SEQ ID NO: 4996891 - DNA, 25 bp, Homo sapien
tagaatataagtaccacagagagca

SEQ ID NO: 4996892 - DNA, 25 bp, Homo sapien
acatagtactgttgccatgagggca

SEQ ID NO: 4996893 - DNA, 25 bp, Homo sapien
tgtgtcaaagaagcgttgttcatgc

SEQ ID NO: 4996894 - DNA, 25 bp, Homo sapien
gagggcaatattaacgagtcaacac

SEQ ID NO: 4996895 - DNA, 25 bp, Homo sapien
ggtaactctctgtagagttagttgc

SEQ ID NO: 4996896 - DNA, 25 bp, Homo sapien
gctcccctgatgattgagtgattaa

SEQ ID NO: 4996897 - DNA, 25 bp, Homo sapien
aactctctgtagagttagttgctcc

SEQ ID NO: 4996898 - DNA, 25 bp, Homo sapien
gaggcagttatggagggtaactctc

SEQ ID NO: 4996899 - DNA, 25 bp, Homo sapien
ctcttacactgctatgctgaacttc

SEQ ID NO: 4996900 - DNA, 25 bp, Homo sapien
cttacactgctatgctgaacttctt

SEQ ID NO: 4996901 - DNA, 25 bp, Homo sapien
ttctcttacactgctatgctgaact

SEQ ID NO: 4996902 - DNA, 25 bp, Homo sapien
aattctcttacactgctatgctgaa

SEQ ID NO: 4996903 - DNA, 25 bp, Homo sapien
atatcacccgggcaacatcagtcct

SEQ ID NO: 4996904 - DNA, 25 bp, Homo sapien
tataaacagctaccataatgccagg

SEQ ID NO: 4996905 - DNA, 25 bp, Homo sapien
tcagtcctaccctgaattggagagg

SEQ ID NO: 4996906 - DNA, 25 bp, Homo sapien
cctaaagaggtttactgtctaccag

SEQ ID NO: 4996907 - DNA, 25 bp, Homo sapien
ttccataaagggtctttgacaaggc

SEQ ID NO: 4996908 - DNA, 25 bp, Homo sapien
ctgcccccgcaggaacttgtttctt

SEQ ID NO: 4996909 - DNA, 25 bp, Homo sapien
gaatacaagctgtgcgggtagcaga

SEQ ID NO: 4996910 - DNA, 25 bp, Homo sapien
tcacatcagtataatgaatacaagc

SEQ ID NO: 4996911 - DNA, 25 bp, Homo sapien
gtgaaatcctggaggatcaatatca

SEQ ID NO: 4996912 - DNA, 25 bp, Homo sapien
aataaggcttgactgtggttcctgc

SEQ ID NO: 4996913 - DNA, 25 bp, Homo sapien
tggaggatcaatatcatcctccaaa

SEQ ID NO: 4996914 - DNA, 25 bp, Homo sapien
aaaatgtataataaggcttgactgt

SEQ ID NO: 4996915 - DNA, 25 bp, Homo sapien
gagcctttcctgggtatgacagcat

SEQ ID NO: 4996916 - DNA, 25 bp, Homo sapien
gaattaaggtcctctgactcctgta

SEQ ID NO: 4996917 - DNA, 25 bp, Homo sapien
agtttcaggatttgagcagctaagc

SEQ ID NO: 4996918 - DNA, 25 bp, Homo sapien
tgtaccttcagtggaccaatgacag

SEQ ID NO: 4996919 - DNA, 25 bp, Homo sapien
gtctcactttcccaatgtacttagg

SEQ ID NO: 4996920 - DNA, 25 bp, Homo sapien
tatgccaagttaattaagctaggcc

SEQ ID NO: 4996921 - DNA, 25 bp, Homo sapien
tacatgagatccctagaatagtcac

SEQ ID NO: 4996922 - DNA, 25 bp, Homo sapien
tggtggtggctatgcaatgagaaca

SEQ ID NO: 4996923 - DNA, 25 bp, Homo sapien
tgagaacatacgtaatgccactaaa

SEQ ID NO: 4996924 - DNA, 25 bp, Homo sapien
gctgtggctgctttaccagctccac

SEQ ID NO: 4996925 - DNA, 25 bp, Homo sapien
tgtggctgctttaccagctccacca

SEQ ID NO: 4996926 - DNA, 25 bp, Homo sapien
ctgtctcttgcttagggccactact

SEQ ID NO: 4996927 - DNA, 25 bp, Homo sapien
gggccactactaagtgctctcttgt

SEQ ID NO: 4996928 - DNA, 25 bp, Homo sapien
tataactggttactcagagaaacac

SEQ ID NO: 4996929 - DNA, 25 bp, Homo sapien
gaaagtcctcacaaagtataactgg

SEQ ID NO: 4996930 - DNA, 25 bp, Homo sapien
gaaacacaccagacacttgaaagga

SEQ ID NO: 4996931 - DNA, 25 bp, Homo sapien
tgtggccgttgtggctagcgctcct

SEQ ID NO: 4996932 - DNA, 25 bp, Homo sapien
ctggtggacgaagaccactgctgag

SEQ ID NO: 4996933 - DNA, 25 bp, Homo sapien
tgctgaggctgaccaaatactgtag

SEQ ID NO: 4996934 - DNA, 25 bp, Homo sapien
gctttggccttgcttctggcgctgg

SEQ ID NO: 4996935 - DNA, 25 bp, Homo sapien
caaatactgtagtcagaggagcagg

SEQ ID NO: 4996936 - DNA, 25 bp, Homo sapien
ggcccatgcatgtctctcaattaca

SEQ ID NO: 4996937 - DNA, 25 bp, Homo sapien
ccctggcccatgcatgtctctcaat

SEQ ID NO: 4996938 - DNA, 25 bp, Homo sapien
ctccctggcccatgcatgtctctca

SEQ ID NO: 4996939 - DNA, 25 bp, Homo sapien
ctggcccatgcatgtctctcaatta

SEQ ID NO: 4996940 - DNA, 25 bp, Homo sapien
cctggctctcaatagatagtttaca

SEQ ID NO: 4996941 - DNA, 25 bp, Homo sapien
cataaaccctctggttcaggaaaga

SEQ ID NO: 4996942 - DNA, 25 bp, Homo sapien
agaactattttggtgaaaccacaga

SEQ ID NO: 4996943 - DNA, 25 bp, Homo sapien
gaaatggcagggcaaatactcaaaa

SEQ ID NO: 4996944 - DNA, 25 bp, Homo sapien
tccaaatagtcaggccttgctgggt

SEQ ID NO: 4996945 - DNA, 25 bp, Homo sapien
ggtaatcaggccaaaagtcccaaga

SEQ ID NO: 4996946 - DNA, 25 bp, Homo sapien
gagataaagtgactggccaaagcca

SEQ ID NO: 4996947 - DNA, 25 bp, Homo sapien
tactttgagccgaaggatactggaa

SEQ ID NO: 4996948 - DNA, 25 bp, Homo sapien
aaggaggactatcatgacatgtgac

SEQ ID NO: 4996949 - DNA, 25 bp, Homo sapien
ttccgctaccaaaaagaggcaactg

SEQ ID NO: 4996950 - DNA, 25 bp, Homo sapien
ataatgtaagcatttcaagggccct

SEQ ID NO: 4996951 - DNA, 25 bp, Homo sapien
ttttataaactatgctcacagcagg

SEQ ID NO: 4996952 - DNA, 25 bp, Homo sapien
ttctctgggcactgtatagtcttgc

SEQ ID NO: 4996953 - DNA, 25 bp, Homo sapien
gcctgctttctctgggcactgtata

SEQ ID NO: 4996954 - DNA, 25 bp, Homo sapien
cctggccagagcctgctttctctgg

SEQ ID NO: 4996955 - DNA, 25 bp, Homo sapien
cacgcctggccagagcctgctttct

SEQ ID NO: 4996956 - DNA, 25 bp, Homo sapien
gccctctgccggcctttcctctggt

SEQ ID NO: 4996957 - DNA, 25 bp, Homo sapien
cgccctctgccggcctttcctctgg

SEQ ID NO: 4996958 - DNA, 25 bp, Homo sapien
ggccgctgccttcattgagtttaaa

SEQ ID NO: 4996959 - DNA, 25 bp, Homo sapien
gacaggattgcccttccgtcaagaa

SEQ ID NO: 4996960 - DNA, 25 bp, Homo sapien
caagtttgtgtatcagagcgggagt

SEQ ID NO: 4996961 - DNA, 25 bp, Homo sapien
tatacggcgaggtagagttggccat

SEQ ID NO: 4996962 - DNA, 25 bp, Homo sapien
ggtggatggtgcgagcgccgctggg

SEQ ID NO: 4996963 - DNA, 25 bp, Homo sapien
tctacggcaatttcaagggtggatg

SEQ ID NO: 4996964 - DNA, 25 bp, Homo sapien
tacggcaatttcaagggtggatggt

SEQ ID NO: 4996965 - DNA, 25 bp, Homo sapien
cttctacggcaatttcaagggtgga

SEQ ID NO: 4996966 - DNA, 25 bp, Homo sapien
ccccggcgcttttacatcacatgag

SEQ ID NO: 4996967 - DNA, 25 bp, Homo sapien
tcatttagaagacaaggcgtcgttt

SEQ ID NO: 4996968 - DNA, 25 bp, Homo sapien
gaaatcccgatgatcttgaagcaag

SEQ ID NO: 4996969 - DNA, 25 bp, Homo sapien
ttcacagggctgtcagaaatcccga

SEQ ID NO: 4996970 - DNA, 25 bp, Homo sapien
caaacacagcccatactggtggcag

SEQ ID NO: 4996971 - DNA, 25 bp, Homo sapien
gaggctttcaactgccatagccagg

SEQ ID NO: 4996972 - DNA, 25 bp, Homo sapien
taatagcagccctgtgtacagaggc

SEQ ID NO: 4996973 - DNA, 25 bp, Homo sapien
tggaagaaacaaccaggccagtatt

SEQ ID NO: 4996974 - DNA, 25 bp, Homo sapien
ctctcagagctctgtgtgtacagag

SEQ ID NO: 4996975 - DNA, 25 bp, Homo sapien
tctctcagagctctgtgtgtacaga

SEQ ID NO: 4996976 - DNA, 25 bp, Homo sapien
ctctctcagagctctgtgtgtacag

SEQ ID NO: 4996977 - DNA, 25 bp, Homo sapien
tggtttcggcagaaggctgttgcca

SEQ ID NO: 4996978 - DNA, 25 bp, Homo sapien
ccaagattggtttcggcagaaggct

SEQ ID NO: 4996979 - DNA, 25 bp, Homo sapien
ctagttttgtcatgataagggtgtt

SEQ ID NO: 4996980 - DNA, 25 bp, Homo sapien
tttccccaagattggtttcggcaga

SEQ ID NO: 4996981 - DNA, 25 bp, Homo sapien
tatcttgcaggaaattccccaaagc

SEQ ID NO: 4996982 - DNA, 25 bp, Homo sapien
tcatctttgcgcataacttacctgt

SEQ ID NO: 4996983 - DNA, 25 bp, Homo sapien
cctgttaccagtataggtgggatat

SEQ ID NO: 4996984 - DNA, 25 bp, Homo sapien
ctcagagtccagttccttccataaa

SEQ ID NO: 4996985 - DNA, 25 bp, Homo sapien
cttgcagatcatagctagctaaaat

SEQ ID NO: 4996986 - DNA, 25 bp, Homo sapien
cttctagctcttcaggagaatcctg

SEQ ID NO: 4996987 - DNA, 25 bp, Homo sapien
ttcttctagctcttcaggagaatcc

SEQ ID NO: 4996988 - DNA, 25 bp, Homo sapien
ttgcagatcatagctagctaaaatt

SEQ ID NO: 4996989 - DNA, 25 bp, Homo sapien
gaggagtgtttggtattcatattga

SEQ ID NO: 4996990 - DNA, 25 bp, Homo sapien
gtttggtattcatattgatgatgac

SEQ ID NO: 4996991 - DNA, 25 bp, Homo sapien
caagaggagtgtttggtattcatat

SEQ ID NO: 4996992 - DNA, 25 bp, Homo sapien
gagtgtttggtattcatattgatga

SEQ ID NO: 4996993 - DNA, 25 bp, Homo sapien
ggaagaatttaaaggtcaagcatga

SEQ ID NO: 4996994 - DNA, 25 bp, Homo sapien
ggaagacttggtgtttttatctgga

SEQ ID NO: 4996995 - DNA, 25 bp, Homo sapien
ggtgtttttatctggatacccatca

SEQ ID NO: 4996996 - DNA, 25 bp, Homo sapien
ttaaaggtcaagcatgaagaaacag

SEQ ID NO: 4996997 - DNA, 25 bp, Homo sapien
ctccaggtcatcgttgcacaggctg

SEQ ID NO: 4996998 - DNA, 25 bp, Homo sapien
tgcacaggctgcgagtctctgacga

SEQ ID NO: 4996999 - DNA, 25 bp, Homo sapien
tgcgagtctctgacgacccgcaaca

SEQ ID NO: 4997000 - DNA, 25 bp, Homo sapien
tcatcgttgcacaggctgcgagtct

SEQ ID NO: 4997001 - DNA, 25 bp, Homo sapien
agatgttgtggagggatgctctccc

SEQ ID NO: 4997002 - DNA, 25 bp, Homo sapien
acagggcagagactccaggagatgt

SEQ ID NO: 4997003 - DNA, 25 bp, Homo sapien
tttcgtggctcctcataggcctcca

SEQ ID NO: 4997004 - DNA, 25 bp, Homo sapien
tcccttcccacttatgaccttcttc

SEQ ID NO: 4997005 - DNA, 25 bp, Homo sapien
tgtggccatgaaatttcccatctgt

SEQ ID NO: 4997006 - DNA, 25 bp, Homo sapien
cccatctgttgagtgcgttcaggac

SEQ ID NO: 4997007 - DNA, 25 bp, Homo sapien
gctgacacgggaacaatgagaggat

SEQ ID NO: 4997008 - DNA, 25 bp, Homo sapien
tgggtaatggatttagtttgattgc

SEQ ID NO: 4997009 - DNA, 25 bp, Homo sapien
tgactaaatccttactaacccagca

SEQ ID NO: 4997010 - DNA, 25 bp, Homo sapien
caaagccaagtcactcagagtaatg

SEQ ID NO: 4997011 - DNA, 25 bp, Homo sapien
gcacgcctgggataatcctagttta

SEQ ID NO: 4997012 - DNA, 25 bp, Homo sapien
cagtgaccacttagccccatttgga

SEQ ID NO: 4997013 - DNA, 25 bp, Homo sapien
tcactgcagctgtaaatctgatgca

SEQ ID NO: 4997014 - DNA, 25 bp, Homo sapien
cactgcagctgtaaatctgatgcat

SEQ ID NO: 4997015 - DNA, 25 bp, Homo sapien
aggaatcacggtggtgaaaacttct

SEQ ID NO: 4997016 - DNA, 25 bp, Homo sapien
tgaaaacttctatgttctcgtcact

SEQ ID NO: 4997017 - DNA, 25 bp, Homo sapien
cagagtaggcgatttcacttcgtcg

SEQ ID NO: 4997018 - DNA, 25 bp, Homo sapien
caagcttggcgctaacagagtaggc

SEQ ID NO: 4997019 - DNA, 25 bp, Homo sapien
taagagagccaagttagcacatgac

SEQ ID NO: 4997020 - DNA, 25 bp, Homo sapien
tcgtcgtcacctcacaaaaggcttc

SEQ ID NO: 4997021 - DNA, 25 bp, Homo sapien
tgcgtgttacccttgcacagtggcc

SEQ ID NO: 4997022 - DNA, 25 bp, Homo sapien
tttgcgtgttacccttgcacagtgg

SEQ ID NO: 4997023 - DNA, 25 bp, Homo sapien
ttgcgtgttacccttgcacagtggc

SEQ ID NO: 4997024 - DNA, 25 bp, Homo sapien
gaaccctcatttgcttgccccatgg

SEQ ID NO: 4997025 - DNA, 25 bp, Homo sapien
tccagaaactccctcgatgcgagct

SEQ ID NO: 4997026 - DNA, 25 bp, Homo sapien
aattcactggaatcacgaaggatcc

SEQ ID NO: 4997027 - DNA, 25 bp, Homo sapien
tgtcgctgttcctagaattcactgg

SEQ ID NO: 4997028 - DNA, 25 bp, Homo sapien
ccaccgcggagaccgcagggaccct

SEQ ID NO: 4997029 - DNA, 25 bp, Homo sapien
cggtacgtgagtcccggccccagct

SEQ ID NO: 4997030 - DNA, 25 bp, Homo sapien
ccgcaggtttgggcggctccagacc

SEQ ID NO: 4997031 - DNA, 25 bp, Homo sapien
gcctctgccagacccggtacgtgag

SEQ ID NO: 4997032 - DNA, 25 bp, Homo sapien
gttctatcacgtagaacagccctga

SEQ ID NO: 4997033 - DNA, 25 bp, Homo sapien
gggggtagttctgtgacagctccat

SEQ ID NO: 4997034 - DNA, 25 bp, Homo sapien
cctgagctgggggtagttctgtgac

SEQ ID NO: 4997035 - DNA, 25 bp, Homo sapien
cgttctatcacgtagaacagccctg

SEQ ID NO: 4997036 - DNA, 25 bp, Homo sapien
tagacacactgatcttatttaggcc

SEQ ID NO: 4997037 - DNA, 25 bp, Homo sapien
tccctggcgtggttgattggctaac

SEQ ID NO: 4997038 - DNA, 25 bp, Homo sapien
caaggtaattgatgcagggccagtg

SEQ ID NO: 4997039 - DNA, 25 bp, Homo sapien
ttagttccagctcccctagaagagt

SEQ ID NO: 4997040 - DNA, 25 bp, Homo sapien
gactctttgagtatccgctgtcaag

SEQ ID NO: 4997041 - DNA, 25 bp, Homo sapien
gcatcctagactctttgagtatccg

SEQ ID NO: 4997042 - DNA, 25 bp, Homo sapien
atccataggtggtgcaatgtgagaa

SEQ ID NO: 4997043 - DNA, 25 bp, Homo sapien
gagtatccgctgtcaagatccatag

SEQ ID NO: 4997044 - DNA, 25 bp, Homo sapien
gaagtctgaatatgtgggagccacc

SEQ ID NO: 4997045 - DNA, 25 bp, Homo sapien
ggaaagaaatgtccctcgaaggcaa

SEQ ID NO: 4997046 - DNA, 25 bp, Homo sapien
cggcatcctccggaaaatgtggaca

SEQ ID NO: 4997047 - DNA, 25 bp, Homo sapien
caggattgaaactgagccacacgca

SEQ ID NO: 4997048 - DNA, 25 bp, Homo sapien
cagactcctccgagctcaggattca

SEQ ID NO: 4997049 - DNA, 25 bp, Homo sapien
aggattcacctcagtcaggcaattg

SEQ ID NO: 4997050 - DNA, 25 bp, Homo sapien
ggcaattgaatgattggcacagggt

SEQ ID NO: 4997051 - DNA, 25 bp, Homo sapien
aaccagactcctccgagctcaggat

SEQ ID NO: 4997052 - DNA, 25 bp, Homo sapien
gctgagggtaggcttgctctcagtt

SEQ ID NO: 4997053 - DNA, 25 bp, Homo sapien
ctgctgagggtaggcttgctctcag

SEQ ID NO: 4997054 - DNA, 25 bp, Homo sapien
ccctgctgagggtaggcttgctctc

SEQ ID NO: 4997055 - DNA, 25 bp, Homo sapien
cctgctgagggtaggcttgctctca

SEQ ID NO: 4997056 - DNA, 25 bp, Homo sapien
tcctaccagcaaaattagcccacag

SEQ ID NO: 4997057 - DNA, 25 bp, Homo sapien
gcgacctctgctcacaagcaagaag

SEQ ID NO: 4997058 - DNA, 25 bp, Homo sapien
gcttgctgccaaatgcagcttttgg

SEQ ID NO: 4997059 - DNA, 25 bp, Homo sapien
tgaggaccagttttttgaattcaaa

SEQ ID NO: 4997060 - DNA, 25 bp, Homo sapien
cagaacaaagccgaaactatttgtc

SEQ ID NO: 4997061 - DNA, 25 bp, Homo sapien
aacaaagccgaaactatttgtcatt

SEQ ID NO: 4997062 - DNA, 25 bp, Homo sapien
agaacaaagccgaaactatttgtca

SEQ ID NO: 4997063 - DNA, 25 bp, Homo sapien
gaacaaagccgaaactatttgtcat

SEQ ID NO: 4997064 - DNA, 25 bp, Homo sapien
tttcaggatcagacagactagtttc

SEQ ID NO: 4997065 - DNA, 25 bp, Homo sapien
ggaatgtaacctattaactaatgcc

SEQ ID NO: 4997066 - DNA, 25 bp, Homo sapien
tgacatgtatctgccatttcaggat

SEQ ID NO: 4997067 - DNA, 25 bp, Homo sapien
cactggacccctggtaacaactggt

SEQ ID NO: 4997068 - DNA, 25 bp, Homo sapien
ggttttccatcagcgactgcctgcc

SEQ ID NO: 4997069 - DNA, 25 bp, Homo sapien
ttcgtggttttccatcagcgactgc

SEQ ID NO: 4997070 - DNA, 25 bp, Homo sapien
cgtggttttccatcagcgactgcct

SEQ ID NO: 4997071 - DNA, 25 bp, Homo sapien
ttattcgtggttttccatcagcgac

SEQ ID NO: 4997072 - DNA, 25 bp, Homo sapien
tcagcgaccaaatggagcttgggat

SEQ ID NO: 4997073 - DNA, 25 bp, Homo sapien
ggaggttcagcgaccaaatggagct

SEQ ID NO: 4997074 - DNA, 25 bp, Homo sapien
ccaaatggagcttgggatggatgaa

SEQ ID NO: 4997075 - DNA, 25 bp, Homo sapien
cgaccaaatggagcttgggatggat

SEQ ID NO: 4997076 - DNA, 25 bp, Homo sapien
tcagcaagctccctactaactgtgc

SEQ ID NO: 4997077 - DNA, 25 bp, Homo sapien
tgtgccctccacttgagtcatgaat

SEQ ID NO: 4997078 - DNA, 25 bp, Homo sapien
caggaatgagtgactcagaggccac

SEQ ID NO: 4997079 - DNA, 25 bp, Homo sapien
ctccacttgagtcatgaatatgcca

SEQ ID NO: 4997080 - DNA, 25 bp, Homo sapien
ggtcccggtgtcctgtctgtctgca

SEQ ID NO: 4997081 - DNA, 25 bp, Homo sapien
ctgggggtcccggtgtcctgtctgt

SEQ ID NO: 4997082 - DNA, 25 bp, Homo sapien
cctgtctgtctgcagatgcacacac

SEQ ID NO: 4997083 - DNA, 25 bp, Homo sapien
ctctctctgggggtcccggtgtcct

SEQ ID NO: 4997084 - DNA, 25 bp, Homo sapien
cctggacagagggatgcagcgcaga

SEQ ID NO: 4997085 - DNA, 25 bp, Homo sapien
acagagggatgcagcgcagatccat

SEQ ID NO: 4997086 - DNA, 25 bp, Homo sapien
gccctggacagagggatgcagcgca

SEQ ID NO: 4997087 - DNA, 25 bp, Homo sapien
tggacagagggatgcagcgcagatc

SEQ ID NO: 4997088 - DNA, 25 bp, Homo sapien
tgtgcatttatgcagcgcagcggcc

SEQ ID NO: 4997089 - DNA, 25 bp, Homo sapien
taatcgcgtcccatctggtgtctgg

SEQ ID NO: 4997090 - DNA, 25 bp, Homo sapien
gacgcgacacacttctggcaggtgc

SEQ ID NO: 4997091 - DNA, 25 bp, Homo sapien
caaaatgtccgtagtagtagcagca

SEQ ID NO: 4997092 - DNA, 25 bp, Homo sapien
cagcaagccttgacagtgcacatta

SEQ ID NO: 4997093 - DNA, 25 bp, Homo sapien
cacattaaagtgtgcgcctccgact

SEQ ID NO: 4997094 - DNA, 25 bp, Homo sapien
gcaagtcgcctctcctagaagtaca

SEQ ID NO: 4997095 - DNA, 25 bp, Homo sapien
gaatggtccaaagacacgccaagtg

SEQ ID NO: 4997096 - DNA, 25 bp, Homo sapien
cagactatgtatatccaggtaaggg

SEQ ID NO: 4997097 - DNA, 25 bp, Homo sapien
tgtagtcagtttccatgcaagtatg

SEQ ID NO: 4997098 - DNA, 25 bp, Homo sapien
cacacagtgcaagtggtggtcgctc

SEQ ID NO: 4997099 - DNA, 25 bp, Homo sapien
tctctcgtagcagcaagccgattct

SEQ ID NO: 4997100 - DNA, 25 bp, Homo sapien
tctaggcaccctgtatacgtataaa

SEQ ID NO: 4997101 - DNA, 25 bp, Homo sapien
tgcagactgtttttagggaccaagg

SEQ ID NO: 4997102 - DNA, 25 bp, Homo sapien
gttgacagcacaccattatatgact

SEQ ID NO: 4997103 - DNA, 25 bp, Homo sapien
aatggtagcctaagtaaatcagcac

SEQ ID NO: 4997104 - DNA, 25 bp, Homo sapien
tacagtatgagagctcttgaagtac

SEQ ID NO: 4997105 - DNA, 25 bp, Homo sapien
gtaagtactcagatatcttcttgct

SEQ ID NO: 4997106 - DNA, 25 bp, Homo sapien
gcttgttcagtcataataagttggt

SEQ ID NO: 4997107 - DNA, 25 bp, Homo sapien
tcttgaagtactactggtagctgtg

SEQ ID NO: 4997108 - DNA, 25 bp, Homo sapien
tattaaaatagctatctatatcaca

SEQ ID NO: 4997109 - DNA, 25 bp, Homo sapien
tatctatattgcttacaggcctatg

SEQ ID NO: 4997110 - DNA, 25 bp, Homo sapien
tcacaattagactcttaaagtcagt

SEQ ID NO: 4997111 - DNA, 25 bp, Homo sapien
ttgcttacaggcctatggaggcagt

SEQ ID NO: 4997112 - DNA, 25 bp, Homo sapien
tgccaaagacgttttcaaggtatgc

SEQ ID NO: 4997113 - DNA, 25 bp, Homo sapien
taattaaacgccaggaactcaaatc

SEQ ID NO: 4997114 - DNA, 25 bp, Homo sapien
tatcaggaatactagtgctgcagtc

SEQ ID NO: 4997115 - DNA, 25 bp, Homo sapien
tacatggctcttagaaagcagtggc

SEQ ID NO: 4997116 - DNA, 25 bp, Homo sapien
aagttcactggaaaccatggtacca

SEQ ID NO: 4997117 - DNA, 25 bp, Homo sapien
gaaaatttcctactcaatgaactct

SEQ ID NO: 4997118 - DNA, 25 bp, Homo sapien
ttcatttgcagttacacactggtcg

SEQ ID NO: 4997119 - DNA, 25 bp, Homo sapien
ttctctggggtaaactcttaatgca

SEQ ID NO: 4997120 - DNA, 25 bp, Homo sapien
tcattaataaggatgtagtaaatct

SEQ ID NO: 4997121 - DNA, 25 bp, Homo sapien
caggaatcaagttgcacctattgtc

SEQ ID NO: 4997122 - DNA, 25 bp, Homo sapien
tattgtcatgtatttccaataatgg

SEQ ID NO: 4997123 - DNA, 25 bp, Homo sapien
ggtatcattaataaggatgtagtaa

SEQ ID NO: 4997124 - DNA, 25 bp, Homo sapien
tatctaagactagtgattttctgac

SEQ ID NO: 4997125 - DNA, 25 bp, Homo sapien
gtcttcagtcaacagttgagtgcct

SEQ ID NO: 4997126 - DNA, 25 bp, Homo sapien
ttttcccaattatctaagactagtg

SEQ ID NO: 4997127 - DNA, 25 bp, Homo sapien
cttcagtcaacagttgagtgcctga

SEQ ID NO: 4997128 - DNA, 25 bp, Homo sapien
agcttttgtaagcaggttcatcttc

SEQ ID NO: 4997129 - DNA, 25 bp, Homo sapien
tcctctttgaggaataggtctgttc

SEQ ID NO: 4997130 - DNA, 25 bp, Homo sapien
tttgaggaataggtctgttccagtt

SEQ ID NO: 4997131 - DNA, 25 bp, Homo sapien
gcttttgtaagcaggttcatcttcc

SEQ ID NO: 4997132 - DNA, 25 bp, Homo sapien
tctacatgaccctatgaaggcagga

SEQ ID NO: 4997133 - DNA, 25 bp, Homo sapien
tccatccctaaagcctagtacagtg

SEQ ID NO: 4997134 - DNA, 25 bp, Homo sapien
ggactactacaagagcatactacca

SEQ ID NO: 4997135 - DNA, 25 bp, Homo sapien
tatgttcaccaaatgaccctgactc

SEQ ID NO: 4997136 - DNA, 25 bp, Homo sapien
tcctaaatattatcatgaaagtgct

SEQ ID NO: 4997137 - DNA, 25 bp, Homo sapien
ccatgactgaaactactaaaatgta

SEQ ID NO: 4997138 - DNA, 25 bp, Homo sapien
aaaagtgttccgacagggcgcagtg

SEQ ID NO: 4997139 - DNA, 25 bp, Homo sapien
ttctaatacatgtaaccatgactga

SEQ ID NO: 4997140 - DNA, 25 bp, Homo sapien
gaaaagagttccactgacacctgat

SEQ ID NO: 4997141 - DNA, 25 bp, Homo sapien
tctctagatgctataaagttaagaa

SEQ ID NO: 4997142 - DNA, 25 bp, Homo sapien
aaggaaaagagttccactgacacct

SEQ ID NO: 4997143 - DNA, 25 bp, Homo sapien
taaagctttgtatctgtttcagtaa

SEQ ID NO: 4997144 - DNA, 25 bp, Homo sapien
tttttctcctgagcagcaagcgcat

SEQ ID NO: 4997145 - DNA, 25 bp, Homo sapien
ccagtatagatcttctaatagtagg

SEQ ID NO: 4997146 - DNA, 25 bp, Homo sapien
gcattcttaaaaggagtaggagttc

SEQ ID NO: 4997147 - DNA, 25 bp, Homo sapien
ggagttcttggtgtggtacccagta

SEQ ID NO: 4997148 - DNA, 25 bp, Homo sapien
ttatgatacttgctatttatatgca

SEQ ID NO: 4997149 - DNA, 25 bp, Homo sapien
ttatatgcacaaaaagctaatctac

SEQ ID NO: 4997150 - DNA, 25 bp, Homo sapien
aagctaatctactttaacactgtgc

SEQ ID NO: 4997151 - DNA, 25 bp, Homo sapien
aatctactttaacactgtgctcccc

SEQ ID NO: 4997152 - DNA, 25 bp, Homo sapien
gctttctgcccacaaataggggttg

SEQ ID NO: 4997153 - DNA, 25 bp, Homo sapien
tattaagttgttcattaccaggaca

SEQ ID NO: 4997154 - DNA, 25 bp, Homo sapien
gatctttgggagttgtttccttatg

SEQ ID NO: 4997155 - DNA, 25 bp, Homo sapien
aagaggagttgtaatgagagctttc

SEQ ID NO: 4997156 - DNA, 25 bp, Homo sapien
gccatccctaagttcgctgcctggg

SEQ ID NO: 4997157 - DNA, 25 bp, Homo sapien
tttcccttcaagtacaagactgacg

SEQ ID NO: 4997158 - DNA, 25 bp, Homo sapien
ggtaacgtcactccatgctacagga

SEQ ID NO: 4997159 - DNA, 25 bp, Homo sapien
ttttagcgccatattaccaccatcg

SEQ ID NO: 4997160 - DNA, 25 bp, Homo sapien
aactgttaataaagttaatgctgta

SEQ ID NO: 4997161 - DNA, 25 bp, Homo sapien
ctgcaataaattaaactgttaataa

SEQ ID NO: 4997162 - DNA, 25 bp, Homo sapien
taaactgttaataaagttaatgctg

SEQ ID NO: 4997163 - DNA, 25 bp, Homo sapien
ctgttaataaagttaatgctgtaac

SEQ ID NO: 4997164 - DNA, 25 bp, Homo sapien
tccacggccaggaactttgtgggtg

SEQ ID NO: 4997165 - DNA, 25 bp, Homo sapien
agattcaataagttctagagtctct

SEQ ID NO: 4997166 - DNA, 25 bp, Homo sapien
acacagcgtttgcctccacggccag

SEQ ID NO: 4997167 - DNA, 25 bp, Homo sapien
tcactagtgtgctcgtcaaggctat

SEQ ID NO: 4997168 - DNA, 25 bp, Homo sapien
aaaactcactagtgtgctcgtcaag

SEQ ID NO: 4997169 - DNA, 25 bp, Homo sapien
actgtaaaactcactagtgtgctcg

SEQ ID NO: 4997170 - DNA, 25 bp, Homo sapien
gctcgtcaaggctatttagagtatt

SEQ ID NO: 4997171 - DNA, 25 bp, Homo sapien
aggaaactaccagaccagctagaaa

SEQ ID NO: 4997172 - DNA, 25 bp, Homo sapien
gaggaaactaccagaccagctagaa

SEQ ID NO: 4997173 - DNA, 25 bp, Homo sapien
tctcaatgtaggcataaattcagat

SEQ ID NO: 4997174 - DNA, 25 bp, Homo sapien
tgtcattctcaatgtaggcataaat

SEQ ID NO: 4997175 - DNA, 25 bp, Homo sapien
tcaatgtaggcataaattcagattt

SEQ ID NO: 4997176 - DNA, 25 bp, Homo sapien
cattctcaatgtaggcataaattca

SEQ ID NO: 4997177 - DNA, 25 bp, Homo sapien
agctgacataagaagcatctcaagt

SEQ ID NO: 4997178 - DNA, 25 bp, Homo sapien
cttctaacttcattctcagctgaca

SEQ ID NO: 4997179 - DNA, 25 bp, Homo sapien
acttcattctcagctgacataagaa

SEQ ID NO: 4997180 - DNA, 25 bp, Homo sapien
ctgacataagaagcatctcaagttc

SEQ ID NO: 4997181 - DNA, 25 bp, Homo sapien
gttctatacaattgccttcaggtga

SEQ ID NO: 4997182 - DNA, 25 bp, Homo sapien
ctgaataaaggcagaagtaggctga

SEQ ID NO: 4997183 - DNA, 25 bp, Homo sapien
cagaagtaggctgaacatgttctat

SEQ ID NO: 4997184 - DNA, 25 bp, Homo sapien
ggtgacacatactgatacccaggga

SEQ ID NO: 4997185 - DNA, 25 bp, Homo sapien
tgtccatatgaatgaagcactcaca

SEQ ID NO: 4997186 - DNA, 25 bp, Homo sapien
gaagggttgctctatctcctaaaga

SEQ ID NO: 4997187 - DNA, 25 bp, Homo sapien
tacttagcctagatttatcagccag

SEQ ID NO: 4997188 - DNA, 25 bp, Homo sapien
gacagagacctgaagcaagtttttc

SEQ ID NO: 4997189 - DNA, 25 bp, Homo sapien
gcttgccccattttgagctcgtgta

SEQ ID NO: 4997190 - DNA, 25 bp, Homo sapien
taagggacaacatagagcttgcccc

SEQ ID NO: 4997191 - DNA, 25 bp, Homo sapien
gactgttaaatactctgttggcccc

SEQ ID NO: 4997192 - DNA, 25 bp, Homo sapien
tcaaatctgaggcatagtaagcaca

SEQ ID NO: 4997193 - DNA, 25 bp, Homo sapien
caaacatcttcccatatagcaactt

SEQ ID NO: 4997194 - DNA, 25 bp, Homo sapien
tcccatatagcaacttaagaaaatt

SEQ ID NO: 4997195 - DNA, 25 bp, Homo sapien
cccttaatacgcattgtatttgtcc

SEQ ID NO: 4997196 - DNA, 25 bp, Homo sapien
cattgtatttgtcctattaagaaac

SEQ ID NO: 4997197 - DNA, 25 bp, Homo sapien
ataataaaggtattaaaagtatgtg

SEQ ID NO: 4997198 - DNA, 25 bp, Homo sapien
taataaaggtattaaaagtatgtgc

SEQ ID NO: 4997199 - DNA, 25 bp, Homo sapien
catcttgtaaatagccctcctgttc

SEQ ID NO: 4997200 - DNA, 25 bp, Homo sapien
ctgattctgggtttgcatatgatcc

SEQ ID NO: 4997201 - DNA, 25 bp, Homo sapien
tcttcgcatagtagaattccaatga

SEQ ID NO: 4997202 - DNA, 25 bp, Homo sapien
catatgatccatagctgcacaaggt

SEQ ID NO: 4997203 - DNA, 25 bp, Homo sapien
aaaaataagtcatcggggacttgca

SEQ ID NO: 4997204 - DNA, 25 bp, Homo sapien
aaaataagtcatcggggacttgcaa

SEQ ID NO: 4997205 - DNA, 25 bp, Homo sapien
aaataagtcatcggggacttgcaaa

SEQ ID NO: 4997206 - DNA, 25 bp, Homo sapien
caaccgcttatgtgcttcatagatg

SEQ ID NO: 4997207 - DNA, 25 bp, Homo sapien
tgcttcatagatgatcctgtcctcc

SEQ ID NO: 4997208 - DNA, 25 bp, Homo sapien
agtttggcaatttctgcccaacgat

SEQ ID NO: 4997209 - DNA, 25 bp, Homo sapien
aacgatttcccaaccgcttatgtgc

SEQ ID NO: 4997210 - DNA, 25 bp, Homo sapien
tctacactgcttgcctattcttcct

SEQ ID NO: 4997211 - DNA, 25 bp, Homo sapien
ctcaggattcagatgattatgccat

SEQ ID NO: 4997212 - DNA, 25 bp, Homo sapien
aatgttttgcaattaaagaccatct

SEQ ID NO: 4997213 - DNA, 25 bp, Homo sapien
actgcttgcctattcttccttttaa

SEQ ID NO: 4997214 - DNA, 25 bp, Homo sapien
tgccatcgatgctggcactgaaaat

SEQ ID NO: 4997215 - DNA, 25 bp, Homo sapien
caggatttaaaactttctgccatcg

SEQ ID NO: 4997216 - DNA, 25 bp, Homo sapien
gctggcactgaaaatcagagcgatt

SEQ ID NO: 4997217 - DNA, 25 bp, Homo sapien
caaggaccctttatcaattcaggat

SEQ ID NO: 4997218 - DNA, 25 bp, Homo sapien
caaccaacttctttaatttatcatc

SEQ ID NO: 4997219 - DNA, 25 bp, Homo sapien
gaagatgactagcaattagagtcca

SEQ ID NO: 4997220 - DNA, 25 bp, Homo sapien
ttccatgttgttcaaccaacttctt

SEQ ID NO: 4997221 - DNA, 25 bp, Homo sapien
ttgaagatgactagcaattagagtc

SEQ ID NO: 4997222 - DNA, 25 bp, Homo sapien
tcgtcccttgtccattttactctgt

SEQ ID NO: 4997223 - DNA, 25 bp, Homo sapien
tgtccattttactctgttccagagt

SEQ ID NO: 4997224 - DNA, 25 bp, Homo sapien
cctttttgttgtggtacttcataat

SEQ ID NO: 4997225 - DNA, 25 bp, Homo sapien
gatcggcatactgaaggtcatcatc

SEQ ID NO: 4997226 - DNA, 25 bp, Homo sapien
ctagcagtattatagtaagacaaac

SEQ ID NO: 4997227 - DNA, 25 bp, Homo sapien
gccacccagtggttaatatatgtac

SEQ ID NO: 4997228 - DNA, 25 bp, Homo sapien
aataaagtgaaattaggccacccag

SEQ ID NO: 4997229 - DNA, 25 bp, Homo sapien
ctggactgtgcaaactagcagtatt

SEQ ID NO: 4997230 - DNA, 25 bp, Homo sapien
agattgatgttaattgggtccttga

SEQ ID NO: 4997231 - DNA, 25 bp, Homo sapien
ggcaatcataattacaagagcttta

SEQ ID NO: 4997232 - DNA, 25 bp, Homo sapien
taaaccagtacttcggcaatcataa

SEQ ID NO: 4997233 - DNA, 25 bp, Homo sapien
ctgaagattgatgttaattgggtcc

SEQ ID NO: 4997234 - DNA, 25 bp, Homo sapien
tcattcagaaaagagtcgcccgaac

SEQ ID NO: 4997235 - DNA, 25 bp, Homo sapien
tccacaacgtttcaagatagccaag

SEQ ID NO: 4997236 - DNA, 25 bp, Homo sapien
ggactccctaaaagcgctcgactta

SEQ ID NO: 4997237 - DNA, 25 bp, Homo sapien
accattttcaagtcctcccggcagg

SEQ ID NO: 4997238 - DNA, 25 bp, Homo sapien
gaagtggcagcatgaggtcagaaat

SEQ ID NO: 4997239 - DNA, 25 bp, Homo sapien
ctggcaagaaacctgcctcgaagaa

SEQ ID NO: 4997240 - DNA, 25 bp, Homo sapien
caagaaacctgcctcgaagaagtgg

SEQ ID NO: 4997241 - DNA, 25 bp, Homo sapien
aacctgcctcgaagaagtggcagca

SEQ ID NO: 4997242 - DNA, 25 bp, Homo sapien
cattacggggagagtcaccgagaaa

SEQ ID NO: 4997243 - DNA, 25 bp, Homo sapien
tccggtcatcgaggccaagcggccg

SEQ ID NO: 4997244 - DNA, 25 bp, Homo sapien
ggaagaaaaacctctgccctcgcca

SEQ ID NO: 4997245 - DNA, 25 bp, Homo sapien
cctcgccagggagggccttatggcg

SEQ ID NO: 4997246 - DNA, 25 bp, Homo sapien
ccaactctccacacgtcgcagctgc

SEQ ID NO: 4997247 - DNA, 25 bp, Homo sapien
ccgagacggcgccgacaggcctggg

SEQ ID NO: 4997248 - DNA, 25 bp, Homo sapien
gacaggcctgggcgaaaggggtgcc

SEQ ID NO: 4997249 - DNA, 25 bp, Homo sapien
ccgacaggcctgggcgaaaggggtg

SEQ ID NO: 4997250 - DNA, 25 bp, Homo sapien
gcctgggcgaaaggggtgccaccca

SEQ ID NO: 4997251 - DNA, 25 bp, Homo sapien
tcgccatccttcaagtaccgcatag

SEQ ID NO: 4997252 - DNA, 25 bp, Homo sapien
tgcgcgacctcttcgccatccttca

SEQ ID NO: 4997253 - DNA, 25 bp, Homo sapien
caagtaccgcataggagcaggctgg

SEQ ID NO: 4997254 - DNA, 25 bp, Homo sapien
agcctccggcgaatgctccttctcc

SEQ ID NO: 4997255 - DNA, 25 bp, Homo sapien
tggaggcggccgagtgcggaacgca

SEQ ID NO: 4997256 - DNA, 25 bp, Homo sapien
ggcggccgagtgcggaacgcacgtc

SEQ ID NO: 4997257 - DNA, 25 bp, Homo sapien
ctggaggcggccgagtgcggaacgc

SEQ ID NO: 4997258 - DNA, 25 bp, Homo sapien
gaggcggccgagtgcggaacgcacg

SEQ ID NO: 4997259 - DNA, 25 bp, Homo sapien
cagggatacccccaacatgtcagga

SEQ ID NO: 4997260 - DNA, 25 bp, Homo sapien
ccccgcagctagcagttctgcaggg

SEQ ID NO: 4997261 - DNA, 25 bp, Homo sapien
ccaacatgtcaggaggcgcgatccc

SEQ ID NO: 4997262 - DNA, 25 bp, Homo sapien
tgcagggctcgcagtctcctgcagg

SEQ ID NO: 4997263 - DNA, 25 bp, Homo sapien
cgcacgcggccctgaacctcattgg

SEQ ID NO: 4997264 - DNA, 25 bp, Homo sapien
agcctccctcaagagccgccgtttg

SEQ ID NO: 4997265 - DNA, 25 bp, Homo sapien
gccgtttgaatctgcgcacgcggcc

SEQ ID NO: 4997266 - DNA, 25 bp, Homo sapien
tcaagagccgccgtttgaatctgcg

SEQ ID NO: 4997267 - DNA, 25 bp, Homo sapien
tctaaccataaatttgcgcggccgt

SEQ ID NO: 4997268 - DNA, 25 bp, Homo sapien
taacgcgtgaagaagacagtggact

SEQ ID NO: 4997269 - DNA, 25 bp, Homo sapien
tctacaggaaataacgtgcgcggcg

SEQ ID NO: 4997270 - DNA, 25 bp, Homo sapien
cactagttaggatgcgcggtcttca

SEQ ID NO: 4997271 - DNA, 25 bp, Homo sapien
gtaaccaccatgaagaagcacagat

SEQ ID NO: 4997272 - DNA, 25 bp, Homo sapien
ggatacttcttcctcgtgcagggct

SEQ ID NO: 4997273 - DNA, 25 bp, Homo sapien
actgtgcccattagtaatgcctgga

SEQ ID NO: 4997274 - DNA, 25 bp, Homo sapien
ttgcaagagcaatgtgttcccagtc

SEQ ID NO: 4997275 - DNA, 25 bp, Homo sapien
gatgtgatcatcatcctcgcagaga

SEQ ID NO: 4997276 - DNA, 25 bp, Homo sapien
gaaagcagcgtaccaggagtcagac

SEQ ID NO: 4997277 - DNA, 25 bp, Homo sapien
gcacactgtcggtttgagattctca

SEQ ID NO: 4997278 - DNA, 25 bp, Homo sapien
taagactatgacgacaatggtcggc

SEQ ID NO: 4997279 - DNA, 25 bp, Homo sapien
aacttctttgtgaggatacctggcc

SEQ ID NO: 4997280 - DNA, 25 bp, Homo sapien
taagggctcaggacgagatttctgc

SEQ ID NO: 4997281 - DNA, 25 bp, Homo sapien
taagcaaatacccagctgatcaggg

SEQ ID NO: 4997282 - DNA, 25 bp, Homo sapien
tgagatgtctagcttgcacgccaag

SEQ ID NO: 4997283 - DNA, 25 bp, Homo sapien
taaacattctgcctttattagcctc

SEQ ID NO: 4997284 - DNA, 25 bp, Homo sapien
aatgactaatcaagttacgtggccc

SEQ ID NO: 4997285 - DNA, 25 bp, Homo sapien
tctgcctttattagcctctaattaa

SEQ ID NO: 4997286 - DNA, 25 bp, Homo sapien
aatcaagttacgtggcccagccaac

SEQ ID NO: 4997287 - DNA, 25 bp, Homo sapien
tgtagtagcctctgctcgaacctga

SEQ ID NO: 4997288 - DNA, 25 bp, Homo sapien
tactttgatcccgaaggtgcctgtc

SEQ ID NO: 4997289 - DNA, 25 bp, Homo sapien
ttcgctgggcctcaaccaaatcagg

SEQ ID NO: 4997290 - DNA, 25 bp, Homo sapien
ggtgcctgtccattgaagcctgaat

SEQ ID NO: 4997291 - DNA, 25 bp, Homo sapien
tgtctgaggaccacttgttgaaaag

SEQ ID NO: 4997292 - DNA, 25 bp, Homo sapien
gcagaggtcaaacctgaggtagaca

SEQ ID NO: 4997293 - DNA, 25 bp, Homo sapien
agtaaagatagccatccccatgcca

SEQ ID NO: 4997294 - DNA, 25 bp, Homo sapien
ttctttccccgctgaattgtctcag

SEQ ID NO: 4997295 - DNA, 25 bp, Homo sapien
tcttcataatactgtagaatacacc

SEQ ID NO: 4997296 - DNA, 25 bp, Homo sapien
gaggaagtccctttgcataagacca

SEQ ID NO: 4997297 - DNA, 25 bp, Homo sapien
tttgcataagaccatacatcttctc

SEQ ID NO: 4997298 - DNA, 25 bp, Homo sapien
cctgctgaaacatgtgaggaagtcc

SEQ ID NO: 4997299 - DNA, 25 bp, Homo sapien
gcaaggtaggcaggatcaatagagc

SEQ ID NO: 4997300 - DNA, 25 bp, Homo sapien
cccagataagccaggagtagtattc

SEQ ID NO: 4997301 - DNA, 25 bp, Homo sapien
tgttgactattattgagggactacc

SEQ ID NO: 4997302 - DNA, 25 bp, Homo sapien
taagagactactaggtgggagtgca

SEQ ID NO: 4997303 - DNA, 25 bp, Homo sapien
acaggaaaactcagtgtattatatt

SEQ ID NO: 4997304 - DNA, 25 bp, Homo sapien
agataacaggaaaactcagtgtatt

SEQ ID NO: 4997305 - DNA, 25 bp, Homo sapien
tacaattaagatataccatcagaat

SEQ ID NO: 4997306 - DNA, 25 bp, Homo sapien
caattaagatataccatcagaatta

SEQ ID NO: 4997307 - DNA, 25 bp, Homo sapien
taagggtaaccatggactgtcgtcc

SEQ ID NO: 4997308 - DNA, 25 bp, Homo sapien
gaacagagcttgatatcgggccagg

SEQ ID NO: 4997309 - DNA, 25 bp, Homo sapien
gaggcacaccccatgctttaggaag

SEQ ID NO: 4997310 - DNA, 25 bp, Homo sapien
taaggcatgccagaagagctctcgg

SEQ ID NO: 4997311 - DNA, 25 bp, Homo sapien
aggtggcggcggcaacggaggcggc

SEQ ID NO: 4997312 - DNA, 25 bp, Homo sapien
ggaggtggcggcggcaacggaggcg

SEQ ID NO: 4997313 - DNA, 25 bp, Homo sapien
gaggaggtggcggcggcaacggagg

SEQ ID NO: 4997314 - DNA, 25 bp, Homo sapien
ggtggcggcggcaacggaggcggcg

SEQ ID NO: 4997315 - DNA, 25 bp, Homo sapien
agctcctggctctcgtgtctcgctc

SEQ ID NO: 4997316 - DNA, 25 bp, Homo sapien
gcgtcccaggcgaccctcaaaagct

SEQ ID NO: 4997317 - DNA, 25 bp, Homo sapien
gaccctcaaaagctcatagcccaga

SEQ ID NO: 4997318 - DNA, 25 bp, Homo sapien
tcgtgtctcgctccgcgtcccaggc

SEQ ID NO: 4997319 - DNA, 25 bp, Homo sapien
tcttcttacttctccactgccgtag

SEQ ID NO: 4997320 - DNA, 25 bp, Homo sapien
ctcctcctaagcgaaggcggaagcg

SEQ ID NO: 4997321 - DNA, 25 bp, Homo sapien
cggaagcgccggacgttgtttctct

SEQ ID NO: 4997322 - DNA, 25 bp, Homo sapien
aggcccagggcgaagcactttcctt

SEQ ID NO: 4997323 - DNA, 25 bp, Homo sapien
ctctctccctcagacacagacatac

SEQ ID NO: 4997324 - DNA, 25 bp, Homo sapien
cagacacagacatacacgccctcat

SEQ ID NO: 4997325 - DNA, 25 bp, Homo sapien
cctcagacacagacatacacgccct

SEQ ID NO: 4997326 - DNA, 25 bp, Homo sapien
tctctctccctcagacacagacata

SEQ ID NO: 4997327 - DNA, 25 bp, Homo sapien
taccgtgaggccaagcggttcagcg

SEQ ID NO: 4997328 - DNA, 25 bp, Homo sapien
gggaattagagtcttccagcctctg

SEQ ID NO: 4997329 - DNA, 25 bp, Homo sapien
tgctggccatcaagccctaggatct

SEQ ID NO: 4997330 - DNA, 25 bp, Homo sapien
tgagtccagaaggaactacaagtac

SEQ ID NO: 4997331 - DNA, 25 bp, Homo sapien
tcacagctgcttactgatttgagag

SEQ ID NO: 4997332 - DNA, 25 bp, Homo sapien
gagggaggctaaactaaattgttca

SEQ ID NO: 4997333 - DNA, 25 bp, Homo sapien
ttaccaccagctatgaaatagagct

SEQ ID NO: 4997334 - DNA, 25 bp, Homo sapien
taggcaagaagtcaatacaaactgg

SEQ ID NO: 4997335 - DNA, 25 bp, Homo sapien
attccaagtacattcctgtctcagg

SEQ ID NO: 4997336 - DNA, 25 bp, Homo sapien
ttttaaggaccaacaaagtcatcac

SEQ ID NO: 4997337 - DNA, 25 bp, Homo sapien
tcactacaacataaaggaccctgtg

SEQ ID NO: 4997338 - DNA, 25 bp, Homo sapien
tatttccgtggcttgtgtgcttcag

SEQ ID NO: 4997339 - DNA, 25 bp, Homo sapien
ttagtaaggcttttcataagggcag

SEQ ID NO: 4997340 - DNA, 25 bp, Homo sapien
tgattgttggattccctgtgccagg

SEQ ID NO: 4997341 - DNA, 25 bp, Homo sapien
gccaatgaacattgtgacaaaacgt

SEQ ID NO: 4997342 - DNA, 25 bp, Homo sapien
tggagaatccaccatttggttgcag

SEQ ID NO: 4997343 - DNA, 25 bp, Homo sapien
aaatgctgactgaacactagcatac

SEQ ID NO: 4997344 - DNA, 25 bp, Homo sapien
agccacctggcacccggtttcagtt

SEQ ID NO: 4997345 - DNA, 25 bp, Homo sapien
ttcctgaaagggagccttctacttg

SEQ ID NO: 4997346 - DNA, 25 bp, Homo sapien
ttctacttgctgacgactgcctcat

SEQ ID NO: 4997347 - DNA, 25 bp, Homo sapien
ctggcacccggtttcagtttcctga

SEQ ID NO: 4997348 - DNA, 25 bp, Homo sapien
catttacccataattgagattgcca

SEQ ID NO: 4997349 - DNA, 25 bp, Homo sapien
tacccataattgagattgccataat

SEQ ID NO: 4997350 - DNA, 25 bp, Homo sapien
cacacatttacccataattgagatt

SEQ ID NO: 4997351 - DNA, 25 bp, Homo sapien
aattgagattgccataattgctata

SEQ ID NO: 4997352 - DNA, 25 bp, Homo sapien
tgaactttgcacagcgcgtgacggg

SEQ ID NO: 4997353 - DNA, 25 bp, Homo sapien
agacggtgcaccgtggcccggcctt

SEQ ID NO: 4997354 - DNA, 25 bp, Homo sapien
aggtcatctctgttgggccccggcg

SEQ ID NO: 4997355 - DNA, 25 bp, Homo sapien
cgtgacgcgtcaaggaggaaacgcc

SEQ ID NO: 4997356 - DNA, 25 bp, Homo sapien
ctcgagattcctaaacgcccaaggg

SEQ ID NO: 4997357 - DNA, 25 bp, Homo sapien
ggtgaattcagatcctgcctcgaga

SEQ ID NO: 4997358 - DNA, 25 bp, Homo sapien
ctatctgaggtcgaaagtgggtgca

SEQ ID NO: 4997359 - DNA, 25 bp, Homo sapien
ccggctcccggagagtttgtggtct

SEQ ID NO: 4997360 - DNA, 25 bp, Homo sapien
taaatactcataataacgctgtggg

SEQ ID NO: 4997361 - DNA, 25 bp, Homo sapien
aaagcccctcatccgaaagaacagg

SEQ ID NO: 4997362 - DNA, 25 bp, Homo sapien
ttgtggcaacacgaggcagagctga

SEQ ID NO: 4997363 - DNA, 25 bp, Homo sapien
tctggctttaccatgaggttccccg

SEQ ID NO: 4997364 - DNA, 25 bp, Homo sapien
caaaccatccaaaggtactgtgggt

SEQ ID NO: 4997365 - DNA, 25 bp, Homo sapien
gcttggcttcaaataatgctatgtg

SEQ ID NO: 4997366 - DNA, 25 bp, Homo sapien
tgttgtcaaaagtaggtgcagggcc

SEQ ID NO: 4997367 - DNA, 25 bp, Homo sapien
tggatcagcatgattggtcatcttg

SEQ ID NO: 4997368 - DNA, 25 bp, Homo sapien
tactgcttcagcctaccgagtgact

SEQ ID NO: 4997369 - DNA, 25 bp, Homo sapien
ctaccgagtgactgggattataggt

SEQ ID NO: 4997370 - DNA, 25 bp, Homo sapien
ttctactgcttcagcctaccgagtg

SEQ ID NO: 4997371 - DNA, 25 bp, Homo sapien
actgcttcagcctaccgagtgactg

SEQ ID NO: 4997372 - DNA, 25 bp, Homo sapien
gaagcaataaggaagagttctggat

SEQ ID NO: 4997373 - DNA, 25 bp, Homo sapien
caggtatctgactttagcctattgc

SEQ ID NO: 4997374 - DNA, 25 bp, Homo sapien
gatattaggtgataagcccattccc

SEQ ID NO: 4997375 - DNA, 25 bp, Homo sapien
taaagatgactcctgatattaggtg

SEQ ID NO: 4997376 - DNA, 25 bp, Homo sapien
tgatgtagacatcactgcagtttgc

SEQ ID NO: 4997377 - DNA, 25 bp, Homo sapien
gagatgatgtagacatcactgcagt

SEQ ID NO: 4997378 - DNA, 25 bp, Homo sapien
atgtagacatcactgcagtttgctg

SEQ ID NO: 4997379 - DNA, 25 bp, Homo sapien
ttatgagatgatgtagacatcactg

SEQ ID NO: 4997380 - DNA, 25 bp, Homo sapien
cattgctgttggagtaagatcagac

SEQ ID NO: 4997381 - DNA, 25 bp, Homo sapien
tggtcaagtctatgacctttcatgg

SEQ ID NO: 4997382 - DNA, 25 bp, Homo sapien
catggttagtctccaatcatgcctt

SEQ ID NO: 4997383 - DNA, 25 bp, Homo sapien
gatcagactcagcatattggtcaag

SEQ ID NO: 4997384 - DNA, 25 bp, Homo sapien
gctgggccaataaggcattctcttc

SEQ ID NO: 4997385 - DNA, 25 bp, Homo sapien
actgtgctgggccaataaggcattc

SEQ ID NO: 4997386 - DNA, 25 bp, Homo sapien
caataaggcattctcttccacgtgt

SEQ ID NO: 4997387 - DNA, 25 bp, Homo sapien
taaggcattctcttccacgtgtctc

SEQ ID NO: 4997388 - DNA, 25 bp, Homo sapien
atacacaaactctaaagcactaaga

SEQ ID NO: 4997389 - DNA, 25 bp, Homo sapien
tgctttattaatagaaatatacaca

SEQ ID NO: 4997390 - DNA, 25 bp, Homo sapien
gaaatatacacaaactctaaagcac

SEQ ID NO: 4997391 - DNA, 25 bp, Homo sapien
atagaaatatacacaaactctaaag

SEQ ID NO: 4997392 - DNA, 25 bp, Homo sapien
tgccaaaacatgatattgaaacttg

SEQ ID NO: 4997393 - DNA, 25 bp, Homo sapien
tcaaaactctcgaagcctagaggat

SEQ ID NO: 4997394 - DNA, 25 bp, Homo sapien
aaacatgatattgaaacttgagatc

SEQ ID NO: 4997395 - DNA, 25 bp, Homo sapien
ccacaaggatgcctggttcttcgtt

SEQ ID NO: 4997396 - DNA, 25 bp, Homo sapien
caagtcgtttcgaggattctggttt

SEQ ID NO: 4997397 - DNA, 25 bp, Homo sapien
cagactcagatgcattaatagttaa

SEQ ID NO: 4997398 - DNA, 25 bp, Homo sapien
ccagactcagatgcattaatagtta

SEQ ID NO: 4997399 - DNA, 25 bp, Homo sapien
aaaacaagtcgtttcgaggattctg

SEQ ID NO: 4997400 - DNA, 25 bp, Homo sapien
tacggacattcatgccaaacccggc

SEQ ID NO: 4997401 - DNA, 25 bp, Homo sapien
tctgctctctcgtgatgcgcctgag

SEQ ID NO: 4997402 - DNA, 25 bp, Homo sapien
cggccgcgtctgctctctcgtgatg

SEQ ID NO: 4997403 - DNA, 25 bp, Homo sapien
ttagagtagcacactacggacattc

SEQ ID NO: 4997404 - DNA, 25 bp, Homo sapien
ttaaggccctggggctgcaccccac

SEQ ID NO: 4997405 - DNA, 25 bp, Homo sapien
taattaaggccctggggctgcaccc

SEQ ID NO: 4997406 - DNA, 25 bp, Homo sapien
attaaggccctggggctgcacccca

SEQ ID NO: 4997407 - DNA, 25 bp, Homo sapien
ttaattaaggccctggggctgcacc

SEQ ID NO: 4997408 - DNA, 25 bp, Homo sapien
gcgtggccggtggtgattggtgagg

SEQ ID NO: 4997409 - DNA, 25 bp, Homo sapien
accgagccatattcgggcgtggccg

SEQ ID NO: 4997410 - DNA, 25 bp, Homo sapien
ggctgaccgagccatattcgggcgt

SEQ ID NO: 4997411 - DNA, 25 bp, Homo sapien
cgcggcgcaggtcccggccgagtgt

SEQ ID NO: 4997412 - DNA, 25 bp, Homo sapien
gactatcatagagaatttagcacag

SEQ ID NO: 4997413 - DNA, 25 bp, Homo sapien
catagagaatttagcacagtctact

SEQ ID NO: 4997414 - DNA, 25 bp, Homo sapien
ctaggtaagttcagttggaagtggt

SEQ ID NO: 4997415 - DNA, 25 bp, Homo sapien
aatgctggtgactatcatagagaat

SEQ ID NO: 4997416 - DNA, 25 bp, Homo sapien
ttctttctgtaacgcagttgcctgg

SEQ ID NO: 4997417 - DNA, 25 bp, Homo sapien
ctttctgtaacgcagttgcctggtg

SEQ ID NO: 4997418 - DNA, 25 bp, Homo sapien
tttctgtaacgcagttgcctggtgg

SEQ ID NO: 4997419 - DNA, 25 bp, Homo sapien
ctttctttctgtaacgcagttgcct

SEQ ID NO: 4997420 - DNA, 25 bp, Homo sapien
tcctcctaagatttggctggccttg

SEQ ID NO: 4997421 - DNA, 25 bp, Homo sapien
gattcaccgttcctcctaagatttg

SEQ ID NO: 4997422 - DNA, 25 bp, Homo sapien
ccgttcctcctaagatttggctggc

SEQ ID NO: 4997423 - DNA, 25 bp, Homo sapien
caccgttcctcctaagatttggctg

SEQ ID NO: 4997424 - DNA, 25 bp, Homo sapien
ctgaaactaaacatccagggcaatt

SEQ ID NO: 4997425 - DNA, 25 bp, Homo sapien
gcagcaaatccaacaagggaagctt

SEQ ID NO: 4997426 - DNA, 25 bp, Homo sapien
tagtgatcagatctgttacagtgac

SEQ ID NO: 4997427 - DNA, 25 bp, Homo sapien
caattatccaagcaaactgacactt

SEQ ID NO: 4997428 - DNA, 25 bp, Homo sapien
gaatgacctcatggtagcctggtga

SEQ ID NO: 4997429 - DNA, 25 bp, Homo sapien
aatagcctgctatgactgacctggt

SEQ ID NO: 4997430 - DNA, 25 bp, Homo sapien
taaagtggctggtctggcaaatagc

SEQ ID NO: 4997431 - DNA, 25 bp, Homo sapien
ttgaccagggtcttgcggcaactca

SEQ ID NO: 4997432 - DNA, 25 bp, Homo sapien
gaaattgcaatgtgcgtctgaccat

SEQ ID NO: 4997433 - DNA, 25 bp, Homo sapien
tgtaaatccaactgtacccaccagg

SEQ ID NO: 4997434 - DNA, 25 bp, Homo sapien
gatgcctgggttatgctcgggtaaa

SEQ ID NO: 4997435 - DNA, 25 bp, Homo sapien
catgactgtagtgtctgtctgtctc

SEQ ID NO: 4997436 - DNA, 25 bp, Homo sapien
acagccaatgagagtttgtacatgg

SEQ ID NO: 4997437 - DNA, 25 bp, Homo sapien
agatcacataaaaaagcttaagagg

SEQ ID NO: 4997438 - DNA, 25 bp, Homo sapien
gatcacataaaaaagcttaagagga

SEQ ID NO: 4997439 - DNA, 25 bp, Homo sapien
cacataaaaaagcttaagaggaaat

SEQ ID NO: 4997440 - DNA, 25 bp, Homo sapien
tcacataaaaaagcttaagaggaaa

SEQ ID NO: 4997441 - DNA, 25 bp, Homo sapien
tgagaatatccaacccactggaaat

SEQ ID NO: 4997442 - DNA, 25 bp, Homo sapien
gaaccactggtgtagaatgagaata

SEQ ID NO: 4997443 - DNA, 25 bp, Homo sapien
actgtatcacagtttccaaggagaa

SEQ ID NO: 4997444 - DNA, 25 bp, Homo sapien
tatagattctaccttcgcgatactc

SEQ ID NO: 4997445 - DNA, 25 bp, Homo sapien
caggtgtctacacgtcccaagaggt

SEQ ID NO: 4997446 - DNA, 25 bp, Homo sapien
gactgctccctcaagattaaagcca

SEQ ID NO: 4997447 - DNA, 25 bp, Homo sapien
caaggtgctattgaacaaactggcc

SEQ ID NO: 4997448 - DNA, 25 bp, Homo sapien
caagaggtccatacattttttcaac

SEQ ID NO: 4997449 - DNA, 25 bp, Homo sapien
catttgtaaggaaccctgtccatgt

SEQ ID NO: 4997450 - DNA, 25 bp, Homo sapien
ccattagagtggagctaacttagct

SEQ ID NO: 4997451 - DNA, 25 bp, Homo sapien
tagcttcctgctatcaaatccacag

SEQ ID NO: 4997452 - DNA, 25 bp, Homo sapien
cacagacctatatacacttgcagga

SEQ ID NO: 4997453 - DNA, 25 bp, Homo sapien
cttcccctgaagtattaagggcaga

SEQ ID NO: 4997454 - DNA, 25 bp, Homo sapien
aaatatgtcactcagggttgtctag

SEQ ID NO: 4997455 - DNA, 25 bp, Homo sapien
cagctgggctgaccttgtacaaaag

SEQ ID NO: 4997456 - DNA, 25 bp, Homo sapien
tcagggagaccagtaagattatagt

SEQ ID NO: 4997457 - DNA, 25 bp, Homo sapien
caatatatgcgtgattccagagtca

SEQ ID NO: 4997458 - DNA, 25 bp, Homo sapien
gttaataatcatcagtaggccagta

SEQ ID NO: 4997459 - DNA, 25 bp, Homo sapien
taatgatagcttcctttgtataggg

SEQ ID NO: 4997460 - DNA, 25 bp, Homo sapien
tgtctcatagctggatagtagagcc

SEQ ID NO: 4997461 - DNA, 25 bp, Homo sapien
aaaactggtcccttaacagagatgc

SEQ ID NO: 4997462 - DNA, 25 bp, Homo sapien
cacaggacccggaggaagttgttca

SEQ ID NO: 4997463 - DNA, 25 bp, Homo sapien
ttaactgtacagctggacctctccc

SEQ ID NO: 4997464 - DNA, 25 bp, Homo sapien
tagtagcagggagtaaacagtatta

SEQ ID NO: 4997465 - DNA, 25 bp, Homo sapien
tttggagggttgtggcgccacctca

SEQ ID NO: 4997466 - DNA, 25 bp, Homo sapien
taccaccctgggataacttctgcat

SEQ ID NO: 4997467 - DNA, 25 bp, Homo sapien
caagctgtagtgtactgatgcaatc

SEQ ID NO: 4997468 - DNA, 25 bp, Homo sapien
catgcatggcacaaagatggctttt

SEQ ID NO: 4997469 - DNA, 25 bp, Homo sapien
gattcaaccacctggtacaacagca

SEQ ID NO: 4997470 - DNA, 25 bp, Homo sapien
tgagaatcaccacccataaataagc

SEQ ID NO: 4997471 - DNA, 25 bp, Homo sapien
ggtacaagcaatgtctccccagctg

SEQ ID NO: 4997472 - DNA, 25 bp, Homo sapien
gccagacagggaacctagaggtaca

SEQ ID NO: 4997473 - DNA, 25 bp, Homo sapien
tattgttcagcaattaaaagttagc

SEQ ID NO: 4997474 - DNA, 25 bp, Homo sapien
cactttattgttcagcaattaaaag

SEQ ID NO: 4997475 - DNA, 25 bp, Homo sapien
attgttcagcaattaaaagttagcc

SEQ ID NO: 4997476 - DNA, 25 bp, Homo sapien
gaaaacactttattgttcagcaatt

SEQ ID NO: 4997477 - DNA, 25 bp, Homo sapien
tcttgaacacgtcttcaattttcct

SEQ ID NO: 4997478 - DNA, 25 bp, Homo sapien
atgttttcttgaacacgtcttcaat

SEQ ID NO: 4997479 - DNA, 25 bp, Homo sapien
ttcttgaacacgtcttcaattttcc

SEQ ID NO: 4997480 - DNA, 25 bp, Homo sapien
tgttttcttgaacacgtcttcaatt

SEQ ID NO: 4997481 - DNA, 25 bp, Homo sapien
aatattcacaagtgcccctcaaaaa

SEQ ID NO: 4997482 - DNA, 25 bp, Homo sapien
cattccatactcaaagttctcatat

SEQ ID NO: 4997483 - DNA, 25 bp, Homo sapien
ccacagtgaaaatcattccatactc

SEQ ID NO: 4997484 - DNA, 25 bp, Homo sapien
agttctcatataacctcaatattca

SEQ ID NO: 4997485 - DNA, 25 bp, Homo sapien
tgaggtaacgaagcagaagtatttt

SEQ ID NO: 4997486 - DNA, 25 bp, Homo sapien
ttgaggtaacgaagcagaagtattt

SEQ ID NO: 4997487 - DNA, 25 bp, Homo sapien
cagctaagaacattcatctacagca

SEQ ID NO: 4997488 - DNA, 25 bp, Homo sapien
tttaaacatgacagctaagaacatt

SEQ ID NO: 4997489 - DNA, 25 bp, Homo sapien
ccgcgtgatcctagtagttttttca

SEQ ID NO: 4997490 - DNA, 25 bp, Homo sapien
aatacatgccgcgtgatcctagtag

SEQ ID NO: 4997491 - DNA, 25 bp, Homo sapien
tcacaaccttctacaagtttttgga

SEQ ID NO: 4997492 - DNA, 25 bp, Homo sapien
tacaccttcacctcaaaggctttct

SEQ ID NO: 4997493 - DNA, 25 bp, Homo sapien
aaatcatgtcatacagcagcccagg

SEQ ID NO: 4997494 - DNA, 25 bp, Homo sapien
gaataaatcattgagccaggcagca

SEQ ID NO: 4997495 - DNA, 25 bp, Homo sapien
tcatagtgagtacacagccgttgct

SEQ ID NO: 4997496 - DNA, 25 bp, Homo sapien
tcagagcagggatacctatattggc

SEQ ID NO: 4997497 - DNA, 25 bp, Homo sapien
ggaaaacaagctgcctaagagcctg

SEQ ID NO: 4997498 - DNA, 25 bp, Homo sapien
gggtcgtcctgacacctaagggata

SEQ ID NO: 4997499 - DNA, 25 bp, Homo sapien
cagaggacagcgaaccggtgttgac

SEQ ID NO: 4997500 - DNA, 25 bp, Homo sapien
cacaagagagatctggccaagaccg

SEQ ID NO: 4997501 - DNA, 25 bp, Homo sapien
aaaacgcgactgcgcaaatggcttg

SEQ ID NO: 4997502 - DNA, 25 bp, Homo sapien
cttgtggggaaagctcgtgggcctt

SEQ ID NO: 4997503 - DNA, 25 bp, Homo sapien
acgcgactgcgcaaatggcttgtgg

SEQ ID NO: 4997504 - DNA, 25 bp, Homo sapien
ggcaccgggagcgtagccttttggc

SEQ ID NO: 4997505 - DNA, 25 bp, Homo sapien
ccgcgctgggcacccatatggcgga

SEQ ID NO: 4997506 - DNA, 25 bp, Homo sapien
atatggcggaggaacccggcacgta

SEQ ID NO: 4997507 - DNA, 25 bp, Homo sapien
cccggcacgtagaggagttggacct

SEQ ID NO: 4997508 - DNA, 25 bp, Homo sapien
ttggacctaagaccgcgatcactct

SEQ ID NO: 4997509 - DNA, 25 bp, Homo sapien
gcagagcccagctacgggcccgcag

SEQ ID NO: 4997510 - DNA, 25 bp, Homo sapien
tcgcagagcccagctacgggcccgc

SEQ ID NO: 4997511 - DNA, 25 bp, Homo sapien
agagcccagctacgggcccgcagtc

SEQ ID NO: 4997512 - DNA, 25 bp, Homo sapien
ctcgcagagcccagctacgggcccg

SEQ ID NO: 4997513 - DNA, 25 bp, Homo sapien
acagctcttaggcactccggtggcc

SEQ ID NO: 4997514 - DNA, 25 bp, Homo sapien
gaaaggaagagcgacatcggaagac

SEQ ID NO: 4997515 - DNA, 25 bp, Homo sapien
gacatcggaagacagctcttaggca

SEQ ID NO: 4997516 - DNA, 25 bp, Homo sapien
ctccctcgccggtcgcgcgggaaag

SEQ ID NO: 4997517 - DNA, 25 bp, Homo sapien
gggcttgatgctggagcagaaaggc

SEQ ID NO: 4997518 - DNA, 25 bp, Homo sapien
ttatagaatcctgactgcaaagcac

SEQ ID NO: 4997519 - DNA, 25 bp, Homo sapien
catatgattaaacaatctactcact

SEQ ID NO: 4997520 - DNA, 25 bp, Homo sapien
gctgttgattttcacgtcttattac

SEQ ID NO: 4997521 - DNA, 25 bp, Homo sapien
tactgtccattcctgcaagaagctc

SEQ ID NO: 4997522 - DNA, 25 bp, Homo sapien
ccattcctgcaagaagctctatttc

SEQ ID NO: 4997523 - DNA, 25 bp, Homo sapien
tgaaccatactgtccattcctgcaa

SEQ ID NO: 4997524 - DNA, 25 bp, Homo sapien
tcccaccactgaaccatactgtcca

SEQ ID NO: 4997525 - DNA, 25 bp, Homo sapien
catctcgaaaaacaacagaggctgg

SEQ ID NO: 4997526 - DNA, 25 bp, Homo sapien
tctcgaaaaacaacagaggctgggt

SEQ ID NO: 4997527 - DNA, 25 bp, Homo sapien
ctccatctcgaaaaacaacagaggc

SEQ ID NO: 4997528 - DNA, 25 bp, Homo sapien
ccatctcgaaaaacaacagaggctg

SEQ ID NO: 4997529 - DNA, 25 bp, Homo sapien
aagctctactaactatttaacagga

SEQ ID NO: 4997530 - DNA, 25 bp, Homo sapien
tgaccattcaccattaaagcattaa

SEQ ID NO: 4997531 - DNA, 25 bp, Homo sapien
acaacttgtaactggatgagaagaa

SEQ ID NO: 4997532 - DNA, 25 bp, Homo sapien
aaagagcatgctcttttgaatctga

SEQ ID NO: 4997533 - DNA, 25 bp, Homo sapien
gccctgtcctctgagcaaaccattt

SEQ ID NO: 4997534 - DNA, 25 bp, Homo sapien
tgagcaaaccatttctaatactcca

SEQ ID NO: 4997535 - DNA, 25 bp, Homo sapien
taggaaggtgaccaagccctgtcct

SEQ ID NO: 4997536 - DNA, 25 bp, Homo sapien
aaccatttctaatactccaaacaag

SEQ ID NO: 4997537 - DNA, 25 bp, Homo sapien
gactgcaccaatagatatgaacttt

SEQ ID NO: 4997538 - DNA, 25 bp, Homo sapien
tttttaaactaggaagactgcacca

SEQ ID NO: 4997539 - DNA, 25 bp, Homo sapien
tagatcaacttaagaacagtatggt

SEQ ID NO: 4997540 - DNA, 25 bp, Homo sapien
tatgggttcacatgtaaactttcag

SEQ ID NO: 4997541 - DNA, 25 bp, Homo sapien
ctaaggctgtgagtctgttggagtg

SEQ ID NO: 4997542 - DNA, 25 bp, Homo sapien
ctccagaaacagaatgcttcagaaa

SEQ ID NO: 4997543 - DNA, 25 bp, Homo sapien
tacaatcttgatcgcatgggccatt

SEQ ID NO: 4997544 - DNA, 25 bp, Homo sapien
gaaactgaccagtagcaccgatgta

SEQ ID NO: 4997545 - DNA, 25 bp, Homo sapien
cggtacctcagatgggaatgcagaa

SEQ ID NO: 4997546 - DNA, 25 bp, Homo sapien
ggcactgcctagtgagatgaacccg

SEQ ID NO: 4997547 - DNA, 25 bp, Homo sapien
tttcgcggcggggaccttgccacca

SEQ ID NO: 4997548 - DNA, 25 bp, Homo sapien
aaccgcgaaggagccggctttcgcg

SEQ ID NO: 4997549 - DNA, 25 bp, Homo sapien
ctcgcgggccgaggtcgttctcccg

SEQ ID NO: 4997550 - DNA, 25 bp, Homo sapien
agccacctgtgaaccgcgaaggagc

SEQ ID NO: 4997551 - DNA, 25 bp, Homo sapien
aaggtgtcctggtctcggccccagc

SEQ ID NO: 4997552 - DNA, 25 bp, Homo sapien
gggcagatcaaggtgtcctggtctc

SEQ ID NO: 4997553 - DNA, 25 bp, Homo sapien
acccaagacggtgactggcagggca

SEQ ID NO: 4997554 - DNA, 25 bp, Homo sapien
ctacccaagacggtgactggcaggg

SEQ ID NO: 4997555 - DNA, 25 bp, Homo sapien
tgagatgcgcgatgtaggtggtggc

SEQ ID NO: 4997556 - DNA, 25 bp, Homo sapien
gcgcagggcgcccaacccggcgtcc

SEQ ID NO: 4997557 - DNA, 25 bp, Homo sapien
tccgccggcgcctcggcgtcgtcct

SEQ ID NO: 4997558 - DNA, 25 bp, Homo sapien
tgcaggctgcgggtgagatgcgcga

SEQ ID NO: 4997559 - DNA, 25 bp, Homo sapien
aagcgtgccgcagggtctgcacccg

SEQ ID NO: 4997560 - DNA, 25 bp, Homo sapien
aggaaagcgtgccgcagggtctgca

SEQ ID NO: 4997561 - DNA, 25 bp, Homo sapien
tccaggaaagcgtgccgcagggtct

SEQ ID NO: 4997562 - DNA, 25 bp, Homo sapien
gaaagcgtgccgcagggtctgcacc

SEQ ID NO: 4997563 - DNA, 25 bp, Homo sapien
gccgcccgctcccggaacgcgagcc

SEQ ID NO: 4997564 - DNA, 25 bp, Homo sapien
ctcccggaacgcgagccgcccccag

SEQ ID NO: 4997565 - DNA, 25 bp, Homo sapien
gcccgctcccggaacgcgagccgcc

SEQ ID NO: 4997566 - DNA, 25 bp, Homo sapien
gctcccggaacgcgagccgccccca

SEQ ID NO: 4997567 - DNA, 25 bp, Homo sapien
ggctgcccgctgggcggccgcggtc

SEQ ID NO: 4997568 - DNA, 25 bp, Homo sapien
gcccgctgggcggccgcggtccatg

SEQ ID NO: 4997569 - DNA, 25 bp, Homo sapien
ctgcccgctgggcggccgcggtcca

SEQ ID NO: 4997570 - DNA, 25 bp, Homo sapien
tgcccgctgggcggccgcggtccat

SEQ ID NO: 4997571 - DNA, 25 bp, Homo sapien
ctgcaaaggaccgaaggtgcggtga

SEQ ID NO: 4997572 - DNA, 25 bp, Homo sapien
ggtcgggcttaacccgagaggcgca

SEQ ID NO: 4997573 - DNA, 25 bp, Homo sapien
gcaaaggaccgaaggtgcggtgagg

SEQ ID NO: 4997574 - DNA, 25 bp, Homo sapien
tcgggcttaacccgagaggcgcagc

SEQ ID NO: 4997575 - DNA, 25 bp, Homo sapien
tctcaagcgagctcgttttgcctgg

SEQ ID NO: 4997576 - DNA, 25 bp, Homo sapien
ggctaagggcgctctcaagcgagct

SEQ ID NO: 4997577 - DNA, 25 bp, Homo sapien
gcctgggacgcgatttgcttccgga

SEQ ID NO: 4997578 - DNA, 25 bp, Homo sapien
gagagttgcggaactccggagttct

SEQ ID NO: 4997579 - DNA, 25 bp, Homo sapien
gaagaaagatctcggaagcacagct

SEQ ID NO: 4997580 - DNA, 25 bp, Homo sapien
tcaggatcagcactcgttcgcgctt

SEQ ID NO: 4997581 - DNA, 25 bp, Homo sapien
caacccggcacgcacgagaggtggc

SEQ ID NO: 4997582 - DNA, 25 bp, Homo sapien
ggtgactttatccaacccggcacgc

SEQ ID NO: 4997583 - DNA, 25 bp, Homo sapien
gttccgagcccgagagctgcgcagt

SEQ ID NO: 4997584 - DNA, 25 bp, Homo sapien
tgcgcagtacgcgtctgacgggccc

SEQ ID NO: 4997585 - DNA, 25 bp, Homo sapien
agagctgcgcagtacgcgtctgacg

SEQ ID NO: 4997586 - DNA, 25 bp, Homo sapien
agcccgagagctgcgcagtacgcgt

SEQ ID NO: 4997587 - DNA, 25 bp, Homo sapien
agtcgacggctgtttccaacctccg

SEQ ID NO: 4997588 - DNA, 25 bp, Homo sapien
gctgagtggagctccgctccgtcgt

SEQ ID NO: 4997589 - DNA, 25 bp, Homo sapien
gtcactccatcctcgtccggccgat

SEQ ID NO: 4997590 - DNA, 25 bp, Homo sapien
gctccgtcgtgagggcgggcgaggg

SEQ ID NO: 4997591 - DNA, 25 bp, Homo sapien
cgtgtgtgctccgaccggctaaggc

SEQ ID NO: 4997592 - DNA, 25 bp, Homo sapien
ccgcggccaggcgtgtgtgctccga

SEQ ID NO: 4997593 - DNA, 25 bp, Homo sapien
ccaggcgtgtgtgctccgaccggct

SEQ ID NO: 4997594 - DNA, 25 bp, Homo sapien
tgctccgaccggctaaggcaggtcg

SEQ ID NO: 4997595 - DNA, 25 bp, Homo sapien
cctcacgctgctttccccgaggcgc

SEQ ID NO: 4997596 - DNA, 25 bp, Homo sapien
gagagtttggggtgtctgccgccgg

SEQ ID NO: 4997597 - DNA, 25 bp, Homo sapien
tcacgctgctttccccgaggcgcct

SEQ ID NO: 4997598 - DNA, 25 bp, Homo sapien
tgcctcacgctgctttccccgaggc

SEQ ID NO: 4997599 - DNA, 25 bp, Homo sapien
agtctgattccaggccgcttccagg

SEQ ID NO: 4997600 - DNA, 25 bp, Homo sapien
aacgctgcagtttggttgagcgtga

SEQ ID NO: 4997601 - DNA, 25 bp, Homo sapien
cagtctgattccaggccgcttccag

SEQ ID NO: 4997602 - DNA, 25 bp, Homo sapien
gtttggttgagcgtgacttttaggc

SEQ ID NO: 4997603 - DNA, 25 bp, Homo sapien
ctgtgaggaaaagtcgagcgcgcca

SEQ ID NO: 4997604 - DNA, 25 bp, Homo sapien
cacatcgaggcgctagccgtttatt

SEQ ID NO: 4997605 - DNA, 25 bp, Homo sapien
aggaaaagtcgagcgcgccacatcg

SEQ ID NO: 4997606 - DNA, 25 bp, Homo sapien
tcgagcgcgccacatcgaggcgcta

SEQ ID NO: 4997607 - DNA, 25 bp, Homo sapien
tcacaggtggaaagcaatgtttcag

SEQ ID NO: 4997608 - DNA, 25 bp, Homo sapien
ccataaagctacaaacccacaaaag

SEQ ID NO: 4997609 - DNA, 25 bp, Homo sapien
ttcagattctataaagcagcaaatc

SEQ ID NO: 4997610 - DNA, 25 bp, Homo sapien
caaaatcaaacgtttcctgtcactt

SEQ ID NO: 4997611 - DNA, 25 bp, Homo sapien
caagctttcagattgcttcaaagag

SEQ ID NO: 4997612 - DNA, 25 bp, Homo sapien
cttctgggttatggaagaggtgagg

SEQ ID NO: 4997613 - DNA, 25 bp, Homo sapien
ttttgtcagcaagctttcagattgc

SEQ ID NO: 4997614 - DNA, 25 bp, Homo sapien
tatggaagaggtgaggttcatgcac

SEQ ID NO: 4997615 - DNA, 25 bp, Homo sapien
atatagagtgtagggacacgtctgc

SEQ ID NO: 4997616 - DNA, 25 bp, Homo sapien
taaatatagagtgtagggacacgtc

SEQ ID NO: 4997617 - DNA, 25 bp, Homo sapien
aatatagagtgtagggacacgtctg

SEQ ID NO: 4997618 - DNA, 25 bp, Homo sapien
atagagtgtagggacacgtctgctg

SEQ ID NO: 4997619 - DNA, 25 bp, Homo sapien
ggtgtatccagtctaacgccgaagt

SEQ ID NO: 4997620 - DNA, 25 bp, Homo sapien
cagtctaacgccgaagtcttctgga

SEQ ID NO: 4997621 - DNA, 25 bp, Homo sapien
ccatcgtaactttctgagtgtttgg

SEQ ID NO: 4997622 - DNA, 25 bp, Homo sapien
ccttcccatcgtaactttctgagtg

SEQ ID NO: 4997623 - DNA, 25 bp, Homo sapien
tttacagggtatctctgtatttcag

SEQ ID NO: 4997624 - DNA, 25 bp, Homo sapien
tttgcatttacagggtatctctgta

SEQ ID NO: 4997625 - DNA, 25 bp, Homo sapien
catttacagggtatctctgtatttc

SEQ ID NO: 4997626 - DNA, 25 bp, Homo sapien
tgcatttacagggtatctctgtatt

SEQ ID NO: 4997627 - DNA, 25 bp, Homo sapien
tgggtaataaacaggaactatatga

SEQ ID NO: 4997628 - DNA, 25 bp, Homo sapien
ctgtgggtaataaacaggaactata

SEQ ID NO: 4997629 - DNA, 25 bp, Homo sapien
gtaataaacaggaactatatgatgc

SEQ ID NO: 4997630 - DNA, 25 bp, Homo sapien
gtgggtaataaacaggaactatatg

SEQ ID NO: 4997631 - DNA, 25 bp, Homo sapien
tatgagtgaattgcttgcatcctca

SEQ ID NO: 4997632 - DNA, 25 bp, Homo sapien
tgcatcctcatttttactgctcctt

SEQ ID NO: 4997633 - DNA, 25 bp, Homo sapien
tccaattcattaggaattgtctttc

SEQ ID NO: 4997634 - DNA, 25 bp, Homo sapien
gcatctttggatgctttccaattca

SEQ ID NO: 4997635 - DNA, 25 bp, Homo sapien
cttgcagtagtctcaatcagtggac

SEQ ID NO: 4997636 - DNA, 25 bp, Homo sapien
ttgcagtagtctcaatcagtggact

SEQ ID NO: 4997637 - DNA, 25 bp, Homo sapien
gctcatgagctatgttctctatagg

SEQ ID NO: 4997638 - DNA, 25 bp, Homo sapien
tgagctatgttctctataggacact

SEQ ID NO: 4997639 - DNA, 25 bp, Homo sapien
aatgctcatgagctatgttctctat

SEQ ID NO: 4997640 - DNA, 25 bp, Homo sapien
ttctgaaatgctcatgagctatgtt

SEQ ID NO: 4997641 - DNA, 25 bp, Homo sapien
catcccactttatccgatgcagcat

SEQ ID NO: 4997642 - DNA, 25 bp, Homo sapien
ccactttatccgatgcagcataaga

SEQ ID NO: 4997643 - DNA, 25 bp, Homo sapien
atcccactttatccgatgcagcata

SEQ ID NO: 4997644 - DNA, 25 bp, Homo sapien
cccactttatccgatgcagcataag

SEQ ID NO: 4997645 - DNA, 25 bp, Homo sapien
ccttccactactaccacgttgacac

SEQ ID NO: 4997646 - DNA, 25 bp, Homo sapien
cttccactactaccacgttgacacc

SEQ ID NO: 4997647 - DNA, 25 bp, Homo sapien
cccttccactactaccacgttgaca

SEQ ID NO: 4997648 - DNA, 25 bp, Homo sapien
tgcagtaacaccactcctatcaggt

SEQ ID NO: 4997649 - DNA, 25 bp, Homo sapien
taacaccactcctatcaggtacagt

SEQ ID NO: 4997650 - DNA, 25 bp, Homo sapien
agtaacaccactcctatcaggtaca

SEQ ID NO: 4997651 - DNA, 25 bp, Homo sapien
acaccactcctatcaggtacagttg

SEQ ID NO: 4997652 - DNA, 25 bp, Homo sapien
ctaactccatatacagatacgtgta

SEQ ID NO: 4997653 - DNA, 25 bp, Homo sapien
actccatatacagatacgtgtaccc

SEQ ID NO: 4997654 - DNA, 25 bp, Homo sapien
tccatatacagatacgtgtaccccc

SEQ ID NO: 4997655 - DNA, 25 bp, Homo sapien
aactccatatacagatacgtgtacc

SEQ ID NO: 4997656 - DNA, 25 bp, Homo sapien
gtcaactggagcattgagctgggct

SEQ ID NO: 4997657 - DNA, 25 bp, Homo sapien
tcaactggagcattgagctgggctg

SEQ ID NO: 4997658 - DNA, 25 bp, Homo sapien
caactggagcattgagctgggctgg

SEQ ID NO: 4997659 - DNA, 25 bp, Homo sapien
aaagccattggggattatgtaagag

SEQ ID NO: 4997660 - DNA, 25 bp, Homo sapien
agccattggggattatgtaagagtc

SEQ ID NO: 4997661 - DNA, 25 bp, Homo sapien
attggggattatgtaagagtcccac

SEQ ID NO: 4997662 - DNA, 25 bp, Homo sapien
ccattggggattatgtaagagtccc

SEQ ID NO: 4997663 - DNA, 25 bp, Homo sapien
tgagcctttgtccttaatcgctgag

SEQ ID NO: 4997664 - DNA, 25 bp, Homo sapien
gttgagcctttgtccttaatcgctg

SEQ ID NO: 4997665 - DNA, 25 bp, Homo sapien
aaagtatggatgtctgttttttgag

SEQ ID NO: 4997666 - DNA, 25 bp, Homo sapien
gtcaaagtatggatgtctgtttttt

SEQ ID NO: 4997667 - DNA, 25 bp, Homo sapien
tgaatggttccctccgaagagggaa

SEQ ID NO: 4997668 - DNA, 25 bp, Homo sapien
gcttgaatggttccctccgaagagg

SEQ ID NO: 4997669 - DNA, 25 bp, Homo sapien
gttgcttgaatggttccctccgaag

SEQ ID NO: 4997670 - DNA, 25 bp, Homo sapien
tgcttgaatggttccctccgaagag

SEQ ID NO: 4997671 - DNA, 25 bp, Homo sapien
ggagtagacatgcagtgtgtcagct

SEQ ID NO: 4997672 - DNA, 25 bp, Homo sapien
gaatattggcaggagtagacatgca

SEQ ID NO: 4997673 - DNA, 25 bp, Homo sapien
gcaggagtagacatgcagtgtgtca

SEQ ID NO: 4997674 - DNA, 25 bp, Homo sapien
tattggcaggagtagacatgcagtg

SEQ ID NO: 4997675 - DNA, 25 bp, Homo sapien
gcccatgtcatggagattagacggg

SEQ ID NO: 4997676 - DNA, 25 bp, Homo sapien
catgtcatggagattagacgggccc

SEQ ID NO: 4997677 - DNA, 25 bp, Homo sapien
tgtcatggagattagacgggcccac

SEQ ID NO: 4997678 - DNA, 25 bp, Homo sapien
ccatgtcatggagattagacgggcc

SEQ ID NO: 4997679 - DNA, 25 bp, Homo sapien
aatagtgtggccaattggaagttgc

SEQ ID NO: 4997680 - DNA, 25 bp, Homo sapien
cattcatgaaagtggcaccctggga

SEQ ID NO: 4997681 - DNA, 25 bp, Homo sapien
gccagcccggcttggattcgagctt

SEQ ID NO: 4997682 - DNA, 25 bp, Homo sapien
ttggcattgctgatgagtcctggct

SEQ ID NO: 4997683 - DNA, 25 bp, Homo sapien
tcctggatttgccattttgctgcgt

SEQ ID NO: 4997684 - DNA, 25 bp, Homo sapien
tgtccatgctcttccctacagcagt

SEQ ID NO: 4997685 - DNA, 25 bp, Homo sapien
ggagagctcaagagtcatcaccaaa

SEQ ID NO: 4997686 - DNA, 25 bp, Homo sapien
gctttcgttttctgcttccgtcact

SEQ ID NO: 4997687 - DNA, 25 bp, Homo sapien
tgggactcaatactacagctcacaa

SEQ ID NO: 4997688 - DNA, 25 bp, Homo sapien
gaatagctcaaatgggactcaatac

SEQ ID NO: 4997689 - DNA, 25 bp, Homo sapien
atgggactcaatactacagctcaca

SEQ ID NO: 4997690 - DNA, 25 bp, Homo sapien
aaaagaatagctcaaatgggactca

SEQ ID NO: 4997691 - DNA, 25 bp, Homo sapien
tcagccccgagacggaggccgaaag

SEQ ID NO: 4997692 - DNA, 25 bp, Homo sapien
cagccccgagacggaggccgaaagt

SEQ ID NO: 4997693 - DNA, 25 bp, Homo sapien
gcatgcgtcgcagaaccgaaacgtt

SEQ ID NO: 4997694 - DNA, 25 bp, Homo sapien
taggcctgttgtccctatcgccacg

SEQ ID NO: 4997695 - DNA, 25 bp, Homo sapien
acgtttccgtgaacaagttgcttgc

SEQ ID NO: 4997696 - DNA, 25 bp, Homo sapien
tgtctcccaacacgtgaccagagtg

SEQ ID NO: 4997697 - DNA, 25 bp, Homo sapien
tttctgccaagttaatgtctttaac

SEQ ID NO: 4997698 - DNA, 25 bp, Homo sapien
tctgccaagttaatgtctttaactt

SEQ ID NO: 4997699 - DNA, 25 bp, Homo sapien
gtttctgccaagttaatgtctttaa

SEQ ID NO: 4997700 - DNA, 25 bp, Homo sapien
tgtttctgccaagttaatgtcttta

SEQ ID NO: 4997701 - DNA, 25 bp, Homo sapien
tacagaaccaagagctaaggagtct

SEQ ID NO: 4997702 - DNA, 25 bp, Homo sapien
ggatctcataaagggtctcgtcacc

SEQ ID NO: 4997703 - DNA, 25 bp, Homo sapien
tcctatcaaacgaaagggattcctg

SEQ ID NO: 4997704 - DNA, 25 bp, Homo sapien
taaaatgactcccatagccttcgtg

SEQ ID NO: 4997705 - DNA, 25 bp, Homo sapien
tcctccttaaggaataagtatcagg

SEQ ID NO: 4997706 - DNA, 25 bp, Homo sapien
caattttcacagatccagatgtcag

SEQ ID NO: 4997707 - DNA, 25 bp, Homo sapien
aataagtatcaggtgctttaattac

SEQ ID NO: 4997708 - DNA, 25 bp, Homo sapien
caaaaagttaactaggtgtcattct

SEQ ID NO: 4997709 - DNA, 25 bp, Homo sapien
agtgatttggacaccaatatcagtc

SEQ ID NO: 4997710 - DNA, 25 bp, Homo sapien
gacaccaatatcagtctgtccctgt

SEQ ID NO: 4997711 - DNA, 25 bp, Homo sapien
gtctgtccctgtattttggtttgag

SEQ ID NO: 4997712 - DNA, 25 bp, Homo sapien
ctgtccctgtattttggtttgagac

SEQ ID NO: 4997713 - DNA, 25 bp, Homo sapien
aagtgcctggaacaaagaaagtaat

SEQ ID NO: 4997714 - DNA, 25 bp, Homo sapien
tagttgccatggcatataaagtgcc

SEQ ID NO: 4997715 - DNA, 25 bp, Homo sapien
gtctgcactagactttgagggattc

SEQ ID NO: 4997716 - DNA, 25 bp, Homo sapien
gaccttaggcaaatatatgtcttca

SEQ ID NO: 4997717 - DNA, 25 bp, Homo sapien
tgtctggaccaaccgtccttactaa

SEQ ID NO: 4997718 - DNA, 25 bp, Homo sapien
caatctttatcggaaatgtctggac

SEQ ID NO: 4997719 - DNA, 25 bp, Homo sapien
cagcatactccaatctttatcggaa

SEQ ID NO: 4997720 - DNA, 25 bp, Homo sapien
tccttactaaatctaaagacagcca

SEQ ID NO: 4997721 - DNA, 25 bp, Homo sapien
ttttcaaaccgctaatctcagccac

SEQ ID NO: 4997722 - DNA, 25 bp, Homo sapien
caatctgttcttcatattgtagcca

SEQ ID NO: 4997723 - DNA, 25 bp, Homo sapien
cagccacataccgagaactgaacat

SEQ ID NO: 4997724 - DNA, 25 bp, Homo sapien
tctgttcttcatattgtagccatgt

SEQ ID NO: 4997725 - DNA, 25 bp, Homo sapien
gtggttttgttaggattctctaatg

SEQ ID NO: 4997726 - DNA, 25 bp, Homo sapien
ttaggtccatataaaagcagctgct

SEQ ID NO: 4997727 - DNA, 25 bp, Homo sapien
tgtaggcacacttaaggaacttagg

SEQ ID NO: 4997728 - DNA, 25 bp, Homo sapien
tgtattttctgtaggcacacttaag

SEQ ID NO: 4997729 - DNA, 25 bp, Homo sapien
ttttaaagcatagataacaagaccc

SEQ ID NO: 4997730 - DNA, 25 bp, Homo sapien
ctctagagagtaccattggattttt

SEQ ID NO: 4997731 - DNA, 25 bp, Homo sapien
catagataacaagacccaggctgct

SEQ ID NO: 4997732 - DNA, 25 bp, Homo sapien
aaaaaatccggtcctactatctctg

SEQ ID NO: 4997733 - DNA, 25 bp, Homo sapien
tatggagggcaattctggtcctggt

SEQ ID NO: 4997734 - DNA, 25 bp, Homo sapien
ggttactacatcatggcccattaga

SEQ ID NO: 4997735 - DNA, 25 bp, Homo sapien
ttttctcttagggacaacaggcctg

SEQ ID NO: 4997736 - DNA, 25 bp, Homo sapien
gtagtattaagagataggcctttgg

SEQ ID NO: 4997737 - DNA, 25 bp, Homo sapien
aactcattcattgggagatcaggct

SEQ ID NO: 4997738 - DNA, 25 bp, Homo sapien
tctagtcacagttactagaaactca

SEQ ID NO: 4997739 - DNA, 25 bp, Homo sapien
cattgggagatcaggcttaagggac

SEQ ID NO: 4997740 - DNA, 25 bp, Homo sapien
aagagagagttcaggtctagtcaca

SEQ ID NO: 4997741 - DNA, 25 bp, Homo sapien
tatttattttatagctattacaaaa

SEQ ID NO: 4997742 - DNA, 25 bp, Homo sapien
tattttatagctattacaaaacatt

SEQ ID NO: 4997743 - DNA, 25 bp, Homo sapien
catttttcaatcataatttcatgta

SEQ ID NO: 4997744 - DNA, 25 bp, Homo sapien
aacatttttcaatcataatttcatg

SEQ ID NO: 4997745 - DNA, 25 bp, Homo sapien
cttcacatgcagaagttggttgtca

SEQ ID NO: 4997746 - DNA, 25 bp, Homo sapien
gctgattaagattctctagtagttc

SEQ ID NO: 4997747 - DNA, 25 bp, Homo sapien
gttggttgtcaacggctatgagctg

SEQ ID NO: 4997748 - DNA, 25 bp, Homo sapien
ctatgagctgattaagattctctag

SEQ ID NO: 4997749 - DNA, 25 bp, Homo sapien
tgatattcaatatacagagggattt

SEQ ID NO: 4997750 - DNA, 25 bp, Homo sapien
tcctaatccttctaaaccttctatg

SEQ ID NO: 4997751 - DNA, 25 bp, Homo sapien
tgacagcaatgtaattgcctcccag

SEQ ID NO: 4997752 - DNA, 25 bp, Homo sapien
gaagagttcttggatcaaacagaag

SEQ ID NO: 4997753 - DNA, 25 bp, Homo sapien
gattctcaacatgaagctctcttag

SEQ ID NO: 4997754 - DNA, 25 bp, Homo sapien
gacctgaggttctctatacatgaaa

SEQ ID NO: 4997755 - DNA, 25 bp, Homo sapien
caggttagtgatttgactaatacaa

SEQ ID NO: 4997756 - DNA, 25 bp, Homo sapien
gtacaagtgggtcagatttgtggca

SEQ ID NO: 4997757 - DNA, 25 bp, Homo sapien
tttgtggcataattcaggttagtga

SEQ ID NO: 4997758 - DNA, 25 bp, Homo sapien
tcggggtttaagattgctgtttctg

SEQ ID NO: 4997759 - DNA, 25 bp, Homo sapien
ttctggcaattagatccaaggtcag

SEQ ID NO: 4997760 - DNA, 25 bp, Homo sapien
ctgtttctggcaattagatccaagg

SEQ ID NO: 4997761 - DNA, 25 bp, Homo sapien
ttagatccaaggtcagtcgaaccat

SEQ ID NO: 4997762 - DNA, 25 bp, Homo sapien
ctttataaatcaaactctcagcaaa

SEQ ID NO: 4997763 - DNA, 25 bp, Homo sapien
tttctttataaatcaaactctcagc

SEQ ID NO: 4997764 - DNA, 25 bp, Homo sapien
tctttataaatcaaactctcagcaa

SEQ ID NO: 4997765 - DNA, 25 bp, Homo sapien
ttataaatcaaactctcagcaaaag

SEQ ID NO: 4997766 - DNA, 25 bp, Homo sapien
caccatgtcaagaagtaggtttagg

SEQ ID NO: 4997767 - DNA, 25 bp, Homo sapien
tgtcaagaagtaggtttaggtatta

SEQ ID NO: 4997768 - DNA, 25 bp, Homo sapien
ccatgtcaagaagtaggtttaggta

SEQ ID NO: 4997769 - DNA, 25 bp, Homo sapien
tgacaccatgtcaagaagtaggttt

SEQ ID NO: 4997770 - DNA, 25 bp, Homo sapien
gacccaaagacgcagagttgtatac

SEQ ID NO: 4997771 - DNA, 25 bp, Homo sapien
gacgcagagttgtatacttgcatac

SEQ ID NO: 4997772 - DNA, 25 bp, Homo sapien
atggagacccaaagacgcagagttg

SEQ ID NO: 4997773 - DNA, 25 bp, Homo sapien
caaagacgcagagttgtatacttgc

SEQ ID NO: 4997774 - DNA, 25 bp, Homo sapien
tctttacaggctctagggatccatt

SEQ ID NO: 4997775 - DNA, 25 bp, Homo sapien
ccaccggtgggaacagcttagagct

SEQ ID NO: 4997776 - DNA, 25 bp, Homo sapien
tctcgtgttactttgggactcctct

SEQ ID NO: 4997777 - DNA, 25 bp, Homo sapien
gagcttaaactgaacctaaagtgga

SEQ ID NO: 4997778 - DNA, 25 bp, Homo sapien
gggacagtccggtagctaactccag

SEQ ID NO: 4997779 - DNA, 25 bp, Homo sapien
aagcgccgctcacgagaaatctcgc

SEQ ID NO: 4997780 - DNA, 25 bp, Homo sapien
gaaatctcgcgacatcgcaggctgc

SEQ ID NO: 4997781 - DNA, 25 bp, Homo sapien
cagtttggtcggtttcatcggcgcc

SEQ ID NO: 4997782 - DNA, 25 bp, Homo sapien
gaaatgctgaaattgactaatttag

SEQ ID NO: 4997783 - DNA, 25 bp, Homo sapien
gaaaaatattgcgaatcttcccaca

SEQ ID NO: 4997784 - DNA, 25 bp, Homo sapien
catattcaagaaccgtaatggatac

SEQ ID NO: 4997785 - DNA, 25 bp, Homo sapien
tctgacaatcagtatggcaagtgaa

SEQ ID NO: 4997786 - DNA, 25 bp, Homo sapien
cagagcaccttatacttctaatcag

SEQ ID NO: 4997787 - DNA, 25 bp, Homo sapien
catactgtctttcaggtaaagtact

SEQ ID NO: 4997788 - DNA, 25 bp, Homo sapien
taaagagctttattacaggatatta

SEQ ID NO: 4997789 - DNA, 25 bp, Homo sapien
aatatttaggacacttcagagcacc

SEQ ID NO: 4997790 - DNA, 25 bp, Homo sapien
gacatcaatccatggatagcttcta

SEQ ID NO: 4997791 - DNA, 25 bp, Homo sapien
agacatcaatccatggatagcttct

SEQ ID NO: 4997792 - DNA, 25 bp, Homo sapien
acatcaatccatggatagcttctat

SEQ ID NO: 4997793 - DNA, 25 bp, Homo sapien
tatttcaaacacacaagatcagccc

SEQ ID NO: 4997794 - DNA, 25 bp, Homo sapien
ccaccaatactcagaagagatgcaa

SEQ ID NO: 4997795 - DNA, 25 bp, Homo sapien
caagcatcctccaacaatcagaagt

SEQ ID NO: 4997796 - DNA, 25 bp, Homo sapien
cagaagtcaaacttaggttagcggg

SEQ ID NO: 4997797 - DNA, 25 bp, Homo sapien
cccaggatacactttagctactctt

SEQ ID NO: 4997798 - DNA, 25 bp, Homo sapien
aggctaacccaaaatgacctccaat

SEQ ID NO: 4997799 - DNA, 25 bp, Homo sapien
gatggcagtgaaataaggctaaccc

SEQ ID NO: 4997800 - DNA, 25 bp, Homo sapien
tgtatagcctatatatctgaaggtc

SEQ ID NO: 4997801 - DNA, 25 bp, Homo sapien
gatggcaggtgcctatattcccagt

SEQ ID NO: 4997802 - DNA, 25 bp, Homo sapien
tacttgggaggctgaggcgggagaa

SEQ ID NO: 4997803 - DNA, 25 bp, Homo sapien
aacccggtaggcggaggttgcagtg

SEQ ID NO: 4997804 - DNA, 25 bp, Homo sapien
atcgcttgaacccggtaggcggagg

SEQ ID NO: 4997805 - DNA, 25 bp, Homo sapien
acatgaaactccctcgtcccagctg

SEQ ID NO: 4997806 - DNA, 25 bp, Homo sapien
acttttcagacaaatcaaagacctg

SEQ ID NO: 4997807 - DNA, 25 bp, Homo sapien
aaatcaaagacctgaccagtggtat

SEQ ID NO: 4997808 - DNA, 25 bp, Homo sapien
aagacctgaccagtggtatagtctg

SEQ ID NO: 4997809 - DNA, 25 bp, Homo sapien
ctgtggggaaagtggtattgtgtca

SEQ ID NO: 4997810 - DNA, 25 bp, Homo sapien
gatctgcttgcctcatacaaaggtt

SEQ ID NO: 4997811 - DNA, 25 bp, Homo sapien
tcatgtatgcagtgctggaatacag

SEQ ID NO: 4997812 - DNA, 25 bp, Homo sapien
cattgggctgagtaggtagatctgc

SEQ ID NO: 4997813 - DNA, 25 bp, Homo sapien
tacaaaggttcagactgttctggtc

SEQ ID NO: 4997814 - DNA, 25 bp, Homo sapien
gaaagctcaatccaacaactactgt

SEQ ID NO: 4997815 - DNA, 25 bp, Homo sapien
tttccttgaaagctcaatccaacaa

SEQ ID NO: 4997816 - DNA, 25 bp, Homo sapien
cttgaaagctcaatccaacaactac

SEQ ID NO: 4997817 - DNA, 25 bp, Homo sapien
tccttgaaagctcaatccaacaact

SEQ ID NO: 4997818 - DNA, 25 bp, Homo sapien
cggctatgaagcttagataaaattc

SEQ ID NO: 4997819 - DNA, 25 bp, Homo sapien
aaattcaaatgcattctttacaagt

SEQ ID NO: 4997820 - DNA, 25 bp, Homo sapien
aatgcattctttacaagtatagtac

SEQ ID NO: 4997821 - DNA, 25 bp, Homo sapien
ttaaacggctatgaagcttagataa

SEQ ID NO: 4997822 - DNA, 25 bp, Homo sapien
acgtattcacccagtatttattcca

SEQ ID NO: 4997823 - DNA, 25 bp, Homo sapien
aagcaagctagaagaactcaacgta

SEQ ID NO: 4997824 - DNA, 25 bp, Homo sapien
aagcaatttgcgatccaaagaggat

SEQ ID NO: 4997825 - DNA, 25 bp, Homo sapien
caatttgcgatccaaagaggatttg

SEQ ID NO: 4997826 - DNA, 25 bp, Homo sapien
taaagcagttagtgagccacatgga

SEQ ID NO: 4997827 - DNA, 25 bp, Homo sapien
ggaacagcaagtgccagtgctctga

SEQ ID NO: 4997828 - DNA, 25 bp, Homo sapien
gaaataagagcgttctaggcagagg

SEQ ID NO: 4997829 - DNA, 25 bp, Homo sapien
gattgcagaccagcagaagttcagt

SEQ ID NO: 4997830 - DNA, 25 bp, Homo sapien
attaagtggaatagtctggtactca

SEQ ID NO: 4997831 - DNA, 25 bp, Homo sapien
ttttattaagtggaatagtctggta

SEQ ID NO: 4997832 - DNA, 25 bp, Homo sapien
tattaagtggaatagtctggtactc

SEQ ID NO: 4997833 - DNA, 25 bp, Homo sapien
cctaaaggcgccaagattcactttc

SEQ ID NO: 4997834 - DNA, 25 bp, Homo sapien
tttgggtatgtcctaaaggcgccaa

SEQ ID NO: 4997835 - DNA, 25 bp, Homo sapien
gtatgtcctaaaggcgccaagattc

SEQ ID NO: 4997836 - DNA, 25 bp, Homo sapien
tcctaaaggcgccaagattcacttt

SEQ ID NO: 4997837 - DNA, 25 bp, Homo sapien
tgctgattgagcatctgagtactaa

SEQ ID NO: 4997838 - DNA, 25 bp, Homo sapien
gtactaacatcaatcccagaaagcc

SEQ ID NO: 4997839 - DNA, 25 bp, Homo sapien
cactgctacaaatggttcctggaac

SEQ ID NO: 4997840 - DNA, 25 bp, Homo sapien
tagccagggtggctatgataccacc

SEQ ID NO: 4997841 - DNA, 25 bp, Homo sapien
cattttctatgtatgcagccatgta

SEQ ID NO: 4997842 - DNA, 25 bp, Homo sapien
aagttgcctcccgatctggcatgca

SEQ ID NO: 4997843 - DNA, 25 bp, Homo sapien
gcagcagcctgagcatttactcggg

SEQ ID NO: 4997844 - DNA, 25 bp, Homo sapien
aatgatcatggtttcaccatccacc

SEQ ID NO: 4997845 - DNA, 25 bp, Homo sapien
cagcagagccaatgctgagattttg

SEQ ID NO: 4997846 - DNA, 25 bp, Homo sapien
cttcagcagagccaatgctgagatt

SEQ ID NO: 4997847 - DNA, 25 bp, Homo sapien
tgctgagattttgcagtacttaaag

SEQ ID NO: 4997848 - DNA, 25 bp, Homo sapien
tttgcagtacttaaagtaatggtga

SEQ ID NO: 4997849 - DNA, 25 bp, Homo sapien
ccacaattagacagtgaggcaggcc

SEQ ID NO: 4997850 - DNA, 25 bp, Homo sapien
gataaccaagcaacttaagcagcct

SEQ ID NO: 4997851 - DNA, 25 bp, Homo sapien
attaatgcagcccaagacagctagg

SEQ ID NO: 4997852 - DNA, 25 bp, Homo sapien
gcagtcagtcaacgtctctacaaag

SEQ ID NO: 4997853 - DNA, 25 bp, Homo sapien
catgaatcgaaatcttggcttctcc

SEQ ID NO: 4997854 - DNA, 25 bp, Homo sapien
tcaagacatgaatcgaaatcttggc

SEQ ID NO: 4997855 - DNA, 25 bp, Homo sapien
gaagtcaagacatgaatcgaaatct

SEQ ID NO: 4997856 - DNA, 25 bp, Homo sapien
tgttggaagtcaagacatgaatcga

SEQ ID NO: 4997857 - DNA, 25 bp, Homo sapien
gagcctccgtgtgcctccgaaataa

SEQ ID NO: 4997858 - DNA, 25 bp, Homo sapien
tatgggtaaagatccctcgacttgt

SEQ ID NO: 4997859 - DNA, 25 bp, Homo sapien
aatctctagctaggtgcttccgcag

SEQ ID NO: 4997860 - DNA, 25 bp, Homo sapien
tagagaccaggtagtagagcctccg

SEQ ID NO: 4997861 - DNA, 25 bp, Homo sapien
aaaactattataggcccaggcctca

SEQ ID NO: 4997862 - DNA, 25 bp, Homo sapien
aaactattataggcccaggcctcac

SEQ ID NO: 4997863 - DNA, 25 bp, Homo sapien
gttgaagacccaaacaaggtgcatg

SEQ ID NO: 4997864 - DNA, 25 bp, Homo sapien
tgcatgtcgacactgggctcaaggt

SEQ ID NO: 4997865 - DNA, 25 bp, Homo sapien
tgagaccttgggctgctgactcgat

SEQ ID NO: 4997866 - DNA, 25 bp, Homo sapien
ggcttaggctctacttgcagatcca

SEQ ID NO: 4997867 - DNA, 25 bp, Homo sapien
ttttctgggccataccgctcccgga

SEQ ID NO: 4997868 - DNA, 25 bp, Homo sapien
tcctgcatgttgttggccagttccc

SEQ ID NO: 4997869 - DNA, 25 bp, Homo sapien
gatttcatcgatactctgagcttcc

SEQ ID NO: 4997870 - DNA, 25 bp, Homo sapien
cttgtcgtatttgtagatttcatcg

SEQ ID NO: 4997871 - DNA, 25 bp, Homo sapien
cgccgaggaagcggagaagttgtcg

SEQ ID NO: 4997872 - DNA, 25 bp, Homo sapien
gccgaggaagcggagaagttgtcgt

SEQ ID NO: 4997873 - DNA, 25 bp, Homo sapien
ccgaggaagcggagaagttgtcgtc

SEQ ID NO: 4997874 - DNA, 25 bp, Homo sapien
ctacaaccaagacgcaactttacct

SEQ ID NO: 4997875 - DNA, 25 bp, Homo sapien
ttgaccctccgcaccacgggaacaa

SEQ ID NO: 4997876 - DNA, 25 bp, Homo sapien
tccgcaccacgggaacaaactctta

SEQ ID NO: 4997877 - DNA, 25 bp, Homo sapien
aagacgcaactttacctcgctaggt

SEQ ID NO: 4997878 - DNA, 25 bp, Homo sapien
ctagactcttggggcagccatgaca

SEQ ID NO: 4997879 - DNA, 25 bp, Homo sapien
tagactcttggggcagccatgacac

SEQ ID NO: 4997880 - DNA, 25 bp, Homo sapien
tccgggacatgacgatataaacagc

SEQ ID NO: 4997881 - DNA, 25 bp, Homo sapien
taatagcgagagacgaatcttcttg

SEQ ID NO: 4997882 - DNA, 25 bp, Homo sapien
cttgtctcggaaaattatatgtgtg

SEQ ID NO: 4997883 - DNA, 25 bp, Homo sapien
tagagaccattcagggaagacaggg

SEQ ID NO: 4997884 - DNA, 25 bp, Homo sapien
gttcctaagctggctggtgcatggg

SEQ ID NO: 4997885 - DNA, 25 bp, Homo sapien
tgttcctaagctggctggtgcatgg

SEQ ID NO: 4997886 - DNA, 25 bp, Homo sapien
ctgttcctaagctggctggtgcatg

SEQ ID NO: 4997887 - DNA, 25 bp, Homo sapien
actgttcctaagctggctggtgcat

SEQ ID NO: 4997888 - DNA, 25 bp, Homo sapien
ttcggtccgcgacgatcctctagag

SEQ ID NO: 4997889 - DNA, 25 bp, Homo sapien
gctcccctgagtaagagtcagccag

SEQ ID NO: 4997890 - DNA, 25 bp, Homo sapien
caggtggccgctgtaacctcttcgg

SEQ ID NO: 4997891 - DNA, 25 bp, Homo sapien
gcaggagaacgagttgaccaagtcc

SEQ ID NO: 4997892 - DNA, 25 bp, Homo sapien
ttacacggtccggattcctgggcca

SEQ ID NO: 4997893 - DNA, 25 bp, Homo sapien
gatttcgccgccgtgaggccggcat

SEQ ID NO: 4997894 - DNA, 25 bp, Homo sapien
ggccggcatcggtgactacgagtta

SEQ ID NO: 4997895 - DNA, 25 bp, Homo sapien
ggagagttgggatttcgccgccgtg

SEQ ID NO: 4997896 - DNA, 25 bp, Homo sapien
acccctgtcagcctctgtagcaggg

SEQ ID NO: 4997897 - DNA, 25 bp, Homo sapien
gctcctaaacccctgtcagcctctg

SEQ ID NO: 4997898 - DNA, 25 bp, Homo sapien
cctaaacccctgtcagcctctgtag

SEQ ID NO: 4997899 - DNA, 25 bp, Homo sapien
taaacccctgtcagcctctgtagca

SEQ ID NO: 4997900 - DNA, 25 bp, Homo sapien
tgtacacagctactggagaaataat

SEQ ID NO: 4997901 - DNA, 25 bp, Homo sapien
atgtacacagctactggagaaataa

SEQ ID NO: 4997902 - DNA, 25 bp, Homo sapien
tatgtacacagctactggagaaata

SEQ ID NO: 4997903 - DNA, 25 bp, Homo sapien
gtacacagctactggagaaataata

SEQ ID NO: 4997904 - DNA, 25 bp, Homo sapien
caacttaactgtggtagttttcctg

SEQ ID NO: 4997905 - DNA, 25 bp, Homo sapien
tccgtgcattccttaatgcaatgag

SEQ ID NO: 4997906 - DNA, 25 bp, Homo sapien
tgcaatgagtagtacatccaactta

SEQ ID NO: 4997907 - DNA, 25 bp, Homo sapien
taccacagggttccccatggtgtgt

SEQ ID NO: 4997908 - DNA, 25 bp, Homo sapien
tagtctcagggagacattaccctcc

SEQ ID NO: 4997909 - DNA, 25 bp, Homo sapien
tgggacggtccaaacattaattatc

SEQ ID NO: 4997910 - DNA, 25 bp, Homo sapien
ctgatgtcacatggcgcaaaggccc

SEQ ID NO: 4997911 - DNA, 25 bp, Homo sapien
tagccaaaggttgagacacataggg

SEQ ID NO: 4997912 - DNA, 25 bp, Homo sapien
ttgtaaatttgtaaattgcttgttc

SEQ ID NO: 4997913 - DNA, 25 bp, Homo sapien
tgtaaatttgtaaattgcttgttcc

SEQ ID NO: 4997914 - DNA, 25 bp, Homo sapien
cccatgtttggaatgggaaattgcc

SEQ ID NO: 4997915 - DNA, 25 bp, Homo sapien
acatcattcttgacccatgtttgga

SEQ ID NO: 4997916 - DNA, 25 bp, Homo sapien
aaacatcattcttgacccatgtttg

SEQ ID NO: 4997917 - DNA, 25 bp, Homo sapien
gtttggaatgggaaattgcccagtg

SEQ ID NO: 4997918 - DNA, 25 bp, Homo sapien
taagtcctttgtatcctccgagatg

SEQ ID NO: 4997919 - DNA, 25 bp, Homo sapien
tagtataacatctagcttgtacccc

SEQ ID NO: 4997920 - DNA, 25 bp, Homo sapien
cattgtcaacaaaaagcctgatgac

SEQ ID NO: 4997921 - DNA, 25 bp, Homo sapien
aagtagtccatgcttgttgctgtca

SEQ ID NO: 4997922 - DNA, 25 bp, Homo sapien
taaaggaccgtgtggtatattgacc

SEQ ID NO: 4997923 - DNA, 25 bp, Homo sapien
caatattgtgcactcaagtcaggta

SEQ ID NO: 4997924 - DNA, 25 bp, Homo sapien
tcagagtccctgttgaacgtaaagg

SEQ ID NO: 4997925 - DNA, 25 bp, Homo sapien
gaaactggtatcagaggtcccaata

SEQ ID NO: 4997926 - DNA, 25 bp, Homo sapien
tacatatagtgtctcatcaaacctc

SEQ ID NO: 4997927 - DNA, 25 bp, Homo sapien
taggattcactaggaagtctttacc

SEQ ID NO: 4997928 - DNA, 25 bp, Homo sapien
taatacacagactaacaggcttgcc

SEQ ID NO: 4997929 - DNA, 25 bp, Homo sapien
gctagcaaattgtgaggccattgct

SEQ ID NO: 4997930 - DNA, 25 bp, Homo sapien
caaatcttaggctctagagtactca

SEQ ID NO: 4997931 - DNA, 25 bp, Homo sapien
agtactcaacgctgcagactccagg

SEQ ID NO: 4997932 - DNA, 25 bp, Homo sapien
gaaacttaattgtgagtccttgtga

SEQ ID NO: 4997933 - DNA, 25 bp, Homo sapien
gactccaggtagcattcaagatgaa

SEQ ID NO: 4997934 - DNA, 25 bp, Homo sapien
catttaagaatttaaggtcgaggca

SEQ ID NO: 4997935 - DNA, 25 bp, Homo sapien
taagaatttaaggtcgaggcaggcg

SEQ ID NO: 4997936 - DNA, 25 bp, Homo sapien
atttaagaatttaaggtcgaggcag

SEQ ID NO: 4997937 - DNA, 25 bp, Homo sapien
ttaagaatttaaggtcgaggcaggc

SEQ ID NO: 4997938 - DNA, 25 bp, Homo sapien
agcatcatacgttcctttattcatg

SEQ ID NO: 4997939 - DNA, 25 bp, Homo sapien
tctcctatagttcctgctcttcaga

SEQ ID NO: 4997940 - DNA, 25 bp, Homo sapien
caaagacctccttcagttgacagca

SEQ ID NO: 4997941 - DNA, 25 bp, Homo sapien
agcacatgagacagccttctcctat

SEQ ID NO: 4997942 - DNA, 25 bp, Homo sapien
tgcttcgattgtaactgatagtgct

SEQ ID NO: 4997943 - DNA, 25 bp, Homo sapien
tcagatctgaaatataggtgatatc

SEQ ID NO: 4997944 - DNA, 25 bp, Homo sapien
agtaatttgcctgctgcttcgattg

SEQ ID NO: 4997945 - DNA, 25 bp, Homo sapien
gatatctacagtaatttgcctgctg

SEQ ID NO: 4997946 - DNA, 25 bp, Homo sapien
catcggttgcaagctcctgtcagaa

SEQ ID NO: 4997947 - DNA, 25 bp, Homo sapien
tgtcagaagacagtcccctaagggc

SEQ ID NO: 4997948 - DNA, 25 bp, Homo sapien
tagacgctgccacttttcagaatgt

SEQ ID NO: 4997949 - DNA, 25 bp, Homo sapien
tttgatatggctagacatcggttgc

SEQ ID NO: 4997950 - DNA, 25 bp, Homo sapien
tggagaatgtgtggaggaaccaaat

SEQ ID NO: 4997951 - DNA, 25 bp, Homo sapien
tcctttaggcatattcagcagagca

SEQ ID NO: 4997952 - DNA, 25 bp, Homo sapien
tcgtatgacgtaggccagaaaactg

SEQ ID NO: 4997953 - DNA, 25 bp, Homo sapien
cagattatgggatgtgtggtcgtat

SEQ ID NO: 4997954 - DNA, 25 bp, Homo sapien
catgaggagtttggtctgaagtcaa

SEQ ID NO: 4997955 - DNA, 25 bp, Homo sapien
tcaaactacctatatgtaagtacca

SEQ ID NO: 4997956 - DNA, 25 bp, Homo sapien
tggatgttttctagtctttctgagc

SEQ ID NO: 4997957 - DNA, 25 bp, Homo sapien
ggcattgtgttaacccagtgggtct

SEQ ID NO: 4997958 - DNA, 25 bp, Homo sapien
ccagattcagaaacacgagttgatc

SEQ ID NO: 4997959 - DNA, 25 bp, Homo sapien
ttatgtacctggatcctccaagaga

SEQ ID NO: 4997960 - DNA, 25 bp, Homo sapien
caggaaggtgccaaaggtaagaaat

SEQ ID NO: 4997961 - DNA, 25 bp, Homo sapien
tgtcaaatagtatcagcacgctgtt

SEQ ID NO: 4997962 - DNA, 25 bp, Homo sapien
acatgaatgttcgtaacagcctcat

SEQ ID NO: 4997963 - DNA, 25 bp, Homo sapien
catgaatgttcgtaacagcctcatt

SEQ ID NO: 4997964 - DNA, 25 bp, Homo sapien
atgaatgttcgtaacagcctcattt

SEQ ID NO: 4997965 - DNA, 25 bp, Homo sapien
tgaatgttcgtaacagcctcatttc

SEQ ID NO: 4997966 - DNA, 25 bp, Homo sapien
tggtctgggccactcaagatggtgt

SEQ ID NO: 4997967 - DNA, 25 bp, Homo sapien
taagtcatggctgtgttaaccactg

SEQ ID NO: 4997968 - DNA, 25 bp, Homo sapien
tatttatggttaacagtcactgcaa

SEQ ID NO: 4997969 - DNA, 25 bp, Homo sapien
tggagtattgcatgacactagagca

SEQ ID NO: 4997970 - DNA, 25 bp, Homo sapien
tgacctccctgtgctcagatgattc

SEQ ID NO: 4997971 - DNA, 25 bp, Homo sapien
gagacagggtcacccttgccaccca

SEQ ID NO: 4997972 - DNA, 25 bp, Homo sapien
cagggtcacccttgccacccaggct

SEQ ID NO: 4997973 - DNA, 25 bp, Homo sapien
ccccttagagacagggtcacccttg

SEQ ID NO: 4997974 - DNA, 25 bp, Homo sapien
tatcctgccattgaagatgacgtcc

SEQ ID NO: 4997975 - DNA, 25 bp, Homo sapien
tctgtgtggcccaataaagagcact

SEQ ID NO: 4997976 - DNA, 25 bp, Homo sapien
gaggcttggcaataacatcatcccc

SEQ ID NO: 4997977 - DNA, 25 bp, Homo sapien
gcttacggtgagacatatcctgcca

SEQ ID NO: 4997978 - DNA, 25 bp, Homo sapien
tataccagtgctattagtcaccggg

SEQ ID NO: 4997979 - DNA, 25 bp, Homo sapien
tcaccgggataatgggacactttca

SEQ ID NO: 4997980 - DNA, 25 bp, Homo sapien
tatctatctagcagtcaaggtgtgg

SEQ ID NO: 4997981 - DNA, 25 bp, Homo sapien
gctagtcatagagcacaaggcagga

SEQ ID NO: 4997982 - DNA, 25 bp, Homo sapien
tcacagggtaggaagacagattttc

SEQ ID NO: 4997983 - DNA, 25 bp, Homo sapien
tagaagttgcgtacaatcaatcaga

SEQ ID NO: 4997984 - DNA, 25 bp, Homo sapien
ggaagtaatctcatgccaactagtg

SEQ ID NO: 4997985 - DNA, 25 bp, Homo sapien
cattgactggacacggccttgttag

SEQ ID NO: 4997986 - DNA, 25 bp, Homo sapien
tctgtgtgatgcaatcaaatgtcct

SEQ ID NO: 4997987 - DNA, 25 bp, Homo sapien
taactactatggagctttctagact

SEQ ID NO: 4997988 - DNA, 25 bp, Homo sapien
accggactcccctttgttacatgca

SEQ ID NO: 4997989 - DNA, 25 bp, Homo sapien
tgttacctcgatgcaaaagaattca

SEQ ID NO: 4997990 - DNA, 25 bp, Homo sapien
ctagagctgtcttgggtgtaacaaa

SEQ ID NO: 4997991 - DNA, 25 bp, Homo sapien
gtcacagtggctcgcagttctagca

SEQ ID NO: 4997992 - DNA, 25 bp, Homo sapien
caactgccaggttgtgtggagcact

SEQ ID NO: 4997993 - DNA, 25 bp, Homo sapien
gactcctcgaacacacaatattgca

SEQ ID NO: 4997994 - DNA, 25 bp, Homo sapien
tgtcttttaaccatcagagcacaat

SEQ ID NO: 4997995 - DNA, 25 bp, Homo sapien
gtaaatctaacctccgcaaaccatg

SEQ ID NO: 4997996 - DNA, 25 bp, Homo sapien
taatacggaatgcttgacaatcttg

SEQ ID NO: 4997997 - DNA, 25 bp, Homo sapien
tgccagatgggaatcaatattgtac

SEQ ID NO: 4997998 - DNA, 25 bp, Homo sapien
cacaggatgattaccagtatctcag

SEQ ID NO: 4997999 - DNA, 25 bp, Homo sapien
aagttccacccaaatgtttagtgca

SEQ ID NO: 4998000 - DNA, 25 bp, Homo sapien
tccctattgttgaagtgtcggccac

SEQ ID NO: 4998001 - DNA, 25 bp, Homo sapien
gcagtgattcaagttttggtccata

SEQ ID NO: 4998002 - DNA, 25 bp, Homo sapien
agtttcacttccacacctgccaaaa

SEQ ID NO: 4998003 - DNA, 25 bp, Homo sapien
agttcaatctttacatctatagttc

SEQ ID NO: 4998004 - DNA, 25 bp, Homo sapien
acttccacacctgccaaaaacgtgg

SEQ ID NO: 4998005 - DNA, 25 bp, Homo sapien
tctatagttctttgggtaagtttca

SEQ ID NO: 4998006 - DNA, 25 bp, Homo sapien
caacatgaggccaatataacacaca

SEQ ID NO: 4998007 - DNA, 25 bp, Homo sapien
gaaggacccgtgagcatgagctgac

SEQ ID NO: 4998008 - DNA, 25 bp, Homo sapien
ttcaggtaggaaacctcagctccag

SEQ ID NO: 4998009 - DNA, 25 bp, Homo sapien
tcagacactgcaatccagagaaatc

SEQ ID NO: 4998010 - DNA, 25 bp, Homo sapien
aaaatcttctaagaacagcacgaag

SEQ ID NO: 4998011 - DNA, 25 bp, Homo sapien
cagcacgaagttcaggaatcaagtc

SEQ ID NO: 4998012 - DNA, 25 bp, Homo sapien
aatttcacataagagagggtagtag

SEQ ID NO: 4998013 - DNA, 25 bp, Homo sapien
tatctgaaaaactactccgattcgc

SEQ ID NO: 4998014 - DNA, 25 bp, Homo sapien
cagcaggcaagtgagtacaaactag

SEQ ID NO: 4998015 - DNA, 25 bp, Homo sapien
tgaggcccattcactagggactctg

SEQ ID NO: 4998016 - DNA, 25 bp, Homo sapien
cctattctagggtcacagcaaagca

SEQ ID NO: 4998017 - DNA, 25 bp, Homo sapien
gcctttcaagtagtgggccacatca

SEQ ID NO: 4998018 - DNA, 25 bp, Homo sapien
ggattctgatccctcgcctactgaa

SEQ ID NO: 4998019 - DNA, 25 bp, Homo sapien
cttgtcaaggtatcccaagggattc

SEQ ID NO: 4998020 - DNA, 25 bp, Homo sapien
tgagtagtaggcagagtacaaggcc

SEQ ID NO: 4998021 - DNA, 25 bp, Homo sapien
taaatatgccaaaggaacagctgca

SEQ ID NO: 4998022 - DNA, 25 bp, Homo sapien
ccactggtggctttgcacaagcagc

SEQ ID NO: 4998023 - DNA, 25 bp, Homo sapien
tgggaccccgcatcccaatgcgaat

SEQ ID NO: 4998024 - DNA, 25 bp, Homo sapien
gctggattcgaagcctcatacttac

SEQ ID NO: 4998025 - DNA, 25 bp, Homo sapien
tgagagctcttgcacggcggctctg

SEQ ID NO: 4998026 - DNA, 25 bp, Homo sapien
cagtaagttagtccaggcttctcga

SEQ ID NO: 4998027 - DNA, 25 bp, Homo sapien
ggcttctcgatgactttctgatgtt

SEQ ID NO: 4998028 - DNA, 25 bp, Homo sapien
gtaacttagtgcttcactgcagaca

SEQ ID NO: 4998029 - DNA, 25 bp, Homo sapien
gactttctgatgttagagtgaggaa

SEQ ID NO: 4998030 - DNA, 25 bp, Homo sapien
aggctgctggtctcctgcttcagaa

SEQ ID NO: 4998031 - DNA, 25 bp, Homo sapien
tacatccggaagagaatgcgcagcc

SEQ ID NO: 4998032 - DNA, 25 bp, Homo sapien
gtctcctgcttcagaaggttgggct

SEQ ID NO: 4998033 - DNA, 25 bp, Homo sapien
gcactaacgcggctctcatccatgt

SEQ ID NO: 4998034 - DNA, 25 bp, Homo sapien
tgctgcttacaaaacggagccacag

SEQ ID NO: 4998035 - DNA, 25 bp, Homo sapien
tgaaacagcccgtatggaggcacat

SEQ ID NO: 4998036 - DNA, 25 bp, Homo sapien
caaggaggctctatcagctcagcag

SEQ ID NO: 4998037 - DNA, 25 bp, Homo sapien
cccagtggaatggtggcaaaaactt

SEQ ID NO: 4998038 - DNA, 25 bp, Homo sapien
cattccttggtcttgagtatcaacg

SEQ ID NO: 4998039 - DNA, 25 bp, Homo sapien
gactctaataagcagtccagtagct

SEQ ID NO: 4998040 - DNA, 25 bp, Homo sapien
ggaattaaacgcttttgcaaatcta

SEQ ID NO: 4998041 - DNA, 25 bp, Homo sapien
gtgatgttaaaaagcggtacattcc

SEQ ID NO: 4998042 - DNA, 25 bp, Homo sapien
tgatctaacctaacagaaagtaagg

SEQ ID NO: 4998043 - DNA, 25 bp, Homo sapien
ttacaactcaatgctccccaaagac

SEQ ID NO: 4998044 - DNA, 25 bp, Homo sapien
ccacagatactcagcttgatctaac

SEQ ID NO: 4998045 - DNA, 25 bp, Homo sapien
aaccaccccagcatatacacacagt

SEQ ID NO: 4998046 - DNA, 25 bp, Homo sapien
ctgtgctgcagctaagttttctgca

SEQ ID NO: 4998047 - DNA, 25 bp, Homo sapien
tctgcatcttctttcttacttgtgg

SEQ ID NO: 4998048 - DNA, 25 bp, Homo sapien
gtgctgcagctaagttttctgcatc

SEQ ID NO: 4998049 - DNA, 25 bp, Homo sapien
gctgcagctaagttttctgcatctt

SEQ ID NO: 4998050 - DNA, 25 bp, Homo sapien
gatagtctggatgagttccagctgc

SEQ ID NO: 4998051 - DNA, 25 bp, Homo sapien
aagacaatgttgtcgatagtctgga

SEQ ID NO: 4998052 - DNA, 25 bp, Homo sapien
acatttaatcaacagggcagcaaac

SEQ ID NO: 4998053 - DNA, 25 bp, Homo sapien
ctgggaagaagacaatgttgtcgat

SEQ ID NO: 4998054 - DNA, 25 bp, Homo sapien
acccacagcctgtatgtggcccagg

SEQ ID NO: 4998055 - DNA, 25 bp, Homo sapien
caggcactactcagtaaaagtttaa

SEQ ID NO: 4998056 - DNA, 25 bp, Homo sapien
actgagaaggacatactgcttttgc

SEQ ID NO: 4998057 - DNA, 25 bp, Homo sapien
gtattcacatatcacactgagaagg

SEQ ID NO: 4998058 - DNA, 25 bp, Homo sapien
caagactgcctagtaggcagctccc

SEQ ID NO: 4998059 - DNA, 25 bp, Homo sapien
agaaacagggattgtaagtcgccca

SEQ ID NO: 4998060 - DNA, 25 bp, Homo sapien
actgccccaagactgcctagtaggc

SEQ ID NO: 4998061 - DNA, 25 bp, Homo sapien
gggattgtaagtcgcccagcattgg

SEQ ID NO: 4998062 - DNA, 25 bp, Homo sapien
ttggatccagattcgtagttgtgac

SEQ ID NO: 4998063 - DNA, 25 bp, Homo sapien
gggcagccaagactccggattaacc

SEQ ID NO: 4998064 - DNA, 25 bp, Homo sapien
gaagtatcaactgtaaacccaagtc

SEQ ID NO: 4998065 - DNA, 25 bp, Homo sapien
cggattaacctatgcaatactgtgg

SEQ ID NO: 4998066 - DNA, 25 bp, Homo sapien
tagttcttagtactagatcacaagt

SEQ ID NO: 4998067 - DNA, 25 bp, Homo sapien
caaattcccttttctggcactaatg

SEQ ID NO: 4998068 - DNA, 25 bp, Homo sapien
tattgagatcattaatgaaggctcc

SEQ ID NO: 4998069 - DNA, 25 bp, Homo sapien
tgctattctatttaacgtttagttc

SEQ ID NO: 4998070 - DNA, 25 bp, Homo sapien
cactgccagggttatattagtcaac

SEQ ID NO: 4998071 - DNA, 25 bp, Homo sapien
aatcaactcgacagagcagtggtgc

SEQ ID NO: 4998072 - DNA, 25 bp, Homo sapien
tggcttaaggatgcagtctgacccc

SEQ ID NO: 4998073 - DNA, 25 bp, Homo sapien
gcaaaagactcctagtagcacctgg

SEQ ID NO: 4998074 - DNA, 25 bp, Homo sapien
ctcgttggcggaaaaagctgacatt

SEQ ID NO: 4998075 - DNA, 25 bp, Homo sapien
gctaggccctacttttgcagacaga

SEQ ID NO: 4998076 - DNA, 25 bp, Homo sapien
aaagaagactcaggtgctcgttggc

SEQ ID NO: 4998077 - DNA, 25 bp, Homo sapien
gaccttctgcaagagggcatctatc

SEQ ID NO: 4998078 - DNA, 25 bp, Homo sapien
tgacacaatcaattatagtatatgc

SEQ ID NO: 4998079 - DNA, 25 bp, Homo sapien
aaaaaagaagtgatgacacaatcaa

SEQ ID NO: 4998080 - DNA, 25 bp, Homo sapien
tatagtatatgcttgttaataataa

SEQ ID NO: 4998081 - DNA, 25 bp, Homo sapien
gaagtgatgacacaatcaattatag

SEQ ID NO: 4998082 - DNA, 25 bp, Homo sapien
agacgcagaaaccagtggtgcttgt

SEQ ID NO: 4998083 - DNA, 25 bp, Homo sapien
acagcagacgcagaaaccagtggtg

SEQ ID NO: 4998084 - DNA, 25 bp, Homo sapien
gcagacgcagaaaccagtggtgctt

SEQ ID NO: 4998085 - DNA, 25 bp, Homo sapien
taacagcagacgcagaaaccagtgg

SEQ ID NO: 4998086 - DNA, 25 bp, Homo sapien
atatctacagacttctgtgatattg

SEQ ID NO: 4998087 - DNA, 25 bp, Homo sapien
tggttgaatagaatcatgaatatct

SEQ ID NO: 4998088 - DNA, 25 bp, Homo sapien
ctacagacttctgtgatattgtatc

SEQ ID NO: 4998089 - DNA, 25 bp, Homo sapien
ttggttgaatagaatcatgaatatc

SEQ ID NO: 4998090 - DNA, 25 bp, Homo sapien
ctaggagtgtcgtatcatgaagaga

SEQ ID NO: 4998091 - DNA, 25 bp, Homo sapien
gaaacttcaaagtgtagagaaactg

SEQ ID NO: 4998092 - DNA, 25 bp, Homo sapien
gctcaggtctgaaaccatccaacag

SEQ ID NO: 4998093 - DNA, 25 bp, Homo sapien
gacctacacaagaattaggctccag

SEQ ID NO: 4998094 - DNA, 25 bp, Homo sapien
caatatcctatgtacttaagccaga

SEQ ID NO: 4998095 - DNA, 25 bp, Homo sapien
tcaaaggtattattgggagaacagt

SEQ ID NO: 4998096 - DNA, 25 bp, Homo sapien
gccagatacttaagtcgaaggagta

SEQ ID NO: 4998097 - DNA, 25 bp, Homo sapien
tagtttgctactttacagcctcctg

SEQ ID NO: 4998098 - DNA, 25 bp, Homo sapien
tccacaatcacgtaagccagttcct

SEQ ID NO: 4998099 - DNA, 25 bp, Homo sapien
tgagacacatgatagggaaacacct

SEQ ID NO: 4998100 - DNA, 25 bp, Homo sapien
tttgctggccctgataaagattttg

SEQ ID NO: 4998101 - DNA, 25 bp, Homo sapien
gaatgtggctgtaacaaacacctaa

SEQ ID NO: 4998102 - DNA, 25 bp, Homo sapien
ccagaattgggtcgccaggtcaaca

SEQ ID NO: 4998103 - DNA, 25 bp, Homo sapien
tccagaattgggtcgccaggtcaac

SEQ ID NO: 4998104 - DNA, 25 bp, Homo sapien
cagaattgggtcgccaggtcaacag

SEQ ID NO: 4998105 - DNA, 25 bp, Homo sapien
agaattgggtcgccaggtcaacagc

SEQ ID NO: 4998106 - DNA, 25 bp, Homo sapien
gtgcagttgcaagttttatcccaga

SEQ ID NO: 4998107 - DNA, 25 bp, Homo sapien
tggttttgaagatatccagtgtgca

SEQ ID NO: 4998108 - DNA, 25 bp, Homo sapien
acagtttgtaccagatcgcgctaac

SEQ ID NO: 4998109 - DNA, 25 bp, Homo sapien
ctagggtaaatttttcaccattcag

SEQ ID NO: 4998110 - DNA, 25 bp, Homo sapien
catcacagattgcataaagtgcatg

SEQ ID NO: 4998111 - DNA, 25 bp, Homo sapien
tccaaaagtacatcactgagtactt

SEQ ID NO: 4998112 - DNA, 25 bp, Homo sapien
caaaagtacatcactgagtacttct

SEQ ID NO: 4998113 - DNA, 25 bp, Homo sapien
gaatacatcacagattgcataaagt

SEQ ID NO: 4998114 - DNA, 25 bp, Homo sapien
taatgaacatcacgccattaatcaa

SEQ ID NO: 4998115 - DNA, 25 bp, Homo sapien
cattaatgaacatcacgccattaat

SEQ ID NO: 4998116 - DNA, 25 bp, Homo sapien
ttaatgaacatcacgccattaatca

SEQ ID NO: 4998117 - DNA, 25 bp, Homo sapien
gtcattaatgaacatcacgccatta

SEQ ID NO: 4998118 - DNA, 25 bp, Homo sapien
aataaatcctgccaccagtgtttct

SEQ ID NO: 4998119 - DNA, 25 bp, Homo sapien
tctgtctgttgttctggcaatttca

SEQ ID NO: 4998120 - DNA, 25 bp, Homo sapien
tcatattgtcaaagattctgaaaac

SEQ ID NO: 4998121 - DNA, 25 bp, Homo sapien
tcctgccaccagtgtttctcataag

SEQ ID NO: 4998122 - DNA, 25 bp, Homo sapien
catcattatttgctagtgtactcct

SEQ ID NO: 4998123 - DNA, 25 bp, Homo sapien
actgcactgccagtcgtataatgat

SEQ ID NO: 4998124 - DNA, 25 bp, Homo sapien
tgaggctttcactgattgtagggca

SEQ ID NO: 4998125 - DNA, 25 bp, Homo sapien
catgtgccacgtaaggacatttcag

SEQ ID NO: 4998126 - DNA, 25 bp, Homo sapien
tggaatctacccataatctgaacat

SEQ ID NO: 4998127 - DNA, 25 bp, Homo sapien
ttactaactagaacacacacaacct

SEQ ID NO: 4998128 - DNA, 25 bp, Homo sapien
cccatacatatcctgggatgaggta

SEQ ID NO: 4998129 - DNA, 25 bp, Homo sapien
caacctctttaacaactggaatcta

SEQ ID NO: 4998130 - DNA, 25 bp, Homo sapien
tggttctggcataaggtgagaaaag

SEQ ID NO: 4998131 - DNA, 25 bp, Homo sapien
atctatttcatacgaatttctgttg

SEQ ID NO: 4998132 - DNA, 25 bp, Homo sapien
tgtgctacctttagaaattcaaaaa

SEQ ID NO: 4998133 - DNA, 25 bp, Homo sapien
tcaaaaaattcgataaagttacaca

SEQ ID NO: 4998134 - DNA, 25 bp, Homo sapien
ctattgatgatacaggataactcaa

SEQ ID NO: 4998135 - DNA, 25 bp, Homo sapien
agagaattgggaaccatcctctcac

SEQ ID NO: 4998136 - DNA, 25 bp, Homo sapien
taactcaaagagaattgggaaccat

SEQ ID NO: 4998137 - DNA, 25 bp, Homo sapien
gatgatacaggataactcaaagaga

SEQ ID NO: 4998138 - DNA, 25 bp, Homo sapien
gtcttcaggtgctacgttcatatca

SEQ ID NO: 4998139 - DNA, 25 bp, Homo sapien
gctacgttcatatcatcgcttgtgt

SEQ ID NO: 4998140 - DNA, 25 bp, Homo sapien
catatcatcgcttgtgtattccttg

SEQ ID NO: 4998141 - DNA, 25 bp, Homo sapien
catcgcttgtgtattccttgaaagc

SEQ ID NO: 4998142 - DNA, 25 bp, Homo sapien
cacatattttgcacaatggcgaata

SEQ ID NO: 4998143 - DNA, 25 bp, Homo sapien
gcgaataagtcgaattgcttccata

SEQ ID NO: 4998144 - DNA, 25 bp, Homo sapien
attttgcacaatggcgaataagtcg

SEQ ID NO: 4998145 - DNA, 25 bp, Homo sapien
cacaatggcgaataagtcgaattgc

SEQ ID NO: 4998146 - DNA, 25 bp, Homo sapien
tgggaaagctgcattgcacgcaaat

SEQ ID NO: 4998147 - DNA, 25 bp, Homo sapien
ttgtgtctgggaaagctgcattgca

SEQ ID NO: 4998148 - DNA, 25 bp, Homo sapien
agctgcattgcacgcaaattcagac

SEQ ID NO: 4998149 - DNA, 25 bp, Homo sapien
gaaagaatcaatggtcgctggaaag

SEQ ID NO: 4998150 - DNA, 25 bp, Homo sapien
taaccatctgtgctatacaccgtac

SEQ ID NO: 4998151 - DNA, 25 bp, Homo sapien
tccatccagatcgaatgttagcagc

SEQ ID NO: 4998152 - DNA, 25 bp, Homo sapien
caatgtgcccggttgtttggaatgc

SEQ ID NO: 4998153 - DNA, 25 bp, Homo sapien
gatgcagctagatgaaatacagaga

SEQ ID NO: 4998154 - DNA, 25 bp, Homo sapien
taattgcttggatatgcaaaccgat

SEQ ID NO: 4998155 - DNA, 25 bp, Homo sapien
tgcaaaccgataaaactcatcagtt

SEQ ID NO: 4998156 - DNA, 25 bp, Homo sapien
tggatatgcaaaccgataaaactca

SEQ ID NO: 4998157 - DNA, 25 bp, Homo sapien
taatataattgcttggatatgcaaa

SEQ ID NO: 4998158 - DNA, 25 bp, Homo sapien
ctgtggaaaacaacaagattttcct

SEQ ID NO: 4998159 - DNA, 25 bp, Homo sapien
ctgttccgtttcattatatgttcaa

SEQ ID NO: 4998160 - DNA, 25 bp, Homo sapien
caaggagtctactgcaaaaatagct

SEQ ID NO: 4998161 - DNA, 25 bp, Homo sapien
ggaatctgaagttagcaagctcccc

SEQ ID NO: 4998162 - DNA, 25 bp, Homo sapien
acttcattgacaactgcctcaagga

SEQ ID NO: 4998163 - DNA, 25 bp, Homo sapien
ctaaacattcttgggtgtgtcgtgg

SEQ ID NO: 4998164 - DNA, 25 bp, Homo sapien
gcacagagccaacggacaaaatcca

SEQ ID NO: 4998165 - DNA, 25 bp, Homo sapien
tattcttcccatgttgtaatatgat

SEQ ID NO: 4998166 - DNA, 25 bp, Homo sapien
taacttcccaaattcgagaccactg

SEQ ID NO: 4998167 - DNA, 25 bp, Homo sapien
tctagccttgtagatcctgtgaata

SEQ ID NO: 4998168 - DNA, 25 bp, Homo sapien
tagccttgtagatcctgtgaatatt

SEQ ID NO: 4998169 - DNA, 25 bp, Homo sapien
atggcatttccatctagccttgtag

SEQ ID NO: 4998170 - DNA, 25 bp, Homo sapien
caatggcatttccatctagccttgt

SEQ ID NO: 4998171 - DNA, 25 bp, Homo sapien
tggattcctgaatacttgctatctg

SEQ ID NO: 4998172 - DNA, 25 bp, Homo sapien
gctatctgtttccagtccacatttc

SEQ ID NO: 4998173 - DNA, 25 bp, Homo sapien
aacaacaacactctgagaactggtt

SEQ ID NO: 4998174 - DNA, 25 bp, Homo sapien
cagcaacaacaacactctgagaact

SEQ ID NO: 4998175 - DNA, 25 bp, Homo sapien
taaacccacaaattcatcaggagcc

SEQ ID NO: 4998176 - DNA, 25 bp, Homo sapien
gaaatgtatcgaggtttcactccag

SEQ ID NO: 4998177 - DNA, 25 bp, Homo sapien
tcaggagcctgatcttttgttccag

SEQ ID NO: 4998178 - DNA, 25 bp, Homo sapien
tccagttcctataagctgtgccagc

SEQ ID NO: 4998179 - DNA, 25 bp, Homo sapien
aagctaaacgtacttattcgaaatg

SEQ ID NO: 4998180 - DNA, 25 bp, Homo sapien
cgtacttattcgaaatgtactaatt

SEQ ID NO: 4998181 - DNA, 25 bp, Homo sapien
ggactatttagcattagctcatttt

SEQ ID NO: 4998182 - DNA, 25 bp, Homo sapien
taacatttaggcatgtcaatgatgg

SEQ ID NO: 4998183 - DNA, 25 bp, Homo sapien
ctgtttcatttcagtaataccggaa

SEQ ID NO: 4998184 - DNA, 25 bp, Homo sapien
tcatttcagtaataccggaactcac

SEQ ID NO: 4998185 - DNA, 25 bp, Homo sapien
tttcatttcagtaataccggaactc

SEQ ID NO: 4998186 - DNA, 25 bp, Homo sapien
tgtttcatttcagtaataccggaac

SEQ ID NO: 4998187 - DNA, 25 bp, Homo sapien
gcctggacatatgcatctctctcca

SEQ ID NO: 4998188 - DNA, 25 bp, Homo sapien
gtgcctggacatatgcatctctctc

SEQ ID NO: 4998189 - DNA, 25 bp, Homo sapien
gtaaggtaaatcttgctagtgcctg

SEQ ID NO: 4998190 - DNA, 25 bp, Homo sapien
tgtgagtaaggtaaatcttgctagt

SEQ ID NO: 4998191 - DNA, 25 bp, Homo sapien
ggcaaagagaggctacttcagtatc

SEQ ID NO: 4998192 - DNA, 25 bp, Homo sapien
tcatcacaatcttgtagacccacac

SEQ ID NO: 4998193 - DNA, 25 bp, Homo sapien
atcttgtagacccacactgaatgca

SEQ ID NO: 4998194 - DNA, 25 bp, Homo sapien
tgcatgcaattctgattgcacatct

SEQ ID NO: 4998195 - DNA, 25 bp, Homo sapien
tattcagaagcctgatataagttcc

SEQ ID NO: 4998196 - DNA, 25 bp, Homo sapien
agcctgatataagttcctgggccca

SEQ ID NO: 4998197 - DNA, 25 bp, Homo sapien
tcagaagcctgatataagttcctgg

SEQ ID NO: 4998198 - DNA, 25 bp, Homo sapien
gcatattcagaagcctgatataagt

SEQ ID NO: 4998199 - DNA, 25 bp, Homo sapien
catttctaagttatacagaagtctt

SEQ ID NO: 4998200 - DNA, 25 bp, Homo sapien
catgagtgctttagctgtcttggcc

SEQ ID NO: 4998201 - DNA, 25 bp, Homo sapien
ggctcacggcctccatgagtgcttt

SEQ ID NO: 4998202 - DNA, 25 bp, Homo sapien
tgcacttgtaaagggtgcctgaaca

SEQ ID NO: 4998203 - DNA, 25 bp, Homo sapien
tatagatggctgatagatactcttc

SEQ ID NO: 4998204 - DNA, 25 bp, Homo sapien
tctttactgtcattgatacctctat

SEQ ID NO: 4998205 - DNA, 25 bp, Homo sapien
tgattttgtagggattgttagttct

SEQ ID NO: 4998206 - DNA, 25 bp, Homo sapien
ctgatagatactcttcaggaaggtc

SEQ ID NO: 4998207 - DNA, 25 bp, Homo sapien
aaacataagctgtatccgcactagc

SEQ ID NO: 4998208 - DNA, 25 bp, Homo sapien
gaaggtctgtggtcaacatgataat

SEQ ID NO: 4998209 - DNA, 25 bp, Homo sapien
gataattgaataagccaaaacataa

SEQ ID NO: 4998210 - DNA, 25 bp, Homo sapien
tatccgcactagcaaagagagtttg

SEQ ID NO: 4998211 - DNA, 25 bp, Homo sapien
tacgacttccagattgtagacaatc

SEQ ID NO: 4998212 - DNA, 25 bp, Homo sapien
ttaggtcctattatctgtaaatccc

SEQ ID NO: 4998213 - DNA, 25 bp, Homo sapien
ggatataacagacaatcaatgagca

SEQ ID NO: 4998214 - DNA, 25 bp, Homo sapien
taaatccctggatgctacctagcac

SEQ ID NO: 4998215 - DNA, 25 bp, Homo sapien
catacgaagggctgaaacgaagtct

SEQ ID NO: 4998216 - DNA, 25 bp, Homo sapien
gcattctaggtatcttgcagcaaat

SEQ ID NO: 4998217 - DNA, 25 bp, Homo sapien
ttttcctgaaaagtcatgttggtcc

SEQ ID NO: 4998218 - DNA, 25 bp, Homo sapien
cattaatcgatcgattttctgagct

SEQ ID NO: 4998219 - DNA, 25 bp, Homo sapien
aaaacagagatagaaattgatattt

SEQ ID NO: 4998220 - DNA, 25 bp, Homo sapien
ttcttggaggtactgtattcctctc

SEQ ID NO: 4998221 - DNA, 25 bp, Homo sapien
aatctttcctcttgatgtaagaatt

SEQ ID NO: 4998222 - DNA, 25 bp, Homo sapien
tgtaagaattgggcaatatcttcag

SEQ ID NO: 4998223 - DNA, 25 bp, Homo sapien
gatgtaagaattgggcaatatcttc

SEQ ID NO: 4998224 - DNA, 25 bp, Homo sapien
gggtgacacaaaccacgtccatata

SEQ ID NO: 4998225 - DNA, 25 bp, Homo sapien
tttttatccatatccacagtgggaa

SEQ ID NO: 4998226 - DNA, 25 bp, Homo sapien
ctgcattgagggtctatcagtacca

SEQ ID NO: 4998227 - DNA, 25 bp, Homo sapien
gagaatgccatgtagtagacgaact

SEQ ID NO: 4998228 - DNA, 25 bp, Homo sapien
gaagctgattctaacccttatggac

SEQ ID NO: 4998229 - DNA, 25 bp, Homo sapien
ttttcaggagtccaagacatcaggg

SEQ ID NO: 4998230 - DNA, 25 bp, Homo sapien
gccaggctaactttcaagtcgtaaa

SEQ ID NO: 4998231 - DNA, 25 bp, Homo sapien
ggaattgctacattgccgacgctga

SEQ ID NO: 4998232 - DNA, 25 bp, Homo sapien
tagtcccaagtaccaaatatgtgtt

SEQ ID NO: 4998233 - DNA, 25 bp, Homo sapien
tttccatgtatctagtttccccagg

SEQ ID NO: 4998234 - DNA, 25 bp, Homo sapien
tgggagacttccacttcgaagccct

SEQ ID NO: 4998235 - DNA, 25 bp, Homo sapien
tacacacactagaccaagagcctct

SEQ ID NO: 4998236 - DNA, 25 bp, Homo sapien
tgttctggattatcagtgccagaca

SEQ ID NO: 4998237 - DNA, 25 bp, Homo sapien
gacatctgtgtactgtagctgccta

SEQ ID NO: 4998238 - DNA, 25 bp, Homo sapien
cagggaatttaaacttccgtatctg

SEQ ID NO: 4998239 - DNA, 25 bp, Homo sapien
gtctcagggtgtttgatttcactca

SEQ ID NO: 4998240 - DNA, 25 bp, Homo sapien
tgatccttactccattcaaccatac

SEQ ID NO: 4998241 - DNA, 25 bp, Homo sapien
gattcacatactgatccttactcca

SEQ ID NO: 4998242 - DNA, 25 bp, Homo sapien
tcaaaatcgacactaagcattctaa

SEQ ID NO: 4998243 - DNA, 25 bp, Homo sapien
accatacacttcaaaatcgacacta

SEQ ID NO: 4998244 - DNA, 25 bp, Homo sapien
tactcataccaagttcttgactgcc

SEQ ID NO: 4998245 - DNA, 25 bp, Homo sapien
tgccccttccttgagcaatttttga

SEQ ID NO: 4998246 - DNA, 25 bp, Homo sapien
ggctgcatttaagtcacagtcatag

SEQ ID NO: 4998247 - DNA, 25 bp, Homo sapien
caaatatattggctgcatttaagtc

SEQ ID NO: 4998248 - DNA, 25 bp, Homo sapien
atcaaatgagctggtagaagtttcc

SEQ ID NO: 4998249 - DNA, 25 bp, Homo sapien
aatcctcgtcagtgtctgaataacc

SEQ ID NO: 4998250 - DNA, 25 bp, Homo sapien
aataaccatccatttgtgatcaaat

SEQ ID NO: 4998251 - DNA, 25 bp, Homo sapien
aaatcctcgtcagtgtctgaataac

SEQ ID NO: 4998252 - DNA, 25 bp, Homo sapien
cagaatggatagaagtaactgcaat

SEQ ID NO: 4998253 - DNA, 25 bp, Homo sapien
cttcagatgtgtcttgaaatttgac

SEQ ID NO: 4998254 - DNA, 25 bp, Homo sapien
gagtgcaacacaaagatactgctta

SEQ ID NO: 4998255 - DNA, 25 bp, Homo sapien
aatcttggatcgtagttcatgagac

SEQ ID NO: 4998256 - DNA, 25 bp, Homo sapien
tggtttcattgacagtttacacaat

SEQ ID NO: 4998257 - DNA, 25 bp, Homo sapien
cctgaatactagaaaggcatccttt

SEQ ID NO: 4998258 - DNA, 25 bp, Homo sapien
tgtgggaaaacttagcaccaggtga

SEQ ID NO: 4998259 - DNA, 25 bp, Homo sapien
tgacagtttacacaatgacctgaat

SEQ ID NO: 4998260 - DNA, 25 bp, Homo sapien
actaccatcctctatagttccaatg

SEQ ID NO: 4998261 - DNA, 25 bp, Homo sapien
gcaacagaaattggtgttcctggaa

SEQ ID NO: 4998262 - DNA, 25 bp, Homo sapien
aaggatggtgtatatgcaacagaaa

SEQ ID NO: 4998263 - DNA, 25 bp, Homo sapien
aagagactgacaatctatcatcagg

SEQ ID NO: 4998264 - DNA, 25 bp, Homo sapien
gctacacctcagctcgtgttcattt

SEQ ID NO: 4998265 - DNA, 25 bp, Homo sapien
cccagtgtttgagggaagagtaaat

SEQ ID NO: 4998266 - DNA, 25 bp, Homo sapien
caacagtatcttcctccactaagta

SEQ ID NO: 4998267 - DNA, 25 bp, Homo sapien
tcatttgagatatacaggaagcact

SEQ ID NO: 4998268 - DNA, 25 bp, Homo sapien
taacataacaagtaggccaggaaag

SEQ ID NO: 4998269 - DNA, 25 bp, Homo sapien
tgtctatcaatagagctgaccacag

SEQ ID NO: 4998270 - DNA, 25 bp, Homo sapien
aatgatgccagcttaagattccctg

SEQ ID NO: 4998271 - DNA, 25 bp, Homo sapien
caacaagtgtgaagatcttcctcag

SEQ ID NO: 4998272 - DNA, 25 bp, Homo sapien
gaatgactcccatctatagcacctg

SEQ ID NO: 4998273 - DNA, 25 bp, Homo sapien
gaggtaacatagcaggccagagact

SEQ ID NO: 4998274 - DNA, 25 bp, Homo sapien
acagatggccaacttgaaggtcaaa

SEQ ID NO: 4998275 - DNA, 25 bp, Homo sapien
gaattttcgtacatggtaggtgcct

SEQ ID NO: 4998276 - DNA, 25 bp, Homo sapien
tctacaatgttctgtacaatgtctt

SEQ ID NO: 4998277 - DNA, 25 bp, Homo sapien
cgtcatataacacttcatttttaga

SEQ ID NO: 4998278 - DNA, 25 bp, Homo sapien
tctccgtcatataacacttcatttt

SEQ ID NO: 4998279 - DNA, 25 bp, Homo sapien
tggttttctccgtcatataacactt

SEQ ID NO: 4998280 - DNA, 25 bp, Homo sapien
ttaccacctacaatgaggaaagtcc

SEQ ID NO: 4998281 - DNA, 25 bp, Homo sapien
tagaaatatatctgcgctccaaagg

SEQ ID NO: 4998282 - DNA, 25 bp, Homo sapien
ggaaagtccacaattaccacaatgt

SEQ ID NO: 4998283 - DNA, 25 bp, Homo sapien
catttaacggacatttatgaccctc

SEQ ID NO: 4998284 - DNA, 25 bp, Homo sapien
ctacatcatttgtatggaggtcaag

SEQ ID NO: 4998285 - DNA, 25 bp, Homo sapien
tgcactggaaatatcagatccattt

SEQ ID NO: 4998286 - DNA, 25 bp, Homo sapien
cgtgttcttgggatatatgatcaac

SEQ ID NO: 4998287 - DNA, 25 bp, Homo sapien
tgcagttgcctgatcagcttcagtc

SEQ ID NO: 4998288 - DNA, 25 bp, Homo sapien
tgaggtggcaaatatctaagttgag

SEQ ID NO: 4998289 - DNA, 25 bp, Homo sapien
tctaagttgaggtgattcaggctcg

SEQ ID NO: 4998290 - DNA, 25 bp, Homo sapien
tgatggcttactggagactgtaaca

SEQ ID NO: 4998291 - DNA, 25 bp, Homo sapien
gactgtaacagatgatgatgctgcc

SEQ ID NO: 4998292 - DNA, 25 bp, Homo sapien
tctatgtgttgtgatgttactgcag

SEQ ID NO: 4998293 - DNA, 25 bp, Homo sapien
gagagtagctttggctgttgtctga

SEQ ID NO: 4998294 - DNA, 25 bp, Homo sapien
ccatgcgtgcaaagataacatttag

SEQ ID NO: 4998295 - DNA, 25 bp, Homo sapien
gtaacatgttctcacagcttgcagt

SEQ ID NO: 4998296 - DNA, 25 bp, Homo sapien
ggtccaacagtacagaagaaactag

SEQ ID NO: 4998297 - DNA, 25 bp, Homo sapien
gatgggtgcaacgatatcaggagaa

SEQ ID NO: 4998298 - DNA, 25 bp, Homo sapien
gctccaaaagggttgtattcacaca

SEQ ID NO: 4998299 - DNA, 25 bp, Homo sapien
aattggcggataagtagtgtccacc

SEQ ID NO: 4998300 - DNA, 25 bp, Homo sapien
tctggagcattgccagtcaagtgcc

SEQ ID NO: 4998301 - DNA, 25 bp, Homo sapien
acatattgtttcaataattctatca

SEQ ID NO: 4998302 - DNA, 25 bp, Homo sapien
catattgtttcaataattctatcaa

SEQ ID NO: 4998303 - DNA, 25 bp, Homo sapien
tcactggtggaagggtgcttgatcc

SEQ ID NO: 4998304 - DNA, 25 bp, Homo sapien
ctaactatgcgaggacatttggact

SEQ ID NO: 4998305 - DNA, 25 bp, Homo sapien
gcaatctagagatgtactaactatg

SEQ ID NO: 4998306 - DNA, 25 bp, Homo sapien
ggcaagaagtacttgtctgcttcaa

SEQ ID NO: 4998307 - DNA, 25 bp, Homo sapien
tttcaaggttgcctcagtcatatgt

SEQ ID NO: 4998308 - DNA, 25 bp, Homo sapien
ctttcaaggttgcctcagtcatatg

SEQ ID NO: 4998309 - DNA, 25 bp, Homo sapien
cattctactgtctacaatagaaggt

SEQ ID NO: 4998310 - DNA, 25 bp, Homo sapien
acaatagaaggtggggcgcttgaac

SEQ ID NO: 4998311 - DNA, 25 bp, Homo sapien
cacaacctacttttcaatatgccaa

SEQ ID NO: 4998312 - DNA, 25 bp, Homo sapien
aacctacttttcaatatgccaatca

SEQ ID NO: 4998313 - DNA, 25 bp, Homo sapien
ccctagtgcctaatacaattttaag

SEQ ID NO: 4998314 - DNA, 25 bp, Homo sapien
tatgtgttccctagtttccctagtg

SEQ ID NO: 4998315 - DNA, 25 bp, Homo sapien
acattaggttaacccaaagagccag

SEQ ID NO: 4998316 - DNA, 25 bp, Homo sapien
caagctgttgaaggtaggaaccaca

SEQ ID NO: 4998317 - DNA, 25 bp, Homo sapien
cttttgagaaatttcccaatgggca

SEQ ID NO: 4998318 - DNA, 25 bp, Homo sapien
gaagacagaagtgcatctactcagg

SEQ ID NO: 4998319 - DNA, 25 bp, Homo sapien
gaaggcaagaaagctctctccaaaa

SEQ ID NO: 4998320 - DNA, 25 bp, Homo sapien
caaaactcagctagatgttgaaggc

SEQ ID NO: 4998321 - DNA, 25 bp, Homo sapien
caacctatactcttgaattagcttt

SEQ ID NO: 4998322 - DNA, 25 bp, Homo sapien
acaacctatactcttgaattagctt

SEQ ID NO: 4998323 - DNA, 25 bp, Homo sapien
aacaacctatactcttgaattagct

SEQ ID NO: 4998324 - DNA, 25 bp, Homo sapien
aaacaacctatactcttgaattagc

SEQ ID NO: 4998325 - DNA, 25 bp, Homo sapien
aatgagatctgaaaccttacacacc

SEQ ID NO: 4998326 - DNA, 25 bp, Homo sapien
ttttttgtgatgaagctaaggcttg

SEQ ID NO: 4998327 - DNA, 25 bp, Homo sapien
taacagcaaccaattaggttctctc

SEQ ID NO: 4998328 - DNA, 25 bp, Homo sapien
tgacatgatgtttaactaaccaatg

SEQ ID NO: 4998329 - DNA, 25 bp, Homo sapien
gaatatagcagtttgcacacacaag

SEQ ID NO: 4998330 - DNA, 25 bp, Homo sapien
taacaaactgaactattcttctgga

SEQ ID NO: 4998331 - DNA, 25 bp, Homo sapien
tcctcctgggatctagcaataaact

SEQ ID NO: 4998332 - DNA, 25 bp, Homo sapien
tcatttctgcaacatagtggtcatt

SEQ ID NO: 4998333 - DNA, 25 bp, Homo sapien
taggcatgcatgagcagcaaaacca

SEQ ID NO: 4998334 - DNA, 25 bp, Homo sapien
caatgagactgaattggtagaaacc

SEQ ID NO: 4998335 - DNA, 25 bp, Homo sapien
tacacagaacagcattaggcatgca

SEQ ID NO: 4998336 - DNA, 25 bp, Homo sapien
caaatgttaaggatagaaagcttca

SEQ ID NO: 4998337 - DNA, 25 bp, Homo sapien
taagaaacaacgaagactagtcaat

SEQ ID NO: 4998338 - DNA, 25 bp, Homo sapien
gctattaaaacacccatcgattcag

SEQ ID NO: 4998339 - DNA, 25 bp, Homo sapien
taaaacttagggaatggaagcatgg

SEQ ID NO: 4998340 - DNA, 25 bp, Homo sapien
taccagataccacattaagtactat

SEQ ID NO: 4998341 - DNA, 25 bp, Homo sapien
ggatgccatcccctctgttaaccaa

SEQ ID NO: 4998342 - DNA, 25 bp, Homo sapien
catataaaaggcaggatgaaaatgt

SEQ ID NO: 4998343 - DNA, 25 bp, Homo sapien
ccaacttagcctaagtccccatggt

SEQ ID NO: 4998344 - DNA, 25 bp, Homo sapien
agctctggctacaagactggatgcc

SEQ ID NO: 4998345 - DNA, 25 bp, Homo sapien
tataggccctctaaagatgatgctc

SEQ ID NO: 4998346 - DNA, 25 bp, Homo sapien
tggcaaggaccatttagagcgctat

SEQ ID NO: 4998347 - DNA, 25 bp, Homo sapien
tgctcatgagtggtagggaataccc

SEQ ID NO: 4998348 - DNA, 25 bp, Homo sapien
tacccaatgcacgagttaacaggac

SEQ ID NO: 4998349 - DNA, 25 bp, Homo sapien
tccttgtcggccaatatcttctcca

SEQ ID NO: 4998350 - DNA, 25 bp, Homo sapien
cagctgggagtgatgcgccttcttc

SEQ ID NO: 4998351 - DNA, 25 bp, Homo sapien
ctaacgccacctcgcaagctttgcg

SEQ ID NO: 4998352 - DNA, 25 bp, Homo sapien
gagcccgggtcaggaacatgttctt

SEQ ID NO: 4998353 - DNA, 25 bp, Homo sapien
gcggcggctcgtccgacccgcggct

SEQ ID NO: 4998354 - DNA, 25 bp, Homo sapien
ggcggctcgtccgacccgcggctcc

SEQ ID NO: 4998355 - DNA, 25 bp, Homo sapien
cggctcgtccgacccgcggctccca

SEQ ID NO: 4998356 - DNA, 25 bp, Homo sapien
tcgtccgacccgcggctcccagcgg

SEQ ID NO: 4998357 - DNA, 25 bp, Homo sapien
gggattggaggcgtggagggcagcg

SEQ ID NO: 4998358 - DNA, 25 bp, Homo sapien
ggtgtcggcgaagggcgtcgaggtc

SEQ ID NO: 4998359 - DNA, 25 bp, Homo sapien
attggaggcgtggagggcagcggca

SEQ ID NO: 4998360 - DNA, 25 bp, Homo sapien
gcgagcgggaccagccgcggtgtcg

SEQ ID NO: 4998361 - DNA, 25 bp, Homo sapien
tccggccctggtggcggtgagggag

SEQ ID NO: 4998362 - DNA, 25 bp, Homo sapien
tgccgggaactgagggacgaggtgg

SEQ ID NO: 4998363 - DNA, 25 bp, Homo sapien
gcccgggcggctgtctgccgggaac

SEQ ID NO: 4998364 - DNA, 25 bp, Homo sapien
ctggtggcggtgagggagcccggcc

SEQ ID NO: 4998365 - DNA, 25 bp, Homo sapien
ttgggaggaaacgacgcgtcacgca

SEQ ID NO: 4998366 - DNA, 25 bp, Homo sapien
ccgccatgttgggaggaaacgacgc

SEQ ID NO: 4998367 - DNA, 25 bp, Homo sapien
aggaaacgacgcgtcacgcagcggc

SEQ ID NO: 4998368 - DNA, 25 bp, Homo sapien
tgtggggattagcacccgccgcggc

SEQ ID NO: 4998369 - DNA, 25 bp, Homo sapien
cagcgttcgcctgcagggcggcgtg

SEQ ID NO: 4998370 - DNA, 25 bp, Homo sapien
aggactcctggctactctgcactgg

SEQ ID NO: 4998371 - DNA, 25 bp, Homo sapien
gcgcccagcacttcgggctcttggt

SEQ ID NO: 4998372 - DNA, 25 bp, Homo sapien
tcctgccgagtgaacaggactcctg

SEQ ID NO: 4998373 - DNA, 25 bp, Homo sapien
aagaagtagacatgggagacttttc

SEQ ID NO: 4998374 - DNA, 25 bp, Homo sapien
agaataattcttctgccttgggatc

SEQ ID NO: 4998375 - DNA, 25 bp, Homo sapien
taattcttctgccttgggatcctgt

SEQ ID NO: 4998376 - DNA, 25 bp, Homo sapien
gaaagaagtagacatgggagacttt

SEQ ID NO: 4998377 - DNA, 25 bp, Homo sapien
tgggaactgagatgttgctgatagg

SEQ ID NO: 4998378 - DNA, 25 bp, Homo sapien
tgtaggctgtttctgcgggccccac

SEQ ID NO: 4998379 - DNA, 25 bp, Homo sapien
tctgggggctacacttctgggaact

SEQ ID NO: 4998380 - DNA, 25 bp, Homo sapien
tctaaactacttgccagtccaggga

SEQ ID NO: 4998381 - DNA, 25 bp, Homo sapien
tccttgcaggtaactgtgccagcag

SEQ ID NO: 4998382 - DNA, 25 bp, Homo sapien
gagaggctggatcagcctcctccat

SEQ ID NO: 4998383 - DNA, 25 bp, Homo sapien
ccttgcaggtaactgtgccagcagg

SEQ ID NO: 4998384 - DNA, 25 bp, Homo sapien
tgggacttttccgttcaccacgatc

SEQ ID NO: 4998385 - DNA, 25 bp, Homo sapien
ctcctaccccaagttagttgttctg

SEQ ID NO: 4998386 - DNA, 25 bp, Homo sapien
catgtgtaagtgttctatctgttgc

SEQ ID NO: 4998387 - DNA, 25 bp, Homo sapien
gacatatagctactacctgggactt

SEQ ID NO: 4998388 - DNA, 25 bp, Homo sapien
ccacaaacttgtgtgaggctgcctc

SEQ ID NO: 4998389 - DNA, 25 bp, Homo sapien
cacactcagctggttagacaaacac

SEQ ID NO: 4998390 - DNA, 25 bp, Homo sapien
tcaatcaatacctggctggcctgga

SEQ ID NO: 4998391 - DNA, 25 bp, Homo sapien
gacttcccaacttgcagtagccctg

SEQ ID NO: 4998392 - DNA, 25 bp, Homo sapien
cctggcctaagatatgatattttat

SEQ ID NO: 4998393 - DNA, 25 bp, Homo sapien
tccagcagtccagatacctatcttg

SEQ ID NO: 4998394 - DNA, 25 bp, Homo sapien
ttcttctatatcgtgtagtgatggg

SEQ ID NO: 4998395 - DNA, 25 bp, Homo sapien
tgtgattgggatcactgtgcctggc

SEQ ID NO: 4998396 - DNA, 25 bp, Homo sapien
aatgagaaccaagtaattaaacatc

SEQ ID NO: 4998397 - DNA, 25 bp, Homo sapien
tttccaatgagaaccaagtaattaa

SEQ ID NO: 4998398 - DNA, 25 bp, Homo sapien
taaacatcattactagcctagatcc

SEQ ID NO: 4998399 - DNA, 25 bp, Homo sapien
ttaaacatcattactagcctagatc

SEQ ID NO: 4998400 - DNA, 25 bp, Homo sapien
ttataacaaactaggctatgccctg

SEQ ID NO: 4998401 - DNA, 25 bp, Homo sapien
taaagtccatagacatgttcactct

SEQ ID NO: 4998402 - DNA, 25 bp, Homo sapien
gaaaacaatttctatccagggccaa

SEQ ID NO: 4998403 - DNA, 25 bp, Homo sapien
aatcctatggcagttgacctgagcc

SEQ ID NO: 4998404 - DNA, 25 bp, Homo sapien
agcatctctgggagtaaaaatccaa

SEQ ID NO: 4998405 - DNA, 25 bp, Homo sapien
gaaagcaaatgcataaggtattcca

SEQ ID NO: 4998406 - DNA, 25 bp, Homo sapien
acagccagcatagtttctgtacagg

SEQ ID NO: 4998407 - DNA, 25 bp, Homo sapien
ccagtgtcacgtagttcgaaagcaa

SEQ ID NO: 4998408 - DNA, 25 bp, Homo sapien
taagggataattcaatggacggtgc

SEQ ID NO: 4998409 - DNA, 25 bp, Homo sapien
ggaagtgatctctggctctgctata

SEQ ID NO: 4998410 - DNA, 25 bp, Homo sapien
catttcataacaagaacggtggcag

SEQ ID NO: 4998411 - DNA, 25 bp, Homo sapien
cagctgaagaacctacgtggagtga

SEQ ID NO: 4998412 - DNA, 25 bp, Homo sapien
tcacagctttataagctgcagattc

SEQ ID NO: 4998413 - DNA, 25 bp, Homo sapien
taccccgtatactgactgaagtgca

SEQ ID NO: 4998414 - DNA, 25 bp, Homo sapien
gaggctggtccatatctgtatcgta

SEQ ID NO: 4998415 - DNA, 25 bp, Homo sapien
acaacgttgtggaggctggtccata

SEQ ID NO: 4998416 - DNA, 25 bp, Homo sapien
gcagggaccatgtcggtctcagtca

SEQ ID NO: 4998417 - DNA, 25 bp, Homo sapien
cagtcatagctcacaaccagtactt

SEQ ID NO: 4998418 - DNA, 25 bp, Homo sapien
caatgtgcctgtatacaacagatgc

SEQ ID NO: 4998419 - DNA, 25 bp, Homo sapien
ctataagttacaaaatacttggccg

SEQ ID NO: 4998420 - DNA, 25 bp, Homo sapien
ttttcgaaggaagttagctacagcc

SEQ ID NO: 4998421 - DNA, 25 bp, Homo sapien
cagtatgtgtcatcacaagggtgca

SEQ ID NO: 4998422 - DNA, 25 bp, Homo sapien
caagggtgcatagaagctccttcat

SEQ ID NO: 4998423 - DNA, 25 bp, Homo sapien
gattctggaaaagggccacagtatg

SEQ ID NO: 4998424 - DNA, 25 bp, Homo sapien
cccagctcaggcagatggcagaagg

SEQ ID NO: 4998425 - DNA, 25 bp, Homo sapien
ttggactttttctcgccatccctcc

SEQ ID NO: 4998426 - DNA, 25 bp, Homo sapien
gagcttgtaaaagcccacagatgtt

SEQ ID NO: 4998427 - DNA, 25 bp, Homo sapien
ccagcgcaggggcacaagctgagct

SEQ ID NO: 4998428 - DNA, 25 bp, Homo sapien
cccagtgtagagtgggcaattctca

SEQ ID NO: 4998429 - DNA, 25 bp, Homo sapien
tccccagtgtagagtgggcaattct

SEQ ID NO: 4998430 - DNA, 25 bp, Homo sapien
ctatttccccagtgtagagtgggca

SEQ ID NO: 4998431 - DNA, 25 bp, Homo sapien
tttccccagtgtagagtgggcaatt

SEQ ID NO: 4998432 - DNA, 25 bp, Homo sapien
gaggcaaggcgaagccgatgtccct

SEQ ID NO: 4998433 - DNA, 25 bp, Homo sapien
aggcgagaggcaaggcgaagccgat

SEQ ID NO: 4998434 - DNA, 25 bp, Homo sapien
agaggcaaggcgaagccgatgtccc

SEQ ID NO: 4998435 - DNA, 25 bp, Homo sapien
cgagaggcaaggcgaagccgatgtc

SEQ ID NO: 4998436 - DNA, 25 bp, Homo sapien
cctgtcctgcctattcttgcttcct

SEQ ID NO: 4998437 - DNA, 25 bp, Homo sapien
ctgtcctgcctattcttgcttcctc

SEQ ID NO: 4998438 - DNA, 25 bp, Homo sapien
gccctgtcctgcctattcttgcttc

SEQ ID NO: 4998439 - DNA, 25 bp, Homo sapien
ccctgtcctgcctattcttgcttcc

SEQ ID NO: 4998440 - DNA, 25 bp, Homo sapien
tcatactttagaccggactctttga

SEQ ID NO: 4998441 - DNA, 25 bp, Homo sapien
tgttcatactttagaccggactctt

SEQ ID NO: 4998442 - DNA, 25 bp, Homo sapien
cttgtgttcatactttagaccggac

SEQ ID NO: 4998443 - DNA, 25 bp, Homo sapien
tttagaccggactctttgaattgct

SEQ ID NO: 4998444 - DNA, 25 bp, Homo sapien
tctcttgaaacctattgaaatcttt

SEQ ID NO: 4998445 - DNA, 25 bp, Homo sapien
tcttgaaacctattgaaatctttcc

SEQ ID NO: 4998446 - DNA, 25 bp, Homo sapien
tgaaacctattgaaatctttccatg

SEQ ID NO: 4998447 - DNA, 25 bp, Homo sapien
tcctctcttgaaacctattgaaatc

SEQ ID NO: 4998448 - DNA, 25 bp, Homo sapien
cccacatatgtgagtatagtagtag

SEQ ID NO: 4998449 - DNA, 25 bp, Homo sapien
actagtcctctgttgagcatttgga

SEQ ID NO: 4998450 - DNA, 25 bp, Homo sapien
gattgctttctccttcgtctgtcta

SEQ ID NO: 4998451 - DNA, 25 bp, Homo sapien
tggccaatggacatacatgggatgc

SEQ ID NO: 4998452 - DNA, 25 bp, Homo sapien
tgtgagatcacttgtaatgtcactt

SEQ ID NO: 4998453 - DNA, 25 bp, Homo sapien
tgattgtacttatttggatcatctt

SEQ ID NO: 4998454 - DNA, 25 bp, Homo sapien
gagatcacttgtaatgtcacttctg

SEQ ID NO: 4998455 - DNA, 25 bp, Homo sapien
ttactgcttcaagtttggaattccg

SEQ ID NO: 4998456 - DNA, 25 bp, Homo sapien
ctttggttgacactgttgatactca

SEQ ID NO: 4998457 - DNA, 25 bp, Homo sapien
tgctgtagtttcctaaccagtcctt

SEQ ID NO: 4998458 - DNA, 25 bp, Homo sapien
gatactcaaggatcagttgttttct

SEQ ID NO: 4998459 - DNA, 25 bp, Homo sapien
catggcttatggtcctgctgtagtt

SEQ ID NO: 4998460 - DNA, 25 bp, Homo sapien
ctagaatgccctcttgaccctgcat

SEQ ID NO: 4998461 - DNA, 25 bp, Homo sapien
tctgaccacgacagacagccgaatg

SEQ ID NO: 4998462 - DNA, 25 bp, Homo sapien
tcaatccacgtatgaccagcagagt

SEQ ID NO: 4998463 - DNA, 25 bp, Homo sapien
tcccaatgtgcatggtcaatccacg

SEQ ID NO: 4998464 - DNA, 25 bp, Homo sapien
tatagacaaggtcatgacagctctg

SEQ ID NO: 4998465 - DNA, 25 bp, Homo sapien
ttgcagagtaaaacctgcagaaacc

SEQ ID NO: 4998466 - DNA, 25 bp, Homo sapien
agaaacctttggatctggatcccag

SEQ ID NO: 4998467 - DNA, 25 bp, Homo sapien
ctggactcatattttgcagagtaaa

SEQ ID NO: 4998468 - DNA, 25 bp, Homo sapien
gtctcccatgagagtcctctggact

SEQ ID NO: 4998469 - DNA, 25 bp, Homo sapien
tttctattggcatccactccacggc

SEQ ID NO: 4998470 - DNA, 25 bp, Homo sapien
ccagtttctattggcatccactcca

SEQ ID NO: 4998471 - DNA, 25 bp, Homo sapien
agtttctattggcatccactccacg

SEQ ID NO: 4998472 - DNA, 25 bp, Homo sapien
cagcgaaaccttgagttccttgacc

SEQ ID NO: 4998473 - DNA, 25 bp, Homo sapien
attggtccaactaaaatggtatcca

SEQ ID NO: 4998474 - DNA, 25 bp, Homo sapien
acacaggcatgatatagaaatatag

SEQ ID NO: 4998475 - DNA, 25 bp, Homo sapien
catcgacgttaaacacaggcatgat

SEQ ID NO: 4998476 - DNA, 25 bp, Homo sapien
aatggtatccatcgacgttaaacac

SEQ ID NO: 4998477 - DNA, 25 bp, Homo sapien
gatcctatcctcttaacatttggca

SEQ ID NO: 4998478 - DNA, 25 bp, Homo sapien
taaacatagcaacatgtcatgaagg

SEQ ID NO: 4998479 - DNA, 25 bp, Homo sapien
tacatcttcaatgtctaggagaact

SEQ ID NO: 4998480 - DNA, 25 bp, Homo sapien
tgtagtcagggctatcagtcattcc

SEQ ID NO: 4998481 - DNA, 25 bp, Homo sapien
ttacagagccagagccccccttgat

SEQ ID NO: 4998482 - DNA, 25 bp, Homo sapien
agagccccccttgatacttctggtt

SEQ ID NO: 4998483 - DNA, 25 bp, Homo sapien
gccagagccccccttgatacttctg

SEQ ID NO: 4998484 - DNA, 25 bp, Homo sapien
tacagagccagagccccccttgata

SEQ ID NO: 4998485 - DNA, 25 bp, Homo sapien
aggttctttctctgtaatgagagct

SEQ ID NO: 4998486 - DNA, 25 bp, Homo sapien
ccacagtctatccaaacagctcttt

SEQ ID NO: 4998487 - DNA, 25 bp, Homo sapien
ttttgagtcgtgatcgtctgcccag

SEQ ID NO: 4998488 - DNA, 25 bp, Homo sapien
aacagctcttttgagtcgtgatcgt

SEQ ID NO: 4998489 - DNA, 25 bp, Homo sapien
tgaataccacagtctatccaaacag

SEQ ID NO: 4998490 - DNA, 25 bp, Homo sapien
caatagagaacatgtgaatgaggcc

SEQ ID NO: 4998491 - DNA, 25 bp, Homo sapien
aacatgtgaatgaggcctgagtgag

SEQ ID NO: 4998492 - DNA, 25 bp, Homo sapien
ctcatatgatcttccaatagagaac

SEQ ID NO: 4998493 - DNA, 25 bp, Homo sapien
taaaaagagatcttccctcatatga

SEQ ID NO: 4998494 - DNA, 25 bp, Homo sapien
ttatatccagagagggatcttcggt

SEQ ID NO: 4998495 - DNA, 25 bp, Homo sapien
aattatatccagagagggatcttcg

SEQ ID NO: 4998496 - DNA, 25 bp, Homo sapien
ctaaggagtgataaacttcataatt

SEQ ID NO: 4998497 - DNA, 25 bp, Homo sapien
ttcttctaaggagtgataaacttca

SEQ ID NO: 4998498 - DNA, 25 bp, Homo sapien
ggaggaaggtcagcgtattctctta

SEQ ID NO: 4998499 - DNA, 25 bp, Homo sapien
tctgcagcgtcatgccacttcttgc

SEQ ID NO: 4998500 - DNA, 25 bp, Homo sapien
cgaactcttggcctgccttgatgtt

SEQ ID NO: 4998501 - DNA, 25 bp, Homo sapien
tatacgccgtgaatcttctcgcttc

SEQ ID NO: 4998502 - DNA, 25 bp, Homo sapien
gggatatggacatcagtaactgttc

SEQ ID NO: 4998503 - DNA, 25 bp, Homo sapien
actggatgttggcttcctgtaagaa

SEQ ID NO: 4998504 - DNA, 25 bp, Homo sapien
taagaaggctaacagggctcgggaa

SEQ ID NO: 4998505 - DNA, 25 bp, Homo sapien
tgatacataggagatactgctgggc

SEQ ID NO: 4998506 - DNA, 25 bp, Homo sapien
tctggagatgagtctataagtgcta

SEQ ID NO: 4998507 - DNA, 25 bp, Homo sapien
aagtgtgctcagaaatgtgctcgga

SEQ ID NO: 4998508 - DNA, 25 bp, Homo sapien
aatggaccctacagcaaggcttgga

SEQ ID NO: 4998509 - DNA, 25 bp, Homo sapien
caggaaagttccatgaaatggaccc

SEQ ID NO: 4998510 - DNA, 25 bp, Homo sapien
tcaggatcttccgagaatatgccag

SEQ ID NO: 4998511 - DNA, 25 bp, Homo sapien
tgtcttcaggatcttccgagaatat

SEQ ID NO: 4998512 - DNA, 25 bp, Homo sapien
tcttcaggatcttccgagaatatgc

SEQ ID NO: 4998513 - DNA, 25 bp, Homo sapien
aggatcttccgagaatatgccagaa

SEQ ID NO: 4998514 - DNA, 25 bp, Homo sapien
ggttcaggtaccatgggatggggct

SEQ ID NO: 4998515 - DNA, 25 bp, Homo sapien
tggttcaggtaccatgggatggggc

SEQ ID NO: 4998516 - DNA, 25 bp, Homo sapien
catgggatggggctctcagtgtcct

SEQ ID NO: 4998517 - DNA, 25 bp, Homo sapien
ctggttcaggtaccatgggatgggg

SEQ ID NO: 4998518 - DNA, 25 bp, Homo sapien
taggatcttttgctatggattcttg

SEQ ID NO: 4998519 - DNA, 25 bp, Homo sapien
cctccaagtttaggtcaaggtatgt

SEQ ID NO: 4998520 - DNA, 25 bp, Homo sapien
caaggtatgtttgttgtctgctttc

SEQ ID NO: 4998521 - DNA, 25 bp, Homo sapien
ttgctatggattcttggagagcttc

SEQ ID NO: 4998522 - DNA, 25 bp, Homo sapien
gctgtggccgtaagaagggtagaat

SEQ ID NO: 4998523 - DNA, 25 bp, Homo sapien
tggccgtaagaagggtagaatgagg

SEQ ID NO: 4998524 - DNA, 25 bp, Homo sapien
ttgctgtggccgtaagaagggtaga

SEQ ID NO: 4998525 - DNA, 25 bp, Homo sapien
tatcctggagtcagatcatcatctg

SEQ ID NO: 4998526 - DNA, 25 bp, Homo sapien
gactttcatggcatctctggagcac

SEQ ID NO: 4998527 - DNA, 25 bp, Homo sapien
tcattgttacaggaaggaacgcttc

SEQ ID NO: 4998528 - DNA, 25 bp, Homo sapien
tgtgtgcagcagtgtcatgacccag

SEQ ID NO: 4998529 - DNA, 25 bp, Homo sapien
tactgtcagaatcccaggtgtacca

SEQ ID NO: 4998530 - DNA, 25 bp, Homo sapien
tgcacccaaactataaatctaacgg

SEQ ID NO: 4998531 - DNA, 25 bp, Homo sapien
ttccaattggttctcaggtagattc

SEQ ID NO: 4998532 - DNA, 25 bp, Homo sapien
gaatacagctcattaatttctccat

SEQ ID NO: 4998533 - DNA, 25 bp, Homo sapien
gagtcaagagatttgttatccacat

SEQ ID NO: 4998534 - DNA, 25 bp, Homo sapien
tgaacctacaccttgaatgttttct

SEQ ID NO: 4998535 - DNA, 25 bp, Homo sapien
ttgcctgaacctacaccttgaatgt

SEQ ID NO: 4998536 - DNA, 25 bp, Homo sapien
ccattgcctgaacctacaccttgaa

SEQ ID NO: 4998537 - DNA, 25 bp, Homo sapien
ctcttacattatgctgctgactcat

SEQ ID NO: 4998538 - DNA, 25 bp, Homo sapien
ctcaggtgaggtcccagatactgca

SEQ ID NO: 4998539 - DNA, 25 bp, Homo sapien
tttgagggatttcccactgcctctg

SEQ ID NO: 4998540 - DNA, 25 bp, Homo sapien
taggcaatgtttgagggatttccca

SEQ ID NO: 4998541 - DNA, 25 bp, Homo sapien
gattagtcgagtcagggtcacctgt

SEQ ID NO: 4998542 - DNA, 25 bp, Homo sapien
ccgtgaggagaataggactctttcc

SEQ ID NO: 4998543 - DNA, 25 bp, Homo sapien
cctgaggccgagcttcactgagcca

SEQ ID NO: 4998544 - DNA, 25 bp, Homo sapien
gagattagcacctggaccgtgagga

SEQ ID NO: 4998545 - DNA, 25 bp, Homo sapien
tcctcctaaggcctgaggccgagct

SEQ ID NO: 4998546 - DNA, 25 bp, Homo sapien
cactgtctgaggtgcatgactagca

SEQ ID NO: 4998547 - DNA, 25 bp, Homo sapien
tctgttaggctaaggacctctccca

SEQ ID NO: 4998548 - DNA, 25 bp, Homo sapien
gaaacgttctgtcagcagcatgcga

SEQ ID NO: 4998549 - DNA, 25 bp, Homo sapien
aaaaccccatacagatctggcagag

SEQ ID NO: 4998550 - DNA, 25 bp, Homo sapien
tcaagcgattctcctatcttagcct

SEQ ID NO: 4998551 - DNA, 25 bp, Homo sapien
cactgcaaccttccgcctccggggt

SEQ ID NO: 4998552 - DNA, 25 bp, Homo sapien
ctaggattataggcctgagtcacct

SEQ ID NO: 4998553 - DNA, 25 bp, Homo sapien
ggattataggcctgagtcacctagc

SEQ ID NO: 4998554 - DNA, 25 bp, Homo sapien
tacaagaccagagtattgaattata

SEQ ID NO: 4998555 - DNA, 25 bp, Homo sapien
tggggaaggatcctccatttctggt

SEQ ID NO: 4998556 - DNA, 25 bp, Homo sapien
gaccagagtattgaattatactaca

SEQ ID NO: 4998557 - DNA, 25 bp, Homo sapien
ttgtcctggggaaggatcctccatt

SEQ ID NO: 4998558 - DNA, 25 bp, Homo sapien
tctttggttgtgtagtggggtggaa

SEQ ID NO: 4998559 - DNA, 25 bp, Homo sapien
ggaaagttattttgtcagggtctga

SEQ ID NO: 4998560 - DNA, 25 bp, Homo sapien
ctaaaacatctttggttgtgtagtg

SEQ ID NO: 4998561 - DNA, 25 bp, Homo sapien
gaaataaaaggtgaacagctgctag

SEQ ID NO: 4998562 - DNA, 25 bp, Homo sapien
gcagctgccttgtgcaactatgggt

SEQ ID NO: 4998563 - DNA, 25 bp, Homo sapien
gttagtggtagttgctggttgatca

SEQ ID NO: 4998564 - DNA, 25 bp, Homo sapien
ctgggtagttgcgtgaagattctgt

SEQ ID NO: 4998565 - DNA, 25 bp, Homo sapien
gaatagtttagcacgatgaagtggg

SEQ ID NO: 4998566 - DNA, 25 bp, Homo sapien
tgcaagtgtgccgataataagggag

SEQ ID NO: 4998567 - DNA, 25 bp, Homo sapien
ttgtaagtgcaagtgtgccgataat

SEQ ID NO: 4998568 - DNA, 25 bp, Homo sapien
caagtgtgccgataataagggagga

SEQ ID NO: 4998569 - DNA, 25 bp, Homo sapien
aagtgcaagtgtgccgataataagg

SEQ ID NO: 4998570 - DNA, 25 bp, Homo sapien
agagcacagattgctagaaataagg

SEQ ID NO: 4998571 - DNA, 25 bp, Homo sapien
gagcacagattgctagaaataaggt

SEQ ID NO: 4998572 - DNA, 25 bp, Homo sapien
ttaagaccaacggatgactctcatc

SEQ ID NO: 4998573 - DNA, 25 bp, Homo sapien
tcttaagaccaacggatgactctca

SEQ ID NO: 4998574 - DNA, 25 bp, Homo sapien
gcaccagtgtttttggttcttaaga

SEQ ID NO: 4998575 - DNA, 25 bp, Homo sapien
ggttcttaagaccaacggatgactc

SEQ ID NO: 4998576 - DNA, 25 bp, Homo sapien
ggcatgagttagcagttcctgcata

SEQ ID NO: 4998577 - DNA, 25 bp, Homo sapien
catgagttagcagttcctgcataca

SEQ ID NO: 4998578 - DNA, 25 bp, Homo sapien
catgttgttagacatgggggcatga

SEQ ID NO: 4998579 - DNA, 25 bp, Homo sapien
tgagttagcagttcctgcatacatt

SEQ ID NO: 4998580 - DNA, 25 bp, Homo sapien
gataagaaattgaaggcttctattg

SEQ ID NO: 4998581 - DNA, 25 bp, Homo sapien
tctaatgttttgcttaaactacagc

SEQ ID NO: 4998582 - DNA, 25 bp, Homo sapien
aatgttttgcttaaactacagctac

SEQ ID NO: 4998583 - DNA, 25 bp, Homo sapien
ggtagataagaaattgaaggcttct

SEQ ID NO: 4998584 - DNA, 25 bp, Homo sapien
catggccaggccagatttatgagga

SEQ ID NO: 4998585 - DNA, 25 bp, Homo sapien
tcaggtaatgtcacgtcatcattgg

SEQ ID NO: 4998586 - DNA, 25 bp, Homo sapien
gctagactggagtagtagaatgccc

SEQ ID NO: 4998587 - DNA, 25 bp, Homo sapien
gattgacaattgatgtaaggtggcc

SEQ ID NO: 4998588 - DNA, 25 bp, Homo sapien
aagacacatgaaaaggacgcttttc

SEQ ID NO: 4998589 - DNA, 25 bp, Homo sapien
ttttcttaagagcatcaggaatcat

SEQ ID NO: 4998590 - DNA, 25 bp, Homo sapien
ttcttaagagcatcaggaatcattt

SEQ ID NO: 4998591 - DNA, 25 bp, Homo sapien
tgaaaaggacgcttttcttaagagc

SEQ ID NO: 4998592 - DNA, 25 bp, Homo sapien
cctcagatctataatcagtgtttac

SEQ ID NO: 4998593 - DNA, 25 bp, Homo sapien
ctaaagcatgtccatagatttttgt

SEQ ID NO: 4998594 - DNA, 25 bp, Homo sapien
tctttgaatagtattgggaaccctc

SEQ ID NO: 4998595 - DNA, 25 bp, Homo sapien
aaaagttgaagacagttaactgtgg

SEQ ID NO: 4998596 - DNA, 25 bp, Homo sapien
gctgtatccctcagcatccagaaca

SEQ ID NO: 4998597 - DNA, 25 bp, Homo sapien
ttgtacatacaacgctcagagactg

SEQ ID NO: 4998598 - DNA, 25 bp, Homo sapien
gactgggaaacataggacacgtgga

SEQ ID NO: 4998599 - DNA, 25 bp, Homo sapien
tgtggaggttctatcaactttgcgt

SEQ ID NO: 4998600 - DNA, 25 bp, Homo sapien
ctcttcagaagcagttttctccaat

SEQ ID NO: 4998601 - DNA, 25 bp, Homo sapien
agaggaccacccaaagtctcttcag

SEQ ID NO: 4998602 - DNA, 25 bp, Homo sapien
taggtccaggtatggctctttatgc

SEQ ID NO: 4998603 - DNA, 25 bp, Homo sapien
tatatatctgcttgagaggaccacc

SEQ ID NO: 4998604 - DNA, 25 bp, Homo sapien
tgctggcggcacagcaaatttctca

SEQ ID NO: 4998605 - DNA, 25 bp, Homo sapien
tggcggcacagcaaatttctcactt

SEQ ID NO: 4998606 - DNA, 25 bp, Homo sapien
tggcaagttttgctcataccaaagc

SEQ ID NO: 4998607 - DNA, 25 bp, Homo sapien
agttttgctcataccaaagcaagag

SEQ ID NO: 4998608 - DNA, 25 bp, Homo sapien
taggtcctggtgtatgacttggtag

SEQ ID NO: 4998609 - DNA, 25 bp, Homo sapien
gttctagagctcttgtaggtcctgg

SEQ ID NO: 4998610 - DNA, 25 bp, Homo sapien
ttttccaattgattaaactgtccag

SEQ ID NO: 4998611 - DNA, 25 bp, Homo sapien
agtttacaaactcccacaatcacag

SEQ ID NO: 4998612 - DNA, 25 bp, Homo sapien
cataagtgtgtagatgttctattac

SEQ ID NO: 4998613 - DNA, 25 bp, Homo sapien
cttaagttgataggatattttcttc

SEQ ID NO: 4998614 - DNA, 25 bp, Homo sapien
tatcaatgtcatgaagttcatattt

SEQ ID NO: 4998615 - DNA, 25 bp, Homo sapien
ctctcagtatcaatgtcatgaagtt

SEQ ID NO: 4998616 - DNA, 25 bp, Homo sapien
agtatcaatgtcatgaagttcatat

SEQ ID NO: 4998617 - DNA, 25 bp, Homo sapien
tcagtatcaatgtcatgaagttcat

SEQ ID NO: 4998618 - DNA, 25 bp, Homo sapien
tgcacatattggatggtctcatttt

SEQ ID NO: 4998619 - DNA, 25 bp, Homo sapien
gaaatgcacatattggatggtctca

SEQ ID NO: 4998620 - DNA, 25 bp, Homo sapien
ctaatctctgatcagtgccttaatt

SEQ ID NO: 4998621 - DNA, 25 bp, Homo sapien
tcagtgccttaatttgggatttact

SEQ ID NO: 4998622 - DNA, 25 bp, Homo sapien
tgagagaattagcatggtaaagtaa

SEQ ID NO: 4998623 - DNA, 25 bp, Homo sapien
agatgatacaattaaccacatagca

SEQ ID NO: 4998624 - DNA, 25 bp, Homo sapien
aaaactagtgagagaattagcatgg

SEQ ID NO: 4998625 - DNA, 25 bp, Homo sapien
gatacaattaaccacatagcaaact

SEQ ID NO: 4998626 - DNA, 25 bp, Homo sapien
caatactgtaaggatgtcagttacc

SEQ ID NO: 4998627 - DNA, 25 bp, Homo sapien
taagaaacaggcaacgcacttgtga

SEQ ID NO: 4998628 - DNA, 25 bp, Homo sapien
ggtgagcaattcttgtcctaccaaa

SEQ ID NO: 4998629 - DNA, 25 bp, Homo sapien
gaattggacaaactgaatcgaaacc

SEQ ID NO: 4998630 - DNA, 25 bp, Homo sapien
tcagctccaaattcaagtcttgagc

SEQ ID NO: 4998631 - DNA, 25 bp, Homo sapien
cttgggttttggtagcctctgctgg

SEQ ID NO: 4998632 - DNA, 25 bp, Homo sapien
cgtctggaaccctcattgcaaagca

SEQ ID NO: 4998633 - DNA, 25 bp, Homo sapien
caaatggagcataagtcacgtctgg

SEQ ID NO: 4998634 - DNA, 25 bp, Homo sapien
ctgccacatcggtgagaaaaatggg

SEQ ID NO: 4998635 - DNA, 25 bp, Homo sapien
cggtgagaaaaatgggagtactaat

SEQ ID NO: 4998636 - DNA, 25 bp, Homo sapien
ccacatcggtgagaaaaatgggagt

SEQ ID NO: 4998637 - DNA, 25 bp, Homo sapien
catcggtgagaaaaatgggagtact

SEQ ID NO: 4998638 - DNA, 25 bp, Homo sapien
tgagaactgtatagctatgaccgcc

SEQ ID NO: 4998639 - DNA, 25 bp, Homo sapien
tataagccatggttggcatgagaac

SEQ ID NO: 4998640 - DNA, 25 bp, Homo sapien
ttgttcattataagccatggttggc

SEQ ID NO: 4998641 - DNA, 25 bp, Homo sapien
gctatgaccgcctgtgacttgttct

SEQ ID NO: 4998642 - DNA, 25 bp, Homo sapien
cacagaggattgatgggttgccagc

SEQ ID NO: 4998643 - DNA, 25 bp, Homo sapien
tactcttgtcggattgtctttcaca

SEQ ID NO: 4998644 - DNA, 25 bp, Homo sapien
cagcaggggaccacttggtaggttt

SEQ ID NO: 4998645 - DNA, 25 bp, Homo sapien
gatcccacacgcacttgcctatact

SEQ ID NO: 4998646 - DNA, 25 bp, Homo sapien
caggaggcttatgggctttatgagt

SEQ ID NO: 4998647 - DNA, 25 bp, Homo sapien
ctggacgtaaaatacttggtgttgc

SEQ ID NO: 4998648 - DNA, 25 bp, Homo sapien
aatacttggtgttgctatcaccagg

SEQ ID NO: 4998649 - DNA, 25 bp, Homo sapien
accaggaggcttatgggctttatga

SEQ ID NO: 4998650 - DNA, 25 bp, Homo sapien
taggctcatgacacgatgtccctca

SEQ ID NO: 4998651 - DNA, 25 bp, Homo sapien
gggtgtgactgtgatataggctcat

SEQ ID NO: 4998652 - DNA, 25 bp, Homo sapien
caggcaaggtgcctggcgatcaggg

SEQ ID NO: 4998653 - DNA, 25 bp, Homo sapien
gatgtccctcactgaagaatgcagc

SEQ ID NO: 4998654 - DNA, 25 bp, Homo sapien
tgatgtgaattcttattctggctgg

SEQ ID NO: 4998655 - DNA, 25 bp, Homo sapien
gatgatagatctggaggtatcttca

SEQ ID NO: 4998656 - DNA, 25 bp, Homo sapien
gtgaattcttattctggctggttga

SEQ ID NO: 4998657 - DNA, 25 bp, Homo sapien
tatgttctaccatctttgtcctctg

SEQ ID NO: 4998658 - DNA, 25 bp, Homo sapien
atgatagaaacttgggggcaatagc

SEQ ID NO: 4998659 - DNA, 25 bp, Homo sapien
gatagaaacttgggggcaatagcaa

SEQ ID NO: 4998660 - DNA, 25 bp, Homo sapien
ggatgatagaaacttgggggcaata

SEQ ID NO: 4998661 - DNA, 25 bp, Homo sapien
tagaaacttgggggcaatagcaaat

SEQ ID NO: 4998662 - DNA, 25 bp, Homo sapien
ctgactgtatttggcggcattcatt

SEQ ID NO: 4998663 - DNA, 25 bp, Homo sapien
tctctgactgtatttggcggcattc

SEQ ID NO: 4998664 - DNA, 25 bp, Homo sapien
ctgtatttggcggcattcattcaaa

SEQ ID NO: 4998665 - DNA, 25 bp, Homo sapien
actgtatttggcggcattcattcaa

SEQ ID NO: 4998666 - DNA, 25 bp, Homo sapien
gctgtgcgccagacactactgaaag

SEQ ID NO: 4998667 - DNA, 25 bp, Homo sapien
gagcctggtgttgaacaaagacaca

SEQ ID NO: 4998668 - DNA, 25 bp, Homo sapien
tactgaaagcatcaggagcctggtg

SEQ ID NO: 4998669 - DNA, 25 bp, Homo sapien
gaggctgtttgagttgatgacaatc

SEQ ID NO: 4998670 - DNA, 25 bp, Homo sapien
cctgcttgaggtggttttacgccct

SEQ ID NO: 4998671 - DNA, 25 bp, Homo sapien
ctcctcctgtcttcacaatcgaggg

SEQ ID NO: 4998672 - DNA, 25 bp, Homo sapien
cccaacgctgggctggttgctcttg

SEQ ID NO: 4998673 - DNA, 25 bp, Homo sapien
atagacctctcccaacgctgggctg

SEQ ID NO: 4998674 - DNA, 25 bp, Homo sapien
tcacaaatgaatgtttagagcacag

SEQ ID NO: 4998675 - DNA, 25 bp, Homo sapien
gaagatattgttctgggatccagaa

SEQ ID NO: 4998676 - DNA, 25 bp, Homo sapien
ttacaacagtagttatcaaggagcc

SEQ ID NO: 4998677 - DNA, 25 bp, Homo sapien
ggagcccttataagctgtcctggga

SEQ ID NO: 4998678 - DNA, 25 bp, Homo sapien
ggctgtgccccggttgcagaatctt

SEQ ID NO: 4998679 - DNA, 25 bp, Homo sapien
gtgccccggttgcagaatcttcaaa

SEQ ID NO: 4998680 - DNA, 25 bp, Homo sapien
ggttgttataaaggtggctgtgccc

SEQ ID NO: 4998681 - DNA, 25 bp, Homo sapien
ttgttataaaggtggctgtgccccg

SEQ ID NO: 4998682 - DNA, 25 bp, Homo sapien
gaggaagggaagttgctattacgac

SEQ ID NO: 4998683 - DNA, 25 bp, Homo sapien
tgagagtgagcaaaatgtgacactt

SEQ ID NO: 4998684 - DNA, 25 bp, Homo sapien
tattacgacttggtcttgggacaag

SEQ ID NO: 4998685 - DNA, 25 bp, Homo sapien
acacaccgcacaggttctccgggaa

SEQ ID NO: 4998686 - DNA, 25 bp, Homo sapien
catttctccactcttactcaatctt

SEQ ID NO: 4998687 - DNA, 25 bp, Homo sapien
ttctccactcttactcaatcttatc

SEQ ID NO: 4998688 - DNA, 25 bp, Homo sapien
tttctccactcttactcaatcttat

SEQ ID NO: 4998689 - DNA, 25 bp, Homo sapien
tccatttctccactcttactcaatc

SEQ ID NO: 4998690 - DNA, 25 bp, Homo sapien
cagtgatgactgttgccaaggcctg

SEQ ID NO: 4998691 - DNA, 25 bp, Homo sapien
tcagtgatgactgttgccaaggcct

SEQ ID NO: 4998692 - DNA, 25 bp, Homo sapien
agtgatgactgttgccaaggcctgc

SEQ ID NO: 4998693 - DNA, 25 bp, Homo sapien
tgatgactgttgccaaggcctgctc

SEQ ID NO: 4998694 - DNA, 25 bp, Homo sapien
taagacaatggtgaggactgtgtga

SEQ ID NO: 4998695 - DNA, 25 bp, Homo sapien
gtgaggactgtgtgatgattgccat

SEQ ID NO: 4998696 - DNA, 25 bp, Homo sapien
caatggtgaggactgtgtgatgatt

SEQ ID NO: 4998697 - DNA, 25 bp, Homo sapien
catgagtaagacaatggtgaggact

SEQ ID NO: 4998698 - DNA, 25 bp, Homo sapien
gtcagcacactgtacaaaatctcat

SEQ ID NO: 4998699 - DNA, 25 bp, Homo sapien
gactcacctttgtcagcacactgta

SEQ ID NO: 4998700 - DNA, 25 bp, Homo sapien
tcacctttgtcagcacactgtacaa

SEQ ID NO: 4998701 - DNA, 25 bp, Homo sapien
cattcaagactcacctttgtcagca

SEQ ID NO: 4998702 - DNA, 25 bp, Homo sapien
catgtaagtcctagattaccagctt

SEQ ID NO: 4998703 - DNA, 25 bp, Homo sapien
tgtatcataccaactcaagtaaacc

SEQ ID NO: 4998704 - DNA, 25 bp, Homo sapien
atccacagtgttcaaggaacttaca

SEQ ID NO: 4998705 - DNA, 25 bp, Homo sapien
aacctcagatattcatacacattag

SEQ ID NO: 4998706 - DNA, 25 bp, Homo sapien
gcttgacccttgaatgaccttgagg

SEQ ID NO: 4998707 - DNA, 25 bp, Homo sapien
gcaagatgccgggacagatggcttg

SEQ ID NO: 4998708 - DNA, 25 bp, Homo sapien
tgtatgtgttcaaataaagcaactg

SEQ ID NO: 4998709 - DNA, 25 bp, Homo sapien
actggaagtggaaggcaagatgccg

SEQ ID NO: 4998710 - DNA, 25 bp, Homo sapien
ggtgtctctcgcatctcctgtgggc

SEQ ID NO: 4998711 - DNA, 25 bp, Homo sapien
cctgtgggccttcggcacatttcaa

SEQ ID NO: 4998712 - DNA, 25 bp, Homo sapien
ctcctgtgggccttcggcacatttc

SEQ ID NO: 4998713 - DNA, 25 bp, Homo sapien
tgaaataaaaggtgtctctcgcatc

SEQ ID NO: 4998714 - DNA, 25 bp, Homo sapien
tgtagctgctataccctccagaagc

SEQ ID NO: 4998715 - DNA, 25 bp, Homo sapien
tccagaggtgataacagatacaagt

SEQ ID NO: 4998716 - DNA, 25 bp, Homo sapien
gaagcaatgataccctccagaggtg

SEQ ID NO: 4998717 - DNA, 25 bp, Homo sapien
tataccctcctgaagcaatgaatgt

SEQ ID NO: 4998718 - DNA, 25 bp, Homo sapien
ccaggctggcatggtcgctctgctg

SEQ ID NO: 4998719 - DNA, 25 bp, Homo sapien
ggagcccaggttcctcctcgctttg

SEQ ID NO: 4998720 - DNA, 25 bp, Homo sapien
tgcaaattgtacaagctgccctcat

SEQ ID NO: 4998721 - DNA, 25 bp, Homo sapien
caggctggcatggtcgctctgctgt

SEQ ID NO: 4998722 - DNA, 25 bp, Homo sapien
cacctggatgcctacatctcactta

SEQ ID NO: 4998723 - DNA, 25 bp, Homo sapien
ggatgcctacatctcacttaagagt

SEQ ID NO: 4998724 - DNA, 25 bp, Homo sapien
cctggatgcctacatctcacttaag

SEQ ID NO: 4998725 - DNA, 25 bp, Homo sapien
tggatgcctacatctcacttaagag

SEQ ID NO: 4998726 - DNA, 25 bp, Homo sapien
ttaaatatcacacctaaaagatagc

SEQ ID NO: 4998727 - DNA, 25 bp, Homo sapien
tccactggagggcagtatatcgtaa

SEQ ID NO: 4998728 - DNA, 25 bp, Homo sapien
cagaggttatgtctgacaggagtcc

SEQ ID NO: 4998729 - DNA, 25 bp, Homo sapien
tcgtaagaattatggctggttgcct

SEQ ID NO: 4998730 - DNA, 25 bp, Homo sapien
atcagctgccggtgtagccctatca

SEQ ID NO: 4998731 - DNA, 25 bp, Homo sapien
agagcattgaatgcaatgttctgga

SEQ ID NO: 4998732 - DNA, 25 bp, Homo sapien
gaaaccaagtttccggagatagctg

SEQ ID NO: 4998733 - DNA, 25 bp, Homo sapien
gatcacacggcctcacattccttaa

SEQ ID NO: 4998734 - DNA, 25 bp, Homo sapien
atgggcaattttagtcttttctgaa

SEQ ID NO: 4998735 - DNA, 25 bp, Homo sapien
tatgctctctgacaggtgaacaggt

SEQ ID NO: 4998736 - DNA, 25 bp, Homo sapien
caagtaggtatttctagctccagac

SEQ ID NO: 4998737 - DNA, 25 bp, Homo sapien
aatctattgaaaggtgttcaagctc

SEQ ID NO: 4998738 - DNA, 25 bp, Homo sapien
aaaggtgttcaagctctcgacctcg

SEQ ID NO: 4998739 - DNA, 25 bp, Homo sapien
gtgttcaagctctcgacctcgttcc

SEQ ID NO: 4998740 - DNA, 25 bp, Homo sapien
tattgaaaggtgttcaagctctcga

SEQ ID NO: 4998741 - DNA, 25 bp, Homo sapien
taccaggatgtactcggatgcacga

SEQ ID NO: 4998742 - DNA, 25 bp, Homo sapien
tactcggatgcacgaagagggaaaa

SEQ ID NO: 4998743 - DNA, 25 bp, Homo sapien
aggatgtactcggatgcacgaagag

SEQ ID NO: 4998744 - DNA, 25 bp, Homo sapien
acatctaccaggatgtactcggatg

SEQ ID NO: 4998745 - DNA, 25 bp, Homo sapien
gccgggatcagcctgtatgtcaggt

SEQ ID NO: 4998746 - DNA, 25 bp, Homo sapien
tccctgtgccgggatcagcctgtat

SEQ ID NO: 4998747 - DNA, 25 bp, Homo sapien
tcctccaagctgcagtatgttcggg

SEQ ID NO: 4998748 - DNA, 25 bp, Homo sapien
aggtcctccaagctgcagtatgttc

SEQ ID NO: 4998749 - DNA, 25 bp, Homo sapien
ttagcgttcataagttcctctttcc

SEQ ID NO: 4998750 - DNA, 25 bp, Homo sapien
tcataagttcctctttccctggaaa

SEQ ID NO: 4998751 - DNA, 25 bp, Homo sapien
agcgttcataagttcctctttccct

SEQ ID NO: 4998752 - DNA, 25 bp, Homo sapien
cgttcataagttcctctttccctgg

SEQ ID NO: 4998753 - DNA, 25 bp, Homo sapien
ctttccaaaatggtcccgttctatg

SEQ ID NO: 4998754 - DNA, 25 bp, Homo sapien
caaaatggtcccgttctatgttgtg

SEQ ID NO: 4998755 - DNA, 25 bp, Homo sapien
tggtcccgttctatgttgtgggaaa

SEQ ID NO: 4998756 - DNA, 25 bp, Homo sapien
aatggtcccgttctatgttgtggga

SEQ ID NO: 4998757 - DNA, 25 bp, Homo sapien
ctgtggtaatagagtgctgtgtttc

SEQ ID NO: 4998758 - DNA, 25 bp, Homo sapien
tggtaatagagtgctgtgtttccat

SEQ ID NO: 4998759 - DNA, 25 bp, Homo sapien
tgtggtaatagagtgctgtgtttcc

SEQ ID NO: 4998760 - DNA, 25 bp, Homo sapien
gtggtaatagagtgctgtgtttcca

SEQ ID NO: 4998761 - DNA, 25 bp, Homo sapien
tgatctctttatttggcctaatctg

SEQ ID NO: 4998762 - DNA, 25 bp, Homo sapien
atctctttatttggcctaatctgaa

SEQ ID NO: 4998763 - DNA, 25 bp, Homo sapien
gatctctttatttggcctaatctga

SEQ ID NO: 4998764 - DNA, 25 bp, Homo sapien
tctctttatttggcctaatctgaat

SEQ ID NO: 4998765 - DNA, 25 bp, Homo sapien
tagtgtctctgattgactctgcccg

SEQ ID NO: 4998766 - DNA, 25 bp, Homo sapien
ctgattgactctgcccgttgccctg

SEQ ID NO: 4998767 - DNA, 25 bp, Homo sapien
tctctgattgactctgcccgttgcc

SEQ ID NO: 4998768 - DNA, 25 bp, Homo sapien
tgtctctgattgactctgcccgttg

SEQ ID NO: 4998769 - DNA, 25 bp, Homo sapien
taactcgtaaagtggatgctaccat

SEQ ID NO: 4998770 - DNA, 25 bp, Homo sapien
aagtggatgctaccattttaaggag

SEQ ID NO: 4998771 - DNA, 25 bp, Homo sapien
cttactcttcttaactcgtaaagtg

SEQ ID NO: 4998772 - DNA, 25 bp, Homo sapien
tcttcttaactcgtaaagtggatgc

SEQ ID NO: 4998773 - DNA, 25 bp, Homo sapien
tgccaaattctgttagcctccagcc

SEQ ID NO: 4998774 - DNA, 25 bp, Homo sapien
ctgccaaattctgttagcctccagc

SEQ ID NO: 4998775 - DNA, 25 bp, Homo sapien
cctctgcttctgatcaaatcggtct

SEQ ID NO: 4998776 - DNA, 25 bp, Homo sapien
gtctccgtaatagaactcatgtctg

SEQ ID NO: 4998777 - DNA, 25 bp, Homo sapien
tttccacagttaacattgcttccct

SEQ ID NO: 4998778 - DNA, 25 bp, Homo sapien
cagttaacattgcttccctctgctt

SEQ ID NO: 4998779 - DNA, 25 bp, Homo sapien
cacattgctcgttgctgttcacaga

SEQ ID NO: 4998780 - DNA, 25 bp, Homo sapien
gagaggtttctctgaattgggcact

SEQ ID NO: 4998781 - DNA, 25 bp, Homo sapien
cccttgcaggggaagtgaacttgtg

SEQ ID NO: 4998782 - DNA, 25 bp, Homo sapien
gaattgggcactgttccagcccttg

SEQ ID NO: 4998783 - DNA, 25 bp, Homo sapien
agtctgcaggttgcattcctttggc

SEQ ID NO: 4998784 - DNA, 25 bp, Homo sapien
tgagtctgcaggttgcattcctttg

SEQ ID NO: 4998785 - DNA, 25 bp, Homo sapien
gagtctgcaggttgcattcctttgg

SEQ ID NO: 4998786 - DNA, 25 bp, Homo sapien
ttgagtctgcaggttgcattccttt

SEQ ID NO: 4998787 - DNA, 25 bp, Homo sapien
gacacatacataaagtccccgttta

SEQ ID NO: 4998788 - DNA, 25 bp, Homo sapien
ggaacttccacagctaatgatctgc

SEQ ID NO: 4998789 - DNA, 25 bp, Homo sapien
ccattttggcagttggaacttccac

SEQ ID NO: 4998790 - DNA, 25 bp, Homo sapien
tcatctagacaagccctggacacat

SEQ ID NO: 4998791 - DNA, 25 bp, Homo sapien
ctggagtagggacgcagaacttgtt

SEQ ID NO: 4998792 - DNA, 25 bp, Homo sapien
cttgttgactccggaagtacacaga

SEQ ID NO: 4998793 - DNA, 25 bp, Homo sapien
gaaaaccaaggcagttgctggagta

SEQ ID NO: 4998794 - DNA, 25 bp, Homo sapien
aaaccaaggcagttgctggagtagg

SEQ ID NO: 4998795 - DNA, 25 bp, Homo sapien
tctcaggtattctggtctcatcacc

SEQ ID NO: 4998796 - DNA, 25 bp, Homo sapien
tttagagaaatgtcgttgctgttgc

SEQ ID NO: 4998797 - DNA, 25 bp, Homo sapien
ttttctcatgcaggagcctctggca

SEQ ID NO: 4998798 - DNA, 25 bp, Homo sapien
tggcactgactgtgtagctttgagt

SEQ ID NO: 4998799 - DNA, 25 bp, Homo sapien
tgctgcatcctgactgtggtgactc

SEQ ID NO: 4998800 - DNA, 25 bp, Homo sapien
tttttgtgtgcacatccagtctctg

SEQ ID NO: 4998801 - DNA, 25 bp, Homo sapien
gactcagaattagctccggaatcca

SEQ ID NO: 4998802 - DNA, 25 bp, Homo sapien
taagttagttgtaagaccatgtagg

SEQ ID NO: 4998803 - DNA, 25 bp, Homo sapien
tgctggctgagtgatgttcgaatat

SEQ ID NO: 4998804 - DNA, 25 bp, Homo sapien
tgaaaagagacctgcagatgcaggt

SEQ ID NO: 4998805 - DNA, 25 bp, Homo sapien
gtgatgttcgaatatgtaagcactt

SEQ ID NO: 4998806 - DNA, 25 bp, Homo sapien
ggctgagtgatgttcgaatatgtaa

SEQ ID NO: 4998807 - DNA, 25 bp, Homo sapien
caagctctcattgttaagtagggca

SEQ ID NO: 4998808 - DNA, 25 bp, Homo sapien
agaaggatactcttccctgcatggc

SEQ ID NO: 4998809 - DNA, 25 bp, Homo sapien
caactgtttccctgtgggcgatggg

SEQ ID NO: 4998810 - DNA, 25 bp, Homo sapien
ggccgctgagtacagtaggctgtaa

SEQ ID NO: 4998811 - DNA, 25 bp, Homo sapien
tgaatattcagctgtcgatggagct

SEQ ID NO: 4998812 - DNA, 25 bp, Homo sapien
tagaaatgaactcattaggagcatt

SEQ ID NO: 4998813 - DNA, 25 bp, Homo sapien
tcatgaatattcagctgtcgatgga

SEQ ID NO: 4998814 - DNA, 25 bp, Homo sapien
gaaatgaactcattaggagcatttt

SEQ ID NO: 4998815 - DNA, 25 bp, Homo sapien
tgcattcttgaataacgactaaaac

SEQ ID NO: 4998816 - DNA, 25 bp, Homo sapien
taaaacaggaatagtgttctgcact

SEQ ID NO: 4998817 - DNA, 25 bp, Homo sapien
gcactttaaattcgggaaatgacca

SEQ ID NO: 4998818 - DNA, 25 bp, Homo sapien
ccttttcatcggaactgcattcttg

SEQ ID NO: 4998819 - DNA, 25 bp, Homo sapien
tgtttagtggacctggccaacgaat

SEQ ID NO: 4998820 - DNA, 25 bp, Homo sapien
tcagaggatggtcttagagcacagc

SEQ ID NO: 4998821 - DNA, 25 bp, Homo sapien
tacttttcagtgctgtagcccaggt

SEQ ID NO: 4998822 - DNA, 25 bp, Homo sapien
cactggagccgcttgagctatgtca

SEQ ID NO: 4998823 - DNA, 25 bp, Homo sapien
atgaagagataaatagggcgatgtc

SEQ ID NO: 4998824 - DNA, 25 bp, Homo sapien
tataaaggataagaagtgaaaagcc

SEQ ID NO: 4998825 - DNA, 25 bp, Homo sapien
gataaatagggcgatgtctggaaga

SEQ ID NO: 4998826 - DNA, 25 bp, Homo sapien
agcctgatgaagagataaatagggc

SEQ ID NO: 4998827 - DNA, 25 bp, Homo sapien
catccttcagagatgggaccagcta

SEQ ID NO: 4998828 - DNA, 25 bp, Homo sapien
tccatggatcactgggaaaaggagg

SEQ ID NO: 4998829 - DNA, 25 bp, Homo sapien
ggaagcaaatgcgtcacccctttct

SEQ ID NO: 4998830 - DNA, 25 bp, Homo sapien
gcaagaactgcggaagaacaggaac

SEQ ID NO: 4998831 - DNA, 25 bp, Homo sapien
tcttgacaaggtatctttctttgct

SEQ ID NO: 4998832 - DNA, 25 bp, Homo sapien
ctcttgacaaggtatctttctttgc

SEQ ID NO: 4998833 - DNA, 25 bp, Homo sapien
tagttgtgccagctcctattggagg

SEQ ID NO: 4998834 - DNA, 25 bp, Homo sapien
tcttcagacagcacggttccaatca

SEQ ID NO: 4998835 - DNA, 25 bp, Homo sapien
tcaatggccaattaaatgctttcaa

SEQ ID NO: 4998836 - DNA, 25 bp, Homo sapien
ggatgggaggtttcacgacgactca

SEQ ID NO: 4998837 - DNA, 25 bp, Homo sapien
gtgaccagaatcaacatattttctt

SEQ ID NO: 4998838 - DNA, 25 bp, Homo sapien
gaccagaatcaacatattttctttt

SEQ ID NO: 4998839 - DNA, 25 bp, Homo sapien
ccagaatcaacatattttcttttac

SEQ ID NO: 4998840 - DNA, 25 bp, Homo sapien
ttgtgaccagaatcaacatattttc

SEQ ID NO: 4998841 - DNA, 25 bp, Homo sapien
tcaactccttttaacccagccttca

SEQ ID NO: 4998842 - DNA, 25 bp, Homo sapien
ggcagaaaccacgtttcccatgcag

SEQ ID NO: 4998843 - DNA, 25 bp, Homo sapien
tagcaccatccccagttttcatgag

SEQ ID NO: 4998844 - DNA, 25 bp, Homo sapien
aatgtaaaccgcaatgttgaaggtg

SEQ ID NO: 4998845 - DNA, 25 bp, Homo sapien
cagccgtgtaagaggcgcctgcttc

SEQ ID NO: 4998846 - DNA, 25 bp, Homo sapien
agcagaataatgagttcaattgatc

SEQ ID NO: 4998847 - DNA, 25 bp, Homo sapien
atgagttcaattgatctgtaactgc

SEQ ID NO: 4998848 - DNA, 25 bp, Homo sapien
gaataatgagttcaattgatctgta

SEQ ID NO: 4998849 - DNA, 25 bp, Homo sapien
taatgagttcaattgatctgtaact

SEQ ID NO: 4998850 - DNA, 25 bp, Homo sapien
tagaagttcaatcagacagttcagc

SEQ ID NO: 4998851 - DNA, 25 bp, Homo sapien
gcttcacgaactgatgtctctctgt

SEQ ID NO: 4998852 - DNA, 25 bp, Homo sapien
ttcccattgcaaacaagtagtgatc

SEQ ID NO: 4998853 - DNA, 25 bp, Homo sapien
tatgctggaaatggatagaagttca

SEQ ID NO: 4998854 - DNA, 25 bp, Homo sapien
gtattcacttttagagtaaaatcca

SEQ ID NO: 4998855 - DNA, 25 bp, Homo sapien
aaaggtggaaaagcatgctttactc

SEQ ID NO: 4998856 - DNA, 25 bp, Homo sapien
tatagactgtgtgctatacattttc

SEQ ID NO: 4998857 - DNA, 25 bp, Homo sapien
tttcagtcccccatttgcaagagag

SEQ ID NO: 4998858 - DNA, 25 bp, Homo sapien
ccattattgaagaaacctggcgaca

SEQ ID NO: 4998859 - DNA, 25 bp, Homo sapien
ttcttctagctgcctttgggcatcc

SEQ ID NO: 4998860 - DNA, 25 bp, Homo sapien
tcttctagctgcctttgggcatcct

SEQ ID NO: 4998861 - DNA, 25 bp, Homo sapien
ttattcttgtggacagctctagcaa

SEQ ID NO: 4998862 - DNA, 25 bp, Homo sapien
tactgggtgctgtgccataatggcc

SEQ ID NO: 4998863 - DNA, 25 bp, Homo sapien
tccttgggccatgaatactgggtgc

SEQ ID NO: 4998864 - DNA, 25 bp, Homo sapien
gccatgaatactgggtgctgtgcca

SEQ ID NO: 4998865 - DNA, 25 bp, Homo sapien
gcttccttgggccatgaatactggg

SEQ ID NO: 4998866 - DNA, 25 bp, Homo sapien
ccttgatactaactttgagagccaa

SEQ ID NO: 4998867 - DNA, 25 bp, Homo sapien
cagtcctttgggcttgtacatttta

SEQ ID NO: 4998868 - DNA, 25 bp, Homo sapien
tgcagagcagttattcacttatact

SEQ ID NO: 4998869 - DNA, 25 bp, Homo sapien
caaagcctaagggtcatgttaatta

SEQ ID NO: 4998870 - DNA, 25 bp, Homo sapien
tcttgatccaaaggtctatctgtct

SEQ ID NO: 4998871 - DNA, 25 bp, Homo sapien
gctgctcttgatccaaaggtctatc

SEQ ID NO: 4998872 - DNA, 25 bp, Homo sapien
atgctgctcttgatccaaaggtcta

SEQ ID NO: 4998873 - DNA, 25 bp, Homo sapien
gctcttgatccaaaggtctatctgt

SEQ ID NO: 4998874 - DNA, 25 bp, Homo sapien
tgacagatgtaagaactctcgagct

SEQ ID NO: 4998875 - DNA, 25 bp, Homo sapien
ggagtaatcactgctgacagatgta

SEQ ID NO: 4998876 - DNA, 25 bp, Homo sapien
agaactctcgagctggccatgaact

SEQ ID NO: 4998877 - DNA, 25 bp, Homo sapien
gatccagcagatggagtaatcactg

SEQ ID NO: 4998878 - DNA, 25 bp, Homo sapien
ccttagaacagcaatctgaagaggc

SEQ ID NO: 4998879 - DNA, 25 bp, Homo sapien
cttagaacagcaatctgaagaggct

SEQ ID NO: 4998880 - DNA, 25 bp, Homo sapien
tccttagaacagcaatctgaagagg

SEQ ID NO: 4998881 - DNA, 25 bp, Homo sapien
tctccttagaacagcaatctgaaga

SEQ ID NO: 4998882 - DNA, 25 bp, Homo sapien
aacacacgagttttgattcctgcca

SEQ ID NO: 4998883 - DNA, 25 bp, Homo sapien
caataagatgtaatgtaggctcaac

SEQ ID NO: 4998884 - DNA, 25 bp, Homo sapien
cagagtttagagttttatgccagca

SEQ ID NO: 4998885 - DNA, 25 bp, Homo sapien
ggaagaacatcttgaaacacacgag

SEQ ID NO: 4998886 - DNA, 25 bp, Homo sapien
tagagtccagatattgcagggtctg

SEQ ID NO: 4998887 - DNA, 25 bp, Homo sapien
gaacaatctggtttaatcggagacg

SEQ ID NO: 4998888 - DNA, 25 bp, Homo sapien
gagaattctggagaatagtaagcag

SEQ ID NO: 4998889 - DNA, 25 bp, Homo sapien
taaaagtacagaggtgagaattctg

SEQ ID NO: 4998890 - DNA, 25 bp, Homo sapien
cagcactattgactgggacacagaa

SEQ ID NO: 4998891 - DNA, 25 bp, Homo sapien
gcactattgactgggacacagaatg

SEQ ID NO: 4998892 - DNA, 25 bp, Homo sapien
agcactattgactgggacacagaat

SEQ ID NO: 4998893 - DNA, 25 bp, Homo sapien
tattcttgtcaccacatcgttgatg

SEQ ID NO: 4998894 - DNA, 25 bp, Homo sapien
ttcttgtcaccacatcgttgatggg

SEQ ID NO: 4998895 - DNA, 25 bp, Homo sapien
cacatcgttgatgggggaacggccc

SEQ ID NO: 4998896 - DNA, 25 bp, Homo sapien
ctggagttcatgtcttcttcatggc

SEQ ID NO: 4998897 - DNA, 25 bp, Homo sapien
gcttcagcagattcacacaacagct

SEQ ID NO: 4998898 - DNA, 25 bp, Homo sapien
gctggattctccttcaaatagttca

SEQ ID NO: 4998899 - DNA, 25 bp, Homo sapien
cttcagcagattcacacaacagctg

SEQ ID NO: 4998900 - DNA, 25 bp, Homo sapien
ggattctccttcaaatagttcagta

SEQ ID NO: 4998901 - DNA, 25 bp, Homo sapien
cttttagcaattgatagagccagat

SEQ ID NO: 4998902 - DNA, 25 bp, Homo sapien
gaagacgtagatggatttgaacaaa

SEQ ID NO: 4998903 - DNA, 25 bp, Homo sapien
atagattatatgctggaccctccaa

SEQ ID NO: 4998904 - DNA, 25 bp, Homo sapien
gaacactacactgaataactgcaga

SEQ ID NO: 4998905 - DNA, 25 bp, Homo sapien
tagaactgcctatattccagcccaa

SEQ ID NO: 4998906 - DNA, 25 bp, Homo sapien
gaagcccttatacattggcggtggg

SEQ ID NO: 4998907 - DNA, 25 bp, Homo sapien
gaaagatctaggagaagcatgcact

SEQ ID NO: 4998908 - DNA, 25 bp, Homo sapien
tatgttacacgaaataggccaggct

SEQ ID NO: 4998909 - DNA, 25 bp, Homo sapien
tcttgcccaggcatagttcacaatc

SEQ ID NO: 4998910 - DNA, 25 bp, Homo sapien
ggacaatcgatttgcccatcaggac

SEQ ID NO: 4998911 - DNA, 25 bp, Homo sapien
ccctatatccaggttggacaatcga

SEQ ID NO: 4998912 - DNA, 25 bp, Homo sapien
gagcaccagctatactgagggaaac

SEQ ID NO: 4998913 - DNA, 25 bp, Homo sapien
tcagtagagtggagagtccttggga

SEQ ID NO: 4998914 - DNA, 25 bp, Homo sapien
gtggtattccctcagtagagtggag

SEQ ID NO: 4998915 - DNA, 25 bp, Homo sapien
tccagtcttcaccttcattgcacca

SEQ ID NO: 4998916 - DNA, 25 bp, Homo sapien
gtgctccagtcttcaccttcattgc

SEQ ID NO: 4998917 - DNA, 25 bp, Homo sapien
tgctccagtcttcaccttcattgca

SEQ ID NO: 4998918 - DNA, 25 bp, Homo sapien
agtcttcaccttcattgcaccatgg

SEQ ID NO: 4998919 - DNA, 25 bp, Homo sapien
agtcctgatgtgcaaattaggtgtc

SEQ ID NO: 4998920 - DNA, 25 bp, Homo sapien
tcctgatgtgcaaattaggtgtcca

SEQ ID NO: 4998921 - DNA, 25 bp, Homo sapien
ctgatgtgcaaattaggtgtccaac

SEQ ID NO: 4998922 - DNA, 25 bp, Homo sapien
ggcagtcctgatgtgcaaattaggt

SEQ ID NO: 4998923 - DNA, 25 bp, Homo sapien
tcaaggacacagagatgcttttagg

SEQ ID NO: 4998924 - DNA, 25 bp, Homo sapien
caatggaaagaatcttctgcaacgg

SEQ ID NO: 4998925 - DNA, 25 bp, Homo sapien
taacagcttggtttgagcagggaat

SEQ ID NO: 4998926 - DNA, 25 bp, Homo sapien
gatgttaccaaccttagatcgctga

SEQ ID NO: 4998927 - DNA, 25 bp, Homo sapien
ccagtgtctcattttctaaagccac

SEQ ID NO: 4998928 - DNA, 25 bp, Homo sapien
ctcattttctaaagccacacagatg

SEQ ID NO: 4998929 - DNA, 25 bp, Homo sapien
cagtgtctcattttctaaagccaca

SEQ ID NO: 4998930 - DNA, 25 bp, Homo sapien
tttctaaagccacacagatgcacat

SEQ ID NO: 4998931 - DNA, 25 bp, Homo sapien
cagacttgcctactgtggttatttt

SEQ ID NO: 4998932 - DNA, 25 bp, Homo sapien
tcacataccagacaagtcacctatt

SEQ ID NO: 4998933 - DNA, 25 bp, Homo sapien
cctgtcaccctgcaacactttcctg

SEQ ID NO: 4998934 - DNA, 25 bp, Homo sapien
tgcagacttgcctactgtggttatt

SEQ ID NO: 4998935 - DNA, 25 bp, Homo sapien
gccccacgcgcgcgtggctccccgg

SEQ ID NO: 4998936 - DNA, 25 bp, Homo sapien
cgccccacgcgcgcgtggctccccg

SEQ ID NO: 4998937 - DNA, 25 bp, Homo sapien
tctgttccccatggcgtctcatccg

SEQ ID NO: 4998938 - DNA, 25 bp, Homo sapien
gagggttgtccccagcggaggcgca

SEQ ID NO: 4998939 - DNA, 25 bp, Homo sapien
actctcttcgcggtcccatctgttc

SEQ ID NO: 4998940 - DNA, 25 bp, Homo sapien
agccgcgcgttctccctgcactctc

SEQ ID NO: 4998941 - DNA, 25 bp, Homo sapien
agatcggtcccctgtttgaggtaag

SEQ ID NO: 4998942 - DNA, 25 bp, Homo sapien
tggagaagaacaagatcggtcccct

SEQ ID NO: 4998943 - DNA, 25 bp, Homo sapien
gaacaagatcggtcccctgtttgag

SEQ ID NO: 4998944 - DNA, 25 bp, Homo sapien
cccctgtttgaggtaaggcgctgtg

SEQ ID NO: 4998945 - DNA, 25 bp, Homo sapien
ccagggaaggagggctagagaacca

SEQ ID NO: 4998946 - DNA, 25 bp, Homo sapien
acagaacactcccaatcccacccct

SEQ ID NO: 4998947 - DNA, 25 bp, Homo sapien
ctagagaaccaacgcgcgggagagg

SEQ ID NO: 4998948 - DNA, 25 bp, Homo sapien
ggctagagaaccaacgcgcgggaga

SEQ ID NO: 4998949 - DNA, 25 bp, Homo sapien
cataaggatcacagccgtgggctac

SEQ ID NO: 4998950 - DNA, 25 bp, Homo sapien
ccttgcgtttatcagagagctgtag

SEQ ID NO: 4998951 - DNA, 25 bp, Homo sapien
agctgtagtgtctgcggagatctcc

SEQ ID NO: 4998952 - DNA, 25 bp, Homo sapien
ctccctgatcatatctaaaaaatgc

SEQ ID NO: 4998953 - DNA, 25 bp, Homo sapien
gctggcctgttgaggaattactttc

SEQ ID NO: 4998954 - DNA, 25 bp, Homo sapien
tctgcataaggctggcctgttgagg

SEQ ID NO: 4998955 - DNA, 25 bp, Homo sapien
tcactgagttgtacagtggagcgat

SEQ ID NO: 4998956 - DNA, 25 bp, Homo sapien
ggagcgattgaagaagcctctcgaa

SEQ ID NO: 4998957 - DNA, 25 bp, Homo sapien
atttctgttgtgcttatgagctatt

SEQ ID NO: 4998958 - DNA, 25 bp, Homo sapien
tgttgtgcttatgagctattgcacc

SEQ ID NO: 4998959 - DNA, 25 bp, Homo sapien
tctgttgtgcttatgagctattgca

SEQ ID NO: 4998960 - DNA, 25 bp, Homo sapien
gttgtgcttatgagctattgcaccc

SEQ ID NO: 4998961 - DNA, 25 bp, Homo sapien
tagcaactggtagatatttgagagt

SEQ ID NO: 4998962 - DNA, 25 bp, Homo sapien
actggtagatatttgagagtcgaag

SEQ ID NO: 4998963 - DNA, 25 bp, Homo sapien
gatatttgagagtcgaagatttttg

SEQ ID NO: 4998964 - DNA, 25 bp, Homo sapien
atttgagagtcgaagatttttgcac

SEQ ID NO: 4998965 - DNA, 25 bp, Homo sapien
gaatcaggccgtcttctgaacaaat

SEQ ID NO: 4998966 - DNA, 25 bp, Homo sapien
aatcaggccgtcttctgaacaaatt

SEQ ID NO: 4998967 - DNA, 25 bp, Homo sapien
atcaggccgtcttctgaacaaattc

SEQ ID NO: 4998968 - DNA, 25 bp, Homo sapien
tcaggccgtcttctgaacaaattcc

SEQ ID NO: 4998969 - DNA, 25 bp, Homo sapien
caaagaaagaatgtctaatgtagtt

SEQ ID NO: 4998970 - DNA, 25 bp, Homo sapien
ccacaaagaaagaatgtctaatgta

SEQ ID NO: 4998971 - DNA, 25 bp, Homo sapien
gaaagaatgtctaatgtagtttcac

SEQ ID NO: 4998972 - DNA, 25 bp, Homo sapien
aaagaatgtctaatgtagtttcaca

SEQ ID NO: 4998973 - DNA, 25 bp, Homo sapien
cacaggtgctgtgagaggaagcccc

SEQ ID NO: 4998974 - DNA, 25 bp, Homo sapien
agccccatgcatcccagtgactgta

SEQ ID NO: 4998975 - DNA, 25 bp, Homo sapien
ctgtgagaggaagccccatgcatcc

SEQ ID NO: 4998976 - DNA, 25 bp, Homo sapien
gtgctgtgagaggaagccccatgca

SEQ ID NO: 4998977 - DNA, 25 bp, Homo sapien
atcaaattacttcttgaggattcca

SEQ ID NO: 4998978 - DNA, 25 bp, Homo sapien
tatcaaattacttcttgaggattcc

SEQ ID NO: 4998979 - DNA, 25 bp, Homo sapien
gctcattcttgccatttgtggctct

SEQ ID NO: 4998980 - DNA, 25 bp, Homo sapien
ttcctcttgaccttctgtgctttct

SEQ ID NO: 4998981 - DNA, 25 bp, Homo sapien
tgtcttgctcattcttgccatttgt

SEQ ID NO: 4998982 - DNA, 25 bp, Homo sapien
cttgctcattcttgccatttgtggc

SEQ ID NO: 4998983 - DNA, 25 bp, Homo sapien
cctgtgggtaaaagccgcaactgcc

SEQ ID NO: 4998984 - DNA, 25 bp, Homo sapien
tcaataccattccagaagaattctc

SEQ ID NO: 4998985 - DNA, 25 bp, Homo sapien
ttccagaagaattctcaggcagatg

SEQ ID NO: 4998986 - DNA, 25 bp, Homo sapien
gcagatggcattggagaaaggttct

SEQ ID NO: 4998987 - DNA, 25 bp, Homo sapien
tcttcatacttccagaatttgtcag

SEQ ID NO: 4998988 - DNA, 25 bp, Homo sapien
ccagaatttgtcagaatttcttgtt

SEQ ID NO: 4998989 - DNA, 25 bp, Homo sapien
ctgcttcattcttcatacttccaga

SEQ ID NO: 4998990 - DNA, 25 bp, Homo sapien
acttccagaatttgtcagaatttct

SEQ ID NO: 4998991 - DNA, 25 bp, Homo sapien
ccaattccaacattcatgtggctct

SEQ ID NO: 4998992 - DNA, 25 bp, Homo sapien
gttctttgtagtctgctgaacttca

SEQ ID NO: 4998993 - DNA, 25 bp, Homo sapien
gacctttccttatctcttggctcgt

SEQ ID NO: 4998994 - DNA, 25 bp, Homo sapien
gtagtctgctgaacttcagcttcaa

SEQ ID NO: 4998995 - DNA, 25 bp, Homo sapien
tctcctgggcttcaaactttagacc

SEQ ID NO: 4998996 - DNA, 25 bp, Homo sapien
ctcctcttgcagttatggtctatgt

SEQ ID NO: 4998997 - DNA, 25 bp, Homo sapien
aagtactaagatataaccatcacca

SEQ ID NO: 4998998 - DNA, 25 bp, Homo sapien
tccttacagtttgcagaaatgtaat

SEQ ID NO: 4998999 - DNA, 25 bp, Homo sapien
caccatttctaggttcatttgctct

SEQ ID NO: 4999000 - DNA, 25 bp, Homo sapien
ttgcagcggctttggtgtccacacc

SEQ ID NO: 4999001 - DNA, 25 bp, Homo sapien
tgttgatgagctaaagaattttaac

SEQ ID NO: 4999002 - DNA, 25 bp, Homo sapien
gctctgacttgcagcggctttggtg

SEQ ID NO: 4999003 - DNA, 25 bp, Homo sapien
gacttgcagcggctttggtgtccac

SEQ ID NO: 4999004 - DNA, 25 bp, Homo sapien
tccagagccattgccaccattcttt

SEQ ID NO: 4999005 - DNA, 25 bp, Homo sapien
agtgctagataacagaaaggagtca

SEQ ID NO: 4999006 - DNA, 25 bp, Homo sapien
gatttttggagtgctagataacaga

SEQ ID NO: 4999007 - DNA, 25 bp, Homo sapien
agagccattgccaccattctttgcc

SEQ ID NO: 4999008 - DNA, 25 bp, Homo sapien
tcaataggaagtttctgtatgccca

SEQ ID NO: 4999009 - DNA, 25 bp, Homo sapien
caataggaagtttctgtatgcccat

SEQ ID NO: 4999010 - DNA, 25 bp, Homo sapien
tgtgtgtcttcgtcttacttctttg

SEQ ID NO: 4999011 - DNA, 25 bp, Homo sapien
cttcgtcttacttctttgtggtcca

SEQ ID NO: 4999012 - DNA, 25 bp, Homo sapien
gtcttcgtcttacttctttgtggtc

SEQ ID NO: 4999013 - DNA, 25 bp, Homo sapien
gtgtcttcgtcttacttctttgtgg

SEQ ID NO: 4999014 - DNA, 25 bp, Homo sapien
tttagcattgtggatgttcctgaga

SEQ ID NO: 4999015 - DNA, 25 bp, Homo sapien
tgattttagattcaccagtgtagcc

SEQ ID NO: 4999016 - DNA, 25 bp, Homo sapien
ccgaactggtcagatgggagcagat

SEQ ID NO: 4999017 - DNA, 25 bp, Homo sapien
tctggagcatggcttgataagaacc

SEQ ID NO: 4999018 - DNA, 25 bp, Homo sapien
agcaactttcaaccacctcacttgt

SEQ ID NO: 4999019 - DNA, 25 bp, Homo sapien
ggaagatttctacccaagcacagca

SEQ ID NO: 4999020 - DNA, 25 bp, Homo sapien
aagatttctacccaagcacagcaca

SEQ ID NO: 4999021 - DNA, 25 bp, Homo sapien
acagatccggggtggcagcaacttt

SEQ ID NO: 4999022 - DNA, 25 bp, Homo sapien
tgcggtcccaaagctggtcgcaggc

SEQ ID NO: 4999023 - DNA, 25 bp, Homo sapien
gtcctgcggtcccaaagctggtcgc

SEQ ID NO: 4999024 - DNA, 25 bp, Homo sapien
cccaaagctggtcgcaggcagtgga

SEQ ID NO: 4999025 - DNA, 25 bp, Homo sapien
tcctgaaacaggctgtccggcattt

SEQ ID NO: 4999026 - DNA, 25 bp, Homo sapien
cagaatgatccactccattttgccc

SEQ ID NO: 4999027 - DNA, 25 bp, Homo sapien
catcctgatagcgttctctgagaaa

SEQ ID NO: 4999028 - DNA, 25 bp, Homo sapien
tggatggaacctgatcaaagaatga

SEQ ID NO: 4999029 - DNA, 25 bp, Homo sapien
ttttgcccccaaactcaactgagat

SEQ ID NO: 4999030 - DNA, 25 bp, Homo sapien
ttagtcataatcatagccaggatca

SEQ ID NO: 4999031 - DNA, 25 bp, Homo sapien
cgttaacaaaattgtccagaaatct

SEQ ID NO: 4999032 - DNA, 25 bp, Homo sapien
caggtggagtgttctcgttaacaaa

SEQ ID NO: 4999033 - DNA, 25 bp, Homo sapien
caggatcaagggaaaacccggcagg

SEQ ID NO: 4999034 - DNA, 25 bp, Homo sapien
ttactttaagcccaaagtacagaga

SEQ ID NO: 4999035 - DNA, 25 bp, Homo sapien
aaggtcgtcaggtcttgagaactcc

SEQ ID NO: 4999036 - DNA, 25 bp, Homo sapien
tttgaggcccttcctctattgctgc

SEQ ID NO: 4999037 - DNA, 25 bp, Homo sapien
attgctgccacaaggtcgtcaggtc

SEQ ID NO: 4999038 - DNA, 25 bp, Homo sapien
cagccacactgcatgagaaacctat

SEQ ID NO: 4999039 - DNA, 25 bp, Homo sapien
gaggacacatcgcttccccttacag

SEQ ID NO: 4999040 - DNA, 25 bp, Homo sapien
gctcccttgctgtctactgccttga

SEQ ID NO: 4999041 - DNA, 25 bp, Homo sapien
cttgctgtctactgccttgaggaca

SEQ ID NO: 4999042 - DNA, 25 bp, Homo sapien
agatggcctcaggtcctgcacggag

SEQ ID NO: 4999043 - DNA, 25 bp, Homo sapien
tgttttctttctgacatatgacgct

SEQ ID NO: 4999044 - DNA, 25 bp, Homo sapien
ctcttgttttctttctgacatatga

SEQ ID NO: 4999045 - DNA, 25 bp, Homo sapien
tcctcttgttttctttctgacatat

SEQ ID NO: 4999046 - DNA, 25 bp, Homo sapien
cttgttttctttctgacatatgacg

SEQ ID NO: 4999047 - DNA, 25 bp, Homo sapien
gcctgactttcctcactctgatttc

SEQ ID NO: 4999048 - DNA, 25 bp, Homo sapien
cttctccaggtcgacactctgaacg

SEQ ID NO: 4999049 - DNA, 25 bp, Homo sapien
cagttgtattcctgaacccttctac

SEQ ID NO: 4999050 - DNA, 25 bp, Homo sapien
cgacactctgaacgttctgcctgac

SEQ ID NO: 4999051 - DNA, 25 bp, Homo sapien
tatgtcaactgtgcatccacattga

SEQ ID NO: 4999052 - DNA, 25 bp, Homo sapien
ccacattgaacttggctcgggaagc

SEQ ID NO: 4999053 - DNA, 25 bp, Homo sapien
aacttggctcgggaagcgtaaacat

SEQ ID NO: 4999054 - DNA, 25 bp, Homo sapien
gctcgggaagcgtaaacatttctat

SEQ ID NO: 4999055 - DNA, 25 bp, Homo sapien
tgttctgtcaggaaaagtagtaagt

SEQ ID NO: 4999056 - DNA, 25 bp, Homo sapien
tgagaatgatatgtctctcccgaag

SEQ ID NO: 4999057 - DNA, 25 bp, Homo sapien
ttgggagctagagcttcaagtattc

SEQ ID NO: 4999058 - DNA, 25 bp, Homo sapien
cagctttacaattgggttttgggag

SEQ ID NO: 4999059 - DNA, 25 bp, Homo sapien
tatttaagtgacgtggaggcaacat

SEQ ID NO: 4999060 - DNA, 25 bp, Homo sapien
aagcaagtcgttcttctggaatttc

SEQ ID NO: 4999061 - DNA, 25 bp, Homo sapien
gactgcctcttggtatatatacagc

SEQ ID NO: 4999062 - DNA, 25 bp, Homo sapien
cctccaaataagcaagtcgttcttc

SEQ ID NO: 4999063 - DNA, 25 bp, Homo sapien
taagccttgctcaggtttttcggaa

SEQ ID NO: 4999064 - DNA, 25 bp, Homo sapien
ccagagcagtatggaaagaggtcct

SEQ ID NO: 4999065 - DNA, 25 bp, Homo sapien
tttcagcataagagataagccttgc

SEQ ID NO: 4999066 - DNA, 25 bp, Homo sapien
tttttcggaattggaggactctgag

SEQ ID NO: 4999067 - DNA, 25 bp, Homo sapien
tagtgaagtttggatctgattgtgt

SEQ ID NO: 4999068 - DNA, 25 bp, Homo sapien
gtgaagtttggatctgattgtgtga

SEQ ID NO: 4999069 - DNA, 25 bp, Homo sapien
tgaagtttggatctgattgtgtgac

SEQ ID NO: 4999070 - DNA, 25 bp, Homo sapien
gaagtttggatctgattgtgtgaca

SEQ ID NO: 4999071 - DNA, 25 bp, Homo sapien
ggcgggtagtgggatacatgccact

SEQ ID NO: 4999072 - DNA, 25 bp, Homo sapien
caggagttcccatctggcgggtagt

SEQ ID NO: 4999073 - DNA, 25 bp, Homo sapien
gggcggccagacctttcttgagatt

SEQ ID NO: 4999074 - DNA, 25 bp, Homo sapien
actctgggcggccagacctttcttg

SEQ ID NO: 4999075 - DNA, 25 bp, Homo sapien
tccacccaatacttcatgcctgtgg

SEQ ID NO: 4999076 - DNA, 25 bp, Homo sapien
cttccacccaatacttcatgcctgt

SEQ ID NO: 4999077 - DNA, 25 bp, Homo sapien
acccaatacttcatgcctgtggcca

SEQ ID NO: 4999078 - DNA, 25 bp, Homo sapien
ccaatacttcatgcctgtggccata

SEQ ID NO: 4999079 - DNA, 25 bp, Homo sapien
gcgtgtcagtggtaataccctcctt

SEQ ID NO: 4999080 - DNA, 25 bp, Homo sapien
tgaactccagcgtgtcagtggtaat

SEQ ID NO: 4999081 - DNA, 25 bp, Homo sapien
ctgtaaccttatcataacctagttt

SEQ ID NO: 4999082 - DNA, 25 bp, Homo sapien
tccagcgtgtcagtggtaataccct

SEQ ID NO: 4999083 - DNA, 25 bp, Homo sapien
ctgctttctacgttcttcggctttt

SEQ ID NO: 4999084 - DNA, 25 bp, Homo sapien
tgctttctacgttcttcggcttttc

SEQ ID NO: 4999085 - DNA, 25 bp, Homo sapien
tctgctttctacgttcttcggcttt

SEQ ID NO: 4999086 - DNA, 25 bp, Homo sapien
caccatgctctatgggactggaact

SEQ ID NO: 4999087 - DNA, 25 bp, Homo sapien
tgattggcaaattgattgttcttca

SEQ ID NO: 4999088 - DNA, 25 bp, Homo sapien
cttctcctgcacttgtactgttgaa

SEQ ID NO: 4999089 - DNA, 25 bp, Homo sapien
gactggaacttgattggcaaattga

SEQ ID NO: 4999090 - DNA, 25 bp, Homo sapien
ccaaccattgcctggttggttttca

SEQ ID NO: 4999091 - DNA, 25 bp, Homo sapien
cctcttcttgctcactgagcttttc

SEQ ID NO: 4999092 - DNA, 25 bp, Homo sapien
tgagccgcgctttcctccaaccatt

SEQ ID NO: 4999093 - DNA, 25 bp, Homo sapien
atcctcttcttgctcactgagcttt

SEQ ID NO: 4999094 - DNA, 25 bp, Homo sapien
tggataaacagttagatgagctcac

SEQ ID NO: 4999095 - DNA, 25 bp, Homo sapien
cttggtagctgcaagtaaaaatgca

SEQ ID NO: 4999096 - DNA, 25 bp, Homo sapien
aatgcaggagtaggtgaaacaggaa

SEQ ID NO: 4999097 - DNA, 25 bp, Homo sapien
gtagctgcaagtaaaaatgcaggag

SEQ ID NO: 4999098 - DNA, 25 bp, Homo sapien
aaaatgcaggagtaggtgaaacagg

SEQ ID NO: 4999099 - DNA, 25 bp, Homo sapien
caggggagttcccacgtggagccat

SEQ ID NO: 4999100 - DNA, 25 bp, Homo sapien
ggagccatagcaggcagctttgaac

SEQ ID NO: 4999101 - DNA, 25 bp, Homo sapien
gagttcccacgtggagccatagcag

SEQ ID NO: 4999102 - DNA, 25 bp, Homo sapien
gcaggcagctttgaacattgatggg

SEQ ID NO: 4999103 - DNA, 25 bp, Homo sapien
tgccagagatcctcataagagctgg

SEQ ID NO: 4999104 - DNA, 25 bp, Homo sapien
tcacgacaagttgaagatcttcatc

SEQ ID NO: 4999105 - DNA, 25 bp, Homo sapien
taaattcatggcatcggccctgtat

SEQ ID NO: 4999106 - DNA, 25 bp, Homo sapien
gattggtgccaaaagcaggtttctc

SEQ ID NO: 4999107 - DNA, 25 bp, Homo sapien
tattagtagtgctacaatattatta

SEQ ID NO: 4999108 - DNA, 25 bp, Homo sapien
tagtgctacaatattattaacaaca

SEQ ID NO: 4999109 - DNA, 25 bp, Homo sapien
tagtagtgctacaatattattaaca

SEQ ID NO: 4999110 - DNA, 25 bp, Homo sapien
gagaacatggagcaccaaaatcaag

SEQ ID NO: 4999111 - DNA, 25 bp, Homo sapien
gtccaagcctgtttcggcagcccat

SEQ ID NO: 4999112 - DNA, 25 bp, Homo sapien
agtccaagcctgtttcggcagccca

SEQ ID NO: 4999113 - DNA, 25 bp, Homo sapien
tcagtccaagcctgtttcggcagcc

SEQ ID NO: 4999114 - DNA, 25 bp, Homo sapien
cctcagtccaagcctgtttcggcag

SEQ ID NO: 4999115 - DNA, 25 bp, Homo sapien
tctttcatggaattggcagtaattt

SEQ ID NO: 4999116 - DNA, 25 bp, Homo sapien
attggcagtaattttccccaaacat

SEQ ID NO: 4999117 - DNA, 25 bp, Homo sapien
tttctgatcactgcttcccactggt

SEQ ID NO: 4999118 - DNA, 25 bp, Homo sapien
tggtgctgggtcaaatcttctttca

SEQ ID NO: 4999119 - DNA, 25 bp, Homo sapien
ccattgcttaacacgaaaagaataa

SEQ ID NO: 4999120 - DNA, 25 bp, Homo sapien
tttaccattgcttaacacgaaaaga

SEQ ID NO: 4999121 - DNA, 25 bp, Homo sapien
taccattgcttaacacgaaaagaat

SEQ ID NO: 4999122 - DNA, 25 bp, Homo sapien
cattgcttaacacgaaaagaataat

SEQ ID NO: 4999123 - DNA, 25 bp, Homo sapien
gcaaatattggatgttatcccgact

SEQ ID NO: 4999124 - DNA, 25 bp, Homo sapien
ggatgttatcccgactgtggcatca

SEQ ID NO: 4999125 - DNA, 25 bp, Homo sapien
acttttatggaatctgtggaactga

SEQ ID NO: 4999126 - DNA, 25 bp, Homo sapien
tctgctctggagttaacttttatgg

SEQ ID NO: 4999127 - DNA, 25 bp, Homo sapien
tgctcattccctccggtgggttcat

SEQ ID NO: 4999128 - DNA, 25 bp, Homo sapien
gatgcgagcaggttacccctgctgg

SEQ ID NO: 4999129 - DNA, 25 bp, Homo sapien
gccacggactctcaaaccgagtgtt

SEQ ID NO: 4999130 - DNA, 25 bp, Homo sapien
gagttctgattaagttgctatggtc

SEQ ID NO: 4999131 - DNA, 25 bp, Homo sapien
ctagatcaggaaccttatgatggca

SEQ ID NO: 4999132 - DNA, 25 bp, Homo sapien
caggaaccttatgatggcaggagtc

SEQ ID NO: 4999133 - DNA, 25 bp, Homo sapien
gatcaggaaccttatgatggcagga

SEQ ID NO: 4999134 - DNA, 25 bp, Homo sapien
ggaaccttatgatggcaggagtcca

SEQ ID NO: 4999135 - DNA, 25 bp, Homo sapien
tgagcatgcacaacctgaacagacg

SEQ ID NO: 4999136 - DNA, 25 bp, Homo sapien
taagctgctgcaatttcgccttcgt

SEQ ID NO: 4999137 - DNA, 25 bp, Homo sapien
tgaacagacgttgccaatttcctga

SEQ ID NO: 4999138 - DNA, 25 bp, Homo sapien
taactgtggctttaccatgagcatg

SEQ ID NO: 4999139 - DNA, 25 bp, Homo sapien
gtggctgaagttcacagtagggaac

SEQ ID NO: 4999140 - DNA, 25 bp, Homo sapien
ggctgaagttcacagtagggaacgc

SEQ ID NO: 4999141 - DNA, 25 bp, Homo sapien
tggctgaagttcacagtagggaacg

SEQ ID NO: 4999142 - DNA, 25 bp, Homo sapien
gatggctgcaaaataggggccttgc

SEQ ID NO: 4999143 - DNA, 25 bp, Homo sapien
ccttgcaacagactcggtcttctgg

SEQ ID NO: 4999144 - DNA, 25 bp, Homo sapien
actgggtattgtttcagtgggaatg

SEQ ID NO: 4999145 - DNA, 25 bp, Homo sapien
ctggaagaaactgggtattgtttca

SEQ ID NO: 4999146 - DNA, 25 bp, Homo sapien
ccaatgaggacgataggactacttc

SEQ ID NO: 4999147 - DNA, 25 bp, Homo sapien
aacaggagtctgtggacccttgcca

SEQ ID NO: 4999148 - DNA, 25 bp, Homo sapien
tagaaaaaatcagcgagtcaggcca

SEQ ID NO: 4999149 - DNA, 25 bp, Homo sapien
ttggcacaggctatagcaggactga

SEQ ID NO: 4999150 - DNA, 25 bp, Homo sapien
tgggcctttgccaattcctcaggtg

SEQ ID NO: 4999151 - DNA, 25 bp, Homo sapien
tagactcttgagtaattagatcgat

SEQ ID NO: 4999152 - DNA, 25 bp, Homo sapien
tagatcgattaacggttaataacaa

SEQ ID NO: 4999153 - DNA, 25 bp, Homo sapien
taacaacttgaacatatcagttcca

SEQ ID NO: 4999154 - DNA, 25 bp, Homo sapien
cagtaagaaactcaaaattgcaagt

SEQ ID NO: 4999155 - DNA, 25 bp, Homo sapien
gaaactcaaaattgcaagtagggaa

SEQ ID NO: 4999156 - DNA, 25 bp, Homo sapien
caaaattgcaagtagggaagtccat

SEQ ID NO: 4999157 - DNA, 25 bp, Homo sapien
tgaacagtaagaaactcaaaattgc

SEQ ID NO: 4999158 - DNA, 25 bp, Homo sapien
tctcacctaacggaaatgtcggctg

SEQ ID NO: 4999159 - DNA, 25 bp, Homo sapien
caaatgtgaattagcaggcagcatc

SEQ ID NO: 4999160 - DNA, 25 bp, Homo sapien
gaactctgaggagcaatcccaggca

SEQ ID NO: 4999161 - DNA, 25 bp, Homo sapien
taaagttgaattcaggctactggcc

SEQ ID NO: 4999162 - DNA, 25 bp, Homo sapien
tgagttctccgtctctctgccgtac

SEQ ID NO: 4999163 - DNA, 25 bp, Homo sapien
tgtgatggaaggtaaagatgacacc

SEQ ID NO: 4999164 - DNA, 25 bp, Homo sapien
gagtgtcctgactgcccacacttga

SEQ ID NO: 4999165 - DNA, 25 bp, Homo sapien
actcaaatgcttctactgctaggat

SEQ ID NO: 4999166 - DNA, 25 bp, Homo sapien
atgtgaagctgcattattttggctc

SEQ ID NO: 4999167 - DNA, 25 bp, Homo sapien
ttctgtccattaaggagatgtgaag

SEQ ID NO: 4999168 - DNA, 25 bp, Homo sapien
aattttatctctgggtgcagcaaaa

SEQ ID NO: 4999169 - DNA, 25 bp, Homo sapien
aataattttatctctgggtgcagca

SEQ ID NO: 4999170 - DNA, 25 bp, Homo sapien
tcattgtgcatcttgctatttgata

SEQ ID NO: 4999171 - DNA, 25 bp, Homo sapien
caactgtacaatgaaacagcttatt

SEQ ID NO: 4999172 - DNA, 25 bp, Homo sapien
tatttctccaactgtacaatgaaac

SEQ ID NO: 4999173 - DNA, 25 bp, Homo sapien
gatatggagatgttatttgacagct

SEQ ID NO: 4999174 - DNA, 25 bp, Homo sapien
cggaggcctggtttgacaccagggt

SEQ ID NO: 4999175 - DNA, 25 bp, Homo sapien
gatcaatgttcagagggttgacttt

SEQ ID NO: 4999176 - DNA, 25 bp, Homo sapien
cctggtttgacaccagggtgctgta

SEQ ID NO: 4999177 - DNA, 25 bp, Homo sapien
agggcggaggcctggtttgacacca

SEQ ID NO: 4999178 - DNA, 25 bp, Homo sapien
tccctgtcttaggttgtccagtaca

SEQ ID NO: 4999179 - DNA, 25 bp, Homo sapien
tcactcttcaatccaaactttatct

SEQ ID NO: 4999180 - DNA, 25 bp, Homo sapien
gacagcatcaatattaggcatacag

SEQ ID NO: 4999181 - DNA, 25 bp, Homo sapien
cagtacactagggaaagacagcatc

SEQ ID NO: 4999182 - DNA, 25 bp, Homo sapien
ccatccatacaagcgttgctttaca

SEQ ID NO: 4999183 - DNA, 25 bp, Homo sapien
catacaagcgttgctttacatattg

SEQ ID NO: 4999184 - DNA, 25 bp, Homo sapien
atccatccatacaagcgttgcttta

SEQ ID NO: 4999185 - DNA, 25 bp, Homo sapien
gcgttgctttacatattgcttcatc

SEQ ID NO: 4999186 - DNA, 25 bp, Homo sapien
gctggctacgtacagcctcactgaa

SEQ ID NO: 4999187 - DNA, 25 bp, Homo sapien
gaaatagacgttgagtaggtaagca

SEQ ID NO: 4999188 - DNA, 25 bp, Homo sapien
gaaacgtctgccatggtgatcagaa

SEQ ID NO: 4999189 - DNA, 25 bp, Homo sapien
acttctacctgcaaaggaggttagg

SEQ ID NO: 4999190 - DNA, 25 bp, Homo sapien
tgtccaagatcatagtgtcaatagg

SEQ ID NO: 4999191 - DNA, 25 bp, Homo sapien
ccaagatcatagtgtcaatagggtt

SEQ ID NO: 4999192 - DNA, 25 bp, Homo sapien
ttctgaggcctgtcttttgcgcttg

SEQ ID NO: 4999193 - DNA, 25 bp, Homo sapien
tgtcttttgcgcttgcagatgacca

SEQ ID NO: 4999194 - DNA, 25 bp, Homo sapien
ttccctgccaattcacagcccagga

SEQ ID NO: 4999195 - DNA, 25 bp, Homo sapien
cacagcccaggagcatgtagagtgt

SEQ ID NO: 4999196 - DNA, 25 bp, Homo sapien
tgtagtgaactgtccaattttaacc

SEQ ID NO: 4999197 - DNA, 25 bp, Homo sapien
tttactgagagctgtacttttccca

SEQ ID NO: 4999198 - DNA, 25 bp, Homo sapien
tatagacattcggtttttggttaca

SEQ ID NO: 4999199 - DNA, 25 bp, Homo sapien
tataaaagtaacagatgagagagtt

SEQ ID NO: 4999200 - DNA, 25 bp, Homo sapien
aaaatagcaagttttgtataaacag

SEQ ID NO: 4999201 - DNA, 25 bp, Homo sapien
ggttacagttggtcatatacatttc

SEQ ID NO: 4999202 - DNA, 25 bp, Homo sapien
tctcgaactcccagtgattcaccca

SEQ ID NO: 4999203 - DNA, 25 bp, Homo sapien
gattcacccacctcggcctcccaca

SEQ ID NO: 4999204 - DNA, 25 bp, Homo sapien
tggtctcgaactcccagtgattcac

SEQ ID NO: 4999205 - DNA, 25 bp, Homo sapien
ccacacctggctaattttgtatttt

SEQ ID NO: 4999206 - DNA, 25 bp, Homo sapien
cagttatgactgtttataggccgta

SEQ ID NO: 4999207 - DNA, 25 bp, Homo sapien
ggccgtacactgtttatgtatgtgt

SEQ ID NO: 4999208 - DNA, 25 bp, Homo sapien
agacatggtccatttgggggcaaaa

SEQ ID NO: 4999209 - DNA, 25 bp, Homo sapien
tctaatgaccataatctttcaagtg

SEQ ID NO: 4999210 - DNA, 25 bp, Homo sapien
tgcgagtcctcctatgtacaagtta

SEQ ID NO: 4999211 - DNA, 25 bp, Homo sapien
tcactcagtatgtggcaaggttcca

SEQ ID NO: 4999212 - DNA, 25 bp, Homo sapien
gccccatggaggaagcaagatttgt

SEQ ID NO: 4999213 - DNA, 25 bp, Homo sapien
caacattggatggagaaaaagctgc

SEQ ID NO: 4999214 - DNA, 25 bp, Homo sapien
cagccttagttgaaggaagcactgg

SEQ ID NO: 4999215 - DNA, 25 bp, Homo sapien
tatagcatttcagttctttgctgtt

SEQ ID NO: 4999216 - DNA, 25 bp, Homo sapien
gcacaccgaaaccaattacctcagt

SEQ ID NO: 4999217 - DNA, 25 bp, Homo sapien
gaagaattaagtgacagaatgatgc

SEQ ID NO: 4999218 - DNA, 25 bp, Homo sapien
gaatgcaaatcatacctgcagctaa

SEQ ID NO: 4999219 - DNA, 25 bp, Homo sapien
tctggcaaatagtagtcttaactct

SEQ ID NO: 4999220 - DNA, 25 bp, Homo sapien
cacaatgttggatattctgatctgc

SEQ ID NO: 4999221 - DNA, 25 bp, Homo sapien
taattaaagtaacgaagacttgtgc

SEQ ID NO: 4999222 - DNA, 25 bp, Homo sapien
tgtaacttaagctaatgcaactctg

SEQ ID NO: 4999223 - DNA, 25 bp, Homo sapien
tctgtctttagccaagcaacttgag

SEQ ID NO: 4999224 - DNA, 25 bp, Homo sapien
taaattcccatcagtagtaccttat

SEQ ID NO: 4999225 - DNA, 25 bp, Homo sapien
gagatttgcaataaccactttatag

SEQ ID NO: 4999226 - DNA, 25 bp, Homo sapien
agatagagccggaagagagggagca

SEQ ID NO: 4999227 - DNA, 25 bp, Homo sapien
cactaaggcaaagatagagccggaa

SEQ ID NO: 4999228 - DNA, 25 bp, Homo sapien
aaggcaaagatagagccggaagaga

SEQ ID NO: 4999229 - DNA, 25 bp, Homo sapien
ctaaggcaaagatagagccggaaga

SEQ ID NO: 4999230 - DNA, 25 bp, Homo sapien
agtcagaaacttggcttggcagcac

SEQ ID NO: 4999231 - DNA, 25 bp, Homo sapien
gataactgttagagcggccactgtg

SEQ ID NO: 4999232 - DNA, 25 bp, Homo sapien
tcctcccgcaagtcagaaacttggc

SEQ ID NO: 4999233 - DNA, 25 bp, Homo sapien
ggcttggcagcacggataactgtta

SEQ ID NO: 4999234 - DNA, 25 bp, Homo sapien
agtctacttactaagggctttgaag

SEQ ID NO: 4999235 - DNA, 25 bp, Homo sapien
tcagaaattaagtatagtctactta

SEQ ID NO: 4999236 - DNA, 25 bp, Homo sapien
tgaaggctcttggtcttgtttaacc

SEQ ID NO: 4999237 - DNA, 25 bp, Homo sapien
gctttgaaggctcttggtcttgttt

SEQ ID NO: 4999238 - DNA, 25 bp, Homo sapien
aaagacagatgacagagcctctcag

SEQ ID NO: 4999239 - DNA, 25 bp, Homo sapien
tatggcaccaggtagaaatcttctc

SEQ ID NO: 4999240 - DNA, 25 bp, Homo sapien
agtatttgactccatccttgagttg

SEQ ID NO: 4999241 - DNA, 25 bp, Homo sapien
tattcttctagacagaacgtcagtg

SEQ ID NO: 4999242 - DNA, 25 bp, Homo sapien
tgttgagtgagtttccggataaact

SEQ ID NO: 4999243 - DNA, 25 bp, Homo sapien
gataggataattactgtgccttgtt

SEQ ID NO: 4999244 - DNA, 25 bp, Homo sapien
agataggataattactgtgccttgt

SEQ ID NO: 4999245 - DNA, 25 bp, Homo sapien
gtgccttgttgagtgagtttccgga

SEQ ID NO: 4999246 - DNA, 25 bp, Homo sapien
ttagtaaagcattctgcatggtact

SEQ ID NO: 4999247 - DNA, 25 bp, Homo sapien
aatatcacccgcaacttattttgtg

SEQ ID NO: 4999248 - DNA, 25 bp, Homo sapien
tttccaatatcacccgcaacttatt

SEQ ID NO: 4999249 - DNA, 25 bp, Homo sapien
aagcattctgcatggtactgatttt

SEQ ID NO: 4999250 - DNA, 25 bp, Homo sapien
tagccttcagcagttggtattccca

SEQ ID NO: 4999251 - DNA, 25 bp, Homo sapien
atgaaaggatggaaacttgggcaca

SEQ ID NO: 4999252 - DNA, 25 bp, Homo sapien
gcaatgtcttgcaaataagggaaat

SEQ ID NO: 4999253 - DNA, 25 bp, Homo sapien
tcctagtaagggacatagccttcag

SEQ ID NO: 4999254 - DNA, 25 bp, Homo sapien
tcaaatgcatacagcagttctgtgt

SEQ ID NO: 4999255 - DNA, 25 bp, Homo sapien
tctgccatgatggtgccttcaagga

SEQ ID NO: 4999256 - DNA, 25 bp, Homo sapien
cctgtttgtgactattctgacttgt

SEQ ID NO: 4999257 - DNA, 25 bp, Homo sapien
cttcaaggacaattgaagtgcagat

SEQ ID NO: 4999258 - DNA, 25 bp, Homo sapien
aacagcacgtaatttgtcctcatcc

SEQ ID NO: 4999259 - DNA, 25 bp, Homo sapien
ttgatcaacagcacgtaatttgtcc

SEQ ID NO: 4999260 - DNA, 25 bp, Homo sapien
gatcaacagcacgtaatttgtcctc

SEQ ID NO: 4999261 - DNA, 25 bp, Homo sapien
tccttgatcaacagcacgtaatttg

SEQ ID NO: 4999262 - DNA, 25 bp, Homo sapien
aatcctggttcccatgactacccat

SEQ ID NO: 4999263 - DNA, 25 bp, Homo sapien
ccactggcaatcctggttcccatga

SEQ ID NO: 4999264 - DNA, 25 bp, Homo sapien
ttgatgcccactggcaatcctggtt

SEQ ID NO: 4999265 - DNA, 25 bp, Homo sapien
tggcaatcctggttcccatgactac

SEQ ID NO: 4999266 - DNA, 25 bp, Homo sapien
gactccttccttcctatataaggcc

SEQ ID NO: 4999267 - DNA, 25 bp, Homo sapien
tagggactccttccttcctatataa

SEQ ID NO: 4999268 - DNA, 25 bp, Homo sapien
tctccactgtgaaatggaaagggaa

SEQ ID NO: 4999269 - DNA, 25 bp, Homo sapien
ccactgtgaaatggaaagggaaata

SEQ ID NO: 4999270 - DNA, 25 bp, Homo sapien
tgttctggaagatgcacacatacac

SEQ ID NO: 4999271 - DNA, 25 bp, Homo sapien
ctgttctggaagatgcacacataca

SEQ ID NO: 4999272 - DNA, 25 bp, Homo sapien
cttacctagtgccagaaaatgaccc

SEQ ID NO: 4999273 - DNA, 25 bp, Homo sapien
caggtccaggttatgtcagaatcac

SEQ ID NO: 4999274 - DNA, 25 bp, Homo sapien
aatcatatgattatacaggtccagg

SEQ ID NO: 4999275 - DNA, 25 bp, Homo sapien
tcctcattagaattctatgagaacc

SEQ ID NO: 4999276 - DNA, 25 bp, Homo sapien
ggtttacatggatgttgaggactca

SEQ ID NO: 4999277 - DNA, 25 bp, Homo sapien
gattgggtagttgaggagcacctca

SEQ ID NO: 4999278 - DNA, 25 bp, Homo sapien
gactcatgatgcaccggtggattgg

SEQ ID NO: 4999279 - DNA, 25 bp, Homo sapien
ctgcatcatacagggcaagcaggct

SEQ ID NO: 4999280 - DNA, 25 bp, Homo sapien
gcgctggccggggcaagagctggag

SEQ ID NO: 4999281 - DNA, 25 bp, Homo sapien
tgctgaagcgctggccggggcaaga

SEQ ID NO: 4999282 - DNA, 25 bp, Homo sapien
tggccggggcaagagctggagaatg

SEQ ID NO: 4999283 - DNA, 25 bp, Homo sapien
cgtgctgaagcgctggccggggcaa

SEQ ID NO: 4999284 - DNA, 25 bp, Homo sapien
ggcccctgaagagtaaattggactc

SEQ ID NO: 4999285 - DNA, 25 bp, Homo sapien
ctctgatgactgtggtaacgcagaa

SEQ ID NO: 4999286 - DNA, 25 bp, Homo sapien
ttcgtgacagcaccaagaaacaggc

SEQ ID NO: 4999287 - DNA, 25 bp, Homo sapien
ggtatagaatgattagggcccctga

SEQ ID NO: 4999288 - DNA, 25 bp, Homo sapien
gttatttgtacctttcagctcgttg

SEQ ID NO: 4999289 - DNA, 25 bp, Homo sapien
tgaagaaagcatcaactggttcttt

SEQ ID NO: 4999290 - DNA, 25 bp, Homo sapien
atactgttatttgtacctttcagct

SEQ ID NO: 4999291 - DNA, 25 bp, Homo sapien
tatttgtacctttcagctcgttgct

SEQ ID NO: 4999292 - DNA, 25 bp, Homo sapien
agtcaccacatcttctattaatcca

SEQ ID NO: 4999293 - DNA, 25 bp, Homo sapien
tacaagtcaccacatcttctattaa

SEQ ID NO: 4999294 - DNA, 25 bp, Homo sapien
atctgctctacaagtcaccacatct

SEQ ID NO: 4999295 - DNA, 25 bp, Homo sapien
gctctacaagtcaccacatcttcta

SEQ ID NO: 4999296 - DNA, 25 bp, Homo sapien
taccgtgtgcagatgttcatgaaat

SEQ ID NO: 4999297 - DNA, 25 bp, Homo sapien
ctaccgtgtgcagatgttcatgaaa

SEQ ID NO: 4999298 - DNA, 25 bp, Homo sapien
actgagacttcttccagatacagca

SEQ ID NO: 4999299 - DNA, 25 bp, Homo sapien
tgtcagaaaactcaaccactgagac

SEQ ID NO: 4999300 - DNA, 25 bp, Homo sapien
gtggtagattctccaacagaatatc

SEQ ID NO: 4999301 - DNA, 25 bp, Homo sapien
cataactcggttgtacacatgtgta

SEQ ID NO: 4999302 - DNA, 25 bp, Homo sapien
agagaaatgaaagccatatcttttc

SEQ ID NO: 4999303 - DNA, 25 bp, Homo sapien
cattttcattaccatagtcatcatc

SEQ ID NO: 4999304 - DNA, 25 bp, Homo sapien
tcaaatacagagttacagctgctcc

SEQ ID NO: 4999305 - DNA, 25 bp, Homo sapien
tctggaaacgatctgcataacatct

SEQ ID NO: 4999306 - DNA, 25 bp, Homo sapien
taccaagaggaggtacatgaccttt

SEQ ID NO: 4999307 - DNA, 25 bp, Homo sapien
cctgttgctcctaaaattacatacg

SEQ ID NO: 4999308 - DNA, 25 bp, Homo sapien
ttatggagctgaaggtccggacagg

SEQ ID NO: 4999309 - DNA, 25 bp, Homo sapien
gggttatggagctgaaggtccggac

SEQ ID NO: 4999310 - DNA, 25 bp, Homo sapien
ggagctgaaggtccggacaggagct

SEQ ID NO: 4999311 - DNA, 25 bp, Homo sapien
tatggagctgaaggtccggacagga

SEQ ID NO: 4999312 - DNA, 25 bp, Homo sapien
tttttggtgctgatactgatattct

SEQ ID NO: 4999313 - DNA, 25 bp, Homo sapien
tgagtttttggtgctgatactgata

SEQ ID NO: 4999314 - DNA, 25 bp, Homo sapien
ttctggcagctgagtttgttcacac

SEQ ID NO: 4999315 - DNA, 25 bp, Homo sapien
gtttttggtgctgatactgatattc

SEQ ID NO: 4999316 - DNA, 25 bp, Homo sapien
ctgctccactgctatgatgagtgca

SEQ ID NO: 4999317 - DNA, 25 bp, Homo sapien
actgctatgatgagtgcagcctctg

SEQ ID NO: 4999318 - DNA, 25 bp, Homo sapien
tccactgctatgatgagtgcagcct

SEQ ID NO: 4999319 - DNA, 25 bp, Homo sapien
atgatgagtgcagcctctgatctct

SEQ ID NO: 4999320 - DNA, 25 bp, Homo sapien
tcccacacggacaagcccacgggac

SEQ ID NO: 4999321 - DNA, 25 bp, Homo sapien
cccacgggacccctcgatggaccag

SEQ ID NO: 4999322 - DNA, 25 bp, Homo sapien
tcccgtcaacatcacagtcctgact

SEQ ID NO: 4999323 - DNA, 25 bp, Homo sapien
agggcatcccgtcaacatcacagtc

SEQ ID NO: 4999324 - DNA, 25 bp, Homo sapien
aggaagaccggaccaagaagatggg

SEQ ID NO: 4999325 - DNA, 25 bp, Homo sapien
ccaagaagatgggaactgcatagga

SEQ ID NO: 4999326 - DNA, 25 bp, Homo sapien
agaagatgggaactgcataggatgt

SEQ ID NO: 4999327 - DNA, 25 bp, Homo sapien
ggaagaccggaccaagaagatggga

SEQ ID NO: 4999328 - DNA, 25 bp, Homo sapien
gaagagatccaaatgcatgttcacc

SEQ ID NO: 4999329 - DNA, 25 bp, Homo sapien
cgtttgcacaaacccaagtgggaag

SEQ ID NO: 4999330 - DNA, 25 bp, Homo sapien
catgttcaccgcagacagctgagga

SEQ ID NO: 4999331 - DNA, 25 bp, Homo sapien
tgagtggacagttgcaaacaaggca

SEQ ID NO: 4999332 - DNA, 25 bp, Homo sapien
gggcttgtcgaggcccctctttgct

SEQ ID NO: 4999333 - DNA, 25 bp, Homo sapien
cctctttgcttctgagagtctgttt

SEQ ID NO: 4999334 - DNA, 25 bp, Homo sapien
gcccctctttgcttctgagagtctg

SEQ ID NO: 4999335 - DNA, 25 bp, Homo sapien
cattgcacatgggtggggggggctt

SEQ ID NO: 4999336 - DNA, 25 bp, Homo sapien
gtgcggctgcccgtcccaccgtgcg

SEQ ID NO: 4999337 - DNA, 25 bp, Homo sapien
gtctgttcctgcctccgcgccaggt

SEQ ID NO: 4999338 - DNA, 25 bp, Homo sapien
gtgtctgttcctgcctccgcgccag

SEQ ID NO: 4999339 - DNA, 25 bp, Homo sapien
cccgtcccaccgtgcgtgtgcaggt

SEQ ID NO: 4999340 - DNA, 25 bp, Homo sapien
gtctctcctccgcactgggtcccgg

SEQ ID NO: 4999341 - DNA, 25 bp, Homo sapien
tgctgctcccccatagggaaattgt

SEQ ID NO: 4999342 - DNA, 25 bp, Homo sapien
tccgcgccacgtcctcactctgctg

SEQ ID NO: 4999343 - DNA, 25 bp, Homo sapien
cgtcccgccgtgtctctcctccgca

SEQ ID NO: 4999344 - DNA, 25 bp, Homo sapien
ggacatcgacgtgcagcctcgactt

SEQ ID NO: 4999345 - DNA, 25 bp, Homo sapien
attcgtcaggctcccgtggccgctg

SEQ ID NO: 4999346 - DNA, 25 bp, Homo sapien
gcctcgacttcctgcagtgcattcg

SEQ ID NO: 4999347 - DNA, 25 bp, Homo sapien
tcagctgtgaggacatcgacgtgca

SEQ ID NO: 4999348 - DNA, 25 bp, Homo sapien
gtcccggtgggtaaacagcgataga

SEQ ID NO: 4999349 - DNA, 25 bp, Homo sapien
acagcgatagatgcgggtgattccc

SEQ ID NO: 4999350 - DNA, 25 bp, Homo sapien
cagatgcacataaatcccgtggctt

SEQ ID NO: 4999351 - DNA, 25 bp, Homo sapien
cccgtggcttttcccaggtagcctg

SEQ ID NO: 4999352 - DNA, 25 bp, Homo sapien
actgtgcctgggaatgtaggtgcta

SEQ ID NO: 4999353 - DNA, 25 bp, Homo sapien
ggtgctggttcactcgcagctccag

SEQ ID NO: 4999354 - DNA, 25 bp, Homo sapien
cctgggaatgtaggtgctacccatg

SEQ ID NO: 4999355 - DNA, 25 bp, Homo sapien
gctgctgttctagagatggccatgg

SEQ ID NO: 4999356 - DNA, 25 bp, Homo sapien
cttcacagatgggatctgggacttg

SEQ ID NO: 4999357 - DNA, 25 bp, Homo sapien
aagcccagagggaggtcgcctccac

SEQ ID NO: 4999358 - DNA, 25 bp, Homo sapien
gacttgggagttaaactgcttggtg

SEQ ID NO: 4999359 - DNA, 25 bp, Homo sapien
gctggattcgaagcccagagggagg

SEQ ID NO: 4999360 - DNA, 25 bp, Homo sapien
tgtgaacgaggaacatgccatgcag

SEQ ID NO: 4999361 - DNA, 25 bp, Homo sapien
ggtttgttccaccagctgactgaaa

SEQ ID NO: 4999362 - DNA, 25 bp, Homo sapien
agaaggtgtgaacgaggaacatgcc

SEQ ID NO: 4999363 - DNA, 25 bp, Homo sapien
catgccatgcagaatagtgaggccc

SEQ ID NO: 4999364 - DNA, 25 bp, Homo sapien
agagctcagtgggaatcgatggaga

SEQ ID NO: 4999365 - DNA, 25 bp, Homo sapien
ggactcagctgtccgtgacccagaa

SEQ ID NO: 4999366 - DNA, 25 bp, Homo sapien
cacgtgtgacccaatgcgaggagga

SEQ ID NO: 4999367 - DNA, 25 bp, Homo sapien
gaaccggctgaccatgtgctggcca

SEQ ID NO: 4999368 - DNA, 25 bp, Homo sapien
gtggacacatgcaggtggtgtccac

SEQ ID NO: 4999369 - DNA, 25 bp, Homo sapien
ctggtggacacatgcaggtggtgtc

SEQ ID NO: 4999370 - DNA, 25 bp, Homo sapien
ggacacatgcaggtggtgtccaccc

SEQ ID NO: 4999371 - DNA, 25 bp, Homo sapien
acacatgcaggtggtgtccacccca

SEQ ID NO: 4999372 - DNA, 25 bp, Homo sapien
tgtccacccactgtgagctgctgga

SEQ ID NO: 4999373 - DNA, 25 bp, Homo sapien
ctggagccccggtgtgggtccctca

SEQ ID NO: 4999374 - DNA, 25 bp, Homo sapien
actctcaggtgctgcagcagtgacc

SEQ ID NO: 4999375 - DNA, 25 bp, Homo sapien
tgcccactctcaggtgctgcagcag

SEQ ID NO: 4999376 - DNA, 25 bp, Homo sapien
gcagttctggggaatgcgaaacaaa

SEQ ID NO: 4999377 - DNA, 25 bp, Homo sapien
caagggctgatgaacgtgcagttct

SEQ ID NO: 4999378 - DNA, 25 bp, Homo sapien
caaggcaagggctgatgaacgtgca

SEQ ID NO: 4999379 - DNA, 25 bp, Homo sapien
tcacaaggcaagggctgatgaacgt

SEQ ID NO: 4999380 - DNA, 25 bp, Homo sapien
tatgcaaaatcaggtagatggtcat

SEQ ID NO: 4999381 - DNA, 25 bp, Homo sapien
tttttgtggcccgtgaatatgcaaa

SEQ ID NO: 4999382 - DNA, 25 bp, Homo sapien
caggactggcttagcgtcagaaata

SEQ ID NO: 4999383 - DNA, 25 bp, Homo sapien
tagatggtcatctgaactctccaca

SEQ ID NO: 4999384 - DNA, 25 bp, Homo sapien
gccaccagctctgtgtaagtcagca

SEQ ID NO: 4999385 - DNA, 25 bp, Homo sapien
tagttgtggagcgacttggcaacag

SEQ ID NO: 4999386 - DNA, 25 bp, Homo sapien
tgtggagcgacttggcaacagacag

SEQ ID NO: 4999387 - DNA, 25 bp, Homo sapien
gagccaccagctctgtgtaagtcag

SEQ ID NO: 4999388 - DNA, 25 bp, Homo sapien
tgtgggcaaagtcatgtggacagcc

SEQ ID NO: 4999389 - DNA, 25 bp, Homo sapien
gatctagcagtagggagagttaccc

SEQ ID NO: 4999390 - DNA, 25 bp, Homo sapien
tcttttccaagggtagcatttccac

SEQ ID NO: 4999391 - DNA, 25 bp, Homo sapien
tacgtacctattgaaccaaggctca

SEQ ID NO: 4999392 - DNA, 25 bp, Homo sapien
gccttcactacatgagctgctactc

SEQ ID NO: 4999393 - DNA, 25 bp, Homo sapien
agggccctcacttggccacaacagc

SEQ ID NO: 4999394 - DNA, 25 bp, Homo sapien
tcctcttgccttcactacatgagct

SEQ ID NO: 4999395 - DNA, 25 bp, Homo sapien
tacatgagctgctactcagggccct

SEQ ID NO: 4999396 - DNA, 25 bp, Homo sapien
tgtgcaataagtcccacagaaggaa

SEQ ID NO: 4999397 - DNA, 25 bp, Homo sapien
tcattgtgagctacaggttacatcc

SEQ ID NO: 4999398 - DNA, 25 bp, Homo sapien
ttggcaaagccaacaaagactatgg

SEQ ID NO: 4999399 - DNA, 25 bp, Homo sapien
cagttgtgatatccgacccttgtgc

SEQ ID NO: 4999400 - DNA, 25 bp, Homo sapien
taatcccatctcaataccctgcagg

SEQ ID NO: 4999401 - DNA, 25 bp, Homo sapien
cagatctctactcatatccagttta

SEQ ID NO: 4999402 - DNA, 25 bp, Homo sapien
taagttacataatcccatctcaata

SEQ ID NO: 4999403 - DNA, 25 bp, Homo sapien
tctcaataccctgcaggccataatc

SEQ ID NO: 4999404 - DNA, 25 bp, Homo sapien
tttggcaacttgtgacgaagaacct

SEQ ID NO: 4999405 - DNA, 25 bp, Homo sapien
tggcaacttgtgacgaagaacctct

SEQ ID NO: 4999406 - DNA, 25 bp, Homo sapien
ttcattttggcaacttgtgacgaag

SEQ ID NO: 4999407 - DNA, 25 bp, Homo sapien
aacttgtgacgaagaacctctaagc

SEQ ID NO: 4999408 - DNA, 25 bp, Homo sapien
ttttctggtttgaggacccgtgctc

SEQ ID NO: 4999409 - DNA, 25 bp, Homo sapien
agagtccgtgactatgtggcttcca

SEQ ID NO: 4999410 - DNA, 25 bp, Homo sapien
tggcttccatcggtccaaggcaggg

SEQ ID NO: 4999411 - DNA, 25 bp, Homo sapien
tccccttcacgctgattttctggtt

SEQ ID NO: 4999412 - DNA, 25 bp, Homo sapien
gacgttgacatgaatccaaagcggt

SEQ ID NO: 4999413 - DNA, 25 bp, Homo sapien
taagacgttgacatgaatccaaagc

SEQ ID NO: 4999414 - DNA, 25 bp, Homo sapien
ctattaagacgttgacatgaatcca

SEQ ID NO: 4999415 - DNA, 25 bp, Homo sapien
gttgacatgaatccaaagcggtatc

SEQ ID NO: 4999416 - DNA, 25 bp, Homo sapien
cctttatctgctgactgggcaagac

SEQ ID NO: 4999417 - DNA, 25 bp, Homo sapien
ggcaagacttctttagtttctgaag

SEQ ID NO: 4999418 - DNA, 25 bp, Homo sapien
gactgggcaagacttctttagtttc

SEQ ID NO: 4999419 - DNA, 25 bp, Homo sapien
tgcctttatctgctgactgggcaag

SEQ ID NO: 4999420 - DNA, 25 bp, Homo sapien
gttcttaagagcagactgtcagtca

SEQ ID NO: 4999421 - DNA, 25 bp, Homo sapien
taagagcagactgtcagtcaggttc

SEQ ID NO: 4999422 - DNA, 25 bp, Homo sapien
actgtcagtcaggttctgagagttc

SEQ ID NO: 4999423 - DNA, 25 bp, Homo sapien
tctgaaatccatataggagaggaaa

SEQ ID NO: 4999424 - DNA, 25 bp, Homo sapien
gaagccacttcctatattacctgta

SEQ ID NO: 4999425 - DNA, 25 bp, Homo sapien
ggtcattcacatggagattctgggc

SEQ ID NO: 4999426 - DNA, 25 bp, Homo sapien
tacctgtaattttagggtcattcac

SEQ ID NO: 4999427 - DNA, 25 bp, Homo sapien
ttgcttgcctgaaatctacccttct

SEQ ID NO: 4999428 - DNA, 25 bp, Homo sapien
tcatgaggggtctggaaattcttca

SEQ ID NO: 4999429 - DNA, 25 bp, Homo sapien
ggaaattcttcactggagtatgaat

SEQ ID NO: 4999430 - DNA, 25 bp, Homo sapien
aggcaatctgctattttcatgaggg

SEQ ID NO: 4999431 - DNA, 25 bp, Homo sapien
cagcttgagtattctctggtgagta

SEQ ID NO: 4999432 - DNA, 25 bp, Homo sapien
gggcaaaggttaccaaatgcaagcc

SEQ ID NO: 4999433 - DNA, 25 bp, Homo sapien
gaacattagttttccaaagatgcca

SEQ ID NO: 4999434 - DNA, 25 bp, Homo sapien
ttggctcgtaccaaataaaagggca

SEQ ID NO: 4999435 - DNA, 25 bp, Homo sapien
aacagtaggttatatggcttcgtgc

SEQ ID NO: 4999436 - DNA, 25 bp, Homo sapien
gaaattacgagcagcaaacagctga

SEQ ID NO: 4999437 - DNA, 25 bp, Homo sapien
actgtattggcttccctgaaaagaa

SEQ ID NO: 4999438 - DNA, 25 bp, Homo sapien
tgaaaagaaattacgagcagcaaac

SEQ ID NO: 4999439 - DNA, 25 bp, Homo sapien
tagtttagggctttctccgaggctg

SEQ ID NO: 4999440 - DNA, 25 bp, Homo sapien
caaaatctatgcagttgaggtaatc

SEQ ID NO: 4999441 - DNA, 25 bp, Homo sapien
acagtttaagagaatgcgaactacc

SEQ ID NO: 4999442 - DNA, 25 bp, Homo sapien
cgaactaccttaataatgtctctgg

SEQ ID NO: 4999443 - DNA, 25 bp, Homo sapien
ttgaggtaatccagatttccagaca

SEQ ID NO: 4999444 - DNA, 25 bp, Homo sapien
cagcaattggattgggcagcccgtc

SEQ ID NO: 4999445 - DNA, 25 bp, Homo sapien
tccaagtgagagtcgcaggcaatag

SEQ ID NO: 4999446 - DNA, 25 bp, Homo sapien
gctgagtgcttgaggacgtgtttca

SEQ ID NO: 4999447 - DNA, 25 bp, Homo sapien
caggttacttgactgggagttctca

SEQ ID NO: 4999448 - DNA, 25 bp, Homo sapien
tatgttacccaactgggttttctga

SEQ ID NO: 4999449 - DNA, 25 bp, Homo sapien
gactttggcctgttctatgttaccc

SEQ ID NO: 4999450 - DNA, 25 bp, Homo sapien
gcattttcgttcctcaaaagagact

SEQ ID NO: 4999451 - DNA, 25 bp, Homo sapien
gagacttgacagcattttcgttcct

SEQ ID NO: 4999452 - DNA, 25 bp, Homo sapien
tgcctcatgaacttaagccctaaag

SEQ ID NO: 4999453 - DNA, 25 bp, Homo sapien
tattgcatatatccgacaaccgtcc

SEQ ID NO: 4999454 - DNA, 25 bp, Homo sapien
tttagtaccatgtggtggctctcac

SEQ ID NO: 4999455 - DNA, 25 bp, Homo sapien
tagaggctccccttcaagttttaga

SEQ ID NO: 4999456 - DNA, 25 bp, Homo sapien
cccttttatggttttgcatcttctc

SEQ ID NO: 4999457 - DNA, 25 bp, Homo sapien
aattcatagtatttatcctggtgac

SEQ ID NO: 4999458 - DNA, 25 bp, Homo sapien
caatttacacgtagatggtctaggc

SEQ ID NO: 4999459 - DNA, 25 bp, Homo sapien
tctctgaagggcagtggatagcttt

SEQ ID NO: 4999460 - DNA, 25 bp, Homo sapien
atcaacacgggaaagagaggcggct

SEQ ID NO: 4999461 - DNA, 25 bp, Homo sapien
gtaagcacattataatcgatgctgc

SEQ ID NO: 4999462 - DNA, 25 bp, Homo sapien
taagctgattacatacgcggccacc

SEQ ID NO: 4999463 - DNA, 25 bp, Homo sapien
gtggctccacagctcagtatcaaca

SEQ ID NO: 4999464 - DNA, 25 bp, Homo sapien
taacattggtgaagtaagcatgatc

SEQ ID NO: 4999465 - DNA, 25 bp, Homo sapien
ttggtgaagtaagcatgatctttca

SEQ ID NO: 4999466 - DNA, 25 bp, Homo sapien
attcacacttaacattggtgaagta

SEQ ID NO: 4999467 - DNA, 25 bp, Homo sapien
cacacttaacattggtgaagtaagc

SEQ ID NO: 4999468 - DNA, 25 bp, Homo sapien
gaaggaacttgtttccccactctgc

SEQ ID NO: 4999469 - DNA, 25 bp, Homo sapien
aaggaacttgtttccccactctgct

SEQ ID NO: 4999470 - DNA, 25 bp, Homo sapien
cctctatctgcctctgcgggaggcc

SEQ ID NO: 4999471 - DNA, 25 bp, Homo sapien
ctatctgcctctgcgggaggccaag

SEQ ID NO: 4999472 - DNA, 25 bp, Homo sapien
ctcactgccaccattgaaaccattg

SEQ ID NO: 4999473 - DNA, 25 bp, Homo sapien
gatctcactgccaccattgaaacca

SEQ ID NO: 4999474 - DNA, 25 bp, Homo sapien
tctcttcgttctcattctcttggat

SEQ ID NO: 4999475 - DNA, 25 bp, Homo sapien
tcgttctcattctcttggatctcac

SEQ ID NO: 4999476 - DNA, 25 bp, Homo sapien
gatctgtgacaaagcgaaacccctg

SEQ ID NO: 4999477 - DNA, 25 bp, Homo sapien
tgtgacaaagcgaaacccctgtgct

SEQ ID NO: 4999478 - DNA, 25 bp, Homo sapien
gacaaagcgaaacccctgtgctatc

SEQ ID NO: 4999479 - DNA, 25 bp, Homo sapien
agcgaaacccctgtgctatctgtgc

SEQ ID NO: 4999480 - DNA, 25 bp, Homo sapien
tcaccaacaataagcctggtgactg

SEQ ID NO: 4999481 - DNA, 25 bp, Homo sapien
tgacaatcgagagggggctctgtcc

SEQ ID NO: 4999482 - DNA, 25 bp, Homo sapien
gctctgtccacgtaggtgccggcac

SEQ ID NO: 4999483 - DNA, 25 bp, Homo sapien
ctgtccacgtaggtgccggcacaag

SEQ ID NO: 4999484 - DNA, 25 bp, Homo sapien
ttgcacggaggaagcaccttttcct

SEQ ID NO: 4999485 - DNA, 25 bp, Homo sapien
agccttgcacggaggaagcaccttt

SEQ ID NO: 4999486 - DNA, 25 bp, Homo sapien
gacagaggaaccagccttgcacgga

SEQ ID NO: 4999487 - DNA, 25 bp, Homo sapien
ggacagaggaaccagccttgcacgg

SEQ ID NO: 4999488 - DNA, 25 bp, Homo sapien
aactccagaaatcaggagacggaga

SEQ ID NO: 4999489 - DNA, 25 bp, Homo sapien
actccagaaatcaggagacggagac

SEQ ID NO: 4999490 - DNA, 25 bp, Homo sapien
cgaggttcagaggacggatacagca

SEQ ID NO: 4999491 - DNA, 25 bp, Homo sapien
tacagcaggaacgaaaaaacatccg

SEQ ID NO: 4999492 - DNA, 25 bp, Homo sapien
cctgggcacagaattgctgggaagc

SEQ ID NO: 4999493 - DNA, 25 bp, Homo sapien
tgttcgactgtcagatccccgaggt

SEQ ID NO: 4999494 - DNA, 25 bp, Homo sapien
taaaactcttcacgctggcacttgg

SEQ ID NO: 4999495 - DNA, 25 bp, Homo sapien
gaatcttctagcagagcatgctggg

SEQ ID NO: 4999496 - DNA, 25 bp, Homo sapien
ggcttctttaccgagctcctgaggc

SEQ ID NO: 4999497 - DNA, 25 bp, Homo sapien
ttcccacttgaaaccagacggtgag

SEQ ID NO: 4999498 - DNA, 25 bp, Homo sapien
gagaacacgactccagcatggtgct

SEQ ID NO: 4999499 - DNA, 25 bp, Homo sapien
ccagcagcattgatggaactttcct

SEQ ID NO: 4999500 - DNA, 25 bp, Homo sapien
tttcctttgcaccccgagaacacga

SEQ ID NO: 4999501 - DNA, 25 bp, Homo sapien
gcatggtgctcattccaccatagcc

SEQ ID NO: 4999502 - DNA, 25 bp, Homo sapien
aaagcaagctttaattatcactggg

SEQ ID NO: 4999503 - DNA, 25 bp, Homo sapien
cagaaggccgcatcttcgaggaatt

SEQ ID NO: 4999504 - DNA, 25 bp, Homo sapien
ttcgaggaatttggcagacctcagc

SEQ ID NO: 4999505 - DNA, 25 bp, Homo sapien
caggcctttggcaaaagatcacttt

SEQ ID NO: 4999506 - DNA, 25 bp, Homo sapien
aagattgacgttctttccaccaaca

SEQ ID NO: 4999507 - DNA, 25 bp, Homo sapien
tttaccacccagtttccaatggctg

SEQ ID NO: 4999508 - DNA, 25 bp, Homo sapien
tacacgtgatctgaagattgtagga

SEQ ID NO: 4999509 - DNA, 25 bp, Homo sapien
tgtgagtgtaactaagtatacttcc

SEQ ID NO: 4999510 - DNA, 25 bp, Homo sapien
tgtatggctttatgggtggtcattg

SEQ ID NO: 4999511 - DNA, 25 bp, Homo sapien
tagttttgcttattcttcttgctgg

SEQ ID NO: 4999512 - DNA, 25 bp, Homo sapien
gttttgcttattcttcttgctggtc

SEQ ID NO: 4999513 - DNA, 25 bp, Homo sapien
gctttatgggtggtcattgcactca

SEQ ID NO: 4999514 - DNA, 25 bp, Homo sapien
tctaggacatagaactttcagggca

SEQ ID NO: 4999515 - DNA, 25 bp, Homo sapien
gtcattcagttatctaaggcacaca

SEQ ID NO: 4999516 - DNA, 25 bp, Homo sapien
tggtacttaggcacaactagagaac

SEQ ID NO: 4999517 - DNA, 25 bp, Homo sapien
tcctggagatgtagaaagatctgag

SEQ ID NO: 4999518 - DNA, 25 bp, Homo sapien
catgtgttttacctcgacttgctaa

SEQ ID NO: 4999519 - DNA, 25 bp, Homo sapien
caatcaagatggctagaatggtgcc

SEQ ID NO: 4999520 - DNA, 25 bp, Homo sapien
caaggacgacacacagtatggatca

SEQ ID NO: 4999521 - DNA, 25 bp, Homo sapien
tgtctaaaacttgacacccctggta

SEQ ID NO: 4999522 - DNA, 25 bp, Homo sapien
tcaccacggatttacctcattgctg

SEQ ID NO: 4999523 - DNA, 25 bp, Homo sapien
caccacggatttacctcattgctgt

SEQ ID NO: 4999524 - DNA, 25 bp, Homo sapien
cagaacggggaagagagggcatcgg

SEQ ID NO: 4999525 - DNA, 25 bp, Homo sapien
ggggaagagagggcatcgggggcca

SEQ ID NO: 4999526 - DNA, 25 bp, Homo sapien
agaacggggaagagagggcatcggg

SEQ ID NO: 4999527 - DNA, 25 bp, Homo sapien
gaagagagggcatcgggggccacat

SEQ ID NO: 4999528 - DNA, 25 bp, Homo sapien
tctcctcccggtaagcaaatgctga

SEQ ID NO: 4999529 - DNA, 25 bp, Homo sapien
tggactcatcgacccctgaaactac

SEQ ID NO: 4999530 - DNA, 25 bp, Homo sapien
tgtgttcactttcctggactcatcg

SEQ ID NO: 4999531 - DNA, 25 bp, Homo sapien
tgaaactactatctcccctatttga

SEQ ID NO: 4999532 - DNA, 25 bp, Homo sapien
tttctctcagtggtgttgttgacac

SEQ ID NO: 4999533 - DNA, 25 bp, Homo sapien
ccttgggccttgtagtgacccctct

SEQ ID NO: 4999534 - DNA, 25 bp, Homo sapien
tgttgttgacactgagcacgttgcc

SEQ ID NO: 4999535 - DNA, 25 bp, Homo sapien
gagcacgttgccagcacagtacctt

SEQ ID NO: 4999536 - DNA, 25 bp, Homo sapien
cagaatccctgagccctcacgttgg

SEQ ID NO: 4999537 - DNA, 25 bp, Homo sapien
acagaatccctgagccctcacgttg

SEQ ID NO: 4999538 - DNA, 25 bp, Homo sapien
ctgagccctcacgttgggggaagca

SEQ ID NO: 4999539 - DNA, 25 bp, Homo sapien
tccctgagccctcacgttgggggaa

SEQ ID NO: 4999540 - DNA, 25 bp, Homo sapien
aatttcctggtcctcgtatcagtgg

SEQ ID NO: 4999541 - DNA, 25 bp, Homo sapien
ttcagctggcgaaggtattgctttc

SEQ ID NO: 4999542 - DNA, 25 bp, Homo sapien
caacctctagtaagtttcagcagga

SEQ ID NO: 4999543 - DNA, 25 bp, Homo sapien
gactcagagctagagcggaaccaac

SEQ ID NO: 4999544 - DNA, 25 bp, Homo sapien
tatttgacccttcctagagctgagt

SEQ ID NO: 4999545 - DNA, 25 bp, Homo sapien
caattgccaataatcggtactagtc

SEQ ID NO: 4999546 - DNA, 25 bp, Homo sapien
taatgccagtttagttgacacagta

SEQ ID NO: 4999547 - DNA, 25 bp, Homo sapien
cagtggcgctttttagtggtgaaca

SEQ ID NO: 4999548 - DNA, 25 bp, Homo sapien
ctttgcaaggtaattaagaggatca

SEQ ID NO: 4999549 - DNA, 25 bp, Homo sapien
gcctaagctcatggagagtcttcat

SEQ ID NO: 4999550 - DNA, 25 bp, Homo sapien
tgctctacaaatcgtcaacactcaa

SEQ ID NO: 4999551 - DNA, 25 bp, Homo sapien
aataaccaaagaatgcgctccaacc

SEQ ID NO: 4999552 - DNA, 25 bp, Homo sapien
gagacactagttcaatcagcaaggt

SEQ ID NO: 4999553 - DNA, 25 bp, Homo sapien
tagctaccagaaaaagtgccaatcc

SEQ ID NO: 4999554 - DNA, 25 bp, Homo sapien
cagagctctcccatagagggtaaag

SEQ ID NO: 4999555 - DNA, 25 bp, Homo sapien
tctcctttaaaggatcagagctctc

SEQ ID NO: 4999556 - DNA, 25 bp, Homo sapien
tatccagccctcaatgaatagcggc

SEQ ID NO: 4999557 - DNA, 25 bp, Homo sapien
tgctaaccgtgtacctcagcctgta

SEQ ID NO: 4999558 - DNA, 25 bp, Homo sapien
ctttgtagcagaactcacagtaggt

SEQ ID NO: 4999559 - DNA, 25 bp, Homo sapien
tgggaacaaatctagctgaacgtct

SEQ ID NO: 4999560 - DNA, 25 bp, Homo sapien
ttccagccccgggtccgcagaggaa

SEQ ID NO: 4999561 - DNA, 25 bp, Homo sapien
tcaggagggcggctccaaggcagcg

SEQ ID NO: 4999562 - DNA, 25 bp, Homo sapien
tccagccccgggtccgcagaggaac

SEQ ID NO: 4999563 - DNA, 25 bp, Homo sapien
ccccgggtaggtctgtgctgcgcac

SEQ ID NO: 4999564 - DNA, 25 bp, Homo sapien
tgcgcactggatccctttttgcagg

SEQ ID NO: 4999565 - DNA, 25 bp, Homo sapien
ctgaaagctgggcaagatctagtcc

SEQ ID NO: 4999566 - DNA, 25 bp, Homo sapien
gctgggcaagatctagtccgggcat

SEQ ID NO: 4999567 - DNA, 25 bp, Homo sapien
aacccaacgaatttgaggccggcag

SEQ ID NO: 4999568 - DNA, 25 bp, Homo sapien
tattttatggagtaccaggccagaa

SEQ ID NO: 4999569 - DNA, 25 bp, Homo sapien
cacattcctgttgccagagcatgca

SEQ ID NO: 4999570 - DNA, 25 bp, Homo sapien
ggtgtcaatgactgctccaaagtag

SEQ ID NO: 4999571 - DNA, 25 bp, Homo sapien
cattcccagtgcaaaaggtctctcc

SEQ ID NO: 4999572 - DNA, 25 bp, Homo sapien
aagtgttcgcaacaaaacaaactgc

SEQ ID NO: 4999573 - DNA, 25 bp, Homo sapien
caagtgttcgcaacaaaacaaactg

SEQ ID NO: 4999574 - DNA, 25 bp, Homo sapien
ctgcattcccagtgcaaaaggtctc

SEQ ID NO: 4999575 - DNA, 25 bp, Homo sapien
tagaagccaactggcgatttgccat

SEQ ID NO: 4999576 - DNA, 25 bp, Homo sapien
ccatgtgacaggaagattggagtca

SEQ ID NO: 4999577 - DNA, 25 bp, Homo sapien
cttccagagtggtagatgcatacat

SEQ ID NO: 4999578 - DNA, 25 bp, Homo sapien
gatcagaggaagcataagccctcca

SEQ ID NO: 4999579 - DNA, 25 bp, Homo sapien
taagagtattgcaggtccgtttaca

SEQ ID NO: 4999580 - DNA, 25 bp, Homo sapien
tcttgacaataaccacacggagctg

SEQ ID NO: 4999581 - DNA, 25 bp, Homo sapien
gatcacttggcgactttggacacag

SEQ ID NO: 4999582 - DNA, 25 bp, Homo sapien
tgacttcgctgtcccacggtgggtg

SEQ ID NO: 4999583 - DNA, 25 bp, Homo sapien
tgtaattccatctgatccacagact

SEQ ID NO: 4999584 - DNA, 25 bp, Homo sapien
accacaattaacgttgcagcttcct

SEQ ID NO: 4999585 - DNA, 25 bp, Homo sapien
cacagactggctcatactcgtgtat

SEQ ID NO: 4999586 - DNA, 25 bp, Homo sapien
gattaccactattaacacagccagc

SEQ ID NO: 4999587 - DNA, 25 bp, Homo sapien
caggggcctcccacttattctacac

SEQ ID NO: 4999588 - DNA, 25 bp, Homo sapien
ggcgccaggggcctcccacttattc

SEQ ID NO: 4999589 - DNA, 25 bp, Homo sapien
gggcctcccacttattctacacctc

SEQ ID NO: 4999590 - DNA, 25 bp, Homo sapien
tcagcaaggccggtggaccccgccc

SEQ ID NO: 4999591 - DNA, 25 bp, Homo sapien
ctgattccgccaagcccgttccctt

SEQ ID NO: 4999592 - DNA, 25 bp, Homo sapien
cgttcccttggctgtggtttcgctg

SEQ ID NO: 4999593 - DNA, 25 bp, Homo sapien
ggacagtgggaatctcgttcatcca

SEQ ID NO: 4999594 - DNA, 25 bp, Homo sapien
tggtttcgctggatagtaggtaggg

SEQ ID NO: 4999595 - DNA, 25 bp, Homo sapien
tcatgcgcgtcactaattagatgac

SEQ ID NO: 4999596 - DNA, 25 bp, Homo sapien
cgtcactaattagatgacgaggcat

SEQ ID NO: 4999597 - DNA, 25 bp, Homo sapien
atgcgcgtcactaattagatgacga

SEQ ID NO: 4999598 - DNA, 25 bp, Homo sapien
gcgcgtcactaattagatgacgagg

SEQ ID NO: 4999599 - DNA, 25 bp, Homo sapien
accatttacctgtgcttcattgaat

SEQ ID NO: 4999600 - DNA, 25 bp, Homo sapien
gttactcccaccatttacctgtgct

SEQ ID NO: 4999601 - DNA, 25 bp, Homo sapien
tcatagttactcccaccatttacct

SEQ ID NO: 4999602 - DNA, 25 bp, Homo sapien
cccaccatttacctgtgcttcattg

SEQ ID NO: 4999603 - DNA, 25 bp, Homo sapien
ctttgtggaatggtgctaaaatatt

SEQ ID NO: 4999604 - DNA, 25 bp, Homo sapien
ttgtggaatggtgctaaaatattta

SEQ ID NO: 4999605 - DNA, 25 bp, Homo sapien
aatggtgctaaaatatttaaacaat

SEQ ID NO: 4999606 - DNA, 25 bp, Homo sapien
tggtgctaaaatatttaaacaatgg

SEQ ID NO: 4999607 - DNA, 25 bp, Homo sapien
tgttgtataagggatgtttatgccc

SEQ ID NO: 4999608 - DNA, 25 bp, Homo sapien
tgtttatgccccctagattaatgct

SEQ ID NO: 4999609 - DNA, 25 bp, Homo sapien
taagggatgtttatgccccctagat

SEQ ID NO: 4999610 - DNA, 25 bp, Homo sapien
tatgccccctagattaatgctttca

SEQ ID NO: 4999611 - DNA, 25 bp, Homo sapien
aatgtagcctccgaggacaatacca

SEQ ID NO: 4999612 - DNA, 25 bp, Homo sapien
tccgaggacaataccaacaccagca

SEQ ID NO: 4999613 - DNA, 25 bp, Homo sapien
ttttttataatgtagcctccgagga

SEQ ID NO: 4999614 - DNA, 25 bp, Homo sapien
ccagcactggggacgataataaccc

SEQ ID NO: 4999615 - DNA, 25 bp, Homo sapien
gaaataccactacctaccaatcacg

SEQ ID NO: 4999616 - DNA, 25 bp, Homo sapien
tcaggtgacagttaccctaaatacc

SEQ ID NO: 4999617 - DNA, 25 bp, Homo sapien
tacaggtgatgcacttaacacatag

SEQ ID NO: 4999618 - DNA, 25 bp, Homo sapien
gggtcaacctcattacacagaagga

SEQ ID NO: 4999619 - DNA, 25 bp, Homo sapien
ggttgtatttctgataatggagggc

SEQ ID NO: 4999620 - DNA, 25 bp, Homo sapien
aaaaggagctcaggttgtatttctg

SEQ ID NO: 4999621 - DNA, 25 bp, Homo sapien
tctgataatggagggcgctgaagaa

SEQ ID NO: 4999622 - DNA, 25 bp, Homo sapien
ggagctcaggttgtatttctgataa

SEQ ID NO: 4999623 - DNA, 25 bp, Homo sapien
aaatgtgtgtgcggagcagctcaat

SEQ ID NO: 4999624 - DNA, 25 bp, Homo sapien
gtgtgcggagcagctcaatggcccc

SEQ ID NO: 4999625 - DNA, 25 bp, Homo sapien
catgaggaagaaatgtgtgtgcgga

SEQ ID NO: 4999626 - DNA, 25 bp, Homo sapien
gtgtgtgcggagcagctcaatggcc

SEQ ID NO: 4999627 - DNA, 25 bp, Homo sapien
aaaggtctgaccactcatttacgcg

SEQ ID NO: 4999628 - DNA, 25 bp, Homo sapien
ccatgaaaatgttcttcggcgcccc

SEQ ID NO: 4999629 - DNA, 25 bp, Homo sapien
ggacattgcttggatctccgatcag

SEQ ID NO: 4999630 - DNA, 25 bp, Homo sapien
catttacgcgaatatggacattgct

SEQ ID NO: 4999631 - DNA, 25 bp, Homo sapien
tccagcgccctctaatggccaagac

SEQ ID NO: 4999632 - DNA, 25 bp, Homo sapien
tgctccagcgccctctaatggccaa

SEQ ID NO: 4999633 - DNA, 25 bp, Homo sapien
ctccagcgccctctaatggccaaga

SEQ ID NO: 4999634 - DNA, 25 bp, Homo sapien
gctccagcgccctctaatggccaag

SEQ ID NO: 4999635 - DNA, 25 bp, Homo sapien
aatccagcagtcctcggagcttttc

SEQ ID NO: 4999636 - DNA, 25 bp, Homo sapien
ccctctttggaggtcctctgggcaa

SEQ ID NO: 4999637 - DNA, 25 bp, Homo sapien
ggagcttttccatcgagacagttca

SEQ ID NO: 4999638 - DNA, 25 bp, Homo sapien
catacaagtaaagcccacagatgtg

SEQ ID NO: 4999639 - DNA, 25 bp, Homo sapien
acattttgacgaactccaactcatc

SEQ ID NO: 4999640 - DNA, 25 bp, Homo sapien
gacgaactccaactcatctattttt

SEQ ID NO: 4999641 - DNA, 25 bp, Homo sapien
tatttctgagagtattataatttaa

SEQ ID NO: 4999642 - DNA, 25 bp, Homo sapien
gttatgttgtctaatacaaggtcac

SEQ ID NO: 4999643 - DNA, 25 bp, Homo sapien
tttacaagcgcaaacatactctagg

SEQ ID NO: 4999644 - DNA, 25 bp, Homo sapien
agaaagtttaccaggagtccaggat

SEQ ID NO: 4999645 - DNA, 25 bp, Homo sapien
ctaggaatctaatggtcggagcatc

SEQ ID NO: 4999646 - DNA, 25 bp, Homo sapien
tcggagcatctgtggagaacatcaa

SEQ ID NO: 4999647 - DNA, 25 bp, Homo sapien
tagcctgagctgtcttgccaaatca

SEQ ID NO: 4999648 - DNA, 25 bp, Homo sapien
ttatgtactgcgaaagccctgggag

SEQ ID NO: 4999649 - DNA, 25 bp, Homo sapien
aatcatcaacgtgcatctgtagggc

SEQ ID NO: 4999650 - DNA, 25 bp, Homo sapien
tgcgaggagtaactacacaggcctg

SEQ ID NO: 4999651 - DNA, 25 bp, Homo sapien
cataaaacggaacaaaatcatgtca

SEQ ID NO: 4999652 - DNA, 25 bp, Homo sapien
agcagccctagcggcagtgccttac

SEQ ID NO: 4999653 - DNA, 25 bp, Homo sapien
caagcagccctagcggcagtgcctt

SEQ ID NO: 4999654 - DNA, 25 bp, Homo sapien
tcaagcagccctagcggcagtgcct

SEQ ID NO: 4999655 - DNA, 25 bp, Homo sapien
aagcagccctagcggcagtgcctta

SEQ ID NO: 4999656 - DNA, 25 bp, Homo sapien
gatgctggcattggaggctgggata

SEQ ID NO: 4999657 - DNA, 25 bp, Homo sapien
aaagcagttacaatggcactctcag

SEQ ID NO: 4999658 - DNA, 25 bp, Homo sapien
tgaaggtaatgaaagcagttacaat

SEQ ID NO: 4999659 - DNA, 25 bp, Homo sapien
caaactgtgactcgatgaacttggg

SEQ ID NO: 4999660 - DNA, 25 bp, Homo sapien
atgttgcttaagatcctgacagctg

SEQ ID NO: 4999661 - DNA, 25 bp, Homo sapien
tgtgtatgacaaactcacaaaaagg

SEQ ID NO: 4999662 - DNA, 25 bp, Homo sapien
ctgtgtatgacaaactcacaaaaag

SEQ ID NO: 4999663 - DNA, 25 bp, Homo sapien
ttgcttaagatcctgacagctgctc

SEQ ID NO: 4999664 - DNA, 25 bp, Homo sapien
ttggtatccaccaaggagttctgga

SEQ ID NO: 4999665 - DNA, 25 bp, Homo sapien
cctaatcaagaccatataacaacta

SEQ ID NO: 4999666 - DNA, 25 bp, Homo sapien
ccagaggatgtgcgtagcttatatg

SEQ ID NO: 4999667 - DNA, 25 bp, Homo sapien
attatctctaatcttgcagttcctg

SEQ ID NO: 4999668 - DNA, 25 bp, Homo sapien
gaaacattgcaatggcacaaaggag

SEQ ID NO: 4999669 - DNA, 25 bp, Homo sapien
ctttttcttgtgtcgaggtggaagc

SEQ ID NO: 4999670 - DNA, 25 bp, Homo sapien
cattgggaatatcacaagaaacatt

SEQ ID NO: 4999671 - DNA, 25 bp, Homo sapien
cagaacatcgtcatcactaacagca

SEQ ID NO: 4999672 - DNA, 25 bp, Homo sapien
caaggtgaacaggatttctgggatc

SEQ ID NO: 4999673 - DNA, 25 bp, Homo sapien
cagtttccaatgaaacgagggtcat

SEQ ID NO: 4999674 - DNA, 25 bp, Homo sapien
gggccaagtgctcccatgacataca

SEQ ID NO: 4999675 - DNA, 25 bp, Homo sapien
gagggtcattctggtcaaggtgaac

SEQ ID NO: 4999676 - DNA, 25 bp, Homo sapien
tccagtgggtaaaggatggtagcct

SEQ ID NO: 4999677 - DNA, 25 bp, Homo sapien
gaccttcccaatggcttctctagag

SEQ ID NO: 4999678 - DNA, 25 bp, Homo sapien
ggcatgtttgattagctggaaccca

SEQ ID NO: 4999679 - DNA, 25 bp, Homo sapien
tgctgacactaagacgagccagagg

SEQ ID NO: 4999680 - DNA, 25 bp, Homo sapien
atcctgtggctttgatgcacacaca

SEQ ID NO: 4999681 - DNA, 25 bp, Homo sapien
tctccaggctctccacaggccacta

SEQ ID NO: 4999682 - DNA, 25 bp, Homo sapien
ttctccaggctctccacaggccact

SEQ ID NO: 4999683 - DNA, 25 bp, Homo sapien
tccaggctctccacaggccactacc

SEQ ID NO: 4999684 - DNA, 25 bp, Homo sapien
caggctctccacaggccactaccat

SEQ ID NO: 4999685 - DNA, 25 bp, Homo sapien
gacacatcctgaacatcaataatct

SEQ ID NO: 4999686 - DNA, 25 bp, Homo sapien
cttatgtctatagcatttcttgcag

SEQ ID NO: 4999687 - DNA, 25 bp, Homo sapien
ttgcaggggcacctgacacatcctg

SEQ ID NO: 4999688 - DNA, 25 bp, Homo sapien
cttgaagaaggcctttacaggacaa

SEQ ID NO: 4999689 - DNA, 25 bp, Homo sapien
gaatagataattttcaacagaaggc

SEQ ID NO: 4999690 - DNA, 25 bp, Homo sapien
gaaggcatataaatggcctacaggc

SEQ ID NO: 4999691 - DNA, 25 bp, Homo sapien
gggactgatatccagaatttataag

SEQ ID NO: 4999692 - DNA, 25 bp, Homo sapien
tcagtatatcgaagggatatttgcc

SEQ ID NO: 4999693 - DNA, 25 bp, Homo sapien
tgtgtgacacactgtactttccagg

SEQ ID NO: 4999694 - DNA, 25 bp, Homo sapien
ccaggaagcaccttccaggtcaaca

SEQ ID NO: 4999695 - DNA, 25 bp, Homo sapien
ctgtgtgacacactgtactttccag

SEQ ID NO: 4999696 - DNA, 25 bp, Homo sapien
ggacttgtatactgagacctgtgaa

SEQ ID NO: 4999697 - DNA, 25 bp, Homo sapien
cagtctccatatgcagctcaagtga

SEQ ID NO: 4999698 - DNA, 25 bp, Homo sapien
gatggtaatctgctgagtctaggac

SEQ ID NO: 4999699 - DNA, 25 bp, Homo sapien
caaaagactgtacgagagctcaagg

SEQ ID NO: 4999700 - DNA, 25 bp, Homo sapien
gaggcctgcccaaactagcatactg

SEQ ID NO: 4999701 - DNA, 25 bp, Homo sapien
tcaccaaagggataccaactggcat

SEQ ID NO: 4999702 - DNA, 25 bp, Homo sapien
taccagtttgaacagataacaatgg

SEQ ID NO: 4999703 - DNA, 25 bp, Homo sapien
gcctcttgcatgatgtgctttatag

SEQ ID NO: 4999704 - DNA, 25 bp, Homo sapien
cttaaggaatatttggatccctcct

SEQ ID NO: 4999705 - DNA, 25 bp, Homo sapien
ttggatccctcctatagataaagaa

SEQ ID NO: 4999706 - DNA, 25 bp, Homo sapien
gtagagctgtaaagaccttaaggaa

SEQ ID NO: 4999707 - DNA, 25 bp, Homo sapien
tagagctgtaaagaccttaaggaat

SEQ ID NO: 4999708 - DNA, 25 bp, Homo sapien
cctcaacaattcctcggaaagcaaa

SEQ ID NO: 4999709 - DNA, 25 bp, Homo sapien
cttgcctgggaagtatattcatttg

SEQ ID NO: 4999710 - DNA, 25 bp, Homo sapien
agataggtttcacctgtgatgagac

SEQ ID NO: 4999711 - DNA, 25 bp, Homo sapien
gcaaagtacattactatagatctta

SEQ ID NO: 4999712 - DNA, 25 bp, Homo sapien
ctgcctcctggagatcggtagcatc

SEQ ID NO: 4999713 - DNA, 25 bp, Homo sapien
ctggagatcggtagcatcatttgca

SEQ ID NO: 4999714 - DNA, 25 bp, Homo sapien
gcctcctggagatcggtagcatcat

SEQ ID NO: 4999715 - DNA, 25 bp, Homo sapien
tcctggagatcggtagcatcatttg

SEQ ID NO: 4999716 - DNA, 25 bp, Homo sapien
aagtgcatgagccaacgtctcagca

SEQ ID NO: 4999717 - DNA, 25 bp, Homo sapien
caggcagactatccatgaaagttcc

SEQ ID NO: 4999718 - DNA, 25 bp, Homo sapien
ggctctggagttactcccatacaca

SEQ ID NO: 4999719 - DNA, 25 bp, Homo sapien
tgagccaacgtctcagcaggcagac

SEQ ID NO: 4999720 - DNA, 25 bp, Homo sapien
ctggttggagacataatcagagatt

SEQ ID NO: 4999721 - DNA, 25 bp, Homo sapien
tcgtaggggagctctcaacagactc

SEQ ID NO: 4999722 - DNA, 25 bp, Homo sapien
tgaaagcttcgtcttctttctcccg

SEQ ID NO: 4999723 - DNA, 25 bp, Homo sapien
ttctttctcccgtgtcactctttgc

SEQ ID NO: 4999724 - DNA, 25 bp, Homo sapien
ccgtgtcactctttgcttcgtaggg

SEQ ID NO: 4999725 - DNA, 25 bp, Homo sapien
catcttgttaaaagttgctgctgtc

SEQ ID NO: 4999726 - DNA, 25 bp, Homo sapien
tcatcttgttaaaagttgctgctgt

SEQ ID NO: 4999727 - DNA, 25 bp, Homo sapien
aacctgcaccacctgagtattgtaa

SEQ ID NO: 4999728 - DNA, 25 bp, Homo sapien
cacctgagtattgtaaaattgccaa

SEQ ID NO: 4999729 - DNA, 25 bp, Homo sapien
ggaactgaagtgaagaacctgcacc

SEQ ID NO: 4999730 - DNA, 25 bp, Homo sapien
aattgccaatggtagttgaagaggg

SEQ ID NO: 4999731 - DNA, 25 bp, Homo sapien
cgatatcaagagttctaccaaaagg

SEQ ID NO: 4999732 - DNA, 25 bp, Homo sapien
ccgatatcaagagttctaccaaaag

SEQ ID NO: 4999733 - DNA, 25 bp, Homo sapien
ctccgatatcaagagttctaccaaa

SEQ ID NO: 4999734 - DNA, 25 bp, Homo sapien
tccgatatcaagagttctaccaaaa

SEQ ID NO: 4999735 - DNA, 25 bp, Homo sapien
aataaaccgggcatgctcagcacag

SEQ ID NO: 4999736 - DNA, 25 bp, Homo sapien
gaagaaggggattaatgtgactgat

SEQ ID NO: 4999737 - DNA, 25 bp, Homo sapien
gaaggggattaatgtgactgatgaa

SEQ ID NO: 4999738 - DNA, 25 bp, Homo sapien
tggaataaaccgggcatgctcagca

SEQ ID NO: 4999739 - DNA, 25 bp, Homo sapien
tcttctgcgctgttggaaaactctg

SEQ ID NO: 4999740 - DNA, 25 bp, Homo sapien
gaaaactctgttgaacgtggcacat

SEQ ID NO: 4999741 - DNA, 25 bp, Homo sapien
catcctgcggttacagttggttctc

SEQ ID NO: 4999742 - DNA, 25 bp, Homo sapien
catgcactgtagaaggaagctcgag

SEQ ID NO: 4999743 - DNA, 25 bp, Homo sapien
aagtaagtttcagtgtgagtgaaac

SEQ ID NO: 4999744 - DNA, 25 bp, Homo sapien
ggaaagtaagtttcagtgtgagtga

SEQ ID NO: 4999745 - DNA, 25 bp, Homo sapien
gtttcagtgtgagtgaaacatatct

SEQ ID NO: 4999746 - DNA, 25 bp, Homo sapien
gtgtgagtgaaacatatctgagaga

SEQ ID NO: 4999747 - DNA, 25 bp, Homo sapien
tgaataaagccacgtagacccagtg

SEQ ID NO: 4999748 - DNA, 25 bp, Homo sapien
taattacgctgctcaggtacccaga

SEQ ID NO: 4999749 - DNA, 25 bp, Homo sapien
ccaggttcccgatgtcaaagcagct

SEQ ID NO: 4999750 - DNA, 25 bp, Homo sapien
tcatctaagtaggttggtcccaggg

SEQ ID NO: 4999751 - DNA, 25 bp, Homo sapien
gaagccgggcccagtcagtcttgcc

SEQ ID NO: 4999752 - DNA, 25 bp, Homo sapien
cacgtttcatccaccggcacgaggg

SEQ ID NO: 4999753 - DNA, 25 bp, Homo sapien
ttgatagctgatggcacccaagcac

SEQ ID NO: 4999754 - DNA, 25 bp, Homo sapien
caagcactccggcacgtttcatcca

SEQ ID NO: 4999755 - DNA, 25 bp, Homo sapien
cgaggcgcccagtgcatcctgatca

SEQ ID NO: 4999756 - DNA, 25 bp, Homo sapien
gtactgcgatgagccctactcggcg

SEQ ID NO: 4999757 - DNA, 25 bp, Homo sapien
cctctccgggcggtagcttgaggca

SEQ ID NO: 4999758 - DNA, 25 bp, Homo sapien
tcacagacacggcttcaaggctccg

SEQ ID NO: 4999759 - DNA, 25 bp, Homo sapien
ggcccgcggccaggagcgagtgcac

SEQ ID NO: 4999760 - DNA, 25 bp, Homo sapien
ccgctgggcccgcggccaggagcga

SEQ ID NO: 4999761 - DNA, 25 bp, Homo sapien
tgggcccgcggccaggagcgagtgc

SEQ ID NO: 4999762 - DNA, 25 bp, Homo sapien
gccgccgctgggcccgcggccagga

SEQ ID NO: 4999763 - DNA, 25 bp, Homo sapien
tcgcggcaccctcgggagtgaagct

SEQ ID NO: 4999764 - DNA, 25 bp, Homo sapien
taccgggtgttcgccgcctgggctc

SEQ ID NO: 4999765 - DNA, 25 bp, Homo sapien
gcacttagcgctgctgtccgtacag

SEQ ID NO: 4999766 - DNA, 25 bp, Homo sapien
agcatcccacctcgctgcgccaggg

SEQ ID NO: 4999767 - DNA, 25 bp, Homo sapien
tgcggcttggggctagcgtcccagc

SEQ ID NO: 4999768 - DNA, 25 bp, Homo sapien
agggcggtcagcgaagagcggctgc

SEQ ID NO: 4999769 - DNA, 25 bp, Homo sapien
aaagcagaaagagggcggtcagcga

SEQ ID NO: 4999770 - DNA, 25 bp, Homo sapien
agaaagagggcggtcagcgaagagc

SEQ ID NO: 4999771 - DNA, 25 bp, Homo sapien
agctagtcaggagcggagccccgga

SEQ ID NO: 4999772 - DNA, 25 bp, Homo sapien
cagtcccggaacaataagcagcagg

SEQ ID NO: 4999773 - DNA, 25 bp, Homo sapien
agccccggaggactaggcagcagcc

SEQ ID NO: 4999774 - DNA, 25 bp, Homo sapien
gacggaggagctagtcaggagcgga

SEQ ID NO: 4999775 - DNA, 25 bp, Homo sapien
gggaaccccaccagccgctgcgtga

SEQ ID NO: 4999776 - DNA, 25 bp, Homo sapien
ccagcaaactctcgccgctcgcggg

SEQ ID NO: 4999777 - DNA, 25 bp, Homo sapien
gagccggggaatcccagcaaactct

SEQ ID NO: 4999778 - DNA, 25 bp, Homo sapien
accagccgctgcgtgaggagccggg

SEQ ID NO: 4999779 - DNA, 25 bp, Homo sapien
agcctccgtccagccgaagagaaat

SEQ ID NO: 4999780 - DNA, 25 bp, Homo sapien
gggcactgagctacgggaatagttg

SEQ ID NO: 4999781 - DNA, 25 bp, Homo sapien
tgggagccgcgtgaggaggcagcct

SEQ ID NO: 4999782 - DNA, 25 bp, Homo sapien
tctgcctggctgagtagagcggcgg

SEQ ID NO: 4999783 - DNA, 25 bp, Homo sapien
gcgcacagagacgcgcccggagagg

SEQ ID NO: 4999784 - DNA, 25 bp, Homo sapien
gacgcgcccggagaggagcagccga

SEQ ID NO: 4999785 - DNA, 25 bp, Homo sapien
cacagccagccaccccgctgccctt

SEQ ID NO: 4999786 - DNA, 25 bp, Homo sapien
acagagacgcgcccggagaggagca

SEQ ID NO: 4999787 - DNA, 25 bp, Homo sapien
tctagaaaagtcagcggctgaagct

SEQ ID NO: 4999788 - DNA, 25 bp, Homo sapien
ccaagagcgctgaagccccgaggga

SEQ ID NO: 4999789 - DNA, 25 bp, Homo sapien
ggcccaagagcgctgaagccccgag

SEQ ID NO: 4999790 - DNA, 25 bp, Homo sapien
ccgagggagccggtctctagaaaag

SEQ ID NO: 4999791 - DNA, 25 bp, Homo sapien
gctctggcagtgacaggtagacaga

SEQ ID NO: 4999792 - DNA, 25 bp, Homo sapien
cagtgacaggtagacagatgtgagg

SEQ ID NO: 4999793 - DNA, 25 bp, Homo sapien
gacaggtagacagatgtgaggccac

SEQ ID NO: 4999794 - DNA, 25 bp, Homo sapien
tggcagtgacaggtagacagatgtg

SEQ ID NO: 4999795 - DNA, 25 bp, Homo sapien
tctgaaagcaaaatgtgatgaggca

SEQ ID NO: 4999796 - DNA, 25 bp, Homo sapien
tgagttgggaggcagtctgaaagca

SEQ ID NO: 4999797 - DNA, 25 bp, Homo sapien
tgaaagcaaaatgtgatgaggcatt

SEQ ID NO: 4999798 - DNA, 25 bp, Homo sapien
agtctgaaagcaaaatgtgatgagg

SEQ ID NO: 4999799 - DNA, 25 bp, Homo sapien
tcagacacccaattgctacagcaca

SEQ ID NO: 4999800 - DNA, 25 bp, Homo sapien
atatctgacctaagccagttcgccc

SEQ ID NO: 4999801 - DNA, 25 bp, Homo sapien
agtgtctactcagaggcccagtccc

SEQ ID NO: 4999802 - DNA, 25 bp, Homo sapien
gtcccactactgattctgctcatat

SEQ ID NO: 4999803 - DNA, 25 bp, Homo sapien
ctgctgtcctttattattgatgaca

SEQ ID NO: 4999804 - DNA, 25 bp, Homo sapien
tctttacaaaatccactcgaattcc

SEQ ID NO: 4999805 - DNA, 25 bp, Homo sapien
tgaaaagggctctttacaaaatcca

SEQ ID NO: 4999806 - DNA, 25 bp, Homo sapien
aaaatccactcgaattcccttctct

SEQ ID NO: 4999807 - DNA, 25 bp, Homo sapien
cacacattctctcgtggtcgtacag

SEQ ID NO: 4999808 - DNA, 25 bp, Homo sapien
ctcgtggtcgtacagtttgtcctga

SEQ ID NO: 4999809 - DNA, 25 bp, Homo sapien
ttaggtcatgtagagattgtcaggt

SEQ ID NO: 4999810 - DNA, 25 bp, Homo sapien
caggagaagcccacacattctctcg

SEQ ID NO: 4999811 - DNA, 25 bp, Homo sapien
gcaacctgccccctaagagggtgta

SEQ ID NO: 4999812 - DNA, 25 bp, Homo sapien
cctaagagggtgtacttcagtctga

SEQ ID NO: 4999813 - DNA, 25 bp, Homo sapien
tgccccctaagagggtgtacttcag

SEQ ID NO: 4999814 - DNA, 25 bp, Homo sapien
aagagggtgtacttcagtctgacag

SEQ ID NO: 4999815 - DNA, 25 bp, Homo sapien
gctgtgccaggtgaacggtaagtac

SEQ ID NO: 4999816 - DNA, 25 bp, Homo sapien
cttgcaactaccgtggaataactgg

SEQ ID NO: 4999817 - DNA, 25 bp, Homo sapien
taccgtggaataactggtctgagta

SEQ ID NO: 4999818 - DNA, 25 bp, Homo sapien
cggtaagtacttgcaactaccgtgg

SEQ ID NO: 4999819 - DNA, 25 bp, Homo sapien
gggatagcagccatcgcctcctccg

SEQ ID NO: 4999820 - DNA, 25 bp, Homo sapien
agagggatagcagccatcgcctcct

SEQ ID NO: 4999821 - DNA, 25 bp, Homo sapien
cccagccaggtggtctccgccgggc

SEQ ID NO: 4999822 - DNA, 25 bp, Homo sapien
ccaggcgcctccagagggatagcag

SEQ ID NO: 4999823 - DNA, 25 bp, Homo sapien
gtagcggctgtaggacagatggtca

SEQ ID NO: 4999824 - DNA, 25 bp, Homo sapien
ccgtagtagcggctgtaggacagat

SEQ ID NO: 4999825 - DNA, 25 bp, Homo sapien
tagtagcggctgtaggacagatggt

SEQ ID NO: 4999826 - DNA, 25 bp, Homo sapien
agcggctgtaggacagatggtcact

SEQ ID NO: 4999827 - DNA, 25 bp, Homo sapien
ctctcctgttccactagaataactt

SEQ ID NO: 4999828 - DNA, 25 bp, Homo sapien
ctactgctgccatatctaggctctc

SEQ ID NO: 4999829 - DNA, 25 bp, Homo sapien
catatctaggctctcatggtctctc

SEQ ID NO: 4999830 - DNA, 25 bp, Homo sapien
tcctgttccactagaataacttcta

SEQ ID NO: 4999831 - DNA, 25 bp, Homo sapien
tacagttgcccgccaccatgcccgg

SEQ ID NO: 4999832 - DNA, 25 bp, Homo sapien
ctgcaagctccgcctgcaagttccg

SEQ ID NO: 4999833 - DNA, 25 bp, Homo sapien
caagctccgcctgcaagttccgcct

SEQ ID NO: 4999834 - DNA, 25 bp, Homo sapien
ctacagttgcccgccaccatgcccg

SEQ ID NO: 4999835 - DNA, 25 bp, Homo sapien
tccaaatatgtaacacggggcaaaa

SEQ ID NO: 4999836 - DNA, 25 bp, Homo sapien
gaatcctcctgccaattaatctgtt

SEQ ID NO: 4999837 - DNA, 25 bp, Homo sapien
taaatgggcttcaccaatcttcagg

SEQ ID NO: 4999838 - DNA, 25 bp, Homo sapien
ctcctaaatgggcttcaccaatctt

SEQ ID NO: 4999839 - DNA, 25 bp, Homo sapien
aagtcagctgagtagtcccctccac

SEQ ID NO: 4999840 - DNA, 25 bp, Homo sapien
taagtcagctgagtagtcccctcca

SEQ ID NO: 4999841 - DNA, 25 bp, Homo sapien
gctaagtcagctgagtagtcccctc

SEQ ID NO: 4999842 - DNA, 25 bp, Homo sapien
aagctaagtcagctgagtagtcccc

SEQ ID NO: 4999843 - DNA, 25 bp, Homo sapien
taaagacctgcaagtccgactcatc

SEQ ID NO: 4999844 - DNA, 25 bp, Homo sapien
gtaggcttgggaatccttcttggac

SEQ ID NO: 4999845 - DNA, 25 bp, Homo sapien
gactgactcaacagcgaagcccaag

SEQ ID NO: 4999846 - DNA, 25 bp, Homo sapien
acagcctggccataaagacctgcaa

SEQ ID NO: 4999847 - DNA, 25 bp, Homo sapien
ccttaggcaactgggtagtctccgc

SEQ ID NO: 4999848 - DNA, 25 bp, Homo sapien
caactgggtagtctccgctcacatg

SEQ ID NO: 4999849 - DNA, 25 bp, Homo sapien
gacatccaatggacatagcgcacta

SEQ ID NO: 4999850 - DNA, 25 bp, Homo sapien
gtggacatccaatggacatagcgca

SEQ ID NO: 4999851 - DNA, 25 bp, Homo sapien
tatgaaactcttgctaatgagtgaa

SEQ ID NO: 4999852 - DNA, 25 bp, Homo sapien
atgaaactcttgctaatgagtgaac

SEQ ID NO: 4999853 - DNA, 25 bp, Homo sapien
gatatgaaactcttgctaatgagtg

SEQ ID NO: 4999854 - DNA, 25 bp, Homo sapien
atatgaaactcttgctaatgagtga

SEQ ID NO: 4999855 - DNA, 25 bp, Homo sapien
cagctttgctgttcatcaacacgtg

SEQ ID NO: 4999856 - DNA, 25 bp, Homo sapien
catcaacacgtgctgagggactgtc

SEQ ID NO: 4999857 - DNA, 25 bp, Homo sapien
cagtgcacgttaggacagctttgct

SEQ ID NO: 4999858 - DNA, 25 bp, Homo sapien
gtcactgttcttcgccacactgtcc

SEQ ID NO: 4999859 - DNA, 25 bp, Homo sapien
ttagagtttctaggtgcccttccca

SEQ ID NO: 4999860 - DNA, 25 bp, Homo sapien
cagtgtcacttcaccctgaacaagg

SEQ ID NO: 4999861 - DNA, 25 bp, Homo sapien
gcttctgactgtatattctgggctc

SEQ ID NO: 4999862 - DNA, 25 bp, Homo sapien
tgggctctaacctcatccttcgtaa

SEQ ID NO: 4999863 - DNA, 25 bp, Homo sapien
gccacctcacgaacagaaatgttcg

SEQ ID NO: 4999864 - DNA, 25 bp, Homo sapien
ctcagagccacctcacgaacagaaa

SEQ ID NO: 4999865 - DNA, 25 bp, Homo sapien
aaatgttcgcttcatgggaagagct

SEQ ID NO: 4999866 - DNA, 25 bp, Homo sapien
cacgaacagaaatgttcgcttcatg

SEQ ID NO: 4999867 - DNA, 25 bp, Homo sapien
tagaagaatcctgcaaaaatgtctc

SEQ ID NO: 4999868 - DNA, 25 bp, Homo sapien
tgtgagctagaagaatcctgcaaaa

SEQ ID NO: 4999869 - DNA, 25 bp, Homo sapien
gcgagtgggtccttgtgagctagaa

SEQ ID NO: 4999870 - DNA, 25 bp, Homo sapien
ggcagcgagtgggtccttgtgagct

SEQ ID NO: 4999871 - DNA, 25 bp, Homo sapien
catcaattcagaggtagttggtagc

SEQ ID NO: 4999872 - DNA, 25 bp, Homo sapien
ccggtatgatctgtatggtggttcc

SEQ ID NO: 4999873 - DNA, 25 bp, Homo sapien
tacatgggcctgagttgaaatgaag

SEQ ID NO: 4999874 - DNA, 25 bp, Homo sapien
gccaacccagcaattttgtcagaag

SEQ ID NO: 4999875 - DNA, 25 bp, Homo sapien
caagtactccagatcagtggtgaaa

SEQ ID NO: 4999876 - DNA, 25 bp, Homo sapien
gaaaactgccgggtggagctctgat

SEQ ID NO: 4999877 - DNA, 25 bp, Homo sapien
tctgataaagcgcacaaggtgctca

SEQ ID NO: 4999878 - DNA, 25 bp, Homo sapien
taaacaagggattcgcgaagtcatt

SEQ ID NO: 4999879 - DNA, 25 bp, Homo sapien
catgacatgacaattcgtgacaggc

SEQ ID NO: 4999880 - DNA, 25 bp, Homo sapien
cctttgaacggacgattaccaagca

SEQ ID NO: 4999881 - DNA, 25 bp, Homo sapien
tgacaattcgtgacaggccctttga

SEQ ID NO: 4999882 - DNA, 25 bp, Homo sapien
ttaccaagcataaggatagcactgg

SEQ ID NO: 4999883 - DNA, 25 bp, Homo sapien
tctatgaaatcaacagacagaatgt

SEQ ID NO: 4999884 - DNA, 25 bp, Homo sapien
gaaatggtcttctcacggaacataa

SEQ ID NO: 4999885 - DNA, 25 bp, Homo sapien
cagaatgtcactggattgaagaact

SEQ ID NO: 4999886 - DNA, 25 bp, Homo sapien
cagtgatccacagtgaaaaacagct

SEQ ID NO: 4999887 - DNA, 25 bp, Homo sapien
agcggatggcaccaagcattatgaa

SEQ ID NO: 4999888 - DNA, 25 bp, Homo sapien
taagcggatggcaccaagcattatg

SEQ ID NO: 4999889 - DNA, 25 bp, Homo sapien
tattaagcggatggcaccaagcatt

SEQ ID NO: 4999890 - DNA, 25 bp, Homo sapien
cggatggcaccaagcattatgaaaa

SEQ ID NO: 4999891 - DNA, 25 bp, Homo sapien
aagcccagaaccaacggattccagc

SEQ ID NO: 4999892 - DNA, 25 bp, Homo sapien
gcccagaaccaacggattccagctg

SEQ ID NO: 4999893 - DNA, 25 bp, Homo sapien
ccagaaccaacggattccagctgtt

SEQ ID NO: 4999894 - DNA, 25 bp, Homo sapien
gcaagcccagaaccaacggattcca

SEQ ID NO: 4999895 - DNA, 25 bp, Homo sapien
gaagaaagtctgaggtttccatgct

SEQ ID NO: 4999896 - DNA, 25 bp, Homo sapien
caggaggaagaaagtctgaggtttc

SEQ ID NO: 4999897 - DNA, 25 bp, Homo sapien
cccaaagcttctcagtaggagaaac

SEQ ID NO: 4999898 - DNA, 25 bp, Homo sapien
tgtcccccaaagcttctcagtagga

SEQ ID NO: 4999899 - DNA, 25 bp, Homo sapien
tcacttcattgtgtagttcagccat

SEQ ID NO: 4999900 - DNA, 25 bp, Homo sapien
gcttaagccagtggtttcagaaaac

SEQ ID NO: 4999901 - DNA, 25 bp, Homo sapien
aagccagtggtttcagaaaacagaa

SEQ ID NO: 4999902 - DNA, 25 bp, Homo sapien
aacagaagtctcacttcattgtgta

SEQ ID NO: 4999903 - DNA, 25 bp, Homo sapien
cctctcctcctgtccttcaaagtat

SEQ ID NO: 4999904 - DNA, 25 bp, Homo sapien
ttaaagagattccctctcctcctgt

SEQ ID NO: 4999905 - DNA, 25 bp, Homo sapien
ctcctcctgtccttcaaagtatgag

SEQ ID NO: 4999906 - DNA, 25 bp, Homo sapien
taaagagattccctctcctcctgtc

SEQ ID NO: 4999907 - DNA, 25 bp, Homo sapien
tgtagcttcacaagagaggtaccag

SEQ ID NO: 4999908 - DNA, 25 bp, Homo sapien
tccctgccaccgttaaattagtatg

SEQ ID NO: 4999909 - DNA, 25 bp, Homo sapien
ggcttttcgtcagctatggtgagca

SEQ ID NO: 4999910 - DNA, 25 bp, Homo sapien
taccaggttcgcatggaacgagcaa

SEQ ID NO: 4999911 - DNA, 25 bp, Homo sapien
tgttcacttacatttgactgagcag

SEQ ID NO: 4999912 - DNA, 25 bp, Homo sapien
cttgttcacttacatttgactgagc

SEQ ID NO: 4999913 - DNA, 25 bp, Homo sapien
gcttgttcacttacatttgactgag

SEQ ID NO: 4999914 - DNA, 25 bp, Homo sapien
ctgcttgttcacttacatttgactg

SEQ ID NO: 4999915 - DNA, 25 bp, Homo sapien
cttgggtattacctgtgcattctct

SEQ ID NO: 4999916 - DNA, 25 bp, Homo sapien
gaaggagtctctggaatcagcacct

SEQ ID NO: 4999917 - DNA, 25 bp, Homo sapien
tgccttcctccttgacagacatgac

SEQ ID NO: 4999918 - DNA, 25 bp, Homo sapien
caactgcatgccaagaatgaatgcc

SEQ ID NO: 4999919 - DNA, 25 bp, Homo sapien
ctttgtttcagtcccagtcagggaa

SEQ ID NO: 4999920 - DNA, 25 bp, Homo sapien
tccaggtgatagaattcttggacaa

SEQ ID NO: 4999921 - DNA, 25 bp, Homo sapien
tatctctacagttgataaggtccat

SEQ ID NO: 4999922 - DNA, 25 bp, Homo sapien
ctgagtatctctacagttgataagg

SEQ ID NO: 4999923 - DNA, 25 bp, Homo sapien
gtatctctacagttgataaggtcca

SEQ ID NO: 4999924 - DNA, 25 bp, Homo sapien
gagtatctctacagttgataaggtc

SEQ ID NO: 4999925 - DNA, 25 bp, Homo sapien
aatcagtgcccagtgtttgctcaga

SEQ ID NO: 4999926 - DNA, 25 bp, Homo sapien
gatttctggtggtgtctatcataca

SEQ ID NO: 4999927 - DNA, 25 bp, Homo sapien
gcagccttttgcgtgagttagcgaa

SEQ ID NO: 4999928 - DNA, 25 bp, Homo sapien
taatggatgtcctaaccagtccatg

SEQ ID NO: 4999929 - DNA, 25 bp, Homo sapien
caggttcaagaagcggcccggagtt

SEQ ID NO: 4999930 - DNA, 25 bp, Homo sapien
tagacataatctggatggcggagac

SEQ ID NO: 4999931 - DNA, 25 bp, Homo sapien
tggcggagactgaagagtgattatc

SEQ ID NO: 4999932 - DNA, 25 bp, Homo sapien
tttcgcctccctagaggttgtcagg

SEQ ID NO: 4999933 - DNA, 25 bp, Homo sapien
gtgctcctgtgagtccggctactca

SEQ ID NO: 4999934 - DNA, 25 bp, Homo sapien
agtttgcaatgagagagatagcgcc

SEQ ID NO: 4999935 - DNA, 25 bp, Homo sapien
ctgagtttgcaatgagagagatagc

SEQ ID NO: 4999936 - DNA, 25 bp, Homo sapien
gaaaggctgagtttgcaatgagaga

SEQ ID NO: 4999937 - DNA, 25 bp, Homo sapien
aggttgaaaagcagtggggcgatct

SEQ ID NO: 4999938 - DNA, 25 bp, Homo sapien
caggttgaaaagcagtggggcgatc

SEQ ID NO: 4999939 - DNA, 25 bp, Homo sapien
ttctccccggagtgctgcctgatgt

SEQ ID NO: 4999940 - DNA, 25 bp, Homo sapien
gggagtagaatgtttcttgatctga

SEQ ID NO: 4999941 - DNA, 25 bp, Homo sapien
tgtgaacgccggacatggctgtcat

SEQ ID NO: 4999942 - DNA, 25 bp, Homo sapien
catgaaacttcatgtgggagtagaa

SEQ ID NO: 4999943 - DNA, 25 bp, Homo sapien
ttaatccgaaaggactccactgatg

SEQ ID NO: 4999944 - DNA, 25 bp, Homo sapien
tcatcagtagccttaatccgaaagg

SEQ ID NO: 4999945 - DNA, 25 bp, Homo sapien
ggccatagagcactcctggtcatca

SEQ ID NO: 4999946 - DNA, 25 bp, Homo sapien
tttaaggccatagagcactcctggt

SEQ ID NO: 4999947 - DNA, 25 bp, Homo sapien
gagtggactcgcatgtgtttgttta

SEQ ID NO: 4999948 - DNA, 25 bp, Homo sapien
tctccagagtggactcgcatgtgtt

SEQ ID NO: 4999949 - DNA, 25 bp, Homo sapien
ctgtctccagagtggactcgcatgt

SEQ ID NO: 4999950 - DNA, 25 bp, Homo sapien
tcgcatgtgtttgtttaggctggaa

SEQ ID NO: 4999951 - DNA, 25 bp, Homo sapien
cctactgtgtgctccacactgctag

SEQ ID NO: 4999952 - DNA, 25 bp, Homo sapien
tgtgctccacactgctagaaaccag

SEQ ID NO: 4999953 - DNA, 25 bp, Homo sapien
tactgtgtgctccacactgctagaa

SEQ ID NO: 4999954 - DNA, 25 bp, Homo sapien
tgtgtgctccacactgctagaaacc

SEQ ID NO: 4999955 - DNA, 25 bp, Homo sapien
gaaatttcctatcgcccttgtccac

SEQ ID NO: 4999956 - DNA, 25 bp, Homo sapien
tgaggccggtgcttctcatgaacat

SEQ ID NO: 4999957 - DNA, 25 bp, Homo sapien
tcaaaggatcgtttgcagagagaac

SEQ ID NO: 4999958 - DNA, 25 bp, Homo sapien
aagaatgtggatccgaagccggtcc

SEQ ID NO: 4999959 - DNA, 25 bp, Homo sapien
aatatatgcccttgacactgcacag

SEQ ID NO: 4999960 - DNA, 25 bp, Homo sapien
gaaggctcacaggaatatccagaaa

SEQ ID NO: 4999961 - DNA, 25 bp, Homo sapien
ccggctctgtgacctgaaggctcac

SEQ ID NO: 4999962 - DNA, 25 bp, Homo sapien
gaagcgggcacagttgacataggac

SEQ ID NO: 4999963 - DNA, 25 bp, Homo sapien
aagtggctcaaatgaccatcttcaa

SEQ ID NO: 4999964 - DNA, 25 bp, Homo sapien
tataaagtggctcaaatgaccatct

SEQ ID NO: 4999965 - DNA, 25 bp, Homo sapien
tctataaagtggctcaaatgaccat

SEQ ID NO: 4999966 - DNA, 25 bp, Homo sapien
ccatctataaagtggctcaaatgac

SEQ ID NO: 4999967 - DNA, 25 bp, Homo sapien
gactcctttggcgataaaactactg

SEQ ID NO: 4999968 - DNA, 25 bp, Homo sapien
aaatgtgggacttcaccaaacaccg

SEQ ID NO: 4999969 - DNA, 25 bp, Homo sapien
caaacaccgtctgcatgaggcatag

SEQ ID NO: 4999970 - DNA, 25 bp, Homo sapien
gtaggtcttcacttcactggcattg

SEQ ID NO: 4999971 - DNA, 25 bp, Homo sapien
ggagtctttatccagagtttgagga

SEQ ID NO: 4999972 - DNA, 25 bp, Homo sapien
gaagggagtctttatccagagtttg

SEQ ID NO: 4999973 - DNA, 25 bp, Homo sapien
agggagtctttatccagagtttgag

SEQ ID NO: 4999974 - DNA, 25 bp, Homo sapien
tctttatccagagtttgaggaagag

SEQ ID NO: 4999975 - DNA, 25 bp, Homo sapien
gcctgcattcccgtccaattcgact

SEQ ID NO: 4999976 - DNA, 25 bp, Homo sapien
tcgactcccaaatggtgtgaactcc

SEQ ID NO: 4999977 - DNA, 25 bp, Homo sapien
ccgtccaattcgactcccaaatggt

SEQ ID NO: 4999978 - DNA, 25 bp, Homo sapien
ctggaagcgcctcttcccggacact

SEQ ID NO: 4999979 - DNA, 25 bp, Homo sapien
gagtgaccccgtacagaacgaagtg

SEQ ID NO: 4999980 - DNA, 25 bp, Homo sapien
ggaccaggaggcctgaaatcgcatg

SEQ ID NO: 4999981 - DNA, 25 bp, Homo sapien
caggaggcctgaaatcgcatggtgc

SEQ ID NO: 4999982 - DNA, 25 bp, Homo sapien
ggcctgaaatcgcatggtgcaggct

SEQ ID NO: 4999983 - DNA, 25 bp, Homo sapien
ctggaaccgagcaggggacttccct

SEQ ID NO: 4999984 - DNA, 25 bp, Homo sapien
gaactggaaccgagcaggggacttc

SEQ ID NO: 4999985 - DNA, 25 bp, Homo sapien
cgtgaactggaaccgagcaggggac

SEQ ID NO: 4999986 - DNA, 25 bp, Homo sapien
ctccgtgaactggaaccgagcaggg

SEQ ID NO: 4999987 - DNA, 25 bp, Homo sapien
gcggtggaattaaagtgtcaggtcc

SEQ ID NO: 4999988 - DNA, 25 bp, Homo sapien
caaggtaataactgggaggtcctca

SEQ ID NO: 4999989 - DNA, 25 bp, Homo sapien
tcgttgtcgccaccaatgatttggt

SEQ ID NO: 4999990 - DNA, 25 bp, Homo sapien
acaacacgggccactctcgttgtcg

SEQ ID NO: 4999991 - DNA, 25 bp, Homo sapien
tagagaggctccctctgtaggccca

SEQ ID NO: 4999992 - DNA, 25 bp, Homo sapien
taccagggcagatcgtagagaggct

SEQ ID NO: 4999993 - DNA, 25 bp, Homo sapien
gctgtttctgtagtgtccataggac

SEQ ID NO: 4999994 - DNA, 25 bp, Homo sapien
gtagcacaccttgtcctgaggcacg

SEQ ID NO: 4999995 - DNA, 25 bp, Homo sapien
aacgaactgcgccagcgagtgctgc

SEQ ID NO: 4999996 - DNA, 25 bp, Homo sapien
ccgagagggcagaacgaccatccaa

SEQ ID NO: 4999997 - DNA, 25 bp, Homo sapien
gaacgaccatccaaaacgaactgcg

SEQ ID NO: 4999998 - DNA, 25 bp, Homo sapien
cttgggattcaaagcccccgagagg

SEQ ID NO: 4999999 - DNA, 25 bp, Homo sapien
accacctccaagagcgccaccgcgg

SEQ ID NO: 5000000 - DNA, 25 bp, Homo sapien
gccactcgggctcggtagacttcgg

SEQ ID NO: 5000001 - DNA, 25 bp, Homo sapien
ggccactcgggctcggtaggccact

SEQ ID NO: 5000002 - DNA, 25 bp, Homo sapien
cgccaccgcggagcgggcgcctcct

SEQ ID NO: 5000003 - DNA, 25 bp, Homo sapien
gccgcggggcatcgacaggtcgagg

SEQ ID NO: 5000004 - DNA, 25 bp, Homo sapien
gggccgcggggcatcgacaggtcga

SEQ ID NO: 5000005 - DNA, 25 bp, Homo sapien
gggcatcgacaggtcgagggtaggg

SEQ ID NO: 5000006 - DNA, 25 bp, Homo sapien
catcgacaggtcgagggtagggaat

SEQ ID NO: 5000007 - DNA, 25 bp, Homo sapien
tgaaccggagtccagaaggccggac

SEQ ID NO: 5000008 - DNA, 25 bp, Homo sapien
ccggagtccagaaggccggactcgc

SEQ ID NO: 5000009 - DNA, 25 bp, Homo sapien
agtccagaaggccggactcgcgtcc

SEQ ID NO: 5000010 - DNA, 25 bp, Homo sapien
cctgaaccggagtccagaaggccgg

SEQ ID NO: 5000011 - DNA, 25 bp, Homo sapien
ctcccagttcggaagatcccagcct

SEQ ID NO: 5000012 - DNA, 25 bp, Homo sapien
cccgaaggcggcgtctgacccgctg

SEQ ID NO: 5000013 - DNA, 25 bp, Homo sapien
cgtctgacccgctggtggacctggt

SEQ ID NO: 5000014 - DNA, 25 bp, Homo sapien
tctccgctcccagttcggaagatcc

SEQ ID NO: 5000015 - DNA, 25 bp, Homo sapien
gagtccccggcagtgacacgtggga

SEQ ID NO: 5000016 - DNA, 25 bp, Homo sapien
gcgggagcgccttgagcgctgggaa

SEQ ID NO: 5000017 - DNA, 25 bp, Homo sapien
tgacacgtgggagcgttgggcccgg

SEQ ID NO: 5000018 - DNA, 25 bp, Homo sapien
gaagcttcgcctcgcgagtccccgg

SEQ ID NO: 5000019 - DNA, 25 bp, Homo sapien
gaaaggaggaacatctacccggcta

SEQ ID NO: 5000020 - DNA, 25 bp, Homo sapien
gggtcccggatcttcagagcgcccg

SEQ ID NO: 5000021 - DNA, 25 bp, Homo sapien
aagagacgccgccagagtccctaaa

SEQ ID NO: 5000022 - DNA, 25 bp, Homo sapien
gcctggcagcggcttggaagagaga

SEQ ID NO: 5000023 - DNA, 25 bp, Homo sapien
ggaatcttcctggtcaggtaagtat

SEQ ID NO: 5000024 - DNA, 25 bp, Homo sapien
tggaatcttcctggtcaggtaagta

SEQ ID NO: 5000025 - DNA, 25 bp, Homo sapien
atggaatcttcctggtcaggtaagt

SEQ ID NO: 5000026 - DNA, 25 bp, Homo sapien
gttcccaggagaggcaagtctgtca

SEQ ID NO: 5000027 - DNA, 25 bp, Homo sapien
gttgaagagctagctctagcgtgta

SEQ ID NO: 5000028 - DNA, 25 bp, Homo sapien
tttatggtaagttagagcagtcaag

SEQ ID NO: 5000029 - DNA, 25 bp, Homo sapien
gctctagcgtgtaaaatgtctgttc

SEQ ID NO: 5000030 - DNA, 25 bp, Homo sapien
ctgagtgtggcccagaagagttaat

SEQ ID NO: 5000031 - DNA, 25 bp, Homo sapien
tcctttttgcccaaagtgagacaat

SEQ ID NO: 5000032 - DNA, 25 bp, Homo sapien
cagcaagtattcttatcactgggca

SEQ ID NO: 5000033 - DNA, 25 bp, Homo sapien
aagggaagactcagaagtggatgcc

SEQ ID NO: 5000034 - DNA, 25 bp, Homo sapien
ttgaagggtaggggccttgatacat

SEQ ID NO: 5000035 - DNA, 25 bp, Homo sapien
gccttgatacatggtgatggtccca

SEQ ID NO: 5000036 - DNA, 25 bp, Homo sapien
taggggccttgatacatggtgatgg

SEQ ID NO: 5000037 - DNA, 25 bp, Homo sapien
gggtaggggccttgatacatggtga

SEQ ID NO: 5000038 - DNA, 25 bp, Homo sapien
cagtgaaggagtgaattacattggc

SEQ ID NO: 5000039 - DNA, 25 bp, Homo sapien
aatatttgtttggtcagtgaaggag

SEQ ID NO: 5000040 - DNA, 25 bp, Homo sapien
ctcctgcgcatcttcctttccacct

SEQ ID NO: 5000041 - DNA, 25 bp, Homo sapien
tcagaaatgccactttcactatcat

SEQ ID NO: 5000042 - DNA, 25 bp, Homo sapien
cttccagattgctcacatagaattt

SEQ ID NO: 5000043 - DNA, 25 bp, Homo sapien
gattgctcacatagaatttcaaaaa

SEQ ID NO: 5000044 - DNA, 25 bp, Homo sapien
tccagattgctcacatagaatttca

SEQ ID NO: 5000045 - DNA, 25 bp, Homo sapien
ttaaacttccagattgctcacatag

SEQ ID NO: 5000046 - DNA, 25 bp, Homo sapien
atttcaggtgtagatgaatacgccc

SEQ ID NO: 5000047 - DNA, 25 bp, Homo sapien
tgaccagtggtactacgctttacct

SEQ ID NO: 5000048 - DNA, 25 bp, Homo sapien
aatacgcccaactgggaactgcaag

SEQ ID NO: 5000049 - DNA, 25 bp, Homo sapien
caagttgcaagtgaccagtggtact

SEQ ID NO: 5000050 - DNA, 25 bp, Homo sapien
ccttcccagccttaccgccagtcat

SEQ ID NO: 5000051 - DNA, 25 bp, Homo sapien
gtccttcccagccttaccgccagtc

SEQ ID NO: 5000052 - DNA, 25 bp, Homo sapien
ggagtccttcccagccttaccgcca

SEQ ID NO: 5000053 - DNA, 25 bp, Homo sapien
gagtccttcccagccttaccgccag

SEQ ID NO: 5000054 - DNA, 25 bp, Homo sapien
tgtcaacagtgtcaactaccatata

SEQ ID NO: 5000055 - DNA, 25 bp, Homo sapien
tgcaattatgaaagaagatacaata

SEQ ID NO: 5000056 - DNA, 25 bp, Homo sapien
aaatgcaattatgaaagaagataca

SEQ ID NO: 5000057 - DNA, 25 bp, Homo sapien
cagtgtcaactaccatataaatata

SEQ ID NO: 5000058 - DNA, 25 bp, Homo sapien
tgcataaactgctcacactagaaat

SEQ ID NO: 5000059 - DNA, 25 bp, Homo sapien
gcatcagcaaagcaatattaacttg

SEQ ID NO: 5000060 - DNA, 25 bp, Homo sapien
aacactgtaagctttctcctgaaga

SEQ ID NO: 5000061 - DNA, 25 bp, Homo sapien
tcaatgcaggtgaacaaagtgatgt

SEQ ID NO: 5000062 - DNA, 25 bp, Homo sapien
tcaagaattggttcctacagcggct

SEQ ID NO: 5000063 - DNA, 25 bp, Homo sapien
gaattgtatgccacatgagcctcag

SEQ ID NO: 5000064 - DNA, 25 bp, Homo sapien
cattaaaatacagcgggcagatgga

SEQ ID NO: 5000065 - DNA, 25 bp, Homo sapien
gatatatgaactggtggccactgag

SEQ ID NO: 5000066 - DNA, 25 bp, Homo sapien
actttgttggtcttcacgcactggg

SEQ ID NO: 5000067 - DNA, 25 bp, Homo sapien
tgagcccggtcagctgaagaagcaa

SEQ ID NO: 5000068 - DNA, 25 bp, Homo sapien
taaatacagcgctgtccacggtgtc

SEQ ID NO: 5000069 - DNA, 25 bp, Homo sapien
tctgctctagcagaaccggctggca

SEQ ID NO: 5000070 - DNA, 25 bp, Homo sapien
gctatttctcgcaggccatcgtctg

SEQ ID NO: 5000071 - DNA, 25 bp, Homo sapien
taaagcaaatcacagaggccgcatc

SEQ ID NO: 5000072 - DNA, 25 bp, Homo sapien
ggagcccagcgaatcctacatgcta

SEQ ID NO: 5000073 - DNA, 25 bp, Homo sapien
tacattcgatgtggaggtgaacagg

SEQ ID NO: 5000074 - DNA, 25 bp, Homo sapien
ggtgcacaattctcctaagcttaaa

SEQ ID NO: 5000075 - DNA, 25 bp, Homo sapien
ggaattacattagcccctgatcagg

SEQ ID NO: 5000076 - DNA, 25 bp, Homo sapien
gatcatgagttctagtggccaaagg

SEQ ID NO: 5000077 - DNA, 25 bp, Homo sapien
cagcctcccggagaagtatttatac

SEQ ID NO: 5000078 - DNA, 25 bp, Homo sapien
cagactagctggtagccctgcataa

SEQ ID NO: 5000079 - DNA, 25 bp, Homo sapien
ttaaatacctacgaagggcctggca

SEQ ID NO: 5000080 - DNA, 25 bp, Homo sapien
cagtagctctaccagacagttgtgg

SEQ ID NO: 5000081 - DNA, 25 bp, Homo sapien
gatgaagaatcccaatgcctgaggc

SEQ ID NO: 5000082 - DNA, 25 bp, Homo sapien
aacttctgcacataagccacgactg

SEQ ID NO: 5000083 - DNA, 25 bp, Homo sapien
catttcctgtactcagtggaggaga

SEQ ID NO: 5000084 - DNA, 25 bp, Homo sapien
ccagcccctctaggtatatacagac

SEQ ID NO: 5000085 - DNA, 25 bp, Homo sapien
cacgactgagttgtgtggccactca

SEQ ID NO: 5000086 - DNA, 25 bp, Homo sapien
gctctcatatgtaagaacatgcaat

SEQ ID NO: 5000087 - DNA, 25 bp, Homo sapien
tgtgcctgccttatctcagttaaga

SEQ ID NO: 5000088 - DNA, 25 bp, Homo sapien
catagtgagggatcaagacagggtt

SEQ ID NO: 5000089 - DNA, 25 bp, Homo sapien
caactgtatgtctgtaacctctcac

SEQ ID NO: 5000090 - DNA, 25 bp, Homo sapien
ccacttaacaggttgtatgggatag

SEQ ID NO: 5000091 - DNA, 25 bp, Homo sapien
ctcttaccttaaagggccacatagg

SEQ ID NO: 5000092 - DNA, 25 bp, Homo sapien
aaaaagagctacctactgtgaaggg

SEQ ID NO: 5000093 - DNA, 25 bp, Homo sapien
tatctatgtgccaaactgctcagac

SEQ ID NO: 5000094 - DNA, 25 bp, Homo sapien
tccatattcatatatttcactgttc

SEQ ID NO: 5000095 - DNA, 25 bp, Homo sapien
catatatttcactgttctttcttac

SEQ ID NO: 5000096 - DNA, 25 bp, Homo sapien
tattcatatatttcactgttctttc

SEQ ID NO: 5000097 - DNA, 25 bp, Homo sapien
catattcatatatttcactgttctt

SEQ ID NO: 5000098 - DNA, 25 bp, Homo sapien
gtctccctcctgcttaatcatatcc

SEQ ID NO: 5000099 - DNA, 25 bp, Homo sapien
gcttaatcatatccattccaggcag

SEQ ID NO: 5000100 - DNA, 25 bp, Homo sapien
ctcccctcagagcaggatcattaac

SEQ ID NO: 5000101 - DNA, 25 bp, Homo sapien
tcctgcttaatcatatccattccag

SEQ ID NO: 5000102 - DNA, 25 bp, Homo sapien
acttgtgtgaactactgaggatcag

SEQ ID NO: 5000103 - DNA, 25 bp, Homo sapien
gtagagtggtcagcattttgggcct

SEQ ID NO: 5000104 - DNA, 25 bp, Homo sapien
gccatcaattcaacaacagaagtgt

SEQ ID NO: 5000105 - DNA, 25 bp, Homo sapien
cacggaagctctgtaatagttctta

SEQ ID NO: 5000106 - DNA, 25 bp, Homo sapien
attccaggctggctactgctatctc

SEQ ID NO: 5000107 - DNA, 25 bp, Homo sapien
atctcaaatgctttgagtctctctg

SEQ ID NO: 5000108 - DNA, 25 bp, Homo sapien
gccacagatttttggattccaggct

SEQ ID NO: 5000109 - DNA, 25 bp, Homo sapien
tcagccacagatttttggattccag

SEQ ID NO: 5000110 - DNA, 25 bp, Homo sapien
agccgggcacggtagtatgtgccta

SEQ ID NO: 5000111 - DNA, 25 bp, Homo sapien
cattgccttcacgttccaaagtaaa

SEQ ID NO: 5000112 - DNA, 25 bp, Homo sapien
tgtgtcggtctctttgcataaatga

SEQ ID NO: 5000113 - DNA, 25 bp, Homo sapien
taaactataatcctctagccgggca

SEQ ID NO: 5000114 - DNA, 25 bp, Homo sapien
tggtcgccatggacacattgatgtt

SEQ ID NO: 5000115 - DNA, 25 bp, Homo sapien
ggaggtcactgaggtcatgctgatc

SEQ ID NO: 5000116 - DNA, 25 bp, Homo sapien
ccctgacgtaggcacggaggtcact

SEQ ID NO: 5000117 - DNA, 25 bp, Homo sapien
catgttgttactgtacatgctggtg

SEQ ID NO: 5000118 - DNA, 25 bp, Homo sapien
gactgttgcatcatgggactctgtg

SEQ ID NO: 5000119 - DNA, 25 bp, Homo sapien
agtcgtagccccagtaaagcctgga

SEQ ID NO: 5000120 - DNA, 25 bp, Homo sapien
cattcggggtgacataagtgggctc

SEQ ID NO: 5000121 - DNA, 25 bp, Homo sapien
cctgcgcccatccatttatgtcgga

SEQ ID NO: 5000122 - DNA, 25 bp, Homo sapien
ggattaaagttcagctatatatcaa

SEQ ID NO: 5000123 - DNA, 25 bp, Homo sapien
aaagttcagctatatatcaaaagtc

SEQ ID NO: 5000124 - DNA, 25 bp, Homo sapien
ttaaagttcagctatatatcaaaag

SEQ ID NO: 5000125 - DNA, 25 bp, Homo sapien
gattaaagttcagctatatatcaaa

SEQ ID NO: 5000126 - DNA, 25 bp, Homo sapien
ttaaagtaagacctgcactcagaga

SEQ ID NO: 5000127 - DNA, 25 bp, Homo sapien
taaagtaagacctgcactcagagaa

SEQ ID NO: 5000128 - DNA, 25 bp, Homo sapien
ctggaaggtactgtgctggacttgg

SEQ ID NO: 5000129 - DNA, 25 bp, Homo sapien
tggaaggtactgtgctggacttggg

SEQ ID NO: 5000130 - DNA, 25 bp, Homo sapien
ggtggtggggatctaagtccagtac

SEQ ID NO: 5000131 - DNA, 25 bp, Homo sapien
tggttagccagattcatctgggagc

SEQ ID NO: 5000132 - DNA, 25 bp, Homo sapien
gagaaaggactggtgaaaggtggtg

SEQ ID NO: 5000133 - DNA, 25 bp, Homo sapien
tgagagaggagctgtgacccaacac

SEQ ID NO: 5000134 - DNA, 25 bp, Homo sapien
ggaaactgctgtgcatttgcctggg

SEQ ID NO: 5000135 - DNA, 25 bp, Homo sapien
gaatccgagggttgctcatagttgc

SEQ ID NO: 5000136 - DNA, 25 bp, Homo sapien
cgaagatgctggttcaggatttccc

SEQ ID NO: 5000137 - DNA, 25 bp, Homo sapien
tggcataccactaggagccaccatg

SEQ ID NO: 5000138 - DNA, 25 bp, Homo sapien
tgtgctagataagcgccattcaggc

SEQ ID NO: 5000139 - DNA, 25 bp, Homo sapien
caggcctgagttacagtgagttctt

SEQ ID NO: 5000140 - DNA, 25 bp, Homo sapien
agaggtctgcaggaacccaaccctg

SEQ ID NO: 5000141 - DNA, 25 bp, Homo sapien
gactggatgatgacaatgttgtgac

SEQ ID NO: 5000142 - DNA, 25 bp, Homo sapien
tcaagttcacattggaaacattgct

SEQ ID NO: 5000143 - DNA, 25 bp, Homo sapien
tggaaacattgctgatttgattcat

SEQ ID NO: 5000144 - DNA, 25 bp, Homo sapien
ttggaaacattgctgatttgattca

SEQ ID NO: 5000145 - DNA, 25 bp, Homo sapien
agagtcaagttcacattggaaacat

SEQ ID NO: 5000146 - DNA, 25 bp, Homo sapien
tcccaggtgccatcgaagaacagac

SEQ ID NO: 5000147 - DNA, 25 bp, Homo sapien
cttcccaggtgccatcgaagaacag

SEQ ID NO: 5000148 - DNA, 25 bp, Homo sapien
acttcccaggtgccatcgaagaaca

SEQ ID NO: 5000149 - DNA, 25 bp, Homo sapien
ttcccaggtgccatcgaagaacaga

SEQ ID NO: 5000150 - DNA, 25 bp, Homo sapien
cctgagatgcatactgctgtgggaa

SEQ ID NO: 5000151 - DNA, 25 bp, Homo sapien
actaggccgctgtcccatggtgtga

SEQ ID NO: 5000152 - DNA, 25 bp, Homo sapien
ccagcatgatgttggaatcctgact

SEQ ID NO: 5000153 - DNA, 25 bp, Homo sapien
catacggagtgtggcataactaggc

SEQ ID NO: 5000154 - DNA, 25 bp, Homo sapien
tcatcactcggagactcagctgcag

SEQ ID NO: 5000155 - DNA, 25 bp, Homo sapien
tccaggccatcaaaattccgcaagg

SEQ ID NO: 5000156 - DNA, 25 bp, Homo sapien
ttccgcaaggccagatacagctggt

SEQ ID NO: 5000157 - DNA, 25 bp, Homo sapien
ggctgaccagttcgggtattcctaa

SEQ ID NO: 5000158 - DNA, 25 bp, Homo sapien
ccaccacatctagcctagaggaggc

SEQ ID NO: 5000159 - DNA, 25 bp, Homo sapien
tctagcctagaggaggcttttaaaa

SEQ ID NO: 5000160 - DNA, 25 bp, Homo sapien
gagcttctgagttgcctgaatacta

SEQ ID NO: 5000161 - DNA, 25 bp, Homo sapien
tgagttgcctgaatactaaaaggga

SEQ ID NO: 5000162 - DNA, 25 bp, Homo sapien
caaacaggccctactcagaattctt

SEQ ID NO: 5000163 - DNA, 25 bp, Homo sapien
aacacaagttgggactctcgggaca

SEQ ID NO: 5000164 - DNA, 25 bp, Homo sapien
gatgctacacataccaccagaaaac

SEQ ID NO: 5000165 - DNA, 25 bp, Homo sapien
gcacactttacagagcaaacaggcc

SEQ ID NO: 5000166 - DNA, 25 bp, Homo sapien
tgatttctggattcacccctcctct

SEQ ID NO: 5000167 - DNA, 25 bp, Homo sapien
taaaataactggctaccctaggtgc

SEQ ID NO: 5000168 - DNA, 25 bp, Homo sapien
gcaccgactactccaaaggaaaaga

SEQ ID NO: 5000169 - DNA, 25 bp, Homo sapien
tgtcctaggtcatactgatttctgg

SEQ ID NO: 5000170 - DNA, 25 bp, Homo sapien
taggcaggatgctttcaggccatgg

SEQ ID NO: 5000171 - DNA, 25 bp, Homo sapien
tgttgttggctatactgaggtcccc

SEQ ID NO: 5000172 - DNA, 25 bp, Homo sapien
catgttcatctctaattcagatggc

SEQ ID NO: 5000173 - DNA, 25 bp, Homo sapien
tgttttggctggcaaaagacgcctg

SEQ ID NO: 5000174 - DNA, 25 bp, Homo sapien
gagatgttctgtaagaccttgcaac

SEQ ID NO: 5000175 - DNA, 25 bp, Homo sapien
tcacaccacaatcgacttcagaacg

SEQ ID NO: 5000176 - DNA, 25 bp, Homo sapien
cattactcattaggagtcactccct

SEQ ID NO: 5000177 - DNA, 25 bp, Homo sapien
tctcaagtatgagttgtacagacca

SEQ ID NO: 5000178 - DNA, 25 bp, Homo sapien
gaagcgtctgtctttggccaggctg

SEQ ID NO: 5000179 - DNA, 25 bp, Homo sapien
ttggactggccggttcatggcactg

SEQ ID NO: 5000180 - DNA, 25 bp, Homo sapien
gccgagaagcactgttaccaatcat

SEQ ID NO: 5000181 - DNA, 25 bp, Homo sapien
gggttccgaatcatacctccttgga

SEQ ID NO: 5000182 - DNA, 25 bp, Homo sapien
gcctagaacagtaactgggatagaa

SEQ ID NO: 5000183 - DNA, 25 bp, Homo sapien
taaatggttagctcacccaaaggct

SEQ ID NO: 5000184 - DNA, 25 bp, Homo sapien
gctataggattaatggttggaaacc

SEQ ID NO: 5000185 - DNA, 25 bp, Homo sapien
tccataagtttttgaggtatcagta

SEQ ID NO: 5000186 - DNA, 25 bp, Homo sapien
gaaaaattctactagtttgatgtgg

SEQ ID NO: 5000187 - DNA, 25 bp, Homo sapien
agtaacagtgcatttgaccccttac

SEQ ID NO: 5000188 - DNA, 25 bp, Homo sapien
aacccaccaataaagtaacagtgca

SEQ ID NO: 5000189 - DNA, 25 bp, Homo sapien
ctagtttgatgtggataaatatacc

SEQ ID NO: 5000190 - DNA, 25 bp, Homo sapien
tgtgatgtcaagtggtaaattctgg

SEQ ID NO: 5000191 - DNA, 25 bp, Homo sapien
tcctggctgaggtatcactgagtag

SEQ ID NO: 5000192 - DNA, 25 bp, Homo sapien
ggaaaggtccagcaccagttgggct

SEQ ID NO: 5000193 - DNA, 25 bp, Homo sapien
ccagttgccctggtcgtgggttatt

SEQ ID NO: 5000194 - DNA, 25 bp, Homo sapien
tgtactaagcactagaccagcatca

SEQ ID NO: 5000195 - DNA, 25 bp, Homo sapien
taatattcagacttaggagtactgc

SEQ ID NO: 5000196 - DNA, 25 bp, Homo sapien
agtgtgaactctgttgcctaaagca

SEQ ID NO: 5000197 - DNA, 25 bp, Homo sapien
tacaggtaagtaccaccaggtctgg

SEQ ID NO: 5000198 - DNA, 25 bp, Homo sapien
gtgtgtttcttacccaattctcaac

SEQ ID NO: 5000199 - DNA, 25 bp, Homo sapien
gtgtttcttacccaattctcaactc

SEQ ID NO: 5000200 - DNA, 25 bp, Homo sapien
tctagtgtgtttcttacccaattct

SEQ ID NO: 5000201 - DNA, 25 bp, Homo sapien
tagtgtgtttcttacccaattctca

SEQ ID NO: 5000202 - DNA, 25 bp, Homo sapien
catgaggtcattgatgatggcttgc

SEQ ID NO: 5000203 - DNA, 25 bp, Homo sapien
aagctgtggtaattgactattctgc

SEQ ID NO: 5000204 - DNA, 25 bp, Homo sapien
gatggcttgcttgtcaactgatcca

SEQ ID NO: 5000205 - DNA, 25 bp, Homo sapien
tgttttctgggctccaacaggtgtg

SEQ ID NO: 5000206 - DNA, 25 bp, Homo sapien
tggtccaggtctaggttttatcatc

SEQ ID NO: 5000207 - DNA, 25 bp, Homo sapien
gtccaggtctaggttttatcatcaa

SEQ ID NO: 5000208 - DNA, 25 bp, Homo sapien
ccaggtctaggttttatcatcaaaa

SEQ ID NO: 5000209 - DNA, 25 bp, Homo sapien
tttggtccaggtctaggttttatca

SEQ ID NO: 5000210 - DNA, 25 bp, Homo sapien
acccagactggcgagcagtagcgca

SEQ ID NO: 5000211 - DNA, 25 bp, Homo sapien
caccgtgcctgtctacagaagccat

SEQ ID NO: 5000212 - DNA, 25 bp, Homo sapien
gtagcgcaaacactcatccctgtag

SEQ ID NO: 5000213 - DNA, 25 bp, Homo sapien
cttttctgctaggaagctaaactgg

SEQ ID NO: 5000214 - DNA, 25 bp, Homo sapien
cactctgctcggtaaaaaatgctat

SEQ ID NO: 5000215 - DNA, 25 bp, Homo sapien
taagtatcaaccatgttccactgtg

SEQ ID NO: 5000216 - DNA, 25 bp, Homo sapien
ccttatcatacgtgtctcagcagca

SEQ ID NO: 5000217 - DNA, 25 bp, Homo sapien
agaaaggacccagtagtatcgtttg

SEQ ID NO: 5000218 - DNA, 25 bp, Homo sapien
ggaacagctgctaatagaaccttgc

SEQ ID NO: 5000219 - DNA, 25 bp, Homo sapien
cagaaataccaaagagtggcccctt

SEQ ID NO: 5000220 - DNA, 25 bp, Homo sapien
aggcctggccacgttagacactaag

SEQ ID NO: 5000221 - DNA, 25 bp, Homo sapien
tgaaactgcaagtgactcaaggagt

SEQ ID NO: 5000222 - DNA, 25 bp, Homo sapien
agagggctccccatatagtccaaaa

SEQ ID NO: 5000223 - DNA, 25 bp, Homo sapien
ttccatgtgtagacccagaaccagg

SEQ ID NO: 5000224 - DNA, 25 bp, Homo sapien
taatagtcacttctgatccaggagc

SEQ ID NO: 5000225 - DNA, 25 bp, Homo sapien
tggtcaccaggctcaaagctcatct

SEQ ID NO: 5000226 - DNA, 25 bp, Homo sapien
acgatgaccctaatgagaccccgtg

SEQ ID NO: 5000227 - DNA, 25 bp, Homo sapien
taccctgaggagtggttgcttgcat

SEQ ID NO: 5000228 - DNA, 25 bp, Homo sapien
ctcatgcgatgccttggtgaaagca

SEQ ID NO: 5000229 - DNA, 25 bp, Homo sapien
cccatttttaggtctggtgaagcca

SEQ ID NO: 5000230 - DNA, 25 bp, Homo sapien
cagtcagatccggattcatcacaca

SEQ ID NO: 5000231 - DNA, 25 bp, Homo sapien
catcgtttgtccagtcagatccgga

SEQ ID NO: 5000232 - DNA, 25 bp, Homo sapien
cagtggcttccccatcgtttgtcca

SEQ ID NO: 5000233 - DNA, 25 bp, Homo sapien
gttagagctaattggattcagtggc

SEQ ID NO: 5000234 - DNA, 25 bp, Homo sapien
gactgaatgccaatccttgtctcag

SEQ ID NO: 5000235 - DNA, 25 bp, Homo sapien
tgagtttgctcttcgtttgtgcagc

SEQ ID NO: 5000236 - DNA, 25 bp, Homo sapien
aaaacgatagatttgactgaatgcc

SEQ ID NO: 5000237 - DNA, 25 bp, Homo sapien
cattagtagtctgagaacggatgag

SEQ ID NO: 5000238 - DNA, 25 bp, Homo sapien
cccttgtccagagtgagagacgtga

SEQ ID NO: 5000239 - DNA, 25 bp, Homo sapien
gatgttcacatcacaggcttgctgt

SEQ ID NO: 5000240 - DNA, 25 bp, Homo sapien
tctgtgagctgagacaagtcgtgtc

SEQ ID NO: 5000241 - DNA, 25 bp, Homo sapien
gaagtcttgggctcagttccagctg

SEQ ID NO: 5000242 - DNA, 25 bp, Homo sapien
tcctttagatggcaacactggggcc

SEQ ID NO: 5000243 - DNA, 25 bp, Homo sapien
gagacagctcacgagaacagtcacc

SEQ ID NO: 5000244 - DNA, 25 bp, Homo sapien
tgttcccaaggtgaactccaggaat

SEQ ID NO: 5000245 - DNA, 25 bp, Homo sapien
tcttctgtcctacaggttctcctgt

SEQ ID NO: 5000246 - DNA, 25 bp, Homo sapien
ctggtatccagagacgtgatcttgc

SEQ ID NO: 5000247 - DNA, 25 bp, Homo sapien
tgatgatgcctcttagcataggaca

SEQ ID NO: 5000248 - DNA, 25 bp, Homo sapien
tggaacttctgaatacaccttctta

SEQ ID NO: 5000249 - DNA, 25 bp, Homo sapien
tggtgctggtatccagagacgtgat

SEQ ID NO: 5000250 - DNA, 25 bp, Homo sapien
taacagcaggcattatacctacatg

SEQ ID NO: 5000251 - DNA, 25 bp, Homo sapien
cataagtacatggaacaaaagggta

SEQ ID NO: 5000252 - DNA, 25 bp, Homo sapien
cttgtgaatcagatgcccaagtagc

SEQ ID NO: 5000253 - DNA, 25 bp, Homo sapien
tagagtccttgcattcccaaatatg

SEQ ID NO: 5000254 - DNA, 25 bp, Homo sapien
gatcctggcgagtagtaaaactttc

SEQ ID NO: 5000255 - DNA, 25 bp, Homo sapien
ttcatgggaactcttcttgccacgc

SEQ ID NO: 5000256 - DNA, 25 bp, Homo sapien
cttcttgccacgcaaatcaagcagg

SEQ ID NO: 5000257 - DNA, 25 bp, Homo sapien
ttggagatcctggcgagtagtaaaa

SEQ ID NO: 5000258 - DNA, 25 bp, Homo sapien
tatgtacctgagcttcctactggtt

SEQ ID NO: 5000259 - DNA, 25 bp, Homo sapien
ccaagtgtatttatgacagcacagc

SEQ ID NO: 5000260 - DNA, 25 bp, Homo sapien
tgggcttttctagtgattcaaacaa

SEQ ID NO: 5000261 - DNA, 25 bp, Homo sapien
aaagcagtaagggagacagtgatga

SEQ ID NO: 5000262 - DNA, 25 bp, Homo sapien
ggttttaccagcatccgacaattga

SEQ ID NO: 5000263 - DNA, 25 bp, Homo sapien
gacaattgaaggtatggctgttccg

SEQ ID NO: 5000264 - DNA, 25 bp, Homo sapien
ctttggttgagagacagcgaagcac

SEQ ID NO: 5000265 - DNA, 25 bp, Homo sapien
tgttccgcctcggaggttcgccaga

SEQ ID NO: 5000266 - DNA, 25 bp, Homo sapien
acaaacatcagattcattgcctctg

SEQ ID NO: 5000267 - DNA, 25 bp, Homo sapien
ttgtctaaatactttcataatctag

SEQ ID NO: 5000268 - DNA, 25 bp, Homo sapien
tgagcaaggcaaaagtaatccagtt

SEQ ID NO: 5000269 - DNA, 25 bp, Homo sapien
tgtactacttttatacttgtctaaa

SEQ ID NO: 5000270 - DNA, 25 bp, Homo sapien
ataccgggcccgcatggatgtcctt

SEQ ID NO: 5000271 - DNA, 25 bp, Homo sapien
taagtcagccctgctcaaaattctg

SEQ ID NO: 5000272 - DNA, 25 bp, Homo sapien
gctccattgcatccatctaacggga

SEQ ID NO: 5000273 - DNA, 25 bp, Homo sapien
tgagtggcaccaaatgtagtgcacg

SEQ ID NO: 5000274 - DNA, 25 bp, Homo sapien
caataagactgaaaaatccttgaaa

SEQ ID NO: 5000275 - DNA, 25 bp, Homo sapien
caatcaatactttactaactactcc

SEQ ID NO: 5000276 - DNA, 25 bp, Homo sapien
tctctctccataggtactcatgctc

SEQ ID NO: 5000277 - DNA, 25 bp, Homo sapien
catgctctaaggctgaggtcctcta

SEQ ID NO: 5000278 - DNA, 25 bp, Homo sapien
gtgttacagcgaatccaatggccca

SEQ ID NO: 5000279 - DNA, 25 bp, Homo sapien
tggcccatgaatggcccagtgaacc

SEQ ID NO: 5000280 - DNA, 25 bp, Homo sapien
tccagtcatcagctaaagaaaatgg

SEQ ID NO: 5000281 - DNA, 25 bp, Homo sapien
agtgaacccaaagagcccatggcca

SEQ ID NO: 5000282 - DNA, 25 bp, Homo sapien
ctacaaagaagaacccatcaagggc

SEQ ID NO: 5000283 - DNA, 25 bp, Homo sapien
ggttataccttagatactgtgtcac

SEQ ID NO: 5000284 - DNA, 25 bp, Homo sapien
gacaaattccgtgtggtccccaaca

SEQ ID NO: 5000285 - DNA, 25 bp, Homo sapien
caaacacaacgttgccttccaggtt

SEQ ID NO: 5000286 - DNA, 25 bp, Homo sapien
ccaacactgggacatttaaagcctt

SEQ ID NO: 5000287 - DNA, 25 bp, Homo sapien
ggagataagcaagggccaacactgg

SEQ ID NO: 5000288 - DNA, 25 bp, Homo sapien
tcaagccagtgattctagaggagat

SEQ ID NO: 5000289 - DNA, 25 bp, Homo sapien
actgggtcagatgctcttggagtct

SEQ ID NO: 5000290 - DNA, 25 bp, Homo sapien
ttgtcgatgacaccctgccctgtag

SEQ ID NO: 5000291 - DNA, 25 bp, Homo sapien
gacaccctgccctgtagaggataca

SEQ ID NO: 5000292 - DNA, 25 bp, Homo sapien
gtagaggatacatctgacttctgca

SEQ ID NO: 5000293 - DNA, 25 bp, Homo sapien
gcgcatccttgtcgatgacaccctg

SEQ ID NO: 5000294 - DNA, 25 bp, Homo sapien
aatggctgccctctgatctagcaga

SEQ ID NO: 5000295 - DNA, 25 bp, Homo sapien
tcctggatggaaacgtgcaaggcaa

SEQ ID NO: 5000296 - DNA, 25 bp, Homo sapien
agaaaggcgcgtagcgtgcgctcct

SEQ ID NO: 5000297 - DNA, 25 bp, Homo sapien
cacttggggaatttcaatggctgcc

SEQ ID NO: 5000298 - DNA, 25 bp, Homo sapien
aagagtaggctacccgacttgaagg

SEQ ID NO: 5000299 - DNA, 25 bp, Homo sapien
gacacacagtccacaaaagagtagg

SEQ ID NO: 5000300 - DNA, 25 bp, Homo sapien
tacatcttcctaggaggatatcccc

SEQ ID NO: 5000301 - DNA, 25 bp, Homo sapien
aaacatgagaagacaacctccctgg

SEQ ID NO: 5000302 - DNA, 25 bp, Homo sapien
agaaagcaacatatttggcttcatt

SEQ ID NO: 5000303 - DNA, 25 bp, Homo sapien
ggacaaagctgttatgaagtattca

SEQ ID NO: 5000304 - DNA, 25 bp, Homo sapien
gcaaggtgctgcgagggacaaagct

SEQ ID NO: 5000305 - DNA, 25 bp, Homo sapien
gctgactgcagagggcaaggtgctg

SEQ ID NO: 5000306 - DNA, 25 bp, Homo sapien
atcttctgcactaagatcatcaggg

SEQ ID NO: 5000307 - DNA, 25 bp, Homo sapien
gcacatgggacgaggaattttactc

SEQ ID NO: 5000308 - DNA, 25 bp, Homo sapien
ggtgcactgccacggttaagccaag

SEQ ID NO: 5000309 - DNA, 25 bp, Homo sapien
cactgtttccctcaagtgggctgaa

SEQ ID NO: 5000310 - DNA, 25 bp, Homo sapien
tgaatttactggatagtgacgggcc

SEQ ID NO: 5000311 - DNA, 25 bp, Homo sapien
gtctcgctctatcacccatgagtgc

SEQ ID NO: 5000312 - DNA, 25 bp, Homo sapien
agtggtgcaatcttggctcaccgca

SEQ ID NO: 5000313 - DNA, 25 bp, Homo sapien
gtgcaatcttggctcaccgcaacct

SEQ ID NO: 5000314 - DNA, 25 bp, Homo sapien
cagtattgatgtatgattagtgtca

SEQ ID NO: 5000315 - DNA, 25 bp, Homo sapien
catacaagtacaaggtgatcaagaa

SEQ ID NO: 5000316 - DNA, 25 bp, Homo sapien
gaaaacaagggatgtctactttcta

SEQ ID NO: 5000317 - DNA, 25 bp, Homo sapien
gaatatttactcttgaatgaaagca

SEQ ID NO: 5000318 - DNA, 25 bp, Homo sapien
tcatacatgccgaataaagatttat

SEQ ID NO: 5000319 - DNA, 25 bp, Homo sapien
cgttgttcatacatgccgaataaag

SEQ ID NO: 5000320 - DNA, 25 bp, Homo sapien
ggcaccaaaacgttgttcatacatg

SEQ ID NO: 5000321 - DNA, 25 bp, Homo sapien
gagcatatattggccctgggcacca

SEQ ID NO: 5000322 - DNA, 25 bp, Homo sapien
caaaatactaattcagtcctcttac

SEQ ID NO: 5000323 - DNA, 25 bp, Homo sapien
tcaaaatactaattcagtcctctta

SEQ ID NO: 5000324 - DNA, 25 bp, Homo sapien
cttgttctttgatctgacgaatttg

SEQ ID NO: 5000325 - DNA, 25 bp, Homo sapien
cacatttgtcaggtttgaagttaaa

SEQ ID NO: 5000326 - DNA, 25 bp, Homo sapien
tgatctgacgaatttgcttcacagt

SEQ ID NO: 5000327 - DNA, 25 bp, Homo sapien
tcacgattacgtttttcagtgttcc

SEQ ID NO: 5000328 - DNA, 25 bp, Homo sapien
gtcaggacattccttgcgctttctt

SEQ ID NO: 5000329 - DNA, 25 bp, Homo sapien
ccaagttggtcaggacattccttgc

SEQ ID NO: 5000330 - DNA, 25 bp, Homo sapien
gttggtcaggacattccttgcgctt

SEQ ID NO: 5000331 - DNA, 25 bp, Homo sapien
aagttggtcaggacattccttgcgc

SEQ ID NO: 5000332 - DNA, 25 bp, Homo sapien
cagtcaaaccgccaggccacttctt

SEQ ID NO: 5000333 - DNA, 25 bp, Homo sapien
ctacaataatttcttctcgccactt

SEQ ID NO: 5000334 - DNA, 25 bp, Homo sapien
gccacttcttccctgtaatctgggc

SEQ ID NO: 5000335 - DNA, 25 bp, Homo sapien
ttccctgtaatctgggctgcccagt

SEQ ID NO: 5000336 - DNA, 25 bp, Homo sapien
tactgtatccgtttagggaggctgc

SEQ ID NO: 5000337 - DNA, 25 bp, Homo sapien
tatgcgaggctcacttgagaccagg

SEQ ID NO: 5000338 - DNA, 25 bp, Homo sapien
cactgtggtcacaattttggcctga

SEQ ID NO: 5000339 - DNA, 25 bp, Homo sapien
ttcaccacttttagctatgcgaggc

SEQ ID NO: 5000340 - DNA, 25 bp, Homo sapien
cttatagacattcactttcagtact

SEQ ID NO: 5000341 - DNA, 25 bp, Homo sapien
ttcagtacttctctctgaatcacaa

SEQ ID NO: 5000342 - DNA, 25 bp, Homo sapien
acttctctctgaatcacaattccca

SEQ ID NO: 5000343 - DNA, 25 bp, Homo sapien
cactttcagtacttctctctgaatc

SEQ ID NO: 5000344 - DNA, 25 bp, Homo sapien
ttgtaacatatgagggacagcactg

SEQ ID NO: 5000345 - DNA, 25 bp, Homo sapien
cctgcattttagtgggagagccgaa

SEQ ID NO: 5000346 - DNA, 25 bp, Homo sapien
tactgggcaatgcagaagtgacaca

SEQ ID NO: 5000347 - DNA, 25 bp, Homo sapien
gaagtgccaacatgcaaggatgccc

SEQ ID NO: 5000348 - DNA, 25 bp, Homo sapien
gagtgctgactgcatcctacctgag

SEQ ID NO: 5000349 - DNA, 25 bp, Homo sapien
aaattgtcttgctctatgggtgacc

SEQ ID NO: 5000350 - DNA, 25 bp, Homo sapien
tcaaagggtcacctgagaactgtca

SEQ ID NO: 5000351 - DNA, 25 bp, Homo sapien
tgctgagatgtaagaaccgctgccc

SEQ ID NO: 5000352 - DNA, 25 bp, Homo sapien
tttgcccgggaactataaatgcaca

SEQ ID NO: 5000353 - DNA, 25 bp, Homo sapien
acaaggtgccttatgatctagccca

SEQ ID NO: 5000354 - DNA, 25 bp, Homo sapien
tttctcaaacgtaatacaaggtgcc

SEQ ID NO: 5000355 - DNA, 25 bp, Homo sapien
aaaatgccccatgtgtaagatgtca

SEQ ID NO: 5000356 - DNA, 25 bp, Homo sapien
gctttagcatattactacatactct

SEQ ID NO: 5000357 - DNA, 25 bp, Homo sapien
tagccagcagaactactccaagaac

SEQ ID NO: 5000358 - DNA, 25 bp, Homo sapien
tgtagttccacaaaccagggaggct

SEQ ID NO: 5000359 - DNA, 25 bp, Homo sapien
atgcccctgtagttccacaaaccag

SEQ ID NO: 5000360 - DNA, 25 bp, Homo sapien
ctcaaacaggtcattacaggaattc

SEQ ID NO: 5000361 - DNA, 25 bp, Homo sapien
ttagacattcaggacagattcaggc

SEQ ID NO: 5000362 - DNA, 25 bp, Homo sapien
caactgccttgagtttacctgggaa

SEQ ID NO: 5000363 - DNA, 25 bp, Homo sapien
caggaattctgtttcggccttgcaa

SEQ ID NO: 5000364 - DNA, 25 bp, Homo sapien
tgtttcttttcaatgcggaccgaat

SEQ ID NO: 5000365 - DNA, 25 bp, Homo sapien
caatgcggaccgaatactctttaaa

SEQ ID NO: 5000366 - DNA, 25 bp, Homo sapien
tgcggaccgaatactctttaaataa

SEQ ID NO: 5000367 - DNA, 25 bp, Homo sapien
cttttcaatgcggaccgaatactct

SEQ ID NO: 5000368 - DNA, 25 bp, Homo sapien
gactattctagccaatcaatttact

SEQ ID NO: 5000369 - DNA, 25 bp, Homo sapien
ttactacaagccataaccctgcatg

SEQ ID NO: 5000370 - DNA, 25 bp, Homo sapien
tgatgaaaccaaacatctagcttct

SEQ ID NO: 5000371 - DNA, 25 bp, Homo sapien
catgttaactgtgaacctggtgaaa

SEQ ID NO: 5000372 - DNA, 25 bp, Homo sapien
ctttttaatgacaaggaccaaagca

SEQ ID NO: 5000373 - DNA, 25 bp, Homo sapien
tttttaatgacaaggaccaaagcac

SEQ ID NO: 5000374 - DNA, 25 bp, Homo sapien
ctgtgagagaaatggataagccaac

SEQ ID NO: 5000375 - DNA, 25 bp, Homo sapien
tatagccccgtactttaatcctgcc

SEQ ID NO: 5000376 - DNA, 25 bp, Homo sapien
caaatcctataagaggtaccgtggg

SEQ ID NO: 5000377 - DNA, 25 bp, Homo sapien
aaaatttgctggctgttacacaggc

SEQ ID NO: 5000378 - DNA, 25 bp, Homo sapien
gcctggttgtcacgctcagttctcc

SEQ ID NO: 5000379 - DNA, 25 bp, Homo sapien
tgggtcacactgtatctatgtgttc

SEQ ID NO: 5000380 - DNA, 25 bp, Homo sapien
tcctgagaacattatcactgcctgg

SEQ ID NO: 5000381 - DNA, 25 bp, Homo sapien
aagaaataaggaccacggaatcaat

SEQ ID NO: 5000382 - DNA, 25 bp, Homo sapien
caatccacaagcacacagaattcca

SEQ ID NO: 5000383 - DNA, 25 bp, Homo sapien
agcttctgcagttcatattagagct

SEQ ID NO: 5000384 - DNA, 25 bp, Homo sapien
tctgcagttcatattagagctcagc

SEQ ID NO: 5000385 - DNA, 25 bp, Homo sapien
gcagttcatattagagctcagcagc

SEQ ID NO: 5000386 - DNA, 25 bp, Homo sapien
gttcatattagagctcagcagcttc

SEQ ID NO: 5000387 - DNA, 25 bp, Homo sapien
tacacacgtgcatgcaatgtacaca

SEQ ID NO: 5000388 - DNA, 25 bp, Homo sapien
ggagacattatagctatccacatac

SEQ ID NO: 5000389 - DNA, 25 bp, Homo sapien
tgcactcacatacgcatgtctaaaa

SEQ ID NO: 5000390 - DNA, 25 bp, Homo sapien
ttcactaggatgtactacactggcc

SEQ ID NO: 5000391 - DNA, 25 bp, Homo sapien
gaatcatagcccaaatacgagcttg

SEQ ID NO: 5000392 - DNA, 25 bp, Homo sapien
tcctctggtcctacaggagttacca

SEQ ID NO: 5000393 - DNA, 25 bp, Homo sapien
tactgctgcgggaaagattcaaagg

SEQ ID NO: 5000394 - DNA, 25 bp, Homo sapien
gcaaggccaggtctctcaacaagtg

SEQ ID NO: 5000395 - DNA, 25 bp, Homo sapien
acagctcaccgcaggcctcaatctc

SEQ ID NO: 5000396 - DNA, 25 bp, Homo sapien
gggactactggcatacgtcaccatg

SEQ ID NO: 5000397 - DNA, 25 bp, Homo sapien
cccaggcggagtacagtgacaatca

SEQ ID NO: 5000398 - DNA, 25 bp, Homo sapien
ctactggcatacgtcaccatgcccg

SEQ ID NO: 5000399 - DNA, 25 bp, Homo sapien
aaatgctgtctttgactagtaagtg

SEQ ID NO: 5000400 - DNA, 25 bp, Homo sapien
catattaaataatctcaaggccata

SEQ ID NO: 5000401 - DNA, 25 bp, Homo sapien
ctatttatcacataaggcacaaacg

SEQ ID NO: 5000402 - DNA, 25 bp, Homo sapien
gctgtctttgactagtaagtgaaag

SEQ ID NO: 5000403 - DNA, 25 bp, Homo sapien
tgctacaggtatagacatggctaaa

SEQ ID NO: 5000404 - DNA, 25 bp, Homo sapien
cattgattcatcctagaaggaggga

SEQ ID NO: 5000405 - DNA, 25 bp, Homo sapien
tcatcaccagtattctgctacaggt

SEQ ID NO: 5000406 - DNA, 25 bp, Homo sapien
gaaattaagccagattcactcaaag

SEQ ID NO: 5000407 - DNA, 25 bp, Homo sapien
gagctgccatcttgcatccccgtgt

SEQ ID NO: 5000408 - DNA, 25 bp, Homo sapien
gatacaattgtacaaaaggacacca

SEQ ID NO: 5000409 - DNA, 25 bp, Homo sapien
ggttttaacttgcaacatgatgcca

SEQ ID NO: 5000410 - DNA, 25 bp, Homo sapien
gtgtgtgtgcacctaatctcagctg

SEQ ID NO: 5000411 - DNA, 25 bp, Homo sapien
gatagtacgttatcactgagatctg

SEQ ID NO: 5000412 - DNA, 25 bp, Homo sapien
gccttcctaaccatgtgaaactgtg

SEQ ID NO: 5000413 - DNA, 25 bp, Homo sapien
cgttagtctcaaaacaattctctca

SEQ ID NO: 5000414 - DNA, 25 bp, Homo sapien
agcagcgtgaggactaatatataca

SEQ ID NO: 5000415 - DNA, 25 bp, Homo sapien
ccctcgggttcttcatctaaagcag

SEQ ID NO: 5000416 - DNA, 25 bp, Homo sapien
gcttgagtgatccttaactgtccaa

SEQ ID NO: 5000417 - DNA, 25 bp, Homo sapien
tgacagaagtcactaaagcttgagt

SEQ ID NO: 5000418 - DNA, 25 bp, Homo sapien
tagcagtattaagggccagacagtt

SEQ ID NO: 5000419 - DNA, 25 bp, Homo sapien
cagagccagggtagaatcctaagac

SEQ ID NO: 5000420 - DNA, 25 bp, Homo sapien
ttagtagaagccataaccccttgcc

SEQ ID NO: 5000421 - DNA, 25 bp, Homo sapien
taaagctcagacaaagcatatgccc

SEQ ID NO: 5000422 - DNA, 25 bp, Homo sapien
taaaacaatgaaggtaggctgccag

SEQ ID NO: 5000423 - DNA, 25 bp, Homo sapien
tgagggcttcccactcatacacgat

SEQ ID NO: 5000424 - DNA, 25 bp, Homo sapien
tcttaagaatgggaggccagtgtga

SEQ ID NO: 5000425 - DNA, 25 bp, Homo sapien
caaaagaatgactttgcataacatc

SEQ ID NO: 5000426 - DNA, 25 bp, Homo sapien
tacacgatcttaagaatgggaggcc

SEQ ID NO: 5000427 - DNA, 25 bp, Homo sapien
ctatataggcttctgattatgggaa

SEQ ID NO: 5000428 - DNA, 25 bp, Homo sapien
ctttgcgtaaaaaggtcctatatag

SEQ ID NO: 5000429 - DNA, 25 bp, Homo sapien
tgcgtaaaaaggtcctatataggct

SEQ ID NO: 5000430 - DNA, 25 bp, Homo sapien
taggcttctgattatgggaattcta

SEQ ID NO: 5000431 - DNA, 25 bp, Homo sapien
tgtgagcctacatcatcctgagttc

SEQ ID NO: 5000432 - DNA, 25 bp, Homo sapien
tcctgagttcagtagtccgttctgc

SEQ ID NO: 5000433 - DNA, 25 bp, Homo sapien
tattaagtgcagaggagtctaccct

SEQ ID NO: 5000434 - DNA, 25 bp, Homo sapien
tctaccctgtgagaccaggatcgtg

SEQ ID NO: 5000435 - DNA, 25 bp, Homo sapien
cctgtaaacagtgcagaagatctat

SEQ ID NO: 5000436 - DNA, 25 bp, Homo sapien
tgcctgtaaacagtgcagaagatct

SEQ ID NO: 5000437 - DNA, 25 bp, Homo sapien
gcagaagatctataagtgtgtagcc

SEQ ID NO: 5000438 - DNA, 25 bp, Homo sapien
ctgtgcctgtaaacagtgcagaaga

SEQ ID NO: 5000439 - DNA, 25 bp, Homo sapien
tagtactaacaagaccagcaaaagg

SEQ ID NO: 5000440 - DNA, 25 bp, Homo sapien
cccagtaggctgttacagaaggtca

SEQ ID NO: 5000441 - DNA, 25 bp, Homo sapien
gctgatgaactagcaaaagtctggg

SEQ ID NO: 5000442 - DNA, 25 bp, Homo sapien
gggttctaacccacaagagtctgac

SEQ ID NO: 5000443 - DNA, 25 bp, Homo sapien
tcctaatatatagccttcatgtgaa

SEQ ID NO: 5000444 - DNA, 25 bp, Homo sapien
catactttcacgacttacctttgaa

SEQ ID NO: 5000445 - DNA, 25 bp, Homo sapien
tgcaaatgtgtcctaatatatagcc

SEQ ID NO: 5000446 - DNA, 25 bp, Homo sapien
aactatttcagattattgaacatga

SEQ ID NO: 5000447 - DNA, 25 bp, Homo sapien
caattctcatctcctacagagaggt

SEQ ID NO: 5000448 - DNA, 25 bp, Homo sapien
gggcagcggcagtctttaacttcca

SEQ ID NO: 5000449 - DNA, 25 bp, Homo sapien
tctatcaacacaacatgaccgcatt

SEQ ID NO: 5000450 - DNA, 25 bp, Homo sapien
gaggaaccagcacaaacttgccacc

SEQ ID NO: 5000451 - DNA, 25 bp, Homo sapien
caatattgcaggataaaagacagtg

SEQ ID NO: 5000452 - DNA, 25 bp, Homo sapien
taaggtgggagacagctaggaaaac

SEQ ID NO: 5000453 - DNA, 25 bp, Homo sapien
ggtcccagagaccaagaatgtatat

SEQ ID NO: 5000454 - DNA, 25 bp, Homo sapien
gatatgctaaatcatgtggacgacc

SEQ ID NO: 5000455 - DNA, 25 bp, Homo sapien
gagaactgaagtgtaaccgcccttc

SEQ ID NO: 5000456 - DNA, 25 bp, Homo sapien
gagctgctacgtatgtatgactgcc

SEQ ID NO: 5000457 - DNA, 25 bp, Homo sapien
gaagagacaaaccatccctattgtg

SEQ ID NO: 5000458 - DNA, 25 bp, Homo sapien
aaaagagaattaaatgcccagccag

SEQ ID NO: 5000459 - DNA, 25 bp, Homo sapien
aattgctagccttggccaagcgcag

SEQ ID NO: 5000460 - DNA, 25 bp, Homo sapien
tatgtatcatagtggtatctttcta

SEQ ID NO: 5000461 - DNA, 25 bp, Homo sapien
caagcgcagtagcaagcacctgtaa

SEQ ID NO: 5000462 - DNA, 25 bp, Homo sapien
cagggatatataaaggctctgggaa

SEQ ID NO: 5000463 - DNA, 25 bp, Homo sapien
aatgtctcggtagtagattctcagc

SEQ ID NO: 5000464 - DNA, 25 bp, Homo sapien
tctcttaggcaaaagaccgtagtat

SEQ ID NO: 5000465 - DNA, 25 bp, Homo sapien
tctaaatgtcagtatcgcacagatg

SEQ ID NO: 5000466 - DNA, 25 bp, Homo sapien
taaaagtcgtaacagtgtactgcac

SEQ ID NO: 5000467 - DNA, 25 bp, Homo sapien
cacttcaggcaaagaggtatgactt

SEQ ID NO: 5000468 - DNA, 25 bp, Homo sapien
gacttgtcactggtaatagtggtaa

SEQ ID NO: 5000469 - DNA, 25 bp, Homo sapien
ctggtaatagtggtaactcgggaag

SEQ ID NO: 5000470 - DNA, 25 bp, Homo sapien
acttcaggcaaagaggtatgacttg

SEQ ID NO: 5000471 - DNA, 25 bp, Homo sapien
gtggagcccctggatagttttggct

SEQ ID NO: 5000472 - DNA, 25 bp, Homo sapien
aagttcctcacggttcagactctga

SEQ ID NO: 5000473 - DNA, 25 bp, Homo sapien
aggttgtaagttcctcacggttcag

SEQ ID NO: 5000474 - DNA, 25 bp, Homo sapien
cagactctgatctctgcgtggagcc

SEQ ID NO: 5000475 - DNA, 25 bp, Homo sapien
catggttcttactgaaatctgctac

SEQ ID NO: 5000476 - DNA, 25 bp, Homo sapien
cataagcaataccataagggcaata

SEQ ID NO: 5000477 - DNA, 25 bp, Homo sapien
cacatccttgagacgtattaggagg

SEQ ID NO: 5000478 - DNA, 25 bp, Homo sapien
tatctagcctaggtgaggtggcctg

SEQ ID NO: 5000479 - DNA, 25 bp, Homo sapien
cacaagttaggctgtgtcgtaagac

SEQ ID NO: 5000480 - DNA, 25 bp, Homo sapien
tcttctgtcctacacaagttaggct

SEQ ID NO: 5000481 - DNA, 25 bp, Homo sapien
actttcttgacatctgtgagaggca

SEQ ID NO: 5000482 - DNA, 25 bp, Homo sapien
cactaggtctgctaattactgagtc

SEQ ID NO: 5000483 - DNA, 25 bp, Homo sapien
atgtgaccaaagctcgctgcaatct

SEQ ID NO: 5000484 - DNA, 25 bp, Homo sapien
tcaaacttattgggcgcaagtgatc

SEQ ID NO: 5000485 - DNA, 25 bp, Homo sapien
cgtggcctcatatctgaaccaacta

SEQ ID NO: 5000486 - DNA, 25 bp, Homo sapien
tgggacttgttccaagagacaagat

SEQ ID NO: 5000487 - DNA, 25 bp, Homo sapien
gacaagatattaggtactgtttcca

SEQ ID NO: 5000488 - DNA, 25 bp, Homo sapien
tatttcaaatgcagtcagttctacc

SEQ ID NO: 5000489 - DNA, 25 bp, Homo sapien
cagaatctttcacatgggtggccca

SEQ ID NO: 5000490 - DNA, 25 bp, Homo sapien
taccattctaatagcagaggcagct

SEQ ID NO: 5000491 - DNA, 25 bp, Homo sapien
caaatgaggccactaggaaactagc

SEQ ID NO: 5000492 - DNA, 25 bp, Homo sapien
taagtagctgactgctctccctggg

SEQ ID NO: 5000493 - DNA, 25 bp, Homo sapien
ctcccatatacatgtgaaaggatac

SEQ ID NO: 5000494 - DNA, 25 bp, Homo sapien
tctcccatatacatgtgaaaggata

SEQ ID NO: 5000495 - DNA, 25 bp, Homo sapien
tgacagaaaactaccctttctgcat

SEQ ID NO: 5000496 - DNA, 25 bp, Homo sapien
gacagaaaactaccctttctgcatt

SEQ ID NO: 5000497 - DNA, 25 bp, Homo sapien
tctcatggatgcaacaatgcacagc

SEQ ID NO: 5000498 - DNA, 25 bp, Homo sapien
tatacccaagagatgtgagggctca

SEQ ID NO: 5000499 - DNA, 25 bp, Homo sapien
gcaattttgatcttgggtataccca

SEQ ID NO: 5000500 - DNA, 25 bp, Homo sapien
ctatcttatagggaccaaggtcacc

SEQ ID NO: 5000501 - DNA, 25 bp, Homo sapien
tacaaaacacggctggccagagtgc

SEQ ID NO: 5000502 - DNA, 25 bp, Homo sapien
tctcccaagggtatgaccaagaagg

SEQ ID NO: 5000503 - DNA, 25 bp, Homo sapien
gatattgagcctacatgtgccagac

SEQ ID NO: 5000504 - DNA, 25 bp, Homo sapien
gaacttcacttaagcaagactggga

SEQ ID NO: 5000505 - DNA, 25 bp, Homo sapien
cagagatttataccctcctgtgctg

SEQ ID NO: 5000506 - DNA, 25 bp, Homo sapien
ggtagcaacagccaaaatgtcgatc

SEQ ID NO: 5000507 - DNA, 25 bp, Homo sapien
cctgtgctggcctgcaaaaggacaa

SEQ ID NO: 5000508 - DNA, 25 bp, Homo sapien
ttagtggttgccagccactcttgaa

SEQ ID NO: 5000509 - DNA, 25 bp, Homo sapien
gaggaaccttgcagaactaaatcag

SEQ ID NO: 5000510 - DNA, 25 bp, Homo sapien
gcaagaaacagcgtcgaggaacctt

SEQ ID NO: 5000511 - DNA, 25 bp, Homo sapien
gctagcatgctaatcccacagatga

SEQ ID NO: 5000512 - DNA, 25 bp, Homo sapien
tactctgagctatgaaagatgaaca

SEQ ID NO: 5000513 - DNA, 25 bp, Homo sapien
caattgaccgtataacgtgggtcta

SEQ ID NO: 5000514 - DNA, 25 bp, Homo sapien
tatttaggcctatgagccacttcaa

SEQ ID NO: 5000515 - DNA, 25 bp, Homo sapien
tatttgagggctatattctgctcca

SEQ ID NO: 5000516 - DNA, 25 bp, Homo sapien
attgaaagggacatgcactggtcgg

SEQ ID NO: 5000517 - DNA, 25 bp, Homo sapien
ctgaaagggtgaactctggacagag

SEQ ID NO: 5000518 - DNA, 25 bp, Homo sapien
ttccttcagatgttcgtgcacacag

SEQ ID NO: 5000519 - DNA, 25 bp, Homo sapien
cacaggtacgcgcttccagagaagt

SEQ ID NO: 5000520 - DNA, 25 bp, Homo sapien
tgttcgtgcacacaggtacgcgctt

SEQ ID NO: 5000521 - DNA, 25 bp, Homo sapien
atttgaatgctctactcatacttct

SEQ ID NO: 5000522 - DNA, 25 bp, Homo sapien
tttctttattgctatttgaatgctc

SEQ ID NO: 5000523 - DNA, 25 bp, Homo sapien
tctctggtaactgtatctaaatatc

SEQ ID NO: 5000524 - DNA, 25 bp, Homo sapien
gtcttctctggtaactgtatctaaa

SEQ ID NO: 5000525 - DNA, 25 bp, Homo sapien
atttagctataccaagttttccatc

SEQ ID NO: 5000526 - DNA, 25 bp, Homo sapien
tccatcagggaatttagctatacca

SEQ ID NO: 5000527 - DNA, 25 bp, Homo sapien
tattgtatattaagccacagtctga

SEQ ID NO: 5000528 - DNA, 25 bp, Homo sapien
agtggttttgaagcatctacttaca

SEQ ID NO: 5000529 - DNA, 25 bp, Homo sapien
aattaaactgtacggcaaaggctgc

SEQ ID NO: 5000530 - DNA, 25 bp, Homo sapien
ttggtgaaatatgcccaaccattct

SEQ ID NO: 5000531 - DNA, 25 bp, Homo sapien
ggaacatgccatgaaaaggtccaag

SEQ ID NO: 5000532 - DNA, 25 bp, Homo sapien
gaactggtccaccttaaaagagatg

SEQ ID NO: 5000533 - DNA, 25 bp, Homo sapien
gagaaactgaagtctgacaccccaa

SEQ ID NO: 5000534 - DNA, 25 bp, Homo sapien
ggcccagacctagagacttcagaag

SEQ ID NO: 5000535 - DNA, 25 bp, Homo sapien
cctctcctagtgactcccagttcat

SEQ ID NO: 5000536 - DNA, 25 bp, Homo sapien
ctgaggcctctcctagtgactccca

SEQ ID NO: 5000537 - DNA, 25 bp, Homo sapien
aggcctctcctagtgactcccagtt

SEQ ID NO: 5000538 - DNA, 25 bp, Homo sapien
gaggcctctcctagtgactcccagt

SEQ ID NO: 5000539 - DNA, 25 bp, Homo sapien
caggacatgatcactacagcatatg

SEQ ID NO: 5000540 - DNA, 25 bp, Homo sapien
gaggtccaggacatgatcactacag

SEQ ID NO: 5000541 - DNA, 25 bp, Homo sapien
gacatgatcactacagcatatgcca

SEQ ID NO: 5000542 - DNA, 25 bp, Homo sapien
ggtccaggacatgatcactacagca

SEQ ID NO: 5000543 - DNA, 25 bp, Homo sapien
tgagttactgccacatcctaaagtg

SEQ ID NO: 5000544 - DNA, 25 bp, Homo sapien
acatacaggacctcgagtgcctcgg

SEQ ID NO: 5000545 - DNA, 25 bp, Homo sapien
taaagtggctttagacttcgtcgtg

SEQ ID NO: 5000546 - DNA, 25 bp, Homo sapien
taagacaacgtctatttcggtacga

SEQ ID NO: 5000547 - DNA, 25 bp, Homo sapien
gagcgggtgactcggggatggacaa

SEQ ID NO: 5000548 - DNA, 25 bp, Homo sapien
tcggggatggacaagagtagctggc

SEQ ID NO: 5000549 - DNA, 25 bp, Homo sapien
ataagtgacacaaccccagaaatca

SEQ ID NO: 5000550 - DNA, 25 bp, Homo sapien
ctataagtgacacaaccccagaaat

SEQ ID NO: 5000551 - DNA, 25 bp, Homo sapien
ttggctcactgccccatcagtcaga

SEQ ID NO: 5000552 - DNA, 25 bp, Homo sapien
aggaaggtgttcaggctcggtctct

SEQ ID NO: 5000553 - DNA, 25 bp, Homo sapien
cagctccctgccttcgattggctca

SEQ ID NO: 5000554 - DNA, 25 bp, Homo sapien
tcagacgcaccgagattcgggtcgg

SEQ ID NO: 5000555 - DNA, 25 bp, Homo sapien
tccgggccagcggaagggggctcca

SEQ ID NO: 5000556 - DNA, 25 bp, Homo sapien
cagctccgggccagcggaagggggc

SEQ ID NO: 5000557 - DNA, 25 bp, Homo sapien
ccagaacgcgggaggcccagtccag

SEQ ID NO: 5000558 - DNA, 25 bp, Homo sapien
cagaacgcgggaggcccagtccagc

SEQ ID NO: 5000559 - DNA, 25 bp, Homo sapien
ctcggaagaggcgcctctgggactc

SEQ ID NO: 5000560 - DNA, 25 bp, Homo sapien
ccccggtctcggaagaggcgcctct

SEQ ID NO: 5000561 - DNA, 25 bp, Homo sapien
ggtctcggaagaggcgcctctggga

SEQ ID NO: 5000562 - DNA, 25 bp, Homo sapien
gccatctaaccagggaccgacccac

SEQ ID NO: 5000563 - DNA, 25 bp, Homo sapien
ccgcgctgcccccgaggggttagag

SEQ ID NO: 5000564 - DNA, 25 bp, Homo sapien
gccgcgctgcccccgaggggttaga

SEQ ID NO: 5000565 - DNA, 25 bp, Homo sapien
gggactcgtctcctgagctctcgca

SEQ ID NO: 5000566 - DNA, 25 bp, Homo sapien
gtcgctgcgcctccgggatgcaact

SEQ ID NO: 5000567 - DNA, 25 bp, Homo sapien
caaggcgctggagcgcctcctttct

SEQ ID NO: 5000568 - DNA, 25 bp, Homo sapien
aaaacagcctctcggaggcgcacgg

SEQ ID NO: 5000569 - DNA, 25 bp, Homo sapien
gctgaccttcgccgccgaagctgta

SEQ ID NO: 5000570 - DNA, 25 bp, Homo sapien
tgccggctgccgtcggcgctgacct

SEQ ID NO: 5000571 - DNA, 25 bp, Homo sapien
ttcgccgccgaagctgtagccgagg

SEQ ID NO: 5000572 - DNA, 25 bp, Homo sapien
ctgccgtcggcgctgaccttcgccg

SEQ ID NO: 5000573 - DNA, 25 bp, Homo sapien
ccgccatgttcccgtgttaataact

SEQ ID NO: 5000574 - DNA, 25 bp, Homo sapien
gccgccatgttcccgtgttaataac

SEQ ID NO: 5000575 - DNA, 25 bp, Homo sapien
ggccgccatgttcccgtgttaataa

SEQ ID NO: 5000576 - DNA, 25 bp, Homo sapien
ggttgtttatttcaatggagatcct

SEQ ID NO: 5000577 - DNA, 25 bp, Homo sapien
ctggttgtttatttcaatggagatc

SEQ ID NO: 5000578 - DNA, 25 bp, Homo sapien
tggttgtttatttcaatggagatcc

SEQ ID NO: 5000579 - DNA, 25 bp, Homo sapien
gacggggcggaaacttgcctctcgc

SEQ ID NO: 5000580 - DNA, 25 bp, Homo sapien
gcagcatctccgtcggcagagtcct

SEQ ID NO: 5000581 - DNA, 25 bp, Homo sapien
acagacagcgcgagctcgcgagcag

SEQ ID NO: 5000582 - DNA, 25 bp, Homo sapien
caaaggtggacgcagggttgtccgg

SEQ ID NO: 5000583 - DNA, 25 bp, Homo sapien
ccggggagaggtgaagaagagtaag

SEQ ID NO: 5000584 - DNA, 25 bp, Homo sapien
gcggcccggggagaggtgaagaaga

SEQ ID NO: 5000585 - DNA, 25 bp, Homo sapien
gagaaggcggcccggggagaggtga

SEQ ID NO: 5000586 - DNA, 25 bp, Homo sapien
ctgagaaggcggcccggggagaggt

SEQ ID NO: 5000587 - DNA, 25 bp, Homo sapien
aactcccggtcctgccgctgctccc

SEQ ID NO: 5000588 - DNA, 25 bp, Homo sapien
ccaactcccggtcctgccgctgctc

SEQ ID NO: 5000589 - DNA, 25 bp, Homo sapien
acccaactcccggtcctgccgctgc

SEQ ID NO: 5000590 - DNA, 25 bp, Homo sapien
ctacccaactcccggtcctgccgct

SEQ ID NO: 5000591 - DNA, 25 bp, Homo sapien
tccctctggagatgattgttttcct

SEQ ID NO: 5000592 - DNA, 25 bp, Homo sapien
cttcctctggatcccttgttgccat

SEQ ID NO: 5000593 - DNA, 25 bp, Homo sapien
tttccttcctctggatcccttgttg

SEQ ID NO: 5000594 - DNA, 25 bp, Homo sapien
ctccctctggagatgattgttttcc

SEQ ID NO: 5000595 - DNA, 25 bp, Homo sapien
cagatcattcgccaggacctggcta

SEQ ID NO: 5000596 - DNA, 25 bp, Homo sapien
ctggctatagtttccagcctttcca

SEQ ID NO: 5000597 - DNA, 25 bp, Homo sapien
acggagcttgttatccagatcattc

SEQ ID NO: 5000598 - DNA, 25 bp, Homo sapien
agaagtggtgcagccctctacaggc

SEQ ID NO: 5000599 - DNA, 25 bp, Homo sapien
cctcagagagtcctgtgctcttggt

SEQ ID NO: 5000600 - DNA, 25 bp, Homo sapien
ttctcagggatcacaagagataagg

SEQ ID NO: 5000601 - DNA, 25 bp, Homo sapien
gctggaatttctcagggatcacaag

SEQ ID NO: 5000602 - DNA, 25 bp, Homo sapien
ctcagggatcacaagagataaggca

SEQ ID NO: 5000603 - DNA, 25 bp, Homo sapien
caagagataaggcagcagcacaagc

SEQ ID NO: 5000604 - DNA, 25 bp, Homo sapien
cataaaaaccattccacgagacagg

SEQ ID NO: 5000605 - DNA, 25 bp, Homo sapien
agcaccatcactgccaataacaaac

SEQ ID NO: 5000606 - DNA, 25 bp, Homo sapien
gacaggatacccctgttgtcctcat

SEQ ID NO: 5000607 - DNA, 25 bp, Homo sapien
cacaaattcgacagttaccataaaa

SEQ ID NO: 5000608 - DNA, 25 bp, Homo sapien
ttcatgctcccgtaagtatcagagt

SEQ ID NO: 5000609 - DNA, 25 bp, Homo sapien
ctttggcacaaatgtcgtttcttat

SEQ ID NO: 5000610 - DNA, 25 bp, Homo sapien
aaggcatattatttgtttagctagc

SEQ ID NO: 5000611 - DNA, 25 bp, Homo sapien
catatctgtgttataatgttgaact

SEQ ID NO: 5000612 - DNA, 25 bp, Homo sapien
gcaacctagtgggcctcactcctgg

SEQ ID NO: 5000613 - DNA, 25 bp, Homo sapien
aacctagtgggcctcactcctggga

SEQ ID NO: 5000614 - DNA, 25 bp, Homo sapien
aggcaacctagtgggcctcactcct

SEQ ID NO: 5000615 - DNA, 25 bp, Homo sapien
ggcaacctagtgggcctcactcctg

SEQ ID NO: 5000616 - DNA, 25 bp, Homo sapien
ttgtgtctgtctcaatacctagcct

SEQ ID NO: 5000617 - DNA, 25 bp, Homo sapien
caatacctagccttagtataaacat

SEQ ID NO: 5000618 - DNA, 25 bp, Homo sapien
tgaaatggatgaagtcccacctccc

SEQ ID NO: 5000619 - DNA, 25 bp, Homo sapien
aaatggatgaagtcccacctcccat

SEQ ID NO: 5000620 - DNA, 25 bp, Homo sapien
cacacctatgtccatatgagacagc

SEQ ID NO: 5000621 - DNA, 25 bp, Homo sapien
tagatcagggtactgtgtggagccc

SEQ ID NO: 5000622 - DNA, 25 bp, Homo sapien
tattgtgctcacaagttgctcaggg

SEQ ID NO: 5000623 - DNA, 25 bp, Homo sapien
ggagtaagtcgatgccccttttcaa

SEQ ID NO: 5000624 - DNA, 25 bp, Homo sapien
ctgttcttcagcttccttggttctt

SEQ ID NO: 5000625 - DNA, 25 bp, Homo sapien
ttttttcaatatcctgttcttcagc

SEQ ID NO: 5000626 - DNA, 25 bp, Homo sapien
ttttttttcaatatcctgttcttca

SEQ ID NO: 5000627 - DNA, 25 bp, Homo sapien
tcttcagcttccttggttcttttta

SEQ ID NO: 5000628 - DNA, 25 bp, Homo sapien
agcaaaggccttggagttcttccct

SEQ ID NO: 5000629 - DNA, 25 bp, Homo sapien
gagactagcaaaggccttggagttc

SEQ ID NO: 5000630 - DNA, 25 bp, Homo sapien
ctagcaaaggccttggagttcttcc

SEQ ID NO: 5000631 - DNA, 25 bp, Homo sapien
gactagcaaaggccttggagttctt

SEQ ID NO: 5000632 - DNA, 25 bp, Homo sapien
tggacaggcataagtagtcctgtca

SEQ ID NO: 5000633 - DNA, 25 bp, Homo sapien
ggacaggcataagtagtcctgtcag

SEQ ID NO: 5000634 - DNA, 25 bp, Homo sapien
ctggacaggcataagtagtcctgtc

SEQ ID NO: 5000635 - DNA, 25 bp, Homo sapien
ggatccacagagatgtcagtgttct

SEQ ID NO: 5000636 - DNA, 25 bp, Homo sapien
tttgccttctcggatccacagagat

SEQ ID NO: 5000637 - DNA, 25 bp, Homo sapien
acttgttttgccttctcggatccac

SEQ ID NO: 5000638 - DNA, 25 bp, Homo sapien
cagggactcggtggacttgttttgc

SEQ ID NO: 5000639 - DNA, 25 bp, Homo sapien
ttcttgtgaataccaaccaccctta

SEQ ID NO: 5000640 - DNA, 25 bp, Homo sapien
tcttgtgaataccaaccacccttaa

SEQ ID NO: 5000641 - DNA, 25 bp, Homo sapien
cttcttgtgaataccaaccaccctt

SEQ ID NO: 5000642 - DNA, 25 bp, Homo sapien
tgtgaataccaaccacccttaactc

SEQ ID NO: 5000643 - DNA, 25 bp, Homo sapien
aagccctggccagcgtgtactttgg

SEQ ID NO: 5000644 - DNA, 25 bp, Homo sapien
gccctggccagcgtgtactttggtg

SEQ ID NO: 5000645 - DNA, 25 bp, Homo sapien
tgaagccctggccagcgtgtacttt

SEQ ID NO: 5000646 - DNA, 25 bp, Homo sapien
cctggccagcgtgtactttggtgtg

SEQ ID NO: 5000647 - DNA, 25 bp, Homo sapien
agacgtggttgaaccatgtagccac

SEQ ID NO: 5000648 - DNA, 25 bp, Homo sapien
cgtggttgaaccatgtagccacaca

SEQ ID NO: 5000649 - DNA, 25 bp, Homo sapien
gtccagacgtggttgaaccatgtag

SEQ ID NO: 5000650 - DNA, 25 bp, Homo sapien
gatgggtccagacgtggttgaacca

SEQ ID NO: 5000651 - DNA, 25 bp, Homo sapien
ttgaagtgggacttgaagatcatgc

SEQ ID NO: 5000652 - DNA, 25 bp, Homo sapien
tgaagatcatgcctttcctgctggg

SEQ ID NO: 5000653 - DNA, 25 bp, Homo sapien
actgccagtgcttgttgaagtggga

SEQ ID NO: 5000654 - DNA, 25 bp, Homo sapien
ccagtgcttgttgaagtgggacttg

SEQ ID NO: 5000655 - DNA, 25 bp, Homo sapien
agctgagtggaaagggctcaacttt

SEQ ID NO: 5000656 - DNA, 25 bp, Homo sapien
gtgcaagaaaacagctgagtggaaa

SEQ ID NO: 5000657 - DNA, 25 bp, Homo sapien
aaacagctgagtggaaagggctcaa

SEQ ID NO: 5000658 - DNA, 25 bp, Homo sapien
tgcaagaaaacagctgagtggaaag

SEQ ID NO: 5000659 - DNA, 25 bp, Homo sapien
tagaaccagctaaatggccagacta

SEQ ID NO: 5000660 - DNA, 25 bp, Homo sapien
atatacatagaaccagctaaatggc

SEQ ID NO: 5000661 - DNA, 25 bp, Homo sapien
gaaccagctaaatggccagactaat

SEQ ID NO: 5000662 - DNA, 25 bp, Homo sapien
tacatagaaccagctaaatggccag

SEQ ID NO: 5000663 - DNA, 25 bp, Homo sapien
tgcaatcatagagatgtagaaaatg

SEQ ID NO: 5000664 - DNA, 25 bp, Homo sapien
ttaagtcttgggtctcagtggagtc

SEQ ID NO: 5000665 - DNA, 25 bp, Homo sapien
tggaggctagagttttttcaagata

SEQ ID NO: 5000666 - DNA, 25 bp, Homo sapien
gagtcatccaaccatcagaagtgca

SEQ ID NO: 5000667 - DNA, 25 bp, Homo sapien
acatctcaaaagtccaatcttaggc

SEQ ID NO: 5000668 - DNA, 25 bp, Homo sapien
catctcaaaagtccaatcttaggct

SEQ ID NO: 5000669 - DNA, 25 bp, Homo sapien
ggagtgtgtccatctgtataggcag

SEQ ID NO: 5000670 - DNA, 25 bp, Homo sapien
tgtaagcacagtctagcagcagcac

SEQ ID NO: 5000671 - DNA, 25 bp, Homo sapien
gcagagaagccatgataacccaatc

SEQ ID NO: 5000672 - DNA, 25 bp, Homo sapien
cagaaatgaagcctaggaataacgt

SEQ ID NO: 5000673 - DNA, 25 bp, Homo sapien
gagctgtaacggagagctggggctg

SEQ ID NO: 5000674 - DNA, 25 bp, Homo sapien
catgaggtaattgttacattgctct

SEQ ID NO: 5000675 - DNA, 25 bp, Homo sapien
ctgtactgtccagagctgtaacgga

SEQ ID NO: 5000676 - DNA, 25 bp, Homo sapien
tcatgaggtaattgttacattgctc

SEQ ID NO: 5000677 - DNA, 25 bp, Homo sapien
gagcctcaagcatccaaccacaagg

SEQ ID NO: 5000678 - DNA, 25 bp, Homo sapien
agtcttggacttgcctgatccccag

SEQ ID NO: 5000679 - DNA, 25 bp, Homo sapien
aatgcacatgcagctgaaccagggc

SEQ ID NO: 5000680 - DNA, 25 bp, Homo sapien
cagggccagtcccttaagtcttgga

SEQ ID NO: 5000681 - DNA, 25 bp, Homo sapien
cttgcccatgaaatattgtggctga

SEQ ID NO: 5000682 - DNA, 25 bp, Homo sapien
tgccaggtctccatgaaatggaggt

SEQ ID NO: 5000683 - DNA, 25 bp, Homo sapien
ggcttgcccatgaaatattgtggct

SEQ ID NO: 5000684 - DNA, 25 bp, Homo sapien
ctccatgaaatggaggtgtgtctgc

SEQ ID NO: 5000685 - DNA, 25 bp, Homo sapien
gagcccttggacctttggaagcctg

SEQ ID NO: 5000686 - DNA, 25 bp, Homo sapien
gggacatgttagtttcaatcacctg

SEQ ID NO: 5000687 - DNA, 25 bp, Homo sapien
tagtcactgtaagagtatccaagca

SEQ ID NO: 5000688 - DNA, 25 bp, Homo sapien
tactgaaaacccaccaggtacagga

SEQ ID NO: 5000689 - DNA, 25 bp, Homo sapien
ctttccaggggagtgtactctactt

SEQ ID NO: 5000690 - DNA, 25 bp, Homo sapien
ccaggggagtgtactctactttcca

SEQ ID NO: 5000691 - DNA, 25 bp, Homo sapien
gggagtgtactctactttccacagc

SEQ ID NO: 5000692 - DNA, 25 bp, Homo sapien
ggggagtgtactctactttccacag

SEQ ID NO: 5000693 - DNA, 25 bp, Homo sapien
ggcaggtccctatagcttgcaagga

SEQ ID NO: 5000694 - DNA, 25 bp, Homo sapien
ttatattagtaactgaggcatgacc

SEQ ID NO: 5000695 - DNA, 25 bp, Homo sapien
ccttcctgaggatataatctcaggc

SEQ ID NO: 5000696 - DNA, 25 bp, Homo sapien
gcaaggacagttgtaggccatacaa

SEQ ID NO: 5000697 - DNA, 25 bp, Homo sapien
gcagtctccagatgcagcagctgct

SEQ ID NO: 5000698 - DNA, 25 bp, Homo sapien
gctgctgcactcttcatgggtccgc

SEQ ID NO: 5000699 - DNA, 25 bp, Homo sapien
cacaggctgtggcagtctccagatg

SEQ ID NO: 5000700 - DNA, 25 bp, Homo sapien
agctgctgcactcttcatgggtccg

SEQ ID NO: 5000701 - DNA, 25 bp, Homo sapien
agtaggaggaaagggcaccctgtct

SEQ ID NO: 5000702 - DNA, 25 bp, Homo sapien
tggggtcctcttttctcaggtgccc

SEQ ID NO: 5000703 - DNA, 25 bp, Homo sapien
gttgcgggcattcccaagctgtagg

SEQ ID NO: 5000704 - DNA, 25 bp, Homo sapien
cttttctcaggtgccctgttgcggg

SEQ ID NO: 5000705 - DNA, 25 bp, Homo sapien
cagagttggtgtttgtcagtgccag

SEQ ID NO: 5000706 - DNA, 25 bp, Homo sapien
gggaccagaccagacaaagatccac

SEQ ID NO: 5000707 - DNA, 25 bp, Homo sapien
cccatgtgctcggaggagtccagca

SEQ ID NO: 5000708 - DNA, 25 bp, Homo sapien
aggtcttctacaggccagagttggt

SEQ ID NO: 5000709 - DNA, 25 bp, Homo sapien
catgagaaaaatgcgtgaaagtgag

SEQ ID NO: 5000710 - DNA, 25 bp, Homo sapien
tgagaaaaatgcgtgaaagtgaggc

SEQ ID NO: 5000711 - DNA, 25 bp, Homo sapien
gcatgagaaaaatgcgtgaaagtga

SEQ ID NO: 5000712 - DNA, 25 bp, Homo sapien
agaaaaatgcgtgaaagtgaggcag

SEQ ID NO: 5000713 - DNA, 25 bp, Homo sapien
tggttatgaccatctatccccccag

SEQ ID NO: 5000714 - DNA, 25 bp, Homo sapien
tatgaccatctatccccccagtagt

SEQ ID NO: 5000715 - DNA, 25 bp, Homo sapien
tatttggttatgaccatctatcccc

SEQ ID NO: 5000716 - DNA, 25 bp, Homo sapien
ttatttggttatgaccatctatccc

SEQ ID NO: 5000717 - DNA, 25 bp, Homo sapien
tgaaaagggttattctgaatgtcta

SEQ ID NO: 5000718 - DNA, 25 bp, Homo sapien
ttgaaaagggttattctgaatgtct

SEQ ID NO: 5000719 - DNA, 25 bp, Homo sapien
tttgaaaagggttattctgaatgtc

SEQ ID NO: 5000720 - DNA, 25 bp, Homo sapien
gaaaagggttattctgaatgtctat

SEQ ID NO: 5000721 - DNA, 25 bp, Homo sapien
tattttgattgatttctcaatgtat

SEQ ID NO: 5000722 - DNA, 25 bp, Homo sapien
ttttgattgatttctcaatgtatag

SEQ ID NO: 5000723 - DNA, 25 bp, Homo sapien
ttattttgattgatttctcaatgta

SEQ ID NO: 5000724 - DNA, 25 bp, Homo sapien
aatttttattttgattgatttctca

SEQ ID NO: 5000725 - DNA, 25 bp, Homo sapien
ggacaatttcctagcagcatggcaa

SEQ ID NO: 5000726 - DNA, 25 bp, Homo sapien
gcacaaacagctggtgacacaagtg

SEQ ID NO: 5000727 - DNA, 25 bp, Homo sapien
ggttccactgaaactccataatgct

SEQ ID NO: 5000728 - DNA, 25 bp, Homo sapien
ccataatgctacagagagctactac

SEQ ID NO: 5000729 - DNA, 25 bp, Homo sapien
ccttcttagaacaggccactctgct

SEQ ID NO: 5000730 - DNA, 25 bp, Homo sapien
tatgttagtaaaactccacgtgttg

SEQ ID NO: 5000731 - DNA, 25 bp, Homo sapien
tgaaggcaggtagcttagtctaagc

SEQ ID NO: 5000732 - DNA, 25 bp, Homo sapien
gagcacagactgtattttcaagaac

SEQ ID NO: 5000733 - DNA, 25 bp, Homo sapien
cggggagagtctgctacatttgaag

SEQ ID NO: 5000734 - DNA, 25 bp, Homo sapien
tttgaagttaatgttccattcacac

SEQ ID NO: 5000735 - DNA, 25 bp, Homo sapien
ttttattccggggagagtctgctac

SEQ ID NO: 5000736 - DNA, 25 bp, Homo sapien
gaagttaatgttccattcacaccat

SEQ ID NO: 5000737 - DNA, 25 bp, Homo sapien
taacacaatgaactgaaagtagcaa

SEQ ID NO: 5000738 - DNA, 25 bp, Homo sapien
attcactcaggtgaaatttacttac

SEQ ID NO: 5000739 - DNA, 25 bp, Homo sapien
agtatttaaccaatcacaaaacctg

SEQ ID NO: 5000740 - DNA, 25 bp, Homo sapien
agaatccatgttactctcttttata

SEQ ID NO: 5000741 - DNA, 25 bp, Homo sapien
atgaaataccgaaaggtctccctct

SEQ ID NO: 5000742 - DNA, 25 bp, Homo sapien
caatgtagtcaatgcaattcacaac

SEQ ID NO: 5000743 - DNA, 25 bp, Homo sapien
ccccagggagacaactgtattatca

SEQ ID NO: 5000744 - DNA, 25 bp, Homo sapien
caccaacttggatgcatgtcagaaa

SEQ ID NO: 5000745 - DNA, 25 bp, Homo sapien
tcaaggtaaccaagcatggaaaact

SEQ ID NO: 5000746 - DNA, 25 bp, Homo sapien
cacccaattgtggaatgcagtaaga

SEQ ID NO: 5000747 - DNA, 25 bp, Homo sapien
cataaagtttggtctaaagtagctc

SEQ ID NO: 5000748 - DNA, 25 bp, Homo sapien
aacaaactaccatcctcaggtttag

SEQ ID NO: 5000749 - DNA, 25 bp, Homo sapien
gcaaatggatgccagaacagcgatt

SEQ ID NO: 5000750 - DNA, 25 bp, Homo sapien
ccaccttcgaagctgaaaattaatg

SEQ ID NO: 5000751 - DNA, 25 bp, Homo sapien
ccacatcataaatgcctgagtaacg

SEQ ID NO: 5000752 - DNA, 25 bp, Homo sapien
agctggtgcctgaaaagcagaatgt

SEQ ID NO: 5000753 - DNA, 25 bp, Homo sapien
gaagtttccagtactgaaatccagc

SEQ ID NO: 5000754 - DNA, 25 bp, Homo sapien
taacagctaacacattgaagtttcc

SEQ ID NO: 5000755 - DNA, 25 bp, Homo sapien
acaaaaagaactgcccacagagaaa

SEQ ID NO: 5000756 - DNA, 25 bp, Homo sapien
agaattaaagtcagaagtcttccca

SEQ ID NO: 5000757 - DNA, 25 bp, Homo sapien
aatggcctaaagcatggatcttggc

SEQ ID NO: 5000758 - DNA, 25 bp, Homo sapien
cagtatctctctagctgagaaagcc

SEQ ID NO: 5000759 - DNA, 25 bp, Homo sapien
gcggctactgatcgcttaaaaagtt

SEQ ID NO: 5000760 - DNA, 25 bp, Homo sapien
cctagtacacgagaaatagaatggc

SEQ ID NO: 5000761 - DNA, 25 bp, Homo sapien
ccagaagaacaagtcctagatgatt

SEQ ID NO: 5000762 - DNA, 25 bp, Homo sapien
gcaccagaagaacaagtcctagatg

SEQ ID NO: 5000763 - DNA, 25 bp, Homo sapien
gtagcaccagaagaacaagtcctag

SEQ ID NO: 5000764 - DNA, 25 bp, Homo sapien
aagaacaagtcctagatgattcaag

SEQ ID NO: 5000765 - DNA, 25 bp, Homo sapien
atactatctgcccagcctacttaca

SEQ ID NO: 5000766 - DNA, 25 bp, Homo sapien
ttaattatcaattaagacaggtcag

SEQ ID NO: 5000767 - DNA, 25 bp, Homo sapien
aagacaggtcagcatactatctgcc

SEQ ID NO: 5000768 - DNA, 25 bp, Homo sapien
caattaagacaggtcagcatactat

SEQ ID NO: 5000769 - DNA, 25 bp, Homo sapien
aaaggtaagctccagcaatgtggaa

SEQ ID NO: 5000770 - DNA, 25 bp, Homo sapien
tgtagacaagctgacgaggaatatc

SEQ ID NO: 5000771 - DNA, 25 bp, Homo sapien
caaaaggtaagctccagcaatgtgg

SEQ ID NO: 5000772 - DNA, 25 bp, Homo sapien
atgtagacaagctgacgaggaatat

SEQ ID NO: 5000773 - DNA, 25 bp, Homo sapien
gacctactagtggatcatgaaatca

SEQ ID NO: 5000774 - DNA, 25 bp, Homo sapien
aaaaaagacctactagtggatcatg

SEQ ID NO: 5000775 - DNA, 25 bp, Homo sapien
caggcaccatgactcacacttgtca

SEQ ID NO: 5000776 - DNA, 25 bp, Homo sapien
atcaatttaggggtcacaccagcat

SEQ ID NO: 5000777 - DNA, 25 bp, Homo sapien
tgggactcttaggaaaattgatacc

SEQ ID NO: 5000778 - DNA, 25 bp, Homo sapien
tgtacaatgcatgtagaagtgccac

SEQ ID NO: 5000779 - DNA, 25 bp, Homo sapien
catgcaaccacaagggaacctctct

SEQ ID NO: 5000780 - DNA, 25 bp, Homo sapien
cccagtgtggtgtgtacattggtac

SEQ ID NO: 5000781 - DNA, 25 bp, Homo sapien
ggcaaacatgtaagaaaatacttaa

SEQ ID NO: 5000782 - DNA, 25 bp, Homo sapien
gtaagagttgaggtaagaagaatgg

SEQ ID NO: 5000783 - DNA, 25 bp, Homo sapien
aatgatggggtaagagttgaggtaa

SEQ ID NO: 5000784 - DNA, 25 bp, Homo sapien
agggcaaacatgtaagaaaatactt

SEQ ID NO: 5000785 - DNA, 25 bp, Homo sapien
tgaagccagtaagccagctgtgata

SEQ ID NO: 5000786 - DNA, 25 bp, Homo sapien
catgaagccagtaagccagctgtga

SEQ ID NO: 5000787 - DNA, 25 bp, Homo sapien
gccagtaagccagctgtgatatgta

SEQ ID NO: 5000788 - DNA, 25 bp, Homo sapien
aagccagtaagccagctgtgatatg

SEQ ID NO: 5000789 - DNA, 25 bp, Homo sapien
tatactaagtaactacctttgtgtc

SEQ ID NO: 5000790 - DNA, 25 bp, Homo sapien
cattccatacaatatctgtgcacct

SEQ ID NO: 5000791 - DNA, 25 bp, Homo sapien
tacctttgtgtcatcattccataca

SEQ ID NO: 5000792 - DNA, 25 bp, Homo sapien
tcaggatatactaagtaactacctt

SEQ ID NO: 5000793 - DNA, 25 bp, Homo sapien
tctccaggagctatatcataatcag

SEQ ID NO: 5000794 - DNA, 25 bp, Homo sapien
acctggttggaacatggagaaagcc

SEQ ID NO: 5000795 - DNA, 25 bp, Homo sapien
gacattatatccctctagcccttct

SEQ ID NO: 5000796 - DNA, 25 bp, Homo sapien
tcagaataaggcacacaagggctct

SEQ ID NO: 5000797 - DNA, 25 bp, Homo sapien
tacggcagtgggactgtcaaagaca

SEQ ID NO: 5000798 - DNA, 25 bp, Homo sapien
tgaccatggtccttaacaaagaaag

SEQ ID NO: 5000799 - DNA, 25 bp, Homo sapien
gaagcgagtaccaaattaagttatg

SEQ ID NO: 5000800 - DNA, 25 bp, Homo sapien
tgtctcaagcttacaaagatgttga

SEQ ID NO: 5000801 - DNA, 25 bp, Homo sapien
tcatcaggttatggggataagccct

SEQ ID NO: 5000802 - DNA, 25 bp, Homo sapien
tagttgggtctgagatgtagttttc

SEQ ID NO: 5000803 - DNA, 25 bp, Homo sapien
gggataagccctccataagatagtt

SEQ ID NO: 5000804 - DNA, 25 bp, Homo sapien
cctccataagatagttgggtctgag

SEQ ID NO: 5000805 - DNA, 25 bp, Homo sapien
ggagaagtgcattcgcctgttaatt

SEQ ID NO: 5000806 - DNA, 25 bp, Homo sapien
aagctgaccagattcattaaacttg

SEQ ID NO: 5000807 - DNA, 25 bp, Homo sapien
ttttggagaagtgcattcgcctgtt

SEQ ID NO: 5000808 - DNA, 25 bp, Homo sapien
ggcaaaaaggtagaacgcactaagc

SEQ ID NO: 5000809 - DNA, 25 bp, Homo sapien
tgccatagtaataaagggacactga

SEQ ID NO: 5000810 - DNA, 25 bp, Homo sapien
aattatcgccactagcatgtagaag

SEQ ID NO: 5000811 - DNA, 25 bp, Homo sapien
aagggacactgattcagtagcttgt

SEQ ID NO: 5000812 - DNA, 25 bp, Homo sapien
tatactcttgaattacggcatgaat

SEQ ID NO: 5000813 - DNA, 25 bp, Homo sapien
gagggtgacattgtactgaagagta

SEQ ID NO: 5000814 - DNA, 25 bp, Homo sapien
acaaaaatgatagaagcttttgccg

SEQ ID NO: 5000815 - DNA, 25 bp, Homo sapien
aaatgatagaagcttttgccgttat

SEQ ID NO: 5000816 - DNA, 25 bp, Homo sapien
gtgacattgtactgaagagtaacaa

SEQ ID NO: 5000817 - DNA, 25 bp, Homo sapien
caagggcctcctcgttcctgtggaa

SEQ ID NO: 5000818 - DNA, 25 bp, Homo sapien
taaaatctgtccctaaatcgaagca

SEQ ID NO: 5000819 - DNA, 25 bp, Homo sapien
gccaaggagctaatgtaattcacta

SEQ ID NO: 5000820 - DNA, 25 bp, Homo sapien
gagtactcttctgcggtttaggtaa

SEQ ID NO: 5000821 - DNA, 25 bp, Homo sapien
ctgactactggtaaaagtaaactgg

SEQ ID NO: 5000822 - DNA, 25 bp, Homo sapien
atctttacaggcaccaggcaaagtg

SEQ ID NO: 5000823 - DNA, 25 bp, Homo sapien
aatctttacaggcaccaggcaaagt

SEQ ID NO: 5000824 - DNA, 25 bp, Homo sapien
ccaatctttacaggcaccaggcaaa

SEQ ID NO: 5000825 - DNA, 25 bp, Homo sapien
caatctttacaggcaccaggcaaag

SEQ ID NO: 5000826 - DNA, 25 bp, Homo sapien
tagatttcactttcgcacaagtgga

SEQ ID NO: 5000827 - DNA, 25 bp, Homo sapien
tctgtgacctgctaagtggtatccc

SEQ ID NO: 5000828 - DNA, 25 bp, Homo sapien
cagagcgtggcaagatcaagtagca

SEQ ID NO: 5000829 - DNA, 25 bp, Homo sapien
catcaggaagcgttagaaaagacta

SEQ ID NO: 5000830 - DNA, 25 bp, Homo sapien
tatttcccatcagatctcagttgca

SEQ ID NO: 5000831 - DNA, 25 bp, Homo sapien
cagttgcattacaccttttcaagga

SEQ ID NO: 5000832 - DNA, 25 bp, Homo sapien
tcatcactatatttcagagcccagc

SEQ ID NO: 5000833 - DNA, 25 bp, Homo sapien
aataatttctgtctcgcccattaga

SEQ ID NO: 5000834 - DNA, 25 bp, Homo sapien
gatgttactcgttcaccttgcaaag

SEQ ID NO: 5000835 - DNA, 25 bp, Homo sapien
aaattactcgattccttggcaccgc

SEQ ID NO: 5000836 - DNA, 25 bp, Homo sapien
ccttcaagtcgaaagcagatgcctg

SEQ ID NO: 5000837 - DNA, 25 bp, Homo sapien
ttttaagcactcctatgtcccaggc

SEQ ID NO: 5000838 - DNA, 25 bp, Homo sapien
caggccggcactcctcagacccggg

SEQ ID NO: 5000839 - DNA, 25 bp, Homo sapien
caatctcggagctaccgggggctcc

SEQ ID NO: 5000840 - DNA, 25 bp, Homo sapien
tcccctgtcactcggggcctgtggt

SEQ ID NO: 5000841 - DNA, 25 bp, Homo sapien
cctgtggtctccaggccggcactcc

SEQ ID NO: 5000842 - DNA, 25 bp, Homo sapien
gaggctggcagtccccccaagtccg

SEQ ID NO: 5000843 - DNA, 25 bp, Homo sapien
cgcggccgaggctggcagtcccccc

SEQ ID NO: 5000844 - DNA, 25 bp, Homo sapien
gccgaggctggcagtccccccaagt

SEQ ID NO: 5000845 - DNA, 25 bp, Homo sapien
tggcagtccccccaagtccgcccac

SEQ ID NO: 5000846 - DNA, 25 bp, Homo sapien
ggaaccaggaactgcgccgcgcagc

SEQ ID NO: 5000847 - DNA, 25 bp, Homo sapien
ccccgagccagctcggcagcgcagg

SEQ ID NO: 5000848 - DNA, 25 bp, Homo sapien
cccttcgcgggaaccaggaactgcg

SEQ ID NO: 5000849 - DNA, 25 bp, Homo sapien
ggctgccacgtaacccttcgcggga

SEQ ID NO: 5000850 - DNA, 25 bp, Homo sapien
gaaggcctgcacctcagggactggg

SEQ ID NO: 5000851 - DNA, 25 bp, Homo sapien
gagccccccgcgtcctgggcggaga

SEQ ID NO: 5000852 - DNA, 25 bp, Homo sapien
cgggactttgcatctccgggccggc

SEQ ID NO: 5000853 - DNA, 25 bp, Homo sapien
cagggaaggcctgcacctcagggac

SEQ ID NO: 5000854 - DNA, 25 bp, Homo sapien
agcaggaagaccatcgccacacagg

SEQ ID NO: 5000855 - DNA, 25 bp, Homo sapien
gaccatcgccacacaggagacgatg

SEQ ID NO: 5000856 - DNA, 25 bp, Homo sapien
gggctcttggtgcttttcttgcgaa

SEQ ID NO: 5000857 - DNA, 25 bp, Homo sapien
ggacgaattcgtggctcagcactgg

SEQ ID NO: 5000858 - DNA, 25 bp, Homo sapien
ctgcaggtgctccgccccggttctg

SEQ ID NO: 5000859 - DNA, 25 bp, Homo sapien
gtgctccgccccggttctgctcttc

SEQ ID NO: 5000860 - DNA, 25 bp, Homo sapien
gcaggtgctccgccccggttctgct

SEQ ID NO: 5000861 - DNA, 25 bp, Homo sapien
aggtgctccgccccggttctgctct

SEQ ID NO: 5000862 - DNA, 25 bp, Homo sapien
tgctcctcacggccccgctgcagcc

SEQ ID NO: 5000863 - DNA, 25 bp, Homo sapien
ctgctcctcacggccccgctgcagc

SEQ ID NO: 5000864 - DNA, 25 bp, Homo sapien
cacagccagtacgcagccgccgggc

SEQ ID NO: 5000865 - DNA, 25 bp, Homo sapien
cagccagtacgcagccgccgggccg

SEQ ID NO: 5000866 - DNA, 25 bp, Homo sapien
acagccagtacgcagccgccgggcc

SEQ ID NO: 5000867 - DNA, 25 bp, Homo sapien
agccagtacgcagccgccgggccgc

SEQ ID NO: 5000868 - DNA, 25 bp, Homo sapien
gcatgcgcaccagggagacgacgct

SEQ ID NO: 5000869 - DNA, 25 bp, Homo sapien
atgcgcaccagggagacgacgctcc

SEQ ID NO: 5000870 - DNA, 25 bp, Homo sapien
ggccgcctccgcgagcccacagcgc

SEQ ID NO: 5000871 - DNA, 25 bp, Homo sapien
ggcgagcatgcgcaccagggagacg

SEQ ID NO: 5000872 - DNA, 25 bp, Homo sapien
atgtgagcggcgcttccctgcttcg

SEQ ID NO: 5000873 - DNA, 25 bp, Homo sapien
tccacaagggtacggtgtattctcc

SEQ ID NO: 5000874 - DNA, 25 bp, Homo sapien
tacaagtgactaacaccgtcaggat

SEQ ID NO: 5000875 - DNA, 25 bp, Homo sapien
tacgaatactacctgactccacaag

SEQ ID NO: 5000876 - DNA, 25 bp, Homo sapien
caatcacagatagaggaaggacttc

SEQ ID NO: 5000877 - DNA, 25 bp, Homo sapien
tgccacggaccaccaagtagaacat

SEQ ID NO: 5000878 - DNA, 25 bp, Homo sapien
tgtcctagagaacatggtgtaaagg

SEQ ID NO: 5000879 - DNA, 25 bp, Homo sapien
gccaaggactgtgggcatatctagt

SEQ ID NO: 5000880 - DNA, 25 bp, Homo sapien
taatagtagttgattttaattagga

SEQ ID NO: 5000881 - DNA, 25 bp, Homo sapien
ttttaattaggaaatgagcactagg

SEQ ID NO: 5000882 - DNA, 25 bp, Homo sapien
tgattttaattaggaaatgagcact

SEQ ID NO: 5000883 - DNA, 25 bp, Homo sapien
ctaatagtagttgattttaattagg

SEQ ID NO: 5000884 - DNA, 25 bp, Homo sapien
tgggaacagactttgctcactccag

SEQ ID NO: 5000885 - DNA, 25 bp, Homo sapien
tcatctcgaagctagacaaaccagc

SEQ ID NO: 5000886 - DNA, 25 bp, Homo sapien
tctaaggaatgggtaatgagccagt

SEQ ID NO: 5000887 - DNA, 25 bp, Homo sapien
gcagtacctaatgtttccttgacca

SEQ ID NO: 5000888 - DNA, 25 bp, Homo sapien
cttctcaggttggttatatgtgcca

SEQ ID NO: 5000889 - DNA, 25 bp, Homo sapien
tattctctcaatctggttaccaaca

SEQ ID NO: 5000890 - DNA, 25 bp, Homo sapien
aacatctgttcttgttcacaggcct

SEQ ID NO: 5000891 - DNA, 25 bp, Homo sapien
tcttatctgcttagctccagttcca

SEQ ID NO: 5000892 - DNA, 25 bp, Homo sapien
tgttctgaacggaaggtaaagtgat

SEQ ID NO: 5000893 - DNA, 25 bp, Homo sapien
gcagaggtgacgacaagcaggcttc

SEQ ID NO: 5000894 - DNA, 25 bp, Homo sapien
tgagtcagccaaaacttccgggtgt

SEQ ID NO: 5000895 - DNA, 25 bp, Homo sapien
gcaggcttcggaaactcttgaataa

SEQ ID NO: 5000896 - DNA, 25 bp, Homo sapien
gagtaaaggtgcatagaaatctgtg

SEQ ID NO: 5000897 - DNA, 25 bp, Homo sapien
gcatgaatcatttgtggtataccag

SEQ ID NO: 5000898 - DNA, 25 bp, Homo sapien
tatgtacagatagagacaagggttg

SEQ ID NO: 5000899 - DNA, 25 bp, Homo sapien
gttatggaaccaatagatagtcatg

SEQ ID NO: 5000900 - DNA, 25 bp, Homo sapien
aaacataccattctctgaaagcaaa

SEQ ID NO: 5000901 - DNA, 25 bp, Homo sapien
ctatagttaagaaaacataccattc

SEQ ID NO: 5000902 - DNA, 25 bp, Homo sapien
caaggttagagaaataacctatcat

SEQ ID NO: 5000903 - DNA, 25 bp, Homo sapien
catatggttgtatagtgtaatttac

SEQ ID NO: 5000904 - DNA, 25 bp, Homo sapien
agatgagctttccatttcttgtcag

SEQ ID NO: 5000905 - DNA, 25 bp, Homo sapien
gatgagctttccatttcttgtcagg

SEQ ID NO: 5000906 - DNA, 25 bp, Homo sapien
ctaaagatgagctttccatttcttg

SEQ ID NO: 5000907 - DNA, 25 bp, Homo sapien
aaagatgagctttccatttcttgtc

SEQ ID NO: 5000908 - DNA, 25 bp, Homo sapien
tgtgctactgaccttcctagcgcct

SEQ ID NO: 5000909 - DNA, 25 bp, Homo sapien
ctgtgctactgaccttcctagcgcc

SEQ ID NO: 5000910 - DNA, 25 bp, Homo sapien
aaactaaggcatctgtaaaaatatt

SEQ ID NO: 5000911 - DNA, 25 bp, Homo sapien
ggaaactaaggcatctgtaaaaata

SEQ ID NO: 5000912 - DNA, 25 bp, Homo sapien
tcaaaggaaactaaggcatctgtaa

SEQ ID NO: 5000913 - DNA, 25 bp, Homo sapien
cctcaaaggaaactaaggcatctgt

SEQ ID NO: 5000914 - DNA, 25 bp, Homo sapien
tagaagaaaatttggaagcatactc

SEQ ID NO: 5000915 - DNA, 25 bp, Homo sapien
gaagaaaatttggaagcatactcac

SEQ ID NO: 5000916 - DNA, 25 bp, Homo sapien
ttaaatgctggtaatagaagaaaat

SEQ ID NO: 5000917 - DNA, 25 bp, Homo sapien
tggtaatagaagaaaatttggaagc

SEQ ID NO: 5000918 - DNA, 25 bp, Homo sapien
tttcatgtaaattctcaggagtatt

SEQ ID NO: 5000919 - DNA, 25 bp, Homo sapien
gaagtaagagattatgtttagccat

SEQ ID NO: 5000920 - DNA, 25 bp, Homo sapien
aatgaagtaagagattatgtttagc

SEQ ID NO: 5000921 - DNA, 25 bp, Homo sapien
taagagattatgtttagccatttca

SEQ ID NO: 5000922 - DNA, 25 bp, Homo sapien
tagcactgtagaaagtttaggctgc

SEQ ID NO: 5000923 - DNA, 25 bp, Homo sapien
ggcgtaacttctgatctgggatata

SEQ ID NO: 5000924 - DNA, 25 bp, Homo sapien
aagttcaatgatggctcgaaatggc

SEQ ID NO: 5000925 - DNA, 25 bp, Homo sapien
tggtctcaaatctagaaaagtggcg

SEQ ID NO: 5000926 - DNA, 25 bp, Homo sapien
gttgaattttagcttcagcattatg

SEQ ID NO: 5000927 - DNA, 25 bp, Homo sapien
taagaatttgctgctctcgaatatt

SEQ ID NO: 5000928 - DNA, 25 bp, Homo sapien
tcagcattatgaattactgggccat

SEQ ID NO: 5000929 - DNA, 25 bp, Homo sapien
caaagttctcacgaaataatgtaag

SEQ ID NO: 5000930 - DNA, 25 bp, Homo sapien
ctggatatataatatcagctttgat

SEQ ID NO: 5000931 - DNA, 25 bp, Homo sapien
gagccatgtgatcatcagtgtggcc

SEQ ID NO: 5000932 - DNA, 25 bp, Homo sapien
tcctcttctaagagtagagccatgt

SEQ ID NO: 5000933 - DNA, 25 bp, Homo sapien
ccctaggatgcaatctccagaaaag

SEQ ID NO: 5000934 - DNA, 25 bp, Homo sapien
tagtagttattatctaaaagcttaa

SEQ ID NO: 5000935 - DNA, 25 bp, Homo sapien
cagaaggtggtcagaaaaagactct

SEQ ID NO: 5000936 - DNA, 25 bp, Homo sapien
taaaagaaactttcttaacatgcag

SEQ ID NO: 5000937 - DNA, 25 bp, Homo sapien
tcttaacatgcagaaggtggtcaga

SEQ ID NO: 5000938 - DNA, 25 bp, Homo sapien
tgtttgctattctacctcacaaggt

SEQ ID NO: 5000939 - DNA, 25 bp, Homo sapien
tatgtgttattctgtaggcttcaca

SEQ ID NO: 5000940 - DNA, 25 bp, Homo sapien
tgttctgcaaagcaccccgacttct

SEQ ID NO: 5000941 - DNA, 25 bp, Homo sapien
tatacgctcagtacttggcacttag

SEQ ID NO: 5000942 - DNA, 25 bp, Homo sapien
tatcctacagtgaggcctaaagcct

SEQ ID NO: 5000943 - DNA, 25 bp, Homo sapien
caatctcactaagggaaacgctgga

SEQ ID NO: 5000944 - DNA, 25 bp, Homo sapien
aagactctacgataccaatgttgga

SEQ ID NO: 5000945 - DNA, 25 bp, Homo sapien
gccaggcctttacgctacatgaaga

SEQ ID NO: 5000946 - DNA, 25 bp, Homo sapien
gtagaaccactcttcatctgaaaac

SEQ ID NO: 5000947 - DNA, 25 bp, Homo sapien
agaaccactcttcatctgaaaactg

SEQ ID NO: 5000948 - DNA, 25 bp, Homo sapien
gaaccactcttcatctgaaaactgt

SEQ ID NO: 5000949 - DNA, 25 bp, Homo sapien
ttgtagaaccactcttcatctgaaa

SEQ ID NO: 5000950 - DNA, 25 bp, Homo sapien
tgactgaattgacagccaatgcaac

SEQ ID NO: 5000951 - DNA, 25 bp, Homo sapien
tacctgctggattgatcgagctgag

SEQ ID NO: 5000952 - DNA, 25 bp, Homo sapien
tcgagctgagcatgcaaccttgaaa

SEQ ID NO: 5000953 - DNA, 25 bp, Homo sapien
tgaaaacctcccatgcaatatccct

SEQ ID NO: 5000954 - DNA, 25 bp, Homo sapien
ccccagctcctaaggtctgagcggt

SEQ ID NO: 5000955 - DNA, 25 bp, Homo sapien
catactgacgctgaatttaacatgg

SEQ ID NO: 5000956 - DNA, 25 bp, Homo sapien
agagatgggtttctactttgtggcc

SEQ ID NO: 5000957 - DNA, 25 bp, Homo sapien
aacatggacatgcaattggcatagt

SEQ ID NO: 5000958 - DNA, 25 bp, Homo sapien
atgcctggccccgtaattcattcct

SEQ ID NO: 5000959 - DNA, 25 bp, Homo sapien
catgcctggccccgtaattcattcc

SEQ ID NO: 5000960 - DNA, 25 bp, Homo sapien
cttctctctgaggattccgtgggag

SEQ ID NO: 5000961 - DNA, 25 bp, Homo sapien
gattccgtgggagttttttaatgca

SEQ ID NO: 5000962 - DNA, 25 bp, Homo sapien
cagataaacatattgttgctctcca

SEQ ID NO: 5000963 - DNA, 25 bp, Homo sapien
tggctccctcagtcttaatcacatc

SEQ ID NO: 5000964 - DNA, 25 bp, Homo sapien
tagctgagatgtcccaattgtagtc

SEQ ID NO: 5000965 - DNA, 25 bp, Homo sapien
cacagtccccttagattggaagaaa

SEQ ID NO: 5000966 - DNA, 25 bp, Homo sapien
taagttcctatggtacacagtcccc

SEQ ID NO: 5000967 - DNA, 25 bp, Homo sapien
taactggcagcctggtgatattggg

SEQ ID NO: 5000968 - DNA, 25 bp, Homo sapien
actacaatttcctggattgctgtgt

SEQ ID NO: 5000969 - DNA, 25 bp, Homo sapien
aacagctgatgtattctggaattgc

SEQ ID NO: 5000970 - DNA, 25 bp, Homo sapien
gttagagcctgctttaaacagctga

SEQ ID NO: 5000971 - DNA, 25 bp, Homo sapien
ctggaattgctggttctccagtgtc

SEQ ID NO: 5000972 - DNA, 25 bp, Homo sapien
ggtaatggcctcatagcccattggc

SEQ ID NO: 5000973 - DNA, 25 bp, Homo sapien
tctgtagcacagtagatgtccttca

SEQ ID NO: 5000974 - DNA, 25 bp, Homo sapien
taacataccatagaaagcattttgc

SEQ ID NO: 5000975 - DNA, 25 bp, Homo sapien
cagtgttgaactgtcctatccggag

SEQ ID NO: 5000976 - DNA, 25 bp, Homo sapien
gggtggtcgtattttagctagcttc

SEQ ID NO: 5000977 - DNA, 25 bp, Homo sapien
cgatcagtcaaagcccgggctccgg

SEQ ID NO: 5000978 - DNA, 25 bp, Homo sapien
gcagccgcgatcagtcaaagcccgg

SEQ ID NO: 5000979 - DNA, 25 bp, Homo sapien
agatccgagtgtctgcgtgcagtcc

SEQ ID NO: 5000980 - DNA, 25 bp, Homo sapien
gtcatgggacccgggttacagccca

SEQ ID NO: 5000981 - DNA, 25 bp, Homo sapien
tcgacgcgctgcagtacagcagcca

SEQ ID NO: 5000982 - DNA, 25 bp, Homo sapien
cactaggtaggtgttggtgccttgg

SEQ ID NO: 5000983 - DNA, 25 bp, Homo sapien
aacacacgcacgactcgattggaca

SEQ ID NO: 5000984 - DNA, 25 bp, Homo sapien
ggatagcgagtagcgtccacgtgat

SEQ ID NO: 5000985 - DNA, 25 bp, Homo sapien
cacgtgatgcctcgcaacccgggag

SEQ ID NO: 5000986 - DNA, 25 bp, Homo sapien
tctggatactccagcgcggaagaag

SEQ ID NO: 5000987 - DNA, 25 bp, Homo sapien
ccggcgtgtcgcctatctggatact

SEQ ID NO: 5000988 - DNA, 25 bp, Homo sapien
tattgtcattgtgtaggagagggac

SEQ ID NO: 5000989 - DNA, 25 bp, Homo sapien
agagggactgcattccatggacttg

SEQ ID NO: 5000990 - DNA, 25 bp, Homo sapien
attaccgtattggtatttgctgtga

SEQ ID NO: 5000991 - DNA, 25 bp, Homo sapien
tcttgttttgactattgtcattgtg

SEQ ID NO: 5000992 - DNA, 25 bp, Homo sapien
cgatttgactcttgatacttgtgtg

SEQ ID NO: 5000993 - DNA, 25 bp, Homo sapien
tctgcttgatcgatttgactcttga

SEQ ID NO: 5000994 - DNA, 25 bp, Homo sapien
ggtacaccaatgaattgtacgtttg

SEQ ID NO: 5000995 - DNA, 25 bp, Homo sapien
atttgattttcaatcttggatatcc

SEQ ID NO: 5000996 - DNA, 25 bp, Homo sapien
cagggtcttagatgtgataaactcc

SEQ ID NO: 5000997 - DNA, 25 bp, Homo sapien
gaatgctgtctggagttaaatgcct

SEQ ID NO: 5000998 - DNA, 25 bp, Homo sapien
tccagatcagtgagtggcagacact

SEQ ID NO: 5000999 - DNA, 25 bp, Homo sapien
ggtttctataagactctgaatgctg

SEQ ID NO: 5001000 - DNA, 25 bp, Homo sapien
tgcagggaaaagccaggttctcctt

SEQ ID NO: 5001001 - DNA, 25 bp, Homo sapien
ctgcagggaaaagccaggttctcct

SEQ ID NO: 5001002 - DNA, 25 bp, Homo sapien
gcagggaaaagccaggttctccttg

SEQ ID NO: 5001003 - DNA, 25 bp, Homo sapien
cagggaaaagccaggttctccttgt

SEQ ID NO: 5001004 - DNA, 25 bp, Homo sapien
ccaacttcagtgatgctgatgttaa

SEQ ID NO: 5001005 - DNA, 25 bp, Homo sapien
tgataacccaccatcatcaggccag

SEQ ID NO: 5001006 - DNA, 25 bp, Homo sapien
cttcagtgatgctgatgttaataag

SEQ ID NO: 5001007 - DNA, 25 bp, Homo sapien
gttctgataacccaccatcatcagg

SEQ ID NO: 5001008 - DNA, 25 bp, Homo sapien
aattagttgctttgctattctcggg

SEQ ID NO: 5001009 - DNA, 25 bp, Homo sapien
tactggcttccaagtcctgcagagg

SEQ ID NO: 5001010 - DNA, 25 bp, Homo sapien
tcaaagtctgatggaaacatgtagg

SEQ ID NO: 5001011 - DNA, 25 bp, Homo sapien
cacctggacttaggttgaacttcaa

SEQ ID NO: 5001012 - DNA, 25 bp, Homo sapien
cagtgaacatgagtgctggcaaaag

SEQ ID NO: 5001013 - DNA, 25 bp, Homo sapien
tcagtgaacatgagtgctggcaaaa

SEQ ID NO: 5001014 - DNA, 25 bp, Homo sapien
agtgaacatgagtgctggcaaaagg

SEQ ID NO: 5001015 - DNA, 25 bp, Homo sapien
gaccagctgatctagggtcaggcat

SEQ ID NO: 5001016 - DNA, 25 bp, Homo sapien
cgactgctgaaaaagaccagctgat

SEQ ID NO: 5001017 - DNA, 25 bp, Homo sapien
ctgctgaaaaagaccagctgatcta

SEQ ID NO: 5001018 - DNA, 25 bp, Homo sapien
agaccagctgatctagggtcaggca

SEQ ID NO: 5001019 - DNA, 25 bp, Homo sapien
taaatgcttcctgaagctgagagga

SEQ ID NO: 5001020 - DNA, 25 bp, Homo sapien
tccggtgtaaggttctgagtctcac

SEQ ID NO: 5001021 - DNA, 25 bp, Homo sapien
gccagagcttatagttccggtgtaa

SEQ ID NO: 5001022 - DNA, 25 bp, Homo sapien
tgagaggaaccctaaaattctgtcc

SEQ ID NO: 5001023 - DNA, 25 bp, Homo sapien
tagcagttatttgatggatatagtg

SEQ ID NO: 5001024 - DNA, 25 bp, Homo sapien
tctgcatcatttgccgacttgcagg

SEQ ID NO: 5001025 - DNA, 25 bp, Homo sapien
cgacttgcagggattttagcagtta

SEQ ID NO: 5001026 - DNA, 25 bp, Homo sapien
ttgatggatatagtgaatgttggcc

SEQ ID NO: 5001027 - DNA, 25 bp, Homo sapien
agcagttattggcatgtgtcaactc

SEQ ID NO: 5001028 - DNA, 25 bp, Homo sapien
agttattggcatgtgtcaactctgg

SEQ ID NO: 5001029 - DNA, 25 bp, Homo sapien
gcagttattggcatgtgtcaactct

SEQ ID NO: 5001030 - DNA, 25 bp, Homo sapien
ttagcagttattggcatgtgtcaac

SEQ ID NO: 5001031 - DNA, 25 bp, Homo sapien
ccagaaggctctctatgacggccca

SEQ ID NO: 5001032 - DNA, 25 bp, Homo sapien
gaatggattattctggcttgtgcca

SEQ ID NO: 5001033 - DNA, 25 bp, Homo sapien
acatttcgcctttcttcagagtgac

SEQ ID NO: 5001034 - DNA, 25 bp, Homo sapien
tcagagtgacgtcctgcagaagcat

SEQ ID NO: 5001035 - DNA, 25 bp, Homo sapien
aatagtatcagcatgcatccagcca

SEQ ID NO: 5001036 - DNA, 25 bp, Homo sapien
cctgttctttggataatagtatcag

SEQ ID NO: 5001037 - DNA, 25 bp, Homo sapien
tctttggataatagtatcagcatgc

SEQ ID NO: 5001038 - DNA, 25 bp, Homo sapien
tggataatagtatcagcatgcatcc

SEQ ID NO: 5001039 - DNA, 25 bp, Homo sapien
cattttggttgaccctgtggtcttg

SEQ ID NO: 5001040 - DNA, 25 bp, Homo sapien
ggacattttggttgaccctgtggtc

SEQ ID NO: 5001041 - DNA, 25 bp, Homo sapien
ccataaatgcaacacaataagctgc

SEQ ID NO: 5001042 - DNA, 25 bp, Homo sapien
gctgctcaaccagaggaatagtcat

SEQ ID NO: 5001043 - DNA, 25 bp, Homo sapien
caataagctgctcaaccagaggaat

SEQ ID NO: 5001044 - DNA, 25 bp, Homo sapien
taaatgcaacacaataagctgctca

SEQ ID NO: 5001045 - DNA, 25 bp, Homo sapien
ttctccccatttagttcaaccacac

SEQ ID NO: 5001046 - DNA, 25 bp, Homo sapien
tgggcagctggttgatgggttcttc

SEQ ID NO: 5001047 - DNA, 25 bp, Homo sapien
gggttcttccagctggacatcttct

SEQ ID NO: 5001048 - DNA, 25 bp, Homo sapien
ctaagcagactgccctgggcagctg

SEQ ID NO: 5001049 - DNA, 25 bp, Homo sapien
tccagctgtagtgtttcatgatgtc

SEQ ID NO: 5001050 - DNA, 25 bp, Homo sapien
tgcttcatacagcaaacaagagcct

SEQ ID NO: 5001051 - DNA, 25 bp, Homo sapien
tctagtatctccatgtagggggcta

SEQ ID NO: 5001052 - DNA, 25 bp, Homo sapien
tagatcaaccattcagcttccagct

SEQ ID NO: 5001053 - DNA, 25 bp, Homo sapien
gaagtgatagattgttgcagtcaca

SEQ ID NO: 5001054 - DNA, 25 bp, Homo sapien
cccataagagggaagtgatagattg

SEQ ID NO: 5001055 - DNA, 25 bp, Homo sapien
atcccataagagggaagtgatagat

SEQ ID NO: 5001056 - DNA, 25 bp, Homo sapien
agtgatagattgttgcagtcacagc

SEQ ID NO: 5001057 - DNA, 25 bp, Homo sapien
ccacagtttcacttacgagtgccaa

SEQ ID NO: 5001058 - DNA, 25 bp, Homo sapien
aatgtgtgccagcattggacataca

SEQ ID NO: 5001059 - DNA, 25 bp, Homo sapien
tacgagtgccaatgtgtgccagcat

SEQ ID NO: 5001060 - DNA, 25 bp, Homo sapien
tcctcaccacagtttcacttacgag

SEQ ID NO: 5001061 - DNA, 25 bp, Homo sapien
ccagaatcaatagacccactgttgg

SEQ ID NO: 5001062 - DNA, 25 bp, Homo sapien
aagctgaccacccagttttgtgaga

SEQ ID NO: 5001063 - DNA, 25 bp, Homo sapien
aatagacccactgttggttctctcc

SEQ ID NO: 5001064 - DNA, 25 bp, Homo sapien
aatcaatagacccactgttggttct

SEQ ID NO: 5001065 - DNA, 25 bp, Homo sapien
aactcttccagttcatgggggtctg

SEQ ID NO: 5001066 - DNA, 25 bp, Homo sapien
actcttccagttcatgggggtctgt

SEQ ID NO: 5001067 - DNA, 25 bp, Homo sapien
tcaactcttccagttcatgggggtc

SEQ ID NO: 5001068 - DNA, 25 bp, Homo sapien
cttcaactcttccagttcatggggg

SEQ ID NO: 5001069 - DNA, 25 bp, Homo sapien
tggcctctggctctacctgcctctt

SEQ ID NO: 5001070 - DNA, 25 bp, Homo sapien
gcctctggctctacctgcctctttc

SEQ ID NO: 5001071 - DNA, 25 bp, Homo sapien
ggcctctggctctacctgcctcttt

SEQ ID NO: 5001072 - DNA, 25 bp, Homo sapien
ggctatggccagaataaccattcag

SEQ ID NO: 5001073 - DNA, 25 bp, Homo sapien
tggccagaataaccattcagggcct

SEQ ID NO: 5001074 - DNA, 25 bp, Homo sapien
gccacatggctatggccagaataac

SEQ ID NO: 5001075 - DNA, 25 bp, Homo sapien
cattcagggcctgaataacaatcat

SEQ ID NO: 5001076 - DNA, 25 bp, Homo sapien
gcacagccggtctgtgtccacaagc

SEQ ID NO: 5001077 - DNA, 25 bp, Homo sapien
agcacagccggtctgtgtccacaag

SEQ ID NO: 5001078 - DNA, 25 bp, Homo sapien
catctcttccaaagagcttggcaca

SEQ ID NO: 5001079 - DNA, 25 bp, Homo sapien
cagatctgtcatacagtcagctgta

SEQ ID NO: 5001080 - DNA, 25 bp, Homo sapien
tggacctgccgcaagaagatgagcc

SEQ ID NO: 5001081 - DNA, 25 bp, Homo sapien
cccttggtagatggaggcagtgcca

SEQ ID NO: 5001082 - DNA, 25 bp, Homo sapien
taaacgtgccatggaagacatcccc

SEQ ID NO: 5001083 - DNA, 25 bp, Homo sapien
tgaaccgcacaagtggttgtgaagc

SEQ ID NO: 5001084 - DNA, 25 bp, Homo sapien
tgtattcagcaatacagcctccctg

SEQ ID NO: 5001085 - DNA, 25 bp, Homo sapien
gtaggtggctatctctaaacgtgcc

SEQ ID NO: 5001086 - DNA, 25 bp, Homo sapien
gggagatatgatccctgctatgagg

SEQ ID NO: 5001087 - DNA, 25 bp, Homo sapien
tgagccccctgtcatccctgtttag

SEQ ID NO: 5001088 - DNA, 25 bp, Homo sapien
actggtgtgggatgagccccctgtc

SEQ ID NO: 5001089 - DNA, 25 bp, Homo sapien
tatgaggatcacgaaggactggtgt

SEQ ID NO: 5001090 - DNA, 25 bp, Homo sapien
ttcgaggacttgacagccaagtgcc

SEQ ID NO: 5001091 - DNA, 25 bp, Homo sapien
gggcttcagctgacttgttaaggct

SEQ ID NO: 5001092 - DNA, 25 bp, Homo sapien
agccaagtgccaattctacagtgaa

SEQ ID NO: 5001093 - DNA, 25 bp, Homo sapien
taaggcttgaatcctgtcttcgagg

SEQ ID NO: 5001094 - DNA, 25 bp, Homo sapien
gccccgatgcccctgtgcctactct

SEQ ID NO: 5001095 - DNA, 25 bp, Homo sapien
ccccgatgcccctgtgcctactctc

SEQ ID NO: 5001096 - DNA, 25 bp, Homo sapien
cagtgaaactttgtcgcaaatttgg

SEQ ID NO: 5001097 - DNA, 25 bp, Homo sapien
ctttgtcgcaaatttgggttatggc

SEQ ID NO: 5001098 - DNA, 25 bp, Homo sapien
tgtcgcaaatttgggttatggctca

SEQ ID NO: 5001099 - DNA, 25 bp, Homo sapien
tccttcctgccagtgaaactttgtc

SEQ ID NO: 5001100 - DNA, 25 bp, Homo sapien
tccgttgtcttcctgttggtctgca

SEQ ID NO: 5001101 - DNA, 25 bp, Homo sapien
tctgcaggaccccacgtgagctgtt

SEQ ID NO: 5001102 - DNA, 25 bp, Homo sapien
taatccctccaggtccgttgtcttc

SEQ ID NO: 5001103 - DNA, 25 bp, Homo sapien
tccttctgtcgtaatccctccaggt

SEQ ID NO: 5001104 - DNA, 25 bp, Homo sapien
ggtcttatgttccaagagttgggag

SEQ ID NO: 5001105 - DNA, 25 bp, Homo sapien
taccttgagatgtggtcttatgttc

SEQ ID NO: 5001106 - DNA, 25 bp, Homo sapien
gctaccttgagatgtggtcttatgt

SEQ ID NO: 5001107 - DNA, 25 bp, Homo sapien
agatgtggtcttatgttccaagagt

SEQ ID NO: 5001108 - DNA, 25 bp, Homo sapien
cttggtaacaagcaggacagaatat

SEQ ID NO: 5001109 - DNA, 25 bp, Homo sapien
tcagcttggtaacaagcaggacaga

SEQ ID NO: 5001110 - DNA, 25 bp, Homo sapien
ttgtcagcttggtaacaagcaggac

SEQ ID NO: 5001111 - DNA, 25 bp, Homo sapien
aactttgtcagcttggtaacaagca

SEQ ID NO: 5001112 - DNA, 25 bp, Homo sapien
ccacttcagtaggagagatctctgg

SEQ ID NO: 5001113 - DNA, 25 bp, Homo sapien
aagcgaccacaagccgagtcatagg

SEQ ID NO: 5001114 - DNA, 25 bp, Homo sapien
catgatgaacgcttgagactgtgac

SEQ ID NO: 5001115 - DNA, 25 bp, Homo sapien
aggtggtgtgccacgcgcagttcca

SEQ ID NO: 5001116 - DNA, 25 bp, Homo sapien
tggtcatcccgcagattgcgcactg

SEQ ID NO: 5001117 - DNA, 25 bp, Homo sapien
ctgtgagtggtcatcccgcagattg

SEQ ID NO: 5001118 - DNA, 25 bp, Homo sapien
ccgcagattgcgcactgtgatgctg

SEQ ID NO: 5001119 - DNA, 25 bp, Homo sapien
gattgcgcactgtgatgctggttcc

SEQ ID NO: 5001120 - DNA, 25 bp, Homo sapien
ccatggcaggctgatcatgtcgtgt

SEQ ID NO: 5001121 - DNA, 25 bp, Homo sapien
tcgtgtgtaactgctctgaacaggc

SEQ ID NO: 5001122 - DNA, 25 bp, Homo sapien
gatcatgtcgtgtgtaactgctctg

SEQ ID NO: 5001123 - DNA, 25 bp, Homo sapien
gcttgcatacaggccccatggcagg

SEQ ID NO: 5001124 - DNA, 25 bp, Homo sapien
gaggggaggatcgttcctgtggtct

SEQ ID NO: 5001125 - DNA, 25 bp, Homo sapien
ggagaggggaggatcgttcctgtgg

SEQ ID NO: 5001126 - DNA, 25 bp, Homo sapien
tggagaggggaggatcgttcctgtg

SEQ ID NO: 5001127 - DNA, 25 bp, Homo sapien
ggggaggatcgttcctgtggtctcc

SEQ ID NO: 5001128 - DNA, 25 bp, Homo sapien
tggttgctttagtgaatatcttttc

SEQ ID NO: 5001129 - DNA, 25 bp, Homo sapien
tcatcaccatattcagggacatctg

SEQ ID NO: 5001130 - DNA, 25 bp, Homo sapien
tcttttcatcaccatattcagggac

SEQ ID NO: 5001131 - DNA, 25 bp, Homo sapien
ggttgctttagtgaatatcttttca

SEQ ID NO: 5001132 - DNA, 25 bp, Homo sapien
gcattttcccccgaaggagcagtgt

SEQ ID NO: 5001133 - DNA, 25 bp, Homo sapien
cctgttctctttaaaacctgagctg

SEQ ID NO: 5001134 - DNA, 25 bp, Homo sapien
tgagctgttactcatcactggcgtg

SEQ ID NO: 5001135 - DNA, 25 bp, Homo sapien
ccgaaggagcagtgtttaaattgtc

SEQ ID NO: 5001136 - DNA, 25 bp, Homo sapien
catgacttgcttcattttggttccc

SEQ ID NO: 5001137 - DNA, 25 bp, Homo sapien
atccaaatcattgcaagttcagaag

SEQ ID NO: 5001138 - DNA, 25 bp, Homo sapien
tattctgttcctcctctatcacccc

SEQ ID NO: 5001139 - DNA, 25 bp, Homo sapien
catccaaatcattgcaagttcagaa

SEQ ID NO: 5001140 - DNA, 25 bp, Homo sapien
ctgtgaagtcgttaatgagctccat

SEQ ID NO: 5001141 - DNA, 25 bp, Homo sapien
taagtctacaatcagcttatttcca

SEQ ID NO: 5001142 - DNA, 25 bp, Homo sapien
aagagtgagggcagttatgtataag

SEQ ID NO: 5001143 - DNA, 25 bp, Homo sapien
tatctcctggtgcatctgggaatga

SEQ ID NO: 5001144 - DNA, 25 bp, Homo sapien
tatcctttaacgacttgtcagaggt

SEQ ID NO: 5001145 - DNA, 25 bp, Homo sapien
tacagcactgagatcgggttcctga

SEQ ID NO: 5001146 - DNA, 25 bp, Homo sapien
tatgtatgacgtacagcactgagat

SEQ ID NO: 5001147 - DNA, 25 bp, Homo sapien
aagcatttggattatatgtatgacg

SEQ ID NO: 5001148 - DNA, 25 bp, Homo sapien
tgagatcgggttcctgaagaattgt

SEQ ID NO: 5001149 - DNA, 25 bp, Homo sapien
ccatcttctgagtcacaatcctcat

SEQ ID NO: 5001150 - DNA, 25 bp, Homo sapien
tgttgccatcttctgagtcacaatc

SEQ ID NO: 5001151 - DNA, 25 bp, Homo sapien
gttgccatcttctgagtcacaatcc

SEQ ID NO: 5001152 - DNA, 25 bp, Homo sapien
tgccatcttctgagtcacaatcctc

SEQ ID NO: 5001153 - DNA, 25 bp, Homo sapien
tttcccagctgaattgtcaattcct

SEQ ID NO: 5001154 - DNA, 25 bp, Homo sapien
gtgtgtttagctctcaatatcagtg

SEQ ID NO: 5001155 - DNA, 25 bp, Homo sapien
tatcagtgtgctagctttctttccc

SEQ ID NO: 5001156 - DNA, 25 bp, Homo sapien
aaaggcagcttcatcctgcacaggg

SEQ ID NO: 5001157 - DNA, 25 bp, Homo sapien
ctttttgttctatatccagtgttct

SEQ ID NO: 5001158 - DNA, 25 bp, Homo sapien
cttgggttcggcttgacaactactg

SEQ ID NO: 5001159 - DNA, 25 bp, Homo sapien
tgttcttgcatagaagcagtcacag

SEQ ID NO: 5001160 - DNA, 25 bp, Homo sapien
gttcggcttgacaactactgaagag

SEQ ID NO: 5001161 - DNA, 25 bp, Homo sapien
tctaggggccagttatctttattct

SEQ ID NO: 5001162 - DNA, 25 bp, Homo sapien
ttaatgcctctaggggccagttatc

SEQ ID NO: 5001163 - DNA, 25 bp, Homo sapien
gggccagttatctttattctgttcc

SEQ ID NO: 5001164 - DNA, 25 bp, Homo sapien
tcagtttaatgcctctaggggccag

SEQ ID NO: 5001165 - DNA, 25 bp, Homo sapien
cttgatctgcattatcatttaggcc

SEQ ID NO: 5001166 - DNA, 25 bp, Homo sapien
tgatctgcattatcatttaggcccc

SEQ ID NO: 5001167 - DNA, 25 bp, Homo sapien
atctgcattatcatttaggccccat

SEQ ID NO: 5001168 - DNA, 25 bp, Homo sapien
gatctgcattatcatttaggcccca

SEQ ID NO: 5001169 - DNA, 25 bp, Homo sapien
cttgtaagtccagggggaccttcat

SEQ ID NO: 5001170 - DNA, 25 bp, Homo sapien
tccagggggaccttcatctaaatct

SEQ ID NO: 5001171 - DNA, 25 bp, Homo sapien
ttggttaatcctcagtgtagccttg

SEQ ID NO: 5001172 - DNA, 25 bp, Homo sapien
ctgagtttggttaatcctcagtgta

SEQ ID NO: 5001173 - DNA, 25 bp, Homo sapien
gagaggccacgaatgaaaccctcac

SEQ ID NO: 5001174 - DNA, 25 bp, Homo sapien
tcgagaggccacgaatgaaaccctc

SEQ ID NO: 5001175 - DNA, 25 bp, Homo sapien
ggccacgaatgaaaccctcactcag

SEQ ID NO: 5001176 - DNA, 25 bp, Homo sapien
tttcgagaggccacgaatgaaaccc

SEQ ID NO: 5001177 - DNA, 25 bp, Homo sapien
catggtagattcatgtaccagatcg

SEQ ID NO: 5001178 - DNA, 25 bp, Homo sapien
gggtttttggcatggtagattcatg

SEQ ID NO: 5001179 - DNA, 25 bp, Homo sapien
gagctggctttgtaatgggtttttg

SEQ ID NO: 5001180 - DNA, 25 bp, Homo sapien
gtaccagatcgagagggagagggac

SEQ ID NO: 5001181 - DNA, 25 bp, Homo sapien
ttggactttgatttggccagtaagt

SEQ ID NO: 5001182 - DNA, 25 bp, Homo sapien
taatcatgggctgttaacatttttt

SEQ ID NO: 5001183 - DNA, 25 bp, Homo sapien
tcctctttcctgttaagcacatcat

SEQ ID NO: 5001184 - DNA, 25 bp, Homo sapien
ctttcctgttaagcacatcattggg

SEQ ID NO: 5001185 - DNA, 25 bp, Homo sapien
ctctttcctgttaagcacatcattg

SEQ ID NO: 5001186 - DNA, 25 bp, Homo sapien
ttcctctttcctgttaagcacatca

SEQ ID NO: 5001187 - DNA, 25 bp, Homo sapien
ctaggagagaagaacctcaggtttt

SEQ ID NO: 5001188 - DNA, 25 bp, Homo sapien
tgtgccgctgcgctcagttcgcgtt

SEQ ID NO: 5001189 - DNA, 25 bp, Homo sapien
tttttgttttgtgccgctgcgctca

SEQ ID NO: 5001190 - DNA, 25 bp, Homo sapien
cgctgcgctcagttcgcgttggata

SEQ ID NO: 5001191 - DNA, 25 bp, Homo sapien
tcatattttccacaatcctccaatt

SEQ ID NO: 5001192 - DNA, 25 bp, Homo sapien
catattttccacaatcctccaatta

SEQ ID NO: 5001193 - DNA, 25 bp, Homo sapien
atattttccacaatcctccaattac

SEQ ID NO: 5001194 - DNA, 25 bp, Homo sapien
tctgtaccaaatatggagggtgatg

SEQ ID NO: 5001195 - DNA, 25 bp, Homo sapien
catgttaatgttgtctctggtctgg

SEQ ID NO: 5001196 - DNA, 25 bp, Homo sapien
ggtgatgttaaaaacttgtgtgaga

SEQ ID NO: 5001197 - DNA, 25 bp, Homo sapien
caaaaccattctggtaattgagaag

SEQ ID NO: 5001198 - DNA, 25 bp, Homo sapien
taaatgccgataagcaaccttccat

SEQ ID NO: 5001199 - DNA, 25 bp, Homo sapien
tcagtgcttcctgacatatgtttaa

SEQ ID NO: 5001200 - DNA, 25 bp, Homo sapien
ggacagatgttgtccacaacacact

SEQ ID NO: 5001201 - DNA, 25 bp, Homo sapien
gatggctgctgtataacggatttta

SEQ ID NO: 5001202 - DNA, 25 bp, Homo sapien
tcattttgcatatgttcgtagcatt

SEQ ID NO: 5001203 - DNA, 25 bp, Homo sapien
gataagaattctgctaggattgaat

SEQ ID NO: 5001204 - DNA, 25 bp, Homo sapien
cattttgcatatgttcgtagcattt

SEQ ID NO: 5001205 - DNA, 25 bp, Homo sapien
cagaagataagaattctgctaggat

SEQ ID NO: 5001206 - DNA, 25 bp, Homo sapien
tgtaaagagtgggagaatcgtggga

SEQ ID NO: 5001207 - DNA, 25 bp, Homo sapien
aattacgcgaggagccctagagcct

SEQ ID NO: 5001208 - DNA, 25 bp, Homo sapien
cagaatcttcttggacacgccagtc

SEQ ID NO: 5001209 - DNA, 25 bp, Homo sapien
gacacgccagtcagtttcttgggct

SEQ ID NO: 5001210 - DNA, 25 bp, Homo sapien
tccccctcttggttgccgtccttgc

SEQ ID NO: 5001211 - DNA, 25 bp, Homo sapien
gccacgaacaggcagtttgtttaaa

SEQ ID NO: 5001212 - DNA, 25 bp, Homo sapien
ttcctgccacgaacaggcagtttgt

SEQ ID NO: 5001213 - DNA, 25 bp, Homo sapien
aatcctgattgccagtgtccacctg

SEQ ID NO: 5001214 - DNA, 25 bp, Homo sapien
gtgttatttcatcaaggccctcaga

SEQ ID NO: 5001215 - DNA, 25 bp, Homo sapien
cataatgcaggtggagaggaacgtt

SEQ ID NO: 5001216 - DNA, 25 bp, Homo sapien
aaactcagataaggcacggcacatg

SEQ ID NO: 5001217 - DNA, 25 bp, Homo sapien
caactacttcgggtcaaagctggtg

SEQ ID NO: 5001218 - DNA, 25 bp, Homo sapien
ctccattcaccacaaaggcagaggt

SEQ ID NO: 5001219 - DNA, 25 bp, Homo sapien
aggccggcgctgatgcgagactggg

SEQ ID NO: 5001220 - DNA, 25 bp, Homo sapien
agcagctgtgcgctgtcaaagtgcc

SEQ ID NO: 5001221 - DNA, 25 bp, Homo sapien
ctaagttctggaggccggcgctgat

SEQ ID NO: 5001222 - DNA, 25 bp, Homo sapien
tgcgctgtcaaagtgccgagcgctg

SEQ ID NO: 5001223 - DNA, 25 bp, Homo sapien
caaggcatggtgcagggccatgagg

SEQ ID NO: 5001224 - DNA, 25 bp, Homo sapien
tgaggtccgagtggctggagatcct

SEQ ID NO: 5001225 - DNA, 25 bp, Homo sapien
ttacaggtactccagttccaaggca

SEQ ID NO: 5001226 - DNA, 25 bp, Homo sapien
gagatcctccagaagggcatcgcgt

SEQ ID NO: 5001227 - DNA, 25 bp, Homo sapien
agaggtacaaatctgttccatccct

SEQ ID NO: 5001228 - DNA, 25 bp, Homo sapien
tcagaggtacaaatctgttccatcc

SEQ ID NO: 5001229 - DNA, 25 bp, Homo sapien
ctgctggccactaggagggtcctga

SEQ ID NO: 5001230 - DNA, 25 bp, Homo sapien
cactaggagggtcctgaataggaat

SEQ ID NO: 5001231 - DNA, 25 bp, Homo sapien
tgcaatgagaggcccaatgagaaag

SEQ ID NO: 5001232 - DNA, 25 bp, Homo sapien
caatgagaggcccaatgagaaagct

SEQ ID NO: 5001233 - DNA, 25 bp, Homo sapien
atgagaggcccaatgagaaagcttt

SEQ ID NO: 5001234 - DNA, 25 bp, Homo sapien
aatgcaatgagaggcccaatgagaa

SEQ ID NO: 5001235 - DNA, 25 bp, Homo sapien
cagcaatgggcaaagcgggagtcaa

SEQ ID NO: 5001236 - DNA, 25 bp, Homo sapien
agcaatgggcaaagcgggagtcaag

SEQ ID NO: 5001237 - DNA, 25 bp, Homo sapien
gcaatgggcaaagcgggagtcaaga

SEQ ID NO: 5001238 - DNA, 25 bp, Homo sapien
acaccatctcctataacaacataca

SEQ ID NO: 5001239 - DNA, 25 bp, Homo sapien
atctcctataacaacatacaccact

SEQ ID NO: 5001240 - DNA, 25 bp, Homo sapien
ctcctataacaacatacaccacttt

SEQ ID NO: 5001241 - DNA, 25 bp, Homo sapien
ctacaccatctcctataacaacata

SEQ ID NO: 5001242 - DNA, 25 bp, Homo sapien
ccgcttctgtactatgggctgcttc

SEQ ID NO: 5001243 - DNA, 25 bp, Homo sapien
gttccaactttcatgtgctggtaaa

SEQ ID NO: 5001244 - DNA, 25 bp, Homo sapien
caactttcatgtgctggtaaacctt

SEQ ID NO: 5001245 - DNA, 25 bp, Homo sapien
ggctgcttcggcatttgttccaact

SEQ ID NO: 5001246 - DNA, 25 bp, Homo sapien
tacaattcctaacccatacagcagg

SEQ ID NO: 5001247 - DNA, 25 bp, Homo sapien
caggactttcgccaatgctgggatg

SEQ ID NO: 5001248 - DNA, 25 bp, Homo sapien
ttttctattggaaatacaattccta

SEQ ID NO: 5001249 - DNA, 25 bp, Homo sapien
gagtagttgttactaaaatattcac

SEQ ID NO: 5001250 - DNA, 25 bp, Homo sapien
gcttccctcttagctggaccaagca

SEQ ID NO: 5001251 - DNA, 25 bp, Homo sapien
cagggcttcaatttcggccctcaac

SEQ ID NO: 5001252 - DNA, 25 bp, Homo sapien
cgagagtgctttcagggccagtgtc

SEQ ID NO: 5001253 - DNA, 25 bp, Homo sapien
aatttcggccctcaactgcagccag

SEQ ID NO: 5001254 - DNA, 25 bp, Homo sapien
tctgtagcggaaggccaactttctc

SEQ ID NO: 5001255 - DNA, 25 bp, Homo sapien
gtgttgtagatctcttttacccgtc

SEQ ID NO: 5001256 - DNA, 25 bp, Homo sapien
tacccgtctgtagcggaaggccaac

SEQ ID NO: 5001257 - DNA, 25 bp, Homo sapien
tctcttttacccgtctgtagcggaa

SEQ ID NO: 5001258 - DNA, 25 bp, Homo sapien
ccagttgccaaacataagttagcac

SEQ ID NO: 5001259 - DNA, 25 bp, Homo sapien
cccgtacaccagttgccaaacataa

SEQ ID NO: 5001260 - DNA, 25 bp, Homo sapien
taagttagcactggttgctgcagca

SEQ ID NO: 5001261 - DNA, 25 bp, Homo sapien
ccaaacataagttagcactggttgc

SEQ ID NO: 5001262 - DNA, 25 bp, Homo sapien
taggtcctgtccgttatcatctgaa

SEQ ID NO: 5001263 - DNA, 25 bp, Homo sapien
cttaggtcctgtccgttatcatctg

SEQ ID NO: 5001264 - DNA, 25 bp, Homo sapien
aggtcctgtccgttatcatctgaag

SEQ ID NO: 5001265 - DNA, 25 bp, Homo sapien
ggtcctgtccgttatcatctgaaga

SEQ ID NO: 5001266 - DNA, 25 bp, Homo sapien
tcttggcactttgtatccctcgtag

SEQ ID NO: 5001267 - DNA, 25 bp, Homo sapien
ctgactaccaaagcaccacatcttg

SEQ ID NO: 5001268 - DNA, 25 bp, Homo sapien
tatccctcgtagaggatattcttcc

SEQ ID NO: 5001269 - DNA, 25 bp, Homo sapien
attccttacacttattgtggagttc

SEQ ID NO: 5001270 - DNA, 25 bp, Homo sapien
tcttggcatcaagactcaagctgac

SEQ ID NO: 5001271 - DNA, 25 bp, Homo sapien
tagtcccttctgtcattattcttgg

SEQ ID NO: 5001272 - DNA, 25 bp, Homo sapien
cagccatgcggcaaatgcacattcg

SEQ ID NO: 5001273 - DNA, 25 bp, Homo sapien
aatgcacattcgctcttggaactct

SEQ ID NO: 5001274 - DNA, 25 bp, Homo sapien
ccaacagtgacgtaatagctaggac

SEQ ID NO: 5001275 - DNA, 25 bp, Homo sapien
tgagtcttattatctgtgccaacag

SEQ ID NO: 5001276 - DNA, 25 bp, Homo sapien
gacactgatgctgtatacttctgaa

SEQ ID NO: 5001277 - DNA, 25 bp, Homo sapien
caatccccgggaataactcagattt

SEQ ID NO: 5001278 - DNA, 25 bp, Homo sapien
tgtgctttcaaatagacctcatgaa

SEQ ID NO: 5001279 - DNA, 25 bp, Homo sapien
cattgtgctttctaagggcacgtcc

SEQ ID NO: 5001280 - DNA, 25 bp, Homo sapien
agagctcaagcgctgctaggctttc

SEQ ID NO: 5001281 - DNA, 25 bp, Homo sapien
agggcacgtccaagccctcactgtg

SEQ ID NO: 5001282 - DNA, 25 bp, Homo sapien
tctcaattttcaacgggcttgctca

SEQ ID NO: 5001283 - DNA, 25 bp, Homo sapien
tgtatcataaccagtgcaaaccttc

SEQ ID NO: 5001284 - DNA, 25 bp, Homo sapien
tattcagaccgagagaactttcatc

SEQ ID NO: 5001285 - DNA, 25 bp, Homo sapien
taccacacagggcaatgcattagtg

SEQ ID NO: 5001286 - DNA, 25 bp, Homo sapien
gacactcaatggacaataacagcag

SEQ ID NO: 5001287 - DNA, 25 bp, Homo sapien
tagacttccttagtgcttcctgcga

SEQ ID NO: 5001288 - DNA, 25 bp, Homo sapien
tacagccttacagggcttgacccag

SEQ ID NO: 5001289 - DNA, 25 bp, Homo sapien
tctggtgtctctagaactgcaagct

SEQ ID NO: 5001290 - DNA, 25 bp, Homo sapien
cactcaatacagaatgcttgaatcc

SEQ ID NO: 5001291 - DNA, 25 bp, Homo sapien
gagatccaaacctgtatgtctacct

SEQ ID NO: 5001292 - DNA, 25 bp, Homo sapien
gcttatatgtcatctcttgacttgg

SEQ ID NO: 5001293 - DNA, 25 bp, Homo sapien
tagttttatggcgtcgggactccca

SEQ ID NO: 5001294 - DNA, 25 bp, Homo sapien
ccaatgtcaacattaggccgcataa

SEQ ID NO: 5001295 - DNA, 25 bp, Homo sapien
ggccgcataattcttcacgctattg

SEQ ID NO: 5001296 - DNA, 25 bp, Homo sapien
tctctcatacttagtccaatgtcaa

SEQ ID NO: 5001297 - DNA, 25 bp, Homo sapien
ctgtgcctgagcagtttgtttcttc

SEQ ID NO: 5001298 - DNA, 25 bp, Homo sapien
gtctgccaagttgaaaatcatttct

SEQ ID NO: 5001299 - DNA, 25 bp, Homo sapien
tccattcgcagtccaagggaaactg

SEQ ID NO: 5001300 - DNA, 25 bp, Homo sapien
cattcgcagtccaagggaaactgaa

SEQ ID NO: 5001301 - DNA, 25 bp, Homo sapien
ttcttccattcgcagtccaagggaa

SEQ ID NO: 5001302 - DNA, 25 bp, Homo sapien
gtactggagtccatatagccctgga

SEQ ID NO: 5001303 - DNA, 25 bp, Homo sapien
cagaaattttggctaggcacctaca

SEQ ID NO: 5001304 - DNA, 25 bp, Homo sapien
caggaaacaaatggtgactcaggca

SEQ ID NO: 5001305 - DNA, 25 bp, Homo sapien
gactcattaatgtcaggccaggaaa

SEQ ID NO: 5001306 - DNA, 25 bp, Homo sapien
tcactgaactcctttaagacttttc

SEQ ID NO: 5001307 - DNA, 25 bp, Homo sapien
cactgaactcctttaagacttttct

SEQ ID NO: 5001308 - DNA, 25 bp, Homo sapien
attgaacaaagtgtatcttattgcc

SEQ ID NO: 5001309 - DNA, 25 bp, Homo sapien
aaaactgatgcctcttggtactcac

SEQ ID NO: 5001310 - DNA, 25 bp, Homo sapien
tatttgctccattaaatgttaggga

SEQ ID NO: 5001311 - DNA, 25 bp, Homo sapien
gagaacacgaaacatctttctatgt

SEQ ID NO: 5001312 - DNA, 25 bp, Homo sapien
atatctgttggcgtaggacccagta

SEQ ID NO: 5001313 - DNA, 25 bp, Homo sapien
cctcccatatctgttggcgtaggac

SEQ ID NO: 5001314 - DNA, 25 bp, Homo sapien
catccaagtcccagatgaacactct

SEQ ID NO: 5001315 - DNA, 25 bp, Homo sapien
gacccagtaagcaaggagtggaaaa

SEQ ID NO: 5001316 - DNA, 25 bp, Homo sapien
tcacttgggtgttggctatgacgta

SEQ ID NO: 5001317 - DNA, 25 bp, Homo sapien
cacttgggtgttggctatgacgtac

SEQ ID NO: 5001318 - DNA, 25 bp, Homo sapien
tctttaatgggtgttgatgggctgt

SEQ ID NO: 5001319 - DNA, 25 bp, Homo sapien
cgacgcaatcgatcagaatctgaat

SEQ ID NO: 5001320 - DNA, 25 bp, Homo sapien
aatctgaatctttaatgggtgttga

SEQ ID NO: 5001321 - DNA, 25 bp, Homo sapien
ccgtccacgtgatttcccatctgaa

SEQ ID NO: 5001322 - DNA, 25 bp, Homo sapien
gaatataggaaggactttcatcttt

SEQ ID NO: 5001323 - DNA, 25 bp, Homo sapien
caggaatataggaaggactttcatc

SEQ ID NO: 5001324 - DNA, 25 bp, Homo sapien
ctgcaggaatataggaaggactttc

SEQ ID NO: 5001325 - DNA, 25 bp, Homo sapien
ataggaaggactttcatcttttatt

SEQ ID NO: 5001326 - DNA, 25 bp, Homo sapien
tcatctctaacataatggccaggtg

SEQ ID NO: 5001327 - DNA, 25 bp, Homo sapien
cagaactatacatcttgtgagtgat

SEQ ID NO: 5001328 - DNA, 25 bp, Homo sapien
gcaggcaccaagtctgctgtcccag

SEQ ID NO: 5001329 - DNA, 25 bp, Homo sapien
ctgggcgtacttgtttaccaggctc

SEQ ID NO: 5001330 - DNA, 25 bp, Homo sapien
gacaagcataccagtgacaccagaa

SEQ ID NO: 5001331 - DNA, 25 bp, Homo sapien
gagcagacaagcataccagtgacac

SEQ ID NO: 5001332 - DNA, 25 bp, Homo sapien
ccagaaaatgagctaagctgagttt

SEQ ID NO: 5001333 - DNA, 25 bp, Homo sapien
gacaccagaaaatgagctaagctga

SEQ ID NO: 5001334 - DNA, 25 bp, Homo sapien
aagaatcattaaacctccatctctg

SEQ ID NO: 5001335 - DNA, 25 bp, Homo sapien
gctgcttgcactcagtcttaaacat

SEQ ID NO: 5001336 - DNA, 25 bp, Homo sapien
ctgctgcttgcactcagtcttaaac

SEQ ID NO: 5001337 - DNA, 25 bp, Homo sapien
gaatcattaaacctccatctctgct

SEQ ID NO: 5001338 - DNA, 25 bp, Homo sapien
aatcttgcacattctggtacatctg

SEQ ID NO: 5001339 - DNA, 25 bp, Homo sapien
agaagctgaatcttgcacattctgg

SEQ ID NO: 5001340 - DNA, 25 bp, Homo sapien
tcttgcacattctggtacatctgca

SEQ ID NO: 5001341 - DNA, 25 bp, Homo sapien
gctgaatcttgcacattctggtaca

SEQ ID NO: 5001342 - DNA, 25 bp, Homo sapien
gttatgggtcatcaaaccttcaaag

SEQ ID NO: 5001343 - DNA, 25 bp, Homo sapien
tatgaaaattacaggcccaatcagg

SEQ ID NO: 5001344 - DNA, 25 bp, Homo sapien
cacacagatctatgaagttatgggt

SEQ ID NO: 5001345 - DNA, 25 bp, Homo sapien
cacagtcctgaaagaaggccaatga

SEQ ID NO: 5001346 - DNA, 25 bp, Homo sapien
gcaagattcccgtccaacaccttaa

SEQ ID NO: 5001347 - DNA, 25 bp, Homo sapien
cacttgaaattcaatatcggcaaga

SEQ ID NO: 5001348 - DNA, 25 bp, Homo sapien
tatcggcaagattcccgtccaacac

SEQ ID NO: 5001349 - DNA, 25 bp, Homo sapien
ttcaatatcggcaagattcccgtcc

SEQ ID NO: 5001350 - DNA, 25 bp, Homo sapien
tgtagcaatggagtgggctttagct

SEQ ID NO: 5001351 - DNA, 25 bp, Homo sapien
cctgacttgtagcaatggagtgggc

SEQ ID NO: 5001352 - DNA, 25 bp, Homo sapien
gaccattttaacctgacttgtagca

SEQ ID NO: 5001353 - DNA, 25 bp, Homo sapien
taagaccattttaacctgacttgta

SEQ ID NO: 5001354 - DNA, 25 bp, Homo sapien
tgttataatactgtgcgtactgacc

SEQ ID NO: 5001355 - DNA, 25 bp, Homo sapien
tgccagatggcggttcttgaagctg

SEQ ID NO: 5001356 - DNA, 25 bp, Homo sapien
tataatgtgctggatacggtgagct

SEQ ID NO: 5001357 - DNA, 25 bp, Homo sapien
taactgcttggctggtgatgccaga

SEQ ID NO: 5001358 - DNA, 25 bp, Homo sapien
ccaaaactgggataagacggatagt

SEQ ID NO: 5001359 - DNA, 25 bp, Homo sapien
ggccaaaactgggataagacggata

SEQ ID NO: 5001360 - DNA, 25 bp, Homo sapien
tggccaaaactgggataagacggat

SEQ ID NO: 5001361 - DNA, 25 bp, Homo sapien
caaaactgggataagacggatagtc

SEQ ID NO: 5001362 - DNA, 25 bp, Homo sapien
agaggaatttgtgagtgaattattt

SEQ ID NO: 5001363 - DNA, 25 bp, Homo sapien
cagaggaatttgtgagtgaattatt

SEQ ID NO: 5001364 - DNA, 25 bp, Homo sapien
caagagaggcacatttgtgtagaag

SEQ ID NO: 5001365 - DNA, 25 bp, Homo sapien
aagagaggcacatttgtgtagaagg

SEQ ID NO: 5001366 - DNA, 25 bp, Homo sapien
tcatctgtccaataagcttttcctt

SEQ ID NO: 5001367 - DNA, 25 bp, Homo sapien
ctgttactctttgtactgagtttat

SEQ ID NO: 5001368 - DNA, 25 bp, Homo sapien
ttactctttgtactgagtttatctt

SEQ ID NO: 5001369 - DNA, 25 bp, Homo sapien
ctcatctgtccaataagcttttcct

SEQ ID NO: 5001370 - DNA, 25 bp, Homo sapien
gcgatgaataccactggaccccaga

SEQ ID NO: 5001371 - DNA, 25 bp, Homo sapien
gaccccagacatggtacaagaactt

SEQ ID NO: 5001372 - DNA, 25 bp, Homo sapien
ctatttgagcgatgaataccactgg

SEQ ID NO: 5001373 - DNA, 25 bp, Homo sapien
tcgcatccacataccatcggagcat

SEQ ID NO: 5001374 - DNA, 25 bp, Homo sapien
cctcgtgtattttcacagaagtcca

SEQ ID NO: 5001375 - DNA, 25 bp, Homo sapien
ggatgctgtttgtccctcgtgtatt

SEQ ID NO: 5001376 - DNA, 25 bp, Homo sapien
gcctctttgccatgggctatgtcca

SEQ ID NO: 5001377 - DNA, 25 bp, Homo sapien
tgtccctcgtgtattttcacagaag

SEQ ID NO: 5001378 - DNA, 25 bp, Homo sapien
gactgagactgtgacaatccacctt

SEQ ID NO: 5001379 - DNA, 25 bp, Homo sapien
gtagctgtatggtgcctgtccaggt

SEQ ID NO: 5001380 - DNA, 25 bp, Homo sapien
tgtgacaatccaccttcagtcttga

SEQ ID NO: 5001381 - DNA, 25 bp, Homo sapien
gctgtatggtgcctgtccaggttga

SEQ ID NO: 5001382 - DNA, 25 bp, Homo sapien
ctaaatcagttagtgatagcttatc

SEQ ID NO: 5001383 - DNA, 25 bp, Homo sapien
tagtgatagcttatctatctgtcca

SEQ ID NO: 5001384 - DNA, 25 bp, Homo sapien
cagttagtgatagcttatctatctg

SEQ ID NO: 5001385 - DNA, 25 bp, Homo sapien
aaatcagttagtgatagcttatcta

SEQ ID NO: 5001386 - DNA, 25 bp, Homo sapien
atatgaggaaatgccgtacggctgt

SEQ ID NO: 5001387 - DNA, 25 bp, Homo sapien
ggaaatgccgtacggctgtcctggc

SEQ ID NO: 5001388 - DNA, 25 bp, Homo sapien
tggctgtgggtacgtggcataggct

SEQ ID NO: 5001389 - DNA, 25 bp, Homo sapien
gctgtagcttgttgcattcctgtgg

SEQ ID NO: 5001390 - DNA, 25 bp, Homo sapien
tagggagaatatgtgggtatggtct

SEQ ID NO: 5001391 - DNA, 25 bp, Homo sapien
agggagaatatgtgggtatggtctg

SEQ ID NO: 5001392 - DNA, 25 bp, Homo sapien
ggtagggagaatatgtgggtatggt

SEQ ID NO: 5001393 - DNA, 25 bp, Homo sapien
ggggtagggagaatatgtgggtatg

SEQ ID NO: 5001394 - DNA, 25 bp, Homo sapien
atttattgattaagagaaaatacat

SEQ ID NO: 5001395 - DNA, 25 bp, Homo sapien
ttattgattaagagaaaatacatct

SEQ ID NO: 5001396 - DNA, 25 bp, Homo sapien
gggctgaaactactgctcccaattg

SEQ ID NO: 5001397 - DNA, 25 bp, Homo sapien
tgagttggtcgtgggctgaaactac

SEQ ID NO: 5001398 - DNA, 25 bp, Homo sapien
aactggtgagttggtcgtgggctga

SEQ ID NO: 5001399 - DNA, 25 bp, Homo sapien
ggtcgtgggctgaaactactgctcc

SEQ ID NO: 5001400 - DNA, 25 bp, Homo sapien
ataggttggccatatgaaatttcag

SEQ ID NO: 5001401 - DNA, 25 bp, Homo sapien
gatatttggtctttgtgacctgcgg

SEQ ID NO: 5001402 - DNA, 25 bp, Homo sapien
catattttcaactataggttggcca

SEQ ID NO: 5001403 - DNA, 25 bp, Homo sapien
tatttggtctttgtgacctgcggag

SEQ ID NO: 5001404 - DNA, 25 bp, Homo sapien
ttgaagacctggaaaaataatacat

SEQ ID NO: 5001405 - DNA, 25 bp, Homo sapien
tttgaagacctggaaaaataataca

SEQ ID NO: 5001406 - DNA, 25 bp, Homo sapien
ttaaagacccgtcggctgtcgttga

SEQ ID NO: 5001407 - DNA, 25 bp, Homo sapien
tgtttcactgctgctcattggctct

SEQ ID NO: 5001408 - DNA, 25 bp, Homo sapien
tgtcgttgaagctgtttcactgctg

SEQ ID NO: 5001409 - DNA, 25 bp, Homo sapien
cccgtcggctgtcgttgaagctgtt

SEQ ID NO: 5001410 - DNA, 25 bp, Homo sapien
aagtagcagtagcaatattctctgt

SEQ ID NO: 5001411 - DNA, 25 bp, Homo sapien
gtaggagctaaaactatattcatca

SEQ ID NO: 5001412 - DNA, 25 bp, Homo sapien
aaaagtagcagtagcaatattctct

SEQ ID NO: 5001413 - DNA, 25 bp, Homo sapien
tagcagtagcaatattctctgttgg

SEQ ID NO: 5001414 - DNA, 25 bp, Homo sapien
tgaaggttccagtcgtacagaagac

SEQ ID NO: 5001415 - DNA, 25 bp, Homo sapien
aggttccagtcgtacagaagacttc

SEQ ID NO: 5001416 - DNA, 25 bp, Homo sapien
gttccagtcgtacagaagacttcta

SEQ ID NO: 5001417 - DNA, 25 bp, Homo sapien
cttgaaggttccagtcgtacagaag

SEQ ID NO: 5001418 - DNA, 25 bp, Homo sapien
tctgaattaagttcccaatctctaa

SEQ ID NO: 5001419 - DNA, 25 bp, Homo sapien
ctctaatcatgtatttaaggtcccc

SEQ ID NO: 5001420 - DNA, 25 bp, Homo sapien
cataatttagatgtgcgtgagtcgc

SEQ ID NO: 5001421 - DNA, 25 bp, Homo sapien
atgtgcgtgagtcgctcctggctgt

SEQ ID NO: 5001422 - DNA, 25 bp, Homo sapien
acagctcctgtacagttgaatctaa

SEQ ID NO: 5001423 - DNA, 25 bp, Homo sapien
tcctgtacagttgaatctaaattct

SEQ ID NO: 5001424 - DNA, 25 bp, Homo sapien
aacttcatatctggagcccttcatc

SEQ ID NO: 5001425 - DNA, 25 bp, Homo sapien
ttgaacttcatatctggagcccttc

SEQ ID NO: 5001426 - DNA, 25 bp, Homo sapien
taaaggtcacctacgggccttctgc

SEQ ID NO: 5001427 - DNA, 25 bp, Homo sapien
tagccaaagccttaagaacactagg

SEQ ID NO: 5001428 - DNA, 25 bp, Homo sapien
cacgctgactcctgcatgaggcctg

SEQ ID NO: 5001429 - DNA, 25 bp, Homo sapien
tactctgcagtaggcatgctttacc

SEQ ID NO: 5001430 - DNA, 25 bp, Homo sapien
ctaccactcagacggctatgcgggc

SEQ ID NO: 5001431 - DNA, 25 bp, Homo sapien
ttatatgagagttaccgagtttggg

SEQ ID NO: 5001432 - DNA, 25 bp, Homo sapien
gggattcactactaccactcagacg

SEQ ID NO: 5001433 - DNA, 25 bp, Homo sapien
ccattgggagtcatggaattactat

SEQ ID NO: 5001434 - DNA, 25 bp, Homo sapien
gcgctaatgacttgacacctttgaa

SEQ ID NO: 5001435 - DNA, 25 bp, Homo sapien
cacagttcatcaagtcacaaggtct

SEQ ID NO: 5001436 - DNA, 25 bp, Homo sapien
agcattagcactcggaatacctcag

SEQ ID NO: 5001437 - DNA, 25 bp, Homo sapien
cagtgggtccctgcaagcattagca

SEQ ID NO: 5001438 - DNA, 25 bp, Homo sapien
ctgcaacttgaggaaacagcaacat

SEQ ID NO: 5001439 - DNA, 25 bp, Homo sapien
ctgaactggcttgagatgtttgcac

SEQ ID NO: 5001440 - DNA, 25 bp, Homo sapien
cgacaatgctctcttttaaccaaaa

SEQ ID NO: 5001441 - DNA, 25 bp, Homo sapien
gatactgcagcagtgaaaggcatat

SEQ ID NO: 5001442 - DNA, 25 bp, Homo sapien
cagtgtcagctcttaattatacaga

SEQ ID NO: 5001443 - DNA, 25 bp, Homo sapien
gcacatggctgagaacgacaatgct

SEQ ID NO: 5001444 - DNA, 25 bp, Homo sapien
aacctcacatagtacttcgccaatc

SEQ ID NO: 5001445 - DNA, 25 bp, Homo sapien
caaacttgctttgagagatcatcaa

SEQ ID NO: 5001446 - DNA, 25 bp, Homo sapien
cattgaatagccacattaaatctgt

SEQ ID NO: 5001447 - DNA, 25 bp, Homo sapien
tgttaataccatgctcttcaacccc

SEQ ID NO: 5001448 - DNA, 25 bp, Homo sapien
caaagaatgttcaaagattgaaaat

SEQ ID NO: 5001449 - DNA, 25 bp, Homo sapien
gaatgttcaaagattgaaaatccat

SEQ ID NO: 5001450 - DNA, 25 bp, Homo sapien
cgcaaagaatgttcaaagattgaaa

SEQ ID NO: 5001451 - DNA, 25 bp, Homo sapien
aagaatgttcaaagattgaaaatcc

SEQ ID NO: 5001452 - DNA, 25 bp, Homo sapien
gctgcatccaccagtttaatgtgtt

SEQ ID NO: 5001453 - DNA, 25 bp, Homo sapien
catccaccagtttaatgtgttcctt

SEQ ID NO: 5001454 - DNA, 25 bp, Homo sapien
tgctgcatccaccagtttaatgtgt

SEQ ID NO: 5001455 - DNA, 25 bp, Homo sapien
tgcatccaccagtttaatgtgttcc

SEQ ID NO: 5001456 - DNA, 25 bp, Homo sapien
acctccattcctgacatagttttgc

SEQ ID NO: 5001457 - DNA, 25 bp, Homo sapien
cctctgcaggggaaagctcggcgca

SEQ ID NO: 5001458 - DNA, 25 bp, Homo sapien
ttttgctcctggatgggtacgcgcg

SEQ ID NO: 5001459 - DNA, 25 bp, Homo sapien
gcgcttctgggagtggagcgcctct

SEQ ID NO: 5001460 - DNA, 25 bp, Homo sapien
cgccacagtggacggcaacaggaag

SEQ ID NO: 5001461 - DNA, 25 bp, Homo sapien
tgagcgaaaacgtgttccccaggaa

SEQ ID NO: 5001462 - DNA, 25 bp, Homo sapien
ctgagcgaaaacgtgttccccagga

SEQ ID NO: 5001463 - DNA, 25 bp, Homo sapien
ccaggaagaaacccgccacagtgga

SEQ ID NO: 5001464 - DNA, 25 bp, Homo sapien
tggagagtttctacctcgccccaaa

SEQ ID NO: 5001465 - DNA, 25 bp, Homo sapien
ttggtaacagctttgcgcccagcgc

SEQ ID NO: 5001466 - DNA, 25 bp, Homo sapien
cttaaagtcggaagtggcactggag

SEQ ID NO: 5001467 - DNA, 25 bp, Homo sapien
cagcggcagatagcatctgagaacc

SEQ ID NO: 5001468 - DNA, 25 bp, Homo sapien
cagctattctcttgtcctaacctta

SEQ ID NO: 5001469 - DNA, 25 bp, Homo sapien
cagccttgtaggtctgcccatggag

SEQ ID NO: 5001470 - DNA, 25 bp, Homo sapien
tcatccctcgatttgtttgcgcagc

SEQ ID NO: 5001471 - DNA, 25 bp, Homo sapien
tttgcaacgcaaaccacagctattc

SEQ ID NO: 5001472 - DNA, 25 bp, Homo sapien
gaggatctggaaatttgctttgtgt

SEQ ID NO: 5001473 - DNA, 25 bp, Homo sapien
agcgcccgtagaggagccctctgct

SEQ ID NO: 5001474 - DNA, 25 bp, Homo sapien
ttaccaagaggtcagagcgcccgta

SEQ ID NO: 5001475 - DNA, 25 bp, Homo sapien
gctgcacgattatcattgacaaccc

SEQ ID NO: 5001476 - DNA, 25 bp, Homo sapien
ttgacaacccctgctgaaagatccg

SEQ ID NO: 5001477 - DNA, 25 bp, Homo sapien
actgttagccagtgatcatccagga

SEQ ID NO: 5001478 - DNA, 25 bp, Homo sapien
tcagtataagatgcagtaagaccct

SEQ ID NO: 5001479 - DNA, 25 bp, Homo sapien
aaaacactcacgctaaatgctggga

SEQ ID NO: 5001480 - DNA, 25 bp, Homo sapien
gactatggattgtaggagaagccct

SEQ ID NO: 5001481 - DNA, 25 bp, Homo sapien
atatttcttgaaataggcatatttg

SEQ ID NO: 5001482 - DNA, 25 bp, Homo sapien
ctgtcctcaacctctgagggccttg

SEQ ID NO: 5001483 - DNA, 25 bp, Homo sapien
tcctgtcctcaacctctgagggcct

SEQ ID NO: 5001484 - DNA, 25 bp, Homo sapien
tgatgccccctttacctctcctgtc

SEQ ID NO: 5001485 - DNA, 25 bp, Homo sapien
aacccaagtccagctgatgccccct

SEQ ID NO: 5001486 - DNA, 25 bp, Homo sapien
gtcccactgccaccagtgttctcaa

SEQ ID NO: 5001487 - DNA, 25 bp, Homo sapien
tcccactgccaccagtgttctcaat

SEQ ID NO: 5001488 - DNA, 25 bp, Homo sapien
tttgaaaatctgtccccgactttgc

SEQ ID NO: 5001489 - DNA, 25 bp, Homo sapien
gatcaggtggataagctcccattta

SEQ ID NO: 5001490 - DNA, 25 bp, Homo sapien
ttcacgccacttaggaaaatatttc

SEQ ID NO: 5001491 - DNA, 25 bp, Homo sapien
gactttgcaccacttaggtagctgt

SEQ ID NO: 5001492 - DNA, 25 bp, Homo sapien
tatacaggctatgaccaaaactcgg

SEQ ID NO: 5001493 - DNA, 25 bp, Homo sapien
tagtcattgaaaagccccagcaaga

SEQ ID NO: 5001494 - DNA, 25 bp, Homo sapien
agccatatctatgaacccgaggaga

SEQ ID NO: 5001495 - DNA, 25 bp, Homo sapien
tacatcccaagctgatagcactggt

SEQ ID NO: 5001496 - DNA, 25 bp, Homo sapien
tgtcataggtaaaagtgccatagtt

SEQ ID NO: 5001497 - DNA, 25 bp, Homo sapien
cataggtaaaagtgccatagtttaa

SEQ ID NO: 5001498 - DNA, 25 bp, Homo sapien
tcataggtaaaagtgccatagttta

SEQ ID NO: 5001499 - DNA, 25 bp, Homo sapien
gtcataggtaaaagtgccatagttt

SEQ ID NO: 5001500 - DNA, 25 bp, Homo sapien
catatgcatctgatagttaggtgcc

SEQ ID NO: 5001501 - DNA, 25 bp, Homo sapien
tctgatagttaggtgccttaaagcc

SEQ ID NO: 5001502 - DNA, 25 bp, Homo sapien
aagggacatatgcatctgatagtta

SEQ ID NO: 5001503 - DNA, 25 bp, Homo sapien
gccttaaagccttggtctctggaaa

SEQ ID NO: 5001504 - DNA, 25 bp, Homo sapien
atagacacgacttggccccaaagag

SEQ ID NO: 5001505 - DNA, 25 bp, Homo sapien
cttcattggcttcacactctataga

SEQ ID NO: 5001506 - DNA, 25 bp, Homo sapien
tcagggtgacacacataagctatag

SEQ ID NO: 5001507 - DNA, 25 bp, Homo sapien
ataagctatagctttagcttcattg

SEQ ID NO: 5001508 - DNA, 25 bp, Homo sapien
gagtggcacaggcagaaactgctgt

SEQ ID NO: 5001509 - DNA, 25 bp, Homo sapien
gctgtcagggttgaccagtgcagac

SEQ ID NO: 5001510 - DNA, 25 bp, Homo sapien
tgagggttacaatgatgcctgaaat

SEQ ID NO: 5001511 - DNA, 25 bp, Homo sapien
gacgaaatgataggtgatgccttca

SEQ ID NO: 5001512 - DNA, 25 bp, Homo sapien
gtatgtacttcttgcatacagcagg

SEQ ID NO: 5001513 - DNA, 25 bp, Homo sapien
ccaggatgagaggagcactaacttg

SEQ ID NO: 5001514 - DNA, 25 bp, Homo sapien
caggtatctgatataacaccaagcc

SEQ ID NO: 5001515 - DNA, 25 bp, Homo sapien
ctaacttggtacgaggtgactgagc

SEQ ID NO: 5001516 - DNA, 25 bp, Homo sapien
ttcaaacattcccttggaccgttgc

SEQ ID NO: 5001517 - DNA, 25 bp, Homo sapien
cccttggaccgttgctgaattcctg

SEQ ID NO: 5001518 - DNA, 25 bp, Homo sapien
tcacagaaccgtttcaaacattccc

SEQ ID NO: 5001519 - DNA, 25 bp, Homo sapien
ttttggagctttctcgccttcacat

SEQ ID NO: 5001520 - DNA, 25 bp, Homo sapien
cctcaggcgctgctctccccgagga

SEQ ID NO: 5001521 - DNA, 25 bp, Homo sapien
ctcaggcgctgctctccccgaggac

SEQ ID NO: 5001522 - DNA, 25 bp, Homo sapien
attaccctcctcaggcgctgctctc

SEQ ID NO: 5001523 - DNA, 25 bp, Homo sapien
cctattaccctcctcaggcgctgct

SEQ ID NO: 5001524 - DNA, 25 bp, Homo sapien
tgattatgcatgagatacatgcaca

SEQ ID NO: 5001525 - DNA, 25 bp, Homo sapien
tcttcccattagagtcattgactgg

SEQ ID NO: 5001526 - DNA, 25 bp, Homo sapien
tcaaaatacatcatatctgaagtgg

SEQ ID NO: 5001527 - DNA, 25 bp, Homo sapien
gtcattggttggtatggatactggc

SEQ ID NO: 5001528 - DNA, 25 bp, Homo sapien
gtggttgctccaaatgtcgtaacat

SEQ ID NO: 5001529 - DNA, 25 bp, Homo sapien
agcatgggccttggctccagactgg

SEQ ID NO: 5001530 - DNA, 25 bp, Homo sapien
ctgtgaccatgctgccgctccccat

SEQ ID NO: 5001531 - DNA, 25 bp, Homo sapien
ctgccgctccccatcatgctgtctt

SEQ ID NO: 5001532 - DNA, 25 bp, Homo sapien
gctccccatcatgctgtcttaccac

SEQ ID NO: 5001533 - DNA, 25 bp, Homo sapien
cgtgccagaagtcagagaagtgata

SEQ ID NO: 5001534 - DNA, 25 bp, Homo sapien
tgagggagccaatggctgctacaca

SEQ ID NO: 5001535 - DNA, 25 bp, Homo sapien
tgaaattagctggtctctacacact

SEQ ID NO: 5001536 - DNA, 25 bp, Homo sapien
gcacagccgatcagtcgtgccagaa

SEQ ID NO: 5001537 - DNA, 25 bp, Homo sapien
ttatttccaccttgtgagtacacag

SEQ ID NO: 5001538 - DNA, 25 bp, Homo sapien
taaacttcccaagaccagggtcatc

SEQ ID NO: 5001539 - DNA, 25 bp, Homo sapien
cactgtgtagggttgctatgatcta

SEQ ID NO: 5001540 - DNA, 25 bp, Homo sapien
ttctactgcactaaataacaaggcc

SEQ ID NO: 5001541 - DNA, 25 bp, Homo sapien
tcatccctgggtatctgtggaagac

SEQ ID NO: 5001542 - DNA, 25 bp, Homo sapien
cctatacagtaaggacaccagtcga

SEQ ID NO: 5001543 - DNA, 25 bp, Homo sapien
tcttgaaaggagagagcgcacaact

SEQ ID NO: 5001544 - DNA, 25 bp, Homo sapien
aactgtagacccaccttgcgtgcag

SEQ ID NO: 5001545 - DNA, 25 bp, Homo sapien
tataaaccatggtgggttagccagc

SEQ ID NO: 5001546 - DNA, 25 bp, Homo sapien
tagccaactattgggtggtcagccc

SEQ ID NO: 5001547 - DNA, 25 bp, Homo sapien
tgctctatcaggcacaggatcatga

SEQ ID NO: 5001548 - DNA, 25 bp, Homo sapien
tcatgatgcatccaggaccggtcag

SEQ ID NO: 5001549 - DNA, 25 bp, Homo sapien
acttgcaaccacataaactagagtt

SEQ ID NO: 5001550 - DNA, 25 bp, Homo sapien
tttgttttcttatgccagctcatgg

SEQ ID NO: 5001551 - DNA, 25 bp, Homo sapien
ggtaagttccattacttgcaaccac

SEQ ID NO: 5001552 - DNA, 25 bp, Homo sapien
ttatgccagctcatggtaagttcca

SEQ ID NO: 5001553 - DNA, 25 bp, Homo sapien
caaaatgctccttttagagtcttag

SEQ ID NO: 5001554 - DNA, 25 bp, Homo sapien
tgctgttagcacttcaaatttatca

SEQ ID NO: 5001555 - DNA, 25 bp, Homo sapien
cacaagaggtacagttatgagagta

SEQ ID NO: 5001556 - DNA, 25 bp, Homo sapien
gagtcttaggagacctaattccacc

SEQ ID NO: 5001557 - DNA, 25 bp, Homo sapien
aagaacatttgaatccatgatccca

SEQ ID NO: 5001558 - DNA, 25 bp, Homo sapien
ttttattcatggtcgtttattcatt

SEQ ID NO: 5001559 - DNA, 25 bp, Homo sapien
aattagagttatgttgcacttttca

SEQ ID NO: 5001560 - DNA, 25 bp, Homo sapien
ctgatgcaggtgtgatggtcacatt

SEQ ID NO: 5001561 - DNA, 25 bp, Homo sapien
tggaactgtgctcatccagatggga

SEQ ID NO: 5001562 - DNA, 25 bp, Homo sapien
taagagcgtggaactgtgctcatcc

SEQ ID NO: 5001563 - DNA, 25 bp, Homo sapien
catggctgctaagagcgtggaactg

SEQ ID NO: 5001564 - DNA, 25 bp, Homo sapien
gtatcagcagttccactgccatggc

SEQ ID NO: 5001565 - DNA, 25 bp, Homo sapien
gagagagactctctaggctctgcag

SEQ ID NO: 5001566 - DNA, 25 bp, Homo sapien
gaagaatgcacacacccttggaatg

SEQ ID NO: 5001567 - DNA, 25 bp, Homo sapien
gaaagcacagggaagctcctcttag

SEQ ID NO: 5001568 - DNA, 25 bp, Homo sapien
catcatggagccaaaattacactgg

SEQ ID NO: 5001569 - DNA, 25 bp, Homo sapien
tcttttgatcttgtcacatatgtat

SEQ ID NO: 5001570 - DNA, 25 bp, Homo sapien
atgaagaggcatcgccaccttctct

SEQ ID NO: 5001571 - DNA, 25 bp, Homo sapien
agaggcatcgccaccttctcttttg

SEQ ID NO: 5001572 - DNA, 25 bp, Homo sapien
aagaggcatcgccaccttctctttt

SEQ ID NO: 5001573 - DNA, 25 bp, Homo sapien
caagtcctcacacgaggcctctgaa

SEQ ID NO: 5001574 - DNA, 25 bp, Homo sapien
cacagtgtttgcctatgagaaatac

SEQ ID NO: 5001575 - DNA, 25 bp, Homo sapien
gcctatgagaaataccccttccttg

SEQ ID NO: 5001576 - DNA, 25 bp, Homo sapien
cacagattctccaatcagtgccaca

SEQ ID NO: 5001577 - DNA, 25 bp, Homo sapien
taattctttccttaggactgacatt

SEQ ID NO: 5001578 - DNA, 25 bp, Homo sapien
aattctttccttaggactgacattc

SEQ ID NO: 5001579 - DNA, 25 bp, Homo sapien
aataattctttccttaggactgaca

SEQ ID NO: 5001580 - DNA, 25 bp, Homo sapien
taataattctttccttaggactgac

SEQ ID NO: 5001581 - DNA, 25 bp, Homo sapien
cacacttcttcaaagggttccaaca

SEQ ID NO: 5001582 - DNA, 25 bp, Homo sapien
tatgggctattagctacacacttct

SEQ ID NO: 5001583 - DNA, 25 bp, Homo sapien
cgggggtcttccattgaagacttct

SEQ ID NO: 5001584 - DNA, 25 bp, Homo sapien
gacttcttctgaattatgtatgggc

SEQ ID NO: 5001585 - DNA, 25 bp, Homo sapien
gcaggtctaagacaaagccccctct

SEQ ID NO: 5001586 - DNA, 25 bp, Homo sapien
gaagggagcaggtctaagacaaagc

SEQ ID NO: 5001587 - DNA, 25 bp, Homo sapien
agaagggagcaggtctaagacaaag

SEQ ID NO: 5001588 - DNA, 25 bp, Homo sapien
tctaagacaaagccccctctgattt

SEQ ID NO: 5001589 - DNA, 25 bp, Homo sapien
tgaacacgtttcaatcaaaatctgt

SEQ ID NO: 5001590 - DNA, 25 bp, Homo sapien
gaacacgtttcaatcaaaatctgta

SEQ ID NO: 5001591 - DNA, 25 bp, Homo sapien
tttgccttctcaccaagtgttgagt

SEQ ID NO: 5001592 - DNA, 25 bp, Homo sapien
ctttgccttctcaccaagtgttgag

SEQ ID NO: 5001593 - DNA, 25 bp, Homo sapien
tgccttctcaccaagtgttgagttt

SEQ ID NO: 5001594 - DNA, 25 bp, Homo sapien
tctttgccttctcaccaagtgttga

SEQ ID NO: 5001595 - DNA, 25 bp, Homo sapien
ggctccagaagccacaaggtgccat

SEQ ID NO: 5001596 - DNA, 25 bp, Homo sapien
tacttcatggctccagaagccacaa

SEQ ID NO: 5001597 - DNA, 25 bp, Homo sapien
atggctccagaagccacaaggtgcc

SEQ ID NO: 5001598 - DNA, 25 bp, Homo sapien
tcatggctccagaagccacaaggtg

SEQ ID NO: 5001599 - DNA, 25 bp, Homo sapien
gggcggcgctcgctgagagtcgcgg

SEQ ID NO: 5001600 - DNA, 25 bp, Homo sapien
ggcggcgccctaggcctcggaggct

SEQ ID NO: 5001601 - DNA, 25 bp, Homo sapien
tcagccgcttcccgggcgccgatcg

SEQ ID NO: 5001602 - DNA, 25 bp, Homo sapien
gctcgctgagagtcgcggcgcccct

SEQ ID NO: 5001603 - DNA, 25 bp, Homo sapien
gctccggcttccagaaattcgagcc

SEQ ID NO: 5001604 - DNA, 25 bp, Homo sapien
tcgagccagcggtggctttttcttt

SEQ ID NO: 5001605 - DNA, 25 bp, Homo sapien
ccgaaaatgggtaacagagaggccg

SEQ ID NO: 5001606 - DNA, 25 bp, Homo sapien
ctccgagtgcacagcgacaccaggg

SEQ ID NO: 5001607 - DNA, 25 bp, Homo sapien
tggtgggttagttctgtcaccgcga

SEQ ID NO: 5001608 - DNA, 25 bp, Homo sapien
caccgcgaggaagctaggtgtgcat

SEQ ID NO: 5001609 - DNA, 25 bp, Homo sapien
gttagttctgtcaccgcgaggaagc

SEQ ID NO: 5001610 - DNA, 25 bp, Homo sapien
tctgtcaccgcgaggaagctaggtg

SEQ ID NO: 5001611 - DNA, 25 bp, Homo sapien
atgatttgctcttataaggactcat

SEQ ID NO: 5001612 - DNA, 25 bp, Homo sapien
gatgatttgctcttataaggactca

SEQ ID NO: 5001613 - DNA, 25 bp, Homo sapien
aaaataacccaaagctaccagatat

SEQ ID NO: 5001614 - DNA, 25 bp, Homo sapien
tggccttggataaaaaccgatctaa

SEQ ID NO: 5001615 - DNA, 25 bp, Homo sapien
ccgatctaaatgttgaacgagtttc

SEQ ID NO: 5001616 - DNA, 25 bp, Homo sapien
tcagaaaggccatatgtttaaaata

SEQ ID NO: 5001617 - DNA, 25 bp, Homo sapien
taaaatattggcagtagtggattca

SEQ ID NO: 5001618 - DNA, 25 bp, Homo sapien
aaacaatgctcttgagcccctcaga

SEQ ID NO: 5001619 - DNA, 25 bp, Homo sapien
cagtcacaggcaaacagcgtggatt

SEQ ID NO: 5001620 - DNA, 25 bp, Homo sapien
tagccaatagggagctgttgactac

SEQ ID NO: 5001621 - DNA, 25 bp, Homo sapien
gaggtttttacacatcactcagcca

SEQ ID NO: 5001622 - DNA, 25 bp, Homo sapien
aaaaatgactgggagagatgctccc

SEQ ID NO: 5001623 - DNA, 25 bp, Homo sapien
caaagactagttatagacacctgca

SEQ ID NO: 5001624 - DNA, 25 bp, Homo sapien
gcatagcagctaaactaatctggtg

SEQ ID NO: 5001625 - DNA, 25 bp, Homo sapien
tttgaacagtacataatgcctcggg

SEQ ID NO: 5001626 - DNA, 25 bp, Homo sapien
ccaaattagagcttttaggccacca

SEQ ID NO: 5001627 - DNA, 25 bp, Homo sapien
taatgagctacctcctgcttgaagc

SEQ ID NO: 5001628 - DNA, 25 bp, Homo sapien
gaaatagggttcaactctacctcca

SEQ ID NO: 5001629 - DNA, 25 bp, Homo sapien
gttcaacagccggtataaaggcctc

SEQ ID NO: 5001630 - DNA, 25 bp, Homo sapien
tggagcctcaacaatgcttctttgt

SEQ ID NO: 5001631 - DNA, 25 bp, Homo sapien
tcacatgacatggtagcttggttct

SEQ ID NO: 5001632 - DNA, 25 bp, Homo sapien
caactatttacttctgtgtcacatg

SEQ ID NO: 5001633 - DNA, 25 bp, Homo sapien
gaagtttggtgagcccaactattta

SEQ ID NO: 5001634 - DNA, 25 bp, Homo sapien
aatgtgttagcttccaaataggtgg

SEQ ID NO: 5001635 - DNA, 25 bp, Homo sapien
tatgggcctgaatttggtctatcat

SEQ ID NO: 5001636 - DNA, 25 bp, Homo sapien
tattgagaactattttatgggcctg

SEQ ID NO: 5001637 - DNA, 25 bp, Homo sapien
cattctaatgttaggtggagtggtc

SEQ ID NO: 5001638 - DNA, 25 bp, Homo sapien
atgcagctgctcgccagcaatgaaa

SEQ ID NO: 5001639 - DNA, 25 bp, Homo sapien
gaatgcagctgctcgccagcaatga

SEQ ID NO: 5001640 - DNA, 25 bp, Homo sapien
aatgcagctgctcgccagcaatgaa

SEQ ID NO: 5001641 - DNA, 25 bp, Homo sapien
aggaccagatggattcacatctgaa

SEQ ID NO: 5001642 - DNA, 25 bp, Homo sapien
tctgaattctaccagaggtagaagg

SEQ ID NO: 5001643 - DNA, 25 bp, Homo sapien
ccagatggattcacatctgaattct

SEQ ID NO: 5001644 - DNA, 25 bp, Homo sapien
gaccagatggattcacatctgaatt

SEQ ID NO: 5001645 - DNA, 25 bp, Homo sapien
gccatagcgatggagccaaataata

SEQ ID NO: 5001646 - DNA, 25 bp, Homo sapien
gattctgtatgactccatgggccat

SEQ ID NO: 5001647 - DNA, 25 bp, Homo sapien
ccaaataatactgcagattgttcat

SEQ ID NO: 5001648 - DNA, 25 bp, Homo sapien
catgacagcaagtgaaccagagaat

SEQ ID NO: 5001649 - DNA, 25 bp, Homo sapien
gctgtgagttgcatacttcatgtgt

SEQ ID NO: 5001650 - DNA, 25 bp, Homo sapien
ggttagctgtgagttgcatacttca

SEQ ID NO: 5001651 - DNA, 25 bp, Homo sapien
gcatacttcatgtgtctcagactgt

SEQ ID NO: 5001652 - DNA, 25 bp, Homo sapien
gagttgcatacttcatgtgtctcag

SEQ ID NO: 5001653 - DNA, 25 bp, Homo sapien
tcctgaggcacgctgatatacggtt

SEQ ID NO: 5001654 - DNA, 25 bp, Homo sapien
gggactcaggtttctcatctattaa

SEQ ID NO: 5001655 - DNA, 25 bp, Homo sapien
gatcctggacttggtgtcataatcc

SEQ ID NO: 5001656 - DNA, 25 bp, Homo sapien
tgcaactggcatctaaaaaggatcc

SEQ ID NO: 5001657 - DNA, 25 bp, Homo sapien
acagtaatatacagtcctctcctgg

SEQ ID NO: 5001658 - DNA, 25 bp, Homo sapien
tatctgcttctataaacagtaatat

SEQ ID NO: 5001659 - DNA, 25 bp, Homo sapien
tcctgggctaaaacagctcttattc

SEQ ID NO: 5001660 - DNA, 25 bp, Homo sapien
ttaacacaagccgtgagttactttg

SEQ ID NO: 5001661 - DNA, 25 bp, Homo sapien
caggagtgagagttgggatcacacc

SEQ ID NO: 5001662 - DNA, 25 bp, Homo sapien
taatgttcaatggacaagcacagct

SEQ ID NO: 5001663 - DNA, 25 bp, Homo sapien
gaaccgagaggatgattggcactga

SEQ ID NO: 5001664 - DNA, 25 bp, Homo sapien
ttggcactgagtgaaacacacaagt

SEQ ID NO: 5001665 - DNA, 25 bp, Homo sapien
cctccagccacactgaaaaccacac

SEQ ID NO: 5001666 - DNA, 25 bp, Homo sapien
ctcctccagccacactgaaaaccac

SEQ ID NO: 5001667 - DNA, 25 bp, Homo sapien
ccctcctccagccacactgaaaacc

SEQ ID NO: 5001668 - DNA, 25 bp, Homo sapien
caccctcctccagccacactgaaaa

SEQ ID NO: 5001669 - DNA, 25 bp, Homo sapien
tacgcacataaatgtgctcttgcat

SEQ ID NO: 5001670 - DNA, 25 bp, Homo sapien
tgctttttgacccctcagaccctgg

SEQ ID NO: 5001671 - DNA, 25 bp, Homo sapien
ctccctgggtgcctacgcacataaa

SEQ ID NO: 5001672 - DNA, 25 bp, Homo sapien
gggtgcctacgcacataaatgtgct

SEQ ID NO: 5001673 - DNA, 25 bp, Homo sapien
tgtgtgcatgcaggtatgtaggatg

SEQ ID NO: 5001674 - DNA, 25 bp, Homo sapien
caatgcacggattaaataattagca

SEQ ID NO: 5001675 - DNA, 25 bp, Homo sapien
ttccaaacatggtcttagaaccatg

SEQ ID NO: 5001676 - DNA, 25 bp, Homo sapien
ctgcagaatctctgacaatgcacgg

SEQ ID NO: 5001677 - DNA, 25 bp, Homo sapien
tgcgaagagagtggtgcaggggagc

SEQ ID NO: 5001678 - DNA, 25 bp, Homo sapien
ctgcgaagagagtggtgcaggggag

SEQ ID NO: 5001679 - DNA, 25 bp, Homo sapien
gtttcactgacactctgtggatgat

SEQ ID NO: 5001680 - DNA, 25 bp, Homo sapien
ctgtttcactgacactctgtggatg

SEQ ID NO: 5001681 - DNA, 25 bp, Homo sapien
catcaaagtaatttaagagcctgct

SEQ ID NO: 5001682 - DNA, 25 bp, Homo sapien
ttggctgttggtacaatatgtagca

SEQ ID NO: 5001683 - DNA, 25 bp, Homo sapien
gagccccataggcaaatctgactcc

SEQ ID NO: 5001684 - DNA, 25 bp, Homo sapien
tctgatttcatcaggcccttgtgcc

SEQ ID NO: 5001685 - DNA, 25 bp, Homo sapien
tgtgttgatcttattatcccctgac

SEQ ID NO: 5001686 - DNA, 25 bp, Homo sapien
taaaagagccccataggcaaatctg

SEQ ID NO: 5001687 - DNA, 25 bp, Homo sapien
tgcatcctctgcgacttggatcaga

SEQ ID NO: 5001688 - DNA, 25 bp, Homo sapien
ggaagacgtcctgtatcttttagag

SEQ ID NO: 5001689 - DNA, 25 bp, Homo sapien
ccactgataggttggtgagttggaa

SEQ ID NO: 5001690 - DNA, 25 bp, Homo sapien
tcttttagagtctgccactgatagg

SEQ ID NO: 5001691 - DNA, 25 bp, Homo sapien
tccgtaatttttcgtgcttcacagt

SEQ ID NO: 5001692 - DNA, 25 bp, Homo sapien
tgttgagaaattcaatgtccgtaat

SEQ ID NO: 5001693 - DNA, 25 bp, Homo sapien
ggttgttgagaaattcaatgtccgt

SEQ ID NO: 5001694 - DNA, 25 bp, Homo sapien
atgtccgtaatttttcgtgcttcac

SEQ ID NO: 5001695 - DNA, 25 bp, Homo sapien
attggcatagttctcttcctgcagg

SEQ ID NO: 5001696 - DNA, 25 bp, Homo sapien
tcaaatcttgaacccaagcctcttc

SEQ ID NO: 5001697 - DNA, 25 bp, Homo sapien
ttcctgaaccaacattgagatgggg

SEQ ID NO: 5001698 - DNA, 25 bp, Homo sapien
tcctgcaggctcctcatcaaatctt

SEQ ID NO: 5001699 - DNA, 25 bp, Homo sapien
catggtttgatgggataagtcttct

SEQ ID NO: 5001700 - DNA, 25 bp, Homo sapien
tggtcaccaagtgtataactagtgt

SEQ ID NO: 5001701 - DNA, 25 bp, Homo sapien
ttttctctgaaacatacgtatcaat

SEQ ID NO: 5001702 - DNA, 25 bp, Homo sapien
catacgtatcaatgagttctttcac

SEQ ID NO: 5001703 - DNA, 25 bp, Homo sapien
gggatctatttttacgtacattatc

SEQ ID NO: 5001704 - DNA, 25 bp, Homo sapien
ctgcaacttgaggcagagatttggg

SEQ ID NO: 5001705 - DNA, 25 bp, Homo sapien
gctcgtaactgttgtcctccccaaa

SEQ ID NO: 5001706 - DNA, 25 bp, Homo sapien
gccttttcccgtccattggctcgta

SEQ ID NO: 5001707 - DNA, 25 bp, Homo sapien
caaatccgtactctaagcaaccctg

SEQ ID NO: 5001708 - DNA, 25 bp, Homo sapien
taagcaaccctgaatatttgcagtt

SEQ ID NO: 5001709 - DNA, 25 bp, Homo sapien
catttttaacttgtaccagaacaag

SEQ ID NO: 5001710 - DNA, 25 bp, Homo sapien
cttgtaccagaacaagaaaacccag

SEQ ID NO: 5001711 - DNA, 25 bp, Homo sapien
ctgcaccttcaccaagaatcatttt

SEQ ID NO: 5001712 - DNA, 25 bp, Homo sapien
gaatcatttttaacttgtaccagaa

SEQ ID NO: 5001713 - DNA, 25 bp, Homo sapien
cagaagtgaaggcacaagtggtctt

SEQ ID NO: 5001714 - DNA, 25 bp, Homo sapien
gcagaagtgaaggcacaagtggtct

SEQ ID NO: 5001715 - DNA, 25 bp, Homo sapien
gtgaaggcacaagtggtcttgctct

SEQ ID NO: 5001716 - DNA, 25 bp, Homo sapien
gaagtgaaggcacaagtggtcttgc

SEQ ID NO: 5001717 - DNA, 25 bp, Homo sapien
tcagtcagggcaaatctcacttctt

SEQ ID NO: 5001718 - DNA, 25 bp, Homo sapien
gagtccaggttgagatactgcagcg

SEQ ID NO: 5001719 - DNA, 25 bp, Homo sapien
gaaccttcattgtccctgaggttag

SEQ ID NO: 5001720 - DNA, 25 bp, Homo sapien
ctgaggttagactgctcccgcagcc

SEQ ID NO: 5001721 - DNA, 25 bp, Homo sapien
ttatggcagaaaatcactggtgttc

SEQ ID NO: 5001722 - DNA, 25 bp, Homo sapien
tcactggtgttctggctacagatgc

SEQ ID NO: 5001723 - DNA, 25 bp, Homo sapien
gtacttttcaactttatggcagaaa

SEQ ID NO: 5001724 - DNA, 25 bp, Homo sapien
cagaaaatcactggtgttctggcta

SEQ ID NO: 5001725 - DNA, 25 bp, Homo sapien
ttcctttgccttgcataggcccagc

SEQ ID NO: 5001726 - DNA, 25 bp, Homo sapien
ggctgtttccatacgaggatccata

SEQ ID NO: 5001727 - DNA, 25 bp, Homo sapien
gactctgattggagttttgtttctc

SEQ ID NO: 5001728 - DNA, 25 bp, Homo sapien
tctttggaatgcacaaaatacttgc

SEQ ID NO: 5001729 - DNA, 25 bp, Homo sapien
aagttaaacatcatatatctgtttg

SEQ ID NO: 5001730 - DNA, 25 bp, Homo sapien
catgggtaccaagtgtgtaaagtta

SEQ ID NO: 5001731 - DNA, 25 bp, Homo sapien
tcatatatctgtttgaagagggaca

SEQ ID NO: 5001732 - DNA, 25 bp, Homo sapien
gtaactgtcggtaggtcatttctcc

SEQ ID NO: 5001733 - DNA, 25 bp, Homo sapien
cccagaaagagctgagagagctgcc

SEQ ID NO: 5001734 - DNA, 25 bp, Homo sapien
ggtagaaccagagcgctgaatgctt

SEQ ID NO: 5001735 - DNA, 25 bp, Homo sapien
cctgagcattgacaacattctcctg

SEQ ID NO: 5001736 - DNA, 25 bp, Homo sapien
tcctgcccatgcagcatcagcccca

SEQ ID NO: 5001737 - DNA, 25 bp, Homo sapien
ttccacactactgcatcacaaaaca

SEQ ID NO: 5001738 - DNA, 25 bp, Homo sapien
tccacactactgcatcacaaaacat

SEQ ID NO: 5001739 - DNA, 25 bp, Homo sapien
tccagaattggaacttaagtttctg

SEQ ID NO: 5001740 - DNA, 25 bp, Homo sapien
tccagaattggaactttagtaccat

SEQ ID NO: 5001741 - DNA, 25 bp, Homo sapien
gttccaggttcaattccagaattgg

SEQ ID NO: 5001742 - DNA, 25 bp, Homo sapien
gtcagttccataattagaactgcat

SEQ ID NO: 5001743 - DNA, 25 bp, Homo sapien
ctgtgccgagtctatacaacagcaa

SEQ ID NO: 5001744 - DNA, 25 bp, Homo sapien
tgactgtgccgagtctatacaacag

SEQ ID NO: 5001745 - DNA, 25 bp, Homo sapien
ttgatgactgtgccgagtctataca

SEQ ID NO: 5001746 - DNA, 25 bp, Homo sapien
gatgactgtgccgagtctatacaac

SEQ ID NO: 5001747 - DNA, 25 bp, Homo sapien
catttaagggtggaaggatagtctt

SEQ ID NO: 5001748 - DNA, 25 bp, Homo sapien
aggatcttccggtcagctggtcttg

SEQ ID NO: 5001749 - DNA, 25 bp, Homo sapien
gagctcaggagccatatttaaaata

SEQ ID NO: 5001750 - DNA, 25 bp, Homo sapien
gaaaagctcaagtatccaggatctt

SEQ ID NO: 5001751 - DNA, 25 bp, Homo sapien
ttcattatcaaatcttgaagtttca

SEQ ID NO: 5001752 - DNA, 25 bp, Homo sapien
gttataatacttcatggatatgttg

SEQ ID NO: 5001753 - DNA, 25 bp, Homo sapien
tatgttgtaaagattactgagtaat

SEQ ID NO: 5001754 - DNA, 25 bp, Homo sapien
ctgagtaatgtttcgtttggcatca

SEQ ID NO: 5001755 - DNA, 25 bp, Homo sapien
gacaggtctgaaacttattaatata

SEQ ID NO: 5001756 - DNA, 25 bp, Homo sapien
cagccatctgccacggtcataccag

SEQ ID NO: 5001757 - DNA, 25 bp, Homo sapien
caccttcgatttgacaggtctgaaa

SEQ ID NO: 5001758 - DNA, 25 bp, Homo sapien
gtcataccagcaccttcgatttgac

SEQ ID NO: 5001759 - DNA, 25 bp, Homo sapien
ctctggctggagcagtcccctattc

SEQ ID NO: 5001760 - DNA, 25 bp, Homo sapien
cagaggtccatcaaagatcaggaac

SEQ ID NO: 5001761 - DNA, 25 bp, Homo sapien
gatcaggaacagagttactgggaga

SEQ ID NO: 5001762 - DNA, 25 bp, Homo sapien
catgtggactatctaagacattctc

SEQ ID NO: 5001763 - DNA, 25 bp, Homo sapien
tactgggagatacatttggagatgc

SEQ ID NO: 5001764 - DNA, 25 bp, Homo sapien
gggctgaatgtgctctgacccctca

SEQ ID NO: 5001765 - DNA, 25 bp, Homo sapien
aaatcatgtcctagccatggtgcca

SEQ ID NO: 5001766 - DNA, 25 bp, Homo sapien
ctttatattgtggttgtggcccata

SEQ ID NO: 5001767 - DNA, 25 bp, Homo sapien
caatgggtggagtttgaatgaaatc

SEQ ID NO: 5001768 - DNA, 25 bp, Homo sapien
agagtgaacgtttcactcttataat

SEQ ID NO: 5001769 - DNA, 25 bp, Homo sapien
cagagtgaacgtttcactcttataa

SEQ ID NO: 5001770 - DNA, 25 bp, Homo sapien
aattccagagtgaacgtttcactct

SEQ ID NO: 5001771 - DNA, 25 bp, Homo sapien
ccagagtgaacgtttcactcttata

SEQ ID NO: 5001772 - DNA, 25 bp, Homo sapien
taatctctagcgcaagagtcttgta

SEQ ID NO: 5001773 - DNA, 25 bp, Homo sapien
ctagcgcaagagtcttgtagtctga

SEQ ID NO: 5001774 - DNA, 25 bp, Homo sapien
ggaagaaataatctctagcgcaaga

SEQ ID NO: 5001775 - DNA, 25 bp, Homo sapien
gaaataatctctagcgcaagagtct

SEQ ID NO: 5001776 - DNA, 25 bp, Homo sapien
gtgaagctatcctatctccataacc

SEQ ID NO: 5001777 - DNA, 25 bp, Homo sapien
tccataaccctttgcagtttccaaa

SEQ ID NO: 5001778 - DNA, 25 bp, Homo sapien
aagtggataaattctgaagtgaagc

SEQ ID NO: 5001779 - DNA, 25 bp, Homo sapien
aattctagtgatttgacctctgcac

SEQ ID NO: 5001780 - DNA, 25 bp, Homo sapien
tcctgttccagtggaacctgctgtg

SEQ ID NO: 5001781 - DNA, 25 bp, Homo sapien
gagaatcctgttccagtggaacctg

SEQ ID NO: 5001782 - DNA, 25 bp, Homo sapien
ccagagaatcctgttccagtggaac

SEQ ID NO: 5001783 - DNA, 25 bp, Homo sapien
ccacggccgccatctggtgcagcag

SEQ ID NO: 5001784 - DNA, 25 bp, Homo sapien
tgggtgacagctcctttatgtcggg

SEQ ID NO: 5001785 - DNA, 25 bp, Homo sapien
gctcctttatgtcgggcacacgttc

SEQ ID NO: 5001786 - DNA, 25 bp, Homo sapien
tatgtcgggcacacgttctattcct

SEQ ID NO: 5001787 - DNA, 25 bp, Homo sapien
ggcacacgttctattccttttgata

SEQ ID NO: 5001788 - DNA, 25 bp, Homo sapien
tatgaagaaacataccttcggagtt

SEQ ID NO: 5001789 - DNA, 25 bp, Homo sapien
tcttatgaagaaacataccttcgga

SEQ ID NO: 5001790 - DNA, 25 bp, Homo sapien
cataccttcggagttttgtgcatgg

SEQ ID NO: 5001791 - DNA, 25 bp, Homo sapien
gaaacataccttcggagttttgtgc

SEQ ID NO: 5001792 - DNA, 25 bp, Homo sapien
gaatgttgcaaatcctgattatgca

SEQ ID NO: 5001793 - DNA, 25 bp, Homo sapien
agtcatcgtgaactctgccctccaa

SEQ ID NO: 5001794 - DNA, 25 bp, Homo sapien
gaatcaggtaggagcaaacagaatg

SEQ ID NO: 5001795 - DNA, 25 bp, Homo sapien
catatcatgtaaactctagtcatcg

SEQ ID NO: 5001796 - DNA, 25 bp, Homo sapien
caccttgctgtagtaaaggatcaca

SEQ ID NO: 5001797 - DNA, 25 bp, Homo sapien
agccaccttgctgtagtaaaggatc

SEQ ID NO: 5001798 - DNA, 25 bp, Homo sapien
ccaccttgctgtagtaaaggatcac

SEQ ID NO: 5001799 - DNA, 25 bp, Homo sapien
gccaccttgctgtagtaaaggatca

SEQ ID NO: 5001800 - DNA, 25 bp, Homo sapien
tccctgtacatgtgagtcagtgaca

SEQ ID NO: 5001801 - DNA, 25 bp, Homo sapien
tggactctgcgaatgtcacacctgt

SEQ ID NO: 5001802 - DNA, 25 bp, Homo sapien
tcacggttgtaatccaggcatctca

SEQ ID NO: 5001803 - DNA, 25 bp, Homo sapien
agggtgcagtgcaacactccctgta

SEQ ID NO: 5001804 - DNA, 25 bp, Homo sapien
gagtgatccaaaagtgatcgccacc

SEQ ID NO: 5001805 - DNA, 25 bp, Homo sapien
gggcaacaaagaccacatcctgaca

SEQ ID NO: 5001806 - DNA, 25 bp, Homo sapien
tagcctgaggagtgtatgtctgtca

SEQ ID NO: 5001807 - DNA, 25 bp, Homo sapien
gacgtgcacctatgttagcctgagg

SEQ ID NO: 5001808 - DNA, 25 bp, Homo sapien
taaaacccgcctgcggtgatctggg

SEQ ID NO: 5001809 - DNA, 25 bp, Homo sapien
gggcgcgttccctatcgcaggatca

SEQ ID NO: 5001810 - DNA, 25 bp, Homo sapien
gcctgcctgattagaaaaagccggg

SEQ ID NO: 5001811 - DNA, 25 bp, Homo sapien
gatcacttgctatggtaagccgccc

SEQ ID NO: 5001812 - DNA, 25 bp, Homo sapien
aaagcggatgtagagcgcgttctaa

SEQ ID NO: 5001813 - DNA, 25 bp, Homo sapien
ttaaagcggatgtagagcgcgttct

SEQ ID NO: 5001814 - DNA, 25 bp, Homo sapien
taaagcggatgtagagcgcgttcta

SEQ ID NO: 5001815 - DNA, 25 bp, Homo sapien
aagcggatgtagagcgcgttctaac

SEQ ID NO: 5001816 - DNA, 25 bp, Homo sapien
ctgagaacggatccgtgggctgtct

SEQ ID NO: 5001817 - DNA, 25 bp, Homo sapien
accattgtgtcaccgcgaaaggccg

SEQ ID NO: 5001818 - DNA, 25 bp, Homo sapien
tgtgtggaaccgtcccgcacgtgtg

SEQ ID NO: 5001819 - DNA, 25 bp, Homo sapien
gatgaatctggctccgctgagaacg

SEQ ID NO: 5001820 - DNA, 25 bp, Homo sapien
gcagcagccgagagttagtctacag

SEQ ID NO: 5001821 - DNA, 25 bp, Homo sapien
tcaaggagaatccagcggaaacttc

SEQ ID NO: 5001822 - DNA, 25 bp, Homo sapien
cgtctcgtcacgaaaggaagctctt

SEQ ID NO: 5001823 - DNA, 25 bp, Homo sapien
gaggcaaaacgtggtcgcccagatc

SEQ ID NO: 5001824 - DNA, 25 bp, Homo sapien
ttaacgaataatcccatcaagtgag

SEQ ID NO: 5001825 - DNA, 25 bp, Homo sapien
taatcccatcaagtgagttccagtc

SEQ ID NO: 5001826 - DNA, 25 bp, Homo sapien
cccatcaagtgagttccagtccgat

SEQ ID NO: 5001827 - DNA, 25 bp, Homo sapien
cgaataatcccatcaagtgagttcc

SEQ ID NO: 5001828 - DNA, 25 bp, Homo sapien
ttcccgagaccacgaatggccatgt

SEQ ID NO: 5001829 - DNA, 25 bp, Homo sapien
tgtcagagtccggtcttcccgagac

SEQ ID NO: 5001830 - DNA, 25 bp, Homo sapien
gttggctgcggaaacttctttggtg

SEQ ID NO: 5001831 - DNA, 25 bp, Homo sapien
cggtggttccacatagtctgttggc

SEQ ID NO: 5001832 - DNA, 25 bp, Homo sapien
tcaaaaagaacgtgagatattagag

SEQ ID NO: 5001833 - DNA, 25 bp, Homo sapien
acgtgagatattagagagaaacgat

SEQ ID NO: 5001834 - DNA, 25 bp, Homo sapien
tgagatattagagagaaacgattgt

SEQ ID NO: 5001835 - DNA, 25 bp, Homo sapien
gatattagagagaaacgattgtctc

SEQ ID NO: 5001836 - DNA, 25 bp, Homo sapien
catatccgttcacgcttcttcctgg

SEQ ID NO: 5001837 - DNA, 25 bp, Homo sapien
atccgttcacgcttcttcctggact

SEQ ID NO: 5001838 - DNA, 25 bp, Homo sapien
tatccgttcacgcttcttcctggac

SEQ ID NO: 5001839 - DNA, 25 bp, Homo sapien
atatccgttcacgcttcttcctgga

SEQ ID NO: 5001840 - DNA, 25 bp, Homo sapien
ggctgctctcccgaatccttgcgcg

SEQ ID NO: 5001841 - DNA, 25 bp, Homo sapien
aattcttcccaacgggctgaccctg

SEQ ID NO: 5001842 - DNA, 25 bp, Homo sapien
ctttcgaattcttcccaacgggctg

SEQ ID NO: 5001843 - DNA, 25 bp, Homo sapien
gagcgccctgggtatctcctggctg

SEQ ID NO: 5001844 - DNA, 25 bp, Homo sapien
caggtgagcgatgtaactggaagcc

SEQ ID NO: 5001845 - DNA, 25 bp, Homo sapien
caggttcactgggtgcacgtagccg

SEQ ID NO: 5001846 - DNA, 25 bp, Homo sapien
gcgactgcttgcactctgcggctga

SEQ ID NO: 5001847 - DNA, 25 bp, Homo sapien
tcctctgccgacgagttgtcactgg

SEQ ID NO: 5001848 - DNA, 25 bp, Homo sapien
tcccccctggccagtctcgctgtct

SEQ ID NO: 5001849 - DNA, 25 bp, Homo sapien
ctttcctcccccctggccagtctcg

SEQ ID NO: 5001850 - DNA, 25 bp, Homo sapien
tggccagtctcgctgtctccgcctt

SEQ ID NO: 5001851 - DNA, 25 bp, Homo sapien
agtctcgctgtctccgccttccgct

SEQ ID NO: 5001852 - DNA, 25 bp, Homo sapien
aggccagagagcgctccaaggaaga

SEQ ID NO: 5001853 - DNA, 25 bp, Homo sapien
ggaggccagagagcgctccaaggaa

SEQ ID NO: 5001854 - DNA, 25 bp, Homo sapien
gaggccagagagcgctccaaggaag

SEQ ID NO: 5001855 - DNA, 25 bp, Homo sapien
gagagcgtgagcgcccctctgctga

SEQ ID NO: 5001856 - DNA, 25 bp, Homo sapien
aagcgaggtgggtggcgagagcgtg

SEQ ID NO: 5001857 - DNA, 25 bp, Homo sapien
gagttggcgcccaagtccagaatcc

SEQ ID NO: 5001858 - DNA, 25 bp, Homo sapien
agcgtggactacgagttggcgccca

SEQ ID NO: 5001859 - DNA, 25 bp, Homo sapien
ggtaagctgcgccttttgaaaaggc

SEQ ID NO: 5001860 - DNA, 25 bp, Homo sapien
cgtctctgcagagccgagatttggg

SEQ ID NO: 5001861 - DNA, 25 bp, Homo sapien
gggaccgcttttctgcatgccgaag

SEQ ID NO: 5001862 - DNA, 25 bp, Homo sapien
tgaaaaggctatctgtactccttgg

SEQ ID NO: 5001863 - DNA, 25 bp, Homo sapien
gcttacattatctctagtgatatcc

SEQ ID NO: 5001864 - DNA, 25 bp, Homo sapien
tatgcagcttgatactcccagttat

SEQ ID NO: 5001865 - DNA, 25 bp, Homo sapien
gatgcaggtgcacagactatctcaa

SEQ ID NO: 5001866 - DNA, 25 bp, Homo sapien
caatttgacaggctttaaggcttac

SEQ ID NO: 5001867 - DNA, 25 bp, Homo sapien
cagatggtttcatgtgttccaactt

SEQ ID NO: 5001868 - DNA, 25 bp, Homo sapien
gaatgcattctaatccaaggacaca

SEQ ID NO: 5001869 - DNA, 25 bp, Homo sapien
catacattcattaatccttgtgctc

SEQ ID NO: 5001870 - DNA, 25 bp, Homo sapien
cttactctcattctgtaggaatgca

SEQ ID NO: 5001871 - DNA, 25 bp, Homo sapien
ccagaacaaagcctgaaaggcaggc

SEQ ID NO: 5001872 - DNA, 25 bp, Homo sapien
tgaaaggcaggcagttggtttgaca

SEQ ID NO: 5001873 - DNA, 25 bp, Homo sapien
cagaacaaagcctgaaaggcaggca

SEQ ID NO: 5001874 - DNA, 25 bp, Homo sapien
ggcagttggtttgacagctttagaa

SEQ ID NO: 5001875 - DNA, 25 bp, Homo sapien
gaatatcaggtacctctccagagca

SEQ ID NO: 5001876 - DNA, 25 bp, Homo sapien
cagttgcttgcctaaaaatggtaaa

SEQ ID NO: 5001877 - DNA, 25 bp, Homo sapien
tatactgaatatcaggtacctctcc

SEQ ID NO: 5001878 - DNA, 25 bp, Homo sapien
gagcatgcatgtggttctacagttg

SEQ ID NO: 5001879 - DNA, 25 bp, Homo sapien
taataagtttttcatcaactatgaa

SEQ ID NO: 5001880 - DNA, 25 bp, Homo sapien
agtttttcatcaactatgaaattag

SEQ ID NO: 5001881 - DNA, 25 bp, Homo sapien
tcaactatgaaattagtcatagtca

SEQ ID NO: 5001882 - DNA, 25 bp, Homo sapien
tcatcaactatgaaattagtcatag

SEQ ID NO: 5001883 - DNA, 25 bp, Homo sapien
taatgtaagacctggccttaaaatc

SEQ ID NO: 5001884 - DNA, 25 bp, Homo sapien
attcctcttgtactatgccttgctg

SEQ ID NO: 5001885 - DNA, 25 bp, Homo sapien
tccccacagttttccatagctagag

SEQ ID NO: 5001886 - DNA, 25 bp, Homo sapien
gacatcccttgacacattctttcct

SEQ ID NO: 5001887 - DNA, 25 bp, Homo sapien
cccaggctgaagagctttcataagc

SEQ ID NO: 5001888 - DNA, 25 bp, Homo sapien
ccccaggctgaagagctttcataag

SEQ ID NO: 5001889 - DNA, 25 bp, Homo sapien
aggctgaagagctttcataagccat

SEQ ID NO: 5001890 - DNA, 25 bp, Homo sapien
tgtgaataccccaggctgaagagct

SEQ ID NO: 5001891 - DNA, 25 bp, Homo sapien
aggctgaagagtaggcagcaaggga

SEQ ID NO: 5001892 - DNA, 25 bp, Homo sapien
aaaaagaggctgaagagtaggcagc

SEQ ID NO: 5001893 - DNA, 25 bp, Homo sapien
agaaaaagaggctgaagagtaggca

SEQ ID NO: 5001894 - DNA, 25 bp, Homo sapien
aaagaggctgaagagtaggcagcaa

SEQ ID NO: 5001895 - DNA, 25 bp, Homo sapien
cgaggaatgcgaggccacccttgac

SEQ ID NO: 5001896 - DNA, 25 bp, Homo sapien
accctgccgaggaatgcgaggccac

SEQ ID NO: 5001897 - DNA, 25 bp, Homo sapien
ctgccgaggaatgcgaggccaccct

SEQ ID NO: 5001898 - DNA, 25 bp, Homo sapien
ccacaccctgccgaggaatgcgagg

SEQ ID NO: 5001899 - DNA, 25 bp, Homo sapien
caccaaggtgacgatgaaggcatca

SEQ ID NO: 5001900 - DNA, 25 bp, Homo sapien
taaaatccgcatattttaggacttg

SEQ ID NO: 5001901 - DNA, 25 bp, Homo sapien
taacagcaaaactggtgcaccaagg

SEQ ID NO: 5001902 - DNA, 25 bp, Homo sapien
tgcttttccaatgaacgaatctagc

SEQ ID NO: 5001903 - DNA, 25 bp, Homo sapien
cttcactacctcatttgacaccctt

SEQ ID NO: 5001904 - DNA, 25 bp, Homo sapien
acacgatggtagcataatcaagttt

SEQ ID NO: 5001905 - DNA, 25 bp, Homo sapien
cacacgatggtagcataatcaagtt

SEQ ID NO: 5001906 - DNA, 25 bp, Homo sapien
tcacacgatggtagcataatcaagt

SEQ ID NO: 5001907 - DNA, 25 bp, Homo sapien
gttccaaaattgctagggccacaca

SEQ ID NO: 5001908 - DNA, 25 bp, Homo sapien
gctagggccacacagtgtgaaaaca

SEQ ID NO: 5001909 - DNA, 25 bp, Homo sapien
ctagggccacacagtgtgaaaacat

SEQ ID NO: 5001910 - DNA, 25 bp, Homo sapien
ccaaaattgctagggccacacagtg

SEQ ID NO: 5001911 - DNA, 25 bp, Homo sapien
gccactgcatacagattttgaatac

SEQ ID NO: 5001912 - DNA, 25 bp, Homo sapien
gtaaccgcctcggtctgcacaagaa

SEQ ID NO: 5001913 - DNA, 25 bp, Homo sapien
ttctgtctgtccaataagccactca

SEQ ID NO: 5001914 - DNA, 25 bp, Homo sapien
catttactgatagcacttgtggtcc

SEQ ID NO: 5001915 - DNA, 25 bp, Homo sapien
tacgcgcataacgtgagatcaaaag

SEQ ID NO: 5001916 - DNA, 25 bp, Homo sapien
caaagacccttaaatcctccagact

SEQ ID NO: 5001917 - DNA, 25 bp, Homo sapien
ttattttgagcagcagaccagcgtg

SEQ ID NO: 5001918 - DNA, 25 bp, Homo sapien
gaccagcgtgactccacagtttcaa

SEQ ID NO: 5001919 - DNA, 25 bp, Homo sapien
tggggaaggggaagcagagcagcgc

SEQ ID NO: 5001920 - DNA, 25 bp, Homo sapien
gaaggggaagcagagcagcgctgac

SEQ ID NO: 5001921 - DNA, 25 bp, Homo sapien
gggccgagctggggaaggggaagca

SEQ ID NO: 5001922 - DNA, 25 bp, Homo sapien
ggaaggggaagcagagcagcgctga

SEQ ID NO: 5001923 - DNA, 25 bp, Homo sapien
tctcaaggcttgcaggtcgtctcca

SEQ ID NO: 5001924 - DNA, 25 bp, Homo sapien
gccgaactccccagtatgagcgaac

SEQ ID NO: 5001925 - DNA, 25 bp, Homo sapien
cagtatgagcgaacctcaagtcact

SEQ ID NO: 5001926 - DNA, 25 bp, Homo sapien
agtcactgccctcgcgcttgtcgag

SEQ ID NO: 5001927 - DNA, 25 bp, Homo sapien
ccactctcaggtggggtgactttgg

SEQ ID NO: 5001928 - DNA, 25 bp, Homo sapien
ccgttcctgtgccactctcaggtgg

SEQ ID NO: 5001929 - DNA, 25 bp, Homo sapien
ggactccggggattcctgctccgcg

SEQ ID NO: 5001930 - DNA, 25 bp, Homo sapien
gggattcctgctccgcggagaactg

SEQ ID NO: 5001931 - DNA, 25 bp, Homo sapien
caaaggccccgtactagatggaata

SEQ ID NO: 5001932 - DNA, 25 bp, Homo sapien
taaatatttcgcatgacaggcatgg

SEQ ID NO: 5001933 - DNA, 25 bp, Homo sapien
caggcatggtacagtgtttctcaca

SEQ ID NO: 5001934 - DNA, 25 bp, Homo sapien
gaaggtggaggtaaccaagctgtcc

SEQ ID NO: 5001935 - DNA, 25 bp, Homo sapien
taaaattcgtgcatatcataaggcc

SEQ ID NO: 5001936 - DNA, 25 bp, Homo sapien
ggctattcatcacagtagggacaga

SEQ ID NO: 5001937 - DNA, 25 bp, Homo sapien
gaaagttagaaccagcaagtcatgc

SEQ ID NO: 5001938 - DNA, 25 bp, Homo sapien
ggaaccatgatttcacacgcagcaa

SEQ ID NO: 5001939 - DNA, 25 bp, Homo sapien
gccttgactgctctcaacacagtat

SEQ ID NO: 5001940 - DNA, 25 bp, Homo sapien
tttgccttgactgctctcaacacag

SEQ ID NO: 5001941 - DNA, 25 bp, Homo sapien
gtttttgccttgactgctctcaaca

SEQ ID NO: 5001942 - DNA, 25 bp, Homo sapien
gtgtttttgccttgactgctctcaa

SEQ ID NO: 5001943 - DNA, 25 bp, Homo sapien
tcctctgtctcagagatgatctcca

SEQ ID NO: 5001944 - DNA, 25 bp, Homo sapien
cctctgtctcagagatgatctccat

SEQ ID NO: 5001945 - DNA, 25 bp, Homo sapien
tgctctttcttaaacctgtcttgaa

SEQ ID NO: 5001946 - DNA, 25 bp, Homo sapien
tctgtctcagagatgatctccatct

SEQ ID NO: 5001947 - DNA, 25 bp, Homo sapien
cggtatttctgctttaatatttcca

SEQ ID NO: 5001948 - DNA, 25 bp, Homo sapien
ggtatttctgctttaatatttccat

SEQ ID NO: 5001949 - DNA, 25 bp, Homo sapien
tttatcagcatttggtatttcttgt

SEQ ID NO: 5001950 - DNA, 25 bp, Homo sapien
tgtcttatttccccagtgcaaaata

SEQ ID NO: 5001951 - DNA, 25 bp, Homo sapien
ctaaagatttatcagcatttggtat

SEQ ID NO: 5001952 - DNA, 25 bp, Homo sapien
ttcttgtcttatttccccagtgcaa

SEQ ID NO: 5001953 - DNA, 25 bp, Homo sapien
aataacatcccaccagatctgggtt

SEQ ID NO: 5001954 - DNA, 25 bp, Homo sapien
gaataacatcccaccagatctgggt

SEQ ID NO: 5001955 - DNA, 25 bp, Homo sapien
cccaccagatctgggtttgttggga

SEQ ID NO: 5001956 - DNA, 25 bp, Homo sapien
accagatctgggtttgttgggatac

SEQ ID NO: 5001957 - DNA, 25 bp, Homo sapien
acgatggtggatttctgatccactt

SEQ ID NO: 5001958 - DNA, 25 bp, Homo sapien
gatccactttgcgtagaaaccaaag

SEQ ID NO: 5001959 - DNA, 25 bp, Homo sapien
ggatttctgatccactttgcgtaga

SEQ ID NO: 5001960 - DNA, 25 bp, Homo sapien
ttctctaagctggtatgaagttcca

SEQ ID NO: 5001961 - DNA, 25 bp, Homo sapien
ctggttctgatgtggccctttgctc

SEQ ID NO: 5001962 - DNA, 25 bp, Homo sapien
cctggttctgatgtggccctttgct

SEQ ID NO: 5001963 - DNA, 25 bp, Homo sapien
caatgtcgccaactgccaaaccaat

SEQ ID NO: 5001964 - DNA, 25 bp, Homo sapien
ggacctcagcaatgtcgccaactgc

SEQ ID NO: 5001965 - DNA, 25 bp, Homo sapien
tgtttctggacctcagcaatgtcgc

SEQ ID NO: 5001966 - DNA, 25 bp, Homo sapien
tcaatgatgcatgtttctggacctc

SEQ ID NO: 5001967 - DNA, 25 bp, Homo sapien
aggactctcgataattgatatctcc

SEQ ID NO: 5001968 - DNA, 25 bp, Homo sapien
ttcatttctcagatatggttctagg

SEQ ID NO: 5001969 - DNA, 25 bp, Homo sapien
tatctcctagcatcatgctgaaggt

SEQ ID NO: 5001970 - DNA, 25 bp, Homo sapien
ggttctaggaaggactctcgataat

SEQ ID NO: 5001971 - DNA, 25 bp, Homo sapien
gattatagaaagcaatggagagctg

SEQ ID NO: 5001972 - DNA, 25 bp, Homo sapien
aaagcaatggagagctgaagggatc

SEQ ID NO: 5001973 - DNA, 25 bp, Homo sapien
tatagaaagcaatggagagctgaag

SEQ ID NO: 5001974 - DNA, 25 bp, Homo sapien
ctggattatagaaagcaatggagag

SEQ ID NO: 5001975 - DNA, 25 bp, Homo sapien
aagcagacggtgaggtacaaatgaa

SEQ ID NO: 5001976 - DNA, 25 bp, Homo sapien
gcagacggtgaggtacaaatgaaat

SEQ ID NO: 5001977 - DNA, 25 bp, Homo sapien
tgaaagcagacggtgaggtacaaat

SEQ ID NO: 5001978 - DNA, 25 bp, Homo sapien
atgaaatgcaaagtttctacaatga

SEQ ID NO: 5001979 - DNA, 25 bp, Homo sapien
gaaggaagataaatacaactgtaga

SEQ ID NO: 5001980 - DNA, 25 bp, Homo sapien
tcaaaattacctccaacataacaat

SEQ ID NO: 5001981 - DNA, 25 bp, Homo sapien
aatacaactgtagacctcaacaaag

SEQ ID NO: 5001982 - DNA, 25 bp, Homo sapien
tcaggaggatgtaaaagctgagtcc

SEQ ID NO: 5001983 - DNA, 25 bp, Homo sapien
caagaacattgcttatatccataaa

SEQ ID NO: 5001984 - DNA, 25 bp, Homo sapien
attcatccaatagaagtaaacagca

SEQ ID NO: 5001985 - DNA, 25 bp, Homo sapien
gaagtaaacagcaattgctccacat

SEQ ID NO: 5001986 - DNA, 25 bp, Homo sapien
cacaaaaatgatgcccgtcgtgtag

SEQ ID NO: 5001987 - DNA, 25 bp, Homo sapien
tatacttgataaaaacactaaaatc

SEQ ID NO: 5001988 - DNA, 25 bp, Homo sapien
gcttctttgcaatacccaaatatac

SEQ ID NO: 5001989 - DNA, 25 bp, Homo sapien
tgccccgcttctttgcaatacccaa

SEQ ID NO: 5001990 - DNA, 25 bp, Homo sapien
cccgcttctttgcaatacccaaata

SEQ ID NO: 5001991 - DNA, 25 bp, Homo sapien
tatgtcagatttattatgggtttag

SEQ ID NO: 5001992 - DNA, 25 bp, Homo sapien
agtcctgatatgtcagatttattat

SEQ ID NO: 5001993 - DNA, 25 bp, Homo sapien
tattatgggtttagtagtcttaaga

SEQ ID NO: 5001994 - DNA, 25 bp, Homo sapien
cagatttattatgggtttagtagtc

SEQ ID NO: 5001995 - DNA, 25 bp, Homo sapien
cattcctggttttatattgacaacg

SEQ ID NO: 5001996 - DNA, 25 bp, Homo sapien
agtaagatcctaaattcatcatatg

SEQ ID NO: 5001997 - DNA, 25 bp, Homo sapien
tattgacaacgagaatggtcatagg

SEQ ID NO: 5001998 - DNA, 25 bp, Homo sapien
cgagaatggtcataggtatgagacc

SEQ ID NO: 5001999 - DNA, 25 bp, Homo sapien
agctctatgcggttattttgtacca

SEQ ID NO: 5002000 - DNA, 25 bp, Homo sapien
ggatgattgagaagctctatgcggt

SEQ ID NO: 5002001 - DNA, 25 bp, Homo sapien
gattgagaagctctatgcggttatt

SEQ ID NO: 5002002 - DNA, 25 bp, Homo sapien
ctatgcggttattttgtaccattgc

SEQ ID NO: 5002003 - DNA, 25 bp, Homo sapien
gaagcaatgaccaaagtgaaaaggc

SEQ ID NO: 5002004 - DNA, 25 bp, Homo sapien
tcgactatgacaccaacaggacagg

SEQ ID NO: 5002005 - DNA, 25 bp, Homo sapien
gagataccacttcgcatccgttagg

SEQ ID NO: 5002006 - DNA, 25 bp, Homo sapien
ttaggttggccactatcaaaagaac

SEQ ID NO: 5002007 - DNA, 25 bp, Homo sapien
ttgagggctgtaagcggttcatata

SEQ ID NO: 5002008 - DNA, 25 bp, Homo sapien
ggttcatatataacatcctgtgtag

SEQ ID NO: 5002009 - DNA, 25 bp, Homo sapien
gggctgtaagcggttcatatataac

SEQ ID NO: 5002010 - DNA, 25 bp, Homo sapien
taagcggttcatatataacatcctg

SEQ ID NO: 5002011 - DNA, 25 bp, Homo sapien
ggaatgcaacatgcagaaatctaaa

SEQ ID NO: 5002012 - DNA, 25 bp, Homo sapien
taatagtctcggcaggacttgtctt

SEQ ID NO: 5002013 - DNA, 25 bp, Homo sapien
cttctgtggaatgcaacatgcagaa

SEQ ID NO: 5002014 - DNA, 25 bp, Homo sapien
tgtggaatgcaacatgcagaaatct

SEQ ID NO: 5002015 - DNA, 25 bp, Homo sapien
cctggagaattatgactgaaaatct

SEQ ID NO: 5002016 - DNA, 25 bp, Homo sapien
ctggagaattatgactgaaaatctt

SEQ ID NO: 5002017 - DNA, 25 bp, Homo sapien
gcctggagaattatgactgaaaatc

SEQ ID NO: 5002018 - DNA, 25 bp, Homo sapien
ttcaggactatgtcagcattgtggc

SEQ ID NO: 5002019 - DNA, 25 bp, Homo sapien
tgatcgtaagaacaacctccttcct

SEQ ID NO: 5002020 - DNA, 25 bp, Homo sapien
ccttcctcttattgtgaagtgcaag

SEQ ID NO: 5002021 - DNA, 25 bp, Homo sapien
tcagaagaagcgcaacggctttggc

SEQ ID NO: 5002022 - DNA, 25 bp, Homo sapien
tcccttgcagcaaagtgaagtgcag

SEQ ID NO: 5002023 - DNA, 25 bp, Homo sapien
cttcccttgcagcaaagtgaagtgc

SEQ ID NO: 5002024 - DNA, 25 bp, Homo sapien
ccttgcagcaaagtgaagtgcagtg

SEQ ID NO: 5002025 - DNA, 25 bp, Homo sapien
ttgcagcaaagtgaagtgcagtgtt

SEQ ID NO: 5002026 - DNA, 25 bp, Homo sapien
gattttgggtaagcatgaggaccgc

SEQ ID NO: 5002027 - DNA, 25 bp, Homo sapien
ctggacctaccagggagtaaacgct

SEQ ID NO: 5002028 - DNA, 25 bp, Homo sapien
tctggcaatgttggaagtttctgct

SEQ ID NO: 5002029 - DNA, 25 bp, Homo sapien
ttgctaaacacccaacaaaaggctg

SEQ ID NO: 5002030 - DNA, 25 bp, Homo sapien
ccgtcttcatccaggcgatctgtgc

SEQ ID NO: 5002031 - DNA, 25 bp, Homo sapien
ggtctgagtgtacccgcccatggac

SEQ ID NO: 5002032 - DNA, 25 bp, Homo sapien
ggacgcatgatgcaaagctgtccag

SEQ ID NO: 5002033 - DNA, 25 bp, Homo sapien
tcatccaggcgatctgtgcacttca

SEQ ID NO: 5002034 - DNA, 25 bp, Homo sapien
tacttcggtcccctttgcaggtcag

SEQ ID NO: 5002035 - DNA, 25 bp, Homo sapien
cattcattcatgtagctgtagcacc

SEQ ID NO: 5002036 - DNA, 25 bp, Homo sapien
ttaagcaacaactgtctggcctggg

SEQ ID NO: 5002037 - DNA, 25 bp, Homo sapien
gcagatgttttagggtgcaagagcc

SEQ ID NO: 5002038 - DNA, 25 bp, Homo sapien
tctgacaggtattgatacgcccata

SEQ ID NO: 5002039 - DNA, 25 bp, Homo sapien
tcagaagcctcgtatcacttatgtc

SEQ ID NO: 5002040 - DNA, 25 bp, Homo sapien
cacttatgtcttgtaggagcctctg

SEQ ID NO: 5002041 - DNA, 25 bp, Homo sapien
tctttgctgccagatggagaggagt

SEQ ID NO: 5002042 - DNA, 25 bp, Homo sapien
catacattgctagactgacccttac

SEQ ID NO: 5002043 - DNA, 25 bp, Homo sapien
tgttcatacattgctagactgaccc

SEQ ID NO: 5002044 - DNA, 25 bp, Homo sapien
ttcatacattgctagactgaccctt

SEQ ID NO: 5002045 - DNA, 25 bp, Homo sapien
acatgttcatacattgctagactga

SEQ ID NO: 5002046 - DNA, 25 bp, Homo sapien
taaagccaagtaggttatttacaga

SEQ ID NO: 5002047 - DNA, 25 bp, Homo sapien
ctgtctacatgcataatgtagagga

SEQ ID NO: 5002048 - DNA, 25 bp, Homo sapien
gcttttggaatgaatggacacatta

SEQ ID NO: 5002049 - DNA, 25 bp, Homo sapien
ggagtacacccatcgttgtcttcat

SEQ ID NO: 5002050 - DNA, 25 bp, Homo sapien
tctgagagatcatgccaataggaaa

SEQ ID NO: 5002051 - DNA, 25 bp, Homo sapien
taacctaaaggatttgagagtaata

SEQ ID NO: 5002052 - DNA, 25 bp, Homo sapien
tccaacaagggtcaatatgtattcc

SEQ ID NO: 5002053 - DNA, 25 bp, Homo sapien
gaagttgaatgctctgtcttcattt

SEQ ID NO: 5002054 - DNA, 25 bp, Homo sapien
aatgcagaaaattacgtccaaaatt

SEQ ID NO: 5002055 - DNA, 25 bp, Homo sapien
atgcagaaaattacgtccaaaatta

SEQ ID NO: 5002056 - DNA, 25 bp, Homo sapien
gttgctgtacagttaaatgcagaaa

SEQ ID NO: 5002057 - DNA, 25 bp, Homo sapien
ttaaatgcagaaaattacgtccaaa

SEQ ID NO: 5002058 - DNA, 25 bp, Homo sapien
ttagagagtagcaaatttacaatat

SEQ ID NO: 5002059 - DNA, 25 bp, Homo sapien
gatgcagaagcagttgctaatataa

SEQ ID NO: 5002060 - DNA, 25 bp, Homo sapien
gaatcgatcttattaatatctgctc

SEQ ID NO: 5002061 - DNA, 25 bp, Homo sapien
tggagagcgtccttcagaatcgatc

SEQ ID NO: 5002062 - DNA, 25 bp, Homo sapien
gtctgctagctcatggtgatcaaac

SEQ ID NO: 5002063 - DNA, 25 bp, Homo sapien
aattaaatagtctgctagctcatgg

SEQ ID NO: 5002064 - DNA, 25 bp, Homo sapien
ctgaaattaaatagtctgctagctc

SEQ ID NO: 5002065 - DNA, 25 bp, Homo sapien
taaatagtctgctagctcatggtga

SEQ ID NO: 5002066 - DNA, 25 bp, Homo sapien
tatccacgctaccagaataggacga

SEQ ID NO: 5002067 - DNA, 25 bp, Homo sapien
caaaatgaatggctgtgcaccttcc

SEQ ID NO: 5002068 - DNA, 25 bp, Homo sapien
tcagtttaacaatctcagtggctcc

SEQ ID NO: 5002069 - DNA, 25 bp, Homo sapien
ggtctcatgacatccatcggttgtg

SEQ ID NO: 5002070 - DNA, 25 bp, Homo sapien
aactgtctactgtacccatgctctt

SEQ ID NO: 5002071 - DNA, 25 bp, Homo sapien
aaagttaatgtgcaactgtctactg

SEQ ID NO: 5002072 - DNA, 25 bp, Homo sapien
ttattcataaagttaatgtgcaact

SEQ ID NO: 5002073 - DNA, 25 bp, Homo sapien
tgtgcaactgtctactgtacccatg

SEQ ID NO: 5002074 - DNA, 25 bp, Homo sapien
atgcagcttggtgaatagggaaaca

SEQ ID NO: 5002075 - DNA, 25 bp, Homo sapien
tatttgatttacatggcttagctcc

SEQ ID NO: 5002076 - DNA, 25 bp, Homo sapien
caaaccttagtattatttccatgca

SEQ ID NO: 5002077 - DNA, 25 bp, Homo sapien
tgcattctttggaacctgaaaatgc

SEQ ID NO: 5002078 - DNA, 25 bp, Homo sapien
ttgtggtgcacgcaatgatcacagc

SEQ ID NO: 5002079 - DNA, 25 bp, Homo sapien
tcgctattatttgtggtgcacgcaa

SEQ ID NO: 5002080 - DNA, 25 bp, Homo sapien
tgcttcgctattatttgtggtgcac

SEQ ID NO: 5002081 - DNA, 25 bp, Homo sapien
tatttgtggtgcacgcaatgatcac

SEQ ID NO: 5002082 - DNA, 25 bp, Homo sapien
tgcacagctatgtggagaggagcca

SEQ ID NO: 5002083 - DNA, 25 bp, Homo sapien
agaggggtatttccataatcatcca

SEQ ID NO: 5002084 - DNA, 25 bp, Homo sapien
tttttctacagcacaatgcagaggg

SEQ ID NO: 5002085 - DNA, 25 bp, Homo sapien
agccatcatgttgaagtttcggaga

SEQ ID NO: 5002086 - DNA, 25 bp, Homo sapien
agaggaatctctggtgatcttctcc

SEQ ID NO: 5002087 - DNA, 25 bp, Homo sapien
attagctcaatttggccttctgctg

SEQ ID NO: 5002088 - DNA, 25 bp, Homo sapien
ccattagctcaatttggccttctgc

SEQ ID NO: 5002089 - DNA, 25 bp, Homo sapien
aaagaggaatctctggtgatcttct

SEQ ID NO: 5002090 - DNA, 25 bp, Homo sapien
catatgcacttccttcaaaaaccac

SEQ ID NO: 5002091 - DNA, 25 bp, Homo sapien
atccatatgcacttccttcaaaaac

SEQ ID NO: 5002092 - DNA, 25 bp, Homo sapien
tccatatgcacttccttcaaaaacc

SEQ ID NO: 5002093 - DNA, 25 bp, Homo sapien
ccatatgcacttccttcaaaaacca

SEQ ID NO: 5002094 - DNA, 25 bp, Homo sapien
tccttgaaatcctccgtgtcgtccg

SEQ ID NO: 5002095 - DNA, 25 bp, Homo sapien
ttgaaatcctccgtgtcgtccggca

SEQ ID NO: 5002096 - DNA, 25 bp, Homo sapien
aaatcctccgtgtcgtccggcacat

SEQ ID NO: 5002097 - DNA, 25 bp, Homo sapien
ccttgaaatcctccgtgtcgtccgg

SEQ ID NO: 5002098 - DNA, 25 bp, Homo sapien
ggacgccacctggtgcagctgctca

SEQ ID NO: 5002099 - DNA, 25 bp, Homo sapien
cccaccccggacgccacctggtgca

SEQ ID NO: 5002100 - DNA, 25 bp, Homo sapien
gacgccacctggtgcagctgctcac

SEQ ID NO: 5002101 - DNA, 25 bp, Homo sapien
accccggacgccacctggtgcagct

SEQ ID NO: 5002102 - DNA, 25 bp, Homo sapien
gggtccgcgcgagcccgagctctcc

SEQ ID NO: 5002103 - DNA, 25 bp, Homo sapien
aggcgctggggtccgcgcgagcccg

SEQ ID NO: 5002104 - DNA, 25 bp, Homo sapien
gctggggtccgcgcgagcccgagct

SEQ ID NO: 5002105 - DNA, 25 bp, Homo sapien
tggggtccgcgcgagcccgagctct

SEQ ID NO: 5002106 - DNA, 25 bp, Homo sapien
ccgcgctacttttgtagtgcaggaa

SEQ ID NO: 5002107 - DNA, 25 bp, Homo sapien
gtagaaacgcggagctccttcgcaa

SEQ ID NO: 5002108 - DNA, 25 bp, Homo sapien
aaggagttctcaggcccgcgctact

SEQ ID NO: 5002109 - DNA, 25 bp, Homo sapien
gaaaaagtcgctctgcggaagccct

SEQ ID NO: 5002110 - DNA, 25 bp, Homo sapien
ctgttgccgtaagttcaggtttaca

SEQ ID NO: 5002111 - DNA, 25 bp, Homo sapien
aagggaactgttgccgtaagttcag

SEQ ID NO: 5002112 - DNA, 25 bp, Homo sapien
cagacaagggaactgttgccgtaag

SEQ ID NO: 5002113 - DNA, 25 bp, Homo sapien
tgttgccgtaagttcaggtttacaa

SEQ ID NO: 5002114 - DNA, 25 bp, Homo sapien
tcagcaacggtttgtggactctctg

SEQ ID NO: 5002115 - DNA, 25 bp, Homo sapien
ataggtgcactcagcaacggtttgt

SEQ ID NO: 5002116 - DNA, 25 bp, Homo sapien
tgcactcagcaacggtttgtggact

SEQ ID NO: 5002117 - DNA, 25 bp, Homo sapien
agcaacggtttgtggactctctgac

SEQ ID NO: 5002118 - DNA, 25 bp, Homo sapien
caagtttatgtccagtggtatggtg

SEQ ID NO: 5002119 - DNA, 25 bp, Homo sapien
tatgtccagtggtatggtgactgaa

SEQ ID NO: 5002120 - DNA, 25 bp, Homo sapien
tgtccagtggtatggtgactgaatt

SEQ ID NO: 5002121 - DNA, 25 bp, Homo sapien
ctctttatctatggcagcctcaggc

SEQ ID NO: 5002122 - DNA, 25 bp, Homo sapien
ggtttgccctgtatgtgacctctgc

SEQ ID NO: 5002123 - DNA, 25 bp, Homo sapien
gcacagccaaggtttgccctgtatg

SEQ ID NO: 5002124 - DNA, 25 bp, Homo sapien
ccaaggtttgccctgtatgtgacct

SEQ ID NO: 5002125 - DNA, 25 bp, Homo sapien
gccctgtatgtgacctctgcaatta

SEQ ID NO: 5002126 - DNA, 25 bp, Homo sapien
gcccaaattccataaagcggatctg

SEQ ID NO: 5002127 - DNA, 25 bp, Homo sapien
agcccaaattccataaagcggatct

SEQ ID NO: 5002128 - DNA, 25 bp, Homo sapien
cccaaattccataaagcggatctgc

SEQ ID NO: 5002129 - DNA, 25 bp, Homo sapien
gtcccagtgttgtgctggctgccaa

SEQ ID NO: 5002130 - DNA, 25 bp, Homo sapien
ggccagattgatgtggacaggctcc

SEQ ID NO: 5002131 - DNA, 25 bp, Homo sapien
gctgccaagggtaacggccagattg

SEQ ID NO: 5002132 - DNA, 25 bp, Homo sapien
aaatgcactctgataggtgtactga

SEQ ID NO: 5002133 - DNA, 25 bp, Homo sapien
ggttagaggctactgaatccaacct

SEQ ID NO: 5002134 - DNA, 25 bp, Homo sapien
caaagtccatgttgcatacagtgaa

SEQ ID NO: 5002135 - DNA, 25 bp, Homo sapien
ctacacagagtgtccagtgatcctc

SEQ ID NO: 5002136 - DNA, 25 bp, Homo sapien
gcaagaaaggtaactaactacacag

SEQ ID NO: 5002137 - DNA, 25 bp, Homo sapien
tcaccaagagggatgtaacattcct

SEQ ID NO: 5002138 - DNA, 25 bp, Homo sapien
ttcatgggaattggtgttctccagg

SEQ ID NO: 5002139 - DNA, 25 bp, Homo sapien
ccaagagggatgtaacattcctgtg

SEQ ID NO: 5002140 - DNA, 25 bp, Homo sapien
tttgtagaatttcatgggaattggt

SEQ ID NO: 5002141 - DNA, 25 bp, Homo sapien
cacaagtatcagtttaatgaaatca

SEQ ID NO: 5002142 - DNA, 25 bp, Homo sapien
aagatatgaattgagaagttgacac

SEQ ID NO: 5002143 - DNA, 25 bp, Homo sapien
tcttcaccatggatgtaagatatga

SEQ ID NO: 5002144 - DNA, 25 bp, Homo sapien
gaaatcattatcttgtgtcccacgg

SEQ ID NO: 5002145 - DNA, 25 bp, Homo sapien
tctggtgtcttcctcgcacttgagg

SEQ ID NO: 5002146 - DNA, 25 bp, Homo sapien
gtctcgcactgacggaggatctcgg

SEQ ID NO: 5002147 - DNA, 25 bp, Homo sapien
ctcggttctcatatctgtctcgcac

SEQ ID NO: 5002148 - DNA, 25 bp, Homo sapien
tctctgttttgatgtctccctcgca

SEQ ID NO: 5002149 - DNA, 25 bp, Homo sapien
tgctcgcaagaatggcttgatctgg

SEQ ID NO: 5002150 - DNA, 25 bp, Homo sapien
tcactgtgcaaaaaccagctgctcg

SEQ ID NO: 5002151 - DNA, 25 bp, Homo sapien
cttgatctggtgagtgatgtatgga

SEQ ID NO: 5002152 - DNA, 25 bp, Homo sapien
gatgtatggagcagccaatttctct

SEQ ID NO: 5002153 - DNA, 25 bp, Homo sapien
ttgccagtgtgcggctcattcacat

SEQ ID NO: 5002154 - DNA, 25 bp, Homo sapien
gccagtgtgcggctcattcacatga

SEQ ID NO: 5002155 - DNA, 25 bp, Homo sapien
agtgtgcggctcattcacatgaatc

SEQ ID NO: 5002156 - DNA, 25 bp, Homo sapien
tgtgcggctcattcacatgaatcca

SEQ ID NO: 5002157 - DNA, 25 bp, Homo sapien
tttggcaccaaattagttcttcata

SEQ ID NO: 5002158 - DNA, 25 bp, Homo sapien
ttctgccctggttcttgtctgacat

SEQ ID NO: 5002159 - DNA, 25 bp, Homo sapien
ctgacatcttgattttggcaccaaa

SEQ ID NO: 5002160 - DNA, 25 bp, Homo sapien
ttatttctgccctggttcttgtctg

SEQ ID NO: 5002161 - DNA, 25 bp, Homo sapien
ggaaggtgttcgtgagtcctcttaa

SEQ ID NO: 5002162 - DNA, 25 bp, Homo sapien
gtcctcttaacagtgatctcagtag

SEQ ID NO: 5002163 - DNA, 25 bp, Homo sapien
aagatctggccaaccactctgaagg

SEQ ID NO: 5002164 - DNA, 25 bp, Homo sapien
gccactcttctaccaaaagcaagga

SEQ ID NO: 5002165 - DNA, 25 bp, Homo sapien
ctaggggtagggggcctagagcgag

SEQ ID NO: 5002166 - DNA, 25 bp, Homo sapien
gggggcctagagcgagtaggacttg

SEQ ID NO: 5002167 - DNA, 25 bp, Homo sapien
ggtagggggcctagagcgagtagga

SEQ ID NO: 5002168 - DNA, 25 bp, Homo sapien
tagggggcctagagcgagtaggact

SEQ ID NO: 5002169 - DNA, 25 bp, Homo sapien
ttccctgttctgatgtggcctttgg

SEQ ID NO: 5002170 - DNA, 25 bp, Homo sapien
tccctgttctgatgtggcctttggc

SEQ ID NO: 5002171 - DNA, 25 bp, Homo sapien
tctctaaatgttccaatcactctgt

SEQ ID NO: 5002172 - DNA, 25 bp, Homo sapien
ctaaatgttccaatcactctgtatc

SEQ ID NO: 5002173 - DNA, 25 bp, Homo sapien
tgttctctaaatgttccaatcactc

SEQ ID NO: 5002174 - DNA, 25 bp, Homo sapien
ttctctaaatgttccaatcactctg

SEQ ID NO: 5002175 - DNA, 25 bp, Homo sapien
atgctcttgatcaagcggctagcta

SEQ ID NO: 5002176 - DNA, 25 bp, Homo sapien
ttaaaacagcggggctaggatgcca

SEQ ID NO: 5002177 - DNA, 25 bp, Homo sapien
tgctcttgatcaagcggctagctac

SEQ ID NO: 5002178 - DNA, 25 bp, Homo sapien
ggatgccagtgatgctcttgatcaa

SEQ ID NO: 5002179 - DNA, 25 bp, Homo sapien
tgcatagctatcctcttcaatgatg

SEQ ID NO: 5002180 - DNA, 25 bp, Homo sapien
atgtttctggacctcagcaatgtca

SEQ ID NO: 5002181 - DNA, 25 bp, Homo sapien
tcaatgatgcatgtttctggacctc

SEQ ID NO: 5002182 - DNA, 25 bp, Homo sapien
tcagcaatgtcaccaactgccaaac

SEQ ID NO: 5002183 - DNA, 25 bp, Homo sapien
gacctagagtgggatgcacctttgc

SEQ ID NO: 5002184 - DNA, 25 bp, Homo sapien
atgccaataagcaaccaccacagac

SEQ ID NO: 5002185 - DNA, 25 bp, Homo sapien
aagcaaccaccacagacctagagtg

SEQ ID NO: 5002186 - DNA, 25 bp, Homo sapien
attccatgtggaagggcactctcat

SEQ ID NO: 5002187 - DNA, 25 bp, Homo sapien
tgtgcaaaggacagaactggatgtg

SEQ ID NO: 5002188 - DNA, 25 bp, Homo sapien
gcaaaggacagaactggatgtgcca

SEQ ID NO: 5002189 - DNA, 25 bp, Homo sapien
tgcaaaggacagaactggatgtgcc

SEQ ID NO: 5002190 - DNA, 25 bp, Homo sapien
aagtaaattcatgaggacaattggg

SEQ ID NO: 5002191 - DNA, 25 bp, Homo sapien
actgcagacctcaacaaagttttaa

SEQ ID NO: 5002192 - DNA, 25 bp, Homo sapien
taaattcaggaggacgtaaaagctg

SEQ ID NO: 5002193 - DNA, 25 bp, Homo sapien
aaattacctccaatataacaatgaa

SEQ ID NO: 5002194 - DNA, 25 bp, Homo sapien
ctgtaaattcaggaggacgtaaaag

SEQ ID NO: 5002195 - DNA, 25 bp, Homo sapien
caactggagtgggatggatgctact

SEQ ID NO: 5002196 - DNA, 25 bp, Homo sapien
aggaatgctgctaagcgttttaaat

SEQ ID NO: 5002197 - DNA, 25 bp, Homo sapien
tgctactggtatgtagtgggtagaa

SEQ ID NO: 5002198 - DNA, 25 bp, Homo sapien
gagacatctggcattgtctgcatac

SEQ ID NO: 5002199 - DNA, 25 bp, Homo sapien
cgtgttgataatccattcagtacta

SEQ ID NO: 5002200 - DNA, 25 bp, Homo sapien
gggcccatcgtgttgataatccatt

SEQ ID NO: 5002201 - DNA, 25 bp, Homo sapien
gataatccattcagtactactgcta

SEQ ID NO: 5002202 - DNA, 25 bp, Homo sapien
ggcagcactaaaatggggcccatcg

SEQ ID NO: 5002203 - DNA, 25 bp, Homo sapien
catatagagaccttgcatctgtgga

SEQ ID NO: 5002204 - DNA, 25 bp, Homo sapien
acctggtgttatgggagtctgttgc

SEQ ID NO: 5002205 - DNA, 25 bp, Homo sapien
tatagatcggtgttggagatggccc

SEQ ID NO: 5002206 - DNA, 25 bp, Homo sapien
taggaccaaggagtaacctcatgcc

SEQ ID NO: 5002207 - DNA, 25 bp, Homo sapien
cactagttttattgatgattccagc

SEQ ID NO: 5002208 - DNA, 25 bp, Homo sapien
ttctgacaacaagaaaggtcattgg

SEQ ID NO: 5002209 - DNA, 25 bp, Homo sapien
gacagtaaaatcctagatttatcat

SEQ ID NO: 5002210 - DNA, 25 bp, Homo sapien
tatcatatgggctataaatccgtaa

SEQ ID NO: 5002211 - DNA, 25 bp, Homo sapien
ttctatgtccactacactgtaggct

SEQ ID NO: 5002212 - DNA, 25 bp, Homo sapien
tacactgtaggcttcagagtgcctc

SEQ ID NO: 5002213 - DNA, 25 bp, Homo sapien
tgtaggcttcagagtgcctctccat

SEQ ID NO: 5002214 - DNA, 25 bp, Homo sapien
cactacactgtaggcttcagagtgc

SEQ ID NO: 5002215 - DNA, 25 bp, Homo sapien
tagataatgaaaacaccgaacttac

SEQ ID NO: 5002216 - DNA, 25 bp, Homo sapien
ctagataatgaaaacaccgaactta

SEQ ID NO: 5002217 - DNA, 25 bp, Homo sapien
ctgttaattctaatgggcattgaag

SEQ ID NO: 5002218 - DNA, 25 bp, Homo sapien
attgagggctgcaaaaggtttatat

SEQ ID NO: 5002219 - DNA, 25 bp, Homo sapien
tgagggctgcaaaaggtttatatgt

SEQ ID NO: 5002220 - DNA, 25 bp, Homo sapien
tgttaattctaatgggcattgaaga

SEQ ID NO: 5002221 - DNA, 25 bp, Homo sapien
ggaggtattcgatcatttccaaaat

SEQ ID NO: 5002222 - DNA, 25 bp, Homo sapien
gggaggtattcgatcatttccaaaa

SEQ ID NO: 5002223 - DNA, 25 bp, Homo sapien
gtgatctgtgcacttcaaattacta

SEQ ID NO: 5002224 - DNA, 25 bp, Homo sapien
gatctgtgcacttcaaattactatc

SEQ ID NO: 5002225 - DNA, 25 bp, Homo sapien
cgtcttcatctatgtgatctgtgca

SEQ ID NO: 5002226 - DNA, 25 bp, Homo sapien
aattactatcaagaatgaccttcat

SEQ ID NO: 5002227 - DNA, 25 bp, Homo sapien
tctgacaggtattgatacgcccata

SEQ ID NO: 5002228 - DNA, 25 bp, Homo sapien
tcagaagcctcgtatcacttatgtc

SEQ ID NO: 5002229 - DNA, 25 bp, Homo sapien
cacttatgtcttgtaggagcctctg

SEQ ID NO: 5002230 - DNA, 25 bp, Homo sapien
tctttgctgccagatggagaggagt

SEQ ID NO: 5002231 - DNA, 25 bp, Homo sapien
gcttttggaatgaatggacacatta

SEQ ID NO: 5002232 - DNA, 25 bp, Homo sapien
taaagccaagtaggttatttacaga

SEQ ID NO: 5002233 - DNA, 25 bp, Homo sapien
ggagtacacccatcgttgtcttcat

SEQ ID NO: 5002234 - DNA, 25 bp, Homo sapien
ctgtctacatgcataatgtagagga

SEQ ID NO: 5002235 - DNA, 25 bp, Homo sapien
caaaaactcaggttgcagatttttt

SEQ ID NO: 5002236 - DNA, 25 bp, Homo sapien
gctggctttcccgttatccacaaag

SEQ ID NO: 5002237 - DNA, 25 bp, Homo sapien
cccgttatccacaaagttgatgtga

SEQ ID NO: 5002238 - DNA, 25 bp, Homo sapien
ggagagggctggctttcccgttatc

SEQ ID NO: 5002239 - DNA, 25 bp, Homo sapien
tccacaaagttgatgtgacactgtc

SEQ ID NO: 5002240 - DNA, 25 bp, Homo sapien
aaagtacagcctgatgaataggaaa

SEQ ID NO: 5002241 - DNA, 25 bp, Homo sapien
aacatccaaatgtatttgatttgca

SEQ ID NO: 5002242 - DNA, 25 bp, Homo sapien
aatgtatttgatttgcatggcttag

SEQ ID NO: 5002243 - DNA, 25 bp, Homo sapien
tgaaagtacagcctgatgaatagga

SEQ ID NO: 5002244 - DNA, 25 bp, Homo sapien
caattcagaagctcagaatcgaacg

SEQ ID NO: 5002245 - DNA, 25 bp, Homo sapien
ttgggaacacgtggcaataatttct

SEQ ID NO: 5002246 - DNA, 25 bp, Homo sapien
tttatgggcccgataagtctggaac

SEQ ID NO: 5002247 - DNA, 25 bp, Homo sapien
gctcagaatcgaacgtgcaaaccat

SEQ ID NO: 5002248 - DNA, 25 bp, Homo sapien
tttggtgcatgcgatcatcacagct

SEQ ID NO: 5002249 - DNA, 25 bp, Homo sapien
tttttggtgcatgcgatcatcacag

SEQ ID NO: 5002250 - DNA, 25 bp, Homo sapien
ggtgcatgcgatcatcacagctgtg

SEQ ID NO: 5002251 - DNA, 25 bp, Homo sapien
tatttttggtgcatgcgatcatcac

SEQ ID NO: 5002252 - DNA, 25 bp, Homo sapien
taattgagttaataggtatttgttc

SEQ ID NO: 5002253 - DNA, 25 bp, Homo sapien
aaccacactttcagagccaatatta

SEQ ID NO: 5002254 - DNA, 25 bp, Homo sapien
tcagagccaatattaattgagttaa

SEQ ID NO: 5002255 - DNA, 25 bp, Homo sapien
tgagttaataggtatttgttcttaa

SEQ ID NO: 5002256 - DNA, 25 bp, Homo sapien
cagctacgtggaggggcgcaatcat

SEQ ID NO: 5002257 - DNA, 25 bp, Homo sapien
atgcccagcacagctacgtggaggg

SEQ ID NO: 5002258 - DNA, 25 bp, Homo sapien
cacagctacgtggaggggcgcaatc

SEQ ID NO: 5002259 - DNA, 25 bp, Homo sapien
agcacagctacgtggaggggcgcaa

SEQ ID NO: 5002260 - DNA, 25 bp, Homo sapien
ctcctctgctgagtagaaacttaac

SEQ ID NO: 5002261 - DNA, 25 bp, Homo sapien
cctctgctgagtagaaacttaacgc

SEQ ID NO: 5002262 - DNA, 25 bp, Homo sapien
ggaggtttgggtttgctcctctgct

SEQ ID NO: 5002263 - DNA, 25 bp, Homo sapien
gctgagtagaaacttaacgctttca

SEQ ID NO: 5002264 - DNA, 25 bp, Homo sapien
tgacgtctccatcccctgaagaagg

SEQ ID NO: 5002265 - DNA, 25 bp, Homo sapien
tgaagaaggaattcgccagttctgt

SEQ ID NO: 5002266 - DNA, 25 bp, Homo sapien
tatcctagagccttaggccactcat

SEQ ID NO: 5002267 - DNA, 25 bp, Homo sapien
ccagttctgtctccgttttacaggg

SEQ ID NO: 5002268 - DNA, 25 bp, Homo sapien
cggttccttgcagtcctccgtgtcg

SEQ ID NO: 5002269 - DNA, 25 bp, Homo sapien
gttccttgcagtcctccgtgtcgtc

SEQ ID NO: 5002270 - DNA, 25 bp, Homo sapien
gcagtcctccgtgtcgtcccgcaca

SEQ ID NO: 5002271 - DNA, 25 bp, Homo sapien
ttgcagtcctccgtgtcgtcccgca

SEQ ID NO: 5002272 - DNA, 25 bp, Homo sapien
gcataggtgcactcaataaccgttt

SEQ ID NO: 5002273 - DNA, 25 bp, Homo sapien
tgcactcaataaccgtttgtggact

SEQ ID NO: 5002274 - DNA, 25 bp, Homo sapien
ctttccaaggctgattatactttgc

SEQ ID NO: 5002275 - DNA, 25 bp, Homo sapien
aataaccgtttgtggactgtctgac

SEQ ID NO: 5002276 - DNA, 25 bp, Homo sapien
cacatcatgagtccatgagtatggc

SEQ ID NO: 5002277 - DNA, 25 bp, Homo sapien
ggtgttcagcttcaccctcgcacac

SEQ ID NO: 5002278 - DNA, 25 bp, Homo sapien
tccatgagtatggcttgctggaaga

SEQ ID NO: 5002279 - DNA, 25 bp, Homo sapien
gcttcaccctcgcacacttttccca

SEQ ID NO: 5002280 - DNA, 25 bp, Homo sapien
gaggatctggggtatcaaccttgac

SEQ ID NO: 5002281 - DNA, 25 bp, Homo sapien
cattccctgaggatctggggtatca

SEQ ID NO: 5002282 - DNA, 25 bp, Homo sapien
cagggtaagtgttgagttgataatg

SEQ ID NO: 5002283 - DNA, 25 bp, Homo sapien
ttgataatggggctgggtcattccc

SEQ ID NO: 5002284 - DNA, 25 bp, Homo sapien
cttatgcaccaaacacattaatctt

SEQ ID NO: 5002285 - DNA, 25 bp, Homo sapien
gagtcatgtgccttgaaagcttagc

SEQ ID NO: 5002286 - DNA, 25 bp, Homo sapien
cttgagagctcaagtttactgtgag

SEQ ID NO: 5002287 - DNA, 25 bp, Homo sapien
ttagctaaccctgctgaccactgcg

SEQ ID NO: 5002288 - DNA, 25 bp, Homo sapien
tgactgcatgtcctgttgcctcaga

SEQ ID NO: 5002289 - DNA, 25 bp, Homo sapien
cagcggcatgcgctgactgcatgtc

SEQ ID NO: 5002290 - DNA, 25 bp, Homo sapien
tgcgctgactgcatgtcctgttgcc

SEQ ID NO: 5002291 - DNA, 25 bp, Homo sapien
tgttgcctcagaccatcctgttgag

SEQ ID NO: 5002292 - DNA, 25 bp, Homo sapien
tcttcacaccgactgaggacctcgg

SEQ ID NO: 5002293 - DNA, 25 bp, Homo sapien
tcagttctggtgtcttcttcacacc

SEQ ID NO: 5002294 - DNA, 25 bp, Homo sapien
gaggacctcggttctggtgtctgcc

SEQ ID NO: 5002295 - DNA, 25 bp, Homo sapien
ctggtgtctgcctcggcacgggcat

SEQ ID NO: 5002296 - DNA, 25 bp, Homo sapien
agtcagcctgtttctcagactgatt

SEQ ID NO: 5002297 - DNA, 25 bp, Homo sapien
caacaagtcagcctgtttctcagac

SEQ ID NO: 5002298 - DNA, 25 bp, Homo sapien
cagcctgtttctcagactgattcat

SEQ ID NO: 5002299 - DNA, 25 bp, Homo sapien
caagtcagcctgtttctcagactga

SEQ ID NO: 5002300 - DNA, 25 bp, Homo sapien
cactctttgattccaacgttgtcag

SEQ ID NO: 5002301 - DNA, 25 bp, Homo sapien
tgcaacacataggttccagttaggg

SEQ ID NO: 5002302 - DNA, 25 bp, Homo sapien
caacgttgtcagaaagaatagcttc

SEQ ID NO: 5002303 - DNA, 25 bp, Homo sapien
gggtactagctgctttctgaccttt

SEQ ID NO: 5002304 - DNA, 25 bp, Homo sapien
catagaattgtagtagcatttggcc

SEQ ID NO: 5002305 - DNA, 25 bp, Homo sapien
cctctatggttggatgattgcctga

SEQ ID NO: 5002306 - DNA, 25 bp, Homo sapien
ttggctcttacaggagacatagaat

SEQ ID NO: 5002307 - DNA, 25 bp, Homo sapien
cttggcttggctcttacaggagaca

SEQ ID NO: 5002308 - DNA, 25 bp, Homo sapien
tcaatatgagcccagtcctggattc

SEQ ID NO: 5002309 - DNA, 25 bp, Homo sapien
caatatgagcccagtcctggattct

SEQ ID NO: 5002310 - DNA, 25 bp, Homo sapien
aatatgagcccagtcctggattctc

SEQ ID NO: 5002311 - DNA, 25 bp, Homo sapien
tatgagcccagtcctggattctctt

SEQ ID NO: 5002312 - DNA, 25 bp, Homo sapien
caaagcaggtcatggtttatgctta

SEQ ID NO: 5002313 - DNA, 25 bp, Homo sapien
ggtttatgcttacttcagacacctc

SEQ ID NO: 5002314 - DNA, 25 bp, Homo sapien
tatgcttacttcagacacctctgcc

SEQ ID NO: 5002315 - DNA, 25 bp, Homo sapien
ctggcaaacaaagcaggtcatggtt

SEQ ID NO: 5002316 - DNA, 25 bp, Homo sapien
catggttttctagatagagccatat

SEQ ID NO: 5002317 - DNA, 25 bp, Homo sapien
atcatggttttctagatagagccat

SEQ ID NO: 5002318 - DNA, 25 bp, Homo sapien
gagccatataactacaagatctgag

SEQ ID NO: 5002319 - DNA, 25 bp, Homo sapien
atagagccatataactacaagatct

SEQ ID NO: 5002320 - DNA, 25 bp, Homo sapien
ttctctctggcttgaagtgaatgcc

SEQ ID NO: 5002321 - DNA, 25 bp, Homo sapien
agttctctctggcttgaagtgaatg

SEQ ID NO: 5002322 - DNA, 25 bp, Homo sapien
ctttccagttctctctggcttgaag

SEQ ID NO: 5002323 - DNA, 25 bp, Homo sapien
tccagttctctctggcttgaagtga

SEQ ID NO: 5002324 - DNA, 25 bp, Homo sapien
tcagtgtgtagagctgcacttcttt

SEQ ID NO: 5002325 - DNA, 25 bp, Homo sapien
tgcataatcaaatagggtcttgaaa

SEQ ID NO: 5002326 - DNA, 25 bp, Homo sapien
gcataatcaaatagggtcttgaaat

SEQ ID NO: 5002327 - DNA, 25 bp, Homo sapien
cctccaaaaattgtgagtattgtca

SEQ ID NO: 5002328 - DNA, 25 bp, Homo sapien
ggctatacctccaaaaattgtgagt

SEQ ID NO: 5002329 - DNA, 25 bp, Homo sapien
cttggctgaggctatacctccaaaa

SEQ ID NO: 5002330 - DNA, 25 bp, Homo sapien
tgaggctatacctccaaaaattgtg

SEQ ID NO: 5002331 - DNA, 25 bp, Homo sapien
tggtgagagtataaaatgctatcac

SEQ ID NO: 5002332 - DNA, 25 bp, Homo sapien
gagagtataaaatgctatcacccaa

SEQ ID NO: 5002333 - DNA, 25 bp, Homo sapien
tatcacccaaattacctcatcttgc

SEQ ID NO: 5002334 - DNA, 25 bp, Homo sapien
aaaatgctatcacccaaattacctc

SEQ ID NO: 5002335 - DNA, 25 bp, Homo sapien
tgtcagggacacttaacaagagatc

SEQ ID NO: 5002336 - DNA, 25 bp, Homo sapien
gggcccattgcgtgtttctggagca

SEQ ID NO: 5002337 - DNA, 25 bp, Homo sapien
catatgtatgtatacccctgggaaa

SEQ ID NO: 5002338 - DNA, 25 bp, Homo sapien
gggaaaataccacaatcaaagcaat

SEQ ID NO: 5002339 - DNA, 25 bp, Homo sapien
tttcagaacagtcaagtccattttc

SEQ ID NO: 5002340 - DNA, 25 bp, Homo sapien
gaagctcagacatcttttcagaaca

SEQ ID NO: 5002341 - DNA, 25 bp, Homo sapien
catcttttcagaacagtcaagtcca

SEQ ID NO: 5002342 - DNA, 25 bp, Homo sapien
gggggaagctcagacatcttttcag

SEQ ID NO: 5002343 - DNA, 25 bp, Homo sapien
tcattccatggctgctaataacacc

SEQ ID NO: 5002344 - DNA, 25 bp, Homo sapien
cacatgtgggaccaaaggcaaagta

SEQ ID NO: 5002345 - DNA, 25 bp, Homo sapien
gaagcaacttgggtccacatgtggg

SEQ ID NO: 5002346 - DNA, 25 bp, Homo sapien
ccttgactccatagaagcaacttgg

SEQ ID NO: 5002347 - DNA, 25 bp, Homo sapien
ttctgcgagtgacgctataaagccc

SEQ ID NO: 5002348 - DNA, 25 bp, Homo sapien
ccccacagccagtagagtatagaga

SEQ ID NO: 5002349 - DNA, 25 bp, Homo sapien
gttactctttactgctttagaaaca

SEQ ID NO: 5002350 - DNA, 25 bp, Homo sapien
aacatcatctcttctgcgagtgacg

SEQ ID NO: 5002351 - DNA, 25 bp, Homo sapien
cgtccaccacaagttgtacaccgtg

SEQ ID NO: 5002352 - DNA, 25 bp, Homo sapien
tctgttgttccgtccaccacaagtt

SEQ ID NO: 5002353 - DNA, 25 bp, Homo sapien
tacaccgtggctcttgcttttggcc

SEQ ID NO: 5002354 - DNA, 25 bp, Homo sapien
cacaagttgtacaccgtggctcttg

SEQ ID NO: 5002355 - DNA, 25 bp, Homo sapien
acaggaccacatacaggagaaggaa

SEQ ID NO: 5002356 - DNA, 25 bp, Homo sapien
tgggccaataatagacaagtcacat

SEQ ID NO: 5002357 - DNA, 25 bp, Homo sapien
gggaatgacaggaccacatacagga

SEQ ID NO: 5002358 - DNA, 25 bp, Homo sapien
aaggaaggcggctcttggatgtaat

SEQ ID NO: 5002359 - DNA, 25 bp, Homo sapien
tagccagttatagaggccatgccag

SEQ ID NO: 5002360 - DNA, 25 bp, Homo sapien
gccatcatgggcctgaaagctacat

SEQ ID NO: 5002361 - DNA, 25 bp, Homo sapien
tttctcccatcacgaagtcgcaagg

SEQ ID NO: 5002362 - DNA, 25 bp, Homo sapien
tgagccctgtgccatttggactgag

SEQ ID NO: 5002363 - DNA, 25 bp, Homo sapien
ggtatttctgcttacaccttgggcc

SEQ ID NO: 5002364 - DNA, 25 bp, Homo sapien
tattcataatcactccctggtaagc

SEQ ID NO: 5002365 - DNA, 25 bp, Homo sapien
tccattttcatgagtggcatctcca

SEQ ID NO: 5002366 - DNA, 25 bp, Homo sapien
gaataaacagctcaaacctaacatg

SEQ ID NO: 5002367 - DNA, 25 bp, Homo sapien
gaattcatgagctagaatatcaatg

SEQ ID NO: 5002368 - DNA, 25 bp, Homo sapien
cagatgagccagagtagaagaaaga

SEQ ID NO: 5002369 - DNA, 25 bp, Homo sapien
catgagctagaatatcaatgtaagg

SEQ ID NO: 5002370 - DNA, 25 bp, Homo sapien
actcattgaataaattagactacag

SEQ ID NO: 5002371 - DNA, 25 bp, Homo sapien
gatgtgctgcacttttacttctgcc

SEQ ID NO: 5002372 - DNA, 25 bp, Homo sapien
cccagaagtttctaggtcaaagagt

SEQ ID NO: 5002373 - DNA, 25 bp, Homo sapien
tcaaattgcttgcaagaacagtagt

SEQ ID NO: 5002374 - DNA, 25 bp, Homo sapien
taatctgtatcattgtacgtaggtg

SEQ ID NO: 5002375 - DNA, 25 bp, Homo sapien
gaaagaagggtatgaagagcgcccc

SEQ ID NO: 5002376 - DNA, 25 bp, Homo sapien
caggtgccgcgaggaaagtcagatc

SEQ ID NO: 5002377 - DNA, 25 bp, Homo sapien
agtcagatcttatctgcgctcctag

SEQ ID NO: 5002378 - DNA, 25 bp, Homo sapien
agaagcaagggttaaggttgccacg

SEQ ID NO: 5002379 - DNA, 25 bp, Homo sapien
caagtctgcctgatgatgaagcgcc

SEQ ID NO: 5002380 - DNA, 25 bp, Homo sapien
taggtcataaaatggaaccgggagc

SEQ ID NO: 5002381 - DNA, 25 bp, Homo sapien
ggcaggataggaccagagcaagtct

SEQ ID NO: 5002382 - DNA, 25 bp, Homo sapien
gaccgtgcactatttacactcatga

SEQ ID NO: 5002383 - DNA, 25 bp, Homo sapien
gcagaactgactggagagatccagg

SEQ ID NO: 5002384 - DNA, 25 bp, Homo sapien
agggcagaaggaggttgttatcatc

SEQ ID NO: 5002385 - DNA, 25 bp, Homo sapien
ctgtagtgtgcagaactgactggag

SEQ ID NO: 5002386 - DNA, 25 bp, Homo sapien
cagaaggaggttgttatcatcaaaa

SEQ ID NO: 5002387 - DNA, 25 bp, Homo sapien
cattacactgtgagtctgggaagac

SEQ ID NO: 5002388 - DNA, 25 bp, Homo sapien
gatttagaaggacacaccttggacg

SEQ ID NO: 5002389 - DNA, 25 bp, Homo sapien
gacgccagtgtaaagggcactttta

SEQ ID NO: 5002390 - DNA, 25 bp, Homo sapien
catctttatcgccttcattacactg

SEQ ID NO: 5002391 - DNA, 25 bp, Homo sapien
cctggagttgtacaaactgtggctc

SEQ ID NO: 5002392 - DNA, 25 bp, Homo sapien
cagacccaggacgtcgttacgttga

SEQ ID NO: 5002393 - DNA, 25 bp, Homo sapien
ttcagtgctgccacactgcgcagac

SEQ ID NO: 5002394 - DNA, 25 bp, Homo sapien
cgttacgttgaagtccagcattcag

SEQ ID NO: 5002395 - DNA, 25 bp, Homo sapien
tggcgtgaaggctgggcattcctgg

SEQ ID NO: 5002396 - DNA, 25 bp, Homo sapien
tcagtaatgctctgtgatgcttgaa

SEQ ID NO: 5002397 - DNA, 25 bp, Homo sapien
cttcccctttttgcagtcggctgca

SEQ ID NO: 5002398 - DNA, 25 bp, Homo sapien
atgcttgaagcttggcgtgaaggct

SEQ ID NO: 5002399 - DNA, 25 bp, Homo sapien
ctgaattactctcccggataggagc

SEQ ID NO: 5002400 - DNA, 25 bp, Homo sapien
attactctcccggataggagcatgc

SEQ ID NO: 5002401 - DNA, 25 bp, Homo sapien
tgctgaattactctcccggatagga

SEQ ID NO: 5002402 - DNA, 25 bp, Homo sapien
tctcccggataggagcatgctcttt

SEQ ID NO: 5002403 - DNA, 25 bp, Homo sapien
ggaattttcctgtagcagacgataa

SEQ ID NO: 5002404 - DNA, 25 bp, Homo sapien
ctggaattttcctgtagcagacgat

SEQ ID NO: 5002405 - DNA, 25 bp, Homo sapien
tggaattttcctgtagcagacgata

SEQ ID NO: 5002406 - DNA, 25 bp, Homo sapien
aattttcctgtagcagacgataaaa

SEQ ID NO: 5002407 - DNA, 25 bp, Homo sapien
ggcaccagatctacatccagtcgat

SEQ ID NO: 5002408 - DNA, 25 bp, Homo sapien
tttgggcaccagatctacatccagt

SEQ ID NO: 5002409 - DNA, 25 bp, Homo sapien
gatctacatccagtcgatccagtaa

SEQ ID NO: 5002410 - DNA, 25 bp, Homo sapien
atccagtcgatccagtaaccttaca

SEQ ID NO: 5002411 - DNA, 25 bp, Homo sapien
tgctggacctgacttcctgtgccat

SEQ ID NO: 5002412 - DNA, 25 bp, Homo sapien
tctggttcacgtgggatgctggacc

SEQ ID NO: 5002413 - DNA, 25 bp, Homo sapien
aacatcagagacataagtatgcctt

SEQ ID NO: 5002414 - DNA, 25 bp, Homo sapien
agaggattccctggtggttctcaca

SEQ ID NO: 5002415 - DNA, 25 bp, Homo sapien
agatgcccatgagggaagcatgtag

SEQ ID NO: 5002416 - DNA, 25 bp, Homo sapien
aatcagaaagggacggttgacttca

SEQ ID NO: 5002417 - DNA, 25 bp, Homo sapien
gaactgtcttttcagtatgttttaa

SEQ ID NO: 5002418 - DNA, 25 bp, Homo sapien
gaaagaagaatctcataaattctct

SEQ ID NO: 5002419 - DNA, 25 bp, Homo sapien
aatgacaactgaatgtgtagaagtc

SEQ ID NO: 5002420 - DNA, 25 bp, Homo sapien
gaaagtaatgacaactgaatgtgta

SEQ ID NO: 5002421 - DNA, 25 bp, Homo sapien
gtaatgacaactgaatgtgtagaag

SEQ ID NO: 5002422 - DNA, 25 bp, Homo sapien
ctgaaagtaatgacaactgaatgtg

SEQ ID NO: 5002423 - DNA, 25 bp, Homo sapien
tctctcgtttgctgcgggccagttt

SEQ ID NO: 5002424 - DNA, 25 bp, Homo sapien
gccagtttgcagttacagccagaca

SEQ ID NO: 5002425 - DNA, 25 bp, Homo sapien
cttctctcgtttgctgcgggccagt

SEQ ID NO: 5002426 - DNA, 25 bp, Homo sapien
tgctgcgggccagtttgcagttaca

SEQ ID NO: 5002427 - DNA, 25 bp, Homo sapien
agcagcactgctcatcttaacacca

SEQ ID NO: 5002428 - DNA, 25 bp, Homo sapien
tgagaccaagacatagaggagtttc

SEQ ID NO: 5002429 - DNA, 25 bp, Homo sapien
aaacatgctctataggtggcctggt

SEQ ID NO: 5002430 - DNA, 25 bp, Homo sapien
tgccagcagtatggagtctgtacca

SEQ ID NO: 5002431 - DNA, 25 bp, Homo sapien
acaaggagcattaagggaccacttc

SEQ ID NO: 5002432 - DNA, 25 bp, Homo sapien
gactgacaaggagcattaagggacc

SEQ ID NO: 5002433 - DNA, 25 bp, Homo sapien
tgacaaggagcattaagggaccact

SEQ ID NO: 5002434 - DNA, 25 bp, Homo sapien
tgcagactgacaaggagcattaagg

SEQ ID NO: 5002435 - DNA, 25 bp, Homo sapien
atctgaggctcctctattagaagga

SEQ ID NO: 5002436 - DNA, 25 bp, Homo sapien
ctgaggctcctctattagaaggagc

SEQ ID NO: 5002437 - DNA, 25 bp, Homo sapien
gaggctcctctattagaaggagcca

SEQ ID NO: 5002438 - DNA, 25 bp, Homo sapien
aggctcctctattagaaggagccaa

SEQ ID NO: 5002439 - DNA, 25 bp, Homo sapien
tgtacagatgtttcttccaaagatg

SEQ ID NO: 5002440 - DNA, 25 bp, Homo sapien
cagtcatgggaaatgcctggcctga

SEQ ID NO: 5002441 - DNA, 25 bp, Homo sapien
ggcctgatcctgaatgaagctgtaa

SEQ ID NO: 5002442 - DNA, 25 bp, Homo sapien
cttagagctgagtggttgcacagtc

SEQ ID NO: 5002443 - DNA, 25 bp, Homo sapien
taacccataccccaggtgtccatgg

SEQ ID NO: 5002444 - DNA, 25 bp, Homo sapien
ccagtccggggagcctattgaacca

SEQ ID NO: 5002445 - DNA, 25 bp, Homo sapien
atggccttcagtctgcacttcccag

SEQ ID NO: 5002446 - DNA, 25 bp, Homo sapien
tcctgcattttcagtaacccatacc

SEQ ID NO: 5002447 - DNA, 25 bp, Homo sapien
gactaagtcccgatctctcaaggta

SEQ ID NO: 5002448 - DNA, 25 bp, Homo sapien
tcagagatgagctgttagccactga

SEQ ID NO: 5002449 - DNA, 25 bp, Homo sapien
gatctctcaaggtacactgatatct

SEQ ID NO: 5002450 - DNA, 25 bp, Homo sapien
gccactgaactccaaacatgactaa

SEQ ID NO: 5002451 - DNA, 25 bp, Homo sapien
cgaatcagtgtctgtaagctccaga

SEQ ID NO: 5002452 - DNA, 25 bp, Homo sapien
ttatggggtcatcgaatcagtgtct

SEQ ID NO: 5002453 - DNA, 25 bp, Homo sapien
agaagtccagggtgtgtctctttct

SEQ ID NO: 5002454 - DNA, 25 bp, Homo sapien
aagtccagggtgtgtctctttctgc

SEQ ID NO: 5002455 - DNA, 25 bp, Homo sapien
tgtgcttcccgacatgtgtgacagc

SEQ ID NO: 5002456 - DNA, 25 bp, Homo sapien
actggttttccagatgaccttgagc

SEQ ID NO: 5002457 - DNA, 25 bp, Homo sapien
cactgctctttgaacggctgcaata

SEQ ID NO: 5002458 - DNA, 25 bp, Homo sapien
tgggcctgcactgacctgaagaact

SEQ ID NO: 5002459 - DNA, 25 bp, Homo sapien
tccgcagtcaggagcaggctctgaa

SEQ ID NO: 5002460 - DNA, 25 bp, Homo sapien
tgaaacacctggaagcaggtcacag

SEQ ID NO: 5002461 - DNA, 25 bp, Homo sapien
tcattgtagtgggaaggactccttg

SEQ ID NO: 5002462 - DNA, 25 bp, Homo sapien
gcaggtcacagccttccacgaagca

SEQ ID NO: 5002463 - DNA, 25 bp, Homo sapien
agttgagagattgccctctgcagag

SEQ ID NO: 5002464 - DNA, 25 bp, Homo sapien
ctttctttctgctccgaacaaggca

SEQ ID NO: 5002465 - DNA, 25 bp, Homo sapien
aggaagttgagagattgccctctgc

SEQ ID NO: 5002466 - DNA, 25 bp, Homo sapien
tctgctccgaacaaggcaggactca

SEQ ID NO: 5002467 - DNA, 25 bp, Homo sapien
ctgcccttccggtcagggccttcca

SEQ ID NO: 5002468 - DNA, 25 bp, Homo sapien
gcccttccggtcagggccttccaca

SEQ ID NO: 5002469 - DNA, 25 bp, Homo sapien
tgcccttccggtcagggccttccac

SEQ ID NO: 5002470 - DNA, 25 bp, Homo sapien
tctgcccttccggtcagggccttcc

SEQ ID NO: 5002471 - DNA, 25 bp, Homo sapien
ttttctggcttggttatctgttcca

SEQ ID NO: 5002472 - DNA, 25 bp, Homo sapien
agaggccccaaaactgatccaagca

SEQ ID NO: 5002473 - DNA, 25 bp, Homo sapien
tggcttggttatctgttccagaggc

SEQ ID NO: 5002474 - DNA, 25 bp, Homo sapien
actgaaaatcatttgagagcagcca

SEQ ID NO: 5002475 - DNA, 25 bp, Homo sapien
gctttagttccaaaatgcggaagac

SEQ ID NO: 5002476 - DNA, 25 bp, Homo sapien
aggctttagttccaaaatgcggaag

SEQ ID NO: 5002477 - DNA, 25 bp, Homo sapien
ccaaaatgcggaagacacccaagct

SEQ ID NO: 5002478 - DNA, 25 bp, Homo sapien
tagttccaaaatgcggaagacaccc

SEQ ID NO: 5002479 - DNA, 25 bp, Homo sapien
ctgcaggctctgtaccagataccga

SEQ ID NO: 5002480 - DNA, 25 bp, Homo sapien
tctgtaccagataccgaaagatgga

SEQ ID NO: 5002481 - DNA, 25 bp, Homo sapien
caggctctgtaccagataccgaaag

SEQ ID NO: 5002482 - DNA, 25 bp, Homo sapien
taccagataccgaaagatggaggta

SEQ ID NO: 5002483 - DNA, 25 bp, Homo sapien
ggtccatttccctggtccatgtgca

SEQ ID NO: 5002484 - DNA, 25 bp, Homo sapien
aacattgggctagctggttgaggcc

SEQ ID NO: 5002485 - DNA, 25 bp, Homo sapien
ggcaaggctgcggtccatttccctg

SEQ ID NO: 5002486 - DNA, 25 bp, Homo sapien
tccctggtccatgtgcaaaagggaa

SEQ ID NO: 5002487 - DNA, 25 bp, Homo sapien
aaaaatgatcgccaccatgagacac

SEQ ID NO: 5002488 - DNA, 25 bp, Homo sapien
tctttgaaaagttgtgcgacctaga

SEQ ID NO: 5002489 - DNA, 25 bp, Homo sapien
taaaatgtaccacccaaatctttga

SEQ ID NO: 5002490 - DNA, 25 bp, Homo sapien
agttgtgcgacctagaaaaatgatc

SEQ ID NO: 5002491 - DNA, 25 bp, Homo sapien
gacaactgtagctctgtgtccatgg

SEQ ID NO: 5002492 - DNA, 25 bp, Homo sapien
tttccctgtattgcctgctgcttcc

SEQ ID NO: 5002493 - DNA, 25 bp, Homo sapien
tccctgatggcaggaatgttccaaa

SEQ ID NO: 5002494 - DNA, 25 bp, Homo sapien
gagcagatgattgctgacccgggct

SEQ ID NO: 5002495 - DNA, 25 bp, Homo sapien
tgtgaccttgagaaaccacaacttc

SEQ ID NO: 5002496 - DNA, 25 bp, Homo sapien
gggcagcaatagactttgtaacccc

SEQ ID NO: 5002497 - DNA, 25 bp, Homo sapien
gagacctgactactggaaccatgta

SEQ ID NO: 5002498 - DNA, 25 bp, Homo sapien
ggaaaagagacctggctctagtcct

SEQ ID NO: 5002499 - DNA, 25 bp, Homo sapien
tatgtgctcggccttcataaccatc

SEQ ID NO: 5002500 - DNA, 25 bp, Homo sapien
catcaatatatgaatactgggagac

SEQ ID NO: 5002501 - DNA, 25 bp, Homo sapien
ctttttattatgtgctcggccttca

SEQ ID NO: 5002502 - DNA, 25 bp, Homo sapien
aaattgtatccgaaattattattct

SEQ ID NO: 5002503 - DNA, 25 bp, Homo sapien
agaaagcaataaaactttgagtgac

SEQ ID NO: 5002504 - DNA, 25 bp, Homo sapien
aataaaactttgagtgacacgaggc

SEQ ID NO: 5002505 - DNA, 25 bp, Homo sapien
gcaataaaactttgagtgacacgag

SEQ ID NO: 5002506 - DNA, 25 bp, Homo sapien
aagcaataaaactttgagtgacacg

SEQ ID NO: 5002507 - DNA, 25 bp, Homo sapien
tgtaaggaaagggtctagcttctgt

SEQ ID NO: 5002508 - DNA, 25 bp, Homo sapien
ctatgccgaatagaagtgagagagg

SEQ ID NO: 5002509 - DNA, 25 bp, Homo sapien
tggctgtctgtctattattgttgaa

SEQ ID NO: 5002510 - DNA, 25 bp, Homo sapien
tcccagagattccagtacactttgt

SEQ ID NO: 5002511 - DNA, 25 bp, Homo sapien
tcttaagccggtctgaaaagcgcaa

SEQ ID NO: 5002512 - DNA, 25 bp, Homo sapien
acacacactggcctgcgcccactgt

SEQ ID NO: 5002513 - DNA, 25 bp, Homo sapien
cgcgcacggtgcgcacacacactgg

SEQ ID NO: 5002514 - DNA, 25 bp, Homo sapien
gattttccaggtgcgaccgtcaccc

SEQ ID NO: 5002515 - DNA, 25 bp, Homo sapien
cctgttctcagatatggagggtaca

SEQ ID NO: 5002516 - DNA, 25 bp, Homo sapien
ctgttctcagatatggagggtacat

SEQ ID NO: 5002517 - DNA, 25 bp, Homo sapien
tgggcatttgtttctgatagtcggg

SEQ ID NO: 5002518 - DNA, 25 bp, Homo sapien
tcagtacaagaagagtaatggcact

SEQ ID NO: 5002519 - DNA, 25 bp, Homo sapien
gagcacgagtattgcaatgccattg

SEQ ID NO: 5002520 - DNA, 25 bp, Homo sapien
gggtcactcggtgcagccgactgca

SEQ ID NO: 5002521 - DNA, 25 bp, Homo sapien
ggacgcactgggcaattaagaccat

SEQ ID NO: 5002522 - DNA, 25 bp, Homo sapien
ccttgtaggacgcactgggcaatta

SEQ ID NO: 5002523 - DNA, 25 bp, Homo sapien
ctgtccttgtaggacgcactgggca

SEQ ID NO: 5002524 - DNA, 25 bp, Homo sapien
tgtaggacgcactgggcaattaaga

SEQ ID NO: 5002525 - DNA, 25 bp, Homo sapien
gataaagccttatgctgcccaccag

SEQ ID NO: 5002526 - DNA, 25 bp, Homo sapien
ggtgtcgtgtatataggccatggta

SEQ ID NO: 5002527 - DNA, 25 bp, Homo sapien
tgcccaccagcccactaaatgtatt

SEQ ID NO: 5002528 - DNA, 25 bp, Homo sapien
caatgccttatgttatggtgtcgtg

SEQ ID NO: 5002529 - DNA, 25 bp, Homo sapien
ccaccaaggcatcctctgaaagggt

SEQ ID NO: 5002530 - DNA, 25 bp, Homo sapien
tcacctccctctgatagacttagtt

SEQ ID NO: 5002531 - DNA, 25 bp, Homo sapien
tgatagacttagttccaaaagattc

SEQ ID NO: 5002532 - DNA, 25 bp, Homo sapien
tgccagtgggtaccacctttgcctt

SEQ ID NO: 5002533 - DNA, 25 bp, Homo sapien
tagtcgatctcaaaccttgattgag

SEQ ID NO: 5002534 - DNA, 25 bp, Homo sapien
gaacagaaaacggagccaggcgttg

SEQ ID NO: 5002535 - DNA, 25 bp, Homo sapien
tacaaactgcattctatagtcgatc

SEQ ID NO: 5002536 - DNA, 25 bp, Homo sapien
tcataaagtgaacccacatcaagga

SEQ ID NO: 5002537 - DNA, 25 bp, Homo sapien
taaccgtgttgttgttccagtcaag

SEQ ID NO: 5002538 - DNA, 25 bp, Homo sapien
agccaatcgttgctcggcgcctgaa

SEQ ID NO: 5002539 - DNA, 25 bp, Homo sapien
ggtgtcggccaatcagaagccaggc

SEQ ID NO: 5002540 - DNA, 25 bp, Homo sapien
tgaaataggctgcaggcaaatgcgt

SEQ ID NO: 5002541 - DNA, 25 bp, Homo sapien
aatgcagtgctcatgaatttttgtg

SEQ ID NO: 5002542 - DNA, 25 bp, Homo sapien
gtactaagcagggagagcaccaaag

SEQ ID NO: 5002543 - DNA, 25 bp, Homo sapien
tggaacccagcaacaagaccttaat

SEQ ID NO: 5002544 - DNA, 25 bp, Homo sapien
gatgtatctaattggaaggccgaaa

SEQ ID NO: 5002545 - DNA, 25 bp, Homo sapien
tttaggtggagataatacagctgcc

SEQ ID NO: 5002546 - DNA, 25 bp, Homo sapien
gactttatgaaattgtactgccctt

SEQ ID NO: 5002547 - DNA, 25 bp, Homo sapien
tccttacttgccagacgatagctta

SEQ ID NO: 5002548 - DNA, 25 bp, Homo sapien
caggtcagttgtgtcactcattaaa

SEQ ID NO: 5002549 - DNA, 25 bp, Homo sapien
ggtaccaatgactactaggccactt

SEQ ID NO: 5002550 - DNA, 25 bp, Homo sapien
gaatagccatgtacttgtaagcagc

SEQ ID NO: 5002551 - DNA, 25 bp, Homo sapien
tcagcctttgtctagcgattgaata

SEQ ID NO: 5002552 - DNA, 25 bp, Homo sapien
taagcagcacagttgccgataggtg

SEQ ID NO: 5002553 - DNA, 25 bp, Homo sapien
gtaagcagcacagttgccgataggt

SEQ ID NO: 5002554 - DNA, 25 bp, Homo sapien
tagtaatacctgagtacccatggga

SEQ ID NO: 5002555 - DNA, 25 bp, Homo sapien
tacagagtaacctataagcatgaca

SEQ ID NO: 5002556 - DNA, 25 bp, Homo sapien
actgcgtcctgcctaaaatgaattt

SEQ ID NO: 5002557 - DNA, 25 bp, Homo sapien
ggctgacctcaaccctgtaacgtaa

SEQ ID NO: 5002558 - DNA, 25 bp, Homo sapien
gatgccataaatacaagattctctg

SEQ ID NO: 5002559 - DNA, 25 bp, Homo sapien
tattgggcctaaaacagtattctgt

SEQ ID NO: 5002560 - DNA, 25 bp, Homo sapien
gaatagatctttataacctgatgcc

SEQ ID NO: 5002561 - DNA, 25 bp, Homo sapien
tattacccatgggacaaaatttgta

SEQ ID NO: 5002562 - DNA, 25 bp, Homo sapien
tctgattggtcccatgttggaagag

SEQ ID NO: 5002563 - DNA, 25 bp, Homo sapien
tgcggtagcaaaggaatcagccacg

SEQ ID NO: 5002564 - DNA, 25 bp, Homo sapien
tcagccacgatctcttgtgtttagc

SEQ ID NO: 5002565 - DNA, 25 bp, Homo sapien
tctattgtcacagaagctcgtccat

SEQ ID NO: 5002566 - DNA, 25 bp, Homo sapien
ggaaggaagcacaatctagaactcg

SEQ ID NO: 5002567 - DNA, 25 bp, Homo sapien
tatttggaatactaataaacccaga

SEQ ID NO: 5002568 - DNA, 25 bp, Homo sapien
ttaacggtctaagccagaaggtgcg

SEQ ID NO: 5002569 - DNA, 25 bp, Homo sapien
tcgacagcaagggtcaaccatgaaa

SEQ ID NO: 5002570 - DNA, 25 bp, Homo sapien
gcccacagcggggaagaaactggcc

SEQ ID NO: 5002571 - DNA, 25 bp, Homo sapien
agcccacagcggggaagaaactggc

SEQ ID NO: 5002572 - DNA, 25 bp, Homo sapien
ggcctgggggcaactggaactcatc

SEQ ID NO: 5002573 - DNA, 25 bp, Homo sapien
tgtggctgggtggaaaggtggcctg

SEQ ID NO: 5002574 - DNA, 25 bp, Homo sapien
gggcaactggaactcatccacatca

SEQ ID NO: 5002575 - DNA, 25 bp, Homo sapien
gggtgtggctgggtggaaaggtggc

SEQ ID NO: 5002576 - DNA, 25 bp, Homo sapien
tctgtgagcactgataggacatgtc

SEQ ID NO: 5002577 - DNA, 25 bp, Homo sapien
ctcagtaggctttgacgtgctccca

SEQ ID NO: 5002578 - DNA, 25 bp, Homo sapien
ctcagagcacatggaaaagggaacc

SEQ ID NO: 5002579 - DNA, 25 bp, Homo sapien
tctttgtaaactaaggagcctggca

SEQ ID NO: 5002580 - DNA, 25 bp, Homo sapien
ctttggtgcttggtgggactgcccc

SEQ ID NO: 5002581 - DNA, 25 bp, Homo sapien
ggctgagagtctttttattcatcct

SEQ ID NO: 5002582 - DNA, 25 bp, Homo sapien
aatggctctcatctctgattccagc

SEQ ID NO: 5002583 - DNA, 25 bp, Homo sapien
cagcttcttctgtaccccgtattaa

SEQ ID NO: 5002584 - DNA, 25 bp, Homo sapien
gaatcgtgtctcttcagtgggatat

SEQ ID NO: 5002585 - DNA, 25 bp, Homo sapien
gaatattcttagagggcaggaacca

SEQ ID NO: 5002586 - DNA, 25 bp, Homo sapien
tttgtgcacatctagaaaagatagc

SEQ ID NO: 5002587 - DNA, 25 bp, Homo sapien
tgtctttcaccctgacctagagtgt

SEQ ID NO: 5002588 - DNA, 25 bp, Homo sapien
cacttgtttttcacttttctcttca

SEQ ID NO: 5002589 - DNA, 25 bp, Homo sapien
tcacttttctcttcaaaaatggcca

SEQ ID NO: 5002590 - DNA, 25 bp, Homo sapien
cttcacttgtttttcacttttctct

SEQ ID NO: 5002591 - DNA, 25 bp, Homo sapien
tttcacttttctcttcaaaaatggc

SEQ ID NO: 5002592 - DNA, 25 bp, Homo sapien
ggaaattacccagacatagcttcaa

SEQ ID NO: 5002593 - DNA, 25 bp, Homo sapien
gaaagcaattactggtcatccacca

SEQ ID NO: 5002594 - DNA, 25 bp, Homo sapien
cacatatcggaactataaaagcacc

SEQ ID NO: 5002595 - DNA, 25 bp, Homo sapien
taacagttaactcctctagcccata

SEQ ID NO: 5002596 - DNA, 25 bp, Homo sapien
tgagatcgtagcacctgtaatgacg

SEQ ID NO: 5002597 - DNA, 25 bp, Homo sapien
cattagaaaatgcatgcggtaggaa

SEQ ID NO: 5002598 - DNA, 25 bp, Homo sapien
taaaaaatattgctactctcggtgt

SEQ ID NO: 5002599 - DNA, 25 bp, Homo sapien
tctggttgaggagtccaaatttggc

SEQ ID NO: 5002600 - DNA, 25 bp, Homo sapien
caccaataatcggactgagttacag

SEQ ID NO: 5002601 - DNA, 25 bp, Homo sapien
tgtattctgtgtctcacgggccacc

SEQ ID NO: 5002602 - DNA, 25 bp, Homo sapien
gagaggactccagttgaaaggtcaa

SEQ ID NO: 5002603 - DNA, 25 bp, Homo sapien
tctacttcagagtgtggcaatgatg

SEQ ID NO: 5002604 - DNA, 25 bp, Homo sapien
gaacactggtctactcgccgaactt

SEQ ID NO: 5002605 - DNA, 25 bp, Homo sapien
ttgacaccgaggattaccaattgct

SEQ ID NO: 5002606 - DNA, 25 bp, Homo sapien
agttccttgacaccgaggattacca

SEQ ID NO: 5002607 - DNA, 25 bp, Homo sapien
caattgcttgccaatggagagtctg

SEQ ID NO: 5002608 - DNA, 25 bp, Homo sapien
tgcatccatctagtcaagggccagt

SEQ ID NO: 5002609 - DNA, 25 bp, Homo sapien
cagagttcatagctggaggctgaca

SEQ ID NO: 5002610 - DNA, 25 bp, Homo sapien
tctccagaacaacgaaggctcacag

SEQ ID NO: 5002611 - DNA, 25 bp, Homo sapien
acacaccgtgtatccctctcggaga

SEQ ID NO: 5002612 - DNA, 25 bp, Homo sapien
cacccacctcacttgtatggtctgg

SEQ ID NO: 5002613 - DNA, 25 bp, Homo sapien
acttgaagtcaattatcacagttac

SEQ ID NO: 5002614 - DNA, 25 bp, Homo sapien
tgctccacgaaagtacccgggatct

SEQ ID NO: 5002615 - DNA, 25 bp, Homo sapien
tatggtctggagtaatgatgatgag

SEQ ID NO: 5002616 - DNA, 25 bp, Homo sapien
cgtagcttgtcgtgttctctccttg

SEQ ID NO: 5002617 - DNA, 25 bp, Homo sapien
cctctgtgtgtgtagaccagtgtgg

SEQ ID NO: 5002618 - DNA, 25 bp, Homo sapien
tgtagaccagtgtggagacgtagct

SEQ ID NO: 5002619 - DNA, 25 bp, Homo sapien
ccagtgtggagacgtagcttgtcgt

SEQ ID NO: 5002620 - DNA, 25 bp, Homo sapien
tgactgtagcgtttgcatttctaag

SEQ ID NO: 5002621 - DNA, 25 bp, Homo sapien
tgtgactgtagcgtttgcatttcta

SEQ ID NO: 5002622 - DNA, 25 bp, Homo sapien
actgtagcgtttgcatttctaagat

SEQ ID NO: 5002623 - DNA, 25 bp, Homo sapien
taaatgtgactgtagcgtttgcatt

SEQ ID NO: 5002624 - DNA, 25 bp, Homo sapien
ctttgagaatttcataacgccctct

SEQ ID NO: 5002625 - DNA, 25 bp, Homo sapien
gagaatttcataacgccctctgaca

SEQ ID NO: 5002626 - DNA, 25 bp, Homo sapien
ttcataacgccctctgacacaatgg

SEQ ID NO: 5002627 - DNA, 25 bp, Homo sapien
tcataacgccctctgacacaatggg

SEQ ID NO: 5002628 - DNA, 25 bp, Homo sapien
tgagtccgtgcacaatgagaatggg

SEQ ID NO: 5002629 - DNA, 25 bp, Homo sapien
gcacagctggccataattcctttat

SEQ ID NO: 5002630 - DNA, 25 bp, Homo sapien
tgagcttcctatctactttgggcag

SEQ ID NO: 5002631 - DNA, 25 bp, Homo sapien
tgggccatcggattataaaacacac

SEQ ID NO: 5002632 - DNA, 25 bp, Homo sapien
cctgcacagcatatggccttttgta

SEQ ID NO: 5002633 - DNA, 25 bp, Homo sapien
gatgaagtggtcaaaaagtcatcac

SEQ ID NO: 5002634 - DNA, 25 bp, Homo sapien
cttttgtaggatgaagtggtcaaaa

SEQ ID NO: 5002635 - DNA, 25 bp, Homo sapien
ataacaaaggcagcaaccatgaaaa

SEQ ID NO: 5002636 - DNA, 25 bp, Homo sapien
gcgccccgccgttctgaggctcctg

SEQ ID NO: 5002637 - DNA, 25 bp, Homo sapien
agcgcctccgcacacgggttgtagg

SEQ ID NO: 5002638 - DNA, 25 bp, Homo sapien
taggcttgcactggtctgcacaacc

SEQ ID NO: 5002639 - DNA, 25 bp, Homo sapien
gaggctcctgctgcaccgagcgcct

SEQ ID NO: 5002640 - DNA, 25 bp, Homo sapien
cagagtgcaagaaattatcaagtcc

SEQ ID NO: 5002641 - DNA, 25 bp, Homo sapien
tcattggagagtgagacaatggatg

SEQ ID NO: 5002642 - DNA, 25 bp, Homo sapien
caatggatgtagattcagagtgcaa

SEQ ID NO: 5002643 - DNA, 25 bp, Homo sapien
aagtccttgcccatttaccaactgg

SEQ ID NO: 5002644 - DNA, 25 bp, Homo sapien
tgtgtattcctctttccgtagaacc

SEQ ID NO: 5002645 - DNA, 25 bp, Homo sapien
gactacattccccaagtgcctatta

SEQ ID NO: 5002646 - DNA, 25 bp, Homo sapien
gaaccttgtcaaagcttctctgaaa

SEQ ID NO: 5002647 - DNA, 25 bp, Homo sapien
attataggagcgcacctccctgcct

SEQ ID NO: 5002648 - DNA, 25 bp, Homo sapien
gcaaattctaggaacccagctggag

SEQ ID NO: 5002649 - DNA, 25 bp, Homo sapien
taacatcagcgggttgagggatcca

SEQ ID NO: 5002650 - DNA, 25 bp, Homo sapien
aagccaaaggcgatgtctctcagac

SEQ ID NO: 5002651 - DNA, 25 bp, Homo sapien
catccctggtaaggcacagccagtg

SEQ ID NO: 5002652 - DNA, 25 bp, Homo sapien
aaaaatgctagtataggtcaccagg

SEQ ID NO: 5002653 - DNA, 25 bp, Homo sapien
tctatcagtgcaagtcaggtgagac

SEQ ID NO: 5002654 - DNA, 25 bp, Homo sapien
tagcttgagtaatggaaacccttgg

SEQ ID NO: 5002655 - DNA, 25 bp, Homo sapien
caattggcagtctgaaatcaggcac

SEQ ID NO: 5002656 - DNA, 25 bp, Homo sapien
gattaacaggagcagggcgacttcc

SEQ ID NO: 5002657 - DNA, 25 bp, Homo sapien
tggccacgggttgaagccctcttca

SEQ ID NO: 5002658 - DNA, 25 bp, Homo sapien
ggatccttcagctcgaaccctaata

SEQ ID NO: 5002659 - DNA, 25 bp, Homo sapien
tgtgttctttcagcatcgggcctgg

SEQ ID NO: 5002660 - DNA, 25 bp, Homo sapien
ctggagtttctgagtcggagatttc

SEQ ID NO: 5002661 - DNA, 25 bp, Homo sapien
gagatttcgtctctcggctcccttc

SEQ ID NO: 5002662 - DNA, 25 bp, Homo sapien
ggagaacagcgggatccagcccttc

SEQ ID NO: 5002663 - DNA, 25 bp, Homo sapien
catccgggctctggtctgtcttggg

SEQ ID NO: 5002664 - DNA, 25 bp, Homo sapien
ctaggatgaacggagccgggcgtac

SEQ ID NO: 5002665 - DNA, 25 bp, Homo sapien
tggatggcggtggtggggatgggtg

SEQ ID NO: 5002666 - DNA, 25 bp, Homo sapien
ggatggcggtggtggggatgggtgg

SEQ ID NO: 5002667 - DNA, 25 bp, Homo sapien
gatggcggtggtggggatgggtggg

SEQ ID NO: 5002668 - DNA, 25 bp, Homo sapien
ctggatggcggtggtggggatgggt

SEQ ID NO: 5002669 - DNA, 25 bp, Homo sapien
gacaggcttggtcgcagaaacacgt

SEQ ID NO: 5002670 - DNA, 25 bp, Homo sapien
gcagaaacacgtcccgtagaccctg

SEQ ID NO: 5002671 - DNA, 25 bp, Homo sapien
tgggcacgccctgtcgtagtcgaag

SEQ ID NO: 5002672 - DNA, 25 bp, Homo sapien
agtccccggtgaagcgacaggcttg

SEQ ID NO: 5002673 - DNA, 25 bp, Homo sapien
ccggggcaagcgctctgatcctcgg

SEQ ID NO: 5002674 - DNA, 25 bp, Homo sapien
gggcaagcgctctgatcctcggctg

SEQ ID NO: 5002675 - DNA, 25 bp, Homo sapien
aagcgctctgatcctcggctggccg

SEQ ID NO: 5002676 - DNA, 25 bp, Homo sapien
ggagctgcccgagcggccggcgagg

SEQ ID NO: 5002677 - DNA, 25 bp, Homo sapien
tccttactggaaactggatgcagtc

SEQ ID NO: 5002678 - DNA, 25 bp, Homo sapien
ttggagagcagaaatcatcccagtg

SEQ ID NO: 5002679 - DNA, 25 bp, Homo sapien
taataaaatgcaccttagaagacac

SEQ ID NO: 5002680 - DNA, 25 bp, Homo sapien
ccttgccctggagatgtttggagag

SEQ ID NO: 5002681 - DNA, 25 bp, Homo sapien
tgggcagtgtcccacgggctcaagc

SEQ ID NO: 5002682 - DNA, 25 bp, Homo sapien
aggttaaaaggagctaaatgacctg

SEQ ID NO: 5002683 - DNA, 25 bp, Homo sapien
ccctctggagagctagcgctgttca

SEQ ID NO: 5002684 - DNA, 25 bp, Homo sapien
gttcatatggttgcattcattctct

SEQ ID NO: 5002685 - DNA, 25 bp, Homo sapien
ctaaggagatcaaaatccagtggag

SEQ ID NO: 5002686 - DNA, 25 bp, Homo sapien
taaggagatcaaaatccagtggagg

SEQ ID NO: 5002687 - DNA, 25 bp, Homo sapien
agccctgtgtgggtgtgaatgcagc

SEQ ID NO: 5002688 - DNA, 25 bp, Homo sapien
ctgtgtgggtgtgaatgcagctcat

SEQ ID NO: 5002689 - DNA, 25 bp, Homo sapien
gcagccctgtgtgggtgtgaatgca

SEQ ID NO: 5002690 - DNA, 25 bp, Homo sapien
ccctgtgtgggtgtgaatgcagctc

SEQ ID NO: 5002691 - DNA, 25 bp, Homo sapien
gatatctacaagcaggcacatttcc

SEQ ID NO: 5002692 - DNA, 25 bp, Homo sapien
tttgcaaatcctcccagaattcctg

SEQ ID NO: 5002693 - DNA, 25 bp, Homo sapien
catttgcaaatcctcccagaattcc

SEQ ID NO: 5002694 - DNA, 25 bp, Homo sapien
atttgcaaatcctcccagaattcct

SEQ ID NO: 5002695 - DNA, 25 bp, Homo sapien
cgttgagggtctgctttacttcaca

SEQ ID NO: 5002696 - DNA, 25 bp, Homo sapien
agggactcgttgagggtctgcttta

SEQ ID NO: 5002697 - DNA, 25 bp, Homo sapien
gagggtctgctttacttcacacttt

SEQ ID NO: 5002698 - DNA, 25 bp, Homo sapien
gttgatgagggactcgttgagggtc

SEQ ID NO: 5002699 - DNA, 25 bp, Homo sapien
caggatttggacctgttttctaagg

SEQ ID NO: 5002700 - DNA, 25 bp, Homo sapien
aattaatatcaaatagtaagacaag

SEQ ID NO: 5002701 - DNA, 25 bp, Homo sapien
ctgaagcccacacaaagtaattaat

SEQ ID NO: 5002702 - DNA, 25 bp, Homo sapien
tcctctcagggttaaaaaactgtgc

SEQ ID NO: 5002703 - DNA, 25 bp, Homo sapien
gaaagaagccagccaactgacatca

SEQ ID NO: 5002704 - DNA, 25 bp, Homo sapien
ggtatcatgagctggacaaataatg

SEQ ID NO: 5002705 - DNA, 25 bp, Homo sapien
aagaacatgtagtcaccactcgagt

SEQ ID NO: 5002706 - DNA, 25 bp, Homo sapien
ctctgtgtaatttggtatcatgagc

SEQ ID NO: 5002707 - DNA, 25 bp, Homo sapien
gcatttcataaatgttagccgttat

SEQ ID NO: 5002708 - DNA, 25 bp, Homo sapien
gaggctgtacagtccgtttatccat

SEQ ID NO: 5002709 - DNA, 25 bp, Homo sapien
tactattatttcttcgtcccggtgc

SEQ ID NO: 5002710 - DNA, 25 bp, Homo sapien
ttcgtcccggtgcattacaatgtga

SEQ ID NO: 5002711 - DNA, 25 bp, Homo sapien
atctggcggccctttgtagttctgg

SEQ ID NO: 5002712 - DNA, 25 bp, Homo sapien
ctttgtagttctggatgatttgatt

SEQ ID NO: 5002713 - DNA, 25 bp, Homo sapien
ctgaaacatctggcggccctttgta

SEQ ID NO: 5002714 - DNA, 25 bp, Homo sapien
cctgaaacatctggcggccctttgt

SEQ ID NO: 5002715 - DNA, 25 bp, Homo sapien
gtctgttgctgaaggcctgagagct

SEQ ID NO: 5002716 - DNA, 25 bp, Homo sapien
tttgagggcaggcagcgtccagcat

SEQ ID NO: 5002717 - DNA, 25 bp, Homo sapien
aaaagtagggaagccgacagcacag

SEQ ID NO: 5002718 - DNA, 25 bp, Homo sapien
cagcacagccttcagtctgttgctg

SEQ ID NO: 5002719 - DNA, 25 bp, Homo sapien
gctgggagactaagtcagcctagtg

SEQ ID NO: 5002720 - DNA, 25 bp, Homo sapien
tactgacagccaatgataagcatag

SEQ ID NO: 5002721 - DNA, 25 bp, Homo sapien
tccactgccgagaccagttcggtcg

SEQ ID NO: 5002722 - DNA, 25 bp, Homo sapien
agcatgttgttgaggcacaggccac

SEQ ID NO: 5002723 - DNA, 25 bp, Homo sapien
taacatagtagaggatattaaagga

SEQ ID NO: 5002724 - DNA, 25 bp, Homo sapien
ataacatagtagaggatattaaagg

SEQ ID NO: 5002725 - DNA, 25 bp, Homo sapien
cataacatagtagaggatattaaag

SEQ ID NO: 5002726 - DNA, 25 bp, Homo sapien
accaagtattccttgagcagtaacc

SEQ ID NO: 5002727 - DNA, 25 bp, Homo sapien
ccttgagcagtaaccatgtagtaag

SEQ ID NO: 5002728 - DNA, 25 bp, Homo sapien
tattccttgagcagtaaccatgtag

SEQ ID NO: 5002729 - DNA, 25 bp, Homo sapien
gcagtaaccatgtagtaagagcaac

SEQ ID NO: 5002730 - DNA, 25 bp, Homo sapien
aaatctgaagctgcaacattctact

SEQ ID NO: 5002731 - DNA, 25 bp, Homo sapien
taggaccacaccttggatcttgttg

SEQ ID NO: 5002732 - DNA, 25 bp, Homo sapien
gatcttgttgtcatctagagctact

SEQ ID NO: 5002733 - DNA, 25 bp, Homo sapien
taaagacctctttaacttcaatggc

SEQ ID NO: 5002734 - DNA, 25 bp, Homo sapien
ctgacagggccccgatgtctgccct

SEQ ID NO: 5002735 - DNA, 25 bp, Homo sapien
gacagggccccgatgtctgcccttg

SEQ ID NO: 5002736 - DNA, 25 bp, Homo sapien
cagggccccgatgtctgcccttgaa

SEQ ID NO: 5002737 - DNA, 25 bp, Homo sapien
agggccccgatgtctgcccttgaaa

SEQ ID NO: 5002738 - DNA, 25 bp, Homo sapien
tgtgagccaatccaacatttcgaag

SEQ ID NO: 5002739 - DNA, 25 bp, Homo sapien
gagtatactttaagattttgcgtga

SEQ ID NO: 5002740 - DNA, 25 bp, Homo sapien
tttgtgaaggtgtcattataagaat

SEQ ID NO: 5002741 - DNA, 25 bp, Homo sapien
cagaagggctgaacaactgtgagcc

SEQ ID NO: 5002742 - DNA, 25 bp, Homo sapien
gagcatccacacaactgattgggca

SEQ ID NO: 5002743 - DNA, 25 bp, Homo sapien
tgtgtattctctcttcgtccgaggc

SEQ ID NO: 5002744 - DNA, 25 bp, Homo sapien
ttgagttcagagacacaccgttggt

SEQ ID NO: 5002745 - DNA, 25 bp, Homo sapien
tcttctgtcgagtgagtgctttgag

SEQ ID NO: 5002746 - DNA, 25 bp, Homo sapien
ggccagttcccggatgatctcataa

SEQ ID NO: 5002747 - DNA, 25 bp, Homo sapien
cagcactaatcgtctgggacaccgg

SEQ ID NO: 5002748 - DNA, 25 bp, Homo sapien
ttaaagccctgactgtcctgatccg

SEQ ID NO: 5002749 - DNA, 25 bp, Homo sapien
gggaatccctcttgtaagccgacag

SEQ ID NO: 5002750 - DNA, 25 bp, Homo sapien
aattccaaatcaagaagacgattta

SEQ ID NO: 5002751 - DNA, 25 bp, Homo sapien
aatcaagaagacgatttaagcggga

SEQ ID NO: 5002752 - DNA, 25 bp, Homo sapien
tccaaatcaagaagacgatttaagc

SEQ ID NO: 5002753 - DNA, 25 bp, Homo sapien
caagaagacgatttaagcgggaaag

SEQ ID NO: 5002754 - DNA, 25 bp, Homo sapien
ttgcagcccattacaagagcctcgg

SEQ ID NO: 5002755 - DNA, 25 bp, Homo sapien
caagagcctcggagactatttgtag

SEQ ID NO: 5002756 - DNA, 25 bp, Homo sapien
tatttgtaggtgcagggaaacactg

SEQ ID NO: 5002757 - DNA, 25 bp, Homo sapien
ctaggaaacttgcagcccattacaa

SEQ ID NO: 5002758 - DNA, 25 bp, Homo sapien
atgtgcctcactgagcacgtgctgg

SEQ ID NO: 5002759 - DNA, 25 bp, Homo sapien
tcaggttgattgcatgtgcctcact

SEQ ID NO: 5002760 - DNA, 25 bp, Homo sapien
catatttcaggttgattgcatgtgc

SEQ ID NO: 5002761 - DNA, 25 bp, Homo sapien
agcacgtgctgggtggtcggctgct

SEQ ID NO: 5002762 - DNA, 25 bp, Homo sapien
gatgcacctatagccagtacttaga

SEQ ID NO: 5002763 - DNA, 25 bp, Homo sapien
agtaggcaaagatgcacctatagcc

SEQ ID NO: 5002764 - DNA, 25 bp, Homo sapien
ctatagccagtacttagaaggtgac

SEQ ID NO: 5002765 - DNA, 25 bp, Homo sapien
ggaatccagggcaagtaggcaaaga

SEQ ID NO: 5002766 - DNA, 25 bp, Homo sapien
gagcagccagattctgaagccttca

SEQ ID NO: 5002767 - DNA, 25 bp, Homo sapien
ccagattctgaagccttcagtaaaa

SEQ ID NO: 5002768 - DNA, 25 bp, Homo sapien
agccagattctgaagccttcagtaa

SEQ ID NO: 5002769 - DNA, 25 bp, Homo sapien
gcagccagattctgaagccttcagt

SEQ ID NO: 5002770 - DNA, 25 bp, Homo sapien
aacagagatggatcatatacccaga

SEQ ID NO: 5002771 - DNA, 25 bp, Homo sapien
agaatccgattcaggggcggtcgct

SEQ ID NO: 5002772 - DNA, 25 bp, Homo sapien
gaaataagcactattaaggcagaat

SEQ ID NO: 5002773 - DNA, 25 bp, Homo sapien
aaacagagatggatcatatacccag

SEQ ID NO: 5002774 - DNA, 25 bp, Homo sapien
ggagctcaggaggagacccctggcc

SEQ ID NO: 5002775 - DNA, 25 bp, Homo sapien
gagctcaggaggagacccctggcct

SEQ ID NO: 5002776 - DNA, 25 bp, Homo sapien
aggaggagacccctggccttccagc

SEQ ID NO: 5002777 - DNA, 25 bp, Homo sapien
gagacccctggccttccagctgaat

SEQ ID NO: 5002778 - DNA, 25 bp, Homo sapien
gagaccctgatgattcaactgaata

SEQ ID NO: 5002779 - DNA, 25 bp, Homo sapien
gaaaatgagaccctgatgattcaac

SEQ ID NO: 5002780 - DNA, 25 bp, Homo sapien
aatgagaccctgatgattcaactga

SEQ ID NO: 5002781 - DNA, 25 bp, Homo sapien
cacttcaaatggaaaatgagaccct

SEQ ID NO: 5002782 - DNA, 25 bp, Homo sapien
tcttggtgtttaaattgatgtgctt

SEQ ID NO: 5002783 - DNA, 25 bp, Homo sapien
aattgatgtgcttttaaggttgaca

SEQ ID NO: 5002784 - DNA, 25 bp, Homo sapien
tcccttcaccaaaagcttctggagc

SEQ ID NO: 5002785 - DNA, 25 bp, Homo sapien
ggagctccagggcaaacactgaaga

SEQ ID NO: 5002786 - DNA, 25 bp, Homo sapien
aactatttacaagggcaggacaagt

SEQ ID NO: 5002787 - DNA, 25 bp, Homo sapien
tcgtccaaaactatttacaagggca

SEQ ID NO: 5002788 - DNA, 25 bp, Homo sapien
catatccttcattcgtccaaaacta

SEQ ID NO: 5002789 - DNA, 25 bp, Homo sapien
gtttggtctttaaccatatccttca

SEQ ID NO: 5002790 - DNA, 25 bp, Homo sapien
tccacaacttgaaatgaccttcttg

SEQ ID NO: 5002791 - DNA, 25 bp, Homo sapien
caaccaatgggctgtgtttccacaa

SEQ ID NO: 5002792 - DNA, 25 bp, Homo sapien
cttcaagccaaccaatgggctgtgt

SEQ ID NO: 5002793 - DNA, 25 bp, Homo sapien
ttcttgacctcgtaaagcctcctcc

SEQ ID NO: 5002794 - DNA, 25 bp, Homo sapien
gttttctcacacagaattttacaca

SEQ ID NO: 5002795 - DNA, 25 bp, Homo sapien
aaacagaattaggtgctctgacctg

SEQ ID NO: 5002796 - DNA, 25 bp, Homo sapien
gacctgttttctcacacagaatttt

SEQ ID NO: 5002797 - DNA, 25 bp, Homo sapien
aattaggtgctctgacctgttttct

SEQ ID NO: 5002798 - DNA, 25 bp, Homo sapien
gagagcagcacggtttcaaacagca

SEQ ID NO: 5002799 - DNA, 25 bp, Homo sapien
ctagttggagtgagtttggggatcc

SEQ ID NO: 5002800 - DNA, 25 bp, Homo sapien
tgactgccttgctgttcctatcagc

SEQ ID NO: 5002801 - DNA, 25 bp, Homo sapien
actgccttgctgttcctatcagcct

SEQ ID NO: 5002802 - DNA, 25 bp, Homo sapien
gactgccttgctgttcctatcagcc

SEQ ID NO: 5002803 - DNA, 25 bp, Homo sapien
attgaagattgtcatcttctcaaac

SEQ ID NO: 5002804 - DNA, 25 bp, Homo sapien
ctattgaagattgtcatcttctcaa

SEQ ID NO: 5002805 - DNA, 25 bp, Homo sapien
agattgtcatcttctcaaacttttt

SEQ ID NO: 5002806 - DNA, 25 bp, Homo sapien
gaagattgtcatcttctcaaacttt

SEQ ID NO: 5002807 - DNA, 25 bp, Homo sapien
ttctcaggtagctccagactctcct

SEQ ID NO: 5002808 - DNA, 25 bp, Homo sapien
tggtaactgagaccaggcttttccc

SEQ ID NO: 5002809 - DNA, 25 bp, Homo sapien
tttcttctcctcattctcaggtagc

SEQ ID NO: 5002810 - DNA, 25 bp, Homo sapien
tctcctcattctcaggtagctccag

SEQ ID NO: 5002811 - DNA, 25 bp, Homo sapien
catcaatggactcagtcatagagac

SEQ ID NO: 5002812 - DNA, 25 bp, Homo sapien
caatggactcagtcatagagactac

SEQ ID NO: 5002813 - DNA, 25 bp, Homo sapien
gactaccttgaagccccgcttccac

SEQ ID NO: 5002814 - DNA, 25 bp, Homo sapien
cttccacactcggtccacaaaagca

SEQ ID NO: 5002815 - DNA, 25 bp, Homo sapien
atataaagcttaaaagtcactgaag

SEQ ID NO: 5002816 - DNA, 25 bp, Homo sapien
aagtcactgaagaaagcatcacact

SEQ ID NO: 5002817 - DNA, 25 bp, Homo sapien
gaaagcatcacactgtacgacattt

SEQ ID NO: 5002818 - DNA, 25 bp, Homo sapien
tataaatcattttgcatcatatcat

SEQ ID NO: 5002819 - DNA, 25 bp, Homo sapien
ctcggaggtctcgtttcttgctttt

SEQ ID NO: 5002820 - DNA, 25 bp, Homo sapien
agcggtctcggaggtctcgtttctt

SEQ ID NO: 5002821 - DNA, 25 bp, Homo sapien
ttttgattttgtggttgtttcctga

SEQ ID NO: 5002822 - DNA, 25 bp, Homo sapien
tttgattttgtggttgtttcctgac

SEQ ID NO: 5002823 - DNA, 25 bp, Homo sapien
tttggaaagtctctctaagtattga

SEQ ID NO: 5002824 - DNA, 25 bp, Homo sapien
caatatggctattttggaaagtctc

SEQ ID NO: 5002825 - DNA, 25 bp, Homo sapien
catattccaatatggctattttgga

SEQ ID NO: 5002826 - DNA, 25 bp, Homo sapien
aaagtctctctaagtattgagatgg

SEQ ID NO: 5002827 - DNA, 25 bp, Homo sapien
atttctcccaaagtggtgccacact

SEQ ID NO: 5002828 - DNA, 25 bp, Homo sapien
agacacctcggcatcagcacgtggc

SEQ ID NO: 5002829 - DNA, 25 bp, Homo sapien
gcagacacctcggcatcagcacgtg

SEQ ID NO: 5002830 - DNA, 25 bp, Homo sapien
cagacacctcggcatcagcacgtgg

SEQ ID NO: 5002831 - DNA, 25 bp, Homo sapien
gacacctcggcatcagcacgtggca

SEQ ID NO: 5002832 - DNA, 25 bp, Homo sapien
ctagtggagttgaacttacactttt

SEQ ID NO: 5002833 - DNA, 25 bp, Homo sapien
gcaactttgcagtcctggtaaatat

SEQ ID NO: 5002834 - DNA, 25 bp, Homo sapien
cagtcctggtaaatatggcattttg

SEQ ID NO: 5002835 - DNA, 25 bp, Homo sapien
ctttgcagtcctggtaaatatggca

SEQ ID NO: 5002836 - DNA, 25 bp, Homo sapien
tcttccaactactctcaaaaatcaa

SEQ ID NO: 5002837 - DNA, 25 bp, Homo sapien
gaagtctcacatttgatttcaggag

SEQ ID NO: 5002838 - DNA, 25 bp, Homo sapien
caactgccaaaggaacttctggtga

SEQ ID NO: 5002839 - DNA, 25 bp, Homo sapien
cttctggtgaatttagaagtctcac

SEQ ID NO: 5002840 - DNA, 25 bp, Homo sapien
tgatgccaccacgaaaacttccctg

SEQ ID NO: 5002841 - DNA, 25 bp, Homo sapien
gatgccaccacgaaaacttccctga

SEQ ID NO: 5002842 - DNA, 25 bp, Homo sapien
ctgatgccaccacgaaaacttccct

SEQ ID NO: 5002843 - DNA, 25 bp, Homo sapien
atgccaccacgaaaacttccctgag

SEQ ID NO: 5002844 - DNA, 25 bp, Homo sapien
cagctcgtccacatgggttttaggg

SEQ ID NO: 5002845 - DNA, 25 bp, Homo sapien
gggacacccagctcgtccacatggg

SEQ ID NO: 5002846 - DNA, 25 bp, Homo sapien
tcgtccacatgggttttagggagga

SEQ ID NO: 5002847 - DNA, 25 bp, Homo sapien
cccagctcgtccacatgggttttag

SEQ ID NO: 5002848 - DNA, 25 bp, Homo sapien
ctcaacagaggaaacagcctggcct

SEQ ID NO: 5002849 - DNA, 25 bp, Homo sapien
aggaaacagcctggcctccgcacag

SEQ ID NO: 5002850 - DNA, 25 bp, Homo sapien
aacagaggaaacagcctggcctccg

SEQ ID NO: 5002851 - DNA, 25 bp, Homo sapien
acagcctggcctccgcacagccata

SEQ ID NO: 5002852 - DNA, 25 bp, Homo sapien
gctcttgcaccgagggaccacatgc

SEQ ID NO: 5002853 - DNA, 25 bp, Homo sapien
ccccagggctcttgcaccgagggac

SEQ ID NO: 5002854 - DNA, 25 bp, Homo sapien
agggctcttgcaccgagggaccaca

SEQ ID NO: 5002855 - DNA, 25 bp, Homo sapien
ccagggctcttgcaccgagggacca

SEQ ID NO: 5002856 - DNA, 25 bp, Homo sapien
tgttctaggaagtggctgcctccct

SEQ ID NO: 5002857 - DNA, 25 bp, Homo sapien
gcaagccgtttgctgaccagggacg

SEQ ID NO: 5002858 - DNA, 25 bp, Homo sapien
tttgctgaccttaaccagactggag

SEQ ID NO: 5002859 - DNA, 25 bp, Homo sapien
gataaagcacatggtctatgggagg

SEQ ID NO: 5002860 - DNA, 25 bp, Homo sapien
cacagattccagtcaatgactgagc

SEQ ID NO: 5002861 - DNA, 25 bp, Homo sapien
tccagtcaatgactgagcagggatt

SEQ ID NO: 5002862 - DNA, 25 bp, Homo sapien
gattccagtcaatgactgagcaggg

SEQ ID NO: 5002863 - DNA, 25 bp, Homo sapien
tgaaacacagattccagtcaatgac

SEQ ID NO: 5002864 - DNA, 25 bp, Homo sapien
ggagggatttctttgcgatcctggc

SEQ ID NO: 5002865 - DNA, 25 bp, Homo sapien
agggatttctttgcgatcctggccg

SEQ ID NO: 5002866 - DNA, 25 bp, Homo sapien
tctttgcgatcctggccgttgcggc

SEQ ID NO: 5002867 - DNA, 25 bp, Homo sapien
gatttctttgcgatcctggccgttg

SEQ ID NO: 5002868 - DNA, 25 bp, Homo sapien
cagccttgtcgcagggctggccacg

SEQ ID NO: 5002869 - DNA, 25 bp, Homo sapien
tcaccactcctggggtgagcatgcc

SEQ ID NO: 5002870 - DNA, 25 bp, Homo sapien
cagtccagccttgtcgcagggctgg

SEQ ID NO: 5002871 - DNA, 25 bp, Homo sapien
actcctggggtgagcatgccccgca

SEQ ID NO: 5002872 - DNA, 25 bp, Homo sapien
caagcgaaggcccgagaaataaatt

SEQ ID NO: 5002873 - DNA, 25 bp, Homo sapien
taaacccatttcgaatcactcagca

SEQ ID NO: 5002874 - DNA, 25 bp, Homo sapien
gtctttcacacagactcgaccctga

SEQ ID NO: 5002875 - DNA, 25 bp, Homo sapien
tggattaccttaccgacaaatcatg

SEQ ID NO: 5002876 - DNA, 25 bp, Homo sapien
gattttgcacgaaatgggctgttga

SEQ ID NO: 5002877 - DNA, 25 bp, Homo sapien
ccagcttagaaaaataatcatggta

SEQ ID NO: 5002878 - DNA, 25 bp, Homo sapien
cagcttagaaaaataatcatggtag

SEQ ID NO: 5002879 - DNA, 25 bp, Homo sapien
ctgtttattaaccaaccagcttaga

SEQ ID NO: 5002880 - DNA, 25 bp, Homo sapien
gagcaggtactgtttattaaccaac

SEQ ID NO: 5002881 - DNA, 25 bp, Homo sapien
cataaactaggcagttataaagtaa

SEQ ID NO: 5002882 - DNA, 25 bp, Homo sapien
caaaagcagtaaacaaaccaactgt

SEQ ID NO: 5002883 - DNA, 25 bp, Homo sapien
gattaccaccacttatactctaaca

SEQ ID NO: 5002884 - DNA, 25 bp, Homo sapien
cactttaggcagctaacaattaaca

SEQ ID NO: 5002885 - DNA, 25 bp, Homo sapien
tcattcttctaataagcctgttgat

SEQ ID NO: 5002886 - DNA, 25 bp, Homo sapien
cttagttcattcttctaataagcct

SEQ ID NO: 5002887 - DNA, 25 bp, Homo sapien
ataagcctgttgatctggtcctccc

SEQ ID NO: 5002888 - DNA, 25 bp, Homo sapien
aataagcctgttgatctggtcctcc

SEQ ID NO: 5002889 - DNA, 25 bp, Homo sapien
ggagaagacaatttgaagggccaca

SEQ ID NO: 5002890 - DNA, 25 bp, Homo sapien
aagacaatttgaagggccacaggaa

SEQ ID NO: 5002891 - DNA, 25 bp, Homo sapien
gaagacaatttgaagggccacagga

SEQ ID NO: 5002892 - DNA, 25 bp, Homo sapien
ttgaagggccacaggaagttatttg

SEQ ID NO: 5002893 - DNA, 25 bp, Homo sapien
cctctttgaagcgttttccaacagt

SEQ ID NO: 5002894 - DNA, 25 bp, Homo sapien
tccatgcagatgatgccgtatttac

SEQ ID NO: 5002895 - DNA, 25 bp, Homo sapien
caaatcctccatgcagatgatgccg

SEQ ID NO: 5002896 - DNA, 25 bp, Homo sapien
tgaatcaaatcctccatgcagatga

SEQ ID NO: 5002897 - DNA, 25 bp, Homo sapien
taaccacgcttgtagattagttcat

SEQ ID NO: 5002898 - DNA, 25 bp, Homo sapien
cataaccacgcttgtagattagttc

SEQ ID NO: 5002899 - DNA, 25 bp, Homo sapien
agatcgagcaatcaaagcgttatct

SEQ ID NO: 5002900 - DNA, 25 bp, Homo sapien
gcgttatctgtcaaagcaattcgct

SEQ ID NO: 5002901 - DNA, 25 bp, Homo sapien
cgaacctttgggctcactccattga

SEQ ID NO: 5002902 - DNA, 25 bp, Homo sapien
cacctttcgaacctttgggctcact

SEQ ID NO: 5002903 - DNA, 25 bp, Homo sapien
ctttcgaacctttgggctcactcca

SEQ ID NO: 5002904 - DNA, 25 bp, Homo sapien
tttcgaacctttgggctcactccat

SEQ ID NO: 5002905 - DNA, 25 bp, Homo sapien
tgtgatagtgctttgctttttcata

SEQ ID NO: 5002906 - DNA, 25 bp, Homo sapien
tattccttgtgatagtgctttgctt

SEQ ID NO: 5002907 - DNA, 25 bp, Homo sapien
gtgctttgctttttcatagataagc

SEQ ID NO: 5002908 - DNA, 25 bp, Homo sapien
tgctttgctttttcatagataagct

SEQ ID NO: 5002909 - DNA, 25 bp, Homo sapien
ctctgcgaaattccttcgctttttc

SEQ ID NO: 5002910 - DNA, 25 bp, Homo sapien
caggcgcttgatcttcagctctgcg

SEQ ID NO: 5002911 - DNA, 25 bp, Homo sapien
gggcaaacttctttctcaggcgctt

SEQ ID NO: 5002912 - DNA, 25 bp, Homo sapien
ttcagctctgcgaaattccttcgct

SEQ ID NO: 5002913 - DNA, 25 bp, Homo sapien
ctggcacagcaggaacctccttctt

SEQ ID NO: 5002914 - DNA, 25 bp, Homo sapien
tggcacagcaggaacctccttcttc

SEQ ID NO: 5002915 - DNA, 25 bp, Homo sapien
gcacagcaggaacctccttcttctt

SEQ ID NO: 5002916 - DNA, 25 bp, Homo sapien
acagcaggaacctccttcttcttct

SEQ ID NO: 5002917 - DNA, 25 bp, Homo sapien
ttgctctggcatgctacagtgtacg

SEQ ID NO: 5002918 - DNA, 25 bp, Homo sapien
gatgcatattttagctccatgtcaa

SEQ ID NO: 5002919 - DNA, 25 bp, Homo sapien
gctacagtgtacgatgcatatttta

SEQ ID NO: 5002920 - DNA, 25 bp, Homo sapien
tattttagctccatgtcaataacct

SEQ ID NO: 5002921 - DNA, 25 bp, Homo sapien
cgaaagaccctctaccgaggactgg

SEQ ID NO: 5002922 - DNA, 25 bp, Homo sapien
acaattcagaggttctgcgcctccc

SEQ ID NO: 5002923 - DNA, 25 bp, Homo sapien
actgggccgtcagccaaccgacggg

SEQ ID NO: 5002924 - DNA, 25 bp, Homo sapien
ggacgaacacaattcagaggttctg

SEQ ID NO: 5002925 - DNA, 25 bp, Homo sapien
gagaagccccacgactcataggtgt

SEQ ID NO: 5002926 - DNA, 25 bp, Homo sapien
aagttggcgcatgcgtactgtccac

SEQ ID NO: 5002927 - DNA, 25 bp, Homo sapien
tgtccacttaaagacttcgcgagag

SEQ ID NO: 5002928 - DNA, 25 bp, Homo sapien
taaagacttcgcgagagaagcccca

SEQ ID NO: 5002929 - DNA, 25 bp, Homo sapien
cctcatggggacgaactacaaatcc

SEQ ID NO: 5002930 - DNA, 25 bp, Homo sapien
cgcccggcgggagggcaacggctga

SEQ ID NO: 5002931 - DNA, 25 bp, Homo sapien
ggtcctaatccccaggctgcgctga

SEQ ID NO: 5002932 - DNA, 25 bp, Homo sapien
gacaggattaggctccgttcctccc

SEQ ID NO: 5002933 - DNA, 25 bp, Homo sapien
tcttgggccacgttccaaacggcta

SEQ ID NO: 5002934 - DNA, 25 bp, Homo sapien
ttcgaagtcacttttggccgccctc

SEQ ID NO: 5002935 - DNA, 25 bp, Homo sapien
caaacggctagctgcaattcgaagt

SEQ ID NO: 5002936 - DNA, 25 bp, Homo sapien
tctagcttacgaaaagtggctagcc

SEQ ID NO: 5002937 - DNA, 25 bp, Homo sapien
gagctgcgaagggaggtgcgaggag

SEQ ID NO: 5002938 - DNA, 25 bp, Homo sapien
ggagggctgaggttgcggccacggc

SEQ ID NO: 5002939 - DNA, 25 bp, Homo sapien
ggagggggcgtgagctgcgaaggga

SEQ ID NO: 5002940 - DNA, 25 bp, Homo sapien
cggccgtgtgagaggggctacccgg

SEQ ID NO: 5002941 - DNA, 25 bp, Homo sapien
agagggagccggcgcgccggttccg

SEQ ID NO: 5002942 - DNA, 25 bp, Homo sapien
cggggtgagagggagccggcgcgcc

SEQ ID NO: 5002943 - DNA, 25 bp, Homo sapien
gttccggggacgctcgggcggcagc

SEQ ID NO: 5002944 - DNA, 25 bp, Homo sapien
gggacgctcgggcggcagcagcttg

SEQ ID NO: 5002945 - DNA, 25 bp, Homo sapien
ccgcggcgggcacagtccggggcca

SEQ ID NO: 5002946 - DNA, 25 bp, Homo sapien
ggcgggcacagtccggggccacagc

SEQ ID NO: 5002947 - DNA, 25 bp, Homo sapien
gagccgggtgactgccgcggcgggc

SEQ ID NO: 5002948 - DNA, 25 bp, Homo sapien
agccgggtgactgccgcggcgggca

SEQ ID NO: 5002949 - DNA, 25 bp, Homo sapien
cccgggcgtcgcgatgaacatcgtg

SEQ ID NO: 5002950 - DNA, 25 bp, Homo sapien
acatctaccgcgacctggaggcggc

SEQ ID NO: 5002951 - DNA, 25 bp, Homo sapien
catcgtggtggagttcttcgtggtc

SEQ ID NO: 5002952 - DNA, 25 bp, Homo sapien
tgggacatcaacacgcaaagcaacg

SEQ ID NO: 5002953 - DNA, 25 bp, Homo sapien
gcgaagtctcagtcctggtcaataa

SEQ ID NO: 5002954 - DNA, 25 bp, Homo sapien
tggtctctgggcatcaccttctgga

SEQ ID NO: 5002955 - DNA, 25 bp, Homo sapien
tacctgacggctgaaagagtccgca

SEQ ID NO: 5002956 - DNA, 25 bp, Homo sapien
tcaataatgctggtgtggtctctgg

SEQ ID NO: 5002957 - DNA, 25 bp, Homo sapien
ctgaccatccattgggtccagggca

SEQ ID NO: 5002958 - DNA, 25 bp, Homo sapien
tctctcgggttagacagtgcctcgc

SEQ ID NO: 5002959 - DNA, 25 bp, Homo sapien
taaagtcaggatttaggcttccaaa

SEQ ID NO: 5002960 - DNA, 25 bp, Homo sapien
tcctgttgcaggacgcttcgggact

SEQ ID NO: 5002961 - DNA, 25 bp, Homo sapien
tttcaaagatgtgttgacgttggca

SEQ ID NO: 5002962 - DNA, 25 bp, Homo sapien
tgtgttgacgttggcatgtgctgtt

SEQ ID NO: 5002963 - DNA, 25 bp, Homo sapien
gcttcccttccagtagtcctcttat

SEQ ID NO: 5002964 - DNA, 25 bp, Homo sapien
cgaagcgttggtggcaacttttcaa

SEQ ID NO: 5002965 - DNA, 25 bp, Homo sapien
cagggactagcggaacatttgagca

SEQ ID NO: 5002966 - DNA, 25 bp, Homo sapien
taataaggccttctcctacggtgag

SEQ ID NO: 5002967 - DNA, 25 bp, Homo sapien
caaaagtcagaccttgccggatacc

SEQ ID NO: 5002968 - DNA, 25 bp, Homo sapien
aaatgttgcactaatccctgcggcc

SEQ ID NO: 5002969 - DNA, 25 bp, Homo sapien
ttaataccaccagattcatttcagg

SEQ ID NO: 5002970 - DNA, 25 bp, Homo sapien
tatttaatttaataccaccagattc

SEQ ID NO: 5002971 - DNA, 25 bp, Homo sapien
cagaacgttgcaacaaattacactt

SEQ ID NO: 5002972 - DNA, 25 bp, Homo sapien
ggggaggggatattaatcagtttca

SEQ ID NO: 5002973 - DNA, 25 bp, Homo sapien
ggggatctggattagtcatttaata

SEQ ID NO: 5002974 - DNA, 25 bp, Homo sapien
tgctggggatctggattagtcattt

SEQ ID NO: 5002975 - DNA, 25 bp, Homo sapien
gggatctggattagtcatttaatac

SEQ ID NO: 5002976 - DNA, 25 bp, Homo sapien
ctggggatctggattagtcatttaa

SEQ ID NO: 5002977 - DNA, 25 bp, Homo sapien
gattgttcagtactgccggagttga

SEQ ID NO: 5002978 - DNA, 25 bp, Homo sapien
tcttcctacgatgctggagattaat

SEQ ID NO: 5002979 - DNA, 25 bp, Homo sapien
gagattaatcatggtcatattgtga

SEQ ID NO: 5002980 - DNA, 25 bp, Homo sapien
gacagttgcaagttccttgggattg

SEQ ID NO: 5002981 - DNA, 25 bp, Homo sapien
ttggtttgcccttatcttgtagaca

SEQ ID NO: 5002982 - DNA, 25 bp, Homo sapien
gaatccctgagccatgaactaaagg

SEQ ID NO: 5002983 - DNA, 25 bp, Homo sapien
ggcatgttcagaggctgccgaatca

SEQ ID NO: 5002984 - DNA, 25 bp, Homo sapien
acaaccttggtttgcccttatcttg

SEQ ID NO: 5002985 - DNA, 25 bp, Homo sapien
agataaccaaaccagttccctgttg

SEQ ID NO: 5002986 - DNA, 25 bp, Homo sapien
gggccattcttaacgtgtactgaac

SEQ ID NO: 5002987 - DNA, 25 bp, Homo sapien
ttcctccagtgtagcatagcagcag

SEQ ID NO: 5002988 - DNA, 25 bp, Homo sapien
aacaagcagcaaaataggtggaagg

SEQ ID NO: 5002989 - DNA, 25 bp, Homo sapien
cgcctcatgtacatcgtgaccttca

SEQ ID NO: 5002990 - DNA, 25 bp, Homo sapien
gcaggccatgaaggccatcctcact

SEQ ID NO: 5002991 - DNA, 25 bp, Homo sapien
tgtacatcgtgaccttcatgaagag

SEQ ID NO: 5002992 - DNA, 25 bp, Homo sapien
ctctgaagcctgattactgtgtgaa

SEQ ID NO: 5002993 - DNA, 25 bp, Homo sapien
catcctaccatttgaagcagttgtg

SEQ ID NO: 5002994 - DNA, 25 bp, Homo sapien
tatcggttcctaggagcggacaagt

SEQ ID NO: 5002995 - DNA, 25 bp, Homo sapien
gcggacaagtgtatgtaccccttta

SEQ ID NO: 5002996 - DNA, 25 bp, Homo sapien
gcagttgtgtgcatgtatcggttcc

SEQ ID NO: 5002997 - DNA, 25 bp, Homo sapien
ttttgctgcatacagaaagtgccct

SEQ ID NO: 5002998 - DNA, 25 bp, Homo sapien
tggatggactcttatctagaataca

SEQ ID NO: 5002999 - DNA, 25 bp, Homo sapien
ccaactatgattagtgagaggaaga

SEQ ID NO: 5003000 - DNA, 25 bp, Homo sapien
tatacttcattaagtgtctggagac

SEQ ID NO: 5003001 - DNA, 25 bp, Homo sapien
tgtgtctacatataggaaaggtcct

SEQ ID NO: 5003002 - DNA, 25 bp, Homo sapien
ggtgcctgcactcaaatagccgatg

SEQ ID NO: 5003003 - DNA, 25 bp, Homo sapien
acagacattaacaacctagggtgcc

SEQ ID NO: 5003004 - DNA, 25 bp, Homo sapien
gccgatgttactgtccctagattag

SEQ ID NO: 5003005 - DNA, 25 bp, Homo sapien
gacttgcttagatgtgcaagcaatg

SEQ ID NO: 5003006 - DNA, 25 bp, Homo sapien
tcagaagcatgacttgcttagatgt

SEQ ID NO: 5003007 - DNA, 25 bp, Homo sapien
gcttagatgtgcaagcaatgtttca

SEQ ID NO: 5003008 - DNA, 25 bp, Homo sapien
gaagcatgacttgcttagatgtgca

SEQ ID NO: 5003009 - DNA, 25 bp, Homo sapien
tacagtcatcaggcaaaactttccg

SEQ ID NO: 5003010 - DNA, 25 bp, Homo sapien
ttgttattcatgatccaggcactta

SEQ ID NO: 5003011 - DNA, 25 bp, Homo sapien
cttacagtcatcaggcaaaactttc

SEQ ID NO: 5003012 - DNA, 25 bp, Homo sapien
ttacagtcatcaggcaaaactttcc

SEQ ID NO: 5003013 - DNA, 25 bp, Homo sapien
tgagacggaaactgcaacttgctta

SEQ ID NO: 5003014 - DNA, 25 bp, Homo sapien
ctgtgagtgttatgaggaaaactgg

SEQ ID NO: 5003015 - DNA, 25 bp, Homo sapien
agcaaaatctgctgtatcacctcag

SEQ ID NO: 5003016 - DNA, 25 bp, Homo sapien
gaggaaaactggatcttggtccaca

SEQ ID NO: 5003017 - DNA, 25 bp, Homo sapien
gacacagggacatattcctttgctt

SEQ ID NO: 5003018 - DNA, 25 bp, Homo sapien
tttgcttctttagagtccatggatg

SEQ ID NO: 5003019 - DNA, 25 bp, Homo sapien
aagacacagggacatattcctttgc

SEQ ID NO: 5003020 - DNA, 25 bp, Homo sapien
caaggcccaatcacatggggtggga

SEQ ID NO: 5003021 - DNA, 25 bp, Homo sapien
caccagcaagaatgtgctccaccat

SEQ ID NO: 5003022 - DNA, 25 bp, Homo sapien
tgcttcctttcaccagcaagaatgt

SEQ ID NO: 5003023 - DNA, 25 bp, Homo sapien
tttcaccagcaagaatgtgctccac

SEQ ID NO: 5003024 - DNA, 25 bp, Homo sapien
tcctttcaccagcaagaatgtgctc

SEQ ID NO: 5003025 - DNA, 25 bp, Homo sapien
gttgctcgctgtagtcaggaaaaaa

SEQ ID NO: 5003026 - DNA, 25 bp, Homo sapien
aacagctgttgctcgctgtagtcag

SEQ ID NO: 5003027 - DNA, 25 bp, Homo sapien
agctgttgctcgctgtagtcaggaa

SEQ ID NO: 5003028 - DNA, 25 bp, Homo sapien
ctcaaacagctgttgctcgctgtag

SEQ ID NO: 5003029 - DNA, 25 bp, Homo sapien
tccacattggccatgaccggagatt

SEQ ID NO: 5003030 - DNA, 25 bp, Homo sapien
gacatgagtctaaagccactagcag

SEQ ID NO: 5003031 - DNA, 25 bp, Homo sapien
aaagccactagcagagaaactcttc

SEQ ID NO: 5003032 - DNA, 25 bp, Homo sapien
tccagttacatgatccccatcagga

SEQ ID NO: 5003033 - DNA, 25 bp, Homo sapien
caaaagaggtttcccgccctggatg

SEQ ID NO: 5003034 - DNA, 25 bp, Homo sapien
agtgaactgcccaatatcccactgc

SEQ ID NO: 5003035 - DNA, 25 bp, Homo sapien
atcctggttcacgccctcaaaagag

SEQ ID NO: 5003036 - DNA, 25 bp, Homo sapien
gtgaactgcccaatatcccactgct

SEQ ID NO: 5003037 - DNA, 25 bp, Homo sapien
cagaagaacacagtcggcatcatcg

SEQ ID NO: 5003038 - DNA, 25 bp, Homo sapien
gctgcaaaaatgtgcagcagtagac

SEQ ID NO: 5003039 - DNA, 25 bp, Homo sapien
ggcatcatcgtgataacatcaggga

SEQ ID NO: 5003040 - DNA, 25 bp, Homo sapien
ctccctttgtgaagagcccagagcc

SEQ ID NO: 5003041 - DNA, 25 bp, Homo sapien
caaggagggattctcccctggatcc

SEQ ID NO: 5003042 - DNA, 25 bp, Homo sapien
tatgtctacaagtcaaggtattgcc

SEQ ID NO: 5003043 - DNA, 25 bp, Homo sapien
tatgaaggcataagtagagattgga

SEQ ID NO: 5003044 - DNA, 25 bp, Homo sapien
ggtattgccatgagccaccagaagc

SEQ ID NO: 5003045 - DNA, 25 bp, Homo sapien
agaggccttggagcggggagaacag

SEQ ID NO: 5003046 - DNA, 25 bp, Homo sapien
atcactgtcagagagttgggccaag

SEQ ID NO: 5003047 - DNA, 25 bp, Homo sapien
tggatcggcaaatcgtgggctggag

SEQ ID NO: 5003048 - DNA, 25 bp, Homo sapien
agatggatcggcaaatcgtgggctg

SEQ ID NO: 5003049 - DNA, 25 bp, Homo sapien
atcggcaaatcgtgggctggagaca

SEQ ID NO: 5003050 - DNA, 25 bp, Homo sapien
gatcggcaaatcgtgggctggagac

SEQ ID NO: 5003051 - DNA, 25 bp, Homo sapien
caagcccctcagagtctttgttgta

SEQ ID NO: 5003052 - DNA, 25 bp, Homo sapien
gcctgtcaattccaagcccctcaga

SEQ ID NO: 5003053 - DNA, 25 bp, Homo sapien
aagcccctcagagtctttgttgtac

SEQ ID NO: 5003054 - DNA, 25 bp, Homo sapien
ctccggcctgtcaattccaagcccc

SEQ ID NO: 5003055 - DNA, 25 bp, Homo sapien
ggaaatgtaaatgaccaatagagac

SEQ ID NO: 5003056 - DNA, 25 bp, Homo sapien
caatagagacataagttactcagtc

SEQ ID NO: 5003057 - DNA, 25 bp, Homo sapien
gctagttcacacctatgggactggc

SEQ ID NO: 5003058 - DNA, 25 bp, Homo sapien
aagatgtgggcaaagagagatcttc

SEQ ID NO: 5003059 - DNA, 25 bp, Homo sapien
gctgctgaatatgcgttactgggaa

SEQ ID NO: 5003060 - DNA, 25 bp, Homo sapien
catcgctcaaaatcaacgggaagga

SEQ ID NO: 5003061 - DNA, 25 bp, Homo sapien
aagggttagtgccattggcagccga

SEQ ID NO: 5003062 - DNA, 25 bp, Homo sapien
tacagtcctgtttacttgtgggtcg

SEQ ID NO: 5003063 - DNA, 25 bp, Homo sapien
tcccaacctcagttgtaagaatcac

SEQ ID NO: 5003064 - DNA, 25 bp, Homo sapien
tcacctcaaataaccaagtctccct

SEQ ID NO: 5003065 - DNA, 25 bp, Homo sapien
ctcagttgtaagaatcacaaagtcc

SEQ ID NO: 5003066 - DNA, 25 bp, Homo sapien
aagagaattagatcaagtttgcctc

SEQ ID NO: 5003067 - DNA, 25 bp, Homo sapien
tgggccacgtttccaaagtcactag

SEQ ID NO: 5003068 - DNA, 25 bp, Homo sapien
ggcaattgcagtgataacccacctg

SEQ ID NO: 5003069 - DNA, 25 bp, Homo sapien
taccagtcagttggtctgggccacg

SEQ ID NO: 5003070 - DNA, 25 bp, Homo sapien
gcagcaggatttaagtaccagtcag

SEQ ID NO: 5003071 - DNA, 25 bp, Homo sapien
tcttgatgcaaaccgtgagtggcta

SEQ ID NO: 5003072 - DNA, 25 bp, Homo sapien
tgagtggctacaacacacggatggg

SEQ ID NO: 5003073 - DNA, 25 bp, Homo sapien
tggattccaacatgctggcccggag

SEQ ID NO: 5003074 - DNA, 25 bp, Homo sapien
tgatctgatctcgagttccaaggga

SEQ ID NO: 5003075 - DNA, 25 bp, Homo sapien
ttgcagtcctgagcgatggagcccg

SEQ ID NO: 5003076 - DNA, 25 bp, Homo sapien
cgagtttgatttcttgcagtcctga

SEQ ID NO: 5003077 - DNA, 25 bp, Homo sapien
tattgtccgctttctctctcagatg

SEQ ID NO: 5003078 - DNA, 25 bp, Homo sapien
gcctggttattgtccgctttctctc

SEQ ID NO: 5003079 - DNA, 25 bp, Homo sapien
tcattgctccatcgattggatccag

SEQ ID NO: 5003080 - DNA, 25 bp, Homo sapien
tcaagagaacctttttcgatattca

SEQ ID NO: 5003081 - DNA, 25 bp, Homo sapien
acctttttcgatattcattgctcca

SEQ ID NO: 5003082 - DNA, 25 bp, Homo sapien
ctccatcgattggatccagtccttg

SEQ ID NO: 5003083 - DNA, 25 bp, Homo sapien
ttggggcatctgtgtcttctcagct

SEQ ID NO: 5003084 - DNA, 25 bp, Homo sapien
ggggcatctgtgtcttctcagctgc

SEQ ID NO: 5003085 - DNA, 25 bp, Homo sapien
tggggcatctgtgtcttctcagctg

SEQ ID NO: 5003086 - DNA, 25 bp, Homo sapien
tagctcttgcaaaatctcctggacg

SEQ ID NO: 5003087 - DNA, 25 bp, Homo sapien
tgcatatatgagacgaaggccaggt

SEQ ID NO: 5003088 - DNA, 25 bp, Homo sapien
gaatggcggcgtgctctctcacttg

SEQ ID NO: 5003089 - DNA, 25 bp, Homo sapien
cagggagcagcttcagcgttttagc

SEQ ID NO: 5003090 - DNA, 25 bp, Homo sapien
cctgagtgctcaagatacatcaaga

SEQ ID NO: 5003091 - DNA, 25 bp, Homo sapien
agtccagtgagagaacgtgtcacct

SEQ ID NO: 5003092 - DNA, 25 bp, Homo sapien
tgctcaagatacatcaagagcccga

SEQ ID NO: 5003093 - DNA, 25 bp, Homo sapien
gtccagtgagagaacgtgtcacctg

SEQ ID NO: 5003094 - DNA, 25 bp, Homo sapien
cactttgcagtcaggctaggagagg

SEQ ID NO: 5003095 - DNA, 25 bp, Homo sapien
tgcagggttgcactccactttgcag

SEQ ID NO: 5003096 - DNA, 25 bp, Homo sapien
aacagggaggaaatattcgcagacc

SEQ ID NO: 5003097 - DNA, 25 bp, Homo sapien
gatggcggcagcagtcccttattca

SEQ ID NO: 5003098 - DNA, 25 bp, Homo sapien
aactactatgaacagtcaagtgtgg

SEQ ID NO: 5003099 - DNA, 25 bp, Homo sapien
gtcacagaataactactatgaacag

SEQ ID NO: 5003100 - DNA, 25 bp, Homo sapien
aggaaagtcccccatactgtctcac

SEQ ID NO: 5003101 - DNA, 25 bp, Homo sapien
tgtggtgtgcatcttatttgttata

SEQ ID NO: 5003102 - DNA, 25 bp, Homo sapien
tgcatagttgaatcttcatctcgaa

SEQ ID NO: 5003103 - DNA, 25 bp, Homo sapien
cttcatctcgaatgaaccgcttagg

SEQ ID NO: 5003104 - DNA, 25 bp, Homo sapien
tcgaatgaaccgcttaggcttaggc

SEQ ID NO: 5003105 - DNA, 25 bp, Homo sapien
gaaccgcttaggcttaggcaccctc

SEQ ID NO: 5003106 - DNA, 25 bp, Homo sapien
gattttcctcattagacaattcagc

SEQ ID NO: 5003107 - DNA, 25 bp, Homo sapien
tggtttccactttgatccctgttca

SEQ ID NO: 5003108 - DNA, 25 bp, Homo sapien
ttcatgataatggatttgaatctca

SEQ ID NO: 5003109 - DNA, 25 bp, Homo sapien
aaattggtcctaggattgacttgga

SEQ ID NO: 5003110 - DNA, 25 bp, Homo sapien
ctcttgttacatgaatctgatcctt

SEQ ID NO: 5003111 - DNA, 25 bp, Homo sapien
tccagatatatttggaaccaaagtg

SEQ ID NO: 5003112 - DNA, 25 bp, Homo sapien
gttacatgaatctgatccttgtcag

SEQ ID NO: 5003113 - DNA, 25 bp, Homo sapien
tgtcaggtatattctcaaaagagga

SEQ ID NO: 5003114 - DNA, 25 bp, Homo sapien
ggttttcccatgttggcatgttggc

SEQ ID NO: 5003115 - DNA, 25 bp, Homo sapien
ttttcccatgttggcatgttggcca

SEQ ID NO: 5003116 - DNA, 25 bp, Homo sapien
ccacagacatgcactactatgccca

SEQ ID NO: 5003117 - DNA, 25 bp, Homo sapien
tttatagagaaagggtctccccatg

SEQ ID NO: 5003118 - DNA, 25 bp, Homo sapien
ttaaagataaagtatatgagcatgt

SEQ ID NO: 5003119 - DNA, 25 bp, Homo sapien
cacttacagataagggctataaaga

SEQ ID NO: 5003120 - DNA, 25 bp, Homo sapien
gataaagtatatgagcatgtacagg

SEQ ID NO: 5003121 - DNA, 25 bp, Homo sapien
aagaacacttacagataagggctat

SEQ ID NO: 5003122 - DNA, 25 bp, Homo sapien
tattagccgggcatgagcacaagcc

SEQ ID NO: 5003123 - DNA, 25 bp, Homo sapien
tcggtagctcagacccgtaatctca

SEQ ID NO: 5003124 - DNA, 25 bp, Homo sapien
gataaaggtggctactgcaatggga

SEQ ID NO: 5003125 - DNA, 25 bp, Homo sapien
caatataatggcaagctcggtagct

SEQ ID NO: 5003126 - DNA, 25 bp, Homo sapien
gaatgagacagggtgcaaatgacct

SEQ ID NO: 5003127 - DNA, 25 bp, Homo sapien
caaatgacctgagtgtttcagccca

SEQ ID NO: 5003128 - DNA, 25 bp, Homo sapien
gagtttaactacttcatgatgaatg

SEQ ID NO: 5003129 - DNA, 25 bp, Homo sapien
gtctgtcagctaatctctcctggtt

SEQ ID NO: 5003130 - DNA, 25 bp, Homo sapien
cagttcaggtgtctatcaaaaggaa

SEQ ID NO: 5003131 - DNA, 25 bp, Homo sapien
catgcatgattgcaagtgacttaca

SEQ ID NO: 5003132 - DNA, 25 bp, Homo sapien
tggacgcccatgctaaagtactcgg

SEQ ID NO: 5003133 - DNA, 25 bp, Homo sapien
gctgagatttactgaaaagggacgt

SEQ ID NO: 5003134 - DNA, 25 bp, Homo sapien
cagtattacttagcagacacctcca

SEQ ID NO: 5003135 - DNA, 25 bp, Homo sapien
tcctccccagatgtgaagatgacca

SEQ ID NO: 5003136 - DNA, 25 bp, Homo sapien
agactgtccacctcaagtttgtatg

SEQ ID NO: 5003137 - DNA, 25 bp, Homo sapien
tgtaactgccacaactgaaggaagt

SEQ ID NO: 5003138 - DNA, 25 bp, Homo sapien
taggcatggcgctgacataaaaaga

SEQ ID NO: 5003139 - DNA, 25 bp, Homo sapien
gaaccaagtgtcaaagctgtatcca

SEQ ID NO: 5003140 - DNA, 25 bp, Homo sapien
cccagcaagtgagtatatgaaccaa

SEQ ID NO: 5003141 - DNA, 25 bp, Homo sapien
gacataaacattgagcagctaaggg

SEQ ID NO: 5003142 - DNA, 25 bp, Homo sapien
tggataggacccaaatggacccaag

SEQ ID NO: 5003143 - DNA, 25 bp, Homo sapien
cagtcatggcaaaagaaggcttcac

SEQ ID NO: 5003144 - DNA, 25 bp, Homo sapien
ggataaagccttgagcacaacagca

SEQ ID NO: 5003145 - DNA, 25 bp, Homo sapien
ggaagtctgagcataggcctttgta

SEQ ID NO: 5003146 - DNA, 25 bp, Homo sapien
gagatacttcttagggctccttctg

SEQ ID NO: 5003147 - DNA, 25 bp, Homo sapien
tgtgcagaactaggacacaggagat

SEQ ID NO: 5003148 - DNA, 25 bp, Homo sapien
gaaagtacctattattccagagagg

SEQ ID NO: 5003149 - DNA, 25 bp, Homo sapien
tgggcagaattagcatccatgaagt

SEQ ID NO: 5003150 - DNA, 25 bp, Homo sapien
tgaccaaccttagggagggactcag

SEQ ID NO: 5003151 - DNA, 25 bp, Homo sapien
gaatgaaagcaatagtctgctgccc

SEQ ID NO: 5003152 - DNA, 25 bp, Homo sapien
caggggcctgaccaaccttagggag

SEQ ID NO: 5003153 - DNA, 25 bp, Homo sapien
cagtttctattagaatgaaagcaat

SEQ ID NO: 5003154 - DNA, 25 bp, Homo sapien
gtttatggttttctctggtagatag

SEQ ID NO: 5003155 - DNA, 25 bp, Homo sapien
ggcctctacaactagttccatacag

SEQ ID NO: 5003156 - DNA, 25 bp, Homo sapien
gcaaagcattagaacaataaaggcc

SEQ ID NO: 5003157 - DNA, 25 bp, Homo sapien
tgattactgggtgtaaatcgtaact

SEQ ID NO: 5003158 - DNA, 25 bp, Homo sapien
cttttggtttagtattcaccttcat

SEQ ID NO: 5003159 - DNA, 25 bp, Homo sapien
ttttggtttagtattcaccttcatc

SEQ ID NO: 5003160 - DNA, 25 bp, Homo sapien
tcttttggtttagtattcaccttca

SEQ ID NO: 5003161 - DNA, 25 bp, Homo sapien
gcagatttcacagtcatccagggtg

SEQ ID NO: 5003162 - DNA, 25 bp, Homo sapien
ccagggtgtataggtagcttgagcc

SEQ ID NO: 5003163 - DNA, 25 bp, Homo sapien
gtaaagcttttaccctctgcccatg

SEQ ID NO: 5003164 - DNA, 25 bp, Homo sapien
tagtcggtggttatgctcaaatacc

SEQ ID NO: 5003165 - DNA, 25 bp, Homo sapien
cccttgttcctgaatgaagaacggc

SEQ ID NO: 5003166 - DNA, 25 bp, Homo sapien
cagctggtcatcaaggcctgctgat

SEQ ID NO: 5003167 - DNA, 25 bp, Homo sapien
gattgatcttatagacaccagcata

SEQ ID NO: 5003168 - DNA, 25 bp, Homo sapien
gagtcacacccatcaaggtgatcag

SEQ ID NO: 5003169 - DNA, 25 bp, Homo sapien
ctttgttgcaaagaacataaatttc

SEQ ID NO: 5003170 - DNA, 25 bp, Homo sapien
tttgttgcaaagaacataaatttca

SEQ ID NO: 5003171 - DNA, 25 bp, Homo sapien
ttgttgcaaagaacataaatttcat

SEQ ID NO: 5003172 - DNA, 25 bp, Homo sapien
tgttggttctggaaactgcttatac

SEQ ID NO: 5003173 - DNA, 25 bp, Homo sapien
gttggttctggaaactgcttataca

SEQ ID NO: 5003174 - DNA, 25 bp, Homo sapien
ttggttctggaaactgcttatacat

SEQ ID NO: 5003175 - DNA, 25 bp, Homo sapien
taagatcaagggacaagtttcggag

SEQ ID NO: 5003176 - DNA, 25 bp, Homo sapien
ttgccagcggcagtgattataccca

SEQ ID NO: 5003177 - DNA, 25 bp, Homo sapien
gcacttggcgctgctgacgtacaga

SEQ ID NO: 5003178 - DNA, 25 bp, Homo sapien
tctatcctgtggtgagaagctcctg

SEQ ID NO: 5003179 - DNA, 25 bp, Homo sapien
gatttttagctttatttcagaaata

SEQ ID NO: 5003180 - DNA, 25 bp, Homo sapien
cagatttttagctttatttcagaaa

SEQ ID NO: 5003181 - DNA, 25 bp, Homo sapien
agatttttagctttatttcagaaat

SEQ ID NO: 5003182 - DNA, 25 bp, Homo sapien
gcatgtgcgcacatagcttccattt

SEQ ID NO: 5003183 - DNA, 25 bp, Homo sapien
caaatgagtatactacagcgagact

SEQ ID NO: 5003184 - DNA, 25 bp, Homo sapien
gatggccttccatttccgagctggg

SEQ ID NO: 5003185 - DNA, 25 bp, Homo sapien
taatggtgctcccagaaggttacaa

SEQ ID NO: 5003186 - DNA, 25 bp, Homo sapien
gggctaatgtcagacaggtcacaca

SEQ ID NO: 5003187 - DNA, 25 bp, Homo sapien
cactctttgccactttgtctatcac

SEQ ID NO: 5003188 - DNA, 25 bp, Homo sapien
catggctggcttcaatggagcttcc

SEQ ID NO: 5003189 - DNA, 25 bp, Homo sapien
gcttccaatagcatggaaagtcatc

SEQ ID NO: 5003190 - DNA, 25 bp, Homo sapien
caacagttcacaaccatttatggca

SEQ ID NO: 5003191 - DNA, 25 bp, Homo sapien
taaaagctcagtcaatgtatacgag

SEQ ID NO: 5003192 - DNA, 25 bp, Homo sapien
ataattaccctttcgacaccaactg

SEQ ID NO: 5003193 - DNA, 25 bp, Homo sapien
actacacagcaactaggtataaggg

SEQ ID NO: 5003194 - DNA, 25 bp, Homo sapien
tgtatacaattcactgtgaagcctg

SEQ ID NO: 5003195 - DNA, 25 bp, Homo sapien
taaacacacttctatgtcagctgac

SEQ ID NO: 5003196 - DNA, 25 bp, Homo sapien
tgaagcctgcaagtactaataaaac

SEQ ID NO: 5003197 - DNA, 25 bp, Homo sapien
cagtgactcagataccattaatgag

SEQ ID NO: 5003198 - DNA, 25 bp, Homo sapien
acacaggcagtcagtataccatcaa

SEQ ID NO: 5003199 - DNA, 25 bp, Homo sapien
gggcaaactctactatttctaatgt

SEQ ID NO: 5003200 - DNA, 25 bp, Homo sapien
ttaacatggtgctttctactcagga

SEQ ID NO: 5003201 - DNA, 25 bp, Homo sapien
acaggaccttacaaatcttattata

SEQ ID NO: 5003202 - DNA, 25 bp, Homo sapien
aaaacgcaaaactattcagaggact

SEQ ID NO: 5003203 - DNA, 25 bp, Homo sapien
aaaacggtgtttaatgcacctatgc

SEQ ID NO: 5003204 - DNA, 25 bp, Homo sapien
ggcaatcaatagacaccaaactcaa

SEQ ID NO: 5003205 - DNA, 25 bp, Homo sapien
tcacaaatgttaggatgcaatccaa

SEQ ID NO: 5003206 - DNA, 25 bp, Homo sapien
tacattaggagcttaacaccatttg

SEQ ID NO: 5003207 - DNA, 25 bp, Homo sapien
cggcaagggcggaggcaaatctttt

SEQ ID NO: 5003208 - DNA, 25 bp, Homo sapien
cacaactgaagacactaagtcatgg

SEQ ID NO: 5003209 - DNA, 25 bp, Homo sapien
gggcagaaaccctggctatcacttt

SEQ ID NO: 5003210 - DNA, 25 bp, Homo sapien
tgtcctgtgcttcagctgaatcagt

SEQ ID NO: 5003211 - DNA, 25 bp, Homo sapien
caacgggatggcattctatgggcag

SEQ ID NO: 5003212 - DNA, 25 bp, Homo sapien
tttccagcaatggttcaaatgttcc

SEQ ID NO: 5003213 - DNA, 25 bp, Homo sapien
gaatcagttccaatgttcaacggga

SEQ ID NO: 5003214 - DNA, 25 bp, Homo sapien
aatgcatgcccctgttatgtcagag

SEQ ID NO: 5003215 - DNA, 25 bp, Homo sapien
aatatccagaagactatgggccacc

SEQ ID NO: 5003216 - DNA, 25 bp, Homo sapien
tttgtaggcaaaaacataccaggta

SEQ ID NO: 5003217 - DNA, 25 bp, Homo sapien
tatgtgagtccatcaataactgtca

SEQ ID NO: 5003218 - DNA, 25 bp, Homo sapien
aatgagtgtaggtatacagctgcca

SEQ ID NO: 5003219 - DNA, 25 bp, Homo sapien
cttggaatgagtgtaggtatacagc

SEQ ID NO: 5003220 - DNA, 25 bp, Homo sapien
ggaatgagtgtaggtatacagctgc

SEQ ID NO: 5003221 - DNA, 25 bp, Homo sapien
tgacttggaatgagtgtaggtatac

SEQ ID NO: 5003222 - DNA, 25 bp, Homo sapien
tagtagaggtcaaattcaagagagc

SEQ ID NO: 5003223 - DNA, 25 bp, Homo sapien
gtgctggtgcataaaggctcaaaat

SEQ ID NO: 5003224 - DNA, 25 bp, Homo sapien
catatcccttggactttggcctgca

SEQ ID NO: 5003225 - DNA, 25 bp, Homo sapien
gcagtatctgctgaccaaacccaca

SEQ ID NO: 5003226 - DNA, 25 bp, Homo sapien
taatagcctacatgaacatttggtc

SEQ ID NO: 5003227 - DNA, 25 bp, Homo sapien
tggtctcagaggcaacacagtaagt

SEQ ID NO: 5003228 - DNA, 25 bp, Homo sapien
attataaggcatctagacatgattt

SEQ ID NO: 5003229 - DNA, 25 bp, Homo sapien
ccatgggctatgcatccaaatatca

SEQ ID NO: 5003230 - DNA, 25 bp, Homo sapien
actgttacagtggatgatgctcaca

SEQ ID NO: 5003231 - DNA, 25 bp, Homo sapien
agtttgttacactatactcggaagg

SEQ ID NO: 5003232 - DNA, 25 bp, Homo sapien
caataatgaaatgcccctccataaa

SEQ ID NO: 5003233 - DNA, 25 bp, Homo sapien
tgaaatccatctagaagggacgatt

SEQ ID NO: 5003234 - DNA, 25 bp, Homo sapien
cagaagcatacgattaggctgaaca

SEQ ID NO: 5003235 - DNA, 25 bp, Homo sapien
aaagtgtacacaacaaggaaccctg

SEQ ID NO: 5003236 - DNA, 25 bp, Homo sapien
ccctgaaacactatggtaggactac

SEQ ID NO: 5003237 - DNA, 25 bp, Homo sapien
gcttggatacctacattcagttgat

SEQ ID NO: 5003238 - DNA, 25 bp, Homo sapien
ggagattctgctcactgcttagctg

SEQ ID NO: 5003239 - DNA, 25 bp, Homo sapien
tagctgcaggtagtggtccatcaat

SEQ ID NO: 5003240 - DNA, 25 bp, Homo sapien
gaaccttctgctgcgacattatgaa

SEQ ID NO: 5003241 - DNA, 25 bp, Homo sapien
gccagactaagtcatttcccggaga

SEQ ID NO: 5003242 - DNA, 25 bp, Homo sapien
tttcatcacaatttatttctaattc

SEQ ID NO: 5003243 - DNA, 25 bp, Homo sapien
tcatcacaatttatttctaattcat

SEQ ID NO: 5003244 - DNA, 25 bp, Homo sapien
catcacaatttatttctaattcatc

SEQ ID NO: 5003245 - DNA, 25 bp, Homo sapien
cttttcatcacaatttatttctaat

SEQ ID NO: 5003246 - DNA, 25 bp, Homo sapien
ctacggagattatagatagaactaa

SEQ ID NO: 5003247 - DNA, 25 bp, Homo sapien
tacggagattatagatagaactaaa

SEQ ID NO: 5003248 - DNA, 25 bp, Homo sapien
acggagattatagatagaactaaaa

SEQ ID NO: 5003249 - DNA, 25 bp, Homo sapien
agtgatttattgtgtttcttaaggt

SEQ ID NO: 5003250 - DNA, 25 bp, Homo sapien
cagtgatttattgtgtttcttaagg

SEQ ID NO: 5003251 - DNA, 25 bp, Homo sapien
gagtccaattagaaacactaacaac

SEQ ID NO: 5003252 - DNA, 25 bp, Homo sapien
aagttcatattaagagtccaattag

SEQ ID NO: 5003253 - DNA, 25 bp, Homo sapien
gagccgataactggtaacagcttct

SEQ ID NO: 5003254 - DNA, 25 bp, Homo sapien
tcagatgacagagccgataactggt

SEQ ID NO: 5003255 - DNA, 25 bp, Homo sapien
catgtaggccatactagcaggcaag

SEQ ID NO: 5003256 - DNA, 25 bp, Homo sapien
gactacccagtgaaacagaattgtt

SEQ ID NO: 5003257 - DNA, 25 bp, Homo sapien
ttaaaacgtaagtggcatgtaggcc

SEQ ID NO: 5003258 - DNA, 25 bp, Homo sapien
gacagagcgaagagatagatgcacc

SEQ ID NO: 5003259 - DNA, 25 bp, Homo sapien
tattcgatgtgggagatatactgaa

SEQ ID NO: 5003260 - DNA, 25 bp, Homo sapien
gctgaactattcgatgtgggagata

SEQ ID NO: 5003261 - DNA, 25 bp, Homo sapien
gaactattcgatgtgggagatatac

SEQ ID NO: 5003262 - DNA, 25 bp, Homo sapien
tcgatgtgggagatatactgaagaa

SEQ ID NO: 5003263 - DNA, 25 bp, Homo sapien
caggagacaaatgaagaattccttt

SEQ ID NO: 5003264 - DNA, 25 bp, Homo sapien
ctcttgataaacatcaggagacaaa

SEQ ID NO: 5003265 - DNA, 25 bp, Homo sapien
ttgataaacatcaggagacaaatga

SEQ ID NO: 5003266 - DNA, 25 bp, Homo sapien
ggagacaaatgaagaattccttttg

SEQ ID NO: 5003267 - DNA, 25 bp, Homo sapien
gaggcagttgcagcttctattgaaa

SEQ ID NO: 5003268 - DNA, 25 bp, Homo sapien
acatacagcaattgaggcacatcag

SEQ ID NO: 5003269 - DNA, 25 bp, Homo sapien
gggtatcatctcaaaactagcactg

SEQ ID NO: 5003270 - DNA, 25 bp, Homo sapien
cgcatgtattcaacagcctagtgat

SEQ ID NO: 5003271 - DNA, 25 bp, Homo sapien
caggccatgccttatcacaagagca

SEQ ID NO: 5003272 - DNA, 25 bp, Homo sapien
gcatgcatgagtcccatatccctgg

SEQ ID NO: 5003273 - DNA, 25 bp, Homo sapien
tgttctaggaaacctcaggccatgc

SEQ ID NO: 5003274 - DNA, 25 bp, Homo sapien
ttcttcacggatatcaagggatgac

SEQ ID NO: 5003275 - DNA, 25 bp, Homo sapien
tcttcttggttatgattcttctcag

SEQ ID NO: 5003276 - DNA, 25 bp, Homo sapien
taaaatgttgctcgtaaaataaaga

SEQ ID NO: 5003277 - DNA, 25 bp, Homo sapien
gaaaaactccattagttatgatttc

SEQ ID NO: 5003278 - DNA, 25 bp, Homo sapien
taaagatcgttcttcttggttatga

SEQ ID NO: 5003279 - DNA, 25 bp, Homo sapien
gcttgaaggtcagggtggccactgc

SEQ ID NO: 5003280 - DNA, 25 bp, Homo sapien
cttgaaggtcagggtggccactgca

SEQ ID NO: 5003281 - DNA, 25 bp, Homo sapien
tgcttgaaggtcagggtggccactg

SEQ ID NO: 5003282 - DNA, 25 bp, Homo sapien
ctgcttgaaggtcagggtggccact

SEQ ID NO: 5003283 - DNA, 25 bp, Homo sapien
tcaggaaacccaggctttggaccac

SEQ ID NO: 5003284 - DNA, 25 bp, Homo sapien
gaaacccaggctttggaccactcca

SEQ ID NO: 5003285 - DNA, 25 bp, Homo sapien
tggttcaggaaacccaggctttgga

SEQ ID NO: 5003286 - DNA, 25 bp, Homo sapien
acccaggctttggaccactccatcc

SEQ ID NO: 5003287 - DNA, 25 bp, Homo sapien
gtagcaacttcattgcctaccttca

SEQ ID NO: 5003288 - DNA, 25 bp, Homo sapien
gtcctgttcctgtagcaacttcatt

SEQ ID NO: 5003289 - DNA, 25 bp, Homo sapien
atctttttattaggtcctgttcctg

SEQ ID NO: 5003290 - DNA, 25 bp, Homo sapien
tcctgtagcaacttcattgcctacc

SEQ ID NO: 5003291 - DNA, 25 bp, Homo sapien
caggcggctaatagggttcatccct

SEQ ID NO: 5003292 - DNA, 25 bp, Homo sapien
gccaggcggctaatagggttcatcc

SEQ ID NO: 5003293 - DNA, 25 bp, Homo sapien
taatagggttcatcccttggccata

SEQ ID NO: 5003294 - DNA, 25 bp, Homo sapien
cggctaatagggttcatcccttggc

SEQ ID NO: 5003295 - DNA, 25 bp, Homo sapien
aattaagaagtctaacagccccaag

SEQ ID NO: 5003296 - DNA, 25 bp, Homo sapien
tgtaataaagcacctgtatccagag

SEQ ID NO: 5003297 - DNA, 25 bp, Homo sapien
tatgtaataaagcacctgtatccag

SEQ ID NO: 5003298 - DNA, 25 bp, Homo sapien
catatgtaataaagcacctgtatcc

SEQ ID NO: 5003299 - DNA, 25 bp, Homo sapien
acatatgtaataaagcacctgtatc

SEQ ID NO: 5003300 - DNA, 25 bp, Homo sapien
tgtttccagtggcatactgtcttta

SEQ ID NO: 5003301 - DNA, 25 bp, Homo sapien
gataatgatggagttcagtgtacat

SEQ ID NO: 5003302 - DNA, 25 bp, Homo sapien
cactagaagtagtatgcccagttca

SEQ ID NO: 5003303 - DNA, 25 bp, Homo sapien
gcctgcacaacgttgcaaaaccctg

SEQ ID NO: 5003304 - DNA, 25 bp, Homo sapien
tcctactgacactcgagtaacaaag

SEQ ID NO: 5003305 - DNA, 25 bp, Homo sapien
ctgacactcgagtaacaaagctttt

SEQ ID NO: 5003306 - DNA, 25 bp, Homo sapien
tactgacactcgagtaacaaagctt

SEQ ID NO: 5003307 - DNA, 25 bp, Homo sapien
cgcttcttggagagttttttgctat

SEQ ID NO: 5003308 - DNA, 25 bp, Homo sapien
aaaactgacaggcatatttcgcttc

SEQ ID NO: 5003309 - DNA, 25 bp, Homo sapien
ctgacaggcatatttcgcttcagag

SEQ ID NO: 5003310 - DNA, 25 bp, Homo sapien
aactgacaggcatatttcgcttcag

SEQ ID NO: 5003311 - DNA, 25 bp, Homo sapien
acaggcatatttcgcttcagagcaa

SEQ ID NO: 5003312 - DNA, 25 bp, Homo sapien
catccacatcctttcctgattcacc

SEQ ID NO: 5003313 - DNA, 25 bp, Homo sapien
ccacatcctttcctgattcaccatt

SEQ ID NO: 5003314 - DNA, 25 bp, Homo sapien
agctgatctcagacttatttgcatc

SEQ ID NO: 5003315 - DNA, 25 bp, Homo sapien
cagacttatttgcatctttgtcatc

SEQ ID NO: 5003316 - DNA, 25 bp, Homo sapien
agcttgtcgagtctttccttcccca

SEQ ID NO: 5003317 - DNA, 25 bp, Homo sapien
tgtgtctagcagcttgtcgagtctt

SEQ ID NO: 5003318 - DNA, 25 bp, Homo sapien
gcattgtgtctagcagcttgtcgag

SEQ ID NO: 5003319 - DNA, 25 bp, Homo sapien
tagcagcttgtcgagtctttccttc

SEQ ID NO: 5003320 - DNA, 25 bp, Homo sapien
tcctgaagtgagatctcatatggca

SEQ ID NO: 5003321 - DNA, 25 bp, Homo sapien
gaagtgagatctcatatggcaaact

SEQ ID NO: 5003322 - DNA, 25 bp, Homo sapien
caaactttcaccatagagcaaatgt

SEQ ID NO: 5003323 - DNA, 25 bp, Homo sapien
tatggcaaactttcaccatagagca

SEQ ID NO: 5003324 - DNA, 25 bp, Homo sapien
cataacacataaccatactgaaaca

SEQ ID NO: 5003325 - DNA, 25 bp, Homo sapien
gaatatgatgtcataacacataacc

SEQ ID NO: 5003326 - DNA, 25 bp, Homo sapien
ttaattgcacaccaaagagcccttg

SEQ ID NO: 5003327 - DNA, 25 bp, Homo sapien
ctggccaaaatattaattgcacacc

SEQ ID NO: 5003328 - DNA, 25 bp, Homo sapien
ctccaacatctccactttcctgagt

SEQ ID NO: 5003329 - DNA, 25 bp, Homo sapien
tccaacatctccactttcctgagta

SEQ ID NO: 5003330 - DNA, 25 bp, Homo sapien
acatctccactttcctgagtatcat

SEQ ID NO: 5003331 - DNA, 25 bp, Homo sapien
caacatctccactttcctgagtatc

SEQ ID NO: 5003332 - DNA, 25 bp, Homo sapien
tacccgggagaacatcacttcatgc

SEQ ID NO: 5003333 - DNA, 25 bp, Homo sapien
ttagcgcttgtaccatacccgggag

SEQ ID NO: 5003334 - DNA, 25 bp, Homo sapien
tagtagccccaggaaatcatagttg

SEQ ID NO: 5003335 - DNA, 25 bp, Homo sapien
tcaagaatgccaatctaggccaggc

SEQ ID NO: 5003336 - DNA, 25 bp, Homo sapien
actgagtgcagagtacatgggcttc

SEQ ID NO: 5003337 - DNA, 25 bp, Homo sapien
tgctgcagtgcttgcatgaatctac

SEQ ID NO: 5003338 - DNA, 25 bp, Homo sapien
tgcctggccgagttctgcatcttgt

SEQ ID NO: 5003339 - DNA, 25 bp, Homo sapien
accaatgtcagtatactggtttgaa

SEQ ID NO: 5003340 - DNA, 25 bp, Homo sapien
tgggccccagactctgatgctgtcc

SEQ ID NO: 5003341 - DNA, 25 bp, Homo sapien
cgtcttctggccttgccaatggcct

SEQ ID NO: 5003342 - DNA, 25 bp, Homo sapien
tgcctgggccccagactctgatgct

SEQ ID NO: 5003343 - DNA, 25 bp, Homo sapien
acctgctgtgcccttgggcacccct

SEQ ID NO: 5003344 - DNA, 25 bp, Homo sapien
actcgatgttttccacagttaaggg

SEQ ID NO: 5003345 - DNA, 25 bp, Homo sapien
ggcgtaattaaagccctgctactct

SEQ ID NO: 5003346 - DNA, 25 bp, Homo sapien
ttcaccaactagataaaactcgatg

SEQ ID NO: 5003347 - DNA, 25 bp, Homo sapien
taaaactgttatttctggccaggcg

SEQ ID NO: 5003348 - DNA, 25 bp, Homo sapien
caaacaataatatcggttttcaaga

SEQ ID NO: 5003349 - DNA, 25 bp, Homo sapien
ggagcaagcaatatgcaaaggtgca

SEQ ID NO: 5003350 - DNA, 25 bp, Homo sapien
tctgactgacaacaatgatttggaa

SEQ ID NO: 5003351 - DNA, 25 bp, Homo sapien
taatagcaattgaaaagcatcaaag

SEQ ID NO: 5003352 - DNA, 25 bp, Homo sapien
caaaccatgtacatatctcatgagg

SEQ ID NO: 5003353 - DNA, 25 bp, Homo sapien
ttaaaaaacagtgcggttcaagctc

SEQ ID NO: 5003354 - DNA, 25 bp, Homo sapien
ccagaacaattatccttaaggagtg

SEQ ID NO: 5003355 - DNA, 25 bp, Homo sapien
ggattatctggtataaggacaaacc

SEQ ID NO: 5003356 - DNA, 25 bp, Homo sapien
gaacatcttataacactgacttagg

SEQ ID NO: 5003357 - DNA, 25 bp, Homo sapien
ccacataaagtctgggcatcagaat

SEQ ID NO: 5003358 - DNA, 25 bp, Homo sapien
gatgttcagtcagtgttaggaacca

SEQ ID NO: 5003359 - DNA, 25 bp, Homo sapien
gacacctttaggagtcttcaagaga

SEQ ID NO: 5003360 - DNA, 25 bp, Homo sapien
tacaacagaaattttacaccagctg

SEQ ID NO: 5003361 - DNA, 25 bp, Homo sapien
caaacttgaatgcttgtaccctaca

SEQ ID NO: 5003362 - DNA, 25 bp, Homo sapien
cattaagtacttgcaaaggatgtag

SEQ ID NO: 5003363 - DNA, 25 bp, Homo sapien
gaactatcatagcaagctgacatcc

SEQ ID NO: 5003364 - DNA, 25 bp, Homo sapien
aaaagtaaaatattaatggacatga

SEQ ID NO: 5003365 - DNA, 25 bp, Homo sapien
tcaccgtgccaggccacataatttt

SEQ ID NO: 5003366 - DNA, 25 bp, Homo sapien
agtcaccgtgccaggccacataatt

SEQ ID NO: 5003367 - DNA, 25 bp, Homo sapien
ccgtgccaggccacataatttttaa

SEQ ID NO: 5003368 - DNA, 25 bp, Homo sapien
tactagcttaatgaaaacggaaagc

SEQ ID NO: 5003369 - DNA, 25 bp, Homo sapien
tacatacaagagacaccaaaaacag

SEQ ID NO: 5003370 - DNA, 25 bp, Homo sapien
gcaaaaaggtattaatggcgaacac

SEQ ID NO: 5003371 - DNA, 25 bp, Homo sapien
tttatggtaaacacccgctgtcaac

SEQ ID NO: 5003372 - DNA, 25 bp, Homo sapien
cctgtaatccattcaagtgttgcca

SEQ ID NO: 5003373 - DNA, 25 bp, Homo sapien
gctaatgattaatctgggttctgac

SEQ ID NO: 5003374 - DNA, 25 bp, Homo sapien
taagaagctaatgattaatctgggt

SEQ ID NO: 5003375 - DNA, 25 bp, Homo sapien
ctccagagtccctgtaatccattca

SEQ ID NO: 5003376 - DNA, 25 bp, Homo sapien
ctactgagtaatggttaggtctgcg

SEQ ID NO: 5003377 - DNA, 25 bp, Homo sapien
tactgagtaatggttaggtctgcgc

SEQ ID NO: 5003378 - DNA, 25 bp, Homo sapien
actgagtaatggttaggtctgcgct

SEQ ID NO: 5003379 - DNA, 25 bp, Homo sapien
ctgagtaatggttaggtctgcgctt

SEQ ID NO: 5003380 - DNA, 25 bp, Homo sapien
gcacataaatactgtatgagtctag

SEQ ID NO: 5003381 - DNA, 25 bp, Homo sapien
ggaacattctgtatctcgatctgag

SEQ ID NO: 5003382 - DNA, 25 bp, Homo sapien
tatgagtctagatataaaaagttca

SEQ ID NO: 5003383 - DNA, 25 bp, Homo sapien
ggatgtgtcaaagacaaagaggtct

SEQ ID NO: 5003384 - DNA, 25 bp, Homo sapien
gagaaagtcaacactataaactgtg

SEQ ID NO: 5003385 - DNA, 25 bp, Homo sapien
tgcacaatgcccaaggtcaattaga

SEQ ID NO: 5003386 - DNA, 25 bp, Homo sapien
ctgcaacaaatacagggccctcatg

SEQ ID NO: 5003387 - DNA, 25 bp, Homo sapien
aactgagctctgcttggtaaatgaa

SEQ ID NO: 5003388 - DNA, 25 bp, Homo sapien
ctctgattgtacatgccccgaaagt

SEQ ID NO: 5003389 - DNA, 25 bp, Homo sapien
caggctctccccttttcatagcaag

SEQ ID NO: 5003390 - DNA, 25 bp, Homo sapien
agttccacagttggagttatactgc

SEQ ID NO: 5003391 - DNA, 25 bp, Homo sapien
ttttcatagcaagcccattcagttc

SEQ ID NO: 5003392 - DNA, 25 bp, Homo sapien
caaaggtgccactacactgcagagg

SEQ ID NO: 5003393 - DNA, 25 bp, Homo sapien
cccagatggttcagaaatgctatca

SEQ ID NO: 5003394 - DNA, 25 bp, Homo sapien
caagactggatctttcctccacaga

SEQ ID NO: 5003395 - DNA, 25 bp, Homo sapien
cggtgtccgtgtccttaagaaatat

SEQ ID NO: 5003396 - DNA, 25 bp, Homo sapien
gaggatgtggacagctctcataccg

SEQ ID NO: 5003397 - DNA, 25 bp, Homo sapien
gaatatgtaagaaccctgtaagcca

SEQ ID NO: 5003398 - DNA, 25 bp, Homo sapien
aatgagctatcacaagagtctactg

SEQ ID NO: 5003399 - DNA, 25 bp, Homo sapien
ttacaacagagcctagcctaatgcc

SEQ ID NO: 5003400 - DNA, 25 bp, Homo sapien
cacagtgagaaagacttctagctga

SEQ ID NO: 5003401 - DNA, 25 bp, Homo sapien
tgaatgcaaattttcctgggcagaa

SEQ ID NO: 5003402 - DNA, 25 bp, Homo sapien
gctgaacgctgtcataattttgact

SEQ ID NO: 5003403 - DNA, 25 bp, Homo sapien
gcaggaagacttctagcctagggca

SEQ ID NO: 5003404 - DNA, 25 bp, Homo sapien
gaactggtttgggaagcgtagattc

SEQ ID NO: 5003405 - DNA, 25 bp, Homo sapien
gcgtagattcagtcaaagctttatt

SEQ ID NO: 5003406 - DNA, 25 bp, Homo sapien
tttattggcaacagcctgctgagcc

SEQ ID NO: 5003407 - DNA, 25 bp, Homo sapien
aagctttattggcaacagcctgctg

SEQ ID NO: 5003408 - DNA, 25 bp, Homo sapien
atcaacaccagacttgttctacaag

SEQ ID NO: 5003409 - DNA, 25 bp, Homo sapien
gaaacgggctaactcatttaccaga

SEQ ID NO: 5003410 - DNA, 25 bp, Homo sapien
gttggactctattgaaacgggctaa

SEQ ID NO: 5003411 - DNA, 25 bp, Homo sapien
gggctaactcatttaccagacacat

SEQ ID NO: 5003412 - DNA, 25 bp, Homo sapien
gcaggccctctttcattcagaagtt

SEQ ID NO: 5003413 - DNA, 25 bp, Homo sapien
gcagttttctcttttgggtttgcca

SEQ ID NO: 5003414 - DNA, 25 bp, Homo sapien
tgcagttttctcttttgggtttgcc

SEQ ID NO: 5003415 - DNA, 25 bp, Homo sapien
cagttttctcttttgggtttgccat

SEQ ID NO: 5003416 - DNA, 25 bp, Homo sapien
ttttacagagtattgatgtatgtgg

SEQ ID NO: 5003417 - DNA, 25 bp, Homo sapien
caatattgcaccagtttttttatcc

SEQ ID NO: 5003418 - DNA, 25 bp, Homo sapien
ggttctagactcacataaatggtat

SEQ ID NO: 5003419 - DNA, 25 bp, Homo sapien
tcactcttcattgtgttctcaagac

SEQ ID NO: 5003420 - DNA, 25 bp, Homo sapien
caaattcagcctttaaactggagtg

SEQ ID NO: 5003421 - DNA, 25 bp, Homo sapien
catatggttaggtttgattctatca

SEQ ID NO: 5003422 - DNA, 25 bp, Homo sapien
caagttgcttttgactaggttacca

SEQ ID NO: 5003423 - DNA, 25 bp, Homo sapien
cagtttatcgttgcaaatgttttgg

SEQ ID NO: 5003424 - DNA, 25 bp, Homo sapien
gatgcttccccagtttgcttgctta

SEQ ID NO: 5003425 - DNA, 25 bp, Homo sapien
ggtccaatcgacataaacaagtgtt

SEQ ID NO: 5003426 - DNA, 25 bp, Homo sapien
tcatcaataggtccttggaagctgc

SEQ ID NO: 5003427 - DNA, 25 bp, Homo sapien
tggaagctgcaacttcaagtgaaac

SEQ ID NO: 5003428 - DNA, 25 bp, Homo sapien
tacccattttatatcctacataggc

SEQ ID NO: 5003429 - DNA, 25 bp, Homo sapien
gagtcttgctcttctatacaatctg

SEQ ID NO: 5003430 - DNA, 25 bp, Homo sapien
aggacctaacaccatcataagtcaa

SEQ ID NO: 5003431 - DNA, 25 bp, Homo sapien
gactagaatgcaatgaagactataa

SEQ ID NO: 5003432 - DNA, 25 bp, Homo sapien
taattacacgtcttaggccactcga

SEQ ID NO: 5003433 - DNA, 25 bp, Homo sapien
ttgacttcttaccatcatctacagg

SEQ ID NO: 5003434 - DNA, 25 bp, Homo sapien
gaactggagacttattctaactgaa

SEQ ID NO: 5003435 - DNA, 25 bp, Homo sapien
tattcaagcccactgatgtgtgtct

SEQ ID NO: 5003436 - DNA, 25 bp, Homo sapien
tttgtttaaggtcagtagtaatgtc

SEQ ID NO: 5003437 - DNA, 25 bp, Homo sapien
gctcaagtaatcttagtttgggagg

SEQ ID NO: 5003438 - DNA, 25 bp, Homo sapien
ctaatctgtgcataaaattgctcac

SEQ ID NO: 5003439 - DNA, 25 bp, Homo sapien
tagtaatgtccccacactcacgtct

SEQ ID NO: 5003440 - DNA, 25 bp, Homo sapien
caatttccagtcaggcagcaatagc

SEQ ID NO: 5003441 - DNA, 25 bp, Homo sapien
gatctacctaaatgtctgccgtctg

SEQ ID NO: 5003442 - DNA, 25 bp, Homo sapien
ccatggtgtaaatatcgggatgccg

SEQ ID NO: 5003443 - DNA, 25 bp, Homo sapien
ggttctgctactccttcgacacgga

SEQ ID NO: 5003444 - DNA, 25 bp, Homo sapien
caactatgatcacaatttaaaggca

SEQ ID NO: 5003445 - DNA, 25 bp, Homo sapien
taaaggcagaaaagtgctattatct

SEQ ID NO: 5003446 - DNA, 25 bp, Homo sapien
tacagtaagcataagttgcacatgg

SEQ ID NO: 5003447 - DNA, 25 bp, Homo sapien
taacagaacatggaacatccatgtt

SEQ ID NO: 5003448 - DNA, 25 bp, Homo sapien
tgttatgagaaagtggttgcccaga

SEQ ID NO: 5003449 - DNA, 25 bp, Homo sapien
ccaggcactgtgtacgatttctagc

SEQ ID NO: 5003450 - DNA, 25 bp, Homo sapien
aacatccagggaattgcttgtggcc

SEQ ID NO: 5003451 - DNA, 25 bp, Homo sapien
tcaacatgacctgcaacatagccag

SEQ ID NO: 5003452 - DNA, 25 bp, Homo sapien
tcagtgccctggaaagtgaacttta

SEQ ID NO: 5003453 - DNA, 25 bp, Homo sapien
catgatcataagcattctgaacaca

SEQ ID NO: 5003454 - DNA, 25 bp, Homo sapien
gcagaactgccacctactgaagctg

SEQ ID NO: 5003455 - DNA, 25 bp, Homo sapien
caatgttctatttgatcgggaaagg

SEQ ID NO: 5003456 - DNA, 25 bp, Homo sapien
gctgtatccctcacggctccaaaaa

SEQ ID NO: 5003457 - DNA, 25 bp, Homo sapien
caatattgaccaaactgctgtatcc

SEQ ID NO: 5003458 - DNA, 25 bp, Homo sapien
gttaagacaatattgaccaaactgc

SEQ ID NO: 5003459 - DNA, 25 bp, Homo sapien
tgctgtatccctcacggctccaaaa

SEQ ID NO: 5003460 - DNA, 25 bp, Homo sapien
gccttggttcaaattactttgtgta

SEQ ID NO: 5003461 - DNA, 25 bp, Homo sapien
caaattactttgtgtatctttgagt

SEQ ID NO: 5003462 - DNA, 25 bp, Homo sapien
tctgagccttggttcaaattacttt

SEQ ID NO: 5003463 - DNA, 25 bp, Homo sapien
aattactttgtgtatctttgagttc

SEQ ID NO: 5003464 - DNA, 25 bp, Homo sapien
aactgtggtgccctttggagaggcc

SEQ ID NO: 5003465 - DNA, 25 bp, Homo sapien
atgtgactgcaaccccaactgacag

SEQ ID NO: 5003466 - DNA, 25 bp, Homo sapien
gcaagagccacatgaatgagttcag

SEQ ID NO: 5003467 - DNA, 25 bp, Homo sapien
acctcttttatgagccacaggcacc

SEQ ID NO: 5003468 - DNA, 25 bp, Homo sapien
gaataaccactaaagcatctcagtg

SEQ ID NO: 5003469 - DNA, 25 bp, Homo sapien
atcattactggtcgggtgtagtggc

SEQ ID NO: 5003470 - DNA, 25 bp, Homo sapien
tctcagtgacttagtgtcccttgct

SEQ ID NO: 5003471 - DNA, 25 bp, Homo sapien
gcttgtaactcagcactccgggagg

SEQ ID NO: 5003472 - DNA, 25 bp, Homo sapien
gctgaggcagaagaaataaatgctt

SEQ ID NO: 5003473 - DNA, 25 bp, Homo sapien
tagctgggcatagtaacacatgcct

SEQ ID NO: 5003474 - DNA, 25 bp, Homo sapien
actccagtccaggtgacagagcaag

SEQ ID NO: 5003475 - DNA, 25 bp, Homo sapien
gtaatcccagctactcgggaggctg

SEQ ID NO: 5003476 - DNA, 25 bp, Homo sapien
cacaaaagtttccagctacagttga

SEQ ID NO: 5003477 - DNA, 25 bp, Homo sapien
tgtatccatgcgtcccaaaaatgcc

SEQ ID NO: 5003478 - DNA, 25 bp, Homo sapien
caactaagcgcttttagagaaatgt

SEQ ID NO: 5003479 - DNA, 25 bp, Homo sapien
tggcgaacacggcaaaatcgtctct

SEQ ID NO: 5003480 - DNA, 25 bp, Homo sapien
gaaaacagaagtcttacgccacaaa

SEQ ID NO: 5003481 - DNA, 25 bp, Homo sapien
catcttgggatgtaggcattatctc

SEQ ID NO: 5003482 - DNA, 25 bp, Homo sapien
tatacgctaggtgccacattttgcc

SEQ ID NO: 5003483 - DNA, 25 bp, Homo sapien
cacattgctaggtttagaacggttc

SEQ ID NO: 5003484 - DNA, 25 bp, Homo sapien
gaaacacaggatgcatcagaagcca

SEQ ID NO: 5003485 - DNA, 25 bp, Homo sapien
ggctcgaccccgaagagactagagt

SEQ ID NO: 5003486 - DNA, 25 bp, Homo sapien
gacttgacttgaaaccatagcagga

SEQ ID NO: 5003487 - DNA, 25 bp, Homo sapien
gaatcccagagtggcgtgcttctca

SEQ ID NO: 5003488 - DNA, 25 bp, Homo sapien
cagcggattccgtaactgagctttg

SEQ ID NO: 5003489 - DNA, 25 bp, Homo sapien
ggcaaggtcactaccgccaactacc

SEQ ID NO: 5003490 - DNA, 25 bp, Homo sapien
ccatcacggtaggagttcgtaacag

SEQ ID NO: 5003491 - DNA, 25 bp, Homo sapien
ccctttaagccgagccatcacggta

SEQ ID NO: 5003492 - DNA, 25 bp, Homo sapien
cgggttccccgtgctgcggaactgc

SEQ ID NO: 5003493 - DNA, 25 bp, Homo sapien
cccgagagcccgatgtgggagggaa

SEQ ID NO: 5003494 - DNA, 25 bp, Homo sapien
tgccttcttcgccggcggcgcggaa

SEQ ID NO: 5003495 - DNA, 25 bp, Homo sapien
tcggcaagttacgtctttaccacta

SEQ ID NO: 5003496 - DNA, 25 bp, Homo sapien
cttcttgccggggacactttgcaga

SEQ ID NO: 5003497 - DNA, 25 bp, Homo sapien
gacactttgcagacggctccaacat

SEQ ID NO: 5003498 - DNA, 25 bp, Homo sapien
tttgcagacggctccaacattggca

SEQ ID NO: 5003499 - DNA, 25 bp, Homo sapien
gggacactttgcagacggctccaac

SEQ ID NO: 5003500 - DNA, 25 bp, Homo sapien
ctgcaactcggcaacttccttcccc

SEQ ID NO: 5003501 - DNA, 25 bp, Homo sapien
gcaacttccttccccgcccgactga

SEQ ID NO: 5003502 - DNA, 25 bp, Homo sapien
tgcaactcggcaacttccttccccg

SEQ ID NO: 5003503 - DNA, 25 bp, Homo sapien
gcaactcggcaacttccttccccgc

SEQ ID NO: 5003504 - DNA, 25 bp, Homo sapien
ctgtgctctgattccccgctcgtac

SEQ ID NO: 5003505 - DNA, 25 bp, Homo sapien
tgctctttctggtccgcaccctgtg

SEQ ID NO: 5003506 - DNA, 25 bp, Homo sapien
accctgtgctctgattccccgctcg

SEQ ID NO: 5003507 - DNA, 25 bp, Homo sapien
tttctggtccgcaccctgtgctctg

SEQ ID NO: 5003508 - DNA, 25 bp, Homo sapien
cacggtttagcggatcttgcacctt

SEQ ID NO: 5003509 - DNA, 25 bp, Homo sapien
cgctgtgcaacgcacggtttagcgg

SEQ ID NO: 5003510 - DNA, 25 bp, Homo sapien
aggctctccggctgcccctctgtgc

SEQ ID NO: 5003511 - DNA, 25 bp, Homo sapien
gggacgcgcgaccatcccgcgtctg

SEQ ID NO: 5003512 - DNA, 25 bp, Homo sapien
cctgtttctgggacatgctgtagct

SEQ ID NO: 5003513 - DNA, 25 bp, Homo sapien
ctggaagtgggccatgatctcagtg

SEQ ID NO: 5003514 - DNA, 25 bp, Homo sapien
ttctgggacatgctgtagctggaag

SEQ ID NO: 5003515 - DNA, 25 bp, Homo sapien
tgtagctggaagtgggccatgatct

SEQ ID NO: 5003516 - DNA, 25 bp, Homo sapien
cccacctcagccactcaaagtgctg

SEQ ID NO: 5003517 - DNA, 25 bp, Homo sapien
ctcagccactcaaagtgctggaatc

SEQ ID NO: 5003518 - DNA, 25 bp, Homo sapien
ccacctcagccactcaaagtgctgg

SEQ ID NO: 5003519 - DNA, 25 bp, Homo sapien
acctcagccactcaaagtgctggaa

SEQ ID NO: 5003520 - DNA, 25 bp, Homo sapien
aaaacagaaatggtctagtctttgc

SEQ ID NO: 5003521 - DNA, 25 bp, Homo sapien
aacagaaatggtctagtctttgctg

SEQ ID NO: 5003522 - DNA, 25 bp, Homo sapien
acctgaacaatagagcaaccctgtc

SEQ ID NO: 5003523 - DNA, 25 bp, Homo sapien
actccaacctgaacaatagagcaac

SEQ ID NO: 5003524 - DNA, 25 bp, Homo sapien
ccctggctgtagaggtgtgatatca

SEQ ID NO: 5003525 - DNA, 25 bp, Homo sapien
cacagcgtccgcctaatttttggat

SEQ ID NO: 5003526 - DNA, 25 bp, Homo sapien
attctccctggctgtagaggtgtga

SEQ ID NO: 5003527 - DNA, 25 bp, Homo sapien
tggctgtagaggtgtgatatcagct

SEQ ID NO: 5003528 - DNA, 25 bp, Homo sapien
tagggtctgtcccaagcctctcttt

SEQ ID NO: 5003529 - DNA, 25 bp, Homo sapien
agactgagagggtagggtctgtccc

SEQ ID NO: 5003530 - DNA, 25 bp, Homo sapien
ggtctgtcccaagcctctctttggt

SEQ ID NO: 5003531 - DNA, 25 bp, Homo sapien
gagggtagggtctgtcccaagcctc

SEQ ID NO: 5003532 - DNA, 25 bp, Homo sapien
tacatcaccccatgactgcatggtc

SEQ ID NO: 5003533 - DNA, 25 bp, Homo sapien
aacacatcttattggaggacatgat

SEQ ID NO: 5003534 - DNA, 25 bp, Homo sapien
ggattaaggccacattctacttcgg

SEQ ID NO: 5003535 - DNA, 25 bp, Homo sapien
caaatagggtcacaatttgaggtac

SEQ ID NO: 5003536 - DNA, 25 bp, Homo sapien
aatccgtaatagatagtatgaaggc

SEQ ID NO: 5003537 - DNA, 25 bp, Homo sapien
tccgtaatagatagtatgaaggcag

SEQ ID NO: 5003538 - DNA, 25 bp, Homo sapien
caatccgtaatagatagtatgaagg

SEQ ID NO: 5003539 - DNA, 25 bp, Homo sapien
tcaatccgtaatagatagtatgaag

SEQ ID NO: 5003540 - DNA, 25 bp, Homo sapien
gcaatcttcacaccttagtttccag

SEQ ID NO: 5003541 - DNA, 25 bp, Homo sapien
cttcacaccttagtttccagctact

SEQ ID NO: 5003542 - DNA, 25 bp, Homo sapien
tcttcacaccttagtttccagctac

SEQ ID NO: 5003543 - DNA, 25 bp, Homo sapien
aatcttcacaccttagtttccagct

SEQ ID NO: 5003544 - DNA, 25 bp, Homo sapien
gctatattcactcagcataaccgag

SEQ ID NO: 5003545 - DNA, 25 bp, Homo sapien
tatggagagttgcttatctgttcac

SEQ ID NO: 5003546 - DNA, 25 bp, Homo sapien
gatgtatgctttttggcctggctat

SEQ ID NO: 5003547 - DNA, 25 bp, Homo sapien
gacatatacctctgtgaaaccaaga

SEQ ID NO: 5003548 - DNA, 25 bp, Homo sapien
catcctgcagtttgtcatgttccct

SEQ ID NO: 5003549 - DNA, 25 bp, Homo sapien
cctgcagtttgtcatgttccctgaa

SEQ ID NO: 5003550 - DNA, 25 bp, Homo sapien
gcagtttgtcatgttccctgaattc

SEQ ID NO: 5003551 - DNA, 25 bp, Homo sapien
ctcatcctgcagtttgtcatgttcc

SEQ ID NO: 5003552 - DNA, 25 bp, Homo sapien
caggtagaaacgcagatcatgaaca

SEQ ID NO: 5003553 - DNA, 25 bp, Homo sapien
caaggtttgtggacagctgaagagc

SEQ ID NO: 5003554 - DNA, 25 bp, Homo sapien
tactaggtactgtgtgctacgtgct

SEQ ID NO: 5003555 - DNA, 25 bp, Homo sapien
ggaagaacattagcagacggcagtg

SEQ ID NO: 5003556 - DNA, 25 bp, Homo sapien
caacaggacagataaccacagtggc

SEQ ID NO: 5003557 - DNA, 25 bp, Homo sapien
cataatccacttaactgtaaagggc

SEQ ID NO: 5003558 - DNA, 25 bp, Homo sapien
taagtccctgaaggccagatacaga

SEQ ID NO: 5003559 - DNA, 25 bp, Homo sapien
gacataaacagagtcacttatccag

SEQ ID NO: 5003560 - DNA, 25 bp, Homo sapien
gaaaacactcagtctttagttggga

SEQ ID NO: 5003561 - DNA, 25 bp, Homo sapien
taagcaagtgcctgggtctccattt

SEQ ID NO: 5003562 - DNA, 25 bp, Homo sapien
tccagaagttcttagagtatgccct

SEQ ID NO: 5003563 - DNA, 25 bp, Homo sapien
gaagttcaggaacatcggactcacg

SEQ ID NO: 5003564 - DNA, 25 bp, Homo sapien
tcttaaatcggcaaacagacgaggc

SEQ ID NO: 5003565 - DNA, 25 bp, Homo sapien
acttagaatcgttgtaggaccatcc

SEQ ID NO: 5003566 - DNA, 25 bp, Homo sapien
tcaactttcaggatagagagctaag

SEQ ID NO: 5003567 - DNA, 25 bp, Homo sapien
cccagagagtgtatgtgccaaggac

SEQ ID NO: 5003568 - DNA, 25 bp, Homo sapien
aaatagtgtttaggcagtagggctc

SEQ ID NO: 5003569 - DNA, 25 bp, Homo sapien
tagtgccccacgaggaaatgcaggg

SEQ ID NO: 5003570 - DNA, 25 bp, Homo sapien
tgatggctagcaggaagttaacaga

SEQ ID NO: 5003571 - DNA, 25 bp, Homo sapien
tgtaggcctatgtcgcaaatagtgc

SEQ ID NO: 5003572 - DNA, 25 bp, Homo sapien
tgccggcaatgaacgtaccaaaacc

SEQ ID NO: 5003573 - DNA, 25 bp, Homo sapien
tattgcacaatacatgaggacctgg

SEQ ID NO: 5003574 - DNA, 25 bp, Homo sapien
caccatagggataacatactgtacc

SEQ ID NO: 5003575 - DNA, 25 bp, Homo sapien
cagtaagttcatttcataggcccta

SEQ ID NO: 5003576 - DNA, 25 bp, Homo sapien
ccagcgatcaacatgcgcccagaat

SEQ ID NO: 5003577 - DNA, 25 bp, Homo sapien
tggactgaaccagcgatcaacatgc

SEQ ID NO: 5003578 - DNA, 25 bp, Homo sapien
catgcgcccagaatgcacacgagta

SEQ ID NO: 5003579 - DNA, 25 bp, Homo sapien
tcaacatgcgcccagaatgcacacg

SEQ ID NO: 5003580 - DNA, 25 bp, Homo sapien
ctgctaggaggatgataacagtggc

SEQ ID NO: 5003581 - DNA, 25 bp, Homo sapien
ttctcagtaggactatcttctgcta

SEQ ID NO: 5003582 - DNA, 25 bp, Homo sapien
agtaggactatcttctgctaggagg

SEQ ID NO: 5003583 - DNA, 25 bp, Homo sapien
tcagtaggactatcttctgctagga

SEQ ID NO: 5003584 - DNA, 25 bp, Homo sapien
cagtgccatgctatttaacacagaa

SEQ ID NO: 5003585 - DNA, 25 bp, Homo sapien
catagtcaggatgtatcaatcttaa

SEQ ID NO: 5003586 - DNA, 25 bp, Homo sapien
cctgtgaatacaaagtgcaatatat

SEQ ID NO: 5003587 - DNA, 25 bp, Homo sapien
tattttatgggcaacaagttcacat

SEQ ID NO: 5003588 - DNA, 25 bp, Homo sapien
atcaacagggacttgcgggactacg

SEQ ID NO: 5003589 - DNA, 25 bp, Homo sapien
aatgatctgtaacagctagatcaac

SEQ ID NO: 5003590 - DNA, 25 bp, Homo sapien
cagctagatcaacagggacttgcgg

SEQ ID NO: 5003591 - DNA, 25 bp, Homo sapien
ttgcgggactacgaatccatgatgg

SEQ ID NO: 5003592 - DNA, 25 bp, Homo sapien
atgaagaagcggcttagtgtttggt

SEQ ID NO: 5003593 - DNA, 25 bp, Homo sapien
taaaggagtttctgacactcaagga

SEQ ID NO: 5003594 - DNA, 25 bp, Homo sapien
gcatgaagaagcggcttagtgtttg

SEQ ID NO: 5003595 - DNA, 25 bp, Homo sapien
tgaagaagcggcttagtgtttggtc

SEQ ID NO: 5003596 - DNA, 25 bp, Homo sapien
tcttgttacatgttcgcacataaaa

SEQ ID NO: 5003597 - DNA, 25 bp, Homo sapien
tacatgttcgcacataaaaagaatt

SEQ ID NO: 5003598 - DNA, 25 bp, Homo sapien
tggattcttgttacatgttcgcaca

SEQ ID NO: 5003599 - DNA, 25 bp, Homo sapien
cataaaaagaattatccggtggtcg

SEQ ID NO: 5003600 - DNA, 25 bp, Homo sapien
tatagtctttaagcgtaacaggaac

SEQ ID NO: 5003601 - DNA, 25 bp, Homo sapien
ctttctatagtctttaagcgtaaca

SEQ ID NO: 5003602 - DNA, 25 bp, Homo sapien
gaaggccttgtacccacaaactgct

SEQ ID NO: 5003603 - DNA, 25 bp, Homo sapien
cgtaacaggaacatagaaggccttg

SEQ ID NO: 5003604 - DNA, 25 bp, Homo sapien
gacaaactgattggactgagagcgc

SEQ ID NO: 5003605 - DNA, 25 bp, Homo sapien
taagacaaactgattggactgagag

SEQ ID NO: 5003606 - DNA, 25 bp, Homo sapien
atgctaagacaaactgattggactg

SEQ ID NO: 5003607 - DNA, 25 bp, Homo sapien
aaactgattggactgagagcgctgg

SEQ ID NO: 5003608 - DNA, 25 bp, Homo sapien
atggataaacagatatgaccattgc

SEQ ID NO: 5003609 - DNA, 25 bp, Homo sapien
tgctataaacatgaggatgaacagg

SEQ ID NO: 5003610 - DNA, 25 bp, Homo sapien
gatgaacaggaatattttcaccagt

SEQ ID NO: 5003611 - DNA, 25 bp, Homo sapien
acagatatgaccattgctataaaca

SEQ ID NO: 5003612 - DNA, 25 bp, Homo sapien
caagtgctaatgctacagagtttca

SEQ ID NO: 5003613 - DNA, 25 bp, Homo sapien
tggttctagccactttcccagggca

SEQ ID NO: 5003614 - DNA, 25 bp, Homo sapien
taacgtattactggcctcagagtag

SEQ ID NO: 5003615 - DNA, 25 bp, Homo sapien
ttttactgccctagaggactggttc

SEQ ID NO: 5003616 - DNA, 25 bp, Homo sapien
tatgattacaccacagcataggtag

SEQ ID NO: 5003617 - DNA, 25 bp, Homo sapien
cataggtagatgacaaagggagact

SEQ ID NO: 5003618 - DNA, 25 bp, Homo sapien
ctatgattacaccacagcataggta

SEQ ID NO: 5003619 - DNA, 25 bp, Homo sapien
acagcataggtagatgacaaaggga

SEQ ID NO: 5003620 - DNA, 25 bp, Homo sapien
aagcaacaaaagtgatgacaatctt

SEQ ID NO: 5003621 - DNA, 25 bp, Homo sapien
cattgaacttagttgaaggtagaca

SEQ ID NO: 5003622 - DNA, 25 bp, Homo sapien
ttgaaggtagacaaataggctgatg

SEQ ID NO: 5003623 - DNA, 25 bp, Homo sapien
agactgagatcctgttgtctccaca

SEQ ID NO: 5003624 - DNA, 25 bp, Homo sapien
ctgaggagagtcaaaaggatatcga

SEQ ID NO: 5003625 - DNA, 25 bp, Homo sapien
atataaggtacctggtgcaccttcc

SEQ ID NO: 5003626 - DNA, 25 bp, Homo sapien
tcaaaaggatatcgactactaaatt

SEQ ID NO: 5003627 - DNA, 25 bp, Homo sapien
ccttcatataaggtacctggtgcac

SEQ ID NO: 5003628 - DNA, 25 bp, Homo sapien
aaagttaagatatgttcattgtaga

SEQ ID NO: 5003629 - DNA, 25 bp, Homo sapien
tgtttcctataccatcgaagcctat

SEQ ID NO: 5003630 - DNA, 25 bp, Homo sapien
cccagtgataaccactgttaaagtt

SEQ ID NO: 5003631 - DNA, 25 bp, Homo sapien
taaaccatcagggtttatgattcca

SEQ ID NO: 5003632 - DNA, 25 bp, Homo sapien
tagaagatggcacaaaggtaaaaat

SEQ ID NO: 5003633 - DNA, 25 bp, Homo sapien
tcatcatcctcgttatggatcttcc

SEQ ID NO: 5003634 - DNA, 25 bp, Homo sapien
tttttgtacccatcagaaagcttct

SEQ ID NO: 5003635 - DNA, 25 bp, Homo sapien
ttttatagcctagaagatggcacaa

SEQ ID NO: 5003636 - DNA, 25 bp, Homo sapien
tgttcttaaagctttgacccctgtc

SEQ ID NO: 5003637 - DNA, 25 bp, Homo sapien
tgaattggctcatttgtcctacaag

SEQ ID NO: 5003638 - DNA, 25 bp, Homo sapien
gacccctgtcttaggtactgataca

SEQ ID NO: 5003639 - DNA, 25 bp, Homo sapien
tttgttgcccttctgtacaggacgc

SEQ ID NO: 5003640 - DNA, 25 bp, Homo sapien
tctcatttaaggtcattccaggagg

SEQ ID NO: 5003641 - DNA, 25 bp, Homo sapien
ttgaacactcttctcatttaaggtc

SEQ ID NO: 5003642 - DNA, 25 bp, Homo sapien
gcaaagccaacagttctttctgtag

SEQ ID NO: 5003643 - DNA, 25 bp, Homo sapien
gtcattttgcaaagccaacagttct

SEQ ID NO: 5003644 - DNA, 25 bp, Homo sapien
agcagccaccagagcctcaagagca

SEQ ID NO: 5003645 - DNA, 25 bp, Homo sapien
agtaatagtagttctggcagcagcc

SEQ ID NO: 5003646 - DNA, 25 bp, Homo sapien
gcacagccaaatgggtggctttcct

SEQ ID NO: 5003647 - DNA, 25 bp, Homo sapien
ggctttcctggagaatctgctggaa

SEQ ID NO: 5003648 - DNA, 25 bp, Homo sapien
ccctcctcctgagacaacctggtgg

SEQ ID NO: 5003649 - DNA, 25 bp, Homo sapien
caatgtggcatatgtactggagaag

SEQ ID NO: 5003650 - DNA, 25 bp, Homo sapien
gaaagcaacagggtggtagcagaac

SEQ ID NO: 5003651 - DNA, 25 bp, Homo sapien
catgcagtgatctccttgggacagt

SEQ ID NO: 5003652 - DNA, 25 bp, Homo sapien
gatcagctagatgcggagtacagaa

SEQ ID NO: 5003653 - DNA, 25 bp, Homo sapien
tacatgtaccttaaacctgcttggc

SEQ ID NO: 5003654 - DNA, 25 bp, Homo sapien
gacagaacaaaacaacggaaccagc

SEQ ID NO: 5003655 - DNA, 25 bp, Homo sapien
tccaagaggcaaagagtttactacc

SEQ ID NO: 5003656 - DNA, 25 bp, Homo sapien
taagattagttttggacctgaccag

SEQ ID NO: 5003657 - DNA, 25 bp, Homo sapien
tcaaagattctgatatatataaatt

SEQ ID NO: 5003658 - DNA, 25 bp, Homo sapien
gctaccttcaaagattctgatatat

SEQ ID NO: 5003659 - DNA, 25 bp, Homo sapien
caaagattctgatatatataaatta

SEQ ID NO: 5003660 - DNA, 25 bp, Homo sapien
accttcaaagattctgatatatata

SEQ ID NO: 5003661 - DNA, 25 bp, Homo sapien
gactgataacgccaccttcaaaagg

SEQ ID NO: 5003662 - DNA, 25 bp, Homo sapien
gaaggtgccattctggactactgaa

SEQ ID NO: 5003663 - DNA, 25 bp, Homo sapien
ggtgaaaaatctacagccagggtct

SEQ ID NO: 5003664 - DNA, 25 bp, Homo sapien
tgtgaagatacagtcagaaggtgcc

SEQ ID NO: 5003665 - DNA, 25 bp, Homo sapien
gtgaacagtgctgtatatggtctgt

SEQ ID NO: 5003666 - DNA, 25 bp, Homo sapien
aacagtgctgtatatggtctgtaag

SEQ ID NO: 5003667 - DNA, 25 bp, Homo sapien
cagtgctgtatatggtctgtaagtg

SEQ ID NO: 5003668 - DNA, 25 bp, Homo sapien
gaacagtgctgtatatggtctgtaa

SEQ ID NO: 5003669 - DNA, 25 bp, Homo sapien
tgactgcacaggtggttggcttcct

SEQ ID NO: 5003670 - DNA, 25 bp, Homo sapien
taggtttccagttaacagtaagcta

SEQ ID NO: 5003671 - DNA, 25 bp, Homo sapien
gaagaatctgaagtaaagctctgtc

SEQ ID NO: 5003672 - DNA, 25 bp, Homo sapien
gctctgtcatcatgcaaaagctgta

SEQ ID NO: 5003673 - DNA, 25 bp, Homo sapien
aatcactgagctcataactgagcct

SEQ ID NO: 5003674 - DNA, 25 bp, Homo sapien
aactgagcctatggaaccgccccat

SEQ ID NO: 5003675 - DNA, 25 bp, Homo sapien
gctcataactgagcctatggaaccg

SEQ ID NO: 5003676 - DNA, 25 bp, Homo sapien
actgagctcataactgagcctatgg

SEQ ID NO: 5003677 - DNA, 25 bp, Homo sapien
ccaatttacataattggcacaccta

SEQ ID NO: 5003678 - DNA, 25 bp, Homo sapien
ttacataattggcacacctaaattc

SEQ ID NO: 5003679 - DNA, 25 bp, Homo sapien
taattggcacacctaaattcctgca

SEQ ID NO: 5003680 - DNA, 25 bp, Homo sapien
cataattggcacacctaaattcctg

SEQ ID NO: 5003681 - DNA, 25 bp, Homo sapien
gctctctacaaagttgtggcaaaca

SEQ ID NO: 5003682 - DNA, 25 bp, Homo sapien
tcttcaaccaatcaaaagtaacttg

SEQ ID NO: 5003683 - DNA, 25 bp, Homo sapien
cattattcacagtagttaagctctc

SEQ ID NO: 5003684 - DNA, 25 bp, Homo sapien
tatggaatccatggttagaggaaat

SEQ ID NO: 5003685 - DNA, 25 bp, Homo sapien
atacttccaccctccttcctgtggt

SEQ ID NO: 5003686 - DNA, 25 bp, Homo sapien
aaccatacttccaccctccttcctg

SEQ ID NO: 5003687 - DNA, 25 bp, Homo sapien
accatacttccaccctccttcctgt

SEQ ID NO: 5003688 - DNA, 25 bp, Homo sapien
catacttccaccctccttcctgtgg

SEQ ID NO: 5003689 - DNA, 25 bp, Homo sapien
cgtcgtatctaactgtcaaggcaac

SEQ ID NO: 5003690 - DNA, 25 bp, Homo sapien
tgttgtaacccttccatactgacat

SEQ ID NO: 5003691 - DNA, 25 bp, Homo sapien
gacatcaacaaacagacgtcgtatc

SEQ ID NO: 5003692 - DNA, 25 bp, Homo sapien
tatgttgtaacccttccatactgac

SEQ ID NO: 5003693 - DNA, 25 bp, Homo sapien
tgacagttaacagtctaagacccag

SEQ ID NO: 5003694 - DNA, 25 bp, Homo sapien
tcttaagacacaacgtaacaggagg

SEQ ID NO: 5003695 - DNA, 25 bp, Homo sapien
taagacccagctaggtaagagagga

SEQ ID NO: 5003696 - DNA, 25 bp, Homo sapien
ttcacaagggtaattcaactgacca

SEQ ID NO: 5003697 - DNA, 25 bp, Homo sapien
gaatgtccgcgagaataccgaggct

SEQ ID NO: 5003698 - DNA, 25 bp, Homo sapien
gatacccacgggcacaggattaaga

SEQ ID NO: 5003699 - DNA, 25 bp, Homo sapien
tgtatagccttatcgcgaccgcaag

SEQ ID NO: 5003700 - DNA, 25 bp, Homo sapien
tagaaggcaagctatcccgagaggt

SEQ ID NO: 5003701 - DNA, 25 bp, Homo sapien
caagaccggcgaggccagagacgca

SEQ ID NO: 5003702 - DNA, 25 bp, Homo sapien
gagctgccgtgctcgcgtcacgccg

SEQ ID NO: 5003703 - DNA, 25 bp, Homo sapien
ggagctgccgtgctcgcgtcacgcc

SEQ ID NO: 5003704 - DNA, 25 bp, Homo sapien
atccccccaagaccggcgaggccag

SEQ ID NO: 5003705 - DNA, 25 bp, Homo sapien
actgaggagacacggctccagtttt

SEQ ID NO: 5003706 - DNA, 25 bp, Homo sapien
tgaggagacacggctccagttttga

SEQ ID NO: 5003707 - DNA, 25 bp, Homo sapien
tactgaggagacacggctccagttt

SEQ ID NO: 5003708 - DNA, 25 bp, Homo sapien
gaggagacacggctccagttttgac

SEQ ID NO: 5003709 - DNA, 25 bp, Homo sapien
atgctgatgacgtccggttccgcgc

SEQ ID NO: 5003710 - DNA, 25 bp, Homo sapien
ccataaaacttcatgcgcagctgct

SEQ ID NO: 5003711 - DNA, 25 bp, Homo sapien
gatgtgttttccatacctccaagcc

SEQ ID NO: 5003712 - DNA, 25 bp, Homo sapien
cgtgtgtaccgcgaaatgctgatga

SEQ ID NO: 5003713 - DNA, 25 bp, Homo sapien
aggtttccttgtacaacgggatgag

SEQ ID NO: 5003714 - DNA, 25 bp, Homo sapien
cttgtacaacgggatgaggatttaa

SEQ ID NO: 5003715 - DNA, 25 bp, Homo sapien
ggatgaggatttaagagcagaacga

SEQ ID NO: 5003716 - DNA, 25 bp, Homo sapien
gatgaggatttaagagcagaacgac

SEQ ID NO: 5003717 - DNA, 25 bp, Homo sapien
tatgttgtcaaaggaatctgctccc

SEQ ID NO: 5003718 - DNA, 25 bp, Homo sapien
tactggaggtaggtgtcaagtttcc

SEQ ID NO: 5003719 - DNA, 25 bp, Homo sapien
tcccatataatcagcctggccctgt

SEQ ID NO: 5003720 - DNA, 25 bp, Homo sapien
tccattcttctgaggatacaaaagg

SEQ ID NO: 5003721 - DNA, 25 bp, Homo sapien
aattccatggtttgacttgtcccag

SEQ ID NO: 5003722 - DNA, 25 bp, Homo sapien
gaaactctggataagttatgttggg

SEQ ID NO: 5003723 - DNA, 25 bp, Homo sapien
ttggcacttacaccaaacactttaa

SEQ ID NO: 5003724 - DNA, 25 bp, Homo sapien
tatgttgggatcatgggaatcactt

SEQ ID NO: 5003725 - DNA, 25 bp, Homo sapien
agatgggagtatatagagatgctgc

SEQ ID NO: 5003726 - DNA, 25 bp, Homo sapien
ctgggagatgggagtatatagagat

SEQ ID NO: 5003727 - DNA, 25 bp, Homo sapien
gatgggagtatatagagatgctgct

SEQ ID NO: 5003728 - DNA, 25 bp, Homo sapien
gggagtatatagagatgctgcttag

SEQ ID NO: 5003729 - DNA, 25 bp, Homo sapien
gtgttcagtaagccttggtccccac

SEQ ID NO: 5003730 - DNA, 25 bp, Homo sapien
agcaagatgcaacagctgattatat

SEQ ID NO: 5003731 - DNA, 25 bp, Homo sapien
ccttgctcagaagcaagatgcaaca

SEQ ID NO: 5003732 - DNA, 25 bp, Homo sapien
ttcagtaagccttggtccccaccat

SEQ ID NO: 5003733 - DNA, 25 bp, Homo sapien
aaacgaagacttcggaattgaagca

SEQ ID NO: 5003734 - DNA, 25 bp, Homo sapien
gaagacttcggaattgaagcagtca

SEQ ID NO: 5003735 - DNA, 25 bp, Homo sapien
gaaggctgataaacgaagacttcgg

SEQ ID NO: 5003736 - DNA, 25 bp, Homo sapien
gctgataaacgaagacttcggaatt

SEQ ID NO: 5003737 - DNA, 25 bp, Homo sapien
cttgggtctggtcctgctgacaatt

SEQ ID NO: 5003738 - DNA, 25 bp, Homo sapien
ttgggtctggtcctgctgacaattc

SEQ ID NO: 5003739 - DNA, 25 bp, Homo sapien
cttctctctcaaaaagatcatcaat

SEQ ID NO: 5003740 - DNA, 25 bp, Homo sapien
aaagatcatcaatatttgctaggac

SEQ ID NO: 5003741 - DNA, 25 bp, Homo sapien
catccataaatacacattttgaata

SEQ ID NO: 5003742 - DNA, 25 bp, Homo sapien
cgcatccataaatacacattttgaa

SEQ ID NO: 5003743 - DNA, 25 bp, Homo sapien
gagtatccgcatccataaatacaca

SEQ ID NO: 5003744 - DNA, 25 bp, Homo sapien
cagagtatccgcatccataaataca

SEQ ID NO: 5003745 - DNA, 25 bp, Homo sapien
tggagctttgtcagcgtgataccca

SEQ ID NO: 5003746 - DNA, 25 bp, Homo sapien
tgtgtaagcaaccagcagtggagct

SEQ ID NO: 5003747 - DNA, 25 bp, Homo sapien
tttgtcagcgtgatacccaactctg

SEQ ID NO: 5003748 - DNA, 25 bp, Homo sapien
ctgtgtaagcaaccagcagtggagc

SEQ ID NO: 5003749 - DNA, 25 bp, Homo sapien
gagcagaattgtgccgtctgagaca

SEQ ID NO: 5003750 - DNA, 25 bp, Homo sapien
ttagatgagcagaattgtgccgtct

SEQ ID NO: 5003751 - DNA, 25 bp, Homo sapien
gtgccgtctgagacatctaccatga

SEQ ID NO: 5003752 - DNA, 25 bp, Homo sapien
aattgtgccgtctgagacatctacc

SEQ ID NO: 5003753 - DNA, 25 bp, Homo sapien
gagtatgaccagtctcttggtggtc

SEQ ID NO: 5003754 - DNA, 25 bp, Homo sapien
gtggtgagtatgaccagtctcttgg

SEQ ID NO: 5003755 - DNA, 25 bp, Homo sapien
gggtggtgagtatgaccagtctctt

SEQ ID NO: 5003756 - DNA, 25 bp, Homo sapien
ggtgagtatgaccagtctcttggtg

SEQ ID NO: 5003757 - DNA, 25 bp, Homo sapien
cttcatatctgctccaacaagataa

SEQ ID NO: 5003758 - DNA, 25 bp, Homo sapien
ttcatatctgctccaacaagataat

SEQ ID NO: 5003759 - DNA, 25 bp, Homo sapien
tcatatctgctccaacaagataatt

SEQ ID NO: 5003760 - DNA, 25 bp, Homo sapien
gcaagatcagccacaccacttggga

SEQ ID NO: 5003761 - DNA, 25 bp, Homo sapien
tgcaggtaactccaggtaagggtgt

SEQ ID NO: 5003762 - DNA, 25 bp, Homo sapien
gaagattctgactgtgcctggcaaa

SEQ ID NO: 5003763 - DNA, 25 bp, Homo sapien
tcaaatcaacctcgctgaaggctca

SEQ ID NO: 5003764 - DNA, 25 bp, Homo sapien
gcagaatataattcttgtacttgat

SEQ ID NO: 5003765 - DNA, 25 bp, Homo sapien
tattaaaatatgtaccagtatagct

SEQ ID NO: 5003766 - DNA, 25 bp, Homo sapien
catttgtcaccacatggcagaatat

SEQ ID NO: 5003767 - DNA, 25 bp, Homo sapien
taagaagttactaaggcggctctgg

SEQ ID NO: 5003768 - DNA, 25 bp, Homo sapien
tccacctctgagataaagacaatac

SEQ ID NO: 5003769 - DNA, 25 bp, Homo sapien
tatagaccctataatgacaactttg

SEQ ID NO: 5003770 - DNA, 25 bp, Homo sapien
gctcagccatattaagccagtctca

SEQ ID NO: 5003771 - DNA, 25 bp, Homo sapien
cagtgcttctttccccatgcataag

SEQ ID NO: 5003772 - DNA, 25 bp, Homo sapien
tggaagtataatcacaacaagggac

SEQ ID NO: 5003773 - DNA, 25 bp, Homo sapien
gaaatttcaactcatacttggagag

SEQ ID NO: 5003774 - DNA, 25 bp, Homo sapien
tctgcaaaagctgtacctagtaacc

SEQ ID NO: 5003775 - DNA, 25 bp, Homo sapien
taactctagtaatgctaatggcggc

SEQ ID NO: 5003776 - DNA, 25 bp, Homo sapien
aaacaagataatctgctttgcaatg

SEQ ID NO: 5003777 - DNA, 25 bp, Homo sapien
tagttcaactgcatacaggcaacat

SEQ ID NO: 5003778 - DNA, 25 bp, Homo sapien
tgaaaaagttactaactgaactaca

SEQ ID NO: 5003779 - DNA, 25 bp, Homo sapien
aactttatatagttcaactgcatac

SEQ ID NO: 5003780 - DNA, 25 bp, Homo sapien
gccatcagcagttccagtgcaattt

SEQ ID NO: 5003781 - DNA, 25 bp, Homo sapien
tcagcagttccagtgcaatttcagg

SEQ ID NO: 5003782 - DNA, 25 bp, Homo sapien
gcagttccagtgcaatttcaggtgc

SEQ ID NO: 5003783 - DNA, 25 bp, Homo sapien
ccatcagcagttccagtgcaatttc

SEQ ID NO: 5003784 - DNA, 25 bp, Homo sapien
accttgtacgtaaaatacatgcata

SEQ ID NO: 5003785 - DNA, 25 bp, Homo sapien
atgcatactttcgatagcacatgtg

SEQ ID NO: 5003786 - DNA, 25 bp, Homo sapien
ctcattggtttcgttctcagcaaac

SEQ ID NO: 5003787 - DNA, 25 bp, Homo sapien
aattgggaattcaggaatctcggtg

SEQ ID NO: 5003788 - DNA, 25 bp, Homo sapien
gcttctctgtaaaattaatggcctg

SEQ ID NO: 5003789 - DNA, 25 bp, Homo sapien
tgcttctctgtaaaattaatggcct

SEQ ID NO: 5003790 - DNA, 25 bp, Homo sapien
cttctctgtaaaattaatggcctgc

SEQ ID NO: 5003791 - DNA, 25 bp, Homo sapien
cttgcttctctgtaaaattaatggc

SEQ ID NO: 5003792 - DNA, 25 bp, Homo sapien
gcagtgagctgagaccgcaccattg

SEQ ID NO: 5003793 - DNA, 25 bp, Homo sapien
attccagctactctgaggcaggaga

SEQ ID NO: 5003794 - DNA, 25 bp, Homo sapien
tgcctgaacccagcaggcggagatt

SEQ ID NO: 5003795 - DNA, 25 bp, Homo sapien
taattccagctactctgaggcagga

SEQ ID NO: 5003796 - DNA, 25 bp, Homo sapien
tacatggcatcaggtccttcacagc

SEQ ID NO: 5003797 - DNA, 25 bp, Homo sapien
tgcctgatgttaatgcatgttctct

SEQ ID NO: 5003798 - DNA, 25 bp, Homo sapien
atttgacatacatggcatcaggtcc

SEQ ID NO: 5003799 - DNA, 25 bp, Homo sapien
tcaacatggcttttatcgtgcctga

SEQ ID NO: 5003800 - DNA, 25 bp, Homo sapien
caatctggtgaaagctatgttagta

SEQ ID NO: 5003801 - DNA, 25 bp, Homo sapien
ggaccctaagaagactagaatggag

SEQ ID NO: 5003802 - DNA, 25 bp, Homo sapien
tagaatggagttttgccaactctac

SEQ ID NO: 5003803 - DNA, 25 bp, Homo sapien
tgttatgtcatcatcttatgttatg

SEQ ID NO: 5003804 - DNA, 25 bp, Homo sapien
catgactgtgtagtaaacataagct

SEQ ID NO: 5003805 - DNA, 25 bp, Homo sapien
tcatcaagatgtcaccgtaggccac

SEQ ID NO: 5003806 - DNA, 25 bp, Homo sapien
tgatgtggacaactaatttcagtct

SEQ ID NO: 5003807 - DNA, 25 bp, Homo sapien
tgtcacacatgtggtccaacactga

SEQ ID NO: 5003808 - DNA, 25 bp, Homo sapien
attctactttgcttccccaggaact

SEQ ID NO: 5003809 - DNA, 25 bp, Homo sapien
taatgttgcaagagacaagttttca

SEQ ID NO: 5003810 - DNA, 25 bp, Homo sapien
tcatattaagattaatgttgcaaga

SEQ ID NO: 5003811 - DNA, 25 bp, Homo sapien
gattaatgttgcaagagacaagttt

SEQ ID NO: 5003812 - DNA, 25 bp, Homo sapien
attaagattaatgttgcaagagaca

SEQ ID NO: 5003813 - DNA, 25 bp, Homo sapien
gaacttgcaagtaacctctctaatg

SEQ ID NO: 5003814 - DNA, 25 bp, Homo sapien
atttgtttcaggtagcgacagagca

SEQ ID NO: 5003815 - DNA, 25 bp, Homo sapien
gagaagggtcaagaaaatgaaccat

SEQ ID NO: 5003816 - DNA, 25 bp, Homo sapien
cataacacttcaacgcagaaaagga

SEQ ID NO: 5003817 - DNA, 25 bp, Homo sapien
gcaaagatttctcagcagccaggtg

SEQ ID NO: 5003818 - DNA, 25 bp, Homo sapien
taggcaaagatttctcagcagccag

SEQ ID NO: 5003819 - DNA, 25 bp, Homo sapien
tcactgtaggcaaagatttctcagc

SEQ ID NO: 5003820 - DNA, 25 bp, Homo sapien
gagaccagccgggcactccagcctg

SEQ ID NO: 5003821 - DNA, 25 bp, Homo sapien
ttttgaaagtgacatcggtaataaa

SEQ ID NO: 5003822 - DNA, 25 bp, Homo sapien
tgaaagtgacatcggtaataaaatt

SEQ ID NO: 5003823 - DNA, 25 bp, Homo sapien
gatatcatcactctaggatggtttt

SEQ ID NO: 5003824 - DNA, 25 bp, Homo sapien
aaagatatcatcactctaggatggt

SEQ ID NO: 5003825 - DNA, 25 bp, Homo sapien
cctgagtagcctgctaccaagcccg

SEQ ID NO: 5003826 - DNA, 25 bp, Homo sapien
tcctgagtagcctgctaccaagccc

SEQ ID NO: 5003827 - DNA, 25 bp, Homo sapien
ctgagtagcctgctaccaagcccgg

SEQ ID NO: 5003828 - DNA, 25 bp, Homo sapien
tgacacactaaagggccaaaaaata

SEQ ID NO: 5003829 - DNA, 25 bp, Homo sapien
gatttcagccctccatataatgtag

SEQ ID NO: 5003830 - DNA, 25 bp, Homo sapien
tgtatcaagggcctaccatgtgcca

SEQ ID NO: 5003831 - DNA, 25 bp, Homo sapien
tgtcactgcgggagaactaacctaa

SEQ ID NO: 5003832 - DNA, 25 bp, Homo sapien
cattcttagcttgcgggtagtataa

SEQ ID NO: 5003833 - DNA, 25 bp, Homo sapien
tcctcgaggttcacagataagcagt

SEQ ID NO: 5003834 - DNA, 25 bp, Homo sapien
gcagttcacagtaagaggcatgaga

SEQ ID NO: 5003835 - DNA, 25 bp, Homo sapien
gccagatgtggcctgtggttctaac

SEQ ID NO: 5003836 - DNA, 25 bp, Homo sapien
tgtttccttgccattgtatctccag

SEQ ID NO: 5003837 - DNA, 25 bp, Homo sapien
agctgtttccttgccattgtatctc

SEQ ID NO: 5003838 - DNA, 25 bp, Homo sapien
ctgtttccttgccattgtatctcca

SEQ ID NO: 5003839 - DNA, 25 bp, Homo sapien
gctgtttccttgccattgtatctcc

SEQ ID NO: 5003840 - DNA, 25 bp, Homo sapien
ccgcagccgggtccccgcgtactgc

SEQ ID NO: 5003841 - DNA, 25 bp, Homo sapien
agccgggtccccgcgtactgccaca

SEQ ID NO: 5003842 - DNA, 25 bp, Homo sapien
gcagccgggtccccgcgtactgcca

SEQ ID NO: 5003843 - DNA, 25 bp, Homo sapien
cgggtccccgcgtactgccacagcc

SEQ ID NO: 5003844 - DNA, 25 bp, Homo sapien
gaaagaattacttccgctgggtcag

SEQ ID NO: 5003845 - DNA, 25 bp, Homo sapien
gggcagtcgaaagaattacttccgc

SEQ ID NO: 5003846 - DNA, 25 bp, Homo sapien
gtcagagccgctttcggcgacgcgc

SEQ ID NO: 5003847 - DNA, 25 bp, Homo sapien
aattacttccgctgggtcagagccg

SEQ ID NO: 5003848 - DNA, 25 bp, Homo sapien
ggacgcagagtgtgtcgctcacttc

SEQ ID NO: 5003849 - DNA, 25 bp, Homo sapien
cgcagagtgtgtcgctcacttccgt

SEQ ID NO: 5003850 - DNA, 25 bp, Homo sapien
agagtgtgtcgctcacttccgtctg

SEQ ID NO: 5003851 - DNA, 25 bp, Homo sapien
cgaggacgcagagtgtgtcgctcac

SEQ ID NO: 5003852 - DNA, 25 bp, Homo sapien
tcgggagtccgagagagcactgcat

SEQ ID NO: 5003853 - DNA, 25 bp, Homo sapien
gctctcgggagtccgagagagcact

SEQ ID NO: 5003854 - DNA, 25 bp, Homo sapien
ctgtaaagacgcatccttagagagg

SEQ ID NO: 5003855 - DNA, 25 bp, Homo sapien
cctgatccaattgctgtaaagacgc

SEQ ID NO: 5003856 - DNA, 25 bp, Homo sapien
gtcggcgttgggaccgaggcagccc

SEQ ID NO: 5003857 - DNA, 25 bp, Homo sapien
cgtcggcgttgggaccgaggcagcc

SEQ ID NO: 5003858 - DNA, 25 bp, Homo sapien
cgttgggaccgaggcagccctgcat

SEQ ID NO: 5003859 - DNA, 25 bp, Homo sapien
cggcgttgggaccgaggcagccctg

SEQ ID NO: 5003860 - DNA, 25 bp, Homo sapien
tagtgatgccagtgttaagttctga

SEQ ID NO: 5003861 - DNA, 25 bp, Homo sapien
ctttagtgatgccagtgttaagttc

SEQ ID NO: 5003862 - DNA, 25 bp, Homo sapien
aactttagtgatgccagtgttaagt

SEQ ID NO: 5003863 - DNA, 25 bp, Homo sapien
taccaactttagtgatgccagtgtt

SEQ ID NO: 5003864 - DNA, 25 bp, Homo sapien
tctacgagtctgattggccttacat

SEQ ID NO: 5003865 - DNA, 25 bp, Homo sapien
gaaagtgtgcctctgcctattcaaa

SEQ ID NO: 5003866 - DNA, 25 bp, Homo sapien
tcatgggaagctttacggtgatcac

SEQ ID NO: 5003867 - DNA, 25 bp, Homo sapien
tatgcttgcagaaacgagtacagtg

SEQ ID NO: 5003868 - DNA, 25 bp, Homo sapien
gagacttaggagtgtggccagtcac

SEQ ID NO: 5003869 - DNA, 25 bp, Homo sapien
attgggataattgccacatgtgagg

SEQ ID NO: 5003870 - DNA, 25 bp, Homo sapien
gcactgaattccctccaaacgtatg

SEQ ID NO: 5003871 - DNA, 25 bp, Homo sapien
caaacgtatgtctaaaatctctcca

SEQ ID NO: 5003872 - DNA, 25 bp, Homo sapien
ggaactctcataatgcatatatggt

SEQ ID NO: 5003873 - DNA, 25 bp, Homo sapien
tgtctcaccattaccttaagttttc

SEQ ID NO: 5003874 - DNA, 25 bp, Homo sapien
tgctgaacccctccagtgaactttt

SEQ ID NO: 5003875 - DNA, 25 bp, Homo sapien
tgcatatatggttctggttggtggt

SEQ ID NO: 5003876 - DNA, 25 bp, Homo sapien
tatggcaatgctggtagaacactct

SEQ ID NO: 5003877 - DNA, 25 bp, Homo sapien
taataatacttaccacctcaggtgg

SEQ ID NO: 5003878 - DNA, 25 bp, Homo sapien
cactaattgtgtgcctagagccaga

SEQ ID NO: 5003879 - DNA, 25 bp, Homo sapien
gaaagttgtgtaaagcatcatgccc

SEQ ID NO: 5003880 - DNA, 25 bp, Homo sapien
gattttcctgtggagtgtggccaaa

SEQ ID NO: 5003881 - DNA, 25 bp, Homo sapien
cagtgtcagctgatagctttcagtg

SEQ ID NO: 5003882 - DNA, 25 bp, Homo sapien
ggagataaagcatccttcagtgtca

SEQ ID NO: 5003883 - DNA, 25 bp, Homo sapien
ttgagtattatgaagatctgccctg

SEQ ID NO: 5003884 - DNA, 25 bp, Homo sapien
caggctgccagggaatctggcagca

SEQ ID NO: 5003885 - DNA, 25 bp, Homo sapien
tcaggctgccagggaatctggcagc

SEQ ID NO: 5003886 - DNA, 25 bp, Homo sapien
aggctgccagggaatctggcagcac

SEQ ID NO: 5003887 - DNA, 25 bp, Homo sapien
tggccctttctgctgatgacactct

SEQ ID NO: 5003888 - DNA, 25 bp, Homo sapien
gggatggccctttctgctgatgaca

SEQ ID NO: 5003889 - DNA, 25 bp, Homo sapien
gatggccctttctgctgatgacact

SEQ ID NO: 5003890 - DNA, 25 bp, Homo sapien
ggatggccctttctgctgatgacac

SEQ ID NO: 5003891 - DNA, 25 bp, Homo sapien
gacttcttttccagctcttaatacc

SEQ ID NO: 5003892 - DNA, 25 bp, Homo sapien
ttgacttcttttccagctcttaata

SEQ ID NO: 5003893 - DNA, 25 bp, Homo sapien
cttcttttccagctcttaataccat

SEQ ID NO: 5003894 - DNA, 25 bp, Homo sapien
ccaatccttgacttcttttccagct

SEQ ID NO: 5003895 - DNA, 25 bp, Homo sapien
cactgttttgccgtaaagggcctca

SEQ ID NO: 5003896 - DNA, 25 bp, Homo sapien
ggtggccaaggttcactgttttgcc

SEQ ID NO: 5003897 - DNA, 25 bp, Homo sapien
gccaaggttcactgttttgccgtaa

SEQ ID NO: 5003898 - DNA, 25 bp, Homo sapien
caaggttcactgttttgccgtaaag

SEQ ID NO: 5003899 - DNA, 25 bp, Homo sapien
agcatccacccttctggggctcagt

SEQ ID NO: 5003900 - DNA, 25 bp, Homo sapien
tgctccctcctttgcaccacatacc

SEQ ID NO: 5003901 - DNA, 25 bp, Homo sapien
acatacccccaagcatccacccttc

SEQ ID NO: 5003902 - DNA, 25 bp, Homo sapien
acccccaagcatccacccttctggg

SEQ ID NO: 5003903 - DNA, 25 bp, Homo sapien
ttgagaactgcttctgctagcggac

SEQ ID NO: 5003904 - DNA, 25 bp, Homo sapien
tgtattctttcatggtgttaatgat

SEQ ID NO: 5003905 - DNA, 25 bp, Homo sapien
gtaggcgtctgaggatgaaattgta

SEQ ID NO: 5003906 - DNA, 25 bp, Homo sapien
tggacttgagagctgtaggcgtctg

SEQ ID NO: 5003907 - DNA, 25 bp, Homo sapien
ggcttccctcctcgctgtgatctga

SEQ ID NO: 5003908 - DNA, 25 bp, Homo sapien
gatggtttctctctaagcgatattt

SEQ ID NO: 5003909 - DNA, 25 bp, Homo sapien
ctgaaactgtccttcaaccagtact

SEQ ID NO: 5003910 - DNA, 25 bp, Homo sapien
tgtccttcaaccagtactggcttcc

SEQ ID NO: 5003911 - DNA, 25 bp, Homo sapien
acatctggtatctgaaggtccctga

SEQ ID NO: 5003912 - DNA, 25 bp, Homo sapien
catctggtatctgaaggtccctgaa

SEQ ID NO: 5003913 - DNA, 25 bp, Homo sapien
tctggtatctgaaggtccctgaatc

SEQ ID NO: 5003914 - DNA, 25 bp, Homo sapien
tggtatctgaaggtccctgaatcct

SEQ ID NO: 5003915 - DNA, 25 bp, Homo sapien
cacagctccactttaagtcctgatt

SEQ ID NO: 5003916 - DNA, 25 bp, Homo sapien
tctggaatagttcttgccgcctcct

SEQ ID NO: 5003917 - DNA, 25 bp, Homo sapien
tctctggaatagttcttgccgcctc

SEQ ID NO: 5003918 - DNA, 25 bp, Homo sapien
tgtattgccacagctccactttaag

SEQ ID NO: 5003919 - DNA, 25 bp, Homo sapien
gccatagggattgttgcttcttcct

SEQ ID NO: 5003920 - DNA, 25 bp, Homo sapien
tgacacagatctgtcctttaagggc

SEQ ID NO: 5003921 - DNA, 25 bp, Homo sapien
gatctgtcctttaagggccataggg

SEQ ID NO: 5003922 - DNA, 25 bp, Homo sapien
agaagcatttcagcttggatgacac

SEQ ID NO: 5003923 - DNA, 25 bp, Homo sapien
caaatcgggacccttttgacactct

SEQ ID NO: 5003924 - DNA, 25 bp, Homo sapien
tggcacctgacttgtttgccaggaa

SEQ ID NO: 5003925 - DNA, 25 bp, Homo sapien
cagtctgggtcaagtttctggcacc

SEQ ID NO: 5003926 - DNA, 25 bp, Homo sapien
gacttgtttgccaggaaaaagacaa

SEQ ID NO: 5003927 - DNA, 25 bp, Homo sapien
gtgaaggagaaaaccctttcctgca

SEQ ID NO: 5003928 - DNA, 25 bp, Homo sapien
tgaaggagaaaaccctttcctgcat

SEQ ID NO: 5003929 - DNA, 25 bp, Homo sapien
catttggagatgtctttaacgttcc

SEQ ID NO: 5003930 - DNA, 25 bp, Homo sapien
taacgttccatcaaaggttttgctc

SEQ ID NO: 5003931 - DNA, 25 bp, Homo sapien
ccttggtgtccctgaatttagatca

SEQ ID NO: 5003932 - DNA, 25 bp, Homo sapien
cttggtgtccctgaatttagatcaa

SEQ ID NO: 5003933 - DNA, 25 bp, Homo sapien
caaagctgaaggttttgcagacacc

SEQ ID NO: 5003934 - DNA, 25 bp, Homo sapien
gagattcaaagctgaaggttttgca

SEQ ID NO: 5003935 - DNA, 25 bp, Homo sapien
gagagattcaaagctgaaggttttg

SEQ ID NO: 5003936 - DNA, 25 bp, Homo sapien
ttcaaagctgaaggttttgcagaca

SEQ ID NO: 5003937 - DNA, 25 bp, Homo sapien
gattccatagggacagtaaacatcc

SEQ ID NO: 5003938 - DNA, 25 bp, Homo sapien
cattgtgatagcctgaagccaaaac

SEQ ID NO: 5003939 - DNA, 25 bp, Homo sapien
taagtgggtgtttaatccagaagcg

SEQ ID NO: 5003940 - DNA, 25 bp, Homo sapien
ccagaagcgttaggagaagaatgcc

SEQ ID NO: 5003941 - DNA, 25 bp, Homo sapien
ggaaccctgctgattggaccaatta

SEQ ID NO: 5003942 - DNA, 25 bp, Homo sapien
tgtaggcttggctaaaaataccctg

SEQ ID NO: 5003943 - DNA, 25 bp, Homo sapien
taatcctattgtgatccgtctgagg

SEQ ID NO: 5003944 - DNA, 25 bp, Homo sapien
caaggccgtctgctagaatatacca

SEQ ID NO: 5003945 - DNA, 25 bp, Homo sapien
cacgtcaagatcatttggaattgtc

SEQ ID NO: 5003946 - DNA, 25 bp, Homo sapien
gaatctgagctcctaagttatccgg

SEQ ID NO: 5003947 - DNA, 25 bp, Homo sapien
tttccagagagtaaagcatgggtgg

SEQ ID NO: 5003948 - DNA, 25 bp, Homo sapien
ggttgcatgcccctctggaatctga

SEQ ID NO: 5003949 - DNA, 25 bp, Homo sapien
tgcctgtggcttcctgggcaatgga

SEQ ID NO: 5003950 - DNA, 25 bp, Homo sapien
gagccccgtcctgatgaccaggact

SEQ ID NO: 5003951 - DNA, 25 bp, Homo sapien
ttccttccggatggcagtgagcccc

SEQ ID NO: 5003952 - DNA, 25 bp, Homo sapien
tggcctcgctccaggattccacaca

SEQ ID NO: 5003953 - DNA, 25 bp, Homo sapien
tgtcatctttactacttctaacatc

SEQ ID NO: 5003954 - DNA, 25 bp, Homo sapien
ttcttccctgtctcttcgctaacag

SEQ ID NO: 5003955 - DNA, 25 bp, Homo sapien
cttgctgctggtaatttttgtcatc

SEQ ID NO: 5003956 - DNA, 25 bp, Homo sapien
ctgcagcgtgccattcctttccttc

SEQ ID NO: 5003957 - DNA, 25 bp, Homo sapien
cagggagggctgcaaggtcataagg

SEQ ID NO: 5003958 - DNA, 25 bp, Homo sapien
catggcaacgcaggtgaagtgggtc

SEQ ID NO: 5003959 - DNA, 25 bp, Homo sapien
cataaggttgggggcatggcaacgc

SEQ ID NO: 5003960 - DNA, 25 bp, Homo sapien
caacgcaggtgaagtgggtctttgg

SEQ ID NO: 5003961 - DNA, 25 bp, Homo sapien
agatgcaggtgagtctcaatgtctc

SEQ ID NO: 5003962 - DNA, 25 bp, Homo sapien
acatctagctgtaggcccccttctt

SEQ ID NO: 5003963 - DNA, 25 bp, Homo sapien
agcaaaagcacatctagctgtaggc

SEQ ID NO: 5003964 - DNA, 25 bp, Homo sapien
gcaggtgagtctcaatgtctcccag

SEQ ID NO: 5003965 - DNA, 25 bp, Homo sapien
actagtatatatcgcctactttgca

SEQ ID NO: 5003966 - DNA, 25 bp, Homo sapien
ttcccactagtatatatcgcctact

SEQ ID NO: 5003967 - DNA, 25 bp, Homo sapien
ccactagtatatatcgcctactttg

SEQ ID NO: 5003968 - DNA, 25 bp, Homo sapien
ttcctgcaccctctttgacactcac

SEQ ID NO: 5003969 - DNA, 25 bp, Homo sapien
ctcctcatattttgtatgttggggc

SEQ ID NO: 5003970 - DNA, 25 bp, Homo sapien
tatgttggggctcacatatgtcttc

SEQ ID NO: 5003971 - DNA, 25 bp, Homo sapien
tcatattttgtatgttggggctcac

SEQ ID NO: 5003972 - DNA, 25 bp, Homo sapien
cacatatgtcttctagtttcatcaa

SEQ ID NO: 5003973 - DNA, 25 bp, Homo sapien
gaggcataggcttatctaatagttc

SEQ ID NO: 5003974 - DNA, 25 bp, Homo sapien
cagttggctggtgttaatggccgta

SEQ ID NO: 5003975 - DNA, 25 bp, Homo sapien
taatagttctagtgcttgaaagatg

SEQ ID NO: 5003976 - DNA, 25 bp, Homo sapien
taatgggctgtagaacagttggctg

SEQ ID NO: 5003977 - DNA, 25 bp, Homo sapien
tggagtcaggagttttgcaaagttc

SEQ ID NO: 5003978 - DNA, 25 bp, Homo sapien
ttagctactaccttgggatccagag

SEQ ID NO: 5003979 - DNA, 25 bp, Homo sapien
acttgtgtaccacggattctcaggg

SEQ ID NO: 5003980 - DNA, 25 bp, Homo sapien
ggatccagagagatatatccacttg

SEQ ID NO: 5003981 - DNA, 25 bp, Homo sapien
tttaggctccacgtaaggatagtca

SEQ ID NO: 5003982 - DNA, 25 bp, Homo sapien
ggctccacgtaaggatagtcacaat

SEQ ID NO: 5003983 - DNA, 25 bp, Homo sapien
tccacgtaaggatagtcacaattgt

SEQ ID NO: 5003984 - DNA, 25 bp, Homo sapien
ctgcttttaggctccacgtaaggat

SEQ ID NO: 5003985 - DNA, 25 bp, Homo sapien
aagagagggacaccccagtgggtct

SEQ ID NO: 5003986 - DNA, 25 bp, Homo sapien
tccaggactgggaccaaagaggcag

SEQ ID NO: 5003987 - DNA, 25 bp, Homo sapien
ccaaggttcgttgtctcatgtcaag

SEQ ID NO: 5003988 - DNA, 25 bp, Homo sapien
gactttgccaccctgttagtccagg

SEQ ID NO: 5003989 - DNA, 25 bp, Homo sapien
tggctccctgttgtacaggcagaag

SEQ ID NO: 5003990 - DNA, 25 bp, Homo sapien
tctcagtgttggctccctgttgtac

SEQ ID NO: 5003991 - DNA, 25 bp, Homo sapien
tgtgtttggccgataatccttccat

SEQ ID NO: 5003992 - DNA, 25 bp, Homo sapien
atgctgtgtatgtgtttggccgata

SEQ ID NO: 5003993 - DNA, 25 bp, Homo sapien
atagcagaagattgcctgaagaatg

SEQ ID NO: 5003994 - DNA, 25 bp, Homo sapien
tatagcagaagattgcctgaagaat

SEQ ID NO: 5003995 - DNA, 25 bp, Homo sapien
cagaagattgcctgaagaatgtgac

SEQ ID NO: 5003996 - DNA, 25 bp, Homo sapien
aagattgcctgaagaatgtgaccat

SEQ ID NO: 5003997 - DNA, 25 bp, Homo sapien
gaactctgagcatgctactggtgtg

SEQ ID NO: 5003998 - DNA, 25 bp, Homo sapien
catgctactggtgtggcgatgctga

SEQ ID NO: 5003999 - DNA, 25 bp, Homo sapien
ctgagcatgctactggtgtggcgat

SEQ ID NO: 5004000 - DNA, 25 bp, Homo sapien
tgctactggtgtggcgatgctgaca

SEQ ID NO: 5004001 - DNA, 25 bp, Homo sapien
cctccactgttttcccataagcaaa

SEQ ID NO: 5004002 - DNA, 25 bp, Homo sapien
ttttcgtccaagtagatgttgtaag

SEQ ID NO: 5004003 - DNA, 25 bp, Homo sapien
ctgcttttattgtgtagatgacgtg

SEQ ID NO: 5004004 - DNA, 25 bp, Homo sapien
caaggatgtggcatatacattcctg

SEQ ID NO: 5004005 - DNA, 25 bp, Homo sapien
caacacgtgtgtttcgtccggccag

SEQ ID NO: 5004006 - DNA, 25 bp, Homo sapien
ggaattaacacagccaccgacaaga

SEQ ID NO: 5004007 - DNA, 25 bp, Homo sapien
gaacagagtcgtgcacaagcaaacg

SEQ ID NO: 5004008 - DNA, 25 bp, Homo sapien
cattccaggagatgttaaagcagca

SEQ ID NO: 5004009 - DNA, 25 bp, Homo sapien
taggacagatggagtagccaatgcc

SEQ ID NO: 5004010 - DNA, 25 bp, Homo sapien
ctaaaaacgtcagatggtaaaatag

SEQ ID NO: 5004011 - DNA, 25 bp, Homo sapien
cagtttagtcacactctgctaggac

SEQ ID NO: 5004012 - DNA, 25 bp, Homo sapien
aatgccaagaacttcgccggatggg

SEQ ID NO: 5004013 - DNA, 25 bp, Homo sapien
taagttttgctctccaacatggccg

SEQ ID NO: 5004014 - DNA, 25 bp, Homo sapien
ccatttaaagggctgacggcaccac

SEQ ID NO: 5004015 - DNA, 25 bp, Homo sapien
taacacaccactagttgtcaggact

SEQ ID NO: 5004016 - DNA, 25 bp, Homo sapien
ggaaccgaacaggtcctctggctga

SEQ ID NO: 5004017 - DNA, 25 bp, Homo sapien
caggcatagccaaaattaaagtgaa

SEQ ID NO: 5004018 - DNA, 25 bp, Homo sapien
taaagtgaaggacaatacgtcattg

SEQ ID NO: 5004019 - DNA, 25 bp, Homo sapien
ctgaagggtcaaaacagttatagca

SEQ ID NO: 5004020 - DNA, 25 bp, Homo sapien
agatagaaattaaggcgattcttac

SEQ ID NO: 5004021 - DNA, 25 bp, Homo sapien
aaagaatggccaacccgatattcaa

SEQ ID NO: 5004022 - DNA, 25 bp, Homo sapien
cgatattcaacagcatgacaaggac

SEQ ID NO: 5004023 - DNA, 25 bp, Homo sapien
aatggccaacccgatattcaacagc

SEQ ID NO: 5004024 - DNA, 25 bp, Homo sapien
acagcatgacaaggacaatcatgat

SEQ ID NO: 5004025 - DNA, 25 bp, Homo sapien
aagatgcacagtcaccccacacagc

SEQ ID NO: 5004026 - DNA, 25 bp, Homo sapien
tcaagatgcacagtcaccccacaca

SEQ ID NO: 5004027 - DNA, 25 bp, Homo sapien
atgcacagtcaccccacacagctcg

SEQ ID NO: 5004028 - DNA, 25 bp, Homo sapien
agatgcacagtcaccccacacagct

SEQ ID NO: 5004029 - DNA, 25 bp, Homo sapien
tggagggactccacttgttagcgga

SEQ ID NO: 5004030 - DNA, 25 bp, Homo sapien
catcaagggcttattgacaatggcc

SEQ ID NO: 5004031 - DNA, 25 bp, Homo sapien
tccaaagcagggcatgaatcgttgc

SEQ ID NO: 5004032 - DNA, 25 bp, Homo sapien
tagcggatggcttgtgcaccagtgc

SEQ ID NO: 5004033 - DNA, 25 bp, Homo sapien
aatctctgtttgacgtaatcagggc

SEQ ID NO: 5004034 - DNA, 25 bp, Homo sapien
cgtgcctttgcgataaaaatgagga

SEQ ID NO: 5004035 - DNA, 25 bp, Homo sapien
tctttagcatctacaccttcctgaa

SEQ ID NO: 5004036 - DNA, 25 bp, Homo sapien
tgtttgggacttgcctcaggagatc

SEQ ID NO: 5004037 - DNA, 25 bp, Homo sapien
tgacgtacaatcctagaaggccaat

SEQ ID NO: 5004038 - DNA, 25 bp, Homo sapien
cagactgacgtacaatcctagaagg

SEQ ID NO: 5004039 - DNA, 25 bp, Homo sapien
gactgacgtacaatcctagaaggcc

SEQ ID NO: 5004040 - DNA, 25 bp, Homo sapien
cgtacaatcctagaaggccaattta

SEQ ID NO: 5004041 - DNA, 25 bp, Homo sapien
tggttggtagaaatcaggtgacagc

SEQ ID NO: 5004042 - DNA, 25 bp, Homo sapien
catcggccttcgctctggcatgtgc

SEQ ID NO: 5004043 - DNA, 25 bp, Homo sapien
tggccacagctctcgcgatgtcgca

SEQ ID NO: 5004044 - DNA, 25 bp, Homo sapien
tgtcgcactcctggcgagcggccag

SEQ ID NO: 5004045 - DNA, 25 bp, Homo sapien
catgtctagattttgcccaggaata

SEQ ID NO: 5004046 - DNA, 25 bp, Homo sapien
gcttttggaaccgatgacaagaagg

SEQ ID NO: 5004047 - DNA, 25 bp, Homo sapien
cctgtacagctaaggccactggcat

SEQ ID NO: 5004048 - DNA, 25 bp, Homo sapien
aataatctggacttgtctctggctc

SEQ ID NO: 5004049 - DNA, 25 bp, Homo sapien
cttatgggtgaagacaccacagcca

SEQ ID NO: 5004050 - DNA, 25 bp, Homo sapien
ttatgggtgaagacaccacagccat

SEQ ID NO: 5004051 - DNA, 25 bp, Homo sapien
ggacaagttgtggtagtaggctata

SEQ ID NO: 5004052 - DNA, 25 bp, Homo sapien
aattctggacaagttgtggtagtag

SEQ ID NO: 5004053 - DNA, 25 bp, Homo sapien
taggctatatttaaattggcctgct

SEQ ID NO: 5004054 - DNA, 25 bp, Homo sapien
ggtagtaggctatatttaaattggc

SEQ ID NO: 5004055 - DNA, 25 bp, Homo sapien
tctgtcatctaccttgggccaccag

SEQ ID NO: 5004056 - DNA, 25 bp, Homo sapien
cctctatgtggcagtaacaggacaa

SEQ ID NO: 5004057 - DNA, 25 bp, Homo sapien
tacctgggatacactgacgatatta

SEQ ID NO: 5004058 - DNA, 25 bp, Homo sapien
tgtaacatggaggtcaagtcccagg

SEQ ID NO: 5004059 - DNA, 25 bp, Homo sapien
cccttaagcccttgtaagatgttga

SEQ ID NO: 5004060 - DNA, 25 bp, Homo sapien
tcttggggtggcatatgaagccctc

SEQ ID NO: 5004061 - DNA, 25 bp, Homo sapien
gcaggtgatgcaggccaaacccgct

SEQ ID NO: 5004062 - DNA, 25 bp, Homo sapien
tctttcactgaggtttcagcaggtg

SEQ ID NO: 5004063 - DNA, 25 bp, Homo sapien
gtggttacttggacatgtaagtctt

SEQ ID NO: 5004064 - DNA, 25 bp, Homo sapien
tggttacttggacatgtaagtcttg

SEQ ID NO: 5004065 - DNA, 25 bp, Homo sapien
ggttacttggacatgtaagtcttgc

SEQ ID NO: 5004066 - DNA, 25 bp, Homo sapien
gcgtctccattattgaaacagcctt

SEQ ID NO: 5004067 - DNA, 25 bp, Homo sapien
cattattgaaacagcctttccgact

SEQ ID NO: 5004068 - DNA, 25 bp, Homo sapien
aaaaagcgtctccattattgaaaca

SEQ ID NO: 5004069 - DNA, 25 bp, Homo sapien
gaaacagcctttccgactagcaact

SEQ ID NO: 5004070 - DNA, 25 bp, Homo sapien
cgtgaaatttccgtctgactataca

SEQ ID NO: 5004071 - DNA, 25 bp, Homo sapien
catccactgttttggcactggtaac

SEQ ID NO: 5004072 - DNA, 25 bp, Homo sapien
gaagggtgaaattccactcagtgac

SEQ ID NO: 5004073 - DNA, 25 bp, Homo sapien
caaatatgtacttgttttagctgac

SEQ ID NO: 5004074 - DNA, 25 bp, Homo sapien
tgaaaacccatttcttcaacagcat

SEQ ID NO: 5004075 - DNA, 25 bp, Homo sapien
gaaaacccatttcttcaacagcatg

SEQ ID NO: 5004076 - DNA, 25 bp, Homo sapien
aacccatttcttcaacagcatgcat

SEQ ID NO: 5004077 - DNA, 25 bp, Homo sapien
ccaagggctgcctctgaaaacccat

SEQ ID NO: 5004078 - DNA, 25 bp, Homo sapien
tcatcagcaaggagtaagctctcaa

SEQ ID NO: 5004079 - DNA, 25 bp, Homo sapien
catcagcaaggagtaagctctcaat

SEQ ID NO: 5004080 - DNA, 25 bp, Homo sapien
caaggagtaagctctcaattaacat

SEQ ID NO: 5004081 - DNA, 25 bp, Homo sapien
cagcaaggagtaagctctcaattaa

SEQ ID NO: 5004082 - DNA, 25 bp, Homo sapien
ttcttcagagaaaggtaacaccacc

SEQ ID NO: 5004083 - DNA, 25 bp, Homo sapien
gcttaacaccattgcagtctggcaa

SEQ ID NO: 5004084 - DNA, 25 bp, Homo sapien
taaccctgcagtagcacactaagaa

SEQ ID NO: 5004085 - DNA, 25 bp, Homo sapien
ccaccttagcgagaacagacgggct

SEQ ID NO: 5004086 - DNA, 25 bp, Homo sapien
gcactgcaacgcaaaatccaggtgg

SEQ ID NO: 5004087 - DNA, 25 bp, Homo sapien
gtcataccactgctgttctccacaa

SEQ ID NO: 5004088 - DNA, 25 bp, Homo sapien
tcagctgtactcgacggcactgcaa

SEQ ID NO: 5004089 - DNA, 25 bp, Homo sapien
tagggctgtagctaatatctccacc

SEQ ID NO: 5004090 - DNA, 25 bp, Homo sapien
gatgggtcataggtgcctctcagtg

SEQ ID NO: 5004091 - DNA, 25 bp, Homo sapien
caggatgggtcataggtgcctctca

SEQ ID NO: 5004092 - DNA, 25 bp, Homo sapien
atgggtcataggtgcctctcagtgg

SEQ ID NO: 5004093 - DNA, 25 bp, Homo sapien
ggatgggtcataggtgcctctcagt

SEQ ID NO: 5004094 - DNA, 25 bp, Homo sapien
tctgttatacaaactcctccaatgg

SEQ ID NO: 5004095 - DNA, 25 bp, Homo sapien
tctctgcattgccagtcgctttctg

SEQ ID NO: 5004096 - DNA, 25 bp, Homo sapien
agtcgtttgttaaagtgttctgcac

SEQ ID NO: 5004097 - DNA, 25 bp, Homo sapien
catttttcacctcccaagactgagc

SEQ ID NO: 5004098 - DNA, 25 bp, Homo sapien
atgagcacagggtctcagtgaactc

SEQ ID NO: 5004099 - DNA, 25 bp, Homo sapien
tgagcacagggtctcagtgaactcc

SEQ ID NO: 5004100 - DNA, 25 bp, Homo sapien
gatgagcacagggtctcagtgaact

SEQ ID NO: 5004101 - DNA, 25 bp, Homo sapien
tacttcatgccattggagcgctcgc

SEQ ID NO: 5004102 - DNA, 25 bp, Homo sapien
caaagctgatcgtggagttggcatc

SEQ ID NO: 5004103 - DNA, 25 bp, Homo sapien
cagcgtctgcgtggaagttgagcac

SEQ ID NO: 5004104 - DNA, 25 bp, Homo sapien
ggaactaattctgctcatggccgcg

SEQ ID NO: 5004105 - DNA, 25 bp, Homo sapien
accgtcacctgcaccatccagcgca

SEQ ID NO: 5004106 - DNA, 25 bp, Homo sapien
accatccagcgcacactggcgcagg

SEQ ID NO: 5004107 - DNA, 25 bp, Homo sapien
ccgcaagaaagcaccgtgagtcggg

SEQ ID NO: 5004108 - DNA, 25 bp, Homo sapien
ttggagagaccgcaagaaagcaccg

SEQ ID NO: 5004109 - DNA, 25 bp, Homo sapien
aaccacagtaccacccaggatgatg

SEQ ID NO: 5004110 - DNA, 25 bp, Homo sapien
aaaactgaagagaaccatccctggc

SEQ ID NO: 5004111 - DNA, 25 bp, Homo sapien
tgggtttctacgacatgtacacaga

SEQ ID NO: 5004112 - DNA, 25 bp, Homo sapien
taatgaatactctaaaccaagagag

SEQ ID NO: 5004113 - DNA, 25 bp, Homo sapien
gtgcgaccaggagcccgagtactcg

SEQ ID NO: 5004114 - DNA, 25 bp, Homo sapien
cagtagccctggtaggtgttgccgc

SEQ ID NO: 5004115 - DNA, 25 bp, Homo sapien
aggtgccgccatcgtcgaagtcgaa

SEQ ID NO: 5004116 - DNA, 25 bp, Homo sapien
gtcttgcagcccgttactccaggta

SEQ ID NO: 5004117 - DNA, 25 bp, Homo sapien
ccgcaggggcacggacgcgggcagt

SEQ ID NO: 5004118 - DNA, 25 bp, Homo sapien
ctgggcacggcagggtgtagctcgg

SEQ ID NO: 5004119 - DNA, 25 bp, Homo sapien
gcgggcgagctcacgacagcgccct

SEQ ID NO: 5004120 - DNA, 25 bp, Homo sapien
gccctgggcagctcgcgctgccgct

SEQ ID NO: 5004121 - DNA, 25 bp, Homo sapien
ctgccgctcggctccagtccgacgc

SEQ ID NO: 5004122 - DNA, 25 bp, Homo sapien
ttccactattcactcgggcctcgga

SEQ ID NO: 5004123 - DNA, 25 bp, Homo sapien
tttgatccagcaagtaaggtccagt

SEQ ID NO: 5004124 - DNA, 25 bp, Homo sapien
gtaacatccccttctgagacttcca

SEQ ID NO: 5004125 - DNA, 25 bp, Homo sapien
ggacatagcctggacttgactttga

SEQ ID NO: 5004126 - DNA, 25 bp, Homo sapien
catacactgggaagattccatgacc

SEQ ID NO: 5004127 - DNA, 25 bp, Homo sapien
aatcaatgtgtccaaaagccaagaa

SEQ ID NO: 5004128 - DNA, 25 bp, Homo sapien
gccaataggtaaagagagggctcta

SEQ ID NO: 5004129 - DNA, 25 bp, Homo sapien
ggaagattccatgaccgaatcaatg

SEQ ID NO: 5004130 - DNA, 25 bp, Homo sapien
tcctcaaggagcccacaatgatcat

SEQ ID NO: 5004131 - DNA, 25 bp, Homo sapien
gtaggtctggctgtgagatacgaca

SEQ ID NO: 5004132 - DNA, 25 bp, Homo sapien
tgtgagatacgacaactgatacgca

SEQ ID NO: 5004133 - DNA, 25 bp, Homo sapien
aactgatacgcagtttggcaactgg

SEQ ID NO: 5004134 - DNA, 25 bp, Homo sapien
gtttgctttttaccagacaagacac

SEQ ID NO: 5004135 - DNA, 25 bp, Homo sapien
gtaacgttccactctgcctgtatcc

SEQ ID NO: 5004136 - DNA, 25 bp, Homo sapien
cttcttctctagagtaacgttccac

SEQ ID NO: 5004137 - DNA, 25 bp, Homo sapien
gagggtgtgttccttgaccaggttc

SEQ ID NO: 5004138 - DNA, 25 bp, Homo sapien
ggctggagggtgtgttccttgacca

SEQ ID NO: 5004139 - DNA, 25 bp, Homo sapien
caggagctcattatcaagtatctta

SEQ ID NO: 5004140 - DNA, 25 bp, Homo sapien
tagattatctgtactacaaaggcac

SEQ ID NO: 5004141 - DNA, 25 bp, Homo sapien
cacaacattaaaagttccacgaggg

SEQ ID NO: 5004142 - DNA, 25 bp, Homo sapien
tccatgacctggaataaggattagc

SEQ ID NO: 5004143 - DNA, 25 bp, Homo sapien
ctttagtatatgaattagagttcaa

SEQ ID NO: 5004144 - DNA, 25 bp, Homo sapien
ggagttaatcatgcctgctacattg

SEQ ID NO: 5004145 - DNA, 25 bp, Homo sapien
gatattttgtagtgggagttaatca

SEQ ID NO: 5004146 - DNA, 25 bp, Homo sapien
tgctggagcaaaattcaacactaaa

SEQ ID NO: 5004147 - DNA, 25 bp, Homo sapien
gaatgtcctggtttgatctgcccat

SEQ ID NO: 5004148 - DNA, 25 bp, Homo sapien
tgaatgtcctggtttgatctgccca

SEQ ID NO: 5004149 - DNA, 25 bp, Homo sapien
caagtggtcacggatttcgacagga

SEQ ID NO: 5004150 - DNA, 25 bp, Homo sapien
ccagggccaccttacgggatagttg

SEQ ID NO: 5004151 - DNA, 25 bp, Homo sapien
tttgttgaaccaggattttcttgaa

SEQ ID NO: 5004152 - DNA, 25 bp, Homo sapien
ttctccttctgctaaaggctgtgtg

SEQ ID NO: 5004153 - DNA, 25 bp, Homo sapien
tcaaggagtcaagaaggaccagcat

SEQ ID NO: 5004154 - DNA, 25 bp, Homo sapien
tgctccacgttcattccacttgctg

SEQ ID NO: 5004155 - DNA, 25 bp, Homo sapien
agactctgaagcagaacgtgctcca

SEQ ID NO: 5004156 - DNA, 25 bp, Homo sapien
tcaagtgaggaagtagccacactcc

SEQ ID NO: 5004157 - DNA, 25 bp, Homo sapien
cagtcctaatcagggtttttgcttc

SEQ ID NO: 5004158 - DNA, 25 bp, Homo sapien
tatggaatgcttccatcaatcacgc

SEQ ID NO: 5004159 - DNA, 25 bp, Homo sapien
atcaatcacgcactctgcagtccta

SEQ ID NO: 5004160 - DNA, 25 bp, Homo sapien
tctgcagtcctaatcagggtttttg

SEQ ID NO: 5004161 - DNA, 25 bp, Homo sapien
tgttcgagaatccagagccatagtc

SEQ ID NO: 5004162 - DNA, 25 bp, Homo sapien
tcatcagtcactggtaccacagaca

SEQ ID NO: 5004163 - DNA, 25 bp, Homo sapien
cttccaagtttactgtattgatgcc

SEQ ID NO: 5004164 - DNA, 25 bp, Homo sapien
gacaccagtgccatgactgttcgag

SEQ ID NO: 5004165 - DNA, 25 bp, Homo sapien
cccctgtggctccttattaatgcac

SEQ ID NO: 5004166 - DNA, 25 bp, Homo sapien
gaattgcacatatacaaacaggctg

SEQ ID NO: 5004167 - DNA, 25 bp, Homo sapien
tttgtaggaaacatcttctcagccc

SEQ ID NO: 5004168 - DNA, 25 bp, Homo sapien
gctgtgtttcggatccatttgtagg

SEQ ID NO: 5004169 - DNA, 25 bp, Homo sapien
aaaagctacaccagtctggaaaaca

SEQ ID NO: 5004170 - DNA, 25 bp, Homo sapien
tctgaaaagctacaccagtctggaa

SEQ ID NO: 5004171 - DNA, 25 bp, Homo sapien
gctacaccagtctggaaaacattat

SEQ ID NO: 5004172 - DNA, 25 bp, Homo sapien
ctggaaaacattatagaagcaagat

SEQ ID NO: 5004173 - DNA, 25 bp, Homo sapien
tcgtttcttccacgtgccctttgct

SEQ ID NO: 5004174 - DNA, 25 bp, Homo sapien
caggtactttctcagctctgtattt

SEQ ID NO: 5004175 - DNA, 25 bp, Homo sapien
gatttatgtagagtgtgacccttgg

SEQ ID NO: 5004176 - DNA, 25 bp, Homo sapien
cctctcaggtactttctcagctctg

SEQ ID NO: 5004177 - DNA, 25 bp, Homo sapien
tgtattaatattccattcttaacat

SEQ ID NO: 5004178 - DNA, 25 bp, Homo sapien
attcctgactttacagtactaaact

SEQ ID NO: 5004179 - DNA, 25 bp, Homo sapien
cttaacatttccatgacagacagaa

SEQ ID NO: 5004180 - DNA, 25 bp, Homo sapien
cctgactttacagtactaaactgaa

SEQ ID NO: 5004181 - DNA, 25 bp, Homo sapien
ctaaatatggatctcagcaccaaca

SEQ ID NO: 5004182 - DNA, 25 bp, Homo sapien
gcttataaaactaaatatggatctc

SEQ ID NO: 5004183 - DNA, 25 bp, Homo sapien
taaaactaaatatggatctcagcac

SEQ ID NO: 5004184 - DNA, 25 bp, Homo sapien
taaatatggatctcagcaccaacag

SEQ ID NO: 5004185 - DNA, 25 bp, Homo sapien
cacgagtggatgataaagtgtgtag

SEQ ID NO: 5004186 - DNA, 25 bp, Homo sapien
aatcacgagtggatgataaagtgtg

SEQ ID NO: 5004187 - DNA, 25 bp, Homo sapien
aaaatcacgagtggatgataaagtg

SEQ ID NO: 5004188 - DNA, 25 bp, Homo sapien
taaaaaatcacgagtggatgataaa

SEQ ID NO: 5004189 - DNA, 25 bp, Homo sapien
ggctaatgctggcagcagatccagt

SEQ ID NO: 5004190 - DNA, 25 bp, Homo sapien
gactgttgcattgccaactggtgca

SEQ ID NO: 5004191 - DNA, 25 bp, Homo sapien
acattgattagatattgagccaggc

SEQ ID NO: 5004192 - DNA, 25 bp, Homo sapien
cagtgatggtaacctgcctatcagt

SEQ ID NO: 5004193 - DNA, 25 bp, Homo sapien
ccttgaagggtataggcctgaccgc

SEQ ID NO: 5004194 - DNA, 25 bp, Homo sapien
tgtccttgaagggtataggcctgac

SEQ ID NO: 5004195 - DNA, 25 bp, Homo sapien
tccttgaagggtataggcctgaccg

SEQ ID NO: 5004196 - DNA, 25 bp, Homo sapien
gtccttgaagggtataggcctgacc

SEQ ID NO: 5004197 - DNA, 25 bp, Homo sapien
aggcttgagctggtacgggatggtc

SEQ ID NO: 5004198 - DNA, 25 bp, Homo sapien
aaggcttgagctggtacgggatggt

SEQ ID NO: 5004199 - DNA, 25 bp, Homo sapien
tggaaggcttgagctggtacgggat

SEQ ID NO: 5004200 - DNA, 25 bp, Homo sapien
gaaggcttgagctggtacgggatgg

SEQ ID NO: 5004201 - DNA, 25 bp, Homo sapien
ctgtttgacacactcaatgatggat

SEQ ID NO: 5004202 - DNA, 25 bp, Homo sapien
gatggattgtgggatgccagcaata

SEQ ID NO: 5004203 - DNA, 25 bp, Homo sapien
cactcaatgatggattgtgggatgc

SEQ ID NO: 5004204 - DNA, 25 bp, Homo sapien
ttgtgggatgccagcaatagtgatg

SEQ ID NO: 5004205 - DNA, 25 bp, Homo sapien
gctcagttgagttgggtagcatatc

SEQ ID NO: 5004206 - DNA, 25 bp, Homo sapien
ctcagttgagttgggtagcatatcc

SEQ ID NO: 5004207 - DNA, 25 bp, Homo sapien
agttgagttgggtagcatatcccct

SEQ ID NO: 5004208 - DNA, 25 bp, Homo sapien
cagttgagttgggtagcatatcccc

SEQ ID NO: 5004209 - DNA, 25 bp, Homo sapien
cgtatttccttgatcttgcaaccac

SEQ ID NO: 5004210 - DNA, 25 bp, Homo sapien
gagcccctgtactctctcgtatttc

SEQ ID NO: 5004211 - DNA, 25 bp, Homo sapien
ctgagcccctgtactctctcgtatt

SEQ ID NO: 5004212 - DNA, 25 bp, Homo sapien
ctcgtatttccttgatcttgcaacc

SEQ ID NO: 5004213 - DNA, 25 bp, Homo sapien
gagagccacactgactagcagggac

SEQ ID NO: 5004214 - DNA, 25 bp, Homo sapien
cttttccaatgagagagccacactg

SEQ ID NO: 5004215 - DNA, 25 bp, Homo sapien
agccacactgactagcagggaccac

SEQ ID NO: 5004216 - DNA, 25 bp, Homo sapien
atgagagagccacactgactagcag

SEQ ID NO: 5004217 - DNA, 25 bp, Homo sapien
gaagacggcattagcaggtccagca

SEQ ID NO: 5004218 - DNA, 25 bp, Homo sapien
tttcttcataagaccaggaaaaatg

SEQ ID NO: 5004219 - DNA, 25 bp, Homo sapien
taaaaagagagtgcttcaacccact

SEQ ID NO: 5004220 - DNA, 25 bp, Homo sapien
gaaacttccagctagtgcactaaaa

SEQ ID NO: 5004221 - DNA, 25 bp, Homo sapien
ttcttaacctaaaactctcagctag

SEQ ID NO: 5004222 - DNA, 25 bp, Homo sapien
gagagaataactgtagttgagcagc

SEQ ID NO: 5004223 - DNA, 25 bp, Homo sapien
gcttggacagaggtcatgctcgtta

SEQ ID NO: 5004224 - DNA, 25 bp, Homo sapien
gaggtcatgctcgttactaggtaat

SEQ ID NO: 5004225 - DNA, 25 bp, Homo sapien
gaataactgtagttgagcagctaaa

SEQ ID NO: 5004226 - DNA, 25 bp, Homo sapien
caaagaagactgtggtggcccagga

SEQ ID NO: 5004227 - DNA, 25 bp, Homo sapien
agcaaagaagactgtggtggcccag

SEQ ID NO: 5004228 - DNA, 25 bp, Homo sapien
tttggtgttgattcttctctgaaaa

SEQ ID NO: 5004229 - DNA, 25 bp, Homo sapien
tcttctctgaaaatggttgcaatca

SEQ ID NO: 5004230 - DNA, 25 bp, Homo sapien
attttccaaatcttctctgaggtgc

SEQ ID NO: 5004231 - DNA, 25 bp, Homo sapien
caaatcttctctgaggtgctgttat

SEQ ID NO: 5004232 - DNA, 25 bp, Homo sapien
aatcttctctgaggtgctgttatct

SEQ ID NO: 5004233 - DNA, 25 bp, Homo sapien
ctctcatcagctcatttattttcca

SEQ ID NO: 5004234 - DNA, 25 bp, Homo sapien
tgggttccagcgatcttcctacctc

SEQ ID NO: 5004235 - DNA, 25 bp, Homo sapien
ctgggttccagcgatcttcctacct

SEQ ID NO: 5004236 - DNA, 25 bp, Homo sapien
aaggagctatcagaataaagataac

SEQ ID NO: 5004237 - DNA, 25 bp, Homo sapien
ataaagataacagaatccaagcacc

SEQ ID NO: 5004238 - DNA, 25 bp, Homo sapien
taacagaatccaagcaccctctttc

SEQ ID NO: 5004239 - DNA, 25 bp, Homo sapien
aagataacagaatccaagcaccctc

SEQ ID NO: 5004240 - DNA, 25 bp, Homo sapien
gccttttttgatttcgaatttgcca

SEQ ID NO: 5004241 - DNA, 25 bp, Homo sapien
gaacaccgccatatttttaatctct

SEQ ID NO: 5004242 - DNA, 25 bp, Homo sapien
tcttctccagaacaccgccatattt

SEQ ID NO: 5004243 - DNA, 25 bp, Homo sapien
tttgccaatatgctactctcccaca

SEQ ID NO: 5004244 - DNA, 25 bp, Homo sapien
actgctaaactagtgaaaacgtctc

SEQ ID NO: 5004245 - DNA, 25 bp, Homo sapien
tactgtcagcatcctatcagcaaac

SEQ ID NO: 5004246 - DNA, 25 bp, Homo sapien
tatggctgaaagctctgtaagctac

SEQ ID NO: 5004247 - DNA, 25 bp, Homo sapien
taaataagcttcgtaagccaggcac

SEQ ID NO: 5004248 - DNA, 25 bp, Homo sapien
gggttttcatgagcgcttcagttca

SEQ ID NO: 5004249 - DNA, 25 bp, Homo sapien
tgctagctaaatatgggacacacag

SEQ ID NO: 5004250 - DNA, 25 bp, Homo sapien
taaagttatctagaggcctaccacg

SEQ ID NO: 5004251 - DNA, 25 bp, Homo sapien
gagtcccctcattaggataatgtgg

SEQ ID NO: 5004252 - DNA, 25 bp, Homo sapien
tgtgtttgatgtagtcgttgtcaag

SEQ ID NO: 5004253 - DNA, 25 bp, Homo sapien
tttgatgtagtcgttgtcaagtgca

SEQ ID NO: 5004254 - DNA, 25 bp, Homo sapien
tgtagtcgttgtcaagtgcatttga

SEQ ID NO: 5004255 - DNA, 25 bp, Homo sapien
ctgattgtgtttgatgtagtcgttg

SEQ ID NO: 5004256 - DNA, 25 bp, Homo sapien
catgtgtagaaagagagttcagata

SEQ ID NO: 5004257 - DNA, 25 bp, Homo sapien
gtagaaagagagttcagatatttga

SEQ ID NO: 5004258 - DNA, 25 bp, Homo sapien
tgtgtagaaagagagttcagatatt

SEQ ID NO: 5004259 - DNA, 25 bp, Homo sapien
tgtagaaagagagttcagatatttg

SEQ ID NO: 5004260 - DNA, 25 bp, Homo sapien
tctcttataggattctgttgccagc

SEQ ID NO: 5004261 - DNA, 25 bp, Homo sapien
ccagcgtgtggtttgtttcaatgca

SEQ ID NO: 5004262 - DNA, 25 bp, Homo sapien
gccagcttgtagaacagtccctttt

SEQ ID NO: 5004263 - DNA, 25 bp, Homo sapien
tgtttcaatgcattctcttatagga

SEQ ID NO: 5004264 - DNA, 25 bp, Homo sapien
aaaatgttcaagaaggtacttccag

SEQ ID NO: 5004265 - DNA, 25 bp, Homo sapien
aaatgttcaagaaggtacttccagg

SEQ ID NO: 5004266 - DNA, 25 bp, Homo sapien
ataaataatccatgatgagctcctc

SEQ ID NO: 5004267 - DNA, 25 bp, Homo sapien
gttcagtcccaaagaataaataatc

SEQ ID NO: 5004268 - DNA, 25 bp, Homo sapien
tgcagagattagcaagtgacaacac

SEQ ID NO: 5004269 - DNA, 25 bp, Homo sapien
tctacaaagcagtaatggtacaggc

SEQ ID NO: 5004270 - DNA, 25 bp, Homo sapien
tgacaacactgggaacttgagagag

SEQ ID NO: 5004271 - DNA, 25 bp, Homo sapien
tgtaaatcacgtgaaactttctgga

SEQ ID NO: 5004272 - DNA, 25 bp, Homo sapien
caccttttcacttattagactctgt

SEQ ID NO: 5004273 - DNA, 25 bp, Homo sapien
cttttcacttattagactctgttca

SEQ ID NO: 5004274 - DNA, 25 bp, Homo sapien
ccttctttgacaccttttcacttat

SEQ ID NO: 5004275 - DNA, 25 bp, Homo sapien
tgcagccactccggccttctttgac

SEQ ID NO: 5004276 - DNA, 25 bp, Homo sapien
tgggaggtggttatattgtgcattg

SEQ ID NO: 5004277 - DNA, 25 bp, Homo sapien
ggttatattgtgcattgttggagag

SEQ ID NO: 5004278 - DNA, 25 bp, Homo sapien
tatattgtgcattgttggagagggt

SEQ ID NO: 5004279 - DNA, 25 bp, Homo sapien
ggtggttatattgtgcattgttgga

SEQ ID NO: 5004280 - DNA, 25 bp, Homo sapien
ggctagtctatcctctgtatcaaga

SEQ ID NO: 5004281 - DNA, 25 bp, Homo sapien
gctttagtggaattaacagtctgcc

SEQ ID NO: 5004282 - DNA, 25 bp, Homo sapien
tcctcaaaggccattataacattcc

SEQ ID NO: 5004283 - DNA, 25 bp, Homo sapien
tttctgttgtccttgcaccaggtct

SEQ ID NO: 5004284 - DNA, 25 bp, Homo sapien
aggaattggcataggctcctctggc

SEQ ID NO: 5004285 - DNA, 25 bp, Homo sapien
caggaattggcataggctcctctgg

SEQ ID NO: 5004286 - DNA, 25 bp, Homo sapien
gcaacatatgactagggcctcagaa

SEQ ID NO: 5004287 - DNA, 25 bp, Homo sapien
gcttatcatttctgtagggcaacca

SEQ ID NO: 5004288 - DNA, 25 bp, Homo sapien
gattctggcgagagcgcacatggct

SEQ ID NO: 5004289 - DNA, 25 bp, Homo sapien
cgtagatatgcaatccaagagtggc

SEQ ID NO: 5004290 - DNA, 25 bp, Homo sapien
taggagccttcggtttattgcccag

SEQ ID NO: 5004291 - DNA, 25 bp, Homo sapien
aggagccttcggtttattgcccagg

SEQ ID NO: 5004292 - DNA, 25 bp, Homo sapien
attgcccaggctttctgaaggatac

SEQ ID NO: 5004293 - DNA, 25 bp, Homo sapien
ttaggagccttcggtttattgccca

SEQ ID NO: 5004294 - DNA, 25 bp, Homo sapien
atataaaatagaggttgacttgtgt

SEQ ID NO: 5004295 - DNA, 25 bp, Homo sapien
ataaaatagaggttgacttgtgttc

SEQ ID NO: 5004296 - DNA, 25 bp, Homo sapien
taaaatagaggttgacttgtgttct

SEQ ID NO: 5004297 - DNA, 25 bp, Homo sapien
aaaatagaggttgacttgtgttctc

SEQ ID NO: 5004298 - DNA, 25 bp, Homo sapien
tctccatgttattagatagatcgcc

SEQ ID NO: 5004299 - DNA, 25 bp, Homo sapien
gatagatcgccttttccaatagctg

SEQ ID NO: 5004300 - DNA, 25 bp, Homo sapien
gttattagatagatcgccttttcca

SEQ ID NO: 5004301 - DNA, 25 bp, Homo sapien
ccttttccaatagctgattcaggca

SEQ ID NO: 5004302 - DNA, 25 bp, Homo sapien
gagacaatcacattagcaagctgga

SEQ ID NO: 5004303 - DNA, 25 bp, Homo sapien
gaatatatcctaggaaacttggctg

SEQ ID NO: 5004304 - DNA, 25 bp, Homo sapien
tcttctgctgaaacatgtgggagac

SEQ ID NO: 5004305 - DNA, 25 bp, Homo sapien
tattgctactgactgtaagtggtcc

SEQ ID NO: 5004306 - DNA, 25 bp, Homo sapien
tgtccgggtatatggactttttaca

SEQ ID NO: 5004307 - DNA, 25 bp, Homo sapien
ataatgttgagtactgttgcatcac

SEQ ID NO: 5004308 - DNA, 25 bp, Homo sapien
ccacgagtgtttatatgtccgggta

SEQ ID NO: 5004309 - DNA, 25 bp, Homo sapien
taacctaaggttcttatgtgcctaa

SEQ ID NO: 5004310 - DNA, 25 bp, Homo sapien
tacttagctgaacacaatctgatgg

SEQ ID NO: 5004311 - DNA, 25 bp, Homo sapien
tcagtgatatggtcaagcattccca

SEQ ID NO: 5004312 - DNA, 25 bp, Homo sapien
tgaaagcttgtaacttgccaatgca

SEQ ID NO: 5004313 - DNA, 25 bp, Homo sapien
tatgcaatccattatccttgaggga

SEQ ID NO: 5004314 - DNA, 25 bp, Homo sapien
aaatacagaatcacttactccagcc

SEQ ID NO: 5004315 - DNA, 25 bp, Homo sapien
aatagaggacccgactaggtggtga

SEQ ID NO: 5004316 - DNA, 25 bp, Homo sapien
ccatgcttggccctagttggaggaa

SEQ ID NO: 5004317 - DNA, 25 bp, Homo sapien
tcttcgtggaatgaccagacacatg

SEQ ID NO: 5004318 - DNA, 25 bp, Homo sapien
cacttccaatcggataggatgcgca

SEQ ID NO: 5004319 - DNA, 25 bp, Homo sapien
aagacgttaaatatccctaggctga

SEQ ID NO: 5004320 - DNA, 25 bp, Homo sapien
catgtgcacacattatacgcaggtt

SEQ ID NO: 5004321 - DNA, 25 bp, Homo sapien
gattgcaaccccagatgtcctatga

SEQ ID NO: 5004322 - DNA, 25 bp, Homo sapien
gcaaaacattggaagtcaattcctt

SEQ ID NO: 5004323 - DNA, 25 bp, Homo sapien
ttttagcaaaacattggaagtcaat

SEQ ID NO: 5004324 - DNA, 25 bp, Homo sapien
tttagcaaaacattggaagtcaatt

SEQ ID NO: 5004325 - DNA, 25 bp, Homo sapien
agactttggtgtaggttcttcctgt

SEQ ID NO: 5004326 - DNA, 25 bp, Homo sapien
tgttgacatagatggaagctcttac

SEQ ID NO: 5004327 - DNA, 25 bp, Homo sapien
cagtatcgaaggatgcaaatgttga

SEQ ID NO: 5004328 - DNA, 25 bp, Homo sapien
tagccatatacccaggctctgcagt

SEQ ID NO: 5004329 - DNA, 25 bp, Homo sapien
tagataacatcctaaaccttcagtt

SEQ ID NO: 5004330 - DNA, 25 bp, Homo sapien
gttatttggtcatattattgaacta

SEQ ID NO: 5004331 - DNA, 25 bp, Homo sapien
tgcaaaagcttaggattatatcatg

SEQ ID NO: 5004332 - DNA, 25 bp, Homo sapien
tacaattaattaacagaggtataat

SEQ ID NO: 5004333 - DNA, 25 bp, Homo sapien
agagcctcactaactgaagcctttt

SEQ ID NO: 5004334 - DNA, 25 bp, Homo sapien
gagagcctcactaactgaagccttt

SEQ ID NO: 5004335 - DNA, 25 bp, Homo sapien
tctcctgtgccgtgcttacactttg

SEQ ID NO: 5004336 - DNA, 25 bp, Homo sapien
tcttgtaagcaaagcctattcctgc

SEQ ID NO: 5004337 - DNA, 25 bp, Homo sapien
gactctgccctaggtccttctgaga

SEQ ID NO: 5004338 - DNA, 25 bp, Homo sapien
tacactttgcaggagtgattggtcc

SEQ ID NO: 5004339 - DNA, 25 bp, Homo sapien
agctctctcctttgatgaaggaaaa

SEQ ID NO: 5004340 - DNA, 25 bp, Homo sapien
cagctctctcctttgatgaaggaaa

SEQ ID NO: 5004341 - DNA, 25 bp, Homo sapien
ttccactaaccacggccggcagttg

SEQ ID NO: 5004342 - DNA, 25 bp, Homo sapien
aggtctcagtgcctgcttgtacaca

SEQ ID NO: 5004343 - DNA, 25 bp, Homo sapien
aataagcatttccactaaccacggc

SEQ ID NO: 5004344 - DNA, 25 bp, Homo sapien
cagtgcctgcttgtacacaataatt

SEQ ID NO: 5004345 - DNA, 25 bp, Homo sapien
tcagaggtcagctggcgcttcattt

SEQ ID NO: 5004346 - DNA, 25 bp, Homo sapien
gcttcatttgcacccagcatccatg

SEQ ID NO: 5004347 - DNA, 25 bp, Homo sapien
gagtgaaagggccaagaatcaattt

SEQ ID NO: 5004348 - DNA, 25 bp, Homo sapien
cacaggcttcgtgaatcatattgga

SEQ ID NO: 5004349 - DNA, 25 bp, Homo sapien
gagatacaggtgcaggtacttctcc

SEQ ID NO: 5004350 - DNA, 25 bp, Homo sapien
gatacaggtgcaggtacttctccat

SEQ ID NO: 5004351 - DNA, 25 bp, Homo sapien
tggagatacaggtgcaggtacttct

SEQ ID NO: 5004352 - DNA, 25 bp, Homo sapien
ctggagatacaggtgcaggtacttc

SEQ ID NO: 5004353 - DNA, 25 bp, Homo sapien
tgaggaggtaacatgccacaccact

SEQ ID NO: 5004354 - DNA, 25 bp, Homo sapien
gaggtaacatgccacaccactccaa

SEQ ID NO: 5004355 - DNA, 25 bp, Homo sapien
ggatgatgaggaggtaacatgccac

SEQ ID NO: 5004356 - DNA, 25 bp, Homo sapien
tatttacaggttcgatttatagaag

SEQ ID NO: 5004357 - DNA, 25 bp, Homo sapien
caacagggctgtatggctgctgagt

SEQ ID NO: 5004358 - DNA, 25 bp, Homo sapien
tccacagagggaaccacttttaaca

SEQ ID NO: 5004359 - DNA, 25 bp, Homo sapien
ctaagaataacagaaacagcatcct

SEQ ID NO: 5004360 - DNA, 25 bp, Homo sapien
tagatagtgactgatgaaaccactg

SEQ ID NO: 5004361 - DNA, 25 bp, Homo sapien
cagatgaatagaccagctgtgcctg

SEQ ID NO: 5004362 - DNA, 25 bp, Homo sapien
taagtctcacaaggcaaactaaggt

SEQ ID NO: 5004363 - DNA, 25 bp, Homo sapien
cttgatcaacataagcagatgaata

SEQ ID NO: 5004364 - DNA, 25 bp, Homo sapien
agagatgtgagaaaccggaaggact

SEQ ID NO: 5004365 - DNA, 25 bp, Homo sapien
ttaccacctgtgactatatcagatg

SEQ ID NO: 5004366 - DNA, 25 bp, Homo sapien
atatcagatgttgtattagctatca

SEQ ID NO: 5004367 - DNA, 25 bp, Homo sapien
tatcagatgttgtattagctatcat

SEQ ID NO: 5004368 - DNA, 25 bp, Homo sapien
cacctgtgactatatcagatgttgt

SEQ ID NO: 5004369 - DNA, 25 bp, Homo sapien
aaaatagtggttctacggctgcctg

SEQ ID NO: 5004370 - DNA, 25 bp, Homo sapien
ggttctacggctgcctgttgattta

SEQ ID NO: 5004371 - DNA, 25 bp, Homo sapien
tgatttaccatgtgtggccccattc

SEQ ID NO: 5004372 - DNA, 25 bp, Homo sapien
tgtggccccattccaattgctctca

SEQ ID NO: 5004373 - DNA, 25 bp, Homo sapien
tagaatgctttgtggtgcacgtaac

SEQ ID NO: 5004374 - DNA, 25 bp, Homo sapien
tcttcctttcaacagctagggctgc

SEQ ID NO: 5004375 - DNA, 25 bp, Homo sapien
tacacactggtacctaaggagacat

SEQ ID NO: 5004376 - DNA, 25 bp, Homo sapien
tggatatccccggtaaattggaggc

SEQ ID NO: 5004377 - DNA, 25 bp, Homo sapien
tatatactcaatcaggaatgacaag

SEQ ID NO: 5004378 - DNA, 25 bp, Homo sapien
tatactcaatcaggaatgacaagat

SEQ ID NO: 5004379 - DNA, 25 bp, Homo sapien
caacatatatactcaatcaggaatg

SEQ ID NO: 5004380 - DNA, 25 bp, Homo sapien
catatatactcaatcaggaatgaca

SEQ ID NO: 5004381 - DNA, 25 bp, Homo sapien
tacacttctataaaagtcttatgtg

SEQ ID NO: 5004382 - DNA, 25 bp, Homo sapien
tactttcatggctctttattcaata

SEQ ID NO: 5004383 - DNA, 25 bp, Homo sapien
cttctataaaagtcttatgtgcatc

SEQ ID NO: 5004384 - DNA, 25 bp, Homo sapien
caaccctgtgcatggaaattatgaa

SEQ ID NO: 5004385 - DNA, 25 bp, Homo sapien
ggtttgatagatatggtgtagttga

SEQ ID NO: 5004386 - DNA, 25 bp, Homo sapien
agcaaggtctcacctccagctgagg

SEQ ID NO: 5004387 - DNA, 25 bp, Homo sapien
cctttctaataagtgatgcttccct

SEQ ID NO: 5004388 - DNA, 25 bp, Homo sapien
aggaagcaaggtctcacctccagct

SEQ ID NO: 5004389 - DNA, 25 bp, Homo sapien
taccccagattacaacatgaacaaa

SEQ ID NO: 5004390 - DNA, 25 bp, Homo sapien
ccccacacttggtagggtaagctgt

SEQ ID NO: 5004391 - DNA, 25 bp, Homo sapien
gatactctagcatttagaaagaagg

SEQ ID NO: 5004392 - DNA, 25 bp, Homo sapien
gattcaccacattagggaagcaaac

SEQ ID NO: 5004393 - DNA, 25 bp, Homo sapien
tgtcaggccattctgagtcacatat

SEQ ID NO: 5004394 - DNA, 25 bp, Homo sapien
taatggtaccctttatatcaactcc

SEQ ID NO: 5004395 - DNA, 25 bp, Homo sapien
gaagacaatgcctcatattttatga

SEQ ID NO: 5004396 - DNA, 25 bp, Homo sapien
aaaaagtgctatggccaccttgaga

SEQ ID NO: 5004397 - DNA, 25 bp, Homo sapien
aactgactgggaggaggatctttga

SEQ ID NO: 5004398 - DNA, 25 bp, Homo sapien
gggcagcccctcgtctgtaaggacc

SEQ ID NO: 5004399 - DNA, 25 bp, Homo sapien
tcgtctgtaaggacccttaaaggca

SEQ ID NO: 5004400 - DNA, 25 bp, Homo sapien
aaggacccttaaaggcatttcagca

SEQ ID NO: 5004401 - DNA, 25 bp, Homo sapien
tcagcaaccattctaggcgttgttc

SEQ ID NO: 5004402 - DNA, 25 bp, Homo sapien
ctgatagtcagcaaccattctaggc

SEQ ID NO: 5004403 - DNA, 25 bp, Homo sapien
tagtcagcaaccattctaggcgttg

SEQ ID NO: 5004404 - DNA, 25 bp, Homo sapien
gcaaccattctaggcgttgttcttc

SEQ ID NO: 5004405 - DNA, 25 bp, Homo sapien
gatctaaatccatccaagccttggc

SEQ ID NO: 5004406 - DNA, 25 bp, Homo sapien
aagccttggctactgtgttttgaaa

SEQ ID NO: 5004407 - DNA, 25 bp, Homo sapien
cagccagtaggctgggatttcctgc

SEQ ID NO: 5004408 - DNA, 25 bp, Homo sapien
aatggttgcagagattccagaaatc

SEQ ID NO: 5004409 - DNA, 25 bp, Homo sapien
tgtgccactgaaaagtcctgctggt

SEQ ID NO: 5004410 - DNA, 25 bp, Homo sapien
gaatttgatcatgtaaagaggcctg

SEQ ID NO: 5004411 - DNA, 25 bp, Homo sapien
gacaaagtctgaaagtgcatgctga

SEQ ID NO: 5004412 - DNA, 25 bp, Homo sapien
tctaagctgctgaaaatcggaacga

SEQ ID NO: 5004413 - DNA, 25 bp, Homo sapien
tacatgctggagtggttcgaaatca

SEQ ID NO: 5004414 - DNA, 25 bp, Homo sapien
catgctggagtggttcgaaatcacg

SEQ ID NO: 5004415 - DNA, 25 bp, Homo sapien
tgctggagtggttcgaaatcacggt

SEQ ID NO: 5004416 - DNA, 25 bp, Homo sapien
gtacatgctggagtggttcgaaatc

SEQ ID NO: 5004417 - DNA, 25 bp, Homo sapien
tatgtactgttaaaattgaggtcac

SEQ ID NO: 5004418 - DNA, 25 bp, Homo sapien
gcaggccaggaagtataatagcaaa

SEQ ID NO: 5004419 - DNA, 25 bp, Homo sapien
tatcctggcaaatactcctgcaggc

SEQ ID NO: 5004420 - DNA, 25 bp, Homo sapien
gtagggttaagcatggacagccaga

SEQ ID NO: 5004421 - DNA, 25 bp, Homo sapien
tcaaggttcagacaaacatttcgag

SEQ ID NO: 5004422 - DNA, 25 bp, Homo sapien
tcagacaaacatttcgaggtgtggg

SEQ ID NO: 5004423 - DNA, 25 bp, Homo sapien
caaggttcagacaaacatttcgagg

SEQ ID NO: 5004424 - DNA, 25 bp, Homo sapien
ggttcagacaaacatttcgaggtgt

SEQ ID NO: 5004425 - DNA, 25 bp, Homo sapien
gtgccagagtttgcaaaacagtttt

SEQ ID NO: 5004426 - DNA, 25 bp, Homo sapien
cattcaaagtcctaagtgccagagt

SEQ ID NO: 5004427 - DNA, 25 bp, Homo sapien
tcccttttctcagccagtgacatgc

SEQ ID NO: 5004428 - DNA, 25 bp, Homo sapien
gccaaacaccttactttcaaaagca

SEQ ID NO: 5004429 - DNA, 25 bp, Homo sapien
taatcatgccacatcttgtagccat

SEQ ID NO: 5004430 - DNA, 25 bp, Homo sapien
ttaatcatgccacatcttgtagcca

SEQ ID NO: 5004431 - DNA, 25 bp, Homo sapien
ctaattgtacctacctcagaaagac

SEQ ID NO: 5004432 - DNA, 25 bp, Homo sapien
tattagctacgtgaccctgagcaag

SEQ ID NO: 5004433 - DNA, 25 bp, Homo sapien
cagactgcctggtttctaaatctag

SEQ ID NO: 5004434 - DNA, 25 bp, Homo sapien
taaatctagctccaccatttattag

SEQ ID NO: 5004435 - DNA, 25 bp, Homo sapien
cggggggcagaagtatttcctgtct

SEQ ID NO: 5004436 - DNA, 25 bp, Homo sapien
atttcctgtctctctcccagtggta

SEQ ID NO: 5004437 - DNA, 25 bp, Homo sapien
ctgtctctctcccagtggtagccat

SEQ ID NO: 5004438 - DNA, 25 bp, Homo sapien
cagaagtatttcctgtctctctccc

SEQ ID NO: 5004439 - DNA, 25 bp, Homo sapien
tgctgactattatgaggaggccgct

SEQ ID NO: 5004440 - DNA, 25 bp, Homo sapien
gatcaagggctaggctgtcatctgg

SEQ ID NO: 5004441 - DNA, 25 bp, Homo sapien
tctgtcacagactgcgatcaagggc

SEQ ID NO: 5004442 - DNA, 25 bp, Homo sapien
ccaaagggccttgcgatacggtgac

SEQ ID NO: 5004443 - DNA, 25 bp, Homo sapien
tgagaaacagctccaagtcagttct

SEQ ID NO: 5004444 - DNA, 25 bp, Homo sapien
tcagttattcgctcccaggtacaca

SEQ ID NO: 5004445 - DNA, 25 bp, Homo sapien
taagattacccagaaagctttgacg

SEQ ID NO: 5004446 - DNA, 25 bp, Homo sapien
gataagccagaagatcgtcataaga

SEQ ID NO: 5004447 - DNA, 25 bp, Homo sapien
tcattggatcaattcccaaatagtt

SEQ ID NO: 5004448 - DNA, 25 bp, Homo sapien
caataactgcctcagagcttttaat

SEQ ID NO: 5004449 - DNA, 25 bp, Homo sapien
ttatttcataaccaggaccatgtag

SEQ ID NO: 5004450 - DNA, 25 bp, Homo sapien
aattctcattggatcaattcccaaa

SEQ ID NO: 5004451 - DNA, 25 bp, Homo sapien
ttggttctgccactaggtcaaattc

SEQ ID NO: 5004452 - DNA, 25 bp, Homo sapien
aattctcaatgtctcttattcttgg

SEQ ID NO: 5004453 - DNA, 25 bp, Homo sapien
gacccatacacagccataattctca

SEQ ID NO: 5004454 - DNA, 25 bp, Homo sapien
gcatagagaaatcgtttgtggaccc

SEQ ID NO: 5004455 - DNA, 25 bp, Homo sapien
catgactgactcagttctctcacca

SEQ ID NO: 5004456 - DNA, 25 bp, Homo sapien
atgactgactcagttctctcaccat

SEQ ID NO: 5004457 - DNA, 25 bp, Homo sapien
taccatgactgactcagttctctca

SEQ ID NO: 5004458 - DNA, 25 bp, Homo sapien
ctgtaccatgactgactcagttctc

SEQ ID NO: 5004459 - DNA, 25 bp, Homo sapien
gagcttacttattatcatgaggaca

SEQ ID NO: 5004460 - DNA, 25 bp, Homo sapien
taacgagtagctcttttgggaacta

SEQ ID NO: 5004461 - DNA, 25 bp, Homo sapien
gagaggtgccaagctctttaacgag

SEQ ID NO: 5004462 - DNA, 25 bp, Homo sapien
gaggacagcatccagctattcatga

SEQ ID NO: 5004463 - DNA, 25 bp, Homo sapien
gccaggtgttgttctgctatcacag

SEQ ID NO: 5004464 - DNA, 25 bp, Homo sapien
tgaaaatgatgtcgcttggcacagt

SEQ ID NO: 5004465 - DNA, 25 bp, Homo sapien
tagtgccaatgactctccagccaaa

SEQ ID NO: 5004466 - DNA, 25 bp, Homo sapien
tgagtcccatgatcagaagaagagg

SEQ ID NO: 5004467 - DNA, 25 bp, Homo sapien
ccactggccttcatgatagttcagg

SEQ ID NO: 5004468 - DNA, 25 bp, Homo sapien
tcctgcactgtaggttagaccgact

SEQ ID NO: 5004469 - DNA, 25 bp, Homo sapien
cctggaggagaaagattacattgct

SEQ ID NO: 5004470 - DNA, 25 bp, Homo sapien
aagaactgtagttttcctagggcag

SEQ ID NO: 5004471 - DNA, 25 bp, Homo sapien
gctttgaagatagacgggaatcact

SEQ ID NO: 5004472 - DNA, 25 bp, Homo sapien
tgcaatgcgagaaagacctaactgg

SEQ ID NO: 5004473 - DNA, 25 bp, Homo sapien
taaaatgggatgaatgtacctggaa

SEQ ID NO: 5004474 - DNA, 25 bp, Homo sapien
gacagacgtgaatatttggagccaa

SEQ ID NO: 5004475 - DNA, 25 bp, Homo sapien
ctacgaaaaggccaatgggtcaaag

SEQ ID NO: 5004476 - DNA, 25 bp, Homo sapien
taaataacacactacgaaaaggcca

SEQ ID NO: 5004477 - DNA, 25 bp, Homo sapien
tggcacgaaactagaaataagtaat

SEQ ID NO: 5004478 - DNA, 25 bp, Homo sapien
tctccaaacacaatggcacgaaact

SEQ ID NO: 5004479 - DNA, 25 bp, Homo sapien
agagaactagataaggcatcagtga

SEQ ID NO: 5004480 - DNA, 25 bp, Homo sapien
cttctcaatgccctgacattgatga

SEQ ID NO: 5004481 - DNA, 25 bp, Homo sapien
actttaaagagggagaggagccaag

SEQ ID NO: 5004482 - DNA, 25 bp, Homo sapien
agcctgagcgacacagaagacggtg

SEQ ID NO: 5004483 - DNA, 25 bp, Homo sapien
cactttaaagagggagaggagccaa

SEQ ID NO: 5004484 - DNA, 25 bp, Homo sapien
ctgagcgacacagaagacggtgatt

SEQ ID NO: 5004485 - DNA, 25 bp, Homo sapien
ccttggcatgatataagagctcttc

SEQ ID NO: 5004486 - DNA, 25 bp, Homo sapien
gatataagagctcttcactctgtgt

SEQ ID NO: 5004487 - DNA, 25 bp, Homo sapien
ggcatgatataagagctcttcactc

SEQ ID NO: 5004488 - DNA, 25 bp, Homo sapien
ccaaacttccttggcatgatataag

SEQ ID NO: 5004489 - DNA, 25 bp, Homo sapien
agacagctcgttaggcccacctgta

SEQ ID NO: 5004490 - DNA, 25 bp, Homo sapien
tgtaccgtggcatcttccctgtgct

SEQ ID NO: 5004491 - DNA, 25 bp, Homo sapien
tgaggacgtggacctccgggtgaac

SEQ ID NO: 5004492 - DNA, 25 bp, Homo sapien
ggtggccagatatcacccacatgcc

SEQ ID NO: 5004493 - DNA, 25 bp, Homo sapien
tgttcctaactgtatgtccatgtct

SEQ ID NO: 5004494 - DNA, 25 bp, Homo sapien
gagttcccagagtctactgttccta

SEQ ID NO: 5004495 - DNA, 25 bp, Homo sapien
tgtttgttggcaggtgtatgtttta

SEQ ID NO: 5004496 - DNA, 25 bp, Homo sapien
tagtggacgtaatacccaacaggaa

SEQ ID NO: 5004497 - DNA, 25 bp, Homo sapien
cacttccattcctcgtggatttcgc

SEQ ID NO: 5004498 - DNA, 25 bp, Homo sapien
cattttgtctgtccagaatcacatc

SEQ ID NO: 5004499 - DNA, 25 bp, Homo sapien
ggatttcgctcatgccattttgtct

SEQ ID NO: 5004500 - DNA, 25 bp, Homo sapien
tcatactgttttggctgtaagcacc

SEQ ID NO: 5004501 - DNA, 25 bp, Homo sapien
tactggttatttgcaggtattcttt

SEQ ID NO: 5004502 - DNA, 25 bp, Homo sapien
atttgcaggtattcttttactcatg

SEQ ID NO: 5004503 - DNA, 25 bp, Homo sapien
catgtactggttatttgcaggtatt

SEQ ID NO: 5004504 - DNA, 25 bp, Homo sapien
ttactcatgatctctctgtatttct

SEQ ID NO: 5004505 - DNA, 25 bp, Homo sapien
cctacttctaccataggaatctctg

SEQ ID NO: 5004506 - DNA, 25 bp, Homo sapien
cattgtccctacttctaccatagga

SEQ ID NO: 5004507 - DNA, 25 bp, Homo sapien
tgtccctacttctaccataggaatc

SEQ ID NO: 5004508 - DNA, 25 bp, Homo sapien
tacttctaccataggaatctctgga

SEQ ID NO: 5004509 - DNA, 25 bp, Homo sapien
ggatagaaattaccccagagagtgg

SEQ ID NO: 5004510 - DNA, 25 bp, Homo sapien
tactttatagcctgggtatcgggta

SEQ ID NO: 5004511 - DNA, 25 bp, Homo sapien
taatcaagttaaggtacccagggca

SEQ ID NO: 5004512 - DNA, 25 bp, Homo sapien
gcaagaagttattatcacaggatag

SEQ ID NO: 5004513 - DNA, 25 bp, Homo sapien
aaatattatttgatgctgagtcaca

SEQ ID NO: 5004514 - DNA, 25 bp, Homo sapien
catagtgtactatgttctttgaagt

SEQ ID NO: 5004515 - DNA, 25 bp, Homo sapien
aacctagggcactcatgggaacaag

SEQ ID NO: 5004516 - DNA, 25 bp, Homo sapien
tgtatgaacaacattgccaaaccac

SEQ ID NO: 5004517 - DNA, 25 bp, Homo sapien
aatgaatgcatgcagtgaggtcagg

SEQ ID NO: 5004518 - DNA, 25 bp, Homo sapien
gctctggggcaggtgaatgaatgca

SEQ ID NO: 5004519 - DNA, 25 bp, Homo sapien
gaatgaatgcatgcagtgaggtcag

SEQ ID NO: 5004520 - DNA, 25 bp, Homo sapien
ctggggcaggtgaatgaatgcatgc

SEQ ID NO: 5004521 - DNA, 25 bp, Homo sapien
ccctgccttaactggattcttaatt

SEQ ID NO: 5004522 - DNA, 25 bp, Homo sapien
ctgaatgaattacagtccctgcctt

SEQ ID NO: 5004523 - DNA, 25 bp, Homo sapien
tgaaactagctgtccttcctaagga

SEQ ID NO: 5004524 - DNA, 25 bp, Homo sapien
ccttacaaatgaaactagctgtcct

SEQ ID NO: 5004525 - DNA, 25 bp, Homo sapien
tgtgatattaagctgagttccccta

SEQ ID NO: 5004526 - DNA, 25 bp, Homo sapien
gcaccagactttgtagttgaaggca

SEQ ID NO: 5004527 - DNA, 25 bp, Homo sapien
gatattaagctgagttcccctatcc

SEQ ID NO: 5004528 - DNA, 25 bp, Homo sapien
ctcagggcaccagactttgtagttg

SEQ ID NO: 5004529 - DNA, 25 bp, Homo sapien
tcaaaacaatacccatgctgctgat

SEQ ID NO: 5004530 - DNA, 25 bp, Homo sapien
tcaatatcaaacaagctatagagta

SEQ ID NO: 5004531 - DNA, 25 bp, Homo sapien
aatatcaaacaagctatagagtaca

SEQ ID NO: 5004532 - DNA, 25 bp, Homo sapien
gctatagagtacatcattcaggcac

SEQ ID NO: 5004533 - DNA, 25 bp, Homo sapien
agctatagagtacatcattcaggca

SEQ ID NO: 5004534 - DNA, 25 bp, Homo sapien
ttattgccagtggccacagtgtgaa

SEQ ID NO: 5004535 - DNA, 25 bp, Homo sapien
ccagtggccacagtgtgaagttgta

SEQ ID NO: 5004536 - DNA, 25 bp, Homo sapien
cagtggccacagtgtgaagttgtag

SEQ ID NO: 5004537 - DNA, 25 bp, Homo sapien
ttgccagtggccacagtgtgaagtt

SEQ ID NO: 5004538 - DNA, 25 bp, Homo sapien
aacctgactgtactatcagccacac

SEQ ID NO: 5004539 - DNA, 25 bp, Homo sapien
cacaacctgactgtactatcagcca

SEQ ID NO: 5004540 - DNA, 25 bp, Homo sapien
tgactgtactatcagccacacccat

SEQ ID NO: 5004541 - DNA, 25 bp, Homo sapien
ctccacaacctgactgtactatcag

SEQ ID NO: 5004542 - DNA, 25 bp, Homo sapien
aaacctgtttcagtagcaattttgc

SEQ ID NO: 5004543 - DNA, 25 bp, Homo sapien
cttctaaaacctgtttcagtagcaa

SEQ ID NO: 5004544 - DNA, 25 bp, Homo sapien
cctgtttcagtagcaattttgccca

SEQ ID NO: 5004545 - DNA, 25 bp, Homo sapien
tctaaaacctgtttcagtagcaatt

SEQ ID NO: 5004546 - DNA, 25 bp, Homo sapien
gaaccacgatgaggagtttgaaatg

SEQ ID NO: 5004547 - DNA, 25 bp, Homo sapien
aagtctcactgatgaaccacgatga

SEQ ID NO: 5004548 - DNA, 25 bp, Homo sapien
ttgaaatgcattcagattggcagtg

SEQ ID NO: 5004549 - DNA, 25 bp, Homo sapien
tattccatacaccagaagtctcact

SEQ ID NO: 5004550 - DNA, 25 bp, Homo sapien
cggaggatgctattgcaggagttta

SEQ ID NO: 5004551 - DNA, 25 bp, Homo sapien
gatgctattgcaggagtttataaag

SEQ ID NO: 5004552 - DNA, 25 bp, Homo sapien
tatcggaggatgctattgcaggagt

SEQ ID NO: 5004553 - DNA, 25 bp, Homo sapien
gaggatgctattgcaggagtttata

SEQ ID NO: 5004554 - DNA, 25 bp, Homo sapien
tcaccaatctgcacatcatgctcag

SEQ ID NO: 5004555 - DNA, 25 bp, Homo sapien
ctcattactgattacaccaccagaa

SEQ ID NO: 5004556 - DNA, 25 bp, Homo sapien
ccttcacaatgactttgcagccagc

SEQ ID NO: 5004557 - DNA, 25 bp, Homo sapien
gaatttggccctaaaatagcttcac

SEQ ID NO: 5004558 - DNA, 25 bp, Homo sapien
gaccgactagcttatcctgcaactt

SEQ ID NO: 5004559 - DNA, 25 bp, Homo sapien
cctgcaactttctagataggagaac

SEQ ID NO: 5004560 - DNA, 25 bp, Homo sapien
tccctggttactactgtcacttggt

SEQ ID NO: 5004561 - DNA, 25 bp, Homo sapien
tcaaagaccgactagcttatcctgc

SEQ ID NO: 5004562 - DNA, 25 bp, Homo sapien
agctggcaaagcagccttctttcca

SEQ ID NO: 5004563 - DNA, 25 bp, Homo sapien
tggcaaagcagccttctttccatca

SEQ ID NO: 5004564 - DNA, 25 bp, Homo sapien
tttagctggcaaagcagccttcttt

SEQ ID NO: 5004565 - DNA, 25 bp, Homo sapien
cagcttttagctggcaaagcagcct

SEQ ID NO: 5004566 - DNA, 25 bp, Homo sapien
gttgctttagttagagatccttcaa

SEQ ID NO: 5004567 - DNA, 25 bp, Homo sapien
tgaggatagttgctttagttagaga

SEQ ID NO: 5004568 - DNA, 25 bp, Homo sapien
tagttgctttagttagagatccttc

SEQ ID NO: 5004569 - DNA, 25 bp, Homo sapien
ggatagttgctttagttagagatcc

SEQ ID NO: 5004570 - DNA, 25 bp, Homo sapien
tggatgagggtttgaaaaaattgaa

SEQ ID NO: 5004571 - DNA, 25 bp, Homo sapien
ttctgcatcttccactcgtgttgac

SEQ ID NO: 5004572 - DNA, 25 bp, Homo sapien
tgttgactttgagatttgcggcatt

SEQ ID NO: 5004573 - DNA, 25 bp, Homo sapien
gaatctttcacagagccgttcagag

SEQ ID NO: 5004574 - DNA, 25 bp, Homo sapien
gaattattaagacatcaggatgcaa

SEQ ID NO: 5004575 - DNA, 25 bp, Homo sapien
gctgtctgcttgtcttgctggtgta

SEQ ID NO: 5004576 - DNA, 25 bp, Homo sapien
ttcacttccccttgttgcctgtatt

SEQ ID NO: 5004577 - DNA, 25 bp, Homo sapien
tacatctgctactctggctaagaaa

SEQ ID NO: 5004578 - DNA, 25 bp, Homo sapien
tggcgtcccctaaagttctgtcctg

SEQ ID NO: 5004579 - DNA, 25 bp, Homo sapien
gttctgtcctgggtatattccacaa

SEQ ID NO: 5004580 - DNA, 25 bp, Homo sapien
tgcaatggtggcgtcccctaaagtt

SEQ ID NO: 5004581 - DNA, 25 bp, Homo sapien
ctgtcctgggtatattccacaatca

SEQ ID NO: 5004582 - DNA, 25 bp, Homo sapien
tttgaggaaggtacatttcacacag

SEQ ID NO: 5004583 - DNA, 25 bp, Homo sapien
ctgatgttataaaaaggtttgagga

SEQ ID NO: 5004584 - DNA, 25 bp, Homo sapien
tgatgttataaaaaggtttgaggaa

SEQ ID NO: 5004585 - DNA, 25 bp, Homo sapien
ggaaggtacatttcacacaggagtg

SEQ ID NO: 5004586 - DNA, 25 bp, Homo sapien
acctcagcatcactataccacatgt

SEQ ID NO: 5004587 - DNA, 25 bp, Homo sapien
tcacattgctacctctaaatgaatg

SEQ ID NO: 5004588 - DNA, 25 bp, Homo sapien
ttgctacctctaaatgaatgtcaac

SEQ ID NO: 5004589 - DNA, 25 bp, Homo sapien
cattgctacctctaaatgaatgtca

SEQ ID NO: 5004590 - DNA, 25 bp, Homo sapien
cacattgctacctctaaatgaatgt

SEQ ID NO: 5004591 - DNA, 25 bp, Homo sapien
cttcattaggctgaattgtcttgtg

SEQ ID NO: 5004592 - DNA, 25 bp, Homo sapien
tcaactgcagccgatcgatacttca

SEQ ID NO: 5004593 - DNA, 25 bp, Homo sapien
ttaggctgaattgtcttgtgcccat

SEQ ID NO: 5004594 - DNA, 25 bp, Homo sapien
tgcagccgatcgatacttcattagg

SEQ ID NO: 5004595 - DNA, 25 bp, Homo sapien
cgtattatgcagtggctcagggagc

SEQ ID NO: 5004596 - DNA, 25 bp, Homo sapien
ttgaagctgtggcttaattaccacc

SEQ ID NO: 5004597 - DNA, 25 bp, Homo sapien
tggcttaattaccacccgtattatg

SEQ ID NO: 5004598 - DNA, 25 bp, Homo sapien
taattaccacccgtattatgcagtg

SEQ ID NO: 5004599 - DNA, 25 bp, Homo sapien
tatttcccgaactactccagcagtt

SEQ ID NO: 5004600 - DNA, 25 bp, Homo sapien
catcccttaaatacagctggttgcc

SEQ ID NO: 5004601 - DNA, 25 bp, Homo sapien
agtttactgacacctttgagaatcc

SEQ ID NO: 5004602 - DNA, 25 bp, Homo sapien
gtcacccaacttctatggttctcag

SEQ ID NO: 5004603 - DNA, 25 bp, Homo sapien
caccagactccacacaagtttagac

SEQ ID NO: 5004604 - DNA, 25 bp, Homo sapien
gactccacacaagtttagacttgta

SEQ ID NO: 5004605 - DNA, 25 bp, Homo sapien
ccacacaagtttagacttgtaaaca

SEQ ID NO: 5004606 - DNA, 25 bp, Homo sapien
cagactccacacaagtttagacttg

SEQ ID NO: 5004607 - DNA, 25 bp, Homo sapien
cttaatggccaaatgtgtcgtgcta

SEQ ID NO: 5004608 - DNA, 25 bp, Homo sapien
ttccttaatggccaaatgtgtcgtg

SEQ ID NO: 5004609 - DNA, 25 bp, Homo sapien
gccaaatgtgtcgtgctattccaca

SEQ ID NO: 5004610 - DNA, 25 bp, Homo sapien
aatggccaaatgtgtcgtgctattc

SEQ ID NO: 5004611 - DNA, 25 bp, Homo sapien
ttcatttagagtgatgattgatatg

SEQ ID NO: 5004612 - DNA, 25 bp, Homo sapien
tggtaatagatacagtgtgattgaa

SEQ ID NO: 5004613 - DNA, 25 bp, Homo sapien
tcatttagagtgatgattgatatgg

SEQ ID NO: 5004614 - DNA, 25 bp, Homo sapien
atatggtaatagatacagtgtgatt

SEQ ID NO: 5004615 - DNA, 25 bp, Homo sapien
tatagacattggtattgaacataac

SEQ ID NO: 5004616 - DNA, 25 bp, Homo sapien
tggtatagacattggtattgaacat

SEQ ID NO: 5004617 - DNA, 25 bp, Homo sapien
ggtatagacattggtattgaacata

SEQ ID NO: 5004618 - DNA, 25 bp, Homo sapien
tagacattggtattgaacataacat

SEQ ID NO: 5004619 - DNA, 25 bp, Homo sapien
tatcaatccaactacagctgacaag

SEQ ID NO: 5004620 - DNA, 25 bp, Homo sapien
tagggtcctgaactgcctgagagat

SEQ ID NO: 5004621 - DNA, 25 bp, Homo sapien
cacacaaagtaataggtgcaggatt

SEQ ID NO: 5004622 - DNA, 25 bp, Homo sapien
cctgagagattcataaccagtactc

SEQ ID NO: 5004623 - DNA, 25 bp, Homo sapien
ccataaaatgggcttgatctgttgc

SEQ ID NO: 5004624 - DNA, 25 bp, Homo sapien
gctgcgtgactattcccagtaagaa

SEQ ID NO: 5004625 - DNA, 25 bp, Homo sapien
tgcatactctgcaaaactctggtgc

SEQ ID NO: 5004626 - DNA, 25 bp, Homo sapien
tgttaaatgggccacggtatccatt

SEQ ID NO: 5004627 - DNA, 25 bp, Homo sapien
tgtgcaagcgacattattatcaaag

SEQ ID NO: 5004628 - DNA, 25 bp, Homo sapien
tttatctgtctttgtgcaagcgaca

SEQ ID NO: 5004629 - DNA, 25 bp, Homo sapien
ttggggatttaaatcatgcattagc

SEQ ID NO: 5004630 - DNA, 25 bp, Homo sapien
aggatattgtaatgctgaaaatgta

SEQ ID NO: 5004631 - DNA, 25 bp, Homo sapien
tgtagcctgacatttgtaatacata

SEQ ID NO: 5004632 - DNA, 25 bp, Homo sapien
ctctgtagcctgacatttgtaatac

SEQ ID NO: 5004633 - DNA, 25 bp, Homo sapien
tctgtagcctgacatttgtaataca

SEQ ID NO: 5004634 - DNA, 25 bp, Homo sapien
ttctctgtagcctgacatttgtaat

SEQ ID NO: 5004635 - DNA, 25 bp, Homo sapien
ttttctccgcatcatcctccagatt

SEQ ID NO: 5004636 - DNA, 25 bp, Homo sapien
caggatgaaggaaggtattgtgagc

SEQ ID NO: 5004637 - DNA, 25 bp, Homo sapien
tcaggatgaaggaaggtattgtgag

SEQ ID NO: 5004638 - DNA, 25 bp, Homo sapien
cctgcctcttttctccgcatcatcc

SEQ ID NO: 5004639 - DNA, 25 bp, Homo sapien
gctaaagaagtttggcaccttgtcc

SEQ ID NO: 5004640 - DNA, 25 bp, Homo sapien
tgctaaagaagtttggcaccttgtc

SEQ ID NO: 5004641 - DNA, 25 bp, Homo sapien
acatatataccccttccgatacagt

SEQ ID NO: 5004642 - DNA, 25 bp, Homo sapien
catatataccccttccgatacagtc

SEQ ID NO: 5004643 - DNA, 25 bp, Homo sapien
tttgtttgtggcatcaatgtttctg

SEQ ID NO: 5004644 - DNA, 25 bp, Homo sapien
gtggcatcaatgtttctgctctcaa

SEQ ID NO: 5004645 - DNA, 25 bp, Homo sapien
gaggttttgtttgtggcatcaatgt

SEQ ID NO: 5004646 - DNA, 25 bp, Homo sapien
tgctctcaaaagcagcattataaaa

SEQ ID NO: 5004647 - DNA, 25 bp, Homo sapien
tctatctgtttaggcagagtgtgca

SEQ ID NO: 5004648 - DNA, 25 bp, Homo sapien
caccacgcaggcaagtgtctatctg

SEQ ID NO: 5004649 - DNA, 25 bp, Homo sapien
tgtgtgcagagacgcattgcctgaa

SEQ ID NO: 5004650 - DNA, 25 bp, Homo sapien
aagagctgatggatgatacccctgc

SEQ ID NO: 5004651 - DNA, 25 bp, Homo sapien
tcatctgacgccaactgaggacttt

SEQ ID NO: 5004652 - DNA, 25 bp, Homo sapien
tggtcttctttcatctgacgccaac

SEQ ID NO: 5004653 - DNA, 25 bp, Homo sapien
actgaggactttgtctaaacaccca

SEQ ID NO: 5004654 - DNA, 25 bp, Homo sapien
tctaaacacccaagcctaggcatca

SEQ ID NO: 5004655 - DNA, 25 bp, Homo sapien
cttctctctcttcccgtcctttctg

SEQ ID NO: 5004656 - DNA, 25 bp, Homo sapien
ttcttctctctcttcccgtcctttc

SEQ ID NO: 5004657 - DNA, 25 bp, Homo sapien
ctctctcttcccgtcctttctgcat

SEQ ID NO: 5004658 - DNA, 25 bp, Homo sapien
ttctctctcttcccgtcctttctgc

SEQ ID NO: 5004659 - DNA, 25 bp, Homo sapien
tcaaccttcagctcttttgcttgtg

SEQ ID NO: 5004660 - DNA, 25 bp, Homo sapien
ctttcaaccttcagctcttttgctt

SEQ ID NO: 5004661 - DNA, 25 bp, Homo sapien
accttcagctcttttgcttgtgaca

SEQ ID NO: 5004662 - DNA, 25 bp, Homo sapien
gctcttttgcttgtgacatagccat

SEQ ID NO: 5004663 - DNA, 25 bp, Homo sapien
caatcttgggattaacaatactgct

SEQ ID NO: 5004664 - DNA, 25 bp, Homo sapien
tcaaagtggacaagctgtatcagca

SEQ ID NO: 5004665 - DNA, 25 bp, Homo sapien
cttattatgcagagggtcaagcccc

SEQ ID NO: 5004666 - DNA, 25 bp, Homo sapien
tcaccataagggatacaatcttggg

SEQ ID NO: 5004667 - DNA, 25 bp, Homo sapien
tcattgcacattcttaagttcttca

SEQ ID NO: 5004668 - DNA, 25 bp, Homo sapien
cacattcttaagttcttcaatgtta

SEQ ID NO: 5004669 - DNA, 25 bp, Homo sapien
tgcacattcttaagttcttcaatgt

SEQ ID NO: 5004670 - DNA, 25 bp, Homo sapien
cattcttaagttcttcaatgttaag

SEQ ID NO: 5004671 - DNA, 25 bp, Homo sapien
tgatgaagaaaagagaaggctttac

SEQ ID NO: 5004672 - DNA, 25 bp, Homo sapien
gatgaagaaaagagaaggctttact

SEQ ID NO: 5004673 - DNA, 25 bp, Homo sapien
tgaagaaaagagaaggctttactta

SEQ ID NO: 5004674 - DNA, 25 bp, Homo sapien
ctgatgaagaaaagagaaggcttta

SEQ ID NO: 5004675 - DNA, 25 bp, Homo sapien
gacttttgaatgtagagtcctttcc

SEQ ID NO: 5004676 - DNA, 25 bp, Homo sapien
tgtgcatgaatgtacactgtcaaaa

SEQ ID NO: 5004677 - DNA, 25 bp, Homo sapien
aaaattcagtgtcctgacatgaggg

SEQ ID NO: 5004678 - DNA, 25 bp, Homo sapien
cctttaagttaacatatgcctgcaa

SEQ ID NO: 5004679 - DNA, 25 bp, Homo sapien
gaaaagcctttgaaatcggtgcagc

SEQ ID NO: 5004680 - DNA, 25 bp, Homo sapien
tggaggtctttgagccaagcccaag

SEQ ID NO: 5004681 - DNA, 25 bp, Homo sapien
ttttctcttcaaagaaccgttgcca

SEQ ID NO: 5004682 - DNA, 25 bp, Homo sapien
cacagcctcgcagttctgagcagga

SEQ ID NO: 5004683 - DNA, 25 bp, Homo sapien
gggcgaacctagttgcagtagatag

SEQ ID NO: 5004684 - DNA, 25 bp, Homo sapien
tttccagctccatagaagaccccaa

SEQ ID NO: 5004685 - DNA, 25 bp, Homo sapien
taaggcaacctacatggcatcagaa

SEQ ID NO: 5004686 - DNA, 25 bp, Homo sapien
tcagggtcagaaaaaagtggcgaag

SEQ ID NO: 5004687 - DNA, 25 bp, Homo sapien
aaatcaatctctgtcaggcttgtaa

SEQ ID NO: 5004688 - DNA, 25 bp, Homo sapien
tgctggtagtgaccaacagcagaac

SEQ ID NO: 5004689 - DNA, 25 bp, Homo sapien
cagcattagctggagttgtggtttc

SEQ ID NO: 5004690 - DNA, 25 bp, Homo sapien
gagcacctctgaagcgattccagca

SEQ ID NO: 5004691 - DNA, 25 bp, Homo sapien
cacaagtgctgctgcataggtgagt

SEQ ID NO: 5004692 - DNA, 25 bp, Homo sapien
ctcaaatagaggacataccaagtat

SEQ ID NO: 5004693 - DNA, 25 bp, Homo sapien
agaacagatgtacgcttgatctcag

SEQ ID NO: 5004694 - DNA, 25 bp, Homo sapien
tctgagaatactgataggccaggtc

SEQ ID NO: 5004695 - DNA, 25 bp, Homo sapien
tatgaagtggattgagcaagctcct

SEQ ID NO: 5004696 - DNA, 25 bp, Homo sapien
tcttcatacctgaaacagtcataga

SEQ ID NO: 5004697 - DNA, 25 bp, Homo sapien
cagtcatagaatttagaatttcctt

SEQ ID NO: 5004698 - DNA, 25 bp, Homo sapien
gaaggagcaagtttcttcatacctg

SEQ ID NO: 5004699 - DNA, 25 bp, Homo sapien
ttgaaggagcaagtttcttcatacc

SEQ ID NO: 5004700 - DNA, 25 bp, Homo sapien
gagtcaagacccagctgtattcagg

SEQ ID NO: 5004701 - DNA, 25 bp, Homo sapien
agtcaagacccagctgtattcagga

SEQ ID NO: 5004702 - DNA, 25 bp, Homo sapien
gtcaagacccagctgtattcaggaa

SEQ ID NO: 5004703 - DNA, 25 bp, Homo sapien
tcaagacccagctgtattcaggaaa

SEQ ID NO: 5004704 - DNA, 25 bp, Homo sapien
cataatctatatcggtgcctttgag

SEQ ID NO: 5004705 - DNA, 25 bp, Homo sapien
ttttccctgtctataatccaagacc

SEQ ID NO: 5004706 - DNA, 25 bp, Homo sapien
cttcctggctgtgattcataatcta

SEQ ID NO: 5004707 - DNA, 25 bp, Homo sapien
gagacagcaggctattgatttttcc

SEQ ID NO: 5004708 - DNA, 25 bp, Homo sapien
gtaccattcacatccaagtcataaa

SEQ ID NO: 5004709 - DNA, 25 bp, Homo sapien
ttcacatccaagtcataaatgttgg

SEQ ID NO: 5004710 - DNA, 25 bp, Homo sapien
tatgaaacagtaccattcacatcca

SEQ ID NO: 5004711 - DNA, 25 bp, Homo sapien
catccaagtcataaatgttggctgt

SEQ ID NO: 5004712 - DNA, 25 bp, Homo sapien
tgtccacaactggagccaatacttc

SEQ ID NO: 5004713 - DNA, 25 bp, Homo sapien
aactggagccaatacttccaatgtg

SEQ ID NO: 5004714 - DNA, 25 bp, Homo sapien
ggagccaatacttccaatgtgttag

SEQ ID NO: 5004715 - DNA, 25 bp, Homo sapien
caatacttccaatgtgttagtcaca

SEQ ID NO: 5004716 - DNA, 25 bp, Homo sapien
ctctcagtttacaagccaaagtgga

SEQ ID NO: 5004717 - DNA, 25 bp, Homo sapien
tggagtgtgtggtcaagctcccaac

SEQ ID NO: 5004718 - DNA, 25 bp, Homo sapien
gagtgtgtggtcaagctcccaacct

SEQ ID NO: 5004719 - DNA, 25 bp, Homo sapien
tggtgctgggttagtagccactctc

SEQ ID NO: 5004720 - DNA, 25 bp, Homo sapien
aaaggaggttcttgacctcgcagat

SEQ ID NO: 5004721 - DNA, 25 bp, Homo sapien
acacatcttacggagttcacaaaaa

SEQ ID NO: 5004722 - DNA, 25 bp, Homo sapien
gacctcgcagatgattttttcagac

SEQ ID NO: 5004723 - DNA, 25 bp, Homo sapien
catcttacggagttcacaaaaagga

SEQ ID NO: 5004724 - DNA, 25 bp, Homo sapien
agaatattgaattgtagcatgcctg

SEQ ID NO: 5004725 - DNA, 25 bp, Homo sapien
ggttgagtcttgtaagcagaggctt

SEQ ID NO: 5004726 - DNA, 25 bp, Homo sapien
atgcctgtgctctttaatggtcatt

SEQ ID NO: 5004727 - DNA, 25 bp, Homo sapien
tacgtctgttaaggtgtcaagatac

SEQ ID NO: 5004728 - DNA, 25 bp, Homo sapien
aatcaatgcacagcggtttccccgt

SEQ ID NO: 5004729 - DNA, 25 bp, Homo sapien
tgagaagatgggatggcacatcgta

SEQ ID NO: 5004730 - DNA, 25 bp, Homo sapien
cccgtgctttcatgctatccctgaa

SEQ ID NO: 5004731 - DNA, 25 bp, Homo sapien
catcgtaggcaatcaatgcacagcg

SEQ ID NO: 5004732 - DNA, 25 bp, Homo sapien
ccaggtttaaacatcattatatgca

SEQ ID NO: 5004733 - DNA, 25 bp, Homo sapien
aataaatctcagtgaactgtcactg

SEQ ID NO: 5004734 - DNA, 25 bp, Homo sapien
tctcagtgaactgtcactgatttct

SEQ ID NO: 5004735 - DNA, 25 bp, Homo sapien
tccaagattagctatagatttccca

SEQ ID NO: 5004736 - DNA, 25 bp, Homo sapien
cataacgttttatatgcacacataa

SEQ ID NO: 5004737 - DNA, 25 bp, Homo sapien
ggtacatatacataacgttttatat

SEQ ID NO: 5004738 - DNA, 25 bp, Homo sapien
tatatcaggtagataggttcatttt

SEQ ID NO: 5004739 - DNA, 25 bp, Homo sapien
tgtatattcctatgatggaccagga

SEQ ID NO: 5004740 - DNA, 25 bp, Homo sapien
gcattaatctgcaaggaacctgctc

SEQ ID NO: 5004741 - DNA, 25 bp, Homo sapien
tttaggatgaattccacatagtagt

SEQ ID NO: 5004742 - DNA, 25 bp, Homo sapien
agggcattaatctgcaaggaacctg

SEQ ID NO: 5004743 - DNA, 25 bp, Homo sapien
ctgaggtttccttgcataatcttta

SEQ ID NO: 5004744 - DNA, 25 bp, Homo sapien
gtcttctctggcagaccccagcttt

SEQ ID NO: 5004745 - DNA, 25 bp, Homo sapien
gactcagtttaatgtgagggcttcc

SEQ ID NO: 5004746 - DNA, 25 bp, Homo sapien
tgccagctgactcagtttaatgtga

SEQ ID NO: 5004747 - DNA, 25 bp, Homo sapien
aatgtgagggcttccgtcttctctg

SEQ ID NO: 5004748 - DNA, 25 bp, Homo sapien
aaaacatcaaggtggtggctagccc

SEQ ID NO: 5004749 - DNA, 25 bp, Homo sapien
tgctgttgcaactgatcttgaggcc

SEQ ID NO: 5004750 - DNA, 25 bp, Homo sapien
gataattcatgaccttaagccccaa

SEQ ID NO: 5004751 - DNA, 25 bp, Homo sapien
tggctagccccaatctctccaaaag

SEQ ID NO: 5004752 - DNA, 25 bp, Homo sapien
gctgcacatggtaactttgagactg

SEQ ID NO: 5004753 - DNA, 25 bp, Homo sapien
ctgttgggagtcattcaagctctct

SEQ ID NO: 5004754 - DNA, 25 bp, Homo sapien
atgctctttgtgtctccagtccctg

SEQ ID NO: 5004755 - DNA, 25 bp, Homo sapien
tcttgcattacacctttagatttca

SEQ ID NO: 5004756 - DNA, 25 bp, Homo sapien
ggcaacaaatctcagatgactcggg

SEQ ID NO: 5004757 - DNA, 25 bp, Homo sapien
gggccacatattgccagcaacacac

SEQ ID NO: 5004758 - DNA, 25 bp, Homo sapien
gctgtggatcctgttccgaggcaac

SEQ ID NO: 5004759 - DNA, 25 bp, Homo sapien
atctcagatgactcgggaacctcca

SEQ ID NO: 5004760 - DNA, 25 bp, Homo sapien
gcatctcaagtacttgccactcctt

SEQ ID NO: 5004761 - DNA, 25 bp, Homo sapien
tctctcttggccaccgaagaaggac

SEQ ID NO: 5004762 - DNA, 25 bp, Homo sapien
gtcaggtagcatctcaagtacttgc

SEQ ID NO: 5004763 - DNA, 25 bp, Homo sapien
tggccaccgaagaaggactgtcagg

SEQ ID NO: 5004764 - DNA, 25 bp, Homo sapien
tagtagcaagagagcactgaatcca

SEQ ID NO: 5004765 - DNA, 25 bp, Homo sapien
caaatgtagtgttgggctctaggag

SEQ ID NO: 5004766 - DNA, 25 bp, Homo sapien
agagatctcagaagctagtagcaag

SEQ ID NO: 5004767 - DNA, 25 bp, Homo sapien
tgaaaataagccagcgaccagggta

SEQ ID NO: 5004768 - DNA, 25 bp, Homo sapien
tcagtgccgacattgccacaagtag

SEQ ID NO: 5004769 - DNA, 25 bp, Homo sapien
cagatcagtgccgacattgccacaa

SEQ ID NO: 5004770 - DNA, 25 bp, Homo sapien
aaagggcagatcagtgccgacattg

SEQ ID NO: 5004771 - DNA, 25 bp, Homo sapien
gggcagatcagtgccgacattgcca

SEQ ID NO: 5004772 - DNA, 25 bp, Homo sapien
attgtgattcaggaaagacttgcct

SEQ ID NO: 5004773 - DNA, 25 bp, Homo sapien
tgtgattcaggaaagacttgccttt

SEQ ID NO: 5004774 - DNA, 25 bp, Homo sapien
gaaagacttgccttttcctggtcat

SEQ ID NO: 5004775 - DNA, 25 bp, Homo sapien
caggaaagacttgccttttcctggt

SEQ ID NO: 5004776 - DNA, 25 bp, Homo sapien
gaagcatagtgctttgctgtataga

SEQ ID NO: 5004777 - DNA, 25 bp, Homo sapien
tctcaaacttcttgtgccatagaac

SEQ ID NO: 5004778 - DNA, 25 bp, Homo sapien
aaagcagggtctatcgtcagaagca

SEQ ID NO: 5004779 - DNA, 25 bp, Homo sapien
ggtatccacagcactagttctcaaa

SEQ ID NO: 5004780 - DNA, 25 bp, Homo sapien
tctgagatgtaataggtcgtttaaa

SEQ ID NO: 5004781 - DNA, 25 bp, Homo sapien
tcctgttaagcaggctatttcctca

SEQ ID NO: 5004782 - DNA, 25 bp, Homo sapien
atagctattttcctgttaagcaggc

SEQ ID NO: 5004783 - DNA, 25 bp, Homo sapien
agatgtaataggtcgtttaaaatgg

SEQ ID NO: 5004784 - DNA, 25 bp, Homo sapien
actaccatcaccaggagctttagag

SEQ ID NO: 5004785 - DNA, 25 bp, Homo sapien
tgctggtggctcattgactcaacta

SEQ ID NO: 5004786 - DNA, 25 bp, Homo sapien
tcgtatggtccgaatgaatggcagg

SEQ ID NO: 5004787 - DNA, 25 bp, Homo sapien
caggtttcttcctcaagtcgacctc

SEQ ID NO: 5004788 - DNA, 25 bp, Homo sapien
caaaattagtaagtcgactttgtca

SEQ ID NO: 5004789 - DNA, 25 bp, Homo sapien
ttagccaattggtctgtgatcagtc

SEQ ID NO: 5004790 - DNA, 25 bp, Homo sapien
agactaacatctaactgtattggcc

SEQ ID NO: 5004791 - DNA, 25 bp, Homo sapien
tgatcagtctatatggaggtgacca

SEQ ID NO: 5004792 - DNA, 25 bp, Homo sapien
gcttggaaaagaagctggagttcct

SEQ ID NO: 5004793 - DNA, 25 bp, Homo sapien
cttggaaaagaagctggagttcctg

SEQ ID NO: 5004794 - DNA, 25 bp, Homo sapien
ggtaagtttgggttcgtgataatga

SEQ ID NO: 5004795 - DNA, 25 bp, Homo sapien
tttgggttcgtgataatgaatctga

SEQ ID NO: 5004796 - DNA, 25 bp, Homo sapien
tcagggttcagctcccgtttgacac

SEQ ID NO: 5004797 - DNA, 25 bp, Homo sapien
tgttcttcatccctacctccaggtg

SEQ ID NO: 5004798 - DNA, 25 bp, Homo sapien
cctccaggtgacagcttttcagaaa

SEQ ID NO: 5004799 - DNA, 25 bp, Homo sapien
gtggcaggcaactgtttcagggttc

SEQ ID NO: 5004800 - DNA, 25 bp, Homo sapien
gtgatgcatatgcagccagtctctg

SEQ ID NO: 5004801 - DNA, 25 bp, Homo sapien
tctctgagaaaggagttgattccga

SEQ ID NO: 5004802 - DNA, 25 bp, Homo sapien
accccagactccaagtgtctccaca

SEQ ID NO: 5004803 - DNA, 25 bp, Homo sapien
tctttactgagatcaggtcacccca

SEQ ID NO: 5004804 - DNA, 25 bp, Homo sapien
cttgtcgatgtagtgtcgctggtgc

SEQ ID NO: 5004805 - DNA, 25 bp, Homo sapien
tcgatgtagtgtcgctggtgcagac

SEQ ID NO: 5004806 - DNA, 25 bp, Homo sapien
cagcttgtcgatgtagtgtcgctgg

SEQ ID NO: 5004807 - DNA, 25 bp, Homo sapien
ttgtcgatgtagtgtcgctggtgca

SEQ ID NO: 5004808 - DNA, 25 bp, Homo sapien
gacattgagatgcagtggcccgtga

SEQ ID NO: 5004809 - DNA, 25 bp, Homo sapien
aaagccttgagagtacatgggtcac

SEQ ID NO: 5004810 - DNA, 25 bp, Homo sapien
gaaagtctctgcctaggattctgga

SEQ ID NO: 5004811 - DNA, 25 bp, Homo sapien
tccacctggagattatgagaaagtc

SEQ ID NO: 5004812 - DNA, 25 bp, Homo sapien
gctgagtaggtcatcattaggcatg

SEQ ID NO: 5004813 - DNA, 25 bp, Homo sapien
caatggtgaccttgacaatgctggc

SEQ ID NO: 5004814 - DNA, 25 bp, Homo sapien
caacattctggaatctccccgagag

SEQ ID NO: 5004815 - DNA, 25 bp, Homo sapien
tcttgatcccaaggattggcagtct

SEQ ID NO: 5004816 - DNA, 25 bp, Homo sapien
caactagcgccttgatgaatagcaa

SEQ ID NO: 5004817 - DNA, 25 bp, Homo sapien
gaaatatacctctctacaaccctcg

SEQ ID NO: 5004818 - DNA, 25 bp, Homo sapien
cctgttgttctgattgcattcttaa

SEQ ID NO: 5004819 - DNA, 25 bp, Homo sapien
tattctcccttaagacaactagcgc

SEQ ID NO: 5004820 - DNA, 25 bp, Homo sapien
ccagggagaaggttgaagctctgca

SEQ ID NO: 5004821 - DNA, 25 bp, Homo sapien
ccctagagacactcccaggaggatc

SEQ ID NO: 5004822 - DNA, 25 bp, Homo sapien
gaggatctggatacaccagggtgtt

SEQ ID NO: 5004823 - DNA, 25 bp, Homo sapien
tacagagcaattcgtttgccatgag

SEQ ID NO: 5004824 - DNA, 25 bp, Homo sapien
cactgtagcttaaagactcttttga

SEQ ID NO: 5004825 - DNA, 25 bp, Homo sapien
gcagagtggtagcatctttgctggc

SEQ ID NO: 5004826 - DNA, 25 bp, Homo sapien
ctcttttgacttccctatatgtatg

SEQ ID NO: 5004827 - DNA, 25 bp, Homo sapien
ctttgctggctggcaagtacagctt

SEQ ID NO: 5004828 - DNA, 25 bp, Homo sapien
tctattgaggagtgccaggtgtttc

SEQ ID NO: 5004829 - DNA, 25 bp, Homo sapien
agcatttgaattctattgaggagtg

SEQ ID NO: 5004830 - DNA, 25 bp, Homo sapien
gaattctattgaggagtgccaggtg

SEQ ID NO: 5004831 - DNA, 25 bp, Homo sapien
cttctgcttcaagacaggattgtgc

SEQ ID NO: 5004832 - DNA, 25 bp, Homo sapien
ttgaggtcgatgccacaaatcagcc

SEQ ID NO: 5004833 - DNA, 25 bp, Homo sapien
ccgttgtagttgcatgcttacagca

SEQ ID NO: 5004834 - DNA, 25 bp, Homo sapien
gccagaaagctgggtccaatgggtc

SEQ ID NO: 5004835 - DNA, 25 bp, Homo sapien
catgtaagtgtaacttataagtaac

SEQ ID NO: 5004836 - DNA, 25 bp, Homo sapien
cgagtgatcaacatagatgtttgcc

SEQ ID NO: 5004837 - DNA, 25 bp, Homo sapien
aaggaagacaagtcaatacgagtga

SEQ ID NO: 5004838 - DNA, 25 bp, Homo sapien
tcaatacgagtgatcaacatagatg

SEQ ID NO: 5004839 - DNA, 25 bp, Homo sapien
gacaagtcaatacgagtgatcaaca

SEQ ID NO: 5004840 - DNA, 25 bp, Homo sapien
tttccatgtgaccaaaaaccacgtg

SEQ ID NO: 5004841 - DNA, 25 bp, Homo sapien
tgtcagtggtgcattaaagtcgccc

SEQ ID NO: 5004842 - DNA, 25 bp, Homo sapien
tacacaatgggcaccttgtacactg

SEQ ID NO: 5004843 - DNA, 25 bp, Homo sapien
tggcatttgcagtaacccggatggg

SEQ ID NO: 5004844 - DNA, 25 bp, Homo sapien
ctataatacatgaacggaaagagat

SEQ ID NO: 5004845 - DNA, 25 bp, Homo sapien
tacaccagcagtgaataagtggaat

SEQ ID NO: 5004846 - DNA, 25 bp, Homo sapien
tagcaggatacaaggcacatataca

SEQ ID NO: 5004847 - DNA, 25 bp, Homo sapien
taagcaattataggaaggtagcagg

SEQ ID NO: 5004848 - DNA, 25 bp, Homo sapien
gctcccttaggatgtgaaatgtatg

SEQ ID NO: 5004849 - DNA, 25 bp, Homo sapien
gcattcataggctcccttaggatgt

SEQ ID NO: 5004850 - DNA, 25 bp, Homo sapien
atatatgtgcattactaaagaaaga

SEQ ID NO: 5004851 - DNA, 25 bp, Homo sapien
tctttgcagtagaggtttttaattc

SEQ ID NO: 5004852 - DNA, 25 bp, Homo sapien
tatggactgggtggtgcacatatgt

SEQ ID NO: 5004853 - DNA, 25 bp, Homo sapien
gttcctccaagcctatatgcttctc

SEQ ID NO: 5004854 - DNA, 25 bp, Homo sapien
tccagaacctactagggcacataag

SEQ ID NO: 5004855 - DNA, 25 bp, Homo sapien
tgtagccagaacgtggagaccagca

SEQ ID NO: 5004856 - DNA, 25 bp, Homo sapien
gcggccacagcgaatttcagcggca

SEQ ID NO: 5004857 - DNA, 25 bp, Homo sapien
cacgccagccggtgatttgataggc

SEQ ID NO: 5004858 - DNA, 25 bp, Homo sapien
ccaatgactggaggtctgggattaa

SEQ ID NO: 5004859 - DNA, 25 bp, Homo sapien
ttgataggcttgtcgggttgccatg

SEQ ID NO: 5004860 - DNA, 25 bp, Homo sapien
gttcaggctcccagcgtaaggaaag

SEQ ID NO: 5004861 - DNA, 25 bp, Homo sapien
agttcaggctcccagcgtaaggaaa

SEQ ID NO: 5004862 - DNA, 25 bp, Homo sapien
ggctcccagcgtaaggaaaggagga

SEQ ID NO: 5004863 - DNA, 25 bp, Homo sapien
tttggagagtctagtcctcgcccct

SEQ ID NO: 5004864 - DNA, 25 bp, Homo sapien
catctccaaataaatcgttttcctt

SEQ ID NO: 5004865 - DNA, 25 bp, Homo sapien
gccgccacagctagaatgccataag

SEQ ID NO: 5004866 - DNA, 25 bp, Homo sapien
cataagctctaatggctgcatttct

SEQ ID NO: 5004867 - DNA, 25 bp, Homo sapien
gccggcaaagaaatcgactccttta

SEQ ID NO: 5004868 - DNA, 25 bp, Homo sapien
taattttgcttataagaagtaactc

SEQ ID NO: 5004869 - DNA, 25 bp, Homo sapien
tcaatttggaagggaaccgccggca

SEQ ID NO: 5004870 - DNA, 25 bp, Homo sapien
gcttataagaagtaactcaatttgg

SEQ ID NO: 5004871 - DNA, 25 bp, Homo sapien
ctgcagggaaatcaacactagttcg

SEQ ID NO: 5004872 - DNA, 25 bp, Homo sapien
tagttcggcaggcacacctaagcaa

SEQ ID NO: 5004873 - DNA, 25 bp, Homo sapien
aatcaacactagttcggcaggcaca

SEQ ID NO: 5004874 - DNA, 25 bp, Homo sapien
acctaagcaactgccctcgagttgt

SEQ ID NO: 5004875 - DNA, 25 bp, Homo sapien
gctcatctatagaccccggaagcgc

SEQ ID NO: 5004876 - DNA, 25 bp, Homo sapien
aaactgagctcatctatagaccccg

SEQ ID NO: 5004877 - DNA, 25 bp, Homo sapien
gaagcgcggtcaaaagactggaaac

SEQ ID NO: 5004878 - DNA, 25 bp, Homo sapien
cccggaagcgcggtcaaaagactgg

SEQ ID NO: 5004879 - DNA, 25 bp, Homo sapien
gtctcaatgttaattactccttgcc

SEQ ID NO: 5004880 - DNA, 25 bp, Homo sapien
ttggttctcccctaactcggtgctc

SEQ ID NO: 5004881 - DNA, 25 bp, Homo sapien
aactcggtgctcaatgtcagggtcc

SEQ ID NO: 5004882 - DNA, 25 bp, Homo sapien
aatgttaattactccttgcctccaa

SEQ ID NO: 5004883 - DNA, 25 bp, Homo sapien
agtagggcgcaagcggccgcggcac

SEQ ID NO: 5004884 - DNA, 25 bp, Homo sapien
gctgggtttcctggcgctgggagcc

SEQ ID NO: 5004885 - DNA, 25 bp, Homo sapien
ggtccagccgctcggatcgcgctcg

SEQ ID NO: 5004886 - DNA, 25 bp, Homo sapien
gaagtagggcgcaagcggccgcggc

SEQ ID NO: 5004887 - DNA, 25 bp, Homo sapien
cgtctgaagtcgcaggaaatggttt

SEQ ID NO: 5004888 - DNA, 25 bp, Homo sapien
gtctgaagtcgcaggaaatggtttt

SEQ ID NO: 5004889 - DNA, 25 bp, Homo sapien
ccgtctgaagtcgcaggaaatggtt

SEQ ID NO: 5004890 - DNA, 25 bp, Homo sapien
taaggcatatggataagccccactg

SEQ ID NO: 5004891 - DNA, 25 bp, Homo sapien
tcattgtaactttagccagctgctg

SEQ ID NO: 5004892 - DNA, 25 bp, Homo sapien
tccaaacgttccctgataatgcaag

SEQ ID NO: 5004893 - DNA, 25 bp, Homo sapien
gaatttaaatgttacccctgtgtgc

SEQ ID NO: 5004894 - DNA, 25 bp, Homo sapien
agccgcagcgctgggagctttggaa

SEQ ID NO: 5004895 - DNA, 25 bp, Homo sapien
ctaatgaagtttgggagtcgcgcgc

SEQ ID NO: 5004896 - DNA, 25 bp, Homo sapien
gcgtagggtgcgagacccggaggtc

SEQ ID NO: 5004897 - DNA, 25 bp, Homo sapien
aagccgtgaggctccggagctgctc

SEQ ID NO: 5004898 - DNA, 25 bp, Homo sapien
cagggctaaaacgataataattagc

SEQ ID NO: 5004899 - DNA, 25 bp, Homo sapien
cggtcggcacatgctttaactcctc

SEQ ID NO: 5004900 - DNA, 25 bp, Homo sapien
ttcacaaccaaacagcgagaccgcg

SEQ ID NO: 5004901 - DNA, 25 bp, Homo sapien
taattagcagaataaagacatatcg

SEQ ID NO: 5004902 - DNA, 25 bp, Homo sapien
cttctcaagttccccgaaggtcgct

SEQ ID NO: 5004903 - DNA, 25 bp, Homo sapien
ttccccgaaggtcgcttagtgtgcg

SEQ ID NO: 5004904 - DNA, 25 bp, Homo sapien
caagttccccgaaggtcgcttagtg

SEQ ID NO: 5004905 - DNA, 25 bp, Homo sapien
tattcagcctcgtttttcttcctcc

SEQ ID NO: 5004906 - DNA, 25 bp, Homo sapien
ttctgcgggcgcctttggccgcgac

SEQ ID NO: 5004907 - DNA, 25 bp, Homo sapien
tgaggttttagctaccgttcggtga

SEQ ID NO: 5004908 - DNA, 25 bp, Homo sapien
tccgcgcggttctggtgaggtttta

SEQ ID NO: 5004909 - DNA, 25 bp, Homo sapien
gacttctcacttccgcgcggttctg

SEQ ID NO: 5004910 - DNA, 25 bp, Homo sapien
ggtaccaaaggttcagatcgcaaac

SEQ ID NO: 5004911 - DNA, 25 bp, Homo sapien
cttgtaggtaccaaaggttcagatc

SEQ ID NO: 5004912 - DNA, 25 bp, Homo sapien
aggttcagatcgcaaacacggaccc

SEQ ID NO: 5004913 - DNA, 25 bp, Homo sapien
caaaggttcagatcgcaaacacgga

SEQ ID NO: 5004914 - DNA, 25 bp, Homo sapien
tggctctgacttcaccaagggtcga

SEQ ID NO: 5004915 - DNA, 25 bp, Homo sapien
agacatgttcagcagttagattggc

SEQ ID NO: 5004916 - DNA, 25 bp, Homo sapien
tcaccaagggtcgacaatgtgtcat

SEQ ID NO: 5004917 - DNA, 25 bp, Homo sapien
gtcatttccacgaagccaaattgcc

SEQ ID NO: 5004918 - DNA, 25 bp, Homo sapien
tcttgggaaggcctactgtctatca

SEQ ID NO: 5004919 - DNA, 25 bp, Homo sapien
cacgaatttcatatgtgatagaaca

SEQ ID NO: 5004920 - DNA, 25 bp, Homo sapien
ttatggtcttaaaccctctggacca

SEQ ID NO: 5004921 - DNA, 25 bp, Homo sapien
ctctggaccaagttccgcacagctg

SEQ ID NO: 5004922 - DNA, 25 bp, Homo sapien
cgtggtgaaatttcattagtctcca

SEQ ID NO: 5004923 - DNA, 25 bp, Homo sapien
gtggtgaaatttcattagtctccat

SEQ ID NO: 5004924 - DNA, 25 bp, Homo sapien
aattgtgctgactaatgttctgggc

SEQ ID NO: 5004925 - DNA, 25 bp, Homo sapien
taattgtgctgactaatgttctggg

SEQ ID NO: 5004926 - DNA, 25 bp, Homo sapien
tgctgactaatgttctgggctgcag

SEQ ID NO: 5004927 - DNA, 25 bp, Homo sapien
tgtgctgactaatgttctgggctgc

SEQ ID NO: 5004928 - DNA, 25 bp, Homo sapien
cgaaatgggcttttaatgagggctc

SEQ ID NO: 5004929 - DNA, 25 bp, Homo sapien
ggctcgatggcattatattcttgca

SEQ ID NO: 5004930 - DNA, 25 bp, Homo sapien
ggcttttaatgagggctcgatggca

SEQ ID NO: 5004931 - DNA, 25 bp, Homo sapien
tctttgatggctaaagacgaaatgg

SEQ ID NO: 5004932 - DNA, 25 bp, Homo sapien
tctcccctttgtcgtgacatgggtg

SEQ ID NO: 5004933 - DNA, 25 bp, Homo sapien
ccctttgtcgtgacatgggtggaaa

SEQ ID NO: 5004934 - DNA, 25 bp, Homo sapien
caggagaggtcgtcacacattcttt

SEQ ID NO: 5004935 - DNA, 25 bp, Homo sapien
tgggtggaaagtttttgccgtgtca

SEQ ID NO: 5004936 - DNA, 25 bp, Homo sapien
caaccttccgcggtttatggagcgc

SEQ ID NO: 5004937 - DNA, 25 bp, Homo sapien
tcttaaaaggaagcgcgagcacctc

SEQ ID NO: 5004938 - DNA, 25 bp, Homo sapien
gaagaagatgcgtactccaatgaac

SEQ ID NO: 5004939 - DNA, 25 bp, Homo sapien
aaatggtgactctttgccggctggc

SEQ ID NO: 5004940 - DNA, 25 bp, Homo sapien
taaagtaggccctcgatattctagg

SEQ ID NO: 5004941 - DNA, 25 bp, Homo sapien
gtcacggttaaatcatgttgtggag

SEQ ID NO: 5004942 - DNA, 25 bp, Homo sapien
ccatcctggtcacggttaaatcatg

SEQ ID NO: 5004943 - DNA, 25 bp, Homo sapien
agttctggtttgtgtaatagctttc

SEQ ID NO: 5004944 - DNA, 25 bp, Homo sapien
gaaggaactggtttagttgtggcca

SEQ ID NO: 5004945 - DNA, 25 bp, Homo sapien
gaatgctttgtgaccacgtgaacaa

SEQ ID NO: 5004946 - DNA, 25 bp, Homo sapien
gagaccttgaggagtctccttcctg

SEQ ID NO: 5004947 - DNA, 25 bp, Homo sapien
aaaactatttttaggccgagcacag

SEQ ID NO: 5004948 - DNA, 25 bp, Homo sapien
tctcagaccctgtatatgtaaaacc

SEQ ID NO: 5004949 - DNA, 25 bp, Homo sapien
agtgtttggctcgatactagcagga

SEQ ID NO: 5004950 - DNA, 25 bp, Homo sapien
tagacagtgctcacaaagagttaca

SEQ ID NO: 5004951 - DNA, 25 bp, Homo sapien
cagttagtagggcaaaacaggaagt

SEQ ID NO: 5004952 - DNA, 25 bp, Homo sapien
gcatttctaataatggagctgtcat

SEQ ID NO: 5004953 - DNA, 25 bp, Homo sapien
ggattctccattagtttgtttctga

SEQ ID NO: 5004954 - DNA, 25 bp, Homo sapien
aagacagtgtttattgtagtcagaa

SEQ ID NO: 5004955 - DNA, 25 bp, Homo sapien
gtttctgtggaatatgaacaagaca

SEQ ID NO: 5004956 - DNA, 25 bp, Homo sapien
tctgtttctgtggaatatgaacaag

SEQ ID NO: 5004957 - DNA, 25 bp, Homo sapien
aaaaattgttggcatgattctgcat

SEQ ID NO: 5004958 - DNA, 25 bp, Homo sapien
tgctagtgtacaggattacttttat

SEQ ID NO: 5004959 - DNA, 25 bp, Homo sapien
tcacctggctgtaatccaattaacg

SEQ ID NO: 5004960 - DNA, 25 bp, Homo sapien
catatctgtagggtgtcggttctca

SEQ ID NO: 5004961 - DNA, 25 bp, Homo sapien
aaattttggtcaggagcgatggctc

SEQ ID NO: 5004962 - DNA, 25 bp, Homo sapien
tcctgccgtacttgggctgttcccg

SEQ ID NO: 5004963 - DNA, 25 bp, Homo sapien
tgttcccgtctgatagctccaggtt

SEQ ID NO: 5004964 - DNA, 25 bp, Homo sapien
tctattctcatcctgccgtacttgg

SEQ ID NO: 5004965 - DNA, 25 bp, Homo sapien
tacttgggctgttcccgtctgatag

SEQ ID NO: 5004966 - DNA, 25 bp, Homo sapien
gttatccgtatttccagaagcacca

SEQ ID NO: 5004967 - DNA, 25 bp, Homo sapien
cattctttatgtgttatccgtattt

SEQ ID NO: 5004968 - DNA, 25 bp, Homo sapien
accacatgctcatagtcttctcaca

SEQ ID NO: 5004969 - DNA, 25 bp, Homo sapien
ggaaccacatgctcatagtcttctc

SEQ ID NO: 5004970 - DNA, 25 bp, Homo sapien
tactggaatctcctgagctttgatg

SEQ ID NO: 5004971 - DNA, 25 bp, Homo sapien
gaaaactgctctgaacatgcataca

SEQ ID NO: 5004972 - DNA, 25 bp, Homo sapien
ctagcccccgtttgagagatttgtc

SEQ ID NO: 5004973 - DNA, 25 bp, Homo sapien
gagatttgtcttacaaaaccctgaa

SEQ ID NO: 5004974 - DNA, 25 bp, Homo sapien
taacgaatcccagcgcaaatgactg

SEQ ID NO: 5004975 - DNA, 25 bp, Homo sapien
tgaatcgataggaaaccagccactg

SEQ ID NO: 5004976 - DNA, 25 bp, Homo sapien
tgcagtatggtacactgcgaagacc

SEQ ID NO: 5004977 - DNA, 25 bp, Homo sapien
taaaggctgatgacgctaacgaatc

SEQ ID NO: 5004978 - DNA, 25 bp, Homo sapien
ggataagtgtcgcagttaagagtcc

SEQ ID NO: 5004979 - DNA, 25 bp, Homo sapien
cttgaatggataagtgtcgcagtta

SEQ ID NO: 5004980 - DNA, 25 bp, Homo sapien
gaatggataagtgtcgcagttaaga

SEQ ID NO: 5004981 - DNA, 25 bp, Homo sapien
atggataagtgtcgcagttaagagt

SEQ ID NO: 5004982 - DNA, 25 bp, Homo sapien
taactgctggtaatagaacaaaatg

SEQ ID NO: 5004983 - DNA, 25 bp, Homo sapien
tcttatcacagagattggaaaggcc

SEQ ID NO: 5004984 - DNA, 25 bp, Homo sapien
tcattgattgaaccctgctgaagtg

SEQ ID NO: 5004985 - DNA, 25 bp, Homo sapien
tgctgaagtgatgcagcaggctcct

SEQ ID NO: 5004986 - DNA, 25 bp, Homo sapien
gtctctgccactccaggatcagcta

SEQ ID NO: 5004987 - DNA, 25 bp, Homo sapien
gatccacccatttaaagccagagcc

SEQ ID NO: 5004988 - DNA, 25 bp, Homo sapien
cggctaaggacttccccacatttgt

SEQ ID NO: 5004989 - DNA, 25 bp, Homo sapien
ccagagccccacatgacagtttttc

SEQ ID NO: 5004990 - DNA, 25 bp, Homo sapien
ttaaaatgtctaactctgtcattat

SEQ ID NO: 5004991 - DNA, 25 bp, Homo sapien
agttaaaatgtctaactctgtcatt

SEQ ID NO: 5004992 - DNA, 25 bp, Homo sapien
gttaaaatgtctaactctgtcatta

SEQ ID NO: 5004993 - DNA, 25 bp, Homo sapien
gaaattgagaaagtactattggtac

SEQ ID NO: 5004994 - DNA, 25 bp, Homo sapien
gatcttccttgaccatggttctcaa

SEQ ID NO: 5004995 - DNA, 25 bp, Homo sapien
ctttcaagcaagaatgtgtttggac

SEQ ID NO: 5004996 - DNA, 25 bp, Homo sapien
tgtagaaatgatattgatcctttga

SEQ ID NO: 5004997 - DNA, 25 bp, Homo sapien
actaaaggttgaagcttggtgacta

SEQ ID NO: 5004998 - DNA, 25 bp, Homo sapien
aagcttggtgactatagaaaacttc

SEQ ID NO: 5004999 - DNA, 25 bp, Homo sapien
agcttggtgactatagaaaacttca

SEQ ID NO: 5005000 - DNA, 25 bp, Homo sapien
cactaaaggttgaagcttggtgact

SEQ ID NO: 5005001 - DNA, 25 bp, Homo sapien
tccgtaatgggactatcagggtgtc

SEQ ID NO: 5005002 - DNA, 25 bp, Homo sapien
ggatcacctccatgcatttggcagg

SEQ ID NO: 5005003 - DNA, 25 bp, Homo sapien
aagtattgtgcaaccgtttcacggg

SEQ ID NO: 5005004 - DNA, 25 bp, Homo sapien
tgggtgccgctcttctgggagaaca

SEQ ID NO: 5005005 - DNA, 25 bp, Homo sapien
ttccagacttaattatgacaaggta

SEQ ID NO: 5005006 - DNA, 25 bp, Homo sapien
ttggtttgacactttaagcagtaag

SEQ ID NO: 5005007 - DNA, 25 bp, Homo sapien
aaatacttgggcatttttaaatcag

SEQ ID NO: 5005008 - DNA, 25 bp, Homo sapien
tgacatatctttcgatatcaaatac

SEQ ID NO: 5005009 - DNA, 25 bp, Homo sapien
tacaatcagattacgcctggactat

SEQ ID NO: 5005010 - DNA, 25 bp, Homo sapien
gcatttcaagatgtatttgcaccca

SEQ ID NO: 5005011 - DNA, 25 bp, Homo sapien
cagttgtccagtgatagtgtcctca

SEQ ID NO: 5005012 - DNA, 25 bp, Homo sapien
tgtatctaccatgaaccccaagaga

SEQ ID NO: 5005013 - DNA, 25 bp, Homo sapien
tcctgtaggaagtgatagtagctct

SEQ ID NO: 5005014 - DNA, 25 bp, Homo sapien
tccttgcccgtgaatggagaactgt

SEQ ID NO: 5005015 - DNA, 25 bp, Homo sapien
caggatgaccatggcctagagcagg

SEQ ID NO: 5005016 - DNA, 25 bp, Homo sapien
gctctgaaccaaagcggaccttacc

SEQ ID NO: 5005017 - DNA, 25 bp, Homo sapien
caggaagttccggagatgtgaaacc

SEQ ID NO: 5005018 - DNA, 25 bp, Homo sapien
gagaatttaaatgcccctcctgctg

SEQ ID NO: 5005019 - DNA, 25 bp, Homo sapien
taatacggcaatcagtgacgccacc

SEQ ID NO: 5005020 - DNA, 25 bp, Homo sapien
cctgctgaggctgggtatgatcaaa

SEQ ID NO: 5005021 - DNA, 25 bp, Homo sapien
cattcatactctgggcacttgtgtt

SEQ ID NO: 5005022 - DNA, 25 bp, Homo sapien
tataaagaggttagccctgcgcacg

SEQ ID NO: 5005023 - DNA, 25 bp, Homo sapien
aaggtatatttgcttctcgggaaag

SEQ ID NO: 5005024 - DNA, 25 bp, Homo sapien
cctgcgcacgtaggactgaattcag

SEQ ID NO: 5005025 - DNA, 25 bp, Homo sapien
caacatgtactctcaacgcctgggt

SEQ ID NO: 5005026 - DNA, 25 bp, Homo sapien
tcttccgagatgaacaagtagcatg

SEQ ID NO: 5005027 - DNA, 25 bp, Homo sapien
caatcctgccgctatagtgagctaa

SEQ ID NO: 5005028 - DNA, 25 bp, Homo sapien
tacataggaaatgcaccctgaggtt

SEQ ID NO: 5005029 - DNA, 25 bp, Homo sapien
aaggagacattgaatgcttggtgtc

SEQ ID NO: 5005030 - DNA, 25 bp, Homo sapien
gagacattgaatgcttggtgtccac

SEQ ID NO: 5005031 - DNA, 25 bp, Homo sapien
aatgcttggtgtccactttccgtga

SEQ ID NO: 5005032 - DNA, 25 bp, Homo sapien
ccactttccgtgatatctgctgagg

SEQ ID NO: 5005033 - DNA, 25 bp, Homo sapien
tctcatccgatgctcttctacctcc

SEQ ID NO: 5005034 - DNA, 25 bp, Homo sapien
cttctacctcctgccactgttgctc

SEQ ID NO: 5005035 - DNA, 25 bp, Homo sapien
ctcctgccactgttgctccagggaa

SEQ ID NO: 5005036 - DNA, 25 bp, Homo sapien
ctgccactgttgctccagggaacaa

SEQ ID NO: 5005037 - DNA, 25 bp, Homo sapien
tcaggattagtgctgccattaggct

SEQ ID NO: 5005038 - DNA, 25 bp, Homo sapien
gagaaacttgacgttcctgccggct

SEQ ID NO: 5005039 - DNA, 25 bp, Homo sapien
tactggcagttttagctctcgggac

SEQ ID NO: 5005040 - DNA, 25 bp, Homo sapien
gcattgctaatttggaacagtaaga

SEQ ID NO: 5005041 - DNA, 25 bp, Homo sapien
tcacctcctttgcattaaaagcagg

SEQ ID NO: 5005042 - DNA, 25 bp, Homo sapien
tctgttgcttgactggaacttaacg

SEQ ID NO: 5005043 - DNA, 25 bp, Homo sapien
taaagtcctagcttgaaggtctgga

SEQ ID NO: 5005044 - DNA, 25 bp, Homo sapien
atgaatacagcggatgggcccctgc

SEQ ID NO: 5005045 - DNA, 25 bp, Homo sapien
tttcctaaagtgtgccagaagcctc

SEQ ID NO: 5005046 - DNA, 25 bp, Homo sapien
caagtgtgacttagtgaggagaatc

SEQ ID NO: 5005047 - DNA, 25 bp, Homo sapien
tgtacccaaacattacactgtgccc

SEQ ID NO: 5005048 - DNA, 25 bp, Homo sapien
gaggagaatcatacaaacagacatc

SEQ ID NO: 5005049 - DNA, 25 bp, Homo sapien
tacgtgaagttctaggaaaggcaaa

SEQ ID NO: 5005050 - DNA, 25 bp, Homo sapien
caggcaaagagatttatacaggtac

SEQ ID NO: 5005051 - DNA, 25 bp, Homo sapien
gcccgacattattaggtagcaagga

SEQ ID NO: 5005052 - DNA, 25 bp, Homo sapien
atacaggtacctcacaaagcaatgc

SEQ ID NO: 5005053 - DNA, 25 bp, Homo sapien
cacttaagataaaaaccgtagcagc

SEQ ID NO: 5005054 - DNA, 25 bp, Homo sapien
ttgtaggaagtccattcatcaatat

SEQ ID NO: 5005055 - DNA, 25 bp, Homo sapien
gtttaatttgtaggaagtccattca

SEQ ID NO: 5005056 - DNA, 25 bp, Homo sapien
tagaatgttaccatgtgacaggcac

SEQ ID NO: 5005057 - DNA, 25 bp, Homo sapien
ttatggtacaccaaccgtacttgaa

SEQ ID NO: 5005058 - DNA, 25 bp, Homo sapien
tacatatgtaaaccctaggagtgca

SEQ ID NO: 5005059 - DNA, 25 bp, Homo sapien
tagaaatcttgggtcaaaagctgtg

SEQ ID NO: 5005060 - DNA, 25 bp, Homo sapien
tcagtctcagtcaaaacacctcaag

SEQ ID NO: 5005061 - DNA, 25 bp, Homo sapien
tttggagaatacatacaatcacata

SEQ ID NO: 5005062 - DNA, 25 bp, Homo sapien
agaagatttggagaatacatacaat

SEQ ID NO: 5005063 - DNA, 25 bp, Homo sapien
tatatatctattgtagaagatttgg

SEQ ID NO: 5005064 - DNA, 25 bp, Homo sapien
tatatctattgtagaagatttggag

SEQ ID NO: 5005065 - DNA, 25 bp, Homo sapien
tctaaaacacaagcggagacctctg

SEQ ID NO: 5005066 - DNA, 25 bp, Homo sapien
tattgcagagggtatggacaagcca

SEQ ID NO: 5005067 - DNA, 25 bp, Homo sapien
gagacctctgcataggagtggccct

SEQ ID NO: 5005068 - DNA, 25 bp, Homo sapien
caatttgggattaccagcctgggct

SEQ ID NO: 5005069 - DNA, 25 bp, Homo sapien
gattaggtctcagttgagattcaag

SEQ ID NO: 5005070 - DNA, 25 bp, Homo sapien
catggcgcctgaccaactgtgacta

SEQ ID NO: 5005071 - DNA, 25 bp, Homo sapien
cagaaacgtcgacattttgtgttga

SEQ ID NO: 5005072 - DNA, 25 bp, Homo sapien
gccaaaccataacaatactcagaaa

SEQ ID NO: 5005073 - DNA, 25 bp, Homo sapien
ccaggccaagggagagcactttgct

SEQ ID NO: 5005074 - DNA, 25 bp, Homo sapien
gtgcacctcagccacttggaaatag

SEQ ID NO: 5005075 - DNA, 25 bp, Homo sapien
catacaaattgtgaaggacacctca

SEQ ID NO: 5005076 - DNA, 25 bp, Homo sapien
cagtgtccggctgataaaaatgagt

SEQ ID NO: 5005077 - DNA, 25 bp, Homo sapien
aagaaactacacaagcagccaacaa

SEQ ID NO: 5005078 - DNA, 25 bp, Homo sapien
tctcaaaagaaactacacaagcagc

SEQ ID NO: 5005079 - DNA, 25 bp, Homo sapien
aaaagaaactacacaagcagccaac

SEQ ID NO: 5005080 - DNA, 25 bp, Homo sapien
tcaaaagaaactacacaagcagcca

SEQ ID NO: 5005081 - DNA, 25 bp, Homo sapien
ggctggcaacagagtgtagtggctt

SEQ ID NO: 5005082 - DNA, 25 bp, Homo sapien
gcttctgcctcctgtgtttacgtga

SEQ ID NO: 5005083 - DNA, 25 bp, Homo sapien
gcatgcatcaccaaacctggctttt

SEQ ID NO: 5005084 - DNA, 25 bp, Homo sapien
atgcatcaccaaacctggctttttt

SEQ ID NO: 5005085 - DNA, 25 bp, Homo sapien
catagtagttctagctgcagaggac

SEQ ID NO: 5005086 - DNA, 25 bp, Homo sapien
tctaagtgccatcccattttgaagg

SEQ ID NO: 5005087 - DNA, 25 bp, Homo sapien
ttttgaaggcttctcgaacagagca

SEQ ID NO: 5005088 - DNA, 25 bp, Homo sapien
tattcacagttagtcctcagagcct

SEQ ID NO: 5005089 - DNA, 25 bp, Homo sapien
gacctggttttcttgctttgactca

SEQ ID NO: 5005090 - DNA, 25 bp, Homo sapien
tgcacaaattatccagagtgatccc

SEQ ID NO: 5005091 - DNA, 25 bp, Homo sapien
tcctcaaaaaggtaagactcatctc

SEQ ID NO: 5005092 - DNA, 25 bp, Homo sapien
gagactgggcgcagccatttcctta

SEQ ID NO: 5005093 - DNA, 25 bp, Homo sapien
catacttgaggctaacatggaaaca

SEQ ID NO: 5005094 - DNA, 25 bp, Homo sapien
catgtagctaaatcccatccagttt

SEQ ID NO: 5005095 - DNA, 25 bp, Homo sapien
gtagcaaacttgatttgagagcaag

SEQ ID NO: 5005096 - DNA, 25 bp, Homo sapien
gcaaagtagtaggacatgccttgtg

SEQ ID NO: 5005097 - DNA, 25 bp, Homo sapien
ggaatgtgcacataatccaaggcag

SEQ ID NO: 5005098 - DNA, 25 bp, Homo sapien
tataagccttgagcttctagcggcc

SEQ ID NO: 5005099 - DNA, 25 bp, Homo sapien
ccagtgggatcagaaagctagcaga

SEQ ID NO: 5005100 - DNA, 25 bp, Homo sapien
cagtttcctgtggtgaacggcctcc

SEQ ID NO: 5005101 - DNA, 25 bp, Homo sapien
gaactcagattcaacattgcattat

SEQ ID NO: 5005102 - DNA, 25 bp, Homo sapien
taatgaactcagattcaacattgca

SEQ ID NO: 5005103 - DNA, 25 bp, Homo sapien
actcagattcaacattgcattattc

SEQ ID NO: 5005104 - DNA, 25 bp, Homo sapien
tgaactcagattcaacattgcatta

SEQ ID NO: 5005105 - DNA, 25 bp, Homo sapien
taatggctacatcagtacctggcac

SEQ ID NO: 5005106 - DNA, 25 bp, Homo sapien
aatatactgttgtgcctctaatggc

SEQ ID NO: 5005107 - DNA, 25 bp, Homo sapien
ggcacctgagtacttgttcaatgaa

SEQ ID NO: 5005108 - DNA, 25 bp, Homo sapien
tccctaagtagggagcctgggatta

SEQ ID NO: 5005109 - DNA, 25 bp, Homo sapien
taacattacaactgaggcggccaag

SEQ ID NO: 5005110 - DNA, 25 bp, Homo sapien
gatttcagtcatgcctggaaaggag

SEQ ID NO: 5005111 - DNA, 25 bp, Homo sapien
gaggcatcaggtcttaaggtttaaa

SEQ ID NO: 5005112 - DNA, 25 bp, Homo sapien
tctgaatataaagccaactgtggag

SEQ ID NO: 5005113 - DNA, 25 bp, Homo sapien
gaatacctaggagacgttctgtcaa

SEQ ID NO: 5005114 - DNA, 25 bp, Homo sapien
taaactgggaccaaactagctgctc

SEQ ID NO: 5005115 - DNA, 25 bp, Homo sapien
tcaaagcgagctaacagcccaggtt

SEQ ID NO: 5005116 - DNA, 25 bp, Homo sapien
aatacaccatgaagacagcttggct

SEQ ID NO: 5005117 - DNA, 25 bp, Homo sapien
tgctaaaatggacctcagtatgatc

SEQ ID NO: 5005118 - DNA, 25 bp, Homo sapien
agttgctaaaatggacctcagtatg

SEQ ID NO: 5005119 - DNA, 25 bp, Homo sapien
aaaatggacctcagtatgatctcat

SEQ ID NO: 5005120 - DNA, 25 bp, Homo sapien
gctaaaatggacctcagtatgatct

SEQ ID NO: 5005121 - DNA, 25 bp, Homo sapien
taaatttacccatgcatcctagaag

SEQ ID NO: 5005122 - DNA, 25 bp, Homo sapien
cctagaagacttagtggcagaagac

SEQ ID NO: 5005123 - DNA, 25 bp, Homo sapien
tagttactgagggaggcatggatcc

SEQ ID NO: 5005124 - DNA, 25 bp, Homo sapien
acaaagggctggagataaaatgacc

SEQ ID NO: 5005125 - DNA, 25 bp, Homo sapien
caagactggacagcctatagctatg

SEQ ID NO: 5005126 - DNA, 25 bp, Homo sapien
ctcaagactggacagcctatagcta

SEQ ID NO: 5005127 - DNA, 25 bp, Homo sapien
cctatagctatgacagtgggaattt

SEQ ID NO: 5005128 - DNA, 25 bp, Homo sapien
tagctatgacagtgggaatttttgc

SEQ ID NO: 5005129 - DNA, 25 bp, Homo sapien
cctaacccatctgtcactccctatc

SEQ ID NO: 5005130 - DNA, 25 bp, Homo sapien
tcatggattccatcaaactggtcta

SEQ ID NO: 5005131 - DNA, 25 bp, Homo sapien
ctatcccccgcaagccttttcctga

SEQ ID NO: 5005132 - DNA, 25 bp, Homo sapien
taacccatctgtcactccctatccc

SEQ ID NO: 5005133 - DNA, 25 bp, Homo sapien
actaagattttaagtactggctcag

SEQ ID NO: 5005134 - DNA, 25 bp, Homo sapien
gttcaccagtagacttcactgtctg

SEQ ID NO: 5005135 - DNA, 25 bp, Homo sapien
ctttgtgtggaacagtccgtttcca

SEQ ID NO: 5005136 - DNA, 25 bp, Homo sapien
ttccttacgcatcacatccagtcaa

SEQ ID NO: 5005137 - DNA, 25 bp, Homo sapien
tcaaacttgtgacttcatcagaatc

SEQ ID NO: 5005138 - DNA, 25 bp, Homo sapien
ttaatccttctaaactgtggtcttc

SEQ ID NO: 5005139 - DNA, 25 bp, Homo sapien
ttaactgctaacagatatatgtgtc

SEQ ID NO: 5005140 - DNA, 25 bp, Homo sapien
taacaacgtaatcttattctggtag

SEQ ID NO: 5005141 - DNA, 25 bp, Homo sapien
ctcagagacactgcaggttaggttc

SEQ ID NO: 5005142 - DNA, 25 bp, Homo sapien
cagagacactgcaggttaggttcca

SEQ ID NO: 5005143 - DNA, 25 bp, Homo sapien
gagacactgcaggttaggttccaga

SEQ ID NO: 5005144 - DNA, 25 bp, Homo sapien
agacactgcaggttaggttccagac

SEQ ID NO: 5005145 - DNA, 25 bp, Homo sapien
aagtgtgcaatagcactgtgcctta

SEQ ID NO: 5005146 - DNA, 25 bp, Homo sapien
ggtggttgtggcaatatcttataac

SEQ ID NO: 5005147 - DNA, 25 bp, Homo sapien
tgcgaagctttctgatagcatttta

SEQ ID NO: 5005148 - DNA, 25 bp, Homo sapien
tcaacagtctcaaaccctgccattg

SEQ ID NO: 5005149 - DNA, 25 bp, Homo sapien
gttgcaccatgagctacatccttgg

SEQ ID NO: 5005150 - DNA, 25 bp, Homo sapien
catagcctagctgggacatacggac

SEQ ID NO: 5005151 - DNA, 25 bp, Homo sapien
tctgtcatgaccaaagcaggctggc

SEQ ID NO: 5005152 - DNA, 25 bp, Homo sapien
gaaaaactgccgttctgggagacca

SEQ ID NO: 5005153 - DNA, 25 bp, Homo sapien
ttctttcagaaacctgatacttctg

SEQ ID NO: 5005154 - DNA, 25 bp, Homo sapien
ttttctttcagaaacctgatacttc

SEQ ID NO: 5005155 - DNA, 25 bp, Homo sapien
catatttttttctttcagaaacctg

SEQ ID NO: 5005156 - DNA, 25 bp, Homo sapien
ttcagaaacctgatacttctgagtc

SEQ ID NO: 5005157 - DNA, 25 bp, Homo sapien
cactatactcttcattggctaaaaa

SEQ ID NO: 5005158 - DNA, 25 bp, Homo sapien
ttattacactatactcttcattggc

SEQ ID NO: 5005159 - DNA, 25 bp, Homo sapien
tctagacaagtcattttattacact

SEQ ID NO: 5005160 - DNA, 25 bp, Homo sapien
gactctagacaagtcattttattac

SEQ ID NO: 5005161 - DNA, 25 bp, Homo sapien
gagcaatacaggacatgaggaaaat

SEQ ID NO: 5005162 - DNA, 25 bp, Homo sapien
agcaatacaggacatgaggaaaata

SEQ ID NO: 5005163 - DNA, 25 bp, Homo sapien
ttacaaccagagaaaacacttaaca

SEQ ID NO: 5005164 - DNA, 25 bp, Homo sapien
tacaagagaacacggaaatatcccc

SEQ ID NO: 5005165 - DNA, 25 bp, Homo sapien
aagctgcggtgttgtgagcgcccaa

SEQ ID NO: 5005166 - DNA, 25 bp, Homo sapien
taaacactttaggatggtaccacag

SEQ ID NO: 5005167 - DNA, 25 bp, Homo sapien
gaagaagtctaatatcccacacgga

SEQ ID NO: 5005168 - DNA, 25 bp, Homo sapien
gattaccaaggcttccggaactcgc

SEQ ID NO: 5005169 - DNA, 25 bp, Homo sapien
gaactcgcaggcttccggagcgacg

SEQ ID NO: 5005170 - DNA, 25 bp, Homo sapien
tcctagccgaatctggattaccaag

SEQ ID NO: 5005171 - DNA, 25 bp, Homo sapien
gaaagcttgtcttttcctagccgaa

SEQ ID NO: 5005172 - DNA, 25 bp, Homo sapien
atggccaaacaaccgcgaacgccga

SEQ ID NO: 5005173 - DNA, 25 bp, Homo sapien
aaaagttacaccaacgagaactgcg

SEQ ID NO: 5005174 - DNA, 25 bp, Homo sapien
aactgcgctttagcggcgctgctga

SEQ ID NO: 5005175 - DNA, 25 bp, Homo sapien
tgctgaaggcactggatggccaaac

SEQ ID NO: 5005176 - DNA, 25 bp, Homo sapien
atggcaggcacttcaggattccagc

SEQ ID NO: 5005177 - DNA, 25 bp, Homo sapien
tctgtggtatgaatggcagtgtctc

SEQ ID NO: 5005178 - DNA, 25 bp, Homo sapien
cagtgacatgtagccgttgaggatc

SEQ ID NO: 5005179 - DNA, 25 bp, Homo sapien
gttgaggatcgccactgccttctcg

SEQ ID NO: 5005180 - DNA, 25 bp, Homo sapien
tctgtcaggcgaatgagattatccc

SEQ ID NO: 5005181 - DNA, 25 bp, Homo sapien
gaaggtatccgacatggctctgaaa

SEQ ID NO: 5005182 - DNA, 25 bp, Homo sapien
ccctgaccaagttattaggaaatgc

SEQ ID NO: 5005183 - DNA, 25 bp, Homo sapien
caaaaggtgatggtgcagcaggaag

SEQ ID NO: 5005184 - DNA, 25 bp, Homo sapien
ttctgcaattggtctgaatgtggtt

SEQ ID NO: 5005185 - DNA, 25 bp, Homo sapien
tttatctgtctccaatgatgtacat

SEQ ID NO: 5005186 - DNA, 25 bp, Homo sapien
attttcttctgcatcaggctccatg

SEQ ID NO: 5005187 - DNA, 25 bp, Homo sapien
tcttctgcatcaggctccatgacca

SEQ ID NO: 5005188 - DNA, 25 bp, Homo sapien
tttcttctgcatcaggctccatgac

SEQ ID NO: 5005189 - DNA, 25 bp, Homo sapien
ttctgcatcaggctccatgaccaca

SEQ ID NO: 5005190 - DNA, 25 bp, Homo sapien
acaatgctgttaattgaaccttcac

SEQ ID NO: 5005191 - DNA, 25 bp, Homo sapien
catgtttcagacaatgctgttaatt

SEQ ID NO: 5005192 - DNA, 25 bp, Homo sapien
ttcagacaatgctgttaattgaacc

SEQ ID NO: 5005193 - DNA, 25 bp, Homo sapien
tgctgttaattgaaccttcacacac

SEQ ID NO: 5005194 - DNA, 25 bp, Homo sapien
gagatctgtgccagttccacacttt

SEQ ID NO: 5005195 - DNA, 25 bp, Homo sapien
acaagccagagatctgtgccagttc

SEQ ID NO: 5005196 - DNA, 25 bp, Homo sapien
ccagagatctgtgccagttccacac

SEQ ID NO: 5005197 - DNA, 25 bp, Homo sapien
agccagagatctgtgccagttccac

SEQ ID NO: 5005198 - DNA, 25 bp, Homo sapien
caatcttgaagttctgccatctcaa

SEQ ID NO: 5005199 - DNA, 25 bp, Homo sapien
aatcttgaagttctgccatctcaac

SEQ ID NO: 5005200 - DNA, 25 bp, Homo sapien
tcaatcttgaagttctgccatctca

SEQ ID NO: 5005201 - DNA, 25 bp, Homo sapien
gattctggtagccccttgacattgg

SEQ ID NO: 5005202 - DNA, 25 bp, Homo sapien
tgtaactctccgtgtgctacaccat

SEQ ID NO: 5005203 - DNA, 25 bp, Homo sapien
cgtgtgctacaccatatctcccaag

SEQ ID NO: 5005204 - DNA, 25 bp, Homo sapien
cagagaattgcatctgtaactctcc

SEQ ID NO: 5005205 - DNA, 25 bp, Homo sapien
aaatctgagagaatttgaaggtcca

SEQ ID NO: 5005206 - DNA, 25 bp, Homo sapien
caaatctgagagaatttgaaggtcc

SEQ ID NO: 5005207 - DNA, 25 bp, Homo sapien
aatctgagagaatttgaaggtccat

SEQ ID NO: 5005208 - DNA, 25 bp, Homo sapien
caaaactctttcttgatggcgccct

SEQ ID NO: 5005209 - DNA, 25 bp, Homo sapien
aaaaggagcattcaaaccacaagca

SEQ ID NO: 5005210 - DNA, 25 bp, Homo sapien
ccttgtaggacctgacctacctgtg

SEQ ID NO: 5005211 - DNA, 25 bp, Homo sapien
gtgtccatgagacttcatcctgtct

SEQ ID NO: 5005212 - DNA, 25 bp, Homo sapien
tacagtatgacaacaggtaatagat

SEQ ID NO: 5005213 - DNA, 25 bp, Homo sapien
tgctgggatgagaaacccctcctct

SEQ ID NO: 5005214 - DNA, 25 bp, Homo sapien
tgcagacttcctcttgattggtaca

SEQ ID NO: 5005215 - DNA, 25 bp, Homo sapien
caggtaatagatacaatagcactaa

SEQ ID NO: 5005216 - DNA, 25 bp, Homo sapien
catctgctggtttgggacatggctg

SEQ ID NO: 5005217 - DNA, 25 bp, Homo sapien
ttcagcagcagttggcgggatggca

SEQ ID NO: 5005218 - DNA, 25 bp, Homo sapien
cttcctcagctggaaagttttgaca

SEQ ID NO: 5005219 - DNA, 25 bp, Homo sapien
atggcagggtgccagcttgtaccat

SEQ ID NO: 5005220 - DNA, 25 bp, Homo sapien
tttctggtttccgtatatggaaata

SEQ ID NO: 5005221 - DNA, 25 bp, Homo sapien
gctaatttaactgatagtatctaat

SEQ ID NO: 5005222 - DNA, 25 bp, Homo sapien
atacaagcctacataattctaaaaa

SEQ ID NO: 5005223 - DNA, 25 bp, Homo sapien
ttttcttcaaagctaatttaactga

SEQ ID NO: 5005224 - DNA, 25 bp, Homo sapien
gatctccccttcctcaatagctgat

SEQ ID NO: 5005225 - DNA, 25 bp, Homo sapien
agttaccgccgcctgatctatccaa

SEQ ID NO: 5005226 - DNA, 25 bp, Homo sapien
tgatacagaagttaccgccgcctga

SEQ ID NO: 5005227 - DNA, 25 bp, Homo sapien
tcaatagctgatacagaagttaccg

SEQ ID NO: 5005228 - DNA, 25 bp, Homo sapien
gtaagcctttatagttctggagaat

SEQ ID NO: 5005229 - DNA, 25 bp, Homo sapien
agctgaattttttgcgctttaccgc

SEQ ID NO: 5005230 - DNA, 25 bp, Homo sapien
gcggcatctagtggctgagatttca

SEQ ID NO: 5005231 - DNA, 25 bp, Homo sapien
agatgtaagcctttatagttctgga

SEQ ID NO: 5005232 - DNA, 25 bp, Homo sapien
tgtttctgtcacatgtctcagaaat

SEQ ID NO: 5005233 - DNA, 25 bp, Homo sapien
tttctgtcacatgtctcagaaatat

SEQ ID NO: 5005234 - DNA, 25 bp, Homo sapien
tgttgtgtggttatcccgagagttt

SEQ ID NO: 5005235 - DNA, 25 bp, Homo sapien
ttgtgtggttatcccgagagtttat

SEQ ID NO: 5005236 - DNA, 25 bp, Homo sapien
aaaataatctaaggagcaagcccat

SEQ ID NO: 5005237 - DNA, 25 bp, Homo sapien
ccccaaaataatctaaggagcaagc

SEQ ID NO: 5005238 - DNA, 25 bp, Homo sapien
tgaaccccaaaataatctaaggagc

SEQ ID NO: 5005239 - DNA, 25 bp, Homo sapien
ccaaaataatctaaggagcaagccc

SEQ ID NO: 5005240 - DNA, 25 bp, Homo sapien
caatgagcttcaatgaagtgctttc

SEQ ID NO: 5005241 - DNA, 25 bp, Homo sapien
caggcaaactgtgcacaggctacaa

SEQ ID NO: 5005242 - DNA, 25 bp, Homo sapien
gactgtgtttattagtgaatgggaa

SEQ ID NO: 5005243 - DNA, 25 bp, Homo sapien
tttctctattttgaatgagcatttc

SEQ ID NO: 5005244 - DNA, 25 bp, Homo sapien
cactacccgtgatttaggccaggga

SEQ ID NO: 5005245 - DNA, 25 bp, Homo sapien
tagctttcctacaagcacaggactg

SEQ ID NO: 5005246 - DNA, 25 bp, Homo sapien
ttggcaaaggtgttaataggcttca

SEQ ID NO: 5005247 - DNA, 25 bp, Homo sapien
tttgtgtaccggcatctagctttcc

SEQ ID NO: 5005248 - DNA, 25 bp, Homo sapien
tatttggtgctggatcattctgctg

SEQ ID NO: 5005249 - DNA, 25 bp, Homo sapien
tgaaattgtgttgtactgactgcta

SEQ ID NO: 5005250 - DNA, 25 bp, Homo sapien
caaatggactgattgaatctgtcac

SEQ ID NO: 5005251 - DNA, 25 bp, Homo sapien
tatgacctgctattccaacaaatgg

SEQ ID NO: 5005252 - DNA, 25 bp, Homo sapien
cagagaatagttgcacaatagaggg

SEQ ID NO: 5005253 - DNA, 25 bp, Homo sapien
taaaattaggcatatacagtaaact

SEQ ID NO: 5005254 - DNA, 25 bp, Homo sapien
cagacagacgactgccacagagaat

SEQ ID NO: 5005255 - DNA, 25 bp, Homo sapien
accttcagacttgtcaaacttaggg

SEQ ID NO: 5005256 - DNA, 25 bp, Homo sapien
tgaagtaagagaacgtgccagaaca

SEQ ID NO: 5005257 - DNA, 25 bp, Homo sapien
tgtcctggtcgtgcaaaaatgtaat

SEQ ID NO: 5005258 - DNA, 25 bp, Homo sapien
aataagaacctttgtgcgagagcac

SEQ ID NO: 5005259 - DNA, 25 bp, Homo sapien
tactgctgtatggtatcacgaaaac

SEQ ID NO: 5005260 - DNA, 25 bp, Homo sapien
atttccagccaatcttgatatgtgt

SEQ ID NO: 5005261 - DNA, 25 bp, Homo sapien
tcctcgtatacgcttagtcagacca

SEQ ID NO: 5005262 - DNA, 25 bp, Homo sapien
tagtcagaccataaaccactttaac

SEQ ID NO: 5005263 - DNA, 25 bp, Homo sapien
aacagtagtaggataaaacaagtag

SEQ ID NO: 5005264 - DNA, 25 bp, Homo sapien
tcatcagactgtctcctcgtatacg

SEQ ID NO: 5005265 - DNA, 25 bp, Homo sapien
acttgagaatttgctatttaatgca

SEQ ID NO: 5005266 - DNA, 25 bp, Homo sapien
taagcaggtatgcttgaaaactgtg

SEQ ID NO: 5005267 - DNA, 25 bp, Homo sapien
agcaggtatgcttgaaaactgtgtc

SEQ ID NO: 5005268 - DNA, 25 bp, Homo sapien
ctgtgtcacacttgagaatttgcta

SEQ ID NO: 5005269 - DNA, 25 bp, Homo sapien
cacattctagcccacctacgtagga

SEQ ID NO: 5005270 - DNA, 25 bp, Homo sapien
gaatagccgtcacattctagcccac

SEQ ID NO: 5005271 - DNA, 25 bp, Homo sapien
ccacctacgtaggacagcttctgat

SEQ ID NO: 5005272 - DNA, 25 bp, Homo sapien
ctatgccgaatagccgtcacattct

SEQ ID NO: 5005273 - DNA, 25 bp, Homo sapien
tatgaaacgtctccattttacactc

SEQ ID NO: 5005274 - DNA, 25 bp, Homo sapien
tcagttacatagctaatacaacatt

SEQ ID NO: 5005275 - DNA, 25 bp, Homo sapien
ttacatagctaatacaacatttttc

SEQ ID NO: 5005276 - DNA, 25 bp, Homo sapien
gacattttggttatgaaacgtctcc

SEQ ID NO: 5005277 - DNA, 25 bp, Homo sapien
caatcatcaatgacgtagtccctga

SEQ ID NO: 5005278 - DNA, 25 bp, Homo sapien
ttcaagacaacccaatcatcaatga

SEQ ID NO: 5005279 - DNA, 25 bp, Homo sapien
atgacgtagtccctgaatggcctta

SEQ ID NO: 5005280 - DNA, 25 bp, Homo sapien
gacaacccaatcatcaatgacgtag

SEQ ID NO: 5005281 - DNA, 25 bp, Homo sapien
tatgcatatgtgttgcttcactaga

SEQ ID NO: 5005282 - DNA, 25 bp, Homo sapien
cttttcctgtgagtagatagtagaa

SEQ ID NO: 5005283 - DNA, 25 bp, Homo sapien
tacagctaagcagtattctacatgt

SEQ ID NO: 5005284 - DNA, 25 bp, Homo sapien
cactagatacagctaagcagtattc

SEQ ID NO: 5005285 - DNA, 25 bp, Homo sapien
ctgtgtttccacagatgtccactgt

SEQ ID NO: 5005286 - DNA, 25 bp, Homo sapien
tgtgtttccacagatgtccactgtt

SEQ ID NO: 5005287 - DNA, 25 bp, Homo sapien
tagactccagtgttcccacaagctg

SEQ ID NO: 5005288 - DNA, 25 bp, Homo sapien
ccagtgttcccacaagctgtgtttc

SEQ ID NO: 5005289 - DNA, 25 bp, Homo sapien
gagagaaagcaccagaatcttctat

SEQ ID NO: 5005290 - DNA, 25 bp, Homo sapien
caacgttgccagatacgtgtttctg

SEQ ID NO: 5005291 - DNA, 25 bp, Homo sapien
tttcaatacaaccagatcattgcag

SEQ ID NO: 5005292 - DNA, 25 bp, Homo sapien
cccctagaggtctcctgcaaattct

SEQ ID NO: 5005293 - DNA, 25 bp, Homo sapien
tacacagtgtatcgatccaaaatcg

SEQ ID NO: 5005294 - DNA, 25 bp, Homo sapien
catttgacggtatatatttgaggcc

SEQ ID NO: 5005295 - DNA, 25 bp, Homo sapien
taatttttaagggagacatcagtaa

SEQ ID NO: 5005296 - DNA, 25 bp, Homo sapien
aaaacctctccaacaattgactgta

SEQ ID NO: 5005297 - DNA, 25 bp, Homo sapien
aagttacttctttatgaggctgccc

SEQ ID NO: 5005298 - DNA, 25 bp, Homo sapien
gaactctgatactgttcagtgacca

SEQ ID NO: 5005299 - DNA, 25 bp, Homo sapien
caatattgagtgagatgtagcaggg

SEQ ID NO: 5005300 - DNA, 25 bp, Homo sapien
gagcagctgatcttcctattgaact

SEQ ID NO: 5005301 - DNA, 25 bp, Homo sapien
ttagcaaaaagtggatgagcagctg

SEQ ID NO: 5005302 - DNA, 25 bp, Homo sapien
ttttttcaaggtgccatagggtgtc

SEQ ID NO: 5005303 - DNA, 25 bp, Homo sapien
ttttcaaggtgccatagggtgtcat

SEQ ID NO: 5005304 - DNA, 25 bp, Homo sapien
tttttcaaggtgccatagggtgtca

SEQ ID NO: 5005305 - DNA, 25 bp, Homo sapien
tcaataagaagataggaagacaagg

SEQ ID NO: 5005306 - DNA, 25 bp, Homo sapien
ggtaagacccaaccttattcttgca

SEQ ID NO: 5005307 - DNA, 25 bp, Homo sapien
tctagatagcagttacaatgattca

SEQ ID NO: 5005308 - DNA, 25 bp, Homo sapien
gaatgttaggctgcaaaagtctgga

SEQ ID NO: 5005309 - DNA, 25 bp, Homo sapien
taaatacgatttctgtgaatcttcc

SEQ ID NO: 5005310 - DNA, 25 bp, Homo sapien
aatacgatttctgtgaatcttcctg

SEQ ID NO: 5005311 - DNA, 25 bp, Homo sapien
cgatttctgtgaatcttcctgacaa

SEQ ID NO: 5005312 - DNA, 25 bp, Homo sapien
tacgatttctgtgaatcttcctgac

SEQ ID NO: 5005313 - DNA, 25 bp, Homo sapien
ggaagcatcactatctgacagttgg

SEQ ID NO: 5005314 - DNA, 25 bp, Homo sapien
taatagcatgtacaaggaaaccctt

SEQ ID NO: 5005315 - DNA, 25 bp, Homo sapien
cagctggaaactttgtactgggccc

SEQ ID NO: 5005316 - DNA, 25 bp, Homo sapien
tgttgtagagagtccatcatatgct

SEQ ID NO: 5005317 - DNA, 25 bp, Homo sapien
ggacatgcactttcagaactacctg

SEQ ID NO: 5005318 - DNA, 25 bp, Homo sapien
taattcttatggctccggacatgca

SEQ ID NO: 5005319 - DNA, 25 bp, Homo sapien
tccggacatgcactttcagaactac

SEQ ID NO: 5005320 - DNA, 25 bp, Homo sapien
tatggctccggacatgcactttcag

SEQ ID NO: 5005321 - DNA, 25 bp, Homo sapien
ggtcaaatagtttctcatttcgtat

SEQ ID NO: 5005322 - DNA, 25 bp, Homo sapien
tggtcaaatagtttctcatttcgta

SEQ ID NO: 5005323 - DNA, 25 bp, Homo sapien
caaatagtttctcatttcgtatcat

SEQ ID NO: 5005324 - DNA, 25 bp, Homo sapien
cctggtcaaatagtttctcatttcg

SEQ ID NO: 5005325 - DNA, 25 bp, Homo sapien
ccatagagtccatctatttttctct

SEQ ID NO: 5005326 - DNA, 25 bp, Homo sapien
tttcagccaaatgatatcttcttat

SEQ ID NO: 5005327 - DNA, 25 bp, Homo sapien
caaaaggaacatgggtggaaggatc

SEQ ID NO: 5005328 - DNA, 25 bp, Homo sapien
attaccaaactcaaaaggaacatgg

SEQ ID NO: 5005329 - DNA, 25 bp, Homo sapien
tgagcttggaaacattaccaaactc

SEQ ID NO: 5005330 - DNA, 25 bp, Homo sapien
tcatgagcttggaaacattaccaaa

SEQ ID NO: 5005331 - DNA, 25 bp, Homo sapien
gcttcttccatttgggctttacctc

SEQ ID NO: 5005332 - DNA, 25 bp, Homo sapien
cttccatttgggctttacctcttct

SEQ ID NO: 5005333 - DNA, 25 bp, Homo sapien
tacctcttctttcccactcctccat

SEQ ID NO: 5005334 - DNA, 25 bp, Homo sapien
cttgctgcttcttccatttgggctt

SEQ ID NO: 5005335 - DNA, 25 bp, Homo sapien
tgccccaagcattcaaaatactaaa

SEQ ID NO: 5005336 - DNA, 25 bp, Homo sapien
cataagacgcaagtgccccaagcat

SEQ ID NO: 5005337 - DNA, 25 bp, Homo sapien
ccactcccatttgggtgcatttgat

SEQ ID NO: 5005338 - DNA, 25 bp, Homo sapien
ttgatacaggattctttcggtgcca

SEQ ID NO: 5005339 - DNA, 25 bp, Homo sapien
tccacaaacatagtagactctccag

SEQ ID NO: 5005340 - DNA, 25 bp, Homo sapien
tgtccacaaacatagtagactctcc

SEQ ID NO: 5005341 - DNA, 25 bp, Homo sapien
cacaaacatagtagactctccagtc

SEQ ID NO: 5005342 - DNA, 25 bp, Homo sapien
ttgtccacaaacatagtagactctc

SEQ ID NO: 5005343 - DNA, 25 bp, Homo sapien
caaaagactcaactagatgccatgc

SEQ ID NO: 5005344 - DNA, 25 bp, Homo sapien
gtaaaaaagctcagactagtgcatc

SEQ ID NO: 5005345 - DNA, 25 bp, Homo sapien
tagtatcgactagctcaaagatagg

SEQ ID NO: 5005346 - DNA, 25 bp, Homo sapien
gagaggatctcctaaggttcccgac

SEQ ID NO: 5005347 - DNA, 25 bp, Homo sapien
gtgtgacttagaatcagtgaaatca

SEQ ID NO: 5005348 - DNA, 25 bp, Homo sapien
tcagtgtgacttagaatcagtgaaa

SEQ ID NO: 5005349 - DNA, 25 bp, Homo sapien
tgtgacttagaatcagtgaaatcac

SEQ ID NO: 5005350 - DNA, 25 bp, Homo sapien
cagtgtgacttagaatcagtgaaat

SEQ ID NO: 5005351 - DNA, 25 bp, Homo sapien
gacactagtctcacattcactggaa

SEQ ID NO: 5005352 - DNA, 25 bp, Homo sapien
tagcaatccgagatcagaacacagg

SEQ ID NO: 5005353 - DNA, 25 bp, Homo sapien
cacttcagccaaggaagagaggctt

SEQ ID NO: 5005354 - DNA, 25 bp, Homo sapien
tggctaacacaagctgcatgcaaga

SEQ ID NO: 5005355 - DNA, 25 bp, Homo sapien
atggtatgtgatttctgcataaagg

SEQ ID NO: 5005356 - DNA, 25 bp, Homo sapien
ttattgtttgtcttaatggtatgtg

SEQ ID NO: 5005357 - DNA, 25 bp, Homo sapien
ttaacatttgagagtcaacatttta

SEQ ID NO: 5005358 - DNA, 25 bp, Homo sapien
aacatttgagagtcaacattttaac

SEQ ID NO: 5005359 - DNA, 25 bp, Homo sapien
atcagcttattagcgccattgcctc

SEQ ID NO: 5005360 - DNA, 25 bp, Homo sapien
tcacatcagcttattagcgccattg

SEQ ID NO: 5005361 - DNA, 25 bp, Homo sapien
ccattgcctccaaaggcaataggag

SEQ ID NO: 5005362 - DNA, 25 bp, Homo sapien
attgcctccaaaggcaataggagag

SEQ ID NO: 5005363 - DNA, 25 bp, Homo sapien
gcagagtaataggactttgtaaggc

SEQ ID NO: 5005364 - DNA, 25 bp, Homo sapien
gctgattaaaaattgactctgccac

SEQ ID NO: 5005365 - DNA, 25 bp, Homo sapien
tctgccacatcaaagaggagttgaa

SEQ ID NO: 5005366 - DNA, 25 bp, Homo sapien
cgaaatgaagcccagtctgatggct

SEQ ID NO: 5005367 - DNA, 25 bp, Homo sapien
catatttgtcatccatgtattgcat

SEQ ID NO: 5005368 - DNA, 25 bp, Homo sapien
tcatatttgtcatccatgtattgca

SEQ ID NO: 5005369 - DNA, 25 bp, Homo sapien
ttcatatttgtcatccatgtattgc

SEQ ID NO: 5005370 - DNA, 25 bp, Homo sapien
tgacgtgttctttctctaagaccat

SEQ ID NO: 5005371 - DNA, 25 bp, Homo sapien
ttctctaagaccatccactcctcca

SEQ ID NO: 5005372 - DNA, 25 bp, Homo sapien
tggattagaggagagggtgacgtgt

SEQ ID NO: 5005373 - DNA, 25 bp, Homo sapien
aggagagggtgacgtgttctttctc

SEQ ID NO: 5005374 - DNA, 25 bp, Homo sapien
caatgtgctcagctgctatagtctt

SEQ ID NO: 5005375 - DNA, 25 bp, Homo sapien
aagctaggaccttaactgatcaggg

SEQ ID NO: 5005376 - DNA, 25 bp, Homo sapien
tctgtaactgttgataatgctgtca

SEQ ID NO: 5005377 - DNA, 25 bp, Homo sapien
gaactagttatcaaagacaatgtgc

SEQ ID NO: 5005378 - DNA, 25 bp, Homo sapien
gggcttagtttaatattagtcatga

SEQ ID NO: 5005379 - DNA, 25 bp, Homo sapien
tctttaatctgactgacatgtcaca

SEQ ID NO: 5005380 - DNA, 25 bp, Homo sapien
aatatcctgtcggtgtcatgcaccc

SEQ ID NO: 5005381 - DNA, 25 bp, Homo sapien
cattttgcttaattctgggcttagt

SEQ ID NO: 5005382 - DNA, 25 bp, Homo sapien
gacagtgcttgcaaatgtgatgctc

SEQ ID NO: 5005383 - DNA, 25 bp, Homo sapien
gtgacagtgcttgcaaatgtgatgc

SEQ ID NO: 5005384 - DNA, 25 bp, Homo sapien
tgacagtgcttgcaaatgtgatgct

SEQ ID NO: 5005385 - DNA, 25 bp, Homo sapien
cagtgcttgcaaatgtgatgctcat

SEQ ID NO: 5005386 - DNA, 25 bp, Homo sapien
cacattcttggagagactgtaacaa

SEQ ID NO: 5005387 - DNA, 25 bp, Homo sapien
ttcctgtgcagtcattttatcaggg

SEQ ID NO: 5005388 - DNA, 25 bp, Homo sapien
tacaagtcagagaacaattctgctt

SEQ ID NO: 5005389 - DNA, 25 bp, Homo sapien
tttatcagggacaaggaatattcca

SEQ ID NO: 5005390 - DNA, 25 bp, Homo sapien
tattgactataggactctcggattt

SEQ ID NO: 5005391 - DNA, 25 bp, Homo sapien
ttattgactataggactctcggatt

SEQ ID NO: 5005392 - DNA, 25 bp, Homo sapien
attgactataggactctcggatttt

SEQ ID NO: 5005393 - DNA, 25 bp, Homo sapien
atatgtattaccacaatgttcccat

SEQ ID NO: 5005394 - DNA, 25 bp, Homo sapien
tatgtattaccacaatgttcccatt

SEQ ID NO: 5005395 - DNA, 25 bp, Homo sapien
cactcttgttcccacttattggctt

SEQ ID NO: 5005396 - DNA, 25 bp, Homo sapien
tcactcttgttcccacttattggct

SEQ ID NO: 5005397 - DNA, 25 bp, Homo sapien
actcttgttcccacttattggcttt

SEQ ID NO: 5005398 - DNA, 25 bp, Homo sapien
cttccttgaacaatcaacaatggca

SEQ ID NO: 5005399 - DNA, 25 bp, Homo sapien
ttccttgaacaatcaacaatggcat

SEQ ID NO: 5005400 - DNA, 25 bp, Homo sapien
actccaactgtcatatagtctctct

SEQ ID NO: 5005401 - DNA, 25 bp, Homo sapien
ctccaactgtcatatagtctctctg

SEQ ID NO: 5005402 - DNA, 25 bp, Homo sapien
catggtgacaaaaaacttccatact

SEQ ID NO: 5005403 - DNA, 25 bp, Homo sapien
ggtcatggtgacaaaaaacttccat

SEQ ID NO: 5005404 - DNA, 25 bp, Homo sapien
tcccaaaagtcataggtatttccat

SEQ ID NO: 5005405 - DNA, 25 bp, Homo sapien
gaatacacaaggcagcttggagcca

SEQ ID NO: 5005406 - DNA, 25 bp, Homo sapien
aatacacaaggcagcttggagccat

SEQ ID NO: 5005407 - DNA, 25 bp, Homo sapien
tggaatacacaaggcagcttggagc

SEQ ID NO: 5005408 - DNA, 25 bp, Homo sapien
ctggaatacacaaggcagcttggag

SEQ ID NO: 5005409 - DNA, 25 bp, Homo sapien
gatggttatctgaataaacagtttt

SEQ ID NO: 5005410 - DNA, 25 bp, Homo sapien
ccaataatgcagatggttatctgaa

SEQ ID NO: 5005411 - DNA, 25 bp, Homo sapien
gactttgccttcaaataacaagata

SEQ ID NO: 5005412 - DNA, 25 bp, Homo sapien
tgccttcaaataacaagataacctt

SEQ ID NO: 5005413 - DNA, 25 bp, Homo sapien
cccacaggaggtagatagaggtcac

SEQ ID NO: 5005414 - DNA, 25 bp, Homo sapien
catgatggcttggtggcatgtagac

SEQ ID NO: 5005415 - DNA, 25 bp, Homo sapien
tatctgcctctctagctaatgccag

SEQ ID NO: 5005416 - DNA, 25 bp, Homo sapien
atgccagaagctgtgcccatgatgg

SEQ ID NO: 5005417 - DNA, 25 bp, Homo sapien
ggcccatttcttcttcggacactgc

SEQ ID NO: 5005418 - DNA, 25 bp, Homo sapien
ccatttcttcttcggacactgccat

SEQ ID NO: 5005419 - DNA, 25 bp, Homo sapien
cccatttcttcttcggacactgcca

SEQ ID NO: 5005420 - DNA, 25 bp, Homo sapien
tgggcccatttcttcttcggacact

SEQ ID NO: 5005421 - DNA, 25 bp, Homo sapien
gagtactaaatacatcatcagtgag

SEQ ID NO: 5005422 - DNA, 25 bp, Homo sapien
tgtgagtactaaatacatcatcagt

SEQ ID NO: 5005423 - DNA, 25 bp, Homo sapien
cttgtgagtactaaatacatcatca

SEQ ID NO: 5005424 - DNA, 25 bp, Homo sapien
taaatacatcatcagtgagtctcat

SEQ ID NO: 5005425 - DNA, 25 bp, Homo sapien
agtgactaaattactgaaaggtaat

SEQ ID NO: 5005426 - DNA, 25 bp, Homo sapien
gaggcataaacgtatgcattccagt

SEQ ID NO: 5005427 - DNA, 25 bp, Homo sapien
ttctgaggcataaacgtatgcattc

SEQ ID NO: 5005428 - DNA, 25 bp, Homo sapien
cataaacgtatgcattccagtggct

SEQ ID NO: 5005429 - DNA, 25 bp, Homo sapien
agtccattgtgtcagactcataaac

SEQ ID NO: 5005430 - DNA, 25 bp, Homo sapien
gtccattgtgtcagactcataaacc

SEQ ID NO: 5005431 - DNA, 25 bp, Homo sapien
ttagtccattgtgtcagactcataa

SEQ ID NO: 5005432 - DNA, 25 bp, Homo sapien
tagtccattgtgtcagactcataaa

SEQ ID NO: 5005433 - DNA, 25 bp, Homo sapien
tctaatatcctcttcattatctact

SEQ ID NO: 5005434 - DNA, 25 bp, Homo sapien
aattctaatatcctcttcattatct

SEQ ID NO: 5005435 - DNA, 25 bp, Homo sapien
cttcattatctacttttccagacat

SEQ ID NO: 5005436 - DNA, 25 bp, Homo sapien
tcttcattatctacttttccagaca

SEQ ID NO: 5005437 - DNA, 25 bp, Homo sapien
tctgtcctcatctgagctttgagtc

SEQ ID NO: 5005438 - DNA, 25 bp, Homo sapien
ctgtcctcatctgagctttgagtcc

SEQ ID NO: 5005439 - DNA, 25 bp, Homo sapien
tgtcctcatctgagctttgagtccc

SEQ ID NO: 5005440 - DNA, 25 bp, Homo sapien
cttctgtcctcatctgagctttgag

SEQ ID NO: 5005441 - DNA, 25 bp, Homo sapien
ccacagatgttgtaagactttttcc

SEQ ID NO: 5005442 - DNA, 25 bp, Homo sapien
gatgttgtaagactttttccaagct

SEQ ID NO: 5005443 - DNA, 25 bp, Homo sapien
tcattcccaaatatagatccagttg

SEQ ID NO: 5005444 - DNA, 25 bp, Homo sapien
tccagttgactgttgcttccattct

SEQ ID NO: 5005445 - DNA, 25 bp, Homo sapien
caatgttctggaggtgtttgcatat

SEQ ID NO: 5005446 - DNA, 25 bp, Homo sapien
cattgtgatgcctagcaaccatttc

SEQ ID NO: 5005447 - DNA, 25 bp, Homo sapien
taatttgttattcttctatgaggcc

SEQ ID NO: 5005448 - DNA, 25 bp, Homo sapien
ggccttcttttgcatactgtgttta

SEQ ID NO: 5005449 - DNA, 25 bp, Homo sapien
ggaggacttcccatataagcaaagc

SEQ ID NO: 5005450 - DNA, 25 bp, Homo sapien
ggcgggcttgcatttaggctcacat

SEQ ID NO: 5005451 - DNA, 25 bp, Homo sapien
ccttacagccttaaatgttggagaa

SEQ ID NO: 5005452 - DNA, 25 bp, Homo sapien
ttgcgttgccaagttccttacagcc

SEQ ID NO: 5005453 - DNA, 25 bp, Homo sapien
tcaagatagcactagcttttcctgt

SEQ ID NO: 5005454 - DNA, 25 bp, Homo sapien
tgataactttatgccatcacagtca

SEQ ID NO: 5005455 - DNA, 25 bp, Homo sapien
tagcactagcttttcctgtgataac

SEQ ID NO: 5005456 - DNA, 25 bp, Homo sapien
tgtgataactttatgccatcacagt

SEQ ID NO: 5005457 - DNA, 25 bp, Homo sapien
ttctgtaacagaatcagtccacaag

SEQ ID NO: 5005458 - DNA, 25 bp, Homo sapien
tcagtccacaagcaaggttctctca

SEQ ID NO: 5005459 - DNA, 25 bp, Homo sapien
cacaagcaaggttctctcattgtct

SEQ ID NO: 5005460 - DNA, 25 bp, Homo sapien
taacagaatcagtccacaagcaagg

SEQ ID NO: 5005461 - DNA, 25 bp, Homo sapien
tcatcaggaaagataagtgctcttg

SEQ ID NO: 5005462 - DNA, 25 bp, Homo sapien
tcagaataatgaaaccgtatgcaga

SEQ ID NO: 5005463 - DNA, 25 bp, Homo sapien
ggcaatgtggagtgctgtatcagaa

SEQ ID NO: 5005464 - DNA, 25 bp, Homo sapien
tcttgaaccctgcaggcttatgggc

SEQ ID NO: 5005465 - DNA, 25 bp, Homo sapien
cccatttcaatcattagaccttcca

SEQ ID NO: 5005466 - DNA, 25 bp, Homo sapien
gaccttccaaacagattaatgtaca

SEQ ID NO: 5005467 - DNA, 25 bp, Homo sapien
caatcattagaccttccaaacagat

SEQ ID NO: 5005468 - DNA, 25 bp, Homo sapien
tccaaacagattaatgtacaaatac

SEQ ID NO: 5005469 - DNA, 25 bp, Homo sapien
aaatgttacttgcagtactgcatgc

SEQ ID NO: 5005470 - DNA, 25 bp, Homo sapien
gcagtactgcatgctctgctaaatg

SEQ ID NO: 5005471 - DNA, 25 bp, Homo sapien
atgttaaacgacaagcagagcttcc

SEQ ID NO: 5005472 - DNA, 25 bp, Homo sapien
gctctgctaaatgttaaacgacaag

SEQ ID NO: 5005473 - DNA, 25 bp, Homo sapien
caaattgaaatgtcgagctgctgca

SEQ ID NO: 5005474 - DNA, 25 bp, Homo sapien
agctgctgcaaatcccacggtagga

SEQ ID NO: 5005475 - DNA, 25 bp, Homo sapien
aagatctcaaattgaaatgtcgagc

SEQ ID NO: 5005476 - DNA, 25 bp, Homo sapien
aatcccacggtaggagaccatacaa

SEQ ID NO: 5005477 - DNA, 25 bp, Homo sapien
ggttcgtccatgctcctgtggttct

SEQ ID NO: 5005478 - DNA, 25 bp, Homo sapien
caagggttcgtccatgctcctgtgg

SEQ ID NO: 5005479 - DNA, 25 bp, Homo sapien
tttctcaagggttcgtccatgctcc

SEQ ID NO: 5005480 - DNA, 25 bp, Homo sapien
cttctttctcaagggttcgtccatg

SEQ ID NO: 5005481 - DNA, 25 bp, Homo sapien
cctcaggggcggactgtggatttaa

SEQ ID NO: 5005482 - DNA, 25 bp, Homo sapien
tgattactggttgaaaattcccctg

SEQ ID NO: 5005483 - DNA, 25 bp, Homo sapien
tcccctgttcttcattaaagactga

SEQ ID NO: 5005484 - DNA, 25 bp, Homo sapien
ttacggctgcatggtcctcaggggc

SEQ ID NO: 5005485 - DNA, 25 bp, Homo sapien
ggttgtgattaaatctggggagtac

SEQ ID NO: 5005486 - DNA, 25 bp, Homo sapien
tagtggtgttgctctgagattcccc

SEQ ID NO: 5005487 - DNA, 25 bp, Homo sapien
gagatgcaactttggtatcctagtg

SEQ ID NO: 5005488 - DNA, 25 bp, Homo sapien
cagtttccttttcacaattggcgta

SEQ ID NO: 5005489 - DNA, 25 bp, Homo sapien
cttttcacaattggcgtattgtgtc

SEQ ID NO: 5005490 - DNA, 25 bp, Homo sapien
gtagaataaaggaaatcttctgtct

SEQ ID NO: 5005491 - DNA, 25 bp, Homo sapien
tcatagtagaataaaggaaatcttc

SEQ ID NO: 5005492 - DNA, 25 bp, Homo sapien
caaaatagatttatcatagtagaat

SEQ ID NO: 5005493 - DNA, 25 bp, Homo sapien
aataaaggaaatcttctgtctgctg

SEQ ID NO: 5005494 - DNA, 25 bp, Homo sapien
caaggtctctatgaactggataatc

SEQ ID NO: 5005495 - DNA, 25 bp, Homo sapien
caaagaggctttttgtctggagcga

SEQ ID NO: 5005496 - DNA, 25 bp, Homo sapien
tttgtctggagcgatgccactggtg

SEQ ID NO: 5005497 - DNA, 25 bp, Homo sapien
tatgaactggataatctgcaacaca

SEQ ID NO: 5005498 - DNA, 25 bp, Homo sapien
tttccattagtgacttaatcaaata

SEQ ID NO: 5005499 - DNA, 25 bp, Homo sapien
gaaaagtcggatattgaagacaggt

SEQ ID NO: 5005500 - DNA, 25 bp, Homo sapien
cgaaaaaatctaagaccaatcttgg

SEQ ID NO: 5005501 - DNA, 25 bp, Homo sapien
tcttcaatgatgaaaagtcggatat

SEQ ID NO: 5005502 - DNA, 25 bp, Homo sapien
aatcttgattgccagatttatatgg

SEQ ID NO: 5005503 - DNA, 25 bp, Homo sapien
aatatcatttaaatcctcaacagaa

SEQ ID NO: 5005504 - DNA, 25 bp, Homo sapien
aaagcttcaggataatatcatttaa

SEQ ID NO: 5005505 - DNA, 25 bp, Homo sapien
catttaaatcctcaacagaaagcaa

SEQ ID NO: 5005506 - DNA, 25 bp, Homo sapien
tccaaaactaattgaaagaattcca

SEQ ID NO: 5005507 - DNA, 25 bp, Homo sapien
tcagagactttagggtgacagatcc

SEQ ID NO: 5005508 - DNA, 25 bp, Homo sapien
tctcttcgaataagcaatttcagag

SEQ ID NO: 5005509 - DNA, 25 bp, Homo sapien
ctttagggtgacagatccaaaacta

SEQ ID NO: 5005510 - DNA, 25 bp, Homo sapien
tctttgccacgagaatggctacatt

SEQ ID NO: 5005511 - DNA, 25 bp, Homo sapien
cattctgagaaatgttccgtcctca

SEQ ID NO: 5005512 - DNA, 25 bp, Homo sapien
tctccttgtcgttataatctttgcc

SEQ ID NO: 5005513 - DNA, 25 bp, Homo sapien
aaatgttccgtcctcagttcagtca

SEQ ID NO: 5005514 - DNA, 25 bp, Homo sapien
ttgtgatggtggtagccaatagttc

SEQ ID NO: 5005515 - DNA, 25 bp, Homo sapien
tgtgatggtggtagccaatagttct

SEQ ID NO: 5005516 - DNA, 25 bp, Homo sapien
tttgtgatggtggtagccaatagtt

SEQ ID NO: 5005517 - DNA, 25 bp, Homo sapien
ttttgtgatggtggtagccaatagt

SEQ ID NO: 5005518 - DNA, 25 bp, Homo sapien
tgcggcagagcacaacaagcattgt

SEQ ID NO: 5005519 - DNA, 25 bp, Homo sapien
gcagagcacaacaagcattgttttg

SEQ ID NO: 5005520 - DNA, 25 bp, Homo sapien
tgcagctatgcttatgcggcagagc

SEQ ID NO: 5005521 - DNA, 25 bp, Homo sapien
tgcttatgcggcagagcacaacaag

SEQ ID NO: 5005522 - DNA, 25 bp, Homo sapien
agatggcatcttgatcgtgcatgca

SEQ ID NO: 5005523 - DNA, 25 bp, Homo sapien
tagatggcatcttgatcgtgcatgc

SEQ ID NO: 5005524 - DNA, 25 bp, Homo sapien
gaaacagccattacagtctgtcaaa

SEQ ID NO: 5005525 - DNA, 25 bp, Homo sapien
tattttttgatgtgcattgtgcaag

SEQ ID NO: 5005526 - DNA, 25 bp, Homo sapien
ccataatatccctgaaacagccatt

SEQ ID NO: 5005527 - DNA, 25 bp, Homo sapien
gcaccgtatttgtacagtagtattc

SEQ ID NO: 5005528 - DNA, 25 bp, Homo sapien
ttttgatatcaataatggtgaagcc

SEQ ID NO: 5005529 - DNA, 25 bp, Homo sapien
ttcatgactccatggttgaacttca

SEQ ID NO: 5005530 - DNA, 25 bp, Homo sapien
ttgggtaatatgacgagaatatcac

SEQ ID NO: 5005531 - DNA, 25 bp, Homo sapien
catagagcttgtaatagagttagac

SEQ ID NO: 5005532 - DNA, 25 bp, Homo sapien
tgagaaatcctgtgacggtattcct

SEQ ID NO: 5005533 - DNA, 25 bp, Homo sapien
gaaatcctgtgacggtattcctgca

SEQ ID NO: 5005534 - DNA, 25 bp, Homo sapien
cctgagaaatcctgtgacggtattc

SEQ ID NO: 5005535 - DNA, 25 bp, Homo sapien
gagaaatcctgtgacggtattcctg

SEQ ID NO: 5005536 - DNA, 25 bp, Homo sapien
ggtaatctaacttttcctctcaggc

SEQ ID NO: 5005537 - DNA, 25 bp, Homo sapien
ggtcattcgtaagtgggtaatctaa

SEQ ID NO: 5005538 - DNA, 25 bp, Homo sapien
tcttgtgaattgttacatgttggct

SEQ ID NO: 5005539 - DNA, 25 bp, Homo sapien
tgcccagcctaagatgtcacgcttt

SEQ ID NO: 5005540 - DNA, 25 bp, Homo sapien
catctctgcctttcttcgaaaccat

SEQ ID NO: 5005541 - DNA, 25 bp, Homo sapien
tctttcaattccaatagaaatccaa

SEQ ID NO: 5005542 - DNA, 25 bp, Homo sapien
caattccaatagaaatccaagcata

SEQ ID NO: 5005543 - DNA, 25 bp, Homo sapien
tttcaattccaatagaaatccaagc

SEQ ID NO: 5005544 - DNA, 25 bp, Homo sapien
ttgtataaatgacatccagtgtcat

SEQ ID NO: 5005545 - DNA, 25 bp, Homo sapien
tgtataaatgacatccagtgtcatg

SEQ ID NO: 5005546 - DNA, 25 bp, Homo sapien
agcagcagggtctttctatcttgaa

SEQ ID NO: 5005547 - DNA, 25 bp, Homo sapien
tcctataggaccgaagaggcttcat

SEQ ID NO: 5005548 - DNA, 25 bp, Homo sapien
gaaggttatcagctaccactggaag

SEQ ID NO: 5005549 - DNA, 25 bp, Homo sapien
agaaaaatcttctcgtcctcaggaa

SEQ ID NO: 5005550 - DNA, 25 bp, Homo sapien
aaagcaggttttgctaccgccgaga

SEQ ID NO: 5005551 - DNA, 25 bp, Homo sapien
gacagagtgtagtttaggcaagtaa

SEQ ID NO: 5005552 - DNA, 25 bp, Homo sapien
cacaggctgtgtagtatatgaggca

SEQ ID NO: 5005553 - DNA, 25 bp, Homo sapien
tattaggaagacagccatcacaggc

SEQ ID NO: 5005554 - DNA, 25 bp, Homo sapien
gatattaatgaagctgcaatgcaga

SEQ ID NO: 5005555 - DNA, 25 bp, Homo sapien
gagtaagagcagtaggacaagaaga

SEQ ID NO: 5005556 - DNA, 25 bp, Homo sapien
aggagtaagagcagtaggacaagaa

SEQ ID NO: 5005557 - DNA, 25 bp, Homo sapien
agtcctgatacagtatcttccgaaa

SEQ ID NO: 5005558 - DNA, 25 bp, Homo sapien
ttccgaaactactatctgttggaga

SEQ ID NO: 5005559 - DNA, 25 bp, Homo sapien
ccaaaccagtaagccctgcaatttc

SEQ ID NO: 5005560 - DNA, 25 bp, Homo sapien
tcttttgcatttcagcgacgattaa

SEQ ID NO: 5005561 - DNA, 25 bp, Homo sapien
ttcagcgacgattaaaatcacgatg

SEQ ID NO: 5005562 - DNA, 25 bp, Homo sapien
cacgatgatattgcggtcaggccca

SEQ ID NO: 5005563 - DNA, 25 bp, Homo sapien
gaccacctaggctgaaattaagtta

SEQ ID NO: 5005564 - DNA, 25 bp, Homo sapien
taaagtcattcttaagctaggagtc

SEQ ID NO: 5005565 - DNA, 25 bp, Homo sapien
gaacccagactgacctgaggtctgt

SEQ ID NO: 5005566 - DNA, 25 bp, Homo sapien
tattcaaagcctagaaatgaccacc

SEQ ID NO: 5005567 - DNA, 25 bp, Homo sapien
tggtgtaaacaccatgttaatcttc

SEQ ID NO: 5005568 - DNA, 25 bp, Homo sapien
acttcacaaattttcgcagcatcct

SEQ ID NO: 5005569 - DNA, 25 bp, Homo sapien
ttcacaaattttcgcagcatcctgg

SEQ ID NO: 5005570 - DNA, 25 bp, Homo sapien
catcctggtgtaaacaccatgttaa

SEQ ID NO: 5005571 - DNA, 25 bp, Homo sapien
gccttgtctgcactgatttcatcat

SEQ ID NO: 5005572 - DNA, 25 bp, Homo sapien
cagccttgtctgcactgatttcatc

SEQ ID NO: 5005573 - DNA, 25 bp, Homo sapien
aagcagccttgtctgcactgatttc

SEQ ID NO: 5005574 - DNA, 25 bp, Homo sapien
tgaaagcagccttgtctgcactgat

SEQ ID NO: 5005575 - DNA, 25 bp, Homo sapien
tacaagtgacaagggatctgatgcc

SEQ ID NO: 5005576 - DNA, 25 bp, Homo sapien
tgatgcctttgtcaccccatgaatg

SEQ ID NO: 5005577 - DNA, 25 bp, Homo sapien
tctaggatgattctatcaagcaaga

SEQ ID NO: 5005578 - DNA, 25 bp, Homo sapien
tgaacgtgagatgtgctggcaagcc

SEQ ID NO: 5005579 - DNA, 25 bp, Homo sapien
aatatgccaaccaactgagacccct

SEQ ID NO: 5005580 - DNA, 25 bp, Homo sapien
tatatattcctaagagccacgtgcc

SEQ ID NO: 5005581 - DNA, 25 bp, Homo sapien
tctagctattggcaagaaatccagg

SEQ ID NO: 5005582 - DNA, 25 bp, Homo sapien
aaatgaaagccccaaactggtgtga

SEQ ID NO: 5005583 - DNA, 25 bp, Homo sapien
tcaagcttgggttgtctggtcaaca

SEQ ID NO: 5005584 - DNA, 25 bp, Homo sapien
catttgggtctgattcgtagtttcc

SEQ ID NO: 5005585 - DNA, 25 bp, Homo sapien
gcaatattcactttcgacagcctgt

SEQ ID NO: 5005586 - DNA, 25 bp, Homo sapien
catggtgcatagtgttctaagtcaa

SEQ ID NO: 5005587 - DNA, 25 bp, Homo sapien
cttatgtaggctggttataggcagt

SEQ ID NO: 5005588 - DNA, 25 bp, Homo sapien
taggcagtagagagacacggtggat

SEQ ID NO: 5005589 - DNA, 25 bp, Homo sapien
cacggtggatgggaggtagaagaca

SEQ ID NO: 5005590 - DNA, 25 bp, Homo sapien
gacaacaggaatgtacacaaacatt

SEQ ID NO: 5005591 - DNA, 25 bp, Homo sapien
tgccctatcaatagaaaaggagtct

SEQ ID NO: 5005592 - DNA, 25 bp, Homo sapien
gtttctaggtctgagtcaattctta

SEQ ID NO: 5005593 - DNA, 25 bp, Homo sapien
gagtctaaatcctcttgagaaagaa

SEQ ID NO: 5005594 - DNA, 25 bp, Homo sapien
gagtcaattcttatgccctatcaat

SEQ ID NO: 5005595 - DNA, 25 bp, Homo sapien
gatttttgtgccctgaatggtcctg

SEQ ID NO: 5005596 - DNA, 25 bp, Homo sapien
tctccgcttgcaggttggctagctc

SEQ ID NO: 5005597 - DNA, 25 bp, Homo sapien
tgcaggcagatagcacctcctttta

SEQ ID NO: 5005598 - DNA, 25 bp, Homo sapien
tccacgtagcataacagtcagattt

SEQ ID NO: 5005599 - DNA, 25 bp, Homo sapien
aacaaagtgaattcttcctaatgtc

SEQ ID NO: 5005600 - DNA, 25 bp, Homo sapien
acaaagtgaattcttcctaatgtca

SEQ ID NO: 5005601 - DNA, 25 bp, Homo sapien
ctctttcattccgtgcaccagggtg

SEQ ID NO: 5005602 - DNA, 25 bp, Homo sapien
tctttcattccgtgcaccagggtgg

SEQ ID NO: 5005603 - DNA, 25 bp, Homo sapien
ctcctctctttcattccgtgcacca

SEQ ID NO: 5005604 - DNA, 25 bp, Homo sapien
ctctctttcattccgtgcaccaggg

SEQ ID NO: 5005605 - DNA, 25 bp, Homo sapien
caaagttctatcagaaggtaggtca

SEQ ID NO: 5005606 - DNA, 25 bp, Homo sapien
gtaggtcagagaaatccccagcgca

SEQ ID NO: 5005607 - DNA, 25 bp, Homo sapien
tatattgactattgactcgggttca

SEQ ID NO: 5005608 - DNA, 25 bp, Homo sapien
tatttcaagaaactaaccatcagtg

SEQ ID NO: 5005609 - DNA, 25 bp, Homo sapien
ggacgttgtcaagttattatcagca

SEQ ID NO: 5005610 - DNA, 25 bp, Homo sapien
tgcttccaacgctaaaggtatcttg

SEQ ID NO: 5005611 - DNA, 25 bp, Homo sapien
tactccatgacagattgcttccaac

SEQ ID NO: 5005612 - DNA, 25 bp, Homo sapien
catctgcaatgccaaaggacgttgt

SEQ ID NO: 5005613 - DNA, 25 bp, Homo sapien
ggtactggtcactaaggcatcaaag

SEQ ID NO: 5005614 - DNA, 25 bp, Homo sapien
taagcctgagtgcaaccttgggcct

SEQ ID NO: 5005615 - DNA, 25 bp, Homo sapien
tatcgaaagtacattcagccctccg

SEQ ID NO: 5005616 - DNA, 25 bp, Homo sapien
caaagggtccccagtgtagtgagac

SEQ ID NO: 5005617 - DNA, 25 bp, Homo sapien
gattttggtatctgcgggttttgat

SEQ ID NO: 5005618 - DNA, 25 bp, Homo sapien
catgcacgctgccaggtgatgactg

SEQ ID NO: 5005619 - DNA, 25 bp, Homo sapien
gccccatgcacgctgccaggtgatg

SEQ ID NO: 5005620 - DNA, 25 bp, Homo sapien
gatgactgtaaatggtcctctgaat

SEQ ID NO: 5005621 - DNA, 25 bp, Homo sapien
cattaaccagatgttttgctaagct

SEQ ID NO: 5005622 - DNA, 25 bp, Homo sapien
taattcaattcagcccaacctcaac

SEQ ID NO: 5005623 - DNA, 25 bp, Homo sapien
gctaagctatttctggataattcca

SEQ ID NO: 5005624 - DNA, 25 bp, Homo sapien
tatgaatccatctactatcatcgtc

SEQ ID NO: 5005625 - DNA, 25 bp, Homo sapien
ctgtttattactcttgacaagagac

SEQ ID NO: 5005626 - DNA, 25 bp, Homo sapien
gaggcacaggattgccaatgtcaca

SEQ ID NO: 5005627 - DNA, 25 bp, Homo sapien
tccctcaagaccccaaagttcattg

SEQ ID NO: 5005628 - DNA, 25 bp, Homo sapien
cagattttatctggatgaattgcaa

SEQ ID NO: 5005629 - DNA, 25 bp, Homo sapien
gacactgcagtgttgggaaccaata

SEQ ID NO: 5005630 - DNA, 25 bp, Homo sapien
gcaagtcgtagatcacaagtcacag

SEQ ID NO: 5005631 - DNA, 25 bp, Homo sapien
ttaatgccaccagttgacgccaggc

SEQ ID NO: 5005632 - DNA, 25 bp, Homo sapien
gacacccagcaatatgtagagtgca

SEQ ID NO: 5005633 - DNA, 25 bp, Homo sapien
tcatatttgagggacaaatcaatag

SEQ ID NO: 5005634 - DNA, 25 bp, Homo sapien
agtcatatttgagggacaaatcaat

SEQ ID NO: 5005635 - DNA, 25 bp, Homo sapien
gtcatatttgagggacaaatcaata

SEQ ID NO: 5005636 - DNA, 25 bp, Homo sapien
tgatcctaagcaagtcagctcctcg

SEQ ID NO: 5005637 - DNA, 25 bp, Homo sapien
cctcgatttgcctgatgacgatgaa

SEQ ID NO: 5005638 - DNA, 25 bp, Homo sapien
gctttctctccagtacagttgctct

SEQ ID NO: 5005639 - DNA, 25 bp, Homo sapien
gacgatgaatatgaatacaggcttt

SEQ ID NO: 5005640 - DNA, 25 bp, Homo sapien
aaagcactcctttcatggcagcggc

SEQ ID NO: 5005641 - DNA, 25 bp, Homo sapien
aaaagcactcctttcatggcagcgg

SEQ ID NO: 5005642 - DNA, 25 bp, Homo sapien
ggcaaaaagcactcctttcatggca

SEQ ID NO: 5005643 - DNA, 25 bp, Homo sapien
caaaaagcactcctttcatggcagc

SEQ ID NO: 5005644 - DNA, 25 bp, Homo sapien
tgccgggcagcaaagcttctaagtg

SEQ ID NO: 5005645 - DNA, 25 bp, Homo sapien
ctttaattacaagagtggcagtctc

SEQ ID NO: 5005646 - DNA, 25 bp, Homo sapien
cagaacagccaatggtaaatgccct

SEQ ID NO: 5005647 - DNA, 25 bp, Homo sapien
tctaagtgaaacctgtagtagcagt

SEQ ID NO: 5005648 - DNA, 25 bp, Homo sapien
catatttagaagctactgttaccgt

SEQ ID NO: 5005649 - DNA, 25 bp, Homo sapien
tatttagaagctactgttaccgtca

SEQ ID NO: 5005650 - DNA, 25 bp, Homo sapien
taagcatcaggttcatatttagaag

SEQ ID NO: 5005651 - DNA, 25 bp, Homo sapien
taatggttgtataagcatcaggttc

SEQ ID NO: 5005652 - DNA, 25 bp, Homo sapien
ttgctcgcagcactcccttggagga

SEQ ID NO: 5005653 - DNA, 25 bp, Homo sapien
caggctcaggtggacggccgtcttt

SEQ ID NO: 5005654 - DNA, 25 bp, Homo sapien
tcaccccattcagctataattgtct

SEQ ID NO: 5005655 - DNA, 25 bp, Homo sapien
tatttctcggtgttcactgcagacc

SEQ ID NO: 5005656 - DNA, 25 bp, Homo sapien
cagtcccgacccgttttcaggacag

SEQ ID NO: 5005657 - DNA, 25 bp, Homo sapien
caggaccaacccgtataatactagg

SEQ ID NO: 5005658 - DNA, 25 bp, Homo sapien
caggacaggaccaacccgtataata

SEQ ID NO: 5005659 - DNA, 25 bp, Homo sapien
ttcaggacaggaccaacccgtataa

SEQ ID NO: 5005660 - DNA, 25 bp, Homo sapien
cgctctgcgttgtaccctctttata

SEQ ID NO: 5005661 - DNA, 25 bp, Homo sapien
cacctggagtctggtacgctctgcg

SEQ ID NO: 5005662 - DNA, 25 bp, Homo sapien
tagtcagtcagatcgcccattttct

SEQ ID NO: 5005663 - DNA, 25 bp, Homo sapien
tatattccagatcgtagtcagtcag

SEQ ID NO: 5005664 - DNA, 25 bp, Homo sapien
agtctcgctgagctcgaggaggtgg

SEQ ID NO: 5005665 - DNA, 25 bp, Homo sapien
ttagcgggtgggaggtgcggctggg

SEQ ID NO: 5005666 - DNA, 25 bp, Homo sapien
agctcgaggaggtggcgcgatggag

SEQ ID NO: 5005667 - DNA, 25 bp, Homo sapien
ggtgcggctgggttgctacagccag

SEQ ID NO: 5005668 - DNA, 25 bp, Homo sapien
ttcggtgcggcggacctcgccgcgt

SEQ ID NO: 5005669 - DNA, 25 bp, Homo sapien
ggatgagggcaggacggctagagcg

SEQ ID NO: 5005670 - DNA, 25 bp, Homo sapien
tggggaccctggacaccagtagcag

SEQ ID NO: 5005671 - DNA, 25 bp, Homo sapien
gaaggtgaggcgatgaagggatgag

SEQ ID NO: 5005672 - DNA, 25 bp, Homo sapien
ctgtttacccattttatcctgtgta

SEQ ID NO: 5005673 - DNA, 25 bp, Homo sapien
tattcacggccgctgtgtgaggaag

SEQ ID NO: 5005674 - DNA, 25 bp, Homo sapien
ccggaggatttgatgacttattcac

SEQ ID NO: 5005675 - DNA, 25 bp, Homo sapien
tatctttgtactgtaaccatgactc

SEQ ID NO: 5005676 - DNA, 25 bp, Homo sapien
taaaggtattcctcattttacgaga

SEQ ID NO: 5005677 - DNA, 25 bp, Homo sapien
tgtccaagttggagaattgttacct

SEQ ID NO: 5005678 - DNA, 25 bp, Homo sapien
taccttgcaagatttgtggaagaac

SEQ ID NO: 5005679 - DNA, 25 bp, Homo sapien
gatttcagctatgccattcttccag

SEQ ID NO: 5005680 - DNA, 25 bp, Homo sapien
caggagcatagtgctagcatctggc

SEQ ID NO: 5005681 - DNA, 25 bp, Homo sapien
agcatagtgctagcatctggcgagg

SEQ ID NO: 5005682 - DNA, 25 bp, Homo sapien
ggagcatagtgctagcatctggcga

SEQ ID NO: 5005683 - DNA, 25 bp, Homo sapien
agtccaggagcatagtgctagcatc

SEQ ID NO: 5005684 - DNA, 25 bp, Homo sapien
caattccatatggtttggcctggaa

SEQ ID NO: 5005685 - DNA, 25 bp, Homo sapien
tacagcaaatccatgtgatgttcag

SEQ ID NO: 5005686 - DNA, 25 bp, Homo sapien
tcagaaatggatgtcctacaagttc

SEQ ID NO: 5005687 - DNA, 25 bp, Homo sapien
ctatgagtcttatcagtctggaaac

SEQ ID NO: 5005688 - DNA, 25 bp, Homo sapien
ttttaacattttgctggtcaggagc

SEQ ID NO: 5005689 - DNA, 25 bp, Homo sapien
gcccctcatgcagggtaagtctaca

SEQ ID NO: 5005690 - DNA, 25 bp, Homo sapien
tcttcaagtagcagctctttgggaa

SEQ ID NO: 5005691 - DNA, 25 bp, Homo sapien
tctcataaagggatagcagcccctc

SEQ ID NO: 5005692 - DNA, 25 bp, Homo sapien
tgggagttccatcccaggtaggctc

SEQ ID NO: 5005693 - DNA, 25 bp, Homo sapien
aaagtgagacctgcagactgtctct

SEQ ID NO: 5005694 - DNA, 25 bp, Homo sapien
tatgtcagactgaaggctctagtgg

SEQ ID NO: 5005695 - DNA, 25 bp, Homo sapien
tacttggtcctcttgattcagcctt

SEQ ID NO: 5005696 - DNA, 25 bp, Homo sapien
gacatttggtcaggtgtaatgctca

SEQ ID NO: 5005697 - DNA, 25 bp, Homo sapien
tttaatcaggcataccagtgatctg

SEQ ID NO: 5005698 - DNA, 25 bp, Homo sapien
ctagcagaatgcctaggctaacaaa

SEQ ID NO: 5005699 - DNA, 25 bp, Homo sapien
tagacagtttgtggattaggccagg

SEQ ID NO: 5005700 - DNA, 25 bp, Homo sapien
taagttcaagtactactctggccac

SEQ ID NO: 5005701 - DNA, 25 bp, Homo sapien
gcaaccactttgaatgacagcattg

SEQ ID NO: 5005702 - DNA, 25 bp, Homo sapien
gagtaaacctcatgaatggacttgg

SEQ ID NO: 5005703 - DNA, 25 bp, Homo sapien
tagttctacaacatccccaaagagg

SEQ ID NO: 5005704 - DNA, 25 bp, Homo sapien
tatcagaatagtattagtaaatgca

SEQ ID NO: 5005705 - DNA, 25 bp, Homo sapien
ttaatcttttgaacttctctgaagc

SEQ ID NO: 5005706 - DNA, 25 bp, Homo sapien
taagtattctttctagtcatgtgaa

SEQ ID NO: 5005707 - DNA, 25 bp, Homo sapien
gtaatttgagaaatacatgctcact

SEQ ID NO: 5005708 - DNA, 25 bp, Homo sapien
tggtgcctatcttcagatagtatca

SEQ ID NO: 5005709 - DNA, 25 bp, Homo sapien
tcactcctgtagagcatgtcaacaa

SEQ ID NO: 5005710 - DNA, 25 bp, Homo sapien
gtatcatagtaggatagatgctggg

SEQ ID NO: 5005711 - DNA, 25 bp, Homo sapien
cattaggtatgttaaggtcactcct

SEQ ID NO: 5005712 - DNA, 25 bp, Homo sapien
tctttaacctgatcacgacacagct

SEQ ID NO: 5005713 - DNA, 25 bp, Homo sapien
tattcaatcaaacctaagagagctt

SEQ ID NO: 5005714 - DNA, 25 bp, Homo sapien
ttcacgtcacattaaggacccactg

SEQ ID NO: 5005715 - DNA, 25 bp, Homo sapien
taatgttgaaacaccattcacgtca

SEQ ID NO: 5005716 - DNA, 25 bp, Homo sapien
aataagatgtaattaagtgtctgcc

SEQ ID NO: 5005717 - DNA, 25 bp, Homo sapien
ctttctggatatgcaatgatgggga

SEQ ID NO: 5005718 - DNA, 25 bp, Homo sapien
taagtgtctgccctcaagttgatac

SEQ ID NO: 5005719 - DNA, 25 bp, Homo sapien
aaaacgctttatgtgctctttctgg

SEQ ID NO: 5005720 - DNA, 25 bp, Homo sapien
tgtgtcgtccgtttgatctgtaaaa

SEQ ID NO: 5005721 - DNA, 25 bp, Homo sapien
tgtgtgtgtcgtccgtttgatctgt

SEQ ID NO: 5005722 - DNA, 25 bp, Homo sapien
tgtgtgtcgtccgtttgatctgtaa

SEQ ID NO: 5005723 - DNA, 25 bp, Homo sapien
atgtgtgtgtcgtccgtttgatctg

SEQ ID NO: 5005724 - DNA, 25 bp, Homo sapien
aaaaataggggggaatacatgcatt

SEQ ID NO: 5005725 - DNA, 25 bp, Homo sapien
ttttctagagaagcaattacaatct

SEQ ID NO: 5005726 - DNA, 25 bp, Homo sapien
ttctagatagtctttcattttccaa

SEQ ID NO: 5005727 - DNA, 25 bp, Homo sapien
ctcaagttagtaaagtttggattca

SEQ ID NO: 5005728 - DNA, 25 bp, Homo sapien
taatggaactggatctatcactggc

SEQ ID NO: 5005729 - DNA, 25 bp, Homo sapien
aacgatctacctagtttgccactgg

SEQ ID NO: 5005730 - DNA, 25 bp, Homo sapien
caaactcactggttgcgtgggaaag

SEQ ID NO: 5005731 - DNA, 25 bp, Homo sapien
gccttgtttcaagaggtcctgccag

SEQ ID NO: 5005732 - DNA, 25 bp, Homo sapien
tgaagaaacccacaactcctcaagg

SEQ ID NO: 5005733 - DNA, 25 bp, Homo sapien
ttttaagagtccaggtaatacaagc

SEQ ID NO: 5005734 - DNA, 25 bp, Homo sapien
caagcaaaggtttactccatagagc

SEQ ID NO: 5005735 - DNA, 25 bp, Homo sapien
gctcagaatccaaccagcaagagga

SEQ ID NO: 5005736 - DNA, 25 bp, Homo sapien
ataagcattgaagatagaaattggc

SEQ ID NO: 5005737 - DNA, 25 bp, Homo sapien
cagtggaggcatacatgaaggaatg

SEQ ID NO: 5005738 - DNA, 25 bp, Homo sapien
gaaattggcaaacatatgtccctct

SEQ ID NO: 5005739 - DNA, 25 bp, Homo sapien
taagagttacttgttgagctgagca

SEQ ID NO: 5005740 - DNA, 25 bp, Homo sapien
tagaggtgtaccacatggttgacca

SEQ ID NO: 5005741 - DNA, 25 bp, Homo sapien
tatgatggaaggagcataacctact

SEQ ID NO: 5005742 - DNA, 25 bp, Homo sapien
ccaatatctccagtaatcagggtag

SEQ ID NO: 5005743 - DNA, 25 bp, Homo sapien
tctatacagctatcgcaccagtgaa

SEQ ID NO: 5005744 - DNA, 25 bp, Homo sapien
aatgacaatgtaactcagtactaag

SEQ ID NO: 5005745 - DNA, 25 bp, Homo sapien
cccaaattgcaaacttatttagaca

SEQ ID NO: 5005746 - DNA, 25 bp, Homo sapien
ggagaaatgtattccaaagtaagca

SEQ ID NO: 5005747 - DNA, 25 bp, Homo sapien
ggtttagcatccttagactaggtga

SEQ ID NO: 5005748 - DNA, 25 bp, Homo sapien
tggaggatgcagctaaagttcgtgt

SEQ ID NO: 5005749 - DNA, 25 bp, Homo sapien
catggtgcattcagtaacttctagg

SEQ ID NO: 5005750 - DNA, 25 bp, Homo sapien
gccctaatccgttttgaccatggtg

SEQ ID NO: 5005751 - DNA, 25 bp, Homo sapien
tcttggaccttgttatgctgttgct

SEQ ID NO: 5005752 - DNA, 25 bp, Homo sapien
tcagtgttctttagtgcccatcaaa

SEQ ID NO: 5005753 - DNA, 25 bp, Homo sapien
tattccaacaagtttttatctcttg

SEQ ID NO: 5005754 - DNA, 25 bp, Homo sapien
gtgttctttagtgcccatcaaaatt

SEQ ID NO: 5005755 - DNA, 25 bp, Homo sapien
ttccaacaagtttttatctcttgta

SEQ ID NO: 5005756 - DNA, 25 bp, Homo sapien
ctttgttggttgggcttcacccagg

SEQ ID NO: 5005757 - DNA, 25 bp, Homo sapien
ttgttggttgggcttcacccagggc

SEQ ID NO: 5005758 - DNA, 25 bp, Homo sapien
tctttgttggttgggcttcacccag

SEQ ID NO: 5005759 - DNA, 25 bp, Homo sapien
ctctttgttggttgggcttcaccca

SEQ ID NO: 5005760 - DNA, 25 bp, Homo sapien
caacagtattgttgtgccttctgaa

SEQ ID NO: 5005761 - DNA, 25 bp, Homo sapien
ttgcgagcagcacggaataaaaaca

SEQ ID NO: 5005762 - DNA, 25 bp, Homo sapien
taagaaattgcctcaacttgcgagc

SEQ ID NO: 5005763 - DNA, 25 bp, Homo sapien
ttgcctcaacttgcgagcagcacgg

SEQ ID NO: 5005764 - DNA, 25 bp, Homo sapien
gcagcacggaataaaaacatacctt

SEQ ID NO: 5005765 - DNA, 25 bp, Homo sapien
tattagcatcacagatatgtctttt

SEQ ID NO: 5005766 - DNA, 25 bp, Homo sapien
tagcatcacagatatgtcttttaaa

SEQ ID NO: 5005767 - DNA, 25 bp, Homo sapien
gcatcacagatatgtcttttaaaaa

SEQ ID NO: 5005768 - DNA, 25 bp, Homo sapien
cttattagcatcacagatatgtctt

SEQ ID NO: 5005769 - DNA, 25 bp, Homo sapien
ttgtgataggacagttttcttctga

SEQ ID NO: 5005770 - DNA, 25 bp, Homo sapien
tcacagttactcttcatggtcacat

SEQ ID NO: 5005771 - DNA, 25 bp, Homo sapien
ggagagaaagtcaatatggttcaca

SEQ ID NO: 5005772 - DNA, 25 bp, Homo sapien
ttctttgtgataggacagttttctt

SEQ ID NO: 5005773 - DNA, 25 bp, Homo sapien
actatgacaacctatccatggcctt

SEQ ID NO: 5005774 - DNA, 25 bp, Homo sapien
tagggggccttttaaaatgcgctgc

SEQ ID NO: 5005775 - DNA, 25 bp, Homo sapien
gcttcctaagtaactggattccagg

SEQ ID NO: 5005776 - DNA, 25 bp, Homo sapien
tttctgatcatcactatgacaacct

SEQ ID NO: 5005777 - DNA, 25 bp, Homo sapien
gaaacctccatagcaaccattgtgg

SEQ ID NO: 5005778 - DNA, 25 bp, Homo sapien
tttaccagagcctaaccttctgagg

SEQ ID NO: 5005779 - DNA, 25 bp, Homo sapien
aaggctgccctgtaccacctaagga

SEQ ID NO: 5005780 - DNA, 25 bp, Homo sapien
caagggtacccagtcatagttgtgg

SEQ ID NO: 5005781 - DNA, 25 bp, Homo sapien
tttgcatctgttaaccaacttctcc

SEQ ID NO: 5005782 - DNA, 25 bp, Homo sapien
tggtaaactatgttcaccctgcagt

SEQ ID NO: 5005783 - DNA, 25 bp, Homo sapien
gaatgccagggctaattcctcctat

SEQ ID NO: 5005784 - DNA, 25 bp, Homo sapien
tctttctgtgactgaccgatttggc

SEQ ID NO: 5005785 - DNA, 25 bp, Homo sapien
tatcaatggctaatgtattcaatgg

SEQ ID NO: 5005786 - DNA, 25 bp, Homo sapien
cccaacaagtagagatccacagtga

SEQ ID NO: 5005787 - DNA, 25 bp, Homo sapien
tgtctcaaccatgaaacagaagtgt

SEQ ID NO: 5005788 - DNA, 25 bp, Homo sapien
cagagatcacgcaaaaggaaacatg

SEQ ID NO: 5005789 - DNA, 25 bp, Homo sapien
cacagtttcggaattatctgtagga

SEQ ID NO: 5005790 - DNA, 25 bp, Homo sapien
gacgctttcatccattttcataccg

SEQ ID NO: 5005791 - DNA, 25 bp, Homo sapien
agagtttaatatatgtgtccaccat

SEQ ID NO: 5005792 - DNA, 25 bp, Homo sapien
aatccaggtcgtgttttatatcaaa

SEQ ID NO: 5005793 - DNA, 25 bp, Homo sapien
tcagctgacagcgtgtcaggattgg

SEQ ID NO: 5005794 - DNA, 25 bp, Homo sapien
tgaagaaggccaagtcaagtcggac

SEQ ID NO: 5005795 - DNA, 25 bp, Homo sapien
ctgaagaaggccaagtcaagtcgga

SEQ ID NO: 5005796 - DNA, 25 bp, Homo sapien
gcgtgctcttccgcgtgcagttggc

SEQ ID NO: 5005797 - DNA, 25 bp, Homo sapien
tgctcttccgcgtgcagttggcggc

SEQ ID NO: 5005798 - DNA, 25 bp, Homo sapien
tcttccgcgtgcagttggcggcagc

SEQ ID NO: 5005799 - DNA, 25 bp, Homo sapien
gctcttccgcgtgcagttggcggca

SEQ ID NO: 5005800 - DNA, 25 bp, Homo sapien
tttaacagcttgcacacaatcttta

SEQ ID NO: 5005801 - DNA, 25 bp, Homo sapien
gaagctttgactcaaatagtcctct

SEQ ID NO: 5005802 - DNA, 25 bp, Homo sapien
tgcaaaattgcatggaaaggcagga

SEQ ID NO: 5005803 - DNA, 25 bp, Homo sapien
tctttaacagccatttcataaatgc

SEQ ID NO: 5005804 - DNA, 25 bp, Homo sapien
tatgtctacatctgcttcaattctt

SEQ ID NO: 5005805 - DNA, 25 bp, Homo sapien
cttgggagtatatatctgtccagga

SEQ ID NO: 5005806 - DNA, 25 bp, Homo sapien
ggtcagtgatgatatttatcttatc

SEQ ID NO: 5005807 - DNA, 25 bp, Homo sapien
gatgttgactagagatctttctagc

SEQ ID NO: 5005808 - DNA, 25 bp, Homo sapien
caaatgatgagcatatcatcaaaat

SEQ ID NO: 5005809 - DNA, 25 bp, Homo sapien
ggagaatgaaaacggatcttgagag

SEQ ID NO: 5005810 - DNA, 25 bp, Homo sapien
ctaatgggagaatgaaaacggatct

SEQ ID NO: 5005811 - DNA, 25 bp, Homo sapien
aatgggagaatgaaaacggatcttg

SEQ ID NO: 5005812 - DNA, 25 bp, Homo sapien
tgggagaatgaaaacggatcttgag

SEQ ID NO: 5005813 - DNA, 25 bp, Homo sapien
taattgatcgatgctgaccattaga

SEQ ID NO: 5005814 - DNA, 25 bp, Homo sapien
caataattgatcgatgctgaccatt

SEQ ID NO: 5005815 - DNA, 25 bp, Homo sapien
cactctcatattgtttgccatcttt

SEQ ID NO: 5005816 - DNA, 25 bp, Homo sapien
agaacactctcatattgtttgccat

SEQ ID NO: 5005817 - DNA, 25 bp, Homo sapien
cttcaatatcacaatcagatgatgc

SEQ ID NO: 5005818 - DNA, 25 bp, Homo sapien
ttcaatatcacaatcagatgatgct

SEQ ID NO: 5005819 - DNA, 25 bp, Homo sapien
tcaatatcacaatcagatgatgcta

SEQ ID NO: 5005820 - DNA, 25 bp, Homo sapien
ggcaacagaacaaggatcaggggag

SEQ ID NO: 5005821 - DNA, 25 bp, Homo sapien
tctgaaattgcctcacggacaatgc

SEQ ID NO: 5005822 - DNA, 25 bp, Homo sapien
ctttagatctgaaattgcctcacgg

SEQ ID NO: 5005823 - DNA, 25 bp, Homo sapien
aattgcctcacggacaatgctgcaa

SEQ ID NO: 5005824 - DNA, 25 bp, Homo sapien
gcctcacggacaatgctgcaaacat

SEQ ID NO: 5005825 - DNA, 25 bp, Homo sapien
ggtagtttggtccataattgaagac

SEQ ID NO: 5005826 - DNA, 25 bp, Homo sapien
tggtccataattgaagacctttctc

SEQ ID NO: 5005827 - DNA, 25 bp, Homo sapien
agcttggtagtttggtccataattg

SEQ ID NO: 5005828 - DNA, 25 bp, Homo sapien
cacatctcataggttcccagctctc

SEQ ID NO: 5005829 - DNA, 25 bp, Homo sapien
tattcaaacactaacgtgatgcagt

SEQ ID NO: 5005830 - DNA, 25 bp, Homo sapien
ttcaaacactaacgtgatgcagttt

SEQ ID NO: 5005831 - DNA, 25 bp, Homo sapien
aacactaacgtgatgcagtttgtaa

SEQ ID NO: 5005832 - DNA, 25 bp, Homo sapien
caaacactaacgtgatgcagtttgt

SEQ ID NO: 5005833 - DNA, 25 bp, Homo sapien
cggagtagccatcaaaagaaagagc

SEQ ID NO: 5005834 - DNA, 25 bp, Homo sapien
cttgattctttacccacgagagtgg

SEQ ID NO: 5005835 - DNA, 25 bp, Homo sapien
cagataagacagttggagaccacat

SEQ ID NO: 5005836 - DNA, 25 bp, Homo sapien
taagctccgggaggacattccttag

SEQ ID NO: 5005837 - DNA, 25 bp, Homo sapien
gtccctgtccattctaaatccgtat

SEQ ID NO: 5005838 - DNA, 25 bp, Homo sapien
tccaaccctcctgaattctgtccct

SEQ ID NO: 5005839 - DNA, 25 bp, Homo sapien
tctttcattggtcatatatgactgc

SEQ ID NO: 5005840 - DNA, 25 bp, Homo sapien
atatatgactgccatccgaatccaa

SEQ ID NO: 5005841 - DNA, 25 bp, Homo sapien
gagtcacgcctatttcattctgcct

SEQ ID NO: 5005842 - DNA, 25 bp, Homo sapien
ctggaagttagagtcacgcctattt

SEQ ID NO: 5005843 - DNA, 25 bp, Homo sapien
caaataagatatattaggtctcaat

SEQ ID NO: 5005844 - DNA, 25 bp, Homo sapien
tattaggtctcaatactggtctgga

SEQ ID NO: 5005845 - DNA, 25 bp, Homo sapien
caaggtacagcccttgccggaaact

SEQ ID NO: 5005846 - DNA, 25 bp, Homo sapien
agcttcgctttcacttctctaggga

SEQ ID NO: 5005847 - DNA, 25 bp, Homo sapien
cggaaactcccagtcttactcaggg

SEQ ID NO: 5005848 - DNA, 25 bp, Homo sapien
gactggtttcccagcaataggcgca

SEQ ID NO: 5005849 - DNA, 25 bp, Homo sapien
cccgggccgcctgcgtgagtaactt

SEQ ID NO: 5005850 - DNA, 25 bp, Homo sapien
ctgccaccgctgagcggcgcggagg

SEQ ID NO: 5005851 - DNA, 25 bp, Homo sapien
ggaagggcgccagacagagagcctt

SEQ ID NO: 5005852 - DNA, 25 bp, Homo sapien
gcagcgttccctctcaggacagaaa

SEQ ID NO: 5005853 - DNA, 25 bp, Homo sapien
ctgggttattggaagcggacgacac

SEQ ID NO: 5005854 - DNA, 25 bp, Homo sapien
tagtcatgatgaccgcaactggagc

SEQ ID NO: 5005855 - DNA, 25 bp, Homo sapien
caacgcttggcgactgggagctaga

SEQ ID NO: 5005856 - DNA, 25 bp, Homo sapien
cataacttccgtaggatccgccagc

SEQ ID NO: 5005857 - DNA, 25 bp, Homo sapien
tgccctctctgacgtttcgtggtac

SEQ ID NO: 5005858 - DNA, 25 bp, Homo sapien
gtggtaccacatcactatcctccag

SEQ ID NO: 5005859 - DNA, 25 bp, Homo sapien
ctgcccagcgtccacttactatggt

SEQ ID NO: 5005860 - DNA, 25 bp, Homo sapien
tactatggtctttagcccatggctg

SEQ ID NO: 5005861 - DNA, 25 bp, Homo sapien
ctgctcctattattctccactccac

SEQ ID NO: 5005862 - DNA, 25 bp, Homo sapien
tttctgctcctattattctccactc

SEQ ID NO: 5005863 - DNA, 25 bp, Homo sapien
tctgctcctattattctccactcca

SEQ ID NO: 5005864 - DNA, 25 bp, Homo sapien
tgtttctgctcctattattctccac

SEQ ID NO: 5005865 - DNA, 25 bp, Homo sapien
caagtcaatagtcttctgctttaaa

SEQ ID NO: 5005866 - DNA, 25 bp, Homo sapien
tcttctgctttaaaagcaggtcttc

SEQ ID NO: 5005867 - DNA, 25 bp, Homo sapien
ctgctttaaaagcaggtcttcctca

SEQ ID NO: 5005868 - DNA, 25 bp, Homo sapien
tcttcctcattcattaaatggacca

SEQ ID NO: 5005869 - DNA, 25 bp, Homo sapien
cagtcccctaagttccctctcctca

SEQ ID NO: 5005870 - DNA, 25 bp, Homo sapien
tgaccagtcccctaagttccctctc

SEQ ID NO: 5005871 - DNA, 25 bp, Homo sapien
ctgcacctattgaccagtcccctaa

SEQ ID NO: 5005872 - DNA, 25 bp, Homo sapien
cacctattgaccagtcccctaagtt

SEQ ID NO: 5005873 - DNA, 25 bp, Homo sapien
catcttaatcttaaagccagattca

SEQ ID NO: 5005874 - DNA, 25 bp, Homo sapien
catcttaatcttaaagccagattca

SEQ ID NO: 5005875 - DNA, 25 bp, Homo sapien
ctctggaaccctgggtctgtggctt

SEQ ID NO: 5005876 - DNA, 25 bp, Homo sapien
tttcgtgtgtcccagtaagtccaac

SEQ ID NO: 5005877 - DNA, 25 bp, Homo sapien
tgtggttgctttgctacaatcagga

SEQ ID NO: 5005878 - DNA, 25 bp, Homo sapien
tcaggatttcaaattggttgatgct

SEQ ID NO: 5005879 - DNA, 25 bp, Homo sapien
tgttctttggttacctgtggttgct

SEQ ID NO: 5005880 - DNA, 25 bp, Homo sapien
gtctcgtacttatagttgaaactcg

SEQ ID NO: 5005881 - DNA, 25 bp, Homo sapien
ttgaaactcggcaagggttgatttc

SEQ ID NO: 5005882 - DNA, 25 bp, Homo sapien
tattcacattgtgccccatttacaa

SEQ ID NO: 5005883 - DNA, 25 bp, Homo sapien
ggaaagaaacgattcagactaagtc

SEQ ID NO: 5005884 - DNA, 25 bp, Homo sapien
taacatcctgccgtagcatgggcat

SEQ ID NO: 5005885 - DNA, 25 bp, Homo sapien
tgtttaacatcctgccgtagcatgg

SEQ ID NO: 5005886 - DNA, 25 bp, Homo sapien
tttaacatcctgccgtagcatgggc

SEQ ID NO: 5005887 - DNA, 25 bp, Homo sapien
gtttaacatcctgccgtagcatggg

SEQ ID NO: 5005888 - DNA, 25 bp, Homo sapien
gcaaaactaagccaatgccttgcat

SEQ ID NO: 5005889 - DNA, 25 bp, Homo sapien
tgtggcaccactgtttgacagcaaa

SEQ ID NO: 5005890 - DNA, 25 bp, Homo sapien
ccactgtttgacagcaaaactaagc

SEQ ID NO: 5005891 - DNA, 25 bp, Homo sapien
ctggttgcctctacagctcttctct

SEQ ID NO: 5005892 - DNA, 25 bp, Homo sapien
ggagcaaaagatccttgggagagaa

SEQ ID NO: 5005893 - DNA, 25 bp, Homo sapien
taaccaaatttcagatgggcagaac

SEQ ID NO: 5005894 - DNA, 25 bp, Homo sapien
gagaagctatcccaaccaagcctgc

SEQ ID NO: 5005895 - DNA, 25 bp, Homo sapien
ggctgtcacttgcttatgccgagat

SEQ ID NO: 5005896 - DNA, 25 bp, Homo sapien
ttttctgtttcagtgcttccaaaac

SEQ ID NO: 5005897 - DNA, 25 bp, Homo sapien
ggttttctgtttcagtgcttccaaa

SEQ ID NO: 5005898 - DNA, 25 bp, Homo sapien
ctgtttcagtgcttccaaaacacat

SEQ ID NO: 5005899 - DNA, 25 bp, Homo sapien
ttctgtttcagtgcttccaaaacac

SEQ ID NO: 5005900 - DNA, 25 bp, Homo sapien
gactcagatgcttcctttttttcct

SEQ ID NO: 5005901 - DNA, 25 bp, Homo sapien
ctgactcagatgcttcctttttttc

SEQ ID NO: 5005902 - DNA, 25 bp, Homo sapien
tgactcagatgcttcctttttttcc

SEQ ID NO: 5005903 - DNA, 25 bp, Homo sapien
tgtcttgcagacaaataccatggcc

SEQ ID NO: 5005904 - DNA, 25 bp, Homo sapien
aatacccttagctctcccatgtgac

SEQ ID NO: 5005905 - DNA, 25 bp, Homo sapien
tcagccagttgtatgtggaaacaga

SEQ ID NO: 5005906 - DNA, 25 bp, Homo sapien
aaccgttccggttgtattggccatg

SEQ ID NO: 5005907 - DNA, 25 bp, Homo sapien
caggaaatctcagtttccgaacgtt

SEQ ID NO: 5005908 - DNA, 25 bp, Homo sapien
ttagactaatgtttcaaaccaggaa

SEQ ID NO: 5005909 - DNA, 25 bp, Homo sapien
tctgacacgaggtggcccatgatct

SEQ ID NO: 5005910 - DNA, 25 bp, Homo sapien
tctgcttctggtgccggatactggt

SEQ ID NO: 5005911 - DNA, 25 bp, Homo sapien
ctgagatggcaaattctatggattc

SEQ ID NO: 5005912 - DNA, 25 bp, Homo sapien
gattccgttgcatgctttaccatac

SEQ ID NO: 5005913 - DNA, 25 bp, Homo sapien
tctatggattccgttgcatgcttta

SEQ ID NO: 5005914 - DNA, 25 bp, Homo sapien
tatggattccgttgcatgctttacc

SEQ ID NO: 5005915 - DNA, 25 bp, Homo sapien
tgtgtgacccatggccaaatatttt

SEQ ID NO: 5005916 - DNA, 25 bp, Homo sapien
aactacttcagaggactatgtgagt

SEQ ID NO: 5005917 - DNA, 25 bp, Homo sapien
taaattaattacagacaaccacagt

SEQ ID NO: 5005918 - DNA, 25 bp, Homo sapien
ccacagttgctaacagtatgagttc

SEQ ID NO: 5005919 - DNA, 25 bp, Homo sapien
tcactggtgcgggtgactggagctg

SEQ ID NO: 5005920 - DNA, 25 bp, Homo sapien
aagaggtcactggtgcgggtgactg

SEQ ID NO: 5005921 - DNA, 25 bp, Homo sapien
ggtgcgggtgactggagctgaacac

SEQ ID NO: 5005922 - DNA, 25 bp, Homo sapien
gaggtcactggtgcgggtgactgga

SEQ ID NO: 5005923 - DNA, 25 bp, Homo sapien
gctataagcagtattgcaagttgca

SEQ ID NO: 5005924 - DNA, 25 bp, Homo sapien
gctgcaaacatatgacctctgaata

SEQ ID NO: 5005925 - DNA, 25 bp, Homo sapien
tactttagtgaattggccacaactc

SEQ ID NO: 5005926 - DNA, 25 bp, Homo sapien
tatttagggagttcaaaagtgagcc

SEQ ID NO: 5005927 - DNA, 25 bp, Homo sapien
gtaagtttgggacagctgtagatga

SEQ ID NO: 5005928 - DNA, 25 bp, Homo sapien
aagtttgggacagctgtagatgatt

SEQ ID NO: 5005929 - DNA, 25 bp, Homo sapien
ttggggtaagtttgggacagctgta

SEQ ID NO: 5005930 - DNA, 25 bp, Homo sapien
gggtaagtttgggacagctgtagat

SEQ ID NO: 5005931 - DNA, 25 bp, Homo sapien
tgtcttatgtccagttccaaatttt

SEQ ID NO: 5005932 - DNA, 25 bp, Homo sapien
gagtgccgaattctgaaatttcctt

SEQ ID NO: 5005933 - DNA, 25 bp, Homo sapien
tttcaaagaaggaacttgaaccatg

SEQ ID NO: 5005934 - DNA, 25 bp, Homo sapien
ttggggagattaaattgagcctgtc

SEQ ID NO: 5005935 - DNA, 25 bp, Homo sapien
aacaatagcgttgaatttgtccaga

SEQ ID NO: 5005936 - DNA, 25 bp, Homo sapien
gcagctttccaacaatagcgttgaa

SEQ ID NO: 5005937 - DNA, 25 bp, Homo sapien
tccaacaatagcgttgaatttgtcc

SEQ ID NO: 5005938 - DNA, 25 bp, Homo sapien
ttgaaggcagctttccaacaatagc

SEQ ID NO: 5005939 - DNA, 25 bp, Homo sapien
ctaggtgaaccctggctacattact

SEQ ID NO: 5005940 - DNA, 25 bp, Homo sapien
aaatttcaatggctgctcttgacct

SEQ ID NO: 5005941 - DNA, 25 bp, Homo sapien
tacttgtagtaaagaagaggaacgc

SEQ ID NO: 5005942 - DNA, 25 bp, Homo sapien
tctgggtagtcagggtcaaaatcca

SEQ ID NO: 5005943 - DNA, 25 bp, Homo sapien
tccacagagataggacactaagagg

SEQ ID NO: 5005944 - DNA, 25 bp, Homo sapien
cactaagaggaatgctttgcttgac

SEQ ID NO: 5005945 - DNA, 25 bp, Homo sapien
tgtgccagtgtgtagtttgttctca

SEQ ID NO: 5005946 - DNA, 25 bp, Homo sapien
ttttcagatgttccactaggatggg

SEQ ID NO: 5005947 - DNA, 25 bp, Homo sapien
catttggttctgagcggtcctggaa

SEQ ID NO: 5005948 - DNA, 25 bp, Homo sapien
catctgtcctaagagtgatttcata

SEQ ID NO: 5005949 - DNA, 25 bp, Homo sapien
gccagacttttgactctgcatttgg

SEQ ID NO: 5005950 - DNA, 25 bp, Homo sapien
gaagttttgggctatcatctgtcct

SEQ ID NO: 5005951 - DNA, 25 bp, Homo sapien
gtttgcaaatcacttgagagcaatg

SEQ ID NO: 5005952 - DNA, 25 bp, Homo sapien
tctagtttgcaaatcacttgagagc

SEQ ID NO: 5005953 - DNA, 25 bp, Homo sapien
tagtttgcaaatcacttgagagcaa

SEQ ID NO: 5005954 - DNA, 25 bp, Homo sapien
ctagtttgcaaatcacttgagagca

SEQ ID NO: 5005955 - DNA, 25 bp, Homo sapien
tttaggaaataaggtgaggaatgcc

SEQ ID NO: 5005956 - DNA, 25 bp, Homo sapien
ggaaataaggtgaggaatgccactc

SEQ ID NO: 5005957 - DNA, 25 bp, Homo sapien
aaataaggtgaggaatgccactcac

SEQ ID NO: 5005958 - DNA, 25 bp, Homo sapien
taggaaataaggtgaggaatgccac

SEQ ID NO: 5005959 - DNA, 25 bp, Homo sapien
tcacagccaccctacgctgcccagg

SEQ ID NO: 5005960 - DNA, 25 bp, Homo sapien
cctcattatgagtgccttcattctc

SEQ ID NO: 5005961 - DNA, 25 bp, Homo sapien
tatgagtgccttcattctcatgttt

SEQ ID NO: 5005962 - DNA, 25 bp, Homo sapien
cattatgagtgccttcattctcatg

SEQ ID NO: 5005963 - DNA, 25 bp, Homo sapien
tctctgctgcctttcctaggtattt

SEQ ID NO: 5005964 - DNA, 25 bp, Homo sapien
ctacacatatatttcaccttcaacc

SEQ ID NO: 5005965 - DNA, 25 bp, Homo sapien
tcctaggtatttacagtagccccag

SEQ ID NO: 5005966 - DNA, 25 bp, Homo sapien
tatttcaccttcaaccttctctgct

SEQ ID NO: 5005967 - DNA, 25 bp, Homo sapien
tgtctgtgagaactacaggatcagg

SEQ ID NO: 5005968 - DNA, 25 bp, Homo sapien
ctgtctgtgagaactacaggatcag

SEQ ID NO: 5005969 - DNA, 25 bp, Homo sapien
ttgctgaacatagaagaactgactt

SEQ ID NO: 5005970 - DNA, 25 bp, Homo sapien
cttgctgaacatagaagaactgact

SEQ ID NO: 5005971 - DNA, 25 bp, Homo sapien
tgctgaacatagaagaactgacttc

SEQ ID NO: 5005972 - DNA, 25 bp, Homo sapien
gctgaacatagaagaactgacttcc

SEQ ID NO: 5005973 - DNA, 25 bp, Homo sapien
tcattgcacatcaaattgaaccttt

SEQ ID NO: 5005974 - DNA, 25 bp, Homo sapien
gtgtaaatctgagctctaacttgag

SEQ ID NO: 5005975 - DNA, 25 bp, Homo sapien
cttgtgttggtgtaaatctgagctc

SEQ ID NO: 5005976 - DNA, 25 bp, Homo sapien
aaatctgagctctaacttgagatgc

SEQ ID NO: 5005977 - DNA, 25 bp, Homo sapien
tgttggtgtaaatctgagctctaac

SEQ ID NO: 5005978 - DNA, 25 bp, Homo sapien
cagtaacgagacgtgcaggaaacac

SEQ ID NO: 5005979 - DNA, 25 bp, Homo sapien
gacatccaggggtgtgacagtaacg

SEQ ID NO: 5005980 - DNA, 25 bp, Homo sapien
gtgacaaggcagacaagacatccag

SEQ ID NO: 5005981 - DNA, 25 bp, Homo sapien
gaggcaagcgtgacaaggcagacaa

SEQ ID NO: 5005982 - DNA, 25 bp, Homo sapien
gatgtgaccatgtacaagaaaaaag

SEQ ID NO: 5005983 - DNA, 25 bp, Homo sapien
gaattaaccagtatgaagggctcaa

SEQ ID NO: 5005984 - DNA, 25 bp, Homo sapien
tgagaagtcacaaactagaaatggc

SEQ ID NO: 5005985 - DNA, 25 bp, Homo sapien
gatacatttgatgaggcggcagaga

SEQ ID NO: 5005986 - DNA, 25 bp, Homo sapien
ggttaacgatcaccagcagagatga

SEQ ID NO: 5005987 - DNA, 25 bp, Homo sapien
tatgtgcaaaagcactaggtcacag

SEQ ID NO: 5005988 - DNA, 25 bp, Homo sapien
ggagcgctggtaatttttcagtgga

SEQ ID NO: 5005989 - DNA, 25 bp, Homo sapien
ttgaaactgattcacaggtgtttgg

SEQ ID NO: 5005990 - DNA, 25 bp, Homo sapien
tgggttaaaccatcataagccgagg

SEQ ID NO: 5005991 - DNA, 25 bp, Homo sapien
aaggagctcctcgacttaacatggg

SEQ ID NO: 5005992 - DNA, 25 bp, Homo sapien
gctaccaagcgatgaatgacagctg

SEQ ID NO: 5005993 - DNA, 25 bp, Homo sapien
taagccgaggattgtatgtacacga

SEQ ID NO: 5005994 - DNA, 25 bp, Homo sapien
cagcactgaaaaatcggtacccaca

SEQ ID NO: 5005995 - DNA, 25 bp, Homo sapien
gagcttaggagcaaataatctgggc

SEQ ID NO: 5005996 - DNA, 25 bp, Homo sapien
caggttgccttcagtggacccagga

SEQ ID NO: 5005997 - DNA, 25 bp, Homo sapien
tcagtgctaccaacaatgctccatg

SEQ ID NO: 5005998 - DNA, 25 bp, Homo sapien
ccgttgagagaacagaatgttcctg

SEQ ID NO: 5005999 - DNA, 25 bp, Homo sapien
tcactggcatctaattcctggtcca

SEQ ID NO: 5006000 - DNA, 25 bp, Homo sapien
gctagtcagtgggagaaaccgttga

SEQ ID NO: 5006001 - DNA, 25 bp, Homo sapien
atccttttcactttggtcactggca

SEQ ID NO: 5006002 - DNA, 25 bp, Homo sapien
gtttccatggtgacattctttgctc

SEQ ID NO: 5006003 - DNA, 25 bp, Homo sapien
taaatctagcagcttgtataactcg

SEQ ID NO: 5006004 - DNA, 25 bp, Homo sapien
gctggaataaatctagcagcttgta

SEQ ID NO: 5006005 - DNA, 25 bp, Homo sapien
gcagcttgtataactcgaggtccat

SEQ ID NO: 5006006 - DNA, 25 bp, Homo sapien
taatccaccagtatgctgaggtaca

SEQ ID NO: 5006007 - DNA, 25 bp, Homo sapien
tcagggacctaagataaatgcaaca

SEQ ID NO: 5006008 - DNA, 25 bp, Homo sapien
tccctgcggacaaatggatgccatt

SEQ ID NO: 5006009 - DNA, 25 bp, Homo sapien
tgaggtacacagcaaatggaataca

SEQ ID NO: 5006010 - DNA, 25 bp, Homo sapien
ctgtatatccaataatcctctgtcc

SEQ ID NO: 5006011 - DNA, 25 bp, Homo sapien
tgtatatccaataatcctctgtcca

SEQ ID NO: 5006012 - DNA, 25 bp, Homo sapien
cctgtatatccaataatcctctgtc

SEQ ID NO: 5006013 - DNA, 25 bp, Homo sapien
gtatatccaataatcctctgtccat

SEQ ID NO: 5006014 - DNA, 25 bp, Homo sapien
ggtttcctagcattcatgtccagct

SEQ ID NO: 5006015 - DNA, 25 bp, Homo sapien
tttcctagcattcatgtccagctcc

SEQ ID NO: 5006016 - DNA, 25 bp, Homo sapien
gtttcctagcattcatgtccagctc

SEQ ID NO: 5006017 - DNA, 25 bp, Homo sapien
caaggggcataagtttgtgagccac

SEQ ID NO: 5006018 - DNA, 25 bp, Homo sapien
tgtgagccacagtgggtagggtgtc

SEQ ID NO: 5006019 - DNA, 25 bp, Homo sapien
aaagcaaggggcataagtttgtgag

SEQ ID NO: 5006020 - DNA, 25 bp, Homo sapien
tttgtgagccacagtgggtagggtg

SEQ ID NO: 5006021 - DNA, 25 bp, Homo sapien
agggtatgttcggtattcccttgag

SEQ ID NO: 5006022 - DNA, 25 bp, Homo sapien
tcggtattcccttgagcactctcca

SEQ ID NO: 5006023 - DNA, 25 bp, Homo sapien
tatgttcggtattcccttgagcact

SEQ ID NO: 5006024 - DNA, 25 bp, Homo sapien
gttcggtattcccttgagcactctc

SEQ ID NO: 5006025 - DNA, 25 bp, Homo sapien
tttgaaactaaagatcaagggcaat

SEQ ID NO: 5006026 - DNA, 25 bp, Homo sapien
tatttaacggttgttacagtttgca

SEQ ID NO: 5006027 - DNA, 25 bp, Homo sapien
cattgtttactgtgaatagttacta

SEQ ID NO: 5006028 - DNA, 25 bp, Homo sapien
caataaggtactactgataaaagcc

SEQ ID NO: 5006029 - DNA, 25 bp, Homo sapien
actctttttcacagtcagcttctga

SEQ ID NO: 5006030 - DNA, 25 bp, Homo sapien
ctgctgtgccttgacaaccacctct

SEQ ID NO: 5006031 - DNA, 25 bp, Homo sapien
tgcctttaccagtccctgacatact

SEQ ID NO: 5006032 - DNA, 25 bp, Homo sapien
tctaggccctgagactctacctttc

SEQ ID NO: 5006033 - DNA, 25 bp, Homo sapien
gtgagcactcgtttcttggttacaa

SEQ ID NO: 5006034 - DNA, 25 bp, Homo sapien
tgagtgctcccacaaatgctttctt

SEQ ID NO: 5006035 - DNA, 25 bp, Homo sapien
gtgctcccacaaatgctttcttctc

SEQ ID NO: 5006036 - DNA, 25 bp, Homo sapien
ggcctttcttgagtgctcccacaaa

SEQ ID NO: 5006037 - DNA, 25 bp, Homo sapien
cttagtgcagtgatggtactctttc

SEQ ID NO: 5006038 - DNA, 25 bp, Homo sapien
ggtactctttctgcccagtgcgtgc

SEQ ID NO: 5006039 - DNA, 25 bp, Homo sapien
atggtactctttctgcccagtgcgt

SEQ ID NO: 5006040 - DNA, 25 bp, Homo sapien
gttgatcttagtgcagtgatggtac

SEQ ID NO: 5006041 - DNA, 25 bp, Homo sapien
cctggatctccatcacatgagcctt

SEQ ID NO: 5006042 - DNA, 25 bp, Homo sapien
caccacatctggttgtgggtaatga

SEQ ID NO: 5006043 - DNA, 25 bp, Homo sapien
ccacatctggttgtgggtaatgata

SEQ ID NO: 5006044 - DNA, 25 bp, Homo sapien
gaagcaccacatctggttgtgggta

SEQ ID NO: 5006045 - DNA, 25 bp, Homo sapien
aagcaccacatctggttgtgggtaa

SEQ ID NO: 5006046 - DNA, 25 bp, Homo sapien
caattcttatagaaatgcctcttgc

SEQ ID NO: 5006047 - DNA, 25 bp, Homo sapien
cagtgaagacggtcttgaaggtcca

SEQ ID NO: 5006048 - DNA, 25 bp, Homo sapien
cagaggcctcgaggggttcccacat

SEQ ID NO: 5006049 - DNA, 25 bp, Homo sapien
tgaagacggtcttgaaggtccagag

SEQ ID NO: 5006050 - DNA, 25 bp, Homo sapien
ggctatgaggtggaccagcttggaa

SEQ ID NO: 5006051 - DNA, 25 bp, Homo sapien
cttcaccttcctgtgatgcctcctg

SEQ ID NO: 5006052 - DNA, 25 bp, Homo sapien
gcctgtcgacttcccacacgatgtg

SEQ ID NO: 5006053 - DNA, 25 bp, Homo sapien
tcctgtgatgcctcctgctgcactt

SEQ ID NO: 5006054 - DNA, 25 bp, Homo sapien
aggcaggaagcggagggacccatgt

SEQ ID NO: 5006055 - DNA, 25 bp, Homo sapien
ctgaggcaggaagcggagggaccca

SEQ ID NO: 5006056 - DNA, 25 bp, Homo sapien
gaggcaggaagcggagggacccatg

SEQ ID NO: 5006057 - DNA, 25 bp, Homo sapien
tgaggcaggaagcggagggacccat

SEQ ID NO: 5006058 - DNA, 25 bp, Homo sapien
gacagtctatggtgctagaaaccca

SEQ ID NO: 5006059 - DNA, 25 bp, Homo sapien
tgaaatcgctcttcataaagtgggc

SEQ ID NO: 5006060 - DNA, 25 bp, Homo sapien
caaattcgaatggttcaagcagccg

SEQ ID NO: 5006061 - DNA, 25 bp, Homo sapien
gagcttgactaagaccatacctaga

SEQ ID NO: 5006062 - DNA, 25 bp, Homo sapien
ggaatctgaatctccttggaagcag

SEQ ID NO: 5006063 - DNA, 25 bp, Homo sapien
ttggtcacattacaaggacattgag

SEQ ID NO: 5006064 - DNA, 25 bp, Homo sapien
ttggtctgtttgctgtccaccaaac

SEQ ID NO: 5006065 - DNA, 25 bp, Homo sapien
ggacattgagaaatatgcctccttg

SEQ ID NO: 5006066 - DNA, 25 bp, Homo sapien
agatcaaattgcctctgaacttttg

SEQ ID NO: 5006067 - DNA, 25 bp, Homo sapien
atcaaattgcctctgaacttttggc

SEQ ID NO: 5006068 - DNA, 25 bp, Homo sapien
gatcaaattgcctctgaacttttgg

SEQ ID NO: 5006069 - DNA, 25 bp, Homo sapien
aaagatcaaattgcctctgaacttt

SEQ ID NO: 5006070 - DNA, 25 bp, Homo sapien
gctcatccatcagcatctttgttaa

SEQ ID NO: 5006071 - DNA, 25 bp, Homo sapien
tgccctgtctccttagcagtgctga

SEQ ID NO: 5006072 - DNA, 25 bp, Homo sapien
cagcatctttgttaacactaccatg

SEQ ID NO: 5006073 - DNA, 25 bp, Homo sapien
acactaccatgatgatcccagtagc

SEQ ID NO: 5006074 - DNA, 25 bp, Homo sapien
gtcttgacaattcgccaaagatcat

SEQ ID NO: 5006075 - DNA, 25 bp, Homo sapien
aaagatcattgttagtctttggtga

SEQ ID NO: 5006076 - DNA, 25 bp, Homo sapien
gctcatcaaagtcttgacaattcgc

SEQ ID NO: 5006077 - DNA, 25 bp, Homo sapien
aattcgccaaagatcattgttagtc

SEQ ID NO: 5006078 - DNA, 25 bp, Homo sapien
tgcccaagagtccacgtcctgcatg

SEQ ID NO: 5006079 - DNA, 25 bp, Homo sapien
actgctactgaagaaggcaacaccc

SEQ ID NO: 5006080 - DNA, 25 bp, Homo sapien
gagtccacgtcctgcatgtgactgc

SEQ ID NO: 5006081 - DNA, 25 bp, Homo sapien
tactgaagaaggcaacacccactga

SEQ ID NO: 5006082 - DNA, 25 bp, Homo sapien
gttatccagagacaacgcggcatct

SEQ ID NO: 5006083 - DNA, 25 bp, Homo sapien
gacacaacgcagtccaaagcaaatt

SEQ ID NO: 5006084 - DNA, 25 bp, Homo sapien
tattcaatactagtacaggatttcc

SEQ ID NO: 5006085 - DNA, 25 bp, Homo sapien
gttctgattacatacaattcccaca

SEQ ID NO: 5006086 - DNA, 25 bp, Homo sapien
cctcttgagtactttccggaaggtg

SEQ ID NO: 5006087 - DNA, 25 bp, Homo sapien
ctggggttatctgactgagggctct

SEQ ID NO: 5006088 - DNA, 25 bp, Homo sapien
tactttccggaaggtgcctgagtcc

SEQ ID NO: 5006089 - DNA, 25 bp, Homo sapien
gagtcctttccataaatcggctact

SEQ ID NO: 5006090 - DNA, 25 bp, Homo sapien
gctaaaacatcaataggaacattct

SEQ ID NO: 5006091 - DNA, 25 bp, Homo sapien
ctggcctgctaggaattccggtact

SEQ ID NO: 5006092 - DNA, 25 bp, Homo sapien
ccatctggtggtagtttaactgtcc

SEQ ID NO: 5006093 - DNA, 25 bp, Homo sapien
ttccggtactacagcagggattccg

SEQ ID NO: 5006094 - DNA, 25 bp, Homo sapien
atcccctgcgtttccaagaaccaca

SEQ ID NO: 5006095 - DNA, 25 bp, Homo sapien
tcccctgcgtttccaagaaccacac

SEQ ID NO: 5006096 - DNA, 25 bp, Homo sapien
taatcccctgcgtttccaagaacca

SEQ ID NO: 5006097 - DNA, 25 bp, Homo sapien
gagaagctaggccactcctcatcat

SEQ ID NO: 5006098 - DNA, 25 bp, Homo sapien
gaggggagaagctaggccactcctc

SEQ ID NO: 5006099 - DNA, 25 bp, Homo sapien
gggagaagctaggccactcctcatc

SEQ ID NO: 5006100 - DNA, 25 bp, Homo sapien
aagctaggccactcctcatcatgtc

SEQ ID NO: 5006101 - DNA, 25 bp, Homo sapien
tctcctttctcatccctttccccat

SEQ ID NO: 5006102 - DNA, 25 bp, Homo sapien
gatctcctttctcatccctttcccc

SEQ ID NO: 5006103 - DNA, 25 bp, Homo sapien
atctcctttctcatccctttcccca

SEQ ID NO: 5006104 - DNA, 25 bp, Homo sapien
agctgtactcaaaatcctgttacaa

SEQ ID NO: 5006105 - DNA, 25 bp, Homo sapien
aagctgtactcaaaatcctgttaca

SEQ ID NO: 5006106 - DNA, 25 bp, Homo sapien
taatctggaaatgaactgccacgcc

SEQ ID NO: 5006107 - DNA, 25 bp, Homo sapien
ggtacatagtcatactccatcctgc

SEQ ID NO: 5006108 - DNA, 25 bp, Homo sapien
taaccagatatagcgatcactgatg

SEQ ID NO: 5006109 - DNA, 25 bp, Homo sapien
tgagacaagtggaacatgctacatg

SEQ ID NO: 5006110 - DNA, 25 bp, Homo sapien
tatttagtcacaacacatcagtaca

SEQ ID NO: 5006111 - DNA, 25 bp, Homo sapien
tttagtcacaacacatcagtacaac

SEQ ID NO: 5006112 - DNA, 25 bp, Homo sapien
tcttttttatttagtcacaacacat

SEQ ID NO: 5006113 - DNA, 25 bp, Homo sapien
ttttatttagtcacaacacatcagt

SEQ ID NO: 5006114 - DNA, 25 bp, Homo sapien
tcagtggaggtcgtttaactacacc

SEQ ID NO: 5006115 - DNA, 25 bp, Homo sapien
catttgtgaatttgagatccgtgtg

SEQ ID NO: 5006116 - DNA, 25 bp, Homo sapien
tgtactactcaattgaccactcgca

SEQ ID NO: 5006117 - DNA, 25 bp, Homo sapien
tacacctgctaaaagaataaacctg

SEQ ID NO: 5006118 - DNA, 25 bp, Homo sapien
aactaaatcagaactgccagtcctg

SEQ ID NO: 5006119 - DNA, 25 bp, Homo sapien
gctggtaaatgcaggcgtattctat

SEQ ID NO: 5006120 - DNA, 25 bp, Homo sapien
cagcggctctctcctaactaaatca

SEQ ID NO: 5006121 - DNA, 25 bp, Homo sapien
aatgagacctaacctatcagcggct

SEQ ID NO: 5006122 - DNA, 25 bp, Homo sapien
cattcacctttctgctataggaggc

SEQ ID NO: 5006123 - DNA, 25 bp, Homo sapien
gatttgtcaacgctttgctcagaaa

SEQ ID NO: 5006124 - DNA, 25 bp, Homo sapien
tgatgttggcaacagtccagcccag

SEQ ID NO: 5006125 - DNA, 25 bp, Homo sapien
tcacaaagtgttggcttatactcac

SEQ ID NO: 5006126 - DNA, 25 bp, Homo sapien
cttgccaaggtttgcagcctgcgtg

SEQ ID NO: 5006127 - DNA, 25 bp, Homo sapien
cagaggcggcgacagtttggaggcg

SEQ ID NO: 5006128 - DNA, 25 bp, Homo sapien
ccccaaggtctatagggcttgccaa

SEQ ID NO: 5006129 - DNA, 25 bp, Homo sapien
acagtaagtggaaggagccgaaaga

SEQ ID NO: 5006130 - DNA, 25 bp, Homo sapien
aactccgatagtccatagcaagggc

SEQ ID NO: 5006131 - DNA, 25 bp, Homo sapien
gatgcgaaaccagtcgaactcgaag

SEQ ID NO: 5006132 - DNA, 25 bp, Homo sapien
tagcaagggcgtgcgcgtcaaagta

SEQ ID NO: 5006133 - DNA, 25 bp, Homo sapien
aactcgaagcgggtcagaggcatct

SEQ ID NO: 5006134 - DNA, 25 bp, Homo sapien
cacagagcagtgaaattcattagac

SEQ ID NO: 5006135 - DNA, 25 bp, Homo sapien
ggcacttggacctcagtaaagcatt

SEQ ID NO: 5006136 - DNA, 25 bp, Homo sapien
cagcagatgaaactatgttcattcc

SEQ ID NO: 5006137 - DNA, 25 bp, Homo sapien
tatcatcgcggagcttttaggcact

SEQ ID NO: 5006138 - DNA, 25 bp, Homo sapien
gcccccactaggtctaggagatgta

SEQ ID NO: 5006139 - DNA, 25 bp, Homo sapien
gagcccccactaggtctaggagatg

SEQ ID NO: 5006140 - DNA, 25 bp, Homo sapien
cccccactaggtctaggagatgtac

SEQ ID NO: 5006141 - DNA, 25 bp, Homo sapien
agagcccccactaggtctaggagat

SEQ ID NO: 5006142 - DNA, 25 bp, Homo sapien
tcggctttttctagcttagcagatc

SEQ ID NO: 5006143 - DNA, 25 bp, Homo sapien
ggtcatctgcaggatctcggctttt

SEQ ID NO: 5006144 - DNA, 25 bp, Homo sapien
aggtgatccacggtcatctgcagga

SEQ ID NO: 5006145 - DNA, 25 bp, Homo sapien
tcctgccgtatgcagcattttcagg

SEQ ID NO: 5006146 - DNA, 25 bp, Homo sapien
tcagctcagacaaactgttattgat

SEQ ID NO: 5006147 - DNA, 25 bp, Homo sapien
aagcactgggtaccagccttctcag

SEQ ID NO: 5006148 - DNA, 25 bp, Homo sapien
atccggtctcgtcggcgcttctcaa

SEQ ID NO: 5006149 - DNA, 25 bp, Homo sapien
ctcaaaagcactgggtaccagcctt

SEQ ID NO: 5006150 - DNA, 25 bp, Homo sapien
atggaacctagagccgaactcaagt

SEQ ID NO: 5006151 - DNA, 25 bp, Homo sapien
tggaacctagagccgaactcaagtt

SEQ ID NO: 5006152 - DNA, 25 bp, Homo sapien
gatggtctcgtccagctcgctgtcc

SEQ ID NO: 5006153 - DNA, 25 bp, Homo sapien
gctgtccgaggagctgtactcgggg

SEQ ID NO: 5006154 - DNA, 25 bp, Homo sapien
cattctcgtccgcactctccttctc

SEQ ID NO: 5006155 - DNA, 25 bp, Homo sapien
tgtactcggggtgagctcgcttcat

SEQ ID NO: 5006156 - DNA, 25 bp, Homo sapien
ggagttaactacagcggcgcctctc

SEQ ID NO: 5006157 - DNA, 25 bp, Homo sapien
gctctcggctgcttgcgttccgcac

SEQ ID NO: 5006158 - DNA, 25 bp, Homo sapien
gcagggaggagttaactacagcggc

SEQ ID NO: 5006159 - DNA, 25 bp, Homo sapien
gcgcctctccgctctcggctgcttg

SEQ ID NO: 5006160 - DNA, 25 bp, Homo sapien
cactgatcccgctcacgctttgcct

SEQ ID NO: 5006161 - DNA, 25 bp, Homo sapien
acactgatcccgctcacgctttgcc

SEQ ID NO: 5006162 - DNA, 25 bp, Homo sapien
aactcaaccatcctttcccacgctg

SEQ ID NO: 5006163 - DNA, 25 bp, Homo sapien
actcaaccatcctttcccacgctga

SEQ ID NO: 5006164 - DNA, 25 bp, Homo sapien
aaactcaaccatcctttcccacgct

SEQ ID NO: 5006165 - DNA, 25 bp, Homo sapien
gaatgaatacccctgtgcatctcat

SEQ ID NO: 5006166 - DNA, 25 bp, Homo sapien
ttcccagccgcggaatggaatgaat

SEQ ID NO: 5006167 - DNA, 25 bp, Homo sapien
tttgatttctgggaccgaggccgca

SEQ ID NO: 5006168 - DNA, 25 bp, Homo sapien
tgcagccagactcgtttccgcaggg

SEQ ID NO: 5006169 - DNA, 25 bp, Homo sapien
agttgtcagtccgaggtcaatccca

SEQ ID NO: 5006170 - DNA, 25 bp, Homo sapien
ggtccaggcataggaaaccatccca

SEQ ID NO: 5006171 - DNA, 25 bp, Homo sapien
tgcagatgttgagtgagacgagacc

SEQ ID NO: 5006172 - DNA, 25 bp, Homo sapien
ccatgtgctgtgctagggcctgaaa

SEQ ID NO: 5006173 - DNA, 25 bp, Homo sapien
gctgcttttatctgcgttcccttgc

SEQ ID NO: 5006174 - DNA, 25 bp, Homo sapien
aggctgcttttatctgcgttccctt

SEQ ID NO: 5006175 - DNA, 25 bp, Homo sapien
ttgcagaagagatactccagatgtc

SEQ ID NO: 5006176 - DNA, 25 bp, Homo sapien
tgcttttatctgcgttcccttgcag

SEQ ID NO: 5006177 - DNA, 25 bp, Homo sapien
tggggtttcctttcaccagccttgc

SEQ ID NO: 5006178 - DNA, 25 bp, Homo sapien
ctttcccaagtgcagcaggctgcat

SEQ ID NO: 5006179 - DNA, 25 bp, Homo sapien
ttcctttcaccagccttgcaactgt

SEQ ID NO: 5006180 - DNA, 25 bp, Homo sapien
ggtttcctttcaccagccttgcaac

SEQ ID NO: 5006181 - DNA, 25 bp, Homo sapien
gagccctggtgctatcaaagggctg

SEQ ID NO: 5006182 - DNA, 25 bp, Homo sapien
gtgcacctctagttggaggattcca

SEQ ID NO: 5006183 - DNA, 25 bp, Homo sapien
tcaatctgtgcacctctagttggag

SEQ ID NO: 5006184 - DNA, 25 bp, Homo sapien
tctattcaatctgtgcacctctagt

SEQ ID NO: 5006185 - DNA, 25 bp, Homo sapien
cattgcacgaggtgctgcagaactc

SEQ ID NO: 5006186 - DNA, 25 bp, Homo sapien
gttgcaacgtgactccattcattca

SEQ ID NO: 5006187 - DNA, 25 bp, Homo sapien
gaggccctgcaatgggcttgtcatt

SEQ ID NO: 5006188 - DNA, 25 bp, Homo sapien
tgatggtcaccagatatttctggag

SEQ ID NO: 5006189 - DNA, 25 bp, Homo sapien
ccaggtctctcctgcttgtttctga

SEQ ID NO: 5006190 - DNA, 25 bp, Homo sapien
ttttgtaggaactccatcccctcca

SEQ ID NO: 5006191 - DNA, 25 bp, Homo sapien
ctccaggtctctcctgcttgtttct

SEQ ID NO: 5006192 - DNA, 25 bp, Homo sapien
ttgtaggaactccatcccctccagg

SEQ ID NO: 5006193 - DNA, 25 bp, Homo sapien
ctcatctgaggacaaggagcagtat

SEQ ID NO: 5006194 - DNA, 25 bp, Homo sapien
catgagtacaggaagagctcatctg

SEQ ID NO: 5006195 - DNA, 25 bp, Homo sapien
ctctggatccagacatgagtacagg

SEQ ID NO: 5006196 - DNA, 25 bp, Homo sapien
gagcagtattcagactctctccttc

SEQ ID NO: 5006197 - DNA, 25 bp, Homo sapien
gctagtcaagctctctgtcacaaag

SEQ ID NO: 5006198 - DNA, 25 bp, Homo sapien
catggccagtggctaaatcctgtgg

SEQ ID NO: 5006199 - DNA, 25 bp, Homo sapien
ccagcaatttgcataggatgttcac

SEQ ID NO: 5006200 - DNA, 25 bp, Homo sapien
caatgcaactgtggtgaacaggacc

SEQ ID NO: 5006201 - DNA, 25 bp, Homo sapien
ccagagacaggctcggtgtttttcc

SEQ ID NO: 5006202 - DNA, 25 bp, Homo sapien
atttgagatcagctcaaggcctggg

SEQ ID NO: 5006203 - DNA, 25 bp, Homo sapien
tcgcttatcgacatgtaaactccac

SEQ ID NO: 5006204 - DNA, 25 bp, Homo sapien
gcttatgtgcctggaaaacggtttc

SEQ ID NO: 5006205 - DNA, 25 bp, Homo sapien
tagttcttgggaactccaaagtcca

SEQ ID NO: 5006206 - DNA, 25 bp, Homo sapien
cctgaactgcaaatgggccagggca

SEQ ID NO: 5006207 - DNA, 25 bp, Homo sapien
tctgagagggtcgatcacctgaact

SEQ ID NO: 5006208 - DNA, 25 bp, Homo sapien
gataaacacgaaatagcatgatgac

SEQ ID NO: 5006209 - DNA, 25 bp, Homo sapien
ggagcattttctgagagggtcgatc

SEQ ID NO: 5006210 - DNA, 25 bp, Homo sapien
taaatacgcagaaggtttaggaagc

SEQ ID NO: 5006211 - DNA, 25 bp, Homo sapien
aaagtacatgcaattcttctgaagg

SEQ ID NO: 5006212 - DNA, 25 bp, Homo sapien
gtgcacctctgcacataattaagag

SEQ ID NO: 5006213 - DNA, 25 bp, Homo sapien
gctgattactcttagcgcattgtgt

SEQ ID NO: 5006214 - DNA, 25 bp, Homo sapien
tttgtccgccaaagagtgggatttg

SEQ ID NO: 5006215 - DNA, 25 bp, Homo sapien
tgtaaacttcaaccacaggaggcct

SEQ ID NO: 5006216 - DNA, 25 bp, Homo sapien
tgtttcctccggtcagattttgttg

SEQ ID NO: 5006217 - DNA, 25 bp, Homo sapien
caacaggcccaatgtctgcacactt

SEQ ID NO: 5006218 - DNA, 25 bp, Homo sapien
ctagctcagaccaaacacctgatga

SEQ ID NO: 5006219 - DNA, 25 bp, Homo sapien
aaacacctgatgaaagaaagccacc

SEQ ID NO: 5006220 - DNA, 25 bp, Homo sapien
cagaccaaacacctgatgaaagaaa

SEQ ID NO: 5006221 - DNA, 25 bp, Homo sapien
ccaaacacctgatgaaagaaagcca

SEQ ID NO: 5006222 - DNA, 25 bp, Homo sapien
aagttttctcatggcgccaagccca

SEQ ID NO: 5006223 - DNA, 25 bp, Homo sapien
caagcccatagctccaactcgagtg

SEQ ID NO: 5006224 - DNA, 25 bp, Homo sapien
gtgtgatgctcaacggtccccagta

SEQ ID NO: 5006225 - DNA, 25 bp, Homo sapien
agcttctggaaaccgcaggcactgt

SEQ ID NO: 5006226 - DNA, 25 bp, Homo sapien
cactaaccagagtgaccaggctgag

SEQ ID NO: 5006227 - DNA, 25 bp, Homo sapien
ttggccccaagtgaggtctccattc

SEQ ID NO: 5006228 - DNA, 25 bp, Homo sapien
tgaaacccaagcatgtgacacattc

SEQ ID NO: 5006229 - DNA, 25 bp, Homo sapien
gctttctaatcacccacttggagga

SEQ ID NO: 5006230 - DNA, 25 bp, Homo sapien
ctggctcccaccaccaatttccatt

SEQ ID NO: 5006231 - DNA, 25 bp, Homo sapien
accaatttccattcccctctgctta

SEQ ID NO: 5006232 - DNA, 25 bp, Homo sapien
gctcccaccaccaatttccattccc

SEQ ID NO: 5006233 - DNA, 25 bp, Homo sapien
ccaatttccattcccctctgcttac

SEQ ID NO: 5006234 - DNA, 25 bp, Homo sapien
catacagccctctggattgctggaa

SEQ ID NO: 5006235 - DNA, 25 bp, Homo sapien
ggccatcgctctcaaagcttccgaa

SEQ ID NO: 5006236 - DNA, 25 bp, Homo sapien
caccaaatgctaggcaggtgggcac

SEQ ID NO: 5006237 - DNA, 25 bp, Homo sapien
gagtgcacctctgagccgagtgaca

SEQ ID NO: 5006238 - DNA, 25 bp, Homo sapien
tccttctccttcgaaactatcttat

SEQ ID NO: 5006239 - DNA, 25 bp, Homo sapien
cgagtcacagggcttcttttaagtc

SEQ ID NO: 5006240 - DNA, 25 bp, Homo sapien
actatcttattcagatttgagcccg

SEQ ID NO: 5006241 - DNA, 25 bp, Homo sapien
gatttgagcccgagtcacagggctt

SEQ ID NO: 5006242 - DNA, 25 bp, Homo sapien
tggcagaggaagaactcggcaccat

SEQ ID NO: 5006243 - DNA, 25 bp, Homo sapien
cagtcagcgcggaggaaaggctttc

SEQ ID NO: 5006244 - DNA, 25 bp, Homo sapien
gcgtgactctcgactgttccctaga

SEQ ID NO: 5006245 - DNA, 25 bp, Homo sapien
tctaccgaccactcatgaggccaag

SEQ ID NO: 5006246 - DNA, 25 bp, Homo sapien
tagaaacaatgaagagcctacctcc

SEQ ID NO: 5006247 - DNA, 25 bp, Homo sapien
gagtcatttatggacccaagaaaga

SEQ ID NO: 5006248 - DNA, 25 bp, Homo sapien
gaaccatggaaaagccagatcagtg

SEQ ID NO: 5006249 - DNA, 25 bp, Homo sapien
ttttattagacaccctgaaccatgg

SEQ ID NO: 5006250 - DNA, 25 bp, Homo sapien
gcagcagcagctcggattctagttc

SEQ ID NO: 5006251 - DNA, 25 bp, Homo sapien
tttcctgctgcatgaagtcagacgg

SEQ ID NO: 5006252 - DNA, 25 bp, Homo sapien
gtcagacggtaaacacttcgccagc

SEQ ID NO: 5006253 - DNA, 25 bp, Homo sapien
cggattctagttctaaggaggacgt

SEQ ID NO: 5006254 - DNA, 25 bp, Homo sapien
gattgctttctgtctgtcttgcact

SEQ ID NO: 5006255 - DNA, 25 bp, Homo sapien
tgctttctgtctgtcttgcactctt

SEQ ID NO: 5006256 - DNA, 25 bp, Homo sapien
ctttctgtctgtcttgcactcttac

SEQ ID NO: 5006257 - DNA, 25 bp, Homo sapien
catttgattgctttctgtctgtctt

SEQ ID NO: 5006258 - DNA, 25 bp, Homo sapien
tccaatcctgtgacttccggtgcat

SEQ ID NO: 5006259 - DNA, 25 bp, Homo sapien
ctgtgacttccggtgcattcctcat

SEQ ID NO: 5006260 - DNA, 25 bp, Homo sapien
cagtccaatcctgtgacttccggtg

SEQ ID NO: 5006261 - DNA, 25 bp, Homo sapien
aatcctgtgacttccggtgcattcc

SEQ ID NO: 5006262 - DNA, 25 bp, Homo sapien
tgacaatttcttagtacagtgtata

SEQ ID NO: 5006263 - DNA, 25 bp, Homo sapien
tgggaatattgctaaagaaaattct

SEQ ID NO: 5006264 - DNA, 25 bp, Homo sapien
acagtgtatactatccccaccaaag

SEQ ID NO: 5006265 - DNA, 25 bp, Homo sapien
tcttagtacagtgtatactatcccc

SEQ ID NO: 5006266 - DNA, 25 bp, Homo sapien
acaattagtctaattgcattcttga

SEQ ID NO: 5006267 - DNA, 25 bp, Homo sapien
tatttattatatcttcattcaatca

SEQ ID NO: 5006268 - DNA, 25 bp, Homo sapien
cattcaatcatttattcacaattag

SEQ ID NO: 5006269 - DNA, 25 bp, Homo sapien
tgacttcagcaaaggagtcaatcca

SEQ ID NO: 5006270 - DNA, 25 bp, Homo sapien
tcttctttcgatcttgagtctttac

SEQ ID NO: 5006271 - DNA, 25 bp, Homo sapien
cattagcctctagtacagttgtatc

SEQ ID NO: 5006272 - DNA, 25 bp, Homo sapien
gacgtaagttcaagatctaatagcc

SEQ ID NO: 5006273 - DNA, 25 bp, Homo sapien
tgctcccaggaacctagacgtaagt

SEQ ID NO: 5006274 - DNA, 25 bp, Homo sapien
tataaggtgttaagaaagggatcca

SEQ ID NO: 5006275 - DNA, 25 bp, Homo sapien
ataaggtgttaagaaagggatccag

SEQ ID NO: 5006276 - DNA, 25 bp, Homo sapien
tgcccatttggacttcctaaatcag

SEQ ID NO: 5006277 - DNA, 25 bp, Homo sapien
tatctgcatctagttgtccttgccc

SEQ ID NO: 5006278 - DNA, 25 bp, Homo sapien
ttatgacatagaaaaagatctcaaa

SEQ ID NO: 5006279 - DNA, 25 bp, Homo sapien
ctattttatagaggttatctgcatc

SEQ ID NO: 5006280 - DNA, 25 bp, Homo sapien
gaaagtccagtcaggataggccttg

SEQ ID NO: 5006281 - DNA, 25 bp, Homo sapien
cattaccgtaaaagaggaatcaccg

SEQ ID NO: 5006282 - DNA, 25 bp, Homo sapien
cctacctcataggatggctgggaag

SEQ ID NO: 5006283 - DNA, 25 bp, Homo sapien
gatcattatgtaaccctaggcaagg

SEQ ID NO: 5006284 - DNA, 25 bp, Homo sapien
gatacctactgaaagatcagggccg

SEQ ID NO: 5006285 - DNA, 25 bp, Homo sapien
catttgaaagcaggaccaacactcc

SEQ ID NO: 5006286 - DNA, 25 bp, Homo sapien
gagcacacggattccttaagtctca

SEQ ID NO: 5006287 - DNA, 25 bp, Homo sapien
tcagggccgaggttctctccaaact

SEQ ID NO: 5006288 - DNA, 25 bp, Homo sapien
cctgcctcaatttccgacatggttt

SEQ ID NO: 5006289 - DNA, 25 bp, Homo sapien
aaaaaatcggcctggtctcaatcat

SEQ ID NO: 5006290 - DNA, 25 bp, Homo sapien
tctacaatgtacttgcctccctagt

SEQ ID NO: 5006291 - DNA, 25 bp, Homo sapien
ctcctcttagctgagaagccaaata

SEQ ID NO: 5006292 - DNA, 25 bp, Homo sapien
tctggagagctgttattataggatt

SEQ ID NO: 5006293 - DNA, 25 bp, Homo sapien
ctgctttcagaactccatattattt

SEQ ID NO: 5006294 - DNA, 25 bp, Homo sapien
gcaaaaatctctggtaaaaaagata

SEQ ID NO: 5006295 - DNA, 25 bp, Homo sapien
tgcgagtgaagtgaactcctttact

SEQ ID NO: 5006296 - DNA, 25 bp, Homo sapien
ggtgaaaacagtgggctacaactac

SEQ ID NO: 5006297 - DNA, 25 bp, Homo sapien
tcagagcctctcttaggactaaagg

SEQ ID NO: 5006298 - DNA, 25 bp, Homo sapien
gatttggccaccgtaagtgccacta

SEQ ID NO: 5006299 - DNA, 25 bp, Homo sapien
cctattgcaggctatgaaggaagca

SEQ ID NO: 5006300 - DNA, 25 bp, Homo sapien
tgatctacataggaacatatgactt

SEQ ID NO: 5006301 - DNA, 25 bp, Homo sapien
ctacataggaacatatgactttaca

SEQ ID NO: 5006302 - DNA, 25 bp, Homo sapien
gaatgatctacataggaacatatga

SEQ ID NO: 5006303 - DNA, 25 bp, Homo sapien
cacaaccagcctaaagctataattt

SEQ ID NO: 5006304 - DNA, 25 bp, Homo sapien
tctgcaaataaagactgttccactt

SEQ ID NO: 5006305 - DNA, 25 bp, Homo sapien
cttacaactctagctatgacatcca

SEQ ID NO: 5006306 - DNA, 25 bp, Homo sapien
tgagcagctagtgctacagatgtgc

SEQ ID NO: 5006307 - DNA, 25 bp, Homo sapien
ctaataagtttttgcagccatctgc

SEQ ID NO: 5006308 - DNA, 25 bp, Homo sapien
atgaacactgaattttgttcaatgc

SEQ ID NO: 5006309 - DNA, 25 bp, Homo sapien
cacaagttaaaccgaacttacattg

SEQ ID NO: 5006310 - DNA, 25 bp, Homo sapien
tgaacactgaattttgttcaatgct

SEQ ID NO: 5006311 - DNA, 25 bp, Homo sapien
tctagcagcctttctcaactcgggt

SEQ ID NO: 5006312 - DNA, 25 bp, Homo sapien
tacaaaatgccttcggatagatgac

SEQ ID NO: 5006313 - DNA, 25 bp, Homo sapien
ggtcttcaatgcattctctagcagc

SEQ ID NO: 5006314 - DNA, 25 bp, Homo sapien
cagccaaagaatttaaccccataga

SEQ ID NO: 5006315 - DNA, 25 bp, Homo sapien
ggaggatccacggtttttatcacaa

SEQ ID NO: 5006316 - DNA, 25 bp, Homo sapien
ccatgatgggatcaagcctgagtat

SEQ ID NO: 5006317 - DNA, 25 bp, Homo sapien
aatcacaactgtcttacctctgggt

SEQ ID NO: 5006318 - DNA, 25 bp, Homo sapien
cctatacagggaaaaaggccagact

SEQ ID NO: 5006319 - DNA, 25 bp, Homo sapien
gacggcgcacttttaatacgagtaa

SEQ ID NO: 5006320 - DNA, 25 bp, Homo sapien
ttatcaacttcggaaaagaatgccc

SEQ ID NO: 5006321 - DNA, 25 bp, Homo sapien
tacgagtaatatctcatagagccta

SEQ ID NO: 5006322 - DNA, 25 bp, Homo sapien
tcattacacatgacggcgcactttt

SEQ ID NO: 5006323 - DNA, 25 bp, Homo sapien
cagaaaggtgctctcacagtggaag

SEQ ID NO: 5006324 - DNA, 25 bp, Homo sapien
cagagtcgagcctgagaacctgtca

SEQ ID NO: 5006325 - DNA, 25 bp, Homo sapien
tgcgtattccatgacacaagggcgt

SEQ ID NO: 5006326 - DNA, 25 bp, Homo sapien
tcagtgcactgactaacagagcagc

SEQ ID NO: 5006327 - DNA, 25 bp, Homo sapien
taacattaaagcctgtgctgacagt

SEQ ID NO: 5006328 - DNA, 25 bp, Homo sapien
agagtacctttgacttctgcgtgga

SEQ ID NO: 5006329 - DNA, 25 bp, Homo sapien
tgctgaacctagcaagtccagactg

SEQ ID NO: 5006330 - DNA, 25 bp, Homo sapien
taggcctccgctaacagtctcaaga

SEQ ID NO: 5006331 - DNA, 25 bp, Homo sapien
tctgagctcaggagtcacctaagtc

SEQ ID NO: 5006332 - DNA, 25 bp, Homo sapien
tcctgccgcatgaattctgagctca

SEQ ID NO: 5006333 - DNA, 25 bp, Homo sapien
gaatagctagcctcttaaatccagg

SEQ ID NO: 5006334 - DNA, 25 bp, Homo sapien
tatgacatcatgtagcatgctgcca

SEQ ID NO: 5006335 - DNA, 25 bp, Homo sapien
aaatctacccaaagtgtataattca

SEQ ID NO: 5006336 - DNA, 25 bp, Homo sapien
cctattctagactctggggatgact

SEQ ID NO: 5006337 - DNA, 25 bp, Homo sapien
atatattctcagagctgtacagctt

SEQ ID NO: 5006338 - DNA, 25 bp, Homo sapien
tgtacagcttttaccataacctaat

SEQ ID NO: 5006339 - DNA, 25 bp, Homo sapien
aacagcataccacgaaatgggactc

SEQ ID NO: 5006340 - DNA, 25 bp, Homo sapien
aagaaaaacaggttatcatcacttg

SEQ ID NO: 5006341 - DNA, 25 bp, Homo sapien
gttatcatcacttgtgaaaatctcc

SEQ ID NO: 5006342 - DNA, 25 bp, Homo sapien
tcctccaaacagcataccacgaaat

SEQ ID NO: 5006343 - DNA, 25 bp, Homo sapien
gaagtgaaggcggaagaatgctcca

SEQ ID NO: 5006344 - DNA, 25 bp, Homo sapien
tccatatgcacatgacaggtcaagt

SEQ ID NO: 5006345 - DNA, 25 bp, Homo sapien
gaaactctcctaccaagcttacagg

SEQ ID NO: 5006346 - DNA, 25 bp, Homo sapien
gaatgctccacactcgtccctgtgg

SEQ ID NO: 5006347 - DNA, 25 bp, Homo sapien
tctgtgttacagagccactgttcta

SEQ ID NO: 5006348 - DNA, 25 bp, Homo sapien
gtgttacagagccactgttctataa

SEQ ID NO: 5006349 - DNA, 25 bp, Homo sapien
acagagccactgttctataatataa

SEQ ID NO: 5006350 - DNA, 25 bp, Homo sapien
gttacagagccactgttctataata

SEQ ID NO: 5006351 - DNA, 25 bp, Homo sapien
tgctattgttgtccaggctggagtg

SEQ ID NO: 5006352 - DNA, 25 bp, Homo sapien
ccaagttttgctattgttgtccagg

SEQ ID NO: 5006353 - DNA, 25 bp, Homo sapien
gccacttaatagtggtgggagctca

SEQ ID NO: 5006354 - DNA, 25 bp, Homo sapien
aactgtacctatctgtagatgctgg

SEQ ID NO: 5006355 - DNA, 25 bp, Homo sapien
ttctcacctgaagcagccacaatga

SEQ ID NO: 5006356 - DNA, 25 bp, Homo sapien
cactggctaggtgacacaagagtta

SEQ ID NO: 5006357 - DNA, 25 bp, Homo sapien
caccataaatgagggtatcttataa

SEQ ID NO: 5006358 - DNA, 25 bp, Homo sapien
gttcgatctgaataacaaaacacca

SEQ ID NO: 5006359 - DNA, 25 bp, Homo sapien
aatgagggtatcttataaacagcag

SEQ ID NO: 5006360 - DNA, 25 bp, Homo sapien
catactatttcctagtctgttcgat

SEQ ID NO: 5006361 - DNA, 25 bp, Homo sapien
ttcaaagcataagtgacagatccct

SEQ ID NO: 5006362 - DNA, 25 bp, Homo sapien
gaccacaaacaactgagctggatct

SEQ ID NO: 5006363 - DNA, 25 bp, Homo sapien
gatccctataagaaacctagagaag

SEQ ID NO: 5006364 - DNA, 25 bp, Homo sapien
tataagtaggagtaatcagtaacca

SEQ ID NO: 5006365 - DNA, 25 bp, Homo sapien
tcaaaaagcttttatgactgcttca

SEQ ID NO: 5006366 - DNA, 25 bp, Homo sapien
ttctccagttgcatgttaggtcagc

SEQ ID NO: 5006367 - DNA, 25 bp, Homo sapien
caatatgaaagatccgtccaatgac

SEQ ID NO: 5006368 - DNA, 25 bp, Homo sapien
actttccaccaaaatctatgtacag

SEQ ID NO: 5006369 - DNA, 25 bp, Homo sapien
gtccaatgaccagtttatcctttgc

SEQ ID NO: 5006370 - DNA, 25 bp, Homo sapien
gatcattctccacaatatgaaagat

SEQ ID NO: 5006371 - DNA, 25 bp, Homo sapien
atgtctcagcatagatgcaaaggat

SEQ ID NO: 5006372 - DNA, 25 bp, Homo sapien
gcatagatgcaaaggattccacatt

SEQ ID NO: 5006373 - DNA, 25 bp, Homo sapien
tcagcatagatgcaaaggattccac

SEQ ID NO: 5006374 - DNA, 25 bp, Homo sapien
tctcagcatagatgcaaaggattcc

SEQ ID NO: 5006375 - DNA, 25 bp, Homo sapien
tgccagttatgctcttcaacttcct

SEQ ID NO: 5006376 - DNA, 25 bp, Homo sapien
ttccttcctgaagaggagctaaaga

SEQ ID NO: 5006377 - DNA, 25 bp, Homo sapien
atgccagttatgctcttcaacttcc

SEQ ID NO: 5006378 - DNA, 25 bp, Homo sapien
gccagttatgctcttcaacttcctc

SEQ ID NO: 5006379 - DNA, 25 bp, Homo sapien
gagatgtgatagtccagggtgaggt

SEQ ID NO: 5006380 - DNA, 25 bp, Homo sapien
ccagggtgaggtctcgagagcccag

SEQ ID NO: 5006381 - DNA, 25 bp, Homo sapien
ggtgaggtctcgagagcccaggcag

SEQ ID NO: 5006382 - DNA, 25 bp, Homo sapien
agggtgaggtctcgagagcccaggc

SEQ ID NO: 5006383 - DNA, 25 bp, Homo sapien
ggagccattattccatccatagtag

SEQ ID NO: 5006384 - DNA, 25 bp, Homo sapien
gctacataatcctttgctgggagcc

SEQ ID NO: 5006385 - DNA, 25 bp, Homo sapien
tctctgcttgtaaccagggcaggtc

SEQ ID NO: 5006386 - DNA, 25 bp, Homo sapien
gaagagcaaacagtatcaacttggg

SEQ ID NO: 5006387 - DNA, 25 bp, Homo sapien
gctcagtgcctaaccctggaaaatg

SEQ ID NO: 5006388 - DNA, 25 bp, Homo sapien
catgctgatatagactgcagagact

SEQ ID NO: 5006389 - DNA, 25 bp, Homo sapien
ctggaagcatactgtcaccgctgga

SEQ ID NO: 5006390 - DNA, 25 bp, Homo sapien
gatatgtatcatagagctcagtgcc

SEQ ID NO: 5006391 - DNA, 25 bp, Homo sapien
cacaggtactaacttggagttgact

SEQ ID NO: 5006392 - DNA, 25 bp, Homo sapien
gatctcctgctattctgctgtacta

SEQ ID NO: 5006393 - DNA, 25 bp, Homo sapien
cagttggtcatagagatcagatctc

SEQ ID NO: 5006394 - DNA, 25 bp, Homo sapien
tgagctgtcacaggtactaacttgg

SEQ ID NO: 5006395 - DNA, 25 bp, Homo sapien
tacatgggatactgaacagtggttc

SEQ ID NO: 5006396 - DNA, 25 bp, Homo sapien
tatacctatcatgcatatgaggacc

SEQ ID NO: 5006397 - DNA, 25 bp, Homo sapien
gaccaactcagccaataaacagcga

SEQ ID NO: 5006398 - DNA, 25 bp, Homo sapien
tacgaaacctgacttctatgaccaa

SEQ ID NO: 5006399 - DNA, 25 bp, Homo sapien
gatgggcttacaggtagatgacaca

SEQ ID NO: 5006400 - DNA, 25 bp, Homo sapien
tgaaattatcagtccaggcatctaa

SEQ ID NO: 5006401 - DNA, 25 bp, Homo sapien
gacactaagggctctaacggaagaa

SEQ ID NO: 5006402 - DNA, 25 bp, Homo sapien
tagagatcgaaagccctgtaacaga

SEQ ID NO: 5006403 - DNA, 25 bp, Homo sapien
tttgctttaattgtcgaatatcaag

SEQ ID NO: 5006404 - DNA, 25 bp, Homo sapien
taattgtcgaatatcaagaaaatcc

SEQ ID NO: 5006405 - DNA, 25 bp, Homo sapien
gatgataaccccagtttccaatttc

SEQ ID NO: 5006406 - DNA, 25 bp, Homo sapien
tcaggaatgaaagatgataacccca

SEQ ID NO: 5006407 - DNA, 25 bp, Homo sapien
aaacaagcgcagtgtggacagaccc

SEQ ID NO: 5006408 - DNA, 25 bp, Homo sapien
agacccggcccagtacgcaaatgcc

SEQ ID NO: 5006409 - DNA, 25 bp, Homo sapien
cggcccagtacgcaaatgccacaca

SEQ ID NO: 5006410 - DNA, 25 bp, Homo sapien
caccagcattcaatcccaggaaaac

SEQ ID NO: 5006411 - DNA, 25 bp, Homo sapien
gacctcagctccccttcctaagcca

SEQ ID NO: 5006412 - DNA, 25 bp, Homo sapien
ctgggccccggacctcagctcccct

SEQ ID NO: 5006413 - DNA, 25 bp, Homo sapien
ccggacctcagctccccttcctaag

SEQ ID NO: 5006414 - DNA, 25 bp, Homo sapien
cggacctcagctccccttcctaagc

SEQ ID NO: 5006415 - DNA, 25 bp, Homo sapien
cgcgtcgttggcgtaattcccgcga

SEQ ID NO: 5006416 - DNA, 25 bp, Homo sapien
tcgttggcgtaattcccgcgactcc

SEQ ID NO: 5006417 - DNA, 25 bp, Homo sapien
cgtaattcccgcgactccctctcac

SEQ ID NO: 5006418 - DNA, 25 bp, Homo sapien
cgtcgttggcgtaattcccgcgact

SEQ ID NO: 5006419 - DNA, 25 bp, Homo sapien
ttggcattggaactaccactttcgg

SEQ ID NO: 5006420 - DNA, 25 bp, Homo sapien
aacactcgcagaaaatggctctcgg

SEQ ID NO: 5006421 - DNA, 25 bp, Homo sapien
tgcctacaccccgaaagggcctgaa

SEQ ID NO: 5006422 - DNA, 25 bp, Homo sapien
tgcgcgcgtcttaggctccttggca

SEQ ID NO: 5006423 - DNA, 25 bp, Homo sapien
tttgacctcccctccgcaagcgcgc

SEQ ID NO: 5006424 - DNA, 25 bp, Homo sapien
acctcccctccgcaagcgcgcgggt

SEQ ID NO: 5006425 - DNA, 25 bp, Homo sapien
tcccctccgcaagcgcgcgggtcac

SEQ ID NO: 5006426 - DNA, 25 bp, Homo sapien
acctttgacctcccctccgcaagcg

SEQ ID NO: 5006427 - DNA, 25 bp, Homo sapien
taaaactgtttatctcccgagacta

SEQ ID NO: 5006428 - DNA, 25 bp, Homo sapien
gatgctctctaatggtacagatagt

SEQ ID NO: 5006429 - DNA, 25 bp, Homo sapien
tggtcttcaagaaccctcagtctga

SEQ ID NO: 5006430 - DNA, 25 bp, Homo sapien
gactattaatggactcttgcctaga

SEQ ID NO: 5006431 - DNA, 25 bp, Homo sapien
ggaccagatggaccacaaccagctt

SEQ ID NO: 5006432 - DNA, 25 bp, Homo sapien
tgaagtcacatggacaaccgtaggg

SEQ ID NO: 5006433 - DNA, 25 bp, Homo sapien
caaagttcttaggatgtcgcttcac

SEQ ID NO: 5006434 - DNA, 25 bp, Homo sapien
tggtgacactgccacatgcctgagt

SEQ ID NO: 5006435 - DNA, 25 bp, Homo sapien
caaccaacctcagtaacatcaaaat

SEQ ID NO: 5006436 - DNA, 25 bp, Homo sapien
aaccaacctcagtaacatcaaaatt

SEQ ID NO: 5006437 - DNA, 25 bp, Homo sapien
accaacctcagtaacatcaaaatta

SEQ ID NO: 5006438 - DNA, 25 bp, Homo sapien
ccaaccaacctcagtaacatcaaaa

SEQ ID NO: 5006439 - DNA, 25 bp, Homo sapien
gcaaaagcacttgcagacccgactc

SEQ ID NO: 5006440 - DNA, 25 bp, Homo sapien
aaagcacttgcagacccgactctct

SEQ ID NO: 5006441 - DNA, 25 bp, Homo sapien
aaaagcacttgcagacccgactctc

SEQ ID NO: 5006442 - DNA, 25 bp, Homo sapien
caaaagcacttgcagacccgactct

SEQ ID NO: 5006443 - DNA, 25 bp, Homo sapien
gaagttgcataatggacttgcccct

SEQ ID NO: 5006444 - DNA, 25 bp, Homo sapien
ttggacacatcttcagcaagcagtc

SEQ ID NO: 5006445 - DNA, 25 bp, Homo sapien
acacatggccgggtgcatgcctata

SEQ ID NO: 5006446 - DNA, 25 bp, Homo sapien
gaaaataaggactaatcaatggcca

SEQ ID NO: 5006447 - DNA, 25 bp, Homo sapien
tctaagttgctaaggtgataatcca

SEQ ID NO: 5006448 - DNA, 25 bp, Homo sapien
catagactccagttgattcggtaca

SEQ ID NO: 5006449 - DNA, 25 bp, Homo sapien
tcaacagcctgtgccttaaagccct

SEQ ID NO: 5006450 - DNA, 25 bp, Homo sapien
tcaaacacaagaggaaccaggaact

SEQ ID NO: 5006451 - DNA, 25 bp, Homo sapien
agatggaatttattaagcttttcac

SEQ ID NO: 5006452 - DNA, 25 bp, Homo sapien
tggaatttattaagcttttcacatg

SEQ ID NO: 5006453 - DNA, 25 bp, Homo sapien
tagatggaatttattaagcttttca

SEQ ID NO: 5006454 - DNA, 25 bp, Homo sapien
gatggaatttattaagcttttcaca

SEQ ID NO: 5006455 - DNA, 25 bp, Homo sapien
aaaaatgctttaggtcactccaagc

SEQ ID NO: 5006456 - DNA, 25 bp, Homo sapien
tatactgaagtaaatctagccatgc

SEQ ID NO: 5006457 - DNA, 25 bp, Homo sapien
tattttataacaatcaacacctgtg

SEQ ID NO: 5006458 - DNA, 25 bp, Homo sapien
aaaactctagcaatcaagaatggca

SEQ ID NO: 5006459 - DNA, 25 bp, Homo sapien
tacaacattgtaggccataatcata

SEQ ID NO: 5006460 - DNA, 25 bp, Homo sapien
taggagacaggttctacagtatcat

SEQ ID NO: 5006461 - DNA, 25 bp, Homo sapien
aaaaggtggtagtgttgagtaagca

SEQ ID NO: 5006462 - DNA, 25 bp, Homo sapien
tattagaatagaataccttggcctc

SEQ ID NO: 5006463 - DNA, 25 bp, Homo sapien
taagtgaagacaacaatggttcccc

SEQ ID NO: 5006464 - DNA, 25 bp, Homo sapien
ggacctcgcttgcagcatctggcag

SEQ ID NO: 5006465 - DNA, 25 bp, Homo sapien
aaatggttactgtcacaaacggtgc

SEQ ID NO: 5006466 - DNA, 25 bp, Homo sapien
tgacaagatgtgcttggacctcgct

SEQ ID NO: 5006467 - DNA, 25 bp, Homo sapien
gcagccgaattcaagacttctccaa

SEQ ID NO: 5006468 - DNA, 25 bp, Homo sapien
gtgtcttttctggaagaggctccgt

SEQ ID NO: 5006469 - DNA, 25 bp, Homo sapien
ggtggtggcactagcatttgcagcc

SEQ ID NO: 5006470 - DNA, 25 bp, Homo sapien
tcttttctggaagaggctccgtggt

SEQ ID NO: 5006471 - DNA, 25 bp, Homo sapien
tagtattgttgcaatgttcagtgtg

SEQ ID NO: 5006472 - DNA, 25 bp, Homo sapien
taaaactagctgattctgcataaag

SEQ ID NO: 5006473 - DNA, 25 bp, Homo sapien
taactctaattcactttcaagaaca

SEQ ID NO: 5006474 - DNA, 25 bp, Homo sapien
cagcaaccttatagctcagtgatta

SEQ ID NO: 5006475 - DNA, 25 bp, Homo sapien
tcttaattgagtggtcacagacccc

SEQ ID NO: 5006476 - DNA, 25 bp, Homo sapien
tatggcaatagcacctacctagctg

SEQ ID NO: 5006477 - DNA, 25 bp, Homo sapien
catcatctttggcttggagtacaac

SEQ ID NO: 5006478 - DNA, 25 bp, Homo sapien
cagtgaagttcttggtggtcctcaa

SEQ ID NO: 5006479 - DNA, 25 bp, Homo sapien
tatctgtttaatacgctatcctttt

SEQ ID NO: 5006480 - DNA, 25 bp, Homo sapien
taattttacagcttccttaggatac

SEQ ID NO: 5006481 - DNA, 25 bp, Homo sapien
gtggcataatcgctgctcactctgc

SEQ ID NO: 5006482 - DNA, 25 bp, Homo sapien
ttttaatctgaatggtgcctagtca

SEQ ID NO: 5006483 - DNA, 25 bp, Homo sapien
ggttgcctgtgatcctaagagttga

SEQ ID NO: 5006484 - DNA, 25 bp, Homo sapien
taaagatgcatttcgtgactcaaag

SEQ ID NO: 5006485 - DNA, 25 bp, Homo sapien
tgaatcataaacgatcatcatggca

SEQ ID NO: 5006486 - DNA, 25 bp, Homo sapien
tatacaaactccgtagagagggtcg

SEQ ID NO: 5006487 - DNA, 25 bp, Homo sapien
gtcaatgattttcgcacagcaaagt

SEQ ID NO: 5006488 - DNA, 25 bp, Homo sapien
cagcaaagttaattaagacaccagg

SEQ ID NO: 5006489 - DNA, 25 bp, Homo sapien
taaagcgtaacagcataatagcaca

SEQ ID NO: 5006490 - DNA, 25 bp, Homo sapien
tatcactgtctgagtggtaggacca

SEQ ID NO: 5006491 - DNA, 25 bp, Homo sapien
ttcgaccttttcttcaaatgattta

SEQ ID NO: 5006492 - DNA, 25 bp, Homo sapien
tcgaccttttcttcaaatgatttaa

SEQ ID NO: 5006493 - DNA, 25 bp, Homo sapien
agaacagttcaagttaaacatctaa

SEQ ID NO: 5006494 - DNA, 25 bp, Homo sapien
cagaacagttcaagttaaacatcta

SEQ ID NO: 5006495 - DNA, 25 bp, Homo sapien
gaacagttcaagttaaacatctaaa

SEQ ID NO: 5006496 - DNA, 25 bp, Homo sapien
aattcagaacagttcaagttaaaca

SEQ ID NO: 5006497 - DNA, 25 bp, Homo sapien
catgctaattgaatgctgaatggaa

SEQ ID NO: 5006498 - DNA, 25 bp, Homo sapien
aattgaatgctgaatggaacgtata

SEQ ID NO: 5006499 - DNA, 25 bp, Homo sapien
ctcatagcaggcatgctaattgaat

SEQ ID NO: 5006500 - DNA, 25 bp, Homo sapien
gcaggcatgctaattgaatgctgaa

SEQ ID NO: 5006501 - DNA, 25 bp, Homo sapien
tgacaaaacttagctccccaggagc

SEQ ID NO: 5006502 - DNA, 25 bp, Homo sapien
ggagccaattaattcccaggagtta

SEQ ID NO: 5006503 - DNA, 25 bp, Homo sapien
tttcacccggagctgtaaggcatat

SEQ ID NO: 5006504 - DNA, 25 bp, Homo sapien
gagctttattctcttggcgccatga

SEQ ID NO: 5006505 - DNA, 25 bp, Homo sapien
tttctccttctatatccataattac

SEQ ID NO: 5006506 - DNA, 25 bp, Homo sapien
cataagtttgccaggtaaaatggac

SEQ ID NO: 5006507 - DNA, 25 bp, Homo sapien
ccggcataagtttgccaggtaaaat

SEQ ID NO: 5006508 - DNA, 25 bp, Homo sapien
aaaatcaccggcataagtttgccag

SEQ ID NO: 5006509 - DNA, 25 bp, Homo sapien
taaaggaatgtgaaaaggcttgcaa

SEQ ID NO: 5006510 - DNA, 25 bp, Homo sapien
ctaaaggaatgtgaaaaggcttgca

SEQ ID NO: 5006511 - DNA, 25 bp, Homo sapien
aaaggaatgtgaaaaggcttgcaat

SEQ ID NO: 5006512 - DNA, 25 bp, Homo sapien
catttgatgttagaatgctaggcct

SEQ ID NO: 5006513 - DNA, 25 bp, Homo sapien
caacaaccttaaatgatcatcagat

SEQ ID NO: 5006514 - DNA, 25 bp, Homo sapien
gttagaatgctaggcctagaagacc

SEQ ID NO: 5006515 - DNA, 25 bp, Homo sapien
gaagttcacaaccagaatttttcaa

SEQ ID NO: 5006516 - DNA, 25 bp, Homo sapien
aatttgcgtcagctacttaatgagc

SEQ ID NO: 5006517 - DNA, 25 bp, Homo sapien
cgtcagctacttaatgagcaaggaa

SEQ ID NO: 5006518 - DNA, 25 bp, Homo sapien
ttgcgtcagctacttaatgagcaag

SEQ ID NO: 5006519 - DNA, 25 bp, Homo sapien
tcagctacttaatgagcaaggaaaa

SEQ ID NO: 5006520 - DNA, 25 bp, Homo sapien
gagccaacagacgaaaaagcagctg

SEQ ID NO: 5006521 - DNA, 25 bp, Homo sapien
tctgtccagcctgggataaggtttc

SEQ ID NO: 5006522 - DNA, 25 bp, Homo sapien
cttctgtccagcctgggataaggtt

SEQ ID NO: 5006523 - DNA, 25 bp, Homo sapien
ctttttggtgatgactgagccaaca

SEQ ID NO: 5006524 - DNA, 25 bp, Homo sapien
cagatgcctttgtcaacttgatttc

SEQ ID NO: 5006525 - DNA, 25 bp, Homo sapien
tcagatgcctttgtcaacttgattt

SEQ ID NO: 5006526 - DNA, 25 bp, Homo sapien
ctctgcagatggctctcaatacaga

SEQ ID NO: 5006527 - DNA, 25 bp, Homo sapien
gaagacagagcagttcggtttctgc

SEQ ID NO: 5006528 - DNA, 25 bp, Homo sapien
cagaagacagagcagttcggtttct

SEQ ID NO: 5006529 - DNA, 25 bp, Homo sapien
cagatggctctcaatacagaagaca

SEQ ID NO: 5006530 - DNA, 25 bp, Homo sapien
agacaaaaggcacaacagtgtcctt

SEQ ID NO: 5006531 - DNA, 25 bp, Homo sapien
ggcaggcacacttgaaaatcagaaa

SEQ ID NO: 5006532 - DNA, 25 bp, Homo sapien
tcccaaggaaagtgtatgatcaagg

SEQ ID NO: 5006533 - DNA, 25 bp, Homo sapien
tgccgtgtcgtccaaagaaaagctg

SEQ ID NO: 5006534 - DNA, 25 bp, Homo sapien
ttctcttttgctgctaacacttgag

SEQ ID NO: 5006535 - DNA, 25 bp, Homo sapien
gttgctgtcacgtcttgccaccctt

SEQ ID NO: 5006536 - DNA, 25 bp, Homo sapien
tagagaattgattccaagtttccgc

SEQ ID NO: 5006537 - DNA, 25 bp, Homo sapien
aagtttccgcttgatctctgctaga

SEQ ID NO: 5006538 - DNA, 25 bp, Homo sapien
cattactgggtatagaaattgttct

SEQ ID NO: 5006539 - DNA, 25 bp, Homo sapien
taacagtcctaaagttcagccactg

SEQ ID NO: 5006540 - DNA, 25 bp, Homo sapien
tgtacacaattgcttacagcggcat

SEQ ID NO: 5006541 - DNA, 25 bp, Homo sapien
ccactgtggaacacaatttggatac

SEQ ID NO: 5006542 - DNA, 25 bp, Homo sapien
tctgtggcactgatcgtggcagcaa

SEQ ID NO: 5006543 - DNA, 25 bp, Homo sapien
tgtggcactgatcgtggcagcaaca

SEQ ID NO: 5006544 - DNA, 25 bp, Homo sapien
ctctgtggcactgatcgtggcagca

SEQ ID NO: 5006545 - DNA, 25 bp, Homo sapien
gtggcactgatcgtggcagcaacat

SEQ ID NO: 5006546 - DNA, 25 bp, Homo sapien
cattttttaaagtgcaaaatctaag

SEQ ID NO: 5006547 - DNA, 25 bp, Homo sapien
gagaactgccagttcagccacagca

SEQ ID NO: 5006548 - DNA, 25 bp, Homo sapien
caaaggcacttggtacaggctctac

SEQ ID NO: 5006549 - DNA, 25 bp, Homo sapien
cagcgtcgcagcaagcattagagaa

SEQ ID NO: 5006550 - DNA, 25 bp, Homo sapien
actgtggaacaagcagccagcgtcg

SEQ ID NO: 5006551 - DNA, 25 bp, Homo sapien
tggcaggtagcccttactggacccg

SEQ ID NO: 5006552 - DNA, 25 bp, Homo sapien
gcataattgcttccgcaggtcttcc

SEQ ID NO: 5006553 - DNA, 25 bp, Homo sapien
caaagcaaagtgtgacccctgaggt

SEQ ID NO: 5006554 - DNA, 25 bp, Homo sapien
ttcaaaaaccacaaatcggactggc

SEQ ID NO: 5006555 - DNA, 25 bp, Homo sapien
taatgttttgtacagaactcccagg

SEQ ID NO: 5006556 - DNA, 25 bp, Homo sapien
cagaaaagaggatgacgggttgtcc

SEQ ID NO: 5006557 - DNA, 25 bp, Homo sapien
cacattagcccgtaggtggcagcaa

SEQ ID NO: 5006558 - DNA, 25 bp, Homo sapien
tatgcggctaggctatcaaggaaaa

SEQ ID NO: 5006559 - DNA, 25 bp, Homo sapien
agtctctgacatctgcaaatattcc

SEQ ID NO: 5006560 - DNA, 25 bp, Homo sapien
aagctcctcactctggacaatctgg

SEQ ID NO: 5006561 - DNA, 25 bp, Homo sapien
tagagtgcatatctgacgacgccac

SEQ ID NO: 5006562 - DNA, 25 bp, Homo sapien
tcccgtgccttaagtcctttgatgg

SEQ ID NO: 5006563 - DNA, 25 bp, Homo sapien
aacagtgtgcagtcaaaagtaccat

SEQ ID NO: 5006564 - DNA, 25 bp, Homo sapien
ggtcacctaccttcatattacagga

SEQ ID NO: 5006565 - DNA, 25 bp, Homo sapien
tcatacataatctgtccaaagattg

SEQ ID NO: 5006566 - DNA, 25 bp, Homo sapien
cacctaccttcatattacaggaaaa

SEQ ID NO: 5006567 - DNA, 25 bp, Homo sapien
aatttctgaagagtaggtgatccgg

SEQ ID NO: 5006568 - DNA, 25 bp, Homo sapien
taggtgatccgggtggagatgaatt

SEQ ID NO: 5006569 - DNA, 25 bp, Homo sapien
gaagagtaggtgatccgggtggaga

SEQ ID NO: 5006570 - DNA, 25 bp, Homo sapien
tttctgaagagtaggtgatccgggt

SEQ ID NO: 5006571 - DNA, 25 bp, Homo sapien
cctcatataagtccatctctctaca

SEQ ID NO: 5006572 - DNA, 25 bp, Homo sapien
gactggtagtcctcatataagtcca

SEQ ID NO: 5006573 - DNA, 25 bp, Homo sapien
cctgcatcaaaatcaaacggggact

SEQ ID NO: 5006574 - DNA, 25 bp, Homo sapien
catcaaaatcaaacggggactggta

SEQ ID NO: 5006575 - DNA, 25 bp, Homo sapien
gatatcagccttcagttgagtgccg

SEQ ID NO: 5006576 - DNA, 25 bp, Homo sapien
gaatgcatggctgtctaatcgcctg

SEQ ID NO: 5006577 - DNA, 25 bp, Homo sapien
gggagcgagctttcctcagtcaaca

SEQ ID NO: 5006578 - DNA, 25 bp, Homo sapien
gatttatcctgagcaaccttaggag

SEQ ID NO: 5006579 - DNA, 25 bp, Homo sapien
gagctgcaataaacctgcgtaccca

SEQ ID NO: 5006580 - DNA, 25 bp, Homo sapien
gactgtggccttggctcaagcaaca

SEQ ID NO: 5006581 - DNA, 25 bp, Homo sapien
gaacctttctatgctgactgtggcc

SEQ ID NO: 5006582 - DNA, 25 bp, Homo sapien
gactgggccacagctagcttgtaaa

SEQ ID NO: 5006583 - DNA, 25 bp, Homo sapien
catgtgacacgctctacctgaaatg

SEQ ID NO: 5006584 - DNA, 25 bp, Homo sapien
tagtgatacggatagaatgcaagcc

SEQ ID NO: 5006585 - DNA, 25 bp, Homo sapien
ttgttccaccacctagagccaaagg

SEQ ID NO: 5006586 - DNA, 25 bp, Homo sapien
gagtatggttcatgaggtccctggc

SEQ ID NO: 5006587 - DNA, 25 bp, Homo sapien
aatggtataaggatgcactgcaggc

SEQ ID NO: 5006588 - DNA, 25 bp, Homo sapien
cagtcagatcccagtcaagacattc

SEQ ID NO: 5006589 - DNA, 25 bp, Homo sapien
ggacttttatgcaacatcctggctc

SEQ ID NO: 5006590 - DNA, 25 bp, Homo sapien
tatgggtacaatcccagcaaggagg

SEQ ID NO: 5006591 - DNA, 25 bp, Homo sapien
tcctgtaagttcctacccatttagc

SEQ ID NO: 5006592 - DNA, 25 bp, Homo sapien
gaacacatcctaaacttagcccaga

SEQ ID NO: 5006593 - DNA, 25 bp, Homo sapien
tgaatagtatacatgcaagggacat

SEQ ID NO: 5006594 - DNA, 25 bp, Homo sapien
tattactcaaccatgctttagccaa

SEQ ID NO: 5006595 - DNA, 25 bp, Homo sapien
cttccaccgaagcagcagttggttt

SEQ ID NO: 5006596 - DNA, 25 bp, Homo sapien
tccaccgaagcagcagttggtttac

SEQ ID NO: 5006597 - DNA, 25 bp, Homo sapien
accgaagcagcagttggtttacctt

SEQ ID NO: 5006598 - DNA, 25 bp, Homo sapien
tctccaccttccaccgaagcagcag

SEQ ID NO: 5006599 - DNA, 25 bp, Homo sapien
tcaaagggcacaaattgcagaaggg

SEQ ID NO: 5006600 - DNA, 25 bp, Homo sapien
tttaaataagctgatccaagcccta

SEQ ID NO: 5006601 - DNA, 25 bp, Homo sapien
tgttttcggaacagaaactagaatc

SEQ ID NO: 5006602 - DNA, 25 bp, Homo sapien
tgacaaacctattatggcccaatga

SEQ ID NO: 5006603 - DNA, 25 bp, Homo sapien
gctgaatttctttggaggacctgtc

SEQ ID NO: 5006604 - DNA, 25 bp, Homo sapien
tctttaggcagacaaaggagtccca

SEQ ID NO: 5006605 - DNA, 25 bp, Homo sapien
gatacctgcctgatttgtcaagaaa

SEQ ID NO: 5006606 - DNA, 25 bp, Homo sapien
gatcttgatgcacgtcagtcatgga

SEQ ID NO: 5006607 - DNA, 25 bp, Homo sapien
aatccaagcacgctctcagggaatc

SEQ ID NO: 5006608 - DNA, 25 bp, Homo sapien
catagtaatattgactgcctcctca

SEQ ID NO: 5006609 - DNA, 25 bp, Homo sapien
tctggacactccaaaattaggccct

SEQ ID NO: 5006610 - DNA, 25 bp, Homo sapien
ttataccccaaaatgcctagaacag

SEQ ID NO: 5006611 - DNA, 25 bp, Homo sapien
caatgggcacagaagccacaatgac

SEQ ID NO: 5006612 - DNA, 25 bp, Homo sapien
taagtgttggtgacgatccagagaa

SEQ ID NO: 5006613 - DNA, 25 bp, Homo sapien
tgacagatgctactccatggatgaa

SEQ ID NO: 5006614 - DNA, 25 bp, Homo sapien
aaacatcatgtgacgtgaaagaagc

SEQ ID NO: 5006615 - DNA, 25 bp, Homo sapien
ccccataattgcactcctaggtaaa

SEQ ID NO: 5006616 - DNA, 25 bp, Homo sapien
gaagaaagccggaactgcaagcatg

SEQ ID NO: 5006617 - DNA, 25 bp, Homo sapien
taatgaacaaggacatggcaattcc

SEQ ID NO: 5006618 - DNA, 25 bp, Homo sapien
gaattctgacgtctgcctctaggcc

SEQ ID NO: 5006619 - DNA, 25 bp, Homo sapien
ggaaaccttcactgctaggctgaga

SEQ ID NO: 5006620 - DNA, 25 bp, Homo sapien
taaagcttccctgatgattctaatg

SEQ ID NO: 5006621 - DNA, 25 bp, Homo sapien
gttaagaaaccactagactcagagg

SEQ ID NO: 5006622 - DNA, 25 bp, Homo sapien
gcttagcacgtattctgatcccagg

SEQ ID NO: 5006623 - DNA, 25 bp, Homo sapien
tatcacccagtcagcatcagtttct

SEQ ID NO: 5006624 - DNA, 25 bp, Homo sapien
taaggtcctaaagactcctaagtga

SEQ ID NO: 5006625 - DNA, 25 bp, Homo sapien
taagatgccactgactacaggatgt

SEQ ID NO: 5006626 - DNA, 25 bp, Homo sapien
gagagactactgcagttcattcaac

SEQ ID NO: 5006627 - DNA, 25 bp, Homo sapien
caagccttgcacagctggcgatgat

SEQ ID NO: 5006628 - DNA, 25 bp, Homo sapien
tctctgactgaaacagtaaacaatg

SEQ ID NO: 5006629 - DNA, 25 bp, Homo sapien
ttaattacgcatcatttctctctga

SEQ ID NO: 5006630 - DNA, 25 bp, Homo sapien
atggattttaattacgcatcatttc

SEQ ID NO: 5006631 - DNA, 25 bp, Homo sapien
tctgactgaaacagtaaacaatgct

SEQ ID NO: 5006632 - DNA, 25 bp, Homo sapien
catccaaactgatggcctgaatatt

SEQ ID NO: 5006633 - DNA, 25 bp, Homo sapien
tgaaacatttcaacactctccagct

SEQ ID NO: 5006634 - DNA, 25 bp, Homo sapien
gttaactatagagtgaaactgacag

SEQ ID NO: 5006635 - DNA, 25 bp, Homo sapien
tgatggattatcatcctcctgtgta

SEQ ID NO: 5006636 - DNA, 25 bp, Homo sapien
ccgcagtactatagactgtcttatc

SEQ ID NO: 5006637 - DNA, 25 bp, Homo sapien
taaattgccagctgtccgcagtact

SEQ ID NO: 5006638 - DNA, 25 bp, Homo sapien
tcaaaaatcagggaagtagatagca

SEQ ID NO: 5006639 - DNA, 25 bp, Homo sapien
cattttctaacaagcagctaatgaa

SEQ ID NO: 5006640 - DNA, 25 bp, Homo sapien
gcacttcttgggtttacaatatacc

SEQ ID NO: 5006641 - DNA, 25 bp, Homo sapien
aacataatacaaaggctggtggccc

SEQ ID NO: 5006642 - DNA, 25 bp, Homo sapien
cctgtagcacctgttaaagttgtgt

SEQ ID NO: 5006643 - DNA, 25 bp, Homo sapien
tgaggatttaggagcctatgggcaa

SEQ ID NO: 5006644 - DNA, 25 bp, Homo sapien
ttccaggaatagcagcaaggactgc

SEQ ID NO: 5006645 - DNA, 25 bp, Homo sapien
gagaggttccaggaatagcagcaag

SEQ ID NO: 5006646 - DNA, 25 bp, Homo sapien
ccaggaatagcagcaaggactgcta

SEQ ID NO: 5006647 - DNA, 25 bp, Homo sapien
gaggttccaggaatagcagcaagga

SEQ ID NO: 5006648 - DNA, 25 bp, Homo sapien
cggccacagcttaggagcagtagtt

SEQ ID NO: 5006649 - DNA, 25 bp, Homo sapien
tttcatcaagttcaagagtccagga

SEQ ID NO: 5006650 - DNA, 25 bp, Homo sapien
ggtgattctaatccacggccacagc

SEQ ID NO: 5006651 - DNA, 25 bp, Homo sapien
gaacttgatggtaccgctgatgcta

SEQ ID NO: 5006652 - DNA, 25 bp, Homo sapien
tatctgtgcccacttgtgaagggag

SEQ ID NO: 5006653 - DNA, 25 bp, Homo sapien
tccacacagtaggaactgaggcctc

SEQ ID NO: 5006654 - DNA, 25 bp, Homo sapien
ttctgatccgagagagagtgtgtca

SEQ ID NO: 5006655 - DNA, 25 bp, Homo sapien
gatccgttagtccattcagcctcca

SEQ ID NO: 5006656 - DNA, 25 bp, Homo sapien
tcatgttaagtgtattatcaaaatc

SEQ ID NO: 5006657 - DNA, 25 bp, Homo sapien
ggttgcatttggatagcgcctccca

SEQ ID NO: 5006658 - DNA, 25 bp, Homo sapien
caatgcacttgaacactatagctaa

SEQ ID NO: 5006659 - DNA, 25 bp, Homo sapien
cctcctaaccatcttgacaggaata

SEQ ID NO: 5006660 - DNA, 25 bp, Homo sapien
ccacatgaggttcaaaatgagcaac

SEQ ID NO: 5006661 - DNA, 25 bp, Homo sapien
gagggtcactctttatctgggaagc

SEQ ID NO: 5006662 - DNA, 25 bp, Homo sapien
tgtttaatcctagcatgtggccaga

SEQ ID NO: 5006663 - DNA, 25 bp, Homo sapien
gcagattctcccacaaggctcaaag

SEQ ID NO: 5006664 - DNA, 25 bp, Homo sapien
ctttcaatataaacaagagccctgc

SEQ ID NO: 5006665 - DNA, 25 bp, Homo sapien
tagaatactgcaacgctagaaaggc

SEQ ID NO: 5006666 - DNA, 25 bp, Homo sapien
gagacctaagtacttcctggtaagc

SEQ ID NO: 5006667 - DNA, 25 bp, Homo sapien
ggctttagacgcaccttccagaaca

SEQ ID NO: 5006668 - DNA, 25 bp, Homo sapien
tacatctgtaaccaattcatttaag

SEQ ID NO: 5006669 - DNA, 25 bp, Homo sapien
aaaacctccaacatttgagacttgg

SEQ ID NO: 5006670 - DNA, 25 bp, Homo sapien
gataagagctctctatattatggag

SEQ ID NO: 5006671 - DNA, 25 bp, Homo sapien
ctactagaggttaagtcaataattc

SEQ ID NO: 5006672 - DNA, 25 bp, Homo sapien
gctcagggttggaatagtcagacgt

SEQ ID NO: 5006673 - DNA, 25 bp, Homo sapien
aatagtcagacgttgagcagtggag

SEQ ID NO: 5006674 - DNA, 25 bp, Homo sapien
cagggttggaatagtcagacgttga

SEQ ID NO: 5006675 - DNA, 25 bp, Homo sapien
ttatgaatcctcaaaccaggtaggg

SEQ ID NO: 5006676 - DNA, 25 bp, Homo sapien
gaaattaataatccagtcaagagaa

SEQ ID NO: 5006677 - DNA, 25 bp, Homo sapien
gagcccaaccaaggcgaagacaggg

SEQ ID NO: 5006678 - DNA, 25 bp, Homo sapien
tgaaattaataatccagtcaagaga

SEQ ID NO: 5006679 - DNA, 25 bp, Homo sapien
tcatgaaattaataatccagtcaag

SEQ ID NO: 5006680 - DNA, 25 bp, Homo sapien
ggcaatgaacatacagataaagaga

SEQ ID NO: 5006681 - DNA, 25 bp, Homo sapien
gaaatagtctggcaagaatacctag

SEQ ID NO: 5006682 - DNA, 25 bp, Homo sapien
gaatttagtacatgacaacagtggt

SEQ ID NO: 5006683 - DNA, 25 bp, Homo sapien
gttgaattttcacctagataagttg

SEQ ID NO: 5006684 - DNA, 25 bp, Homo sapien
tatggaaatcacgaaactgttgacc

SEQ ID NO: 5006685 - DNA, 25 bp, Homo sapien
tatggtttcagtacagctggtaccc

SEQ ID NO: 5006686 - DNA, 25 bp, Homo sapien
tgctaaaagatcacaacccctccta

SEQ ID NO: 5006687 - DNA, 25 bp, Homo sapien
tattcccctagggactaggcagcct

SEQ ID NO: 5006688 - DNA, 25 bp, Homo sapien
tcttccatgtaaagttatcctccaa

SEQ ID NO: 5006689 - DNA, 25 bp, Homo sapien
tactagttctaagatcttccatgta

SEQ ID NO: 5006690 - DNA, 25 bp, Homo sapien
taagatcttccatgtaaagttatcc

SEQ ID NO: 5006691 - DNA, 25 bp, Homo sapien
gcccagcactgccttatcagcaact

SEQ ID NO: 5006692 - DNA, 25 bp, Homo sapien
gctttccacccaaagcgcatcacgg

SEQ ID NO: 5006693 - DNA, 25 bp, Homo sapien
gtgctcccttcacgcggctttccac

SEQ ID NO: 5006694 - DNA, 25 bp, Homo sapien
ctggctgcgccgtgctcccttcacg

SEQ ID NO: 5006695 - DNA, 25 bp, Homo sapien
agcccctgacgctagccccttcgcc

SEQ ID NO: 5006696 - DNA, 25 bp, Homo sapien
cccacccccagaggcgtcgggcgcg

SEQ ID NO: 5006697 - DNA, 25 bp, Homo sapien
cctcggcctggagcgctttcctggg

SEQ ID NO: 5006698 - DNA, 25 bp, Homo sapien
tccgccggcgactcccgcgaagtcc

SEQ ID NO: 5006699 - DNA, 25 bp, Homo sapien
gtcccggctcggatcgcccgccgcg

SEQ ID NO: 5006700 - DNA, 25 bp, Homo sapien
ccggctggaagtcggccgggaggag

SEQ ID NO: 5006701 - DNA, 25 bp, Homo sapien
gaggacggcgaggagatggactcgg

SEQ ID NO: 5006702 - DNA, 25 bp, Homo sapien
gctggaagtcggccgggaggaggga

SEQ ID NO: 5006703 - DNA, 25 bp, Homo sapien
cggctggaagtcggccgggaggagg

SEQ ID NO: 5006704 - DNA, 25 bp, Homo sapien
tataactcatgtaccataaagctca

SEQ ID NO: 5006705 - DNA, 25 bp, Homo sapien
tgtgaatctgagaaggccaaatgct

SEQ ID NO: 5006706 - DNA, 25 bp, Homo sapien
gccaaatgctaaactgggaaagcca

SEQ ID NO: 5006707 - DNA, 25 bp, Homo sapien
ccaagaagaacctaatttccactgc

SEQ ID NO: 5006708 - DNA, 25 bp, Homo sapien
gccaggcatatactgtgaaagcagg

SEQ ID NO: 5006709 - DNA, 25 bp, Homo sapien
tgaggatttcctaatacaggcagaa

SEQ ID NO: 5006710 - DNA, 25 bp, Homo sapien
tctgcaagaatactaaagtggcttc

SEQ ID NO: 5006711 - DNA, 25 bp, Homo sapien
ctagaagactaagtacatttgaggc

SEQ ID NO: 5006712 - DNA, 25 bp, Homo sapien
cagttaactgtttgagagggtcaga

SEQ ID NO: 5006713 - DNA, 25 bp, Homo sapien
tgctgttgttgttccataaggaaaa

SEQ ID NO: 5006714 - DNA, 25 bp, Homo sapien
ttaaagaagatgtgaccagcctggg

SEQ ID NO: 5006715 - DNA, 25 bp, Homo sapien
cagctctcttggtgggatgtaactc

SEQ ID NO: 5006716 - DNA, 25 bp, Homo sapien
gagaagatgtggatggcaccagtga

SEQ ID NO: 5006717 - DNA, 25 bp, Homo sapien
gggtcctcgccaatcatatattcta

SEQ ID NO: 5006718 - DNA, 25 bp, Homo sapien
catatattctagaacattcctgggc

SEQ ID NO: 5006719 - DNA, 25 bp, Homo sapien
gctgccaacgttcccagtcctgaag

SEQ ID NO: 5006720 - DNA, 25 bp, Homo sapien
gccctgtttttgctgatagtgccat

SEQ ID NO: 5006721 - DNA, 25 bp, Homo sapien
tgtcagtgggctgccctgtttttgc

SEQ ID NO: 5006722 - DNA, 25 bp, Homo sapien
gtttttgctgatagtgccatgttag

SEQ ID NO: 5006723 - DNA, 25 bp, Homo sapien
agtgccatgttaggaagattcagcc

SEQ ID NO: 5006724 - DNA, 25 bp, Homo sapien
agcaggtggcgttgaaccttctcag

SEQ ID NO: 5006725 - DNA, 25 bp, Homo sapien
cccggatttgacactggtcaggaag

SEQ ID NO: 5006726 - DNA, 25 bp, Homo sapien
caggaagcaggtggcgttgaacctt

SEQ ID NO: 5006727 - DNA, 25 bp, Homo sapien
ggtctgttcagggactgtaatggcc

SEQ ID NO: 5006728 - DNA, 25 bp, Homo sapien
ttctcatgctgggtggttctttcca

SEQ ID NO: 5006729 - DNA, 25 bp, Homo sapien
gctgcagtgaaggtcatcccttaaa

SEQ ID NO: 5006730 - DNA, 25 bp, Homo sapien
atttgatgggcccattgttctcatg

SEQ ID NO: 5006731 - DNA, 25 bp, Homo sapien
cagtgaaggtcatcccttaaaggat

SEQ ID NO: 5006732 - DNA, 25 bp, Homo sapien
aatccaatatcaaggggctcacatc

SEQ ID NO: 5006733 - DNA, 25 bp, Homo sapien
aatatcaaggggctcacatctggca

SEQ ID NO: 5006734 - DNA, 25 bp, Homo sapien
tatcaaggggctcacatctggcaag

SEQ ID NO: 5006735 - DNA, 25 bp, Homo sapien
tcaaggggctcacatctggcaaggg

SEQ ID NO: 5006736 - DNA, 25 bp, Homo sapien
cttcttctctcccaagcaagttgac

SEQ ID NO: 5006737 - DNA, 25 bp, Homo sapien
ccttcttctctcccaagcaagttga

SEQ ID NO: 5006738 - DNA, 25 bp, Homo sapien
tgccttcttctctcccaagcaagtt

SEQ ID NO: 5006739 - DNA, 25 bp, Homo sapien
gccttcttctctcccaagcaagttg

SEQ ID NO: 5006740 - DNA, 25 bp, Homo sapien
tcttgccggatctgtcctgacaacc

SEQ ID NO: 5006741 - DNA, 25 bp, Homo sapien
ggatctgtcctgacaaccgcagtaa

SEQ ID NO: 5006742 - DNA, 25 bp, Homo sapien
gagcttcttcacatcttgccggatc

SEQ ID NO: 5006743 - DNA, 25 bp, Homo sapien
tgacaaccgcagtaaacaccaagtg

SEQ ID NO: 5006744 - DNA, 25 bp, Homo sapien
ctttataggagagagggcggctgtc

SEQ ID NO: 5006745 - DNA, 25 bp, Homo sapien
tgtcaaggagcggtccatactggga

SEQ ID NO: 5006746 - DNA, 25 bp, Homo sapien
cacacaaacgtagcttgcatctgcc

SEQ ID NO: 5006747 - DNA, 25 bp, Homo sapien
gccaccaatgtgaagctgaccagga

SEQ ID NO: 5006748 - DNA, 25 bp, Homo sapien
tcccctgtcccggagaggccttctc

SEQ ID NO: 5006749 - DNA, 25 bp, Homo sapien
catgctcatgtcttttagtattgac

SEQ ID NO: 5006750 - DNA, 25 bp, Homo sapien
cccctgtcccggagaggccttctct

SEQ ID NO: 5006751 - DNA, 25 bp, Homo sapien
ctgcgatcctggtacctggaaccac

SEQ ID NO: 5006752 - DNA, 25 bp, Homo sapien
cacctgtgatcaacagcttctcttt

SEQ ID NO: 5006753 - DNA, 25 bp, Homo sapien
accccaatcctaatggcacctgtga

SEQ ID NO: 5006754 - DNA, 25 bp, Homo sapien
cagaatgcacctgcgatcctggtac

SEQ ID NO: 5006755 - DNA, 25 bp, Homo sapien
tcctttctccggccttccattggag

SEQ ID NO: 5006756 - DNA, 25 bp, Homo sapien
tccggccttccattggagatcggaa

SEQ ID NO: 5006757 - DNA, 25 bp, Homo sapien
ggccttccattggagatcggaaagt

SEQ ID NO: 5006758 - DNA, 25 bp, Homo sapien
cacacaggtaagaagtggttttcct

SEQ ID NO: 5006759 - DNA, 25 bp, Homo sapien
cctctttgtcagagctcggttagtg

SEQ ID NO: 5006760 - DNA, 25 bp, Homo sapien
tttgtcagagctcggttagtgagtg

SEQ ID NO: 5006761 - DNA, 25 bp, Homo sapien
tagtgagtgggacactaaaatagca

SEQ ID NO: 5006762 - DNA, 25 bp, Homo sapien
agctcggttagtgagtgggacacta

SEQ ID NO: 5006763 - DNA, 25 bp, Homo sapien
tctgtcaaagttgaacgccatccac

SEQ ID NO: 5006764 - DNA, 25 bp, Homo sapien
gcttctgtcaaagttgaacgccatc

SEQ ID NO: 5006765 - DNA, 25 bp, Homo sapien
tcggcttctgtcaaagttgaacgcc

SEQ ID NO: 5006766 - DNA, 25 bp, Homo sapien
cctcggcttctgtcaaagttgaacg

SEQ ID NO: 5006767 - DNA, 25 bp, Homo sapien
gcgtgccttccacagaggcgtgctc

SEQ ID NO: 5006768 - DNA, 25 bp, Homo sapien
agaggcgtgccttccacagaggcgt

SEQ ID NO: 5006769 - DNA, 25 bp, Homo sapien
acagaggcgtgctccgcagcgccgc

SEQ ID NO: 5006770 - DNA, 25 bp, Homo sapien
acagaggcgtgccttccacagaggc

SEQ ID NO: 5006771 - DNA, 25 bp, Homo sapien
atcttcattcccatctcctctggaa

SEQ ID NO: 5006772 - DNA, 25 bp, Homo sapien
tctcctctggaaatggcacacacac

SEQ ID NO: 5006773 - DNA, 25 bp, Homo sapien
cttcattcccatctcctctggaaat

SEQ ID NO: 5006774 - DNA, 25 bp, Homo sapien
tcaatctatcttcattcccatctcc

SEQ ID NO: 5006775 - DNA, 25 bp, Homo sapien
tcaggaagggtcttctcaagccctg

SEQ ID NO: 5006776 - DNA, 25 bp, Homo sapien
cctatgattgtgttctggtgaagcc

SEQ ID NO: 5006777 - DNA, 25 bp, Homo sapien
gcctgggcttaaactgagaactgga

SEQ ID NO: 5006778 - DNA, 25 bp, Homo sapien
ggaaagagccttccggaatgaagct

SEQ ID NO: 5006779 - DNA, 25 bp, Homo sapien
gagaagcactcaccagcagagttgt

SEQ ID NO: 5006780 - DNA, 25 bp, Homo sapien
aagcactcaccagcagagttgtggg

SEQ ID NO: 5006781 - DNA, 25 bp, Homo sapien
ccagagaagcactcaccagcagagt

SEQ ID NO: 5006782 - DNA, 25 bp, Homo sapien
gaagcactcaccagcagagttgtgg

SEQ ID NO: 5006783 - DNA, 25 bp, Homo sapien
ggagacaccacacgattgtatctta

SEQ ID NO: 5006784 - DNA, 25 bp, Homo sapien
gtgtggatcaggagacaccacacga

SEQ ID NO: 5006785 - DNA, 25 bp, Homo sapien
cacacgattgtatcttacacttggg

SEQ ID NO: 5006786 - DNA, 25 bp, Homo sapien
tggatcaggagacaccacacgattg

SEQ ID NO: 5006787 - DNA, 25 bp, Homo sapien
tgtcagttttcttctccacgttctt

SEQ ID NO: 5006788 - DNA, 25 bp, Homo sapien
tgaggacctctgtgtatttgtcagt

SEQ ID NO: 5006789 - DNA, 25 bp, Homo sapien
gtgggtcttgaggacctctgtgtat

SEQ ID NO: 5006790 - DNA, 25 bp, Homo sapien
tcagaccaggagtctgtgggtcttg

SEQ ID NO: 5006791 - DNA, 25 bp, Homo sapien
cagcctgtttccgtagcctcatgag

SEQ ID NO: 5006792 - DNA, 25 bp, Homo sapien
gctgtttcttcttccggtagtggat

SEQ ID NO: 5006793 - DNA, 25 bp, Homo sapien
catgagctgtttcttcttccggtag

SEQ ID NO: 5006794 - DNA, 25 bp, Homo sapien
tcagcctgtttccgtagcctcatga

SEQ ID NO: 5006795 - DNA, 25 bp, Homo sapien
ttcctcttctccagggtagctgtca

SEQ ID NO: 5006796 - DNA, 25 bp, Homo sapien
ccttcctcttctccagggtagctgt

SEQ ID NO: 5006797 - DNA, 25 bp, Homo sapien
ctcttctccagggtagctgtcactg

SEQ ID NO: 5006798 - DNA, 25 bp, Homo sapien
tcctcttctccagggtagctgtcac

SEQ ID NO: 5006799 - DNA, 25 bp, Homo sapien
cttgtcggcttcagacgcacgacct

SEQ ID NO: 5006800 - DNA, 25 bp, Homo sapien
cctcgtgcgccaggcgccccagata

SEQ ID NO: 5006801 - DNA, 25 bp, Homo sapien
ccagccaacctcgtgcgccaggcgc

SEQ ID NO: 5006802 - DNA, 25 bp, Homo sapien
tttcttgtcggcttcagacgcacga

SEQ ID NO: 5006803 - DNA, 25 bp, Homo sapien
ctttcttgtcgtagagcggtgagat

SEQ ID NO: 5006804 - DNA, 25 bp, Homo sapien
ccgctttcttgtcgtagagcggtga

SEQ ID NO: 5006805 - DNA, 25 bp, Homo sapien
cgctttcttgtcgtagagcggtgag

SEQ ID NO: 5006806 - DNA, 25 bp, Homo sapien
gctttcttgtcgtagagcggtgaga

SEQ ID NO: 5006807 - DNA, 25 bp, Homo sapien
ctaggacggcctggccccgcttggt

SEQ ID NO: 5006808 - DNA, 25 bp, Homo sapien
gtctaggacggcctggccccgcttg

SEQ ID NO: 5006809 - DNA, 25 bp, Homo sapien
tctaggacggcctggccccgcttgg

SEQ ID NO: 5006810 - DNA, 25 bp, Homo sapien
tcgcacggtccaccggaagatgcag

SEQ ID NO: 5006811 - DNA, 25 bp, Homo sapien
gtgttaggagcctcgcgaagggttg

SEQ ID NO: 5006812 - DNA, 25 bp, Homo sapien
ccggaagtgttaggagcctcgcgaa

SEQ ID NO: 5006813 - DNA, 25 bp, Homo sapien
ggtccggaagtgttaggagcctcgc

SEQ ID NO: 5006814 - DNA, 25 bp, Homo sapien
tgttaggagcctcgcgaagggttgg

SEQ ID NO: 5006815 - DNA, 25 bp, Homo sapien
aatgttgatgccctcacagcgtacg

SEQ ID NO: 5006816 - DNA, 25 bp, Homo sapien
cgaccaccaccttccagcccaacat

SEQ ID NO: 5006817 - DNA, 25 bp, Homo sapien
tgttgatgccctcacagcgtacgac

SEQ ID NO: 5006818 - DNA, 25 bp, Homo sapien
accaccaccttccagcccaacatta

SEQ ID NO: 5006819 - DNA, 25 bp, Homo sapien
tcgaccatggaggactgggacctgc

SEQ ID NO: 5006820 - DNA, 25 bp, Homo sapien
gatggcctcgaccatggaggactgg

SEQ ID NO: 5006821 - DNA, 25 bp, Homo sapien
tggcctcgaccatggaggactggga

SEQ ID NO: 5006822 - DNA, 25 bp, Homo sapien
gcctcgaccatggaggactgggacc

SEQ ID NO: 5006823 - DNA, 25 bp, Homo sapien
tctctggaggaatagaagttcgtgt

SEQ ID NO: 5006824 - DNA, 25 bp, Homo sapien
tcagatgagctatgggtcgaatcct

SEQ ID NO: 5006825 - DNA, 25 bp, Homo sapien
cagagcttgttaaacggattcagat

SEQ ID NO: 5006826 - DNA, 25 bp, Homo sapien
cgaatcctgttcgacccatatcgag

SEQ ID NO: 5006827 - DNA, 25 bp, Homo sapien
gtgaagtttcagcagtggtttgcca

SEQ ID NO: 5006828 - DNA, 25 bp, Homo sapien
ctcagctggtctggagttatgggaa

SEQ ID NO: 5006829 - DNA, 25 bp, Homo sapien
gaacatcgtcattttgccatagagc

SEQ ID NO: 5006830 - DNA, 25 bp, Homo sapien
aaacaccttataattgctcagctgg

SEQ ID NO: 5006831 - DNA, 25 bp, Homo sapien
taactgcttgtatcattatgagact

SEQ ID NO: 5006832 - DNA, 25 bp, Homo sapien
gcttgtatcattatgagactatagc

SEQ ID NO: 5006833 - DNA, 25 bp, Homo sapien
ccatgcatataactgcttgtatcat

SEQ ID NO: 5006834 - DNA, 25 bp, Homo sapien
gtatcattatgagactatagcagca

SEQ ID NO: 5006835 - DNA, 25 bp, Homo sapien
cagcttttggttccttccgataatt

SEQ ID NO: 5006836 - DNA, 25 bp, Homo sapien
aaagtctcatgatgtattctgtggt

SEQ ID NO: 5006837 - DNA, 25 bp, Homo sapien
ccttccgataattgctaagctgtat

SEQ ID NO: 5006838 - DNA, 25 bp, Homo sapien
catgatgtattctgtggtgactttc

SEQ ID NO: 5006839 - DNA, 25 bp, Homo sapien
aggaattgtcttcctgtactaggag

SEQ ID NO: 5006840 - DNA, 25 bp, Homo sapien
tgtactaggagttacccacatcact

SEQ ID NO: 5006841 - DNA, 25 bp, Homo sapien
atcactacccatggtgctgacagag

SEQ ID NO: 5006842 - DNA, 25 bp, Homo sapien
tcttctcaggcatgaggaattgtct

SEQ ID NO: 5006843 - DNA, 25 bp, Homo sapien
tgtttctcgtaggatcaaatggaca

SEQ ID NO: 5006844 - DNA, 25 bp, Homo sapien
ctgtttctcgtaggatcaaatggac

SEQ ID NO: 5006845 - DNA, 25 bp, Homo sapien
ttctcgtaggatcaaatggacaaaa

SEQ ID NO: 5006846 - DNA, 25 bp, Homo sapien
gtttctcgtaggatcaaatggacaa

SEQ ID NO: 5006847 - DNA, 25 bp, Homo sapien
tgtggatcaagtagccaggagacca

SEQ ID NO: 5006848 - DNA, 25 bp, Homo sapien
tcagtggaagcttgtaaagcaggtt

SEQ ID NO: 5006849 - DNA, 25 bp, Homo sapien
tattttcattgcatagcgaagagcc

SEQ ID NO: 5006850 - DNA, 25 bp, Homo sapien
tctaccagaagtttcagtggaagct

SEQ ID NO: 5006851 - DNA, 25 bp, Homo sapien
gggaaatccattggctgacaccgtt

SEQ ID NO: 5006852 - DNA, 25 bp, Homo sapien
aatccattggctgacaccgttgacc

SEQ ID NO: 5006853 - DNA, 25 bp, Homo sapien
tggctgacaccgttgacctcttcaa

SEQ ID NO: 5006854 - DNA, 25 bp, Homo sapien
gacctcttcaacttactgcatagta

SEQ ID NO: 5006855 - DNA, 25 bp, Homo sapien
aatggagaagaatttaactgcttcc

SEQ ID NO: 5006856 - DNA, 25 bp, Homo sapien
tggataaccactcttcttgcctgaa

SEQ ID NO: 5006857 - DNA, 25 bp, Homo sapien
ttgcctgaacaaatggagaagaatt

SEQ ID NO: 5006858 - DNA, 25 bp, Homo sapien
cactcttcttgcctgaacaaatgga

SEQ ID NO: 5006859 - DNA, 25 bp, Homo sapien
atttactgagggcatactgtttgct

SEQ ID NO: 5006860 - DNA, 25 bp, Homo sapien
aagcagtgatgatcccaaataaaac

SEQ ID NO: 5006861 - DNA, 25 bp, Homo sapien
tcagaaaatactgtatgcaggcaga

SEQ ID NO: 5006862 - DNA, 25 bp, Homo sapien
ctgaaataagcattgggtgatggca

SEQ ID NO: 5006863 - DNA, 25 bp, Homo sapien
tctttatcagatccacaggttttgc

SEQ ID NO: 5006864 - DNA, 25 bp, Homo sapien
tccacagtgggtctgagcaccacag

SEQ ID NO: 5006865 - DNA, 25 bp, Homo sapien
tcatctgttgagttttgtaagctgt

SEQ ID NO: 5006866 - DNA, 25 bp, Homo sapien
gagaattcttagcattcacatttag

SEQ ID NO: 5006867 - DNA, 25 bp, Homo sapien
gactgaatctgcgaagtgctaacaa

SEQ ID NO: 5006868 - DNA, 25 bp, Homo sapien
caggctgtatcttcgttgtgtccac

SEQ ID NO: 5006869 - DNA, 25 bp, Homo sapien
tatcccaggctctagctttaagctg

SEQ ID NO: 5006870 - DNA, 25 bp, Homo sapien
gaaacagtggatccctatcccaggc

SEQ ID NO: 5006871 - DNA, 25 bp, Homo sapien
gaatgccctttaaacaagttcaatg

SEQ ID NO: 5006872 - DNA, 25 bp, Homo sapien
cctttaaacaagttcaatgatacag

SEQ ID NO: 5006873 - DNA, 25 bp, Homo sapien
tttgcacttgtttggttgtggattg

SEQ ID NO: 5006874 - DNA, 25 bp, Homo sapien
tacaatggtatttgcacttgtttgg

SEQ ID NO: 5006875 - DNA, 25 bp, Homo sapien
taacctcttcgcgtgaaaggcaccg

SEQ ID NO: 5006876 - DNA, 25 bp, Homo sapien
caatgcatcaaaggaggttgtgtcc

SEQ ID NO: 5006877 - DNA, 25 bp, Homo sapien
tcatcacagcaataagacactcggg

SEQ ID NO: 5006878 - DNA, 25 bp, Homo sapien
taaacacacaatcttcggagccgct

SEQ ID NO: 5006879 - DNA, 25 bp, Homo sapien
catgatgagctttcgcgagggaccc

SEQ ID NO: 5006880 - DNA, 25 bp, Homo sapien
tggcgaaggagagactgtccagcac

SEQ ID NO: 5006881 - DNA, 25 bp, Homo sapien
tggtgccaaaagacccctgcagatg

SEQ ID NO: 5006882 - DNA, 25 bp, Homo sapien
gtcttatgtcttgcggctggtgcca

SEQ ID NO: 5006883 - DNA, 25 bp, Homo sapien
ggctgtaattgagtagggtagtaaa

SEQ ID NO: 5006884 - DNA, 25 bp, Homo sapien
cattttcctattgttaacggattga

SEQ ID NO: 5006885 - DNA, 25 bp, Homo sapien
ttgttaacggattgactacaggtgt

SEQ ID NO: 5006886 - DNA, 25 bp, Homo sapien
tcagttattggaaaagggctgtaat

SEQ ID NO: 5006887 - DNA, 25 bp, Homo sapien
gatgtcagcattgtggtaagcggaa

SEQ ID NO: 5006888 - DNA, 25 bp, Homo sapien
tcaaagctcataagaacatcctggt

SEQ ID NO: 5006889 - DNA, 25 bp, Homo sapien
cctggttgcaggcagccgtttcttt

SEQ ID NO: 5006890 - DNA, 25 bp, Homo sapien
acttctgcgacaactaaatgaacag

SEQ ID NO: 5006891 - DNA, 25 bp, Homo sapien
tatggtgtttgtgtagactgtgcag

SEQ ID NO: 5006892 - DNA, 25 bp, Homo sapien
tcgggatgaagaatacgaggagaat

SEQ ID NO: 5006893 - DNA, 25 bp, Homo sapien
ggatacagaattccctcgggatgaa

SEQ ID NO: 5006894 - DNA, 25 bp, Homo sapien
gatcagaatgatccctctcgatggg

SEQ ID NO: 5006895 - DNA, 25 bp, Homo sapien
gaacttatgattggtctcagaggta

SEQ ID NO: 5006896 - DNA, 25 bp, Homo sapien
tacacatttggcgaagttgtctctt

SEQ ID NO: 5006897 - DNA, 25 bp, Homo sapien
ttttaccggaaacagaattgacaga

SEQ ID NO: 5006898 - DNA, 25 bp, Homo sapien
tgtttcatgatctcgagggactgcc

SEQ ID NO: 5006899 - DNA, 25 bp, Homo sapien
tactctttcagggaggctctattgc

SEQ ID NO: 5006900 - DNA, 25 bp, Homo sapien
tataaggtaggtgctaattgtctcc

SEQ ID NO: 5006901 - DNA, 25 bp, Homo sapien
ccccagtttttgtgccgttcagtca

SEQ ID NO: 5006902 - DNA, 25 bp, Homo sapien
tgacagagctcgaatttgaccacgt

SEQ ID NO: 5006903 - DNA, 25 bp, Homo sapien
ttcactgtttccactaccagcatgc

SEQ ID NO: 5006904 - DNA, 25 bp, Homo sapien
tgcccaagaatgtcatagccacagg

SEQ ID NO: 5006905 - DNA, 25 bp, Homo sapien
tatagctgagaatttagtggtttga

SEQ ID NO: 5006906 - DNA, 25 bp, Homo sapien
tgccctgcccaagaatgtcatagcc

SEQ ID NO: 5006907 - DNA, 25 bp, Homo sapien
cctgttaggtgcaagactttttgaa

SEQ ID NO: 5006908 - DNA, 25 bp, Homo sapien
gcaagactttttgaatgactcatca

SEQ ID NO: 5006909 - DNA, 25 bp, Homo sapien
taggtgcaagactttttgaatgact

SEQ ID NO: 5006910 - DNA, 25 bp, Homo sapien
agtttttcctgttaggtgcaagact

SEQ ID NO: 5006911 - DNA, 25 bp, Homo sapien
gatttgacattattgggagagcctc

SEQ ID NO: 5006912 - DNA, 25 bp, Homo sapien
taaggtcagctacacatgcctcctg

SEQ ID NO: 5006913 - DNA, 25 bp, Homo sapien
ttaaccaggattagtagcccacatg

SEQ ID NO: 5006914 - DNA, 25 bp, Homo sapien
gcaggactggttttcaagcacgcta

SEQ ID NO: 5006915 - DNA, 25 bp, Homo sapien
gtgagcccagaccgtgccactgtac

SEQ ID NO: 5006916 - DNA, 25 bp, Homo sapien
ggcaggagaatggcttgaacctggg

SEQ ID NO: 5006917 - DNA, 25 bp, Homo sapien
taattccagctacttgggaggctga

SEQ ID NO: 5006918 - DNA, 25 bp, Homo sapien
ttagcagggcgtggtagtgggtgcc

SEQ ID NO: 5006919 - DNA, 25 bp, Homo sapien
gctttaacaagttcaatcgctttcc

SEQ ID NO: 5006920 - DNA, 25 bp, Homo sapien
cgctttccacgctacctacagaggg

SEQ ID NO: 5006921 - DNA, 25 bp, Homo sapien
caaattcagatttttagagagtatc

SEQ ID NO: 5006922 - DNA, 25 bp, Homo sapien
caagttcaatcgctttccacgctac

SEQ ID NO: 5006923 - DNA, 25 bp, Homo sapien
cagaaggctgatcgcgcagagcctg

SEQ ID NO: 5006924 - DNA, 25 bp, Homo sapien
gcctggtgcaaacgggaagcaattc

SEQ ID NO: 5006925 - DNA, 25 bp, Homo sapien
cactttgagaactggtcgggcagaa

SEQ ID NO: 5006926 - DNA, 25 bp, Homo sapien
ccatggacgcagctgggcactttga

SEQ ID NO: 5006927 - DNA, 25 bp, Homo sapien
tttgtttctttcatgctccctttcc

SEQ ID NO: 5006928 - DNA, 25 bp, Homo sapien
tttcctcaatcacccactgctgtgt

SEQ ID NO: 5006929 - DNA, 25 bp, Homo sapien
aggccacctctgttccaaatgttcc

SEQ ID NO: 5006930 - DNA, 25 bp, Homo sapien
tgttgttcccttcgcccagtccagg

SEQ ID NO: 5006931 - DNA, 25 bp, Homo sapien
ttctctggtgaaaacactccaggcg

SEQ ID NO: 5006932 - DNA, 25 bp, Homo sapien
tcctctcgccaagggagagagccct

SEQ ID NO: 5006933 - DNA, 25 bp, Homo sapien
gcaagccttagctcggaattccctc

SEQ ID NO: 5006934 - DNA, 25 bp, Homo sapien
ttgtgtaacggaaaatattctctgg

SEQ ID NO: 5006935 - DNA, 25 bp, Homo sapien
ggtggatcttgggcagaacagctcc

SEQ ID NO: 5006936 - DNA, 25 bp, Homo sapien
tggtggatcttgggcagaacagctc

SEQ ID NO: 5006937 - DNA, 25 bp, Homo sapien
tatcaggatgaaggtaggtggagcc

SEQ ID NO: 5006938 - DNA, 25 bp, Homo sapien
tcaggatgaaggtaggtggagccag

SEQ ID NO: 5006939 - DNA, 25 bp, Homo sapien
gatgaaggtaggtggagccagacag

SEQ ID NO: 5006940 - DNA, 25 bp, Homo sapien
ctgcagtatcaggatgaaggtaggt

SEQ ID NO: 5006941 - DNA, 25 bp, Homo sapien
gaaatccacttagtatattgtgctc

SEQ ID NO: 5006942 - DNA, 25 bp, Homo sapien
ctgcaacacgaggttgatgagtcgg

SEQ ID NO: 5006943 - DNA, 25 bp, Homo sapien
aggtactgcaacacgaggttgatga

SEQ ID NO: 5006944 - DNA, 25 bp, Homo sapien
gcagaaatccacttagtatattgtg

SEQ ID NO: 5006945 - DNA, 25 bp, Homo sapien
tgatagctaaggcaaccctggacat

SEQ ID NO: 5006946 - DNA, 25 bp, Homo sapien
ttggtgacacctgcttgtgaccccg

SEQ ID NO: 5006947 - DNA, 25 bp, Homo sapien
gccttagaggattggctgccccttt

SEQ ID NO: 5006948 - DNA, 25 bp, Homo sapien
ttagactctctgacccttgaagacg

SEQ ID NO: 5006949 - DNA, 25 bp, Homo sapien
tgataaatggcacttaactgatttt

SEQ ID NO: 5006950 - DNA, 25 bp, Homo sapien
ttaagaaagagaccaagctgcattc

SEQ ID NO: 5006951 - DNA, 25 bp, Homo sapien
agaaagagaccaagctgcattcttc

SEQ ID NO: 5006952 - DNA, 25 bp, Homo sapien
cttagaatgtctattcagttgataa

SEQ ID NO: 5006953 - DNA, 25 bp, Homo sapien
ccaatctgagaccatatgtgagttt

SEQ ID NO: 5006954 - DNA, 25 bp, Homo sapien
accaatctgagaccatatgtgagtt

SEQ ID NO: 5006955 - DNA, 25 bp, Homo sapien
caccaatctgagaccatatgtgagt

SEQ ID NO: 5006956 - DNA, 25 bp, Homo sapien
ccaccaatctgagaccatatgtgag

SEQ ID NO: 5006957 - DNA, 25 bp, Homo sapien
tcgaaggccgaaaaacaagacattg

SEQ ID NO: 5006958 - DNA, 25 bp, Homo sapien
ctcgaaggccgaaaaacaagacatt

SEQ ID NO: 5006959 - DNA, 25 bp, Homo sapien
tctccaattctgtgacatttcagtg

SEQ ID NO: 5006960 - DNA, 25 bp, Homo sapien
acatttcagtgccttgaaagcctga

SEQ ID NO: 5006961 - DNA, 25 bp, Homo sapien
ctgtgacatttcagtgccttgaaag

SEQ ID NO: 5006962 - DNA, 25 bp, Homo sapien
tttcagtgccttgaaagcctgatac

SEQ ID NO: 5006963 - DNA, 25 bp, Homo sapien
ctgaaagcactgccgccacaccacg

SEQ ID NO: 5006964 - DNA, 25 bp, Homo sapien
ccacgatacaagttttgaaatccaa

SEQ ID NO: 5006965 - DNA, 25 bp, Homo sapien
cacgatacaagttttgaaatccaac

SEQ ID NO: 5006966 - DNA, 25 bp, Homo sapien
acaccacgggctgcaaactctggag

SEQ ID NO: 5006967 - DNA, 25 bp, Homo sapien
tattgcatcacgagttttgatgcta

SEQ ID NO: 5006968 - DNA, 25 bp, Homo sapien
agtattgcatcacgagttttgatgc

SEQ ID NO: 5006969 - DNA, 25 bp, Homo sapien
catcacgagttttgatgctatacag

SEQ ID NO: 5006970 - DNA, 25 bp, Homo sapien
ctgaagtattgcatcacgagttttg

SEQ ID NO: 5006971 - DNA, 25 bp, Homo sapien
tattagtattggcagcctcttttca

SEQ ID NO: 5006972 - DNA, 25 bp, Homo sapien
gatattagtattggcagcctctttt

SEQ ID NO: 5006973 - DNA, 25 bp, Homo sapien
gaagatattagtattggcagcctct

SEQ ID NO: 5006974 - DNA, 25 bp, Homo sapien
agatattagtattggcagcctcttt

SEQ ID NO: 5006975 - DNA, 25 bp, Homo sapien
ttctgactctctactgccaaaatcc

SEQ ID NO: 5006976 - DNA, 25 bp, Homo sapien
taggcaatcactgtcaatgtgggtc

SEQ ID NO: 5006977 - DNA, 25 bp, Homo sapien
tgactttctcgaaaccacagaggtg

SEQ ID NO: 5006978 - DNA, 25 bp, Homo sapien
catagaatatcttgttgcagctcag

SEQ ID NO: 5006979 - DNA, 25 bp, Homo sapien
gcacctcctgcagggaggaacgtcc

SEQ ID NO: 5006980 - DNA, 25 bp, Homo sapien
tcctgcagggaggaacgtccctggg

SEQ ID NO: 5006981 - DNA, 25 bp, Homo sapien
cttgaccgcacctcctgcagggagg

SEQ ID NO: 5006982 - DNA, 25 bp, Homo sapien
acctcctgcagggaggaacgtccct

SEQ ID NO: 5006983 - DNA, 25 bp, Homo sapien
caggtgtgagcctactattaatcag

SEQ ID NO: 5006984 - DNA, 25 bp, Homo sapien
gagcctactattaatcagcacggga

SEQ ID NO: 5006985 - DNA, 25 bp, Homo sapien
cacccgattgggatagcgcactaga

SEQ ID NO: 5006986 - DNA, 25 bp, Homo sapien
acacccgattgggatagcgcactag

SEQ ID NO: 5006987 - DNA, 25 bp, Homo sapien
cagctctgtgggtaatggtggccac

SEQ ID NO: 5006988 - DNA, 25 bp, Homo sapien
ttaaggtccagcttcgacgctacca

SEQ ID NO: 5006989 - DNA, 25 bp, Homo sapien
taccatttggattcaagctagcgga

SEQ ID NO: 5006990 - DNA, 25 bp, Homo sapien
gtacgctgtgtgcagagacgcgccc

SEQ ID NO: 5006991 - DNA, 25 bp, Homo sapien
atagcacttcattgtttatatatac

SEQ ID NO: 5006992 - DNA, 25 bp, Homo sapien
tgaatagcacttcattgtttatata

SEQ ID NO: 5006993 - DNA, 25 bp, Homo sapien
gaatagcacttcattgtttatatat

SEQ ID NO: 5006994 - DNA, 25 bp, Homo sapien
agcacttcattgtttatatatacca

SEQ ID NO: 5006995 - DNA, 25 bp, Homo sapien
tctcttaaattatgacactggtttt

SEQ ID NO: 5006996 - DNA, 25 bp, Homo sapien
catcatatggtggataaagaagtac

SEQ ID NO: 5006997 - DNA, 25 bp, Homo sapien
gacctgtctgtcttgggaagaatta

SEQ ID NO: 5006998 - DNA, 25 bp, Homo sapien
tcactgtctcccagaacgcagaaat

SEQ ID NO: 5006999 - DNA, 25 bp, Homo sapien
tagtgcccagtgagatgcccgtgtt

SEQ ID NO: 5007000 - DNA, 25 bp, Homo sapien
cattaggtctcaaccgtgtgcaggg

SEQ ID NO: 5007001 - DNA, 25 bp, Homo sapien
cccgtgttgttcagagcattaggtc

SEQ ID NO: 5007002 - DNA, 25 bp, Homo sapien
tcagcaaacttgtgagagactcatg

SEQ ID NO: 5007003 - DNA, 25 bp, Homo sapien
aacatttggtggtctcttgatgccc

SEQ ID NO: 5007004 - DNA, 25 bp, Homo sapien
gatatcagactagattggcaacacc

SEQ ID NO: 5007005 - DNA, 25 bp, Homo sapien
cagtgtagcaaatccttaactctgg

SEQ ID NO: 5007006 - DNA, 25 bp, Homo sapien
tacagtcagacaggtattcagaaat

SEQ ID NO: 5007007 - DNA, 25 bp, Homo sapien
taagtaccaggtttagaaatgcgtg

SEQ ID NO: 5007008 - DNA, 25 bp, Homo sapien
aagtaccaggtttagaaatgcgtgt

SEQ ID NO: 5007009 - DNA, 25 bp, Homo sapien
agtaccaggtttagaaatgcgtgtt

SEQ ID NO: 5007010 - DNA, 25 bp, Homo sapien
ttcaggctgagtaatgtagtaaagc

SEQ ID NO: 5007011 - DNA, 25 bp, Homo sapien
tctttatttccacattgtcagatga

SEQ ID NO: 5007012 - DNA, 25 bp, Homo sapien
tcaggctgagtaatgtagtaaagca

SEQ ID NO: 5007013 - DNA, 25 bp, Homo sapien
ttttcaggctgagtaatgtagtaaa

SEQ ID NO: 5007014 - DNA, 25 bp, Homo sapien
gaaactccgctgtatatccctgagg

SEQ ID NO: 5007015 - DNA, 25 bp, Homo sapien
gaaaaaatgaccgtaggccactcgc

SEQ ID NO: 5007016 - DNA, 25 bp, Homo sapien
tcatgaaccctttgggacctagcga

SEQ ID NO: 5007017 - DNA, 25 bp, Homo sapien
taaacattggacagcattgccacct

SEQ ID NO: 5007018 - DNA, 25 bp, Homo sapien
tcacactctggcagccgctcttcct

SEQ ID NO: 5007019 - DNA, 25 bp, Homo sapien
cctctttcctctcggtcccagccat

SEQ ID NO: 5007020 - DNA, 25 bp, Homo sapien
cacactctggcagccgctcttcctc

SEQ ID NO: 5007021 - DNA, 25 bp, Homo sapien
cttcctctttcctctcggtcccagc

SEQ ID NO: 5007022 - DNA, 25 bp, Homo sapien
tcagagcctggagtaattaaacatg

SEQ ID NO: 5007023 - DNA, 25 bp, Homo sapien
tcctaaggtggaacccagctcacat

SEQ ID NO: 5007024 - DNA, 25 bp, Homo sapien
taacaacatgagtggactgaagtcc

SEQ ID NO: 5007025 - DNA, 25 bp, Homo sapien
tattagcctcgcacgtggagaggac

SEQ ID NO: 5007026 - DNA, 25 bp, Homo sapien
aaatcttttgtgatgagcgtggctg

SEQ ID NO: 5007027 - DNA, 25 bp, Homo sapien
ggctgtgtgactaagccgctctcct

SEQ ID NO: 5007028 - DNA, 25 bp, Homo sapien
gactaagccgctctcctcatgatca

SEQ ID NO: 5007029 - DNA, 25 bp, Homo sapien
ctgaacaaatcttttgtgatgagcg

SEQ ID NO: 5007030 - DNA, 25 bp, Homo sapien
cccgaagggagggaatagccacact

SEQ ID NO: 5007031 - DNA, 25 bp, Homo sapien
tccttaatggtagtctcaccccagg

SEQ ID NO: 5007032 - DNA, 25 bp, Homo sapien
cagaaacaagaatgtcccatcaggg

SEQ ID NO: 5007033 - DNA, 25 bp, Homo sapien
tggtggtgcctaacatgaaagaaca

SEQ ID NO: 5007034 - DNA, 25 bp, Homo sapien
tttcttcatgggtctttctacatcc

SEQ ID NO: 5007035 - DNA, 25 bp, Homo sapien
ttcatgggtctttctacatcctgtt

SEQ ID NO: 5007036 - DNA, 25 bp, Homo sapien
ctgctttcggaaccatagctttctt

SEQ ID NO: 5007037 - DNA, 25 bp, Homo sapien
tgctttcggaaccatagctttcttc

SEQ ID NO: 5007038 - DNA, 25 bp, Homo sapien
cctgttcatgatgtaggagtctggc

SEQ ID NO: 5007039 - DNA, 25 bp, Homo sapien
tacactcaagatgttacacctagta

SEQ ID NO: 5007040 - DNA, 25 bp, Homo sapien
gcctgtgaatgactttacactcaag

SEQ ID NO: 5007041 - DNA, 25 bp, Homo sapien
gcaacggcgctatgattcttttcca

SEQ ID NO: 5007042 - DNA, 25 bp, Homo sapien
caacatgactgagtaacgggtgggc

SEQ ID NO: 5007043 - DNA, 25 bp, Homo sapien
ggaagactaaggtttgagccaggcc

SEQ ID NO: 5007044 - DNA, 25 bp, Homo sapien
tggtttgagaacatggtgggtccct

SEQ ID NO: 5007045 - DNA, 25 bp, Homo sapien
tttatgtctatgctgaaaggcctgg

SEQ ID NO: 5007046 - DNA, 25 bp, Homo sapien
ttggtaacgaagactcatgaggccg

SEQ ID NO: 5007047 - DNA, 25 bp, Homo sapien
taagagctgcccaacgggtgtatgg

SEQ ID NO: 5007048 - DNA, 25 bp, Homo sapien
ttttagttgcccagatagtgccgac

SEQ ID NO: 5007049 - DNA, 25 bp, Homo sapien
tctagagctgagtgtgggcacccct

SEQ ID NO: 5007050 - DNA, 25 bp, Homo sapien
cattttggttcctggtcctacgata

SEQ ID NO: 5007051 - DNA, 25 bp, Homo sapien
gctctattggtgtgcattactcagt

SEQ ID NO: 5007052 - DNA, 25 bp, Homo sapien
tactcagtgatacaactggtaccta

SEQ ID NO: 5007053 - DNA, 25 bp, Homo sapien
gatatgggctttttcaaagtcagtc

SEQ ID NO: 5007054 - DNA, 25 bp, Homo sapien
cccacaggtatgaggaacaggaaca

SEQ ID NO: 5007055 - DNA, 25 bp, Homo sapien
tccgtgccgctggtagggctacttt

SEQ ID NO: 5007056 - DNA, 25 bp, Homo sapien
gttccaatatggaggaatccccaca

SEQ ID NO: 5007057 - DNA, 25 bp, Homo sapien
tgacttcaggtttggctagttacaa

SEQ ID NO: 5007058 - DNA, 25 bp, Homo sapien
agatgtggtcgatagcaattctaca

SEQ ID NO: 5007059 - DNA, 25 bp, Homo sapien
gagttcacacaggtcagtgctacag

SEQ ID NO: 5007060 - DNA, 25 bp, Homo sapien
gaaatttccagttgacccgtgtgcc

SEQ ID NO: 5007061 - DNA, 25 bp, Homo sapien
tctacagggtcatgagaaaaagcag

SEQ ID NO: 5007062 - DNA, 25 bp, Homo sapien
gctaataaacagtcatccattgggt

SEQ ID NO: 5007063 - DNA, 25 bp, Homo sapien
gaaaaagccttacgtgagtctagga

SEQ ID NO: 5007064 - DNA, 25 bp, Homo sapien
cacggcttgctttcgcctacggaat

SEQ ID NO: 5007065 - DNA, 25 bp, Homo sapien
taatgataaaaaggaccagcaaggc

SEQ ID NO: 5007066 - DNA, 25 bp, Homo sapien
caactaattcagaacccagggctgc

SEQ ID NO: 5007067 - DNA, 25 bp, Homo sapien
tatgcctcacaaatgtcagtactgc

SEQ ID NO: 5007068 - DNA, 25 bp, Homo sapien
tgcacctgtggttcaaatgttagcc

SEQ ID NO: 5007069 - DNA, 25 bp, Homo sapien
ggctacaggtcagctccaaaccgtt

SEQ ID NO: 5007070 - DNA, 25 bp, Homo sapien
gacactggcttttgccaaccaaggg

SEQ ID NO: 5007071 - DNA, 25 bp, Homo sapien
tgacaggcactttgcagctaagcgc

SEQ ID NO: 5007072 - DNA, 25 bp, Homo sapien
caatatggttatgttcgggcaggaa

SEQ ID NO: 5007073 - DNA, 25 bp, Homo sapien
caggaattgtctaataaaagggcac

SEQ ID NO: 5007074 - DNA, 25 bp, Homo sapien
agtgtggtggagagaagtccatatc

SEQ ID NO: 5007075 - DNA, 25 bp, Homo sapien
cctgcactcttggccggaggtactt

SEQ ID NO: 5007076 - DNA, 25 bp, Homo sapien
tcttggccggaggtacttcccttca

SEQ ID NO: 5007077 - DNA, 25 bp, Homo sapien
gtggagagaagtccatatctgctag

SEQ ID NO: 5007078 - DNA, 25 bp, Homo sapien
gaggtacttagggatggtgaccacc

SEQ ID NO: 5007079 - DNA, 25 bp, Homo sapien
gggaggtacttagggatggtgacca

SEQ ID NO: 5007080 - DNA, 25 bp, Homo sapien
ctgggaggtacttagggatggtgac

SEQ ID NO: 5007081 - DNA, 25 bp, Homo sapien
aggtacttagggatggtgaccacca

SEQ ID NO: 5007082 - DNA, 25 bp, Homo sapien
actctgctttgtcgctctctggaga

SEQ ID NO: 5007083 - DNA, 25 bp, Homo sapien
tctctggagaatgtcctgtcagtca

SEQ ID NO: 5007084 - DNA, 25 bp, Homo sapien
gaatgtcctgtcagtcactatgaaa

SEQ ID NO: 5007085 - DNA, 25 bp, Homo sapien
gaaggcccaaggcttaacaccactg

SEQ ID NO: 5007086 - DNA, 25 bp, Homo sapien
tgcatgccttttgcgtagattggcc

SEQ ID NO: 5007087 - DNA, 25 bp, Homo sapien
aaaccctaacttgcacgatcagtgg

SEQ ID NO: 5007088 - DNA, 25 bp, Homo sapien
cagagatggcatcaaacgaatgtct

SEQ ID NO: 5007089 - DNA, 25 bp, Homo sapien
ggtggcctgtaaggagtataatccc

SEQ ID NO: 5007090 - DNA, 25 bp, Homo sapien
gttattccacgccttggtccaggga

SEQ ID NO: 5007091 - DNA, 25 bp, Homo sapien
gcttggtggtctactagttattcca

SEQ ID NO: 5007092 - DNA, 25 bp, Homo sapien
gtctactagttattccacgccttgg

SEQ ID NO: 5007093 - DNA, 25 bp, Homo sapien
cacgccttggtccagggaatatgtg

SEQ ID NO: 5007094 - DNA, 25 bp, Homo sapien
gaaagtacacagagccgtgggctag

SEQ ID NO: 5007095 - DNA, 25 bp, Homo sapien
taaatggaacatagtgcaagccctg

SEQ ID NO: 5007096 - DNA, 25 bp, Homo sapien
taacagtccaacgatcaagggccag

SEQ ID NO: 5007097 - DNA, 25 bp, Homo sapien
gccctggccctactaaactgagaaa

SEQ ID NO: 5007098 - DNA, 25 bp, Homo sapien
cagagtgctgcgctgtcttgcaaca

SEQ ID NO: 5007099 - DNA, 25 bp, Homo sapien
gatttccgtggacaatcccttctcg

SEQ ID NO: 5007100 - DNA, 25 bp, Homo sapien
gactcctagatgtttcccaacagtg

SEQ ID NO: 5007101 - DNA, 25 bp, Homo sapien
tcttatggatccaaggaagactcct

SEQ ID NO: 5007102 - DNA, 25 bp, Homo sapien
taggaaaagctctttccaacacctg

SEQ ID NO: 5007103 - DNA, 25 bp, Homo sapien
aggaaaagctctttccaacacctgc

SEQ ID NO: 5007104 - DNA, 25 bp, Homo sapien
tcagtcgaggaacctctggcaggcc

SEQ ID NO: 5007105 - DNA, 25 bp, Homo sapien
acatgtctcggttctccatcccgta

SEQ ID NO: 5007106 - DNA, 25 bp, Homo sapien
catcccgtacaccttccgacacttt

SEQ ID NO: 5007107 - DNA, 25 bp, Homo sapien
cggtacaccacatgtctcggttctc

SEQ ID NO: 5007108 - DNA, 25 bp, Homo sapien
tgtgcccaccggatgatgtgtgggt

SEQ ID NO: 5007109 - DNA, 25 bp, Homo sapien
caggaccgtgtgcgcatgctgtctc

SEQ ID NO: 5007110 - DNA, 25 bp, Homo sapien
gggaggacaggaccgtgtgcgcatg

SEQ ID NO: 5007111 - DNA, 25 bp, Homo sapien
gaccgtgtgcgcatgctgtctctgc

SEQ ID NO: 5007112 - DNA, 25 bp, Homo sapien
ttgatggggcaggttctccacccat

SEQ ID NO: 5007113 - DNA, 25 bp, Homo sapien
tggtgaatacatggaaaagaaagtt

SEQ ID NO: 5007114 - DNA, 25 bp, Homo sapien
tggaaaagaaagttgatggggcagg

SEQ ID NO: 5007115 - DNA, 25 bp, Homo sapien
aagaaagttgatggggcaggttctc

SEQ ID NO: 5007116 - DNA, 25 bp, Homo sapien
gtgagaagcaagaaggcaacataat

SEQ ID NO: 5007117 - DNA, 25 bp, Homo sapien
tctggatacagaacacatcgtggct

SEQ ID NO: 5007118 - DNA, 25 bp, Homo sapien
cataaatccgcaagtcaccatacat

SEQ ID NO: 5007119 - DNA, 25 bp, Homo sapien
cactgaaacataaatccgcaagtca

SEQ ID NO: 5007120 - DNA, 25 bp, Homo sapien
gtgggtgccggaacagcaagatgtg

SEQ ID NO: 5007121 - DNA, 25 bp, Homo sapien
ttctcgggtagtgggtgccggaaca

SEQ ID NO: 5007122 - DNA, 25 bp, Homo sapien
tcgggtagtgggtgccggaacagca

SEQ ID NO: 5007123 - DNA, 25 bp, Homo sapien
gggtgccggaacagcaagatgtgag

SEQ ID NO: 5007124 - DNA, 25 bp, Homo sapien
gcagcatgacatgtcgatactcaaa

SEQ ID NO: 5007125 - DNA, 25 bp, Homo sapien
cgtcgtcgtatttgtccaaatagta

SEQ ID NO: 5007126 - DNA, 25 bp, Homo sapien
gactctgctgaatgccaagattcct

SEQ ID NO: 5007127 - DNA, 25 bp, Homo sapien
aactcctcgtcgtcgtatttgtcca

SEQ ID NO: 5007128 - DNA, 25 bp, Homo sapien
ttataaccaattataagcattctta

SEQ ID NO: 5007129 - DNA, 25 bp, Homo sapien
attataagcattcttaaaaccaata

SEQ ID NO: 5007130 - DNA, 25 bp, Homo sapien
acaagcattcttataaccaattata

SEQ ID NO: 5007131 - DNA, 25 bp, Homo sapien
caagcattcttataaccaattataa

SEQ ID NO: 5007132 - DNA, 25 bp, Homo sapien
tgtccgtgggtgtacaacagtcctg

SEQ ID NO: 5007133 - DNA, 25 bp, Homo sapien
ttaaattctacgtggcttgcctggc

SEQ ID NO: 5007134 - DNA, 25 bp, Homo sapien
ggctgttatgagagctagcccacca

SEQ ID NO: 5007135 - DNA, 25 bp, Homo sapien
cattcttagttgtagccttcttgtc

SEQ ID NO: 5007136 - DNA, 25 bp, Homo sapien
aatattcatcaacagagcacagcac

SEQ ID NO: 5007137 - DNA, 25 bp, Homo sapien
ataaatattcatcaacagagcacag

SEQ ID NO: 5007138 - DNA, 25 bp, Homo sapien
tattcatcaacagagcacagcacaa

SEQ ID NO: 5007139 - DNA, 25 bp, Homo sapien
attcatcaacagagcacagcacaat

SEQ ID NO: 5007140 - DNA, 25 bp, Homo sapien
tagactttgctggaaacctccggga

SEQ ID NO: 5007141 - DNA, 25 bp, Homo sapien
tccacagaaggcgttagactttgct

SEQ ID NO: 5007142 - DNA, 25 bp, Homo sapien
tccgggagatgccagtggttgacaa

SEQ ID NO: 5007143 - DNA, 25 bp, Homo sapien
tggttgacaataagaagcttttgtg

SEQ ID NO: 5007144 - DNA, 25 bp, Homo sapien
ctacattggctttgaccagattttt

SEQ ID NO: 5007145 - DNA, 25 bp, Homo sapien
acattggctttgaccagatttttgg

SEQ ID NO: 5007146 - DNA, 25 bp, Homo sapien
cattggctttgaccagatttttggc

SEQ ID NO: 5007147 - DNA, 25 bp, Homo sapien
tggctttgaccagatttttggcttt

SEQ ID NO: 5007148 - DNA, 25 bp, Homo sapien
tggccgatcctggaatggtcacagg

SEQ ID NO: 5007149 - DNA, 25 bp, Homo sapien
tgggatgcctgtgaaagtgaccgga

SEQ ID NO: 5007150 - DNA, 25 bp, Homo sapien
tgcctgtgaaagtgaccggaggaga

SEQ ID NO: 5007151 - DNA, 25 bp, Homo sapien
gtgaacttggccgatcctggaatgg

SEQ ID NO: 5007152 - DNA, 25 bp, Homo sapien
cctggttttggtcaaggtcaaagtg

SEQ ID NO: 5007153 - DNA, 25 bp, Homo sapien
cttttactcataggccagatggccc

SEQ ID NO: 5007154 - DNA, 25 bp, Homo sapien
tttccactgagttgtcttttactca

SEQ ID NO: 5007155 - DNA, 25 bp, Homo sapien
caaagtgattgctctcacagtcccc

SEQ ID NO: 5007156 - DNA, 25 bp, Homo sapien
tcaacggcgtcatcaacttagtctc

SEQ ID NO: 5007157 - DNA, 25 bp, Homo sapien
taagcatggtcagtgtgcacgaggt

SEQ ID NO: 5007158 - DNA, 25 bp, Homo sapien
cttagtctccgttttggcacaagga

SEQ ID NO: 5007159 - DNA, 25 bp, Homo sapien
ggcacaaggagtttctgttcggctt

SEQ ID NO: 5007160 - DNA, 25 bp, Homo sapien
gcagcagcagatccctgactcggaa

SEQ ID NO: 5007161 - DNA, 25 bp, Homo sapien
gcagcagatccctgactcggaacat

SEQ ID NO: 5007162 - DNA, 25 bp, Homo sapien
agcagcagatccctgactcggaaca

SEQ ID NO: 5007163 - DNA, 25 bp, Homo sapien
gcagcagcagcagatccctgactcg

SEQ ID NO: 5007164 - DNA, 25 bp, Homo sapien
taatgagccctgcatagaatctaac

SEQ ID NO: 5007165 - DNA, 25 bp, Homo sapien
agccctgcatagaatctaacataaa

SEQ ID NO: 5007166 - DNA, 25 bp, Homo sapien
ttttccccactaatgagccctgcat

SEQ ID NO: 5007167 - DNA, 25 bp, Homo sapien
ccccactaatgagccctgcatagaa

SEQ ID NO: 5007168 - DNA, 25 bp, Homo sapien
aaggctctggtgtgtccccaaacat

SEQ ID NO: 5007169 - DNA, 25 bp, Homo sapien
gatggttcggatgtgtttctggata

SEQ ID NO: 5007170 - DNA, 25 bp, Homo sapien
cccagatggatggttcggatgtgtt

SEQ ID NO: 5007171 - DNA, 25 bp, Homo sapien
gatgtgtttctggatacctgctgca

SEQ ID NO: 5007172 - DNA, 25 bp, Homo sapien
tggatacctgctgcagtgctcagca

SEQ ID NO: 5007173 - DNA, 25 bp, Homo sapien
ttcacatgggcttcgtgagcccagg

SEQ ID NO: 5007174 - DNA, 25 bp, Homo sapien
tgggtggccagcattcacagcacag

SEQ ID NO: 5007175 - DNA, 25 bp, Homo sapien
aaccacggaaggagcccactgttca

SEQ ID NO: 5007176 - DNA, 25 bp, Homo sapien
cactgtgccccagaggctctgcctg

SEQ ID NO: 5007177 - DNA, 25 bp, Homo sapien
taggctttcatactgaatataatag

SEQ ID NO: 5007178 - DNA, 25 bp, Homo sapien
tacatcatgggacttttttaaggcc

SEQ ID NO: 5007179 - DNA, 25 bp, Homo sapien
tcagatgtaggctttcatactgaat

SEQ ID NO: 5007180 - DNA, 25 bp, Homo sapien
tattgtacgacatataaagccaaat

SEQ ID NO: 5007181 - DNA, 25 bp, Homo sapien
tattgtataacatgcatatgacgtg

SEQ ID NO: 5007182 - DNA, 25 bp, Homo sapien
gcatatgacgtgtaagtccaactaa

SEQ ID NO: 5007183 - DNA, 25 bp, Homo sapien
agttccaagagtggaaacatggctg

SEQ ID NO: 5007184 - DNA, 25 bp, Homo sapien
tttgaagtgcttcaaagtattgtat

SEQ ID NO: 5007185 - DNA, 25 bp, Homo sapien
aattttctctatgaggccaatcagc

SEQ ID NO: 5007186 - DNA, 25 bp, Homo sapien
tccatgcagttgatccaagctgctg

SEQ ID NO: 5007187 - DNA, 25 bp, Homo sapien
aatgctgtatgtaccatcaccatga

SEQ ID NO: 5007188 - DNA, 25 bp, Homo sapien
caagctgctgttcttagcatcgccc

SEQ ID NO: 5007189 - DNA, 25 bp, Homo sapien
caatttctgctactgtccttgctgc

SEQ ID NO: 5007190 - DNA, 25 bp, Homo sapien
tgcactcacccagtgcattgcaggg

SEQ ID NO: 5007191 - DNA, 25 bp, Homo sapien
tgatgaaggctgaaatttagaaatt

SEQ ID NO: 5007192 - DNA, 25 bp, Homo sapien
gatgctgccaatgttctgaaatgca

SEQ ID NO: 5007193 - DNA, 25 bp, Homo sapien
gctgagggatctggagttatcctga

SEQ ID NO: 5007194 - DNA, 25 bp, Homo sapien
ggtggctgagggatctggagttatc

SEQ ID NO: 5007195 - DNA, 25 bp, Homo sapien
gcacacccaattgagcacagggtgg

SEQ ID NO: 5007196 - DNA, 25 bp, Homo sapien
cacagggtggctgagggatctggag

SEQ ID NO: 5007197 - DNA, 25 bp, Homo sapien
ggcattggcacggtcagtgtgggtc

SEQ ID NO: 5007198 - DNA, 25 bp, Homo sapien
ttctctccacacctatgcttctcaa

SEQ ID NO: 5007199 - DNA, 25 bp, Homo sapien
tggcacggtcagtgtgggtcagggt

SEQ ID NO: 5007200 - DNA, 25 bp, Homo sapien
ctgtggcattggcacggtcagtgtg

SEQ ID NO: 5007201 - DNA, 25 bp, Homo sapien
taagctctccggcagacagcctgga

SEQ ID NO: 5007202 - DNA, 25 bp, Homo sapien
tatgggtgacggatacttcatgtgg

SEQ ID NO: 5007203 - DNA, 25 bp, Homo sapien
atgtgggaagtaagctctccggcag

SEQ ID NO: 5007204 - DNA, 25 bp, Homo sapien
caggttccttatgggtgacggatac

SEQ ID NO: 5007205 - DNA, 25 bp, Homo sapien
acttcaagaacattaaagaggaacg

SEQ ID NO: 5007206 - DNA, 25 bp, Homo sapien
tgcttctttccacagaaagggggtg

SEQ ID NO: 5007207 - DNA, 25 bp, Homo sapien
gggtgtaggtccaaggttaagctca

SEQ ID NO: 5007208 - DNA, 25 bp, Homo sapien
aagaggaacgtaagctgcttctttc

SEQ ID NO: 5007209 - DNA, 25 bp, Homo sapien
cgtggacgggttggactggtcgctg

SEQ ID NO: 5007210 - DNA, 25 bp, Homo sapien
cttgaagctgtcagccgagagcggc

SEQ ID NO: 5007211 - DNA, 25 bp, Homo sapien
tgggctcgtcgaagagcaggttgct

SEQ ID NO: 5007212 - DNA, 25 bp, Homo sapien
tcgtcgatgccgtcgtctggctgcg

SEQ ID NO: 5007213 - DNA, 25 bp, Homo sapien
cgcacgggaggacttcgaaccaaag

SEQ ID NO: 5007214 - DNA, 25 bp, Homo sapien
tgtccatgtctagttcctctgaaga

SEQ ID NO: 5007215 - DNA, 25 bp, Homo sapien
ctggttagtaccattgctgctgtca

SEQ ID NO: 5007216 - DNA, 25 bp, Homo sapien
gaaccaaagggctagtcgacaagct

SEQ ID NO: 5007217 - DNA, 25 bp, Homo sapien
tcacagtttacaagatccctgtact

SEQ ID NO: 5007218 - DNA, 25 bp, Homo sapien
ttacaagatccctgtacttgggagt

SEQ ID NO: 5007219 - DNA, 25 bp, Homo sapien
acagtttacaagatccctgtacttg

SEQ ID NO: 5007220 - DNA, 25 bp, Homo sapien
agtttacaagatccctgtacttggg

SEQ ID NO: 5007221 - DNA, 25 bp, Homo sapien
agactgaattaggagggctgttgac

SEQ ID NO: 5007222 - DNA, 25 bp, Homo sapien
agaaccaggataggaggcccgtgca

SEQ ID NO: 5007223 - DNA, 25 bp, Homo sapien
aattaggagggctgttgacttctct

SEQ ID NO: 5007224 - DNA, 25 bp, Homo sapien
tgacttctctttccaacggccagtc

SEQ ID NO: 5007225 - DNA, 25 bp, Homo sapien
aagaaccaaaccctggctgaatcct

SEQ ID NO: 5007226 - DNA, 25 bp, Homo sapien
tgctctttactgtccacctcagggc

SEQ ID NO: 5007227 - DNA, 25 bp, Homo sapien
ctgatgggaaacagcgaatgactct

SEQ ID NO: 5007228 - DNA, 25 bp, Homo sapien
agcatccctgaatccctggccttgc

SEQ ID NO: 5007229 - DNA, 25 bp, Homo sapien
tgcccgcttctagccaggattctgc

SEQ ID NO: 5007230 - DNA, 25 bp, Homo sapien
tagccaggattctgccttatcttca

SEQ ID NO: 5007231 - DNA, 25 bp, Homo sapien
ctcaccacaactgcccgcttctagc

SEQ ID NO: 5007232 - DNA, 25 bp, Homo sapien
gattctgccttatcttcacctctct

SEQ ID NO: 5007233 - DNA, 25 bp, Homo sapien
caggagtcacaaggccagtcttaaa

SEQ ID NO: 5007234 - DNA, 25 bp, Homo sapien
gggaggcatctcgaacattccttga

SEQ ID NO: 5007235 - DNA, 25 bp, Homo sapien
tctatgttgcttctggatggtgcca

SEQ ID NO: 5007236 - DNA, 25 bp, Homo sapien
tgccagtcacaggaaagaccaagcc

SEQ ID NO: 5007237 - DNA, 25 bp, Homo sapien
gccatcctagcttgtgtgccacaaa

SEQ ID NO: 5007238 - DNA, 25 bp, Homo sapien
ggagccatcctagcttgtgtgccac

SEQ ID NO: 5007239 - DNA, 25 bp, Homo sapien
gagaagactcacatcattcctaaca

SEQ ID NO: 5007240 - DNA, 25 bp, Homo sapien
aagagagaagactcacatcattcct

SEQ ID NO: 5007241 - DNA, 25 bp, Homo sapien
tacactgtgaagagcgggacaaacc

SEQ ID NO: 5007242 - DNA, 25 bp, Homo sapien
ctttataatatagaggtgggtccac

SEQ ID NO: 5007243 - DNA, 25 bp, Homo sapien
tctaacagtacttggccagtcagcc

SEQ ID NO: 5007244 - DNA, 25 bp, Homo sapien
tcagccacttctggatacacctggg

SEQ ID NO: 5007245 - DNA, 25 bp, Homo sapien
taaaacctgctaagctgtgccttcc

SEQ ID NO: 5007246 - DNA, 25 bp, Homo sapien
cgtgctctagggttttagctactcc

SEQ ID NO: 5007247 - DNA, 25 bp, Homo sapien
gcatttttctaggttaaggcttcag

SEQ ID NO: 5007248 - DNA, 25 bp, Homo sapien
taaacctcttagcatgccattcgag

SEQ ID NO: 5007249 - DNA, 25 bp, Homo sapien
taggagttgtcaggcttcgttcccc

SEQ ID NO: 5007250 - DNA, 25 bp, Homo sapien
catgctgggtttaagctcatccaac

SEQ ID NO: 5007251 - DNA, 25 bp, Homo sapien
tatctgcgaactggcatttcccaag

SEQ ID NO: 5007252 - DNA, 25 bp, Homo sapien
tgtctttaactctcgatactcacgg

SEQ ID NO: 5007253 - DNA, 25 bp, Homo sapien
ggatggagcgggtaacgagggagag

SEQ ID NO: 5007254 - DNA, 25 bp, Homo sapien
taacgagggagaggcgagcttggag

SEQ ID NO: 5007255 - DNA, 25 bp, Homo sapien
cagtggctcttgtttggcgcaggca

SEQ ID NO: 5007256 - DNA, 25 bp, Homo sapien
tattttgcaagagttcgccttcggg

SEQ ID NO: 5007257 - DNA, 25 bp, Homo sapien
ttgcttttcctgagcataggaaaaa

SEQ ID NO: 5007258 - DNA, 25 bp, Homo sapien
acaagtgaggaactggcacagctgc

SEQ ID NO: 5007259 - DNA, 25 bp, Homo sapien
ccttggcagtgcaaattaggatgac

SEQ ID NO: 5007260 - DNA, 25 bp, Homo sapien
gcatcggtatttctagctgttcctg

SEQ ID NO: 5007261 - DNA, 25 bp, Homo sapien
cacattgcctgcattagtatcagct

SEQ ID NO: 5007262 - DNA, 25 bp, Homo sapien
attcaagggtgtcgtgggaaacata

SEQ ID NO: 5007263 - DNA, 25 bp, Homo sapien
ttattcaagggtgtcgtgggaaaca

SEQ ID NO: 5007264 - DNA, 25 bp, Homo sapien
acattgcctgcattagtatcagctc

SEQ ID NO: 5007265 - DNA, 25 bp, Homo sapien
tacagctcttgtggatgcatggcaa

SEQ ID NO: 5007266 - DNA, 25 bp, Homo sapien
tatgctatgtttctctacaggccac

SEQ ID NO: 5007267 - DNA, 25 bp, Homo sapien
tagtatttcttaagggcaccccatg

SEQ ID NO: 5007268 - DNA, 25 bp, Homo sapien
tagaatatcttccacgcctggcatt

SEQ ID NO: 5007269 - DNA, 25 bp, Homo sapien
cagaaccagtttcactaccaatcca

SEQ ID NO: 5007270 - DNA, 25 bp, Homo sapien
cctgcagattggttccaacactggt

SEQ ID NO: 5007271 - DNA, 25 bp, Homo sapien
tgactggctggcaggtaactgaacg

SEQ ID NO: 5007272 - DNA, 25 bp, Homo sapien
taactgaacgcttcatctgagctgt

SEQ ID NO: 5007273 - DNA, 25 bp, Homo sapien
acacacctgagaagatgcgattgca

SEQ ID NO: 5007274 - DNA, 25 bp, Homo sapien
agccttactgctgcgaatcacctgg

SEQ ID NO: 5007275 - DNA, 25 bp, Homo sapien
tagagtttgattactgccggaaccc

SEQ ID NO: 5007276 - DNA, 25 bp, Homo sapien
cctatgcataggtggacggaaacag

SEQ ID NO: 5007277 - DNA, 25 bp, Homo sapien
cagatggtgtttcgaaaaactgcca

SEQ ID NO: 5007278 - DNA, 25 bp, Homo sapien
caaattgccagatgtgatgctgtca

SEQ ID NO: 5007279 - DNA, 25 bp, Homo sapien
gcaggaccagatcactagacaagct

SEQ ID NO: 5007280 - DNA, 25 bp, Homo sapien
tcatatggaaaggtccacaggaccc

SEQ ID NO: 5007281 - DNA, 25 bp, Homo sapien
cctaggacatatcccttaaaaggag

SEQ ID NO: 5007282 - DNA, 25 bp, Homo sapien
tatcgtcactatctatttatggctg

SEQ ID NO: 5007283 - DNA, 25 bp, Homo sapien
gagagtatgcttccaattaatcaag

SEQ ID NO: 5007284 - DNA, 25 bp, Homo sapien
tcaatttgctcaggaactttcaatg

SEQ ID NO: 5007285 - DNA, 25 bp, Homo sapien
cttggccttcaaggcttcagcatca

SEQ ID NO: 5007286 - DNA, 25 bp, Homo sapien
ttggccttcaaggcttcagcatcat

SEQ ID NO: 5007287 - DNA, 25 bp, Homo sapien
gaagatcacccgatcagatcacctg

SEQ ID NO: 5007288 - DNA, 25 bp, Homo sapien
taagttagtcatgtcaccactgtcc

SEQ ID NO: 5007289 - DNA, 25 bp, Homo sapien
gctgttgtgattctcttctggctta

SEQ ID NO: 5007290 - DNA, 25 bp, Homo sapien
gtccacatgatgcttagttttgctg

SEQ ID NO: 5007291 - DNA, 25 bp, Homo sapien
cctgaatgtctatcatgggatgcca

SEQ ID NO: 5007292 - DNA, 25 bp, Homo sapien
tgagatatgacagggctcacaccag

SEQ ID NO: 5007293 - DNA, 25 bp, Homo sapien
gacccagggatgaaatctgagatat

SEQ ID NO: 5007294 - DNA, 25 bp, Homo sapien
tcaatccctttatgctcagacccag

SEQ ID NO: 5007295 - DNA, 25 bp, Homo sapien
aggaggtaccgagagacaagactag

SEQ ID NO: 5007296 - DNA, 25 bp, Homo sapien
gcaggaagcagttagagcggttgtc

SEQ ID NO: 5007297 - DNA, 25 bp, Homo sapien
gttagagcggttgtcggccaacctc

SEQ ID NO: 5007298 - DNA, 25 bp, Homo sapien
gttgagaggaggtaccgagagacaa

SEQ ID NO: 5007299 - DNA, 25 bp, Homo sapien
gctcctggtagctcagcaaccagca

SEQ ID NO: 5007300 - DNA, 25 bp, Homo sapien
ttctcgctgatctggaaaggctcct

SEQ ID NO: 5007301 - DNA, 25 bp, Homo sapien
cctccattctcgctgatctggaaag

SEQ ID NO: 5007302 - DNA, 25 bp, Homo sapien
tggaaaggctcctggtagctcagca

SEQ ID NO: 5007303 - DNA, 25 bp, Homo sapien
gagttaaggccatcatccagtcctc

SEQ ID NO: 5007304 - DNA, 25 bp, Homo sapien
gtcctctcagctccagcatcagtgc

SEQ ID NO: 5007305 - DNA, 25 bp, Homo sapien
tggcatctgagttaaggccatcatc

SEQ ID NO: 5007306 - DNA, 25 bp, Homo sapien
cctctgcccggaaggatctcagaag

SEQ ID NO: 5007307 - DNA, 25 bp, Homo sapien
gggtgctggcaccagtgatcaccag

SEQ ID NO: 5007308 - DNA, 25 bp, Homo sapien
aattgagttgtcctatgtgtgccac

SEQ ID NO: 5007309 - DNA, 25 bp, Homo sapien
attctgcatgaagagaaattgagtt

SEQ ID NO: 5007310 - DNA, 25 bp, Homo sapien
caaaaattacgcttccaaaatctct

SEQ ID NO: 5007311 - DNA, 25 bp, Homo sapien
tagggcgcccttccctgaccaaaga

SEQ ID NO: 5007312 - DNA, 25 bp, Homo sapien
gaatgactccctgggccagcgtgct

SEQ ID NO: 5007313 - DNA, 25 bp, Homo sapien
agaatgactccctgggccagcgtgc

SEQ ID NO: 5007314 - DNA, 25 bp, Homo sapien
gcccttccctgaccaaagaatgact

SEQ ID NO: 5007315 - DNA, 25 bp, Homo sapien
gagttcccatgtataattcacccag

SEQ ID NO: 5007316 - DNA, 25 bp, Homo sapien
tgtagattcacagtaagttgcaaga

SEQ ID NO: 5007317 - DNA, 25 bp, Homo sapien
ggaccttgttgtacatactgctatc

SEQ ID NO: 5007318 - DNA, 25 bp, Homo sapien
agttccaggaatcactagggcaggg

SEQ ID NO: 5007319 - DNA, 25 bp, Homo sapien
atcttttcaaagaacgaaattgtat

SEQ ID NO: 5007320 - DNA, 25 bp, Homo sapien
cttgtgagaactctaacagcactag

SEQ ID NO: 5007321 - DNA, 25 bp, Homo sapien
tgtgagaactctaacagcactaggg

SEQ ID NO: 5007322 - DNA, 25 bp, Homo sapien
cgaaattgtattagattgttcttgc

SEQ ID NO: 5007323 - DNA, 25 bp, Homo sapien
gggttctcaaggtgaaagctttgat

SEQ ID NO: 5007324 - DNA, 25 bp, Homo sapien
tgggttatatagaggtgtgttattt

SEQ ID NO: 5007325 - DNA, 25 bp, Homo sapien
caaggtgaaagctttgattattgat

SEQ ID NO: 5007326 - DNA, 25 bp, Homo sapien
tatgtattatcactgcattagctgt

SEQ ID NO: 5007327 - DNA, 25 bp, Homo sapien
gtggacacccaactgatgtagcgca

SEQ ID NO: 5007328 - DNA, 25 bp, Homo sapien
cattactaataagcatgggagctct

SEQ ID NO: 5007329 - DNA, 25 bp, Homo sapien
cgggaggtaatcacaatgatgccaa

SEQ ID NO: 5007330 - DNA, 25 bp, Homo sapien
tggctcccgggaggtaatcacaatg

SEQ ID NO: 5007331 - DNA, 25 bp, Homo sapien
cgaagagtaggaaaccgtcagaaat

SEQ ID NO: 5007332 - DNA, 25 bp, Homo sapien
gaaaccgtcagaaatttctaagaga

SEQ ID NO: 5007333 - DNA, 25 bp, Homo sapien
aaccgtcagaaatttctaagagatt

SEQ ID NO: 5007334 - DNA, 25 bp, Homo sapien
tttcgaagagtaggaaaccgtcaga

SEQ ID NO: 5007335 - DNA, 25 bp, Homo sapien
tctccctccttcctacttctgagat

SEQ ID NO: 5007336 - DNA, 25 bp, Homo sapien
ccactctccctccttcctacttctg

SEQ ID NO: 5007337 - DNA, 25 bp, Homo sapien
actctccctccttcctacttctgag

SEQ ID NO: 5007338 - DNA, 25 bp, Homo sapien
tcacagctcagttccactctccctc

SEQ ID NO: 5007339 - DNA, 25 bp, Homo sapien
gaatggcagacactaccagctacct

SEQ ID NO: 5007340 - DNA, 25 bp, Homo sapien
ccacctatgaaggaaggcggagcat

SEQ ID NO: 5007341 - DNA, 25 bp, Homo sapien
catgaagtcacaaggagtctgggcc

SEQ ID NO: 5007342 - DNA, 25 bp, Homo sapien
tcttaggtctatgaggatgacagcc

SEQ ID NO: 5007343 - DNA, 25 bp, Homo sapien
tatttgtacgttaaaatccaatgac

SEQ ID NO: 5007344 - DNA, 25 bp, Homo sapien
ctgtttgatgcagataagattatac

SEQ ID NO: 5007345 - DNA, 25 bp, Homo sapien
tatttacaagtatgcgtttcagaat

SEQ ID NO: 5007346 - DNA, 25 bp, Homo sapien
cagtatctcaggtttatgcttccat

SEQ ID NO: 5007347 - DNA, 25 bp, Homo sapien
tctccactctgtctacagttatctg

SEQ ID NO: 5007348 - DNA, 25 bp, Homo sapien
tgacaagtctccactctgtctacag

SEQ ID NO: 5007349 - DNA, 25 bp, Homo sapien
ctccactctgtctacagttatctgg

SEQ ID NO: 5007350 - DNA, 25 bp, Homo sapien
tccactctgtctacagttatctggg

SEQ ID NO: 5007351 - DNA, 25 bp, Homo sapien
tacagtaggtgtattaagttctaca

SEQ ID NO: 5007352 - DNA, 25 bp, Homo sapien
tatccttagacatggacacaatgca

SEQ ID NO: 5007353 - DNA, 25 bp, Homo sapien
ttataacaagaagggcctttacaca

SEQ ID NO: 5007354 - DNA, 25 bp, Homo sapien
cctcattgtaatggcctttagtgtc

SEQ ID NO: 5007355 - DNA, 25 bp, Homo sapien
tgatctctccctaagctgccacctg

SEQ ID NO: 5007356 - DNA, 25 bp, Homo sapien
ctgcagacagcaatgcaccacactg

SEQ ID NO: 5007357 - DNA, 25 bp, Homo sapien
taagctgccacctgccatcgcctcc

SEQ ID NO: 5007358 - DNA, 25 bp, Homo sapien
agacagcaatgcaccacactggttg

SEQ ID NO: 5007359 - DNA, 25 bp, Homo sapien
gccatcatcagtgtcttcaaacagc

SEQ ID NO: 5007360 - DNA, 25 bp, Homo sapien
ttgccatcatcagtgtcttcaaaca

SEQ ID NO: 5007361 - DNA, 25 bp, Homo sapien
tgccatcatcagtgtcttcaaacag

SEQ ID NO: 5007362 - DNA, 25 bp, Homo sapien
gtggtgtgtttcataggatggagca

SEQ ID NO: 5007363 - DNA, 25 bp, Homo sapien
cattccagcttggtgaagcaggtgg

SEQ ID NO: 5007364 - DNA, 25 bp, Homo sapien
caagcgtactcctcagtggaaaaat

SEQ ID NO: 5007365 - DNA, 25 bp, Homo sapien
caaaaacaagcgtactcctcagtgg

SEQ ID NO: 5007366 - DNA, 25 bp, Homo sapien
ttatagcaggggtcctcagtcaccc

SEQ ID NO: 5007367 - DNA, 25 bp, Homo sapien
ttagattctcaaaggcacgtgaacc

SEQ ID NO: 5007368 - DNA, 25 bp, Homo sapien
tctcaaaggcacgtgaaccctattg

SEQ ID NO: 5007369 - DNA, 25 bp, Homo sapien
tgagctgcagtgggcaagtaagcat

SEQ ID NO: 5007370 - DNA, 25 bp, Homo sapien
ttttttcgcaacatcatcaatggat

SEQ ID NO: 5007371 - DNA, 25 bp, Homo sapien
catcatcaatggataggccagcatg

SEQ ID NO: 5007372 - DNA, 25 bp, Homo sapien
tttcgcaacatcatcaatggatagg

SEQ ID NO: 5007373 - DNA, 25 bp, Homo sapien
caatggataggccagcatgttctac

SEQ ID NO: 5007374 - DNA, 25 bp, Homo sapien
cagaagaaaggtcgaaagaggtctc

SEQ ID NO: 5007375 - DNA, 25 bp, Homo sapien
tagaacggaacagaagaaaggtcga

SEQ ID NO: 5007376 - DNA, 25 bp, Homo sapien
gaagttgatgggagcatctgggcgc

SEQ ID NO: 5007377 - DNA, 25 bp, Homo sapien
ggtctcctgggtgcatgtctcttag

SEQ ID NO: 5007378 - DNA, 25 bp, Homo sapien
cagtgctaccggtccacctgaagtt

SEQ ID NO: 5007379 - DNA, 25 bp, Homo sapien
tacggcacgggcatcacaaaagtgg

SEQ ID NO: 5007380 - DNA, 25 bp, Homo sapien
tgttgatacagagagcataaccttc

SEQ ID NO: 5007381 - DNA, 25 bp, Homo sapien
aaatgtaaaccaattctgcagaggc

SEQ ID NO: 5007382 - DNA, 25 bp, Homo sapien
gggttagtacaagaaagagaactgc

SEQ ID NO: 5007383 - DNA, 25 bp, Homo sapien
tggaaaaagttctcatcttacctta

SEQ ID NO: 5007384 - DNA, 25 bp, Homo sapien
attgagataacatcaatgttactag

SEQ ID NO: 5007385 - DNA, 25 bp, Homo sapien
tcaatgttactagggttagtacaag

SEQ ID NO: 5007386 - DNA, 25 bp, Homo sapien
taattacaaatttgacatgggcgac

SEQ ID NO: 5007387 - DNA, 25 bp, Homo sapien
caggaactgctaggcttctagagat

SEQ ID NO: 5007388 - DNA, 25 bp, Homo sapien
catgggcgactttccgataaactgt

SEQ ID NO: 5007389 - DNA, 25 bp, Homo sapien
cacagtttcccatcgtatttatagg

SEQ ID NO: 5007390 - DNA, 25 bp, Homo sapien
gcactggtaactcaaagggcaggga

SEQ ID NO: 5007391 - DNA, 25 bp, Homo sapien
ggaggaaggcaaccatgagtacgca

SEQ ID NO: 5007392 - DNA, 25 bp, Homo sapien
ccaataacagggagctaactgacca

SEQ ID NO: 5007393 - DNA, 25 bp, Homo sapien
gaaaccatctgctgcatttgcgcca

SEQ ID NO: 5007394 - DNA, 25 bp, Homo sapien
aggcctccctatagacacaaaatca

SEQ ID NO: 5007395 - DNA, 25 bp, Homo sapien
ttccaggcctccctatagacacaaa

SEQ ID NO: 5007396 - DNA, 25 bp, Homo sapien
tgtacatgtttggtatagacaattt

SEQ ID NO: 5007397 - DNA, 25 bp, Homo sapien
acagatattcctcagtacccatggg

SEQ ID NO: 5007398 - DNA, 25 bp, Homo sapien
gcacactgtatttatgatgattaaa

SEQ ID NO: 5007399 - DNA, 25 bp, Homo sapien
caactgctggcacactgtatttatg

SEQ ID NO: 5007400 - DNA, 25 bp, Homo sapien
ctggcacactgtatttatgatgatt

SEQ ID NO: 5007401 - DNA, 25 bp, Homo sapien
cactgtatttatgatgattaaattc

SEQ ID NO: 5007402 - DNA, 25 bp, Homo sapien
cataattaagcactgttccagggct

SEQ ID NO: 5007403 - DNA, 25 bp, Homo sapien
tgtcattctgccagaatattgtcct

SEQ ID NO: 5007404 - DNA, 25 bp, Homo sapien
tctaaaatccctgctgacgtggagc

SEQ ID NO: 5007405 - DNA, 25 bp, Homo sapien
cctttggttcagtgctattgggtgt

SEQ ID NO: 5007406 - DNA, 25 bp, Homo sapien
ttggcctgcagccatagtttaccaa

SEQ ID NO: 5007407 - DNA, 25 bp, Homo sapien
tgagctacctttgcgtcactgcact

SEQ ID NO: 5007408 - DNA, 25 bp, Homo sapien
gaccacctgtgctctgtgtcgccta

SEQ ID NO: 5007409 - DNA, 25 bp, Homo sapien
cctctgaccaaagatctgtgtacac

SEQ ID NO: 5007410 - DNA, 25 bp, Homo sapien
tactgaagagagtctgtacactggc

SEQ ID NO: 5007411 - DNA, 25 bp, Homo sapien
tgtacactggcagagattatgcatg

SEQ ID NO: 5007412 - DNA, 25 bp, Homo sapien
tctatatactgaagagagtctgtac

SEQ ID NO: 5007413 - DNA, 25 bp, Homo sapien
gattatgcatgctctccaccaactt

SEQ ID NO: 5007414 - DNA, 25 bp, Homo sapien
tcaaggatccggctggcttttttgg

SEQ ID NO: 5007415 - DNA, 25 bp, Homo sapien
gacagatggagcgagtgttttcttt

SEQ ID NO: 5007416 - DNA, 25 bp, Homo sapien
gagacagatggagcgagtgttttct

SEQ ID NO: 5007417 - DNA, 25 bp, Homo sapien
ctttttcatggtcaaggatccggct

SEQ ID NO: 5007418 - DNA, 25 bp, Homo sapien
cacagtcacgttttaagtcctctga

SEQ ID NO: 5007419 - DNA, 25 bp, Homo sapien
taccacagtcacgttttaagtcctc

SEQ ID NO: 5007420 - DNA, 25 bp, Homo sapien
cacgttttaagtcctctgactgaaa

SEQ ID NO: 5007421 - DNA, 25 bp, Homo sapien
ttttaagtcctctgactgaaatgtg

SEQ ID NO: 5007422 - DNA, 25 bp, Homo sapien
tctaaggaggatagatgccaagttc

SEQ ID NO: 5007423 - DNA, 25 bp, Homo sapien
tagggctgcaaaagtgtgggatcac

SEQ ID NO: 5007424 - DNA, 25 bp, Homo sapien
tctccaggagctagaagagcatctg

SEQ ID NO: 5007425 - DNA, 25 bp, Homo sapien
aaacagcatgggcactcttgtagca

SEQ ID NO: 5007426 - DNA, 25 bp, Homo sapien
ggaacagaagcagtatgccggagct

SEQ ID NO: 5007427 - DNA, 25 bp, Homo sapien
cagaagcagtatgccggagctcatc

SEQ ID NO: 5007428 - DNA, 25 bp, Homo sapien
agagagattcgtgggaacagaagca

SEQ ID NO: 5007429 - DNA, 25 bp, Homo sapien
agagattcgtgggaacagaagcagt

SEQ ID NO: 5007430 - DNA, 25 bp, Homo sapien
aacaagacaactgcacatagccagg

SEQ ID NO: 5007431 - DNA, 25 bp, Homo sapien
gggtcacaaatgagcctatcactaa

SEQ ID NO: 5007432 - DNA, 25 bp, Homo sapien
gagaatcaggctgggatgatcaaca

SEQ ID NO: 5007433 - DNA, 25 bp, Homo sapien
taaacacaattagctcccttgaagc

SEQ ID NO: 5007434 - DNA, 25 bp, Homo sapien
ttcacaggggacaagcctgcaagcc

SEQ ID NO: 5007435 - DNA, 25 bp, Homo sapien
caaagggatccatgcttggatcttc

SEQ ID NO: 5007436 - DNA, 25 bp, Homo sapien
tccctgagcttgttcagcaacagca

SEQ ID NO: 5007437 - DNA, 25 bp, Homo sapien
ttctttgccttattctatgtccctg

SEQ ID NO: 5007438 - DNA, 25 bp, Homo sapien
taatcaatgctttgctgtcatgatg

SEQ ID NO: 5007439 - DNA, 25 bp, Homo sapien
tgatggtaaacagcgttaaggcact

SEQ ID NO: 5007440 - DNA, 25 bp, Homo sapien
ccactgcctcgtgactgaattgaaa

SEQ ID NO: 5007441 - DNA, 25 bp, Homo sapien
tcatgatgtccaaggataaaaaagg

SEQ ID NO: 5007442 - DNA, 25 bp, Homo sapien
tcgagtggaaacacgggagggcgag

SEQ ID NO: 5007443 - DNA, 25 bp, Homo sapien
gtcgagtggaaacacgggagggcga

SEQ ID NO: 5007444 - DNA, 25 bp, Homo sapien
cacgggagggcgagggtcaatgcca

SEQ ID NO: 5007445 - DNA, 25 bp, Homo sapien
cgggagggcgagggtcaatgccaaa

SEQ ID NO: 5007446 - DNA, 25 bp, Homo sapien
ctagcaaaatgcatgtggaaaccaa

SEQ ID NO: 5007447 - DNA, 25 bp, Homo sapien
ggtttaccggttctctcacaagcgc

SEQ ID NO: 5007448 - DNA, 25 bp, Homo sapien
tggattttgctgtactgggtttacc

SEQ ID NO: 5007449 - DNA, 25 bp, Homo sapien
tgcatgtggaaaccaagggcttgga

SEQ ID NO: 5007450 - DNA, 25 bp, Homo sapien
tgatggaaactcatcgacaattgtt

SEQ ID NO: 5007451 - DNA, 25 bp, Homo sapien
gtgatggaaactcatcgacaattgt

SEQ ID NO: 5007452 - DNA, 25 bp, Homo sapien
tgtgatggaaactcatcgacaattg

SEQ ID NO: 5007453 - DNA, 25 bp, Homo sapien
ctgtgatggaaactcatcgacaatt

SEQ ID NO: 5007454 - DNA, 25 bp, Homo sapien
gagattgacaagaaacaccgctttc

SEQ ID NO: 5007455 - DNA, 25 bp, Homo sapien
tcaataagcttgaatagccctcaaa

SEQ ID NO: 5007456 - DNA, 25 bp, Homo sapien
tgacaagaaacaccgctttctggtt

SEQ ID NO: 5007457 - DNA, 25 bp, Homo sapien
tctggtttcaataagcttgaatagc

SEQ ID NO: 5007458 - DNA, 25 bp, Homo sapien
gagaagcgccctttcccggcaccca

SEQ ID NO: 5007459 - DNA, 25 bp, Homo sapien
ggcctttgaggaaagcgggagccgc

SEQ ID NO: 5007460 - DNA, 25 bp, Homo sapien
ggcacgaaccggcgcctccgtggtc

SEQ ID NO: 5007461 - DNA, 25 bp, Homo sapien
caacaaacccgacacggcctttgag

SEQ ID NO: 5007462 - DNA, 25 bp, Homo sapien
aggggcacgaaacgctcctcgccgt

SEQ ID NO: 5007463 - DNA, 25 bp, Homo sapien
gtccgaggggcacgaaacgctcctc

SEQ ID NO: 5007464 - DNA, 25 bp, Homo sapien
tcgtcgtcttcgtcgccgtccacca

SEQ ID NO: 5007465 - DNA, 25 bp, Homo sapien
ctggggactgcgtggccgggtccga

SEQ ID NO: 5007466 - DNA, 25 bp, Homo sapien
gcagcagcaccggcgacgaggcggc

SEQ ID NO: 5007467 - DNA, 25 bp, Homo sapien
cagcagcaccggcgacgaggcggcg

SEQ ID NO: 5007468 - DNA, 25 bp, Homo sapien
tagggcggcttccttggcgggcgcg

SEQ ID NO: 5007469 - DNA, 25 bp, Homo sapien
ctccagctctccggggcgggcgccg

SEQ ID NO: 5007470 - DNA, 25 bp, Homo sapien
cagctctccggggcgggcgccgggg

SEQ ID NO: 5007471 - DNA, 25 bp, Homo sapien
gtagggcggcttccttggcgggcgc

SEQ ID NO: 5007472 - DNA, 25 bp, Homo sapien
tagacgccgcgcctgcatgcctgag

SEQ ID NO: 5007473 - DNA, 25 bp, Homo sapien
caggctggagcgcttggctagacgc

SEQ ID NO: 5007474 - DNA, 25 bp, Homo sapien
agcgcttggctagacgccgcgcctg

SEQ ID NO: 5007475 - DNA, 25 bp, Homo sapien
cctgagcgcggggttgcgggccgcg

SEQ ID NO: 5007476 - DNA, 25 bp, Homo sapien
gcgggcgccgccttcgctggaccgg

SEQ ID NO: 5007477 - DNA, 25 bp, Homo sapien
cggtggccgcagggccggggactcg

SEQ ID NO: 5007478 - DNA, 25 bp, Homo sapien
cgccgccttcgctggaccggccggc

SEQ ID NO: 5007479 - DNA, 25 bp, Homo sapien
gggtgtgagcgagcggcgcgctgcc

SEQ ID NO: 5007480 - DNA, 25 bp, Homo sapien
ggcaaacgcttaaccgcagcccatt

SEQ ID NO: 5007481 - DNA, 25 bp, Homo sapien
tctggcgcttcgaagcagttggccc

SEQ ID NO: 5007482 - DNA, 25 bp, Homo sapien
ccacagtctccgaaagtctggcgct

SEQ ID NO: 5007483 - DNA, 25 bp, Homo sapien
ctgacaccagggcaaacgcttaacc

SEQ ID NO: 5007484 - DNA, 25 bp, Homo sapien
gaagtaaggttgtctgtcaaagtta

SEQ ID NO: 5007485 - DNA, 25 bp, Homo sapien
tggaagtaaggttgtctgtcaaagt

SEQ ID NO: 5007486 - DNA, 25 bp, Homo sapien
ctggaagtaaggttgtctgtcaaag

SEQ ID NO: 5007487 - DNA, 25 bp, Homo sapien
agtaaggttgtctgtcaaagttaga

SEQ ID NO: 5007488 - DNA, 25 bp, Homo sapien
tgcagaggaagtctttgctatgtgc

SEQ ID NO: 5007489 - DNA, 25 bp, Homo sapien
cagtgaatgatttctggatggccca

SEQ ID NO: 5007490 - DNA, 25 bp, Homo sapien
aatcatgagcggacacttgtggcca

SEQ ID NO: 5007491 - DNA, 25 bp, Homo sapien
ggatggcccagtccgaatcatgagc

SEQ ID NO: 5007492 - DNA, 25 bp, Homo sapien
tattcagggttactgagagtatgag

SEQ ID NO: 5007493 - DNA, 25 bp, Homo sapien
agaaattctaaagctttgatactat

SEQ ID NO: 5007494 - DNA, 25 bp, Homo sapien
ctgtattctgctgcagtatctgtca

SEQ ID NO: 5007495 - DNA, 25 bp, Homo sapien
tatgagtatgctgttatatgtatcc

SEQ ID NO: 5007496 - DNA, 25 bp, Homo sapien
ggagcaatatgagggcttcgcagaa

SEQ ID NO: 5007497 - DNA, 25 bp, Homo sapien
tcagatggagcaatatgagggcttc

SEQ ID NO: 5007498 - DNA, 25 bp, Homo sapien
tttctcactttcagatggagcaata

SEQ ID NO: 5007499 - DNA, 25 bp, Homo sapien
ggcttcgcagaagcagcaggctctg

SEQ ID NO: 5007500 - DNA, 25 bp, Homo sapien
taagtagagtcttagtccctgaggg

SEQ ID NO: 5007501 - DNA, 25 bp, Homo sapien
tagagtcttagtccctgagggtgga

SEQ ID NO: 5007502 - DNA, 25 bp, Homo sapien
gtcttagtccctgagggtggatcac

SEQ ID NO: 5007503 - DNA, 25 bp, Homo sapien
tcataagtagagtcttagtccctga

SEQ ID NO: 5007504 - DNA, 25 bp, Homo sapien
tctgccagaggaaggtgtatcatac

SEQ ID NO: 5007505 - DNA, 25 bp, Homo sapien
tgccagaggaaggtgtatcatacag

SEQ ID NO: 5007506 - DNA, 25 bp, Homo sapien
gccagaggaaggtgtatcatacagt

SEQ ID NO: 5007507 - DNA, 25 bp, Homo sapien
ctgccagaggaaggtgtatcataca

SEQ ID NO: 5007508 - DNA, 25 bp, Homo sapien
ggggcagagtccctatcagctgctt

SEQ ID NO: 5007509 - DNA, 25 bp, Homo sapien
ggcagagtccctatcagctgctttt

SEQ ID NO: 5007510 - DNA, 25 bp, Homo sapien
cgggggcagagtccctatcagctgc

SEQ ID NO: 5007511 - DNA, 25 bp, Homo sapien
tcgggggcagagtccctatcagctg

SEQ ID NO: 5007512 - DNA, 25 bp, Homo sapien
cggctccagttttcatagccatctc

SEQ ID NO: 5007513 - DNA, 25 bp, Homo sapien
cagcttcggctccagttttcatagc

SEQ ID NO: 5007514 - DNA, 25 bp, Homo sapien
tgactgtttggcacctatcccagcc

SEQ ID NO: 5007515 - DNA, 25 bp, Homo sapien
tcccagccagggtgagcttctactg

SEQ ID NO: 5007516 - DNA, 25 bp, Homo sapien
gcgaatgtccagttgaccacacaga

SEQ ID NO: 5007517 - DNA, 25 bp, Homo sapien
tgtccagttgaccacacagaatgcc

SEQ ID NO: 5007518 - DNA, 25 bp, Homo sapien
cgaatgtccagttgaccacacagaa

SEQ ID NO: 5007519 - DNA, 25 bp, Homo sapien
ctagcgaatgtccagttgaccacac

SEQ ID NO: 5007520 - DNA, 25 bp, Homo sapien
tggggacagtgagagttcttagaag

SEQ ID NO: 5007521 - DNA, 25 bp, Homo sapien
ctggaagctgagccgcagattctga

SEQ ID NO: 5007522 - DNA, 25 bp, Homo sapien
agctgagccgcagattctgacaccc

SEQ ID NO: 5007523 - DNA, 25 bp, Homo sapien
tctggccttgggaagtaaaagctgg

SEQ ID NO: 5007524 - DNA, 25 bp, Homo sapien
cagaaggaccggatagctaggttaa

SEQ ID NO: 5007525 - DNA, 25 bp, Homo sapien
tggtgcagcacaaatgtcccccttt

SEQ ID NO: 5007526 - DNA, 25 bp, Homo sapien
catttggatgccattcatgacagaa

SEQ ID NO: 5007527 - DNA, 25 bp, Homo sapien
tgtgctttcactcgctgcaaggagg

SEQ ID NO: 5007528 - DNA, 25 bp, Homo sapien
agtgtggcatctgactttgtatgcg

SEQ ID NO: 5007529 - DNA, 25 bp, Homo sapien
cagtgtggcatctgactttgtatgc

SEQ ID NO: 5007530 - DNA, 25 bp, Homo sapien
ccagtgtggcatctgactttgtatg

SEQ ID NO: 5007531 - DNA, 25 bp, Homo sapien
gagaggtgcaatgaggcaggtagtt

SEQ ID NO: 5007532 - DNA, 25 bp, Homo sapien
caagagaggtgcaatgaggcaggta

SEQ ID NO: 5007533 - DNA, 25 bp, Homo sapien
aatgaggcaggtagttgttgggaac

SEQ ID NO: 5007534 - DNA, 25 bp, Homo sapien
ggtgcaatgaggcaggtagttgttg

SEQ ID NO: 5007535 - DNA, 25 bp, Homo sapien
caggtgacagggaaccttcgaaact

SEQ ID NO: 5007536 - DNA, 25 bp, Homo sapien
aagaggcgagtgctccattctacag

SEQ ID NO: 5007537 - DNA, 25 bp, Homo sapien
tgacagggaaccttcgaaactgctg

SEQ ID NO: 5007538 - DNA, 25 bp, Homo sapien
ctctgacagaagaggcgagtgctcc

SEQ ID NO: 5007539 - DNA, 25 bp, Homo sapien
cctggctcctgaagtatgtagaaaa

SEQ ID NO: 5007540 - DNA, 25 bp, Homo sapien
gcagatagggaattgggccaacaca

SEQ ID NO: 5007541 - DNA, 25 bp, Homo sapien
gggaagccttcactacctaaatgag

SEQ ID NO: 5007542 - DNA, 25 bp, Homo sapien
aaaagtgtcaaggtcgcaagcatac

SEQ ID NO: 5007543 - DNA, 25 bp, Homo sapien
tgacatcatccttaggcactgtttc

SEQ ID NO: 5007544 - DNA, 25 bp, Homo sapien
cttgacatcatccttaggcactgtt

SEQ ID NO: 5007545 - DNA, 25 bp, Homo sapien
acttgacatcatccttaggcactgt

SEQ ID NO: 5007546 - DNA, 25 bp, Homo sapien
atcagagcaaactggctgtaacttg

SEQ ID NO: 5007547 - DNA, 25 bp, Homo sapien
gggggagagggtgcaatggcttcat

SEQ ID NO: 5007548 - DNA, 25 bp, Homo sapien
ctgggggagagggtgcaatggcttc

SEQ ID NO: 5007549 - DNA, 25 bp, Homo sapien
tgggggagagggtgcaatggcttca

SEQ ID NO: 5007550 - DNA, 25 bp, Homo sapien
ctttcctggtaactatgggtctggt

SEQ ID NO: 5007551 - DNA, 25 bp, Homo sapien
tcactgtggggaacactaagcttac

SEQ ID NO: 5007552 - DNA, 25 bp, Homo sapien
aactatgggtctggtgttgtcataa

SEQ ID NO: 5007553 - DNA, 25 bp, Homo sapien
aaggatctaccttccacatgctgga

SEQ ID NO: 5007554 - DNA, 25 bp, Homo sapien
ttagagcacggcactaacatttctg

SEQ ID NO: 5007555 - DNA, 25 bp, Homo sapien
ctgtgagtttgattccaccacataa

SEQ ID NO: 5007556 - DNA, 25 bp, Homo sapien
ggccccttagtgtcaaccattctta

SEQ ID NO: 5007557 - DNA, 25 bp, Homo sapien
agtgcttttccatggccccttagtg

SEQ ID NO: 5007558 - DNA, 25 bp, Homo sapien
cagagctgtgacgaggcatggttct

SEQ ID NO: 5007559 - DNA, 25 bp, Homo sapien
tccgtactggaaagacataatggca

SEQ ID NO: 5007560 - DNA, 25 bp, Homo sapien
tatggcagcactgtgatccgtactg

SEQ ID NO: 5007561 - DNA, 25 bp, Homo sapien
gtcgtgacaaatagcaccagcatct

SEQ ID NO: 5007562 - DNA, 25 bp, Homo sapien
cacacaaagcgataggccagctaag

SEQ ID NO: 5007563 - DNA, 25 bp, Homo sapien
gcgacccaggggtattgccacacaa

SEQ ID NO: 5007564 - DNA, 25 bp, Homo sapien
gggtattgccacacaaagcgatagg

SEQ ID NO: 5007565 - DNA, 25 bp, Homo sapien
taggccagctaagtaccaggagaca

SEQ ID NO: 5007566 - DNA, 25 bp, Homo sapien
tcattctttagacttactccttaaa

SEQ ID NO: 5007567 - DNA, 25 bp, Homo sapien
tttgtgaattggacaatttgaccat

SEQ ID NO: 5007568 - DNA, 25 bp, Homo sapien
gaattggacaatttgaccattatga

SEQ ID NO: 5007569 - DNA, 25 bp, Homo sapien
gacaatttgaccattatgaagatct

SEQ ID NO: 5007570 - DNA, 25 bp, Homo sapien
tgggcccatgtaatagacaatatgt

SEQ ID NO: 5007571 - DNA, 25 bp, Homo sapien
tactttaatactgattgggcccatg

SEQ ID NO: 5007572 - DNA, 25 bp, Homo sapien
tacgcaaggtgatatgagacaaccc

SEQ ID NO: 5007573 - DNA, 25 bp, Homo sapien
gagacaacccaagggtagcacattt

SEQ ID NO: 5007574 - DNA, 25 bp, Homo sapien
tacttgggagtcacgttgtcttggc

SEQ ID NO: 5007575 - DNA, 25 bp, Homo sapien
gcaccagagttgtgtcagagccaag

SEQ ID NO: 5007576 - DNA, 25 bp, Homo sapien
cagacatgcagtgtagagcagtcac

SEQ ID NO: 5007577 - DNA, 25 bp, Homo sapien
tatgcacacgacatcttcatgggag

SEQ ID NO: 5007578 - DNA, 25 bp, Homo sapien
cttttgagaaattaggcattgaaca

SEQ ID NO: 5007579 - DNA, 25 bp, Homo sapien
agcttatgtgctttatggtatcttt

SEQ ID NO: 5007580 - DNA, 25 bp, Homo sapien
ttgaatcaggagctccaagtaccat

SEQ ID NO: 5007581 - DNA, 25 bp, Homo sapien
ccttgtagtgatctagcttatgtgc

SEQ ID NO: 5007582 - DNA, 25 bp, Homo sapien
tgtttacattttaatcttagattac

SEQ ID NO: 5007583 - DNA, 25 bp, Homo sapien
aatgtttacattttaatcttagatt

SEQ ID NO: 5007584 - DNA, 25 bp, Homo sapien
atgtttacattttaatcttagatta

SEQ ID NO: 5007585 - DNA, 25 bp, Homo sapien
catggctgccgtccaaatatgtggt

SEQ ID NO: 5007586 - DNA, 25 bp, Homo sapien
cacagcccttcagcgatggatgcat

SEQ ID NO: 5007587 - DNA, 25 bp, Homo sapien
tgtggtctgtgtcccaacataaaga

SEQ ID NO: 5007588 - DNA, 25 bp, Homo sapien
gcagcggagaccatgggaaatacac

SEQ ID NO: 5007589 - DNA, 25 bp, Homo sapien
gctgctgatatcgaatgccaaaata

SEQ ID NO: 5007590 - DNA, 25 bp, Homo sapien
cagatccccaggtgctgatgcgcaa

SEQ ID NO: 5007591 - DNA, 25 bp, Homo sapien
tcccttcacccgcagggtccagatc

SEQ ID NO: 5007592 - DNA, 25 bp, Homo sapien
agaagagactccagggacgtccctc

SEQ ID NO: 5007593 - DNA, 25 bp, Homo sapien
tagtccgtacctctctgtctcagaa

SEQ ID NO: 5007594 - DNA, 25 bp, Homo sapien
aacacctatattgagggcaaaggcc

SEQ ID NO: 5007595 - DNA, 25 bp, Homo sapien
tctgaatggcagtactttaggccgg

SEQ ID NO: 5007596 - DNA, 25 bp, Homo sapien
aactgggagaacagtcgacagggcc

SEQ ID NO: 5007597 - DNA, 25 bp, Homo sapien
gagcctggtaatatctctgccttgc

SEQ ID NO: 5007598 - DNA, 25 bp, Homo sapien
tagagcctggtaatatctctgcctt

SEQ ID NO: 5007599 - DNA, 25 bp, Homo sapien
agcctggtaatatctctgccttgct

SEQ ID NO: 5007600 - DNA, 25 bp, Homo sapien
ctagagcctggtaatatctctgcct

SEQ ID NO: 5007601 - DNA, 25 bp, Homo sapien
gagagtctgtatcgcttcataatca

SEQ ID NO: 5007602 - DNA, 25 bp, Homo sapien
gaactgtaagcgactgccccgattt

SEQ ID NO: 5007603 - DNA, 25 bp, Homo sapien
tagtcgttctcctttgggacgagac

SEQ ID NO: 5007604 - DNA, 25 bp, Homo sapien
catagagatcattacaggaggaggg

SEQ ID NO: 5007605 - DNA, 25 bp, Homo sapien
ccgatatcaacagggatttcattca

SEQ ID NO: 5007606 - DNA, 25 bp, Homo sapien
gtatcacctccgatatcaacaggga

SEQ ID NO: 5007607 - DNA, 25 bp, Homo sapien
tcctgtatcacctccgatatcaaca

SEQ ID NO: 5007608 - DNA, 25 bp, Homo sapien
tcacctccgatatcaacagggattt

SEQ ID NO: 5007609 - DNA, 25 bp, Homo sapien
catactgcaggtgaagtttccagct

SEQ ID NO: 5007610 - DNA, 25 bp, Homo sapien
caatccaagggtttacagttcagaa

SEQ ID NO: 5007611 - DNA, 25 bp, Homo sapien
gacaggccttcttatgtctcaaaag

SEQ ID NO: 5007612 - DNA, 25 bp, Homo sapien
gctaactggtcatttgcatgagaac

SEQ ID NO: 5007613 - DNA, 25 bp, Homo sapien
cagtataactaggtcctgtttcaaa

SEQ ID NO: 5007614 - DNA, 25 bp, Homo sapien
gtctgtgagtcatagttctgtcatg

SEQ ID NO: 5007615 - DNA, 25 bp, Homo sapien
gatcactttggctgcagagtagaaa

SEQ ID NO: 5007616 - DNA, 25 bp, Homo sapien
tcctctttgtcctaaaatgaatgtc

SEQ ID NO: 5007617 - DNA, 25 bp, Homo sapien
aattaaggtgtttagctctctgagc

SEQ ID NO: 5007618 - DNA, 25 bp, Homo sapien
tcctataggaagtgatgtacctgca

SEQ ID NO: 5007619 - DNA, 25 bp, Homo sapien
catggacgagggtgggcaatatcac

SEQ ID NO: 5007620 - DNA, 25 bp, Homo sapien
cattcaacgtgggtgtctatgtcca

SEQ ID NO: 5007621 - DNA, 25 bp, Homo sapien
acttgtatgacaatgagctaaatct

SEQ ID NO: 5007622 - DNA, 25 bp, Homo sapien
gagagtggggtcttcttcccgagac

SEQ ID NO: 5007623 - DNA, 25 bp, Homo sapien
ggtcttcttcccgagacttgtatga

SEQ ID NO: 5007624 - DNA, 25 bp, Homo sapien
tcccgagacttgtatgacaatgagc

SEQ ID NO: 5007625 - DNA, 25 bp, Homo sapien
ccagcctgtctcacttctttatagc

SEQ ID NO: 5007626 - DNA, 25 bp, Homo sapien
tgtagagacggggtgctgctacatt

SEQ ID NO: 5007627 - DNA, 25 bp, Homo sapien
taaatttaggaagtataggctatag

SEQ ID NO: 5007628 - DNA, 25 bp, Homo sapien
aggaagtataggctatagtttagaa

SEQ ID NO: 5007629 - DNA, 25 bp, Homo sapien
tttacagctttgttgaatatctaaa

SEQ ID NO: 5007630 - DNA, 25 bp, Homo sapien
ggattgctaatgcattttacagctt

SEQ ID NO: 5007631 - DNA, 25 bp, Homo sapien
aggtttgtacaatcagatataacca

SEQ ID NO: 5007632 - DNA, 25 bp, Homo sapien
tttatatgaaggtttgtacaatcag

SEQ ID NO: 5007633 - DNA, 25 bp, Homo sapien
tatgaaggtttgtacaatcagatat

SEQ ID NO: 5007634 - DNA, 25 bp, Homo sapien
gaaggtttgtacaatcagatataac

SEQ ID NO: 5007635 - DNA, 25 bp, Homo sapien
catggtacctgttgctatgcatgct

SEQ ID NO: 5007636 - DNA, 25 bp, Homo sapien
gttgctatgcatgctgatttttggg

SEQ ID NO: 5007637 - DNA, 25 bp, Homo sapien
tacctgttgctatgcatgctgattt

SEQ ID NO: 5007638 - DNA, 25 bp, Homo sapien
ttcccatggtacctgttgctatgca

SEQ ID NO: 5007639 - DNA, 25 bp, Homo sapien
ggccagctagattcctaaccagaac

SEQ ID NO: 5007640 - DNA, 25 bp, Homo sapien
cagggccagctagattcctaaccag

SEQ ID NO: 5007641 - DNA, 25 bp, Homo sapien
actccagggccagctagattcctaa

SEQ ID NO: 5007642 - DNA, 25 bp, Homo sapien
acaaactggaaagtgtttgcagata

SEQ ID NO: 5007643 - DNA, 25 bp, Homo sapien
gctcccgactctgatgacattttgg

SEQ ID NO: 5007644 - DNA, 25 bp, Homo sapien
tgtccaccgaggcatattcagcaaa

SEQ ID NO: 5007645 - DNA, 25 bp, Homo sapien
tccagaagcttaacagggacaggtg

SEQ ID NO: 5007646 - DNA, 25 bp, Homo sapien
gatccgaggccgatgtctggacttc

SEQ ID NO: 5007647 - DNA, 25 bp, Homo sapien
gcaggtcagagtactgtcctctgaa

SEQ ID NO: 5007648 - DNA, 25 bp, Homo sapien
gtcagagtactgtcctctgaaagaa

SEQ ID NO: 5007649 - DNA, 25 bp, Homo sapien
catgcaggtcagagtactgtcctct

SEQ ID NO: 5007650 - DNA, 25 bp, Homo sapien
ctgcatgcaggtcagagtactgtcc

SEQ ID NO: 5007651 - DNA, 25 bp, Homo sapien
tgcgtgcccagggatcagactgcct

SEQ ID NO: 5007652 - DNA, 25 bp, Homo sapien
tatgcagagtgactgagtgcgtgcc

SEQ ID NO: 5007653 - DNA, 25 bp, Homo sapien
tctgtggaaggcagaacgaccctga

SEQ ID NO: 5007654 - DNA, 25 bp, Homo sapien
gaaagccctgcccttaggatgcaga

SEQ ID NO: 5007655 - DNA, 25 bp, Homo sapien
tgtccccattggtgagtgccccatt

SEQ ID NO: 5007656 - DNA, 25 bp, Homo sapien
ctgttgccaggctagtaactgaacg

SEQ ID NO: 5007657 - DNA, 25 bp, Homo sapien
ggctagtaactgaacggctgaacat

SEQ ID NO: 5007658 - DNA, 25 bp, Homo sapien
ccattggtgagtgccccattctgct

SEQ ID NO: 5007659 - DNA, 25 bp, Homo sapien
aaacaaaaacaaatgcatcacattg

SEQ ID NO: 5007660 - DNA, 25 bp, Homo sapien
aacaaaaacaaatgcatcacattgc

SEQ ID NO: 5007661 - DNA, 25 bp, Homo sapien
acaaaaacaaatgcatcacattgct

SEQ ID NO: 5007662 - DNA, 25 bp, Homo sapien
caaaaacaaatgcatcacattgcta

SEQ ID NO: 5007663 - DNA, 25 bp, Homo sapien
catcaatagttggttttctgcaggg

SEQ ID NO: 5007664 - DNA, 25 bp, Homo sapien
gcacgttccaagaggctatctcatg

SEQ ID NO: 5007665 - DNA, 25 bp, Homo sapien
cctagaacaatatgcctggctcagc

SEQ ID NO: 5007666 - DNA, 25 bp, Homo sapien
catgctccaggattctacaaggaaa

SEQ ID NO: 5007667 - DNA, 25 bp, Homo sapien
gctgtgcaatgatccaaaagtgtat

SEQ ID NO: 5007668 - DNA, 25 bp, Homo sapien
taggttgccaggaacttgcaatgca

SEQ ID NO: 5007669 - DNA, 25 bp, Homo sapien
tggaagccagtaatacacagcagat

SEQ ID NO: 5007670 - DNA, 25 bp, Homo sapien
gctagttggcctcacaaattctctg

SEQ ID NO: 5007671 - DNA, 25 bp, Homo sapien
acaggcagacgacacgcgcaggctc

SEQ ID NO: 5007672 - DNA, 25 bp, Homo sapien
gataagtagctgatgttctggagca

SEQ ID NO: 5007673 - DNA, 25 bp, Homo sapien
gacagacaggcagacgacacgcgca

SEQ ID NO: 5007674 - DNA, 25 bp, Homo sapien
ttctggagcacgcacggacagacag

SEQ ID NO: 5007675 - DNA, 25 bp, Homo sapien
ggttctcatggtccccactatgctg

SEQ ID NO: 5007676 - DNA, 25 bp, Homo sapien
ccactatgctgtcgcggcttctttt

SEQ ID NO: 5007677 - DNA, 25 bp, Homo sapien
tcatggtccccactatgctgtcgcg

SEQ ID NO: 5007678 - DNA, 25 bp, Homo sapien
ggtccccactatgctgtcgcggctt

SEQ ID NO: 5007679 - DNA, 25 bp, Homo sapien
taaaatcaagcgcacactacccttt

SEQ ID NO: 5007680 - DNA, 25 bp, Homo sapien
tttcctatcccaattcttatcagct

SEQ ID NO: 5007681 - DNA, 25 bp, Homo sapien
aatgttgtaatgtcaaatgtgcccc

SEQ ID NO: 5007682 - DNA, 25 bp, Homo sapien
taaatctctcgttttaagaaccatg

SEQ ID NO: 5007683 - DNA, 25 bp, Homo sapien
aagcctcaactagggactgtccacc

SEQ ID NO: 5007684 - DNA, 25 bp, Homo sapien
cgaggcctgggcctgcgtagaaatt

SEQ ID NO: 5007685 - DNA, 25 bp, Homo sapien
gaggaccgaggcctgggcctgcgta

SEQ ID NO: 5007686 - DNA, 25 bp, Homo sapien
gttcaagcctcaactagggactgtc

SEQ ID NO: 5007687 - DNA, 25 bp, Homo sapien
aatggcgacagcagccagacttccc

SEQ ID NO: 5007688 - DNA, 25 bp, Homo sapien
tgatgacgaagaaaatggcgacagc

SEQ ID NO: 5007689 - DNA, 25 bp, Homo sapien
gtcacaactagagcacaggaagatg

SEQ ID NO: 5007690 - DNA, 25 bp, Homo sapien
ctgtcacaactagagcacaggaaga

SEQ ID NO: 5007691 - DNA, 25 bp, Homo sapien
tggcaccagccgagggaatcagtca

SEQ ID NO: 5007692 - DNA, 25 bp, Homo sapien
caccagccgagggaatcagtcagtc

SEQ ID NO: 5007693 - DNA, 25 bp, Homo sapien
tccttcaaaggtggtgacatggagg

SEQ ID NO: 5007694 - DNA, 25 bp, Homo sapien
gtccttcaaaggtggtgacatggag

SEQ ID NO: 5007695 - DNA, 25 bp, Homo sapien
agtggcagaatctgtaattcggtcc

SEQ ID NO: 5007696 - DNA, 25 bp, Homo sapien
taattcggtccctgtcaggagcaag

SEQ ID NO: 5007697 - DNA, 25 bp, Homo sapien
accagtgcgtttggagagtaattct

SEQ ID NO: 5007698 - DNA, 25 bp, Homo sapien
agtaattctcgggtaaagtggcaga

SEQ ID NO: 5007699 - DNA, 25 bp, Homo sapien
gagccccggactggacttgaaattg

SEQ ID NO: 5007700 - DNA, 25 bp, Homo sapien
aaagcgggaacatacagctgcctgg

SEQ ID NO: 5007701 - DNA, 25 bp, Homo sapien
cctggatggattcttaatgtcttca

SEQ ID NO: 5007702 - DNA, 25 bp, Homo sapien
ctttgcgcaaagtcagggaagcgtg

SEQ ID NO: 5007703 - DNA, 25 bp, Homo sapien
gcttcagtgataaagctgtgactgt

SEQ ID NO: 5007704 - DNA, 25 bp, Homo sapien
acattttcgtttgcttcagtgataa

SEQ ID NO: 5007705 - DNA, 25 bp, Homo sapien
ttcgtttgcttcagtgataaagctg

SEQ ID NO: 5007706 - DNA, 25 bp, Homo sapien
tttgcttcagtgataaagctgtgac

SEQ ID NO: 5007707 - DNA, 25 bp, Homo sapien
ctgagcacagacatcaagacggcag

SEQ ID NO: 5007708 - DNA, 25 bp, Homo sapien
gagcacagacatcaagacggcaggg

SEQ ID NO: 5007709 - DNA, 25 bp, Homo sapien
gggtggcttcgcagcaaaccagggt

SEQ ID NO: 5007710 - DNA, 25 bp, Homo sapien
gcttcgcagcaaaccagggtgcctc

SEQ ID NO: 5007711 - DNA, 25 bp, Homo sapien
ggactccctgcgtaatacagaactt

SEQ ID NO: 5007712 - DNA, 25 bp, Homo sapien
cgtcttctaaggctctataattata

SEQ ID NO: 5007713 - DNA, 25 bp, Homo sapien
tctttgaatcaacatgaacgtcttc

SEQ ID NO: 5007714 - DNA, 25 bp, Homo sapien
aattatataaatgcaggactccctg

SEQ ID NO: 5007715 - DNA, 25 bp, Homo sapien
gagtcagatgcactgcagtcctcag

SEQ ID NO: 5007716 - DNA, 25 bp, Homo sapien
caggtgcacgtttctgagtcagatg

SEQ ID NO: 5007717 - DNA, 25 bp, Homo sapien
ggacaaaattctcacagcgaacaga

SEQ ID NO: 5007718 - DNA, 25 bp, Homo sapien
aacagaatgatcatcatcaggtgca

SEQ ID NO: 5007719 - DNA, 25 bp, Homo sapien
cagtgctggcgggttgagtggctgc

SEQ ID NO: 5007720 - DNA, 25 bp, Homo sapien
gagtggctgcaccagcaactgccac

SEQ ID NO: 5007721 - DNA, 25 bp, Homo sapien
tggtcgtgggcagtgctggcgggtt

SEQ ID NO: 5007722 - DNA, 25 bp, Homo sapien
tgtgggacaccagtccccgtggtcg

SEQ ID NO: 5007723 - DNA, 25 bp, Homo sapien
gcagacgtccttggtggacggttcc

SEQ ID NO: 5007724 - DNA, 25 bp, Homo sapien
agcagacgtccttggtggacggttc

SEQ ID NO: 5007725 - DNA, 25 bp, Homo sapien
gacatggttatggtccacaaggacc

SEQ ID NO: 5007726 - DNA, 25 bp, Homo sapien
tgtgacatggttatggtccacaagg

SEQ ID NO: 5007727 - DNA, 25 bp, Homo sapien
gtcctgtgacatggttatggtccac

SEQ ID NO: 5007728 - DNA, 25 bp, Homo sapien
cctgtgacatggttatggtccacaa

SEQ ID NO: 5007729 - DNA, 25 bp, Homo sapien
gccacactgaactctgcacggatga

SEQ ID NO: 5007730 - DNA, 25 bp, Homo sapien
cacggatgagtgtctgttggaaaca

SEQ ID NO: 5007731 - DNA, 25 bp, Homo sapien
tccatcctgctaaggtacaaaggct

SEQ ID NO: 5007732 - DNA, 25 bp, Homo sapien
tccgttcaggttacagggactgtgc

SEQ ID NO: 5007733 - DNA, 25 bp, Homo sapien
taggttcctcacacaagcctcaagg

SEQ ID NO: 5007734 - DNA, 25 bp, Homo sapien
tgaatcgattgtaaggactcctggg

SEQ ID NO: 5007735 - DNA, 25 bp, Homo sapien
ggctggaccttccatttctaaagga

SEQ ID NO: 5007736 - DNA, 25 bp, Homo sapien
accatgtccccaagcttagtgttct

SEQ ID NO: 5007737 - DNA, 25 bp, Homo sapien
cagaggagtttgtaacaccagttca

SEQ ID NO: 5007738 - DNA, 25 bp, Homo sapien
tactgccatcgtaaggactgctggc

SEQ ID NO: 5007739 - DNA, 25 bp, Homo sapien
gctaatattgtacccagcaatggca

SEQ ID NO: 5007740 - DNA, 25 bp, Homo sapien
tgccaaattagagaacgcgtcctgt

SEQ ID NO: 5007741 - DNA, 25 bp, Homo sapien
aaattcaggactttccacacaaagg

SEQ ID NO: 5007742 - DNA, 25 bp, Homo sapien
ttttagtcagcatgcagtgccggga

SEQ ID NO: 5007743 - DNA, 25 bp, Homo sapien
cacagcagttaggtggatgtcagga

SEQ ID NO: 5007744 - DNA, 25 bp, Homo sapien
gctgtgtggcctgaagcgagtccaa

SEQ ID NO: 5007745 - DNA, 25 bp, Homo sapien
gcttctggtagagagggcttctcca

SEQ ID NO: 5007746 - DNA, 25 bp, Homo sapien
tatagtccctcatgcaatatgcaca

SEQ ID NO: 5007747 - DNA, 25 bp, Homo sapien
cagtgccagctacttttgcagagaa

SEQ ID NO: 5007748 - DNA, 25 bp, Homo sapien
agagaaggcgttttgcagcctgtgc

SEQ ID NO: 5007749 - DNA, 25 bp, Homo sapien
gagacacccgtgtttagacgcatgg

SEQ ID NO: 5007750 - DNA, 25 bp, Homo sapien
tgaattctagaaggacagggatgac

SEQ ID NO: 5007751 - DNA, 25 bp, Homo sapien
gccctaatgcctagaccctggagta

SEQ ID NO: 5007752 - DNA, 25 bp, Homo sapien
taagcaagctctgctatggtccagg

SEQ ID NO: 5007753 - DNA, 25 bp, Homo sapien
gaaattccgcaggaaaggaacaagc

SEQ ID NO: 5007754 - DNA, 25 bp, Homo sapien
cacacgaaggtgtcttccagggacc

SEQ ID NO: 5007755 - DNA, 25 bp, Homo sapien
aacaagcaggcaggataggaggcat

SEQ ID NO: 5007756 - DNA, 25 bp, Homo sapien
cagatgggccagcaattaccctgca

SEQ ID NO: 5007757 - DNA, 25 bp, Homo sapien
aatgccaggcctcagtcacagccag

SEQ ID NO: 5007758 - DNA, 25 bp, Homo sapien
tccagttcacggtttgcatgctgct

SEQ ID NO: 5007759 - DNA, 25 bp, Homo sapien
ttctgaacatttggagcatggctcc

SEQ ID NO: 5007760 - DNA, 25 bp, Homo sapien
gagaagtgggaacacatagcctcaa

SEQ ID NO: 5007761 - DNA, 25 bp, Homo sapien
gatgacgtacataggctaattttca

SEQ ID NO: 5007762 - DNA, 25 bp, Homo sapien
gaaccaccagatgacgtacataggc

SEQ ID NO: 5007763 - DNA, 25 bp, Homo sapien
tcaatgcacatctttaaatgcgtct

SEQ ID NO: 5007764 - DNA, 25 bp, Homo sapien
tcttatctttggcagcatacacttg

SEQ ID NO: 5007765 - DNA, 25 bp, Homo sapien
gtgatgtgtccctttattggtacaa

SEQ ID NO: 5007766 - DNA, 25 bp, Homo sapien
attaaacctttgtgctgtaccactg

SEQ ID NO: 5007767 - DNA, 25 bp, Homo sapien
cactctaggtctgtatgagactaaa

SEQ ID NO: 5007768 - DNA, 25 bp, Homo sapien
taccactgccattcaaaaattctag

SEQ ID NO: 5007769 - DNA, 25 bp, Homo sapien
gaaatgttgtggtgagagttctctc

SEQ ID NO: 5007770 - DNA, 25 bp, Homo sapien
ttgaaatgttgtggtgagagttctc

SEQ ID NO: 5007771 - DNA, 25 bp, Homo sapien
ggaaatgtttgtccagtagagtatt

SEQ ID NO: 5007772 - DNA, 25 bp, Homo sapien
aatgtttgtccagtagagtattcca

SEQ ID NO: 5007773 - DNA, 25 bp, Homo sapien
tttttggtaaggtaagctgtgattc

SEQ ID NO: 5007774 - DNA, 25 bp, Homo sapien
tcttattagaaggagactttggtgc

SEQ ID NO: 5007775 - DNA, 25 bp, Homo sapien
ttggtaaggtaagctgtgattcagt

SEQ ID NO: 5007776 - DNA, 25 bp, Homo sapien
ctttggtgcagcgtgaacagtgtca

SEQ ID NO: 5007777 - DNA, 25 bp, Homo sapien
agatctagccccgagttgtcccttc

SEQ ID NO: 5007778 - DNA, 25 bp, Homo sapien
catgcagatctagccccgagttgtc

SEQ ID NO: 5007779 - DNA, 25 bp, Homo sapien
ccgagttgtcccttcacgcattctg

SEQ ID NO: 5007780 - DNA, 25 bp, Homo sapien
ctggacgacatgcagatctagcccc

SEQ ID NO: 5007781 - DNA, 25 bp, Homo sapien
tgggtgcagggcttgatagacaact

SEQ ID NO: 5007782 - DNA, 25 bp, Homo sapien
gacaactgagttcccaagccatcgt

SEQ ID NO: 5007783 - DNA, 25 bp, Homo sapien
tcttgtcatcatggtcaatccaggg

SEQ ID NO: 5007784 - DNA, 25 bp, Homo sapien
tgtcttcttctaagccgactccagg

SEQ ID NO: 5007785 - DNA, 25 bp, Homo sapien
tatcctgtccatggaatgccacgcc

SEQ ID NO: 5007786 - DNA, 25 bp, Homo sapien
catgaggacggttggtgacttctta

SEQ ID NO: 5007787 - DNA, 25 bp, Homo sapien
tgaactcttgttctggctaaagcca

SEQ ID NO: 5007788 - DNA, 25 bp, Homo sapien
cattcataagaaggcccaagcaagt

SEQ ID NO: 5007789 - DNA, 25 bp, Homo sapien
accaacaccagggaagtattgcggg

SEQ ID NO: 5007790 - DNA, 25 bp, Homo sapien
gagaagatgtcagcccagattatgg

SEQ ID NO: 5007791 - DNA, 25 bp, Homo sapien
acctaccagaatgagcagccagagg

SEQ ID NO: 5007792 - DNA, 25 bp, Homo sapien
cagaggcttgactggccatttacca

SEQ ID NO: 5007793 - DNA, 25 bp, Homo sapien
aaggcttcttgaacggtcaaggcca

SEQ ID NO: 5007794 - DNA, 25 bp, Homo sapien
cactgatggtagttctccctgactt

SEQ ID NO: 5007795 - DNA, 25 bp, Homo sapien
ttcttaaatatccttctccactgat

SEQ ID NO: 5007796 - DNA, 25 bp, Homo sapien
tctggagtgtgaaggataaagtaaa

SEQ ID NO: 5007797 - DNA, 25 bp, Homo sapien
cgcaatcgcatcctcacattcctgc

SEQ ID NO: 5007798 - DNA, 25 bp, Homo sapien
cagaagccagtagaacatgtgctca

SEQ ID NO: 5007799 - DNA, 25 bp, Homo sapien
tggcagaagccagtagaacatgtgc

SEQ ID NO: 5007800 - DNA, 25 bp, Homo sapien
tcagctggtgagtcaactccgcaat

SEQ ID NO: 5007801 - DNA, 25 bp, Homo sapien
gaaaagaaaccatccttctgcaggt

SEQ ID NO: 5007802 - DNA, 25 bp, Homo sapien
taagggaggtatcaaaaacttgcca

SEQ ID NO: 5007803 - DNA, 25 bp, Homo sapien
tatagcagttttgaacaacagcagc

SEQ ID NO: 5007804 - DNA, 25 bp, Homo sapien
taaactccttgtctagcagaaggga

SEQ ID NO: 5007805 - DNA, 25 bp, Homo sapien
ctctctgctcccttgaaagaatagc

SEQ ID NO: 5007806 - DNA, 25 bp, Homo sapien
ttgtatttaacaggctctacagcag

SEQ ID NO: 5007807 - DNA, 25 bp, Homo sapien
cattacctttgatgaccacagaacc

SEQ ID NO: 5007808 - DNA, 25 bp, Homo sapien
tgtgttaacctgacatgagggccca

SEQ ID NO: 5007809 - DNA, 25 bp, Homo sapien
taagggcacaagtcttttatcagga

SEQ ID NO: 5007810 - DNA, 25 bp, Homo sapien
gcaaagtgctatgccacacagcatt

SEQ ID NO: 5007811 - DNA, 25 bp, Homo sapien
tcttgagtcgatgggattaagggca

SEQ ID NO: 5007812 - DNA, 25 bp, Homo sapien
tatgagagtttcctgtttggcaaag

SEQ ID NO: 5007813 - DNA, 25 bp, Homo sapien
aagttcagaaactcgccataggtca

SEQ ID NO: 5007814 - DNA, 25 bp, Homo sapien
caaaatgtcccaaagaagttcagaa

SEQ ID NO: 5007815 - DNA, 25 bp, Homo sapien
tactttcaaacggaagagtcctgat

SEQ ID NO: 5007816 - DNA, 25 bp, Homo sapien
gaaactagcttttacgtcacctgac

SEQ ID NO: 5007817 - DNA, 25 bp, Homo sapien
cttttcccagcaatgaagttgtggc

SEQ ID NO: 5007818 - DNA, 25 bp, Homo sapien
caatgaagttgtggccaactgctga

SEQ ID NO: 5007819 - DNA, 25 bp, Homo sapien
cagcaatgaagttgtggccaactgc

SEQ ID NO: 5007820 - DNA, 25 bp, Homo sapien
tcccagcaatgaagttgtggccaac

SEQ ID NO: 5007821 - DNA, 25 bp, Homo sapien
aaattgtccagtgcagagatgctgc

SEQ ID NO: 5007822 - DNA, 25 bp, Homo sapien
gaagatttgagtttagcacacagac

SEQ ID NO: 5007823 - DNA, 25 bp, Homo sapien
catacactaagggacaggctattta

SEQ ID NO: 5007824 - DNA, 25 bp, Homo sapien
tctggttccagagtacaggcgcttt

SEQ ID NO: 5007825 - DNA, 25 bp, Homo sapien
tgcaccagccacatggaatgaccag

SEQ ID NO: 5007826 - DNA, 25 bp, Homo sapien
gcccggctgcgttaggaaaagtcat

SEQ ID NO: 5007827 - DNA, 25 bp, Homo sapien
gactgaaaacacagacaagctgcta

SEQ ID NO: 5007828 - DNA, 25 bp, Homo sapien
ggagccaagcatcctttaagcactg

SEQ ID NO: 5007829 - DNA, 25 bp, Homo sapien
caaatacagtgagacgagatgcctg

SEQ ID NO: 5007830 - DNA, 25 bp, Homo sapien
aaaagcttacatatgcaaccctggg

SEQ ID NO: 5007831 - DNA, 25 bp, Homo sapien
gatacggtacctagggattgggtca

SEQ ID NO: 5007832 - DNA, 25 bp, Homo sapien
tttgacttagaacatgagctccctc

SEQ ID NO: 5007833 - DNA, 25 bp, Homo sapien
tattggcaccagtatgaaatcgaga

SEQ ID NO: 5007834 - DNA, 25 bp, Homo sapien
caaatgagagatcaacaggatatgc

SEQ ID NO: 5007835 - DNA, 25 bp, Homo sapien
gcttactccataaggttcacaggat

SEQ ID NO: 5007836 - DNA, 25 bp, Homo sapien
aaaatcatacagtcctataacatca

SEQ ID NO: 5007837 - DNA, 25 bp, Homo sapien
ttattaagataattaggcccatcag

SEQ ID NO: 5007838 - DNA, 25 bp, Homo sapien
gatgtgttcaaaaagcggtcctctg

SEQ ID NO: 5007839 - DNA, 25 bp, Homo sapien
gactcaacaattgtctggcatgaac

SEQ ID NO: 5007840 - DNA, 25 bp, Homo sapien
taggcccatcagtacacttaacttt

SEQ ID NO: 5007841 - DNA, 25 bp, Homo sapien
cagcagtcgaaatgccctaggagta

SEQ ID NO: 5007842 - DNA, 25 bp, Homo sapien
tcaccccaacgtaaacacagagtca

SEQ ID NO: 5007843 - DNA, 25 bp, Homo sapien
ttggaatgaataattagcacgcagc

SEQ ID NO: 5007844 - DNA, 25 bp, Homo sapien
gagtcaaggagcttggaatgaataa

SEQ ID NO: 5007845 - DNA, 25 bp, Homo sapien
catatttccaactggcacattcgtg

SEQ ID NO: 5007846 - DNA, 25 bp, Homo sapien
tccaactggcacattcgtgagatgc

SEQ ID NO: 5007847 - DNA, 25 bp, Homo sapien
actggcacattcgtgagatgctgag

SEQ ID NO: 5007848 - DNA, 25 bp, Homo sapien
tgtcctctcccagcatatttccaac

SEQ ID NO: 5007849 - DNA, 25 bp, Homo sapien
ctctgcaccagtcgccttggctcag

SEQ ID NO: 5007850 - DNA, 25 bp, Homo sapien
gggcgccgggcattcgccagggcac

SEQ ID NO: 5007851 - DNA, 25 bp, Homo sapien
gccagggcacacgactcagcgaggc

SEQ ID NO: 5007852 - DNA, 25 bp, Homo sapien
agcctctgcaaactccggcgcgcag

SEQ ID NO: 5007853 - DNA, 25 bp, Homo sapien
tccgagcccctggtgggtgtctctg

SEQ ID NO: 5007854 - DNA, 25 bp, Homo sapien
cccagtcggctggtcacatcgcggg

SEQ ID NO: 5007855 - DNA, 25 bp, Homo sapien
aggagaaaaaccgatgcgctgccgc

SEQ ID NO: 5007856 - DNA, 25 bp, Homo sapien
gctccaagggaatcacggctcaatt

SEQ ID NO: 5007857 - DNA, 25 bp, Homo sapien
cgccgcggagaatgacaggcgccga

SEQ ID NO: 5007858 - DNA, 25 bp, Homo sapien
cgccgcgccgcggagaatgacaggc

SEQ ID NO: 5007859 - DNA, 25 bp, Homo sapien
cgcggagaatgacaggcgccgaggc

SEQ ID NO: 5007860 - DNA, 25 bp, Homo sapien
cggagaatgacaggcgccgaggcgg

SEQ ID NO: 5007861 - DNA, 25 bp, Homo sapien
ttcatagacacagtccagataagag

SEQ ID NO: 5007862 - DNA, 25 bp, Homo sapien
acagtccagataagagaactgtggg

SEQ ID NO: 5007863 - DNA, 25 bp, Homo sapien
gacacagtccagataagagaactgt

SEQ ID NO: 5007864 - DNA, 25 bp, Homo sapien
tagacacagtccagataagagaact

SEQ ID NO: 5007865 - DNA, 25 bp, Homo sapien
aagtgctgaggattccacgtgtgac

SEQ ID NO: 5007866 - DNA, 25 bp, Homo sapien
ctgaacttaaagtgctgaggattcc

SEQ ID NO: 5007867 - DNA, 25 bp, Homo sapien
ttaaagtgctgaggattccacgtgt

SEQ ID NO: 5007868 - DNA, 25 bp, Homo sapien
ctgaggattccacgtgtgactttgt

SEQ ID NO: 5007869 - DNA, 25 bp, Homo sapien
tccgtgttttcctgtgtaattcttc

SEQ ID NO: 5007870 - DNA, 25 bp, Homo sapien
aatccgtgttttcctgtgtaattct

SEQ ID NO: 5007871 - DNA, 25 bp, Homo sapien
ctgtgtaattcttccctttctttct

SEQ ID NO: 5007872 - DNA, 25 bp, Homo sapien
tcaaatccgtgttttcctgtgtaat

SEQ ID NO: 5007873 - DNA, 25 bp, Homo sapien
cctagttctcgtgtggtacctgtgt

SEQ ID NO: 5007874 - DNA, 25 bp, Homo sapien
tcctagttctcgtgtggtacctgtg

SEQ ID NO: 5007875 - DNA, 25 bp, Homo sapien
ctcctagttctcgtgtggtacctgt

SEQ ID NO: 5007876 - DNA, 25 bp, Homo sapien
cctcctagttctcgtgtggtacctg

SEQ ID NO: 5007877 - DNA, 25 bp, Homo sapien
tgaagattaaactgtgaagtttctt

SEQ ID NO: 5007878 - DNA, 25 bp, Homo sapien
tcgtgtgaagattaaactgtgaagt

SEQ ID NO: 5007879 - DNA, 25 bp, Homo sapien
ctcgtgtgaagattaaactgtgaag

SEQ ID NO: 5007880 - DNA, 25 bp, Homo sapien
tgtgaagattaaactgtgaagtttc

SEQ ID NO: 5007881 - DNA, 25 bp, Homo sapien
cttgctgtcaaaacattccaatctg

SEQ ID NO: 5007882 - DNA, 25 bp, Homo sapien
gctgtcaaaacattccaatctgatt

SEQ ID NO: 5007883 - DNA, 25 bp, Homo sapien
ccaatctgatttgatgcaacttcat

SEQ ID NO: 5007884 - DNA, 25 bp, Homo sapien
catttgctgtgtcttgctgtcaaaa

SEQ ID NO: 5007885 - DNA, 25 bp, Homo sapien
cacttcctatgtcgatgacatgctt

SEQ ID NO: 5007886 - DNA, 25 bp, Homo sapien
gatgacatgcttgtattgatttttc

SEQ ID NO: 5007887 - DNA, 25 bp, Homo sapien
tgcaacacgtagagcttcttcaggt

SEQ ID NO: 5007888 - DNA, 25 bp, Homo sapien
ctggtgctcaatccaaagggcctcc

SEQ ID NO: 5007889 - DNA, 25 bp, Homo sapien
tgcaccaatagcgattagagagaca

SEQ ID NO: 5007890 - DNA, 25 bp, Homo sapien
gcaccaatagcgattagagagacac

SEQ ID NO: 5007891 - DNA, 25 bp, Homo sapien
ctgcaccaatagcgattagagagac

SEQ ID NO: 5007892 - DNA, 25 bp, Homo sapien
caccaatagcgattagagagacact

SEQ ID NO: 5007893 - DNA, 25 bp, Homo sapien
ggggctccgggccaggtgcttgcat

SEQ ID NO: 5007894 - DNA, 25 bp, Homo sapien
ctgtccaccagtttcctgctgtggg

SEQ ID NO: 5007895 - DNA, 25 bp, Homo sapien
tccaccagtttcctgctgtgggggc

SEQ ID NO: 5007896 - DNA, 25 bp, Homo sapien
gggggctccgggccaggtgcttgca

SEQ ID NO: 5007897 - DNA, 25 bp, Homo sapien
tcaacgtatgtgtggatgttccagc

SEQ ID NO: 5007898 - DNA, 25 bp, Homo sapien
gttcctcaacgtatgtgtggatgtt

SEQ ID NO: 5007899 - DNA, 25 bp, Homo sapien
tatgtgtggatgttccagctgagaa

SEQ ID NO: 5007900 - DNA, 25 bp, Homo sapien
acgtatgtgtggatgttccagctga

SEQ ID NO: 5007901 - DNA, 25 bp, Homo sapien
ggcctttgaccacaaatgctggggt

SEQ ID NO: 5007902 - DNA, 25 bp, Homo sapien
aaggcctttgaccacaaatgctggg

SEQ ID NO: 5007903 - DNA, 25 bp, Homo sapien
gcctttgaccacaaatgctggggtc

SEQ ID NO: 5007904 - DNA, 25 bp, Homo sapien
gaaggcctttgaccacaaatgctgg

SEQ ID NO: 5007905 - DNA, 25 bp, Homo sapien
tagtcccgaaagtcagtctttgctt

SEQ ID NO: 5007906 - DNA, 25 bp, Homo sapien
ctagtcccgaaagtcagtctttgct

SEQ ID NO: 5007907 - DNA, 25 bp, Homo sapien
agtcccgaaagtcagtctttgcttt

SEQ ID NO: 5007908 - DNA, 25 bp, Homo sapien
ctttccccctggaacataaagtcat

SEQ ID NO: 5007909 - DNA, 25 bp, Homo sapien
aacataaagtcattaagtaactggc

SEQ ID NO: 5007910 - DNA, 25 bp, Homo sapien
ttgacaagacaagaagtcttgtctt

SEQ ID NO: 5007911 - DNA, 25 bp, Homo sapien
agtaactggccttgaaggttattgt

SEQ ID NO: 5007912 - DNA, 25 bp, Homo sapien
agaatttcactttgcggacagctct

SEQ ID NO: 5007913 - DNA, 25 bp, Homo sapien
taatttggcaaggaattatcatcct

SEQ ID NO: 5007914 - DNA, 25 bp, Homo sapien
tataatttggcaaggaattatcatc

SEQ ID NO: 5007915 - DNA, 25 bp, Homo sapien
tttgagaatttcactttgcggacag

SEQ ID NO: 5007916 - DNA, 25 bp, Homo sapien
tgtgggaccactcaaggatgagctg

SEQ ID NO: 5007917 - DNA, 25 bp, Homo sapien
agctgcctcctttggttgtaaaaga

SEQ ID NO: 5007918 - DNA, 25 bp, Homo sapien
ggaccactcaaggatgagctgcctc

SEQ ID NO: 5007919 - DNA, 25 bp, Homo sapien
gctgcctcctttggttgtaaaagaa

SEQ ID NO: 5007920 - DNA, 25 bp, Homo sapien
caaatacaactgtttggcttctctc

SEQ ID NO: 5007921 - DNA, 25 bp, Homo sapien
tcaaatacaactgtttggcttctct

SEQ ID NO: 5007922 - DNA, 25 bp, Homo sapien
tggtgctactatccagatcctgttc

SEQ ID NO: 5007923 - DNA, 25 bp, Homo sapien
agctaagaacccatgtcctgctcag

SEQ ID NO: 5007924 - DNA, 25 bp, Homo sapien
tattaggtggatcataaacctttgc

SEQ ID NO: 5007925 - DNA, 25 bp, Homo sapien
gccagcccaaaggataacaagctaa

SEQ ID NO: 5007926 - DNA, 25 bp, Homo sapien
ctgcttccttggcgtcaggatgcat

SEQ ID NO: 5007927 - DNA, 25 bp, Homo sapien
gtttttcagagttagttcaacatag

SEQ ID NO: 5007928 - DNA, 25 bp, Homo sapien
tgctccacctcgtgagcacgctcca

SEQ ID NO: 5007929 - DNA, 25 bp, Homo sapien
aacatagaacctttgaccccactgc

SEQ ID NO: 5007930 - DNA, 25 bp, Homo sapien
tcagcttactgggtgtaaaaacaag

SEQ ID NO: 5007931 - DNA, 25 bp, Homo sapien
tgggatagaaagaccaacacctcgt

SEQ ID NO: 5007932 - DNA, 25 bp, Homo sapien
tctgtaaagttataccgagtgtaac

SEQ ID NO: 5007933 - DNA, 25 bp, Homo sapien
gaaatcctttatgatgatctacttt

SEQ ID NO: 5007934 - DNA, 25 bp, Homo sapien
ttttacatgtcggttcctgcccttc

SEQ ID NO: 5007935 - DNA, 25 bp, Homo sapien
ttacatgtcggttcctgcccttcac

SEQ ID NO: 5007936 - DNA, 25 bp, Homo sapien
tttacatgtcggttcctgcccttca

SEQ ID NO: 5007937 - DNA, 25 bp, Homo sapien
gaagacccgtgtggtgactgcaaag

SEQ ID NO: 5007938 - DNA, 25 bp, Homo sapien
atgggtattttagacccaacacagg

SEQ ID NO: 5007939 - DNA, 25 bp, Homo sapien
tttcagagagtgaccgaataggaag

SEQ ID NO: 5007940 - DNA, 25 bp, Homo sapien
cagagagtgaccgaataggaagaag

SEQ ID NO: 5007941 - DNA, 25 bp, Homo sapien
atgatgtagtagaacatgccctgca

SEQ ID NO: 5007942 - DNA, 25 bp, Homo sapien
gttcttgtacccagagtgattctac

SEQ ID NO: 5007943 - DNA, 25 bp, Homo sapien
cataatagtagttaccattcactga

SEQ ID NO: 5007944 - DNA, 25 bp, Homo sapien
gctcagttccttccggctccaaatt

SEQ ID NO: 5007945 - DNA, 25 bp, Homo sapien
cactgaattatatatggtgctgata

SEQ ID NO: 5007946 - DNA, 25 bp, Homo sapien
tattattgtcccatcaaaatggtcg

SEQ ID NO: 5007947 - DNA, 25 bp, Homo sapien
tatttggcaactcagtaggatgtct

SEQ ID NO: 5007948 - DNA, 25 bp, Homo sapien
tggtagttttgagatctcctctttg

SEQ ID NO: 5007949 - DNA, 25 bp, Homo sapien
tcttgactgactcaataaaggagtg

SEQ ID NO: 5007950 - DNA, 25 bp, Homo sapien
caacagatgtgtgtagctcaggtga

SEQ ID NO: 5007951 - DNA, 25 bp, Homo sapien
aataatgtgattagaagcgggcttg

SEQ ID NO: 5007952 - DNA, 25 bp, Homo sapien
aagttgcattgcctggtaaacatag

SEQ ID NO: 5007953 - DNA, 25 bp, Homo sapien
tatctgttgccatgagctattgaca

SEQ ID NO: 5007954 - DNA, 25 bp, Homo sapien
cacatgtctggaaagtaggaagatc

SEQ ID NO: 5007955 - DNA, 25 bp, Homo sapien
gcaagcacaagtttatgatggatca

SEQ ID NO: 5007956 - DNA, 25 bp, Homo sapien
taatggttagccgtggcagttatga

SEQ ID NO: 5007957 - DNA, 25 bp, Homo sapien
tctagtccagttaactcagcaagca

SEQ ID NO: 5007958 - DNA, 25 bp, Homo sapien
taaaatgagccattatgtcctctgc

SEQ ID NO: 5007959 - DNA, 25 bp, Homo sapien
ggctggatgcattgaaggattaaaa

SEQ ID NO: 5007960 - DNA, 25 bp, Homo sapien
gagtgagggtcaaaaatctagttat

SEQ ID NO: 5007961 - DNA, 25 bp, Homo sapien
caaagcatgtctatagcaaggaaag

SEQ ID NO: 5007962 - DNA, 25 bp, Homo sapien
taaggtgtgccttaaactgcaaggt

SEQ ID NO: 5007963 - DNA, 25 bp, Homo sapien
tattacggtttcaccactaggtgga

SEQ ID NO: 5007964 - DNA, 25 bp, Homo sapien
gccatgaacttctactgcaggagta

SEQ ID NO: 5007965 - DNA, 25 bp, Homo sapien
gaataggcctttacttagcgggtga

SEQ ID NO: 5007966 - DNA, 25 bp, Homo sapien
cataatgggtgcaaggtaagtagcc

SEQ ID NO: 5007967 - DNA, 25 bp, Homo sapien
tccggcgagggctaatcgattggtc

SEQ ID NO: 5007968 - DNA, 25 bp, Homo sapien
gaagaaacggtgaagggtgcactac

SEQ ID NO: 5007969 - DNA, 25 bp, Homo sapien
gggaggcaccgtagttaatgaatca

SEQ ID NO: 5007970 - DNA, 25 bp, Homo sapien
tatatccccactattgggccaggga

SEQ ID NO: 5007971 - DNA, 25 bp, Homo sapien
attggccgcatagcgccgcccagcg

SEQ ID NO: 5007972 - DNA, 25 bp, Homo sapien
agaggagctggttagcacctcccga

SEQ ID NO: 5007973 - DNA, 25 bp, Homo sapien
ggcccgcctcccattggccgcatag

SEQ ID NO: 5007974 - DNA, 25 bp, Homo sapien
gcgcgggccgccgttataaagcagc

SEQ ID NO: 5007975 - DNA, 25 bp, Homo sapien
ggaagatggcgcctggtggacagca

SEQ ID NO: 5007976 - DNA, 25 bp, Homo sapien
aggaagatggcgcctggtggacagc

SEQ ID NO: 5007977 - DNA, 25 bp, Homo sapien
cagcgcctgcaacgtggcgtgttgt

SEQ ID NO: 5007978 - DNA, 25 bp, Homo sapien
tgtgcggtcgtctgtccctaggtcc

SEQ ID NO: 5007979 - DNA, 25 bp, Homo sapien
ccccgtcagcgtgccagattctggg

SEQ ID NO: 5007980 - DNA, 25 bp, Homo sapien
gcaggagatgctcggcggcctaccc

SEQ ID NO: 5007981 - DNA, 25 bp, Homo sapien
tcacttgtgatggtaaaaacctcac

SEQ ID NO: 5007982 - DNA, 25 bp, Homo sapien
aagccagattgtatcatcacttgtg

SEQ ID NO: 5007983 - DNA, 25 bp, Homo sapien
gaatagctttgcgaaaaatgggcgc

SEQ ID NO: 5007984 - DNA, 25 bp, Homo sapien
aatgggcgcaatggccaagccagat

SEQ ID NO: 5007985 - DNA, 25 bp, Homo sapien
gatggtgcattggttcagcatcagg

SEQ ID NO: 5007986 - DNA, 25 bp, Homo sapien
atggtgcattggttcagcatcagga

SEQ ID NO: 5007987 - DNA, 25 bp, Homo sapien
ctgcaactttacagatggtgcattg

SEQ ID NO: 5007988 - DNA, 25 bp, Homo sapien
cagatggtgcattggttcagcatca

SEQ ID NO: 5007989 - DNA, 25 bp, Homo sapien
caatgtcacctgtactcggatctat

SEQ ID NO: 5007990 - DNA, 25 bp, Homo sapien
cacctgtactcggatctatgaaaaa

SEQ ID NO: 5007991 - DNA, 25 bp, Homo sapien
tgtactcggatctatgaaaaagtag

SEQ ID NO: 5007992 - DNA, 25 bp, Homo sapien
gtcacctgtactcggatctatgaaa

SEQ ID NO: 5007993 - DNA, 25 bp, Homo sapien
tgcccacagactacgatgctcctga

SEQ ID NO: 5007994 - DNA, 25 bp, Homo sapien
tcggtggtcccttgatatgtccatt

SEQ ID NO: 5007995 - DNA, 25 bp, Homo sapien
tacaattccagtttctcggtggtcc

SEQ ID NO: 5007996 - DNA, 25 bp, Homo sapien
caggtccgttgcacttgccatctgt

SEQ ID NO: 5007997 - DNA, 25 bp, Homo sapien
agctctttcgggtaaatcctctcct

SEQ ID NO: 5007998 - DNA, 25 bp, Homo sapien
tctttcgggtaaatcctctcctctg

SEQ ID NO: 5007999 - DNA, 25 bp, Homo sapien
cctcgtttggacaggaatatgtggg

SEQ ID NO: 5008000 - DNA, 25 bp, Homo sapien
aatctcttgtcctcgtttggacagg

SEQ ID NO: 5008001 - DNA, 25 bp, Homo sapien
ctggaatgttgcaaatagaatagag

SEQ ID NO: 5008002 - DNA, 25 bp, Homo sapien
cccgtatgcccatgtggctccattt

SEQ ID NO: 5008003 - DNA, 25 bp, Homo sapien
ttttgctggaacaatggatatcagc

SEQ ID NO: 5008004 - DNA, 25 bp, Homo sapien
tagaatagagacactggagacccgc

SEQ ID NO: 5008005 - DNA, 25 bp, Homo sapien
ggatttttgtacatcaagctctagg

SEQ ID NO: 5008006 - DNA, 25 bp, Homo sapien
ccagttggtcagtgtatagttgtcc

SEQ ID NO: 5008007 - DNA, 25 bp, Homo sapien
ccctggtataagtcccatttgattg

SEQ ID NO: 5008008 - DNA, 25 bp, Homo sapien
tgaggtgatcaaatggttttcatcc

SEQ ID NO: 5008009 - DNA, 25 bp, Homo sapien
caatcttgcaataatcctagtaata

SEQ ID NO: 5008010 - DNA, 25 bp, Homo sapien
ccagcatctgtacttagcaatcttg

SEQ ID NO: 5008011 - DNA, 25 bp, Homo sapien
tctccagcatctgtacttagcaatc

SEQ ID NO: 5008012 - DNA, 25 bp, Homo sapien
gcatctgtacttagcaatcttgcaa

SEQ ID NO: 5008013 - DNA, 25 bp, Homo sapien
catatgctttgtcttgagtaatggc

SEQ ID NO: 5008014 - DNA, 25 bp, Homo sapien
tgctttgtcttgagtaatggctaat

SEQ ID NO: 5008015 - DNA, 25 bp, Homo sapien
tttccatatgctttgtcttgagtaa

SEQ ID NO: 5008016 - DNA, 25 bp, Homo sapien
ttgtcttgagtaatggctaattgtg

SEQ ID NO: 5008017 - DNA, 25 bp, Homo sapien
tcatcaactgtttgtgtctggccaa

SEQ ID NO: 5008018 - DNA, 25 bp, Homo sapien
tagaggctaccccttttaactgaga

SEQ ID NO: 5008019 - DNA, 25 bp, Homo sapien
tacttgggcacaatgcaatggtccc

SEQ ID NO: 5008020 - DNA, 25 bp, Homo sapien
ggtccatgacgttctattgcaaaag

SEQ ID NO: 5008021 - DNA, 25 bp, Homo sapien
catagattctggtgcacaccacgcc

SEQ ID NO: 5008022 - DNA, 25 bp, Homo sapien
ttctcatagattctggtgcacacca

SEQ ID NO: 5008023 - DNA, 25 bp, Homo sapien
gcacaccacgcccttcattttacat

SEQ ID NO: 5008024 - DNA, 25 bp, Homo sapien
gaccttctcatagattctggtgcac

SEQ ID NO: 5008025 - DNA, 25 bp, Homo sapien
cccattcactagctttctctttatg

SEQ ID NO: 5008026 - DNA, 25 bp, Homo sapien
cactagctttctctttatggttgtc

SEQ ID NO: 5008027 - DNA, 25 bp, Homo sapien
atcctctctgcagggttacgatgct

SEQ ID NO: 5008028 - DNA, 25 bp, Homo sapien
gatcctctctgcagggttacgatgc

SEQ ID NO: 5008029 - DNA, 25 bp, Homo sapien
tgggccaactttgaagagaaacatt

SEQ ID NO: 5008030 - DNA, 25 bp, Homo sapien
ggccaactttgaagagaaacattaa

SEQ ID NO: 5008031 - DNA, 25 bp, Homo sapien
aactttgaagagaaacattaaagat

SEQ ID NO: 5008032 - DNA, 25 bp, Homo sapien
tttgaagagaaacattaaagattac

SEQ ID NO: 5008033 - DNA, 25 bp, Homo sapien
aaattcctggcctagcttgaaggag

SEQ ID NO: 5008034 - DNA, 25 bp, Homo sapien
ctttcttgctgatgatcacagtggg

SEQ ID NO: 5008035 - DNA, 25 bp, Homo sapien
tcacagtgggtttggccaaatttcc

SEQ ID NO: 5008036 - DNA, 25 bp, Homo sapien
cagttttctggtggctaaccccaca

SEQ ID NO: 5008037 - DNA, 25 bp, Homo sapien
ccaggtgcccaggaatttgttgctc

SEQ ID NO: 5008038 - DNA, 25 bp, Homo sapien
aatcgtcaaagttctcactagagac

SEQ ID NO: 5008039 - DNA, 25 bp, Homo sapien
ctcactagagacaagtttccaggtg

SEQ ID NO: 5008040 - DNA, 25 bp, Homo sapien
ccagagctttcatgtaatcgtcaaa

SEQ ID NO: 5008041 - DNA, 25 bp, Homo sapien
cgtgatgggtgagagctcaacacag

SEQ ID NO: 5008042 - DNA, 25 bp, Homo sapien
gtgatgggtgagagctcaacacagt

SEQ ID NO: 5008043 - DNA, 25 bp, Homo sapien
tgatgggtgagagctcaacacagtt

SEQ ID NO: 5008044 - DNA, 25 bp, Homo sapien
cagataaaatgctgaggcctcagaa

SEQ ID NO: 5008045 - DNA, 25 bp, Homo sapien
ctaagtgggattcagaagactcaga

SEQ ID NO: 5008046 - DNA, 25 bp, Homo sapien
gattcttttcaaggatgcccaaagc

SEQ ID NO: 5008047 - DNA, 25 bp, Homo sapien
gactcagataaaatgctgaggcctc

SEQ ID NO: 5008048 - DNA, 25 bp, Homo sapien
aagttttcattgctgtggacctttc

SEQ ID NO: 5008049 - DNA, 25 bp, Homo sapien
cttcaggtaccagttccttgtcagt

SEQ ID NO: 5008050 - DNA, 25 bp, Homo sapien
cagtgaacaagttttcattgctgtg

SEQ ID NO: 5008051 - DNA, 25 bp, Homo sapien
gaacaagttttcattgctgtggacc

SEQ ID NO: 5008052 - DNA, 25 bp, Homo sapien
tcgtagattctggtgctgacaatat

SEQ ID NO: 5008053 - DNA, 25 bp, Homo sapien
ttcgtagattctggtgctgacaata

SEQ ID NO: 5008054 - DNA, 25 bp, Homo sapien
cttttcgtagattctggtgctgaca

SEQ ID NO: 5008055 - DNA, 25 bp, Homo sapien
gattctggtgctgacaatattattc

SEQ ID NO: 5008056 - DNA, 25 bp, Homo sapien
tttttggacgtgaatcattgagcca

SEQ ID NO: 5008057 - DNA, 25 bp, Homo sapien
ttggacgtgaatcattgagccattc

SEQ ID NO: 5008058 - DNA, 25 bp, Homo sapien
ttttggacgtgaatcattgagccat

SEQ ID NO: 5008059 - DNA, 25 bp, Homo sapien
tttggacgtgaatcattgagccatt

SEQ ID NO: 5008060 - DNA, 25 bp, Homo sapien
cctgattgttgaacaccaggaagaa

SEQ ID NO: 5008061 - DNA, 25 bp, Homo sapien
aacaccaggaagaattagttctgac

SEQ ID NO: 5008062 - DNA, 25 bp, Homo sapien
actttttcctgattgttgaacacca

SEQ ID NO: 5008063 - DNA, 25 bp, Homo sapien
tgttgaacaccaggaagaattagtt

SEQ ID NO: 5008064 - DNA, 25 bp, Homo sapien
gatcttagtgtcctggaaagaactt

SEQ ID NO: 5008065 - DNA, 25 bp, Homo sapien
ccccagcttgaaggagatcttagtg

SEQ ID NO: 5008066 - DNA, 25 bp, Homo sapien
ctttccggttgtctgctgtagtttc

SEQ ID NO: 5008067 - DNA, 25 bp, Homo sapien
gaactttctgttcttatggtcatca

SEQ ID NO: 5008068 - DNA, 25 bp, Homo sapien
cactaatagttactgtcggtttcac

SEQ ID NO: 5008069 - DNA, 25 bp, Homo sapien
caacactaatagttactgtcggttt

SEQ ID NO: 5008070 - DNA, 25 bp, Homo sapien
taatagttactgtcggtttcactaa

SEQ ID NO: 5008071 - DNA, 25 bp, Homo sapien
acactaatagttactgtcggtttca

SEQ ID NO: 5008072 - DNA, 25 bp, Homo sapien
ctacaagacagagatagccttggac

SEQ ID NO: 5008073 - DNA, 25 bp, Homo sapien
ttcactggagaccagcttccaggtt

SEQ ID NO: 5008074 - DNA, 25 bp, Homo sapien
ccagttctttcatgtaatcctcaaa

SEQ ID NO: 5008075 - DNA, 25 bp, Homo sapien
cttccaggttcccaagaagggctca

SEQ ID NO: 5008076 - DNA, 25 bp, Homo sapien
caggttcccaagaagggctcaacca

SEQ ID NO: 5008077 - DNA, 25 bp, Homo sapien
ttgctgagaagagccactcgtaatt

SEQ ID NO: 5008078 - DNA, 25 bp, Homo sapien
catggaacacttgctgagaagagcc

SEQ ID NO: 5008079 - DNA, 25 bp, Homo sapien
gagccactcgtaattgaaaaccaaa

SEQ ID NO: 5008080 - DNA, 25 bp, Homo sapien
gaagagccactcgtaattgaaaacc

SEQ ID NO: 5008081 - DNA, 25 bp, Homo sapien
cagagcgggtataaaatgtgagcac

SEQ ID NO: 5008082 - DNA, 25 bp, Homo sapien
catacttgttatctcctacctaggg

SEQ ID NO: 5008083 - DNA, 25 bp, Homo sapien
tcagtctacgtacaggaaacctcaa

SEQ ID NO: 5008084 - DNA, 25 bp, Homo sapien
tcttgcaacgcactaagacagagcg

SEQ ID NO: 5008085 - DNA, 25 bp, Homo sapien
ccacagaatgttgtagagttcaatg

SEQ ID NO: 5008086 - DNA, 25 bp, Homo sapien
tatttaaccaacgtaaccatattga

SEQ ID NO: 5008087 - DNA, 25 bp, Homo sapien
gttcaatgcgaacttcagtccaggt

SEQ ID NO: 5008088 - DNA, 25 bp, Homo sapien
gagaaaattagttgcttgctaaatc

SEQ ID NO: 5008089 - DNA, 25 bp, Homo sapien
tatgctctctcataaactctcgtgg

SEQ ID NO: 5008090 - DNA, 25 bp, Homo sapien
aagtgacgcctttcatgacgcattc

SEQ ID NO: 5008091 - DNA, 25 bp, Homo sapien
actctcgtggaagtgacgcctttca

SEQ ID NO: 5008092 - DNA, 25 bp, Homo sapien
tctcataaactctcgtggaagtgac

SEQ ID NO: 5008093 - DNA, 25 bp, Homo sapien
tggtcaatcactggattaaaccatg

SEQ ID NO: 5008094 - DNA, 25 bp, Homo sapien
tcttggtcaatcactggattaaacc

SEQ ID NO: 5008095 - DNA, 25 bp, Homo sapien
gtcaatcactggattaaaccatgga

SEQ ID NO: 5008096 - DNA, 25 bp, Homo sapien
caatcactggattaaaccatggatt

SEQ ID NO: 5008097 - DNA, 25 bp, Homo sapien
ctcgttttctctttatggtggttga

SEQ ID NO: 5008098 - DNA, 25 bp, Homo sapien
cgttttctctttatggtggttgatt

SEQ ID NO: 5008099 - DNA, 25 bp, Homo sapien
cctctcgttttctctttatggtggt

SEQ ID NO: 5008100 - DNA, 25 bp, Homo sapien
tctcgttttctctttatggtggttg

SEQ ID NO: 5008101 - DNA, 25 bp, Homo sapien
cgttatgtccagagtgttatacaaa

SEQ ID NO: 5008102 - DNA, 25 bp, Homo sapien
aaaatagagtgcctttgttcaaagg

SEQ ID NO: 5008103 - DNA, 25 bp, Homo sapien
aacaacataaccacttatggatacg

SEQ ID NO: 5008104 - DNA, 25 bp, Homo sapien
caaaggaatattttgaggtcattag

SEQ ID NO: 5008105 - DNA, 25 bp, Homo sapien
cctggcccagtatgaaggaaatctc

SEQ ID NO: 5008106 - DNA, 25 bp, Homo sapien
ggcccagtatgaaggaaatctcagt

SEQ ID NO: 5008107 - DNA, 25 bp, Homo sapien
aattcctggcccagtatgaaggaaa

SEQ ID NO: 5008108 - DNA, 25 bp, Homo sapien
cccagtatgaaggaaatctcagtat

SEQ ID NO: 5008109 - DNA, 25 bp, Homo sapien
atgccagccactttcctggtggcaa

SEQ ID NO: 5008110 - DNA, 25 bp, Homo sapien
catgccagccactttcctggtggca

SEQ ID NO: 5008111 - DNA, 25 bp, Homo sapien
ctgatgatcatgttaggtttggcca

SEQ ID NO: 5008112 - DNA, 25 bp, Homo sapien
caaaataagtaatgctgaggctccg

SEQ ID NO: 5008113 - DNA, 25 bp, Homo sapien
gagtccacttcgtgaatgcaggcaa

SEQ ID NO: 5008114 - DNA, 25 bp, Homo sapien
tgatgaagacaatacctgcccactc

SEQ ID NO: 5008115 - DNA, 25 bp, Homo sapien
gaactgggagagatatatggcgcaa

SEQ ID NO: 5008116 - DNA, 25 bp, Homo sapien
tcaaagtagaagctgcctgagtgag

SEQ ID NO: 5008117 - DNA, 25 bp, Homo sapien
ggttttcaaagtagaagctgcctga

SEQ ID NO: 5008118 - DNA, 25 bp, Homo sapien
agaaaggttttcaaagtagaagctg

SEQ ID NO: 5008119 - DNA, 25 bp, Homo sapien
tcatgcatggggttgagggagaaag

SEQ ID NO: 5008120 - DNA, 25 bp, Homo sapien
gagctaagtaaaccaaggataccca

SEQ ID NO: 5008121 - DNA, 25 bp, Homo sapien
cagggcttccagacattgctataaa

SEQ ID NO: 5008122 - DNA, 25 bp, Homo sapien
tcacttgctatgtgtgcagcctctc

SEQ ID NO: 5008123 - DNA, 25 bp, Homo sapien
cattaagggaactagagtgctttca

SEQ ID NO: 5008124 - DNA, 25 bp, Homo sapien
atcaaagttttcactggagacaagt

SEQ ID NO: 5008125 - DNA, 25 bp, Homo sapien
ctggagacaagtttccaggtaccta

SEQ ID NO: 5008126 - DNA, 25 bp, Homo sapien
ccaggtacctacaaaagcatcacac

SEQ ID NO: 5008127 - DNA, 25 bp, Homo sapien
aggtacctacaaaagcatcacacat

SEQ ID NO: 5008128 - DNA, 25 bp, Homo sapien
ttctaggattattcttcaaggtgag

SEQ ID NO: 5008129 - DNA, 25 bp, Homo sapien
ttcaggagggtgctgtgaccctctt

SEQ ID NO: 5008130 - DNA, 25 bp, Homo sapien
tttctaggattattcttcaaggtga

SEQ ID NO: 5008131 - DNA, 25 bp, Homo sapien
gttttcaggagggtgctgtgaccct

SEQ ID NO: 5008132 - DNA, 25 bp, Homo sapien
tgagcatgtgattgattcacaagcc

SEQ ID NO: 5008133 - DNA, 25 bp, Homo sapien
catgtgattgattcacaagcctgtg

SEQ ID NO: 5008134 - DNA, 25 bp, Homo sapien
tgattgattcacaagcctgtgtaag

SEQ ID NO: 5008135 - DNA, 25 bp, Homo sapien
ttcacaagcctgtgtaagtgtcctg

SEQ ID NO: 5008136 - DNA, 25 bp, Homo sapien
cagaggaagaattttggatgaagct

SEQ ID NO: 5008137 - DNA, 25 bp, Homo sapien
taggggtaggagttcgggcagagga

SEQ ID NO: 5008138 - DNA, 25 bp, Homo sapien
gaagaattttggatgaagctgctta

SEQ ID NO: 5008139 - DNA, 25 bp, Homo sapien
gaattttggatgaagctgcttacac

SEQ ID NO: 5008140 - DNA, 25 bp, Homo sapien
gcaaacaggttagcaacttagccac

SEQ ID NO: 5008141 - DNA, 25 bp, Homo sapien
gctggtgctggtactcctaaaggta

SEQ ID NO: 5008142 - DNA, 25 bp, Homo sapien
gacatgcagctttctaggatctaag

SEQ ID NO: 5008143 - DNA, 25 bp, Homo sapien
catcttggctagaaagggacgtctc

SEQ ID NO: 5008144 - DNA, 25 bp, Homo sapien
cattccataataactagtgatgcag

SEQ ID NO: 5008145 - DNA, 25 bp, Homo sapien
actagtgatgcagagtatttttgca

SEQ ID NO: 5008146 - DNA, 25 bp, Homo sapien
gagctgtttgaattccatagatatg

SEQ ID NO: 5008147 - DNA, 25 bp, Homo sapien
ctgttgagctgtttgaattccatag

SEQ ID NO: 5008148 - DNA, 25 bp, Homo sapien
taacgtgcacgcactgccttggtga

SEQ ID NO: 5008149 - DNA, 25 bp, Homo sapien
taaaggaaaccctaacgtgcacgca

SEQ ID NO: 5008150 - DNA, 25 bp, Homo sapien
ggaaaccctaacgtgcacgcactgc

SEQ ID NO: 5008151 - DNA, 25 bp, Homo sapien
ctaacgtgcacgcactgccttggtg

SEQ ID NO: 5008152 - DNA, 25 bp, Homo sapien
tgtcgaagagatattctgccgagcc

SEQ ID NO: 5008153 - DNA, 25 bp, Homo sapien
tcgaagagatattctgccgagccag

SEQ ID NO: 5008154 - DNA, 25 bp, Homo sapien
gcttgtcgaagagatattctgccga

SEQ ID NO: 5008155 - DNA, 25 bp, Homo sapien
cgaagagatattctgccgagccaga

SEQ ID NO: 5008156 - DNA, 25 bp, Homo sapien
tccaaatataatgcacactccatcg

SEQ ID NO: 5008157 - DNA, 25 bp, Homo sapien
aaatataatgcacactccatcgcat

SEQ ID NO: 5008158 - DNA, 25 bp, Homo sapien
caaatataatgcacactccatcgca

SEQ ID NO: 5008159 - DNA, 25 bp, Homo sapien
tataatgcacactccatcgcattca

SEQ ID NO: 5008160 - DNA, 25 bp, Homo sapien
gattggtaaagaaagtatttggcaa

SEQ ID NO: 5008161 - DNA, 25 bp, Homo sapien
gttccctctcctcatgagattggta

SEQ ID NO: 5008162 - DNA, 25 bp, Homo sapien
tcgttggttctgcagcttcatcagt

SEQ ID NO: 5008163 - DNA, 25 bp, Homo sapien
tcatcagtttctcagcatgttccct

SEQ ID NO: 5008164 - DNA, 25 bp, Homo sapien
agccacatcatcgcggtcaaagtat

SEQ ID NO: 5008165 - DNA, 25 bp, Homo sapien
catcatcgcggtcaaagtataagac

SEQ ID NO: 5008166 - DNA, 25 bp, Homo sapien
gccacatcatcgcggtcaaagtata

SEQ ID NO: 5008167 - DNA, 25 bp, Homo sapien
cacatcatcgcggtcaaagtataag

SEQ ID NO: 5008168 - DNA, 25 bp, Homo sapien
ggttgtagtcctggcgctcctgcga

SEQ ID NO: 5008169 - DNA, 25 bp, Homo sapien
tgtagtcctggcgctcctgcgaggt

SEQ ID NO: 5008170 - DNA, 25 bp, Homo sapien
ttgtagtcctggcgctcctgcgagg

SEQ ID NO: 5008171 - DNA, 25 bp, Homo sapien
ctggttgtagtcctggcgctcctgc

SEQ ID NO: 5008172 - DNA, 25 bp, Homo sapien
cggcgactaaagagaggcggctgca

SEQ ID NO: 5008173 - DNA, 25 bp, Homo sapien
ggcggcgactaaagagaggcggctg

SEQ ID NO: 5008174 - DNA, 25 bp, Homo sapien
cgactaaagagaggcggctgcagcg

SEQ ID NO: 5008175 - DNA, 25 bp, Homo sapien
gcgactaaagagaggcggctgcagc

SEQ ID NO: 5008176 - DNA, 25 bp, Homo sapien
ctggagcggcggcggggggaccttg

SEQ ID NO: 5008177 - DNA, 25 bp, Homo sapien
ctgagggggcggtgaagaggtgacg

SEQ ID NO: 5008178 - DNA, 25 bp, Homo sapien
agaggtgacggacggctggctatgg

SEQ ID NO: 5008179 - DNA, 25 bp, Homo sapien
ggacggctggctatgggcggccggc

SEQ ID NO: 5008180 - DNA, 25 bp, Homo sapien
gacggacggctggctatgggcggcc

SEQ ID NO: 5008181 - DNA, 25 bp, Homo sapien
actgtggaggtgtcagagcagtgct

SEQ ID NO: 5008182 - DNA, 25 bp, Homo sapien
tctcctctgtctttgcagcaagctg

SEQ ID NO: 5008183 - DNA, 25 bp, Homo sapien
caagctgttacttgggcctgcagta

SEQ ID NO: 5008184 - DNA, 25 bp, Homo sapien
agttcccatagctactgactgtgga

SEQ ID NO: 5008185 - DNA, 25 bp, Homo sapien
tagtttggatgacagcttgagaaag

SEQ ID NO: 5008186 - DNA, 25 bp, Homo sapien
cagtagtttggatgacagcttgaga

SEQ ID NO: 5008187 - DNA, 25 bp, Homo sapien
gtttggatgacagcttgagaaagcc

SEQ ID NO: 5008188 - DNA, 25 bp, Homo sapien
agtagtttggatgacagcttgagaa

SEQ ID NO: 5008189 - DNA, 25 bp, Homo sapien
ttgatgatactttctcgtatgttcg

SEQ ID NO: 5008190 - DNA, 25 bp, Homo sapien
tctcgtatgttcgtgtacagataac

SEQ ID NO: 5008191 - DNA, 25 bp, Homo sapien
gtatgttcgtgtacagataacactg

SEQ ID NO: 5008192 - DNA, 25 bp, Homo sapien
gatactttctcgtatgttcgtgtac

SEQ ID NO: 5008193 - DNA, 25 bp, Homo sapien
tatgaggtatttcagtatagttagt

SEQ ID NO: 5008194 - DNA, 25 bp, Homo sapien
gcaaactaagtactatccacacata

SEQ ID NO: 5008195 - DNA, 25 bp, Homo sapien
tcagtatagttagtgaaattaacat

SEQ ID NO: 5008196 - DNA, 25 bp, Homo sapien
aaatattgaaagagaggccgggcgc

SEQ ID NO: 5008197 - DNA, 25 bp, Homo sapien
cctgtgagtcaaaggattaggctgc

SEQ ID NO: 5008198 - DNA, 25 bp, Homo sapien
ggaaggtgacctgggaaaccatctg

SEQ ID NO: 5008199 - DNA, 25 bp, Homo sapien
tttgtaacctacacacgaatcttgc

SEQ ID NO: 5008200 - DNA, 25 bp, Homo sapien
tggagtagaggattggcaacaaccc

SEQ ID NO: 5008201 - DNA, 25 bp, Homo sapien
ccaccagctttctcgttatggtggt

SEQ ID NO: 5008202 - DNA, 25 bp, Homo sapien
ccagctttctcgttatggtggtttc

SEQ ID NO: 5008203 - DNA, 25 bp, Homo sapien
ctttctcgttatggtggtttctttg

SEQ ID NO: 5008204 - DNA, 25 bp, Homo sapien
cagctttctcgttatggtggtttct

SEQ ID NO: 5008205 - DNA, 25 bp, Homo sapien
gatatctgactaacattcttttgaa

SEQ ID NO: 5008206 - DNA, 25 bp, Homo sapien
cgaggatgatatctgactaacattc

SEQ ID NO: 5008207 - DNA, 25 bp, Homo sapien
tctgaaagactgtcgtaggcctcac

SEQ ID NO: 5008208 - DNA, 25 bp, Homo sapien
atgtgtctgaaagactgtcgtaggc

SEQ ID NO: 5008209 - DNA, 25 bp, Homo sapien
tccatctgtactgatggtcacagtg

SEQ ID NO: 5008210 - DNA, 25 bp, Homo sapien
tcccagcttaaaggagatctcatta

SEQ ID NO: 5008211 - DNA, 25 bp, Homo sapien
tttgccaaacggcccagtttcctgc

SEQ ID NO: 5008212 - DNA, 25 bp, Homo sapien
tggccacctggcgtgatttcctcaa

SEQ ID NO: 5008213 - DNA, 25 bp, Homo sapien
ctggaaaccagataaaaggagtatt

SEQ ID NO: 5008214 - DNA, 25 bp, Homo sapien
tggaaaccagataaaaggagtatta

SEQ ID NO: 5008215 - DNA, 25 bp, Homo sapien
gtcttcggaattttcacaagaaatg

SEQ ID NO: 5008216 - DNA, 25 bp, Homo sapien
tgtagtcttcggaattttcacaaga

SEQ ID NO: 5008217 - DNA, 25 bp, Homo sapien
ccttcatgtagtcttcggaattttc

SEQ ID NO: 5008218 - DNA, 25 bp, Homo sapien
ccagctccttcatgtagtcttcgga

SEQ ID NO: 5008219 - DNA, 25 bp, Homo sapien
tctgagataagttgatctcaaagaa

SEQ ID NO: 5008220 - DNA, 25 bp, Homo sapien
agataagttgatctcaaagaacagt

SEQ ID NO: 5008221 - DNA, 25 bp, Homo sapien
ctgtctgagataagttgatctcaaa

SEQ ID NO: 5008222 - DNA, 25 bp, Homo sapien
aagttgatctcaaagaacagtagtt

SEQ ID NO: 5008223 - DNA, 25 bp, Homo sapien
ccagatgcacaatctgatctcacga

SEQ ID NO: 5008224 - DNA, 25 bp, Homo sapien
cacaatctgatctcacgatggactt

SEQ ID NO: 5008225 - DNA, 25 bp, Homo sapien
ggacttctggtcttgtttaggcttg

SEQ ID NO: 5008226 - DNA, 25 bp, Homo sapien
gatctcacgatggacttctgctgga

SEQ ID NO: 5008227 - DNA, 25 bp, Homo sapien
cttggtgctgctactcaaatgcaca

SEQ ID NO: 5008228 - DNA, 25 bp, Homo sapien
ttggtgctgctactcaaatgcacac

SEQ ID NO: 5008229 - DNA, 25 bp, Homo sapien
tgccttggtgctgctactcaaatgc

SEQ ID NO: 5008230 - DNA, 25 bp, Homo sapien
gccttggtgctgctactcaaatgca

SEQ ID NO: 5008231 - DNA, 25 bp, Homo sapien
tggtaaacagcatgctatgcgatgc

SEQ ID NO: 5008232 - DNA, 25 bp, Homo sapien
aacagcatgctatgcgatgccttac

SEQ ID NO: 5008233 - DNA, 25 bp, Homo sapien
gtaaacagcatgctatgcgatgcct

SEQ ID NO: 5008234 - DNA, 25 bp, Homo sapien
taaacagcatgctatgcgatgcctt

SEQ ID NO: 5008235 - DNA, 25 bp, Homo sapien
ttcagcagactgctcactgaaggct

SEQ ID NO: 5008236 - DNA, 25 bp, Homo sapien
tcttagggttgagtgctggcttgct

SEQ ID NO: 5008237 - DNA, 25 bp, Homo sapien
aaggctgctcttagggttgagtgct

SEQ ID NO: 5008238 - DNA, 25 bp, Homo sapien
catgtgattcagacaaatcaaaata

SEQ ID NO: 5008239 - DNA, 25 bp, Homo sapien
tcagcatgggcactcggtgagggag

SEQ ID NO: 5008240 - DNA, 25 bp, Homo sapien
caaatcgggaaccttgcttctctac

SEQ ID NO: 5008241 - DNA, 25 bp, Homo sapien
gattgcatgagcattattattggca

SEQ ID NO: 5008242 - DNA, 25 bp, Homo sapien
agattgcccaagtttccctctaggc

SEQ ID NO: 5008243 - DNA, 25 bp, Homo sapien
gcctgctccacgtgaaggcagccat

SEQ ID NO: 5008244 - DNA, 25 bp, Homo sapien
ctctcttccaggctgccgcagtccc

SEQ ID NO: 5008245 - DNA, 25 bp, Homo sapien
tgagcctgctccacgtgaaggcagc

SEQ ID NO: 5008246 - DNA, 25 bp, Homo sapien
ctcttccaggctgccgcagtccctg

SEQ ID NO: 5008247 - DNA, 25 bp, Homo sapien
aaatggagccaacagtgatgtgatg

SEQ ID NO: 5008248 - DNA, 25 bp, Homo sapien
cagtgatgtgatggaaatgagctct

SEQ ID NO: 5008249 - DNA, 25 bp, Homo sapien
tctgccttgccacgtagcttctttc

SEQ ID NO: 5008250 - DNA, 25 bp, Homo sapien
tcttttcatgtatgggtctaggccc

SEQ ID NO: 5008251 - DNA, 25 bp, Homo sapien
tcaagagaagatgctggaacaaagc

SEQ ID NO: 5008252 - DNA, 25 bp, Homo sapien
caagagaagatgctggaacaaagct

SEQ ID NO: 5008253 - DNA, 25 bp, Homo sapien
ctctaaactcaagagaagatgctgg

SEQ ID NO: 5008254 - DNA, 25 bp, Homo sapien
taaactcaagagaagatgctggaac

SEQ ID NO: 5008255 - DNA, 25 bp, Homo sapien
tgttgtatcttcagggtgttactgt

SEQ ID NO: 5008256 - DNA, 25 bp, Homo sapien
gttgtatcttcagggtgttactgtg

SEQ ID NO: 5008257 - DNA, 25 bp, Homo sapien
tgtatcttcagggtgttactgtggc

SEQ ID NO: 5008258 - DNA, 25 bp, Homo sapien
ttgtatcttcagggtgttactgtgg

SEQ ID NO: 5008259 - DNA, 25 bp, Homo sapien
tcttgttggcatgtcactagtgtaa

SEQ ID NO: 5008260 - DNA, 25 bp, Homo sapien
tttagataaaacgactgaagaccca

SEQ ID NO: 5008261 - DNA, 25 bp, Homo sapien
cagatttctccgacagcaatgaata

SEQ ID NO: 5008262 - DNA, 25 bp, Homo sapien
tgcctgactaaagaggagatatcct

SEQ ID NO: 5008263 - DNA, 25 bp, Homo sapien
tctacacagggtaaacagacattca

SEQ ID NO: 5008264 - DNA, 25 bp, Homo sapien
gacacattctatggacaaagcatgt

SEQ ID NO: 5008265 - DNA, 25 bp, Homo sapien
tgttggccacaatctagtctcttgg

SEQ ID NO: 5008266 - DNA, 25 bp, Homo sapien
taatctgagccataacatctttgct

SEQ ID NO: 5008267 - DNA, 25 bp, Homo sapien
cggacacatacaacctaccacgatt

SEQ ID NO: 5008268 - DNA, 25 bp, Homo sapien
catagattattatgaatgactacac

SEQ ID NO: 5008269 - DNA, 25 bp, Homo sapien
cctaccacgattgagtcaggaagaa

SEQ ID NO: 5008270 - DNA, 25 bp, Homo sapien
ccaggaatcgatagctgcacagctg

SEQ ID NO: 5008271 - DNA, 25 bp, Homo sapien
gagaattccaagaagagaattgaag

SEQ ID NO: 5008272 - DNA, 25 bp, Homo sapien
gaattccaagaagagaattgaagtg

SEQ ID NO: 5008273 - DNA, 25 bp, Homo sapien
ttccaagaagagaattgaagtgaac

SEQ ID NO: 5008274 - DNA, 25 bp, Homo sapien
ctgagaattccaagaagagaattga

SEQ ID NO: 5008275 - DNA, 25 bp, Homo sapien
tagatacgggagaaaggatagaact

SEQ ID NO: 5008276 - DNA, 25 bp, Homo sapien
gtctcaggaccactaaatcactaag

SEQ ID NO: 5008277 - DNA, 25 bp, Homo sapien
ccccatgctggatgtggtacagcaa

SEQ ID NO: 5008278 - DNA, 25 bp, Homo sapien
cactaggagattccttgtggtcccc

SEQ ID NO: 5008279 - DNA, 25 bp, Homo sapien
ctttatgtcagtgcgtgaagctgga

SEQ ID NO: 5008280 - DNA, 25 bp, Homo sapien
tctgaactttatgtcagtgcgtgaa

SEQ ID NO: 5008281 - DNA, 25 bp, Homo sapien
gaaatccagtctgaactttatgtca

SEQ ID NO: 5008282 - DNA, 25 bp, Homo sapien
tgaaagaaatccagtctgaacttta

SEQ ID NO: 5008283 - DNA, 25 bp, Homo sapien
gattgctaactgacaagcacggtgc

SEQ ID NO: 5008284 - DNA, 25 bp, Homo sapien
tctaagcgagtgtctaggcatacat

SEQ ID NO: 5008285 - DNA, 25 bp, Homo sapien
gcctacaataagcaactctatctgg

SEQ ID NO: 5008286 - DNA, 25 bp, Homo sapien
cacggtgctaggtgttatatgagca

SEQ ID NO: 5008287 - DNA, 25 bp, Homo sapien
tcctttctgctaatgctgtacaatt

SEQ ID NO: 5008288 - DNA, 25 bp, Homo sapien
cgtgacattaaatggaatggtccac

SEQ ID NO: 5008289 - DNA, 25 bp, Homo sapien
gctgtacaatttgcagcaattattc

SEQ ID NO: 5008290 - DNA, 25 bp, Homo sapien
gcagcaattattctccgtgacatta

SEQ ID NO: 5008291 - DNA, 25 bp, Homo sapien
acaataatggcagctactgcaatat

SEQ ID NO: 5008292 - DNA, 25 bp, Homo sapien
taatggcagctactgcaatatccca

SEQ ID NO: 5008293 - DNA, 25 bp, Homo sapien
tccacttgccgcaatgcacatatta

SEQ ID NO: 5008294 - DNA, 25 bp, Homo sapien
gctcctccacttgccgcaatgcaca

SEQ ID NO: 5008295 - DNA, 25 bp, Homo sapien
ctgatgttctgcaatagcccagctc

SEQ ID NO: 5008296 - DNA, 25 bp, Homo sapien
tccatattggaaagaatagttctta

SEQ ID NO: 5008297 - DNA, 25 bp, Homo sapien
tgttctgcaatagcccagctcggtc

SEQ ID NO: 5008298 - DNA, 25 bp, Homo sapien
ttccatattggaaagaatagttctt

SEQ ID NO: 5008299 - DNA, 25 bp, Homo sapien
tccccacgattattgtaaagccagt

SEQ ID NO: 5008300 - DNA, 25 bp, Homo sapien
agccagtcaaaagtaccagtgacat

SEQ ID NO: 5008301 - DNA, 25 bp, Homo sapien
gacatcatcaatgggcatatcttgc

SEQ ID NO: 5008302 - DNA, 25 bp, Homo sapien
tttgtcttttcgaagagacacaggc

SEQ ID NO: 5008303 - DNA, 25 bp, Homo sapien
taatgtattggagtcatgatggaag

SEQ ID NO: 5008304 - DNA, 25 bp, Homo sapien
atgtaatgtattggagtcatgatgg

SEQ ID NO: 5008305 - DNA, 25 bp, Homo sapien
tattggagtcatgatggaagtgtta

SEQ ID NO: 5008306 - DNA, 25 bp, Homo sapien
aaatatatccagggcgcaatttagg

SEQ ID NO: 5008307 - DNA, 25 bp, Homo sapien
tgttgcaaagtccacaaaacctgga

SEQ ID NO: 5008308 - DNA, 25 bp, Homo sapien
gttgcaaagtccacaaaacctggat

SEQ ID NO: 5008309 - DNA, 25 bp, Homo sapien
aggaagattaatatcatggccataa

SEQ ID NO: 5008310 - DNA, 25 bp, Homo sapien
caggaagattaatatcatggccata

SEQ ID NO: 5008311 - DNA, 25 bp, Homo sapien
tcctagtggagtcaccagtgtggcc

SEQ ID NO: 5008312 - DNA, 25 bp, Homo sapien
aaacccatatgcagctgagttggcc

SEQ ID NO: 5008313 - DNA, 25 bp, Homo sapien
cattctttaggatatgcgtggccac

SEQ ID NO: 5008314 - DNA, 25 bp, Homo sapien
tgccattgacagcagtctagcccac

SEQ ID NO: 5008315 - DNA, 25 bp, Homo sapien
tggcaagtcgcagaaagcctttttt

SEQ ID NO: 5008316 - DNA, 25 bp, Homo sapien
ctggcaagtcgcagaaagccttttt

SEQ ID NO: 5008317 - DNA, 25 bp, Homo sapien
taaaccctagcagagtagctccagc

SEQ ID NO: 5008318 - DNA, 25 bp, Homo sapien
ttaaaccctagcagagtagctccag

SEQ ID NO: 5008319 - DNA, 25 bp, Homo sapien
ctttcctgacagtgtacctcttgtc

SEQ ID NO: 5008320 - DNA, 25 bp, Homo sapien
ttcctgacagtgtacctcttgtctt

SEQ ID NO: 5008321 - DNA, 25 bp, Homo sapien
tttcctgacagtgtacctcttgtct

SEQ ID NO: 5008322 - DNA, 25 bp, Homo sapien
acacatcatggtcttcgacttctcc

SEQ ID NO: 5008323 - DNA, 25 bp, Homo sapien
atgaccatctcactgttccatgcac

SEQ ID NO: 5008324 - DNA, 25 bp, Homo sapien
catgaccatctcactgttccatgca

SEQ ID NO: 5008325 - DNA, 25 bp, Homo sapien
catggtcttcgacttctccaagctc

SEQ ID NO: 5008326 - DNA, 25 bp, Homo sapien
tatttacaacaaggccaatcgaaac

SEQ ID NO: 5008327 - DNA, 25 bp, Homo sapien
acaaggccaatcgaaacagctacaa

SEQ ID NO: 5008328 - DNA, 25 bp, Homo sapien
ttacaacaaggccaatcgaaacagc

SEQ ID NO: 5008329 - DNA, 25 bp, Homo sapien
ttcttatttacaacaaggccaatcg

SEQ ID NO: 5008330 - DNA, 25 bp, Homo sapien
tcaatgatccacgtagggttgtcag

SEQ ID NO: 5008331 - DNA, 25 bp, Homo sapien
cgtagggttgtcagttaagacacct

SEQ ID NO: 5008332 - DNA, 25 bp, Homo sapien
gatccacgtagggttgtcagttaag

SEQ ID NO: 5008333 - DNA, 25 bp, Homo sapien
tccacgtagggttgtcagttaagac

SEQ ID NO: 5008334 - DNA, 25 bp, Homo sapien
gtagcagttaccaaatcaactggag

SEQ ID NO: 5008335 - DNA, 25 bp, Homo sapien
tagcagttaccaaatcaactggaga

SEQ ID NO: 5008336 - DNA, 25 bp, Homo sapien
gcagttaccaaatcaactggagaac

SEQ ID NO: 5008337 - DNA, 25 bp, Homo sapien
agcagttaccaaatcaactggagaa

SEQ ID NO: 5008338 - DNA, 25 bp, Homo sapien
ggttactgcataatccatgcattcc

SEQ ID NO: 5008339 - DNA, 25 bp, Homo sapien
cttgtcttgctagggttactgcata

SEQ ID NO: 5008340 - DNA, 25 bp, Homo sapien
ctctccagcttgtcttgctagggtt

SEQ ID NO: 5008341 - DNA, 25 bp, Homo sapien
tccagcttgtcttgctagggttact

SEQ ID NO: 5008342 - DNA, 25 bp, Homo sapien
gcaaggattgaacacccctaccctg

SEQ ID NO: 5008343 - DNA, 25 bp, Homo sapien
caaagtagtcaggaaccgatcctgt

SEQ ID NO: 5008344 - DNA, 25 bp, Homo sapien
taccctgatttagacctgcaggtgc

SEQ ID NO: 5008345 - DNA, 25 bp, Homo sapien
aaccgatcctgtgaagcccgcaagg

SEQ ID NO: 5008346 - DNA, 25 bp, Homo sapien
cctggtgctatccagcctcagtgct

SEQ ID NO: 5008347 - DNA, 25 bp, Homo sapien
gctatccagcctcagtgctttggga

SEQ ID NO: 5008348 - DNA, 25 bp, Homo sapien
ctcgagttgtcctgctagctgggtg

SEQ ID NO: 5008349 - DNA, 25 bp, Homo sapien
aacaggggcctcacctcgagttgtc

SEQ ID NO: 5008350 - DNA, 25 bp, Homo sapien
aatctcctttgccaattctcctgag

SEQ ID NO: 5008351 - DNA, 25 bp, Homo sapien
ttgccaattctcctgagttttacca

SEQ ID NO: 5008352 - DNA, 25 bp, Homo sapien
taagcagaatctcctttgccaattc

SEQ ID NO: 5008353 - DNA, 25 bp, Homo sapien
ttaagcagaatctcctttgccaatt

SEQ ID NO: 5008354 - DNA, 25 bp, Homo sapien
ttttctccatagtcaaattgtgctc

SEQ ID NO: 5008355 - DNA, 25 bp, Homo sapien
ttgccaattgattccttgcagttct

SEQ ID NO: 5008356 - DNA, 25 bp, Homo sapien
gcagttcttccttcgtgtcacctga

SEQ ID NO: 5008357 - DNA, 25 bp, Homo sapien
tgttaagtcttttctgtatgacgag

SEQ ID NO: 5008358 - DNA, 25 bp, Homo sapien
catactccttaaatcggagttctca

SEQ ID NO: 5008359 - DNA, 25 bp, Homo sapien
ccctaaactaaccagtccttctctg

SEQ ID NO: 5008360 - DNA, 25 bp, Homo sapien
gcatactccttaaatcggagttctc

SEQ ID NO: 5008361 - DNA, 25 bp, Homo sapien
tgcatactccttaaatcggagttct

SEQ ID NO: 5008362 - DNA, 25 bp, Homo sapien
tgctcctcaacgtaagtaatgtata

SEQ ID NO: 5008363 - DNA, 25 bp, Homo sapien
gacaatattattacactgctcctca

SEQ ID NO: 5008364 - DNA, 25 bp, Homo sapien
agctggatgagtgctgccacttcga

SEQ ID NO: 5008365 - DNA, 25 bp, Homo sapien
gccacttcgaggtcagggatatgaa

SEQ ID NO: 5008366 - DNA, 25 bp, Homo sapien
cttaacacaacacatggtacagtgc

SEQ ID NO: 5008367 - DNA, 25 bp, Homo sapien
taacacaacacatggtacagtgcac

SEQ ID NO: 5008368 - DNA, 25 bp, Homo sapien
acacatggtacagtgcactcaacaa

SEQ ID NO: 5008369 - DNA, 25 bp, Homo sapien
cacaacacatggtacagtgcactca

SEQ ID NO: 5008370 - DNA, 25 bp, Homo sapien
gctcaatctgaaggatgcctcctga

SEQ ID NO: 5008371 - DNA, 25 bp, Homo sapien
tccagtctggcaggagtattcagtg

SEQ ID NO: 5008372 - DNA, 25 bp, Homo sapien
ccagtgaagagctattggtccagtc

SEQ ID NO: 5008373 - DNA, 25 bp, Homo sapien
tacagacatggtgacagtaagcaca

SEQ ID NO: 5008374 - DNA, 25 bp, Homo sapien
gatgcaaacctattaatgcagccca

SEQ ID NO: 5008375 - DNA, 25 bp, Homo sapien
tgtgcatggcatgatgggaccaata

SEQ ID NO: 5008376 - DNA, 25 bp, Homo sapien
tattgcaaactctgtgggttgccct

SEQ ID NO: 5008377 - DNA, 25 bp, Homo sapien
tatttctggacgctctgtcccactg

SEQ ID NO: 5008378 - DNA, 25 bp, Homo sapien
tagaaaagttggaaagattacaggc

SEQ ID NO: 5008379 - DNA, 25 bp, Homo sapien
tacatgttaagtctaagaagtcctg

SEQ ID NO: 5008380 - DNA, 25 bp, Homo sapien
tctgtgtatgtatccacatgcagaa

SEQ ID NO: 5008381 - DNA, 25 bp, Homo sapien
tagataattcacttgtcgatcatcc

SEQ ID NO: 5008382 - DNA, 25 bp, Homo sapien
aaatatcatggcctggctcggtggc

SEQ ID NO: 5008383 - DNA, 25 bp, Homo sapien
gactgcaatgaatggtgatcatgcc

SEQ ID NO: 5008384 - DNA, 25 bp, Homo sapien
tgcaccacagcacagtcagagacag

SEQ ID NO: 5008385 - DNA, 25 bp, Homo sapien
agcctctaaaagtagtttgaactat

SEQ ID NO: 5008386 - DNA, 25 bp, Homo sapien
taagtacatgtgatcaacagtacaa

SEQ ID NO: 5008387 - DNA, 25 bp, Homo sapien
cctgtcttagaatacagtatcagat

SEQ ID NO: 5008388 - DNA, 25 bp, Homo sapien
cagtacaaataattatagcagtcaa

SEQ ID NO: 5008389 - DNA, 25 bp, Homo sapien
tagcagtcaaaccttagtatcacac

SEQ ID NO: 5008390 - DNA, 25 bp, Homo sapien
aatgggccaggtgctatatgaacac

SEQ ID NO: 5008391 - DNA, 25 bp, Homo sapien
aactgggattgactatgaggctgcc

SEQ ID NO: 5008392 - DNA, 25 bp, Homo sapien
tgaacagaatccagcggcaatgaag

SEQ ID NO: 5008393 - DNA, 25 bp, Homo sapien
gtttacgtgccaagggataaggctg

SEQ ID NO: 5008394 - DNA, 25 bp, Homo sapien
taatcttcgtcgtctcgttgcaaag

SEQ ID NO: 5008395 - DNA, 25 bp, Homo sapien
tatttgcagcaattactcttcgtga

SEQ ID NO: 5008396 - DNA, 25 bp, Homo sapien
tcgtgacatcaaatcaaatggtcca

SEQ ID NO: 5008397 - DNA, 25 bp, Homo sapien
gtctcgttgcaaaggtataacctga

SEQ ID NO: 5008398 - DNA, 25 bp, Homo sapien
atctgctccgccagttgccacaagg

SEQ ID NO: 5008399 - DNA, 25 bp, Homo sapien
aggcacatattaacagctgctgttc

SEQ ID NO: 5008400 - DNA, 25 bp, Homo sapien
ccagttgccacaaggcacatattaa

SEQ ID NO: 5008401 - DNA, 25 bp, Homo sapien
cataatatgcatctgctccgccagt

SEQ ID NO: 5008402 - DNA, 25 bp, Homo sapien
gtcattttcaactgggtgtgcgtca

SEQ ID NO: 5008403 - DNA, 25 bp, Homo sapien
gaaacttggaacgatctagaggata

SEQ ID NO: 5008404 - DNA, 25 bp, Homo sapien
ggaaaattactgcaggtttgccctc

SEQ ID NO: 5008405 - DNA, 25 bp, Homo sapien
tctgcaaagacctaagcctgccttg

SEQ ID NO: 5008406 - DNA, 25 bp, Homo sapien
cgatggtaataagggagtgagttct

SEQ ID NO: 5008407 - DNA, 25 bp, Homo sapien
tggaaaactgatgactaatgtggca

SEQ ID NO: 5008408 - DNA, 25 bp, Homo sapien
aatgcaatacatgactctagactgg

SEQ ID NO: 5008409 - DNA, 25 bp, Homo sapien
tattaaagacacacacgctgaaatg

SEQ ID NO: 5008410 - DNA, 25 bp, Homo sapien
gcagagatggtactccttggaaaca

SEQ ID NO: 5008411 - DNA, 25 bp, Homo sapien
gtgaaaacttaaggaccctgcagaa

SEQ ID NO: 5008412 - DNA, 25 bp, Homo sapien
aactactgcaaaacatcgaacgctg

SEQ ID NO: 5008413 - DNA, 25 bp, Homo sapien
caggaaccctgatcacaaaacgaag

SEQ ID NO: 5008414 - DNA, 25 bp, Homo sapien
ccatgaacaggaatgcaaaaaagct

SEQ ID NO: 5008415 - DNA, 25 bp, Homo sapien
ctggtgttctggaagagcccaactc

SEQ ID NO: 5008416 - DNA, 25 bp, Homo sapien
tggtgttctggaagagcccaactca

SEQ ID NO: 5008417 - DNA, 25 bp, Homo sapien
catgaacaggaatgcaaaaaagctt

SEQ ID NO: 5008418 - DNA, 25 bp, Homo sapien
ttctggcagtgtacatcttgccttc

SEQ ID NO: 5008419 - DNA, 25 bp, Homo sapien
tccttttctggcagtgtacatcttg

SEQ ID NO: 5008420 - DNA, 25 bp, Homo sapien
gcagtgtacatcttgccttccacac

SEQ ID NO: 5008421 - DNA, 25 bp, Homo sapien
ccttttctggcagtgtacatcttgc

SEQ ID NO: 5008422 - DNA, 25 bp, Homo sapien
ttaccaaacctaagtatgtttcatc

SEQ ID NO: 5008423 - DNA, 25 bp, Homo sapien
caaacctaagtatgtttcatccact

SEQ ID NO: 5008424 - DNA, 25 bp, Homo sapien
ccaaacctaagtatgtttcatccac

SEQ ID NO: 5008425 - DNA, 25 bp, Homo sapien
cctaagtatgtttcatccacttttt

SEQ ID NO: 5008426 - DNA, 25 bp, Homo sapien
taatcaagagaaagaggtcaccaga

SEQ ID NO: 5008427 - DNA, 25 bp, Homo sapien
gcttctccggtgttaggactcctac

SEQ ID NO: 5008428 - DNA, 25 bp, Homo sapien
gacaatctggtatactgactagtaa

SEQ ID NO: 5008429 - DNA, 25 bp, Homo sapien
tgcttcggaagacagggctttccta

SEQ ID NO: 5008430 - DNA, 25 bp, Homo sapien
cattccccacacgtataatggtctt

SEQ ID NO: 5008431 - DNA, 25 bp, Homo sapien
cacacgtataatggtcttcaatttc

SEQ ID NO: 5008432 - DNA, 25 bp, Homo sapien
ctttctgattaaaacgccttcctct

SEQ ID NO: 5008433 - DNA, 25 bp, Homo sapien
caccattccccacacgtataatggt

SEQ ID NO: 5008434 - DNA, 25 bp, Homo sapien
tttttatttacagcaaagccaattg

SEQ ID NO: 5008435 - DNA, 25 bp, Homo sapien
atttacagcaaagccaattgaaaca

SEQ ID NO: 5008436 - DNA, 25 bp, Homo sapien
tttatttacagcaaagccaattgaa

SEQ ID NO: 5008437 - DNA, 25 bp, Homo sapien
tatttacagcaaagccaattgaaac

SEQ ID NO: 5008438 - DNA, 25 bp, Homo sapien
cctatagtccaagcttccccggtag

SEQ ID NO: 5008439 - DNA, 25 bp, Homo sapien
caagcttccccggtaggctgaggca

SEQ ID NO: 5008440 - DNA, 25 bp, Homo sapien
gggtgacagagatgctgtccccctt

SEQ ID NO: 5008441 - DNA, 25 bp, Homo sapien
cagagatgctgtccccctttaaaaa

SEQ ID NO: 5008442 - DNA, 25 bp, Homo sapien
aagactgcgccattgcatctcagcc

SEQ ID NO: 5008443 - DNA, 25 bp, Homo sapien
gactgcgccattgcatctcagcctg

SEQ ID NO: 5008444 - DNA, 25 bp, Homo sapien
gccaagactgcgccattgcatctca

SEQ ID NO: 5008445 - DNA, 25 bp, Homo sapien
ctggccaacaagagggaaactccat

SEQ ID NO: 5008446 - DNA, 25 bp, Homo sapien
tgccacagattcttcaccaatgaaa

SEQ ID NO: 5008447 - DNA, 25 bp, Homo sapien
tcaatgatccatgtggggttgtcgg

SEQ ID NO: 5008448 - DNA, 25 bp, Homo sapien
gctgccacagattcttcaccaatga

SEQ ID NO: 5008449 - DNA, 25 bp, Homo sapien
catgtggggttgtcggttaagatac

SEQ ID NO: 5008450 - DNA, 25 bp, Homo sapien
taggacaaactcttaatctttacac

SEQ ID NO: 5008451 - DNA, 25 bp, Homo sapien
tttacactgatttcaacaatttcca

SEQ ID NO: 5008452 - DNA, 25 bp, Homo sapien
aagccaagtaggacaaactcttaat

SEQ ID NO: 5008453 - DNA, 25 bp, Homo sapien
tcaacaatttccaaatcataacatt

SEQ ID NO: 5008454 - DNA, 25 bp, Homo sapien
tagcagttaccaaatcaactggaga

SEQ ID NO: 5008455 - DNA, 25 bp, Homo sapien
gcagttaccaaatcaactggagaac

SEQ ID NO: 5008456 - DNA, 25 bp, Homo sapien
agcagttaccaaatcaactggagaa

SEQ ID NO: 5008457 - DNA, 25 bp, Homo sapien
gtagcagttaccaaatcaactggag

SEQ ID NO: 5008458 - DNA, 25 bp, Homo sapien
cataatccatgcattcctgccaagg

SEQ ID NO: 5008459 - DNA, 25 bp, Homo sapien
gcttgtcttgctagagttactgcat

SEQ ID NO: 5008460 - DNA, 25 bp, Homo sapien
tctccagcttgtcttgctagagtta

SEQ ID NO: 5008461 - DNA, 25 bp, Homo sapien
gagttactgcataatccatgcattc

SEQ ID NO: 5008462 - DNA, 25 bp, Homo sapien
tcacagccttccagcgtaggagcca

SEQ ID NO: 5008463 - DNA, 25 bp, Homo sapien
cacagccttccagcgtaggagccag

SEQ ID NO: 5008464 - DNA, 25 bp, Homo sapien
cagccttccagcgtaggagccaggc

SEQ ID NO: 5008465 - DNA, 25 bp, Homo sapien
acagccttccagcgtaggagccagg

SEQ ID NO: 5008466 - DNA, 25 bp, Homo sapien
ctgcgggcagcacaggacctgggcg

SEQ ID NO: 5008467 - DNA, 25 bp, Homo sapien
tgcgggcagcacaggacctgggcgc

SEQ ID NO: 5008468 - DNA, 25 bp, Homo sapien
agcacaggacctgggcgctgcccca

SEQ ID NO: 5008469 - DNA, 25 bp, Homo sapien
ggcagcacaggacctgggcgctgcc

SEQ ID NO: 5008470 - DNA, 25 bp, Homo sapien
acttagagtgactacctgggcctgg

SEQ ID NO: 5008471 - DNA, 25 bp, Homo sapien
cacttagagtgactacctgggcctg

SEQ ID NO: 5008472 - DNA, 25 bp, Homo sapien
cgcactcgtctcttccggaggtaga

SEQ ID NO: 5008473 - DNA, 25 bp, Homo sapien
ggacgtccggctagctctgtgaacg

SEQ ID NO: 5008474 - DNA, 25 bp, Homo sapien
gctggagcatgggatactgcctctt

SEQ ID NO: 5008475 - DNA, 25 bp, Homo sapien
tactcgcaacaggaagttccgccct

SEQ ID NO: 5008476 - DNA, 25 bp, Homo sapien
ttccctcttggaggcctttggtatc

SEQ ID NO: 5008477 - DNA, 25 bp, Homo sapien
ttggtatcctttcctgtcagctgac

SEQ ID NO: 5008478 - DNA, 25 bp, Homo sapien
tcttggaggcctttggtatcctttc

SEQ ID NO: 5008479 - DNA, 25 bp, Homo sapien
tttggtatcctttcctgtcagctga

SEQ ID NO: 5008480 - DNA, 25 bp, Homo sapien
tagccttgtaaactagaatgatcag

SEQ ID NO: 5008481 - DNA, 25 bp, Homo sapien
gccttgtaaactagaatgatcagta

SEQ ID NO: 5008482 - DNA, 25 bp, Homo sapien
tttcttagccttgtaaactagaatg

SEQ ID NO: 5008483 - DNA, 25 bp, Homo sapien
cttagccttgtaaactagaatgatc

SEQ ID NO: 5008484 - DNA, 25 bp, Homo sapien
gctaaattggccttggactgtggaa

SEQ ID NO: 5008485 - DNA, 25 bp, Homo sapien
gaacacatggctactgtaaaaggag

SEQ ID NO: 5008486 - DNA, 25 bp, Homo sapien
ttagcaaaggagtacccaaacagca

SEQ ID NO: 5008487 - DNA, 25 bp, Homo sapien
gaggcagcgtacaaactttagcaaa

SEQ ID NO: 5008488 - DNA, 25 bp, Homo sapien
caatgtgaaatctccatctagaagc

SEQ ID NO: 5008489 - DNA, 25 bp, Homo sapien
gatgtgcaagtcatcaaaatggcca

SEQ ID NO: 5008490 - DNA, 25 bp, Homo sapien
cctgggcacgtgcaggtcattacaa

SEQ ID NO: 5008491 - DNA, 25 bp, Homo sapien
tatataagaattgacaggcatcatg

SEQ ID NO: 5008492 - DNA, 25 bp, Homo sapien
tgaaacagctgtaattcaatcttac

SEQ ID NO: 5008493 - DNA, 25 bp, Homo sapien
gaattactggcaaaggtctcttcca

SEQ ID NO: 5008494 - DNA, 25 bp, Homo sapien
gtagactgtctttttgtttgagcac

SEQ ID NO: 5008495 - DNA, 25 bp, Homo sapien
aaagaaacccgcaaaatggcatcag

SEQ ID NO: 5008496 - DNA, 25 bp, Homo sapien
tcagaatcccagagttgaatagtca

SEQ ID NO: 5008497 - DNA, 25 bp, Homo sapien
ttcatcagtcaccagatttatggta

SEQ ID NO: 5008498 - DNA, 25 bp, Homo sapien
cccagagttgaatagtcacatttgt

SEQ ID NO: 5008499 - DNA, 25 bp, Homo sapien
tggtaaagtttgtagcatctgatga

SEQ ID NO: 5008500 - DNA, 25 bp, Homo sapien
tcttctctatattcagaaaactgag

SEQ ID NO: 5008501 - DNA, 25 bp, Homo sapien
gcttcttctatagtcacaagcaaca

SEQ ID NO: 5008502 - DNA, 25 bp, Homo sapien
tgagcgatgacatccttgcttcttc

SEQ ID NO: 5008503 - DNA, 25 bp, Homo sapien
tgaacttacaaggatggtttcttca

SEQ ID NO: 5008504 - DNA, 25 bp, Homo sapien
caagatccgctgtaccaatggtgag

SEQ ID NO: 5008505 - DNA, 25 bp, Homo sapien
tgagggacactaactatgataagac

SEQ ID NO: 5008506 - DNA, 25 bp, Homo sapien
tgttgcctaggtcgaagatgtgagt

SEQ ID NO: 5008507 - DNA, 25 bp, Homo sapien
gaacaaagcctgacaaatctaggaa

SEQ ID NO: 5008508 - DNA, 25 bp, Homo sapien
aaatttagatattccattatcttag

SEQ ID NO: 5008509 - DNA, 25 bp, Homo sapien
agatattccattatcttagttgata

SEQ ID NO: 5008510 - DNA, 25 bp, Homo sapien
ttgaaagaggttctactcaggaaaa

SEQ ID NO: 5008511 - DNA, 25 bp, Homo sapien
tgtaactaccgccccaatcagtcag

SEQ ID NO: 5008512 - DNA, 25 bp, Homo sapien
aataactatgctaatgaatgaaagt

SEQ ID NO: 5008513 - DNA, 25 bp, Homo sapien
ttgtgtggtagtctgaaactgaacc

SEQ ID NO: 5008514 - DNA, 25 bp, Homo sapien
taggacaaatccctacatttagtgg

SEQ ID NO: 5008515 - DNA, 25 bp, Homo sapien
aaatttgtctggctcaatatactcc

SEQ ID NO: 5008516 - DNA, 25 bp, Homo sapien
tccatgatgctaggcttggccacat

SEQ ID NO: 5008517 - DNA, 25 bp, Homo sapien
gaaatatgccccaatctagttaggt

SEQ ID NO: 5008518 - DNA, 25 bp, Homo sapien
gcaaggctatactttctggctccat

SEQ ID NO: 5008519 - DNA, 25 bp, Homo sapien
cactagaggtgggtctttatcagaa

SEQ ID NO: 5008520 - DNA, 25 bp, Homo sapien
caggtttccaaagtatgatccaagg

SEQ ID NO: 5008521 - DNA, 25 bp, Homo sapien
gtttccaaagtatgatccaagggta

SEQ ID NO: 5008522 - DNA, 25 bp, Homo sapien
ttccaaagtatgatccaagggtaag

SEQ ID NO: 5008523 - DNA, 25 bp, Homo sapien
caaagtatgatccaagggtaaggct

SEQ ID NO: 5008524 - DNA, 25 bp, Homo sapien
aaacatgcttgaatggagcatcata

SEQ ID NO: 5008525 - DNA, 25 bp, Homo sapien
gaatggagcatcataaaacctttat

SEQ ID NO: 5008526 - DNA, 25 bp, Homo sapien
acatgcttgaatggagcatcataaa

SEQ ID NO: 5008527 - DNA, 25 bp, Homo sapien
cttgaatggagcatcataaaacctt

SEQ ID NO: 5008528 - DNA, 25 bp, Homo sapien
agtctatggcctttccaatgctcca

SEQ ID NO: 5008529 - DNA, 25 bp, Homo sapien
cttagctgtaaatttgttattgtca

SEQ ID NO: 5008530 - DNA, 25 bp, Homo sapien
tttaagcctggctagagaagcggca

SEQ ID NO: 5008531 - DNA, 25 bp, Homo sapien
ctccatcggtggcaaaagaacattg

SEQ ID NO: 5008532 - DNA, 25 bp, Homo sapien
aaatacttcactccagattactcat

SEQ ID NO: 5008533 - DNA, 25 bp, Homo sapien
tagtgctcttaaaaatacttcactc

SEQ ID NO: 5008534 - DNA, 25 bp, Homo sapien
agttagtgctcttaaaaatacttca

SEQ ID NO: 5008535 - DNA, 25 bp, Homo sapien
gtgctcttaaaaatacttcactcca

SEQ ID NO: 5008536 - DNA, 25 bp, Homo sapien
ttagggccacaccaactcacttgag

SEQ ID NO: 5008537 - DNA, 25 bp, Homo sapien
gaaggatatatagtctaccccaaac

SEQ ID NO: 5008538 - DNA, 25 bp, Homo sapien
taatatctatctcagcccagtggca

SEQ ID NO: 5008539 - DNA, 25 bp, Homo sapien
ggaactctaggttcataagggcaga

SEQ ID NO: 5008540 - DNA, 25 bp, Homo sapien
acactcaactgtgttaaggtatgta

SEQ ID NO: 5008541 - DNA, 25 bp, Homo sapien
taaaggaacagtcctagagaaactc

SEQ ID NO: 5008542 - DNA, 25 bp, Homo sapien
aaaggaacagtcctagagaaactct

SEQ ID NO: 5008543 - DNA, 25 bp, Homo sapien
ataacactcaactgtgttaaggtat

SEQ ID NO: 5008544 - DNA, 25 bp, Homo sapien
ctgtggtaatgacttatcgccatca

SEQ ID NO: 5008545 - DNA, 25 bp, Homo sapien
gtaatgacttatcgccatcagcatg

SEQ ID NO: 5008546 - DNA, 25 bp, Homo sapien
acctttccatcgtttacttgctgtt

SEQ ID NO: 5008547 - DNA, 25 bp, Homo sapien
ttccatcgtttacttgctgtttctc

SEQ ID NO: 5008548 - DNA, 25 bp, Homo sapien
cagaacagctgactaggcttagagt

SEQ ID NO: 5008549 - DNA, 25 bp, Homo sapien
tgagctaacatactggcaggcagac

SEQ ID NO: 5008550 - DNA, 25 bp, Homo sapien
ccaaatttccatcggtcaggtagac

SEQ ID NO: 5008551 - DNA, 25 bp, Homo sapien
taatctaagtggctcagcaaaagag

SEQ ID NO: 5008552 - DNA, 25 bp, Homo sapien
taacaagtttctgagtggcagccat

SEQ ID NO: 5008553 - DNA, 25 bp, Homo sapien
gtctttaacaagtttctgagtggca

SEQ ID NO: 5008554 - DNA, 25 bp, Homo sapien
tttaacaagtttctgagtggcagcc

SEQ ID NO: 5008555 - DNA, 25 bp, Homo sapien
atgtctttaacaagtttctgagtgg

SEQ ID NO: 5008556 - DNA, 25 bp, Homo sapien
acactcatgatctgactgatgacgg

SEQ ID NO: 5008557 - DNA, 25 bp, Homo sapien
cacactcatgatctgactgatgacg

SEQ ID NO: 5008558 - DNA, 25 bp, Homo sapien
tcacactcatgatctgactgatgac

SEQ ID NO: 5008559 - DNA, 25 bp, Homo sapien
cactcatgatctgactgatgacggt

SEQ ID NO: 5008560 - DNA, 25 bp, Homo sapien
tagcacttaaacagatatacaaagt

SEQ ID NO: 5008561 - DNA, 25 bp, Homo sapien
agatatacaaagtgtgaacagccta

SEQ ID NO: 5008562 - DNA, 25 bp, Homo sapien
gtgtgaacagcctaagtgatcaatc

SEQ ID NO: 5008563 - DNA, 25 bp, Homo sapien
gtttgtatagcacttaaacagatat

SEQ ID NO: 5008564 - DNA, 25 bp, Homo sapien
gagcatgggtaagatgtatgttgat

SEQ ID NO: 5008565 - DNA, 25 bp, Homo sapien
tcagtctctcattgattacagtcac

SEQ ID NO: 5008566 - DNA, 25 bp, Homo sapien
aaggacatataactgccacaagttc

SEQ ID NO: 5008567 - DNA, 25 bp, Homo sapien
aaattcttctcacaataaggacata

SEQ ID NO: 5008568 - DNA, 25 bp, Homo sapien
cccatttgctctatgctgaacttca

SEQ ID NO: 5008569 - DNA, 25 bp, Homo sapien
tgctgggcaagtctgcctaattctg

SEQ ID NO: 5008570 - DNA, 25 bp, Homo sapien
tctggatattctttgcaaacccatt

SEQ ID NO: 5008571 - DNA, 25 bp, Homo sapien
ggcaagtctgcctaattctggatat

SEQ ID NO: 5008572 - DNA, 25 bp, Homo sapien
aggacaaccatgagactccctgctt

SEQ ID NO: 5008573 - DNA, 25 bp, Homo sapien
caaaatattcctgaacaatcatcac

SEQ ID NO: 5008574 - DNA, 25 bp, Homo sapien
aaatattcctgaacaatcatcacac

SEQ ID NO: 5008575 - DNA, 25 bp, Homo sapien
ctgaacaatcatcacacacaaatgg

SEQ ID NO: 5008576 - DNA, 25 bp, Homo sapien
atattcctgaacaatcatcacacac

SEQ ID NO: 5008577 - DNA, 25 bp, Homo sapien
gtatatactggtcagtatctgattt

SEQ ID NO: 5008578 - DNA, 25 bp, Homo sapien
atgtatatactggtcagtatctgat

SEQ ID NO: 5008579 - DNA, 25 bp, Homo sapien
tttagttttcttaagcaagaagaca

SEQ ID NO: 5008580 - DNA, 25 bp, Homo sapien
ttagttttcttaagcaagaagacaa

SEQ ID NO: 5008581 - DNA, 25 bp, Homo sapien
aaaggacaatactgcagtgactggg

SEQ ID NO: 5008582 - DNA, 25 bp, Homo sapien
tttaggatatacacttgacgtagtc

SEQ ID NO: 5008583 - DNA, 25 bp, Homo sapien
tggcctcatctcagttattgacact

SEQ ID NO: 5008584 - DNA, 25 bp, Homo sapien
tcaatccctccagaaggtagataaa

SEQ ID NO: 5008585 - DNA, 25 bp, Homo sapien
cactgcaaggtacgttttcaggaat

SEQ ID NO: 5008586 - DNA, 25 bp, Homo sapien
cacggcacactcgaacaccaaaatg

SEQ ID NO: 5008587 - DNA, 25 bp, Homo sapien
tgtgagccacgcgatccagcagtgg

SEQ ID NO: 5008588 - DNA, 25 bp, Homo sapien
ttcgtgcactgctcggacacggcac

SEQ ID NO: 5008589 - DNA, 25 bp, Homo sapien
tgcagccccagaagaaacgctccca

SEQ ID NO: 5008590 - DNA, 25 bp, Homo sapien
gtcatttcaaaagctcacggccaaa

SEQ ID NO: 5008591 - DNA, 25 bp, Homo sapien
tccaaggagaccacacgtcatttca

SEQ ID NO: 5008592 - DNA, 25 bp, Homo sapien
tcatttcaaaagctcacggccaaaa

SEQ ID NO: 5008593 - DNA, 25 bp, Homo sapien
accatccgcggagccaaagcggagc

SEQ ID NO: 5008594 - DNA, 25 bp, Homo sapien
atccgcggagccaaagcggagccct

SEQ ID NO: 5008595 - DNA, 25 bp, Homo sapien
cgccaccatccgcggagccaaagcg

SEQ ID NO: 5008596 - DNA, 25 bp, Homo sapien
tccgcggagccaaagcggagccctg

SEQ ID NO: 5008597 - DNA, 25 bp, Homo sapien
gcggccggggatgggggctggaagc

SEQ ID NO: 5008598 - DNA, 25 bp, Homo sapien
ctcccgcggccggggatgggggctg

SEQ ID NO: 5008599 - DNA, 25 bp, Homo sapien
tgggggctggaagctcccggatcac

SEQ ID NO: 5008600 - DNA, 25 bp, Homo sapien
gatgggggctggaagctcccggatc

SEQ ID NO: 5008601 - DNA, 25 bp, Homo sapien
gctgcccgatgtccaactccgccat

SEQ ID NO: 5008602 - DNA, 25 bp, Homo sapien
cctgacattaggaaaagagatggcc

SEQ ID NO: 5008603 - DNA, 25 bp, Homo sapien
gctatattatgcagagcacatggca

SEQ ID NO: 5008604 - DNA, 25 bp, Homo sapien
tgacatacagccaaacaccagggca

SEQ ID NO: 5008605 - DNA, 25 bp, Homo sapien
ggtaacgttgctcaaatacggctat

SEQ ID NO: 5008606 - DNA, 25 bp, Homo sapien
tcctgggaccgtccctagtgtggat

SEQ ID NO: 5008607 - DNA, 25 bp, Homo sapien
cacaaactagttcctcgttcctggg

SEQ ID NO: 5008608 - DNA, 25 bp, Homo sapien
cacagtctttgtcggtcttttcaac

SEQ ID NO: 5008609 - DNA, 25 bp, Homo sapien
gcacaagacccctggacatcggttt

SEQ ID NO: 5008610 - DNA, 25 bp, Homo sapien
gatgctgggcaagaaacaagagtac

SEQ ID NO: 5008611 - DNA, 25 bp, Homo sapien
gtctgggtccccgagaggactgcct

SEQ ID NO: 5008612 - DNA, 25 bp, Homo sapien
tgtccaggacgacttgttgattccc

SEQ ID NO: 5008613 - DNA, 25 bp, Homo sapien
cagcaatgagcaagttgggcaagtt

SEQ ID NO: 5008614 - DNA, 25 bp, Homo sapien
ccagagagaaatcgccctggccaag

SEQ ID NO: 5008615 - DNA, 25 bp, Homo sapien
cacgcagaataagcgaggtaggctg

SEQ ID NO: 5008616 - DNA, 25 bp, Homo sapien
aagcacggcacgcagaataagcgag

SEQ ID NO: 5008617 - DNA, 25 bp, Homo sapien
atccagagagaaatcgccctggcca

SEQ ID NO: 5008618 - DNA, 25 bp, Homo sapien
ctagcctttcccttggggacaatcg

SEQ ID NO: 5008619 - DNA, 25 bp, Homo sapien
tgcctctagcctttcccttggggac

SEQ ID NO: 5008620 - DNA, 25 bp, Homo sapien
ctgcctctagcctttcccttgggga

SEQ ID NO: 5008621 - DNA, 25 bp, Homo sapien
ttctacgagatagaggattttagga

SEQ ID NO: 5008622 - DNA, 25 bp, Homo sapien
catcgaagtggagaagtttaatgcc

SEQ ID NO: 5008623 - DNA, 25 bp, Homo sapien
tcagcagatggtagtaccattttct

SEQ ID NO: 5008624 - DNA, 25 bp, Homo sapien
ttcattactgtagggctggcactca

SEQ ID NO: 5008625 - DNA, 25 bp, Homo sapien
tcagttttatctgccatattctcct

SEQ ID NO: 5008626 - DNA, 25 bp, Homo sapien
ttaattcaattggaggcaaaccctc

SEQ ID NO: 5008627 - DNA, 25 bp, Homo sapien
tgtcttcttttaccatgcatacttt

SEQ ID NO: 5008628 - DNA, 25 bp, Homo sapien
cagctgcttgagtccatacgatatt

SEQ ID NO: 5008629 - DNA, 25 bp, Homo sapien
aatgcaatgtcaggagtcaagccag

SEQ ID NO: 5008630 - DNA, 25 bp, Homo sapien
tgagaacatacctgtgcactttgac

SEQ ID NO: 5008631 - DNA, 25 bp, Homo sapien
ataccgactgggattgcaaaatgcc

SEQ ID NO: 5008632 - DNA, 25 bp, Homo sapien
taaagctgactcaaagaccctagga

SEQ ID NO: 5008633 - DNA, 25 bp, Homo sapien
atttagagatgtaaacatgtaaaca

SEQ ID NO: 5008634 - DNA, 25 bp, Homo sapien
tatttagagatgtaaacatgtaaac

SEQ ID NO: 5008635 - DNA, 25 bp, Homo sapien
tgtgggccttgataacagaattcca

SEQ ID NO: 5008636 - DNA, 25 bp, Homo sapien
tggagcaatatataggcaaaacacc

SEQ ID NO: 5008637 - DNA, 25 bp, Homo sapien
aaaatagtatttgccactcttctaa

SEQ ID NO: 5008638 - DNA, 25 bp, Homo sapien
gaatagtctaaatggagggaactgc

SEQ ID NO: 5008639 - DNA, 25 bp, Homo sapien
agtcttcttcagcatcatatgccac

SEQ ID NO: 5008640 - DNA, 25 bp, Homo sapien
ttagtcttcttcagcatcatatgcc

SEQ ID NO: 5008641 - DNA, 25 bp, Homo sapien
tcttcttcagcatcatatgccactt

SEQ ID NO: 5008642 - DNA, 25 bp, Homo sapien
tagtcttcttcagcatcatatgcca

SEQ ID NO: 5008643 - DNA, 25 bp, Homo sapien
tcaggttcactaaaacttaagcatg

SEQ ID NO: 5008644 - DNA, 25 bp, Homo sapien
tcaacctcaagtgcagaggactcca

SEQ ID NO: 5008645 - DNA, 25 bp, Homo sapien
tcatccaggacatcttgatcaacct

SEQ ID NO: 5008646 - DNA, 25 bp, Homo sapien
gactccacctttaggatctgttcac

SEQ ID NO: 5008647 - DNA, 25 bp, Homo sapien
ctgtttctgacacatccagtgattc

SEQ ID NO: 5008648 - DNA, 25 bp, Homo sapien
gattctgttctctaaagtgtctata

SEQ ID NO: 5008649 - DNA, 25 bp, Homo sapien
ctctaaagtgtctatatgaagttgc

SEQ ID NO: 5008650 - DNA, 25 bp, Homo sapien
aagtgtctatatgaagttgcttctc

SEQ ID NO: 5008651 - DNA, 25 bp, Homo sapien
tatgaagttgcttctcactgagcag

SEQ ID NO: 5008652 - DNA, 25 bp, Homo sapien
tctgtaagcggtagtttgtctcttc

SEQ ID NO: 5008653 - DNA, 25 bp, Homo sapien
aagcggtagtttgtctcttctaaag

SEQ ID NO: 5008654 - DNA, 25 bp, Homo sapien
ttctttctgtaagcggtagtttgtc

SEQ ID NO: 5008655 - DNA, 25 bp, Homo sapien
gtagtttgtctcttctaaagtttca

SEQ ID NO: 5008656 - DNA, 25 bp, Homo sapien
cgctgaatttgcgttaatctcataa

SEQ ID NO: 5008657 - DNA, 25 bp, Homo sapien
gatgcaagtgaaagcattcacacac

SEQ ID NO: 5008658 - DNA, 25 bp, Homo sapien
tgtaatttaccacaccaatagatta

SEQ ID NO: 5008659 - DNA, 25 bp, Homo sapien
aggatgcccaccataatggcttcaa

SEQ ID NO: 5008660 - DNA, 25 bp, Homo sapien
atttattggtggcattaaagaagac

SEQ ID NO: 5008661 - DNA, 25 bp, Homo sapien
atatttattggtggcattaaagaag

SEQ ID NO: 5008662 - DNA, 25 bp, Homo sapien
tggtggcattaaagaagacactgaa

SEQ ID NO: 5008663 - DNA, 25 bp, Homo sapien
tattggtggcattaaagaagacact

SEQ ID NO: 5008664 - DNA, 25 bp, Homo sapien
caatccaagtatccctcaatgggtg

SEQ ID NO: 5008665 - DNA, 25 bp, Homo sapien
tgcagactgactgcaaaatggctta

SEQ ID NO: 5008666 - DNA, 25 bp, Homo sapien
atcaaacacttctactcttagggaa

SEQ ID NO: 5008667 - DNA, 25 bp, Homo sapien
tactcataatatcacaaaactggaa

SEQ ID NO: 5008668 - DNA, 25 bp, Homo sapien
caaatggacccggtggatcatccaa

SEQ ID NO: 5008669 - DNA, 25 bp, Homo sapien
cggtggatcatccaaacaaagaaat

SEQ ID NO: 5008670 - DNA, 25 bp, Homo sapien
tcttctaggctatcaaatggacccg

SEQ ID NO: 5008671 - DNA, 25 bp, Homo sapien
cctgctttcttctaggctatcaaat

SEQ ID NO: 5008672 - DNA, 25 bp, Homo sapien
taatatgctcacatattctattgta

SEQ ID NO: 5008673 - DNA, 25 bp, Homo sapien
taggataagtattggatcttcattc

SEQ ID NO: 5008674 - DNA, 25 bp, Homo sapien
ttttcacgacaatcaggtaagatta

SEQ ID NO: 5008675 - DNA, 25 bp, Homo sapien
cagattaggccagacaggttgatga

SEQ ID NO: 5008676 - DNA, 25 bp, Homo sapien
gaagtgctagtcgaaaacctggaaa

SEQ ID NO: 5008677 - DNA, 25 bp, Homo sapien
tgtccttgtgagctactaaattttg

SEQ ID NO: 5008678 - DNA, 25 bp, Homo sapien
cgcttgtaatcctaattgtctgtct

SEQ ID NO: 5008679 - DNA, 25 bp, Homo sapien
cattgtaattatctttaaaccagcg

SEQ ID NO: 5008680 - DNA, 25 bp, Homo sapien
gtattccacttaactatcaggtaac

SEQ ID NO: 5008681 - DNA, 25 bp, Homo sapien
gctctttctggtacctataacacca

SEQ ID NO: 5008682 - DNA, 25 bp, Homo sapien
tatatgaagctcaggaacagtaaat

SEQ ID NO: 5008683 - DNA, 25 bp, Homo sapien
taaatgcccatcttggaggatcaag

SEQ ID NO: 5008684 - DNA, 25 bp, Homo sapien
actagaatgaatttgactcattaac

SEQ ID NO: 5008685 - DNA, 25 bp, Homo sapien
tcttatgaactagaatgaatttgac

SEQ ID NO: 5008686 - DNA, 25 bp, Homo sapien
ctttttcagactcacaagataatta

SEQ ID NO: 5008687 - DNA, 25 bp, Homo sapien
gaatgaatttgactcattaacaaag

SEQ ID NO: 5008688 - DNA, 25 bp, Homo sapien
tgaaaactacccagctttcttctgg

SEQ ID NO: 5008689 - DNA, 25 bp, Homo sapien
agagaagtcagtgtatcttctgaaa

SEQ ID NO: 5008690 - DNA, 25 bp, Homo sapien
ctgaaaactacccagctttcttctg

SEQ ID NO: 5008691 - DNA, 25 bp, Homo sapien
agcctagagaagtcagtgtatcttc

SEQ ID NO: 5008692 - DNA, 25 bp, Homo sapien
gttagggactatagattatccttac

SEQ ID NO: 5008693 - DNA, 25 bp, Homo sapien
ccattcattagttagggactataga

SEQ ID NO: 5008694 - DNA, 25 bp, Homo sapien
agtgctgccctaaagaccattcatt

SEQ ID NO: 5008695 - DNA, 25 bp, Homo sapien
agatgtgattcacaattactgctca

SEQ ID NO: 5008696 - DNA, 25 bp, Homo sapien
tctcccatacaaacttctctttcag

SEQ ID NO: 5008697 - DNA, 25 bp, Homo sapien
tttctcccatacaaacttctctttc

SEQ ID NO: 5008698 - DNA, 25 bp, Homo sapien
tgatttttctcccatacaaacttct

SEQ ID NO: 5008699 - DNA, 25 bp, Homo sapien
atttttctcccatacaaacttctct

SEQ ID NO: 5008700 - DNA, 25 bp, Homo sapien
aatgactgatacaggataaaagtgc

SEQ ID NO: 5008701 - DNA, 25 bp, Homo sapien
tctttgtaacatctaagggtgggaa

SEQ ID NO: 5008702 - DNA, 25 bp, Homo sapien
gttactcggatactctttaaagtca

SEQ ID NO: 5008703 - DNA, 25 bp, Homo sapien
aaaagttgcaatgggaatacaaaag

SEQ ID NO: 5008704 - DNA, 25 bp, Homo sapien
attaaaaccacaaccaatgtgatat

SEQ ID NO: 5008705 - DNA, 25 bp, Homo sapien
accacagagtgagaggatagtcata

SEQ ID NO: 5008706 - DNA, 25 bp, Homo sapien
gtgagaggatagtcataatacatgt

SEQ ID NO: 5008707 - DNA, 25 bp, Homo sapien
gatatttcacaagagaatatccaaa

SEQ ID NO: 5008708 - DNA, 25 bp, Homo sapien
atcacttcataacccagtatagtag

SEQ ID NO: 5008709 - DNA, 25 bp, Homo sapien
ttccatcacttcataacccagtata

SEQ ID NO: 5008710 - DNA, 25 bp, Homo sapien
acttcataacccagtatagtaggtg

SEQ ID NO: 5008711 - DNA, 25 bp, Homo sapien
ccatcacttcataacccagtatagt

SEQ ID NO: 5008712 - DNA, 25 bp, Homo sapien
ggtctagtagaatactcaatggaag

SEQ ID NO: 5008713 - DNA, 25 bp, Homo sapien
agatggtctatcttcccaattcact

SEQ ID NO: 5008714 - DNA, 25 bp, Homo sapien
tatcttcccaattcactgtttccgg

SEQ ID NO: 5008715 - DNA, 25 bp, Homo sapien
agtgtctcttggtctagtagaatac

SEQ ID NO: 5008716 - DNA, 25 bp, Homo sapien
attatccatttgatcaggaacactt

SEQ ID NO: 5008717 - DNA, 25 bp, Homo sapien
catttgatcaggaacacttgtctgt

SEQ ID NO: 5008718 - DNA, 25 bp, Homo sapien
taatgaggggactgctacagacaga

SEQ ID NO: 5008719 - DNA, 25 bp, Homo sapien
tagtcctaatgaggggactgctaca

SEQ ID NO: 5008720 - DNA, 25 bp, Homo sapien
tctaactggcccttagaagaatttg

SEQ ID NO: 5008721 - DNA, 25 bp, Homo sapien
tagaagaatttgagcttgttgagac

SEQ ID NO: 5008722 - DNA, 25 bp, Homo sapien
tggcccttagaagaatttgagcttg

SEQ ID NO: 5008723 - DNA, 25 bp, Homo sapien
aactggcccttagaagaatttgagc

SEQ ID NO: 5008724 - DNA, 25 bp, Homo sapien
gaactgggacataaggagttgccat

SEQ ID NO: 5008725 - DNA, 25 bp, Homo sapien
atgggcataggaactgggacataag

SEQ ID NO: 5008726 - DNA, 25 bp, Homo sapien
aggaactgggacataaggagttgcc

SEQ ID NO: 5008727 - DNA, 25 bp, Homo sapien
ctatgggcataggaactgggacata

SEQ ID NO: 5008728 - DNA, 25 bp, Homo sapien
gcttgcacactgttgagtccactta

SEQ ID NO: 5008729 - DNA, 25 bp, Homo sapien
tagagaacaactaatatgcaatcca

SEQ ID NO: 5008730 - DNA, 25 bp, Homo sapien
aacaagcttgcacactgttgagtcc

SEQ ID NO: 5008731 - DNA, 25 bp, Homo sapien
ttccaacaagcttgcacactgttga

SEQ ID NO: 5008732 - DNA, 25 bp, Homo sapien
tggtaggagaaagattggtaaagac

SEQ ID NO: 5008733 - DNA, 25 bp, Homo sapien
tcctctactttattcccttgtgaag

SEQ ID NO: 5008734 - DNA, 25 bp, Homo sapien
tctgaagctttattccatgcttatc

SEQ ID NO: 5008735 - DNA, 25 bp, Homo sapien
tagagagagcaaaactacttcacac

SEQ ID NO: 5008736 - DNA, 25 bp, Homo sapien
acgggtcttccgcactgcaggcggc

SEQ ID NO: 5008737 - DNA, 25 bp, Homo sapien
gtgaggtggcccgactctgagcaac

SEQ ID NO: 5008738 - DNA, 25 bp, Homo sapien
ggcacagttcgaccctcggaaggta

SEQ ID NO: 5008739 - DNA, 25 bp, Homo sapien
agttgctcccaggacgctcagttca

SEQ ID NO: 5008740 - DNA, 25 bp, Homo sapien
gactctccttaaccgcagcttttcg

SEQ ID NO: 5008741 - DNA, 25 bp, Homo sapien
acgagcgcgcttcccggtgacggtt

SEQ ID NO: 5008742 - DNA, 25 bp, Homo sapien
tcagcagcgagaagcctcacgtgac

SEQ ID NO: 5008743 - DNA, 25 bp, Homo sapien
tcggcgatcccgaacgagcgcgctt

SEQ ID NO: 5008744 - DNA, 25 bp, Homo sapien
tctgagaaatggaggctacaatacc

SEQ ID NO: 5008745 - DNA, 25 bp, Homo sapien
tgccaaacaggagaagactacaatt

SEQ ID NO: 5008746 - DNA, 25 bp, Homo sapien
tcccagaaggaactgcgaccaacat

SEQ ID NO: 5008747 - DNA, 25 bp, Homo sapien
gacttgtagtcatcaccagcttgcg

SEQ ID NO: 5008748 - DNA, 25 bp, Homo sapien
tagtagttccaagctgccttgtcca

SEQ ID NO: 5008749 - DNA, 25 bp, Homo sapien
gccacaaacgagattctttacttct

SEQ ID NO: 5008750 - DNA, 25 bp, Homo sapien
acataaatctttagtagttccaagc

SEQ ID NO: 5008751 - DNA, 25 bp, Homo sapien
cagtctaagagtgttccgggaatgg

SEQ ID NO: 5008752 - DNA, 25 bp, Homo sapien
tagttagcattgctaagatccataa

SEQ ID NO: 5008753 - DNA, 25 bp, Homo sapien
gttagcattgctaagatccataaaa

SEQ ID NO: 5008754 - DNA, 25 bp, Homo sapien
ctagttagcattgctaagatccata

SEQ ID NO: 5008755 - DNA, 25 bp, Homo sapien
agttagcattgctaagatccataaa

SEQ ID NO: 5008756 - DNA, 25 bp, Homo sapien
tggaaggtgttgatcagttgaagca

SEQ ID NO: 5008757 - DNA, 25 bp, Homo sapien
ggaaggtgttgatcagttgaagcat

SEQ ID NO: 5008758 - DNA, 25 bp, Homo sapien
atcaaccagacagattggaaggtgt

SEQ ID NO: 5008759 - DNA, 25 bp, Homo sapien
aaccagacagattggaaggtgttga

SEQ ID NO: 5008760 - DNA, 25 bp, Homo sapien
tgttgttccctgtcactgttgctgg

SEQ ID NO: 5008761 - DNA, 25 bp, Homo sapien
tgacagttctgcactagcctttgcc

SEQ ID NO: 5008762 - DNA, 25 bp, Homo sapien
gaggtgctgtcattgcctttgccgc

SEQ ID NO: 5008763 - DNA, 25 bp, Homo sapien
gaatattcttggcatccctaaaagg

SEQ ID NO: 5008764 - DNA, 25 bp, Homo sapien
ctagtcttttgtagagagtgtgtta

SEQ ID NO: 5008765 - DNA, 25 bp, Homo sapien
tgttagtcttttgtagagagtttgg

SEQ ID NO: 5008766 - DNA, 25 bp, Homo sapien
tttggtctttgtcacactgcattga

SEQ ID NO: 5008767 - DNA, 25 bp, Homo sapien
gtagagagtttggtctttgtcacac

SEQ ID NO: 5008768 - DNA, 25 bp, Homo sapien
taaacacttgactgatagctcacag

SEQ ID NO: 5008769 - DNA, 25 bp, Homo sapien
tcaggcgaggttagctggaaatctc

SEQ ID NO: 5008770 - DNA, 25 bp, Homo sapien
catcttcccgagaagcagtcaataa

SEQ ID NO: 5008771 - DNA, 25 bp, Homo sapien
gaactgctcagatgtactcaggcga

SEQ ID NO: 5008772 - DNA, 25 bp, Homo sapien
taatgtgatttctgttttagggctc

SEQ ID NO: 5008773 - DNA, 25 bp, Homo sapien
tgggtaattttacagcctttccaca

SEQ ID NO: 5008774 - DNA, 25 bp, Homo sapien
tagcatgtggcaaattggaagattc

SEQ ID NO: 5008775 - DNA, 25 bp, Homo sapien
tgatttctgttttagggctctgatc

SEQ ID NO: 5008776 - DNA, 25 bp, Homo sapien
tgaagattttaggtcctttaacata

SEQ ID NO: 5008777 - DNA, 25 bp, Homo sapien
ttttaggtcctttaacatatctagc

SEQ ID NO: 5008778 - DNA, 25 bp, Homo sapien
cctttaacatatctagcaatactag

SEQ ID NO: 5008779 - DNA, 25 bp, Homo sapien
aatttcttagaatttgtgttactga

SEQ ID NO: 5008780 - DNA, 25 bp, Homo sapien
tcttgtttaaattcggaggctcttc

SEQ ID NO: 5008781 - DNA, 25 bp, Homo sapien
atgcttgtgtcatgggataaggtaa

SEQ ID NO: 5008782 - DNA, 25 bp, Homo sapien
tagtacatccaattctctccggcac

SEQ ID NO: 5008783 - DNA, 25 bp, Homo sapien
aggtaaccgtatcatttgcttcagt

SEQ ID NO: 5008784 - DNA, 25 bp, Homo sapien
gaaagcaatcttcctagaggctgca

SEQ ID NO: 5008785 - DNA, 25 bp, Homo sapien
ttggaaagcaatcttcctagaggct

SEQ ID NO: 5008786 - DNA, 25 bp, Homo sapien
tgcttggatgcatctccaggtagtt

SEQ ID NO: 5008787 - DNA, 25 bp, Homo sapien
ccaggtagtttctatacacccacca

SEQ ID NO: 5008788 - DNA, 25 bp, Homo sapien
ggaggtatgaaagcataggctggtg

SEQ ID NO: 5008789 - DNA, 25 bp, Homo sapien
tggaggtatgaaagcataggctggt

SEQ ID NO: 5008790 - DNA, 25 bp, Homo sapien
ctggaggtatgaaagcataggctgg

SEQ ID NO: 5008791 - DNA, 25 bp, Homo sapien
gacttcagggcatttcaattgttcc

SEQ ID NO: 5008792 - DNA, 25 bp, Homo sapien
tgagacaaatactccaaagtgcatt

SEQ ID NO: 5008793 - DNA, 25 bp, Homo sapien
ggaatctggtctgcaggtcttatct

SEQ ID NO: 5008794 - DNA, 25 bp, Homo sapien
tatgtcttttccacggttttatcca

SEQ ID NO: 5008795 - DNA, 25 bp, Homo sapien
ttacacttgggcagaatattctaag

SEQ ID NO: 5008796 - DNA, 25 bp, Homo sapien
tacacttgggcagaatattctaagg

SEQ ID NO: 5008797 - DNA, 25 bp, Homo sapien
ctaagggctctaagttttctcctgt

SEQ ID NO: 5008798 - DNA, 25 bp, Homo sapien
atattctaagggctctaagttttct

SEQ ID NO: 5008799 - DNA, 25 bp, Homo sapien
tatctttaataagtccatgaatttg

SEQ ID NO: 5008800 - DNA, 25 bp, Homo sapien
atctttaataagtccatgaatttgc

SEQ ID NO: 5008801 - DNA, 25 bp, Homo sapien
gcttcagatgattcatgaaactgct

SEQ ID NO: 5008802 - DNA, 25 bp, Homo sapien
tttgcttcagatgattcatgaaact

SEQ ID NO: 5008803 - DNA, 25 bp, Homo sapien
acctcttggcatgacgatgactttg

SEQ ID NO: 5008804 - DNA, 25 bp, Homo sapien
ccaaatatctgctggaagttctttc

SEQ ID NO: 5008805 - DNA, 25 bp, Homo sapien
catgtgacagccctattactgtgat

SEQ ID NO: 5008806 - DNA, 25 bp, Homo sapien
tccagtatactctgaccagggataa

SEQ ID NO: 5008807 - DNA, 25 bp, Homo sapien
aagtttgcagatgctgtatgaataa

SEQ ID NO: 5008808 - DNA, 25 bp, Homo sapien
aaagtttgcagatgctgtatgaata

SEQ ID NO: 5008809 - DNA, 25 bp, Homo sapien
taaagtttgcagatgctgtatgaat

SEQ ID NO: 5008810 - DNA, 25 bp, Homo sapien
agtttgcagatgctgtatgaataaa

SEQ ID NO: 5008811 - DNA, 25 bp, Homo sapien
cctggactcttcaaatagtaggtga

SEQ ID NO: 5008812 - DNA, 25 bp, Homo sapien
ggcaatgtttcttcacatcatagag

SEQ ID NO: 5008813 - DNA, 25 bp, Homo sapien
tgtgcattggtacttctccctggac

SEQ ID NO: 5008814 - DNA, 25 bp, Homo sapien
tcgtttcctaacttaatgctgcctc

SEQ ID NO: 5008815 - DNA, 25 bp, Homo sapien
gattgtgcaaggcatatgaacccga

SEQ ID NO: 5008816 - DNA, 25 bp, Homo sapien
gcagaatgcccatccaatagttata

SEQ ID NO: 5008817 - DNA, 25 bp, Homo sapien
cagattaagagacttcccagtaaat

SEQ ID NO: 5008818 - DNA, 25 bp, Homo sapien
tattccccaaatgagcagttgtggc

SEQ ID NO: 5008819 - DNA, 25 bp, Homo sapien
ttgtctgcaaactggagactgagga

SEQ ID NO: 5008820 - DNA, 25 bp, Homo sapien
tattatgaggaattgactcctgtga

SEQ ID NO: 5008821 - DNA, 25 bp, Homo sapien
ttatgaggaattgactcctgtgatt

SEQ ID NO: 5008822 - DNA, 25 bp, Homo sapien
attatgaggaattgactcctgtgat

SEQ ID NO: 5008823 - DNA, 25 bp, Homo sapien
ttatgatgtctttaggtagagttga

SEQ ID NO: 5008824 - DNA, 25 bp, Homo sapien
tatgatgtctttaggtagagttgaa

SEQ ID NO: 5008825 - DNA, 25 bp, Homo sapien
gatgtctttaggtagagttgaattt

SEQ ID NO: 5008826 - DNA, 25 bp, Homo sapien
ttttatgatgtctttaggtagagtt

SEQ ID NO: 5008827 - DNA, 25 bp, Homo sapien
ctggagagagtaaaaggacttaatt

SEQ ID NO: 5008828 - DNA, 25 bp, Homo sapien
gagctgacagttccgaataaaattc

SEQ ID NO: 5008829 - DNA, 25 bp, Homo sapien
aaccaaacccgagctgacagttccg

SEQ ID NO: 5008830 - DNA, 25 bp, Homo sapien
aatgatgcttttcaaccaaccaaac

SEQ ID NO: 5008831 - DNA, 25 bp, Homo sapien
agttccgaataaaattcatgaccag

SEQ ID NO: 5008832 - DNA, 25 bp, Homo sapien
ctctctctttattggttccttctga

SEQ ID NO: 5008833 - DNA, 25 bp, Homo sapien
cctctctctttattggttccttctg

SEQ ID NO: 5008834 - DNA, 25 bp, Homo sapien
ccctctctctttattggttccttct

SEQ ID NO: 5008835 - DNA, 25 bp, Homo sapien
tcagaaggttgcattgaagtgtagg

SEQ ID NO: 5008836 - DNA, 25 bp, Homo sapien
tgtctgagcacaacacagtagtttt

SEQ ID NO: 5008837 - DNA, 25 bp, Homo sapien
tattagagtggttgctaagaaacgc

SEQ ID NO: 5008838 - DNA, 25 bp, Homo sapien
gctaagaaacgctgaagttggaaat

SEQ ID NO: 5008839 - DNA, 25 bp, Homo sapien
ggtgaacactgttaacttggacaac

SEQ ID NO: 5008840 - DNA, 25 bp, Homo sapien
agatggccatatttcattatgaggg

SEQ ID NO: 5008841 - DNA, 25 bp, Homo sapien
gaacgttgttgcagttgtagattca

SEQ ID NO: 5008842 - DNA, 25 bp, Homo sapien
tgcctttccattatcggtcttagaa

SEQ ID NO: 5008843 - DNA, 25 bp, Homo sapien
tatctgtgatttatgcgctttaatg

SEQ ID NO: 5008844 - DNA, 25 bp, Homo sapien
gctttaatgttgcaattgtctggca

SEQ ID NO: 5008845 - DNA, 25 bp, Homo sapien
gtcatttgtgtgattgtatctgtga

SEQ ID NO: 5008846 - DNA, 25 bp, Homo sapien
gcaattgtctggcatttttctatga

SEQ ID NO: 5008847 - DNA, 25 bp, Homo sapien
aagagcccagtcaaggtatctgctg

SEQ ID NO: 5008848 - DNA, 25 bp, Homo sapien
tatattcttgagagttagggttagc

SEQ ID NO: 5008849 - DNA, 25 bp, Homo sapien
tatcttctgatatattgggagtaaa

SEQ ID NO: 5008850 - DNA, 25 bp, Homo sapien
gggtctgaatctgccatatcttctg

SEQ ID NO: 5008851 - DNA, 25 bp, Homo sapien
aatgctttggttgaactgattgtag

SEQ ID NO: 5008852 - DNA, 25 bp, Homo sapien
gattgtagtgatggacaaggcacct

SEQ ID NO: 5008853 - DNA, 25 bp, Homo sapien
gctttccaaaatgtcgttgacaact

SEQ ID NO: 5008854 - DNA, 25 bp, Homo sapien
ccaaaatgtcgttgacaacttgaaa

SEQ ID NO: 5008855 - DNA, 25 bp, Homo sapien
catacgataatggatgatacacaag

SEQ ID NO: 5008856 - DNA, 25 bp, Homo sapien
ataaccaataattccatgattttgc

SEQ ID NO: 5008857 - DNA, 25 bp, Homo sapien
cgtttattgattacatacgataatg

SEQ ID NO: 5008858 - DNA, 25 bp, Homo sapien
ttaaatcgtttattgattacatacg

SEQ ID NO: 5008859 - DNA, 25 bp, Homo sapien
tcagtgtcacgatcagactattaca

SEQ ID NO: 5008860 - DNA, 25 bp, Homo sapien
aacagcatgggtgcaaaaaaaaatc

SEQ ID NO: 5008861 - DNA, 25 bp, Homo sapien
agacatttattcagtgtcacgatca

SEQ ID NO: 5008862 - DNA, 25 bp, Homo sapien
tattcagtgtcacgatcagactatt

SEQ ID NO: 5008863 - DNA, 25 bp, Homo sapien
tgttgtaacctgtagcttccctgtt

SEQ ID NO: 5008864 - DNA, 25 bp, Homo sapien
tctcctgctgagctttgtttcctaa

SEQ ID NO: 5008865 - DNA, 25 bp, Homo sapien
tagcttccctgttacttctctggct

SEQ ID NO: 5008866 - DNA, 25 bp, Homo sapien
cctctcctgctgagctttgtttcct

SEQ ID NO: 5008867 - DNA, 25 bp, Homo sapien
agtactggcctccaccaccatgggg

SEQ ID NO: 5008868 - DNA, 25 bp, Homo sapien
tcctccatgaccaaagttgtcgttc

SEQ ID NO: 5008869 - DNA, 25 bp, Homo sapien
atgaccaaagttgtcgttcccactg

SEQ ID NO: 5008870 - DNA, 25 bp, Homo sapien
ttcgtggttttgcaaagtactggcc

SEQ ID NO: 5008871 - DNA, 25 bp, Homo sapien
cacgaccaccaccaaagtttccaga

SEQ ID NO: 5008872 - DNA, 25 bp, Homo sapien
tccacgaccaccaccaaagtttcca

SEQ ID NO: 5008873 - DNA, 25 bp, Homo sapien
ccacgaccaccaccaaagtttccag

SEQ ID NO: 5008874 - DNA, 25 bp, Homo sapien
tttggctggatgaagcactagccat

SEQ ID NO: 5008875 - DNA, 25 bp, Homo sapien
ctttggctggatgaagcactagcca

SEQ ID NO: 5008876 - DNA, 25 bp, Homo sapien
tctttggctggatgaagcactagcc

SEQ ID NO: 5008877 - DNA, 25 bp, Homo sapien
ctctttggctggatgaagcactagc

SEQ ID NO: 5008878 - DNA, 25 bp, Homo sapien
gctttgacagggcttttgtaacttc

SEQ ID NO: 5008879 - DNA, 25 bp, Homo sapien
cttgctttgacagggcttttgtaac

SEQ ID NO: 5008880 - DNA, 25 bp, Homo sapien
tttgacagggcttttgtaacttcac

SEQ ID NO: 5008881 - DNA, 25 bp, Homo sapien
ctcttgctttgacagggcttttgta

SEQ ID NO: 5008882 - DNA, 25 bp, Homo sapien
ccactgcctcggtcactcatgattt

SEQ ID NO: 5008883 - DNA, 25 bp, Homo sapien
ttgccactgcctcggtcactcatga

SEQ ID NO: 5008884 - DNA, 25 bp, Homo sapien
cctcggtcactcatgatttcaatca

SEQ ID NO: 5008885 - DNA, 25 bp, Homo sapien
ctgcctcggtcactcatgatttcaa

SEQ ID NO: 5008886 - DNA, 25 bp, Homo sapien
tcttctcttgagacggctctctttg

SEQ ID NO: 5008887 - DNA, 25 bp, Homo sapien
aatcttctcttgagacggctctctt

SEQ ID NO: 5008888 - DNA, 25 bp, Homo sapien
ttgagaatcttctcttgagacggct

SEQ ID NO: 5008889 - DNA, 25 bp, Homo sapien
gagaatcttctcttgagacggctct

SEQ ID NO: 5008890 - DNA, 25 bp, Homo sapien
cttcttgacagatgccagaagtgct

SEQ ID NO: 5008891 - DNA, 25 bp, Homo sapien
ttcttgacagatgccagaagtgctt

SEQ ID NO: 5008892 - DNA, 25 bp, Homo sapien
cgttggcttcttgacagatgccaga

SEQ ID NO: 5008893 - DNA, 25 bp, Homo sapien
atagctcgttggcttcttgacagat

SEQ ID NO: 5008894 - DNA, 25 bp, Homo sapien
tctgccatggcacataagggaaatg

SEQ ID NO: 5008895 - DNA, 25 bp, Homo sapien
gctgcttgatactggaagagacaat

SEQ ID NO: 5008896 - DNA, 25 bp, Homo sapien
tctccacagggctatcatcaatgcc

SEQ ID NO: 5008897 - DNA, 25 bp, Homo sapien
gacagggtcaactctcctggtagaa

SEQ ID NO: 5008898 - DNA, 25 bp, Homo sapien
gcgtatgaggcattgtactatatta

SEQ ID NO: 5008899 - DNA, 25 bp, Homo sapien
tgcctactagcacattttgaggaga

SEQ ID NO: 5008900 - DNA, 25 bp, Homo sapien
gcctactagcacattttgaggagaa

SEQ ID NO: 5008901 - DNA, 25 bp, Homo sapien
aactaaaagttttgcgtatgaggca

SEQ ID NO: 5008902 - DNA, 25 bp, Homo sapien
ttgcttaggccatcacctttgcaag

SEQ ID NO: 5008903 - DNA, 25 bp, Homo sapien
tatctattaaactaatgtcccaaag

SEQ ID NO: 5008904 - DNA, 25 bp, Homo sapien
aaactggattgttcattgttcctcc

SEQ ID NO: 5008905 - DNA, 25 bp, Homo sapien
cacttcgggaacactattctctgag

SEQ ID NO: 5008906 - DNA, 25 bp, Homo sapien
tccactctgcgttcataatcaccag

SEQ ID NO: 5008907 - DNA, 25 bp, Homo sapien
tctgctccactctgcgttcataatc

SEQ ID NO: 5008908 - DNA, 25 bp, Homo sapien
cctattaacttatagggagcaatcc

SEQ ID NO: 5008909 - DNA, 25 bp, Homo sapien
tcctacctgctcctaatacatttgc

SEQ ID NO: 5008910 - DNA, 25 bp, Homo sapien
agcaggaagtccatgttcactgtag

SEQ ID NO: 5008911 - DNA, 25 bp, Homo sapien
gcaggaagtccatgttcactgtaga

SEQ ID NO: 5008912 - DNA, 25 bp, Homo sapien
tcaagttggaatgaagccaaaaact

SEQ ID NO: 5008913 - DNA, 25 bp, Homo sapien
tataaattcaagttggaatgaagcc

SEQ ID NO: 5008914 - DNA, 25 bp, Homo sapien
agttggaatgaagccaaaaactgca

SEQ ID NO: 5008915 - DNA, 25 bp, Homo sapien
gaatgaagccaaaaactgcagaatt

SEQ ID NO: 5008916 - DNA, 25 bp, Homo sapien
ttcatgggagtgagatccgctgagc

SEQ ID NO: 5008917 - DNA, 25 bp, Homo sapien
gagatccgctgagcaataccactcg

SEQ ID NO: 5008918 - DNA, 25 bp, Homo sapien
ataccactcggctccctggtttcag

SEQ ID NO: 5008919 - DNA, 25 bp, Homo sapien
tgttgggcttcatgggagtgagatc

SEQ ID NO: 5008920 - DNA, 25 bp, Homo sapien
tacagccataatgtctgtttcccca

SEQ ID NO: 5008921 - DNA, 25 bp, Homo sapien
ttagtattcttttacagccataatg

SEQ ID NO: 5008922 - DNA, 25 bp, Homo sapien
acagccataatgtctgtttccccag

SEQ ID NO: 5008923 - DNA, 25 bp, Homo sapien
ttacagccataatgtctgtttcccc

SEQ ID NO: 5008924 - DNA, 25 bp, Homo sapien
gttctcattccacttgccaataatg

SEQ ID NO: 5008925 - DNA, 25 bp, Homo sapien
cttcttgttctcattccacttgcca

SEQ ID NO: 5008926 - DNA, 25 bp, Homo sapien
tcttgttctcattccacttgccaat

SEQ ID NO: 5008927 - DNA, 25 bp, Homo sapien
tgttctcattccacttgccaataat

SEQ ID NO: 5008928 - DNA, 25 bp, Homo sapien
caatctctccatgtgataaaggccc

SEQ ID NO: 5008929 - DNA, 25 bp, Homo sapien
gcaatctctccatgtgataaaggcc

SEQ ID NO: 5008930 - DNA, 25 bp, Homo sapien
gggcaatctctccatgtgataaagg

SEQ ID NO: 5008931 - DNA, 25 bp, Homo sapien
ctgggcaatctctccatgtgataaa

SEQ ID NO: 5008932 - DNA, 25 bp, Homo sapien
gaagggcaaatgtatctgacaagac

SEQ ID NO: 5008933 - DNA, 25 bp, Homo sapien
aactgtagattcatggtatatgccc

SEQ ID NO: 5008934 - DNA, 25 bp, Homo sapien
tgacaagacatcagacctccagagc

SEQ ID NO: 5008935 - DNA, 25 bp, Homo sapien
tgctttgctactgatactacaggga

SEQ ID NO: 5008936 - DNA, 25 bp, Homo sapien
caggctagaataaatggtgtggtgc

SEQ ID NO: 5008937 - DNA, 25 bp, Homo sapien
gctagattggagtcagtggtatcaa

SEQ ID NO: 5008938 - DNA, 25 bp, Homo sapien
caatagcattgagcacacctggcac

SEQ ID NO: 5008939 - DNA, 25 bp, Homo sapien
caaaaacagttgttagagagagaca

SEQ ID NO: 5008940 - DNA, 25 bp, Homo sapien
taaatatgactctacgtgatggact

SEQ ID NO: 5008941 - DNA, 25 bp, Homo sapien
gaatgagccgtcatcatctactgga

SEQ ID NO: 5008942 - DNA, 25 bp, Homo sapien
tgtgactgctgagaatgagccgtca

SEQ ID NO: 5008943 - DNA, 25 bp, Homo sapien
tacgtgatggactgtgactgctgag

SEQ ID NO: 5008944 - DNA, 25 bp, Homo sapien
ccatccaattcctcatttcatactg

SEQ ID NO: 5008945 - DNA, 25 bp, Homo sapien
aacttgtcacaattgtacaggtaca

SEQ ID NO: 5008946 - DNA, 25 bp, Homo sapien
gctaagccaatattatgaagtatag

SEQ ID NO: 5008947 - DNA, 25 bp, Homo sapien
aggtacaaattgtaagaatagggct

SEQ ID NO: 5008948 - DNA, 25 bp, Homo sapien
caatggtcagtgtctcagaagagtt

SEQ ID NO: 5008949 - DNA, 25 bp, Homo sapien
ttagagtggtaggaaaggatgacat

SEQ ID NO: 5008950 - DNA, 25 bp, Homo sapien
tctgagggattgtaaagcaatggtc

SEQ ID NO: 5008951 - DNA, 25 bp, Homo sapien
ggaaaaactcctctaatgaggatac

SEQ ID NO: 5008952 - DNA, 25 bp, Homo sapien
ctgaatcctgaaacgataagccaat

SEQ ID NO: 5008953 - DNA, 25 bp, Homo sapien
tgaagtcagtgtgaagctcaataac

SEQ ID NO: 5008954 - DNA, 25 bp, Homo sapien
tctgaatcctgaaacgataagccaa

SEQ ID NO: 5008955 - DNA, 25 bp, Homo sapien
ctgttccttgtgtgctttcaaatga

SEQ ID NO: 5008956 - DNA, 25 bp, Homo sapien
atctggcttggactgcagcttgcat

SEQ ID NO: 5008957 - DNA, 25 bp, Homo sapien
tgatctggcttggactgcagcttgc

SEQ ID NO: 5008958 - DNA, 25 bp, Homo sapien
gtgctttcaaatgatctggcttgga

SEQ ID NO: 5008959 - DNA, 25 bp, Homo sapien
ctcaatgttgaacacagaattcagt

SEQ ID NO: 5008960 - DNA, 25 bp, Homo sapien
tcagtgttatgaaattagttgaaac

SEQ ID NO: 5008961 - DNA, 25 bp, Homo sapien
aaattagttgaaactctgtctggtg

SEQ ID NO: 5008962 - DNA, 25 bp, Homo sapien
caatgttgaacacagaattcagtgt

SEQ ID NO: 5008963 - DNA, 25 bp, Homo sapien
cttgcttttcgttcacccagggata

SEQ ID NO: 5008964 - DNA, 25 bp, Homo sapien
tatccacagcatgatacaactttga

SEQ ID NO: 5008965 - DNA, 25 bp, Homo sapien
cttttcgttcacccagggatatcca

SEQ ID NO: 5008966 - DNA, 25 bp, Homo sapien
tgcttttcgttcacccagggatatc

SEQ ID NO: 5008967 - DNA, 25 bp, Homo sapien
tattctctgagaagataatcctgcc

SEQ ID NO: 5008968 - DNA, 25 bp, Homo sapien
tatttacgggaagcacacttcattc

SEQ ID NO: 5008969 - DNA, 25 bp, Homo sapien
tatgataggaataaagcgggtactc

SEQ ID NO: 5008970 - DNA, 25 bp, Homo sapien
cattccctttatcaagacctccagg

SEQ ID NO: 5008971 - DNA, 25 bp, Homo sapien
cccacagattgtgggtcctgtccct

SEQ ID NO: 5008972 - DNA, 25 bp, Homo sapien
actggaaagccagacaactcccaga

SEQ ID NO: 5008973 - DNA, 25 bp, Homo sapien
aactcccagaccatcccacagattg

SEQ ID NO: 5008974 - DNA, 25 bp, Homo sapien
gccaaggaactggaaagccagacaa

SEQ ID NO: 5008975 - DNA, 25 bp, Homo sapien
ctggggttgaggaaacagcaaacat

SEQ ID NO: 5008976 - DNA, 25 bp, Homo sapien
gcttcctctcccataccctcacatc

SEQ ID NO: 5008977 - DNA, 25 bp, Homo sapien
tctcccataccctcacatctgtttt

SEQ ID NO: 5008978 - DNA, 25 bp, Homo sapien
ttcctctcccataccctcacatctg

SEQ ID NO: 5008979 - DNA, 25 bp, Homo sapien
tcctctcccataccctcacatctgt

SEQ ID NO: 5008980 - DNA, 25 bp, Homo sapien
ttgtctacagttgtgagtttaatct

SEQ ID NO: 5008981 - DNA, 25 bp, Homo sapien
ttaatctctgcactcctgaatgttt

SEQ ID NO: 5008982 - DNA, 25 bp, Homo sapien
caatatctttgtctacagttgtgag

SEQ ID NO: 5008983 - DNA, 25 bp, Homo sapien
tatttctccaatatctttgtctaca

SEQ ID NO: 5008984 - DNA, 25 bp, Homo sapien
ctttgtccaggatgtgtaaatacaa

SEQ ID NO: 5008985 - DNA, 25 bp, Homo sapien
gtgatgtattgaagtttcaccttcc

SEQ ID NO: 5008986 - DNA, 25 bp, Homo sapien
gccatcagcagagtgattgtcaggc

SEQ ID NO: 5008987 - DNA, 25 bp, Homo sapien
tttcctgttgcggtgatgtattgaa

SEQ ID NO: 5008988 - DNA, 25 bp, Homo sapien
taaattgggtaagaggaagcataac

SEQ ID NO: 5008989 - DNA, 25 bp, Homo sapien
tttttctgtgtatcacagccacaaa

SEQ ID NO: 5008990 - DNA, 25 bp, Homo sapien
ggaggtggactttccttggatgcca

SEQ ID NO: 5008991 - DNA, 25 bp, Homo sapien
tctgtaaattgggtaagaggaagca

SEQ ID NO: 5008992 - DNA, 25 bp, Homo sapien
tcagaagtgatgtactgtgttgttt

SEQ ID NO: 5008993 - DNA, 25 bp, Homo sapien
ttatagatcagaagtgatgtactgt

SEQ ID NO: 5008994 - DNA, 25 bp, Homo sapien
tagatcagaagtgatgtactgtgtt

SEQ ID NO: 5008995 - DNA, 25 bp, Homo sapien
gatcagaagtgatgtactgtgttgt

SEQ ID NO: 5008996 - DNA, 25 bp, Homo sapien
attccggacacattaggacaaaatg

SEQ ID NO: 5008997 - DNA, 25 bp, Homo sapien
tgatttggctccctagggatgcagt

SEQ ID NO: 5008998 - DNA, 25 bp, Homo sapien
atttggctccctagggatgcagtgg

SEQ ID NO: 5008999 - DNA, 25 bp, Homo sapien
ctttgatttggctccctagggatgc

SEQ ID NO: 5009000 - DNA, 25 bp, Homo sapien
tttgatttggctccctagggatgca

SEQ ID NO: 5009001 - DNA, 25 bp, Homo sapien
gctctctcaccacttcttttcaatg

SEQ ID NO: 5009002 - DNA, 25 bp, Homo sapien
acaaggcaaggatgttagctctctc

SEQ ID NO: 5009003 - DNA, 25 bp, Homo sapien
ttcttttcaatgttgtactggagac

SEQ ID NO: 5009004 - DNA, 25 bp, Homo sapien
tctttataaactcaggaacaaggca

SEQ ID NO: 5009005 - DNA, 25 bp, Homo sapien
acagcttcacaaaattctgaaataa

SEQ ID NO: 5009006 - DNA, 25 bp, Homo sapien
catccgtacagcttcacaaaattct

SEQ ID NO: 5009007 - DNA, 25 bp, Homo sapien
cttcacaaaattctgaaataatgtg

SEQ ID NO: 5009008 - DNA, 25 bp, Homo sapien
atccgtacagcttcacaaaattctg

SEQ ID NO: 5009009 - DNA, 25 bp, Homo sapien
tagttgattgatctttgatcttgaa

SEQ ID NO: 5009010 - DNA, 25 bp, Homo sapien
ccatgatttccaagcatagacatag

SEQ ID NO: 5009011 - DNA, 25 bp, Homo sapien
tattacacgtaagccagaaggaaca

SEQ ID NO: 5009012 - DNA, 25 bp, Homo sapien
aaaatgatctcttgttaaaacatcc

SEQ ID NO: 5009013 - DNA, 25 bp, Homo sapien
aaacatcccattccttatagtgcca

SEQ ID NO: 5009014 - DNA, 25 bp, Homo sapien
caagtccttatgtggtattgccagg

SEQ ID NO: 5009015 - DNA, 25 bp, Homo sapien
aaactagcgttctccctaggatagc

SEQ ID NO: 5009016 - DNA, 25 bp, Homo sapien
cttgcagcagatagacactgagttt

SEQ ID NO: 5009017 - DNA, 25 bp, Homo sapien
aactaaatccagcaggcttgcagca

SEQ ID NO: 5009018 - DNA, 25 bp, Homo sapien
caggcttgaaacgactttgctgagc

SEQ ID NO: 5009019 - DNA, 25 bp, Homo sapien
aggcttgaaacgactttgctgagca

SEQ ID NO: 5009020 - DNA, 25 bp, Homo sapien
ggcttgaaacgactttgctgagcat

SEQ ID NO: 5009021 - DNA, 25 bp, Homo sapien
aatttcaaaattcttgactaccatc

SEQ ID NO: 5009022 - DNA, 25 bp, Homo sapien
tatacctgagaacctgtggaaaacc

SEQ ID NO: 5009023 - DNA, 25 bp, Homo sapien
accagccactatacctgagaacctg

SEQ ID NO: 5009024 - DNA, 25 bp, Homo sapien
tacctgagaacctgtggaaaacctg

SEQ ID NO: 5009025 - DNA, 25 bp, Homo sapien
gccactatacctgagaacctgtgga

SEQ ID NO: 5009026 - DNA, 25 bp, Homo sapien
tgtctatccatgaacacactatgga

SEQ ID NO: 5009027 - DNA, 25 bp, Homo sapien
cacattatcagtgttttgtctatcc

SEQ ID NO: 5009028 - DNA, 25 bp, Homo sapien
ttagacccctgcaagattttctggt

SEQ ID NO: 5009029 - DNA, 25 bp, Homo sapien
taactgatggcagtagagttttctt

SEQ ID NO: 5009030 - DNA, 25 bp, Homo sapien
aatgggtccataagaaaatttgcca

SEQ ID NO: 5009031 - DNA, 25 bp, Homo sapien
cataaaatgggtccataagaaaatt

SEQ ID NO: 5009032 - DNA, 25 bp, Homo sapien
atccagtggtcataaaatgggtcca

SEQ ID NO: 5009033 - DNA, 25 bp, Homo sapien
ttcttgggtaatccagtggtcataa

SEQ ID NO: 5009034 - DNA, 25 bp, Homo sapien
caactctgaagtatggaactacctc

SEQ ID NO: 5009035 - DNA, 25 bp, Homo sapien
agtccagagacccaacactctttga

SEQ ID NO: 5009036 - DNA, 25 bp, Homo sapien
agcagtctactgctcctgacacatg

SEQ ID NO: 5009037 - DNA, 25 bp, Homo sapien
tccagcaagtggactgtcaacccag

SEQ ID NO: 5009038 - DNA, 25 bp, Homo sapien
ccagggagaactgtgacactagcct

SEQ ID NO: 5009039 - DNA, 25 bp, Homo sapien
catattggatcaagccagggagaac

SEQ ID NO: 5009040 - DNA, 25 bp, Homo sapien
tgtcctctcccttgtagccattgcc

SEQ ID NO: 5009041 - DNA, 25 bp, Homo sapien
attgcccactggtggccacccctgt

SEQ ID NO: 5009042 - DNA, 25 bp, Homo sapien
gtgggttgctactgggaatttggaa

SEQ ID NO: 5009043 - DNA, 25 bp, Homo sapien
tgggttgctactgggaatttggaat

SEQ ID NO: 5009044 - DNA, 25 bp, Homo sapien
agtgggttgctactgggaatttgga

SEQ ID NO: 5009045 - DNA, 25 bp, Homo sapien
caagctgctattaacattgtctagg

SEQ ID NO: 5009046 - DNA, 25 bp, Homo sapien
ctttcaagctgctattaacattgtc

SEQ ID NO: 5009047 - DNA, 25 bp, Homo sapien
ttcaagctgctattaacattgtcta

SEQ ID NO: 5009048 - DNA, 25 bp, Homo sapien
agctgctattaacattgtctaggga

SEQ ID NO: 5009049 - DNA, 25 bp, Homo sapien
ggtagcattgtggtttcagcagttt

SEQ ID NO: 5009050 - DNA, 25 bp, Homo sapien
ttgtggtttcagcagtttgggcctt

SEQ ID NO: 5009051 - DNA, 25 bp, Homo sapien
gatgcattattcaggtacatactgc

SEQ ID NO: 5009052 - DNA, 25 bp, Homo sapien
tgatgcattattcaggtacatactg

SEQ ID NO: 5009053 - DNA, 25 bp, Homo sapien
tacctctactacatgcaggcaaaag

SEQ ID NO: 5009054 - DNA, 25 bp, Homo sapien
tatgatccggtgcttagggaacttg

SEQ ID NO: 5009055 - DNA, 25 bp, Homo sapien
caccagttgctggtatgctgcagag

SEQ ID NO: 5009056 - DNA, 25 bp, Homo sapien
caaaaggtgcttgggtccaggctag

SEQ ID NO: 5009057 - DNA, 25 bp, Homo sapien
gaaaatactatcatgttgatttgtg

SEQ ID NO: 5009058 - DNA, 25 bp, Homo sapien
aaaaggatagtgacttagaactgaa

SEQ ID NO: 5009059 - DNA, 25 bp, Homo sapien
tagaattaaaaaggatagtgactta

SEQ ID NO: 5009060 - DNA, 25 bp, Homo sapien
gacttagaactgaaagtgatagttt

SEQ ID NO: 5009061 - DNA, 25 bp, Homo sapien
ggtgatcttaactagcaaacctgct

SEQ ID NO: 5009062 - DNA, 25 bp, Homo sapien
gccagtggtaaagcaggaggtatta

SEQ ID NO: 5009063 - DNA, 25 bp, Homo sapien
ggaggtattatccagccaataactc

SEQ ID NO: 5009064 - DNA, 25 bp, Homo sapien
gggtccttcaacaaatgccagtggt

SEQ ID NO: 5009065 - DNA, 25 bp, Homo sapien
caggcccagagtaaagaatgacagc

SEQ ID NO: 5009066 - DNA, 25 bp, Homo sapien
aaactggctaattcacacatccatt

SEQ ID NO: 5009067 - DNA, 25 bp, Homo sapien
ctgccagtgtcaggcccagagtaaa

SEQ ID NO: 5009068 - DNA, 25 bp, Homo sapien
gctactgaataaccatagtgaaggc

SEQ ID NO: 5009069 - DNA, 25 bp, Homo sapien
gcttgaagtggggtcactggactct

SEQ ID NO: 5009070 - DNA, 25 bp, Homo sapien
tcatgaattgactgcttgaagtggg

SEQ ID NO: 5009071 - DNA, 25 bp, Homo sapien
tttggaagggcaaccaaataatcat

SEQ ID NO: 5009072 - DNA, 25 bp, Homo sapien
ttggaagggcaaccaaataatcata

SEQ ID NO: 5009073 - DNA, 25 bp, Homo sapien
gagacatcacctcataacacctcat

SEQ ID NO: 5009074 - DNA, 25 bp, Homo sapien
taacttgactaatcatctgggaaat

SEQ ID NO: 5009075 - DNA, 25 bp, Homo sapien
tgaccaacaaccttatgaaaaacat

SEQ ID NO: 5009076 - DNA, 25 bp, Homo sapien
cgtgagaacggctaccatcaaaaag

SEQ ID NO: 5009077 - DNA, 25 bp, Homo sapien
cacataatcaaatgtcctcttcagg

SEQ ID NO: 5009078 - DNA, 25 bp, Homo sapien
tgaaatcttacccacataatcaaat

SEQ ID NO: 5009079 - DNA, 25 bp, Homo sapien
tacccacataatcaaatgtcctctt

SEQ ID NO: 5009080 - DNA, 25 bp, Homo sapien
tcttacccacataatcaaatgtcct

SEQ ID NO: 5009081 - DNA, 25 bp, Homo sapien
tcattttctgagctaggttaaactc

SEQ ID NO: 5009082 - DNA, 25 bp, Homo sapien
tcaaggtttcagtgttctattcatt

SEQ ID NO: 5009083 - DNA, 25 bp, Homo sapien
gctaggttaaactccttcggcagtg

SEQ ID NO: 5009084 - DNA, 25 bp, Homo sapien
cttcggcagtgcaatctccttttcc

SEQ ID NO: 5009085 - DNA, 25 bp, Homo sapien
gaagacacaagcatctcttgccact

SEQ ID NO: 5009086 - DNA, 25 bp, Homo sapien
aagctatcagtaaaagccacatggc

SEQ ID NO: 5009087 - DNA, 25 bp, Homo sapien
catccctatgaacctgctctgcaga

SEQ ID NO: 5009088 - DNA, 25 bp, Homo sapien
tccctatgaacctgctctgcagaag

SEQ ID NO: 5009089 - DNA, 25 bp, Homo sapien
aacgtggctgtgctcctactttcag

SEQ ID NO: 5009090 - DNA, 25 bp, Homo sapien
tttcagctcccttggttgcttcaca

SEQ ID NO: 5009091 - DNA, 25 bp, Homo sapien
ctactttcagctcccttggttgctt

SEQ ID NO: 5009092 - DNA, 25 bp, Homo sapien
gctcccttggttgcttcacaagtac

SEQ ID NO: 5009093 - DNA, 25 bp, Homo sapien
caaactattgccaacacagtagcaa

SEQ ID NO: 5009094 - DNA, 25 bp, Homo sapien
cacagtagcaaaggtgtctgcacac

SEQ ID NO: 5009095 - DNA, 25 bp, Homo sapien
tgccaacacagtagcaaaggtgtct

SEQ ID NO: 5009096 - DNA, 25 bp, Homo sapien
ggtgtctgcacactggcaccagtgc

SEQ ID NO: 5009097 - DNA, 25 bp, Homo sapien
tcaaatagtagaaccaacctggaag

SEQ ID NO: 5009098 - DNA, 25 bp, Homo sapien
tctttgggtttctacgaatatgttc

SEQ ID NO: 5009099 - DNA, 25 bp, Homo sapien
agcagttttgtactcggtctttggg

SEQ ID NO: 5009100 - DNA, 25 bp, Homo sapien
cagatactatcctggtatctgaact

SEQ ID NO: 5009101 - DNA, 25 bp, Homo sapien
tgaccccagaggcatggacaatcta

SEQ ID NO: 5009102 - DNA, 25 bp, Homo sapien
tgttctgctactccaaaagaattgg

SEQ ID NO: 5009103 - DNA, 25 bp, Homo sapien
gccacgcttgtgttgcatattccca

SEQ ID NO: 5009104 - DNA, 25 bp, Homo sapien
ggacaatctatgagaacccacgctt

SEQ ID NO: 5009105 - DNA, 25 bp, Homo sapien
aattaacagcacttctacctagagg

SEQ ID NO: 5009106 - DNA, 25 bp, Homo sapien
gagagtctacaatttattcgccacc

SEQ ID NO: 5009107 - DNA, 25 bp, Homo sapien
tacatgatgagttgggagagtctac

SEQ ID NO: 5009108 - DNA, 25 bp, Homo sapien
gaatattctccaagactgctagtaa

SEQ ID NO: 5009109 - DNA, 25 bp, Homo sapien
aacgtgctgcattactgattttgaa

SEQ ID NO: 5009110 - DNA, 25 bp, Homo sapien
gatcttacatcaatgtgtaggtttg

SEQ ID NO: 5009111 - DNA, 25 bp, Homo sapien
gagccaccacgactagccttaagga

SEQ ID NO: 5009112 - DNA, 25 bp, Homo sapien
gctttctagcttgagaacagtttga

SEQ ID NO: 5009113 - DNA, 25 bp, Homo sapien
gatattccgtatccttcctcatcat

SEQ ID NO: 5009114 - DNA, 25 bp, Homo sapien
ttgttacaaaactgcgatattccgt

SEQ ID NO: 5009115 - DNA, 25 bp, Homo sapien
gatagagatacaactttccttctgt

SEQ ID NO: 5009116 - DNA, 25 bp, Homo sapien
tcctctagactgtcgcagatgctgc

SEQ ID NO: 5009117 - DNA, 25 bp, Homo sapien
gctctccaagttgttccatgaccat

SEQ ID NO: 5009118 - DNA, 25 bp, Homo sapien
gctgtactgatgcatgcaaccctgg

SEQ ID NO: 5009119 - DNA, 25 bp, Homo sapien
cagctgtactgatgcatgcaaccct

SEQ ID NO: 5009120 - DNA, 25 bp, Homo sapien
tactgatgcatgcaaccctggtcat

SEQ ID NO: 5009121 - DNA, 25 bp, Homo sapien
tgtactgatgcatgcaaccctggtc

SEQ ID NO: 5009122 - DNA, 25 bp, Homo sapien
cagacatccgtgtgatgttgcccat

SEQ ID NO: 5009123 - DNA, 25 bp, Homo sapien
gtgtgaggcagagtaggaccagagc

SEQ ID NO: 5009124 - DNA, 25 bp, Homo sapien
tcctgttgccctggatgaaagtgtg

SEQ ID NO: 5009125 - DNA, 25 bp, Homo sapien
gaggcagagtaggaccagagcctga

SEQ ID NO: 5009126 - DNA, 25 bp, Homo sapien
tttccactttgaatccgtgaaccag

SEQ ID NO: 5009127 - DNA, 25 bp, Homo sapien
ctttgaatccgtgaaccagctccta

SEQ ID NO: 5009128 - DNA, 25 bp, Homo sapien
cactttgaatccgtgaaccagctcc

SEQ ID NO: 5009129 - DNA, 25 bp, Homo sapien
tccactttgaatccgtgaaccagct

SEQ ID NO: 5009130 - DNA, 25 bp, Homo sapien
gaagttgcacatatactcatactca

SEQ ID NO: 5009131 - DNA, 25 bp, Homo sapien
taaggtggaagttgcacatatactc

SEQ ID NO: 5009132 - DNA, 25 bp, Homo sapien
ggtggaagttgcacatatactcata

SEQ ID NO: 5009133 - DNA, 25 bp, Homo sapien
aataaggtggaagttgcacatatac

SEQ ID NO: 5009134 - DNA, 25 bp, Homo sapien
gcaggtcactggagtctggcagact

SEQ ID NO: 5009135 - DNA, 25 bp, Homo sapien
gacttggcctcaacctgtctcttag

SEQ ID NO: 5009136 - DNA, 25 bp, Homo sapien
aagttcccactccacgcagcgggat

SEQ ID NO: 5009137 - DNA, 25 bp, Homo sapien
aggctcaggccctcccatcttgaaa

SEQ ID NO: 5009138 - DNA, 25 bp, Homo sapien
cagcatagctattgcataggccacc

SEQ ID NO: 5009139 - DNA, 25 bp, Homo sapien
ccttgaagccagcatagctattgca

SEQ ID NO: 5009140 - DNA, 25 bp, Homo sapien
agccagcatagctattgcataggcc

SEQ ID NO: 5009141 - DNA, 25 bp, Homo sapien
ccagcatagctattgcataggccac

SEQ ID NO: 5009142 - DNA, 25 bp, Homo sapien
gcttctagagcccaaatgaatatgt

SEQ ID NO: 5009143 - DNA, 25 bp, Homo sapien
caaaaatcgatgattggcaataaat

SEQ ID NO: 5009144 - DNA, 25 bp, Homo sapien
ccaaagccaaaaatcgatgattggc

SEQ ID NO: 5009145 - DNA, 25 bp, Homo sapien
tgaatatgtgcataaaggcaaaatc

SEQ ID NO: 5009146 - DNA, 25 bp, Homo sapien
tcattttcaggcacaaggtccagga

SEQ ID NO: 5009147 - DNA, 25 bp, Homo sapien
cttcattttcaggcacaaggtccag

SEQ ID NO: 5009148 - DNA, 25 bp, Homo sapien
ttcattttcaggcacaaggtccagg

SEQ ID NO: 5009149 - DNA, 25 bp, Homo sapien
ggtgtctgagaagccattaatgtga

SEQ ID NO: 5009150 - DNA, 25 bp, Homo sapien
ctttttgttattaagcagtgtggta

SEQ ID NO: 5009151 - DNA, 25 bp, Homo sapien
ttaagcagtgtggtatcactaaata

SEQ ID NO: 5009152 - DNA, 25 bp, Homo sapien
ttgtgagcaacatattggtgtctga

SEQ ID NO: 5009153 - DNA, 25 bp, Homo sapien
cagtaatcagatgtatatttggtct

SEQ ID NO: 5009154 - DNA, 25 bp, Homo sapien
acagtaatcagatgtatatttggtc

SEQ ID NO: 5009155 - DNA, 25 bp, Homo sapien
ttcaggtacagtaatcagatgtata

SEQ ID NO: 5009156 - DNA, 25 bp, Homo sapien
ggtacagtaatcagatgtatatttg

SEQ ID NO: 5009157 - DNA, 25 bp, Homo sapien
gtgatgagcaagttgtgttaaatgt

SEQ ID NO: 5009158 - DNA, 25 bp, Homo sapien
tttagtgatgagcaagttgtgttaa

SEQ ID NO: 5009159 - DNA, 25 bp, Homo sapien
ttagtgatgagcaagttgtgttaaa

SEQ ID NO: 5009160 - DNA, 25 bp, Homo sapien
tagtgatgagcaagttgtgttaaat

SEQ ID NO: 5009161 - DNA, 25 bp, Homo sapien
tcatatctgatgagtgcaacccact

SEQ ID NO: 5009162 - DNA, 25 bp, Homo sapien
gggtgcagacagtgctcctctaagt

SEQ ID NO: 5009163 - DNA, 25 bp, Homo sapien
aacagccccaagtaccaggagaggt

SEQ ID NO: 5009164 - DNA, 25 bp, Homo sapien
tgttatacctaagccacaggatgag

SEQ ID NO: 5009165 - DNA, 25 bp, Homo sapien
taatgtccagcgtttctagtcacag

SEQ ID NO: 5009166 - DNA, 25 bp, Homo sapien
gcctgaaaacagaccgagtcatttt

SEQ ID NO: 5009167 - DNA, 25 bp, Homo sapien
ggtgctggctctctatcaggccaag

SEQ ID NO: 5009168 - DNA, 25 bp, Homo sapien
tcaggccaagtagcattatgaatca

SEQ ID NO: 5009169 - DNA, 25 bp, Homo sapien
ggctgcctgtttcactcacgcagca

SEQ ID NO: 5009170 - DNA, 25 bp, Homo sapien
gggctgcctgtttcactcacgcagc

SEQ ID NO: 5009171 - DNA, 25 bp, Homo sapien
gctgcctgtttcactcacgcagcag

SEQ ID NO: 5009172 - DNA, 25 bp, Homo sapien
tctcgtaatagaaaagtggggagcc

SEQ ID NO: 5009173 - DNA, 25 bp, Homo sapien
tggggagccaccccattcatcccca

SEQ ID NO: 5009174 - DNA, 25 bp, Homo sapien
ttctctcgtaatagaaaagtgggga

SEQ ID NO: 5009175 - DNA, 25 bp, Homo sapien
cgtaatagaaaagtggggagccgct

SEQ ID NO: 5009176 - DNA, 25 bp, Homo sapien
tttctggactgctaggctccccatg

SEQ ID NO: 5009177 - DNA, 25 bp, Homo sapien
tgtgttctgacagtgagagctcttt

SEQ ID NO: 5009178 - DNA, 25 bp, Homo sapien
aaacccacactacatgcttgtctgt

SEQ ID NO: 5009179 - DNA, 25 bp, Homo sapien
ctcacaaagggagcagcgaccacct

SEQ ID NO: 5009180 - DNA, 25 bp, Homo sapien
ctggcttcacattatgatcaaactg

SEQ ID NO: 5009181 - DNA, 25 bp, Homo sapien
gcagcatacctatttagtaaggaca

SEQ ID NO: 5009182 - DNA, 25 bp, Homo sapien
ttctgtgaaactcctagtggcagca

SEQ ID NO: 5009183 - DNA, 25 bp, Homo sapien
gcatacctatttagtaaggacaaac

SEQ ID NO: 5009184 - DNA, 25 bp, Homo sapien
tcctagtggcagcatacctatttag

SEQ ID NO: 5009185 - DNA, 25 bp, Homo sapien
catgtaaagtactcccatcatcata

SEQ ID NO: 5009186 - DNA, 25 bp, Homo sapien
tacaaacatgtaaagtactcccatc

SEQ ID NO: 5009187 - DNA, 25 bp, Homo sapien
tactcccatcatcatagggaaacat

SEQ ID NO: 5009188 - DNA, 25 bp, Homo sapien
taaagtactcccatcatcataggga

SEQ ID NO: 5009189 - DNA, 25 bp, Homo sapien
cacatttagaatctttggggatgga

SEQ ID NO: 5009190 - DNA, 25 bp, Homo sapien
tatgtacttaaaactttgctcttcc

SEQ ID NO: 5009191 - DNA, 25 bp, Homo sapien
gggatggatacttagctatgtactt

SEQ ID NO: 5009192 - DNA, 25 bp, Homo sapien
cttttgcacatgctagtctctcagc

SEQ ID NO: 5009193 - DNA, 25 bp, Homo sapien
gaactgacaactgaagagtactcca

SEQ ID NO: 5009194 - DNA, 25 bp, Homo sapien
cggtcacaacagaactgacaactga

SEQ ID NO: 5009195 - DNA, 25 bp, Homo sapien
cacaacagaactgacaactgaagag

SEQ ID NO: 5009196 - DNA, 25 bp, Homo sapien
cagaactgacaactgaagagtactc

SEQ ID NO: 5009197 - DNA, 25 bp, Homo sapien
gtagggtatcctgcatcctaagagc

SEQ ID NO: 5009198 - DNA, 25 bp, Homo sapien
cgatagtggttgagaacaatgaatc

SEQ ID NO: 5009199 - DNA, 25 bp, Homo sapien
tgtgaagtccagtgtagggtatcct

SEQ ID NO: 5009200 - DNA, 25 bp, Homo sapien
gggtatcctgcatcctaagagctct

SEQ ID NO: 5009201 - DNA, 25 bp, Homo sapien
cgaacaaatcctagatcacttggct

SEQ ID NO: 5009202 - DNA, 25 bp, Homo sapien
tcaccaatcatcaatttgccgaaca

SEQ ID NO: 5009203 - DNA, 25 bp, Homo sapien
catcaatttgccgaacaaatcctag

SEQ ID NO: 5009204 - DNA, 25 bp, Homo sapien
aaatcctagatcacttggcttgatg

SEQ ID NO: 5009205 - DNA, 25 bp, Homo sapien
ttcaatgactaataaccccaaattc

SEQ ID NO: 5009206 - DNA, 25 bp, Homo sapien
cccttttggttatgatgctatttgt

SEQ ID NO: 5009207 - DNA, 25 bp, Homo sapien
tgtttgctctaacgtagagttgaaa

SEQ ID NO: 5009208 - DNA, 25 bp, Homo sapien
tagcaagaagctagtaacaccatag

SEQ ID NO: 5009209 - DNA, 25 bp, Homo sapien
gaaaagcactctcaaaaagaagcca

SEQ ID NO: 5009210 - DNA, 25 bp, Homo sapien
aaatgtctgtgtgttgccgaagaaa

SEQ ID NO: 5009211 - DNA, 25 bp, Homo sapien
ggaagagatcaagattcttactgat

SEQ ID NO: 5009212 - DNA, 25 bp, Homo sapien
taaactcaaggagccagcatttcat

SEQ ID NO: 5009213 - DNA, 25 bp, Homo sapien
aaaccacttcttcacacttcctatc

SEQ ID NO: 5009214 - DNA, 25 bp, Homo sapien
cttcttcacacttcctatctgcctt

SEQ ID NO: 5009215 - DNA, 25 bp, Homo sapien
tctaaaacaacaggattctgccagc

SEQ ID NO: 5009216 - DNA, 25 bp, Homo sapien
gtactctaaaacaacaggattctgc

SEQ ID NO: 5009217 - DNA, 25 bp, Homo sapien
cacacactcctgagtgtgatcctgc

SEQ ID NO: 5009218 - DNA, 25 bp, Homo sapien
tcttatcagaagcttttcccacttc

SEQ ID NO: 5009219 - DNA, 25 bp, Homo sapien
ctgctcatcttcaaccagttggacc

SEQ ID NO: 5009220 - DNA, 25 bp, Homo sapien
tcctgagtgtgatcctgctcatctt

SEQ ID NO: 5009221 - DNA, 25 bp, Homo sapien
ccagctttatcgctttgatggtggt

SEQ ID NO: 5009222 - DNA, 25 bp, Homo sapien
gggtctccagctttatcgctttgat

SEQ ID NO: 5009223 - DNA, 25 bp, Homo sapien
ctttatcgctttgatggtggtggtc

SEQ ID NO: 5009224 - DNA, 25 bp, Homo sapien
tatcgctttgatggtggtggtccca

SEQ ID NO: 5009225 - DNA, 25 bp, Homo sapien
ttcctgttgaccagaagcagcagtt

SEQ ID NO: 5009226 - DNA, 25 bp, Homo sapien
tttagcagcaggataatgaaagcca

SEQ ID NO: 5009227 - DNA, 25 bp, Homo sapien
tctgacctttacaccttcctgttga

SEQ ID NO: 5009228 - DNA, 25 bp, Homo sapien
cttctgacctttacaccttcctgtt

SEQ ID NO: 5009229 - DNA, 25 bp, Homo sapien
gaatatgtataggaagatataagag

SEQ ID NO: 5009230 - DNA, 25 bp, Homo sapien
ctagaatatgtataggaagatataa

SEQ ID NO: 5009231 - DNA, 25 bp, Homo sapien
tagaatatgtataggaagatataag

SEQ ID NO: 5009232 - DNA, 25 bp, Homo sapien
tatgtataggaagatataagagatc

SEQ ID NO: 5009233 - DNA, 25 bp, Homo sapien
ccagcgattggctgatggcatcttt

SEQ ID NO: 5009234 - DNA, 25 bp, Homo sapien
caggcgatcgatgagcgccctaacc

SEQ ID NO: 5009235 - DNA, 25 bp, Homo sapien
gcagtaatagaagcccaatgcaccc

SEQ ID NO: 5009236 - DNA, 25 bp, Homo sapien
gattcttcaacaggcagtaatagaa

SEQ ID NO: 5009237 - DNA, 25 bp, Homo sapien
ccagcatcgcgctgagccaggttcc

SEQ ID NO: 5009238 - DNA, 25 bp, Homo sapien
ggctgtgcgttcagatggcaataaa

SEQ ID NO: 5009239 - DNA, 25 bp, Homo sapien
gacagtggctttgcccgtgacaacg

SEQ ID NO: 5009240 - DNA, 25 bp, Homo sapien
tccccttgaagacggcgaaagagag

SEQ ID NO: 5009241 - DNA, 25 bp, Homo sapien
tcttcgcaatgagtaaacgacgcag

SEQ ID NO: 5009242 - DNA, 25 bp, Homo sapien
cacttgggtttaatgttgaggacga

SEQ ID NO: 5009243 - DNA, 25 bp, Homo sapien
gctttgctttcttagggatgctgtc

SEQ ID NO: 5009244 - DNA, 25 bp, Homo sapien
taagtgcctgctggtgtcgtcttcc

SEQ ID NO: 5009245 - DNA, 25 bp, Homo sapien
tgtgaccgaatctgctggaaatttt

SEQ ID NO: 5009246 - DNA, 25 bp, Homo sapien
ttctgtatttaacactgtgaccgaa

SEQ ID NO: 5009247 - DNA, 25 bp, Homo sapien
tatttaacactgtgaccgaatctgc

SEQ ID NO: 5009248 - DNA, 25 bp, Homo sapien
ttaacactgtgaccgaatctgctgg

SEQ ID NO: 5009249 - DNA, 25 bp, Homo sapien
tgtactttgtcatgccccattgtga

SEQ ID NO: 5009250 - DNA, 25 bp, Homo sapien
tactatgtctctttgtccctaaaag

SEQ ID NO: 5009251 - DNA, 25 bp, Homo sapien
tgttcgcagctagcatatttatttg

SEQ ID NO: 5009252 - DNA, 25 bp, Homo sapien
ttatatccaaccctcacaacaggtg

SEQ ID NO: 5009253 - DNA, 25 bp, Homo sapien
tcatgcttaatagttgataccgtcc

SEQ ID NO: 5009254 - DNA, 25 bp, Homo sapien
aaatcatgcttaatagttgataccg

SEQ ID NO: 5009255 - DNA, 25 bp, Homo sapien
caaaatcatgcttaatagttgatac

SEQ ID NO: 5009256 - DNA, 25 bp, Homo sapien
gcttaatagttgataccgtcctcat

SEQ ID NO: 5009257 - DNA, 25 bp, Homo sapien
gatggaatatctggctgagaaactt

SEQ ID NO: 5009258 - DNA, 25 bp, Homo sapien
atggaatatctggctgagaaacttg

SEQ ID NO: 5009259 - DNA, 25 bp, Homo sapien
tgatggaatatctggctgagaaact

SEQ ID NO: 5009260 - DNA, 25 bp, Homo sapien
aaaatcatatgtttgcacatccatg

SEQ ID NO: 5009261 - DNA, 25 bp, Homo sapien
tattgcataggcttcctgggcattg

SEQ ID NO: 5009262 - DNA, 25 bp, Homo sapien
gctttagtcaagtcattgtgggcaa

SEQ ID NO: 5009263 - DNA, 25 bp, Homo sapien
taacctgagtttgctattgcatagg

SEQ ID NO: 5009264 - DNA, 25 bp, Homo sapien
cattctgaaatttactcaaggccag

SEQ ID NO: 5009265 - DNA, 25 bp, Homo sapien
acatagacctttaatatttttggtg

SEQ ID NO: 5009266 - DNA, 25 bp, Homo sapien
tgaaatttactcaaggccagaagga

SEQ ID NO: 5009267 - DNA, 25 bp, Homo sapien
tatttttggtgacaagaagtttgaa

SEQ ID NO: 5009268 - DNA, 25 bp, Homo sapien
tcatatgaaatataagtgagtacat

SEQ ID NO: 5009269 - DNA, 25 bp, Homo sapien
tttgcttaggcttttcatgaagcat

SEQ ID NO: 5009270 - DNA, 25 bp, Homo sapien
tcatgaagcatataataacaaccat

SEQ ID NO: 5009271 - DNA, 25 bp, Homo sapien
ttctgtgttgtctgcgctagagtca

SEQ ID NO: 5009272 - DNA, 25 bp, Homo sapien
catagcaccattcttcaaccttttc

SEQ ID NO: 5009273 - DNA, 25 bp, Homo sapien
tagcaccattcttcaaccttttcat

SEQ ID NO: 5009274 - DNA, 25 bp, Homo sapien
atagcaccattcttcaaccttttca

SEQ ID NO: 5009275 - DNA, 25 bp, Homo sapien
cttggtgggcaaacatttccgttgg

SEQ ID NO: 5009276 - DNA, 25 bp, Homo sapien
ccgttgggaatgtaagagcatgtgc

SEQ ID NO: 5009277 - DNA, 25 bp, Homo sapien
gacagaggcccttgaaacatccagg

SEQ ID NO: 5009278 - DNA, 25 bp, Homo sapien
gcatatggcatacgtggatattcag

SEQ ID NO: 5009279 - DNA, 25 bp, Homo sapien
catggaaacgcaggcattcttgtca

SEQ ID NO: 5009280 - DNA, 25 bp, Homo sapien
cactgggatctcataaagctagcaa

SEQ ID NO: 5009281 - DNA, 25 bp, Homo sapien
ggatgtagttcctcccagtccactg

SEQ ID NO: 5009282 - DNA, 25 bp, Homo sapien
gctgttatagactgcatcagccaac

SEQ ID NO: 5009283 - DNA, 25 bp, Homo sapien
ggctgattgagtgagagttgaacat

SEQ ID NO: 5009284 - DNA, 25 bp, Homo sapien
tcagcaagaacgcacttaaaagtgc

SEQ ID NO: 5009285 - DNA, 25 bp, Homo sapien
gccaagttgtagcaaaatctaggga

SEQ ID NO: 5009286 - DNA, 25 bp, Homo sapien
gaaataccaggctttgaaagcgggc

SEQ ID NO: 5009287 - DNA, 25 bp, Homo sapien
gagactttttccatcgtatactcct

SEQ ID NO: 5009288 - DNA, 25 bp, Homo sapien
aacaatacgtacttcaactaagatc

SEQ ID NO: 5009289 - DNA, 25 bp, Homo sapien
tgtactggaccaaagattgttgtct

SEQ ID NO: 5009290 - DNA, 25 bp, Homo sapien
tctaaaacaatacgtacttcaacta

SEQ ID NO: 5009291 - DNA, 25 bp, Homo sapien
agtgctctcagatatgagtatcttt

SEQ ID NO: 5009292 - DNA, 25 bp, Homo sapien
tttcattgtcaagtcgcagattcat

SEQ ID NO: 5009293 - DNA, 25 bp, Homo sapien
ttggattgtaagagttgttttcctg

SEQ ID NO: 5009294 - DNA, 25 bp, Homo sapien
ggattgtaagagttgttttcctgaa

SEQ ID NO: 5009295 - DNA, 25 bp, Homo sapien
tattggattgtaagagttgttttcc

SEQ ID NO: 5009296 - DNA, 25 bp, Homo sapien
tatattggattgtaagagttgtttt

SEQ ID NO: 5009297 - DNA, 25 bp, Homo sapien
cattgagttgacaggttttcttgca

SEQ ID NO: 5009298 - DNA, 25 bp, Homo sapien
ctctccttttgggtagacattagtg

SEQ ID NO: 5009299 - DNA, 25 bp, Homo sapien
aaatcggcacatgtttaatgcagct

SEQ ID NO: 5009300 - DNA, 25 bp, Homo sapien
gttgacaggttttcttgcaatagat

SEQ ID NO: 5009301 - DNA, 25 bp, Homo sapien
atatactctgtcttttggtgatctc

SEQ ID NO: 5009302 - DNA, 25 bp, Homo sapien
tccattcttagttctatatactctg

SEQ ID NO: 5009303 - DNA, 25 bp, Homo sapien
tgccgccgccttcttgagcatcgtt

SEQ ID NO: 5009304 - DNA, 25 bp, Homo sapien
cgttgtagctttatcctcttctaac

SEQ ID NO: 5009305 - DNA, 25 bp, Homo sapien
gtcaatttggactctgcactgctgc

SEQ ID NO: 5009306 - DNA, 25 bp, Homo sapien
tgcccagcctcgtgaaattatagcg

SEQ ID NO: 5009307 - DNA, 25 bp, Homo sapien
tttcaacttttgctagggtggtcac

SEQ ID NO: 5009308 - DNA, 25 bp, Homo sapien
gaaatcagcataggttcaaaggact

SEQ ID NO: 5009309 - DNA, 25 bp, Homo sapien
tcatcggcaatctaaatacggcaat

SEQ ID NO: 5009310 - DNA, 25 bp, Homo sapien
tgctcagacatggatctcacgttat

SEQ ID NO: 5009311 - DNA, 25 bp, Homo sapien
tgagtgagcgacatgcaagagctgc

SEQ ID NO: 5009312 - DNA, 25 bp, Homo sapien
ccacttggtaagtcatgctcagaca

SEQ ID NO: 5009313 - DNA, 25 bp, Homo sapien
tagtaccccttccaaatagtgacag

SEQ ID NO: 5009314 - DNA, 25 bp, Homo sapien
gaattgttctaatggtcttaggata

SEQ ID NO: 5009315 - DNA, 25 bp, Homo sapien
gacttctacctgcaagatacctata

SEQ ID NO: 5009316 - DNA, 25 bp, Homo sapien
ggcaaaatcactccagttaagaatt

SEQ ID NO: 5009317 - DNA, 25 bp, Homo sapien
tgcagaatgctatgtagagatggct

SEQ ID NO: 5009318 - DNA, 25 bp, Homo sapien
cagggtgtatacgtgcacatgtacc

SEQ ID NO: 5009319 - DNA, 25 bp, Homo sapien
taactaaacgttcaactcattccta

SEQ ID NO: 5009320 - DNA, 25 bp, Homo sapien
tacagattatgcaaagtagttcatc

SEQ ID NO: 5009321 - DNA, 25 bp, Homo sapien
cagcaaaggtagctctgtcaaactg

SEQ ID NO: 5009322 - DNA, 25 bp, Homo sapien
agttaacactcctgatactcctggt

SEQ ID NO: 5009323 - DNA, 25 bp, Homo sapien
tggtgattaactggatgactctgtc

SEQ ID NO: 5009324 - DNA, 25 bp, Homo sapien
tagaagacaaggcaagcaaacctgc

SEQ ID NO: 5009325 - DNA, 25 bp, Homo sapien
aagccagcgtttccagatatgccat

SEQ ID NO: 5009326 - DNA, 25 bp, Homo sapien
aaagccagcgtttccagatatgcca

SEQ ID NO: 5009327 - DNA, 25 bp, Homo sapien
aaaagccagcgtttccagatatgcc

SEQ ID NO: 5009328 - DNA, 25 bp, Homo sapien
aaaaaagccagcgtttccagatatg

SEQ ID NO: 5009329 - DNA, 25 bp, Homo sapien
tagcatttgtgtccactttaatgct

SEQ ID NO: 5009330 - DNA, 25 bp, Homo sapien
agcatttgtgtccactttaatgctt

SEQ ID NO: 5009331 - DNA, 25 bp, Homo sapien
gcatttgtgtccactttaatgcttc

SEQ ID NO: 5009332 - DNA, 25 bp, Homo sapien
attgcttctggttcccctgtgatga

SEQ ID NO: 5009333 - DNA, 25 bp, Homo sapien
gattgcttctggttcccctgtgatg

SEQ ID NO: 5009334 - DNA, 25 bp, Homo sapien
tgattgcttctggttcccctgtgat

SEQ ID NO: 5009335 - DNA, 25 bp, Homo sapien
gcaaagatatctgagatgtggttcc

SEQ ID NO: 5009336 - DNA, 25 bp, Homo sapien
aacagaacctgttgaaatgtcgggt

SEQ ID NO: 5009337 - DNA, 25 bp, Homo sapien
tggataagcaattcactaaagtgtg

SEQ ID NO: 5009338 - DNA, 25 bp, Homo sapien
gaaaggtgtcaggtttcatgtcata

SEQ ID NO: 5009339 - DNA, 25 bp, Homo sapien
tccacatttgacaaagctttctctg

SEQ ID NO: 5009340 - DNA, 25 bp, Homo sapien
gacaaagctttctctgataattggt

SEQ ID NO: 5009341 - DNA, 25 bp, Homo sapien
caagtatctcccctcagtttcttta

SEQ ID NO: 5009342 - DNA, 25 bp, Homo sapien
aggtgccaatctgttccacatttga

SEQ ID NO: 5009343 - DNA, 25 bp, Homo sapien
ggactccctggatctgctagactaa

SEQ ID NO: 5009344 - DNA, 25 bp, Homo sapien
tgaaggccctgttgttccttgagcc

SEQ ID NO: 5009345 - DNA, 25 bp, Homo sapien
aagtgtgcctatcctaaattcatgg

SEQ ID NO: 5009346 - DNA, 25 bp, Homo sapien
ccagggctgcgggttttcatgttca

SEQ ID NO: 5009347 - DNA, 25 bp, Homo sapien
catttgtgcgcctgcattgtgcgaa

SEQ ID NO: 5009348 - DNA, 25 bp, Homo sapien
gaattccaggctgtgccactaggcg

SEQ ID NO: 5009349 - DNA, 25 bp, Homo sapien
gaattccgcccaagctttactctct

SEQ ID NO: 5009350 - DNA, 25 bp, Homo sapien
taaagctgcatgtgagaattccagg

SEQ ID NO: 5009351 - DNA, 25 bp, Homo sapien
tgcaccagagaagcattgaaggcag

SEQ ID NO: 5009352 - DNA, 25 bp, Homo sapien
ttctttgcaccagagaagcattgaa

SEQ ID NO: 5009353 - DNA, 25 bp, Homo sapien
ctttctttgcaccagagaagcattg

SEQ ID NO: 5009354 - DNA, 25 bp, Homo sapien
tttgcaccagagaagcattgaaggc

SEQ ID NO: 5009355 - DNA, 25 bp, Homo sapien
agtgttaggaaccaccaagttctga

SEQ ID NO: 5009356 - DNA, 25 bp, Homo sapien
aaccaccaagttctgacctgtgttc

SEQ ID NO: 5009357 - DNA, 25 bp, Homo sapien
taggaaccaccaagttctgacctgt

SEQ ID NO: 5009358 - DNA, 25 bp, Homo sapien
tgttaggaaccaccaagttctgacc

SEQ ID NO: 5009359 - DNA, 25 bp, Homo sapien
tagtgatcccatagaacacggttcc

SEQ ID NO: 5009360 - DNA, 25 bp, Homo sapien
tagacagatagcctgagtggaaaac

SEQ ID NO: 5009361 - DNA, 25 bp, Homo sapien
cacggttccaacagtttgtgtaaga

SEQ ID NO: 5009362 - DNA, 25 bp, Homo sapien
gatgaagcctcttcgtatatgagct

SEQ ID NO: 5009363 - DNA, 25 bp, Homo sapien
catgctactcttctctgtatcactt

SEQ ID NO: 5009364 - DNA, 25 bp, Homo sapien
ttagtatatgtgctgctaaagcaag

SEQ ID NO: 5009365 - DNA, 25 bp, Homo sapien
gctactcttctctgtatcacttcag

SEQ ID NO: 5009366 - DNA, 25 bp, Homo sapien
tactcttctctgtatcacttcagtt

SEQ ID NO: 5009367 - DNA, 25 bp, Homo sapien
acagtgccaggataatcagggaaca

SEQ ID NO: 5009368 - DNA, 25 bp, Homo sapien
tgctaggatgccatactgtgtgtct

SEQ ID NO: 5009369 - DNA, 25 bp, Homo sapien
tgttggtgaccacagagttactgct

SEQ ID NO: 5009370 - DNA, 25 bp, Homo sapien
agttactgctaggatgccatactgt

SEQ ID NO: 5009371 - DNA, 25 bp, Homo sapien
agagcccaaaccatacagaccaaaa

SEQ ID NO: 5009372 - DNA, 25 bp, Homo sapien
gagcccaaaccatacagaccaaaac

SEQ ID NO: 5009373 - DNA, 25 bp, Homo sapien
acttgaatcaaaggaacctttcctg

SEQ ID NO: 5009374 - DNA, 25 bp, Homo sapien
aatcaaaggaacctttcctgtctgt

SEQ ID NO: 5009375 - DNA, 25 bp, Homo sapien
ttgaatcaaaggaacctttcctgtc

SEQ ID NO: 5009376 - DNA, 25 bp, Homo sapien
tcaaaggaacctttcctgtctgttg

SEQ ID NO: 5009377 - DNA, 25 bp, Homo sapien
ggagtcccttcagaaaatcttcgaa

SEQ ID NO: 5009378 - DNA, 25 bp, Homo sapien
tctggagtcccttcagaaaatcttc

SEQ ID NO: 5009379 - DNA, 25 bp, Homo sapien
tcagaaaatcttcgaaatgtaatgt

SEQ ID NO: 5009380 - DNA, 25 bp, Homo sapien
aaatcttcgaaatgtaatgtccaca

SEQ ID NO: 5009381 - DNA, 25 bp, Homo sapien
tctgcattcactgctaacaacatct

SEQ ID NO: 5009382 - DNA, 25 bp, Homo sapien
ttcttcagatccaatgtatccaaat

SEQ ID NO: 5009383 - DNA, 25 bp, Homo sapien
tcactgctaacaacatctactcttt

SEQ ID NO: 5009384 - DNA, 25 bp, Homo sapien
ttcttgcttagcaaactacaagttg

SEQ ID NO: 5009385 - DNA, 25 bp, Homo sapien
gtctttgactatgattactacagag

SEQ ID NO: 5009386 - DNA, 25 bp, Homo sapien
tatgtctttgactatgattactaca

SEQ ID NO: 5009387 - DNA, 25 bp, Homo sapien
gactatgattactacagagatgatt

SEQ ID NO: 5009388 - DNA, 25 bp, Homo sapien
cggttatgtctttgactatgattac

SEQ ID NO: 5009389 - DNA, 25 bp, Homo sapien
gttatttgattaccacgggcgtgtg

SEQ ID NO: 5009390 - DNA, 25 bp, Homo sapien
ttagttacatgtttcttgtctgtca

SEQ ID NO: 5009391 - DNA, 25 bp, Homo sapien
gaccagggaggcagttcaccatgat

SEQ ID NO: 5009392 - DNA, 25 bp, Homo sapien
taggagggtgggacctatataccca

SEQ ID NO: 5009393 - DNA, 25 bp, Homo sapien
cactagttatagagtccatgagacc

SEQ ID NO: 5009394 - DNA, 25 bp, Homo sapien
cattctggtacaccattgaaaaact

SEQ ID NO: 5009395 - DNA, 25 bp, Homo sapien
tcctgcagttgaagacaactgaaag

SEQ ID NO: 5009396 - DNA, 25 bp, Homo sapien
gaaggtctggacctcaaatccaatc

SEQ ID NO: 5009397 - DNA, 25 bp, Homo sapien
caactgaaagtaaacattctggtac

SEQ ID NO: 5009398 - DNA, 25 bp, Homo sapien
tttgtgagaaccagtatgactctct

SEQ ID NO: 5009399 - DNA, 25 bp, Homo sapien
ggtgtaagatcccttcaggtctcat

SEQ ID NO: 5009400 - DNA, 25 bp, Homo sapien
tgcaggacccacaaggtgcacttgg

SEQ ID NO: 5009401 - DNA, 25 bp, Homo sapien
gagaaccagtatgactctctcacac

SEQ ID NO: 5009402 - DNA, 25 bp, Homo sapien
tgtacttgaacaagctaagaaagtc

SEQ ID NO: 5009403 - DNA, 25 bp, Homo sapien
aaaagacaatgttcatttgataaat

SEQ ID NO: 5009404 - DNA, 25 bp, Homo sapien
gtgtttcacaggcacaggactttaa

SEQ ID NO: 5009405 - DNA, 25 bp, Homo sapien
taccagggcaagaaatttgtacttg

SEQ ID NO: 5009406 - DNA, 25 bp, Homo sapien
tctgaatatggaaaatcacaagctc

SEQ ID NO: 5009407 - DNA, 25 bp, Homo sapien
ttgccctgcctaaggatcttccctt

SEQ ID NO: 5009408 - DNA, 25 bp, Homo sapien
cggcacaaccatgctgcactatcag

SEQ ID NO: 5009409 - DNA, 25 bp, Homo sapien
aaaccttcgctgtctttagaatgtc

SEQ ID NO: 5009410 - DNA, 25 bp, Homo sapien
catgcaggatggtgtaagaatgtac

SEQ ID NO: 5009411 - DNA, 25 bp, Homo sapien
gcaggatggtgtaagaatgtactaa

SEQ ID NO: 5009412 - DNA, 25 bp, Homo sapien
acatgcaggatggtgtaagaatgta

SEQ ID NO: 5009413 - DNA, 25 bp, Homo sapien
tgtactaaattcatgtcaactgcca

SEQ ID NO: 5009414 - DNA, 25 bp, Homo sapien
acatgagtgtgaaaattcaatcatc

SEQ ID NO: 5009415 - DNA, 25 bp, Homo sapien
ccaatatcataacaagatttgaggg

SEQ ID NO: 5009416 - DNA, 25 bp, Homo sapien
gagtgtgaaaattcaatcatcacat

SEQ ID NO: 5009417 - DNA, 25 bp, Homo sapien
tgtgccaatatcataacaagatttg

SEQ ID NO: 5009418 - DNA, 25 bp, Homo sapien
gcatgctccgctctactgaactaaa

SEQ ID NO: 5009419 - DNA, 25 bp, Homo sapien
tctgtgattaagttgagcatgctcc

SEQ ID NO: 5009420 - DNA, 25 bp, Homo sapien
tctccattcccaagcattgccagtg

SEQ ID NO: 5009421 - DNA, 25 bp, Homo sapien
gattccatggacaagtaaggactag

SEQ ID NO: 5009422 - DNA, 25 bp, Homo sapien
caactgctctggtatgtgcaaggcc

SEQ ID NO: 5009423 - DNA, 25 bp, Homo sapien
cagaaggactgctatgtgaggaatg

SEQ ID NO: 5009424 - DNA, 25 bp, Homo sapien
gaatgaggtccagaacaagtgaggc

SEQ ID NO: 5009425 - DNA, 25 bp, Homo sapien
tgatacctctgcacttgttggcaac

SEQ ID NO: 5009426 - DNA, 25 bp, Homo sapien
gatgtgaacatgcacaagaacctgt

SEQ ID NO: 5009427 - DNA, 25 bp, Homo sapien
tcaaaattattgtgccccgtgagca

SEQ ID NO: 5009428 - DNA, 25 bp, Homo sapien
caatctcttcttgataggtcccggc

SEQ ID NO: 5009429 - DNA, 25 bp, Homo sapien
cacattctctgtgtgaatcagcggc

SEQ ID NO: 5009430 - DNA, 25 bp, Homo sapien
tggcagtaaaatccattttttagcc

SEQ ID NO: 5009431 - DNA, 25 bp, Homo sapien
cacactcctatttaagtttacatcc

SEQ ID NO: 5009432 - DNA, 25 bp, Homo sapien
ccatcagcaaaaatcacgggctctc

SEQ ID NO: 5009433 - DNA, 25 bp, Homo sapien
ccgtgtgttcataataatctgtgta

SEQ ID NO: 5009434 - DNA, 25 bp, Homo sapien
ttgccttttgaaggccacgccagca

SEQ ID NO: 5009435 - DNA, 25 bp, Homo sapien
tctgagcaggcactacaactttgcc

SEQ ID NO: 5009436 - DNA, 25 bp, Homo sapien
caagagtgattgtaagtgggtcgct

SEQ ID NO: 5009437 - DNA, 25 bp, Homo sapien
gacacgtacaccctttctttgtgaa

SEQ ID NO: 5009438 - DNA, 25 bp, Homo sapien
tttacagaggtatgacaaatggtac

SEQ ID NO: 5009439 - DNA, 25 bp, Homo sapien
ttacagaggtatgacaaatggtaca

SEQ ID NO: 5009440 - DNA, 25 bp, Homo sapien
tacagaggtatgacaaatggtacac

SEQ ID NO: 5009441 - DNA, 25 bp, Homo sapien
aacagcaatttggatgtttctctcc

SEQ ID NO: 5009442 - DNA, 25 bp, Homo sapien
agaacagcaatttggatgtttctct

SEQ ID NO: 5009443 - DNA, 25 bp, Homo sapien
acagcaatttggatgtttctctcca

SEQ ID NO: 5009444 - DNA, 25 bp, Homo sapien
aggagaacagcaatttggatgtttc

SEQ ID NO: 5009445 - DNA, 25 bp, Homo sapien
taacctgggcccacttatatttgtc

SEQ ID NO: 5009446 - DNA, 25 bp, Homo sapien
acttatatttgtcatcaacaagaat

SEQ ID NO: 5009447 - DNA, 25 bp, Homo sapien
tgaaaataacctgggcccacttata

SEQ ID NO: 5009448 - DNA, 25 bp, Homo sapien
ttatatttgtcatcaacaagaatga

SEQ ID NO: 5009449 - DNA, 25 bp, Homo sapien
tggctggtctacctggctcccaagt

SEQ ID NO: 5009450 - DNA, 25 bp, Homo sapien
ctggctggtctacctggctcccaag

SEQ ID NO: 5009451 - DNA, 25 bp, Homo sapien
agcaagttcaagagtcgcaccgcag

SEQ ID NO: 5009452 - DNA, 25 bp, Homo sapien
aagttcaagagtcgcaccgcagatg

SEQ ID NO: 5009453 - DNA, 25 bp, Homo sapien
caagttcaagagtcgcaccgcagat

SEQ ID NO: 5009454 - DNA, 25 bp, Homo sapien
cagcaagttcaagagtcgcaccgca

SEQ ID NO: 5009455 - DNA, 25 bp, Homo sapien
gctggttttctcgtgttctctcgtc

SEQ ID NO: 5009456 - DNA, 25 bp, Homo sapien
tatctctggcagctatgagcgggca

SEQ ID NO: 5009457 - DNA, 25 bp, Homo sapien
tggtggttattcctttgcttgccgt

SEQ ID NO: 5009458 - DNA, 25 bp, Homo sapien
tgctgcctgttagttttgcctcagt

SEQ ID NO: 5009459 - DNA, 25 bp, Homo sapien
tactgtaaagcaggtctccacctgc

SEQ ID NO: 5009460 - DNA, 25 bp, Homo sapien
tatatttagttcatcgtttccctct

SEQ ID NO: 5009461 - DNA, 25 bp, Homo sapien
caaagcatatgaggcacttggttct

SEQ ID NO: 5009462 - DNA, 25 bp, Homo sapien
tctgtaatactgtaaagcaggtctc

SEQ ID NO: 5009463 - DNA, 25 bp, Homo sapien
ccgggtgatgtatctggtagctgat

SEQ ID NO: 5009464 - DNA, 25 bp, Homo sapien
tgccacagcttagaatcctagattg

SEQ ID NO: 5009465 - DNA, 25 bp, Homo sapien
gggtacagagcagttattctccaga

SEQ ID NO: 5009466 - DNA, 25 bp, Homo sapien
tggtgaaccagtaaatttgacagaa

SEQ ID NO: 5009467 - DNA, 25 bp, Homo sapien
caccaagtgatgctgtgttgacgtc

SEQ ID NO: 5009468 - DNA, 25 bp, Homo sapien
ccttggaacagtttgcaagtacacc

SEQ ID NO: 5009469 - DNA, 25 bp, Homo sapien
cattgatagaatgccagtgataaca

SEQ ID NO: 5009470 - DNA, 25 bp, Homo sapien
tatcgatgagttagttcccttggaa

SEQ ID NO: 5009471 - DNA, 25 bp, Homo sapien
gattccgttttcttaggctatgtct

SEQ ID NO: 5009472 - DNA, 25 bp, Homo sapien
gctttgaggatctgtctataccact

SEQ ID NO: 5009473 - DNA, 25 bp, Homo sapien
tctcattgagaataggacatggtga

SEQ ID NO: 5009474 - DNA, 25 bp, Homo sapien
tttgttggtaatgtatctgtcttgc

SEQ ID NO: 5009475 - DNA, 25 bp, Homo sapien
tgcttgctctctttagtgatgcaat

SEQ ID NO: 5009476 - DNA, 25 bp, Homo sapien
tctgtgtgcttgctctctttagtga

SEQ ID NO: 5009477 - DNA, 25 bp, Homo sapien
caaatctgtgtgcttgctctcttta

SEQ ID NO: 5009478 - DNA, 25 bp, Homo sapien
tgtgtgcttgctctctttagtgatg

SEQ ID NO: 5009479 - DNA, 25 bp, Homo sapien
gaatctaacggcatgtctttggcaa

SEQ ID NO: 5009480 - DNA, 25 bp, Homo sapien
tatttgcaaacgatgctagagctcg

SEQ ID NO: 5009481 - DNA, 25 bp, Homo sapien
ctttggtcaaacacaggagatctgg

SEQ ID NO: 5009482 - DNA, 25 bp, Homo sapien
tctgtactccgaatctaaaagggtg

SEQ ID NO: 5009483 - DNA, 25 bp, Homo sapien
tgctgaagctctgcaaacttgagca

SEQ ID NO: 5009484 - DNA, 25 bp, Homo sapien
gctgaagctctgcaaacttgagcag

SEQ ID NO: 5009485 - DNA, 25 bp, Homo sapien
cgagtgtgaaacacacgcgccaaca

SEQ ID NO: 5009486 - DNA, 25 bp, Homo sapien
tcacaaacgtttggccgctaggcat

SEQ ID NO: 5009487 - DNA, 25 bp, Homo sapien
cgcgtgagattaccactcctcgggt

SEQ ID NO: 5009488 - DNA, 25 bp, Homo sapien
gctaggcattgtgactttctgccca

SEQ ID NO: 5009489 - DNA, 25 bp, Homo sapien
gcgggcggcggcgtcacttcctgcc

SEQ ID NO: 5009490 - DNA, 25 bp, Homo sapien
ccgcactaccgctctcggcgggcgg

SEQ ID NO: 5009491 - DNA, 25 bp, Homo sapien
gggccggcgagcgaaagtgcgcggg

SEQ ID NO: 5009492 - DNA, 25 bp, Homo sapien
cagcggagccgacccggcaggtggc

SEQ ID NO: 5009493 - DNA, 25 bp, Homo sapien
ctgttgtttgcagcagccagcgacc

SEQ ID NO: 5009494 - DNA, 25 bp, Homo sapien
gcagcagcaggcacgagaagagcct

SEQ ID NO: 5009495 - DNA, 25 bp, Homo sapien
cgcaggcgcaagccccgcagccgcc

SEQ ID NO: 5009496 - DNA, 25 bp, Homo sapien
ggcggcagcagcaggcacgagaaga

SEQ ID NO: 5009497 - DNA, 25 bp, Homo sapien
ggcagcagcaggcacgagaagagcc

SEQ ID NO: 5009498 - DNA, 25 bp, Homo sapien
tctcaaagcggtgagctccggaggc

SEQ ID NO: 5009499 - DNA, 25 bp, Homo sapien
gctttgcccggagacaccgtggata

SEQ ID NO: 5009500 - DNA, 25 bp, Homo sapien
gagtgtctgttgctctgcgtccacc

SEQ ID NO: 5009501 - DNA, 25 bp, Homo sapien
taccaagttcgtgtcgctgctgcag

SEQ ID NO: 5009502 - DNA, 25 bp, Homo sapien
taggcgattccagttggaaccatgt

SEQ ID NO: 5009503 - DNA, 25 bp, Homo sapien
ggatggttttaataggcgattccag

SEQ ID NO: 5009504 - DNA, 25 bp, Homo sapien
agaatggatggttttaataggcgat

SEQ ID NO: 5009505 - DNA, 25 bp, Homo sapien
tccagttggaaccatgttcctgtag

SEQ ID NO: 5009506 - DNA, 25 bp, Homo sapien
ccttacttggaggattggccccagc

SEQ ID NO: 5009507 - DNA, 25 bp, Homo sapien
actccctaaatgtggccttacttgg

SEQ ID NO: 5009508 - DNA, 25 bp, Homo sapien
cactccgcgcgaagtttaagaacta

SEQ ID NO: 5009509 - DNA, 25 bp, Homo sapien
ggaagaattcaacagcgctcaggat

SEQ ID NO: 5009510 - DNA, 25 bp, Homo sapien
tggcttgagagtgtcactgcatcct

SEQ ID NO: 5009511 - DNA, 25 bp, Homo sapien
gagtgtcactgcatcctcaaggctc

SEQ ID NO: 5009512 - DNA, 25 bp, Homo sapien
tgagagtgtcactgcatcctcaagg

SEQ ID NO: 5009513 - DNA, 25 bp, Homo sapien
ctggcttgagagtgtcactgcatcc

SEQ ID NO: 5009514 - DNA, 25 bp, Homo sapien
gaatgtaaggaccaagacttgcagg

SEQ ID NO: 5009515 - DNA, 25 bp, Homo sapien
gcagtggcagctccctgaatgtaag

SEQ ID NO: 5009516 - DNA, 25 bp, Homo sapien
tctcctttccctggatgtagttggt

SEQ ID NO: 5009517 - DNA, 25 bp, Homo sapien
gggaagtagatcttttcagtgccct

SEQ ID NO: 5009518 - DNA, 25 bp, Homo sapien
accgtgcccagccaagatgtggaga

SEQ ID NO: 5009519 - DNA, 25 bp, Homo sapien
cgtgcccagccaagatgtggagatt

SEQ ID NO: 5009520 - DNA, 25 bp, Homo sapien
ccgtgcccagccaagatgtggagat

SEQ ID NO: 5009521 - DNA, 25 bp, Homo sapien
caccaatgtcttagagggaattgac

SEQ ID NO: 5009522 - DNA, 25 bp, Homo sapien
aaaggagaatttatgatatcaccaa

SEQ ID NO: 5009523 - DNA, 25 bp, Homo sapien
tagagggaattgacttgattgaaaa

SEQ ID NO: 5009524 - DNA, 25 bp, Homo sapien
tatgatatcaccaatgtcttagagg

SEQ ID NO: 5009525 - DNA, 25 bp, Homo sapien
ataaatgtgcatgtcagtcaagctg

SEQ ID NO: 5009526 - DNA, 25 bp, Homo sapien
ggcacagagtaagcgctcatgaaaa

SEQ ID NO: 5009527 - DNA, 25 bp, Homo sapien
ggcacgtgccatgaatgtctggcta

SEQ ID NO: 5009528 - DNA, 25 bp, Homo sapien
tacagtaagtaataggcaaccttca

SEQ ID NO: 5009529 - DNA, 25 bp, Homo sapien
tgaagtgttcttccctaatactttc

SEQ ID NO: 5009530 - DNA, 25 bp, Homo sapien
ctgaagtgttcttccctaatacttt

SEQ ID NO: 5009531 - DNA, 25 bp, Homo sapien
gacattccactttcctaggttatag

SEQ ID NO: 5009532 - DNA, 25 bp, Homo sapien
caaaaacaagttggccaaggactca

SEQ ID NO: 5009533 - DNA, 25 bp, Homo sapien
caaacagacgttcactgccacttgt

SEQ ID NO: 5009534 - DNA, 25 bp, Homo sapien
gtatgtccttctatccaaacagacg

SEQ ID NO: 5009535 - DNA, 25 bp, Homo sapien
tgtagcttcatcaactggtttgctt

SEQ ID NO: 5009536 - DNA, 25 bp, Homo sapien
gtagcttcatcaactggtttgcttt

SEQ ID NO: 5009537 - DNA, 25 bp, Homo sapien
acattcaatttattggtctttgtgg

SEQ ID NO: 5009538 - DNA, 25 bp, Homo sapien
attcaatttattggtctttgtggag

SEQ ID NO: 5009539 - DNA, 25 bp, Homo sapien
gagccaagtactaaaaattacactc

SEQ ID NO: 5009540 - DNA, 25 bp, Homo sapien
gagcctagtactagagagccaagta

SEQ ID NO: 5009541 - DNA, 25 bp, Homo sapien
tacactcaacttacaggctttgaaa

SEQ ID NO: 5009542 - DNA, 25 bp, Homo sapien
tctttggaagtagaacaatctgtat

SEQ ID NO: 5009543 - DNA, 25 bp, Homo sapien
caagtgaaatgctttttgcgaaatg

SEQ ID NO: 5009544 - DNA, 25 bp, Homo sapien
cagaggttcaagtgaaatgcttttt

SEQ ID NO: 5009545 - DNA, 25 bp, Homo sapien
aatgctttttgcgaaatgtgcaagt

SEQ ID NO: 5009546 - DNA, 25 bp, Homo sapien
tgctttttgcgaaatgtgcaagttc

SEQ ID NO: 5009547 - DNA, 25 bp, Homo sapien
gattaggactttctgctccagagga

SEQ ID NO: 5009548 - DNA, 25 bp, Homo sapien
tgaagcctccggaaatctacaaaag

SEQ ID NO: 5009549 - DNA, 25 bp, Homo sapien
aatgggatttatgtggctatgcctc

SEQ ID NO: 5009550 - DNA, 25 bp, Homo sapien
gagggctagtcagataaaaacacag

SEQ ID NO: 5009551 - DNA, 25 bp, Homo sapien
ttatgcagcctacccatagatctct

SEQ ID NO: 5009552 - DNA, 25 bp, Homo sapien
tctcttagatcctacctggtggcat

SEQ ID NO: 5009553 - DNA, 25 bp, Homo sapien
tggtggcatatataaaagttctagt

SEQ ID NO: 5009554 - DNA, 25 bp, Homo sapien
tctagtacctcctgtccaaataaaa

SEQ ID NO: 5009555 - DNA, 25 bp, Homo sapien
gacatcccatgtcttgcctctatta

SEQ ID NO: 5009556 - DNA, 25 bp, Homo sapien
tacatttgagtttagagataagaac

SEQ ID NO: 5009557 - DNA, 25 bp, Homo sapien
aatgagttctatggttcagtaaaac

SEQ ID NO: 5009558 - DNA, 25 bp, Homo sapien
aagaatgggtgctcactgacatccc

SEQ ID NO: 5009559 - DNA, 25 bp, Homo sapien
tagacaaatgcttgaaaccatcctt

SEQ ID NO: 5009560 - DNA, 25 bp, Homo sapien
aatgcttgaaaccatccttaccttt

SEQ ID NO: 5009561 - DNA, 25 bp, Homo sapien
ttttagacaaatgcttgaaaccatc

SEQ ID NO: 5009562 - DNA, 25 bp, Homo sapien
gacaaatgcttgaaaccatccttac

SEQ ID NO: 5009563 - DNA, 25 bp, Homo sapien
caataaagtcagagtgcttaactaa

SEQ ID NO: 5009564 - DNA, 25 bp, Homo sapien
acagctgttcagtagcttacaatga

SEQ ID NO: 5009565 - DNA, 25 bp, Homo sapien
tagtatacagctgttcagtagctta

SEQ ID NO: 5009566 - DNA, 25 bp, Homo sapien
gtcagagtgcttaactaatactcac

SEQ ID NO: 5009567 - DNA, 25 bp, Homo sapien
cattcctggacttcggccctcttaa

SEQ ID NO: 5009568 - DNA, 25 bp, Homo sapien
acattcctggacttcggccctctta

SEQ ID NO: 5009569 - DNA, 25 bp, Homo sapien
tacattcctggacttcggccctctt

SEQ ID NO: 5009570 - DNA, 25 bp, Homo sapien
attcctggacttcggccctcttaat

SEQ ID NO: 5009571 - DNA, 25 bp, Homo sapien
tgcccacatttatgaaccgtaagtc

SEQ ID NO: 5009572 - DNA, 25 bp, Homo sapien
atccccagtaatgggcccataggag

SEQ ID NO: 5009573 - DNA, 25 bp, Homo sapien
ccaagtctttcactcctagtagatt

SEQ ID NO: 5009574 - DNA, 25 bp, Homo sapien
ggtgcatatattatttccaagtctt

SEQ ID NO: 5009575 - DNA, 25 bp, Homo sapien
gattactgctgaagtccctaggtcc

SEQ ID NO: 5009576 - DNA, 25 bp, Homo sapien
tacctctatgtgaacggcccttgcc

SEQ ID NO: 5009577 - DNA, 25 bp, Homo sapien
ggagatgccaggacttacagccagg

SEQ ID NO: 5009578 - DNA, 25 bp, Homo sapien
gatactgtctttcctccgtagctag

SEQ ID NO: 5009579 - DNA, 25 bp, Homo sapien
tgcgatcgaccttcccaatgttaaa

SEQ ID NO: 5009580 - DNA, 25 bp, Homo sapien
tatctggcaccaagctatgcgatcg

SEQ ID NO: 5009581 - DNA, 25 bp, Homo sapien
gcttggcatattactggcactctga

SEQ ID NO: 5009582 - DNA, 25 bp, Homo sapien
tataaacactgctctagccagcctg

SEQ ID NO: 5009583 - DNA, 25 bp, Homo sapien
caatgtagccttactacattgtaag

SEQ ID NO: 5009584 - DNA, 25 bp, Homo sapien
tgtagccttactacattgtaagtaa

SEQ ID NO: 5009585 - DNA, 25 bp, Homo sapien
ctttgctcagtcgtagtcttgactg

SEQ ID NO: 5009586 - DNA, 25 bp, Homo sapien
gtcttgactgaaatttatatcttcc

SEQ ID NO: 5009587 - DNA, 25 bp, Homo sapien
atgcttttgaacgccaacagtattc

SEQ ID NO: 5009588 - DNA, 25 bp, Homo sapien
tgcttttgaacgccaacagtattcc

SEQ ID NO: 5009589 - DNA, 25 bp, Homo sapien
cttttgaacgccaacagtattcctc

SEQ ID NO: 5009590 - DNA, 25 bp, Homo sapien
gcttttgaacgccaacagtattcct

SEQ ID NO: 5009591 - DNA, 25 bp, Homo sapien
tgaacagacagtctacaagtggaga

SEQ ID NO: 5009592 - DNA, 25 bp, Homo sapien
ccatgaacagacagtctacaagtgg

SEQ ID NO: 5009593 - DNA, 25 bp, Homo sapien
aacagacagtctacaagtggagagg

SEQ ID NO: 5009594 - DNA, 25 bp, Homo sapien
cagacagtctacaagtggagaggtt

SEQ ID NO: 5009595 - DNA, 25 bp, Homo sapien
tttcgggcctgctacccagtagggc

SEQ ID NO: 5009596 - DNA, 25 bp, Homo sapien
tgggaccccgtcaggagatgaaagc

SEQ ID NO: 5009597 - DNA, 25 bp, Homo sapien
catgaaagacacagcccaaaactgg

SEQ ID NO: 5009598 - DNA, 25 bp, Homo sapien
gaaaaccacgtagaaactgatcatg

SEQ ID NO: 5009599 - DNA, 25 bp, Homo sapien
gaggcagagcgcgacggaaccgagc

SEQ ID NO: 5009600 - DNA, 25 bp, Homo sapien
gcgacggaaccgagcctacaggcca

SEQ ID NO: 5009601 - DNA, 25 bp, Homo sapien
agagcgcgacggaaccgagcctaca

SEQ ID NO: 5009602 - DNA, 25 bp, Homo sapien
tgaggcagagcgcgacggaaccgag

SEQ ID NO: 5009603 - DNA, 25 bp, Homo sapien
cagaagtttaacacttgcgtgcagc

SEQ ID NO: 5009604 - DNA, 25 bp, Homo sapien
taacacttgcgtgcagctttttaag

SEQ ID NO: 5009605 - DNA, 25 bp, Homo sapien
gcagctttttaagctccaggtaaca

SEQ ID NO: 5009606 - DNA, 25 bp, Homo sapien
cgtgcagctttttaagctccaggta

SEQ ID NO: 5009607 - DNA, 25 bp, Homo sapien
ttggaaaagatctagagctataatc

SEQ ID NO: 5009608 - DNA, 25 bp, Homo sapien
taatctccgaaaggaagatttgtaa

SEQ ID NO: 5009609 - DNA, 25 bp, Homo sapien
gaggcgctgtgcacctctgggtggt

SEQ ID NO: 5009610 - DNA, 25 bp, Homo sapien
taatgcactgcgagttagaaatgtt

SEQ ID NO: 5009611 - DNA, 25 bp, Homo sapien
tcaaggctactagtggccatctcct

SEQ ID NO: 5009612 - DNA, 25 bp, Homo sapien
tcattatacccacttcagagaacgt

SEQ ID NO: 5009613 - DNA, 25 bp, Homo sapien
gagaacgttgattatctgctcagca

SEQ ID NO: 5009614 - DNA, 25 bp, Homo sapien
taacatggttattcaggcaagagca

SEQ ID NO: 5009615 - DNA, 25 bp, Homo sapien
cttggctttcccggcttgacgcttt

SEQ ID NO: 5009616 - DNA, 25 bp, Homo sapien
tcccggcttgacgcttttgaaaata

SEQ ID NO: 5009617 - DNA, 25 bp, Homo sapien
tgacgcttttgaaaataaccgttca

SEQ ID NO: 5009618 - DNA, 25 bp, Homo sapien
gctttcccggcttgacgcttttgaa

SEQ ID NO: 5009619 - DNA, 25 bp, Homo sapien
ccccatggactctcatccacctggg

SEQ ID NO: 5009620 - DNA, 25 bp, Homo sapien
catggactctcatccacctgggctg

SEQ ID NO: 5009621 - DNA, 25 bp, Homo sapien
ccatggactctcatccacctgggct

SEQ ID NO: 5009622 - DNA, 25 bp, Homo sapien
tggactctcatccacctgggctgcg

SEQ ID NO: 5009623 - DNA, 25 bp, Homo sapien
tggacaatagtccattgaatggcag

SEQ ID NO: 5009624 - DNA, 25 bp, Homo sapien
tccattgaatggcagctgggcgcag

SEQ ID NO: 5009625 - DNA, 25 bp, Homo sapien
gctctgctcatggagatcttcattc

SEQ ID NO: 5009626 - DNA, 25 bp, Homo sapien
gccactagtaatgcatgcttgtaat

SEQ ID NO: 5009627 - DNA, 25 bp, Homo sapien
cgagtgacgactcctcagaaggcag

SEQ ID NO: 5009628 - DNA, 25 bp, Homo sapien
actaagagagactcgcgccccagga

SEQ ID NO: 5009629 - DNA, 25 bp, Homo sapien
ggcaacactttcctctcccgagtga

SEQ ID NO: 5009630 - DNA, 25 bp, Homo sapien
cattcccgagtccaaactaagagag

SEQ ID NO: 5009631 - DNA, 25 bp, Homo sapien
tcttaacttgcattgtgacactgaa

SEQ ID NO: 5009632 - DNA, 25 bp, Homo sapien
tgttactgtaaatattcccacagca

SEQ ID NO: 5009633 - DNA, 25 bp, Homo sapien
gcttcgtggcaaacaaaatactgca

SEQ ID NO: 5009634 - DNA, 25 bp, Homo sapien
gttacattgtgggttacttctccac

SEQ ID NO: 5009635 - DNA, 25 bp, Homo sapien
tagcattgggatgccttagcataca

SEQ ID NO: 5009636 - DNA, 25 bp, Homo sapien
gttcttggattatagtaggcgctca

SEQ ID NO: 5009637 - DNA, 25 bp, Homo sapien
taaacattattcattgctggaacct

SEQ ID NO: 5009638 - DNA, 25 bp, Homo sapien
gattaagaaagtcctgctaggaaga

SEQ ID NO: 5009639 - DNA, 25 bp, Homo sapien
gcagcttttctggtgagcaatcacc

SEQ ID NO: 5009640 - DNA, 25 bp, Homo sapien
tctacagctggccaaatttcgcagt

SEQ ID NO: 5009641 - DNA, 25 bp, Homo sapien
cacagcctctaaagggccgcaaagt

SEQ ID NO: 5009642 - DNA, 25 bp, Homo sapien
tttcgcagtctcctgtgcacagcgg

SEQ ID NO: 5009643 - DNA, 25 bp, Homo sapien
gcaccttgtcttccagaacaacacg

SEQ ID NO: 5009644 - DNA, 25 bp, Homo sapien
gggcaccttgtcttccagaacaaca

SEQ ID NO: 5009645 - DNA, 25 bp, Homo sapien
aggtagtctcttcattacgggcacc

SEQ ID NO: 5009646 - DNA, 25 bp, Homo sapien
gtctcttcattacgggcaccttgtc

SEQ ID NO: 5009647 - DNA, 25 bp, Homo sapien
gggtcccaaactgaatccactgggc

SEQ ID NO: 5009648 - DNA, 25 bp, Homo sapien
tctgggcattgttaatcctctgggt

SEQ ID NO: 5009649 - DNA, 25 bp, Homo sapien
caggtgcatcacttggccaccattc

SEQ ID NO: 5009650 - DNA, 25 bp, Homo sapien
gctctgggcattgttaatcctctgg

SEQ ID NO: 5009651 - DNA, 25 bp, Homo sapien
cagtggccatgagagaagtactaat

SEQ ID NO: 5009652 - DNA, 25 bp, Homo sapien
gactttccgcatatttttagattta

SEQ ID NO: 5009653 - DNA, 25 bp, Homo sapien
tagatttagattaggggcagtggcc

SEQ ID NO: 5009654 - DNA, 25 bp, Homo sapien
ccaatatgagcatgactttccgcat

SEQ ID NO: 5009655 - DNA, 25 bp, Homo sapien
gaagacaaggagcaattgtacaatt

SEQ ID NO: 5009656 - DNA, 25 bp, Homo sapien
cagagaagacaaggagcaattgtac

SEQ ID NO: 5009657 - DNA, 25 bp, Homo sapien
gcagagaagacaaggagcaattgta

SEQ ID NO: 5009658 - DNA, 25 bp, Homo sapien
caaggagcaattgtacaattttctc

SEQ ID NO: 5009659 - DNA, 25 bp, Homo sapien
tgccctgctggtgctaatctctctt

SEQ ID NO: 5009660 - DNA, 25 bp, Homo sapien
ctgccctgctggtgctaatctctct

SEQ ID NO: 5009661 - DNA, 25 bp, Homo sapien
actgccctgctggtgctaatctctc

SEQ ID NO: 5009662 - DNA, 25 bp, Homo sapien
gagcagttgttccacccctaagtct

SEQ ID NO: 5009663 - DNA, 25 bp, Homo sapien
cagttgttccacccctaagtctgtt

SEQ ID NO: 5009664 - DNA, 25 bp, Homo sapien
ttccacccctaagtctgtttctctg

SEQ ID NO: 5009665 - DNA, 25 bp, Homo sapien
tgttccacccctaagtctgtttctc

SEQ ID NO: 5009666 - DNA, 25 bp, Homo sapien
aaagtttccacttggttcacaatgg

SEQ ID NO: 5009667 - DNA, 25 bp, Homo sapien
ccaactacagttgataggaccatag

SEQ ID NO: 5009668 - DNA, 25 bp, Homo sapien
tgctcctgcagcctatagcctatct

SEQ ID NO: 5009669 - DNA, 25 bp, Homo sapien
cacaatggcccctaagctgcatctg

SEQ ID NO: 5009670 - DNA, 25 bp, Homo sapien
ccatagtgataacggtacagcaggg

SEQ ID NO: 5009671 - DNA, 25 bp, Homo sapien
ggtgccatagtgataacggtacagc

SEQ ID NO: 5009672 - DNA, 25 bp, Homo sapien
gtgataacggtacagcagggtattt

SEQ ID NO: 5009673 - DNA, 25 bp, Homo sapien
gcagaagggtgccatagtgataacg

SEQ ID NO: 5009674 - DNA, 25 bp, Homo sapien
tgggccagcataacgatattaaatc

SEQ ID NO: 5009675 - DNA, 25 bp, Homo sapien
ggtgaagcgcacatctgactaaaag

SEQ ID NO: 5009676 - DNA, 25 bp, Homo sapien
cacaaatggtagcaatgttgggcca

SEQ ID NO: 5009677 - DNA, 25 bp, Homo sapien
gaagcattgtccttgctaacgtggg

SEQ ID NO: 5009678 - DNA, 25 bp, Homo sapien
cagattactatttgctagcttacta

SEQ ID NO: 5009679 - DNA, 25 bp, Homo sapien
attatttgaattaagcagtaagaac

SEQ ID NO: 5009680 - DNA, 25 bp, Homo sapien
acttgaatttaagcataagcttatg

SEQ ID NO: 5009681 - DNA, 25 bp, Homo sapien
ggcatgctgtcttgctaatattgaa

SEQ ID NO: 5009682 - DNA, 25 bp, Homo sapien
cttcagaggttgggttgggcggttg

SEQ ID NO: 5009683 - DNA, 25 bp, Homo sapien
cagaggttgggttgggcggttgttg

SEQ ID NO: 5009684 - DNA, 25 bp, Homo sapien
ttctgcccttcagaggttgggttgg

SEQ ID NO: 5009685 - DNA, 25 bp, Homo sapien
tgttctgcccttcagaggttgggtt

SEQ ID NO: 5009686 - DNA, 25 bp, Homo sapien
ccttcaacatttgatagaaggctgc

SEQ ID NO: 5009687 - DNA, 25 bp, Homo sapien
tgatagaaggctgcggaattgtgcc

SEQ ID NO: 5009688 - DNA, 25 bp, Homo sapien
gggacagcgttatcaccttcaacat

SEQ ID NO: 5009689 - DNA, 25 bp, Homo sapien
tgcatggggacagcgttatcacctt

SEQ ID NO: 5009690 - DNA, 25 bp, Homo sapien
agctgacactgatgctctccttaca

SEQ ID NO: 5009691 - DNA, 25 bp, Homo sapien
tgagctgacactgatgctctcctta

SEQ ID NO: 5009692 - DNA, 25 bp, Homo sapien
tctgagctgacactgatgctctcct

SEQ ID NO: 5009693 - DNA, 25 bp, Homo sapien
tgctctgagctgacactgatgctct

SEQ ID NO: 5009694 - DNA, 25 bp, Homo sapien
agaggaggatgagtcagagagccag

SEQ ID NO: 5009695 - DNA, 25 bp, Homo sapien
ccaagttacactctcataaagagga

SEQ ID NO: 5009696 - DNA, 25 bp, Homo sapien
ttacactctcataaagaggaggatg

SEQ ID NO: 5009697 - DNA, 25 bp, Homo sapien
tctcataaagaggaggatgagtcag

SEQ ID NO: 5009698 - DNA, 25 bp, Homo sapien
tctagaatcagcataaatcagattc

SEQ ID NO: 5009699 - DNA, 25 bp, Homo sapien
tttgttgttcttccaaagaatcaac

SEQ ID NO: 5009700 - DNA, 25 bp, Homo sapien
attttaccccttacttagccatcat

SEQ ID NO: 5009701 - DNA, 25 bp, Homo sapien
ttttgataactcttgagttgagggc

SEQ ID NO: 5009702 - DNA, 25 bp, Homo sapien
cttcattaaatgatttccatagatc

SEQ ID NO: 5009703 - DNA, 25 bp, Homo sapien
tttccatagatctgtaaattcttgt

SEQ ID NO: 5009704 - DNA, 25 bp, Homo sapien
tcttgttctctgatttaaactactt

SEQ ID NO: 5009705 - DNA, 25 bp, Homo sapien
taaatgatttccatagatctgtaaa

SEQ ID NO: 5009706 - DNA, 25 bp, Homo sapien
aattgcttggagggcatcaagtact

SEQ ID NO: 5009707 - DNA, 25 bp, Homo sapien
ttttaattgcttggagggcatcaag

SEQ ID NO: 5009708 - DNA, 25 bp, Homo sapien
taattgcttggagggcatcaagtac

SEQ ID NO: 5009709 - DNA, 25 bp, Homo sapien
tttaattgcttggagggcatcaagt

SEQ ID NO: 5009710 - DNA, 25 bp, Homo sapien
ggctggagtactttgcagaattcca

SEQ ID NO: 5009711 - DNA, 25 bp, Homo sapien
catcaaaacaccaataactgccaaa

SEQ ID NO: 5009712 - DNA, 25 bp, Homo sapien
aaaacaccaataactgccaaaccat

SEQ ID NO: 5009713 - DNA, 25 bp, Homo sapien
cagaattccagtgagctacgtgaag

SEQ ID NO: 5009714 - DNA, 25 bp, Homo sapien
taagtggtcgagctttgattcaaac

SEQ ID NO: 5009715 - DNA, 25 bp, Homo sapien
catgccagtgtagattctgtcccta

SEQ ID NO: 5009716 - DNA, 25 bp, Homo sapien
gaaaggtgctggtctaagtgtgctc

SEQ ID NO: 5009717 - DNA, 25 bp, Homo sapien
tcagctgggtacttgcattcttaag

SEQ ID NO: 5009718 - DNA, 25 bp, Homo sapien
tgtatgttctgaaccatgctcattt

SEQ ID NO: 5009719 - DNA, 25 bp, Homo sapien
ctcggcagaatatttgactccatcc

SEQ ID NO: 5009720 - DNA, 25 bp, Homo sapien
actgtatgttctgaaccatgctcat

SEQ ID NO: 5009721 - DNA, 25 bp, Homo sapien
tatttgactccatccactgtatgtt

SEQ ID NO: 5009722 - DNA, 25 bp, Homo sapien
aaccgattgttagcctgatgctcca

SEQ ID NO: 5009723 - DNA, 25 bp, Homo sapien
gcctgatgctccacaaactctagct

SEQ ID NO: 5009724 - DNA, 25 bp, Homo sapien
aaagggaaccgattgttagcctgat

SEQ ID NO: 5009725 - DNA, 25 bp, Homo sapien
tgatgctccacaaactctagcttat

SEQ ID NO: 5009726 - DNA, 25 bp, Homo sapien
ctaaattgtattgagtagaagtgaa

SEQ ID NO: 5009727 - DNA, 25 bp, Homo sapien
taaattgtattgagtagaagtgaaa

SEQ ID NO: 5009728 - DNA, 25 bp, Homo sapien
acaaacattagtgcctaaactttca

SEQ ID NO: 5009729 - DNA, 25 bp, Homo sapien
agtgaaaacaaacattagtgcctaa

SEQ ID NO: 5009730 - DNA, 25 bp, Homo sapien
tagagagctgggagttccaaaaatt

SEQ ID NO: 5009731 - DNA, 25 bp, Homo sapien
gagctgggagttccaaaaattgtct

SEQ ID NO: 5009732 - DNA, 25 bp, Homo sapien
gacgtgatggtgactttgagaagca

SEQ ID NO: 5009733 - DNA, 25 bp, Homo sapien
tactggaatgacgagaagagacgtg

SEQ ID NO: 5009734 - DNA, 25 bp, Homo sapien
cagaagtccaagatgcctcactaga

SEQ ID NO: 5009735 - DNA, 25 bp, Homo sapien
gaagtccaagatgcctcactagatt

SEQ ID NO: 5009736 - DNA, 25 bp, Homo sapien
tccaagatgcctcactagattacag

SEQ ID NO: 5009737 - DNA, 25 bp, Homo sapien
gatgcctcactagattacagcaatg

SEQ ID NO: 5009738 - DNA, 25 bp, Homo sapien
caaaagacttagaatgggtgtcata

SEQ ID NO: 5009739 - DNA, 25 bp, Homo sapien
gggtgtcatatttctcgagcactat

SEQ ID NO: 5009740 - DNA, 25 bp, Homo sapien
atatcagaagggtctttcagctcac

SEQ ID NO: 5009741 - DNA, 25 bp, Homo sapien
aatatcagaagggtctttcagctca

SEQ ID NO: 5009742 - DNA, 25 bp, Homo sapien
gagaggtgtcatgtttggtttcact

SEQ ID NO: 5009743 - DNA, 25 bp, Homo sapien
ctgatcggttatcgttgtcctcaaa

SEQ ID NO: 5009744 - DNA, 25 bp, Homo sapien
gagacactaataggtttcagagagg

SEQ ID NO: 5009745 - DNA, 25 bp, Homo sapien
gaaggaatgccccacattgataatt

SEQ ID NO: 5009746 - DNA, 25 bp, Homo sapien
ctctagctgggcgacagagaggact

SEQ ID NO: 5009747 - DNA, 25 bp, Homo sapien
tgccattgcactctagctgggcgac

SEQ ID NO: 5009748 - DNA, 25 bp, Homo sapien
ccattgcactctagctgggcgacag

SEQ ID NO: 5009749 - DNA, 25 bp, Homo sapien
catgccattgcactctagctgggcg

SEQ ID NO: 5009750 - DNA, 25 bp, Homo sapien
caattaacctatagctgtacaatta

SEQ ID NO: 5009751 - DNA, 25 bp, Homo sapien
tgggaacaagttatcattttgatct

SEQ ID NO: 5009752 - DNA, 25 bp, Homo sapien
aattatttaaagcagacagttcaac

SEQ ID NO: 5009753 - DNA, 25 bp, Homo sapien
catgcaaagatagtataattattta

SEQ ID NO: 5009754 - DNA, 25 bp, Homo sapien
catatccccagtctggacttgccat

SEQ ID NO: 5009755 - DNA, 25 bp, Homo sapien
tttgtcatcatatccccagtctgga

SEQ ID NO: 5009756 - DNA, 25 bp, Homo sapien
tttttgtcatcatatccccagtctg

SEQ ID NO: 5009757 - DNA, 25 bp, Homo sapien
catttttgtcatcatatccccagtc

SEQ ID NO: 5009758 - DNA, 25 bp, Homo sapien
tcatctctgcttatcaggaagtaca

SEQ ID NO: 5009759 - DNA, 25 bp, Homo sapien
ttgcttttaataggccattatttca

SEQ ID NO: 5009760 - DNA, 25 bp, Homo sapien
atctctgcttatcaggaagtacaca

SEQ ID NO: 5009761 - DNA, 25 bp, Homo sapien
tcatcatctctgcttatcaggaagt

SEQ ID NO: 5009762 - DNA, 25 bp, Homo sapien
tttcatgccatgacagtcattcctc

SEQ ID NO: 5009763 - DNA, 25 bp, Homo sapien
catagtgatgcttttttcatgccat

SEQ ID NO: 5009764 - DNA, 25 bp, Homo sapien
catgccatgacagtcattcctcctt

SEQ ID NO: 5009765 - DNA, 25 bp, Homo sapien
atagtgatgcttttttcatgccatg

SEQ ID NO: 5009766 - DNA, 25 bp, Homo sapien
cacatggtaaggattgtctgagctg

SEQ ID NO: 5009767 - DNA, 25 bp, Homo sapien
acatggtaaggattgtctgagctgc

SEQ ID NO: 5009768 - DNA, 25 bp, Homo sapien
tcacatggtaaggattgtctgagct

SEQ ID NO: 5009769 - DNA, 25 bp, Homo sapien
taaaatctgtgttttaggctgaggt

SEQ ID NO: 5009770 - DNA, 25 bp, Homo sapien
ataacaaaattgggcattaaaatct

SEQ ID NO: 5009771 - DNA, 25 bp, Homo sapien
aaaatctgtgttttaggctgaggtg

SEQ ID NO: 5009772 - DNA, 25 bp, Homo sapien
tattataacaaaattgggcattaaa

SEQ ID NO: 5009773 - DNA, 25 bp, Homo sapien
ccaagtgcactgatctgaactcagg

SEQ ID NO: 5009774 - DNA, 25 bp, Homo sapien
tgtgtggtacattgatatttgggca

SEQ ID NO: 5009775 - DNA, 25 bp, Homo sapien
catgtgaatgagctttgctatactc

SEQ ID NO: 5009776 - DNA, 25 bp, Homo sapien
aactcaggttgtgtggtacattgat

SEQ ID NO: 5009777 - DNA, 25 bp, Homo sapien
tgagctgagactgcactgctgcacg

SEQ ID NO: 5009778 - DNA, 25 bp, Homo sapien
tgagactgcactgctgcacgccagc

SEQ ID NO: 5009779 - DNA, 25 bp, Homo sapien
gagctgagactgcactgctgcacgc

SEQ ID NO: 5009780 - DNA, 25 bp, Homo sapien
gctgagactgcactgctgcacgcca

SEQ ID NO: 5009781 - DNA, 25 bp, Homo sapien
cttatttcttccagtcctaggtgta

SEQ ID NO: 5009782 - DNA, 25 bp, Homo sapien
caaaataggtcctcctcccttctat

SEQ ID NO: 5009783 - DNA, 25 bp, Homo sapien
cttccagtcctaggtgtaaaggatc

SEQ ID NO: 5009784 - DNA, 25 bp, Homo sapien
taaaggatcagcctacaggatggaa

SEQ ID NO: 5009785 - DNA, 25 bp, Homo sapien
cggactctgcctttaactagttggt

SEQ ID NO: 5009786 - DNA, 25 bp, Homo sapien
aactgcctgagggttgcaaaatgag

SEQ ID NO: 5009787 - DNA, 25 bp, Homo sapien
tcctttaagactgtcccggactctg

SEQ ID NO: 5009788 - DNA, 25 bp, Homo sapien
gagttccttaatatgcaacacttgg

SEQ ID NO: 5009789 - DNA, 25 bp, Homo sapien
gagcagctttcagtctccttcctac

SEQ ID NO: 5009790 - DNA, 25 bp, Homo sapien
tcttgcaaagtgaacttgaaaatcc

SEQ ID NO: 5009791 - DNA, 25 bp, Homo sapien
ctcttgcaaagtgaacttgaaaatc

SEQ ID NO: 5009792 - DNA, 25 bp, Homo sapien
atgatccatggcttcttagggtgta

SEQ ID NO: 5009793 - DNA, 25 bp, Homo sapien
aaatcattcaacctaacctcaaggg

SEQ ID NO: 5009794 - DNA, 25 bp, Homo sapien
ccaaatcattcaacctaacctcaag

SEQ ID NO: 5009795 - DNA, 25 bp, Homo sapien
tgttttgaactcaatgatccatggc

SEQ ID NO: 5009796 - DNA, 25 bp, Homo sapien
actggcctctttgatataccctggg

SEQ ID NO: 5009797 - DNA, 25 bp, Homo sapien
cagataccctgaaacctgagtccca

SEQ ID NO: 5009798 - DNA, 25 bp, Homo sapien
gaaagaacggttcaagtcccattga

SEQ ID NO: 5009799 - DNA, 25 bp, Homo sapien
gtcccattgaatctttgttagccag

SEQ ID NO: 5009800 - DNA, 25 bp, Homo sapien
acacagcctttctgctaaagtgagc

SEQ ID NO: 5009801 - DNA, 25 bp, Homo sapien
agcctttctgctaaagtgagcacca

SEQ ID NO: 5009802 - DNA, 25 bp, Homo sapien
tacacagcctttctgctaaagtgag

SEQ ID NO: 5009803 - DNA, 25 bp, Homo sapien
atctacacagcctttctgctaaagt

SEQ ID NO: 5009804 - DNA, 25 bp, Homo sapien
cttcttgcctccaaatgaattggtg

SEQ ID NO: 5009805 - DNA, 25 bp, Homo sapien
tctatcttcacaacccctctggtgt

SEQ ID NO: 5009806 - DNA, 25 bp, Homo sapien
cagtgtgttggttactgttgccatc

SEQ ID NO: 5009807 - DNA, 25 bp, Homo sapien
ccagcttggagttatctgtgtctcc

SEQ ID NO: 5009808 - DNA, 25 bp, Homo sapien
gagtccgaattttatcagtcctagg

SEQ ID NO: 5009809 - DNA, 25 bp, Homo sapien
ttctagacggtactggcagcaacag

SEQ ID NO: 5009810 - DNA, 25 bp, Homo sapien
cactgagctatgaaaaatcttatgc

SEQ ID NO: 5009811 - DNA, 25 bp, Homo sapien
agctcataactctgacagggctggg

SEQ ID NO: 5009812 - DNA, 25 bp, Homo sapien
gagcaattagttatggcatcaccgg

SEQ ID NO: 5009813 - DNA, 25 bp, Homo sapien
caaagggtgacttctatgaacttcc

SEQ ID NO: 5009814 - DNA, 25 bp, Homo sapien
tcaggccctggttggagatacagct

SEQ ID NO: 5009815 - DNA, 25 bp, Homo sapien
ggagtaaacttaacaggcgcttcat

SEQ ID NO: 5009816 - DNA, 25 bp, Homo sapien
ccctataattgttcaagattgattt

SEQ ID NO: 5009817 - DNA, 25 bp, Homo sapien
gattgtttcattgtgactgaagtag

SEQ ID NO: 5009818 - DNA, 25 bp, Homo sapien
ttttgagtttccctataattgttca

SEQ ID NO: 5009819 - DNA, 25 bp, Homo sapien
aagagagaaaactttagataactgt

SEQ ID NO: 5009820 - DNA, 25 bp, Homo sapien
tacttgaagcagtaccaagcctctg

SEQ ID NO: 5009821 - DNA, 25 bp, Homo sapien
taagggagttcaagcactgtgcatc

SEQ ID NO: 5009822 - DNA, 25 bp, Homo sapien
caagcctctggatagagcttcgagg

SEQ ID NO: 5009823 - DNA, 25 bp, Homo sapien
ctgtgcatcagagccaggaggttcc

SEQ ID NO: 5009824 - DNA, 25 bp, Homo sapien
tccagggaggctcgaaaaaagcttc

SEQ ID NO: 5009825 - DNA, 25 bp, Homo sapien
ggctcgaaaaaagcttcccttgcag

SEQ ID NO: 5009826 - DNA, 25 bp, Homo sapien
gaaggctgtagctcagtggcagatc

SEQ ID NO: 5009827 - DNA, 25 bp, Homo sapien
gatcaggacacctaggaacatttcc

SEQ ID NO: 5009828 - DNA, 25 bp, Homo sapien
cggataaaacacttcaatgctcagc

SEQ ID NO: 5009829 - DNA, 25 bp, Homo sapien
gattcttttggcagtcggataaaac

SEQ ID NO: 5009830 - DNA, 25 bp, Homo sapien
cagatttacagagatctgcttgata

SEQ ID NO: 5009831 - DNA, 25 bp, Homo sapien
gtaattaagatgtaggtaggactgt

SEQ ID NO: 5009832 - DNA, 25 bp, Homo sapien
tagagtgggtacatagtggccccag

SEQ ID NO: 5009833 - DNA, 25 bp, Homo sapien
cgttggccaggagaatacatcagtc

SEQ ID NO: 5009834 - DNA, 25 bp, Homo sapien
tagggcctaagttgcactaaacagc

SEQ ID NO: 5009835 - DNA, 25 bp, Homo sapien
taaccaggctcccatttgtttggcg

SEQ ID NO: 5009836 - DNA, 25 bp, Homo sapien
gcaggactaatatttgctgtaactt

SEQ ID NO: 5009837 - DNA, 25 bp, Homo sapien
gactgttgggctaaagcaatggtcc

SEQ ID NO: 5009838 - DNA, 25 bp, Homo sapien
caaagctccctggtttagcaggact

SEQ ID NO: 5009839 - DNA, 25 bp, Homo sapien
tggacatttgtagggtagcatcaat

SEQ ID NO: 5009840 - DNA, 25 bp, Homo sapien
gaaaagccattgttccttctctcct

SEQ ID NO: 5009841 - DNA, 25 bp, Homo sapien
tctctccttctaatgctttcttcac

SEQ ID NO: 5009842 - DNA, 25 bp, Homo sapien
tcctgaaaagccattgttccttctc

SEQ ID NO: 5009843 - DNA, 25 bp, Homo sapien
atgctttcttcacatacagtctctc

SEQ ID NO: 5009844 - DNA, 25 bp, Homo sapien
tagtcaattagaaagaggccttggg

SEQ ID NO: 5009845 - DNA, 25 bp, Homo sapien
tactaaagacatcaggcatgaccct

SEQ ID NO: 5009846 - DNA, 25 bp, Homo sapien
tatttcctaggtcctgaccactggc

SEQ ID NO: 5009847 - DNA, 25 bp, Homo sapien
tcgcccgttgagctgcatactaaag

SEQ ID NO: 5009848 - DNA, 25 bp, Homo sapien
ttatttcacctacactagtaagcaa

SEQ ID NO: 5009849 - DNA, 25 bp, Homo sapien
tcacctacactagtaagcaaatcag

SEQ ID NO: 5009850 - DNA, 25 bp, Homo sapien
tataataaaagaagactagtcagaa

SEQ ID NO: 5009851 - DNA, 25 bp, Homo sapien
taaaagaagactagtcagaaatact

SEQ ID NO: 5009852 - DNA, 25 bp, Homo sapien
tgaacaaactcatataggcctagcc

SEQ ID NO: 5009853 - DNA, 25 bp, Homo sapien
taccaggaggttccaagttacagaa

SEQ ID NO: 5009854 - DNA, 25 bp, Homo sapien
gaaccactccatttctacctgaaca

SEQ ID NO: 5009855 - DNA, 25 bp, Homo sapien
gatattcataattcctacctaccag

SEQ ID NO: 5009856 - DNA, 25 bp, Homo sapien
gctcttcggatgatcatggctctga

SEQ ID NO: 5009857 - DNA, 25 bp, Homo sapien
gcggaggtaagaggaactgccataa

SEQ ID NO: 5009858 - DNA, 25 bp, Homo sapien
tctgagcacaccgtggatggagtca

SEQ ID NO: 5009859 - DNA, 25 bp, Homo sapien
tatctgaatcacagtgctgagaggg

SEQ ID NO: 5009860 - DNA, 25 bp, Homo sapien
tcttgtgagcaactggcgacctcca

SEQ ID NO: 5009861 - DNA, 25 bp, Homo sapien
caataacagggtggtgagagcttcc

SEQ ID NO: 5009862 - DNA, 25 bp, Homo sapien
gaaaggaaacctaccattggagagc

SEQ ID NO: 5009863 - DNA, 25 bp, Homo sapien
tgtggtcaccaagatctaagttact

SEQ ID NO: 5009864 - DNA, 25 bp, Homo sapien
tagctactaagattacttggttttg

SEQ ID NO: 5009865 - DNA, 25 bp, Homo sapien
tgtagttgaatttatcctagtattt

SEQ ID NO: 5009866 - DNA, 25 bp, Homo sapien
ttgaagttttagctactaagattac

SEQ ID NO: 5009867 - DNA, 25 bp, Homo sapien
ctactaagattacttggttttgatt

SEQ ID NO: 5009868 - DNA, 25 bp, Homo sapien
caaaagagtttatgtgtcaaacgcg

SEQ ID NO: 5009869 - DNA, 25 bp, Homo sapien
ttatgtgtcaaacgcggaagagata

SEQ ID NO: 5009870 - DNA, 25 bp, Homo sapien
caaacgcggaagagataaaagcagg

SEQ ID NO: 5009871 - DNA, 25 bp, Homo sapien
gagtttatgtgtcaaacgcggaaga

SEQ ID NO: 5009872 - DNA, 25 bp, Homo sapien
gagcagtcatcatgtgcacccctga

SEQ ID NO: 5009873 - DNA, 25 bp, Homo sapien
aactggtccgctttgttctgtcctg

SEQ ID NO: 5009874 - DNA, 25 bp, Homo sapien
gctacagagtctcctgccaactggt

SEQ ID NO: 5009875 - DNA, 25 bp, Homo sapien
tgaatgctaacaaaacaggctacag

SEQ ID NO: 5009876 - DNA, 25 bp, Homo sapien
gatagagacactaatagaagcacag

SEQ ID NO: 5009877 - DNA, 25 bp, Homo sapien
tagccattgtactcagatggaagag

SEQ ID NO: 5009878 - DNA, 25 bp, Homo sapien
gctaacggcgtggaataatctttaa

SEQ ID NO: 5009879 - DNA, 25 bp, Homo sapien
aatctaacgagaagcaaaaaagtgc

SEQ ID NO: 5009880 - DNA, 25 bp, Homo sapien
tattacatcaccacgaggcagttgc

SEQ ID NO: 5009881 - DNA, 25 bp, Homo sapien
ttgaaggtatttcgctggccctcgg

SEQ ID NO: 5009882 - DNA, 25 bp, Homo sapien
tcagaactgtgttggtgcgtaatca

SEQ ID NO: 5009883 - DNA, 25 bp, Homo sapien
tcacttcctagctgagttacctggg

SEQ ID NO: 5009884 - DNA, 25 bp, Homo sapien
cagtaggccctgtaagcacagtgtc

SEQ ID NO: 5009885 - DNA, 25 bp, Homo sapien
agtaggccctgtaagcacagtgtct

SEQ ID NO: 5009886 - DNA, 25 bp, Homo sapien
ccagtaggccctgtaagcacagtgt

SEQ ID NO: 5009887 - DNA, 25 bp, Homo sapien
aggtgaaatgccgtaggacccacaa

SEQ ID NO: 5009888 - DNA, 25 bp, Homo sapien
ttttgaatgattcctaggtatgcca

SEQ ID NO: 5009889 - DNA, 25 bp, Homo sapien
aatgattcctaggtatgccagatgc

SEQ ID NO: 5009890 - DNA, 25 bp, Homo sapien
aatgtcataatgctggctggcctca

SEQ ID NO: 5009891 - DNA, 25 bp, Homo sapien
cagcatgtagggtgatgagcactca

SEQ ID NO: 5009892 - DNA, 25 bp, Homo sapien
ccttggtgatttggaccctggttgc

SEQ ID NO: 5009893 - DNA, 25 bp, Homo sapien
ttagctaagcacagatctaccttgg

SEQ ID NO: 5009894 - DNA, 25 bp, Homo sapien
gatggtcccatagtctgtatccaaa

SEQ ID NO: 5009895 - DNA, 25 bp, Homo sapien
ggcatattctcttgtaccctgtttc

SEQ ID NO: 5009896 - DNA, 25 bp, Homo sapien
ggtggaggcatattctcttgtaccc

SEQ ID NO: 5009897 - DNA, 25 bp, Homo sapien
ggaggcatattctcttgtaccctgt

SEQ ID NO: 5009898 - DNA, 25 bp, Homo sapien
ctgggtggaggcatattctcttgta

SEQ ID NO: 5009899 - DNA, 25 bp, Homo sapien
gcgccttccccagagtcataatagc

SEQ ID NO: 5009900 - DNA, 25 bp, Homo sapien
tacaacaggagaagggccatcagaa

SEQ ID NO: 5009901 - DNA, 25 bp, Homo sapien
tggttttacaacaggagaagggcca

SEQ ID NO: 5009902 - DNA, 25 bp, Homo sapien
taagacccatgttacacttagcaat

SEQ ID NO: 5009903 - DNA, 25 bp, Homo sapien
caacttgatttttatgcacacaatt

SEQ ID NO: 5009904 - DNA, 25 bp, Homo sapien
ccactgtccaggcaaaagaggctgt

SEQ ID NO: 5009905 - DNA, 25 bp, Homo sapien
catcttacatctatgtcatcttcta

SEQ ID NO: 5009906 - DNA, 25 bp, Homo sapien
tgctctatcaaaaggcatcttacat

SEQ ID NO: 5009907 - DNA, 25 bp, Homo sapien
ggcgctgtatttcatgaaggtgaga

SEQ ID NO: 5009908 - DNA, 25 bp, Homo sapien
gagagacaggaagtcgattgtcaac

SEQ ID NO: 5009909 - DNA, 25 bp, Homo sapien
gagacaggaagtcgattgtcaacaa

SEQ ID NO: 5009910 - DNA, 25 bp, Homo sapien
caccgtttggcgctgtatttcatga

SEQ ID NO: 5009911 - DNA, 25 bp, Homo sapien
ggtaagattggagtctctctcggaa

SEQ ID NO: 5009912 - DNA, 25 bp, Homo sapien
tctctcggaagtttcttcagccctc

SEQ ID NO: 5009913 - DNA, 25 bp, Homo sapien
tgaatcctttggtaagattggagtc

SEQ ID NO: 5009914 - DNA, 25 bp, Homo sapien
aaaaagattttagctggcccaggca

SEQ ID NO: 5009915 - DNA, 25 bp, Homo sapien
cataaatcagggcaaatgtggccac

SEQ ID NO: 5009916 - DNA, 25 bp, Homo sapien
aaggcgtggttcaagccgccaatgg

SEQ ID NO: 5009917 - DNA, 25 bp, Homo sapien
cgccaatggttgcaactattacact

SEQ ID NO: 5009918 - DNA, 25 bp, Homo sapien
ttttggagaccaggactaacataaa

SEQ ID NO: 5009919 - DNA, 25 bp, Homo sapien
aagattgtctcttcagagacaacca

SEQ ID NO: 5009920 - DNA, 25 bp, Homo sapien
ttaagattgtctcttcagagacaac

SEQ ID NO: 5009921 - DNA, 25 bp, Homo sapien
taagattgtctcttcagagacaacc

SEQ ID NO: 5009922 - DNA, 25 bp, Homo sapien
tgaaggggttgttctccattggcac

SEQ ID NO: 5009923 - DNA, 25 bp, Homo sapien
tggttccgctgaaggggttgttctc

SEQ ID NO: 5009924 - DNA, 25 bp, Homo sapien
cgctgaaggggttgttctccattgg

SEQ ID NO: 5009925 - DNA, 25 bp, Homo sapien
tccgctgaaggggttgttctccatt

SEQ ID NO: 5009926 - DNA, 25 bp, Homo sapien
aggatgctggcatctaccttcctgg

SEQ ID NO: 5009927 - DNA, 25 bp, Homo sapien
gatgctggcatctaccttcctggtt

SEQ ID NO: 5009928 - DNA, 25 bp, Homo sapien
ggatgctggcatctaccttcctggt

SEQ ID NO: 5009929 - DNA, 25 bp, Homo sapien
atgctggcatctaccttcctggttt

SEQ ID NO: 5009930 - DNA, 25 bp, Homo sapien
tctccatagggcttagctttgccct

SEQ ID NO: 5009931 - DNA, 25 bp, Homo sapien
tacagttcgttcttctccatagggc

SEQ ID NO: 5009932 - DNA, 25 bp, Homo sapien
atgcctgtacagttcgttcttctcc

SEQ ID NO: 5009933 - DNA, 25 bp, Homo sapien
agcaatgcctgtacagttcgttctt

SEQ ID NO: 5009934 - DNA, 25 bp, Homo sapien
gactccacataataaccatccaggg

SEQ ID NO: 5009935 - DNA, 25 bp, Homo sapien
aaccatccagggctgtaacacatga

SEQ ID NO: 5009936 - DNA, 25 bp, Homo sapien
tgtaacacatgagccacccagtttt

SEQ ID NO: 5009937 - DNA, 25 bp, Homo sapien
taaccatccagggctgtaacacatg

SEQ ID NO: 5009938 - DNA, 25 bp, Homo sapien
tcaaacaatctatgggtctaacaag

SEQ ID NO: 5009939 - DNA, 25 bp, Homo sapien
tataaccgtagatatccccatgaga

SEQ ID NO: 5009940 - DNA, 25 bp, Homo sapien
cagctaaagcagtggttagggaaca

SEQ ID NO: 5009941 - DNA, 25 bp, Homo sapien
cacttggcatgcttgatagaagtaa

SEQ ID NO: 5009942 - DNA, 25 bp, Homo sapien
ttagtggtgtaacgacagaggtctt

SEQ ID NO: 5009943 - DNA, 25 bp, Homo sapien
tgagctctcgggacgaatggcagtt

SEQ ID NO: 5009944 - DNA, 25 bp, Homo sapien
cgacagaggtcttcgacaggcagag

SEQ ID NO: 5009945 - DNA, 25 bp, Homo sapien
ctctcgggacgaatggcagttttgg

SEQ ID NO: 5009946 - DNA, 25 bp, Homo sapien
gcggaccggtggcgtggctggatct

SEQ ID NO: 5009947 - DNA, 25 bp, Homo sapien
ctgcaggcaggcgtttgcgtcctcg

SEQ ID NO: 5009948 - DNA, 25 bp, Homo sapien
cagctgcaggcaggcgtttgcgtcc

SEQ ID NO: 5009949 - DNA, 25 bp, Homo sapien
agctgcaggcaggcgtttgcgtcct

SEQ ID NO: 5009950 - DNA, 25 bp, Homo sapien
gctgcaggcaggcgtttgcgtcctc

SEQ ID NO: 5009951 - DNA, 25 bp, Homo sapien
aaacccaggtagtgcgggaagagca

SEQ ID NO: 5009952 - DNA, 25 bp, Homo sapien
gctcgtcttggcgacgtcggcctcg

SEQ ID NO: 5009953 - DNA, 25 bp, Homo sapien
ggtttgggcgctgaaaaagctcagc

SEQ ID NO: 5009954 - DNA, 25 bp, Homo sapien
gattcctgagggagcgcttgtaggg

SEQ ID NO: 5009955 - DNA, 25 bp, Homo sapien
gccatgcgtggtgtagcacatctca

SEQ ID NO: 5009956 - DNA, 25 bp, Homo sapien
gtgtcgtacaccactcgcatgtcgg

SEQ ID NO: 5009957 - DNA, 25 bp, Homo sapien
tggataagcgtctctggacaactct

SEQ ID NO: 5009958 - DNA, 25 bp, Homo sapien
ccaaggcgtagattcctggataagc

SEQ ID NO: 5009959 - DNA, 25 bp, Homo sapien
gtgtactggctaacccggcctccag

SEQ ID NO: 5009960 - DNA, 25 bp, Homo sapien
gcggccgtcccgcacgtgctgcttt

SEQ ID NO: 5009961 - DNA, 25 bp, Homo sapien
gtcccgcacgtgctgctttgccacc

SEQ ID NO: 5009962 - DNA, 25 bp, Homo sapien
agccacctggctcgagcggacccgc

SEQ ID NO: 5009963 - DNA, 25 bp, Homo sapien
acaactggtcgcgtacacagcggcc

SEQ ID NO: 5009964 - DNA, 25 bp, Homo sapien
ccagtgataataacacaactggtcg

SEQ ID NO: 5009965 - DNA, 25 bp, Homo sapien
taacacaactggtcgcgtacacagc

SEQ ID NO: 5009966 - DNA, 25 bp, Homo sapien
tgataataacacaactggtcgcgta

SEQ ID NO: 5009967 - DNA, 25 bp, Homo sapien
ggcacccagagcttcggaggataat

SEQ ID NO: 5009968 - DNA, 25 bp, Homo sapien
cttggaggcgcagaacttgagacac

SEQ ID NO: 5009969 - DNA, 25 bp, Homo sapien
cttgagacactcttcggtgaacagt

SEQ ID NO: 5009970 - DNA, 25 bp, Homo sapien
acgacggacgattcgcttagagctg

SEQ ID NO: 5009971 - DNA, 25 bp, Homo sapien
ctgctggccacccgggttctcttgg

SEQ ID NO: 5009972 - DNA, 25 bp, Homo sapien
acccgggttctcttggcatctgtgt

SEQ ID NO: 5009973 - DNA, 25 bp, Homo sapien
tggccacccgggttctcttggcatc

SEQ ID NO: 5009974 - DNA, 25 bp, Homo sapien
gccacccgggttctcttggcatctg

SEQ ID NO: 5009975 - DNA, 25 bp, Homo sapien
gaagagtgggcgatcgtcttcctct

SEQ ID NO: 5009976 - DNA, 25 bp, Homo sapien
cccctctgcgcagggaagtagcacg

SEQ ID NO: 5009977 - DNA, 25 bp, Homo sapien
cagggaagtagcacgactccgtcac

SEQ ID NO: 5009978 - DNA, 25 bp, Homo sapien
aggccgatcccctctgcgcagggaa

SEQ ID NO: 5009979 - DNA, 25 bp, Homo sapien
cccagagcccgaagctctgggcagg

SEQ ID NO: 5009980 - DNA, 25 bp, Homo sapien
gaattctggagcctcgagggccgcc

SEQ ID NO: 5009981 - DNA, 25 bp, Homo sapien
acccagagcccgaagctctgggcag

SEQ ID NO: 5009982 - DNA, 25 bp, Homo sapien
agagggcagtgggaattctggagcc

SEQ ID NO: 5009983 - DNA, 25 bp, Homo sapien
cgcgtcgcctttatatacgcacagg

SEQ ID NO: 5009984 - DNA, 25 bp, Homo sapien
gccacgcgtcgcctttatatacgca

SEQ ID NO: 5009985 - DNA, 25 bp, Homo sapien
ccgccacgcgtcgcctttatatacg

SEQ ID NO: 5009986 - DNA, 25 bp, Homo sapien
agttaagtaactgtccctgcagggc

SEQ ID NO: 5009987 - DNA, 25 bp, Homo sapien
agggctcggtagtccacatcctggc

SEQ ID NO: 5009988 - DNA, 25 bp, Homo sapien
ttatttcttcagggctcggtagtcc

SEQ ID NO: 5009989 - DNA, 25 bp, Homo sapien
gctcggtagtccacatcctggcgcg

SEQ ID NO: 5009990 - DNA, 25 bp, Homo sapien
ttcttcagggctcggtagtccacat

SEQ ID NO: 5009991 - DNA, 25 bp, Homo sapien
gaaagggcgtggctcagagcccgct

SEQ ID NO: 5009992 - DNA, 25 bp, Homo sapien
agcccgcttcttccgctcgggcgta

SEQ ID NO: 5009993 - DNA, 25 bp, Homo sapien
agagcccgcttcttccgctcgggcg

SEQ ID NO: 5009994 - DNA, 25 bp, Homo sapien
ggtgaaagggcgtggctcagagccc

SEQ ID NO: 5009995 - DNA, 25 bp, Homo sapien
cacttttgcacccacgttttgtctg

SEQ ID NO: 5009996 - DNA, 25 bp, Homo sapien
tctgcagtgcaaatggattatgtgc

SEQ ID NO: 5009997 - DNA, 25 bp, Homo sapien
ggagcatttgaccaactcactgtgg

SEQ ID NO: 5009998 - DNA, 25 bp, Homo sapien
aatagcttcattgtcaccacgagtg

SEQ ID NO: 5009999 - DNA, 25 bp, Homo sapien
gggcagagggatgtggacaggcgcg

SEQ ID NO: 5010000 - DNA, 25 bp, Homo sapien
ctagtggtgtaaggacagaggtctc

SEQ ID NO: 5010001 - DNA, 25 bp, Homo sapien
taaggacagaggtctcggatgggca

SEQ ID NO: 5010002 - DNA, 25 bp, Homo sapien
gggatgtggacaggcgcgagggcgc

SEQ ID NO: 5010003 - DNA, 25 bp, Homo sapien
gcggaccggtggcgtggctggatct

SEQ ID NO: 5010004 - DNA, 25 bp, Homo sapien
ctgcaggcaggcgtttgcgtcctcg

SEQ ID NO: 5010005 - DNA, 25 bp, Homo sapien
cagctgcaggcaggcgtttgcgtcc

SEQ ID NO: 5010006 - DNA, 25 bp, Homo sapien
gctgcaggcaggcgtttgcgtcctc

SEQ ID NO: 5010007 - DNA, 25 bp, Homo sapien
agctgcaggcaggcgtttgcgtcct

SEQ ID NO: 5010008 - DNA, 25 bp, Homo sapien
ggtttgggcgctgaaaaagctcagc

SEQ ID NO: 5010009 - DNA, 25 bp, Homo sapien
gattcctgagggagcgcttgtaggg

SEQ ID NO: 5010010 - DNA, 25 bp, Homo sapien
aaacccaggtagtgcgggaagagca

SEQ ID NO: 5010011 - DNA, 25 bp, Homo sapien
gctcgtcttggcgacgtcggcctcg

SEQ ID NO: 5010012 - DNA, 25 bp, Homo sapien
tgtcgtacaccactcgcatgtcggc

SEQ ID NO: 5010013 - DNA, 25 bp, Homo sapien
tcgggcttgacgaaggtgtcgtaca

SEQ ID NO: 5010014 - DNA, 25 bp, Homo sapien
gcgtccaccacggtgacgcgggtca

SEQ ID NO: 5010015 - DNA, 25 bp, Homo sapien
tcgcatgtcggcgtccaccacggtg

SEQ ID NO: 5010016 - DNA, 25 bp, Homo sapien
catgcgtggtgtagcacatctcaca

SEQ ID NO: 5010017 - DNA, 25 bp, Homo sapien
ctcacagtccaaggcgtagattcct

SEQ ID NO: 5010018 - DNA, 25 bp, Homo sapien
tggataagcgtctctggacaactct

SEQ ID NO: 5010019 - DNA, 25 bp, Homo sapien
aggccatgcgtggtgtagcacatct

SEQ ID NO: 5010020 - DNA, 25 bp, Homo sapien
gcggccgtcccgcacgtgctgcttt

SEQ ID NO: 5010021 - DNA, 25 bp, Homo sapien
gtcccgcacgtgctgctttgccacc

SEQ ID NO: 5010022 - DNA, 25 bp, Homo sapien
gtgtactggctaacccggcctccag

SEQ ID NO: 5010023 - DNA, 25 bp, Homo sapien
agccacctggctcgagcggacccgc

SEQ ID NO: 5010024 - DNA, 25 bp, Homo sapien
tgataataacacaactggtcgcgta

SEQ ID NO: 5010025 - DNA, 25 bp, Homo sapien
acaactggtcgcgtacacagcggcc

SEQ ID NO: 5010026 - DNA, 25 bp, Homo sapien
ccagtgataataacacaactggtcg

SEQ ID NO: 5010027 - DNA, 25 bp, Homo sapien
taacacaactggtcgcgtacacagc

SEQ ID NO: 5010028 - DNA, 25 bp, Homo sapien
ttcaggaccacgttcaggtacctgt

SEQ ID NO: 5010029 - DNA, 25 bp, Homo sapien
gccagtgaagaggacggcgcctccg

SEQ ID NO: 5010030 - DNA, 25 bp, Homo sapien
cgttcaggtacctgttcttgttggg

SEQ ID NO: 5010031 - DNA, 25 bp, Homo sapien
tacagggcggccctgctgaggccgg

SEQ ID NO: 5010032 - DNA, 25 bp, Homo sapien
cacccgggttctcttggcatctgtg

SEQ ID NO: 5010033 - DNA, 25 bp, Homo sapien
acgacggacgattcgcttagagctg

SEQ ID NO: 5010034 - DNA, 25 bp, Homo sapien
ggcacccagagcttcggaggataat

SEQ ID NO: 5010035 - DNA, 25 bp, Homo sapien
tgagacactcttcggtgaacagttg

SEQ ID NO: 5010036 - DNA, 25 bp, Homo sapien
aggccgatcccctctgcgcagggaa

SEQ ID NO: 5010037 - DNA, 25 bp, Homo sapien
gaagagtgggcgatcgtcttcctct

SEQ ID NO: 5010038 - DNA, 25 bp, Homo sapien
cccctctgcgcagggaagtagcacg

SEQ ID NO: 5010039 - DNA, 25 bp, Homo sapien
cagggaagtagcacgactccgtcac

SEQ ID NO: 5010040 - DNA, 25 bp, Homo sapien
cccagagcccgaagctctgggcagg

SEQ ID NO: 5010041 - DNA, 25 bp, Homo sapien
acccagagcccgaagctctgggcag

SEQ ID NO: 5010042 - DNA, 25 bp, Homo sapien
gaattctggagcctcgagggccgcc

SEQ ID NO: 5010043 - DNA, 25 bp, Homo sapien
agagggcagtgggaattctggagcc

SEQ ID NO: 5010044 - DNA, 25 bp, Homo sapien
gagcaccggccgggctctgctccgc

SEQ ID NO: 5010045 - DNA, 25 bp, Homo sapien
tgctccgctcccaaatggcggcttg

SEQ ID NO: 5010046 - DNA, 25 bp, Homo sapien
ggctctgctccgctcccaaatggcg

SEQ ID NO: 5010047 - DNA, 25 bp, Homo sapien
tgtggctcgcaacatcttgctgcct

SEQ ID NO: 5010048 - DNA, 25 bp, Homo sapien
taggaattcaccttacgggctgctt

SEQ ID NO: 5010049 - DNA, 25 bp, Homo sapien
gaaagtctccttgccttgtttggac

SEQ ID NO: 5010050 - DNA, 25 bp, Homo sapien
catgaaagcgatggctaccaagagg

SEQ ID NO: 5010051 - DNA, 25 bp, Homo sapien
catttacgacgagagctatcagtgg

SEQ ID NO: 5010052 - DNA, 25 bp, Homo sapien
agcccgcttcttccgctcgggcgta

SEQ ID NO: 5010053 - DNA, 25 bp, Homo sapien
agagcccgcttcttccgctcgggcg

SEQ ID NO: 5010054 - DNA, 25 bp, Homo sapien
ggtgaaagggcgtggctcagagccc

SEQ ID NO: 5010055 - DNA, 25 bp, Homo sapien
gaaagggcgtggctcagagcccgct

SEQ ID NO: 5010056 - DNA, 25 bp, Homo sapien
gaggaacccttgtccggtgagcatg

SEQ ID NO: 5010057 - DNA, 25 bp, Homo sapien
catggttccaaatgcggtaggcaca

SEQ ID NO: 5010058 - DNA, 25 bp, Homo sapien
ccgctacgggcactcaaaggtttca

SEQ ID NO: 5010059 - DNA, 25 bp, Homo sapien
cacaacgtgctaggactggaatgac

SEQ ID NO: 5010060 - DNA, 25 bp, Homo sapien
gcggaccggtggcgtggctggatct

SEQ ID NO: 5010061 - DNA, 25 bp, Homo sapien
ctgcaggcaggcgcttgcgtcctcg

SEQ ID NO: 5010062 - DNA, 25 bp, Homo sapien
cagctgcaggcaggcgcttgcgtcc

SEQ ID NO: 5010063 - DNA, 25 bp, Homo sapien
agctgcaggcaggcgcttgcgtcct

SEQ ID NO: 5010064 - DNA, 25 bp, Homo sapien
gctgcaggcaggcgcttgcgtcctc

SEQ ID NO: 5010065 - DNA, 25 bp, Homo sapien
ggtttgggcgctgaaaaagctcagc

SEQ ID NO: 5010066 - DNA, 25 bp, Homo sapien
gattcctgagggagcgcttgtaggg

SEQ ID NO: 5010067 - DNA, 25 bp, Homo sapien
aaacccaggtagtgcgggaagagca

SEQ ID NO: 5010068 - DNA, 25 bp, Homo sapien
gctcgtcttggcgacgtcggcctcg

SEQ ID NO: 5010069 - DNA, 25 bp, Homo sapien
gccatgcgtggtgtagcacatctca

SEQ ID NO: 5010070 - DNA, 25 bp, Homo sapien
gtgtcgtacaccactcgcatgtcgg

SEQ ID NO: 5010071 - DNA, 25 bp, Homo sapien
tggataagcgtctctggacaactct

SEQ ID NO: 5010072 - DNA, 25 bp, Homo sapien
ccaaggcgtagattcctggataagc

SEQ ID NO: 5010073 - DNA, 25 bp, Homo sapien
gtgtactggctaacccggcctccag

SEQ ID NO: 5010074 - DNA, 25 bp, Homo sapien
gcggccgtcccgcacgtgctgcttt

SEQ ID NO: 5010075 - DNA, 25 bp, Homo sapien
gtcccgcacgtgctgctttgccacc

SEQ ID NO: 5010076 - DNA, 25 bp, Homo sapien
agccacctggctcgagcggacccgc

SEQ ID NO: 5010077 - DNA, 25 bp, Homo sapien
ccagtgataataacacaactggtcg

SEQ ID NO: 5010078 - DNA, 25 bp, Homo sapien
tgataataacacaactggtcgcgta

SEQ ID NO: 5010079 - DNA, 25 bp, Homo sapien
taacacaactggtcgcgtacacagc

SEQ ID NO: 5010080 - DNA, 25 bp, Homo sapien
acaactggtcgcgtacacagcggcc

SEQ ID NO: 5010081 - DNA, 25 bp, Homo sapien
cagtgaagaggacggcgcctccggg

SEQ ID NO: 5010082 - DNA, 25 bp, Homo sapien
tgtacagggcggccctgctgaggcc

SEQ ID NO: 5010083 - DNA, 25 bp, Homo sapien
gccagtgaagaggacggcgcctccg

SEQ ID NO: 5010084 - DNA, 25 bp, Homo sapien
acagggcggccctgctgaggccggg

SEQ ID NO: 5010085 - DNA, 25 bp, Homo sapien
ttcaggaccacgttcaggtacctgt

SEQ ID NO: 5010086 - DNA, 25 bp, Homo sapien
cgttcaggtacctgttcttgttggg

SEQ ID NO: 5010087 - DNA, 25 bp, Homo sapien
gaccacgttcaggtacctgttcttg

SEQ ID NO: 5010088 - DNA, 25 bp, Homo sapien
aggaccacgttcaggtacctgttct

SEQ ID NO: 5010089 - DNA, 25 bp, Homo sapien
gacactcttcggtgaacagttggag

SEQ ID NO: 5010090 - DNA, 25 bp, Homo sapien
acgacggacgattcgcttagagctg

SEQ ID NO: 5010091 - DNA, 25 bp, Homo sapien
tctgcgcagggaagtagcacgactc

SEQ ID NO: 5010092 - DNA, 25 bp, Homo sapien
ggcacccagagcttcggaggataat

SEQ ID NO: 5010093 - DNA, 25 bp, Homo sapien
tgctccgctcccaaatggcggcttg

SEQ ID NO: 5010094 - DNA, 25 bp, Homo sapien
gagcaccggccgggctctgctccgc

SEQ ID NO: 5010095 - DNA, 25 bp, Homo sapien
ggctctgctccgctcccaaatggcg

SEQ ID NO: 5010096 - DNA, 25 bp, Homo sapien
tgtggctcgcaacatcttgctgcct

SEQ ID NO: 5010097 - DNA, 25 bp, Homo sapien
ctagtggtgtaaggacagaggtctc

SEQ ID NO: 5010098 - DNA, 25 bp, Homo sapien
gggcagagggatgtggacaggcgcg

SEQ ID NO: 5010099 - DNA, 25 bp, Homo sapien
taaggacagaggtctcggatgggca

SEQ ID NO: 5010100 - DNA, 25 bp, Homo sapien
gggatgtggacaggcgcgagggcgc

SEQ ID NO: 5010101 - DNA, 25 bp, Homo sapien
tcctcgctggagttgtggccgtcct

SEQ ID NO: 5010102 - DNA, 25 bp, Homo sapien
ggcaacgtgatgctcgtcttggcga

SEQ ID NO: 5010103 - DNA, 25 bp, Homo sapien
aaacccaggtagtgcgggaagagca

SEQ ID NO: 5010104 - DNA, 25 bp, Homo sapien
ggtttgggcgctgaaaaagctcagc

SEQ ID NO: 5010105 - DNA, 25 bp, Homo sapien
gccatgcgtggtgtagcacatctca

SEQ ID NO: 5010106 - DNA, 25 bp, Homo sapien
ggtgtcgtacaccactcgcatgtcg

SEQ ID NO: 5010107 - DNA, 25 bp, Homo sapien
tggataagcgtctctggacaactct

SEQ ID NO: 5010108 - DNA, 25 bp, Homo sapien
ccaaggcgtagattcctggataagc

SEQ ID NO: 5010109 - DNA, 25 bp, Homo sapien
gtgtactggctaacccggcctccag

SEQ ID NO: 5010110 - DNA, 25 bp, Homo sapien
gcggccgtcccgcacgtgctgcttt

SEQ ID NO: 5010111 - DNA, 25 bp, Homo sapien
gtcccgcacgtgctgctttgccacc

SEQ ID NO: 5010112 - DNA, 25 bp, Homo sapien
agccacctggctcgagcggacccgc

SEQ ID NO: 5010113 - DNA, 25 bp, Homo sapien
ccagtgataataacacaactggtcg

SEQ ID NO: 5010114 - DNA, 25 bp, Homo sapien
taacacaactggtcgcgtacacagc

SEQ ID NO: 5010115 - DNA, 25 bp, Homo sapien
acaactggtcgcgtacacagcggcc

SEQ ID NO: 5010116 - DNA, 25 bp, Homo sapien
tgataataacacaactggtcgcgta

SEQ ID NO: 5010117 - DNA, 25 bp, Homo sapien
gccagtgaagaggacggcgcctccg

SEQ ID NO: 5010118 - DNA, 25 bp, Homo sapien
ttcaggaccacgttcaggtacctgt

SEQ ID NO: 5010119 - DNA, 25 bp, Homo sapien
tacagggcggccctgctgaggccgg

SEQ ID NO: 5010120 - DNA, 25 bp, Homo sapien
cgttcaggtacctgttcttgttggg

SEQ ID NO: 5010121 - DNA, 25 bp, Homo sapien
cacccgggttctcttggcatctgtg

SEQ ID NO: 5010122 - DNA, 25 bp, Homo sapien
ggcacccagagcttcggaggataat

SEQ ID NO: 5010123 - DNA, 25 bp, Homo sapien
tgagacactcttcggtgaacagttg

SEQ ID NO: 5010124 - DNA, 25 bp, Homo sapien
acgacggacgattcgcttagagctg

SEQ ID NO: 5010125 - DNA, 25 bp, Homo sapien
aggccgatcccctctgcgcagggaa

SEQ ID NO: 5010126 - DNA, 25 bp, Homo sapien
cccctctgcgcagggaagtagcacg

SEQ ID NO: 5010127 - DNA, 25 bp, Homo sapien
gaagagtgggcgatcgtcttcctct

SEQ ID NO: 5010128 - DNA, 25 bp, Homo sapien
cagggaagtagcacgactccgtcac

SEQ ID NO: 5010129 - DNA, 25 bp, Homo sapien
gagcaccggccgggctctgctccgc

SEQ ID NO: 5010130 - DNA, 25 bp, Homo sapien
tgctccgctcccaaatggcggcttg

SEQ ID NO: 5010131 - DNA, 25 bp, Homo sapien
ggctctgctccgctcccaaatggcg

SEQ ID NO: 5010132 - DNA, 25 bp, Homo sapien
tgtggctcgcaacatcttgctgcct

SEQ ID NO: 5010133 - DNA, 25 bp, Homo sapien
caggacttgggcaatgttcaacaca

SEQ ID NO: 5010134 - DNA, 25 bp, Homo sapien
cgccgctgcgggcaaattgaggaca

SEQ ID NO: 5010135 - DNA, 25 bp, Homo sapien
gacaggaagcggaccgcacccactt

SEQ ID NO: 5010136 - DNA, 25 bp, Homo sapien
catagaaaatgcacatggtgaagaa

SEQ ID NO: 5010137 - DNA, 25 bp, Homo sapien
ccttctaggagttgtgcagtcttcg

SEQ ID NO: 5010138 - DNA, 25 bp, Homo sapien
aagagtggccgtctgggtttgcagc

SEQ ID NO: 5010139 - DNA, 25 bp, Homo sapien
ttcgattgtgtgaaacttcacctgg

SEQ ID NO: 5010140 - DNA, 25 bp, Homo sapien
tatccagaacagcaaacggacgagg

SEQ ID NO: 5010141 - DNA, 25 bp, Homo sapien
gatcttccgcctcagtgtatggctt

SEQ ID NO: 5010142 - DNA, 25 bp, Homo sapien
gaaaccagtgggtattgaagacctg

SEQ ID NO: 5010143 - DNA, 25 bp, Homo sapien
gccggccactctgacttgcgatctt

SEQ ID NO: 5010144 - DNA, 25 bp, Homo sapien
tcagggtcccttacgcagcctgttg

SEQ ID NO: 5010145 - DNA, 25 bp, Homo sapien
gggcagagggatgtggacaggcgcg

SEQ ID NO: 5010146 - DNA, 25 bp, Homo sapien
ctagtggtgtaaggacagaggtctc

SEQ ID NO: 5010147 - DNA, 25 bp, Homo sapien
taaggacagaggtctcggatgggca

SEQ ID NO: 5010148 - DNA, 25 bp, Homo sapien
gggatgtggacaggcgcgagggcgc

SEQ ID NO: 5010149 - DNA, 25 bp, Homo sapien
taaggacaggccagggcggcgggag

SEQ ID NO: 5010150 - DNA, 25 bp, Homo sapien
ggccagggcggcgggagaggcggac

SEQ ID NO: 5010151 - DNA, 25 bp, Homo sapien
acaggccagggcggcgggagaggcg

SEQ ID NO: 5010152 - DNA, 25 bp, Homo sapien
ctaaggacaggccagggcggcggga

SEQ ID NO: 5010153 - DNA, 25 bp, Homo sapien
ggtttgggcgctgaaaaagctcagc

SEQ ID NO: 5010154 - DNA, 25 bp, Homo sapien
gattcctgagggagcgcttgtaggg

SEQ ID NO: 5010155 - DNA, 25 bp, Homo sapien
tcctcgctggagttgtggccgtcct

SEQ ID NO: 5010156 - DNA, 25 bp, Homo sapien
aaacccaggtagtgcgggaagagca

SEQ ID NO: 5010157 - DNA, 25 bp, Homo sapien
gtgtcgtacaccactcgcatgtcgg

SEQ ID NO: 5010158 - DNA, 25 bp, Homo sapien
tggataagcgtctctggacaactct

SEQ ID NO: 5010159 - DNA, 25 bp, Homo sapien
ccaaggcgtagattcctggataagc

SEQ ID NO: 5010160 - DNA, 25 bp, Homo sapien
gccatgcgtggtgtagcacatctca

SEQ ID NO: 5010161 - DNA, 25 bp, Homo sapien
gtgtactggctaacccggcctccag

SEQ ID NO: 5010162 - DNA, 25 bp, Homo sapien
gtcccgcacgtgctgctttgccacc

SEQ ID NO: 5010163 - DNA, 25 bp, Homo sapien
gcggccgtcccgcacgtgctgcttt

SEQ ID NO: 5010164 - DNA, 25 bp, Homo sapien
agccacctggctcgagcggacccgc

SEQ ID NO: 5010165 - DNA, 25 bp, Homo sapien
ccagtgataataacacaactggtcg

SEQ ID NO: 5010166 - DNA, 25 bp, Homo sapien
tgataataacacaactggtcgcgta

SEQ ID NO: 5010167 - DNA, 25 bp, Homo sapien
taacacaactggtcgcgtacacagc

SEQ ID NO: 5010168 - DNA, 25 bp, Homo sapien
acaactggtcgcgtacacagcggcc

SEQ ID NO: 5010169 - DNA, 25 bp, Homo sapien
ttcaggaccacgttcaggtacctgt

SEQ ID NO: 5010170 - DNA, 25 bp, Homo sapien
gccagtgaagaggacggcgcctccg

SEQ ID NO: 5010171 - DNA, 25 bp, Homo sapien
cgttcaggtacctgttcttgttggg

SEQ ID NO: 5010172 - DNA, 25 bp, Homo sapien
tacagggcggccctgctgaggccgg

SEQ ID NO: 5010173 - DNA, 25 bp, Homo sapien
cacccgggttctcttggcatctgtg

SEQ ID NO: 5010174 - DNA, 25 bp, Homo sapien
acgacggacgattcgcttagagctg

SEQ ID NO: 5010175 - DNA, 25 bp, Homo sapien
cacccagagcttcggaggataatgg

SEQ ID NO: 5010176 - DNA, 25 bp, Homo sapien
tgagacactcttcggtgaacagttg

SEQ ID NO: 5010177 - DNA, 25 bp, Homo sapien
gaagagtgggcgatcgtcttcctct

SEQ ID NO: 5010178 - DNA, 25 bp, Homo sapien
cccctctgcgcagggaagtagcacg

SEQ ID NO: 5010179 - DNA, 25 bp, Homo sapien
cagggaagtagcacgactccgtcac

SEQ ID NO: 5010180 - DNA, 25 bp, Homo sapien
aggccgatcccctctgcgcagggaa

SEQ ID NO: 5010181 - DNA, 25 bp, Homo sapien
caactggcggcttcaatgagtgctg

SEQ ID NO: 5010182 - DNA, 25 bp, Homo sapien
tcctctcccaactggcggcttcaat

SEQ ID NO: 5010183 - DNA, 25 bp, Homo sapien
ttgtcgcctttatataggcacaggg

SEQ ID NO: 5010184 - DNA, 25 bp, Homo sapien
tgcggccgccacttgtcgcctttat

SEQ ID NO: 5010185 - DNA, 25 bp, Homo sapien
gaaagggcgtggctcagagcccgct

SEQ ID NO: 5010186 - DNA, 25 bp, Homo sapien
agcccgcttcttccgctcgggcgta

SEQ ID NO: 5010187 - DNA, 25 bp, Homo sapien
agagcccgcttcttccgctcgggcg

SEQ ID NO: 5010188 - DNA, 25 bp, Homo sapien
ggtgaaagggcgtggctcagagccc

SEQ ID NO: 5010189 - DNA, 25 bp, Homo sapien
aatccggtttttcactaagtcactg

SEQ ID NO: 5010190 - DNA, 25 bp, Homo sapien
ctacttcagtgctttccgaaatttg

SEQ ID NO: 5010191 - DNA, 25 bp, Homo sapien
gctttccgaaatttgtctgacagag

SEQ ID NO: 5010192 - DNA, 25 bp, Homo sapien
tttgtctgacagagtggaaatccgg

SEQ ID NO: 5010193 - DNA, 25 bp, Homo sapien
gggcagagggatgtggacaggcgcg

SEQ ID NO: 5010194 - DNA, 25 bp, Homo sapien
ctagtggtgtaaggacagaggtctc

SEQ ID NO: 5010195 - DNA, 25 bp, Homo sapien
taaggacagaggtctcggatgggca

SEQ ID NO: 5010196 - DNA, 25 bp, Homo sapien
gggatgtggacaggcgcgagggcgc

SEQ ID NO: 5010197 - DNA, 25 bp, Homo sapien
gtgagctctcgggactgatggcggt

SEQ ID NO: 5010198 - DNA, 25 bp, Homo sapien
gggcagggtgagctctcgggactga

SEQ ID NO: 5010199 - DNA, 25 bp, Homo sapien
agctctcgggactgatggcggtttt

SEQ ID NO: 5010200 - DNA, 25 bp, Homo sapien
ctttcgctttgcggcgaggtgggca

SEQ ID NO: 5010201 - DNA, 25 bp, Homo sapien
gcggaccggtggcgtggctggatct

SEQ ID NO: 5010202 - DNA, 25 bp, Homo sapien
ggcaacgtgatgctcgtcttggcga

SEQ ID NO: 5010203 - DNA, 25 bp, Homo sapien
aaacccaggtagtgcgggaagagca

SEQ ID NO: 5010204 - DNA, 25 bp, Homo sapien
tcctcgctggagttgtggccgtcct

SEQ ID NO: 5010205 - DNA, 25 bp, Homo sapien
ggtttgggcgctgaaaaagctcagc

SEQ ID NO: 5010206 - DNA, 25 bp, Homo sapien
gccatgcgtggtgtagcacatctca

SEQ ID NO: 5010207 - DNA, 25 bp, Homo sapien
gtgtcgtacaccactcgcatgtcgg

SEQ ID NO: 5010208 - DNA, 25 bp, Homo sapien
tggataagcgtctctggacaactct

SEQ ID NO: 5010209 - DNA, 25 bp, Homo sapien
ccaaggcgtagattcctggataagc

SEQ ID NO: 5010210 - DNA, 25 bp, Homo sapien
gcggccgtcccgcacgtgctgcttt

SEQ ID NO: 5010211 - DNA, 25 bp, Homo sapien
gtgtactggctaacccggcctccag

SEQ ID NO: 5010212 - DNA, 25 bp, Homo sapien
gtcccgcacgtgctgctttgccacc

SEQ ID NO: 5010213 - DNA, 25 bp, Homo sapien
agccacctggctcgagcggacccgc

SEQ ID NO: 5010214 - DNA, 25 bp, Homo sapien
ccagtgataataacacaactggtcg

SEQ ID NO: 5010215 - DNA, 25 bp, Homo sapien
acaactggtcgcgtacacagcggcc

SEQ ID NO: 5010216 - DNA, 25 bp, Homo sapien
taacacaactggtcgcgtacacagc

SEQ ID NO: 5010217 - DNA, 25 bp, Homo sapien
tgataataacacaactggtcgcgta

SEQ ID NO: 5010218 - DNA, 25 bp, Homo sapien
gccagtgaagaggacggcgcctccg

SEQ ID NO: 5010219 - DNA, 25 bp, Homo sapien
cgttcaggtacctgttcttgttggg

SEQ ID NO: 5010220 - DNA, 25 bp, Homo sapien
ttcaggaccacgttcaggtacctgt

SEQ ID NO: 5010221 - DNA, 25 bp, Homo sapien
tacagggcggccctgctgaggccgg

SEQ ID NO: 5010222 - DNA, 25 bp, Homo sapien
ggcacccagagcttcggaggataat

SEQ ID NO: 5010223 - DNA, 25 bp, Homo sapien
cacccgggttctcttggcatctgtg

SEQ ID NO: 5010224 - DNA, 25 bp, Homo sapien
acgacggacgattcgcttagagctg

SEQ ID NO: 5010225 - DNA, 25 bp, Homo sapien
tgagacactcttcggtgaacagttg

SEQ ID NO: 5010226 - DNA, 25 bp, Homo sapien
gaagagtgggcgatcgtcttcctct

SEQ ID NO: 5010227 - DNA, 25 bp, Homo sapien
cagggaagtagcacgactccgtcac

SEQ ID NO: 5010228 - DNA, 25 bp, Homo sapien
cccctctgcgcagggaagtagcacg

SEQ ID NO: 5010229 - DNA, 25 bp, Homo sapien
aggccgatcccctctgcgcagggaa

SEQ ID NO: 5010230 - DNA, 25 bp, Homo sapien
cccagagcccgaagctctgggcagg

SEQ ID NO: 5010231 - DNA, 25 bp, Homo sapien
gaattctggagcctcgagggccgcc

SEQ ID NO: 5010232 - DNA, 25 bp, Homo sapien
agagggcagtgggaattctggagcc

SEQ ID NO: 5010233 - DNA, 25 bp, Homo sapien
gcttctgggtatccaggtgggaacc

SEQ ID NO: 5010234 - DNA, 25 bp, Homo sapien
tatccagaacagcaaacggacgagg

SEQ ID NO: 5010235 - DNA, 25 bp, Homo sapien
ccttctaggagttgtgcagtcttcg

SEQ ID NO: 5010236 - DNA, 25 bp, Homo sapien
aagagtggccgtctgggtttgcagc

SEQ ID NO: 5010237 - DNA, 25 bp, Homo sapien
ttcgattgtgtgaaacttcacctgg

SEQ ID NO: 5010238 - DNA, 25 bp, Homo sapien
gggcagagggatgtggacaggcgcg

SEQ ID NO: 5010239 - DNA, 25 bp, Homo sapien
ctagtggtgtaaggacagaggtctc

SEQ ID NO: 5010240 - DNA, 25 bp, Homo sapien
taaggacagaggtctcggatgggca

SEQ ID NO: 5010241 - DNA, 25 bp, Homo sapien
gggatgtggacaggcgcgagggcgc

SEQ ID NO: 5010242 - DNA, 25 bp, Homo sapien
ggtttgggcgctgaaaaagctcagc

SEQ ID NO: 5010243 - DNA, 25 bp, Homo sapien
tcctcgctggagttgtggccgtcct

SEQ ID NO: 5010244 - DNA, 25 bp, Homo sapien
ggcaacgtgatgctcgtcttggcga

SEQ ID NO: 5010245 - DNA, 25 bp, Homo sapien
aaacccaggtagtgcgggaagagca

SEQ ID NO: 5010246 - DNA, 25 bp, Homo sapien
gccatgcgtggtgtagcacatctca

SEQ ID NO: 5010247 - DNA, 25 bp, Homo sapien
gtgtcgtacaccactcgcatgtcgg

SEQ ID NO: 5010248 - DNA, 25 bp, Homo sapien
tggataagcgtctctggacaactct

SEQ ID NO: 5010249 - DNA, 25 bp, Homo sapien
ccaaggcgtagattcctggataagc

SEQ ID NO: 5010250 - DNA, 25 bp, Homo sapien
gtgtactggctaacccggcctccag

SEQ ID NO: 5010251 - DNA, 25 bp, Homo sapien
gcggccgtcccgcacgtgctgcttt

SEQ ID NO: 5010252 - DNA, 25 bp, Homo sapien
gtcccgcacgtgctgctttgccacc

SEQ ID NO: 5010253 - DNA, 25 bp, Homo sapien
agccacctggctcgagcggacccgc

SEQ ID NO: 5010254 - DNA, 25 bp, Homo sapien
ccagtgataataacacaactggtcg

SEQ ID NO: 5010255 - DNA, 25 bp, Homo sapien
taacacaactggtcgcgtacacagc

SEQ ID NO: 5010256 - DNA, 25 bp, Homo sapien
acaactggtcgcgtacacagcggcc

SEQ ID NO: 5010257 - DNA, 25 bp, Homo sapien
tgataataacacaactggtcgcgta

SEQ ID NO: 5010258 - DNA, 25 bp, Homo sapien
ttcaggaccacgttcaggtacctgt

SEQ ID NO: 5010259 - DNA, 25 bp, Homo sapien
cgttcaggtacctgttcttgttggg

SEQ ID NO: 5010260 - DNA, 25 bp, Homo sapien
gccagtgaagaggacggcgcctccg

SEQ ID NO: 5010261 - DNA, 25 bp, Homo sapien
tacagggcggccctgctgaggccgg

SEQ ID NO: 5010262 - DNA, 25 bp, Homo sapien
ggcacccagagcttcggaggataat

SEQ ID NO: 5010263 - DNA, 25 bp, Homo sapien
gacactcttcggtgaacagttggag

SEQ ID NO: 5010264 - DNA, 25 bp, Homo sapien
tctgcgcagggaagtagcacgactc

SEQ ID NO: 5010265 - DNA, 25 bp, Homo sapien
acgacggacgattcgcttagagctg

SEQ ID NO: 5010266 - DNA, 25 bp, Homo sapien
caactggcggcttcaatgagtgctg

SEQ ID NO: 5010267 - DNA, 25 bp, Homo sapien
ttgtcgcctttatataggcacaggg

SEQ ID NO: 5010268 - DNA, 25 bp, Homo sapien
tcctctcccaactggcggcttcaat

SEQ ID NO: 5010269 - DNA, 25 bp, Homo sapien
tgcggccgccacttgtcgcctttat

SEQ ID NO: 5010270 - DNA, 25 bp, Homo sapien
cgccgctgcgggcaaattgaggaca

SEQ ID NO: 5010271 - DNA, 25 bp, Homo sapien
caggacttgggcaatgttcaacaca

SEQ ID NO: 5010272 - DNA, 25 bp, Homo sapien
gacaggaagcggaccgcacccactt

SEQ ID NO: 5010273 - DNA, 25 bp, Homo sapien
catagaaaatgcacatggtgaagaa

SEQ ID NO: 5010274 - DNA, 25 bp, Homo sapien
tatccagaacagcaaacggacgagg

SEQ ID NO: 5010275 - DNA, 25 bp, Homo sapien
cagtcttcgattgtgtgaaacttca

SEQ ID NO: 5010276 - DNA, 25 bp, Homo sapien
ccttctaggagttgtgcagtcttcg

SEQ ID NO: 5010277 - DNA, 25 bp, Homo sapien
tggctgatttgtggcaatgcctcca

SEQ ID NO: 5010278 - DNA, 25 bp, Homo sapien
gatcttccgcctcagtgtatggctt

SEQ ID NO: 5010279 - DNA, 25 bp, Homo sapien
gaaaccagtgggtattgaagacctg

SEQ ID NO: 5010280 - DNA, 25 bp, Homo sapien
gccggccactctgacttgcgatctt

SEQ ID NO: 5010281 - DNA, 25 bp, Homo sapien
tcagggtcccttacgcagcctgttg

SEQ ID NO: 5010282 - DNA, 25 bp, Homo sapien
tccttccgactcctgtgccctgttt

SEQ ID NO: 5010283 - DNA, 25 bp, Homo sapien
tagtccttccgactcctgtgccctg

SEQ ID NO: 5010284 - DNA, 25 bp, Homo sapien
actattgccactagtccttccgact

SEQ ID NO: 5010285 - DNA, 25 bp, Homo sapien
cactattgccactagtccttccgac

SEQ ID NO: 5010286 - DNA, 25 bp, Homo sapien
agaagccatggaagtcccacgtggg

SEQ ID NO: 5010287 - DNA, 25 bp, Homo sapien
cccacgtggggtggctagtggtgta

SEQ ID NO: 5010288 - DNA, 25 bp, Homo sapien
gagggcgcgcggcagggactcgggg

SEQ ID NO: 5010289 - DNA, 25 bp, Homo sapien
cagaagccatggaagtcccacgtgg

SEQ ID NO: 5010290 - DNA, 25 bp, Homo sapien
gtgagctctcgggactgatggcggt

SEQ ID NO: 5010291 - DNA, 25 bp, Homo sapien
gggcagggtgagctctcgggactga

SEQ ID NO: 5010292 - DNA, 25 bp, Homo sapien
agctctcgggactgatggcggtttt

SEQ ID NO: 5010293 - DNA, 25 bp, Homo sapien
ctttcgctttgcggcgaggtgggca

SEQ ID NO: 5010294 - DNA, 25 bp, Homo sapien
taaggacaggccagggcggcgggag

SEQ ID NO: 5010295 - DNA, 25 bp, Homo sapien
ggccagggcggcgggagaggcggac

SEQ ID NO: 5010296 - DNA, 25 bp, Homo sapien
acaggccagggcggcgggagaggcg

SEQ ID NO: 5010297 - DNA, 25 bp, Homo sapien
ctaaggacaggccagggcggcggga

SEQ ID NO: 5010298 - DNA, 25 bp, Homo sapien
ggtttgggcgctgaaaaagctcagc

SEQ ID NO: 5010299 - DNA, 25 bp, Homo sapien
tcctcgctggagttgtggccgtcct

SEQ ID NO: 5010300 - DNA, 25 bp, Homo sapien
ggcaacgtgatgctcgtcttggcga

SEQ ID NO: 5010301 - DNA, 25 bp, Homo sapien
aaacccaggtagtgcgggaagagca

SEQ ID NO: 5010302 - DNA, 25 bp, Homo sapien
gtgtcgtacaccactcgcatgtcgg

SEQ ID NO: 5010303 - DNA, 25 bp, Homo sapien
tggataagcgtctctggacaactct

SEQ ID NO: 5010304 - DNA, 25 bp, Homo sapien
ccaaggcgtagattcctggataagc

SEQ ID NO: 5010305 - DNA, 25 bp, Homo sapien
gccatgcgtggtgtagcacatctca

SEQ ID NO: 5010306 - DNA, 25 bp, Homo sapien
gtgtactggctaacccggcctccag

SEQ ID NO: 5010307 - DNA, 25 bp, Homo sapien
gcggccgtcccgcacgtgctgcttt

SEQ ID NO: 5010308 - DNA, 25 bp, Homo sapien
gtcccgcacgtgctgctttgccacc

SEQ ID NO: 5010309 - DNA, 25 bp, Homo sapien
agccacctggctcgagcggacccgc

SEQ ID NO: 5010310 - DNA, 25 bp, Homo sapien
ccagtgataataacacaactggtcg

SEQ ID NO: 5010311 - DNA, 25 bp, Homo sapien
taacacaactggtcgcgtacacagc

SEQ ID NO: 5010312 - DNA, 25 bp, Homo sapien
acaactggtcgcgtacacagcggcc

SEQ ID NO: 5010313 - DNA, 25 bp, Homo sapien
tgataataacacaactggtcgcgta

SEQ ID NO: 5010314 - DNA, 25 bp, Homo sapien
cttggaggcgcagaacttgagacac

SEQ ID NO: 5010315 - DNA, 25 bp, Homo sapien
cttgagacactcttcggtgaacagt

SEQ ID NO: 5010316 - DNA, 25 bp, Homo sapien
ggcacccagagcttcggaggataat

SEQ ID NO: 5010317 - DNA, 25 bp, Homo sapien
acgacggacgattcgcttagagctg

SEQ ID NO: 5010318 - DNA, 25 bp, Homo sapien
tgctgctggccacccgggttctctt

SEQ ID NO: 5010319 - DNA, 25 bp, Homo sapien
acccgggttctcttggcatctgtgt

SEQ ID NO: 5010320 - DNA, 25 bp, Homo sapien
tggccacccgggttctcttggcatc

SEQ ID NO: 5010321 - DNA, 25 bp, Homo sapien
gccacccgggttctcttggcatctg

SEQ ID NO: 5010322 - DNA, 25 bp, Homo sapien
gaagagtgggcgatcgtcttcctct

SEQ ID NO: 5010323 - DNA, 25 bp, Homo sapien
cccctctgcgcagggaagtagcacg

SEQ ID NO: 5010324 - DNA, 25 bp, Homo sapien
cagggaagtagcacgactccgtcac

SEQ ID NO: 5010325 - DNA, 25 bp, Homo sapien
aggccgatcccctctgcgcagggaa

SEQ ID NO: 5010326 - DNA, 25 bp, Homo sapien
cccagagcccgaagctctgggcagg

SEQ ID NO: 5010327 - DNA, 25 bp, Homo sapien
gaattctggagcctcgagggccgcc

SEQ ID NO: 5010328 - DNA, 25 bp, Homo sapien
agagggcagtgggaattctggagcc

SEQ ID NO: 5010329 - DNA, 25 bp, Homo sapien
gcttctgggtatccaggtgggaacc

SEQ ID NO: 5010330 - DNA, 25 bp, Homo sapien
ttgttcgggcccagacaacatccca

SEQ ID NO: 5010331 - DNA, 25 bp, Homo sapien
tcaacttgttcgggcccagacaaca

SEQ ID NO: 5010332 - DNA, 25 bp, Homo sapien
acttgttcgggcccagacaacatcc

SEQ ID NO: 5010333 - DNA, 25 bp, Homo sapien
caacttgttcgggcccagacaacat

SEQ ID NO: 5010334 - DNA, 25 bp, Homo sapien
actggtgcagcagtccgctgcatgc

SEQ ID NO: 5010335 - DNA, 25 bp, Homo sapien
aggactggtgcagcagtccgctgca

SEQ ID NO: 5010336 - DNA, 25 bp, Homo sapien
ccaggactggtgcagcagtccgctg

SEQ ID NO: 5010337 - DNA, 25 bp, Homo sapien
ctctctggggttgcgtttccctgct

SEQ ID NO: 5010338 - DNA, 25 bp, Homo sapien
ctgtgggcaattggaggacaggaag

SEQ ID NO: 5010339 - DNA, 25 bp, Homo sapien
ggcaattggaggacaggaagtggac

SEQ ID NO: 5010340 - DNA, 25 bp, Homo sapien
tgggcaattggaggacaggaagtgg

SEQ ID NO: 5010341 - DNA, 25 bp, Homo sapien
tgtgggcaattggaggacaggaagt

SEQ ID NO: 5010342 - DNA, 25 bp, Homo sapien
tctttaaatgcagtgaaagtctgca

SEQ ID NO: 5010343 - DNA, 25 bp, Homo sapien
gtaaccagctgtgggtacacagtga

SEQ ID NO: 5010344 - DNA, 25 bp, Homo sapien
tttctttaaatgcagtgaaagtctg

SEQ ID NO: 5010345 - DNA, 25 bp, Homo sapien
atgtaaccagctgtgggtacacagt

SEQ ID NO: 5010346 - DNA, 25 bp, Homo sapien
tccgcagtgggagcactgattttat

SEQ ID NO: 5010347 - DNA, 25 bp, Homo sapien
gcctttccgcagtgggagcactgat

SEQ ID NO: 5010348 - DNA, 25 bp, Homo sapien
gcagcctttccgcagtgggagcact

SEQ ID NO: 5010349 - DNA, 25 bp, Homo sapien
gcagtgggagcactgattttattga

SEQ ID NO: 5010350 - DNA, 25 bp, Homo sapien
ttcatgtcaagaaaactaagagcca

SEQ ID NO: 5010351 - DNA, 25 bp, Homo sapien
gattcatgtcaagaaaactaagagc

SEQ ID NO: 5010352 - DNA, 25 bp, Homo sapien
tcatgtcaagaaaactaagagccat

SEQ ID NO: 5010353 - DNA, 25 bp, Homo sapien
attcatgtcaagaaaactaagagcc

SEQ ID NO: 5010354 - DNA, 25 bp, Homo sapien
tctggagatgccctatcctgggccc

SEQ ID NO: 5010355 - DNA, 25 bp, Homo sapien
gccacacctgtcatgctcattacaa

SEQ ID NO: 5010356 - DNA, 25 bp, Homo sapien
ggagccctcttagtgtttccccagc

SEQ ID NO: 5010357 - DNA, 25 bp, Homo sapien
cattcaggagccctcttagtgtttc

SEQ ID NO: 5010358 - DNA, 25 bp, Homo sapien
ctataagaccatatgaacatgaccc

SEQ ID NO: 5010359 - DNA, 25 bp, Homo sapien
atatgaacatgaccccttctcttga

SEQ ID NO: 5010360 - DNA, 25 bp, Homo sapien
gaccatatgaacatgaccccttctc

SEQ ID NO: 5010361 - DNA, 25 bp, Homo sapien
taagaccatatgaacatgacccctt

SEQ ID NO: 5010362 - DNA, 25 bp, Homo sapien
tctgggttcccataatactgtgtga

SEQ ID NO: 5010363 - DNA, 25 bp, Homo sapien
ctctgggttcccataatactgtgtg

SEQ ID NO: 5010364 - DNA, 25 bp, Homo sapien
tgggttcccataatactgtgtgagg

SEQ ID NO: 5010365 - DNA, 25 bp, Homo sapien
ggttcccataatactgtgtgaggag

SEQ ID NO: 5010366 - DNA, 25 bp, Homo sapien
ctgtcactctcacgcctcggcttga

SEQ ID NO: 5010367 - DNA, 25 bp, Homo sapien
ctgtctgtcactctcacgcctcggc

SEQ ID NO: 5010368 - DNA, 25 bp, Homo sapien
gtctgtcactctcacgcctcggctt

SEQ ID NO: 5010369 - DNA, 25 bp, Homo sapien
cactctcacgcctcggcttgaccat

SEQ ID NO: 5010370 - DNA, 25 bp, Homo sapien
caagcattgtcacacctccttgttt

SEQ ID NO: 5010371 - DNA, 25 bp, Homo sapien
tcaagcattgtcacacctccttgtt

SEQ ID NO: 5010372 - DNA, 25 bp, Homo sapien
gatgtgcctttatgatattcttcag

SEQ ID NO: 5010373 - DNA, 25 bp, Homo sapien
catgccaacataatcatgatgtgcc

SEQ ID NO: 5010374 - DNA, 25 bp, Homo sapien
ctcttgaataaggttcccgttccat

SEQ ID NO: 5010375 - DNA, 25 bp, Homo sapien
tcttcatatctacttggtcaccaac

SEQ ID NO: 5010376 - DNA, 25 bp, Homo sapien
gtagctgtcaaatacataacaagac

SEQ ID NO: 5010377 - DNA, 25 bp, Homo sapien
caaatacataacaagactgaggatc

SEQ ID NO: 5010378 - DNA, 25 bp, Homo sapien
tgtcaaatacataacaagactgagg

SEQ ID NO: 5010379 - DNA, 25 bp, Homo sapien
aagcttttgtagctgtcaaatacat

SEQ ID NO: 5010380 - DNA, 25 bp, Homo sapien
atgttcatggtttcaagagtatcac

SEQ ID NO: 5010381 - DNA, 25 bp, Homo sapien
cactactggcagcaataagggcccc

SEQ ID NO: 5010382 - DNA, 25 bp, Homo sapien
actactggcagcaataagggcccca

SEQ ID NO: 5010383 - DNA, 25 bp, Homo sapien
gctgtaacagatggtgtgtttgtca

SEQ ID NO: 5010384 - DNA, 25 bp, Homo sapien
ggaataacccgaagctgtaacagat

SEQ ID NO: 5010385 - DNA, 25 bp, Homo sapien
agctgtaacagatggtgtgtttgtc

SEQ ID NO: 5010386 - DNA, 25 bp, Homo sapien
tttggaataacccgaagctgtaaca

SEQ ID NO: 5010387 - DNA, 25 bp, Homo sapien
ttttgtagtgtcattgcaggcatat

SEQ ID NO: 5010388 - DNA, 25 bp, Homo sapien
tttgtagtgtcattgcaggcatatt

SEQ ID NO: 5010389 - DNA, 25 bp, Homo sapien
gttgaggacaaggcagcagctgtcc

SEQ ID NO: 5010390 - DNA, 25 bp, Homo sapien
gctcttcttcaaagctacgcaggag

SEQ ID NO: 5010391 - DNA, 25 bp, Homo sapien
tcttcaaagctacgcaggagttgag

SEQ ID NO: 5010392 - DNA, 25 bp, Homo sapien
aaagctacgcaggagttgaggacaa

SEQ ID NO: 5010393 - DNA, 25 bp, Homo sapien
tcctctttccgcaatatcacctgat

SEQ ID NO: 5010394 - DNA, 25 bp, Homo sapien
tctttccgcaatatcacctgatgct

SEQ ID NO: 5010395 - DNA, 25 bp, Homo sapien
tccgcaatatcacctgatgctgtga

SEQ ID NO: 5010396 - DNA, 25 bp, Homo sapien
gcaatatcacctgatgctgtgatgg

SEQ ID NO: 5010397 - DNA, 25 bp, Homo sapien
tcttaacaatttgacagcgtgtcca

SEQ ID NO: 5010398 - DNA, 25 bp, Homo sapien
tttgacagcgtgtccagaacattgc

SEQ ID NO: 5010399 - DNA, 25 bp, Homo sapien
gtccagaacattgcgcctaaatgaa

SEQ ID NO: 5010400 - DNA, 25 bp, Homo sapien
gcgtgtccagaacattgcgcctaaa

SEQ ID NO: 5010401 - DNA, 25 bp, Homo sapien
ccacagagctgccatctcattctta

SEQ ID NO: 5010402 - DNA, 25 bp, Homo sapien
cacccacagagctgccatctcattc

SEQ ID NO: 5010403 - DNA, 25 bp, Homo sapien
acccacagagctgccatctcattct

SEQ ID NO: 5010404 - DNA, 25 bp, Homo sapien
cacagagctgccatctcattcttac

SEQ ID NO: 5010405 - DNA, 25 bp, Homo sapien
attcttgcactttcaacaggatttc

SEQ ID NO: 5010406 - DNA, 25 bp, Homo sapien
ttgattcttgcactttcaacaggat

SEQ ID NO: 5010407 - DNA, 25 bp, Homo sapien
cttgcactttcaacaggatttcttc

SEQ ID NO: 5010408 - DNA, 25 bp, Homo sapien
gcactttcaacaggatttcttcttc

SEQ ID NO: 5010409 - DNA, 25 bp, Homo sapien
tacaaaccatctgtgctaagagcta

SEQ ID NO: 5010410 - DNA, 25 bp, Homo sapien
acaaaccatctgtgctaagagctat

SEQ ID NO: 5010411 - DNA, 25 bp, Homo sapien
ctacaaaccatctgtgctaagagct

SEQ ID NO: 5010412 - DNA, 25 bp, Homo sapien
caagttgttatcatggtatcagtca

SEQ ID NO: 5010413 - DNA, 25 bp, Homo sapien
catacaagttgttatcatggtatca

SEQ ID NO: 5010414 - DNA, 25 bp, Homo sapien
acaagttgttatcatggtatcagtc

SEQ ID NO: 5010415 - DNA, 25 bp, Homo sapien
caaccatacaagttgttatcatggt

SEQ ID NO: 5010416 - DNA, 25 bp, Homo sapien
gctgttctttttcctccgcgtaaga

SEQ ID NO: 5010417 - DNA, 25 bp, Homo sapien
cactggggctgttctttttcctccg

SEQ ID NO: 5010418 - DNA, 25 bp, Homo sapien
ctggggctgttctttttcctccgcg

SEQ ID NO: 5010419 - DNA, 25 bp, Homo sapien
tcactggggctgttctttttcctcc

SEQ ID NO: 5010420 - DNA, 25 bp, Homo sapien
taagtcagttagtaatcactgctca

SEQ ID NO: 5010421 - DNA, 25 bp, Homo sapien
taattcctattgtgttttaagtcag

SEQ ID NO: 5010422 - DNA, 25 bp, Homo sapien
gaattagtgtccctttatatgttgg

SEQ ID NO: 5010423 - DNA, 25 bp, Homo sapien
ttgataaccttggaattcttgttca

SEQ ID NO: 5010424 - DNA, 25 bp, Homo sapien
taatgcactggagtaacaaacaggt

SEQ ID NO: 5010425 - DNA, 25 bp, Homo sapien
aactgtaaagtataatgcactggag

SEQ ID NO: 5010426 - DNA, 25 bp, Homo sapien
ggagtaacaaacaggtgcgtggtac

SEQ ID NO: 5010427 - DNA, 25 bp, Homo sapien
gcgtggtactgttcttgccttctct

SEQ ID NO: 5010428 - DNA, 25 bp, Homo sapien
gaaggcgctccctgctaaggatcta

SEQ ID NO: 5010429 - DNA, 25 bp, Homo sapien
tgccttaaacggagatagtgcccct

SEQ ID NO: 5010430 - DNA, 25 bp, Homo sapien
gatctaaactcagggtaaggcagcc

SEQ ID NO: 5010431 - DNA, 25 bp, Homo sapien
aaatgatttgatcctcctgaaggcg

SEQ ID NO: 5010432 - DNA, 25 bp, Homo sapien
gacatctaacatagttcaaatggga

SEQ ID NO: 5010433 - DNA, 25 bp, Homo sapien
tcttcttgtggagtttgtgtgcgga

SEQ ID NO: 5010434 - DNA, 25 bp, Homo sapien
tccagcacccgtgaggggcttcctg

SEQ ID NO: 5010435 - DNA, 25 bp, Homo sapien
taagcagcatcaagttctgtcctgg

SEQ ID NO: 5010436 - DNA, 25 bp, Homo sapien
gtggcctttatcacagcaaagaact

SEQ ID NO: 5010437 - DNA, 25 bp, Homo sapien
cttgtggcctttatcacagcaaaga

SEQ ID NO: 5010438 - DNA, 25 bp, Homo sapien
tgtggcctttatcacagcaaagaac

SEQ ID NO: 5010439 - DNA, 25 bp, Homo sapien
ttgtggcctttatcacagcaaagaa

SEQ ID NO: 5010440 - DNA, 25 bp, Homo sapien
tgctgtgtagccatcagtgtgcgtg

SEQ ID NO: 5010441 - DNA, 25 bp, Homo sapien
tcaattgtattctccaataggagat

SEQ ID NO: 5010442 - DNA, 25 bp, Homo sapien
agccatcagtgtgcgtgcctcataa

SEQ ID NO: 5010443 - DNA, 25 bp, Homo sapien
cctcataatgggaattaacacctgc

SEQ ID NO: 5010444 - DNA, 25 bp, Homo sapien
cactttgaagttggcatttgtgcac

SEQ ID NO: 5010445 - DNA, 25 bp, Homo sapien
ccactaagaagcctactttctgtgc

SEQ ID NO: 5010446 - DNA, 25 bp, Homo sapien
taagaagcctactttctgtgctggc

SEQ ID NO: 5010447 - DNA, 25 bp, Homo sapien
ggcttttgtacacagagcactttga

SEQ ID NO: 5010448 - DNA, 25 bp, Homo sapien
tgtcacgtgtaggacctggaatcac

SEQ ID NO: 5010449 - DNA, 25 bp, Homo sapien
cttctgtccagcgtgtgtgtggcac

SEQ ID NO: 5010450 - DNA, 25 bp, Homo sapien
gccaccttgcaggtaatgtcacgtg

SEQ ID NO: 5010451 - DNA, 25 bp, Homo sapien
tggtggcatccaaggatatgccctc

SEQ ID NO: 5010452 - DNA, 25 bp, Homo sapien
cctgggttgcctggagcatgtgtct

SEQ ID NO: 5010453 - DNA, 25 bp, Homo sapien
attgagcctgggttgcctggagcat

SEQ ID NO: 5010454 - DNA, 25 bp, Homo sapien
ctgggttattgagcctgggttgcct

SEQ ID NO: 5010455 - DNA, 25 bp, Homo sapien
gttattgagcctgggttgcctggag

SEQ ID NO: 5010456 - DNA, 25 bp, Homo sapien
catttactcattagccatctatatg

SEQ ID NO: 5010457 - DNA, 25 bp, Homo sapien
tatcatgtgatacagcattacaaca

SEQ ID NO: 5010458 - DNA, 25 bp, Homo sapien
tagttgtgtcactaattacatattc

SEQ ID NO: 5010459 - DNA, 25 bp, Homo sapien
tatatcagatatatagctgttccat

SEQ ID NO: 5010460 - DNA, 25 bp, Homo sapien
attgagactgattttaaagttacag

SEQ ID NO: 5010461 - DNA, 25 bp, Homo sapien
tttaaagttacagtaaatgtcattc

SEQ ID NO: 5010462 - DNA, 25 bp, Homo sapien
ttaaagttacagtaaatgtcattct

SEQ ID NO: 5010463 - DNA, 25 bp, Homo sapien
atgaaaaaattgagactgattttaa

SEQ ID NO: 5010464 - DNA, 25 bp, Homo sapien
tagaagactgtgcagatccaggact

SEQ ID NO: 5010465 - DNA, 25 bp, Homo sapien
tgcatgaggtttcgggatatggccc

SEQ ID NO: 5010466 - DNA, 25 bp, Homo sapien
ttacaaaagcgcagacagtggcgat

SEQ ID NO: 5010467 - DNA, 25 bp, Homo sapien
cagtggcgattctactatccttaag

SEQ ID NO: 5010468 - DNA, 25 bp, Homo sapien
aatcagtagtttgtctataaagtcc

SEQ ID NO: 5010469 - DNA, 25 bp, Homo sapien
aagtccttcgccaagtgggaaatgc

SEQ ID NO: 5010470 - DNA, 25 bp, Homo sapien
ggcctggccagctgacatgcgatga

SEQ ID NO: 5010471 - DNA, 25 bp, Homo sapien
catgcgatgaccagcctccaaaatc

SEQ ID NO: 5010472 - DNA, 25 bp, Homo sapien
gctaaacacccaagcgtcatgctga

SEQ ID NO: 5010473 - DNA, 25 bp, Homo sapien
gatttaaggcagaaaaatctctcgc

SEQ ID NO: 5010474 - DNA, 25 bp, Homo sapien
cacaaaaagggcttggatcatcaag

SEQ ID NO: 5010475 - DNA, 25 bp, Homo sapien
catttcgctgagaaaacacttcatc

SEQ ID NO: 5010476 - DNA, 25 bp, Homo sapien
tcatcatcaaaaggcaggaatccgc

SEQ ID NO: 5010477 - DNA, 25 bp, Homo sapien
tatgtgatcacaccaagagcccaca

SEQ ID NO: 5010478 - DNA, 25 bp, Homo sapien
aaattttcgactcttcacctggatg

SEQ ID NO: 5010479 - DNA, 25 bp, Homo sapien
catgtccactgcactggtataaggc

SEQ ID NO: 5010480 - DNA, 25 bp, Homo sapien
caaccatctggaggatcctgacggc

SEQ ID NO: 5010481 - DNA, 25 bp, Homo sapien
gacggcatcccgctctgtaaaggat

SEQ ID NO: 5010482 - DNA, 25 bp, Homo sapien
caatgagtcgatcaaagagctcccc

SEQ ID NO: 5010483 - DNA, 25 bp, Homo sapien
gacaatgtaacgatggctaacccgc

SEQ ID NO: 5010484 - DNA, 25 bp, Homo sapien
gcctccgacgccggcttggttttga

SEQ ID NO: 5010485 - DNA, 25 bp, Homo sapien
tggttttgaccttcgtgcttggccc

SEQ ID NO: 5010486 - DNA, 25 bp, Homo sapien
gtcgaacttggctcggaagcgagcc

SEQ ID NO: 5010487 - DNA, 25 bp, Homo sapien
ggaagcgagccacctgtatcctctg

SEQ ID NO: 5010488 - DNA, 25 bp, Homo sapien
tcattgcaggtcacaatacagaggt

SEQ ID NO: 5010489 - DNA, 25 bp, Homo sapien
ggaagcctgcccaatgtgacctaca

SEQ ID NO: 5010490 - DNA, 25 bp, Homo sapien
gagggactcacggtaagattcttta

SEQ ID NO: 5010491 - DNA, 25 bp, Homo sapien
tccgccaggcaggtaaatttggaag

SEQ ID NO: 5010492 - DNA, 25 bp, Homo sapien
gttctgaagactaggtccaagccca

SEQ ID NO: 5010493 - DNA, 25 bp, Homo sapien
cagctctcctagctgaaaaactggg

SEQ ID NO: 5010494 - DNA, 25 bp, Homo sapien
catctgtggttccaattgtgcaaca

SEQ ID NO: 5010495 - DNA, 25 bp, Homo sapien
tggcactcaggcgtcaatatatttg

SEQ ID NO: 5010496 - DNA, 25 bp, Homo sapien
caagtgtacacccccacacaaggct

SEQ ID NO: 5010497 - DNA, 25 bp, Homo sapien
acaagtgtacacccccacacaaggc

SEQ ID NO: 5010498 - DNA, 25 bp, Homo sapien
gcaagcagtgttaaatttgttaata

SEQ ID NO: 5010499 - DNA, 25 bp, Homo sapien
aatcctatcttctagatgcaagcag

SEQ ID NO: 5010500 - DNA, 25 bp, Homo sapien
gtaatcagcttgagaaagcaacaca

SEQ ID NO: 5010501 - DNA, 25 bp, Homo sapien
gatgtaatcagcttgagaaagcaac

SEQ ID NO: 5010502 - DNA, 25 bp, Homo sapien
aaggatctgcaccaagcacagcatc

SEQ ID NO: 5010503 - DNA, 25 bp, Homo sapien
tgcaccaagcacagcatccactgag

SEQ ID NO: 5010504 - DNA, 25 bp, Homo sapien
caaacaaggatctgcaccaagcaca

SEQ ID NO: 5010505 - DNA, 25 bp, Homo sapien
ccctgcaacaaacaaggatctgcac

SEQ ID NO: 5010506 - DNA, 25 bp, Homo sapien
aagttttttaccatgcgaagcagag

SEQ ID NO: 5010507 - DNA, 25 bp, Homo sapien
tataggatccccacaaattcagtag

SEQ ID NO: 5010508 - DNA, 25 bp, Homo sapien
tatcaagctacgcaaaccaggactt

SEQ ID NO: 5010509 - DNA, 25 bp, Homo sapien
tcttagtgactctgaagccaggtac

SEQ ID NO: 5010510 - DNA, 25 bp, Homo sapien
tagtaattgtaaatagcaagtcatc

SEQ ID NO: 5010511 - DNA, 25 bp, Homo sapien
gtaattgtaaatagcaagtcatctt

SEQ ID NO: 5010512 - DNA, 25 bp, Homo sapien
agtaattgtaaatagcaagtcatct

SEQ ID NO: 5010513 - DNA, 25 bp, Homo sapien
cagaagcacgtagacataatgcaca

SEQ ID NO: 5010514 - DNA, 25 bp, Homo sapien
tccgctgagaactaacagaagcacg

SEQ ID NO: 5010515 - DNA, 25 bp, Homo sapien
cccacgtcgatgactattgttgcta

SEQ ID NO: 5010516 - DNA, 25 bp, Homo sapien
tggtatcacaaccaagcccacgtcg

SEQ ID NO: 5010517 - DNA, 25 bp, Homo sapien
taggtagcaatcgtcacaccgtgat

SEQ ID NO: 5010518 - DNA, 25 bp, Homo sapien
ggtcagtgatctaacaaaatgtgga

SEQ ID NO: 5010519 - DNA, 25 bp, Homo sapien
gatgcagcatgtgaaactatacaga

SEQ ID NO: 5010520 - DNA, 25 bp, Homo sapien
tatacagaaagcagacgttaggcag

SEQ ID NO: 5010521 - DNA, 25 bp, Homo sapien
tgtaatttgccaacaaagtaagctg

SEQ ID NO: 5010522 - DNA, 25 bp, Homo sapien
catccagactgaaagtcagtttaaa

SEQ ID NO: 5010523 - DNA, 25 bp, Homo sapien
tagatgttatcacttgtgacctcac

SEQ ID NO: 5010524 - DNA, 25 bp, Homo sapien
acaattaagtggttgtctcctctcc

SEQ ID NO: 5010525 - DNA, 25 bp, Homo sapien
tcttctgtttcccatctgctaaatc

SEQ ID NO: 5010526 - DNA, 25 bp, Homo sapien
ttcccatctgctaaatctggccctg

SEQ ID NO: 5010527 - DNA, 25 bp, Homo sapien
tcccatctgctaaatctggccctga

SEQ ID NO: 5010528 - DNA, 25 bp, Homo sapien
tgtttcccatctgctaaatctggcc

SEQ ID NO: 5010529 - DNA, 25 bp, Homo sapien
agaagatctacttatagatgctctg

SEQ ID NO: 5010530 - DNA, 25 bp, Homo sapien
tatagatgctctgattataatctta

SEQ ID NO: 5010531 - DNA, 25 bp, Homo sapien
taatcttaaatacagttatactcaa

SEQ ID NO: 5010532 - DNA, 25 bp, Homo sapien
gttatactcaatatctgttatttca

SEQ ID NO: 5010533 - DNA, 25 bp, Homo sapien
ggaaaagctcgatcagcccatgtga

SEQ ID NO: 5010534 - DNA, 25 bp, Homo sapien
taatatagaccataatgaacccgtg

SEQ ID NO: 5010535 - DNA, 25 bp, Homo sapien
taagataattgcaagggatcccaaa

SEQ ID NO: 5010536 - DNA, 25 bp, Homo sapien
tgtattaaatagcaaaggcagctgg

SEQ ID NO: 5010537 - DNA, 25 bp, Homo sapien
tactggcttataacacaaggtagga

SEQ ID NO: 5010538 - DNA, 25 bp, Homo sapien
taggacagatcactcagtcagagag

SEQ ID NO: 5010539 - DNA, 25 bp, Homo sapien
aaggtaggacttcccaaatgcgaca

SEQ ID NO: 5010540 - DNA, 25 bp, Homo sapien
tccttggagcctatgttcttgtgcc

SEQ ID NO: 5010541 - DNA, 25 bp, Homo sapien
tatttctttccagtaaggcaaagga

SEQ ID NO: 5010542 - DNA, 25 bp, Homo sapien
aatttcacatcttcagtcacatttc

SEQ ID NO: 5010543 - DNA, 25 bp, Homo sapien
tgtcagaacagtcagataggaaatg

SEQ ID NO: 5010544 - DNA, 25 bp, Homo sapien
actacagtcaccagaggtaacgcag

SEQ ID NO: 5010545 - DNA, 25 bp, Homo sapien
gtaacgcagtaaatatgcatttggg

SEQ ID NO: 5010546 - DNA, 25 bp, Homo sapien
gagaatttccctgggtgtcagaaca

SEQ ID NO: 5010547 - DNA, 25 bp, Homo sapien
ccagtgctgtcattgcagacaaggg

SEQ ID NO: 5010548 - DNA, 25 bp, Homo sapien
agaatttcctgtttcgggtgtccag

SEQ ID NO: 5010549 - DNA, 25 bp, Homo sapien
cccagtgctgtcattgcagacaagg

SEQ ID NO: 5010550 - DNA, 25 bp, Homo sapien
gctggagaatttcctgtttcgggtg

SEQ ID NO: 5010551 - DNA, 25 bp, Homo sapien
gatttttttcctcaatggattgtta

SEQ ID NO: 5010552 - DNA, 25 bp, Homo sapien
ttagatttttttcctcaatggattg

SEQ ID NO: 5010553 - DNA, 25 bp, Homo sapien
tagatttttttcctcaatggattgt

SEQ ID NO: 5010554 - DNA, 25 bp, Homo sapien
agatttttttcctcaatggattgtt

SEQ ID NO: 5010555 - DNA, 25 bp, Homo sapien
gctataagtgtaaagcatgccccgc

SEQ ID NO: 5010556 - DNA, 25 bp, Homo sapien
ctgctataagtgtaaagcatgcccc

SEQ ID NO: 5010557 - DNA, 25 bp, Homo sapien
tgctataagtgtaaagcatgccccg

SEQ ID NO: 5010558 - DNA, 25 bp, Homo sapien
gcactgagctagctatctgaagcca

SEQ ID NO: 5010559 - DNA, 25 bp, Homo sapien
ccacgagaagtcagaattcctacaa

SEQ ID NO: 5010560 - DNA, 25 bp, Homo sapien
tatcaggaacactactccagttagg

SEQ ID NO: 5010561 - DNA, 25 bp, Homo sapien
gaagctaagtatggacactttcagc

SEQ ID NO: 5010562 - DNA, 25 bp, Homo sapien
tcaaaaaagcaaccgtggagccaaa

SEQ ID NO: 5010563 - DNA, 25 bp, Homo sapien
tagtattgagctccactgcatggga

SEQ ID NO: 5010564 - DNA, 25 bp, Homo sapien
tcatgcaagagtatgccaacacacc

SEQ ID NO: 5010565 - DNA, 25 bp, Homo sapien
gggagactcccacgttcatgcaaga

SEQ ID NO: 5010566 - DNA, 25 bp, Homo sapien
ctgcaccaatgatattaataagcaa

SEQ ID NO: 5010567 - DNA, 25 bp, Homo sapien
tgcaccaatgatattaataagcaaa

SEQ ID NO: 5010568 - DNA, 25 bp, Homo sapien
gcaccaatgatattaataagcaaaa

SEQ ID NO: 5010569 - DNA, 25 bp, Homo sapien
caatatccaaacactctcttgagct

SEQ ID NO: 5010570 - DNA, 25 bp, Homo sapien
gtagctgcaaaggatgttgatggat

SEQ ID NO: 5010571 - DNA, 25 bp, Homo sapien
tttcctgcctatgtagctgcaaagg

SEQ ID NO: 5010572 - DNA, 25 bp, Homo sapien
gatgttgatggattcctgaaataaa

SEQ ID NO: 5010573 - DNA, 25 bp, Homo sapien
agattttcctgcctatgtagctgca

SEQ ID NO: 5010574 - DNA, 25 bp, Homo sapien
taattagatgcacattctttcttcg

SEQ ID NO: 5010575 - DNA, 25 bp, Homo sapien
tgtttggttgtcttctacaactgaa

SEQ ID NO: 5010576 - DNA, 25 bp, Homo sapien
ttctttcttcgttgtgaagagcttt

SEQ ID NO: 5010577 - DNA, 25 bp, Homo sapien
agtctcagattttgcaccccataat

SEQ ID NO: 5010578 - DNA, 25 bp, Homo sapien
gtcaaaatgctctcaaatgctccaa

SEQ ID NO: 5010579 - DNA, 25 bp, Homo sapien
gaagggaatagtcaaaatgctctca

SEQ ID NO: 5010580 - DNA, 25 bp, Homo sapien
ggaatagtcaaaatgctctcaaatg

SEQ ID NO: 5010581 - DNA, 25 bp, Homo sapien
gatttgaagggaatagtcaaaatgc

SEQ ID NO: 5010582 - DNA, 25 bp, Homo sapien
tgtgagttggatggaacatgctgct

SEQ ID NO: 5010583 - DNA, 25 bp, Homo sapien
gctgacatgccccacaatgatgaca

SEQ ID NO: 5010584 - DNA, 25 bp, Homo sapien
cagcacaacgattttggccaacatg

SEQ ID NO: 5010585 - DNA, 25 bp, Homo sapien
tgatgacatccatgataaacctggt

SEQ ID NO: 5010586 - DNA, 25 bp, Homo sapien
ttccaggagagggttggcaagctct

SEQ ID NO: 5010587 - DNA, 25 bp, Homo sapien
ctctttgtttccatgccagtctgtt

SEQ ID NO: 5010588 - DNA, 25 bp, Homo sapien
tccgtatctcattctgagtgtctga

SEQ ID NO: 5010589 - DNA, 25 bp, Homo sapien
tctgatactgccagactgtcatctt

SEQ ID NO: 5010590 - DNA, 25 bp, Homo sapien
taaacatgatctcagtgtacaggac

SEQ ID NO: 5010591 - DNA, 25 bp, Homo sapien
tcaaccatggttgtaagtgatgaca

SEQ ID NO: 5010592 - DNA, 25 bp, Homo sapien
tgggagcattgttgcggtagaaaaa

SEQ ID NO: 5010593 - DNA, 25 bp, Homo sapien
taagctccatcgaggtcaaccatgg

SEQ ID NO: 5010594 - DNA, 25 bp, Homo sapien
cttgggggctgactgccatagcaag

SEQ ID NO: 5010595 - DNA, 25 bp, Homo sapien
aatcaatggggtccatcttgggggc

SEQ ID NO: 5010596 - DNA, 25 bp, Homo sapien
caggagtccagaatcaatggggtcc

SEQ ID NO: 5010597 - DNA, 25 bp, Homo sapien
gggctgactgccatagcaagccata

SEQ ID NO: 5010598 - DNA, 25 bp, Homo sapien
tctgaaacatgctgagctgaaacca

SEQ ID NO: 5010599 - DNA, 25 bp, Homo sapien
gggatcactactccactagaaaaga

SEQ ID NO: 5010600 - DNA, 25 bp, Homo sapien
tagcaaatccatacaagggatcact

SEQ ID NO: 5010601 - DNA, 25 bp, Homo sapien
tcttgaaaaagtgggccgagatgca

SEQ ID NO: 5010602 - DNA, 25 bp, Homo sapien
gaagcccttaagactgatataccta

SEQ ID NO: 5010603 - DNA, 25 bp, Homo sapien
ggaagcccttaagactgatatacct

SEQ ID NO: 5010604 - DNA, 25 bp, Homo sapien
gggaagcccttaagactgatatacc

SEQ ID NO: 5010605 - DNA, 25 bp, Homo sapien
aagcccttaagactgatatacctac

SEQ ID NO: 5010606 - DNA, 25 bp, Homo sapien
tacttataggaaggtaaacaggaga

SEQ ID NO: 5010607 - DNA, 25 bp, Homo sapien
aggggaacatcagaagaggagagga

SEQ ID NO: 5010608 - DNA, 25 bp, Homo sapien
cttataggaaggtaaacaggagagg

SEQ ID NO: 5010609 - DNA, 25 bp, Homo sapien
ggggaacatcagaagaggagaggac

SEQ ID NO: 5010610 - DNA, 25 bp, Homo sapien
gctatctgagttttgggctttgacc

SEQ ID NO: 5010611 - DNA, 25 bp, Homo sapien
gcatgagaatgaggagaatactaaa

SEQ ID NO: 5010612 - DNA, 25 bp, Homo sapien
tcaaaggaattcttaaggaagtgca

SEQ ID NO: 5010613 - DNA, 25 bp, Homo sapien
ggcactgctctctatgctatctgag

SEQ ID NO: 5010614 - DNA, 25 bp, Homo sapien
ccacttctaagatgtctcactcacg

SEQ ID NO: 5010615 - DNA, 25 bp, Homo sapien
tttctatgggttaagcatttgagag

SEQ ID NO: 5010616 - DNA, 25 bp, Homo sapien
gaggctgcagtcaagacgcaatcat

SEQ ID NO: 5010617 - DNA, 25 bp, Homo sapien
tctcactcacgtggtgatggcagca

SEQ ID NO: 5010618 - DNA, 25 bp, Homo sapien
cagcccgggagtcgggagttttctg

SEQ ID NO: 5010619 - DNA, 25 bp, Homo sapien
ttgcccggagttcgccctggcaaag

SEQ ID NO: 5010620 - DNA, 25 bp, Homo sapien
actctgcagccgcagttcttaggct

SEQ ID NO: 5010621 - DNA, 25 bp, Homo sapien
aaggcctgtgccagtgatcctggag

SEQ ID NO: 5010622 - DNA, 25 bp, Homo sapien
gcggagcgaagtgtttccgtgactc

SEQ ID NO: 5010623 - DNA, 25 bp, Homo sapien
aaaacacaaatacatggactcattg

SEQ ID NO: 5010624 - DNA, 25 bp, Homo sapien
ctgaaaacacaaatacatggactca

SEQ ID NO: 5010625 - DNA, 25 bp, Homo sapien
tgaaaacacaaatacatggactcat

SEQ ID NO: 5010626 - DNA, 25 bp, Homo sapien
gaaaacacaaatacatggactcatt

SEQ ID NO: 5010627 - DNA, 25 bp, Homo sapien
cttgttcacagtcctttctttgctc

SEQ ID NO: 5010628 - DNA, 25 bp, Homo sapien
tttaaatgatcagtcttgttcacag

SEQ ID NO: 5010629 - DNA, 25 bp, Homo sapien
ctttacgacctttaaatgatcagtc

SEQ ID NO: 5010630 - DNA, 25 bp, Homo sapien
ctctgccgatttggagttttctctg

SEQ ID NO: 5010631 - DNA, 25 bp, Homo sapien
cagacattgggctagaggctggaat

SEQ ID NO: 5010632 - DNA, 25 bp, Homo sapien
caaaactggagagatgacacctgag

SEQ ID NO: 5010633 - DNA, 25 bp, Homo sapien
gacacctgagcggacagatgattag

SEQ ID NO: 5010634 - DNA, 25 bp, Homo sapien
gactttaacagtgtaacgggagaga

SEQ ID NO: 5010635 - DNA, 25 bp, Homo sapien
ggagtcctccacaactcatctcaac

SEQ ID NO: 5010636 - DNA, 25 bp, Homo sapien
tccacaactcatctcaactgttacc

SEQ ID NO: 5010637 - DNA, 25 bp, Homo sapien
cctccacaactcatctcaactgtta

SEQ ID NO: 5010638 - DNA, 25 bp, Homo sapien
gtcctccacaactcatctcaactgt

SEQ ID NO: 5010639 - DNA, 25 bp, Homo sapien
tcaggatccacagtaccccacattt

SEQ ID NO: 5010640 - DNA, 25 bp, Homo sapien
tggacaaactcttgaggctcaggat

SEQ ID NO: 5010641 - DNA, 25 bp, Homo sapien
taagattcatagagtactccttgga

SEQ ID NO: 5010642 - DNA, 25 bp, Homo sapien
tgttggctgtttggaccttagcagt

SEQ ID NO: 5010643 - DNA, 25 bp, Homo sapien
agttgttcctcttcagtggctacag

SEQ ID NO: 5010644 - DNA, 25 bp, Homo sapien
gaatggcgtttttctcgaggagtac

SEQ ID NO: 5010645 - DNA, 25 bp, Homo sapien
tagtgcttttacagaacagtgttca

SEQ ID NO: 5010646 - DNA, 25 bp, Homo sapien
gtggctacagtacttcgatgaaaaa

SEQ ID NO: 5010647 - DNA, 25 bp, Homo sapien
ggaaggattcattgagcagcataga

SEQ ID NO: 5010648 - DNA, 25 bp, Homo sapien
tcctgagggtgtttagttgcatggc

SEQ ID NO: 5010649 - DNA, 25 bp, Homo sapien
ggatagaaccataacttacacatga

SEQ ID NO: 5010650 - DNA, 25 bp, Homo sapien
tcagaaaggtattaagggcttaggc

SEQ ID NO: 5010651 - DNA, 25 bp, Homo sapien
aggtaatgtaaactctgccactttt

SEQ ID NO: 5010652 - DNA, 25 bp, Homo sapien
tcactgctaagtacatacagaaaaa

SEQ ID NO: 5010653 - DNA, 25 bp, Homo sapien
aactgacttcttaaaatctgttgcc

SEQ ID NO: 5010654 - DNA, 25 bp, Homo sapien
ttttaatagccatggaactgacttc

SEQ ID NO: 5010655 - DNA, 25 bp, Homo sapien
ccaaatccttattatgaacactctg

SEQ ID NO: 5010656 - DNA, 25 bp, Homo sapien
ttccaaatccttattatgaacactc

SEQ ID NO: 5010657 - DNA, 25 bp, Homo sapien
ctgcttggttgaatagactcctttt

SEQ ID NO: 5010658 - DNA, 25 bp, Homo sapien
aagacgaaagaaaggcagagatctg

SEQ ID NO: 5010659 - DNA, 25 bp, Homo sapien
tgcactaggtgaggctacacagaac

SEQ ID NO: 5010660 - DNA, 25 bp, Homo sapien
ccttcaaaaaggactgcgtatacca

SEQ ID NO: 5010661 - DNA, 25 bp, Homo sapien
tgtgatagagggaaactggccttca

SEQ ID NO: 5010662 - DNA, 25 bp, Homo sapien
ctggtctccctcaagtaagaaatta

SEQ ID NO: 5010663 - DNA, 25 bp, Homo sapien
tgtgcccaaaacacagttcatgagg

SEQ ID NO: 5010664 - DNA, 25 bp, Homo sapien
ccaccagtaaatggcccagggaata

SEQ ID NO: 5010665 - DNA, 25 bp, Homo sapien
tagatatccaagacctacaggcaga

SEQ ID NO: 5010666 - DNA, 25 bp, Homo sapien
tgttctgtgctggactaaccgaaag

SEQ ID NO: 5010667 - DNA, 25 bp, Homo sapien
ttccagggaaagcagcttaccagtg

SEQ ID NO: 5010668 - DNA, 25 bp, Homo sapien
aagcagcttaccagtgttttttttg

SEQ ID NO: 5010669 - DNA, 25 bp, Homo sapien
ccagggaaagcagcttaccagtgtt

SEQ ID NO: 5010670 - DNA, 25 bp, Homo sapien
agggaaagcagcttaccagtgtttt

SEQ ID NO: 5010671 - DNA, 25 bp, Homo sapien
tccagatacacgacagaaagccaca

SEQ ID NO: 5010672 - DNA, 25 bp, Homo sapien
ccgtcttctgagaggaggttcaaaa

SEQ ID NO: 5010673 - DNA, 25 bp, Homo sapien
cagctttgggcatacctgagtggaa

SEQ ID NO: 5010674 - DNA, 25 bp, Homo sapien
tgcatctggactgggaaatctccag

SEQ ID NO: 5010675 - DNA, 25 bp, Homo sapien
tgtaataacacttagaacacagagt

SEQ ID NO: 5010676 - DNA, 25 bp, Homo sapien
acatctataatggagagatatagcc

SEQ ID NO: 5010677 - DNA, 25 bp, Homo sapien
aacacttagaacacagagtactacc

SEQ ID NO: 5010678 - DNA, 25 bp, Homo sapien
gatatagcctatgtatgtaataaca

SEQ ID NO: 5010679 - DNA, 25 bp, Homo sapien
atccacacaagaacaatcaggtggg

SEQ ID NO: 5010680 - DNA, 25 bp, Homo sapien
tgttctcagtaatgggtctcaccct

SEQ ID NO: 5010681 - DNA, 25 bp, Homo sapien
gggaaataagcatctcaatccagca

SEQ ID NO: 5010682 - DNA, 25 bp, Homo sapien
ggaaacgtcacggaccaatgtgaca

SEQ ID NO: 5010683 - DNA, 25 bp, Homo sapien
tcttgggaaggcaccatgtcttgca

SEQ ID NO: 5010684 - DNA, 25 bp, Homo sapien
aagagacttagtgcacagaatcaga

SEQ ID NO: 5010685 - DNA, 25 bp, Homo sapien
gaagaaacctaaccctcagagagta

SEQ ID NO: 5010686 - DNA, 25 bp, Homo sapien
gcatatggttgatatggtatgccca

SEQ ID NO: 5010687 - DNA, 25 bp, Homo sapien
gacctagtattgctggtaactcaac

SEQ ID NO: 5010688 - DNA, 25 bp, Homo sapien
caaacacatatcagatgtgaaggca

SEQ ID NO: 5010689 - DNA, 25 bp, Homo sapien
atattcttgaactaacccagaccct

SEQ ID NO: 5010690 - DNA, 25 bp, Homo sapien
cagatgtgaatgactggctaaaatc

SEQ ID NO: 5010691 - DNA, 25 bp, Homo sapien
ggtgaactattatgatgcttgcaat

SEQ ID NO: 5010692 - DNA, 25 bp, Homo sapien
gggtgaactattatgatgcttgcaa

SEQ ID NO: 5010693 - DNA, 25 bp, Homo sapien
catttggggtgaactattatgatgc

SEQ ID NO: 5010694 - DNA, 25 bp, Homo sapien
gaactattatgatgcttgcaatcag

SEQ ID NO: 5010695 - DNA, 25 bp, Homo sapien
ccagcagaatgccacatccctagaa

SEQ ID NO: 5010696 - DNA, 25 bp, Homo sapien
atccctagaaagacccacttcctgg

SEQ ID NO: 5010697 - DNA, 25 bp, Homo sapien
caacacagtttattcggtctcccta

SEQ ID NO: 5010698 - DNA, 25 bp, Homo sapien
aatgccacatccctagaaagaccca

SEQ ID NO: 5010699 - DNA, 25 bp, Homo sapien
ccttgttcctgtgcgagttatgtca

SEQ ID NO: 5010700 - DNA, 25 bp, Homo sapien
tatctaagtggattcaagatgctcc

SEQ ID NO: 5010701 - DNA, 25 bp, Homo sapien
gtgggaaactgaaagcctgccattg

SEQ ID NO: 5010702 - DNA, 25 bp, Homo sapien
ttgccgtttaacagctgatacaggt

SEQ ID NO: 5010703 - DNA, 25 bp, Homo sapien
tgtgaagaagcctagaatattttat

SEQ ID NO: 5010704 - DNA, 25 bp, Homo sapien
ctaccactcttatggcgattattta

SEQ ID NO: 5010705 - DNA, 25 bp, Homo sapien
ctcttatggcgattatttattttac

SEQ ID NO: 5010706 - DNA, 25 bp, Homo sapien
ttacacggttaaatggtcacaacat

SEQ ID NO: 5010707 - DNA, 25 bp, Homo sapien
tagctatttcataaatcttctctga

SEQ ID NO: 5010708 - DNA, 25 bp, Homo sapien
tgaaacttgtaagcaactgagcagc

SEQ ID NO: 5010709 - DNA, 25 bp, Homo sapien
cttgtaagcaactgagcagcttctg

SEQ ID NO: 5010710 - DNA, 25 bp, Homo sapien
ctcactgaaacttgtaagcaactga

SEQ ID NO: 5010711 - DNA, 25 bp, Homo sapien
cactgaaacttgtaagcaactgagc

SEQ ID NO: 5010712 - DNA, 25 bp, Homo sapien
taaacaggagagctaagagactaac

SEQ ID NO: 5010713 - DNA, 25 bp, Homo sapien
gcaacccgtaacatccacctggtga

SEQ ID NO: 5010714 - DNA, 25 bp, Homo sapien
tctgcattgtagcaggcaacccgta

SEQ ID NO: 5010715 - DNA, 25 bp, Homo sapien
gaaatgttaactcgatctgccatgt

SEQ ID NO: 5010716 - DNA, 25 bp, Homo sapien
tttacacttgaaatgaacacacttg

SEQ ID NO: 5010717 - DNA, 25 bp, Homo sapien
cacttgaaatgaacacacttgtttt

SEQ ID NO: 5010718 - DNA, 25 bp, Homo sapien
atgtcaatcaatttacacttgaaat

SEQ ID NO: 5010719 - DNA, 25 bp, Homo sapien
taaatgtcaatcaatttacacttga

SEQ ID NO: 5010720 - DNA, 25 bp, Homo sapien
gatagtccttggctttcattagcca

SEQ ID NO: 5010721 - DNA, 25 bp, Homo sapien
tgtgctggatagtccttggctttca

SEQ ID NO: 5010722 - DNA, 25 bp, Homo sapien
gctggatagtccttggctttcatta

SEQ ID NO: 5010723 - DNA, 25 bp, Homo sapien
ctgtgtgtgctggatagtccttggc

SEQ ID NO: 5010724 - DNA, 25 bp, Homo sapien
aagaagtaagtttttgctgtagaag

SEQ ID NO: 5010725 - DNA, 25 bp, Homo sapien
agtaagtttttgctgtagaagtttg

SEQ ID NO: 5010726 - DNA, 25 bp, Homo sapien
agtttttgctgtagaagtttggatc

SEQ ID NO: 5010727 - DNA, 25 bp, Homo sapien
tttttgctgtagaagtttggatcca

SEQ ID NO: 5010728 - DNA, 25 bp, Homo sapien
gaagctgaagctcccgatagaatgt

SEQ ID NO: 5010729 - DNA, 25 bp, Homo sapien
gctaggcactgcattatacacattt

SEQ ID NO: 5010730 - DNA, 25 bp, Homo sapien
tagttccctatggtaccccacgtgc

SEQ ID NO: 5010731 - DNA, 25 bp, Homo sapien
gctatttgaggacagcaatactctt

SEQ ID NO: 5010732 - DNA, 25 bp, Homo sapien
ataaaagatactaagggcatcagag

SEQ ID NO: 5010733 - DNA, 25 bp, Homo sapien
catcttctcagaatgtacagtctta

SEQ ID NO: 5010734 - DNA, 25 bp, Homo sapien
caagagagggtatcagtgaaggtaa

SEQ ID NO: 5010735 - DNA, 25 bp, Homo sapien
caagaatgactgaagttaccaggga

SEQ ID NO: 5010736 - DNA, 25 bp, Homo sapien
tgttctgccctgtgaaagtagccta

SEQ ID NO: 5010737 - DNA, 25 bp, Homo sapien
ctgccctgtgaaagtagcctaaggc

SEQ ID NO: 5010738 - DNA, 25 bp, Homo sapien
cttgttctgccctgtgaaagtagcc

SEQ ID NO: 5010739 - DNA, 25 bp, Homo sapien
ttctgccctgtgaaagtagcctaag

SEQ ID NO: 5010740 - DNA, 25 bp, Homo sapien
ttgtctcaaagatctactgctatat

SEQ ID NO: 5010741 - DNA, 25 bp, Homo sapien
ctatattatatttaagtcaggaagt

SEQ ID NO: 5010742 - DNA, 25 bp, Homo sapien
gctatattatatttaagtcaggaag

SEQ ID NO: 5010743 - DNA, 25 bp, Homo sapien
gtctcaaagatctactgctatatta

SEQ ID NO: 5010744 - DNA, 25 bp, Homo sapien
tgtaatacagctaaaacatgctggg

SEQ ID NO: 5010745 - DNA, 25 bp, Homo sapien
gcaaaaggccttgaaaatatgagag

SEQ ID NO: 5010746 - DNA, 25 bp, Homo sapien
caagtacagctttttcgattgcctg

SEQ ID NO: 5010747 - DNA, 25 bp, Homo sapien
gaaggtagattttagccacgagcca

SEQ ID NO: 5010748 - DNA, 25 bp, Homo sapien
cgtactaacttaacaaaggacatca

SEQ ID NO: 5010749 - DNA, 25 bp, Homo sapien
gaaattgctcaagtccctcactgaa

SEQ ID NO: 5010750 - DNA, 25 bp, Homo sapien
actgaatcagagctccacatgtgtg

SEQ ID NO: 5010751 - DNA, 25 bp, Homo sapien
tgaacacatggtagaatggcgctgt

SEQ ID NO: 5010752 - DNA, 25 bp, Homo sapien
gtggaactaggaggagttgcaaaca

SEQ ID NO: 5010753 - DNA, 25 bp, Homo sapien
tctcataggtggaactaggaggagt

SEQ ID NO: 5010754 - DNA, 25 bp, Homo sapien
cttctcataggtggaactaggagga

SEQ ID NO: 5010755 - DNA, 25 bp, Homo sapien
taggaggagttgcaaacagcatttt

SEQ ID NO: 5010756 - DNA, 25 bp, Homo sapien
caagggctagttaatggatttagca

SEQ ID NO: 5010757 - DNA, 25 bp, Homo sapien
tctaaatgacctgaataacaatgtt

SEQ ID NO: 5010758 - DNA, 25 bp, Homo sapien
gatttagcactctaagctctgtcag

SEQ ID NO: 5010759 - DNA, 25 bp, Homo sapien
tgaaaatcagattatatggttcctc

SEQ ID NO: 5010760 - DNA, 25 bp, Homo sapien
cccataaggtgaattgaagtagcat

SEQ ID NO: 5010761 - DNA, 25 bp, Homo sapien
tgaagtagcatctttagggttcagt

SEQ ID NO: 5010762 - DNA, 25 bp, Homo sapien
caaatacccataaggtgaattgaag

SEQ ID NO: 5010763 - DNA, 25 bp, Homo sapien
ggtgaattgaagtagcatctttagg

SEQ ID NO: 5010764 - DNA, 25 bp, Homo sapien
tgttcaacttccccatctgtactta

SEQ ID NO: 5010765 - DNA, 25 bp, Homo sapien
ttttagaaagtcttcttgtatgcag

SEQ ID NO: 5010766 - DNA, 25 bp, Homo sapien
ttggcaaactgtagatgaatactga

SEQ ID NO: 5010767 - DNA, 25 bp, Homo sapien
tgtaaaatatgttgaatctccctaa

SEQ ID NO: 5010768 - DNA, 25 bp, Homo sapien
gattcttgctggccccaccaatggt

SEQ ID NO: 5010769 - DNA, 25 bp, Homo sapien
ctaagacccaatggatgtaggttcc

SEQ ID NO: 5010770 - DNA, 25 bp, Homo sapien
agaagacctaagacccaatggatgt

SEQ ID NO: 5010771 - DNA, 25 bp, Homo sapien
caatggatgtaggttccaaatttgg

SEQ ID NO: 5010772 - DNA, 25 bp, Homo sapien
tcctggagaagagatcttttcccac

SEQ ID NO: 5010773 - DNA, 25 bp, Homo sapien
cttcctggagaagagatcttttccc

SEQ ID NO: 5010774 - DNA, 25 bp, Homo sapien
agcttcctggagaagagatcttttc

SEQ ID NO: 5010775 - DNA, 25 bp, Homo sapien
ttagcttcctggagaagagatcttt

SEQ ID NO: 5010776 - DNA, 25 bp, Homo sapien
cagtgtgttagttggagcagtattt

SEQ ID NO: 5010777 - DNA, 25 bp, Homo sapien
cggccagacacgaagtggaaagatt

SEQ ID NO: 5010778 - DNA, 25 bp, Homo sapien
caggaaacagtgtgttagttggagc

SEQ ID NO: 5010779 - DNA, 25 bp, Homo sapien
tggctcggccagacacgaagtggaa

SEQ ID NO: 5010780 - DNA, 25 bp, Homo sapien
tatattattagaaagtgttattcgt

SEQ ID NO: 5010781 - DNA, 25 bp, Homo sapien
ctctggacctcgatcttgaaaggag

SEQ ID NO: 5010782 - DNA, 25 bp, Homo sapien
tctgtcacacataatcatagtatca

SEQ ID NO: 5010783 - DNA, 25 bp, Homo sapien
ctgctaaagctcacgcggcacgcag

SEQ ID NO: 5010784 - DNA, 25 bp, Homo sapien
atgagtgagtttttgtgacaactgc

SEQ ID NO: 5010785 - DNA, 25 bp, Homo sapien
tgagtgagtttttgtgacaactgcc

SEQ ID NO: 5010786 - DNA, 25 bp, Homo sapien
ggcttccacattgagcgcagtcgga

SEQ ID NO: 5010787 - DNA, 25 bp, Homo sapien
gagcgcagtcggaaaaagactttat

SEQ ID NO: 5010788 - DNA, 25 bp, Homo sapien
taacctgtgtgcaacaggaccccaa

SEQ ID NO: 5010789 - DNA, 25 bp, Homo sapien
aggtggcgccataacctgtgtgcaa

SEQ ID NO: 5010790 - DNA, 25 bp, Homo sapien
gcggactgtggcagccgcactcgct

SEQ ID NO: 5010791 - DNA, 25 bp, Homo sapien
agactgacctctgatacatctggct

SEQ ID NO: 5010792 - DNA, 25 bp, Homo sapien
gctgcccctcgatgagcagtggcat

SEQ ID NO: 5010793 - DNA, 25 bp, Homo sapien
actcgctgcccctcgatgagcagtg

SEQ ID NO: 5010794 - DNA, 25 bp, Homo sapien
gacacaccattagtttatgtgccac

SEQ ID NO: 5010795 - DNA, 25 bp, Homo sapien
tatttctacatcctgaggcacagag

SEQ ID NO: 5010796 - DNA, 25 bp, Homo sapien
tattactatccatacctgaacaaga

SEQ ID NO: 5010797 - DNA, 25 bp, Homo sapien
taaggttccagcaattacatcatgt

SEQ ID NO: 5010798 - DNA, 25 bp, Homo sapien
atgaatttgaataattcatcagtac

SEQ ID NO: 5010799 - DNA, 25 bp, Homo sapien
catgaatttgaataattcatcagta

SEQ ID NO: 5010800 - DNA, 25 bp, Homo sapien
tcatgaatttgaataattcatcagt

SEQ ID NO: 5010801 - DNA, 25 bp, Homo sapien
aaatgctccttgatgatatatgcat

SEQ ID NO: 5010802 - DNA, 25 bp, Homo sapien
caaaatgctccttgatgatatatgc

SEQ ID NO: 5010803 - DNA, 25 bp, Homo sapien
aacatcactaaggcagattgcatac

SEQ ID NO: 5010804 - DNA, 25 bp, Homo sapien
catcactaaggcagattgcatacca

SEQ ID NO: 5010805 - DNA, 25 bp, Homo sapien
ggttctgctaagctgagctacatca

SEQ ID NO: 5010806 - DNA, 25 bp, Homo sapien
tctttttgcatactctagggcttca

SEQ ID NO: 5010807 - DNA, 25 bp, Homo sapien
tacatcacgtgatgcccgtgccaaa

SEQ ID NO: 5010808 - DNA, 25 bp, Homo sapien
tagggcttcatacaccaatagcttt

SEQ ID NO: 5010809 - DNA, 25 bp, Homo sapien
tgtattgggttagcaactgataaag

SEQ ID NO: 5010810 - DNA, 25 bp, Homo sapien
cttgtattgggttagcaactgataa

SEQ ID NO: 5010811 - DNA, 25 bp, Homo sapien
attgggttagcaactgataaagttt

SEQ ID NO: 5010812 - DNA, 25 bp, Homo sapien
tattgggttagcaactgataaagtt

SEQ ID NO: 5010813 - DNA, 25 bp, Homo sapien
ggtagtctgcttgttcaagtatttc

SEQ ID NO: 5010814 - DNA, 25 bp, Homo sapien
tgtttctccgctttcatacaggtag

SEQ ID NO: 5010815 - DNA, 25 bp, Homo sapien
tcatacaggtagtctgcttgttcaa

SEQ ID NO: 5010816 - DNA, 25 bp, Homo sapien
tccgctttcatacaggtagtctgct

SEQ ID NO: 5010817 - DNA, 25 bp, Homo sapien
aaagactaattactgtccttaacat

SEQ ID NO: 5010818 - DNA, 25 bp, Homo sapien
tctaccctcagtgacacagcgagac

SEQ ID NO: 5010819 - DNA, 25 bp, Homo sapien
cctacaaagtgcagcccttccattt

SEQ ID NO: 5010820 - DNA, 25 bp, Homo sapien
atccttcctgctatcctacaaagtg

SEQ ID NO: 5010821 - DNA, 25 bp, Homo sapien
tcctgctatcctacaaagtgcagcc

SEQ ID NO: 5010822 - DNA, 25 bp, Homo sapien
tgctatcctacaaagtgcagccctt

SEQ ID NO: 5010823 - DNA, 25 bp, Homo sapien
agggcttttgaggatatcacatggg

SEQ ID NO: 5010824 - DNA, 25 bp, Homo sapien
ttcaaagtccctgagacccatggca

SEQ ID NO: 5010825 - DNA, 25 bp, Homo sapien
aaagtccctgagacccatggcaggg

SEQ ID NO: 5010826 - DNA, 25 bp, Homo sapien
cttcttcaaagtccctgagacccat

SEQ ID NO: 5010827 - DNA, 25 bp, Homo sapien
gaggcaatggccacttggcatatga

SEQ ID NO: 5010828 - DNA, 25 bp, Homo sapien
aggcaatggccacttggcatatgac

SEQ ID NO: 5010829 - DNA, 25 bp, Homo sapien
aggaggcaatggccacttggcatat

SEQ ID NO: 5010830 - DNA, 25 bp, Homo sapien
ggaggcaatggccacttggcatatg

SEQ ID NO: 5010831 - DNA, 25 bp, Homo sapien
gaagtctgcacattacctcttgaca

SEQ ID NO: 5010832 - DNA, 25 bp, Homo sapien
tatacatgtcccatgatggaaatgt

SEQ ID NO: 5010833 - DNA, 25 bp, Homo sapien
ggaggttagcgtgcaatatgaagaa

SEQ ID NO: 5010834 - DNA, 25 bp, Homo sapien
tatacagtagaagatttcatgctgg

SEQ ID NO: 5010835 - DNA, 25 bp, Homo sapien
caaacccttgctgataacggtatct

SEQ ID NO: 5010836 - DNA, 25 bp, Homo sapien
cccttgctgataacggtatcttggt

SEQ ID NO: 5010837 - DNA, 25 bp, Homo sapien
tagccaaacccttgctgataacggt

SEQ ID NO: 5010838 - DNA, 25 bp, Homo sapien
gctgataacggtatcttggttctca

SEQ ID NO: 5010839 - DNA, 25 bp, Homo sapien
aattctgaatgtacgcacacaaaaa

SEQ ID NO: 5010840 - DNA, 25 bp, Homo sapien
tcttccaacttcacgtcaacttctg

SEQ ID NO: 5010841 - DNA, 25 bp, Homo sapien
aaaattctgaatgtacgcacacaaa

SEQ ID NO: 5010842 - DNA, 25 bp, Homo sapien
taaatgttccatatatctaatttat

SEQ ID NO: 5010843 - DNA, 25 bp, Homo sapien
agcagcctgagagataacctggtaa

SEQ ID NO: 5010844 - DNA, 25 bp, Homo sapien
cagcctgagagataacctggtaagt

SEQ ID NO: 5010845 - DNA, 25 bp, Homo sapien
cctgagagataacctggtaagtttc

SEQ ID NO: 5010846 - DNA, 25 bp, Homo sapien
gagagataacctggtaagtttcaaa

SEQ ID NO: 5010847 - DNA, 25 bp, Homo sapien
tgagagtaaaaggcctcttttgaaa

SEQ ID NO: 5010848 - DNA, 25 bp, Homo sapien
ctgagagtaaaaggcctcttttgaa

SEQ ID NO: 5010849 - DNA, 25 bp, Homo sapien
ttttcaaagtctgaaaggggcagcc

SEQ ID NO: 5010850 - DNA, 25 bp, Homo sapien
cttttcaaagtctgaaaggggcagc

SEQ ID NO: 5010851 - DNA, 25 bp, Homo sapien
acttttcaaagtctgaaaggggcag

SEQ ID NO: 5010852 - DNA, 25 bp, Homo sapien
cacttttcaaagtctgaaaggggca

SEQ ID NO: 5010853 - DNA, 25 bp, Homo sapien
tcaagcgctgttgtatctgtcatcg

SEQ ID NO: 5010854 - DNA, 25 bp, Homo sapien
caagcgctgttgtatctgtcatcgc

SEQ ID NO: 5010855 - DNA, 25 bp, Homo sapien
tttcacagcggtcaaggttctttcc

SEQ ID NO: 5010856 - DNA, 25 bp, Homo sapien
aataatttcacagcggtcaaggttc

SEQ ID NO: 5010857 - DNA, 25 bp, Homo sapien
ctacagggagaataatttcacagcg

SEQ ID NO: 5010858 - DNA, 25 bp, Homo sapien
gagaataatttcacagcggtcaagg

SEQ ID NO: 5010859 - DNA, 25 bp, Homo sapien
tgacagccccagttaaggatagtgg

SEQ ID NO: 5010860 - DNA, 25 bp, Homo sapien
ctgttttacatttcgcacaagaagg

SEQ ID NO: 5010861 - DNA, 25 bp, Homo sapien
tctgacagccccagttaaggatagt

SEQ ID NO: 5010862 - DNA, 25 bp, Homo sapien
cagccccagttaaggatagtggagg

SEQ ID NO: 5010863 - DNA, 25 bp, Homo sapien
tcaccacattccttaggcagcgcgg

SEQ ID NO: 5010864 - DNA, 25 bp, Homo sapien
aggcacagtggccccgagttctttc

SEQ ID NO: 5010865 - DNA, 25 bp, Homo sapien
cagtggccccgagttctttcctcgg

SEQ ID NO: 5010866 - DNA, 25 bp, Homo sapien
agcgcggggccgccaccacttaagt

SEQ ID NO: 5010867 - DNA, 25 bp, Homo sapien
cgaagtccccgcagggagacgagac

SEQ ID NO: 5010868 - DNA, 25 bp, Homo sapien
gctccacgtcggaaaggcagaaggc

SEQ ID NO: 5010869 - DNA, 25 bp, Homo sapien
ccgcggaatcgacaggggccgcaat

SEQ ID NO: 5010870 - DNA, 25 bp, Homo sapien
gcagaaggcgccacagtcgagcagc

SEQ ID NO: 5010871 - DNA, 25 bp, Homo sapien
cttgcgggctgaccctgcactactt

SEQ ID NO: 5010872 - DNA, 25 bp, Homo sapien
gcaacttgcgggctgaccctgcact

SEQ ID NO: 5010873 - DNA, 25 bp, Homo sapien
aacttgcgggctgaccctgcactac

SEQ ID NO: 5010874 - DNA, 25 bp, Homo sapien
gacctgcaacttgcgggctgaccct

SEQ ID NO: 5010875 - DNA, 25 bp, Homo sapien
taaaggagattcaatccttccggaa

SEQ ID NO: 5010876 - DNA, 25 bp, Homo sapien
gagattcaatccttccggaaagaac

SEQ ID NO: 5010877 - DNA, 25 bp, Homo sapien
gggctaaaggagattcaatccttcc

SEQ ID NO: 5010878 - DNA, 25 bp, Homo sapien
ggcggggctaaaggagattcaatcc

SEQ ID NO: 5010879 - DNA, 25 bp, Homo sapien
tgccttttcagtaagcgactggcct

SEQ ID NO: 5010880 - DNA, 25 bp, Homo sapien
ctcgaagcgccagcctactggcaag

SEQ ID NO: 5010881 - DNA, 25 bp, Homo sapien
tccagaatggcctcgaagcgccagc

SEQ ID NO: 5010882 - DNA, 25 bp, Homo sapien
cagtaagcgactggcctccagaatg

SEQ ID NO: 5010883 - DNA, 25 bp, Homo sapien
gcagctggggatcggcaggtcgcgg

SEQ ID NO: 5010884 - DNA, 25 bp, Homo sapien
tgctggaagtgctccgtgggcttcg

SEQ ID NO: 5010885 - DNA, 25 bp, Homo sapien
aggctcccgagctaggtcgcggcct

SEQ ID NO: 5010886 - DNA, 25 bp, Homo sapien
cctggaggatccgagcccgcaggct

SEQ ID NO: 5010887 - DNA, 25 bp, Homo sapien
ctggacccaggcaccgccgacgcct

SEQ ID NO: 5010888 - DNA, 25 bp, Homo sapien
tggacccaggcaccgccgacgcctc

SEQ ID NO: 5010889 - DNA, 25 bp, Homo sapien
tgggcggagagggtcgggcttgtgg

SEQ ID NO: 5010890 - DNA, 25 bp, Homo sapien
gctggggataggctgggatccgccc

SEQ ID NO: 5010891 - DNA, 25 bp, Homo sapien
gagaagggtgacaggtcccgaaatc

SEQ ID NO: 5010892 - DNA, 25 bp, Homo sapien
tggggataggctgggatccgccctc

SEQ ID NO: 5010893 - DNA, 25 bp, Homo sapien
ggcgcgcgcttcagagcacccgaga

SEQ ID NO: 5010894 - DNA, 25 bp, Homo sapien
ggtgaagccaatgcccagttgagcg

SEQ ID NO: 5010895 - DNA, 25 bp, Homo sapien
atagggtacccacaccacgtccgtg

SEQ ID NO: 5010896 - DNA, 25 bp, Homo sapien
accacgtccgtggtgaagccaatgc

SEQ ID NO: 5010897 - DNA, 25 bp, Homo sapien
aacactttatagacaatggtcttca

SEQ ID NO: 5010898 - DNA, 25 bp, Homo sapien
ataactgtgaacactttatagacaa

SEQ ID NO: 5010899 - DNA, 25 bp, Homo sapien
actgtgaacactttatagacaatgg

SEQ ID NO: 5010900 - DNA, 25 bp, Homo sapien
gtgaacactttatagacaatggtct

SEQ ID NO: 5010901 - DNA, 25 bp, Homo sapien
aactttagcaacactgatgttagta

SEQ ID NO: 5010902 - DNA, 25 bp, Homo sapien
actttagcaacactgatgttagtaa

SEQ ID NO: 5010903 - DNA, 25 bp, Homo sapien
ttatttttgaagttagagtgatcac

SEQ ID NO: 5010904 - DNA, 25 bp, Homo sapien
ttttatttttgaagttagagtgatc

SEQ ID NO: 5010905 - DNA, 25 bp, Homo sapien
tatttttgaagttagagtgatcaca

SEQ ID NO: 5010906 - DNA, 25 bp, Homo sapien
atttttgaagttagagtgatcacac

SEQ ID NO: 5010907 - DNA, 25 bp, Homo sapien
ctgttaattcctgctttcctccgtt

SEQ ID NO: 5010908 - DNA, 25 bp, Homo sapien
attcctgctttcctccgttctgcat

SEQ ID NO: 5010909 - DNA, 25 bp, Homo sapien
taattcctgctttcctccgttctgc

SEQ ID NO: 5010910 - DNA, 25 bp, Homo sapien
ttaattcctgctttcctccgttctg

SEQ ID NO: 5010911 - DNA, 25 bp, Homo sapien
ggacacattttgagtcactgacatg

SEQ ID NO: 5010912 - DNA, 25 bp, Homo sapien
tgcccttgcttgctttcaatagcgg

SEQ ID NO: 5010913 - DNA, 25 bp, Homo sapien
agggatttgtagataggcaccgact

SEQ ID NO: 5010914 - DNA, 25 bp, Homo sapien
tcaatagcggtcaggcaggatgtac

SEQ ID NO: 5010915 - DNA, 25 bp, Homo sapien
tacattgaaggactagtgtcagggt

SEQ ID NO: 5010916 - DNA, 25 bp, Homo sapien
gctacagacctacagttgtcagggt

SEQ ID NO: 5010917 - DNA, 25 bp, Homo sapien
gaaagctgctttatgtcttactact

SEQ ID NO: 5010918 - DNA, 25 bp, Homo sapien
taacaagccatctatgctgagacaa

SEQ ID NO: 5010919 - DNA, 25 bp, Homo sapien
tgctcctacggcagaggaaaggagc

SEQ ID NO: 5010920 - DNA, 25 bp, Homo sapien
catgcagctaggctggagttctctc

SEQ ID NO: 5010921 - DNA, 25 bp, Homo sapien
ggagttctctccatgtttcttatat

SEQ ID NO: 5010922 - DNA, 25 bp, Homo sapien
ttgctcattttacatgcagctaggc

SEQ ID NO: 5010923 - DNA, 25 bp, Homo sapien
aacagcatgcactcaacttgggact

SEQ ID NO: 5010924 - DNA, 25 bp, Homo sapien
gggacagtgccaagtccatctttgc

SEQ ID NO: 5010925 - DNA, 25 bp, Homo sapien
gacactgtggtttacaaaacagcat

SEQ ID NO: 5010926 - DNA, 25 bp, Homo sapien
tgtataagccaatgtccatacctga

SEQ ID NO: 5010927 - DNA, 25 bp, Homo sapien
aatagtccttttccctgttgtgcca

SEQ ID NO: 5010928 - DNA, 25 bp, Homo sapien
gagggcctatgtgctaaaaactatg

SEQ ID NO: 5010929 - DNA, 25 bp, Homo sapien
tctctgcaatgcctcaagggagtga

SEQ ID NO: 5010930 - DNA, 25 bp, Homo sapien
tggtggttgcctagcccagatgagc

SEQ ID NO: 5010931 - DNA, 25 bp, Homo sapien
tacgccagaagtttgatggaacgtg

SEQ ID NO: 5010932 - DNA, 25 bp, Homo sapien
tcatacttgacaatacatgtgtaag

SEQ ID NO: 5010933 - DNA, 25 bp, Homo sapien
catggaaatgacacataaagtacgc

SEQ ID NO: 5010934 - DNA, 25 bp, Homo sapien
gaattgatgctaaatatatcttaca

SEQ ID NO: 5010935 - DNA, 25 bp, Homo sapien
gttcagagtctcaggtgacctaaga

SEQ ID NO: 5010936 - DNA, 25 bp, Homo sapien
cagagtctcaggtgacctaagaata

SEQ ID NO: 5010937 - DNA, 25 bp, Homo sapien
cagttcagagtctcaggtgacctaa

SEQ ID NO: 5010938 - DNA, 25 bp, Homo sapien
agtctcaggtgacctaagaatatcc

SEQ ID NO: 5010939 - DNA, 25 bp, Homo sapien
gctcatgggatgattgtcaggctcc

SEQ ID NO: 5010940 - DNA, 25 bp, Homo sapien
gatcttggtggttcaatccctgaga

SEQ ID NO: 5010941 - DNA, 25 bp, Homo sapien
tcagatccttgtgtaaccaccttgg

SEQ ID NO: 5010942 - DNA, 25 bp, Homo sapien
tctcccaaagcctagattccttgca

SEQ ID NO: 5010943 - DNA, 25 bp, Homo sapien
agattttagtctgatggattggaaa

SEQ ID NO: 5010944 - DNA, 25 bp, Homo sapien
tcaacaataaaagagttcttgaatt

SEQ ID NO: 5010945 - DNA, 25 bp, Homo sapien
gaaaatatgttctgggtgttagcaa

SEQ ID NO: 5010946 - DNA, 25 bp, Homo sapien
gaaaataactgccaggcgaaaagca

SEQ ID NO: 5010947 - DNA, 25 bp, Homo sapien
attattacttccgacaccagcctgg

SEQ ID NO: 5010948 - DNA, 25 bp, Homo sapien
caagtcccttgagccagatgagtta

SEQ ID NO: 5010949 - DNA, 25 bp, Homo sapien
tcaagggtcccagcatgtcgtttcc

SEQ ID NO: 5010950 - DNA, 25 bp, Homo sapien
tcctcacagcatgcaacgtcggtaa

SEQ ID NO: 5010951 - DNA, 25 bp, Homo sapien
tcctccactgcaataggacttgctg

SEQ ID NO: 5010952 - DNA, 25 bp, Homo sapien
taatgagtgattgacgagaagtccc

SEQ ID NO: 5010953 - DNA, 25 bp, Homo sapien
aaaactgtccttctaactgagtggg

SEQ ID NO: 5010954 - DNA, 25 bp, Homo sapien
tgtacattcaggtctgtccagtggc

SEQ ID NO: 5010955 - DNA, 25 bp, Homo sapien
ttctccatgacagccgtccattcac

SEQ ID NO: 5010956 - DNA, 25 bp, Homo sapien
ccatgacagccgtccattcactcca

SEQ ID NO: 5010957 - DNA, 25 bp, Homo sapien
atgacagccgtccattcactccacc

SEQ ID NO: 5010958 - DNA, 25 bp, Homo sapien
ctccatgacagccgtccattcactc

SEQ ID NO: 5010959 - DNA, 25 bp, Homo sapien
gagggcaagatcttttcttggaggg

SEQ ID NO: 5010960 - DNA, 25 bp, Homo sapien
tgggtgtctcttctttcggtgggaa

SEQ ID NO: 5010961 - DNA, 25 bp, Homo sapien
tttgagtagtcttgcaagacttgct

SEQ ID NO: 5010962 - DNA, 25 bp, Homo sapien
gagctgcttgctctcgcttcaattt

SEQ ID NO: 5010963 - DNA, 25 bp, Homo sapien
tcagaatctggataatgcactagaa

SEQ ID NO: 5010964 - DNA, 25 bp, Homo sapien
tgcactagaatttcttggagggtct

SEQ ID NO: 5010965 - DNA, 25 bp, Homo sapien
attggcaaacccgtgggccaccaca

SEQ ID NO: 5010966 - DNA, 25 bp, Homo sapien
ccacattggcagttcgacggtttcc

SEQ ID NO: 5010967 - DNA, 25 bp, Homo sapien
tgaactcctggaccccgggcagcat

SEQ ID NO: 5010968 - DNA, 25 bp, Homo sapien
cagggaagttggtcaaattgaactc

SEQ ID NO: 5010969 - DNA, 25 bp, Homo sapien
tgctggtagtcaccgcctgtgtgcc

SEQ ID NO: 5010970 - DNA, 25 bp, Homo sapien
ccacatctgtcaggtcagggaagtt

SEQ ID NO: 5010971 - DNA, 25 bp, Homo sapien
gtgtctccaacgatcacccactggg

SEQ ID NO: 5010972 - DNA, 25 bp, Homo sapien
tcatgagcttgtcggtggtaaagac

SEQ ID NO: 5010973 - DNA, 25 bp, Homo sapien
ttgcctgggtgagctttcggatgcc

SEQ ID NO: 5010974 - DNA, 25 bp, Homo sapien
tacacctgagtctgattcgtccacc

SEQ ID NO: 5010975 - DNA, 25 bp, Homo sapien
cttttaaaggctacatgatagtgct

SEQ ID NO: 5010976 - DNA, 25 bp, Homo sapien
aaggctacatgatagtgctggattt

SEQ ID NO: 5010977 - DNA, 25 bp, Homo sapien
catttttgagtagtaaacactatta

SEQ ID NO: 5010978 - DNA, 25 bp, Homo sapien
cacagcatttttgagtagtaaacac

SEQ ID NO: 5010979 - DNA, 25 bp, Homo sapien
ttggcaggcatacctccagctctgg

SEQ ID NO: 5010980 - DNA, 25 bp, Homo sapien
atgtttggcaggcatacctccagct

SEQ ID NO: 5010981 - DNA, 25 bp, Homo sapien
cagcggcatatgacagctgtgggcc

SEQ ID NO: 5010982 - DNA, 25 bp, Homo sapien
tggaataaatgactagagcttcagc

SEQ ID NO: 5010983 - DNA, 25 bp, Homo sapien
tcagggagtactcaacccttgggaa

SEQ ID NO: 5010984 - DNA, 25 bp, Homo sapien
cacttttgcaaggactcccaggaag

SEQ ID NO: 5010985 - DNA, 25 bp, Homo sapien
tgaatcaaccaaactactgagcaag

SEQ ID NO: 5010986 - DNA, 25 bp, Homo sapien
gagaatcaaggcaaaaagctccctt

SEQ ID NO: 5010987 - DNA, 25 bp, Homo sapien
gagtaaccagaactttagtaccatc

SEQ ID NO: 5010988 - DNA, 25 bp, Homo sapien
tggacttctccatgcttgatgatat

SEQ ID NO: 5010989 - DNA, 25 bp, Homo sapien
acttctccatgcttgatgatataca

SEQ ID NO: 5010990 - DNA, 25 bp, Homo sapien
gaactttagtaccatcagggcctcc

SEQ ID NO: 5010991 - DNA, 25 bp, Homo sapien
agctcatggctccaagtcttcataa

SEQ ID NO: 5010992 - DNA, 25 bp, Homo sapien
tccaagtcttcataaaaaatgccat

SEQ ID NO: 5010993 - DNA, 25 bp, Homo sapien
tgcttccgttccttggatatgccaa

SEQ ID NO: 5010994 - DNA, 25 bp, Homo sapien
cttccgttccttggatatgccaagc

SEQ ID NO: 5010995 - DNA, 25 bp, Homo sapien
cagacaaagtcaccaggcaaataga

SEQ ID NO: 5010996 - DNA, 25 bp, Homo sapien
ggcaaatagagaacggatttcaatc

SEQ ID NO: 5010997 - DNA, 25 bp, Homo sapien
cttagcaacatgtcataaatcatct

SEQ ID NO: 5010998 - DNA, 25 bp, Homo sapien
tgcagacaaagtcaccaggcaaata

SEQ ID NO: 5010999 - DNA, 25 bp, Homo sapien
cgatagctttcagctgacggcttgg

SEQ ID NO: 5011000 - DNA, 25 bp, Homo sapien
atcgatagctttcagctgacggctt

SEQ ID NO: 5011001 - DNA, 25 bp, Homo sapien
agctttcagctgacggcttggattt

SEQ ID NO: 5011002 - DNA, 25 bp, Homo sapien
gatagctttcagctgacggcttgga

SEQ ID NO: 5011003 - DNA, 25 bp, Homo sapien
aaacaatgagtcaaagatcccagtg

SEQ ID NO: 5011004 - DNA, 25 bp, Homo sapien
gaagtcacagcctttgcaggctctc

SEQ ID NO: 5011005 - DNA, 25 bp, Homo sapien
tctttgccacagaatcgcaaacaat

SEQ ID NO: 5011006 - DNA, 25 bp, Homo sapien
agatcccagtgaggtgtcctgttgg

SEQ ID NO: 5011007 - DNA, 25 bp, Homo sapien
ttgtgcttgggcctggaataacgtg

SEQ ID NO: 5011008 - DNA, 25 bp, Homo sapien
tgtgcttgggcctggaataacgtga

SEQ ID NO: 5011009 - DNA, 25 bp, Homo sapien
tgcttgggcctggaataacgtgaaa

SEQ ID NO: 5011010 - DNA, 25 bp, Homo sapien
gcttgggcctggaataacgtgaaat

SEQ ID NO: 5011011 - DNA, 25 bp, Homo sapien
tacacttatgtaccttccccggcaa

SEQ ID NO: 5011012 - DNA, 25 bp, Homo sapien
gaaatatacagatcttaagggacag

SEQ ID NO: 5011013 - DNA, 25 bp, Homo sapien
tgcttgttgacgttaatcttgttgg

SEQ ID NO: 5011014 - DNA, 25 bp, Homo sapien
actggcataagccatggaacctggc

SEQ ID NO: 5011015 - DNA, 25 bp, Homo sapien
aatggcgagggctaactggaccgta

SEQ ID NO: 5011016 - DNA, 25 bp, Homo sapien
tagggtcttaagcaaatcagactca

SEQ ID NO: 5011017 - DNA, 25 bp, Homo sapien
aagtcgactttgctgatgatgctga

SEQ ID NO: 5011018 - DNA, 25 bp, Homo sapien
tgaagttcacatcaatggcgagggc

SEQ ID NO: 5011019 - DNA, 25 bp, Homo sapien
atgccttcaagtagctgcagatgtt

SEQ ID NO: 5011020 - DNA, 25 bp, Homo sapien
cagatgccttcaagtagctgcagat

SEQ ID NO: 5011021 - DNA, 25 bp, Homo sapien
tcagatgccttcaagtagctgcaga

SEQ ID NO: 5011022 - DNA, 25 bp, Homo sapien
gatgccttcaagtagctgcagatgt

SEQ ID NO: 5011023 - DNA, 25 bp, Homo sapien
tggtgtcatccatgcaggcgcggaa

SEQ ID NO: 5011024 - DNA, 25 bp, Homo sapien
gaactcgcttttgcacaagtttagg

SEQ ID NO: 5011025 - DNA, 25 bp, Homo sapien
ctagcattctttgagagtcccatgt

SEQ ID NO: 5011026 - DNA, 25 bp, Homo sapien
tgttcatgtaggcaatggtgtcatc

SEQ ID NO: 5011027 - DNA, 25 bp, Homo sapien
gccaccaatggtaattaaagttcga

SEQ ID NO: 5011028 - DNA, 25 bp, Homo sapien
tctggaaggccaccaatggtaatta

SEQ ID NO: 5011029 - DNA, 25 bp, Homo sapien
ctggaaggccaccaatggtaattaa

SEQ ID NO: 5011030 - DNA, 25 bp, Homo sapien
tggaaggccaccaatggtaattaaa

SEQ ID NO: 5011031 - DNA, 25 bp, Homo sapien
tgcccaataataacatctcagatac

SEQ ID NO: 5011032 - DNA, 25 bp, Homo sapien
taaacttattactggaagcaatggc

SEQ ID NO: 5011033 - DNA, 25 bp, Homo sapien
ggatgagtgaatgcatacctagact

SEQ ID NO: 5011034 - DNA, 25 bp, Homo sapien
caatggctatgagggagaacggtct

SEQ ID NO: 5011035 - DNA, 25 bp, Homo sapien
tgtttatgggcctagtagcacacaa

SEQ ID NO: 5011036 - DNA, 25 bp, Homo sapien
aataaacagcaagtatccagttgtt

SEQ ID NO: 5011037 - DNA, 25 bp, Homo sapien
gcaagtatccagttgttcgaataac

SEQ ID NO: 5011038 - DNA, 25 bp, Homo sapien
ccatcatacacccatctagtagtgc

SEQ ID NO: 5011039 - DNA, 25 bp, Homo sapien
tagtgccaattccttcatagtttga

SEQ ID NO: 5011040 - DNA, 25 bp, Homo sapien
tgtccattatagactctaggtgatg

SEQ ID NO: 5011041 - DNA, 25 bp, Homo sapien
gactctaggtgatgattaaattcaa

SEQ ID NO: 5011042 - DNA, 25 bp, Homo sapien
ccattatagactctaggtgatgatt

SEQ ID NO: 5011043 - DNA, 25 bp, Homo sapien
tatgctttgtccattatagactcta

SEQ ID NO: 5011044 - DNA, 25 bp, Homo sapien
aaatggtattattgatgcgacatcc

SEQ ID NO: 5011045 - DNA, 25 bp, Homo sapien
gctctaaacattggattaaacccaa

SEQ ID NO: 5011046 - DNA, 25 bp, Homo sapien
aatggtattattgatgcgacatcca

SEQ ID NO: 5011047 - DNA, 25 bp, Homo sapien
atttgctctaaacattggattaaac

SEQ ID NO: 5011048 - DNA, 25 bp, Homo sapien
tcacaaatatgttgtgtttacatgc

SEQ ID NO: 5011049 - DNA, 25 bp, Homo sapien
ggaatggatggatttacgctgatgt

SEQ ID NO: 5011050 - DNA, 25 bp, Homo sapien
cacaaatatgttgtgtttacatgcc

SEQ ID NO: 5011051 - DNA, 25 bp, Homo sapien
tctgggaatggatggatttacgctg

SEQ ID NO: 5011052 - DNA, 25 bp, Homo sapien
tagaagtcctgtagtgtttccttag

SEQ ID NO: 5011053 - DNA, 25 bp, Homo sapien
agaagtcctgtagtgtttccttagc

SEQ ID NO: 5011054 - DNA, 25 bp, Homo sapien
gaagtcctgtagtgtttccttagct

SEQ ID NO: 5011055 - DNA, 25 bp, Homo sapien
agtcctgtagtgtttccttagctca

SEQ ID NO: 5011056 - DNA, 25 bp, Homo sapien
tgggcgaggctcatcttgcaaagat

SEQ ID NO: 5011057 - DNA, 25 bp, Homo sapien
ccatgccacttgttgtggttgccca

SEQ ID NO: 5011058 - DNA, 25 bp, Homo sapien
gagcgggctaatcaacagggttctt

SEQ ID NO: 5011059 - DNA, 25 bp, Homo sapien
gatcaccctgtttgttggcagcccc

SEQ ID NO: 5011060 - DNA, 25 bp, Homo sapien
tgctgatgtattccttctggtgcca

SEQ ID NO: 5011061 - DNA, 25 bp, Homo sapien
ctgctgatgtattccttctggtgcc

SEQ ID NO: 5011062 - DNA, 25 bp, Homo sapien
gcagcgacgttccagtttttccatc

SEQ ID NO: 5011063 - DNA, 25 bp, Homo sapien
ggatgcagcgacgttccagtttttc

SEQ ID NO: 5011064 - DNA, 25 bp, Homo sapien
cagcgacgttccagtttttccatct

SEQ ID NO: 5011065 - DNA, 25 bp, Homo sapien
agctgcccacgtggccatgcctgct

SEQ ID NO: 5011066 - DNA, 25 bp, Homo sapien
cttcagctgcccacgtggccatgcc

SEQ ID NO: 5011067 - DNA, 25 bp, Homo sapien
actggccacagctgagtttaaaaat

SEQ ID NO: 5011068 - DNA, 25 bp, Homo sapien
ggccacagctgagtttaaaaatgcc

SEQ ID NO: 5011069 - DNA, 25 bp, Homo sapien
ctcccgactctccagttcctccggg

SEQ ID NO: 5011070 - DNA, 25 bp, Homo sapien
tgcttggcatgagcggaagcgcctc

SEQ ID NO: 5011071 - DNA, 25 bp, Homo sapien
gggatgcttggcatgagcggaagcg

SEQ ID NO: 5011072 - DNA, 25 bp, Homo sapien
ggcatgagcggaagcgcctcctcct

SEQ ID NO: 5011073 - DNA, 25 bp, Homo sapien
ttggctcttcagctctaccatctcc

SEQ ID NO: 5011074 - DNA, 25 bp, Homo sapien
ggctcttcagctctaccatctcctt

SEQ ID NO: 5011075 - DNA, 25 bp, Homo sapien
ttcagctctaccatctccttcagct

SEQ ID NO: 5011076 - DNA, 25 bp, Homo sapien
agctctaccatctccttcagctcac

SEQ ID NO: 5011077 - DNA, 25 bp, Homo sapien
tgtgctgctccgactgtggtgtgct

SEQ ID NO: 5011078 - DNA, 25 bp, Homo sapien
tgatgtgctgctccgactgtggtgt

SEQ ID NO: 5011079 - DNA, 25 bp, Homo sapien
ttgatgtgctgctccgactgtggtg

SEQ ID NO: 5011080 - DNA, 25 bp, Homo sapien
tgctgctccgactgtggtgtgctgg

SEQ ID NO: 5011081 - DNA, 25 bp, Homo sapien
tcaccattctggaagactgcatgac

SEQ ID NO: 5011082 - DNA, 25 bp, Homo sapien
tgaagccagtctgcaacttggccag

SEQ ID NO: 5011083 - DNA, 25 bp, Homo sapien
ccattctggaagactgcatgactga

SEQ ID NO: 5011084 - DNA, 25 bp, Homo sapien
ttctggaagactgcatgactgatgg

SEQ ID NO: 5011085 - DNA, 25 bp, Homo sapien
tctccagggtttgcctgtgcacctc

SEQ ID NO: 5011086 - DNA, 25 bp, Homo sapien
ggtctccagggtttgcctgtgcacc

SEQ ID NO: 5011087 - DNA, 25 bp, Homo sapien
tccagggtttgcctgtgcacctcca

SEQ ID NO: 5011088 - DNA, 25 bp, Homo sapien
gggtttgcctgtgcacctccacctg

SEQ ID NO: 5011089 - DNA, 25 bp, Homo sapien
agagctcagccttctgctctagctc

SEQ ID NO: 5011090 - DNA, 25 bp, Homo sapien
tctcggttcaggagactcaagccct

SEQ ID NO: 5011091 - DNA, 25 bp, Homo sapien
ctgctctcggttcaggagactcaag

SEQ ID NO: 5011092 - DNA, 25 bp, Homo sapien
tcctcctgctctcggttcaggagac

SEQ ID NO: 5011093 - DNA, 25 bp, Homo sapien
gcttggagctgtcctgccagaccct

SEQ ID NO: 5011094 - DNA, 25 bp, Homo sapien
gggcttggagctgtcctgccagacc

SEQ ID NO: 5011095 - DNA, 25 bp, Homo sapien
ctgggcttggagctgtcctgccaga

SEQ ID NO: 5011096 - DNA, 25 bp, Homo sapien
cttggagctgtcctgccagaccctc

SEQ ID NO: 5011097 - DNA, 25 bp, Homo sapien
ctgctctgacatcggctgcatcctc

SEQ ID NO: 5011098 - DNA, 25 bp, Homo sapien
gctctgacatcggctgcatcctctg

SEQ ID NO: 5011099 - DNA, 25 bp, Homo sapien
tgctctgacatcggctgcatcctct

SEQ ID NO: 5011100 - DNA, 25 bp, Homo sapien
atcagggggttcacactggcttgag

SEQ ID NO: 5011101 - DNA, 25 bp, Homo sapien
ggttagcatcagggggttcacactg

SEQ ID NO: 5011102 - DNA, 25 bp, Homo sapien
ctgctggttagcatcagggggttca

SEQ ID NO: 5011103 - DNA, 25 bp, Homo sapien
tagcatcagggggttcacactggct

SEQ ID NO: 5011104 - DNA, 25 bp, Homo sapien
gtgtcttcttctgctatgtagagac

SEQ ID NO: 5011105 - DNA, 25 bp, Homo sapien
ttcagatcctcatataactccagcc

SEQ ID NO: 5011106 - DNA, 25 bp, Homo sapien
ttctaattctgagttctgtggcttc

SEQ ID NO: 5011107 - DNA, 25 bp, Homo sapien
cttcttctgctatgtagagacagca

SEQ ID NO: 5011108 - DNA, 25 bp, Homo sapien
tgctgagtgtaatacagagctgtcc

SEQ ID NO: 5011109 - DNA, 25 bp, Homo sapien
tgaatttgaacctgtaaccactccc

SEQ ID NO: 5011110 - DNA, 25 bp, Homo sapien
tacagagctgtccataactctgcct

SEQ ID NO: 5011111 - DNA, 25 bp, Homo sapien
tctcggacatgaggatccctatggt

SEQ ID NO: 5011112 - DNA, 25 bp, Homo sapien
tgggctcttgatcaatgagaaagtc

SEQ ID NO: 5011113 - DNA, 25 bp, Homo sapien
atccatgagattgggaccaatgtca

SEQ ID NO: 5011114 - DNA, 25 bp, Homo sapien
gattgggaccaatgtcagcatcatg

SEQ ID NO: 5011115 - DNA, 25 bp, Homo sapien
ccattgacaaaggatgtagactcag

SEQ ID NO: 5011116 - DNA, 25 bp, Homo sapien
cagatgtgcaactgatccagaggag

SEQ ID NO: 5011117 - DNA, 25 bp, Homo sapien
tcagaatagggtgtggtctcaatgc

SEQ ID NO: 5011118 - DNA, 25 bp, Homo sapien
tccagagggacgatttttctcatgc

SEQ ID NO: 5011119 - DNA, 25 bp, Homo sapien
atccagaggagagttaaccagggcc

SEQ ID NO: 5011120 - DNA, 25 bp, Homo sapien
attgttgggctcttgctagattata

SEQ ID NO: 5011121 - DNA, 25 bp, Homo sapien
ggaattataggattgttgggctctt

SEQ ID NO: 5011122 - DNA, 25 bp, Homo sapien
gggctcttgctagattatattgatt

SEQ ID NO: 5011123 - DNA, 25 bp, Homo sapien
aatggaattataggattgttgggct

SEQ ID NO: 5011124 - DNA, 25 bp, Homo sapien
gtaacaccactcaaacaaatggagg

SEQ ID NO: 5011125 - DNA, 25 bp, Homo sapien
aacaggtaacaccactcaaacaaat

SEQ ID NO: 5011126 - DNA, 25 bp, Homo sapien
gagaacaggtaacaccactcaaaca

SEQ ID NO: 5011127 - DNA, 25 bp, Homo sapien
tgagagaacaggtaacaccactcaa

SEQ ID NO: 5011128 - DNA, 25 bp, Homo sapien
gtactgtcatttacgagttccactg

SEQ ID NO: 5011129 - DNA, 25 bp, Homo sapien
gactatcagggtcgaccttctgcag

SEQ ID NO: 5011130 - DNA, 25 bp, Homo sapien
taaatccttttcaagcaatattgct

SEQ ID NO: 5011131 - DNA, 25 bp, Homo sapien
ttttgatctgaagatcattgtgcaa

SEQ ID NO: 5011132 - DNA, 25 bp, Homo sapien
tccatgatctgcatacgtccctgag

SEQ ID NO: 5011133 - DNA, 25 bp, Homo sapien
ccatgatctgcatacgtccctgagc

SEQ ID NO: 5011134 - DNA, 25 bp, Homo sapien
atgatctgcatacgtccctgagctc

SEQ ID NO: 5011135 - DNA, 25 bp, Homo sapien
catgatctgcatacgtccctgagct

SEQ ID NO: 5011136 - DNA, 25 bp, Homo sapien
agtattttatatctccagccatctc

SEQ ID NO: 5011137 - DNA, 25 bp, Homo sapien
tggtgaaaaagatggataggattct

SEQ ID NO: 5011138 - DNA, 25 bp, Homo sapien
gaaggtaattgttgttctcagtatc

SEQ ID NO: 5011139 - DNA, 25 bp, Homo sapien
tctcagtatcttctggacgttccag

SEQ ID NO: 5011140 - DNA, 25 bp, Homo sapien
gtcatcacagtccacaaaccatatt

SEQ ID NO: 5011141 - DNA, 25 bp, Homo sapien
cgaggcgcagtggtataaaacagca

SEQ ID NO: 5011142 - DNA, 25 bp, Homo sapien
cagcagttccagttataggcaagag

SEQ ID NO: 5011143 - DNA, 25 bp, Homo sapien
caagagtgacaagcaagagccacag

SEQ ID NO: 5011144 - DNA, 25 bp, Homo sapien
gatgtccgcaataagccagtagtgt

SEQ ID NO: 5011145 - DNA, 25 bp, Homo sapien
gaagtggcccctctgagtctgtcca

SEQ ID NO: 5011146 - DNA, 25 bp, Homo sapien
aagaagtggcccctctgagtctgtc

SEQ ID NO: 5011147 - DNA, 25 bp, Homo sapien
agtggcccctctgagtctgtccaca

SEQ ID NO: 5011148 - DNA, 25 bp, Homo sapien
ttaagaagtggcccctctgagtctg

SEQ ID NO: 5011149 - DNA, 25 bp, Homo sapien
tggatcaggcaacgagaatttcaag

SEQ ID NO: 5011150 - DNA, 25 bp, Homo sapien
gcagccacagatctttagttcctca

SEQ ID NO: 5011151 - DNA, 25 bp, Homo sapien
tagttcctcagtagttaagttgcag

SEQ ID NO: 5011152 - DNA, 25 bp, Homo sapien
taagttgcaggattgattgcccagg

SEQ ID NO: 5011153 - DNA, 25 bp, Homo sapien
agtttaattcgctttaagtactctg

SEQ ID NO: 5011154 - DNA, 25 bp, Homo sapien
cagcctgtagtaatgttctgttggc

SEQ ID NO: 5011155 - DNA, 25 bp, Homo sapien
cttttactggtggtacagccgtggg

SEQ ID NO: 5011156 - DNA, 25 bp, Homo sapien
catcgctttcttttactggtggtac

SEQ ID NO: 5011157 - DNA, 25 bp, Homo sapien
gactttgaaccacaacagcctgtag

SEQ ID NO: 5011158 - DNA, 25 bp, Homo sapien
ggagagatctccctctaccaacttt

SEQ ID NO: 5011159 - DNA, 25 bp, Homo sapien
tctttgacgcattcttttcaccagg

SEQ ID NO: 5011160 - DNA, 25 bp, Homo sapien
tgtgtagctgggcatcggcatactc

SEQ ID NO: 5011161 - DNA, 25 bp, Homo sapien
tcatttataacaggagctgcaggcg

SEQ ID NO: 5011162 - DNA, 25 bp, Homo sapien
aaatttactattgtggacatgtaaa

SEQ ID NO: 5011163 - DNA, 25 bp, Homo sapien
caaatttactattgtggacatgtaa

SEQ ID NO: 5011164 - DNA, 25 bp, Homo sapien
aatttactattgtggacatgtaaat

SEQ ID NO: 5011165 - DNA, 25 bp, Homo sapien
atttactattgtggacatgtaaatt

SEQ ID NO: 5011166 - DNA, 25 bp, Homo sapien
tcgtgttgctgtctcacagatggca

SEQ ID NO: 5011167 - DNA, 25 bp, Homo sapien
cagggataagtggtaccacagttca

SEQ ID NO: 5011168 - DNA, 25 bp, Homo sapien
tgcatccagttgtcctcatgttgag

SEQ ID NO: 5011169 - DNA, 25 bp, Homo sapien
caagaagaggagagatcgtgttgct

SEQ ID NO: 5011170 - DNA, 25 bp, Homo sapien
gctggatatcagaaacacggctgac

SEQ ID NO: 5011171 - DNA, 25 bp, Homo sapien
aataccaaagacaggctggatatca

SEQ ID NO: 5011172 - DNA, 25 bp, Homo sapien
gacaggctggatatcagaaacacgg

SEQ ID NO: 5011173 - DNA, 25 bp, Homo sapien
gatatcagaaacacggctgacatga

SEQ ID NO: 5011174 - DNA, 25 bp, Homo sapien
tctgatgccaattgttcattcagca

SEQ ID NO: 5011175 - DNA, 25 bp, Homo sapien
ttatcgaaaaggcattctctgtttc

SEQ ID NO: 5011176 - DNA, 25 bp, Homo sapien
ctgatgccaattgttcattcagcaa

SEQ ID NO: 5011177 - DNA, 25 bp, Homo sapien
aaatttgtgtttatcgaaaaggcat

SEQ ID NO: 5011178 - DNA, 25 bp, Homo sapien
ctagataatcacgatgacttctact

SEQ ID NO: 5011179 - DNA, 25 bp, Homo sapien
gcagatggtttaacacagtagaggt

SEQ ID NO: 5011180 - DNA, 25 bp, Homo sapien
gatgacttctactaacagcagatgg

SEQ ID NO: 5011181 - DNA, 25 bp, Homo sapien
ctaacagcagatggtttaacacagt

SEQ ID NO: 5011182 - DNA, 25 bp, Homo sapien
tctttataagtgacaactctttttg

SEQ ID NO: 5011183 - DNA, 25 bp, Homo sapien
ggtggagtgggatggacgaataggt

SEQ ID NO: 5011184 - DNA, 25 bp, Homo sapien
agtgggatggacgaataggtacttt

SEQ ID NO: 5011185 - DNA, 25 bp, Homo sapien
tgggatggacgaataggtactttta

SEQ ID NO: 5011186 - DNA, 25 bp, Homo sapien
tgctgcattttgagggtcagggttt

SEQ ID NO: 5011187 - DNA, 25 bp, Homo sapien
gggtttgtggtcagatctccagagg

SEQ ID NO: 5011188 - DNA, 25 bp, Homo sapien
gttctgctgcattttgagggtcagg

SEQ ID NO: 5011189 - DNA, 25 bp, Homo sapien
ctggcactgttccagttggttctgc

SEQ ID NO: 5011190 - DNA, 25 bp, Homo sapien
gtaatatacttccaatctccttggc

SEQ ID NO: 5011191 - DNA, 25 bp, Homo sapien
tgatgtggaaatccattaaccttcc

SEQ ID NO: 5011192 - DNA, 25 bp, Homo sapien
caggtgtgaaacatctgcttctctc

SEQ ID NO: 5011193 - DNA, 25 bp, Homo sapien
tctcttcaggtgatgaaataagtga

SEQ ID NO: 5011194 - DNA, 25 bp, Homo sapien
tgatacggatttagaatcatccctg

SEQ ID NO: 5011195 - DNA, 25 bp, Homo sapien
tagaatcatccctgtagaatcgagt

SEQ ID NO: 5011196 - DNA, 25 bp, Homo sapien
ccctgtagaatcgagtgtggtagcc

SEQ ID NO: 5011197 - DNA, 25 bp, Homo sapien
tcgagtgtggtagccttaggagtaa

SEQ ID NO: 5011198 - DNA, 25 bp, Homo sapien
cttgtatgttggtgtgtggctcttc

SEQ ID NO: 5011199 - DNA, 25 bp, Homo sapien
tgactggagttgacttggttttgag

SEQ ID NO: 5011200 - DNA, 25 bp, Homo sapien
gctcttcagacgtgactggagttga

SEQ ID NO: 5011201 - DNA, 25 bp, Homo sapien
tggtgtgtggctcttcagacgtgac

SEQ ID NO: 5011202 - DNA, 25 bp, Homo sapien
ttgacttttgtcagcgatttaaaca

SEQ ID NO: 5011203 - DNA, 25 bp, Homo sapien
tgtggtttgctgagactgattactt

SEQ ID NO: 5011204 - DNA, 25 bp, Homo sapien
gagccttcttcattccgacgagaac

SEQ ID NO: 5011205 - DNA, 25 bp, Homo sapien
cctataggcttcaccttgttgactt

SEQ ID NO: 5011206 - DNA, 25 bp, Homo sapien
cttctctgaggtggttctgaaaacc

SEQ ID NO: 5011207 - DNA, 25 bp, Homo sapien
aaccctctgtatttatgactgtgcc

SEQ ID NO: 5011208 - DNA, 25 bp, Homo sapien
ctgaaaaccctctgtatttatgact

SEQ ID NO: 5011209 - DNA, 25 bp, Homo sapien
ttctctgaggtggttctgaaaaccc

SEQ ID NO: 5011210 - DNA, 25 bp, Homo sapien
taagagaaagctcttctgactcctc

SEQ ID NO: 5011211 - DNA, 25 bp, Homo sapien
tttgtttaagagaaagctcttctga

SEQ ID NO: 5011212 - DNA, 25 bp, Homo sapien
tttaagagaaagctcttctgactcc

SEQ ID NO: 5011213 - DNA, 25 bp, Homo sapien
agagaaagctcttctgactcctctc

SEQ ID NO: 5011214 - DNA, 25 bp, Homo sapien
ccatactgatggatttagtctagat

SEQ ID NO: 5011215 - DNA, 25 bp, Homo sapien
tatccctggtaagtccatactgatg

SEQ ID NO: 5011216 - DNA, 25 bp, Homo sapien
taatttctcactatatccctggtaa

SEQ ID NO: 5011217 - DNA, 25 bp, Homo sapien
tctagatgagattgtgtagtaaact

SEQ ID NO: 5011218 - DNA, 25 bp, Homo sapien
tgaagtcctctccaacactggtggt

SEQ ID NO: 5011219 - DNA, 25 bp, Homo sapien
cattgtggaggctgatcatatggca

SEQ ID NO: 5011220 - DNA, 25 bp, Homo sapien
cagccagtaattgaggtgctgcctg

SEQ ID NO: 5011221 - DNA, 25 bp, Homo sapien
tgctgcctggagatagagtgaagtc

SEQ ID NO: 5011222 - DNA, 25 bp, Homo sapien
catagtagcctgtgatgaaagtgtt

SEQ ID NO: 5011223 - DNA, 25 bp, Homo sapien
cactgagagcacctatttgaaatga

SEQ ID NO: 5011224 - DNA, 25 bp, Homo sapien
tgacaaagggtccagaattactact

SEQ ID NO: 5011225 - DNA, 25 bp, Homo sapien
tgtccatagtacaaccattttggtg

SEQ ID NO: 5011226 - DNA, 25 bp, Homo sapien
ggttgtggatcttcatgttcacaaa

SEQ ID NO: 5011227 - DNA, 25 bp, Homo sapien
gctggagcaacaggtcttcccttga

SEQ ID NO: 5011228 - DNA, 25 bp, Homo sapien
gtaatgctagtgagacaatttagct

SEQ ID NO: 5011229 - DNA, 25 bp, Homo sapien
tcacaaatgtaatgctagtgagaca

SEQ ID NO: 5011230 - DNA, 25 bp, Homo sapien
cacccaaggaatcttgtaactcatt

SEQ ID NO: 5011231 - DNA, 25 bp, Homo sapien
aaggcagcacccaaggaatcttgta

SEQ ID NO: 5011232 - DNA, 25 bp, Homo sapien
tgcagctattccaacacggaaggca

SEQ ID NO: 5011233 - DNA, 25 bp, Homo sapien
ctgcagctattccaacacggaaggc

SEQ ID NO: 5011234 - DNA, 25 bp, Homo sapien
gagttagtgccattagatccacttg

SEQ ID NO: 5011235 - DNA, 25 bp, Homo sapien
agagtgagttgccagtaggactgat

SEQ ID NO: 5011236 - DNA, 25 bp, Homo sapien
gtctgtgtctagcttgcactgaggg

SEQ ID NO: 5011237 - DNA, 25 bp, Homo sapien
cccatgaacactggtaagggtagag

SEQ ID NO: 5011238 - DNA, 25 bp, Homo sapien
tttcccatggcccaatgtagcaggg

SEQ ID NO: 5011239 - DNA, 25 bp, Homo sapien
gacagcagatgtcttctgatatgac

SEQ ID NO: 5011240 - DNA, 25 bp, Homo sapien
cccaatgtagcagggcttgtaaaaa

SEQ ID NO: 5011241 - DNA, 25 bp, Homo sapien
cagatgtcttctgatatgaccttta

SEQ ID NO: 5011242 - DNA, 25 bp, Homo sapien
tcaaatatatccttgcatctaagtc

SEQ ID NO: 5011243 - DNA, 25 bp, Homo sapien
tctaagtccctgctgagtgaaaggt

SEQ ID NO: 5011244 - DNA, 25 bp, Homo sapien
gaatgctcagttttgataagtcaaa

SEQ ID NO: 5011245 - DNA, 25 bp, Homo sapien
ttttaatgcatgtctgaatgctcag

SEQ ID NO: 5011246 - DNA, 25 bp, Homo sapien
ggtgtcatctacaattgaaaaggag

SEQ ID NO: 5011247 - DNA, 25 bp, Homo sapien
tccagagcctccacaaattgtaaat

SEQ ID NO: 5011248 - DNA, 25 bp, Homo sapien
ttggtgtcatctacaattgaaaagg

SEQ ID NO: 5011249 - DNA, 25 bp, Homo sapien
ccagagcctccacaaattgtaaata

SEQ ID NO: 5011250 - DNA, 25 bp, Homo sapien
ttttctgtacctcgtatctctcgta

SEQ ID NO: 5011251 - DNA, 25 bp, Homo sapien
tgttttctgtacctcgtatctctcg

SEQ ID NO: 5011252 - DNA, 25 bp, Homo sapien
atgttttctgtacctcgtatctctc

SEQ ID NO: 5011253 - DNA, 25 bp, Homo sapien
tctgtacctcgtatctctcgtatct

SEQ ID NO: 5011254 - DNA, 25 bp, Homo sapien
ctcactgtgcatcgggccttctgtc

SEQ ID NO: 5011255 - DNA, 25 bp, Homo sapien
ccatattcacactgcttttgattaa

SEQ ID NO: 5011256 - DNA, 25 bp, Homo sapien
tcgatccgtttaccttctcactgtg

SEQ ID NO: 5011257 - DNA, 25 bp, Homo sapien
gcttttgattaatcgatccgtttac

SEQ ID NO: 5011258 - DNA, 25 bp, Homo sapien
taatagaagcggattttgtcatgtt

SEQ ID NO: 5011259 - DNA, 25 bp, Homo sapien
tgtgctgctatgatctctacttact

SEQ ID NO: 5011260 - DNA, 25 bp, Homo sapien
gtgtgctgctatgatctctacttac

SEQ ID NO: 5011261 - DNA, 25 bp, Homo sapien
tttttaatagaagcggattttgtca

SEQ ID NO: 5011262 - DNA, 25 bp, Homo sapien
cagaggcaatgcgaaggttgtagat

SEQ ID NO: 5011263 - DNA, 25 bp, Homo sapien
tgacagcctgcctatattttgcagc

SEQ ID NO: 5011264 - DNA, 25 bp, Homo sapien
ggttgtagattgcataaagtgtgac

SEQ ID NO: 5011265 - DNA, 25 bp, Homo sapien
caaaagcacaagcatattatccaat

SEQ ID NO: 5011266 - DNA, 25 bp, Homo sapien
cactggtactcacttttcccatttt

SEQ ID NO: 5011267 - DNA, 25 bp, Homo sapien
cttttcccattttcattcagagttc

SEQ ID NO: 5011268 - DNA, 25 bp, Homo sapien
tcacttttcccattttcattcagag

SEQ ID NO: 5011269 - DNA, 25 bp, Homo sapien
tcactggtactcacttttcccattt

SEQ ID NO: 5011270 - DNA, 25 bp, Homo sapien
gatttccttgcggtttccagattcc

SEQ ID NO: 5011271 - DNA, 25 bp, Homo sapien
taaactattattgcagttgacagag

SEQ ID NO: 5011272 - DNA, 25 bp, Homo sapien
gacacaaactagctacttgctcatt

SEQ ID NO: 5011273 - DNA, 25 bp, Homo sapien
gaaacaacagtgtgacacaaactag

SEQ ID NO: 5011274 - DNA, 25 bp, Homo sapien
gtttgcaagcaaggaagggtgcctt

SEQ ID NO: 5011275 - DNA, 25 bp, Homo sapien
catgcacgacgaggtggcatcacct

SEQ ID NO: 5011276 - DNA, 25 bp, Homo sapien
tcttccttcgctgtgtgattcagtc

SEQ ID NO: 5011277 - DNA, 25 bp, Homo sapien
tgattcagtcttaaggtcacgaggg

SEQ ID NO: 5011278 - DNA, 25 bp, Homo sapien
tgattgcttcttgcaggatatccgt

SEQ ID NO: 5011279 - DNA, 25 bp, Homo sapien
cgttctagcaccagggatttatcat

SEQ ID NO: 5011280 - DNA, 25 bp, Homo sapien
cctgtagtgtatccatcagggaata

SEQ ID NO: 5011281 - DNA, 25 bp, Homo sapien
tatcatagaagtcagccttgatttc

SEQ ID NO: 5011282 - DNA, 25 bp, Homo sapien
tttatgagagtaactccatcagatt

SEQ ID NO: 5011283 - DNA, 25 bp, Homo sapien
tatgagagtaactccatcagatttc

SEQ ID NO: 5011284 - DNA, 25 bp, Homo sapien
ttttatgagagtaactccatcagat

SEQ ID NO: 5011285 - DNA, 25 bp, Homo sapien
tgagagtaactccatcagatttcat

SEQ ID NO: 5011286 - DNA, 25 bp, Homo sapien
tacatattaagtaagggaaagggca

SEQ ID NO: 5011287 - DNA, 25 bp, Homo sapien
aaagggcattgctgacaagatctca

SEQ ID NO: 5011288 - DNA, 25 bp, Homo sapien
agggaaagggcattgctgacaagat

SEQ ID NO: 5011289 - DNA, 25 bp, Homo sapien
agggcattgctgacaagatctcaaa

SEQ ID NO: 5011290 - DNA, 25 bp, Homo sapien
ggtctactctagagatcaggttcat

SEQ ID NO: 5011291 - DNA, 25 bp, Homo sapien
gacctgagctatagggaatggcttt

SEQ ID NO: 5011292 - DNA, 25 bp, Homo sapien
cagttgactacacttacatgggtcc

SEQ ID NO: 5011293 - DNA, 25 bp, Homo sapien
tacttaggcgccatggacctgagct

SEQ ID NO: 5011294 - DNA, 25 bp, Homo sapien
caagtttccaacaaggatctttgca

SEQ ID NO: 5011295 - DNA, 25 bp, Homo sapien
ttccttcaccatagaggccaaggct

SEQ ID NO: 5011296 - DNA, 25 bp, Homo sapien
atggcaatcagcccacaatgggctt

SEQ ID NO: 5011297 - DNA, 25 bp, Homo sapien
tccaacaaggatctttgcaatgtgc

SEQ ID NO: 5011298 - DNA, 25 bp, Homo sapien
gctgggagtactccagatgtcttaa

SEQ ID NO: 5011299 - DNA, 25 bp, Homo sapien
cagatgctgggagtactccagatgt

SEQ ID NO: 5011300 - DNA, 25 bp, Homo sapien
tccagatgtcttaacacagtggtag

SEQ ID NO: 5011301 - DNA, 25 bp, Homo sapien
ccagatgtcttaacacagtggtagg

SEQ ID NO: 5011302 - DNA, 25 bp, Homo sapien
ttttgggtccaggataggaatgctg

SEQ ID NO: 5011303 - DNA, 25 bp, Homo sapien
ggtccaggataggaatgctgaaatt

SEQ ID NO: 5011304 - DNA, 25 bp, Homo sapien
ccaggataggaatgctgaaattgcc

SEQ ID NO: 5011305 - DNA, 25 bp, Homo sapien
taggaatgctgaaattgccaaaagg

SEQ ID NO: 5011306 - DNA, 25 bp, Homo sapien
tgaaagcttctggcttccctaccat

SEQ ID NO: 5011307 - DNA, 25 bp, Homo sapien
gatgaaagcttctggcttccctacc

SEQ ID NO: 5011308 - DNA, 25 bp, Homo sapien
atgaaagcttctggcttccctacca

SEQ ID NO: 5011309 - DNA, 25 bp, Homo sapien
gatacaatgtgcatcatttccccga

SEQ ID NO: 5011310 - DNA, 25 bp, Homo sapien
gacttgaatatccacaggccaatga

SEQ ID NO: 5011311 - DNA, 25 bp, Homo sapien
gatctgatagctcacacattctgac

SEQ ID NO: 5011312 - DNA, 25 bp, Homo sapien
gcagttcatcccaatgagtgtccag

SEQ ID NO: 5011313 - DNA, 25 bp, Homo sapien
aaattggggttcttgatgggatcaa

SEQ ID NO: 5011314 - DNA, 25 bp, Homo sapien
agaaattggggttcttgatgggatc

SEQ ID NO: 5011315 - DNA, 25 bp, Homo sapien
gggatcaataaacttcagataacac

SEQ ID NO: 5011316 - DNA, 25 bp, Homo sapien
gatcaataaacttcagataacacca

SEQ ID NO: 5011317 - DNA, 25 bp, Homo sapien
cactcatgattgtttggtgacacta

SEQ ID NO: 5011318 - DNA, 25 bp, Homo sapien
tattatgtagacaaagcaatcagct

SEQ ID NO: 5011319 - DNA, 25 bp, Homo sapien
acttggatggctttgacatagcagc

SEQ ID NO: 5011320 - DNA, 25 bp, Homo sapien
gattgatttcactttttcgccacgt

SEQ ID NO: 5011321 - DNA, 25 bp, Homo sapien
tttatagggtcaaagaagcacctaa

SEQ ID NO: 5011322 - DNA, 25 bp, Homo sapien
cctttatagggtcaaagaagcacct

SEQ ID NO: 5011323 - DNA, 25 bp, Homo sapien
atagggtcaaagaagcacctaaagg

SEQ ID NO: 5011324 - DNA, 25 bp, Homo sapien
tatagggtcaaagaagcacctaaag

SEQ ID NO: 5011325 - DNA, 25 bp, Homo sapien
attttttggatgtatggcataattc

SEQ ID NO: 5011326 - DNA, 25 bp, Homo sapien
atgccattgctcatatcagtaggta

SEQ ID NO: 5011327 - DNA, 25 bp, Homo sapien
agtaacttttctggccagcgcggtg

SEQ ID NO: 5011328 - DNA, 25 bp, Homo sapien
ttgcctgttttagcttatcattaaa

SEQ ID NO: 5011329 - DNA, 25 bp, Homo sapien
atagaggctgatcagtctcagaagt

SEQ ID NO: 5011330 - DNA, 25 bp, Homo sapien
gatcagtctcagaagtctgcactgg

SEQ ID NO: 5011331 - DNA, 25 bp, Homo sapien
acaatttttgtagccccacatagag

SEQ ID NO: 5011332 - DNA, 25 bp, Homo sapien
ctacaatttttgtagccccacatag

SEQ ID NO: 5011333 - DNA, 25 bp, Homo sapien
ttccttctgcatccgacagtacaga

SEQ ID NO: 5011334 - DNA, 25 bp, Homo sapien
tctcttactggcagcttaaaagctt

SEQ ID NO: 5011335 - DNA, 25 bp, Homo sapien
tcctcttgcctgtggtgataataca

SEQ ID NO: 5011336 - DNA, 25 bp, Homo sapien
tacagaccagcctctttcaaccaga

SEQ ID NO: 5011337 - DNA, 25 bp, Homo sapien
gggttaccccttagcatgttctgca

SEQ ID NO: 5011338 - DNA, 25 bp, Homo sapien
ccttgtattggcttgaggcacgtca

SEQ ID NO: 5011339 - DNA, 25 bp, Homo sapien
ggctggcatcggacttctacaagtg

SEQ ID NO: 5011340 - DNA, 25 bp, Homo sapien
gctggcctgtcaactcgctttcaaa

SEQ ID NO: 5011341 - DNA, 25 bp, Homo sapien
caactgtttcataagtatttctaac

SEQ ID NO: 5011342 - DNA, 25 bp, Homo sapien
aacaacagtaatagagcaccgcggg

SEQ ID NO: 5011343 - DNA, 25 bp, Homo sapien
tttgcattgcatagaaacaacagta

SEQ ID NO: 5011344 - DNA, 25 bp, Homo sapien
tcttgcctaatagcttcatgatcac

SEQ ID NO: 5011345 - DNA, 25 bp, Homo sapien
caatcaattgacaggttgtttgaga

SEQ ID NO: 5011346 - DNA, 25 bp, Homo sapien
catgaactgggactgtgtaaatcaa

SEQ ID NO: 5011347 - DNA, 25 bp, Homo sapien
attataggatgagtacaagtaccat

SEQ ID NO: 5011348 - DNA, 25 bp, Homo sapien
tgtcatggttatacaatttgcaggt

SEQ ID NO: 5011349 - DNA, 25 bp, Homo sapien
tttcagccaataaaccccagtggat

SEQ ID NO: 5011350 - DNA, 25 bp, Homo sapien
tcttgaagaagctagtctgaggctc

SEQ ID NO: 5011351 - DNA, 25 bp, Homo sapien
gaaaagccacatttttagaggttgc

SEQ ID NO: 5011352 - DNA, 25 bp, Homo sapien
tggttcctagccctggtgactgaat

SEQ ID NO: 5011353 - DNA, 25 bp, Homo sapien
ccccgtgtaagttaacaaatcactg

SEQ ID NO: 5011354 - DNA, 25 bp, Homo sapien
tcagccaaacttggaatttggtcct

SEQ ID NO: 5011355 - DNA, 25 bp, Homo sapien
cagtgaatgtgaataacaagttctc

SEQ ID NO: 5011356 - DNA, 25 bp, Homo sapien
ggtccttggtataccacagagccaa

SEQ ID NO: 5011357 - DNA, 25 bp, Homo sapien
gctccatctgtgagggcgcaccctt

SEQ ID NO: 5011358 - DNA, 25 bp, Homo sapien
tctgtgagggcgcacccttctatag

SEQ ID NO: 5011359 - DNA, 25 bp, Homo sapien
attgctccatctgtgagggcgcacc

SEQ ID NO: 5011360 - DNA, 25 bp, Homo sapien
ccttctatagaagtaaattgccttg

SEQ ID NO: 5011361 - DNA, 25 bp, Homo sapien
tcttttcaccttcatattctaccat

SEQ ID NO: 5011362 - DNA, 25 bp, Homo sapien
ttcttttcaccttcatattctacca

SEQ ID NO: 5011363 - DNA, 25 bp, Homo sapien
tttcttttcaccttcatattctacc

SEQ ID NO: 5011364 - DNA, 25 bp, Homo sapien
gtgtgtcagttgcagctcccgagga

SEQ ID NO: 5011365 - DNA, 25 bp, Homo sapien
cctttgtgtgtcagttgcagctccc

SEQ ID NO: 5011366 - DNA, 25 bp, Homo sapien
ctcatttccactgccttgcttaaaa

SEQ ID NO: 5011367 - DNA, 25 bp, Homo sapien
ttccactgccttgcttaaaatttcc

SEQ ID NO: 5011368 - DNA, 25 bp, Homo sapien
tggttctgactgattaatgtattct

SEQ ID NO: 5011369 - DNA, 25 bp, Homo sapien
tattctttgccatgtcatactccat

SEQ ID NO: 5011370 - DNA, 25 bp, Homo sapien
gaaggttctttggtcagcatagtga

SEQ ID NO: 5011371 - DNA, 25 bp, Homo sapien
tagtgaatgcaatggttctgactga

SEQ ID NO: 5011372 - DNA, 25 bp, Homo sapien
tctgagaagcccatgtaggttcctg

SEQ ID NO: 5011373 - DNA, 25 bp, Homo sapien
ccatctccccaagaagtattggtct

SEQ ID NO: 5011374 - DNA, 25 bp, Homo sapien
tctccccaagaagtattggtctcta

SEQ ID NO: 5011375 - DNA, 25 bp, Homo sapien
tcatccatcatcgtaaatagaataa

SEQ ID NO: 5011376 - DNA, 25 bp, Homo sapien
gcagagccatcaaggattttcaggg

SEQ ID NO: 5011377 - DNA, 25 bp, Homo sapien
tatggcaagtaatgcaggcaaactc

SEQ ID NO: 5011378 - DNA, 25 bp, Homo sapien
tgaggagccagcagtttgactgaat

SEQ ID NO: 5011379 - DNA, 25 bp, Homo sapien
tctggaatacagtacatggtggcat

SEQ ID NO: 5011380 - DNA, 25 bp, Homo sapien
tgttaacatcaaaacacttgccaaa

SEQ ID NO: 5011381 - DNA, 25 bp, Homo sapien
gttaacatcaaaacacttgccaaaa

SEQ ID NO: 5011382 - DNA, 25 bp, Homo sapien
ctgttaacatcaaaacacttgccaa

SEQ ID NO: 5011383 - DNA, 25 bp, Homo sapien
cctgttaacatcaaaacacttgcca

SEQ ID NO: 5011384 - DNA, 25 bp, Homo sapien
tcctctttctctcagatttccaagc

SEQ ID NO: 5011385 - DNA, 25 bp, Homo sapien
tgtcctctttctctcagatttccaa

SEQ ID NO: 5011386 - DNA, 25 bp, Homo sapien
ctctttctctcagatttccaagcat

SEQ ID NO: 5011387 - DNA, 25 bp, Homo sapien
cttgtcctctttctctcagatttcc

SEQ ID NO: 5011388 - DNA, 25 bp, Homo sapien
aggtaagtcccttctgcctatgaac

SEQ ID NO: 5011389 - DNA, 25 bp, Homo sapien
aaggtaagtcccttctgcctatgaa

SEQ ID NO: 5011390 - DNA, 25 bp, Homo sapien
gcaaggtaagtcccttctgcctatg

SEQ ID NO: 5011391 - DNA, 25 bp, Homo sapien
aggcaaggtaagtcccttctgccta

SEQ ID NO: 5011392 - DNA, 25 bp, Homo sapien
aaaatcagatactccaacctcaagg

SEQ ID NO: 5011393 - DNA, 25 bp, Homo sapien
aatcagatactccaacctcaaggaa

SEQ ID NO: 5011394 - DNA, 25 bp, Homo sapien
tcagatactccaacctcaaggaact

SEQ ID NO: 5011395 - DNA, 25 bp, Homo sapien
gatactccaacctcaaggaactggg

SEQ ID NO: 5011396 - DNA, 25 bp, Homo sapien
gggtcaactaagatgtcaactcagg

SEQ ID NO: 5011397 - DNA, 25 bp, Homo sapien
tctataacccagaagtagttggcct

SEQ ID NO: 5011398 - DNA, 25 bp, Homo sapien
tgaggtgacacaataagagcttcgc

SEQ ID NO: 5011399 - DNA, 25 bp, Homo sapien
gaagttccaagaccagatgcagcag

SEQ ID NO: 5011400 - DNA, 25 bp, Homo sapien
gatccagtttccaagtatcaccaga

SEQ ID NO: 5011401 - DNA, 25 bp, Homo sapien
cagtttccaagtatcaccagatcca

SEQ ID NO: 5011402 - DNA, 25 bp, Homo sapien
gtttccaagtatcaccagatccact

SEQ ID NO: 5011403 - DNA, 25 bp, Homo sapien
tccagtttccaagtatcaccagatc

SEQ ID NO: 5011404 - DNA, 25 bp, Homo sapien
ccggagagtccttcgtttcccacat

SEQ ID NO: 5011405 - DNA, 25 bp, Homo sapien
tctttgtgctagtactgcttctggg

SEQ ID NO: 5011406 - DNA, 25 bp, Homo sapien
gctttctttgtgctagtactgcttc

SEQ ID NO: 5011407 - DNA, 25 bp, Homo sapien
tttgtgctagtactgcttctgggat

SEQ ID NO: 5011408 - DNA, 25 bp, Homo sapien
tttctttgtgctagtactgcttctg

SEQ ID NO: 5011409 - DNA, 25 bp, Homo sapien
gactcctcttgtatagaggaaacca

SEQ ID NO: 5011410 - DNA, 25 bp, Homo sapien
ctgtgcatgtgcgatttctcctttc

SEQ ID NO: 5011411 - DNA, 25 bp, Homo sapien
ttcatgactcctcttgtatagagga

SEQ ID NO: 5011412 - DNA, 25 bp, Homo sapien
catgactcctcttgtatagaggaaa

SEQ ID NO: 5011413 - DNA, 25 bp, Homo sapien
ctttccatgattgaataactcactc

SEQ ID NO: 5011414 - DNA, 25 bp, Homo sapien
taactcactcagaggctcattttca

SEQ ID NO: 5011415 - DNA, 25 bp, Homo sapien
ctcctcatgtgggtaggtgactgag

SEQ ID NO: 5011416 - DNA, 25 bp, Homo sapien
agaattaattgcctcctcctctgta

SEQ ID NO: 5011417 - DNA, 25 bp, Homo sapien
caacgtgcagctttttgtcatccat

SEQ ID NO: 5011418 - DNA, 25 bp, Homo sapien
tcgtattcaccaacgtgcagctttt

SEQ ID NO: 5011419 - DNA, 25 bp, Homo sapien
caccaacgtgcagctttttgtcatc

SEQ ID NO: 5011420 - DNA, 25 bp, Homo sapien
tgattgcctcgtattcaccaacgtg

SEQ ID NO: 5011421 - DNA, 25 bp, Homo sapien
tctaggcttgtactcatagtcaggg

SEQ ID NO: 5011422 - DNA, 25 bp, Homo sapien
tggtctaggcttgtactcatagtca

SEQ ID NO: 5011423 - DNA, 25 bp, Homo sapien
gcaggtgcactttggtctaggcttg

SEQ ID NO: 5011424 - DNA, 25 bp, Homo sapien
gcactttggtctaggcttgtactca

SEQ ID NO: 5011425 - DNA, 25 bp, Homo sapien
gcgttcactggacgctttatgaggg

SEQ ID NO: 5011426 - DNA, 25 bp, Homo sapien
ttggagtcacgcatgccaggaaagg

SEQ ID NO: 5011427 - DNA, 25 bp, Homo sapien
ctgatgttggagtcacgcatgccag

SEQ ID NO: 5011428 - DNA, 25 bp, Homo sapien
tctgctcatctttagcccatatcat

SEQ ID NO: 5011429 - DNA, 25 bp, Homo sapien
taacagccagttgctgagtcagacc

SEQ ID NO: 5011430 - DNA, 25 bp, Homo sapien
ccttttctgtccagcagttatagag

SEQ ID NO: 5011431 - DNA, 25 bp, Homo sapien
cattctgtttaacagccagttgctg

SEQ ID NO: 5011432 - DNA, 25 bp, Homo sapien
gagtcagaccctccactgttgtttt

SEQ ID NO: 5011433 - DNA, 25 bp, Homo sapien
aggactaccaaacgctgctgcaaca

SEQ ID NO: 5011434 - DNA, 25 bp, Homo sapien
gaaggactaccaaacgctgctgcaa

SEQ ID NO: 5011435 - DNA, 25 bp, Homo sapien
gactaccaaacgctgctgcaacaca

SEQ ID NO: 5011436 - DNA, 25 bp, Homo sapien
ctaccaaacgctgctgcaacacaag

SEQ ID NO: 5011437 - DNA, 25 bp, Homo sapien
tgtgggtgatttgccatcagaggtc

SEQ ID NO: 5011438 - DNA, 25 bp, Homo sapien
gggcctgccccactgtttattctca

SEQ ID NO: 5011439 - DNA, 25 bp, Homo sapien
tgccccactgtttattctcagagct

SEQ ID NO: 5011440 - DNA, 25 bp, Homo sapien
gtgatttgccatcagaggtcttggg

SEQ ID NO: 5011441 - DNA, 25 bp, Homo sapien
cctcatgaacaaagcaggaataatg

SEQ ID NO: 5011442 - DNA, 25 bp, Homo sapien
gttccctcatgaacaaagcaggaat

SEQ ID NO: 5011443 - DNA, 25 bp, Homo sapien
cagttccctcatgaacaaagcagga

SEQ ID NO: 5011444 - DNA, 25 bp, Homo sapien
gtttccagttccctcatgaacaaag

SEQ ID NO: 5011445 - DNA, 25 bp, Homo sapien
tggatgggatctacaaacaccgaac

SEQ ID NO: 5011446 - DNA, 25 bp, Homo sapien
cccaggtaggactagtcaaacagtc

SEQ ID NO: 5011447 - DNA, 25 bp, Homo sapien
tagtcaggtccaagccacaatcatt

SEQ ID NO: 5011448 - DNA, 25 bp, Homo sapien
gatgcatgtatttccggaacccagg

SEQ ID NO: 5011449 - DNA, 25 bp, Homo sapien
agggtatggttgtgagcaggtggcc

SEQ ID NO: 5011450 - DNA, 25 bp, Homo sapien
gtgctcctcggaagcccccgaggcg

SEQ ID NO: 5011451 - DNA, 25 bp, Homo sapien
tatggttgtgagcaggtggccatga

SEQ ID NO: 5011452 - DNA, 25 bp, Homo sapien
actgggaatgtcgttctccgaggcg

SEQ ID NO: 5011453 - DNA, 25 bp, Homo sapien
ggtaggtaggcggagttattcacat

SEQ ID NO: 5011454 - DNA, 25 bp, Homo sapien
catgaccttcgtactgtgttacaca

SEQ ID NO: 5011455 - DNA, 25 bp, Homo sapien
agtcatgattgcaaactgctgggcc

SEQ ID NO: 5011456 - DNA, 25 bp, Homo sapien
tcttcgttcacatgcacgggtaggt

SEQ ID NO: 5011457 - DNA, 25 bp, Homo sapien
caaagcatgccaggccgacgcattc

SEQ ID NO: 5011458 - DNA, 25 bp, Homo sapien
gaaagagtgatacgcgtggatgctc

SEQ ID NO: 5011459 - DNA, 25 bp, Homo sapien
tgatacgcgtggatgctcagggacc

SEQ ID NO: 5011460 - DNA, 25 bp, Homo sapien
aactgcaaagcatgccaggccgacg

SEQ ID NO: 5011461 - DNA, 25 bp, Homo sapien
cagtgaggcccagcacatagaattc

SEQ ID NO: 5011462 - DNA, 25 bp, Homo sapien
catagaattcaccttccgattaggg

SEQ ID NO: 5011463 - DNA, 25 bp, Homo sapien
gaggagggatcccagctatgaatct

SEQ ID NO: 5011464 - DNA, 25 bp, Homo sapien
gagtatctgcaagtcccacgaagca

SEQ ID NO: 5011465 - DNA, 25 bp, Homo sapien
ctcgcgagctatacggcaatagttg

SEQ ID NO: 5011466 - DNA, 25 bp, Homo sapien
ttggcgaatctgaggaaacctagct

SEQ ID NO: 5011467 - DNA, 25 bp, Homo sapien
tagctggttctttcgtagcatggaa

SEQ ID NO: 5011468 - DNA, 25 bp, Homo sapien
tagcatggaaggtgcattgagtccc

SEQ ID NO: 5011469 - DNA, 25 bp, Homo sapien
cctcctgaggggaagttctgtcccg

SEQ ID NO: 5011470 - DNA, 25 bp, Homo sapien
taagaggaagtaccgcttctttaca

SEQ ID NO: 5011471 - DNA, 25 bp, Homo sapien
caagcacgacttggcacggaagaac

SEQ ID NO: 5011472 - DNA, 25 bp, Homo sapien
gcttctttacaagcacgacttggca

SEQ ID NO: 5011473 - DNA, 25 bp, Homo sapien
tttcttcttcaagagaattgaacat

SEQ ID NO: 5011474 - DNA, 25 bp, Homo sapien
cgtactgtttcacagccaacaccag

SEQ ID NO: 5011475 - DNA, 25 bp, Homo sapien
gcaactgaatcaccccagatctttt

SEQ ID NO: 5011476 - DNA, 25 bp, Homo sapien
gccaacaccagcaactgaatcaccc

SEQ ID NO: 5011477 - DNA, 25 bp, Homo sapien
catctcttccccaattcctctgtca

SEQ ID NO: 5011478 - DNA, 25 bp, Homo sapien
tctgtcacactcatctaggaaccca

SEQ ID NO: 5011479 - DNA, 25 bp, Homo sapien
actactagtggtcccccagtgcctt

SEQ ID NO: 5011480 - DNA, 25 bp, Homo sapien
tagcctgatgttgcgactgtatcat

SEQ ID NO: 5011481 - DNA, 25 bp, Homo sapien
tcaggagtaggaagcacgagaatcg

SEQ ID NO: 5011482 - DNA, 25 bp, Homo sapien
ggagtggctagtaattgaaagagaa

SEQ ID NO: 5011483 - DNA, 25 bp, Homo sapien
taggtctttcaggtgtaaagtggag

SEQ ID NO: 5011484 - DNA, 25 bp, Homo sapien
gctaggtctttcaggtgtaaagtgg

SEQ ID NO: 5011485 - DNA, 25 bp, Homo sapien
gtgtaaagtggagtggctagtaatt

SEQ ID NO: 5011486 - DNA, 25 bp, Homo sapien
actgtactcctcagttattgttgct

SEQ ID NO: 5011487 - DNA, 25 bp, Homo sapien
ttattgttgctacaatctctggctc

SEQ ID NO: 5011488 - DNA, 25 bp, Homo sapien
tactcctcagttattgttgctacaa

SEQ ID NO: 5011489 - DNA, 25 bp, Homo sapien
cagggtcacattcaaattaaggaac

SEQ ID NO: 5011490 - DNA, 25 bp, Homo sapien
ctaaataagaaaacagcaggacaac

SEQ ID NO: 5011491 - DNA, 25 bp, Homo sapien
ataagaaaacagcaggacaactgtc

SEQ ID NO: 5011492 - DNA, 25 bp, Homo sapien
aaataagaaaacagcaggacaactg

SEQ ID NO: 5011493 - DNA, 25 bp, Homo sapien
aagaaaacagcaggacaactgtcat

SEQ ID NO: 5011494 - DNA, 25 bp, Homo sapien
taggtgtagtcactcatgattttgg

SEQ ID NO: 5011495 - DNA, 25 bp, Homo sapien
ataggtgtagtcactcatgattttg

SEQ ID NO: 5011496 - DNA, 25 bp, Homo sapien
aggtgtagtcactcatgattttgga

SEQ ID NO: 5011497 - DNA, 25 bp, Homo sapien
cataggtgtagtcactcatgatttt

SEQ ID NO: 5011498 - DNA, 25 bp, Homo sapien
ctttctcttccccaaggttgatgtc

SEQ ID NO: 5011499 - DNA, 25 bp, Homo sapien
tagtagatgttcaattctttctctt

SEQ ID NO: 5011500 - DNA, 25 bp, Homo sapien
caaggttgatgtctacaagtttcac

SEQ ID NO: 5011501 - DNA, 25 bp, Homo sapien
ctatttaggatagtagatgttcaat

SEQ ID NO: 5011502 - DNA, 25 bp, Homo sapien
tgttttccacttaggcacactcttg

SEQ ID NO: 5011503 - DNA, 25 bp, Homo sapien
tgaatggaggaaggcaccaagtgaa

SEQ ID NO: 5011504 - DNA, 25 bp, Homo sapien
tgctggatccttttcataagcagaa

SEQ ID NO: 5011505 - DNA, 25 bp, Homo sapien
cagatcccttgcgcctccttgtttt

SEQ ID NO: 5011506 - DNA, 25 bp, Homo sapien
tgaccacatttgatgtgaacaatgg

SEQ ID NO: 5011507 - DNA, 25 bp, Homo sapien
ggtccttcctgttcgttatccttga

SEQ ID NO: 5011508 - DNA, 25 bp, Homo sapien
tcttggcggccaaacagcttttata

SEQ ID NO: 5011509 - DNA, 25 bp, Homo sapien
ggcggccaaacagcttttatagtca

SEQ ID NO: 5011510 - DNA, 25 bp, Homo sapien
tccatgacatttagaaatggagttt

SEQ ID NO: 5011511 - DNA, 25 bp, Homo sapien
ggatccatgacatttagaaatggag

SEQ ID NO: 5011512 - DNA, 25 bp, Homo sapien
ttggaggatccatgacatttagaaa

SEQ ID NO: 5011513 - DNA, 25 bp, Homo sapien
ggaggatccatgacatttagaaatg

SEQ ID NO: 5011514 - DNA, 25 bp, Homo sapien
ccaactcctcgaaccacagtatttt

SEQ ID NO: 5011515 - DNA, 25 bp, Homo sapien
tattttctctggtaggctcatttgt

SEQ ID NO: 5011516 - DNA, 25 bp, Homo sapien
aactcctcgaaccacagtattttct

SEQ ID NO: 5011517 - DNA, 25 bp, Homo sapien
ctcctcgaaccacagtattttctct

SEQ ID NO: 5011518 - DNA, 25 bp, Homo sapien
gactgaaagtgcaacggatttgtca

SEQ ID NO: 5011519 - DNA, 25 bp, Homo sapien
tctggcagttcccaatgttgatgga

SEQ ID NO: 5011520 - DNA, 25 bp, Homo sapien
tctcctactgccaacaggcacagga

SEQ ID NO: 5011521 - DNA, 25 bp, Homo sapien
aagaatcaaagtggccttcaatggg

SEQ ID NO: 5011522 - DNA, 25 bp, Homo sapien
aaggtgtgcccggctttgagtgatg

SEQ ID NO: 5011523 - DNA, 25 bp, Homo sapien
agctgaaggtgtgcccggctttgag

SEQ ID NO: 5011524 - DNA, 25 bp, Homo sapien
gatagccaatagccttgtccagctg

SEQ ID NO: 5011525 - DNA, 25 bp, Homo sapien
cttgtccagctgagctaacaaattc

SEQ ID NO: 5011526 - DNA, 25 bp, Homo sapien
caaagttcataggattgaagtgtca

SEQ ID NO: 5011527 - DNA, 25 bp, Homo sapien
gaagcgctctaagatgtctggaatc

SEQ ID NO: 5011528 - DNA, 25 bp, Homo sapien
taaagactatgagtacaagaagttc

SEQ ID NO: 5011529 - DNA, 25 bp, Homo sapien
taccacttataatggcactgtgcca

SEQ ID NO: 5011530 - DNA, 25 bp, Homo sapien
ccttttcaacctgcttcgagtgagg

SEQ ID NO: 5011531 - DNA, 25 bp, Homo sapien
gccatcctaatatacagcaagacca

SEQ ID NO: 5011532 - DNA, 25 bp, Homo sapien
cacaggtaagaactctgcaggtcca

SEQ ID NO: 5011533 - DNA, 25 bp, Homo sapien
gacttttagggtgatccagttccac

SEQ ID NO: 5011534 - DNA, 25 bp, Homo sapien
tgcctaaggccagttctgtatgcag

SEQ ID NO: 5011535 - DNA, 25 bp, Homo sapien
gagaaaaagtggcccagttgttgga

SEQ ID NO: 5011536 - DNA, 25 bp, Homo sapien
ccagttctgtatgcagggagatgct

SEQ ID NO: 5011537 - DNA, 25 bp, Homo sapien
ttagtagataattttgcctaaggcc

SEQ ID NO: 5011538 - DNA, 25 bp, Homo sapien
gaactcaggaatccgtatggccaca

SEQ ID NO: 5011539 - DNA, 25 bp, Homo sapien
tgtttctaagaaagcgtgccatgaa

SEQ ID NO: 5011540 - DNA, 25 bp, Homo sapien
ggccacatacagtccatctttaaga

SEQ ID NO: 5011541 - DNA, 25 bp, Homo sapien
tttgtgtttccacacctgggccaac

SEQ ID NO: 5011542 - DNA, 25 bp, Homo sapien
ctctccataagaccaaagttgctat

SEQ ID NO: 5011543 - DNA, 25 bp, Homo sapien
ctccataagaccaaagttgctattt

SEQ ID NO: 5011544 - DNA, 25 bp, Homo sapien
cataagaccaaagttgctatttagg

SEQ ID NO: 5011545 - DNA, 25 bp, Homo sapien
ccataagaccaaagttgctatttag

SEQ ID NO: 5011546 - DNA, 25 bp, Homo sapien
ctcttgctcctggtggccaatgaca

SEQ ID NO: 5011547 - DNA, 25 bp, Homo sapien
taacataaccaaactgctcttgctc

SEQ ID NO: 5011548 - DNA, 25 bp, Homo sapien
ccattcttgggatctattgtcctca

SEQ ID NO: 5011549 - DNA, 25 bp, Homo sapien
gctacttgggcctttccattcttgg

SEQ ID NO: 5011550 - DNA, 25 bp, Homo sapien
aacctgggtggcataaattttgtag

SEQ ID NO: 5011551 - DNA, 25 bp, Homo sapien
gccaattaaaagtacgcgtttctgc

SEQ ID NO: 5011552 - DNA, 25 bp, Homo sapien
acgcgtttctgccttcttggtctag

SEQ ID NO: 5011553 - DNA, 25 bp, Homo sapien
tgtagcagaacctgggtggcataaa

SEQ ID NO: 5011554 - DNA, 25 bp, Homo sapien
tgatacagtcaaaaccaaggcagca

SEQ ID NO: 5011555 - DNA, 25 bp, Homo sapien
catttgtgtggttaaaggttgccgc

SEQ ID NO: 5011556 - DNA, 25 bp, Homo sapien
gagattaatagcatgaccccttgac

SEQ ID NO: 5011557 - DNA, 25 bp, Homo sapien
tgccgcagcagtcaaagggttatag

SEQ ID NO: 5011558 - DNA, 25 bp, Homo sapien
gatgtacaatgctgctcaattctgg

SEQ ID NO: 5011559 - DNA, 25 bp, Homo sapien
ggcacacatacccttgcttggaaat

SEQ ID NO: 5011560 - DNA, 25 bp, Homo sapien
gactgcataggacaactcaataaga

SEQ ID NO: 5011561 - DNA, 25 bp, Homo sapien
ttgggtgagaaacagaaggcaaaca

SEQ ID NO: 5011562 - DNA, 25 bp, Homo sapien
gaatgtctgtgaagtctccgttata

SEQ ID NO: 5011563 - DNA, 25 bp, Homo sapien
taatgtgaggacacgctgagtgcac

SEQ ID NO: 5011564 - DNA, 25 bp, Homo sapien
caaaaagtattctgcctgggatcca

SEQ ID NO: 5011565 - DNA, 25 bp, Homo sapien
tgctctgaagctaagtgacctaaca

SEQ ID NO: 5011566 - DNA, 25 bp, Homo sapien
tatgctctggcacctatttcctgtg

SEQ ID NO: 5011567 - DNA, 25 bp, Homo sapien
aacgtggagcctgtaacttaactgc

SEQ ID NO: 5011568 - DNA, 25 bp, Homo sapien
tatgattccctcctaggcaacgtgg

SEQ ID NO: 5011569 - DNA, 25 bp, Homo sapien
gatactttggaatatgcccttgaaa

SEQ ID NO: 5011570 - DNA, 25 bp, Homo sapien
gagagggaatgaaaataggtacaca

SEQ ID NO: 5011571 - DNA, 25 bp, Homo sapien
aggtacacagtatatgaaatggcca

SEQ ID NO: 5011572 - DNA, 25 bp, Homo sapien
aataggtacacagtatatgaaatgg

SEQ ID NO: 5011573 - DNA, 25 bp, Homo sapien
tgaaaataggtacacagtatatgaa

SEQ ID NO: 5011574 - DNA, 25 bp, Homo sapien
ttatcacatcgattcagaaaagcct

SEQ ID NO: 5011575 - DNA, 25 bp, Homo sapien
tagtaatttatcacatcgattcaga

SEQ ID NO: 5011576 - DNA, 25 bp, Homo sapien
gccttgccctctgatttataacaga

SEQ ID NO: 5011577 - DNA, 25 bp, Homo sapien
acttagtaatttatcacatcgattc

SEQ ID NO: 5011578 - DNA, 25 bp, Homo sapien
tagctctataacctttgcaatcaga

SEQ ID NO: 5011579 - DNA, 25 bp, Homo sapien
tgctgtctaatttagctctataacc

SEQ ID NO: 5011580 - DNA, 25 bp, Homo sapien
aagagcatctgtattcacctgctct

SEQ ID NO: 5011581 - DNA, 25 bp, Homo sapien
catctgtattcacctgctctgactg

SEQ ID NO: 5011582 - DNA, 25 bp, Homo sapien
tatagtcctccatgcttagcagcag

SEQ ID NO: 5011583 - DNA, 25 bp, Homo sapien
gaagaggagtcaggaaccataccca

SEQ ID NO: 5011584 - DNA, 25 bp, Homo sapien
tattgatacaaacctgctctgcagg

SEQ ID NO: 5011585 - DNA, 25 bp, Homo sapien
tctgtcagtgatcaaatggacggct

SEQ ID NO: 5011586 - DNA, 25 bp, Homo sapien
tatgaatataaatgcgatgaaacac

SEQ ID NO: 5011587 - DNA, 25 bp, Homo sapien
gggcaatggcctaatacaacttggg

SEQ ID NO: 5011588 - DNA, 25 bp, Homo sapien
tgctctgctttgtaacgaatattcc

SEQ ID NO: 5011589 - DNA, 25 bp, Homo sapien
tcctgacagacccatggaaggcctg

SEQ ID NO: 5011590 - DNA, 25 bp, Homo sapien
cgaaaaatggatgtattattaaggc

SEQ ID NO: 5011591 - DNA, 25 bp, Homo sapien
atggatgtattattaaggctgttac

SEQ ID NO: 5011592 - DNA, 25 bp, Homo sapien
ctgtataaaacgaaaaatggatgta

SEQ ID NO: 5011593 - DNA, 25 bp, Homo sapien
aaaatggatgtattattaaggctgt

SEQ ID NO: 5011594 - DNA, 25 bp, Homo sapien
cagagagctatcttctttggagaca

SEQ ID NO: 5011595 - DNA, 25 bp, Homo sapien
ggaaaatggctgtcccaacagtcta

SEQ ID NO: 5011596 - DNA, 25 bp, Homo sapien
caaaatggtgcgtaggagactatcc

SEQ ID NO: 5011597 - DNA, 25 bp, Homo sapien
taacgtcctgcatgtgtattccaaa

SEQ ID NO: 5011598 - DNA, 25 bp, Homo sapien
tttactgggcattgagcgtgcagag

SEQ ID NO: 5011599 - DNA, 25 bp, Homo sapien
gaggaaaggcctagaactgaatgac

SEQ ID NO: 5011600 - DNA, 25 bp, Homo sapien
ggtttgaaaggtcagccccgaatca

SEQ ID NO: 5011601 - DNA, 25 bp, Homo sapien
gaaagacaaaggactgaagaacagc

SEQ ID NO: 5011602 - DNA, 25 bp, Homo sapien
acagcataacagctcttgtcttgaa

SEQ ID NO: 5011603 - DNA, 25 bp, Homo sapien
agcataacagctcttgtcttgaatc

SEQ ID NO: 5011604 - DNA, 25 bp, Homo sapien
cagcataacagctcttgtcttgaat

SEQ ID NO: 5011605 - DNA, 25 bp, Homo sapien
tagctatggctttcacagtgctggc

SEQ ID NO: 5011606 - DNA, 25 bp, Homo sapien
caaggaggcataaggccaagatgca

SEQ ID NO: 5011607 - DNA, 25 bp, Homo sapien
taactctgtctgttggtccatcaca

SEQ ID NO: 5011608 - DNA, 25 bp, Homo sapien
cttgcatagagcgtttacagtacag

SEQ ID NO: 5011609 - DNA, 25 bp, Homo sapien
gatagccagggtccattgttttcat

SEQ ID NO: 5011610 - DNA, 25 bp, Homo sapien
aaatgctccctgaggagattcaggg

SEQ ID NO: 5011611 - DNA, 25 bp, Homo sapien
ttccagactgtgattggcttgggat

SEQ ID NO: 5011612 - DNA, 25 bp, Homo sapien
ctgaggagattcagggatccctttc

SEQ ID NO: 5011613 - DNA, 25 bp, Homo sapien
gtcctgtgcaaaaggctttcctata

SEQ ID NO: 5011614 - DNA, 25 bp, Homo sapien
tgcaaaaggctttcctataaattcc

SEQ ID NO: 5011615 - DNA, 25 bp, Homo sapien
gggtcctgtgcaaaaggctttccta

SEQ ID NO: 5011616 - DNA, 25 bp, Homo sapien
tctggggtcctgtgcaaaaggcttt

SEQ ID NO: 5011617 - DNA, 25 bp, Homo sapien
tgagtaacatctggaattcctccat

SEQ ID NO: 5011618 - DNA, 25 bp, Homo sapien
ctggaattcctccatcttcctccat

SEQ ID NO: 5011619 - DNA, 25 bp, Homo sapien
ttgagtaacatctggaattcctcca

SEQ ID NO: 5011620 - DNA, 25 bp, Homo sapien
catctggaattcctccatcttcctc

SEQ ID NO: 5011621 - DNA, 25 bp, Homo sapien
tttctcatgagaagtgtatactgac

SEQ ID NO: 5011622 - DNA, 25 bp, Homo sapien
tgtttttctcatgagaagtgtatac

SEQ ID NO: 5011623 - DNA, 25 bp, Homo sapien
ttttctcatgagaagtgtatactga

SEQ ID NO: 5011624 - DNA, 25 bp, Homo sapien
tttttctcatgagaagtgtatactg

SEQ ID NO: 5011625 - DNA, 25 bp, Homo sapien
gacgtcctcccaccaaatggctgaa

SEQ ID NO: 5011626 - DNA, 25 bp, Homo sapien
gaagagttgtatccttgaacaccca

SEQ ID NO: 5011627 - DNA, 25 bp, Homo sapien
caagtcatgagggtaaccaggttga

SEQ ID NO: 5011628 - DNA, 25 bp, Homo sapien
ggaattccacttccaagggttatca

SEQ ID NO: 5011629 - DNA, 25 bp, Homo sapien
gtctcagtgtctgctttctggggaa

SEQ ID NO: 5011630 - DNA, 25 bp, Homo sapien
cctcctaacttggtctcagtgtctg

SEQ ID NO: 5011631 - DNA, 25 bp, Homo sapien
taacttggtctcagtgtctgctttc

SEQ ID NO: 5011632 - DNA, 25 bp, Homo sapien
tcaacctcctaacttggtctcagtg

SEQ ID NO: 5011633 - DNA, 25 bp, Homo sapien
cggtatttggtgtttacgaatgcaa

SEQ ID NO: 5011634 - DNA, 25 bp, Homo sapien
cagattgatccctcggtatttggtg

SEQ ID NO: 5011635 - DNA, 25 bp, Homo sapien
ttttttgcagattgatccctcggta

SEQ ID NO: 5011636 - DNA, 25 bp, Homo sapien
tgtttacgaatgcaattgtaaatgg

SEQ ID NO: 5011637 - DNA, 25 bp, Homo sapien
catttccaatggtatttgtagagcc

SEQ ID NO: 5011638 - DNA, 25 bp, Homo sapien
tttcagtttgtcttgagagcacagg

SEQ ID NO: 5011639 - DNA, 25 bp, Homo sapien
gatggaagataattcttcataggtc

SEQ ID NO: 5011640 - DNA, 25 bp, Homo sapien
tgtgcttttcagtttgtcttgagag

SEQ ID NO: 5011641 - DNA, 25 bp, Homo sapien
tgtggttatctggtcttttgagggt

SEQ ID NO: 5011642 - DNA, 25 bp, Homo sapien
ctcatggcccatagagcaaaatggg

SEQ ID NO: 5011643 - DNA, 25 bp, Homo sapien
gatgaggaatgatgtggttatctgg

SEQ ID NO: 5011644 - DNA, 25 bp, Homo sapien
ggggtgaccacgtgggatgaggaat

SEQ ID NO: 5011645 - DNA, 25 bp, Homo sapien
cccgtcgctattttcataaactgca

SEQ ID NO: 5011646 - DNA, 25 bp, Homo sapien
gcaagccccgccagaagtaagtaat

SEQ ID NO: 5011647 - DNA, 25 bp, Homo sapien
tgcatcgatactaggaggcaagccc

SEQ ID NO: 5011648 - DNA, 25 bp, Homo sapien
gtaagtaatttgcattgggtatcca

SEQ ID NO: 5011649 - DNA, 25 bp, Homo sapien
ggctcatcaggcagtctcataggtg

SEQ ID NO: 5011650 - DNA, 25 bp, Homo sapien
caggtagctatgtacatctgggcag

SEQ ID NO: 5011651 - DNA, 25 bp, Homo sapien
tggaagagccagcaacgaacactaa

SEQ ID NO: 5011652 - DNA, 25 bp, Homo sapien
taaaccttggtagcgaggctcatca

SEQ ID NO: 5011653 - DNA, 25 bp, Homo sapien
ccataccacacgagaggaatttcac

SEQ ID NO: 5011654 - DNA, 25 bp, Homo sapien
agaattcaccataccacacgagagg

SEQ ID NO: 5011655 - DNA, 25 bp, Homo sapien
taccacacgagaggaatttcactag

SEQ ID NO: 5011656 - DNA, 25 bp, Homo sapien
tcaccataccacacgagaggaattt

SEQ ID NO: 5011657 - DNA, 25 bp, Homo sapien
ttcctctgattggtgctcaaatgca

SEQ ID NO: 5011658 - DNA, 25 bp, Homo sapien
tcctctgattggtgctcaaatgcat

SEQ ID NO: 5011659 - DNA, 25 bp, Homo sapien
cagtagaaattgtgaccgtgaggac

SEQ ID NO: 5011660 - DNA, 25 bp, Homo sapien
gggaatggaggttaatgctcttcca

SEQ ID NO: 5011661 - DNA, 25 bp, Homo sapien
gaggttaatgctcttccattcaaca

SEQ ID NO: 5011662 - DNA, 25 bp, Homo sapien
cattaagggaatggaggttaatgct

SEQ ID NO: 5011663 - DNA, 25 bp, Homo sapien
tatctgtaacccactcaattggtag

SEQ ID NO: 5011664 - DNA, 25 bp, Homo sapien
catctgtatctgtaacccactcaat

SEQ ID NO: 5011665 - DNA, 25 bp, Homo sapien
tgtaacccactcaattggtagtgag

SEQ ID NO: 5011666 - DNA, 25 bp, Homo sapien
attggtagtgagtatctcttggtga

SEQ ID NO: 5011667 - DNA, 25 bp, Homo sapien
cactgtcggtagaggtcttgtaggt

SEQ ID NO: 5011668 - DNA, 25 bp, Homo sapien
aatagctagagtgttaaagttccca

SEQ ID NO: 5011669 - DNA, 25 bp, Homo sapien
ttccttgggtcagccggaggaatag

SEQ ID NO: 5011670 - DNA, 25 bp, Homo sapien
catctcacgacgaagaatagctaga

SEQ ID NO: 5011671 - DNA, 25 bp, Homo sapien
tttgaaaatatgaggacagtgcttg

SEQ ID NO: 5011672 - DNA, 25 bp, Homo sapien
aaaatatgaggacagtgcttggctc

SEQ ID NO: 5011673 - DNA, 25 bp, Homo sapien
gaaaatatgaggacagtgcttggct

SEQ ID NO: 5011674 - DNA, 25 bp, Homo sapien
tgaaaatatgaggacagtgcttggc

SEQ ID NO: 5011675 - DNA, 25 bp, Homo sapien
cttaaaactggaatagagctggaaa

SEQ ID NO: 5011676 - DNA, 25 bp, Homo sapien
gagctggaaaatatgctacagagaa

SEQ ID NO: 5011677 - DNA, 25 bp, Homo sapien
tagagctggaaaatatgctacagag

SEQ ID NO: 5011678 - DNA, 25 bp, Homo sapien
ctggaatagagctggaaaatatgct

SEQ ID NO: 5011679 - DNA, 25 bp, Homo sapien
ttaagcaaattgaaacagtagtaac

SEQ ID NO: 5011680 - DNA, 25 bp, Homo sapien
agagcatgtcccagttcatggactg

SEQ ID NO: 5011681 - DNA, 25 bp, Homo sapien
ggtagtttgaagttgtctgtttcca

SEQ ID NO: 5011682 - DNA, 25 bp, Homo sapien
tgtactggtaaaatggagccatgat

SEQ ID NO: 5011683 - DNA, 25 bp, Homo sapien
ggtcattggaatgctccaatcccag

SEQ ID NO: 5011684 - DNA, 25 bp, Homo sapien
tgtgtgaacaagaagaaaataagtt

SEQ ID NO: 5011685 - DNA, 25 bp, Homo sapien
ctgtgtgaacaagaagaaaataagt

SEQ ID NO: 5011686 - DNA, 25 bp, Homo sapien
tcttcagatgattggcaataatgta

SEQ ID NO: 5011687 - DNA, 25 bp, Homo sapien
gatgattggcaataatgtaattaaa

SEQ ID NO: 5011688 - DNA, 25 bp, Homo sapien
cttcagatgattggcaataatgtaa

SEQ ID NO: 5011689 - DNA, 25 bp, Homo sapien
cagatgattggcaataatgtaatta

SEQ ID NO: 5011690 - DNA, 25 bp, Homo sapien
agtactgccctgtgatttgaattcc

SEQ ID NO: 5011691 - DNA, 25 bp, Homo sapien
ctttgcacttcgctgaaaagagggc

SEQ ID NO: 5011692 - DNA, 25 bp, Homo sapien
tttgcacttcgctgaaaagagggcc

SEQ ID NO: 5011693 - DNA, 25 bp, Homo sapien
gaaaagagggccactctcttggtgg

SEQ ID NO: 5011694 - DNA, 25 bp, Homo sapien
tgcacttcgctgaaaagagggccac

SEQ ID NO: 5011695 - DNA, 25 bp, Homo sapien
gccttgtcctgctctattttgttag

SEQ ID NO: 5011696 - DNA, 25 bp, Homo sapien
attttgttagttatccttacagtga

SEQ ID NO: 5011697 - DNA, 25 bp, Homo sapien
ggccttgtcctgctctattttgtta

SEQ ID NO: 5011698 - DNA, 25 bp, Homo sapien
cttgtcctgctctattttgttagtt

SEQ ID NO: 5011699 - DNA, 25 bp, Homo sapien
ttcctttttcaccaggatcttcaca

SEQ ID NO: 5011700 - DNA, 25 bp, Homo sapien
tttcaccaggatcttcacatctcat

SEQ ID NO: 5011701 - DNA, 25 bp, Homo sapien
tggttcctttttcaccaggatcttc

SEQ ID NO: 5011702 - DNA, 25 bp, Homo sapien
ttttcaccaggatcttcacatctca

SEQ ID NO: 5011703 - DNA, 25 bp, Homo sapien
ttaggtttgatagtggtatggttgt

SEQ ID NO: 5011704 - DNA, 25 bp, Homo sapien
aggtttgatagtggtatggttgtaa

SEQ ID NO: 5011705 - DNA, 25 bp, Homo sapien
taggtttgatagtggtatggttgta

SEQ ID NO: 5011706 - DNA, 25 bp, Homo sapien
gtttgatagtggtatggttgtaatt

SEQ ID NO: 5011707 - DNA, 25 bp, Homo sapien
gttgggaaggcaaaccttaggcaca

SEQ ID NO: 5011708 - DNA, 25 bp, Homo sapien
ttgggaaggcaaaccttaggcacac

SEQ ID NO: 5011709 - DNA, 25 bp, Homo sapien
ctgtgcagacgtaaacctgctgaag

SEQ ID NO: 5011710 - DNA, 25 bp, Homo sapien
cttaggtttacttctacacaggtgt

SEQ ID NO: 5011711 - DNA, 25 bp, Homo sapien
tgtgcagacgtaaacctgctgaagg

SEQ ID NO: 5011712 - DNA, 25 bp, Homo sapien
tgcagacgtaaacctgctgaaggct

SEQ ID NO: 5011713 - DNA, 25 bp, Homo sapien
tactggcagcctaagacactgttta

SEQ ID NO: 5011714 - DNA, 25 bp, Homo sapien
caatgtgctgtggaaaatgtgctgg

SEQ ID NO: 5011715 - DNA, 25 bp, Homo sapien
ggtagatagaatgcaaattgccttc

SEQ ID NO: 5011716 - DNA, 25 bp, Homo sapien
tgctgggtacttatcaagaggctct

SEQ ID NO: 5011717 - DNA, 25 bp, Homo sapien
ttaaatctcttggttattctgaaat

SEQ ID NO: 5011718 - DNA, 25 bp, Homo sapien
taggatttcctagtgtccatggctc

SEQ ID NO: 5011719 - DNA, 25 bp, Homo sapien
ttaggatttcctagtgtccatggct

SEQ ID NO: 5011720 - DNA, 25 bp, Homo sapien
tgattaggatttcctagtgtccatg

SEQ ID NO: 5011721 - DNA, 25 bp, Homo sapien
tcatctgagtcaaaatgggtatctc

SEQ ID NO: 5011722 - DNA, 25 bp, Homo sapien
gatgcaaaaataatggttatatcca

SEQ ID NO: 5011723 - DNA, 25 bp, Homo sapien
cccatggaaaccagatgcaaaaata

SEQ ID NO: 5011724 - DNA, 25 bp, Homo sapien
ctctccatcaaagggagagctgtcc

SEQ ID NO: 5011725 - DNA, 25 bp, Homo sapien
tcctccctctccatcaaagggagag

SEQ ID NO: 5011726 - DNA, 25 bp, Homo sapien
tagctttacgagtctcagggtctcc

SEQ ID NO: 5011727 - DNA, 25 bp, Homo sapien
gaggagttacattctgccacacatc

SEQ ID NO: 5011728 - DNA, 25 bp, Homo sapien
gccacacatcaaaggcacggcgaat

SEQ ID NO: 5011729 - DNA, 25 bp, Homo sapien
taattcactgtagggaacttcttca

SEQ ID NO: 5011730 - DNA, 25 bp, Homo sapien
tagcgggctgatattcctatgacac

SEQ ID NO: 5011731 - DNA, 25 bp, Homo sapien
gagttggagcaatcacaatcactgt

SEQ ID NO: 5011732 - DNA, 25 bp, Homo sapien
gatttcagaactccctcattagcgg

SEQ ID NO: 5011733 - DNA, 25 bp, Homo sapien
caaagatgcctagcactgagtttcc

SEQ ID NO: 5011734 - DNA, 25 bp, Homo sapien
agtcaatactaaatatgccaataaa

SEQ ID NO: 5011735 - DNA, 25 bp, Homo sapien
gtcaatactaaatatgccaataaaa

SEQ ID NO: 5011736 - DNA, 25 bp, Homo sapien
ctgtaagtgatgtgcttgtgctgcc

SEQ ID NO: 5011737 - DNA, 25 bp, Homo sapien
tgtaagtgatgtgcttgtgctgcca

SEQ ID NO: 5011738 - DNA, 25 bp, Homo sapien
gtaagtgatgtgcttgtgctgccat

SEQ ID NO: 5011739 - DNA, 25 bp, Homo sapien
aagtgatgtgcttgtgctgccattt

SEQ ID NO: 5011740 - DNA, 25 bp, Homo sapien
tggagctacctcttgtctggtcagg

SEQ ID NO: 5011741 - DNA, 25 bp, Homo sapien
acctcttgtctggtcaggtacaccg

SEQ ID NO: 5011742 - DNA, 25 bp, Homo sapien
gtctggtcaggtacaccgcatcggg

SEQ ID NO: 5011743 - DNA, 25 bp, Homo sapien
aaatttggagctacctcttgtctgg

SEQ ID NO: 5011744 - DNA, 25 bp, Homo sapien
cagaagctaacagctctccattaag

SEQ ID NO: 5011745 - DNA, 25 bp, Homo sapien
tccattaagaacaagaacgctgtcc

SEQ ID NO: 5011746 - DNA, 25 bp, Homo sapien
gaaagtgaatcagaagctaacagct

SEQ ID NO: 5011747 - DNA, 25 bp, Homo sapien
aagaacgctgtccacagcactttgt

SEQ ID NO: 5011748 - DNA, 25 bp, Homo sapien
tcatgttaatgccatagaactgctg

SEQ ID NO: 5011749 - DNA, 25 bp, Homo sapien
gcatggcagctagggcagactgcat

SEQ ID NO: 5011750 - DNA, 25 bp, Homo sapien
tgtcatgttaatgccatagaactgc

SEQ ID NO: 5011751 - DNA, 25 bp, Homo sapien
tgctgcatggcagctagggcagact

SEQ ID NO: 5011752 - DNA, 25 bp, Homo sapien
ggtcagtcggtggaaggtagccgta

SEQ ID NO: 5011753 - DNA, 25 bp, Homo sapien
cagtcggtggaaggtagccgtactt

SEQ ID NO: 5011754 - DNA, 25 bp, Homo sapien
actgacattctggggtcagtcggtg

SEQ ID NO: 5011755 - DNA, 25 bp, Homo sapien
gacattctggggtcagtcggtggaa

SEQ ID NO: 5011756 - DNA, 25 bp, Homo sapien
tctctagtcctgattcagctccctg

SEQ ID NO: 5011757 - DNA, 25 bp, Homo sapien
ctgtttactgccagtgtgataatct

SEQ ID NO: 5011758 - DNA, 25 bp, Homo sapien
tgagaaacagtagtgacctcctaac

SEQ ID NO: 5011759 - DNA, 25 bp, Homo sapien
taatctttatagagccttccaaaca

SEQ ID NO: 5011760 - DNA, 25 bp, Homo sapien
gttgggtatgtgtcttgcttgattc

SEQ ID NO: 5011761 - DNA, 25 bp, Homo sapien
caaagatctatctgtcttggttggg

SEQ ID NO: 5011762 - DNA, 25 bp, Homo sapien
acacctaacaaagatctatctgtct

SEQ ID NO: 5011763 - DNA, 25 bp, Homo sapien
tctatctgtcttggttgggtatgtg

SEQ ID NO: 5011764 - DNA, 25 bp, Homo sapien
ggtaatcctacccacattatgaatc

SEQ ID NO: 5011765 - DNA, 25 bp, Homo sapien
gtataaagactgctgtgttttccac

SEQ ID NO: 5011766 - DNA, 25 bp, Homo sapien
caggcaagggcccactctagtatcc

SEQ ID NO: 5011767 - DNA, 25 bp, Homo sapien
tcaggcgatggtaatcctacccaca

SEQ ID NO: 5011768 - DNA, 25 bp, Homo sapien
gaaagctgcagaaccacaatttagg

SEQ ID NO: 5011769 - DNA, 25 bp, Homo sapien
tcattaacagcaaatggaaagctgc

SEQ ID NO: 5011770 - DNA, 25 bp, Homo sapien
taaaaagggagcactgaatcaagca

SEQ ID NO: 5011771 - DNA, 25 bp, Homo sapien
tacaatcgtcaatgctaaaaaggga

SEQ ID NO: 5011772 - DNA, 25 bp, Homo sapien
cacttttcagagctgggccactgct

SEQ ID NO: 5011773 - DNA, 25 bp, Homo sapien
cttgcgatgactcacttttcagagc

SEQ ID NO: 5011774 - DNA, 25 bp, Homo sapien
ttgcgatgactcacttttcagagct

SEQ ID NO: 5011775 - DNA, 25 bp, Homo sapien
actcacttttcagagctgggccact

SEQ ID NO: 5011776 - DNA, 25 bp, Homo sapien
tcttggaacaactagatgtatatca

SEQ ID NO: 5011777 - DNA, 25 bp, Homo sapien
tggaatgtctaaaacaagctattta

SEQ ID NO: 5011778 - DNA, 25 bp, Homo sapien
agtactatttttagctaagacggat

SEQ ID NO: 5011779 - DNA, 25 bp, Homo sapien
taaatgaggtattaggaaacaggtg

SEQ ID NO: 5011780 - DNA, 25 bp, Homo sapien
ataaagaagtgtggctcagaaaact

SEQ ID NO: 5011781 - DNA, 25 bp, Homo sapien
tataaagaagtgtggctcagaaaac

SEQ ID NO: 5011782 - DNA, 25 bp, Homo sapien
atataaagaagtgtggctcagaaaa

SEQ ID NO: 5011783 - DNA, 25 bp, Homo sapien
gagtcggctgtaaggcatactaatg

SEQ ID NO: 5011784 - DNA, 25 bp, Homo sapien
gtgcctgtgctaacacctctgctgt

SEQ ID NO: 5011785 - DNA, 25 bp, Homo sapien
tcaggagcctatacttaagatcagt

SEQ ID NO: 5011786 - DNA, 25 bp, Homo sapien
aaatgcacctagttctgcactcagg

SEQ ID NO: 5011787 - DNA, 25 bp, Homo sapien
tcatacactggtgagggtgcactgt

SEQ ID NO: 5011788 - DNA, 25 bp, Homo sapien
cctactatgaagcaattgggtgaca

SEQ ID NO: 5011789 - DNA, 25 bp, Homo sapien
gaactgtcatttgaacccacgtctg

SEQ ID NO: 5011790 - DNA, 25 bp, Homo sapien
cacgtctgtgtaactccagaggtaa

SEQ ID NO: 5011791 - DNA, 25 bp, Homo sapien
tggattccctaagcgttcagtctgg

SEQ ID NO: 5011792 - DNA, 25 bp, Homo sapien
cacgcatcaatgtcaatgagaatgg

SEQ ID NO: 5011793 - DNA, 25 bp, Homo sapien
gatacatgttggtcccatcactcag

SEQ ID NO: 5011794 - DNA, 25 bp, Homo sapien
gggattcccaaccattaggactata

SEQ ID NO: 5011795 - DNA, 25 bp, Homo sapien
ttcccaagtaggtgaaagcaaatct

SEQ ID NO: 5011796 - DNA, 25 bp, Homo sapien
cagagacaacctagtaaaatatggg

SEQ ID NO: 5011797 - DNA, 25 bp, Homo sapien
tacactgacaactgaggcattaggg

SEQ ID NO: 5011798 - DNA, 25 bp, Homo sapien
ttggacaagttagagaacggtctgc

SEQ ID NO: 5011799 - DNA, 25 bp, Homo sapien
cacattgaaatactgctccgttccg

SEQ ID NO: 5011800 - DNA, 25 bp, Homo sapien
tccagtgctgaatgtgagtaagatc

SEQ ID NO: 5011801 - DNA, 25 bp, Homo sapien
gaaatccaaccgtcttccagtgctg

SEQ ID NO: 5011802 - DNA, 25 bp, Homo sapien
tgcaagaaaaacacccccgaatgat

SEQ ID NO: 5011803 - DNA, 25 bp, Homo sapien
agtgaactgtgcttcaatggatgga

SEQ ID NO: 5011804 - DNA, 25 bp, Homo sapien
gaactgtgcttcaatggatggacga

SEQ ID NO: 5011805 - DNA, 25 bp, Homo sapien
tgtgcttcaatggatggacgagctc

SEQ ID NO: 5011806 - DNA, 25 bp, Homo sapien
tgcttcaatggatggacgagctccc

SEQ ID NO: 5011807 - DNA, 25 bp, Homo sapien
agaggcagcggcgaagacagggtca

SEQ ID NO: 5011808 - DNA, 25 bp, Homo sapien
cagcagtagttcctgttcaccatcc

SEQ ID NO: 5011809 - DNA, 25 bp, Homo sapien
tcaccggcggttccggctcaaagag

SEQ ID NO: 5011810 - DNA, 25 bp, Homo sapien
gtcagtcaccgggaacgtggcgcct

SEQ ID NO: 5011811 - DNA, 25 bp, Homo sapien
agcccgtgcgtcctcctcctgcact

SEQ ID NO: 5011812 - DNA, 25 bp, Homo sapien
tcctgcactgcctactcctcctcct

SEQ ID NO: 5011813 - DNA, 25 bp, Homo sapien
cctcctcctgcactgcctactcctc

SEQ ID NO: 5011814 - DNA, 25 bp, Homo sapien
cagcccgtgcgtcctcctcctgcac

SEQ ID NO: 5011815 - DNA, 25 bp, Homo sapien
tcactctctcgcctctgcttctcct

SEQ ID NO: 5011816 - DNA, 25 bp, Homo sapien
actctctcgcctctgcttctccttc

SEQ ID NO: 5011817 - DNA, 25 bp, Homo sapien
ctgcgggaagggcctccgccgctcc

SEQ ID NO: 5011818 - DNA, 25 bp, Homo sapien
ctcctcactctctcgcctctgcttc

SEQ ID NO: 5011819 - DNA, 25 bp, Homo sapien
cacgcacgcgcgcttcttaaaggag

SEQ ID NO: 5011820 - DNA, 25 bp, Homo sapien
caggcacccaggaacttgggcggct

SEQ ID NO: 5011821 - DNA, 25 bp, Homo sapien
caagggccctggtttgagcacagct

SEQ ID NO: 5011822 - DNA, 25 bp, Homo sapien
tcataaaggattccccactacggta

SEQ ID NO: 5011823 - DNA, 25 bp, Homo sapien
ccaaacagcggagtcagtggtcacc

SEQ ID NO: 5011824 - DNA, 25 bp, Homo sapien
ggtcacaggcaatcaggaggaacga

SEQ ID NO: 5011825 - DNA, 25 bp, Homo sapien
tcctgtagttgctgtccggagacct

SEQ ID NO: 5011826 - DNA, 25 bp, Homo sapien
tgtctgttagcaaccatagggctgc

SEQ ID NO: 5011827 - DNA, 25 bp, Homo sapien
tattggtctttggatgaagcagcag

SEQ ID NO: 5011828 - DNA, 25 bp, Homo sapien
gcaataacggcaacatcttccacat

SEQ ID NO: 5011829 - DNA, 25 bp, Homo sapien
catcataagttagccttgacctggg

SEQ ID NO: 5011830 - DNA, 25 bp, Homo sapien
agcagggccatttgcaataacggca

SEQ ID NO: 5011831 - DNA, 25 bp, Homo sapien
gaatataaatctcaagatattgtga

SEQ ID NO: 5011832 - DNA, 25 bp, Homo sapien
taaatctcaagatattgtgattttg

SEQ ID NO: 5011833 - DNA, 25 bp, Homo sapien
ctcaagatattgtgattttgtttcc

SEQ ID NO: 5011834 - DNA, 25 bp, Homo sapien
ggaatataaatctcaagatattgtg

SEQ ID NO: 5011835 - DNA, 25 bp, Homo sapien
ggaacattcaggtatgaccatagac

SEQ ID NO: 5011836 - DNA, 25 bp, Homo sapien
gatcaggaacattcaggtatgacca

SEQ ID NO: 5011837 - DNA, 25 bp, Homo sapien
tccaattactaaccaagcctgactc

SEQ ID NO: 5011838 - DNA, 25 bp, Homo sapien
tgagatcaggaacattcaggtatga

SEQ ID NO: 5011839 - DNA, 25 bp, Homo sapien
aagcagcaacagggctagttaattc

SEQ ID NO: 5011840 - DNA, 25 bp, Homo sapien
tcacttcttccttgtaattatactt

SEQ ID NO: 5011841 - DNA, 25 bp, Homo sapien
acagggctagttaattcaactccca

SEQ ID NO: 5011842 - DNA, 25 bp, Homo sapien
cagcaacagggctagttaattcaac

SEQ ID NO: 5011843 - DNA, 25 bp, Homo sapien
aaaatgaaggatcaaaattttggag

SEQ ID NO: 5011844 - DNA, 25 bp, Homo sapien
aaatgaaggatcaaaattttggagt

SEQ ID NO: 5011845 - DNA, 25 bp, Homo sapien
tgaaggatcaaaattttggagttct

SEQ ID NO: 5011846 - DNA, 25 bp, Homo sapien
tgaaaaatgaaggatcaaaattttg

SEQ ID NO: 5011847 - DNA, 25 bp, Homo sapien
cagaaggaatttcacgtggcagtga

SEQ ID NO: 5011848 - DNA, 25 bp, Homo sapien
gagaactgagttcctcggactgggt

SEQ ID NO: 5011849 - DNA, 25 bp, Homo sapien
tgtggtacactcacaggagaactga

SEQ ID NO: 5011850 - DNA, 25 bp, Homo sapien
tctgaggatgagtcttcagaaggaa

SEQ ID NO: 5011851 - DNA, 25 bp, Homo sapien
tgcctggtccagccattatcaaacc

SEQ ID NO: 5011852 - DNA, 25 bp, Homo sapien
gccattatcaaacccagaatatcag

SEQ ID NO: 5011853 - DNA, 25 bp, Homo sapien
gtccagccattatcaaacccagaat

SEQ ID NO: 5011854 - DNA, 25 bp, Homo sapien
ttatcaaacccagaatatcaggatc

SEQ ID NO: 5011855 - DNA, 25 bp, Homo sapien
tgaagtgttccacttcaacctcaga

SEQ ID NO: 5011856 - DNA, 25 bp, Homo sapien
tgtgaaccaccctctaactccatag

SEQ ID NO: 5011857 - DNA, 25 bp, Homo sapien
ccttgtcctggctaaagtgtgaacc

SEQ ID NO: 5011858 - DNA, 25 bp, Homo sapien
ccatagagatagtgaagtgttccac

SEQ ID NO: 5011859 - DNA, 25 bp, Homo sapien
agacctcactgacatctccaggggt

SEQ ID NO: 5011860 - DNA, 25 bp, Homo sapien
tagacctcactgacatctccagggg

SEQ ID NO: 5011861 - DNA, 25 bp, Homo sapien
gacctcactgacatctccaggggtc

SEQ ID NO: 5011862 - DNA, 25 bp, Homo sapien
ctagacctcactgacatctccaggg

SEQ ID NO: 5011863 - DNA, 25 bp, Homo sapien
aatgccacctgctgtgattctcttg

SEQ ID NO: 5011864 - DNA, 25 bp, Homo sapien
cacctgggaatctttgagcgaagga

SEQ ID NO: 5011865 - DNA, 25 bp, Homo sapien
ttccccagtggctatacagcttttc

SEQ ID NO: 5011866 - DNA, 25 bp, Homo sapien
ccatgtggtgtaaaagaaattctaa

SEQ ID NO: 5011867 - DNA, 25 bp, Homo sapien
tacgcaatgggttgacatcctggga

SEQ ID NO: 5011868 - DNA, 25 bp, Homo sapien
caaactacgcaatgggttgacatcc

SEQ ID NO: 5011869 - DNA, 25 bp, Homo sapien
tgggttgacatcctgggactgccgc

SEQ ID NO: 5011870 - DNA, 25 bp, Homo sapien
ctgcaaactacgcaatgggttgaca

SEQ ID NO: 5011871 - DNA, 25 bp, Homo sapien
gatgagtcccattaccagaacttag

SEQ ID NO: 5011872 - DNA, 25 bp, Homo sapien
cacgtcagggtagtaaaagtgcgca

SEQ ID NO: 5011873 - DNA, 25 bp, Homo sapien
agaacttagtttgaaccacgtcagg

SEQ ID NO: 5011874 - DNA, 25 bp, Homo sapien
cacatccatcacattcagtatcttc

SEQ ID NO: 5011875 - DNA, 25 bp, Homo sapien
tccgtcgcaaggcagcagtctgggt

SEQ ID NO: 5011876 - DNA, 25 bp, Homo sapien
gcggcagctgcgttgtgctcgccta

SEQ ID NO: 5011877 - DNA, 25 bp, Homo sapien
gaaatgttgctgtgctccgtcgcaa

SEQ ID NO: 5011878 - DNA, 25 bp, Homo sapien
cctaggtgccgctttttgcctgcgc

SEQ ID NO: 5011879 - DNA, 25 bp, Homo sapien
ctgacattgcttgataatagcgtgt

SEQ ID NO: 5011880 - DNA, 25 bp, Homo sapien
gacattgcttgataatagcgtgtgc

SEQ ID NO: 5011881 - DNA, 25 bp, Homo sapien
tgcttgataatagcgtgtgctctgc

SEQ ID NO: 5011882 - DNA, 25 bp, Homo sapien
cattgcttgataatagcgtgtgctc

SEQ ID NO: 5011883 - DNA, 25 bp, Homo sapien
caaataaagaacagacagcagcgtg

SEQ ID NO: 5011884 - DNA, 25 bp, Homo sapien
caaccctgcctgaatactctctgga

SEQ ID NO: 5011885 - DNA, 25 bp, Homo sapien
tacttaacagacagtggaagtttgg

SEQ ID NO: 5011886 - DNA, 25 bp, Homo sapien
gaattgacactgagagtatctatgg

SEQ ID NO: 5011887 - DNA, 25 bp, Homo sapien
ggtgagtcagtttgaaccatgtaaa

SEQ ID NO: 5011888 - DNA, 25 bp, Homo sapien
tcagtttgaaccatgtaaagttggg

SEQ ID NO: 5011889 - DNA, 25 bp, Homo sapien
ctggtgagtcagtttgaaccatgta

SEQ ID NO: 5011890 - DNA, 25 bp, Homo sapien
tgagtcagtttgaaccatgtaaagt

SEQ ID NO: 5011891 - DNA, 25 bp, Homo sapien
acagtttggagttgatagacttaaa

SEQ ID NO: 5011892 - DNA, 25 bp, Homo sapien
cttaaattctattgctgtttcctca

SEQ ID NO: 5011893 - DNA, 25 bp, Homo sapien
gagccctcattaggccacagtttgg

SEQ ID NO: 5011894 - DNA, 25 bp, Homo sapien
tgccctgagccctcattaggccaca

SEQ ID NO: 5011895 - DNA, 25 bp, Homo sapien
ttttatgtaggtgagaacagagtct

SEQ ID NO: 5011896 - DNA, 25 bp, Homo sapien
tcattctggatagtagagtgtaagt

SEQ ID NO: 5011897 - DNA, 25 bp, Homo sapien
ccctcgggctcttcctcaataactt

SEQ ID NO: 5011898 - DNA, 25 bp, Homo sapien
cacatattcgataaattctgtggag

SEQ ID NO: 5011899 - DNA, 25 bp, Homo sapien
aagaggtagttttgaccatgccatg

SEQ ID NO: 5011900 - DNA, 25 bp, Homo sapien
tctcaaaacttgtagtatccagttt

SEQ ID NO: 5011901 - DNA, 25 bp, Homo sapien
gttcacttgcatgtctggacacaga

SEQ ID NO: 5011902 - DNA, 25 bp, Homo sapien
ctgtatgttcacttgcatgtctgga

SEQ ID NO: 5011903 - DNA, 25 bp, Homo sapien
tatgttcacttgcatgtctggacac

SEQ ID NO: 5011904 - DNA, 25 bp, Homo sapien
tgttcacttgcatgtctggacacag

SEQ ID NO: 5011905 - DNA, 25 bp, Homo sapien
gccagctctattcttaggaagggtg

SEQ ID NO: 5011906 - DNA, 25 bp, Homo sapien
tattcttaggaagggtgtgcctggc

SEQ ID NO: 5011907 - DNA, 25 bp, Homo sapien
tgtgcctggctattggtgagcagtt

SEQ ID NO: 5011908 - DNA, 25 bp, Homo sapien
tattggtgagcagttaataaactgc

SEQ ID NO: 5011909 - DNA, 25 bp, Homo sapien
aaacatcagctttgtagagagtcat

SEQ ID NO: 5011910 - DNA, 25 bp, Homo sapien
ggagtttaaccatggagtcacgaca

SEQ ID NO: 5011911 - DNA, 25 bp, Homo sapien
caaagtataacctcagtgcttagca

SEQ ID NO: 5011912 - DNA, 25 bp, Homo sapien
taaaagcgctttgtaaaacagttgc

SEQ ID NO: 5011913 - DNA, 25 bp, Homo sapien
atcagtcataggcatgatgtacccc

SEQ ID NO: 5011914 - DNA, 25 bp, Homo sapien
caggattgggtgtaacaaaaggcga

SEQ ID NO: 5011915 - DNA, 25 bp, Homo sapien
tgggtgtaacaaaaggcgattttca

SEQ ID NO: 5011916 - DNA, 25 bp, Homo sapien
acatagatcaggattgggtgtaaca

SEQ ID NO: 5011917 - DNA, 25 bp, Homo sapien
gtagatagccaaacatagatcagga

SEQ ID NO: 5011918 - DNA, 25 bp, Homo sapien
caaccaagagaatgcctagtatttc

SEQ ID NO: 5011919 - DNA, 25 bp, Homo sapien
caagatcagcgtcaagattgactct

SEQ ID NO: 5011920 - DNA, 25 bp, Homo sapien
gaaagccatggtgaatgtaatcact

SEQ ID NO: 5011921 - DNA, 25 bp, Homo sapien
taaccacagggaattcaaagtctcc

SEQ ID NO: 5011922 - DNA, 25 bp, Homo sapien
cccactttgatctgattccattaac

SEQ ID NO: 5011923 - DNA, 25 bp, Homo sapien
aaaacaagagccattaggtcccact

SEQ ID NO: 5011924 - DNA, 25 bp, Homo sapien
cactttgatctgattccattaacaa

SEQ ID NO: 5011925 - DNA, 25 bp, Homo sapien
ctttgatctgattccattaacaatg

SEQ ID NO: 5011926 - DNA, 25 bp, Homo sapien
cagccagaggctactgcctgaaggt

SEQ ID NO: 5011927 - DNA, 25 bp, Homo sapien
caatgtgcatttcccatgtcagcca

SEQ ID NO: 5011928 - DNA, 25 bp, Homo sapien
tttccacttttcggagattgttgag

SEQ ID NO: 5011929 - DNA, 25 bp, Homo sapien
gattgttgaggactgacaaactcag

SEQ ID NO: 5011930 - DNA, 25 bp, Homo sapien
ctctgtgtaccctgtggagcaccca

SEQ ID NO: 5011931 - DNA, 25 bp, Homo sapien
ctgtgtaccctgtggagcacccaga

SEQ ID NO: 5011932 - DNA, 25 bp, Homo sapien
tgtgtaccctgtggagcacccagag

SEQ ID NO: 5011933 - DNA, 25 bp, Homo sapien
tctgtgtaccctgtggagcacccag

SEQ ID NO: 5011934 - DNA, 25 bp, Homo sapien
tcttctcagggatccattgacacat

SEQ ID NO: 5011935 - DNA, 25 bp, Homo sapien
ctcatggcataacctgggaagtaga

SEQ ID NO: 5011936 - DNA, 25 bp, Homo sapien
caagcatacgttgtcttcttaaata

SEQ ID NO: 5011937 - DNA, 25 bp, Homo sapien
acaagcatacgttgtcttcttaaat

SEQ ID NO: 5011938 - DNA, 25 bp, Homo sapien
tatcattgtggatgcgacgacttga

SEQ ID NO: 5011939 - DNA, 25 bp, Homo sapien
tcaagaacaccccttgcataacctt

SEQ ID NO: 5011940 - DNA, 25 bp, Homo sapien
gacgacttgagggtccatggactgt

SEQ ID NO: 5011941 - DNA, 25 bp, Homo sapien
taaccttatcattgtggatgcgacg

SEQ ID NO: 5011942 - DNA, 25 bp, Homo sapien
caaactcttctagggtcgatatgag

SEQ ID NO: 5011943 - DNA, 25 bp, Homo sapien
gatgctgtactacaaactcttctag

SEQ ID NO: 5011944 - DNA, 25 bp, Homo sapien
tatgttcaggttctcttagatgctg

SEQ ID NO: 5011945 - DNA, 25 bp, Homo sapien
tatgagaactttcatgtagtaagtt

SEQ ID NO: 5011946 - DNA, 25 bp, Homo sapien
tggtctgtctaatgacatcttcttg

SEQ ID NO: 5011947 - DNA, 25 bp, Homo sapien
tgttacttgctcacagctggtctgt

SEQ ID NO: 5011948 - DNA, 25 bp, Homo sapien
cacagctggtctgtctaatgacatc

SEQ ID NO: 5011949 - DNA, 25 bp, Homo sapien
ctttactgtctgttacttgctcaca

SEQ ID NO: 5011950 - DNA, 25 bp, Homo sapien
tctcagatgagttgtgtatgcctca

SEQ ID NO: 5011951 - DNA, 25 bp, Homo sapien
gaaccaaggctctccttagacttag

SEQ ID NO: 5011952 - DNA, 25 bp, Homo sapien
gacagacttagcttgaaccctagaa

SEQ ID NO: 5011953 - DNA, 25 bp, Homo sapien
catgtttccagtggcaaacttgaac

SEQ ID NO: 5011954 - DNA, 25 bp, Homo sapien
acaaagagcacgtctttgtgttgca

SEQ ID NO: 5011955 - DNA, 25 bp, Homo sapien
gttcaacaaagagcacgtctttgtg

SEQ ID NO: 5011956 - DNA, 25 bp, Homo sapien
tcaacaaagagcacgtctttgtgtt

SEQ ID NO: 5011957 - DNA, 25 bp, Homo sapien
gggttcaacaaagagcacgtctttg

SEQ ID NO: 5011958 - DNA, 25 bp, Homo sapien
aaagtgctggtcacctattctttta

SEQ ID NO: 5011959 - DNA, 25 bp, Homo sapien
caaagtgctggtcacctattctttt

SEQ ID NO: 5011960 - DNA, 25 bp, Homo sapien
cactcagagctgaaattgcttgccc

SEQ ID NO: 5011961 - DNA, 25 bp, Homo sapien
tccatttttagtcaggacagctcag

SEQ ID NO: 5011962 - DNA, 25 bp, Homo sapien
agtagctcaataactctcactgaag

SEQ ID NO: 5011963 - DNA, 25 bp, Homo sapien
cagttgccagcataaaagtaggatt

SEQ ID NO: 5011964 - DNA, 25 bp, Homo sapien
tacacgtcagctcagtagcattgtc

SEQ ID NO: 5011965 - DNA, 25 bp, Homo sapien
tcagctggcccgatcatgtgtacac

SEQ ID NO: 5011966 - DNA, 25 bp, Homo sapien
tggcccgatcatgtgtacacgtcag

SEQ ID NO: 5011967 - DNA, 25 bp, Homo sapien
cgatcatgtgtacacgtcagctcag

SEQ ID NO: 5011968 - DNA, 25 bp, Homo sapien
gctgcctgtgctttaagtagtaatg

SEQ ID NO: 5011969 - DNA, 25 bp, Homo sapien
ttaatgctgcctgtgctttaagtag

SEQ ID NO: 5011970 - DNA, 25 bp, Homo sapien
gtttaatgctgcctgtgctttaagt

SEQ ID NO: 5011971 - DNA, 25 bp, Homo sapien
aatgctgcctgtgctttaagtagta

SEQ ID NO: 5011972 - DNA, 25 bp, Homo sapien
ggaagtcttagataccacaccaata

SEQ ID NO: 5011973 - DNA, 25 bp, Homo sapien
caccaatatcctgaacaacaccatg

SEQ ID NO: 5011974 - DNA, 25 bp, Homo sapien
taatctacatcttaatgacatagcc

SEQ ID NO: 5011975 - DNA, 25 bp, Homo sapien
gacatagccaatatgactttacaat

SEQ ID NO: 5011976 - DNA, 25 bp, Homo sapien
aggattatcctctgcaacttctgac

SEQ ID NO: 5011977 - DNA, 25 bp, Homo sapien
taaggattatcctctgcaacttctg

SEQ ID NO: 5011978 - DNA, 25 bp, Homo sapien
ttaaggattatcctctgcaacttct

SEQ ID NO: 5011979 - DNA, 25 bp, Homo sapien
ggattatcctctgcaacttctgact

SEQ ID NO: 5011980 - DNA, 25 bp, Homo sapien
tctgaatcttgttcttgcccacatt

SEQ ID NO: 5011981 - DNA, 25 bp, Homo sapien
gatctgaatcttgttcttgcccaca

SEQ ID NO: 5011982 - DNA, 25 bp, Homo sapien
atctgaatcttgttcttgcccacat

SEQ ID NO: 5011983 - DNA, 25 bp, Homo sapien
gtcacagtcctcaacaacttctgtt

SEQ ID NO: 5011984 - DNA, 25 bp, Homo sapien
gtgaaaagtggactatctgtaatga

SEQ ID NO: 5011985 - DNA, 25 bp, Homo sapien
gtgcagtaattatgtgaaaaccatg

SEQ ID NO: 5011986 - DNA, 25 bp, Homo sapien
cagagtatagtatgatgatacagaa

SEQ ID NO: 5011987 - DNA, 25 bp, Homo sapien
tattgggaagagtgttgcaagtata

SEQ ID NO: 5011988 - DNA, 25 bp, Homo sapien
tccttctgtactcaagctccatgaa

SEQ ID NO: 5011989 - DNA, 25 bp, Homo sapien
cactacacttagcaccctttggtaa

SEQ ID NO: 5011990 - DNA, 25 bp, Homo sapien
tagcaccctttggtaaccatccttc

SEQ ID NO: 5011991 - DNA, 25 bp, Homo sapien
tgacctcactatccaagagctgaag

SEQ ID NO: 5011992 - DNA, 25 bp, Homo sapien
cctgatacgtactttctgttaagcc

SEQ ID NO: 5011993 - DNA, 25 bp, Homo sapien
aatgctaagtattggttggctaaac

SEQ ID NO: 5011994 - DNA, 25 bp, Homo sapien
tacaaactagtatggtcaaaatcac

SEQ ID NO: 5011995 - DNA, 25 bp, Homo sapien
caggatctgaaagaatttttagttt

SEQ ID NO: 5011996 - DNA, 25 bp, Homo sapien
ttgtgatgttgggatagagacccat

SEQ ID NO: 5011997 - DNA, 25 bp, Homo sapien
ctttgtgatgttgggatagagaccc

SEQ ID NO: 5011998 - DNA, 25 bp, Homo sapien
ttctttgtgatgttgggatagagac

SEQ ID NO: 5011999 - DNA, 25 bp, Homo sapien
aatggattgggtaaagcctatggcc

SEQ ID NO: 5012000 - DNA, 25 bp, Homo sapien
tgtgtcagtttgactaggccacggg

SEQ ID NO: 5012001 - DNA, 25 bp, Homo sapien
tggtccttacccagtccattgcagg

SEQ ID NO: 5012002 - DNA, 25 bp, Homo sapien
cctcatgtgagccagtaagccaatt

SEQ ID NO: 5012003 - DNA, 25 bp, Homo sapien
caggtcagccgttgtcactgcagga

SEQ ID NO: 5012004 - DNA, 25 bp, Homo sapien
tcctgcagggtatcttctccaaact

SEQ ID NO: 5012005 - DNA, 25 bp, Homo sapien
tgaacggtgctttctgagactccat

SEQ ID NO: 5012006 - DNA, 25 bp, Homo sapien
ctcactcattagttctgctttcaaa

SEQ ID NO: 5012007 - DNA, 25 bp, Homo sapien
gagggcacctgcatgccttcagacc

SEQ ID NO: 5012008 - DNA, 25 bp, Homo sapien
caggccagtcttccatggcaggctg

SEQ ID NO: 5012009 - DNA, 25 bp, Homo sapien
tccatggcaggctgagccctccagt

SEQ ID NO: 5012010 - DNA, 25 bp, Homo sapien
gtcttccatggcaggctgagccctc

SEQ ID NO: 5012011 - DNA, 25 bp, Homo sapien
ctgagtagcagtgaactcaggagct

SEQ ID NO: 5012012 - DNA, 25 bp, Homo sapien
actcaggagctggagcagtccattc

SEQ ID NO: 5012013 - DNA, 25 bp, Homo sapien
caggagctggagcagtccattcatc

SEQ ID NO: 5012014 - DNA, 25 bp, Homo sapien
tgagtagcagtgaactcaggagctg

SEQ ID NO: 5012015 - DNA, 25 bp, Homo sapien
cccttgttgttgtggtatgttgtca

SEQ ID NO: 5012016 - DNA, 25 bp, Homo sapien
tcccttgttgttgtggtatgttgtc

SEQ ID NO: 5012017 - DNA, 25 bp, Homo sapien
ccttgttgttgtggtatgttgtcat

SEQ ID NO: 5012018 - DNA, 25 bp, Homo sapien
gctcccttgttgttgtggtatgttg

SEQ ID NO: 5012019 - DNA, 25 bp, Homo sapien
caagaatttacccattccctccagg

SEQ ID NO: 5012020 - DNA, 25 bp, Homo sapien
tactctcatggaatgagttaggaat

SEQ ID NO: 5012021 - DNA, 25 bp, Homo sapien
tcttttgttgaacgactttctgtta

SEQ ID NO: 5012022 - DNA, 25 bp, Homo sapien
ctgggctttcttttgttgaacgact

SEQ ID NO: 5012023 - DNA, 25 bp, Homo sapien
gactgtcaacaattctgcatttcca

SEQ ID NO: 5012024 - DNA, 25 bp, Homo sapien
ccaccccaatataagaaggacaaca

SEQ ID NO: 5012025 - DNA, 25 bp, Homo sapien
aagaaggacaacaaattagagactg

SEQ ID NO: 5012026 - DNA, 25 bp, Homo sapien
caaattagagactgtcaacaattct

SEQ ID NO: 5012027 - DNA, 25 bp, Homo sapien
tctattttgttctttcggagtcatc

SEQ ID NO: 5012028 - DNA, 25 bp, Homo sapien
agtattcacgaagaacacaagttgg

SEQ ID NO: 5012029 - DNA, 25 bp, Homo sapien
tttgttctttcggagtcatcatttg

SEQ ID NO: 5012030 - DNA, 25 bp, Homo sapien
gttctttcggagtcatcatttgttc

SEQ ID NO: 5012031 - DNA, 25 bp, Homo sapien
tcagtgtttcttggtttgaacctca

SEQ ID NO: 5012032 - DNA, 25 bp, Homo sapien
cagtgtttcttggtttgaacctcac

SEQ ID NO: 5012033 - DNA, 25 bp, Homo sapien
cagacagcttgcctgttagagcaga

SEQ ID NO: 5012034 - DNA, 25 bp, Homo sapien
cagcaatgcaattctagttcaagca

SEQ ID NO: 5012035 - DNA, 25 bp, Homo sapien
tttccctgagttaggacagacagct

SEQ ID NO: 5012036 - DNA, 25 bp, Homo sapien
gagtccgatgcatggtcacatagcc

SEQ ID NO: 5012037 - DNA, 25 bp, Homo sapien
caattgtgagcagttacaataaaat

SEQ ID NO: 5012038 - DNA, 25 bp, Homo sapien
tcaaaagtcaggtagtcactacagc

SEQ ID NO: 5012039 - DNA, 25 bp, Homo sapien
ttaatcaaaagtcaggtagtcacta

SEQ ID NO: 5012040 - DNA, 25 bp, Homo sapien
tagtcactacagcaattgtgagcag

SEQ ID NO: 5012041 - DNA, 25 bp, Homo sapien
ctccattcccagtcagaaatgcact

SEQ ID NO: 5012042 - DNA, 25 bp, Homo sapien
tgaacttcacttaggcccttctgcc

SEQ ID NO: 5012043 - DNA, 25 bp, Homo sapien
tgcctaacaatttcccagtctccga

SEQ ID NO: 5012044 - DNA, 25 bp, Homo sapien
ttaggcccttctgcctaacaatttc

SEQ ID NO: 5012045 - DNA, 25 bp, Homo sapien
gttcctacatccctttctccactca

SEQ ID NO: 5012046 - DNA, 25 bp, Homo sapien
agcaaacattccacaccccagtggg

SEQ ID NO: 5012047 - DNA, 25 bp, Homo sapien
gggctgctacagaggcaacttgtga

SEQ ID NO: 5012048 - DNA, 25 bp, Homo sapien
taagttgtcaatgatactatctcca

SEQ ID NO: 5012049 - DNA, 25 bp, Homo sapien
tcattagagcaggtttctctgggta

SEQ ID NO: 5012050 - DNA, 25 bp, Homo sapien
ttaggtgattgtaggcatgcggcat

SEQ ID NO: 5012051 - DNA, 25 bp, Homo sapien
gctttggttactgaagctctgcagt

SEQ ID NO: 5012052 - DNA, 25 bp, Homo sapien
ttgccagggcctatattcataatgg

SEQ ID NO: 5012053 - DNA, 25 bp, Homo sapien
taaggaagtagtccagtgtcaatct

SEQ ID NO: 5012054 - DNA, 25 bp, Homo sapien
ggtcagcaagatgctgatgttgctc

SEQ ID NO: 5012055 - DNA, 25 bp, Homo sapien
aagatgctgatgttgctctgacacc

SEQ ID NO: 5012056 - DNA, 25 bp, Homo sapien
actgtggcctttctcagtgaagctg

SEQ ID NO: 5012057 - DNA, 25 bp, Homo sapien
ctgtggcctttctcagtgaagctgt

SEQ ID NO: 5012058 - DNA, 25 bp, Homo sapien
gcatgcaccatcattacaagctaat

SEQ ID NO: 5012059 - DNA, 25 bp, Homo sapien
ctacgcctggctaatgtcctaaatt

SEQ ID NO: 5012060 - DNA, 25 bp, Homo sapien
ctcctggacccaagagagtctttca

SEQ ID NO: 5012061 - DNA, 25 bp, Homo sapien
tttgtaaaaacatagtcttgttatg

SEQ ID NO: 5012062 - DNA, 25 bp, Homo sapien
tttcataatactaaagctccattgc

SEQ ID NO: 5012063 - DNA, 25 bp, Homo sapien
taaagatacttcctgaaacgtttca

SEQ ID NO: 5012064 - DNA, 25 bp, Homo sapien
taaagctccattgcaatgtgatact

SEQ ID NO: 5012065 - DNA, 25 bp, Homo sapien
taatactaaagctccattgcaatgt

SEQ ID NO: 5012066 - DNA, 25 bp, Homo sapien
cttgtcctctgacgggctcttgatc

SEQ ID NO: 5012067 - DNA, 25 bp, Homo sapien
gtcctctgacgggctcttgatccat

SEQ ID NO: 5012068 - DNA, 25 bp, Homo sapien
ttccttgtcctctgacgggctcttg

SEQ ID NO: 5012069 - DNA, 25 bp, Homo sapien
tcctctgacgggctcttgatccatt

SEQ ID NO: 5012070 - DNA, 25 bp, Homo sapien
aataaagccttccagacaagaggcc

SEQ ID NO: 5012071 - DNA, 25 bp, Homo sapien
tgcctgcaagggtttcaattgcttt

SEQ ID NO: 5012072 - DNA, 25 bp, Homo sapien
acagacgtctttgtttatcccagtg

SEQ ID NO: 5012073 - DNA, 25 bp, Homo sapien
ggccttcaaatatgaacagacgtct

SEQ ID NO: 5012074 - DNA, 25 bp, Homo sapien
tgttccctgtgctccgctgaacaag

SEQ ID NO: 5012075 - DNA, 25 bp, Homo sapien
agggaccgccagtgtctgcctcagt

SEQ ID NO: 5012076 - DNA, 25 bp, Homo sapien
cctgtgctccgctgaacaagagcct

SEQ ID NO: 5012077 - DNA, 25 bp, Homo sapien
catggtgggagggaccgccagtgtc

SEQ ID NO: 5012078 - DNA, 25 bp, Homo sapien
accacagccctagaggagctggtac

SEQ ID NO: 5012079 - DNA, 25 bp, Homo sapien
caggagatcagacgactcagagcca

SEQ ID NO: 5012080 - DNA, 25 bp, Homo sapien
cctagaggagctggtactcctgaag

SEQ ID NO: 5012081 - DNA, 25 bp, Homo sapien
gcctctgtagaccaagttcagccta

SEQ ID NO: 5012082 - DNA, 25 bp, Homo sapien
gcagacactggtgatcttcgtatgg

SEQ ID NO: 5012083 - DNA, 25 bp, Homo sapien
agcagacactggtgatcttcgtatg

SEQ ID NO: 5012084 - DNA, 25 bp, Homo sapien
cagacactggtgatcttcgtatgga

SEQ ID NO: 5012085 - DNA, 25 bp, Homo sapien
gagcagacactggtgatcttcgtat

SEQ ID NO: 5012086 - DNA, 25 bp, Homo sapien
agggccagcatgacattcatcagcc

SEQ ID NO: 5012087 - DNA, 25 bp, Homo sapien
tctcaatgtccagggccagcatgac

SEQ ID NO: 5012088 - DNA, 25 bp, Homo sapien
caatgtccagggccagcatgacatt

SEQ ID NO: 5012089 - DNA, 25 bp, Homo sapien
gggccagcatgacattcatcagccc

SEQ ID NO: 5012090 - DNA, 25 bp, Homo sapien
tattcatgcagctgtgtgccatgtc

SEQ ID NO: 5012091 - DNA, 25 bp, Homo sapien
ctggtattcatgcagctgtgtgcca

SEQ ID NO: 5012092 - DNA, 25 bp, Homo sapien
attcatgcagctgtgtgccatgtcc

SEQ ID NO: 5012093 - DNA, 25 bp, Homo sapien
ggtattcatgcagctgtgtgccatg

SEQ ID NO: 5012094 - DNA, 25 bp, Homo sapien
tccaacagcttggtggccttaacag

SEQ ID NO: 5012095 - DNA, 25 bp, Homo sapien
caacagcttggtggccttaacagcc

SEQ ID NO: 5012096 - DNA, 25 bp, Homo sapien
tgcttggcctccatgacgacagctt

SEQ ID NO: 5012097 - DNA, 25 bp, Homo sapien
gctgcttggcctccatgacgacagc

SEQ ID NO: 5012098 - DNA, 25 bp, Homo sapien
gctcatctcagcgatgtccatcttt

SEQ ID NO: 5012099 - DNA, 25 bp, Homo sapien
agctcatctcagcgatgtccatctt

SEQ ID NO: 5012100 - DNA, 25 bp, Homo sapien
atgcgctcagccttggccaggctat

SEQ ID NO: 5012101 - DNA, 25 bp, Homo sapien
gccttggccaggctatggttggcaa

SEQ ID NO: 5012102 - DNA, 25 bp, Homo sapien
ttggccaggctatggttggcaatct

SEQ ID NO: 5012103 - DNA, 25 bp, Homo sapien
gccaggctatggttggcaatctcct

SEQ ID NO: 5012104 - DNA, 25 bp, Homo sapien
ccatagacaggaccacagatgtgta

SEQ ID NO: 5012105 - DNA, 25 bp, Homo sapien
agacaggaccacagatgtgtatgag

SEQ ID NO: 5012106 - DNA, 25 bp, Homo sapien
catagacaggaccacagatgtgtat

SEQ ID NO: 5012107 - DNA, 25 bp, Homo sapien
gtggctgttgtccatagacaggacc

SEQ ID NO: 5012108 - DNA, 25 bp, Homo sapien
gggaatgcagctcacagaaaacctc

SEQ ID NO: 5012109 - DNA, 25 bp, Homo sapien
ctgggaatgcagctcacagaaaacc

SEQ ID NO: 5012110 - DNA, 25 bp, Homo sapien
acagaaaacctctttatacatctgc

SEQ ID NO: 5012111 - DNA, 25 bp, Homo sapien
tcacagaaaacctctttatacatct

SEQ ID NO: 5012112 - DNA, 25 bp, Homo sapien
ctaaacctctgtatgtttactgatg

SEQ ID NO: 5012113 - DNA, 25 bp, Homo sapien
cctctgtatgtttactgatgtcacc

SEQ ID NO: 5012114 - DNA, 25 bp, Homo sapien
aacctctgtatgtttactgatgtca

SEQ ID NO: 5012115 - DNA, 25 bp, Homo sapien
cattctaaacctctgtatgtttact

SEQ ID NO: 5012116 - DNA, 25 bp, Homo sapien
cccactgcctccaaaggttgttgat

SEQ ID NO: 5012117 - DNA, 25 bp, Homo sapien
agagtgtcccactgcctccaaaggt

SEQ ID NO: 5012118 - DNA, 25 bp, Homo sapien
ttattattcaagtccttcagcagcc

SEQ ID NO: 5012119 - DNA, 25 bp, Homo sapien
ggcccagagtgtcccactgcctcca

SEQ ID NO: 5012120 - DNA, 25 bp, Homo sapien
tacaggaggctccactggtcttcag

SEQ ID NO: 5012121 - DNA, 25 bp, Homo sapien
ttctgctgctgctccagcagtatac

SEQ ID NO: 5012122 - DNA, 25 bp, Homo sapien
aggaggctccactggtcttcagcat

SEQ ID NO: 5012123 - DNA, 25 bp, Homo sapien
ctacaggaggctccactggtcttca

SEQ ID NO: 5012124 - DNA, 25 bp, Homo sapien
ttctcctgggtgtatgtgacctgga

SEQ ID NO: 5012125 - DNA, 25 bp, Homo sapien
tctcctgggtgtatgtgacctggat

SEQ ID NO: 5012126 - DNA, 25 bp, Homo sapien
ctgggtgtatgtgacctggatgttg

SEQ ID NO: 5012127 - DNA, 25 bp, Homo sapien
cctgggtgtatgtgacctggatgtt

SEQ ID NO: 5012128 - DNA, 25 bp, Homo sapien
atcactggccccaccatagtctcca

SEQ ID NO: 5012129 - DNA, 25 bp, Homo sapien
tatgataccccccatatcactggcc

SEQ ID NO: 5012130 - DNA, 25 bp, Homo sapien
ctatgataccccccatatcactggc

SEQ ID NO: 5012131 - DNA, 25 bp, Homo sapien
cccaccatagtctccacccagaccc

SEQ ID NO: 5012132 - DNA, 25 bp, Homo sapien
tgaaaacctggggaccagagatgga

SEQ ID NO: 5012133 - DNA, 25 bp, Homo sapien
tgtaggagtagctgctgaaaacctg

SEQ ID NO: 5012134 - DNA, 25 bp, Homo sapien
taggagtagctgctgaaaacctggg

SEQ ID NO: 5012135 - DNA, 25 bp, Homo sapien
acatgtaggagtagctgctgaaaac

SEQ ID NO: 5012136 - DNA, 25 bp, Homo sapien
tgagtgtccccatgtagttcctggt

SEQ ID NO: 5012137 - DNA, 25 bp, Homo sapien
ttctgaaaaacctcatggaacttct

SEQ ID NO: 5012138 - DNA, 25 bp, Homo sapien
atagcaatcaataacagggcagaac

SEQ ID NO: 5012139 - DNA, 25 bp, Homo sapien
gagtcgtcagtgttcaaatgctatg

SEQ ID NO: 5012140 - DNA, 25 bp, Homo sapien
tatttcatgcctaccatatgtcggg

SEQ ID NO: 5012141 - DNA, 25 bp, Homo sapien
agactttgagagaggctagggcact

SEQ ID NO: 5012142 - DNA, 25 bp, Homo sapien
taatggacctagaagccacaaactc

SEQ ID NO: 5012143 - DNA, 25 bp, Homo sapien
caagttctgaccatggagcagtgaa

SEQ ID NO: 5012144 - DNA, 25 bp, Homo sapien
atgaaacgtcctgaggaatgatcag

SEQ ID NO: 5012145 - DNA, 25 bp, Homo sapien
tgagatgaaacgtcctgaggaatga

SEQ ID NO: 5012146 - DNA, 25 bp, Homo sapien
gatgaaacgtcctgaggaatgatca

SEQ ID NO: 5012147 - DNA, 25 bp, Homo sapien
gagatgaaacgtcctgaggaatgat

SEQ ID NO: 5012148 - DNA, 25 bp, Homo sapien
aataagctcgctcctgttcaacagt

SEQ ID NO: 5012149 - DNA, 25 bp, Homo sapien
tgacagttgtgctatgtagagccca

SEQ ID NO: 5012150 - DNA, 25 bp, Homo sapien
tgtaaaccaccatatagcaagatcc

SEQ ID NO: 5012151 - DNA, 25 bp, Homo sapien
cccatggtttttatcggaagtgcaa

SEQ ID NO: 5012152 - DNA, 25 bp, Homo sapien
ggacctcagttcttctaattggatc

SEQ ID NO: 5012153 - DNA, 25 bp, Homo sapien
ccttagttcaagcatccatagtctc

SEQ ID NO: 5012154 - DNA, 25 bp, Homo sapien
tatgacagaaacttgagactcaccc

SEQ ID NO: 5012155 - DNA, 25 bp, Homo sapien
tttgcatcaatagcctggacctcag

SEQ ID NO: 5012156 - DNA, 25 bp, Homo sapien
gaatggctggctcagtctacactcc

SEQ ID NO: 5012157 - DNA, 25 bp, Homo sapien
cattgttttagttagtccaggtcac

SEQ ID NO: 5012158 - DNA, 25 bp, Homo sapien
taatgaagtcactagtaccctcctg

SEQ ID NO: 5012159 - DNA, 25 bp, Homo sapien
tctttggcttatacattcggtggca

SEQ ID NO: 5012160 - DNA, 25 bp, Homo sapien
tgatggccctacatgctatctgcga

SEQ ID NO: 5012161 - DNA, 25 bp, Homo sapien
tcagcatgccttgggagttaggcaa

SEQ ID NO: 5012162 - DNA, 25 bp, Homo sapien
ttctcatgacaagacggcccaagta

SEQ ID NO: 5012163 - DNA, 25 bp, Homo sapien
tccacaattataagccacagttctg

SEQ ID NO: 5012164 - DNA, 25 bp, Homo sapien
taagttgtatggctgttgtacctgc

SEQ ID NO: 5012165 - DNA, 25 bp, Homo sapien
ggaactcaaaagagaataccctcga

SEQ ID NO: 5012166 - DNA, 25 bp, Homo sapien
gaggcttgcccagtatgctataaga

SEQ ID NO: 5012167 - DNA, 25 bp, Homo sapien
tacacttgggacaggactatagata

SEQ ID NO: 5012168 - DNA, 25 bp, Homo sapien
aaactctaaaaagcagagcgcctct

SEQ ID NO: 5012169 - DNA, 25 bp, Homo sapien
ggaacgcagttcctcaccagcaacg

SEQ ID NO: 5012170 - DNA, 25 bp, Homo sapien
aggaacgcagttcctcaccagcaac

SEQ ID NO: 5012171 - DNA, 25 bp, Homo sapien
ctctaaaaagcagagcgcctctcct

SEQ ID NO: 5012172 - DNA, 25 bp, Homo sapien
gatggtcctcctggtagagagcctc

SEQ ID NO: 5012173 - DNA, 25 bp, Homo sapien
ctttgtggacagagggagcggtggc

SEQ ID NO: 5012174 - DNA, 25 bp, Homo sapien
tgggtgctgacttcagctggcgatt

SEQ ID NO: 5012175 - DNA, 25 bp, Homo sapien
cagctggcgattctgtttttgcaca

SEQ ID NO: 5012176 - DNA, 25 bp, Homo sapien
taattatgtttcttggagttggtct

SEQ ID NO: 5012177 - DNA, 25 bp, Homo sapien
gataattatgtttcttggagttggt

SEQ ID NO: 5012178 - DNA, 25 bp, Homo sapien
ataattatgtttcttggagttggtc

SEQ ID NO: 5012179 - DNA, 25 bp, Homo sapien
tgataattatgtttcttggagttgg

SEQ ID NO: 5012180 - DNA, 25 bp, Homo sapien
tcacagcccacttttatttcactgc

SEQ ID NO: 5012181 - DNA, 25 bp, Homo sapien
tcactgctgttgaaatcttccctga

SEQ ID NO: 5012182 - DNA, 25 bp, Homo sapien
tatttcactgctgttgaaatcttcc

SEQ ID NO: 5012183 - DNA, 25 bp, Homo sapien
tgctgttgaaatcttccctgatcat

SEQ ID NO: 5012184 - DNA, 25 bp, Homo sapien
gaagagccctttattcctgaagcga

SEQ ID NO: 5012185 - DNA, 25 bp, Homo sapien
ggttgctatagctagtctcccatta

SEQ ID NO: 5012186 - DNA, 25 bp, Homo sapien
tgttaacttgcagtaaagtctcagc

SEQ ID NO: 5012187 - DNA, 25 bp, Homo sapien
tcaacttttattcctgaagagccct

SEQ ID NO: 5012188 - DNA, 25 bp, Homo sapien
aaagagtagtaaaagccagtagcct

SEQ ID NO: 5012189 - DNA, 25 bp, Homo sapien
tatatgcactttatgaagcggaggg

SEQ ID NO: 5012190 - DNA, 25 bp, Homo sapien
gctagactttccagtaatatgctaa

SEQ ID NO: 5012191 - DNA, 25 bp, Homo sapien
aagcggagggagctctactctttgc

SEQ ID NO: 5012192 - DNA, 25 bp, Homo sapien
aagatttctcggtgtccattctggg

SEQ ID NO: 5012193 - DNA, 25 bp, Homo sapien
catggatgcagagtatgaggaacca

SEQ ID NO: 5012194 - DNA, 25 bp, Homo sapien
aagaaacagcgctgcctacattgca

SEQ ID NO: 5012195 - DNA, 25 bp, Homo sapien
gagctcagaggacaggtgtgcacca

SEQ ID NO: 5012196 - DNA, 25 bp, Homo sapien
caggataatgcatgctgatcagatc

SEQ ID NO: 5012197 - DNA, 25 bp, Homo sapien
agcaggataatgcatgctgatcaga

SEQ ID NO: 5012198 - DNA, 25 bp, Homo sapien
ggataatgcatgctgatcagatcat

SEQ ID NO: 5012199 - DNA, 25 bp, Homo sapien
gataatgcatgctgatcagatcata

SEQ ID NO: 5012200 - DNA, 25 bp, Homo sapien
ttatggtagaaacaccgtaaggtca

SEQ ID NO: 5012201 - DNA, 25 bp, Homo sapien
tgtctactcctactaacagtgtata

SEQ ID NO: 5012202 - DNA, 25 bp, Homo sapien
tccatgttccgtccacagacatctt

SEQ ID NO: 5012203 - DNA, 25 bp, Homo sapien
actgcttttcacaatagttggacaa

SEQ ID NO: 5012204 - DNA, 25 bp, Homo sapien
ctgtagccttgcagcataaagtcaa

SEQ ID NO: 5012205 - DNA, 25 bp, Homo sapien
ttgtagagatctcaacaaatccagg

SEQ ID NO: 5012206 - DNA, 25 bp, Homo sapien
tagatatgccactagctaggctaat

SEQ ID NO: 5012207 - DNA, 25 bp, Homo sapien
actagatagttggagatgtgcggca

SEQ ID NO: 5012208 - DNA, 25 bp, Homo sapien
cgggcattctgcatacatactcaag

SEQ ID NO: 5012209 - DNA, 25 bp, Homo sapien
aaggaacacgggcattctgcataca

SEQ ID NO: 5012210 - DNA, 25 bp, Homo sapien
ctatcattctcagaaaggaacacgg

SEQ ID NO: 5012211 - DNA, 25 bp, Homo sapien
ttctcagaaaggaacacgggcattc

SEQ ID NO: 5012212 - DNA, 25 bp, Homo sapien
gagaccacccatccattttacaagg

SEQ ID NO: 5012213 - DNA, 25 bp, Homo sapien
gaaactgtaaactgatcactccaga

SEQ ID NO: 5012214 - DNA, 25 bp, Homo sapien
gaaatgtggcctattgtgtccagag

SEQ ID NO: 5012215 - DNA, 25 bp, Homo sapien
gcaacattaggtgtcaagttcccca

SEQ ID NO: 5012216 - DNA, 25 bp, Homo sapien
gattcctgatcctgagtctgaggtt

SEQ ID NO: 5012217 - DNA, 25 bp, Homo sapien
gaagaattaggtacatctatagctt

SEQ ID NO: 5012218 - DNA, 25 bp, Homo sapien
catctatagctttgtccattgtgct

SEQ ID NO: 5012219 - DNA, 25 bp, Homo sapien
tgtccattgtgcttgaggatgaagt

SEQ ID NO: 5012220 - DNA, 25 bp, Homo sapien
acaaccccattattattcattcata

SEQ ID NO: 5012221 - DNA, 25 bp, Homo sapien
caaccccattattattcattcatac

SEQ ID NO: 5012222 - DNA, 25 bp, Homo sapien
ttcatagacaaccccattattattc

SEQ ID NO: 5012223 - DNA, 25 bp, Homo sapien
tagacaaccccattattattcattc

SEQ ID NO: 5012224 - DNA, 25 bp, Homo sapien
cactgtgtccttggaaaacgtacag

SEQ ID NO: 5012225 - DNA, 25 bp, Homo sapien
tggaaaacgtacagtttcatcacct

SEQ ID NO: 5012226 - DNA, 25 bp, Homo sapien
agcactgtgtccttggaaaacgtac

SEQ ID NO: 5012227 - DNA, 25 bp, Homo sapien
tgtccttggaaaacgtacagtttca

SEQ ID NO: 5012228 - DNA, 25 bp, Homo sapien
aaataagagccccatagcctggact

SEQ ID NO: 5012229 - DNA, 25 bp, Homo sapien
caagggcaatggtattttcctcctg

SEQ ID NO: 5012230 - DNA, 25 bp, Homo sapien
cctcctgagcttgctacaaaggtaa

SEQ ID NO: 5012231 - DNA, 25 bp, Homo sapien
gactacctccatgacagtgtgatga

SEQ ID NO: 5012232 - DNA, 25 bp, Homo sapien
gattggttttccagtcgatctgtga

SEQ ID NO: 5012233 - DNA, 25 bp, Homo sapien
taggagctccgtgagtcagtggcaa

SEQ ID NO: 5012234 - DNA, 25 bp, Homo sapien
tcattaaggccagctatggattcag

SEQ ID NO: 5012235 - DNA, 25 bp, Homo sapien
gatctgtgacactaattctcctcta

SEQ ID NO: 5012236 - DNA, 25 bp, Homo sapien
gtcatgttgggtaagcaatgatgca

SEQ ID NO: 5012237 - DNA, 25 bp, Homo sapien
ctgagtcatgttgggtaagcaatga

SEQ ID NO: 5012238 - DNA, 25 bp, Homo sapien
atgttgggtaagcaatgatgcagtc

SEQ ID NO: 5012239 - DNA, 25 bp, Homo sapien
gagtcatgttgggtaagcaatgatg

SEQ ID NO: 5012240 - DNA, 25 bp, Homo sapien
cctggctcgtgagtaggaaatgtaa

SEQ ID NO: 5012241 - DNA, 25 bp, Homo sapien
ttcacattagtatcagcaaagaagg

SEQ ID NO: 5012242 - DNA, 25 bp, Homo sapien
aaagaaggtatttcctggctcgtga

SEQ ID NO: 5012243 - DNA, 25 bp, Homo sapien
ctttgttgtctccacacgactggct

SEQ ID NO: 5012244 - DNA, 25 bp, Homo sapien
ctgcttttcccgctgtctctccagc

SEQ ID NO: 5012245 - DNA, 25 bp, Homo sapien
tgcttttcccgctgtctctccagca

SEQ ID NO: 5012246 - DNA, 25 bp, Homo sapien
tctaatatccttcacagagtcacca

SEQ ID NO: 5012247 - DNA, 25 bp, Homo sapien
tcaaatgacctattgcaggaacctc

SEQ ID NO: 5012248 - DNA, 25 bp, Homo sapien
ttgcaggaacctcatcaatggtctt

SEQ ID NO: 5012249 - DNA, 25 bp, Homo sapien
tccttcacagagtcaccaacattat

SEQ ID NO: 5012250 - DNA, 25 bp, Homo sapien
ggttcttgtgcaacattaccctgta

SEQ ID NO: 5012251 - DNA, 25 bp, Homo sapien
tctaaacctggttctccaatcctgt

SEQ ID NO: 5012252 - DNA, 25 bp, Homo sapien
tctccaatcctgtcttccttacagt

SEQ ID NO: 5012253 - DNA, 25 bp, Homo sapien
caatcaaaaacttctggcactgcct

SEQ ID NO: 5012254 - DNA, 25 bp, Homo sapien
caaagatgttttaggccaagtaaga

SEQ ID NO: 5012255 - DNA, 25 bp, Homo sapien
gaaaggccataaatctcctactcca

SEQ ID NO: 5012256 - DNA, 25 bp, Homo sapien
tccaaagatgttttaggccaagtaa

SEQ ID NO: 5012257 - DNA, 25 bp, Homo sapien
cataaatctcctactccaaagatgt

SEQ ID NO: 5012258 - DNA, 25 bp, Homo sapien
agggagatggacatgctgagcttca

SEQ ID NO: 5012259 - DNA, 25 bp, Homo sapien
ttctcttataacgctgcaatgtttc

SEQ ID NO: 5012260 - DNA, 25 bp, Homo sapien
catgctgagcttcaacaaatagtct

SEQ ID NO: 5012261 - DNA, 25 bp, Homo sapien
gagcttcaacaaatagtctataatt

SEQ ID NO: 5012262 - DNA, 25 bp, Homo sapien
tctaagatcacacggaactggctga

SEQ ID NO: 5012263 - DNA, 25 bp, Homo sapien
attttggaaaatgtcccatccccag

SEQ ID NO: 5012264 - DNA, 25 bp, Homo sapien
gcaccaagggtgacatctattacag

SEQ ID NO: 5012265 - DNA, 25 bp, Homo sapien
tgctcagagaacacaatcaccctgg

SEQ ID NO: 5012266 - DNA, 25 bp, Homo sapien
ctggaaatggctaatggatcagcat

SEQ ID NO: 5012267 - DNA, 25 bp, Homo sapien
tatttgacatcaaaagggcagctgg

SEQ ID NO: 5012268 - DNA, 25 bp, Homo sapien
aactacatatcattgaacatgactg

SEQ ID NO: 5012269 - DNA, 25 bp, Homo sapien
gatcagcatggtgttcaatcttcca

SEQ ID NO: 5012270 - DNA, 25 bp, Homo sapien
atgacagaaggcaaagcaggagcag

SEQ ID NO: 5012271 - DNA, 25 bp, Homo sapien
catggtggcatatgcttctggggag

SEQ ID NO: 5012272 - DNA, 25 bp, Homo sapien
tggtggcatatgcttctggggaggt

SEQ ID NO: 5012273 - DNA, 25 bp, Homo sapien
aagcttccaatcatgacagaaggca

SEQ ID NO: 5012274 - DNA, 25 bp, Homo sapien
tcccaaggactagggtgaacacctg

SEQ ID NO: 5012275 - DNA, 25 bp, Homo sapien
tccagtcccgtgaataatgactcat

SEQ ID NO: 5012276 - DNA, 25 bp, Homo sapien
ttctccagtcccgtgaataatgact

SEQ ID NO: 5012277 - DNA, 25 bp, Homo sapien
ctttctggtcccaaggactagggtg

SEQ ID NO: 5012278 - DNA, 25 bp, Homo sapien
tcacttcaaaaatatatctttacta

SEQ ID NO: 5012279 - DNA, 25 bp, Homo sapien
cacttcaaaaatatatctttactac

SEQ ID NO: 5012280 - DNA, 25 bp, Homo sapien
gtctgattggaaatgaccacccctg

SEQ ID NO: 5012281 - DNA, 25 bp, Homo sapien
cattagcaggagttcttaggtgtct

SEQ ID NO: 5012282 - DNA, 25 bp, Homo sapien
gcgtttctagaatgtgcctccatct

SEQ ID NO: 5012283 - DNA, 25 bp, Homo sapien
caaagcaacacacagtttcaagcgt

SEQ ID NO: 5012284 - DNA, 25 bp, Homo sapien
caggcccagaggcaaatgacagtac

SEQ ID NO: 5012285 - DNA, 25 bp, Homo sapien
caactggaacgtgcactttgccgaa

SEQ ID NO: 5012286 - DNA, 25 bp, Homo sapien
cacaagcagagtcaagttcctagga

SEQ ID NO: 5012287 - DNA, 25 bp, Homo sapien
aagccactttgtagccaggattgag

SEQ ID NO: 5012288 - DNA, 25 bp, Homo sapien
gagccagggaggcgaaggatacagt

SEQ ID NO: 5012289 - DNA, 25 bp, Homo sapien
agccagggaggcgaaggatacagtg

SEQ ID NO: 5012290 - DNA, 25 bp, Homo sapien
tgagccagggaggcgaaggatacag

SEQ ID NO: 5012291 - DNA, 25 bp, Homo sapien
tcaagctcctccactttgtgttctg

SEQ ID NO: 5012292 - DNA, 25 bp, Homo sapien
aagctcctccactttgtgttctgtg

SEQ ID NO: 5012293 - DNA, 25 bp, Homo sapien
agctcctccactttgtgttctgtgt

SEQ ID NO: 5012294 - DNA, 25 bp, Homo sapien
caagctcctccactttgtgttctgt

SEQ ID NO: 5012295 - DNA, 25 bp, Homo sapien
catgaaggaataacgaacggtcctg

SEQ ID NO: 5012296 - DNA, 25 bp, Homo sapien
ttcacacaagtacgaggctccaaaa

SEQ ID NO: 5012297 - DNA, 25 bp, Homo sapien
ctacagtcctgagggcgggatcctg

SEQ ID NO: 5012298 - DNA, 25 bp, Homo sapien
tgccagacttcacacaagtacgagg

SEQ ID NO: 5012299 - DNA, 25 bp, Homo sapien
cttggtaaatttagcctcttggctt

SEQ ID NO: 5012300 - DNA, 25 bp, Homo sapien
ataaccaccaagtagaaaattgtag

SEQ ID NO: 5012301 - DNA, 25 bp, Homo sapien
caccaagtagaaaattgtagcagca

SEQ ID NO: 5012302 - DNA, 25 bp, Homo sapien
tcccattgattaatacaaagagtaa

SEQ ID NO: 5012303 - DNA, 25 bp, Homo sapien
ttcccacctatcataactccctcca

SEQ ID NO: 5012304 - DNA, 25 bp, Homo sapien
ctcagagatcaacatgcccttctgg

SEQ ID NO: 5012305 - DNA, 25 bp, Homo sapien
cccttctggtgagtcaaagcccctg

SEQ ID NO: 5012306 - DNA, 25 bp, Homo sapien
tgctgctttcccacctatcataact

SEQ ID NO: 5012307 - DNA, 25 bp, Homo sapien
tcatggtgatctgtcataagtaacc

SEQ ID NO: 5012308 - DNA, 25 bp, Homo sapien
taataaccgtacaatggcgtatcca

SEQ ID NO: 5012309 - DNA, 25 bp, Homo sapien
gaaccattcccacataagacagcaa

SEQ ID NO: 5012310 - DNA, 25 bp, Homo sapien
ttcttatcccatggaccaaccagtc

SEQ ID NO: 5012311 - DNA, 25 bp, Homo sapien
tattgcaatattggctttgtcacag

SEQ ID NO: 5012312 - DNA, 25 bp, Homo sapien
ctcgcaatatctagaaggtatgcct

SEQ ID NO: 5012313 - DNA, 25 bp, Homo sapien
gaatagaatatactcctggtgaaga

SEQ ID NO: 5012314 - DNA, 25 bp, Homo sapien
tatccgcactgaggtaagactcttc

SEQ ID NO: 5012315 - DNA, 25 bp, Homo sapien
ctaggtatgcctttcacagctgtga

SEQ ID NO: 5012316 - DNA, 25 bp, Homo sapien
tctacaacgagtcaaatagaggtac

SEQ ID NO: 5012317 - DNA, 25 bp, Homo sapien
agctgtgaactctgaagtgggatta

SEQ ID NO: 5012318 - DNA, 25 bp, Homo sapien
tgtttttaacaggtacggtagcatc

SEQ ID NO: 5012319 - DNA, 25 bp, Homo sapien
ttatgagtctccaaagtcaattata

SEQ ID NO: 5012320 - DNA, 25 bp, Homo sapien
tatagtcatgaattctgagattcta

SEQ ID NO: 5012321 - DNA, 25 bp, Homo sapien
gcatctgtcacataagtagtgtaca

SEQ ID NO: 5012322 - DNA, 25 bp, Homo sapien
gcctccaattccatgcagaaatcct

SEQ ID NO: 5012323 - DNA, 25 bp, Homo sapien
catgtacagacttaggacctcctgg

SEQ ID NO: 5012324 - DNA, 25 bp, Homo sapien
taatggactgcgtcagctagcctcc

SEQ ID NO: 5012325 - DNA, 25 bp, Homo sapien
cacacttggcaaggcagatctcaca

SEQ ID NO: 5012326 - DNA, 25 bp, Homo sapien
tttcccaggagtgtgtactagcacc

SEQ ID NO: 5012327 - DNA, 25 bp, Homo sapien
tagagacctagaaagagactaagac

SEQ ID NO: 5012328 - DNA, 25 bp, Homo sapien
acagcaagtccttagagacctagaa

SEQ ID NO: 5012329 - DNA, 25 bp, Homo sapien
tccttagagacctagaaagagacta

SEQ ID NO: 5012330 - DNA, 25 bp, Homo sapien
atacagcaagtccttagagacctag

SEQ ID NO: 5012331 - DNA, 25 bp, Homo sapien
ttcatagaccgctggaaagaccaat

SEQ ID NO: 5012332 - DNA, 25 bp, Homo sapien
aattcatagaccgctggaaagacca

SEQ ID NO: 5012333 - DNA, 25 bp, Homo sapien
attcatagaccgctggaaagaccaa

SEQ ID NO: 5012334 - DNA, 25 bp, Homo sapien
catatctctcgttctgaggcccagg

SEQ ID NO: 5012335 - DNA, 25 bp, Homo sapien
caggttcaggtttgctccatatctc

SEQ ID NO: 5012336 - DNA, 25 bp, Homo sapien
tcatcctggcttgattgtaggctgc

SEQ ID NO: 5012337 - DNA, 25 bp, Homo sapien
tgctcattggtctacaagtctgctg

SEQ ID NO: 5012338 - DNA, 25 bp, Homo sapien
tcaaagggctccgtgcaaacaaagc

SEQ ID NO: 5012339 - DNA, 25 bp, Homo sapien
gaagtcaactctttgcagccacaag

SEQ ID NO: 5012340 - DNA, 25 bp, Homo sapien
ggctgtatacactcggaaatgcatg

SEQ ID NO: 5012341 - DNA, 25 bp, Homo sapien
tctttgctaagctggaacaggccag

SEQ ID NO: 5012342 - DNA, 25 bp, Homo sapien
ttagggcccctgctacttgtagata

SEQ ID NO: 5012343 - DNA, 25 bp, Homo sapien
cagtgcccattgcaggaaagagtgc

SEQ ID NO: 5012344 - DNA, 25 bp, Homo sapien
aacagggatttgatgatgccacacc

SEQ ID NO: 5012345 - DNA, 25 bp, Homo sapien
tgaagcaagtcactacaaccagcct

SEQ ID NO: 5012346 - DNA, 25 bp, Homo sapien
ccatgaagaattattggcactattt

SEQ ID NO: 5012347 - DNA, 25 bp, Homo sapien
aagacttgagagaggtgcatctcca

SEQ ID NO: 5012348 - DNA, 25 bp, Homo sapien
atctccatgaagaattattggcact

SEQ ID NO: 5012349 - DNA, 25 bp, Homo sapien
ttcaagacttgagagaggtgcatct

SEQ ID NO: 5012350 - DNA, 25 bp, Homo sapien
aaaagaatatgttaagatggggcag

SEQ ID NO: 5012351 - DNA, 25 bp, Homo sapien
ctgtttgagaagttagactcacacg

SEQ ID NO: 5012352 - DNA, 25 bp, Homo sapien
ttaaaacactgctacgtccttgtca

SEQ ID NO: 5012353 - DNA, 25 bp, Homo sapien
gaagttagactcacacgcttcccaa

SEQ ID NO: 5012354 - DNA, 25 bp, Homo sapien
tccttggtagtgagatggggaattt

SEQ ID NO: 5012355 - DNA, 25 bp, Homo sapien
taggtctgtccttggtagtgagatg

SEQ ID NO: 5012356 - DNA, 25 bp, Homo sapien
tcagttaggtctgtccttggtagtg

SEQ ID NO: 5012357 - DNA, 25 bp, Homo sapien
gaatttctccagtatctttaacttg

SEQ ID NO: 5012358 - DNA, 25 bp, Homo sapien
cagttctaggtgagaacccatttcc

SEQ ID NO: 5012359 - DNA, 25 bp, Homo sapien
gggctgggttgctttccagcagttc

SEQ ID NO: 5012360 - DNA, 25 bp, Homo sapien
agttctaggtgagaacccatttcct

SEQ ID NO: 5012361 - DNA, 25 bp, Homo sapien
tgtcagtagggctgggttgctttcc

SEQ ID NO: 5012362 - DNA, 25 bp, Homo sapien
cattgtcacatatccttttctggct

SEQ ID NO: 5012363 - DNA, 25 bp, Homo sapien
catgtgaggtaatatcagaggtgct

SEQ ID NO: 5012364 - DNA, 25 bp, Homo sapien
tttcatcctcaaagccagaaacagc

SEQ ID NO: 5012365 - DNA, 25 bp, Homo sapien
cagcaggttgaatccttctcacatc

SEQ ID NO: 5012366 - DNA, 25 bp, Homo sapien
gaatataacctcagtctcaaagaag

SEQ ID NO: 5012367 - DNA, 25 bp, Homo sapien
atgatccaagagttcagagaaggag

SEQ ID NO: 5012368 - DNA, 25 bp, Homo sapien
tagtcagaagaagtggaatataacc

SEQ ID NO: 5012369 - DNA, 25 bp, Homo sapien
ttgtttcaggttgaagtaatgatcc

SEQ ID NO: 5012370 - DNA, 25 bp, Homo sapien
caatcttggaagataaatagaccat

SEQ ID NO: 5012371 - DNA, 25 bp, Homo sapien
cttgagcctctcagaacaatcttgg

SEQ ID NO: 5012372 - DNA, 25 bp, Homo sapien
tatatattcattgtgtaacttgagc

SEQ ID NO: 5012373 - DNA, 25 bp, Homo sapien
cttggaagataaatagaccatagta

SEQ ID NO: 5012374 - DNA, 25 bp, Homo sapien
agctgctgacgttggatccctgatg

SEQ ID NO: 5012375 - DNA, 25 bp, Homo sapien
gccctggaagggcagacatttctat

SEQ ID NO: 5012376 - DNA, 25 bp, Homo sapien
aattgagccaaagaaggttcctgag

SEQ ID NO: 5012377 - DNA, 25 bp, Homo sapien
tccccactggagttgtacaaaaatg

SEQ ID NO: 5012378 - DNA, 25 bp, Homo sapien
ccgcgcccagctaaaaagttaatat

SEQ ID NO: 5012379 - DNA, 25 bp, Homo sapien
agccaccgcgcccagctaaaaagtt

SEQ ID NO: 5012380 - DNA, 25 bp, Homo sapien
cagctaaaaagttaatataccttag

SEQ ID NO: 5012381 - DNA, 25 bp, Homo sapien
gagtgctgtggcgcgctggagtgca

SEQ ID NO: 5012382 - DNA, 25 bp, Homo sapien
tataatcagactgtgaaaaggcacc

SEQ ID NO: 5012383 - DNA, 25 bp, Homo sapien
tcacacttgtattcctgaggaagaa

SEQ ID NO: 5012384 - DNA, 25 bp, Homo sapien
gacgttcagatatcaaaagccccag

SEQ ID NO: 5012385 - DNA, 25 bp, Homo sapien
tctagtcacctataaaggaatcccc

SEQ ID NO: 5012386 - DNA, 25 bp, Homo sapien
gtgcagttatggcttactatgtcct

SEQ ID NO: 5012387 - DNA, 25 bp, Homo sapien
tatggcttactatgtccttgaactc

SEQ ID NO: 5012388 - DNA, 25 bp, Homo sapien
cagttatggcttactatgtccttga

SEQ ID NO: 5012389 - DNA, 25 bp, Homo sapien
gttatggcttactatgtccttgaac

SEQ ID NO: 5012390 - DNA, 25 bp, Homo sapien
tcaatagcttgcagatagtgttctc

SEQ ID NO: 5012391 - DNA, 25 bp, Homo sapien
tgatgactatgagggagaatccatt

SEQ ID NO: 5012392 - DNA, 25 bp, Homo sapien
tagcttctggtagtctagtctgttc

SEQ ID NO: 5012393 - DNA, 25 bp, Homo sapien
gatataaccactggcgggaactgaa

SEQ ID NO: 5012394 - DNA, 25 bp, Homo sapien
cagggccgtcttccattgcgtgaat

SEQ ID NO: 5012395 - DNA, 25 bp, Homo sapien
aaatgaatagtttagcagggccgtc

SEQ ID NO: 5012396 - DNA, 25 bp, Homo sapien
tgtaaccaatggaaagggcttgctc

SEQ ID NO: 5012397 - DNA, 25 bp, Homo sapien
caaaatatggttggtcacggtcatc

SEQ ID NO: 5012398 - DNA, 25 bp, Homo sapien
ccatgagcagtgtacaagagctcct

SEQ ID NO: 5012399 - DNA, 25 bp, Homo sapien
tctattgcattatgagtccttattg

SEQ ID NO: 5012400 - DNA, 25 bp, Homo sapien
ggatagtagtgttgcaatgtgaata

SEQ ID NO: 5012401 - DNA, 25 bp, Homo sapien
cactcacacttggtatattctgtct

SEQ ID NO: 5012402 - DNA, 25 bp, Homo sapien
acagaatgaatggatagaaaagtct

SEQ ID NO: 5012403 - DNA, 25 bp, Homo sapien
ggatagaaaagtcttctgagtactt

SEQ ID NO: 5012404 - DNA, 25 bp, Homo sapien
gacgcgcgttaacagaatgaatgga

SEQ ID NO: 5012405 - DNA, 25 bp, Homo sapien
tcttcacactgacgcgcgttaacag

SEQ ID NO: 5012406 - DNA, 25 bp, Homo sapien
gaaggatggaaaaacgtttgcagtc

SEQ ID NO: 5012407 - DNA, 25 bp, Homo sapien
tgtatataacatttgcactcacgtc

SEQ ID NO: 5012408 - DNA, 25 bp, Homo sapien
tagaaaggtattcaaggcagaagga

SEQ ID NO: 5012409 - DNA, 25 bp, Homo sapien
gcagaaatctgttcgagtcattcct

SEQ ID NO: 5012410 - DNA, 25 bp, Homo sapien
tgaacttgctccactatgacagggt

SEQ ID NO: 5012411 - DNA, 25 bp, Homo sapien
tggcaacttccggaagacctgtggc

SEQ ID NO: 5012412 - DNA, 25 bp, Homo sapien
tggagccctcggaattcacaacact

SEQ ID NO: 5012413 - DNA, 25 bp, Homo sapien
tacaacctcttaagtgtggagccct

SEQ ID NO: 5012414 - DNA, 25 bp, Homo sapien
tgcttgaaactacaggcgtgggcta

SEQ ID NO: 5012415 - DNA, 25 bp, Homo sapien
gataactaaggtacagtagtcttcc

SEQ ID NO: 5012416 - DNA, 25 bp, Homo sapien
tccaagaccctggtcaatgcctgaa

SEQ ID NO: 5012417 - DNA, 25 bp, Homo sapien
acttatagggcaagaatatcatctg

SEQ ID NO: 5012418 - DNA, 25 bp, Homo sapien
tacatggtctctatatctgggcagt

SEQ ID NO: 5012419 - DNA, 25 bp, Homo sapien
ctaattaaaatgtcgattgtgctga

SEQ ID NO: 5012420 - DNA, 25 bp, Homo sapien
tgtgctgagccattcaagcatgaag

SEQ ID NO: 5012421 - DNA, 25 bp, Homo sapien
gaagtttgcaaattaccacaagcct

SEQ ID NO: 5012422 - DNA, 25 bp, Homo sapien
gaaaggtcacctctgacgtctacca

SEQ ID NO: 5012423 - DNA, 25 bp, Homo sapien
tctttaagatggagaaagggtccag

SEQ ID NO: 5012424 - DNA, 25 bp, Homo sapien
gctgtcaagggtatcgaaatcctaa

SEQ ID NO: 5012425 - DNA, 25 bp, Homo sapien
ccccactaagtaatagctgtcaagg

SEQ ID NO: 5012426 - DNA, 25 bp, Homo sapien
tgttgctaactcctaaagatgcccc

SEQ ID NO: 5012427 - DNA, 25 bp, Homo sapien
gacatgggtctcgatatattctgct

SEQ ID NO: 5012428 - DNA, 25 bp, Homo sapien
gcagctgtcaaaagcggcagttctg

SEQ ID NO: 5012429 - DNA, 25 bp, Homo sapien
gagatacctctcagctcagtgtgac

SEQ ID NO: 5012430 - DNA, 25 bp, Homo sapien
taaaggcccaataggacaatctcat

SEQ ID NO: 5012431 - DNA, 25 bp, Homo sapien
aatttgttttataaggccagcgtct

SEQ ID NO: 5012432 - DNA, 25 bp, Homo sapien
aaaaggagcattcaccttgatcaag

SEQ ID NO: 5012433 - DNA, 25 bp, Homo sapien
cttgatcaagtaagatttatccctg

SEQ ID NO: 5012434 - DNA, 25 bp, Homo sapien
cgtgtgtgtcaactcagtgggtaca

SEQ ID NO: 5012435 - DNA, 25 bp, Homo sapien
caaagatggttgctggcaagaggat

SEQ ID NO: 5012436 - DNA, 25 bp, Homo sapien
ttcctgcagcatatgataacaatgg

SEQ ID NO: 5012437 - DNA, 25 bp, Homo sapien
cacttttggctaggcagtagttttc

SEQ ID NO: 5012438 - DNA, 25 bp, Homo sapien
aatgtgttgcatggatagaaattga

SEQ ID NO: 5012439 - DNA, 25 bp, Homo sapien
tgagaaaagtacattcctaaatgtg

SEQ ID NO: 5012440 - DNA, 25 bp, Homo sapien
cattcctaaatgtgttgcatggata

SEQ ID NO: 5012441 - DNA, 25 bp, Homo sapien
aagcgaccggcctatctcactctcc

SEQ ID NO: 5012442 - DNA, 25 bp, Homo sapien
acatgtgtttggcaaacagtaagtg

SEQ ID NO: 5012443 - DNA, 25 bp, Homo sapien
catgtgtttggcaaacagtaagtgt

SEQ ID NO: 5012444 - DNA, 25 bp, Homo sapien
cagtaaagtcgtttcatttacatgt

SEQ ID NO: 5012445 - DNA, 25 bp, Homo sapien
atcttcagtaaagtcgtttcattta

SEQ ID NO: 5012446 - DNA, 25 bp, Homo sapien
tactattttagtcacctcaggctgc

SEQ ID NO: 5012447 - DNA, 25 bp, Homo sapien
tataggtcccatctgcaatacagtc

SEQ ID NO: 5012448 - DNA, 25 bp, Homo sapien
gattaggaccccacacttatagcct

SEQ ID NO: 5012449 - DNA, 25 bp, Homo sapien
gactagggcgtcaacatcagaattt

SEQ ID NO: 5012450 - DNA, 25 bp, Homo sapien
tggcagacctcataccacgggctaa

SEQ ID NO: 5012451 - DNA, 25 bp, Homo sapien
ggtggtctaggccataaggactgcc

SEQ ID NO: 5012452 - DNA, 25 bp, Homo sapien
caggcagcacccatgaagggatcat

SEQ ID NO: 5012453 - DNA, 25 bp, Homo sapien
ccattcctgggcaagtcctggtgct

SEQ ID NO: 5012454 - DNA, 25 bp, Homo sapien
gctttcaggaatttatatgtttatt

SEQ ID NO: 5012455 - DNA, 25 bp, Homo sapien
tttttggttacatagtaagtgtata

SEQ ID NO: 5012456 - DNA, 25 bp, Homo sapien
agctttcaggaatttatatgtttat

SEQ ID NO: 5012457 - DNA, 25 bp, Homo sapien
ctttcaggaatttatatgtttattt

SEQ ID NO: 5012458 - DNA, 25 bp, Homo sapien
acgaatttgcgtgttatccttggga

SEQ ID NO: 5012459 - DNA, 25 bp, Homo sapien
tgcgtgttatccttgggaaggggcc

SEQ ID NO: 5012460 - DNA, 25 bp, Homo sapien
atttgcgtgttatccttgggaaggg

SEQ ID NO: 5012461 - DNA, 25 bp, Homo sapien
cgaatttgcgtgttatccttgggaa

SEQ ID NO: 5012462 - DNA, 25 bp, Homo sapien
ttccataaaagaagcgtggtgggcg

SEQ ID NO: 5012463 - DNA, 25 bp, Homo sapien
tcacccggcgtgctggtaattccta

SEQ ID NO: 5012464 - DNA, 25 bp, Homo sapien
gaggtctaggtctcgattgccgccg

SEQ ID NO: 5012465 - DNA, 25 bp, Homo sapien
gcgggcctgatgagcacctggattt

SEQ ID NO: 5012466 - DNA, 25 bp, Homo sapien
gcgagcgcctggaccgcagcgtcct

SEQ ID NO: 5012467 - DNA, 25 bp, Homo sapien
gggtggagggcgagcgcctggaccg

SEQ ID NO: 5012468 - DNA, 25 bp, Homo sapien
cgcgctctcgagctttttggcctgg

SEQ ID NO: 5012469 - DNA, 25 bp, Homo sapien
gggatgccgcgctctcgagcttttt

SEQ ID NO: 5012470 - DNA, 25 bp, Homo sapien
ttctgatgttggtagggcggataca

SEQ ID NO: 5012471 - DNA, 25 bp, Homo sapien
taaagcgatgccattagttgaagaa

SEQ ID NO: 5012472 - DNA, 25 bp, Homo sapien
tccttagtgcaatactttggtgaca

SEQ ID NO: 5012473 - DNA, 25 bp, Homo sapien
ggataataccttacaactctgcaga

SEQ ID NO: 5012474 - DNA, 25 bp, Homo sapien
caaaggtgtacttagagatctctat

SEQ ID NO: 5012475 - DNA, 25 bp, Homo sapien
ggttgaactacttatccctgtgtga

SEQ ID NO: 5012476 - DNA, 25 bp, Homo sapien
ttatcgttgaaaccttgacaggtac

SEQ ID NO: 5012477 - DNA, 25 bp, Homo sapien
gacatagcagctcatatcatggttg

SEQ ID NO: 5012478 - DNA, 25 bp, Homo sapien
ttgcgtcgatcaaataattgcttca

SEQ ID NO: 5012479 - DNA, 25 bp, Homo sapien
gttaagacgaaaacatctgaagttc

SEQ ID NO: 5012480 - DNA, 25 bp, Homo sapien
gtgttttcacacaaactgctagaat

SEQ ID NO: 5012481 - DNA, 25 bp, Homo sapien
aataacattctctgactgcacttgc

SEQ ID NO: 5012482 - DNA, 25 bp, Homo sapien
tgcctgccagcacaagacttgacac

SEQ ID NO: 5012483 - DNA, 25 bp, Homo sapien
aatagcagagccagaccttgctgaa

SEQ ID NO: 5012484 - DNA, 25 bp, Homo sapien
aaaaggccatgccttgcgaataggg

SEQ ID NO: 5012485 - DNA, 25 bp, Homo sapien
cattcagctgaaaccccaaaaaggc

SEQ ID NO: 5012486 - DNA, 25 bp, Homo sapien
tagaactactacacccctaaactgc

SEQ ID NO: 5012487 - DNA, 25 bp, Homo sapien
taagggatattcaatggcattacca

SEQ ID NO: 5012488 - DNA, 25 bp, Homo sapien
catagttggagactgagtagacaaa

SEQ ID NO: 5012489 - DNA, 25 bp, Homo sapien
ggtgagacaaagttacaatcatagt

SEQ ID NO: 5012490 - DNA, 25 bp, Homo sapien
cctctagttagagaagaaccaaaga

SEQ ID NO: 5012491 - DNA, 25 bp, Homo sapien
taaaactgcctgtattcaccaatga

SEQ ID NO: 5012492 - DNA, 25 bp, Homo sapien
tctgaaagtatcgtttacagtacca

SEQ ID NO: 5012493 - DNA, 25 bp, Homo sapien
taacattgtattgacagccactgta

SEQ ID NO: 5012494 - DNA, 25 bp, Homo sapien
tatgcagctacagtaattcaaggca

SEQ ID NO: 5012495 - DNA, 25 bp, Homo sapien
ttcagtgtaaccaaacagaaagtcc

SEQ ID NO: 5012496 - DNA, 25 bp, Homo sapien
gagtgagtgcaaggatggacaaaca

SEQ ID NO: 5012497 - DNA, 25 bp, Homo sapien
ccaacttaaggagcatctatgcagc

SEQ ID NO: 5012498 - DNA, 25 bp, Homo sapien
tacatatatccgacaagagacttgc

SEQ ID NO: 5012499 - DNA, 25 bp, Homo sapien
taaagacaggaggtaccagaactct

SEQ ID NO: 5012500 - DNA, 25 bp, Homo sapien
tagaaattgcagattggctcaccca

SEQ ID NO: 5012501 - DNA, 25 bp, Homo sapien
tgaaacatcactacacaccgattgg

SEQ ID NO: 5012502 - DNA, 25 bp, Homo sapien
taaacccatgtttgatgaagtctcc

SEQ ID NO: 5012503 - DNA, 25 bp, Homo sapien
gaactcccttcttgctggatcacag

SEQ ID NO: 5012504 - DNA, 25 bp, Homo sapien
gaagccattttgtttggatcaccag

SEQ ID NO: 5012505 - DNA, 25 bp, Homo sapien
caagggaagtcatggaaatatggcc

SEQ ID NO: 5012506 - DNA, 25 bp, Homo sapien
tatattcatataaccttgttggcct

SEQ ID NO: 5012507 - DNA, 25 bp, Homo sapien
aacattgtaacttaaatcgcttcta

SEQ ID NO: 5012508 - DNA, 25 bp, Homo sapien
ccttgttggcctgaagtagatgctt

SEQ ID NO: 5012509 - DNA, 25 bp, Homo sapien
taacttaaatcgcttctatacacta

SEQ ID NO: 5012510 - DNA, 25 bp, Homo sapien
tccatggcttctttttaaaatcctc

SEQ ID NO: 5012511 - DNA, 25 bp, Homo sapien
ccatggcttctttttaaaatcctca

SEQ ID NO: 5012512 - DNA, 25 bp, Homo sapien
catggcttctttttaaaatcctcag

SEQ ID NO: 5012513 - DNA, 25 bp, Homo sapien
tctaattggctgcaaaacagactca

SEQ ID NO: 5012514 - DNA, 25 bp, Homo sapien
ccagcaatttatactgtcagttatg

SEQ ID NO: 5012515 - DNA, 25 bp, Homo sapien
cagttatgaaattagagaatcaatc

SEQ ID NO: 5012516 - DNA, 25 bp, Homo sapien
ggattacccggcctgtttgtcaaca

SEQ ID NO: 5012517 - DNA, 25 bp, Homo sapien
gagactcttcttttgcatgttgatt

SEQ ID NO: 5012518 - DNA, 25 bp, Homo sapien
atcagcaagagactcttcttttgca

SEQ ID NO: 5012519 - DNA, 25 bp, Homo sapien
agatcatcagcaagagactcttctt

SEQ ID NO: 5012520 - DNA, 25 bp, Homo sapien
aaaagatcatcagcaagagactctt

SEQ ID NO: 5012521 - DNA, 25 bp, Homo sapien
gagttcttgcctctacaatatttca

SEQ ID NO: 5012522 - DNA, 25 bp, Homo sapien
gctctaactaaacagctttctccca

SEQ ID NO: 5012523 - DNA, 25 bp, Homo sapien
gctatagtgataggtcactgtcatc

SEQ ID NO: 5012524 - DNA, 25 bp, Homo sapien
tctccactcaaagacaaccaatagt

SEQ ID NO: 5012525 - DNA, 25 bp, Homo sapien
gagatgacatacagcagttccttga

SEQ ID NO: 5012526 - DNA, 25 bp, Homo sapien
tccctctgccaaggaagttaattcc

SEQ ID NO: 5012527 - DNA, 25 bp, Homo sapien
aactgcaactgtaagtgagatgaca

SEQ ID NO: 5012528 - DNA, 25 bp, Homo sapien
tgttcttcccctctttagcaaaggc

SEQ ID NO: 5012529 - DNA, 25 bp, Homo sapien
gaccaggtctaccttattaagagca

SEQ ID NO: 5012530 - DNA, 25 bp, Homo sapien
caagagtgacttgcagggattcgat

SEQ ID NO: 5012531 - DNA, 25 bp, Homo sapien
gttaggtaaacctgcagaagatagg

SEQ ID NO: 5012532 - DNA, 25 bp, Homo sapien
cagctcttaacgaggctgcctcagg

SEQ ID NO: 5012533 - DNA, 25 bp, Homo sapien
cagtagccatgcagcaaaagcaagt

SEQ ID NO: 5012534 - DNA, 25 bp, Homo sapien
cataaataagcagtagccatgcagc

SEQ ID NO: 5012535 - DNA, 25 bp, Homo sapien
gggaaatgagatggcagtacagaac

SEQ ID NO: 5012536 - DNA, 25 bp, Homo sapien
tagagtaagtcctaccaatagcaac

SEQ ID NO: 5012537 - DNA, 25 bp, Homo sapien
cttcattctttgtgtactgccataa

SEQ ID NO: 5012538 - DNA, 25 bp, Homo sapien
tcattctttgtgtactgccataatt

SEQ ID NO: 5012539 - DNA, 25 bp, Homo sapien
catcttcattctttgtgtactgcca

SEQ ID NO: 5012540 - DNA, 25 bp, Homo sapien
tcttcattctttgtgtactgccata

SEQ ID NO: 5012541 - DNA, 25 bp, Homo sapien
taatggaccaaagtgcaatttaagc

SEQ ID NO: 5012542 - DNA, 25 bp, Homo sapien
tatagattaatgctctgtaactcag

SEQ ID NO: 5012543 - DNA, 25 bp, Homo sapien
gcttgaaggccaccataatggacca

SEQ ID NO: 5012544 - DNA, 25 bp, Homo sapien
taaagaagtgttatggaagggtata

SEQ ID NO: 5012545 - DNA, 25 bp, Homo sapien
gttctgtattctttcgagcatgatg

SEQ ID NO: 5012546 - DNA, 25 bp, Homo sapien
gatgagctattagatctgatcctcc

SEQ ID NO: 5012547 - DNA, 25 bp, Homo sapien
tctgatcctccaatgatgtgtggaa

SEQ ID NO: 5012548 - DNA, 25 bp, Homo sapien
caatgatgtgtggaagttttcctgc

SEQ ID NO: 5012549 - DNA, 25 bp, Homo sapien
atgcataagtgccaaagatgtttat

SEQ ID NO: 5012550 - DNA, 25 bp, Homo sapien
tacagatctggacatgtcatgggat

SEQ ID NO: 5012551 - DNA, 25 bp, Homo sapien
gatggtaaatcatgcataagtgcca

SEQ ID NO: 5012552 - DNA, 25 bp, Homo sapien
caaataaaagtgagagcagtaactc

SEQ ID NO: 5012553 - DNA, 25 bp, Homo sapien
tctaaagtcggcttctgattccagg

SEQ ID NO: 5012554 - DNA, 25 bp, Homo sapien
ggcaaagaccaaccggtgaccatca

SEQ ID NO: 5012555 - DNA, 25 bp, Homo sapien
ctggtgaccatggaacaggccccag

SEQ ID NO: 5012556 - DNA, 25 bp, Homo sapien
cctaaggacaatccgccacagtgtg

SEQ ID NO: 5012557 - DNA, 25 bp, Homo sapien
gttgttaataaaccactctgtgcca

SEQ ID NO: 5012558 - DNA, 25 bp, Homo sapien
tgtagtttcagaacagattacttgg

SEQ ID NO: 5012559 - DNA, 25 bp, Homo sapien
tgtaaagaactcagacaaattcctg

SEQ ID NO: 5012560 - DNA, 25 bp, Homo sapien
tccaaaccactttccagagattcat

SEQ ID NO: 5012561 - DNA, 25 bp, Homo sapien
ttttttggaagcatctcactatcat

SEQ ID NO: 5012562 - DNA, 25 bp, Homo sapien
catttatgccagatggatttctgga

SEQ ID NO: 5012563 - DNA, 25 bp, Homo sapien
tcactatcatcctgaagtttgtcat

SEQ ID NO: 5012564 - DNA, 25 bp, Homo sapien
tcaccagtgatctaaattcagtcaa

SEQ ID NO: 5012565 - DNA, 25 bp, Homo sapien
tgagtcttccttgagttcacgtttc

SEQ ID NO: 5012566 - DNA, 25 bp, Homo sapien
ctgaccatagtgagtcttccttgag

SEQ ID NO: 5012567 - DNA, 25 bp, Homo sapien
tcttccttgagttcacgtttcttcc

SEQ ID NO: 5012568 - DNA, 25 bp, Homo sapien
tagtgagtcttccttgagttcacgt

SEQ ID NO: 5012569 - DNA, 25 bp, Homo sapien
tgacaggaaatcttacagacatgct

SEQ ID NO: 5012570 - DNA, 25 bp, Homo sapien
gacagtcacttctgtagctaaaaaa

SEQ ID NO: 5012571 - DNA, 25 bp, Homo sapien
ggcacagctatcattcgtataagga

SEQ ID NO: 5012572 - DNA, 25 bp, Homo sapien
gaaatatagctagggattccaacac

SEQ ID NO: 5012573 - DNA, 25 bp, Homo sapien
gatattttgctactttctggtactg

SEQ ID NO: 5012574 - DNA, 25 bp, Homo sapien
tttgtgtccttgaataactgttcca

SEQ ID NO: 5012575 - DNA, 25 bp, Homo sapien
acaggctcattctcagatagatgct

SEQ ID NO: 5012576 - DNA, 25 bp, Homo sapien
ttttctgcagcatgagatttactgg

SEQ ID NO: 5012577 - DNA, 25 bp, Homo sapien
ccacaatgagggtgtagcaggttgt

SEQ ID NO: 5012578 - DNA, 25 bp, Homo sapien
gctgatttgcatgaagacatttctt

SEQ ID NO: 5012579 - DNA, 25 bp, Homo sapien
tctaaaagagaacaagacgtttcta

SEQ ID NO: 5012580 - DNA, 25 bp, Homo sapien
gacgtttctattcttgctgatttgc

SEQ ID NO: 5012581 - DNA, 25 bp, Homo sapien
ggtagacggctgaaagtagtttctg

SEQ ID NO: 5012582 - DNA, 25 bp, Homo sapien
gtagacggctgaaagtagtttctga

SEQ ID NO: 5012583 - DNA, 25 bp, Homo sapien
ttggtagacggctgaaagtagtttc

SEQ ID NO: 5012584 - DNA, 25 bp, Homo sapien
tggtagacggctgaaagtagtttct

SEQ ID NO: 5012585 - DNA, 25 bp, Homo sapien
cttttatttatacttggcaatttag

SEQ ID NO: 5012586 - DNA, 25 bp, Homo sapien
tgagaagccctatctttacttttat

SEQ ID NO: 5012587 - DNA, 25 bp, Homo sapien
tttatacttggcaatttagttggtg

SEQ ID NO: 5012588 - DNA, 25 bp, Homo sapien
ctgagaagccctatctttactttta

SEQ ID NO: 5012589 - DNA, 25 bp, Homo sapien
attattagagcttgttttgcaggac

SEQ ID NO: 5012590 - DNA, 25 bp, Homo sapien
agcttgttttgcaggactcctttac

SEQ ID NO: 5012591 - DNA, 25 bp, Homo sapien
tctcatcttagccaaagtatttgat

SEQ ID NO: 5012592 - DNA, 25 bp, Homo sapien
tgggattctcatcttagccaaagta

SEQ ID NO: 5012593 - DNA, 25 bp, Homo sapien
ttcttttggcctttcactcaaatcc

SEQ ID NO: 5012594 - DNA, 25 bp, Homo sapien
gttccattttggagactttgatttc

SEQ ID NO: 5012595 - DNA, 25 bp, Homo sapien
tttgttccattttggagactttgat

SEQ ID NO: 5012596 - DNA, 25 bp, Homo sapien
tccattttggagactttgatttctt

SEQ ID NO: 5012597 - DNA, 25 bp, Homo sapien
caaagatcgttaaatagttctaacg

SEQ ID NO: 5012598 - DNA, 25 bp, Homo sapien
ttaatagagaaacaaagatcgttaa

SEQ ID NO: 5012599 - DNA, 25 bp, Homo sapien
gaaaagaatgcaaggtaaataatca

SEQ ID NO: 5012600 - DNA, 25 bp, Homo sapien
tctaacgtaatataaccttagaaga

SEQ ID NO: 5012601 - DNA, 25 bp, Homo sapien
ctgacacgccttgtgaaaggcttgg

SEQ ID NO: 5012602 - DNA, 25 bp, Homo sapien
gctacgtatgttgtagtgttcactg

SEQ ID NO: 5012603 - DNA, 25 bp, Homo sapien
ggcgcttggcattagtttttcatca

SEQ ID NO: 5012604 - DNA, 25 bp, Homo sapien
tctgattctgtgtcagctacgtatg

SEQ ID NO: 5012605 - DNA, 25 bp, Homo sapien
cacagtaattctttgtagtcatgaa

SEQ ID NO: 5012606 - DNA, 25 bp, Homo sapien
ggatggccctgaggatcacagtaat

SEQ ID NO: 5012607 - DNA, 25 bp, Homo sapien
tgcttcaggaataggtctaagacct

SEQ ID NO: 5012608 - DNA, 25 bp, Homo sapien
aaatcaccgccaatccaatttctgc

SEQ ID NO: 5012609 - DNA, 25 bp, Homo sapien
ttctgttatcaacctagcttcccca

SEQ ID NO: 5012610 - DNA, 25 bp, Homo sapien
cagtcaggaattaaggtctgtgagt

SEQ ID NO: 5012611 - DNA, 25 bp, Homo sapien
tccaaagacaactgcggaactcaat

SEQ ID NO: 5012612 - DNA, 25 bp, Homo sapien
tgtatcaacaacacacgttcccgga

SEQ ID NO: 5012613 - DNA, 25 bp, Homo sapien
tggttcatcaagaggtgggtaaaaa

SEQ ID NO: 5012614 - DNA, 25 bp, Homo sapien
tgttttctttcctgccgtcctgaca

SEQ ID NO: 5012615 - DNA, 25 bp, Homo sapien
ttacttccaatagatggttcatcaa

SEQ ID NO: 5012616 - DNA, 25 bp, Homo sapien
gccgtcctgacagatcaacattttt

SEQ ID NO: 5012617 - DNA, 25 bp, Homo sapien
gattatcagctggtaagttaacctg

SEQ ID NO: 5012618 - DNA, 25 bp, Homo sapien
ggcagaagacaaacactcctgagtc

SEQ ID NO: 5012619 - DNA, 25 bp, Homo sapien
tgagccccagtatgtttgctgcagg

SEQ ID NO: 5012620 - DNA, 25 bp, Homo sapien
tgaccaagtcccatagggaagacgt

SEQ ID NO: 5012621 - DNA, 25 bp, Homo sapien
ttctggctttacaattggacgtcca

SEQ ID NO: 5012622 - DNA, 25 bp, Homo sapien
aattggacgtccacaaatgagtgca

SEQ ID NO: 5012623 - DNA, 25 bp, Homo sapien
cgtccacaaatgagtgcacatattg

SEQ ID NO: 5012624 - DNA, 25 bp, Homo sapien
tacaattggacgtccacaaatgagt

SEQ ID NO: 5012625 - DNA, 25 bp, Homo sapien
tcctccaagttgcaatatagcttga

SEQ ID NO: 5012626 - DNA, 25 bp, Homo sapien
taccatgacaaggtgagtgcattct

SEQ ID NO: 5012627 - DNA, 25 bp, Homo sapien
tgtttacagtaaatcctccaagttg

SEQ ID NO: 5012628 - DNA, 25 bp, Homo sapien
tgcaaccaaaggctcatactctatt

SEQ ID NO: 5012629 - DNA, 25 bp, Homo sapien
cccatggcacagagtccaatactgt

SEQ ID NO: 5012630 - DNA, 25 bp, Homo sapien
tcaccgtgatgtacaaaatgcactc

SEQ ID NO: 5012631 - DNA, 25 bp, Homo sapien
tagtatcagagttgcagagatggca

SEQ ID NO: 5012632 - DNA, 25 bp, Homo sapien
ttataccttcaccaatgaggaatcg

SEQ ID NO: 5012633 - DNA, 25 bp, Homo sapien
cttttaatgtcaatacagggatttc

SEQ ID NO: 5012634 - DNA, 25 bp, Homo sapien
tcaaagttcgggaaaagccattctg

SEQ ID NO: 5012635 - DNA, 25 bp, Homo sapien
tccaaacactccaaaagtaatacca

SEQ ID NO: 5012636 - DNA, 25 bp, Homo sapien
caatacagggatttcatctgtttga

SEQ ID NO: 5012637 - DNA, 25 bp, Homo sapien
ataggcaggtggctaacctcccaac

SEQ ID NO: 5012638 - DNA, 25 bp, Homo sapien
cagtatcaaaaccacattgtaaaaa

SEQ ID NO: 5012639 - DNA, 25 bp, Homo sapien
tactgcttcggttgccttgagagga

SEQ ID NO: 5012640 - DNA, 25 bp, Homo sapien
tcccaacacggcagacaacaattac

SEQ ID NO: 5012641 - DNA, 25 bp, Homo sapien
catgatttcggctgatcgactgatc

SEQ ID NO: 5012642 - DNA, 25 bp, Homo sapien
gtactcaacgccagtcaaaagtctg

SEQ ID NO: 5012643 - DNA, 25 bp, Homo sapien
ttccaacaacgtactcaacgccagt

SEQ ID NO: 5012644 - DNA, 25 bp, Homo sapien
cggctgatcgactgatcattttcaa

SEQ ID NO: 5012645 - DNA, 25 bp, Homo sapien
catccagccctagcgctgcaacggc

SEQ ID NO: 5012646 - DNA, 25 bp, Homo sapien
agccctagcgctgcaacggcgcggg

SEQ ID NO: 5012647 - DNA, 25 bp, Homo sapien
cgcaggccatccagccctagcgctg

SEQ ID NO: 5012648 - DNA, 25 bp, Homo sapien
ggccatccagccctagcgctgcaac

SEQ ID NO: 5012649 - DNA, 25 bp, Homo sapien
agccgccgtgctgcccgggaagaat

SEQ ID NO: 5012650 - DNA, 25 bp, Homo sapien
aggaacggacgcgacgcaggaatca

SEQ ID NO: 5012651 - DNA, 25 bp, Homo sapien
ttgccatacagcgtactcgccgctt

SEQ ID NO: 5012652 - DNA, 25 bp, Homo sapien
aagaatatgcgcttgccatacagcg

SEQ ID NO: 5012653 - DNA, 25 bp, Homo sapien
ccgggcccgcggcgggcagcagttt

SEQ ID NO: 5012654 - DNA, 25 bp, Homo sapien
gggcccgcggcgggcagcagtttcc

SEQ ID NO: 5012655 - DNA, 25 bp, Homo sapien
gcccgcggcgggcagcagtttccac

SEQ ID NO: 5012656 - DNA, 25 bp, Homo sapien
tgccgggcccgcggcgggcagcagt

SEQ ID NO: 5012657 - DNA, 25 bp, Homo sapien
gctgctagacgagcgcggatacggc

SEQ ID NO: 5012658 - DNA, 25 bp, Homo sapien
agggctggggccgacgtgcaaccgc

SEQ ID NO: 5012659 - DNA, 25 bp, Homo sapien
gggctgctagacgagcgcggatacg

SEQ ID NO: 5012660 - DNA, 25 bp, Homo sapien
gcaaccgcgtaaccggggctgctag

SEQ ID NO: 5012661 - DNA, 25 bp, Homo sapien
tcggcatgggctccgggacgtgcgc

SEQ ID NO: 5012662 - DNA, 25 bp, Homo sapien
ctgcggtcggcatgggctccgggac

SEQ ID NO: 5012663 - DNA, 25 bp, Homo sapien
ggtcggcatgggctccgggacgtgc

SEQ ID NO: 5012664 - DNA, 25 bp, Homo sapien
catgggctccgggacgtgcgcgctc

SEQ ID NO: 5012665 - DNA, 25 bp, Homo sapien
tgtcgctgaatgtaaggttactacc

SEQ ID NO: 5012666 - DNA, 25 bp, Homo sapien
aagggtatgtttctaaggtgtcgct

SEQ ID NO: 5012667 - DNA, 25 bp, Homo sapien
caatctgtattgaaatgtgctgcgt

SEQ ID NO: 5012668 - DNA, 25 bp, Homo sapien
tggttggaaaaggaacagcacaatc

SEQ ID NO: 5012669 - DNA, 25 bp, Homo sapien
cctttggaatctagtaatggtgata

SEQ ID NO: 5012670 - DNA, 25 bp, Homo sapien
taatgatgaagataaggatttcacc

SEQ ID NO: 5012671 - DNA, 25 bp, Homo sapien
ggatttcacctcgaagtaaactcat

SEQ ID NO: 5012672 - DNA, 25 bp, Homo sapien
cagttatgtagtttcgtgcgtttgc

SEQ ID NO: 5012673 - DNA, 25 bp, Homo sapien
cagttggccacactttcgatcttca

SEQ ID NO: 5012674 - DNA, 25 bp, Homo sapien
gatccttccactttacccaggtgtc

SEQ ID NO: 5012675 - DNA, 25 bp, Homo sapien
tcgatcttcacatcatcagaacctt

SEQ ID NO: 5012676 - DNA, 25 bp, Homo sapien
tccattgcctcgctttttagcctca

SEQ ID NO: 5012677 - DNA, 25 bp, Homo sapien
tcaatgtactatagtctcatatatg

SEQ ID NO: 5012678 - DNA, 25 bp, Homo sapien
tagtggagcaaaacagcactttggg

SEQ ID NO: 5012679 - DNA, 25 bp, Homo sapien
aataataaccaatgagtaggccttg

SEQ ID NO: 5012680 - DNA, 25 bp, Homo sapien
aaatcaatttagtggagcaaaacag

SEQ ID NO: 5012681 - DNA, 25 bp, Homo sapien
gattcattctttgattactatcatg

SEQ ID NO: 5012682 - DNA, 25 bp, Homo sapien
gagtaataactatccaacctgatca

SEQ ID NO: 5012683 - DNA, 25 bp, Homo sapien
tgattactatcatgcacactgccat

SEQ ID NO: 5012684 - DNA, 25 bp, Homo sapien
taactatccaacctgatcaacatgg

SEQ ID NO: 5012685 - DNA, 25 bp, Homo sapien
cttaatcatgtggtaaggtgtaccc

SEQ ID NO: 5012686 - DNA, 25 bp, Homo sapien
gatatacagtccttatccttgaggg

SEQ ID NO: 5012687 - DNA, 25 bp, Homo sapien
gagtcacatactcagaggcctaaag

SEQ ID NO: 5012688 - DNA, 25 bp, Homo sapien
tacaataggcatctaggagtcacat

SEQ ID NO: 5012689 - DNA, 25 bp, Homo sapien
tcaatcttgatacgaaaggtgttat

SEQ ID NO: 5012690 - DNA, 25 bp, Homo sapien
ttgccaaagttggaagactctagaa

SEQ ID NO: 5012691 - DNA, 25 bp, Homo sapien
ctgtattgccaaagttggaagactc

SEQ ID NO: 5012692 - DNA, 25 bp, Homo sapien
ttaggtcactaaagatctcaagaga

SEQ ID NO: 5012693 - DNA, 25 bp, Homo sapien
ttgcctggcctcaatggaatctcac

SEQ ID NO: 5012694 - DNA, 25 bp, Homo sapien
caagctctgggaattgcatcactta

SEQ ID NO: 5012695 - DNA, 25 bp, Homo sapien
tctctactgaaagctctggatgttc

SEQ ID NO: 5012696 - DNA, 25 bp, Homo sapien
tcagtgaagctgcttagaactccca

SEQ ID NO: 5012697 - DNA, 25 bp, Homo sapien
gattcaatgtgattcaaccagggcc

SEQ ID NO: 5012698 - DNA, 25 bp, Homo sapien
taaatatggaatgcgattcaatgtg

SEQ ID NO: 5012699 - DNA, 25 bp, Homo sapien
tgtgattcaaccagggcctataaaa

SEQ ID NO: 5012700 - DNA, 25 bp, Homo sapien
gaatgcgattcaatgtgattcaacc

SEQ ID NO: 5012701 - DNA, 25 bp, Homo sapien
gtgcctttagccgtctggacccaac

SEQ ID NO: 5012702 - DNA, 25 bp, Homo sapien
tgattatgcttcttggattaatgga

SEQ ID NO: 5012703 - DNA, 25 bp, Homo sapien
ggacccaactggaacatttgagaaa

SEQ ID NO: 5012704 - DNA, 25 bp, Homo sapien
gggactgtagaagaactcgcaaatc

SEQ ID NO: 5012705 - DNA, 25 bp, Homo sapien
atttgacggtggagaggaagtactt

SEQ ID NO: 5012706 - DNA, 25 bp, Homo sapien
tatttcaggggaattcaacgacctg

SEQ ID NO: 5012707 - DNA, 25 bp, Homo sapien
aggggaattcaacgacctgagaaag

SEQ ID NO: 5012708 - DNA, 25 bp, Homo sapien
gtcattaaatttgacggtggagagg

SEQ ID NO: 5012709 - DNA, 25 bp, Homo sapien
aaggagcagtgggacaccatagaag

SEQ ID NO: 5012710 - DNA, 25 bp, Homo sapien
ggagcagtgggacaccatagaagaa

SEQ ID NO: 5012711 - DNA, 25 bp, Homo sapien
caccaaggagcagtgggacaccata

SEQ ID NO: 5012712 - DNA, 25 bp, Homo sapien
ccaaggagcagtgggacaccataga

SEQ ID NO: 5012713 - DNA, 25 bp, Homo sapien
ttctcacaactaaccactgtcttga

SEQ ID NO: 5012714 - DNA, 25 bp, Homo sapien
accccatcgttaagctgttttgaga

SEQ ID NO: 5012715 - DNA, 25 bp, Homo sapien
tgaagtatgacttctaaaaatgcac

SEQ ID NO: 5012716 - DNA, 25 bp, Homo sapien
ttattacaatacaaatgcactcagg

SEQ ID NO: 5012717 - DNA, 25 bp, Homo sapien
caccagtagtgagcattgaaattct

SEQ ID NO: 5012718 - DNA, 25 bp, Homo sapien
tgtttgggaacttacactgtgctgc

SEQ ID NO: 5012719 - DNA, 25 bp, Homo sapien
ttaacatcccaccaagctgtttggg

SEQ ID NO: 5012720 - DNA, 25 bp, Homo sapien
tgaaccttctattcttttggcgaaa

SEQ ID NO: 5012721 - DNA, 25 bp, Homo sapien
ttgggtatcctctagtgaaatattt

SEQ ID NO: 5012722 - DNA, 25 bp, Homo sapien
ttgcatatgttattggacatcattt

SEQ ID NO: 5012723 - DNA, 25 bp, Homo sapien
tcctctagtgaaatatttgttcaac

SEQ ID NO: 5012724 - DNA, 25 bp, Homo sapien
tatgttattggacatcatttgggta

SEQ ID NO: 5012725 - DNA, 25 bp, Homo sapien
ggtttctaggagtaatcttaatata

SEQ ID NO: 5012726 - DNA, 25 bp, Homo sapien
gcctttgtcaagtatatgtgttgca

SEQ ID NO: 5012727 - DNA, 25 bp, Homo sapien
ttggatatgtgcctttgtcaagtat

SEQ ID NO: 5012728 - DNA, 25 bp, Homo sapien
tgttggtttctaggagtaatcttaa

SEQ ID NO: 5012729 - DNA, 25 bp, Homo sapien
gctcaggaattaaagtctaccatga

SEQ ID NO: 5012730 - DNA, 25 bp, Homo sapien
taagtgtgactgatgtagctgaggt

SEQ ID NO: 5012731 - DNA, 25 bp, Homo sapien
tctaccatgatagtcctgatgctag

SEQ ID NO: 5012732 - DNA, 25 bp, Homo sapien
gacagccctctaggaagtctcttca

SEQ ID NO: 5012733 - DNA, 25 bp, Homo sapien
ccaaacctggtagagttttggcgca

SEQ ID NO: 5012734 - DNA, 25 bp, Homo sapien
gcgcatacttggtagtgaacagtta

SEQ ID NO: 5012735 - DNA, 25 bp, Homo sapien
ggaaaattctgtatgtccctgttat

SEQ ID NO: 5012736 - DNA, 25 bp, Homo sapien
tgtatgtccctgttattcctttgga

SEQ ID NO: 5012737 - DNA, 25 bp, Homo sapien
gagacacccctcaattcaacaaagt

SEQ ID NO: 5012738 - DNA, 25 bp, Homo sapien
catcatagattgcatgtcagctgac

SEQ ID NO: 5012739 - DNA, 25 bp, Homo sapien
caacaaagtatccagtagttcactg

SEQ ID NO: 5012740 - DNA, 25 bp, Homo sapien
cacatttacgtttatttagattcct

SEQ ID NO: 5012741 - DNA, 25 bp, Homo sapien
agaacgatcattaactcctaggcag

SEQ ID NO: 5012742 - DNA, 25 bp, Homo sapien
ggacattcaagctgacccagaacga

SEQ ID NO: 5012743 - DNA, 25 bp, Homo sapien
ggaagtatgcaaactagacaccagg

SEQ ID NO: 5012744 - DNA, 25 bp, Homo sapien
cagtgcttccatttacacgctaaag

SEQ ID NO: 5012745 - DNA, 25 bp, Homo sapien
tatcactagcaagtggttgcggcca

SEQ ID NO: 5012746 - DNA, 25 bp, Homo sapien
tatggatccaagcagtagacatgct

SEQ ID NO: 5012747 - DNA, 25 bp, Homo sapien
taaaattgggtgtactgactggcct

SEQ ID NO: 5012748 - DNA, 25 bp, Homo sapien
tgactggcctaagcatagactttct

SEQ ID NO: 5012749 - DNA, 25 bp, Homo sapien
agagaataagagcaagatccgttcg

SEQ ID NO: 5012750 - DNA, 25 bp, Homo sapien
tccctccatccgacaaagccattat

SEQ ID NO: 5012751 - DNA, 25 bp, Homo sapien
agatccgttcggtacagcttccctc

SEQ ID NO: 5012752 - DNA, 25 bp, Homo sapien
taagagcaagatccgttcggtacag

SEQ ID NO: 5012753 - DNA, 25 bp, Homo sapien
tttcatctatgtatccattgccgtc

SEQ ID NO: 5012754 - DNA, 25 bp, Homo sapien
ccttcagtaaagcatccagttcatt

SEQ ID NO: 5012755 - DNA, 25 bp, Homo sapien
ttcttctcgcacagatccttcagta

SEQ ID NO: 5012756 - DNA, 25 bp, Homo sapien
tcttctcgcacagatccttcagtaa

SEQ ID NO: 5012757 - DNA, 25 bp, Homo sapien
tctgctagagctcacaggtccagga

SEQ ID NO: 5012758 - DNA, 25 bp, Homo sapien
tatgtggctctatgtcacaccaggg

SEQ ID NO: 5012759 - DNA, 25 bp, Homo sapien
gacgagttactcatcaatgggcata

SEQ ID NO: 5012760 - DNA, 25 bp, Homo sapien
tatgtcaggccacccaagtttttag

SEQ ID NO: 5012761 - DNA, 25 bp, Homo sapien
ctgatcatacagctcaaaagcctta

SEQ ID NO: 5012762 - DNA, 25 bp, Homo sapien
gaaaattctcctgcactggtagtaa

SEQ ID NO: 5012763 - DNA, 25 bp, Homo sapien
aaaattctcctgcactggtagtaac

SEQ ID NO: 5012764 - DNA, 25 bp, Homo sapien
caatatttttcatggttcctaaact

SEQ ID NO: 5012765 - DNA, 25 bp, Homo sapien
ttgaaaaggatccacttacaatatt

SEQ ID NO: 5012766 - DNA, 25 bp, Homo sapien
ttttgaaaaggatccacttacaata

SEQ ID NO: 5012767 - DNA, 25 bp, Homo sapien
tatttttcatggttcctaaactcac

SEQ ID NO: 5012768 - DNA, 25 bp, Homo sapien
ggccatctcagttaattccagcttc

SEQ ID NO: 5012769 - DNA, 25 bp, Homo sapien
tcccatcattatttgaatcaaatag

SEQ ID NO: 5012770 - DNA, 25 bp, Homo sapien
attccagcttcccatcattatttga

SEQ ID NO: 5012771 - DNA, 25 bp, Homo sapien
gccatctcagttaattccagcttcc

SEQ ID NO: 5012772 - DNA, 25 bp, Homo sapien
catacccgtatttgggaagcattca

SEQ ID NO: 5012773 - DNA, 25 bp, Homo sapien
gtcacactacctaccaagatactgg

SEQ ID NO: 5012774 - DNA, 25 bp, Homo sapien
gattacttagttttgtgcccatggg

SEQ ID NO: 5012775 - DNA, 25 bp, Homo sapien
gatactggacagctcgattacttag

SEQ ID NO: 5012776 - DNA, 25 bp, Homo sapien
gctttttctagcaggtcctttagaa

SEQ ID NO: 5012777 - DNA, 25 bp, Homo sapien
cttgtttgctttttctagcaggtcc

SEQ ID NO: 5012778 - DNA, 25 bp, Homo sapien
tgtgtcatcaacagtcttgtttgct

SEQ ID NO: 5012779 - DNA, 25 bp, Homo sapien
cattaggtctgtatactcggctaat

SEQ ID NO: 5012780 - DNA, 25 bp, Homo sapien
cagtttctatgaagccactgtggtc

SEQ ID NO: 5012781 - DNA, 25 bp, Homo sapien
gccactgtggtcagtatcatatttt

SEQ ID NO: 5012782 - DNA, 25 bp, Homo sapien
tcttctgtgggtaatacgtgagcca

SEQ ID NO: 5012783 - DNA, 25 bp, Homo sapien
tctcttctgtgggtaatacgtgagc

SEQ ID NO: 5012784 - DNA, 25 bp, Homo sapien
cttctgtgggtaatacgtgagccaa

SEQ ID NO: 5012785 - DNA, 25 bp, Homo sapien
ctgctggcatcggaagagcagcagg

SEQ ID NO: 5012786 - DNA, 25 bp, Homo sapien
gttgagaggtctcctgaatgtcaga

SEQ ID NO: 5012787 - DNA, 25 bp, Homo sapien
tgagaggtctcctgaatgtcagata

SEQ ID NO: 5012788 - DNA, 25 bp, Homo sapien
ataaagttgagaggtctcctgaatg

SEQ ID NO: 5012789 - DNA, 25 bp, Homo sapien
aaagttgagaggtctcctgaatgtc

SEQ ID NO: 5012790 - DNA, 25 bp, Homo sapien
ctcaaagagggtaaatggcctgctc

SEQ ID NO: 5012791 - DNA, 25 bp, Homo sapien
catagattgcagttggagccagatt

SEQ ID NO: 5012792 - DNA, 25 bp, Homo sapien
ttgttcactaccaaggaaacagagg

SEQ ID NO: 5012793 - DNA, 25 bp, Homo sapien
aaaggcttggcattcagaagatggg

SEQ ID NO: 5012794 - DNA, 25 bp, Homo sapien
tctttgcccatactgatccacaaaa

SEQ ID NO: 5012795 - DNA, 25 bp, Homo sapien
tttgcccatactgatccacaaaagt

SEQ ID NO: 5012796 - DNA, 25 bp, Homo sapien
atctctttgcccatactgatccaca

SEQ ID NO: 5012797 - DNA, 25 bp, Homo sapien
ttgcccatactgatccacaaaagtt

SEQ ID NO: 5012798 - DNA, 25 bp, Homo sapien
agccttctttcgcgcctgctggagc

SEQ ID NO: 5012799 - DNA, 25 bp, Homo sapien
ccagccttctttcgcgcctgctgga

SEQ ID NO: 5012800 - DNA, 25 bp, Homo sapien
cagccttctttcgcgcctgctggag

SEQ ID NO: 5012801 - DNA, 25 bp, Homo sapien
atccagccttctttcgcgcctgctg

SEQ ID NO: 5012802 - DNA, 25 bp, Homo sapien
taagcgcagccacagaaactttggg

SEQ ID NO: 5012803 - DNA, 25 bp, Homo sapien
gacagttatctttctggcgacccga

SEQ ID NO: 5012804 - DNA, 25 bp, Homo sapien
ggcacccaggtgtcagatatctcat

SEQ ID NO: 5012805 - DNA, 25 bp, Homo sapien
caaagtgtacagacggtgaagcgct

SEQ ID NO: 5012806 - DNA, 25 bp, Homo sapien
gaaggggcatggaaacgggtcttga

SEQ ID NO: 5012807 - DNA, 25 bp, Homo sapien
taatgggatcaggaggctcagaaaa

SEQ ID NO: 5012808 - DNA, 25 bp, Homo sapien
atgggatcaggaggctcagaaaagg

SEQ ID NO: 5012809 - DNA, 25 bp, Homo sapien
ggcatggaaacgggtcttgaaacag

SEQ ID NO: 5012810 - DNA, 25 bp, Homo sapien
atgagggatgactgcaggtgggatt

SEQ ID NO: 5012811 - DNA, 25 bp, Homo sapien
tctcgaaaaactgtgaggctgtgat

SEQ ID NO: 5012812 - DNA, 25 bp, Homo sapien
gaaatggagccagatctcgaaaaac

SEQ ID NO: 5012813 - DNA, 25 bp, Homo sapien
cgtcagcgtcgaaatggagccagat

SEQ ID NO: 5012814 - DNA, 25 bp, Homo sapien
tgtgtccgcgcgagggggagtgagc

SEQ ID NO: 5012815 - DNA, 25 bp, Homo sapien
tgtcctcggtgctgctcagctcagc

SEQ ID NO: 5012816 - DNA, 25 bp, Homo sapien
aaagctcagcgtgtgcgcgagtcag

SEQ ID NO: 5012817 - DNA, 25 bp, Homo sapien
tcagctcagcgttcctccagagttc

SEQ ID NO: 5012818 - DNA, 25 bp, Homo sapien
ctggagcgagagtttgggcttgttg

SEQ ID NO: 5012819 - DNA, 25 bp, Homo sapien
tagctggagcgagagtttgggcttg

SEQ ID NO: 5012820 - DNA, 25 bp, Homo sapien
ctagctggagcgagagtttgggctt

SEQ ID NO: 5012821 - DNA, 25 bp, Homo sapien
gagcgagagtttgggcttgttggaa

SEQ ID NO: 5012822 - DNA, 25 bp, Homo sapien
cctgctctgggagataaccatattg

SEQ ID NO: 5012823 - DNA, 25 bp, Homo sapien
tctgggagataaccatattgatact

SEQ ID NO: 5012824 - DNA, 25 bp, Homo sapien
acaaccggttggtcccctgctctgg

SEQ ID NO: 5012825 - DNA, 25 bp, Homo sapien
gacaaccggttggtcccctgctctg

SEQ ID NO: 5012826 - DNA, 25 bp, Homo sapien
gggttgttctctggtgggcaggggc

SEQ ID NO: 5012827 - DNA, 25 bp, Homo sapien
ttataggatttggaaaggaaatgga

SEQ ID NO: 5012828 - DNA, 25 bp, Homo sapien
tggtgggcaggggcgggggtcacaa

SEQ ID NO: 5012829 - DNA, 25 bp, Homo sapien
tataggatttggaaaggaaatggaa

SEQ ID NO: 5012830 - DNA, 25 bp, Homo sapien
gtctatggggcttctgaggcaatga

SEQ ID NO: 5012831 - DNA, 25 bp, Homo sapien
gcttctgaggcaatgaggcagcatc

SEQ ID NO: 5012832 - DNA, 25 bp, Homo sapien
aatgaggcagcatcaatcttcagcc

SEQ ID NO: 5012833 - DNA, 25 bp, Homo sapien
tctgaggcaatgaggcagcatcaat

SEQ ID NO: 5012834 - DNA, 25 bp, Homo sapien
taaaaaagagcctaaacgcttctga

SEQ ID NO: 5012835 - DNA, 25 bp, Homo sapien
aaacgtctcaggattgctgccgaac

SEQ ID NO: 5012836 - DNA, 25 bp, Homo sapien
agggctgtaaaacgtctcaggattg

SEQ ID NO: 5012837 - DNA, 25 bp, Homo sapien
acgtctcaggattgctgccgaacga

SEQ ID NO: 5012838 - DNA, 25 bp, Homo sapien
caaatttcatgtgcgtccatgtgaa

SEQ ID NO: 5012839 - DNA, 25 bp, Homo sapien
gaggtcccctgatctgagtcacggc

SEQ ID NO: 5012840 - DNA, 25 bp, Homo sapien
gcaccaaatttcatgtgcgtccatg

SEQ ID NO: 5012841 - DNA, 25 bp, Homo sapien
ggaggtcccctgatctgagtcacgg

SEQ ID NO: 5012842 - DNA, 25 bp, Homo sapien
tgactataagcctgaccgctacgta

SEQ ID NO: 5012843 - DNA, 25 bp, Homo sapien
tagcttctagaagtgttgtcagacc

SEQ ID NO: 5012844 - DNA, 25 bp, Homo sapien
tggtacaaatgtccgtgtatataac

SEQ ID NO: 5012845 - DNA, 25 bp, Homo sapien
tataacaagaagttcattccctaaa

SEQ ID NO: 5012846 - DNA, 25 bp, Homo sapien
ctctaaattgctcttgttcttccat

SEQ ID NO: 5012847 - DNA, 25 bp, Homo sapien
tatgacaaggacaacatattttctt

SEQ ID NO: 5012848 - DNA, 25 bp, Homo sapien
tttgtatgacaaggacaacatattt

SEQ ID NO: 5012849 - DNA, 25 bp, Homo sapien
cagctgcttctctctaaattgctct

SEQ ID NO: 5012850 - DNA, 25 bp, Homo sapien
aatctaacggttctgatgaataatt

SEQ ID NO: 5012851 - DNA, 25 bp, Homo sapien
taagcttgtggttgagggtacccag

SEQ ID NO: 5012852 - DNA, 25 bp, Homo sapien
tctggaatctaacggttctgatgaa

SEQ ID NO: 5012853 - DNA, 25 bp, Homo sapien
ggaatctaacggttctgatgaataa

SEQ ID NO: 5012854 - DNA, 25 bp, Homo sapien
tacgagttcctggagtcataagcat

SEQ ID NO: 5012855 - DNA, 25 bp, Homo sapien
ttcctggagtcataagcatctccac

SEQ ID NO: 5012856 - DNA, 25 bp, Homo sapien
ttacagttctgctttacgagttcct

SEQ ID NO: 5012857 - DNA, 25 bp, Homo sapien
agttctgctttacgagttcctggag

SEQ ID NO: 5012858 - DNA, 25 bp, Homo sapien
ggggccactcaacttccaaatgtaa

SEQ ID NO: 5012859 - DNA, 25 bp, Homo sapien
cactttgctgctggggccactcaac

SEQ ID NO: 5012860 - DNA, 25 bp, Homo sapien
tactgtgctttacactttgctgctg

SEQ ID NO: 5012861 - DNA, 25 bp, Homo sapien
ttagctactgtgctttacactttgc

SEQ ID NO: 5012862 - DNA, 25 bp, Homo sapien
ggctctgacttggtccatcaattac

SEQ ID NO: 5012863 - DNA, 25 bp, Homo sapien
catagatacatgctcttgagatcag

SEQ ID NO: 5012864 - DNA, 25 bp, Homo sapien
ggatcagctttgaccttgcgaataa

SEQ ID NO: 5012865 - DNA, 25 bp, Homo sapien
ttgcgaataagggatttaaagagcc

SEQ ID NO: 5012866 - DNA, 25 bp, Homo sapien
tcctgatgaagggcatatggagtgt

SEQ ID NO: 5012867 - DNA, 25 bp, Homo sapien
tgtgcaaaagcatttgttcagtgtg

SEQ ID NO: 5012868 - DNA, 25 bp, Homo sapien
ctcctgatgaagggcatatggagtg

SEQ ID NO: 5012869 - DNA, 25 bp, Homo sapien
tgcaaaagcatttgttcagtgtggc

SEQ ID NO: 5012870 - DNA, 25 bp, Homo sapien
ctttgaggattggaacatcagagag

SEQ ID NO: 5012871 - DNA, 25 bp, Homo sapien
ctgcttatgttcagtgattgagctc

SEQ ID NO: 5012872 - DNA, 25 bp, Homo sapien
gcttatgttcagtgattgagctcat

SEQ ID NO: 5012873 - DNA, 25 bp, Homo sapien
tgcttatgttcagtgattgagctca

SEQ ID NO: 5012874 - DNA, 25 bp, Homo sapien
tttcccctgatcactgatgctgaca

SEQ ID NO: 5012875 - DNA, 25 bp, Homo sapien
ttttcccctgatcactgatgctgac

SEQ ID NO: 5012876 - DNA, 25 bp, Homo sapien
ccttttcccctgatcactgatgctg

SEQ ID NO: 5012877 - DNA, 25 bp, Homo sapien
ttccttttcccctgatcactgatgc

SEQ ID NO: 5012878 - DNA, 25 bp, Homo sapien
ttggataacatcaccacttctagac

SEQ ID NO: 5012879 - DNA, 25 bp, Homo sapien
acttctagacaactacccaagccag

SEQ ID NO: 5012880 - DNA, 25 bp, Homo sapien
cagcccgtacgcagatggctaccag

SEQ ID NO: 5012881 - DNA, 25 bp, Homo sapien
ccaggtccaattctttaccactgac

SEQ ID NO: 5012882 - DNA, 25 bp, Homo sapien
aatgtggccttcacttgaaatgctg

SEQ ID NO: 5012883 - DNA, 25 bp, Homo sapien
tgttatttctacacctttggcctga

SEQ ID NO: 5012884 - DNA, 25 bp, Homo sapien
aaatgtggccttcacttgaaatgct

SEQ ID NO: 5012885 - DNA, 25 bp, Homo sapien
cacctttggcctgatatagctccat

SEQ ID NO: 5012886 - DNA, 25 bp, Homo sapien
tcagttcccatagatccccatgcat

SEQ ID NO: 5012887 - DNA, 25 bp, Homo sapien
tgcctcagtcagttcccatagatcc

SEQ ID NO: 5012888 - DNA, 25 bp, Homo sapien
gaagccttgcccacatgcctcagtc

SEQ ID NO: 5012889 - DNA, 25 bp, Homo sapien
cacatgcctcagtcagttcccatag

SEQ ID NO: 5012890 - DNA, 25 bp, Homo sapien
gtgacagccagtttgcaacaataga

SEQ ID NO: 5012891 - DNA, 25 bp, Homo sapien
tgccaaaatatgttggagaaactgg

SEQ ID NO: 5012892 - DNA, 25 bp, Homo sapien
aatggtcttccaacatcaacataaa

SEQ ID NO: 5012893 - DNA, 25 bp, Homo sapien
ccctgttttgacttacaaatggtct

SEQ ID NO: 5012894 - DNA, 25 bp, Homo sapien
ggttctggaccatatcccttagccc

SEQ ID NO: 5012895 - DNA, 25 bp, Homo sapien
tgaggttctggaccatatcccttag

SEQ ID NO: 5012896 - DNA, 25 bp, Homo sapien
tctggaccatatcccttagccctgt

SEQ ID NO: 5012897 - DNA, 25 bp, Homo sapien
gaccatatcccttagccctgtctga

SEQ ID NO: 5012898 - DNA, 25 bp, Homo sapien
cattcacaaaggctgtatttccctt

SEQ ID NO: 5012899 - DNA, 25 bp, Homo sapien
cacaaaggctgtatttccctttatt

SEQ ID NO: 5012900 - DNA, 25 bp, Homo sapien
cccattcacaaaggctgtatttccc

SEQ ID NO: 5012901 - DNA, 25 bp, Homo sapien
tctgcaactgaaaccacagttcctt

SEQ ID NO: 5012902 - DNA, 25 bp, Homo sapien
gtaccagccaatgggaccaaccaga

SEQ ID NO: 5012903 - DNA, 25 bp, Homo sapien
gggaccaaccagatttgagtttctc

SEQ ID NO: 5012904 - DNA, 25 bp, Homo sapien
gggcacatttcaatactcggtacca

SEQ ID NO: 5012905 - DNA, 25 bp, Homo sapien
tgcgggcagcaatttcagacagaaa

SEQ ID NO: 5012906 - DNA, 25 bp, Homo sapien
gggcaaactgacttcttcccaggcc

SEQ ID NO: 5012907 - DNA, 25 bp, Homo sapien
tagctcatgaggacaacggacttgg

SEQ ID NO: 5012908 - DNA, 25 bp, Homo sapien
tatctgagcaatctgggatgaatcc

SEQ ID NO: 5012909 - DNA, 25 bp, Homo sapien
gcagggacctgagcaatagctcatg

SEQ ID NO: 5012910 - DNA, 25 bp, Homo sapien
tggtcctgacattcacttctgccta

SEQ ID NO: 5012911 - DNA, 25 bp, Homo sapien
tctggtcctgacattcacttctgcc

SEQ ID NO: 5012912 - DNA, 25 bp, Homo sapien
gatctggtcctgacattcacttctg

SEQ ID NO: 5012913 - DNA, 25 bp, Homo sapien
atctggtcctgacattcacttctgc

SEQ ID NO: 5012914 - DNA, 25 bp, Homo sapien
actttggcgattatctttatatctc

SEQ ID NO: 5012915 - DNA, 25 bp, Homo sapien
gtaactgtcattggcagacatgctg

SEQ ID NO: 5012916 - DNA, 25 bp, Homo sapien
agagggaaaaccaactggatatggt

SEQ ID NO: 5012917 - DNA, 25 bp, Homo sapien
aaccaactggatatggtaactgtca

SEQ ID NO: 5012918 - DNA, 25 bp, Homo sapien
actgcctgcctcaaagcttttcatc

SEQ ID NO: 5012919 - DNA, 25 bp, Homo sapien
tctcgccaattctctttactgcctg

SEQ ID NO: 5012920 - DNA, 25 bp, Homo sapien
aaagcttttcatcagtctcccacaa

SEQ ID NO: 5012921 - DNA, 25 bp, Homo sapien
ccacaaagtggagaatcatactcag

SEQ ID NO: 5012922 - DNA, 25 bp, Homo sapien
tgtgtcaacctggtatagatcttca

SEQ ID NO: 5012923 - DNA, 25 bp, Homo sapien
cttctgtgtcaacctggtatagatc

SEQ ID NO: 5012924 - DNA, 25 bp, Homo sapien
tctgtgtcaacctggtatagatctt

SEQ ID NO: 5012925 - DNA, 25 bp, Homo sapien
ttctgtgtcaacctggtatagatct

SEQ ID NO: 5012926 - DNA, 25 bp, Homo sapien
cttgccttttaacccaatccatcct

SEQ ID NO: 5012927 - DNA, 25 bp, Homo sapien
gctactagagtctgcctgcatagaa

SEQ ID NO: 5012928 - DNA, 25 bp, Homo sapien
tgcaatggaaggacggaagtccctg

SEQ ID NO: 5012929 - DNA, 25 bp, Homo sapien
tgcatagaaatggtaggtagagttc

SEQ ID NO: 5012930 - DNA, 25 bp, Homo sapien
gcagaattcagctgtatgcaatgga

SEQ ID NO: 5012931 - DNA, 25 bp, Homo sapien
catatggtaggcgtgttttcagatt

SEQ ID NO: 5012932 - DNA, 25 bp, Homo sapien
tatttgggtgagaacgtgtgatact

SEQ ID NO: 5012933 - DNA, 25 bp, Homo sapien
caacggtgtatgagtggtccccttt

SEQ ID NO: 5012934 - DNA, 25 bp, Homo sapien
aaagtagccatttaacaggtgagat

SEQ ID NO: 5012935 - DNA, 25 bp, Homo sapien
ctgggccctcaacgctcaggattta

SEQ ID NO: 5012936 - DNA, 25 bp, Homo sapien
tctgtattgccaagtcctgctaaag

SEQ ID NO: 5012937 - DNA, 25 bp, Homo sapien
gaagatattggacttgggcagaaag

SEQ ID NO: 5012938 - DNA, 25 bp, Homo sapien
caaactaggctcaaccttagcaaaa

SEQ ID NO: 5012939 - DNA, 25 bp, Homo sapien
cagagtcacaccgatggcagggaat

SEQ ID NO: 5012940 - DNA, 25 bp, Homo sapien
ggtcccaatgtgcactaagactgtc

SEQ ID NO: 5012941 - DNA, 25 bp, Homo sapien
tactaatactggagatggtcccctc

SEQ ID NO: 5012942 - DNA, 25 bp, Homo sapien
gctaaaatcatacgacacctccaga

SEQ ID NO: 5012943 - DNA, 25 bp, Homo sapien
tgctgctctagtgtcccggagagca

SEQ ID NO: 5012944 - DNA, 25 bp, Homo sapien
ttccacgggaatctatgcttatggg

SEQ ID NO: 5012945 - DNA, 25 bp, Homo sapien
gtcagttggcttccacgggaatcta

SEQ ID NO: 5012946 - DNA, 25 bp, Homo sapien
tgcatttgattttgctgctctagtg

SEQ ID NO: 5012947 - DNA, 25 bp, Homo sapien
tacggatgttcactaaggaagggac

SEQ ID NO: 5012948 - DNA, 25 bp, Homo sapien
gaatcagtaacacgcagagttgctg

SEQ ID NO: 5012949 - DNA, 25 bp, Homo sapien
gggactataacgtaggctccttgtg

SEQ ID NO: 5012950 - DNA, 25 bp, Homo sapien
cattctgtagttctttgcactgaaa

SEQ ID NO: 5012951 - DNA, 25 bp, Homo sapien
catattctgtttagggagttgcttc

SEQ ID NO: 5012952 - DNA, 25 bp, Homo sapien
caacatgttctgaatcctggacata

SEQ ID NO: 5012953 - DNA, 25 bp, Homo sapien
tgttctgaatcctggacatattctg

SEQ ID NO: 5012954 - DNA, 25 bp, Homo sapien
gttgcttcttatgattggcactatc

SEQ ID NO: 5012955 - DNA, 25 bp, Homo sapien
cagttatcgaggatcacttgtgcag

SEQ ID NO: 5012956 - DNA, 25 bp, Homo sapien
tctgctgggattctctttaccagaa

SEQ ID NO: 5012957 - DNA, 25 bp, Homo sapien
gaagaggtggattcactccccagtt

SEQ ID NO: 5012958 - DNA, 25 bp, Homo sapien
cacttgtgcaggagtcagaattgtc

SEQ ID NO: 5012959 - DNA, 25 bp, Homo sapien
ctccagtactttgtgagcagcaaac

SEQ ID NO: 5012960 - DNA, 25 bp, Homo sapien
acctgttggaacctgtggaatttag

SEQ ID NO: 5012961 - DNA, 25 bp, Homo sapien
gtctgccccttgtataagaaagagg

SEQ ID NO: 5012962 - DNA, 25 bp, Homo sapien
ggaacctgtggaatttaggctcttg

SEQ ID NO: 5012963 - DNA, 25 bp, Homo sapien
gtttttcctcatgcttccttctgcc

SEQ ID NO: 5012964 - DNA, 25 bp, Homo sapien
tttcctcatgcttccttctgcccat

SEQ ID NO: 5012965 - DNA, 25 bp, Homo sapien
ctgtttgtttttcctcatgcttcct

SEQ ID NO: 5012966 - DNA, 25 bp, Homo sapien
ttgtttttcctcatgcttccttctg

SEQ ID NO: 5012967 - DNA, 25 bp, Homo sapien
ttcatctgacgggtttctagggaga

SEQ ID NO: 5012968 - DNA, 25 bp, Homo sapien
tctgacgggtttctagggagaagta

SEQ ID NO: 5012969 - DNA, 25 bp, Homo sapien
tctcatttcatctgacgggtttcta

SEQ ID NO: 5012970 - DNA, 25 bp, Homo sapien
catttcatctgacgggtttctaggg

SEQ ID NO: 5012971 - DNA, 25 bp, Homo sapien
tagatgttttgtacgttgttttggc

SEQ ID NO: 5012972 - DNA, 25 bp, Homo sapien
gagtagttgagcttacaaaccttaa

SEQ ID NO: 5012973 - DNA, 25 bp, Homo sapien
aaaccttaaataatgccacgaagtg

SEQ ID NO: 5012974 - DNA, 25 bp, Homo sapien
gccacgaagtgtgaatcttcaaatg

SEQ ID NO: 5012975 - DNA, 25 bp, Homo sapien
tctccaggttctaagcctgtctgag

SEQ ID NO: 5012976 - DNA, 25 bp, Homo sapien
acttccaggcttgatccctgatcca

SEQ ID NO: 5012977 - DNA, 25 bp, Homo sapien
gacgtataccatgctccaaattttt

SEQ ID NO: 5012978 - DNA, 25 bp, Homo sapien
aggttctaagcctgtctgagaatca

SEQ ID NO: 5012979 - DNA, 25 bp, Homo sapien
aaaaacctccaataaattcagtgca

SEQ ID NO: 5012980 - DNA, 25 bp, Homo sapien
aaacctccaataaattcagtgcaag

SEQ ID NO: 5012981 - DNA, 25 bp, Homo sapien
taaaaacctccaataaattcagtgc

SEQ ID NO: 5012982 - DNA, 25 bp, Homo sapien
acctccaataaattcagtgcaagtg

SEQ ID NO: 5012983 - DNA, 25 bp, Homo sapien
cagactcagcttttggtgcttttca

SEQ ID NO: 5012984 - DNA, 25 bp, Homo sapien
ctcagcttttggtgcttttcacagg

SEQ ID NO: 5012985 - DNA, 25 bp, Homo sapien
ttattcccaaaatgtcccatgctgt

SEQ ID NO: 5012986 - DNA, 25 bp, Homo sapien
ttttcacaggcattccctgtcctta

SEQ ID NO: 5012987 - DNA, 25 bp, Homo sapien
caccgtatatgggattatacatcgt

SEQ ID NO: 5012988 - DNA, 25 bp, Homo sapien
ggattatacatcgttcatctataca

SEQ ID NO: 5012989 - DNA, 25 bp, Homo sapien
catttagtaataattccctaatcac

SEQ ID NO: 5012990 - DNA, 25 bp, Homo sapien
taattccctaatcaccgtatatggg

SEQ ID NO: 5012991 - DNA, 25 bp, Homo sapien
ctctttcttcacagacaacttgcct

SEQ ID NO: 5012992 - DNA, 25 bp, Homo sapien
caaatggtttctgtataaagttctt

SEQ ID NO: 5012993 - DNA, 25 bp, Homo sapien
tcaaatggtttctgtataaagttct

SEQ ID NO: 5012994 - DNA, 25 bp, Homo sapien
tcttcacagacaacttgcctttttt

SEQ ID NO: 5012995 - DNA, 25 bp, Homo sapien
ggagagcccatgaagaccctggtac

SEQ ID NO: 5012996 - DNA, 25 bp, Homo sapien
gggagagcccatgaagaccctggta

SEQ ID NO: 5012997 - DNA, 25 bp, Homo sapien
tgggagagcccatgaagaccctggt

SEQ ID NO: 5012998 - DNA, 25 bp, Homo sapien
ctgggagagcccatgaagaccctgg

SEQ ID NO: 5012999 - DNA, 25 bp, Homo sapien
tcaaggattcggagaaagcttaata

SEQ ID NO: 5013000 - DNA, 25 bp, Homo sapien
gagtgggcaagaaataaaagggcaa

SEQ ID NO: 5013001 - DNA, 25 bp, Homo sapien
cttccaaactgtaataatcaaggat

SEQ ID NO: 5013002 - DNA, 25 bp, Homo sapien
agtggtagcctgaacagaaacttcc

SEQ ID NO: 5013003 - DNA, 25 bp, Homo sapien
ctacacttaggaagatcaacacccc

SEQ ID NO: 5013004 - DNA, 25 bp, Homo sapien
gctcctgctcacattgtctacactt

SEQ ID NO: 5013005 - DNA, 25 bp, Homo sapien
tgtctacacttaggaagatcaacac

SEQ ID NO: 5013006 - DNA, 25 bp, Homo sapien
gctcacattgtctacacttaggaag

SEQ ID NO: 5013007 - DNA, 25 bp, Homo sapien
gcaaggttccatgctatcttccctg

SEQ ID NO: 5013008 - DNA, 25 bp, Homo sapien
tcaagtgtagcaaggttccatgcta

SEQ ID NO: 5013009 - DNA, 25 bp, Homo sapien
aaggttccatgctatcttccctgca

SEQ ID NO: 5013010 - DNA, 25 bp, Homo sapien
tgtagcaaggttccatgctatcttc

SEQ ID NO: 5013011 - DNA, 25 bp, Homo sapien
tgtctctggcttaatgagctttcgt

SEQ ID NO: 5013012 - DNA, 25 bp, Homo sapien
ggcatcactgccaatgctctatatt

SEQ ID NO: 5013013 - DNA, 25 bp, Homo sapien
aatattgactcactgacttgcctca

SEQ ID NO: 5013014 - DNA, 25 bp, Homo sapien
gggtgcaagctgcagtttgtagcaa

SEQ ID NO: 5013015 - DNA, 25 bp, Homo sapien
gaaaagcaatcatcagacttgcttg

SEQ ID NO: 5013016 - DNA, 25 bp, Homo sapien
gaaatctttcactggccatggcaga

SEQ ID NO: 5013017 - DNA, 25 bp, Homo sapien
gacttgcttggtgaaacactctggt

SEQ ID NO: 5013018 - DNA, 25 bp, Homo sapien
ggttgacccatgtaatgttaacatc

SEQ ID NO: 5013019 - DNA, 25 bp, Homo sapien
tataatattatgcatgcagcattcc

SEQ ID NO: 5013020 - DNA, 25 bp, Homo sapien
tcaaacatgtacagttgtatggcct

SEQ ID NO: 5013021 - DNA, 25 bp, Homo sapien
ggattcagtgtattatgtcaccaca

SEQ ID NO: 5013022 - DNA, 25 bp, Homo sapien
tgtatggccttctcgaagccttatg

SEQ ID NO: 5013023 - DNA, 25 bp, Homo sapien
tcaaatatgggagccagcagctaca

SEQ ID NO: 5013024 - DNA, 25 bp, Homo sapien
caaatgtagtggtttctagcggcag

SEQ ID NO: 5013025 - DNA, 25 bp, Homo sapien
gccaggaagagtgcccaaggttgaa

SEQ ID NO: 5013026 - DNA, 25 bp, Homo sapien
ttgaaaaagccttgagagtggacgg

SEQ ID NO: 5013027 - DNA, 25 bp, Homo sapien
cacttatgagcacctgattgcctct

SEQ ID NO: 5013028 - DNA, 25 bp, Homo sapien
ctgccacttatgagcacctgattgc

SEQ ID NO: 5013029 - DNA, 25 bp, Homo sapien
gatgccaaccttaatgtggaccccg

SEQ ID NO: 5013030 - DNA, 25 bp, Homo sapien
aatgtggaccccggattggcatagc

SEQ ID NO: 5013031 - DNA, 25 bp, Homo sapien
tacctgtagcacattcgtggctgag

SEQ ID NO: 5013032 - DNA, 25 bp, Homo sapien
aggtcctgtccagcaacgtcaaagg

SEQ ID NO: 5013033 - DNA, 25 bp, Homo sapien
gggatcagtacctgggtatacctgt

SEQ ID NO: 5013034 - DNA, 25 bp, Homo sapien
tgtccagcaacgtcaaaggctgagg

SEQ ID NO: 5013035 - DNA, 25 bp, Homo sapien
gcagttggacgtgcccggagtttct

SEQ ID NO: 5013036 - DNA, 25 bp, Homo sapien
tacgcagcacggaccccaaaagtca

SEQ ID NO: 5013037 - DNA, 25 bp, Homo sapien
tcatacgcagcacggaccccaaaag

SEQ ID NO: 5013038 - DNA, 25 bp, Homo sapien
ggtgtgtccgcagttggacgtgccc

SEQ ID NO: 5013039 - DNA, 25 bp, Homo sapien
gaggcctaacctcctgaaatgagac

SEQ ID NO: 5013040 - DNA, 25 bp, Homo sapien
gacattgcgactaccttttcccgaa

SEQ ID NO: 5013041 - DNA, 25 bp, Homo sapien
gaaaatcactttctgataggcctgg

SEQ ID NO: 5013042 - DNA, 25 bp, Homo sapien
tctcagggcctcagatgaattctac

SEQ ID NO: 5013043 - DNA, 25 bp, Homo sapien
tgtggcacacacctagcaactttct

SEQ ID NO: 5013044 - DNA, 25 bp, Homo sapien
gaacagtccaaatcagcagtgcaca

SEQ ID NO: 5013045 - DNA, 25 bp, Homo sapien
ggctggctctgaataaacccacagt

SEQ ID NO: 5013046 - DNA, 25 bp, Homo sapien
gatttacctgcaccaatgtggcaca

SEQ ID NO: 5013047 - DNA, 25 bp, Homo sapien
tgtgagtgcaacttaaaaacccagc

SEQ ID NO: 5013048 - DNA, 25 bp, Homo sapien
tatcctgtagatatgtgttgctgcc

SEQ ID NO: 5013049 - DNA, 25 bp, Homo sapien
caagtagcaggactataagggacta

SEQ ID NO: 5013050 - DNA, 25 bp, Homo sapien
ttacttggatgctggaaatgctgaa

SEQ ID NO: 5013051 - DNA, 25 bp, Homo sapien
tataaaattaagattggcagaatac

SEQ ID NO: 5013052 - DNA, 25 bp, Homo sapien
gcacactaggctcttgacaatcacg

SEQ ID NO: 5013053 - DNA, 25 bp, Homo sapien
gaacttgtctctgcccactagtgaa

SEQ ID NO: 5013054 - DNA, 25 bp, Homo sapien
tacaggcatgataaagaggtgcagc

SEQ ID NO: 5013055 - DNA, 25 bp, Homo sapien
tgggacagccctttgatgaaaaatc

SEQ ID NO: 5013056 - DNA, 25 bp, Homo sapien
gccactggtatttggttgattgcct

SEQ ID NO: 5013057 - DNA, 25 bp, Homo sapien
tagggtcctcttgttgtagaatgaa

SEQ ID NO: 5013058 - DNA, 25 bp, Homo sapien
catttcacaagctacaatagctgca

SEQ ID NO: 5013059 - DNA, 25 bp, Homo sapien
ccacttgagctcgatgaactacata

SEQ ID NO: 5013060 - DNA, 25 bp, Homo sapien
tctacaatagaggtaacagctggct

SEQ ID NO: 5013061 - DNA, 25 bp, Homo sapien
tatttgcaatgaactacctggtgaa

SEQ ID NO: 5013062 - DNA, 25 bp, Homo sapien
ggaccaaagtctacaggtaaccatg

SEQ ID NO: 5013063 - DNA, 25 bp, Homo sapien
gcttctcctggtagtggaggaccaa

SEQ ID NO: 5013064 - DNA, 25 bp, Homo sapien
aaatatccactaacactctgttctg

SEQ ID NO: 5013065 - DNA, 25 bp, Homo sapien
tgacatcttccattgtccgcagggt

SEQ ID NO: 5013066 - DNA, 25 bp, Homo sapien
cgcagggtggtacccaagtaagaat

SEQ ID NO: 5013067 - DNA, 25 bp, Homo sapien
taggaagcagtccaaccgaagatgc

SEQ ID NO: 5013068 - DNA, 25 bp, Homo sapien
agggataggccagcgggaccccact

SEQ ID NO: 5013069 - DNA, 25 bp, Homo sapien
tagggccgccacaagaccgctcaaa

SEQ ID NO: 5013070 - DNA, 25 bp, Homo sapien
ttatctgatagagcgccctcctagg

SEQ ID NO: 5013071 - DNA, 25 bp, Homo sapien
aagaccgctcaaaaacagacttgga

SEQ ID NO: 5013072 - DNA, 25 bp, Homo sapien
ccacatgggcgatgaaggtgccgat

SEQ ID NO: 5013073 - DNA, 25 bp, Homo sapien
agcacgaagccgtacaggtagccag

SEQ ID NO: 5013074 - DNA, 25 bp, Homo sapien
caaaaggtatgggtgtcagtctggc

SEQ ID NO: 5013075 - DNA, 25 bp, Homo sapien
atgaagcccacgacgaagagcagga

SEQ ID NO: 5013076 - DNA, 25 bp, Homo sapien
agcagcagcgccagtttctcacctc

SEQ ID NO: 5013077 - DNA, 25 bp, Homo sapien
tcacctcagccacgccgaccaccac

SEQ ID NO: 5013078 - DNA, 25 bp, Homo sapien
tcagccacgccgaccaccacgccgc

SEQ ID NO: 5013079 - DNA, 25 bp, Homo sapien
tctcacctcagccacgccgaccacc

SEQ ID NO: 5013080 - DNA, 25 bp, Homo sapien
gcccgttaggcagctgcccttcatg

SEQ ID NO: 5013081 - DNA, 25 bp, Homo sapien
gcgctccagataggcgccgagcagg

SEQ ID NO: 5013082 - DNA, 25 bp, Homo sapien
atggcgcccggttcgcccggcatcg

SEQ ID NO: 5013083 - DNA, 25 bp, Homo sapien
ctggagcaggatcccgcccgggctc

SEQ ID NO: 5013084 - DNA, 25 bp, Homo sapien
gggcgtccgcgtgggccagcggagg

SEQ ID NO: 5013085 - DNA, 25 bp, Homo sapien
tgcccgccccttgtcggccagaggg

SEQ ID NO: 5013086 - DNA, 25 bp, Homo sapien
gctgtgttctggtccgctcccgtga

SEQ ID NO: 5013087 - DNA, 25 bp, Homo sapien
ggagcccactccggtggtgcccgcc

SEQ ID NO: 5013088 - DNA, 25 bp, Homo sapien
cttaggtcgttgctgatcaggctcc

SEQ ID NO: 5013089 - DNA, 25 bp, Homo sapien
taggtcgttgctgatcaggctcctg

SEQ ID NO: 5013090 - DNA, 25 bp, Homo sapien
ttaggtcgttgctgatcaggctcct

SEQ ID NO: 5013091 - DNA, 25 bp, Homo sapien
taaccactgtgagatggcagtaggg

SEQ ID NO: 5013092 - DNA, 25 bp, Homo sapien
ataaccactgtgagatggcagtagg

SEQ ID NO: 5013093 - DNA, 25 bp, Homo sapien
tttcttctatctgaataaccactgt

SEQ ID NO: 5013094 - DNA, 25 bp, Homo sapien
cttctatctgaataaccactgtgag

SEQ ID NO: 5013095 - DNA, 25 bp, Homo sapien
ctaaggcagtctgcacgagagggtc

SEQ ID NO: 5013096 - DNA, 25 bp, Homo sapien
agtctgcacgagagggtcgtgatcc

SEQ ID NO: 5013097 - DNA, 25 bp, Homo sapien
ctctaaggcagtctgcacgagaggg

SEQ ID NO: 5013098 - DNA, 25 bp, Homo sapien
gcagtctgcacgagagggtcgtgat

SEQ ID NO: 5013099 - DNA, 25 bp, Homo sapien
tatccaggcttttgtactgtggttc

SEQ ID NO: 5013100 - DNA, 25 bp, Homo sapien
aaccaatagaatcctctggagggta

SEQ ID NO: 5013101 - DNA, 25 bp, Homo sapien
ctgtctaatggcaaagtggaatgtg

SEQ ID NO: 5013102 - DNA, 25 bp, Homo sapien
gtaatggagcccttaagcccctatg

SEQ ID NO: 5013103 - DNA, 25 bp, Homo sapien
ctggttggccaattaaacattttat

SEQ ID NO: 5013104 - DNA, 25 bp, Homo sapien
gttattttcaatgcatgttttctgg

SEQ ID NO: 5013105 - DNA, 25 bp, Homo sapien
taaagggatttcattcaattgttat

SEQ ID NO: 5013106 - DNA, 25 bp, Homo sapien
acattttataaagggatttcattca

SEQ ID NO: 5013107 - DNA, 25 bp, Homo sapien
caattctttgctctcacccttcttc

SEQ ID NO: 5013108 - DNA, 25 bp, Homo sapien
gcaggggtcttgcagatagaaaaga

SEQ ID NO: 5013109 - DNA, 25 bp, Homo sapien
cacacagatatgtctaggcaggggt

SEQ ID NO: 5013110 - DNA, 25 bp, Homo sapien
cacagatatgtctaggcaggggtct

SEQ ID NO: 5013111 - DNA, 25 bp, Homo sapien
caaaaccatcaggagacttcgaatc

SEQ ID NO: 5013112 - DNA, 25 bp, Homo sapien
tctcaggtcaactgaactttctgag

SEQ ID NO: 5013113 - DNA, 25 bp, Homo sapien
cgcttgcagttttgctagtcactgt

SEQ ID NO: 5013114 - DNA, 25 bp, Homo sapien
gaatcaggtaagtattagtccgctt

SEQ ID NO: 5013115 - DNA, 25 bp, Homo sapien
gtgttatctttaaagactcatcttt

SEQ ID NO: 5013116 - DNA, 25 bp, Homo sapien
tgtgttatctttaaagactcatctt

SEQ ID NO: 5013117 - DNA, 25 bp, Homo sapien
cagaagggttctgggctgcaggtga

SEQ ID NO: 5013118 - DNA, 25 bp, Homo sapien
ggttctgggctgcaggtgaaatatt

SEQ ID NO: 5013119 - DNA, 25 bp, Homo sapien
gggaaaggtggctgtgctctgggcc

SEQ ID NO: 5013120 - DNA, 25 bp, Homo sapien
gctgcaggtgaaatattcaggtggg

SEQ ID NO: 5013121 - DNA, 25 bp, Homo sapien
tgtaccattcttgtaggctcaggct

SEQ ID NO: 5013122 - DNA, 25 bp, Homo sapien
gcctgatctggattgccgtattgca

SEQ ID NO: 5013123 - DNA, 25 bp, Homo sapien
cgtattgcacaattgtaagaccttg

SEQ ID NO: 5013124 - DNA, 25 bp, Homo sapien
taagaccttgtttcatgcttggaga

SEQ ID NO: 5013125 - DNA, 25 bp, Homo sapien
acaggtaagttcatatcccatacat

SEQ ID NO: 5013126 - DNA, 25 bp, Homo sapien
caggtaagttcatatcccatacatg

SEQ ID NO: 5013127 - DNA, 25 bp, Homo sapien
cacaggtaagttcatatcccataca

SEQ ID NO: 5013128 - DNA, 25 bp, Homo sapien
gtcaaactctatgtctagggccaag

SEQ ID NO: 5013129 - DNA, 25 bp, Homo sapien
gccagttttcacaaatggatgacca

SEQ ID NO: 5013130 - DNA, 25 bp, Homo sapien
tagggccaagttccatgccttgagt

SEQ ID NO: 5013131 - DNA, 25 bp, Homo sapien
gcaaagctccatgcctgaatgccag

SEQ ID NO: 5013132 - DNA, 25 bp, Homo sapien
tcatcactggtgacgcttcccactg

SEQ ID NO: 5013133 - DNA, 25 bp, Homo sapien
atccctagcaccaccctcaactaca

SEQ ID NO: 5013134 - DNA, 25 bp, Homo sapien
tctcatcactggtgacgcttcccac

SEQ ID NO: 5013135 - DNA, 25 bp, Homo sapien
tttcagccctgttccaatccctagc

SEQ ID NO: 5013136 - DNA, 25 bp, Homo sapien
aattccgcaagtaggtcactgggaa

SEQ ID NO: 5013137 - DNA, 25 bp, Homo sapien
ggtgagaaacacaaattccgcaagt

SEQ ID NO: 5013138 - DNA, 25 bp, Homo sapien
tcactgggaatgattgtgactcggg

SEQ ID NO: 5013139 - DNA, 25 bp, Homo sapien
tgggaatgattgtgactcgggccat

SEQ ID NO: 5013140 - DNA, 25 bp, Homo sapien
gattgctggtattcgtgaaccctgc

SEQ ID NO: 5013141 - DNA, 25 bp, Homo sapien
tgctggtattcgtgaaccctgcccc

SEQ ID NO: 5013142 - DNA, 25 bp, Homo sapien
gctcctcgattgctggtattcgtga

SEQ ID NO: 5013143 - DNA, 25 bp, Homo sapien
cctcgattgctggtattcgtgaacc

SEQ ID NO: 5013144 - DNA, 25 bp, Homo sapien
acaggccactgggaccaaaagcaga

SEQ ID NO: 5013145 - DNA, 25 bp, Homo sapien
gaccaaaagcagagtaggtagaacc

SEQ ID NO: 5013146 - DNA, 25 bp, Homo sapien
agcagagtaggtagaacctctctga

SEQ ID NO: 5013147 - DNA, 25 bp, Homo sapien
ggccactgggaccaaaagcagagta

SEQ ID NO: 5013148 - DNA, 25 bp, Homo sapien
ccctccgcgcgttgctacgtgcggg

SEQ ID NO: 5013149 - DNA, 25 bp, Homo sapien
ctttggctgctcaggacaaacgccc

SEQ ID NO: 5013150 - DNA, 25 bp, Homo sapien
atctccagccgtggccgatggccgt

SEQ ID NO: 5013151 - DNA, 25 bp, Homo sapien
tacgtgcggggatgacatggatcca

SEQ ID NO: 5013152 - DNA, 25 bp, Homo sapien
tgtccaagggcatgtcgatcttcct

SEQ ID NO: 5013153 - DNA, 25 bp, Homo sapien
gagctgggcggttgcttcccagcac

SEQ ID NO: 5013154 - DNA, 25 bp, Homo sapien
tgggcggttgcttcccagcaccttt

SEQ ID NO: 5013155 - DNA, 25 bp, Homo sapien
ctcgacgtaagtacagatggtggga

SEQ ID NO: 5013156 - DNA, 25 bp, Homo sapien
tacagcggtgggaaatatcattttc

SEQ ID NO: 5013157 - DNA, 25 bp, Homo sapien
cagcggtgggaaatatcattttcat

SEQ ID NO: 5013158 - DNA, 25 bp, Homo sapien
tctctccaagttctaattactactg

SEQ ID NO: 5013159 - DNA, 25 bp, Homo sapien
ctttttacagcggtgggaaatatca

SEQ ID NO: 5013160 - DNA, 25 bp, Homo sapien
ctttggtccaatttctcacttcggt

SEQ ID NO: 5013161 - DNA, 25 bp, Homo sapien
aatttctcacttcggtatcgactgc

SEQ ID NO: 5013162 - DNA, 25 bp, Homo sapien
ttcggtatcgactgcctgccttcat

SEQ ID NO: 5013163 - DNA, 25 bp, Homo sapien
attctagcttttgactattttccct

SEQ ID NO: 5013164 - DNA, 25 bp, Homo sapien
cattcatgctgttgccggaggtcgt

SEQ ID NO: 5013165 - DNA, 25 bp, Homo sapien
ccggaggtcgtgtctatctcagtgg

SEQ ID NO: 5013166 - DNA, 25 bp, Homo sapien
cagcccctcagttgtcacattcatg

SEQ ID NO: 5013167 - DNA, 25 bp, Homo sapien
tctcagtggggacaattctgtctgc

SEQ ID NO: 5013168 - DNA, 25 bp, Homo sapien
ctatttgaagtgtatgccctggaaa

SEQ ID NO: 5013169 - DNA, 25 bp, Homo sapien
gagattttactgtactccaagaggt

SEQ ID NO: 5013170 - DNA, 25 bp, Homo sapien
tgcctggaaacctgcattgctagct

SEQ ID NO: 5013171 - DNA, 25 bp, Homo sapien
gctagctttatctctaccccattgt

SEQ ID NO: 5013172 - DNA, 25 bp, Homo sapien
ttaccgcctctcctaatgtccattc

SEQ ID NO: 5013173 - DNA, 25 bp, Homo sapien
gccttccttaccgcctctcctaatg

SEQ ID NO: 5013174 - DNA, 25 bp, Homo sapien
cttccttaccgcctctcctaatgtc

SEQ ID NO: 5013175 - DNA, 25 bp, Homo sapien
tccttaccgcctctcctaatgtcca

SEQ ID NO: 5013176 - DNA, 25 bp, Homo sapien
gtcttcaatcattatgacaagccaa

SEQ ID NO: 5013177 - DNA, 25 bp, Homo sapien
tagagcagtggcgagaacataggct

SEQ ID NO: 5013178 - DNA, 25 bp, Homo sapien
taatgttcgataaaatgtatggagg

SEQ ID NO: 5013179 - DNA, 25 bp, Homo sapien
agctgagtcctaccctctgtgattt

SEQ ID NO: 5013180 - DNA, 25 bp, Homo sapien
tctcgggaggcgtgctttccggccc

SEQ ID NO: 5013181 - DNA, 25 bp, Homo sapien
ggaggcgtgctttccggcccctcat

SEQ ID NO: 5013182 - DNA, 25 bp, Homo sapien
taaactgagagcagctttaaagacc

SEQ ID NO: 5013183 - DNA, 25 bp, Homo sapien
cagctttaaagacccgcttccagga

SEQ ID NO: 5013184 - DNA, 25 bp, Homo sapien
aaatcaggccactccacaacctgca

SEQ ID NO: 5013185 - DNA, 25 bp, Homo sapien
tctaaatcaggccactccacaacct

SEQ ID NO: 5013186 - DNA, 25 bp, Homo sapien
gtggattggggcactgcattcttcc

SEQ ID NO: 5013187 - DNA, 25 bp, Homo sapien
tccacaacctgcagtgtggattggg

SEQ ID NO: 5013188 - DNA, 25 bp, Homo sapien
tgcttagttctccatgatgcatcag

SEQ ID NO: 5013189 - DNA, 25 bp, Homo sapien
ctctctgcttagttctccatgatgc

SEQ ID NO: 5013190 - DNA, 25 bp, Homo sapien
tctctgcttagttctccatgatgca

SEQ ID NO: 5013191 - DNA, 25 bp, Homo sapien
tctgcttagttctccatgatgcatc

SEQ ID NO: 5013192 - DNA, 25 bp, Homo sapien
caaactgactttaccaattttgcca

SEQ ID NO: 5013193 - DNA, 25 bp, Homo sapien
gactttaccaattttgccaacttgc

SEQ ID NO: 5013194 - DNA, 25 bp, Homo sapien
ctgactttaccaattttgccaactt

SEQ ID NO: 5013195 - DNA, 25 bp, Homo sapien
ctttaccaattttgccaacttgcat

SEQ ID NO: 5013196 - DNA, 25 bp, Homo sapien
cctcccgagtacactattacatatt

SEQ ID NO: 5013197 - DNA, 25 bp, Homo sapien
taggttaatatagcagaataatttg

SEQ ID NO: 5013198 - DNA, 25 bp, Homo sapien
gactattaacaaaacggccatagtg

SEQ ID NO: 5013199 - DNA, 25 bp, Homo sapien
agtattattatagcagaagacctaa

SEQ ID NO: 5013200 - DNA, 25 bp, Homo sapien
caaaaacccgcctctggatgaatat

SEQ ID NO: 5013201 - DNA, 25 bp, Homo sapien
gcctctggatgaatatagctgggca

SEQ ID NO: 5013202 - DNA, 25 bp, Homo sapien
agagagaaacaaaaacccgcctctg

SEQ ID NO: 5013203 - DNA, 25 bp, Homo sapien
aaagcctgtccttcataagtaatca

SEQ ID NO: 5013204 - DNA, 25 bp, Homo sapien
tagccacttcagaggtaagggggag

SEQ ID NO: 5013205 - DNA, 25 bp, Homo sapien
agccacttcagaggtaagggggagc

SEQ ID NO: 5013206 - DNA, 25 bp, Homo sapien
cccactcagggttctaggaataatt

SEQ ID NO: 5013207 - DNA, 25 bp, Homo sapien
gggtgccaaatgctctctgatacaa

SEQ ID NO: 5013208 - DNA, 25 bp, Homo sapien
tacaagtcttcatagccctctatat

SEQ ID NO: 5013209 - DNA, 25 bp, Homo sapien
tatatttaggctctgacccactcag

SEQ ID NO: 5013210 - DNA, 25 bp, Homo sapien
gcctaaaccattctggagttgtaaa

SEQ ID NO: 5013211 - DNA, 25 bp, Homo sapien
agatacatctttacaaatgcctggt

SEQ ID NO: 5013212 - DNA, 25 bp, Homo sapien
tgattcaatggggacagatacatct

SEQ ID NO: 5013213 - DNA, 25 bp, Homo sapien
atgcctggtttaatagcctcttcat

SEQ ID NO: 5013214 - DNA, 25 bp, Homo sapien
gttgtggtccactctcatctatgtg

SEQ ID NO: 5013215 - DNA, 25 bp, Homo sapien
aaaggccaagttgtggtccactctc

SEQ ID NO: 5013216 - DNA, 25 bp, Homo sapien
gatgaatagcagtcaccataaaggc

SEQ ID NO: 5013217 - DNA, 25 bp, Homo sapien
gcagtcaccataaaggccaagttgt

SEQ ID NO: 5013218 - DNA, 25 bp, Homo sapien
tagtcctagttgtgtgatgaaatcc

SEQ ID NO: 5013219 - DNA, 25 bp, Homo sapien
cacatcttggagtttgcagatctgc

SEQ ID NO: 5013220 - DNA, 25 bp, Homo sapien
ttcccaaatcatccttagtgcatcc

SEQ ID NO: 5013221 - DNA, 25 bp, Homo sapien
ctttggcatggctcatagtcctagt

SEQ ID NO: 5013222 - DNA, 25 bp, Homo sapien
ggcaatttatcataatcagtgagta

SEQ ID NO: 5013223 - DNA, 25 bp, Homo sapien
taactgtgcaatgttttcgttgttg

SEQ ID NO: 5013224 - DNA, 25 bp, Homo sapien
tatcataatcagtgagtaactgtgc

SEQ ID NO: 5013225 - DNA, 25 bp, Homo sapien
cagtgagtaactgtgcaatgttttc

SEQ ID NO: 5013226 - DNA, 25 bp, Homo sapien
tctccaagccaagttgccagatgat

SEQ ID NO: 5013227 - DNA, 25 bp, Homo sapien
ctccaagccaagttgccagatgatg

SEQ ID NO: 5013228 - DNA, 25 bp, Homo sapien
ccatcagaggccctctttcatgtcc

SEQ ID NO: 5013229 - DNA, 25 bp, Homo sapien
ggaggcagctatgaagcctagttcc

SEQ ID NO: 5013230 - DNA, 25 bp, Homo sapien
gctatgaagcctagttccatcagag

SEQ ID NO: 5013231 - DNA, 25 bp, Homo sapien
tgaagcctagttccatcagaggccc

SEQ ID NO: 5013232 - DNA, 25 bp, Homo sapien
gattttgtccttaatgttggtcacg

SEQ ID NO: 5013233 - DNA, 25 bp, Homo sapien
tgtctacagaccatgctccatcctg

SEQ ID NO: 5013234 - DNA, 25 bp, Homo sapien
cagggattccttgtcacagcaccga

SEQ ID NO: 5013235 - DNA, 25 bp, Homo sapien
gagcctccttgactcgcacagggat

SEQ ID NO: 5013236 - DNA, 25 bp, Homo sapien
gcttaaattagaccctggaacagag

SEQ ID NO: 5013237 - DNA, 25 bp, Homo sapien
gaagtcagaggcaacaatctcaagg

SEQ ID NO: 5013238 - DNA, 25 bp, Homo sapien
tcatgtctgatcctgaagatgcaaa

SEQ ID NO: 5013239 - DNA, 25 bp, Homo sapien
ccaacactgagtggtacattgggtg

SEQ ID NO: 5013240 - DNA, 25 bp, Homo sapien
taagccagattgcatccagatatga

SEQ ID NO: 5013241 - DNA, 25 bp, Homo sapien
cttggtctgtggagcagaatgtcca

SEQ ID NO: 5013242 - DNA, 25 bp, Homo sapien
taaagtaattaagcaactaagccag

SEQ ID NO: 5013243 - DNA, 25 bp, Homo sapien
tattgccagcaaattacttgaacag

SEQ ID NO: 5013244 - DNA, 25 bp, Homo sapien
tatccacgtatcaggttatagactg

SEQ ID NO: 5013245 - DNA, 25 bp, Homo sapien
caatcctgtgataagttggagtacc

SEQ ID NO: 5013246 - DNA, 25 bp, Homo sapien
taggcatcaaacaaccttggctgta

SEQ ID NO: 5013247 - DNA, 25 bp, Homo sapien
tgcgatacagacagctaacttttct

SEQ ID NO: 5013248 - DNA, 25 bp, Homo sapien
taaaatcctttcatagttctattag

SEQ ID NO: 5013249 - DNA, 25 bp, Homo sapien
gtatttgtgtgcctctggtcaactc

SEQ ID NO: 5013250 - DNA, 25 bp, Homo sapien
tcaactctaaggatgacagacactg

SEQ ID NO: 5013251 - DNA, 25 bp, Homo sapien
aactaattcatgaaacagcaacttt

SEQ ID NO: 5013252 - DNA, 25 bp, Homo sapien
caaaacattgctttggttggtgcat

SEQ ID NO: 5013253 - DNA, 25 bp, Homo sapien
caaatattttgggtactaggcagtt

SEQ ID NO: 5013254 - DNA, 25 bp, Homo sapien
aattagaatgacttgagaacgggca

SEQ ID NO: 5013255 - DNA, 25 bp, Homo sapien
tactaagtggaagggatctgcagat

SEQ ID NO: 5013256 - DNA, 25 bp, Homo sapien
gggacctaagtataaatatctcatc

SEQ ID NO: 5013257 - DNA, 25 bp, Homo sapien
taacatggaatacaagcttgaatct

SEQ ID NO: 5013258 - DNA, 25 bp, Homo sapien
gaggtcactaaaagaccaagatggg

SEQ ID NO: 5013259 - DNA, 25 bp, Homo sapien
tactggaacctatagtagaaaagga

SEQ ID NO: 5013260 - DNA, 25 bp, Homo sapien
aattgctcaacttctgctattcata

SEQ ID NO: 5013261 - DNA, 25 bp, Homo sapien
ctattcatatggtctgattagtgac

SEQ ID NO: 5013262 - DNA, 25 bp, Homo sapien
tccatatataagaaattatcgaatt

SEQ ID NO: 5013263 - DNA, 25 bp, Homo sapien
tgacataagtagcagccgtttttca

SEQ ID NO: 5013264 - DNA, 25 bp, Homo sapien
agtgttacttcccaatttatgcagg

SEQ ID NO: 5013265 - DNA, 25 bp, Homo sapien
ttagagaagtcaaatagccaaccat

SEQ ID NO: 5013266 - DNA, 25 bp, Homo sapien
gctagatccacctcatttgcagatg

SEQ ID NO: 5013267 - DNA, 25 bp, Homo sapien
ttctgaatcattctaagcctctgga

SEQ ID NO: 5013268 - DNA, 25 bp, Homo sapien
ctgcagatggaaacacttgagagct

SEQ ID NO: 5013269 - DNA, 25 bp, Homo sapien
gatgatcaggcagaaagtctggttt

SEQ ID NO: 5013270 - DNA, 25 bp, Homo sapien
tgagagcttcaacaggaaatctctg

SEQ ID NO: 5013271 - DNA, 25 bp, Homo sapien
ttttgcagtacaatgggatgatcag

SEQ ID NO: 5013272 - DNA, 25 bp, Homo sapien
gctgttgctgttgctcattaagacc

SEQ ID NO: 5013273 - DNA, 25 bp, Homo sapien
tcttaactggagactgctgttgctg

SEQ ID NO: 5013274 - DNA, 25 bp, Homo sapien
tcattaagaccttgagaaaaggctt

SEQ ID NO: 5013275 - DNA, 25 bp, Homo sapien
gctgttgctcattaagaccttgaga

SEQ ID NO: 5013276 - DNA, 25 bp, Homo sapien
taaagtgaaagaaggtcaatggttc

SEQ ID NO: 5013277 - DNA, 25 bp, Homo sapien
taagattccactataaatcagtgtg

SEQ ID NO: 5013278 - DNA, 25 bp, Homo sapien
catcatgatattgattatacagaga

SEQ ID NO: 5013279 - DNA, 25 bp, Homo sapien
catttctatgacttatagaaaactc

SEQ ID NO: 5013280 - DNA, 25 bp, Homo sapien
gcactgagtgttgcatggatattcg

SEQ ID NO: 5013281 - DNA, 25 bp, Homo sapien
gttgcatggatattcgttttgaaag

SEQ ID NO: 5013282 - DNA, 25 bp, Homo sapien
tgcatggatattcgttttgaaagtt

SEQ ID NO: 5013283 - DNA, 25 bp, Homo sapien
cactgagtgttgcatggatattcgt

SEQ ID NO: 5013284 - DNA, 25 bp, Homo sapien
tctctccagcatgattgccctgcag

SEQ ID NO: 5013285 - DNA, 25 bp, Homo sapien
ggcacagtttgtactgggagtatca

SEQ ID NO: 5013286 - DNA, 25 bp, Homo sapien
actgggagtatcactctgaccagaa

SEQ ID NO: 5013287 - DNA, 25 bp, Homo sapien
gattgccctgcagttatcataatca

SEQ ID NO: 5013288 - DNA, 25 bp, Homo sapien
cagatgacgaacaggtcttgctggt

SEQ ID NO: 5013289 - DNA, 25 bp, Homo sapien
gaagtcagatgacgaacaggtcttg

SEQ ID NO: 5013290 - DNA, 25 bp, Homo sapien
ggagaagtcagatgacgaacaggtc

SEQ ID NO: 5013291 - DNA, 25 bp, Homo sapien
cttgctggttgaagcggtttaccaa

SEQ ID NO: 5013292 - DNA, 25 bp, Homo sapien
tgtcacaaagactttgaggttccat

SEQ ID NO: 5013293 - DNA, 25 bp, Homo sapien
gtcacaaagactttgaggttccata

SEQ ID NO: 5013294 - DNA, 25 bp, Homo sapien
tgaaaaccttgtgccaccgggtgga

SEQ ID NO: 5013295 - DNA, 25 bp, Homo sapien
gatgggctaaagctgtccaggtaat

SEQ ID NO: 5013296 - DNA, 25 bp, Homo sapien
acttagctccttttttggcgatggc

SEQ ID NO: 5013297 - DNA, 25 bp, Homo sapien
gcaaatcgtcttgaaagcctcccac

SEQ ID NO: 5013298 - DNA, 25 bp, Homo sapien
tcggggaacggctcctgccgctggt

SEQ ID NO: 5013299 - DNA, 25 bp, Homo sapien
gggatttcggggcagcagcgtcgcc

SEQ ID NO: 5013300 - DNA, 25 bp, Homo sapien
tcagcccacacgcggaggccgagcg

SEQ ID NO: 5013301 - DNA, 25 bp, Homo sapien
cgactcaaaatccacggggatttcg

SEQ ID NO: 5013302 - DNA, 25 bp, Homo sapien
accagggatacagcgtttcacacag

SEQ ID NO: 5013303 - DNA, 25 bp, Homo sapien
gaccagggatacagcgtttcacaca

SEQ ID NO: 5013304 - DNA, 25 bp, Homo sapien
agaccagggatacagcgtttcacac

SEQ ID NO: 5013305 - DNA, 25 bp, Homo sapien
tgtactgagggacgtggaggtggca

SEQ ID NO: 5013306 - DNA, 25 bp, Homo sapien
actgagggacgtggaggtggcagtc

SEQ ID NO: 5013307 - DNA, 25 bp, Homo sapien
ctgcttgtactgagggacgtggagg

SEQ ID NO: 5013308 - DNA, 25 bp, Homo sapien
tgtctgcttgtactgagggacgtgg

SEQ ID NO: 5013309 - DNA, 25 bp, Homo sapien
gcaccaaaaggacagttgaaaatgc

SEQ ID NO: 5013310 - DNA, 25 bp, Homo sapien
caccaaaaggacagttgaaaatgca

SEQ ID NO: 5013311 - DNA, 25 bp, Homo sapien
gtggggcactatcaggatttaccat

SEQ ID NO: 5013312 - DNA, 25 bp, Homo sapien
ttaagtggggcactatcaggattta

SEQ ID NO: 5013313 - DNA, 25 bp, Homo sapien
ctggcaaacactgaacggttttaag

SEQ ID NO: 5013314 - DNA, 25 bp, Homo sapien
acggttttaagtggggcactatcag

SEQ ID NO: 5013315 - DNA, 25 bp, Homo sapien
tatgtatcacacaatttgcgagcca

SEQ ID NO: 5013316 - DNA, 25 bp, Homo sapien
taaggttttatcaatgaccgtcatt

SEQ ID NO: 5013317 - DNA, 25 bp, Homo sapien
catcaagagtaaaacctactttcca

SEQ ID NO: 5013318 - DNA, 25 bp, Homo sapien
aattttaggtaactcacatagggct

SEQ ID NO: 5013319 - DNA, 25 bp, Homo sapien
gaaacaggtacattcctaaacatga

SEQ ID NO: 5013320 - DNA, 25 bp, Homo sapien
catattcattcacgtaaattgagca

SEQ ID NO: 5013321 - DNA, 25 bp, Homo sapien
gagcacatgtacactaagaactgtt

SEQ ID NO: 5013322 - DNA, 25 bp, Homo sapien
ttccagaaggaatatgacatagcat

SEQ ID NO: 5013323 - DNA, 25 bp, Homo sapien
cagtaagcagttcaagcaaaatgca

SEQ ID NO: 5013324 - DNA, 25 bp, Homo sapien
tctgatcagttacctttgagaagaa

SEQ ID NO: 5013325 - DNA, 25 bp, Homo sapien
ggcagtgcgagagctgattccataa

SEQ ID NO: 5013326 - DNA, 25 bp, Homo sapien
ggtacatataatcctgagctacagc

SEQ ID NO: 5013327 - DNA, 25 bp, Homo sapien
cccaaagtcttgaaacgattataca

SEQ ID NO: 5013328 - DNA, 25 bp, Homo sapien
tccagagtagcttaccaagaactgc

SEQ ID NO: 5013329 - DNA, 25 bp, Homo sapien
gaactgctagacactctcacctgca

SEQ ID NO: 5013330 - DNA, 25 bp, Homo sapien
ttgttcataaaagactcccaaagtc

SEQ ID NO: 5013331 - DNA, 25 bp, Homo sapien
ttatgcaaaactgtgttctggataa

SEQ ID NO: 5013332 - DNA, 25 bp, Homo sapien
tatgcaaaactgtgttctggataac

SEQ ID NO: 5013333 - DNA, 25 bp, Homo sapien
tgcaaaactgtgttctggataactg

SEQ ID NO: 5013334 - DNA, 25 bp, Homo sapien
caaaactgtgttctggataactgac

SEQ ID NO: 5013335 - DNA, 25 bp, Homo sapien
taaggcagatcaatcctaggagata

SEQ ID NO: 5013336 - DNA, 25 bp, Homo sapien
caataacaagctcggataaggcaga

SEQ ID NO: 5013337 - DNA, 25 bp, Homo sapien
ggagataagcaattgcccaagaaac

SEQ ID NO: 5013338 - DNA, 25 bp, Homo sapien
tcgaaatcgccttgcaaaatctggg

SEQ ID NO: 5013339 - DNA, 25 bp, Homo sapien
cattccaatggtaatatatgcacag

SEQ ID NO: 5013340 - DNA, 25 bp, Homo sapien
tggaagtgcactacccactgaggag

SEQ ID NO: 5013341 - DNA, 25 bp, Homo sapien
cacagcagcgtcttcgtggaagtgc

SEQ ID NO: 5013342 - DNA, 25 bp, Homo sapien
tatatgcacagcagcgtcttcgtgg

SEQ ID NO: 5013343 - DNA, 25 bp, Homo sapien
caagccttggtcattgataatatcc

SEQ ID NO: 5013344 - DNA, 25 bp, Homo sapien
gtagtacctactaatctcccaagat

SEQ ID NO: 5013345 - DNA, 25 bp, Homo sapien
taatatccacagaaatccattgtag

SEQ ID NO: 5013346 - DNA, 25 bp, Homo sapien
taatgggtgacaaaatcgttcaggg

SEQ ID NO: 5013347 - DNA, 25 bp, Homo sapien
gtgtataataccagtttgacagtta

SEQ ID NO: 5013348 - DNA, 25 bp, Homo sapien
ggtaccaggatggtagataccctgg

SEQ ID NO: 5013349 - DNA, 25 bp, Homo sapien
ctttgatggtttagataggtgtata

SEQ ID NO: 5013350 - DNA, 25 bp, Homo sapien
caggatggtagataccctgggtttt

SEQ ID NO: 5013351 - DNA, 25 bp, Homo sapien
gcattttgccagagtgttgaacctc

SEQ ID NO: 5013352 - DNA, 25 bp, Homo sapien
cattttgccagagtgttgaacctca

SEQ ID NO: 5013353 - DNA, 25 bp, Homo sapien
ttcagaaataagcattactgggcca

SEQ ID NO: 5013354 - DNA, 25 bp, Homo sapien
tgggccaaggttaattatccgtcta

SEQ ID NO: 5013355 - DNA, 25 bp, Homo sapien
acagtgcccacacacgacccttgta

SEQ ID NO: 5013356 - DNA, 25 bp, Homo sapien
cgacccttgtaccttctggttggat

SEQ ID NO: 5013357 - DNA, 25 bp, Homo sapien
ttgggcatcctattcgccgagatgt

SEQ ID NO: 5013358 - DNA, 25 bp, Homo sapien
tcttgggcatcctattcgccgagat

SEQ ID NO: 5013359 - DNA, 25 bp, Homo sapien
gggcatcctattcgccgagatgtgt

SEQ ID NO: 5013360 - DNA, 25 bp, Homo sapien
gggtcttgggcatcctattcgccga

SEQ ID NO: 5013361 - DNA, 25 bp, Homo sapien
caattacaagggcatctaacatatt

SEQ ID NO: 5013362 - DNA, 25 bp, Homo sapien
caaatgagaagacaattacaagggc

SEQ ID NO: 5013363 - DNA, 25 bp, Homo sapien
caagggcatctaacatatttcttgc

SEQ ID NO: 5013364 - DNA, 25 bp, Homo sapien
aagacaattacaagggcatctaaca

SEQ ID NO: 5013365 - DNA, 25 bp, Homo sapien
tggaataccactggcgtctggactg

SEQ ID NO: 5013366 - DNA, 25 bp, Homo sapien
catgctggtgaagcttgccatccaa

SEQ ID NO: 5013367 - DNA, 25 bp, Homo sapien
cgtagcttcattgcaaactgtgcac

SEQ ID NO: 5013368 - DNA, 25 bp, Homo sapien
tgattagtgattggcacacacggca

SEQ ID NO: 5013369 - DNA, 25 bp, Homo sapien
gaatcaatccaagagatcaatagaa

SEQ ID NO: 5013370 - DNA, 25 bp, Homo sapien
ggcctggcccaccagataaatggaa

SEQ ID NO: 5013371 - DNA, 25 bp, Homo sapien
cctggcccaccagataaatggaatc

SEQ ID NO: 5013372 - DNA, 25 bp, Homo sapien
aatccaagagatcaatagaatgaca

SEQ ID NO: 5013373 - DNA, 25 bp, Homo sapien
tctggagattccacagttagtaaac

SEQ ID NO: 5013374 - DNA, 25 bp, Homo sapien
ttctggagattccacagttagtaaa

SEQ ID NO: 5013375 - DNA, 25 bp, Homo sapien
tccatctcctcttatatgggacttg

SEQ ID NO: 5013376 - DNA, 25 bp, Homo sapien
tcttatatgggacttgtaattctgg

SEQ ID NO: 5013377 - DNA, 25 bp, Homo sapien
gactccattgagatgtgctgcctga

SEQ ID NO: 5013378 - DNA, 25 bp, Homo sapien
tgcagaccagacattacagtatgag

SEQ ID NO: 5013379 - DNA, 25 bp, Homo sapien
gattgaaatggatgggttacctgca

SEQ ID NO: 5013380 - DNA, 25 bp, Homo sapien
cattatttagaggagcacatgcatc

SEQ ID NO: 5013381 - DNA, 25 bp, Homo sapien
tttggcactgctcccattgagaggt

SEQ ID NO: 5013382 - DNA, 25 bp, Homo sapien
tatagagaactagaacatgacaacc

SEQ ID NO: 5013383 - DNA, 25 bp, Homo sapien
cctcattaagggatggtagcaaatc

SEQ ID NO: 5013384 - DNA, 25 bp, Homo sapien
acttaggtcatcttgtattcaggca

SEQ ID NO: 5013385 - DNA, 25 bp, Homo sapien
gcatgtggtaagagtccctggatct

SEQ ID NO: 5013386 - DNA, 25 bp, Homo sapien
gtgcatgtggtaagagtccctggat

SEQ ID NO: 5013387 - DNA, 25 bp, Homo sapien
tgcatgtggtaagagtccctggatc

SEQ ID NO: 5013388 - DNA, 25 bp, Homo sapien
tacggtggggcggtgggagtgacat

SEQ ID NO: 5013389 - DNA, 25 bp, Homo sapien
acagcagaggcgagcgttcgtccac

SEQ ID NO: 5013390 - DNA, 25 bp, Homo sapien
gctttcttgcaagtacggtggggcg

SEQ ID NO: 5013391 - DNA, 25 bp, Homo sapien
agaggcgagcgttcgtccaccccat

SEQ ID NO: 5013392 - DNA, 25 bp, Homo sapien
ccgagccggggttgcggcctcggcg

SEQ ID NO: 5013393 - DNA, 25 bp, Homo sapien
ggcctcggcggagtggtggctactg

SEQ ID NO: 5013394 - DNA, 25 bp, Homo sapien
cggcggagtggtggctactgctgct

SEQ ID NO: 5013395 - DNA, 25 bp, Homo sapien
ttgcggcctcggcggagtggtggct

SEQ ID NO: 5013396 - DNA, 25 bp, Homo sapien
tgaggctagctgtagatttcagtga

SEQ ID NO: 5013397 - DNA, 25 bp, Homo sapien
caagatgcctgagagagtcaaaaac

SEQ ID NO: 5013398 - DNA, 25 bp, Homo sapien
tacattaggaaggatcctcactctg

SEQ ID NO: 5013399 - DNA, 25 bp, Homo sapien
ggcaaagcagaagttagacatacga

SEQ ID NO: 5013400 - DNA, 25 bp, Homo sapien
gatacaatacaatataaggatccct

SEQ ID NO: 5013401 - DNA, 25 bp, Homo sapien
ataagggcatttctaggtctccagg

SEQ ID NO: 5013402 - DNA, 25 bp, Homo sapien
tcttttgtggatcagtagcatcagg

SEQ ID NO: 5013403 - DNA, 25 bp, Homo sapien
gaatcaagatgtagcacttcctgca

SEQ ID NO: 5013404 - DNA, 25 bp, Homo sapien
cagttttgccatctgactgatcaat

SEQ ID NO: 5013405 - DNA, 25 bp, Homo sapien
agttttgccatctgactgatcaatt

SEQ ID NO: 5013406 - DNA, 25 bp, Homo sapien
ttgccatctgactgatcaatttttt

SEQ ID NO: 5013407 - DNA, 25 bp, Homo sapien
ttttgccatctgactgatcaatttt

SEQ ID NO: 5013408 - DNA, 25 bp, Homo sapien
cttttttgcccatgtagtgatcagt

SEQ ID NO: 5013409 - DNA, 25 bp, Homo sapien
cccatgtagtgatcagtataaaggt

SEQ ID NO: 5013410 - DNA, 25 bp, Homo sapien
ggtttctctactgcagaactcattt

SEQ ID NO: 5013411 - DNA, 25 bp, Homo sapien
ggctcatgacagttactcttcttac

SEQ ID NO: 5013412 - DNA, 25 bp, Homo sapien
caatccaggtgcagtcaaaattcct

SEQ ID NO: 5013413 - DNA, 25 bp, Homo sapien
tacagcatctgttgatccagagacc

SEQ ID NO: 5013414 - DNA, 25 bp, Homo sapien
aactaaaaggacgaagcatgtgccc

SEQ ID NO: 5013415 - DNA, 25 bp, Homo sapien
tccagagacctgtgaactaaaagga

SEQ ID NO: 5013416 - DNA, 25 bp, Homo sapien
cagtgtttatcgcagtacctggagc

SEQ ID NO: 5013417 - DNA, 25 bp, Homo sapien
ggagattgctaacccttgttcaaga

SEQ ID NO: 5013418 - DNA, 25 bp, Homo sapien
gccaagcttaaggatatgcccggaa

SEQ ID NO: 5013419 - DNA, 25 bp, Homo sapien
ccacagggtatcaggatgaggaacc

SEQ ID NO: 5013420 - DNA, 25 bp, Homo sapien
tgtattgaggaataacaagcccaca

SEQ ID NO: 5013421 - DNA, 25 bp, Homo sapien
ctcaaattctccgaagagtgggcag

SEQ ID NO: 5013422 - DNA, 25 bp, Homo sapien
cccagaataagatgaaggacttgcc

SEQ ID NO: 5013423 - DNA, 25 bp, Homo sapien
gcatctatgtgcttggtcccagcag

SEQ ID NO: 5013424 - DNA, 25 bp, Homo sapien
tgttgacctcaagaacacattacgg

SEQ ID NO: 5013425 - DNA, 25 bp, Homo sapien
gatacgtatgaggttgatggcactg

SEQ ID NO: 5013426 - DNA, 25 bp, Homo sapien
tggcactggaaactagaatgctgct

SEQ ID NO: 5013427 - DNA, 25 bp, Homo sapien
cacattacggtagcttcgatcagag

SEQ ID NO: 5013428 - DNA, 25 bp, Homo sapien
aacccagagaaccaacttaattgtg

SEQ ID NO: 5013429 - DNA, 25 bp, Homo sapien
tccggagaatcttaatacacactag

SEQ ID NO: 5013430 - DNA, 25 bp, Homo sapien
cttgagagaaaggtccagttggcac

SEQ ID NO: 5013431 - DNA, 25 bp, Homo sapien
gaagttggcagaaagtatgtagagt

SEQ ID NO: 5013432 - DNA, 25 bp, Homo sapien
tcacccggatatgtctagatgctgc

SEQ ID NO: 5013433 - DNA, 25 bp, Homo sapien
aatatattgaacatgtggtatgccc

SEQ ID NO: 5013434 - DNA, 25 bp, Homo sapien
tagattgtatctcctggaccggccc

SEQ ID NO: 5013435 - DNA, 25 bp, Homo sapien
cagaaaatgaggatgtatccacccc

SEQ ID NO: 5013436 - DNA, 25 bp, Homo sapien
catcgcgcataggtgtttaagctcc

SEQ ID NO: 5013437 - DNA, 25 bp, Homo sapien
gattttgtggccaatccagcgtgcg

SEQ ID NO: 5013438 - DNA, 25 bp, Homo sapien
tctatatccgtttcaagaggaggca

SEQ ID NO: 5013439 - DNA, 25 bp, Homo sapien
tagtaccctctttatcatcgcgcat

SEQ ID NO: 5013440 - DNA, 25 bp, Homo sapien
tttatggctgactcggctctggcgc

SEQ ID NO: 5013441 - DNA, 25 bp, Homo sapien
gcagggaatgaaatagacgttgaaa

SEQ ID NO: 5013442 - DNA, 25 bp, Homo sapien
gtcagggccaagagcctagcgcgta

SEQ ID NO: 5013443 - DNA, 25 bp, Homo sapien
tctggcgctctagccaattccgagg

SEQ ID NO: 5013444 - DNA, 25 bp, Homo sapien
gtgctttattaacaagttgtaatga

SEQ ID NO: 5013445 - DNA, 25 bp, Homo sapien
ggtattacctatgaagtaagtatac

SEQ ID NO: 5013446 - DNA, 25 bp, Homo sapien
tcatttaacctcagtaacacactgt

SEQ ID NO: 5013447 - DNA, 25 bp, Homo sapien
tatcgttggatctaatatatatgtg

SEQ ID NO: 5013448 - DNA, 25 bp, Homo sapien
aacatacaactttgtgcatttgtgg

SEQ ID NO: 5013449 - DNA, 25 bp, Homo sapien
tgcaaatggaaacatcaacagacta

SEQ ID NO: 5013450 - DNA, 25 bp, Homo sapien
tacagtctaatcatatcaccactat

SEQ ID NO: 5013451 - DNA, 25 bp, Homo sapien
gaaaaaccaatgattcataacaatg

SEQ ID NO: 5013452 - DNA, 25 bp, Homo sapien
cagctcagatatcaactcctcagga

SEQ ID NO: 5013453 - DNA, 25 bp, Homo sapien
tctttatggcacttaccactgtaat

SEQ ID NO: 5013454 - DNA, 25 bp, Homo sapien
ttttcctcacaactcagtcaaagta

SEQ ID NO: 5013455 - DNA, 25 bp, Homo sapien
ccaagagcagtccttggcaaataat

SEQ ID NO: 5013456 - DNA, 25 bp, Homo sapien
ggatgagatcatcactacttaggtt

SEQ ID NO: 5013457 - DNA, 25 bp, Homo sapien
taggttcagagatacattatctttc

SEQ ID NO: 5013458 - DNA, 25 bp, Homo sapien
tcatgaacttcactatatgtgttgt

SEQ ID NO: 5013459 - DNA, 25 bp, Homo sapien
tttctaactcctggatgagatcatc

SEQ ID NO: 5013460 - DNA, 25 bp, Homo sapien
tccagacttgctccatctggcatca

SEQ ID NO: 5013461 - DNA, 25 bp, Homo sapien
gacttgctccatctggcatcagcat

SEQ ID NO: 5013462 - DNA, 25 bp, Homo sapien
tctttccagacttgctccatctggc

SEQ ID NO: 5013463 - DNA, 25 bp, Homo sapien
cagacttgctccatctggcatcagc

SEQ ID NO: 5013464 - DNA, 25 bp, Homo sapien
tataactactccacaacttgagcct

SEQ ID NO: 5013465 - DNA, 25 bp, Homo sapien
cttcagtggaaattatcagcacaga

SEQ ID NO: 5013466 - DNA, 25 bp, Homo sapien
ccaaagaacaaggtaaatgcttcag

SEQ ID NO: 5013467 - DNA, 25 bp, Homo sapien
aatttgattgcaccagtttgtcagc

SEQ ID NO: 5013468 - DNA, 25 bp, Homo sapien
gtagagcccgtgaatatatccaaat

SEQ ID NO: 5013469 - DNA, 25 bp, Homo sapien
ttcatgcaccgggtttgtagagccc

SEQ ID NO: 5013470 - DNA, 25 bp, Homo sapien
ttaacattcatgcaccgggtttgta

SEQ ID NO: 5013471 - DNA, 25 bp, Homo sapien
caccgggtttgtagagcccgtgaat

SEQ ID NO: 5013472 - DNA, 25 bp, Homo sapien
gatcttcagacccaatagctctaat

SEQ ID NO: 5013473 - DNA, 25 bp, Homo sapien
ctgtgaatattggaaatgcttagga

SEQ ID NO: 5013474 - DNA, 25 bp, Homo sapien
cataatcgaaagaaacgggtatcca

SEQ ID NO: 5013475 - DNA, 25 bp, Homo sapien
tcaggaatgttttcataatcgaaag

SEQ ID NO: 5013476 - DNA, 25 bp, Homo sapien
attcatcacacttattaactagaaa

SEQ ID NO: 5013477 - DNA, 25 bp, Homo sapien
tgtgcgtgacaacccattcatcaca

SEQ ID NO: 5013478 - DNA, 25 bp, Homo sapien
ggaaggcacaactcatacatgtgcg

SEQ ID NO: 5013479 - DNA, 25 bp, Homo sapien
ataggtaatgtaccgatgtcgtaac

SEQ ID NO: 5013480 - DNA, 25 bp, Homo sapien
agtgtttgggtattcatctgctgac

SEQ ID NO: 5013481 - DNA, 25 bp, Homo sapien
caaatattagaacagctactggcac

SEQ ID NO: 5013482 - DNA, 25 bp, Homo sapien
gctagtgttaacctaatgaaactgg

SEQ ID NO: 5013483 - DNA, 25 bp, Homo sapien
gacagattactaccatcatagtggc

SEQ ID NO: 5013484 - DNA, 25 bp, Homo sapien
tagaaatcctactctacgattgtag

SEQ ID NO: 5013485 - DNA, 25 bp, Homo sapien
tcttctcatctaatagaaatcctac

SEQ ID NO: 5013486 - DNA, 25 bp, Homo sapien
cgattgtagtttcctccagttagaa

SEQ ID NO: 5013487 - DNA, 25 bp, Homo sapien
cctactctacgattgtagtttcctc

SEQ ID NO: 5013488 - DNA, 25 bp, Homo sapien
ctcttctctattaaggacaatggaa

SEQ ID NO: 5013489 - DNA, 25 bp, Homo sapien
gaaaaatcagtgtcctttggttgag

SEQ ID NO: 5013490 - DNA, 25 bp, Homo sapien
tctcttctctattaaggacaatgga

SEQ ID NO: 5013491 - DNA, 25 bp, Homo sapien
aatcagtgtcctttggttgagtttc

SEQ ID NO: 5013492 - DNA, 25 bp, Homo sapien
tgttagtgtcaattgccttgggaac

SEQ ID NO: 5013493 - DNA, 25 bp, Homo sapien
tttacctctacctacatccctgtta

SEQ ID NO: 5013494 - DNA, 25 bp, Homo sapien
tacctacatccctgttagtgtcaat

SEQ ID NO: 5013495 - DNA, 25 bp, Homo sapien
gttagtgtcaattgccttgggaact

SEQ ID NO: 5013496 - DNA, 25 bp, Homo sapien
cccattggtaggaggggtgaggact

SEQ ID NO: 5013497 - DNA, 25 bp, Homo sapien
tcactcaagggatgcccattggtag

SEQ ID NO: 5013498 - DNA, 25 bp, Homo sapien
caagggatgcccattggtaggaggg

SEQ ID NO: 5013499 - DNA, 25 bp, Homo sapien
aacagagtgcaggatttccttgaca

SEQ ID NO: 5013500 - DNA, 25 bp, Homo sapien
tgaaagagcaagcctgcaaatgtgc

SEQ ID NO: 5013501 - DNA, 25 bp, Homo sapien
gaaagagcaagcctgcaaatgtgct

SEQ ID NO: 5013502 - DNA, 25 bp, Homo sapien
aagagcaagcctgcaaatgtgctcc

SEQ ID NO: 5013503 - DNA, 25 bp, Homo sapien
agcaagcctgcaaatgtgctccttt

SEQ ID NO: 5013504 - DNA, 25 bp, Homo sapien
tgtatccgtcaatgccatttttgaa

SEQ ID NO: 5013505 - DNA, 25 bp, Homo sapien
tgtgacattcctttctgtatccgtc

SEQ ID NO: 5013506 - DNA, 25 bp, Homo sapien
cactcttccttgtactgtgacattc

SEQ ID NO: 5013507 - DNA, 25 bp, Homo sapien
tcctttctgtatccgtcaatgccat

SEQ ID NO: 5013508 - DNA, 25 bp, Homo sapien
gtgtctcccttaagcagagtcacaa

SEQ ID NO: 5013509 - DNA, 25 bp, Homo sapien
ggcaacggctgtatggcccatgctg

SEQ ID NO: 5013510 - DNA, 25 bp, Homo sapien
tgattttcaagcatgcattcaggga

SEQ ID NO: 5013511 - DNA, 25 bp, Homo sapien
tcgacatctatggagctgggcaacg

SEQ ID NO: 5013512 - DNA, 25 bp, Homo sapien
gcttgacgcctctggtaggaaccat

SEQ ID NO: 5013513 - DNA, 25 bp, Homo sapien
gaaccatcgggaatgctttagccca

SEQ ID NO: 5013514 - DNA, 25 bp, Homo sapien
ttggcttgacgcctctggtaggaac

SEQ ID NO: 5013515 - DNA, 25 bp, Homo sapien
gcctctggtaggaaccatcgggaat

SEQ ID NO: 5013516 - DNA, 25 bp, Homo sapien
tccaatgctccatagtaaaatgaga

SEQ ID NO: 5013517 - DNA, 25 bp, Homo sapien
gaaatcttcattaagttgtaggtca

SEQ ID NO: 5013518 - DNA, 25 bp, Homo sapien
agttgtaggtcataggcatctctcc

SEQ ID NO: 5013519 - DNA, 25 bp, Homo sapien
gattttttgatattccaatgctcca

SEQ ID NO: 5013520 - DNA, 25 bp, Homo sapien
gaccagggtcctacctatattttga

SEQ ID NO: 5013521 - DNA, 25 bp, Homo sapien
gagagagtatcagtccaagaggaag

SEQ ID NO: 5013522 - DNA, 25 bp, Homo sapien
aagagtctgccttctgaaaattcca

SEQ ID NO: 5013523 - DNA, 25 bp, Homo sapien
gtttctgaattatgctccctatgaa

SEQ ID NO: 5013524 - DNA, 25 bp, Homo sapien
ggttgccaaatgagctgctgacaac

SEQ ID NO: 5013525 - DNA, 25 bp, Homo sapien
cgggttgccaaatgagctgctgaca

SEQ ID NO: 5013526 - DNA, 25 bp, Homo sapien
gggttgccaaatgagctgctgacaa

SEQ ID NO: 5013527 - DNA, 25 bp, Homo sapien
gttgccaaatgagctgctgacaacc

SEQ ID NO: 5013528 - DNA, 25 bp, Homo sapien
ttgcaatctgccctccaggtatcac

SEQ ID NO: 5013529 - DNA, 25 bp, Homo sapien
tgataacgagcccttcatagtgctt

SEQ ID NO: 5013530 - DNA, 25 bp, Homo sapien
cagcttcatctcgtatgatcaccct

SEQ ID NO: 5013531 - DNA, 25 bp, Homo sapien
tgaccttcaaggcccttgcaatctg

SEQ ID NO: 5013532 - DNA, 25 bp, Homo sapien
gagacctggtgcctgtcgttgtatg

SEQ ID NO: 5013533 - DNA, 25 bp, Homo sapien
aaatgaccctaagtagcagttgtgc

SEQ ID NO: 5013534 - DNA, 25 bp, Homo sapien
tttatactgctctttggcaagccaa

SEQ ID NO: 5013535 - DNA, 25 bp, Homo sapien
gcaagccaaagggagattttaagaa

SEQ ID NO: 5013536 - DNA, 25 bp, Homo sapien
ccaggtgtggaacagctggtaaatg

SEQ ID NO: 5013537 - DNA, 25 bp, Homo sapien
gataaattgaagagggatgtttctg

SEQ ID NO: 5013538 - DNA, 25 bp, Homo sapien
aggtgtggaacagctggtaaatgcc

SEQ ID NO: 5013539 - DNA, 25 bp, Homo sapien
agccctgtcacctggcatctgagtc

SEQ ID NO: 5013540 - DNA, 25 bp, Homo sapien
ggctgagagctgtattgtgcccact

SEQ ID NO: 5013541 - DNA, 25 bp, Homo sapien
ttccctgcaggatgaaaaggagtcc

SEQ ID NO: 5013542 - DNA, 25 bp, Homo sapien
tgtgggcaatagcttaattcagtcc

SEQ ID NO: 5013543 - DNA, 25 bp, Homo sapien
agtccttaactgtgttcttgccgag

SEQ ID NO: 5013544 - DNA, 25 bp, Homo sapien
acttcctgcttacggccacagctgt

SEQ ID NO: 5013545 - DNA, 25 bp, Homo sapien
tcacttcctgcttacggccacagct

SEQ ID NO: 5013546 - DNA, 25 bp, Homo sapien
ctgcatctggtccaccaaaagaagg

SEQ ID NO: 5013547 - DNA, 25 bp, Homo sapien
tgcatctggtccaccaaaagaaggg

SEQ ID NO: 5013548 - DNA, 25 bp, Homo sapien
gcatatacttcaccccgtttgcatt

SEQ ID NO: 5013549 - DNA, 25 bp, Homo sapien
tcaccccgtttgcatttctcacaaa

SEQ ID NO: 5013550 - DNA, 25 bp, Homo sapien
ttcccctgcctctgactggtctggc

SEQ ID NO: 5013551 - DNA, 25 bp, Homo sapien
ttcttccaactttgcatatacttca

SEQ ID NO: 5013552 - DNA, 25 bp, Homo sapien
agtgaacaccacagccggatgctca

SEQ ID NO: 5013553 - DNA, 25 bp, Homo sapien
ccatgtgagagatcgtgcttagcca

SEQ ID NO: 5013554 - DNA, 25 bp, Homo sapien
agccaaaggagaagacgtgagccag

SEQ ID NO: 5013555 - DNA, 25 bp, Homo sapien
gatgctcagaggcagatacagccaa

SEQ ID NO: 5013556 - DNA, 25 bp, Homo sapien
cttgattttcatagtacctgagttc

SEQ ID NO: 5013557 - DNA, 25 bp, Homo sapien
ttgattttcatagtacctgagttct

SEQ ID NO: 5013558 - DNA, 25 bp, Homo sapien
ttgtctttatacaggttggaaactc

SEQ ID NO: 5013559 - DNA, 25 bp, Homo sapien
caagtggcaatatttagactttgca

SEQ ID NO: 5013560 - DNA, 25 bp, Homo sapien
tgcttgggccaaaagtgaacaccca

SEQ ID NO: 5013561 - DNA, 25 bp, Homo sapien
taagatgagctgatcaggttcttcc

SEQ ID NO: 5013562 - DNA, 25 bp, Homo sapien
cagtgacttgtgagcctggatcaaa

SEQ ID NO: 5013563 - DNA, 25 bp, Homo sapien
cagatactccataagtgtagatgtt

SEQ ID NO: 5013564 - DNA, 25 bp, Homo sapien
caattttcactacgtcaactgctga

SEQ ID NO: 5013565 - DNA, 25 bp, Homo sapien
caggaacaagctccttaagcacaat

SEQ ID NO: 5013566 - DNA, 25 bp, Homo sapien
acattggaagcaatacagatactcc

SEQ ID NO: 5013567 - DNA, 25 bp, Homo sapien
caagaagcaagtggtacaaccctgc

SEQ ID NO: 5013568 - DNA, 25 bp, Homo sapien
aagaagcaagtggtacaaccctgca

SEQ ID NO: 5013569 - DNA, 25 bp, Homo sapien
ttatggaaacatcccacatcagaga

SEQ ID NO: 5013570 - DNA, 25 bp, Homo sapien
gtagttatggaaacatcccacatca

SEQ ID NO: 5013571 - DNA, 25 bp, Homo sapien
aagggtgttacattcctgcacctca

SEQ ID NO: 5013572 - DNA, 25 bp, Homo sapien
tgccaccaagggtgttacattcctg

SEQ ID NO: 5013573 - DNA, 25 bp, Homo sapien
ccatgccaccaagggtgttacattc

SEQ ID NO: 5013574 - DNA, 25 bp, Homo sapien
caccaagggtgttacattcctgcac

SEQ ID NO: 5013575 - DNA, 25 bp, Homo sapien
accaagcctgatgcccccaaagtcc

SEQ ID NO: 5013576 - DNA, 25 bp, Homo sapien
ccacatcaaggtgaccaccaagcct

SEQ ID NO: 5013577 - DNA, 25 bp, Homo sapien
accacatcaaggtgaccaccaagcc

SEQ ID NO: 5013578 - DNA, 25 bp, Homo sapien
ggctgcccctgagtgccagggccat

SEQ ID NO: 5013579 - DNA, 25 bp, Homo sapien
tgggcagggccacaatccagacaat

SEQ ID NO: 5013580 - DNA, 25 bp, Homo sapien
aatggggagacccaggctgcccctg

SEQ ID NO: 5013581 - DNA, 25 bp, Homo sapien
ccacaatccagacaatggggagacc

SEQ ID NO: 5013582 - DNA, 25 bp, Homo sapien
ggattaagaatctccctcaaaactg

SEQ ID NO: 5013583 - DNA, 25 bp, Homo sapien
ttaagaatctccctcaaaactgctc

SEQ ID NO: 5013584 - DNA, 25 bp, Homo sapien
aagaatctccctcaaaactgctcaa

SEQ ID NO: 5013585 - DNA, 25 bp, Homo sapien
gaatctccctcaaaactgctcaact

SEQ ID NO: 5013586 - DNA, 25 bp, Homo sapien
tcgacagatgtcctaccaaggataa

SEQ ID NO: 5013587 - DNA, 25 bp, Homo sapien
ttagtgacaatcgacagatgtccta

SEQ ID NO: 5013588 - DNA, 25 bp, Homo sapien
gtgacaatcgacagatgtcctacca

SEQ ID NO: 5013589 - DNA, 25 bp, Homo sapien
caatcgacagatgtcctaccaagga

SEQ ID NO: 5013590 - DNA, 25 bp, Homo sapien
aattctgagcatgagggtataaatc

SEQ ID NO: 5013591 - DNA, 25 bp, Homo sapien
aagattcaacgtggaaattctgagc

SEQ ID NO: 5013592 - DNA, 25 bp, Homo sapien
tgtcaacattcgtaaaagtctgatt

SEQ ID NO: 5013593 - DNA, 25 bp, Homo sapien
cagtgaaagattcaacgtggaaatt

SEQ ID NO: 5013594 - DNA, 25 bp, Homo sapien
tctcatcagatctgtattgattctg

SEQ ID NO: 5013595 - DNA, 25 bp, Homo sapien
tcccggacagcaggcttacaagctt

SEQ ID NO: 5013596 - DNA, 25 bp, Homo sapien
tctgtggccccaactgactggttca

SEQ ID NO: 5013597 - DNA, 25 bp, Homo sapien
ggttcaggtagctaatctcatcaga

SEQ ID NO: 5013598 - DNA, 25 bp, Homo sapien
ctgataattctgcacctcttctaag

SEQ ID NO: 5013599 - DNA, 25 bp, Homo sapien
ccagggcagtactgctggcctttga

SEQ ID NO: 5013600 - DNA, 25 bp, Homo sapien
ggcagtactgctggcctttgactcc

SEQ ID NO: 5013601 - DNA, 25 bp, Homo sapien
cagggcagtactgctggcctttgac

SEQ ID NO: 5013602 - DNA, 25 bp, Homo sapien
gggcagtactgctggcctttgactc

SEQ ID NO: 5013603 - DNA, 25 bp, Homo sapien
agccagccggcaagaacaggcaggc

SEQ ID NO: 5013604 - DNA, 25 bp, Homo sapien
cgagccagccggcaagaacaggcag

SEQ ID NO: 5013605 - DNA, 25 bp, Homo sapien
ccagcacagatggcatgagtgtttc

SEQ ID NO: 5013606 - DNA, 25 bp, Homo sapien
catgagtgtttctgccgagccagcc

SEQ ID NO: 5013607 - DNA, 25 bp, Homo sapien
gaaccaagggttggcatcctggata

SEQ ID NO: 5013608 - DNA, 25 bp, Homo sapien
tatcactcctggtccaaccatgtca

SEQ ID NO: 5013609 - DNA, 25 bp, Homo sapien
tcctggtccaaccatgtcaggagcc

SEQ ID NO: 5013610 - DNA, 25 bp, Homo sapien
gaatcttcttgtccactatcactcc

SEQ ID NO: 5013611 - DNA, 25 bp, Homo sapien
tagttgctgctttgttatgctccat

SEQ ID NO: 5013612 - DNA, 25 bp, Homo sapien
gtcaatcctattagttgctgctttg

SEQ ID NO: 5013613 - DNA, 25 bp, Homo sapien
ctggtcaatcctattagttgctgct

SEQ ID NO: 5013614 - DNA, 25 bp, Homo sapien
cctattagttgctgctttgttatgc

SEQ ID NO: 5013615 - DNA, 25 bp, Homo sapien
caataagcacaaggataaacatggc

SEQ ID NO: 5013616 - DNA, 25 bp, Homo sapien
cattcgcatgttgctcctactgaga

SEQ ID NO: 5013617 - DNA, 25 bp, Homo sapien
catcagtggaccctaaagttagctg

SEQ ID NO: 5013618 - DNA, 25 bp, Homo sapien
tgatttggaaagctttacagccact

SEQ ID NO: 5013619 - DNA, 25 bp, Homo sapien
agcaactaagcggtggcaagtcacc

SEQ ID NO: 5013620 - DNA, 25 bp, Homo sapien
gcactgttggagcaactaagcggtg

SEQ ID NO: 5013621 - DNA, 25 bp, Homo sapien
actgttggagcaactaagcggtggc

SEQ ID NO: 5013622 - DNA, 25 bp, Homo sapien
caactaagcggtggcaagtcaccac

SEQ ID NO: 5013623 - DNA, 25 bp, Homo sapien
gaacccagctggcacaagaaggaaa

SEQ ID NO: 5013624 - DNA, 25 bp, Homo sapien
ggaagtctcatactgttcgcgtaaa

SEQ ID NO: 5013625 - DNA, 25 bp, Homo sapien
gaaactagagggctccaagtcaccc

SEQ ID NO: 5013626 - DNA, 25 bp, Homo sapien
aataggcaacttgggtcaggctggc

SEQ ID NO: 5013627 - DNA, 25 bp, Homo sapien
tactcaacacgcatggataagccaa

SEQ ID NO: 5013628 - DNA, 25 bp, Homo sapien
ggaattcggacaacatggagtcgct

SEQ ID NO: 5013629 - DNA, 25 bp, Homo sapien
ccattcgggtatgcacaaggcagcc

SEQ ID NO: 5013630 - DNA, 25 bp, Homo sapien
tattccagacgtaggcatgctttgc

SEQ ID NO: 5013631 - DNA, 25 bp, Homo sapien
aaaaagtaatgagacgtactgtact

SEQ ID NO: 5013632 - DNA, 25 bp, Homo sapien
gagacgtactgtactaatccttatt

SEQ ID NO: 5013633 - DNA, 25 bp, Homo sapien
gtatttgttttcactcagggtgccc

SEQ ID NO: 5013634 - DNA, 25 bp, Homo sapien
taatgagacgtactgtactaatcct

SEQ ID NO: 5013635 - DNA, 25 bp, Homo sapien
ttaacccttcgtagcctagaacata

SEQ ID NO: 5013636 - DNA, 25 bp, Homo sapien
ggtatgacatacctcatttttggga

SEQ ID NO: 5013637 - DNA, 25 bp, Homo sapien
tcgtagcctagaacatataatagct

SEQ ID NO: 5013638 - DNA, 25 bp, Homo sapien
ctagagataaagacgtgtgggtatg

SEQ ID NO: 5013639 - DNA, 25 bp, Homo sapien
tgggagcaccatgataaaatataac

SEQ ID NO: 5013640 - DNA, 25 bp, Homo sapien
cagtgtcacaagcagactagaaagc

SEQ ID NO: 5013641 - DNA, 25 bp, Homo sapien
cccgccccaaagctaatggattgtt

SEQ ID NO: 5013642 - DNA, 25 bp, Homo sapien
ggcagatggacttccaacatgtaga

SEQ ID NO: 5013643 - DNA, 25 bp, Homo sapien
gaacatgtttaacctgctgatcatt

SEQ ID NO: 5013644 - DNA, 25 bp, Homo sapien
tgtttaacctgctgatcatttggaa

SEQ ID NO: 5013645 - DNA, 25 bp, Homo sapien
gaaagtagtactggtgcttttcaaa

SEQ ID NO: 5013646 - DNA, 25 bp, Homo sapien
gctgatcatttggaaagtagtactg

SEQ ID NO: 5013647 - DNA, 25 bp, Homo sapien
agatcagtctttggctgacttccct

SEQ ID NO: 5013648 - DNA, 25 bp, Homo sapien
cagatcagtctttggctgacttccc

SEQ ID NO: 5013649 - DNA, 25 bp, Homo sapien
ttggctgacttccctttttgtaaga

SEQ ID NO: 5013650 - DNA, 25 bp, Homo sapien
tccctttttgtaagaatactgtata

SEQ ID NO: 5013651 - DNA, 25 bp, Homo sapien
tgaaatagcagctccgaaagatagc

SEQ ID NO: 5013652 - DNA, 25 bp, Homo sapien
gcacatctgcgcgttttgtagcggg

SEQ ID NO: 5013653 - DNA, 25 bp, Homo sapien
taaacttgatgaaatggctctagca

SEQ ID NO: 5013654 - DNA, 25 bp, Homo sapien
aacaaaaagcatgcctagggagtca

SEQ ID NO: 5013655 - DNA, 25 bp, Homo sapien
ctcttgctgaagtactgaaatagga

SEQ ID NO: 5013656 - DNA, 25 bp, Homo sapien
taacagggaggaggtcaaatctatc

SEQ ID NO: 5013657 - DNA, 25 bp, Homo sapien
taagtcattacgacccgttactggc

SEQ ID NO: 5013658 - DNA, 25 bp, Homo sapien
cacctcaagatacagttaggttctc

SEQ ID NO: 5013659 - DNA, 25 bp, Homo sapien
tgttgggcgtgacagaggagctgac

SEQ ID NO: 5013660 - DNA, 25 bp, Homo sapien
tggtgtgtccatcgggctcccagcc

SEQ ID NO: 5013661 - DNA, 25 bp, Homo sapien
ccagccccgctgttgggcgtgacag

SEQ ID NO: 5013662 - DNA, 25 bp, Homo sapien
tggtggtgtgtccatcgggctccca

SEQ ID NO: 5013663 - DNA, 25 bp, Homo sapien
cagccactgcaggtttcactcgctt

SEQ ID NO: 5013664 - DNA, 25 bp, Homo sapien
ctcccagtctttgtgctggcaaaat

SEQ ID NO: 5013665 - DNA, 25 bp, Homo sapien
ctttacggccacaattccagcaact

SEQ ID NO: 5013666 - DNA, 25 bp, Homo sapien
tttgtgctggcaaaatgagccacag

SEQ ID NO: 5013667 - DNA, 25 bp, Homo sapien
ctgtgcaaaacgtgcaagggaattt

SEQ ID NO: 5013668 - DNA, 25 bp, Homo sapien
tgtgcaaaacgtgcaagggaatttt

SEQ ID NO: 5013669 - DNA, 25 bp, Homo sapien
cactgtgcaaaacgtgcaagggaat

SEQ ID NO: 5013670 - DNA, 25 bp, Homo sapien
tgcaaaacgtgcaagggaattttta

SEQ ID NO: 5013671 - DNA, 25 bp, Homo sapien
ctgccgtttggcctcggcgaccgtg

SEQ ID NO: 5013672 - DNA, 25 bp, Homo sapien
ttgataactgccagtgcgtcctccg

SEQ ID NO: 5013673 - DNA, 25 bp, Homo sapien
ggcgaccgtgcgctccatcttggcc

SEQ ID NO: 5013674 - DNA, 25 bp, Homo sapien
atcgcctggcgcttcacctcattga

SEQ ID NO: 5013675 - DNA, 25 bp, Homo sapien
taaaggacaaggtcattcgcaagaa

SEQ ID NO: 5013676 - DNA, 25 bp, Homo sapien
catgaatataggagggtccacaggt

SEQ ID NO: 5013677 - DNA, 25 bp, Homo sapien
tgtgtgccagtcaggccaaaccaga

SEQ ID NO: 5013678 - DNA, 25 bp, Homo sapien
tcagttagccgaagtcattggatac

SEQ ID NO: 5013679 - DNA, 25 bp, Homo sapien
catgttggatgccttgacactgaac

SEQ ID NO: 5013680 - DNA, 25 bp, Homo sapien
gttggatgccttgacactgaacact

SEQ ID NO: 5013681 - DNA, 25 bp, Homo sapien
tggatgccttgacactgaacactag

SEQ ID NO: 5013682 - DNA, 25 bp, Homo sapien
ttcatcatgttggatgccttgacac

SEQ ID NO: 5013683 - DNA, 25 bp, Homo sapien
gatctcctctggcacgtatccagac

SEQ ID NO: 5013684 - DNA, 25 bp, Homo sapien
gcctgtgaaggaattcccgatgcgc

SEQ ID NO: 5013685 - DNA, 25 bp, Homo sapien
tggcacgtatccagacgcaggcctg

SEQ ID NO: 5013686 - DNA, 25 bp, Homo sapien
ctgtgaaggaattcccgatgcgcgt

SEQ ID NO: 5013687 - DNA, 25 bp, Homo sapien
atgaaagatgctaattaccagcccc

SEQ ID NO: 5013688 - DNA, 25 bp, Homo sapien
gaagctagctattgaccatggaaca

SEQ ID NO: 5013689 - DNA, 25 bp, Homo sapien
ggtatccaaagtccatgcatgaaag

SEQ ID NO: 5013690 - DNA, 25 bp, Homo sapien
gaaagttagttctagcacccagtga

SEQ ID NO: 5013691 - DNA, 25 bp, Homo sapien
aaagacagtttttcaaaatagcaga

SEQ ID NO: 5013692 - DNA, 25 bp, Homo sapien
agacagtttttcaaaatagcagaat

SEQ ID NO: 5013693 - DNA, 25 bp, Homo sapien
aaaagacagtttttcaaaatagcag

SEQ ID NO: 5013694 - DNA, 25 bp, Homo sapien
taaaagacagtttttcaaaatagca

SEQ ID NO: 5013695 - DNA, 25 bp, Homo sapien
aacaagggacaattctctcctagga

SEQ ID NO: 5013696 - DNA, 25 bp, Homo sapien
aatgtagtggtagatgcaaagacag

SEQ ID NO: 5013697 - DNA, 25 bp, Homo sapien
acagaagaacgtctatgatatggtc

SEQ ID NO: 5013698 - DNA, 25 bp, Homo sapien
gaatactggctaatctaaacacatc

SEQ ID NO: 5013699 - DNA, 25 bp, Homo sapien
gcaagggccgccatcaatatacatg

SEQ ID NO: 5013700 - DNA, 25 bp, Homo sapien
gacaggatggagaccattggatact

SEQ ID NO: 5013701 - DNA, 25 bp, Homo sapien
atactagatactgcaagggccgcca

SEQ ID NO: 5013702 - DNA, 25 bp, Homo sapien
tcaatatacatgaagggatgagctg

SEQ ID NO: 5013703 - DNA, 25 bp, Homo sapien
aggacagcaatgctcaaagctgggc

SEQ ID NO: 5013704 - DNA, 25 bp, Homo sapien
tatgacccaggacagcaatgctcaa

SEQ ID NO: 5013705 - DNA, 25 bp, Homo sapien
ggcagcacctaggtatggccttcat

SEQ ID NO: 5013706 - DNA, 25 bp, Homo sapien
ggagaagcaatgtgacctcatatga

SEQ ID NO: 5013707 - DNA, 25 bp, Homo sapien
agtgctgaaacgctgccatcagctc

SEQ ID NO: 5013708 - DNA, 25 bp, Homo sapien
tcagtgctgaaacgctgccatcagc

SEQ ID NO: 5013709 - DNA, 25 bp, Homo sapien
tgctgaaacgctgccatcagctcaa

SEQ ID NO: 5013710 - DNA, 25 bp, Homo sapien
gctgaaacgctgccatcagctcaat

SEQ ID NO: 5013711 - DNA, 25 bp, Homo sapien
agcataagaaatatgtgttttcgag

SEQ ID NO: 5013712 - DNA, 25 bp, Homo sapien
tcgagatactcatctgaagaaaagt

SEQ ID NO: 5013713 - DNA, 25 bp, Homo sapien
gaaatatgtgttttcgagatactca

SEQ ID NO: 5013714 - DNA, 25 bp, Homo sapien
tttcgagatactcatctgaagaaaa

SEQ ID NO: 5013715 - DNA, 25 bp, Homo sapien
tgggttgacgggactctgctgccta

SEQ ID NO: 5013716 - DNA, 25 bp, Homo sapien
tttttaagtcctcggcgtcactgta

SEQ ID NO: 5013717 - DNA, 25 bp, Homo sapien
cgccttagtacggtgagagatcgcc

SEQ ID NO: 5013718 - DNA, 25 bp, Homo sapien
tgtaccgccggatccagtaattcaa

SEQ ID NO: 5013719 - DNA, 25 bp, Homo sapien
tatgaacacgagtcagaagggaaat

SEQ ID NO: 5013720 - DNA, 25 bp, Homo sapien
aatttcacctgaaggcattatagcc

SEQ ID NO: 5013721 - DNA, 25 bp, Homo sapien
ttcacaatagaacagtagcccaccg

SEQ ID NO: 5013722 - DNA, 25 bp, Homo sapien
tagcccaccgatctggctttgagaa

SEQ ID NO: 5013723 - DNA, 25 bp, Homo sapien
ttagtctgtgatcaatcatttcttc

SEQ ID NO: 5013724 - DNA, 25 bp, Homo sapien
tcttcttgacgtgtgccatgcaacc

SEQ ID NO: 5013725 - DNA, 25 bp, Homo sapien
tctgtctgttagtctgtgatcaatc

SEQ ID NO: 5013726 - DNA, 25 bp, Homo sapien
cccattctctgtctgttagtctgtg

SEQ ID NO: 5013727 - DNA, 25 bp, Homo sapien
tctctcatttttcatggtagacatt

SEQ ID NO: 5013728 - DNA, 25 bp, Homo sapien
ctctctcatttttcatggtagacat

SEQ ID NO: 5013729 - DNA, 25 bp, Homo sapien
tcatttttcatggtagacatttgtt

SEQ ID NO: 5013730 - DNA, 25 bp, Homo sapien
tctcatttttcatggtagacatttg

SEQ ID NO: 5013731 - DNA, 25 bp, Homo sapien
cacagatttcaagcctcaagttaag

SEQ ID NO: 5013732 - DNA, 25 bp, Homo sapien
gaaataatggtgcaagtcttcaagc

SEQ ID NO: 5013733 - DNA, 25 bp, Homo sapien
tgagaatcttcatccctatcacaga

SEQ ID NO: 5013734 - DNA, 25 bp, Homo sapien
caagcacccaatcccgtaagaagtg

SEQ ID NO: 5013735 - DNA, 25 bp, Homo sapien
ggcaatggccatatcatccaaacgg

SEQ ID NO: 5013736 - DNA, 25 bp, Homo sapien
gatgttctgagtgcaaaggctctct

SEQ ID NO: 5013737 - DNA, 25 bp, Homo sapien
cctgggctaatagtgcatggtcgct

SEQ ID NO: 5013738 - DNA, 25 bp, Homo sapien
tatttggactgtaccgctggcctgg

SEQ ID NO: 5013739 - DNA, 25 bp, Homo sapien
gaaaccttctaaactcagcttccca

SEQ ID NO: 5013740 - DNA, 25 bp, Homo sapien
cagtcactcatatttgagcttggaa

SEQ ID NO: 5013741 - DNA, 25 bp, Homo sapien
tcagcttcccagaaaacatacggga

SEQ ID NO: 5013742 - DNA, 25 bp, Homo sapien
tcagtcactcatatttgagcttgga

SEQ ID NO: 5013743 - DNA, 25 bp, Homo sapien
gaccgactgtatttgatgaagattc

SEQ ID NO: 5013744 - DNA, 25 bp, Homo sapien
ccgactgtatttgatgaagattcat

SEQ ID NO: 5013745 - DNA, 25 bp, Homo sapien
aagaccgactgtatttgatgaagat

SEQ ID NO: 5013746 - DNA, 25 bp, Homo sapien
cctaagaccgactgtatttgatgaa

SEQ ID NO: 5013747 - DNA, 25 bp, Homo sapien
ctggactgggaatcaagagacctga

SEQ ID NO: 5013748 - DNA, 25 bp, Homo sapien
tggactgggaatcaagagacctgag

SEQ ID NO: 5013749 - DNA, 25 bp, Homo sapien
ggactgggaatcaagagacctgaga

SEQ ID NO: 5013750 - DNA, 25 bp, Homo sapien
actggactgggaatcaagagacctg

SEQ ID NO: 5013751 - DNA, 25 bp, Homo sapien
caggatacctttatcttggcccttg

SEQ ID NO: 5013752 - DNA, 25 bp, Homo sapien
aaatccaagtcctattgctgatctc

SEQ ID NO: 5013753 - DNA, 25 bp, Homo sapien
cctattgctgatctcaagcatctct

SEQ ID NO: 5013754 - DNA, 25 bp, Homo sapien
aagcatctctatacgggtccctcct

SEQ ID NO: 5013755 - DNA, 25 bp, Homo sapien
ccacaggcccccagatttgtttgct

SEQ ID NO: 5013756 - DNA, 25 bp, Homo sapien
tttgccagtatcccccagagccaca

SEQ ID NO: 5013757 - DNA, 25 bp, Homo sapien
caagtcccatccctagactgtagct

SEQ ID NO: 5013758 - DNA, 25 bp, Homo sapien
caggcccccagatttgtttgctgtt

SEQ ID NO: 5013759 - DNA, 25 bp, Homo sapien
cttaagactgtgcaaggatagtcaa

SEQ ID NO: 5013760 - DNA, 25 bp, Homo sapien
gactgtgcaaggatagtcaaaagtc

SEQ ID NO: 5013761 - DNA, 25 bp, Homo sapien
aaatactgggaaagagctggtggga

SEQ ID NO: 5013762 - DNA, 25 bp, Homo sapien
ctgtgcaaggatagtcaaaagtcac

SEQ ID NO: 5013763 - DNA, 25 bp, Homo sapien
ccacaggtatgggaaaaaggtcatg

SEQ ID NO: 5013764 - DNA, 25 bp, Homo sapien
aaaggtcatggttcatccaggctcc

SEQ ID NO: 5013765 - DNA, 25 bp, Homo sapien
ccatcagtggtacttggcaaatcag

SEQ ID NO: 5013766 - DNA, 25 bp, Homo sapien
tgtgcaagaatgacataggccagcg

SEQ ID NO: 5013767 - DNA, 25 bp, Homo sapien
ctgtctggagttcgcctcttcccgt

SEQ ID NO: 5013768 - DNA, 25 bp, Homo sapien
tcttgcgcagtggaggagctcacgc

SEQ ID NO: 5013769 - DNA, 25 bp, Homo sapien
ttcatgctgggcgaggtactgggca

SEQ ID NO: 5013770 - DNA, 25 bp, Homo sapien
cgttttcgttcacatcgagaagcag

SEQ ID NO: 5013771 - DNA, 25 bp, Homo sapien
atgacaggaatgagaggacggactg

SEQ ID NO: 5013772 - DNA, 25 bp, Homo sapien
tgagaggacggactgaaagttttct

SEQ ID NO: 5013773 - DNA, 25 bp, Homo sapien
gtcctgttgacttactctgcttttc

SEQ ID NO: 5013774 - DNA, 25 bp, Homo sapien
gttgacttactctgcttttcgaaca

SEQ ID NO: 5013775 - DNA, 25 bp, Homo sapien
tatttgctaaagataaatgcatgcc

SEQ ID NO: 5013776 - DNA, 25 bp, Homo sapien
tggaaatgacttcctacaggataac

SEQ ID NO: 5013777 - DNA, 25 bp, Homo sapien
caaccgccctcaagtcagttttcta

SEQ ID NO: 5013778 - DNA, 25 bp, Homo sapien
taagagtattaatcaagaaaccatc

SEQ ID NO: 5013779 - DNA, 25 bp, Homo sapien
cttgtgtcataaaataataaagcaa

SEQ ID NO: 5013780 - DNA, 25 bp, Homo sapien
gattataccaccacacttgcctggg

SEQ ID NO: 5013781 - DNA, 25 bp, Homo sapien
aaaattcatcctgggctgggtgtag

SEQ ID NO: 5013782 - DNA, 25 bp, Homo sapien
agccgagattataccaccacacttg

SEQ ID NO: 5013783 - DNA, 25 bp, Homo sapien
aaagcattcgctggctcccatccag

SEQ ID NO: 5013784 - DNA, 25 bp, Homo sapien
gagaattgactcacaggctggacat

SEQ ID NO: 5013785 - DNA, 25 bp, Homo sapien
cagcaatattgaaccaagcaggcaa

SEQ ID NO: 5013786 - DNA, 25 bp, Homo sapien
gcaaacatagttatgccagctcaga

SEQ ID NO: 5013787 - DNA, 25 bp, Homo sapien
gacagaaagctcacagcagagactt

SEQ ID NO: 5013788 - DNA, 25 bp, Homo sapien
tgagaatccactatgcccaagcaat

SEQ ID NO: 5013789 - DNA, 25 bp, Homo sapien
gtgaattaactacccgctatgctga

SEQ ID NO: 5013790 - DNA, 25 bp, Homo sapien
ctggcacaaaaggatgacggtctga

SEQ ID NO: 5013791 - DNA, 25 bp, Homo sapien
gtctcagtgggaagttagtagcttc

SEQ ID NO: 5013792 - DNA, 25 bp, Homo sapien
gcttcttgcagtttggaatgaaatt

SEQ ID NO: 5013793 - DNA, 25 bp, Homo sapien
aaattcttcaattgtcaaagtggag

SEQ ID NO: 5013794 - DNA, 25 bp, Homo sapien
aatgggatgacaaaaggtctcagtg

SEQ ID NO: 5013795 - DNA, 25 bp, Homo sapien
gcaaacatactgacagaaaccagta

SEQ ID NO: 5013796 - DNA, 25 bp, Homo sapien
tataaatacattagcctgttggtaa

SEQ ID NO: 5013797 - DNA, 25 bp, Homo sapien
gactggtacaacacagtgtaataac

SEQ ID NO: 5013798 - DNA, 25 bp, Homo sapien
cctattgactttgtaaaaatgatca

SEQ ID NO: 5013799 - DNA, 25 bp, Homo sapien
tcttggaagtttatgaggtggagct

SEQ ID NO: 5013800 - DNA, 25 bp, Homo sapien
tggaagtttatgaggtggagctgat

SEQ ID NO: 5013801 - DNA, 25 bp, Homo sapien
aagtttatgaggtggagctgatgga

SEQ ID NO: 5013802 - DNA, 25 bp, Homo sapien
tcctgtcttggaagtttatgaggtg

SEQ ID NO: 5013803 - DNA, 25 bp, Homo sapien
ctcctatctcgggtgaaatgtcatt

SEQ ID NO: 5013804 - DNA, 25 bp, Homo sapien
cagctgttgattagccagagaggag

SEQ ID NO: 5013805 - DNA, 25 bp, Homo sapien
cactagtcccagaacgagggtgcga

SEQ ID NO: 5013806 - DNA, 25 bp, Homo sapien
taaggaaccttttcagcttgctgag

SEQ ID NO: 5013807 - DNA, 25 bp, Homo sapien
ggagaatggctcgtgccattagtta

SEQ ID NO: 5013808 - DNA, 25 bp, Homo sapien
ctgtaggagaatggctcgtgccatt

SEQ ID NO: 5013809 - DNA, 25 bp, Homo sapien
taggagaatggctcgtgccattagt

SEQ ID NO: 5013810 - DNA, 25 bp, Homo sapien
gtaggagaatggctcgtgccattag

SEQ ID NO: 5013811 - DNA, 25 bp, Homo sapien
aatgcttggacttcacagggttact

SEQ ID NO: 5013812 - DNA, 25 bp, Homo sapien
catactgagtgatggtatcctgcac

SEQ ID NO: 5013813 - DNA, 25 bp, Homo sapien
cacagaggctgacaataaatggagt

SEQ ID NO: 5013814 - DNA, 25 bp, Homo sapien
gaacatgcatgaggaaattgccacc

SEQ ID NO: 5013815 - DNA, 25 bp, Homo sapien
ggcaaatattggcagtcacacaaat

SEQ ID NO: 5013816 - DNA, 25 bp, Homo sapien
catagcagactgcaacttcgaagca

SEQ ID NO: 5013817 - DNA, 25 bp, Homo sapien
ctggaattacagaccaaatgctgct

SEQ ID NO: 5013818 - DNA, 25 bp, Homo sapien
taaagagctccacattaagatgaat

SEQ ID NO: 5013819 - DNA, 25 bp, Homo sapien
ttgttggaggagtcagcctagattg

SEQ ID NO: 5013820 - DNA, 25 bp, Homo sapien
ctagattgcgtcttcacatccacag

SEQ ID NO: 5013821 - DNA, 25 bp, Homo sapien
cggtgtaaatgaactggttcttgga

SEQ ID NO: 5013822 - DNA, 25 bp, Homo sapien
ttgtcggtgtaaatgaactggttct

SEQ ID NO: 5013823 - DNA, 25 bp, Homo sapien
tattttactccttaagcacctcagt

SEQ ID NO: 5013824 - DNA, 25 bp, Homo sapien
catattattttactccttaagcacc

SEQ ID NO: 5013825 - DNA, 25 bp, Homo sapien
gaacatattattttactccttaagc

SEQ ID NO: 5013826 - DNA, 25 bp, Homo sapien
tattattttactccttaagcacctc

SEQ ID NO: 5013827 - DNA, 25 bp, Homo sapien
ctattgttatttctggcttaggcag

SEQ ID NO: 5013828 - DNA, 25 bp, Homo sapien
tggcaggacctcatttgtaactagg

SEQ ID NO: 5013829 - DNA, 25 bp, Homo sapien
ccttggtagtgttatatgcagcagc

SEQ ID NO: 5013830 - DNA, 25 bp, Homo sapien
gcttaggcagatgctaccttggtag

SEQ ID NO: 5013831 - DNA, 25 bp, Homo sapien
gaggcacctcttgcagttatagaca

SEQ ID NO: 5013832 - DNA, 25 bp, Homo sapien
ctagtcaacagcagtatcagagtct

SEQ ID NO: 5013833 - DNA, 25 bp, Homo sapien
gagcatttgcacgatgagctagtca

SEQ ID NO: 5013834 - DNA, 25 bp, Homo sapien
cacacacccaacgtattttgaggca

SEQ ID NO: 5013835 - DNA, 25 bp, Homo sapien
caagcaagttagttttcccgagcct

SEQ ID NO: 5013836 - DNA, 25 bp, Homo sapien
cacagtgggatacttggcataacag

SEQ ID NO: 5013837 - DNA, 25 bp, Homo sapien
aacaatggtgctggtcgcttctgcc

SEQ ID NO: 5013838 - DNA, 25 bp, Homo sapien
tacaggagactatccatggaccaga

SEQ ID NO: 5013839 - DNA, 25 bp, Homo sapien
ggcagcctgggatctaacgacttca

SEQ ID NO: 5013840 - DNA, 25 bp, Homo sapien
caaatggatattaagtggcagcctg

SEQ ID NO: 5013841 - DNA, 25 bp, Homo sapien
caccacttcttggaggtacctaagg

SEQ ID NO: 5013842 - DNA, 25 bp, Homo sapien
gttaatctgacttacaccctggtgt

SEQ ID NO: 5013843 - DNA, 25 bp, Homo sapien
tcccagaacgtatcacattgccaag

SEQ ID NO: 5013844 - DNA, 25 bp, Homo sapien
tacaggtagagcaaaacaattggac

SEQ ID NO: 5013845 - DNA, 25 bp, Homo sapien
tgtagagcttaccacaactgttgta

SEQ ID NO: 5013846 - DNA, 25 bp, Homo sapien
tatttgtctaacacctcctgccaga

SEQ ID NO: 5013847 - DNA, 25 bp, Homo sapien
taaataacctttgcgatccaggatg

SEQ ID NO: 5013848 - DNA, 25 bp, Homo sapien
caggtgtccatatctccaaggaagg

SEQ ID NO: 5013849 - DNA, 25 bp, Homo sapien
caatgctgtatctccggtgtctaaa

SEQ ID NO: 5013850 - DNA, 25 bp, Homo sapien
gatactttcctgagggccagaccaa

SEQ ID NO: 5013851 - DNA, 25 bp, Homo sapien
tccagggaagtgtctcaagtgaaca

SEQ ID NO: 5013852 - DNA, 25 bp, Homo sapien
tataatggcgagaatcaaaccaaac

SEQ ID NO: 5013853 - DNA, 25 bp, Homo sapien
gaaaatcaagattgccttagcagga

SEQ ID NO: 5013854 - DNA, 25 bp, Homo sapien
acattgatggacaactgcaaagagc

SEQ ID NO: 5013855 - DNA, 25 bp, Homo sapien
tattactgcagcctgactgttagtt

SEQ ID NO: 5013856 - DNA, 25 bp, Homo sapien
gcctgtaccaccatgtcccaccaat

SEQ ID NO: 5013857 - DNA, 25 bp, Homo sapien
gtaccaccatgtcccaccaatttct

SEQ ID NO: 5013858 - DNA, 25 bp, Homo sapien
taatattactgcagcctgactgtta

SEQ ID NO: 5013859 - DNA, 25 bp, Homo sapien
ttcagcaaatgcctgttttgggtat

SEQ ID NO: 5013860 - DNA, 25 bp, Homo sapien
aaatgcctgttttgggtatcttata

SEQ ID NO: 5013861 - DNA, 25 bp, Homo sapien
agcaaatgcctgttttgggtatctt

SEQ ID NO: 5013862 - DNA, 25 bp, Homo sapien
gggtatcttatatctaaaatgagtt

SEQ ID NO: 5013863 - DNA, 25 bp, Homo sapien
tctagtggaacacaaatactaccta

SEQ ID NO: 5013864 - DNA, 25 bp, Homo sapien
acaaatactacctaagtctctgtat

SEQ ID NO: 5013865 - DNA, 25 bp, Homo sapien
caaatactacctaagtctctgtatt

SEQ ID NO: 5013866 - DNA, 25 bp, Homo sapien
tttctagtggaacacaaatactacc

SEQ ID NO: 5013867 - DNA, 25 bp, Homo sapien
gtgcctgcttgtctaggagctcctg

SEQ ID NO: 5013868 - DNA, 25 bp, Homo sapien
ttccgattaacaaaagatagccagg

SEQ ID NO: 5013869 - DNA, 25 bp, Homo sapien
gaatgtactcatctactggaaacac

SEQ ID NO: 5013870 - DNA, 25 bp, Homo sapien
gaaaggtgatatttcagttaacctg

SEQ ID NO: 5013871 - DNA, 25 bp, Homo sapien
aaaatcagaaagtatacacagtgcc

SEQ ID NO: 5013872 - DNA, 25 bp, Homo sapien
aaaggctgctcttagtatactatca

SEQ ID NO: 5013873 - DNA, 25 bp, Homo sapien
tcttgatgatgaaggctaatgcttt

SEQ ID NO: 5013874 - DNA, 25 bp, Homo sapien
taactttacctatgtccttgggcaa

SEQ ID NO: 5013875 - DNA, 25 bp, Homo sapien
cattgagaaagggtggtctgaccta

SEQ ID NO: 5013876 - DNA, 25 bp, Homo sapien
tatttctgggctacagggactgtgc

SEQ ID NO: 5013877 - DNA, 25 bp, Homo sapien
cacatctggagagcaggaccattga

SEQ ID NO: 5013878 - DNA, 25 bp, Homo sapien
gcaatgcactgttttactacccaaa

SEQ ID NO: 5013879 - DNA, 25 bp, Homo sapien
tctcctaaaagcaagcgcgttccgg

SEQ ID NO: 5013880 - DNA, 25 bp, Homo sapien
gatgacaggagcacatgtggccttg

SEQ ID NO: 5013881 - DNA, 25 bp, Homo sapien
tgaatccagcgtaccacacagaaag

SEQ ID NO: 5013882 - DNA, 25 bp, Homo sapien
tctttaggcagaacaatgacaggga

SEQ ID NO: 5013883 - DNA, 25 bp, Homo sapien
tgaaagggcagactcactcatgtcc

SEQ ID NO: 5013884 - DNA, 25 bp, Homo sapien
cacaaagtggcacaccagcttgaaa

SEQ ID NO: 5013885 - DNA, 25 bp, Homo sapien
tgctagttttgtcagaccccaaagg

SEQ ID NO: 5013886 - DNA, 25 bp, Homo sapien
tagaggagacccttccacaaagtgg

SEQ ID NO: 5013887 - DNA, 25 bp, Homo sapien
cagtcaattaaatagatacaacacc

SEQ ID NO: 5013888 - DNA, 25 bp, Homo sapien
ggctaagggagatggacctctcttt

SEQ ID NO: 5013889 - DNA, 25 bp, Homo sapien
gccataatagattgtcccctgacaa

SEQ ID NO: 5013890 - DNA, 25 bp, Homo sapien
gaaagccatctgaaactgtattaaa

SEQ ID NO: 5013891 - DNA, 25 bp, Homo sapien
ctgcaggcaaaatcggagggctcga

SEQ ID NO: 5013892 - DNA, 25 bp, Homo sapien
atcggagggctcgagagctctgtgg

SEQ ID NO: 5013893 - DNA, 25 bp, Homo sapien
actgcaggcaaaatcggagggctcg

SEQ ID NO: 5013894 - DNA, 25 bp, Homo sapien
gctaatgaggactatgaatgacaat

SEQ ID NO: 5013895 - DNA, 25 bp, Homo sapien
gcatatggagacactgttttcaaaa

SEQ ID NO: 5013896 - DNA, 25 bp, Homo sapien
tccaaatcccttgcatatggagaca

SEQ ID NO: 5013897 - DNA, 25 bp, Homo sapien
ttgtacgcttgcaacaataaatgct

SEQ ID NO: 5013898 - DNA, 25 bp, Homo sapien
cggctgtgagagatactgggttttc

SEQ ID NO: 5013899 - DNA, 25 bp, Homo sapien
cacacaatgcctcccgaaagaaagg

SEQ ID NO: 5013900 - DNA, 25 bp, Homo sapien
cagggtttgagccagcctgacgctg

SEQ ID NO: 5013901 - DNA, 25 bp, Homo sapien
tgggtatgagcctgaccccgaagct

SEQ ID NO: 5013902 - DNA, 25 bp, Homo sapien
tttttccggcagtcacctattacta

SEQ ID NO: 5013903 - DNA, 25 bp, Homo sapien
ttttccggcagtcacctattactaa

SEQ ID NO: 5013904 - DNA, 25 bp, Homo sapien
cttgacaatattcaaagttcccttt

SEQ ID NO: 5013905 - DNA, 25 bp, Homo sapien
tctgactgggacagagattatgttc

SEQ ID NO: 5013906 - DNA, 25 bp, Homo sapien
tctccaccaatcgctctgctaattt

SEQ ID NO: 5013907 - DNA, 25 bp, Homo sapien
tttctgactgggacagagattatgt

SEQ ID NO: 5013908 - DNA, 25 bp, Homo sapien
ttctgactgggacagagattatgtt

SEQ ID NO: 5013909 - DNA, 25 bp, Homo sapien
cagttaacctcatatggccttggca

SEQ ID NO: 5013910 - DNA, 25 bp, Homo sapien
tgatcaatcttaaccatatgcgcaa

SEQ ID NO: 5013911 - DNA, 25 bp, Homo sapien
gccaggaatcctttcactgcctaaa

SEQ ID NO: 5013912 - DNA, 25 bp, Homo sapien
ggaatgcaataacttgagagaacct

SEQ ID NO: 5013913 - DNA, 25 bp, Homo sapien
tgctgctcctatcaactgatctctc

SEQ ID NO: 5013914 - DNA, 25 bp, Homo sapien
tgcattcgtggttgatggtcacaca

SEQ ID NO: 5013915 - DNA, 25 bp, Homo sapien
taacaactgtccagttgccagcatg

SEQ ID NO: 5013916 - DNA, 25 bp, Homo sapien
ggtcacacatctcaagaggctataa

SEQ ID NO: 5013917 - DNA, 25 bp, Homo sapien
gaacatgaaaacaagctcatccatc

SEQ ID NO: 5013918 - DNA, 25 bp, Homo sapien
tgtgaagcatatcaacagacacttc

SEQ ID NO: 5013919 - DNA, 25 bp, Homo sapien
tccatcaccactgggcattaaagaa

SEQ ID NO: 5013920 - DNA, 25 bp, Homo sapien
aataagacatttatacagacaatga

SEQ ID NO: 5013921 - DNA, 25 bp, Homo sapien
gaccactttgcattctcctgcacgg

SEQ ID NO: 5013922 - DNA, 25 bp, Homo sapien
tgaccactttgcattctcctgcacg

SEQ ID NO: 5013923 - DNA, 25 bp, Homo sapien
ccactttgcattctcctgcacggcc

SEQ ID NO: 5013924 - DNA, 25 bp, Homo sapien
ctttgcattctcctgcacggcctga

SEQ ID NO: 5013925 - DNA, 25 bp, Homo sapien
aactgttattggatgcagggtttcc

SEQ ID NO: 5013926 - DNA, 25 bp, Homo sapien
actttgccttgatgaatcctacctg

SEQ ID NO: 5013927 - DNA, 25 bp, Homo sapien
tgtgcccaatctgggtaccctccat

SEQ ID NO: 5013928 - DNA, 25 bp, Homo sapien
tcctctgttcaaaagacgcccagct

SEQ ID NO: 5013929 - DNA, 25 bp, Homo sapien
gactcaagaactaaggactgggcag

SEQ ID NO: 5013930 - DNA, 25 bp, Homo sapien
tggagtgaccaactacgaaaggaac

SEQ ID NO: 5013931 - DNA, 25 bp, Homo sapien
tccaaggatatgtcagctagaagcc

SEQ ID NO: 5013932 - DNA, 25 bp, Homo sapien
gattaaatcctcatggcctcagtgc

SEQ ID NO: 5013933 - DNA, 25 bp, Homo sapien
tttaccagtagttctgatgtaagag

SEQ ID NO: 5013934 - DNA, 25 bp, Homo sapien
ttaccagtagttctgatgtaagagc

SEQ ID NO: 5013935 - DNA, 25 bp, Homo sapien
ttcatattggagcagatgtagcagt

SEQ ID NO: 5013936 - DNA, 25 bp, Homo sapien
ttcaaatcccgcacaaattgaaaac

SEQ ID NO: 5013937 - DNA, 25 bp, Homo sapien
aaatcccgcacaaattgaaaacagg

SEQ ID NO: 5013938 - DNA, 25 bp, Homo sapien
tatttttagtggaagtagttcaata

SEQ ID NO: 5013939 - DNA, 25 bp, Homo sapien
caattgtcatgtataagtcatagtc

SEQ ID NO: 5013940 - DNA, 25 bp, Homo sapien
tctaaacactgtaaagggcatcagt

SEQ ID NO: 5013941 - DNA, 25 bp, Homo sapien
tgcctacttgatggcaacaattgtc

SEQ ID NO: 5013942 - DNA, 25 bp, Homo sapien
aacagcacctgctgatcaaacagaa

SEQ ID NO: 5013943 - DNA, 25 bp, Homo sapien
tgagtcctgtctggatagcagaggt

SEQ ID NO: 5013944 - DNA, 25 bp, Homo sapien
aatgtaaattctctccgccagctaa

SEQ ID NO: 5013945 - DNA, 25 bp, Homo sapien
tgatgggagatagcgtcaaggccag

SEQ ID NO: 5013946 - DNA, 25 bp, Homo sapien
taagaggagcgacagataacatgtt

SEQ ID NO: 5013947 - DNA, 25 bp, Homo sapien
cattaaacacacattggagcttatc

SEQ ID NO: 5013948 - DNA, 25 bp, Homo sapien
tggagcttatcagaagtaaaagcct

SEQ ID NO: 5013949 - DNA, 25 bp, Homo sapien
tatcagaagtaaaagccttgtcagg

SEQ ID NO: 5013950 - DNA, 25 bp, Homo sapien
cgcggctttgtattcattaaacaca

SEQ ID NO: 5013951 - DNA, 25 bp, Homo sapien
tgtagctatggatgccaaacaaagg

SEQ ID NO: 5013952 - DNA, 25 bp, Homo sapien
tcactgctgctcactaaattgtagc

SEQ ID NO: 5013953 - DNA, 25 bp, Homo sapien
tgtgcttcaaaaccaagtgcctagc

SEQ ID NO: 5013954 - DNA, 25 bp, Homo sapien
tgcataagctaaaacagaacctacc

SEQ ID NO: 5013955 - DNA, 25 bp, Homo sapien
tcatcttcctgctcgcataccgtga

SEQ ID NO: 5013956 - DNA, 25 bp, Homo sapien
gtcatcttcctgctcgcataccgtg

SEQ ID NO: 5013957 - DNA, 25 bp, Homo sapien
tcgtcatcttcctgctcgcataccg

SEQ ID NO: 5013958 - DNA, 25 bp, Homo sapien
cgtcatcttcctgctcgcataccgt

SEQ ID NO: 5013959 - DNA, 25 bp, Homo sapien
gccacaggctccgagctgcaaataa

SEQ ID NO: 5013960 - DNA, 25 bp, Homo sapien
cttacactgcacagggccggagagt

SEQ ID NO: 5013961 - DNA, 25 bp, Homo sapien
gctgcaaataaaacttcccgtcgtc

SEQ ID NO: 5013962 - DNA, 25 bp, Homo sapien
ggcttccctcgcgaggccagagtgt

SEQ ID NO: 5013963 - DNA, 25 bp, Homo sapien
ctcgccacgagaccgcggagtcgcg

SEQ ID NO: 5013964 - DNA, 25 bp, Homo sapien
ggtcggggacgccagccaaacgcaa

SEQ ID NO: 5013965 - DNA, 25 bp, Homo sapien
agagagctgccgtgcaaaaagcccg

SEQ ID NO: 5013966 - DNA, 25 bp, Homo sapien
agtcgcgccgcggagcgactacggc

SEQ ID NO: 5013967 - DNA, 25 bp, Homo sapien
tttctgtaccctcaaggctagttta

SEQ ID NO: 5013968 - DNA, 25 bp, Homo sapien
aggtttctgtaccctcaaggctagt

SEQ ID NO: 5013969 - DNA, 25 bp, Homo sapien
ccacataccttgcaatttggtccaa

SEQ ID NO: 5013970 - DNA, 25 bp, Homo sapien
tcatttgatcagtgtaacctctaga

SEQ ID NO: 5013971 - DNA, 25 bp, Homo sapien
ggtcatgtcaaccacccagtttacc

SEQ ID NO: 5013972 - DNA, 25 bp, Homo sapien
actggtaaaaccacaggattggtca

SEQ ID NO: 5013973 - DNA, 25 bp, Homo sapien
cacctgcaatccacaatggaggtcc

SEQ ID NO: 5013974 - DNA, 25 bp, Homo sapien
aatccacaatggaggtccattatca

SEQ ID NO: 5013975 - DNA, 25 bp, Homo sapien
aggcacctgcaatccacaatggagg

SEQ ID NO: 5013976 - DNA, 25 bp, Homo sapien
tgcaatccacaatggaggtccatta

SEQ ID NO: 5013977 - DNA, 25 bp, Homo sapien
cccagccttattgccaccagtgctc

SEQ ID NO: 5013978 - DNA, 25 bp, Homo sapien
ggcattgggcctgaatgtcccagcc

SEQ ID NO: 5013979 - DNA, 25 bp, Homo sapien
gcattgggcctgaatgtcccagcct

SEQ ID NO: 5013980 - DNA, 25 bp, Homo sapien
tggcattgggcctgaatgtcccagc

SEQ ID NO: 5013981 - DNA, 25 bp, Homo sapien
gatgagtagagggctggcctgctgc

SEQ ID NO: 5013982 - DNA, 25 bp, Homo sapien
actgtcattaagctgttcagtgaaa

SEQ ID NO: 5013983 - DNA, 25 bp, Homo sapien
ctgtcattaagctgttcagtgaaag

SEQ ID NO: 5013984 - DNA, 25 bp, Homo sapien
aaagatgagtagagggctggcctgc

SEQ ID NO: 5013985 - DNA, 25 bp, Homo sapien
gtccctcagactggagtgccgtggc

SEQ ID NO: 5013986 - DNA, 25 bp, Homo sapien
gctctgtccctcagactggagtgcc

SEQ ID NO: 5013987 - DNA, 25 bp, Homo sapien
ggctcgctgcaagctccaccttccg

SEQ ID NO: 5013988 - DNA, 25 bp, Homo sapien
cggctcgctgcaagctccaccttcc

SEQ ID NO: 5013989 - DNA, 25 bp, Homo sapien
caataggctccatagttaacgtggg

SEQ ID NO: 5013990 - DNA, 25 bp, Homo sapien
gttaacgtgggtctgctgaaatgcc

SEQ ID NO: 5013991 - DNA, 25 bp, Homo sapien
gcagggaatcaataggctccatagt

SEQ ID NO: 5013992 - DNA, 25 bp, Homo sapien
gctccatagttaacgtgggtctgct

SEQ ID NO: 5013993 - DNA, 25 bp, Homo sapien
tccacaacgcatactgccagtttca

SEQ ID NO: 5013994 - DNA, 25 bp, Homo sapien
tggctccttccacaacgcatactgc

SEQ ID NO: 5013995 - DNA, 25 bp, Homo sapien
ctcgaaagcagatgctctggctcct

SEQ ID NO: 5013996 - DNA, 25 bp, Homo sapien
gccctgctcgaaagcagatgctctg

SEQ ID NO: 5013997 - DNA, 25 bp, Homo sapien
attggtataatgggcttttactgaa

SEQ ID NO: 5013998 - DNA, 25 bp, Homo sapien
gatattggtataatgggcttttact

SEQ ID NO: 5013999 - DNA, 25 bp, Homo sapien
cagatattggtataatgggctttta

SEQ ID NO: 5014000 - DNA, 25 bp, Homo sapien
tattggtataatgggcttttactga

SEQ ID NO: 5014001 - DNA, 25 bp, Homo sapien
tttctccagagaatagtctgtcttc

SEQ ID NO: 5014002 - DNA, 25 bp, Homo sapien
atttttctccagagaatagtctgtc

SEQ ID NO: 5014003 - DNA, 25 bp, Homo sapien
tctgtcttcagtctttaagaactca

SEQ ID NO: 5014004 - DNA, 25 bp, Homo sapien
tccagagaatagtctgtcttcagtc

SEQ ID NO: 5014005 - DNA, 25 bp, Homo sapien
ggtgaactgcacaactcacgcagta

SEQ ID NO: 5014006 - DNA, 25 bp, Homo sapien
tgcgcgtggtggcggccctttttgg

SEQ ID NO: 5014007 - DNA, 25 bp, Homo sapien
tcctgactattttgcggtgaactgc

SEQ ID NO: 5014008 - DNA, 25 bp, Homo sapien
gtgcggcgaataggctgcgcgtggt

SEQ ID NO: 5014009 - DNA, 25 bp, Homo sapien
ggctgccctcccttgataggatttg

SEQ ID NO: 5014010 - DNA, 25 bp, Homo sapien
ggatttgcagtcctccactggacca

SEQ ID NO: 5014011 - DNA, 25 bp, Homo sapien
agttgggctgccctcccttgatagg

SEQ ID NO: 5014012 - DNA, 25 bp, Homo sapien
ccctcccttgataggatttgcagtc

SEQ ID NO: 5014013 - DNA, 25 bp, Homo sapien
ccatggtagcatgataaactgggct

SEQ ID NO: 5014014 - DNA, 25 bp, Homo sapien
acaggagaatgaggcttttgcagaa

SEQ ID NO: 5014015 - DNA, 25 bp, Homo sapien
taaactgggctgtgtaaaagtgtgg

SEQ ID NO: 5014016 - DNA, 25 bp, Homo sapien
tgaggcttttgcagaattccatggt

SEQ ID NO: 5014017 - DNA, 25 bp, Homo sapien
ttaaaaatggattgttaatcttcat

SEQ ID NO: 5014018 - DNA, 25 bp, Homo sapien
attaaaaatggattgttaatcttca

SEQ ID NO: 5014019 - DNA, 25 bp, Homo sapien
cccaaatttcatagcagatgtaaca

SEQ ID NO: 5014020 - DNA, 25 bp, Homo sapien
cttgtttagaaaatggatatgcagc

SEQ ID NO: 5014021 - DNA, 25 bp, Homo sapien
gctgcatatggtatctgctaacttg

SEQ ID NO: 5014022 - DNA, 25 bp, Homo sapien
gcctgatagcactggacagcatgtt

SEQ ID NO: 5014023 - DNA, 25 bp, Homo sapien
tcaggatggcctcatacagaatgtg

SEQ ID NO: 5014024 - DNA, 25 bp, Homo sapien
tgtagtatgattgccaaagtcccac

SEQ ID NO: 5014025 - DNA, 25 bp, Homo sapien
caatagacagttggcttccctccag

SEQ ID NO: 5014026 - DNA, 25 bp, Homo sapien
tatcttccctgtggtaaacactgaa

SEQ ID NO: 5014027 - DNA, 25 bp, Homo sapien
tatcctgtatcttccactctctata

SEQ ID NO: 5014028 - DNA, 25 bp, Homo sapien
tcttgttgtcaccaacatcacgact

SEQ ID NO: 5014029 - DNA, 25 bp, Homo sapien
ctagaaaccaatcttgttgtcacca

SEQ ID NO: 5014030 - DNA, 25 bp, Homo sapien
agaaaccaatcttgttgtcaccaac

SEQ ID NO: 5014031 - DNA, 25 bp, Homo sapien
tcaccaacatcacgactttgtttca

SEQ ID NO: 5014032 - DNA, 25 bp, Homo sapien
cagatatatgtgttttcccattttg

SEQ ID NO: 5014033 - DNA, 25 bp, Homo sapien
tcagatatatgtgttttcccatttt

SEQ ID NO: 5014034 - DNA, 25 bp, Homo sapien
gatatatgtgttttcccattttgaa

SEQ ID NO: 5014035 - DNA, 25 bp, Homo sapien
tatatgtgttttcccattttgaagc

SEQ ID NO: 5014036 - DNA, 25 bp, Homo sapien
gagtattgaagtcacaacgactata

SEQ ID NO: 5014037 - DNA, 25 bp, Homo sapien
tgcagaaaaacctccgatcttctta

SEQ ID NO: 5014038 - DNA, 25 bp, Homo sapien
tgaacccaacacacagcaagaagag

SEQ ID NO: 5014039 - DNA, 25 bp, Homo sapien
cgactatatgccaatttatttgcag

SEQ ID NO: 5014040 - DNA, 25 bp, Homo sapien
caatcttggcagtataaattatcag

SEQ ID NO: 5014041 - DNA, 25 bp, Homo sapien
tataaattatcagtgtgtacttcac

SEQ ID NO: 5014042 - DNA, 25 bp, Homo sapien
cagtgtgtacttcactgcttggagt

SEQ ID NO: 5014043 - DNA, 25 bp, Homo sapien
cttcacaatcttggcagtataaatt

SEQ ID NO: 5014044 - DNA, 25 bp, Homo sapien
tggacatcatgtagcaacgtgtaca

SEQ ID NO: 5014045 - DNA, 25 bp, Homo sapien
tgtacacaagtagccttaggtcttt

SEQ ID NO: 5014046 - DNA, 25 bp, Homo sapien
caacgtgtacacaagtagccttagg

SEQ ID NO: 5014047 - DNA, 25 bp, Homo sapien
tgtagcaacgtgtacacaagtagcc

SEQ ID NO: 5014048 - DNA, 25 bp, Homo sapien
taagggctgctgagtcatacaactc

SEQ ID NO: 5014049 - DNA, 25 bp, Homo sapien
gtaagggctgctgagtcatacaact

SEQ ID NO: 5014050 - DNA, 25 bp, Homo sapien
aagggctgctgagtcatacaactcc

SEQ ID NO: 5014051 - DNA, 25 bp, Homo sapien
gtgtaagggctgctgagtcatacaa

SEQ ID NO: 5014052 - DNA, 25 bp, Homo sapien
gcttttgtggcacactcaaatctct

SEQ ID NO: 5014053 - DNA, 25 bp, Homo sapien
ttgtgcaatatagcagcataacttt

SEQ ID NO: 5014054 - DNA, 25 bp, Homo sapien
tttgaatgatgctcccagttgtgca

SEQ ID NO: 5014055 - DNA, 25 bp, Homo sapien
cttggcttttgtggcacactcaaat

SEQ ID NO: 5014056 - DNA, 25 bp, Homo sapien
tttagtcaacaatggagatcctgcc

SEQ ID NO: 5014057 - DNA, 25 bp, Homo sapien
agcactgtgtcaaggctcttggcca

SEQ ID NO: 5014058 - DNA, 25 bp, Homo sapien
ttgtgacaattaacagagcctgcag

SEQ ID NO: 5014059 - DNA, 25 bp, Homo sapien
tgcagcctgcaacacgcgttggact

SEQ ID NO: 5014060 - DNA, 25 bp, Homo sapien
catataagtgagaatatacggtgtt

SEQ ID NO: 5014061 - DNA, 25 bp, Homo sapien
cacatataagtgagaatatacggtg

SEQ ID NO: 5014062 - DNA, 25 bp, Homo sapien
acatataagtgagaatatacggtgt

SEQ ID NO: 5014063 - DNA, 25 bp, Homo sapien
tcagcaccagcgtaaaaaatcccag

SEQ ID NO: 5014064 - DNA, 25 bp, Homo sapien
aacaattctaatcaagcaggattga

SEQ ID NO: 5014065 - DNA, 25 bp, Homo sapien
tacggtgtcctgaacatcaaagaaa

SEQ ID NO: 5014066 - DNA, 25 bp, Homo sapien
gataccgaggcctgtcccttagagc

SEQ ID NO: 5014067 - DNA, 25 bp, Homo sapien
ccagcccatgtccaagagaagtgga

SEQ ID NO: 5014068 - DNA, 25 bp, Homo sapien
agcccatgtccaagagaagtggagt

SEQ ID NO: 5014069 - DNA, 25 bp, Homo sapien
cagcccatgtccaagagaagtggag

SEQ ID NO: 5014070 - DNA, 25 bp, Homo sapien
caggagctcttccatcgcggtgctg

SEQ ID NO: 5014071 - DNA, 25 bp, Homo sapien
ttcatggcctgtaaccttcttctgg

SEQ ID NO: 5014072 - DNA, 25 bp, Homo sapien
gccaatttatcttcctgagtctgca

SEQ ID NO: 5014073 - DNA, 25 bp, Homo sapien
tccagtatttacattgctgccagga

SEQ ID NO: 5014074 - DNA, 25 bp, Homo sapien
cagtgtagtccttcgacaagctgag

SEQ ID NO: 5014075 - DNA, 25 bp, Homo sapien
tcactgactgactgcgaaagagccc

SEQ ID NO: 5014076 - DNA, 25 bp, Homo sapien
gagattgaatcactgactgactgcg

SEQ ID NO: 5014077 - DNA, 25 bp, Homo sapien
tcgacaagctgagattgaatcactg

SEQ ID NO: 5014078 - DNA, 25 bp, Homo sapien
cacgggaatcacgtgtggtccagcc

SEQ ID NO: 5014079 - DNA, 25 bp, Homo sapien
ggttctcacggaggctccactgtga

SEQ ID NO: 5014080 - DNA, 25 bp, Homo sapien
tcagaagcagcgtgccacgggaatc

SEQ ID NO: 5014081 - DNA, 25 bp, Homo sapien
catctgaccggtgctgggtttggct

SEQ ID NO: 5014082 - DNA, 25 bp, Homo sapien
tgattgaaaatatccttccgacgtt

SEQ ID NO: 5014083 - DNA, 25 bp, Homo sapien
atgattgaaaatatccttccgacgt

SEQ ID NO: 5014084 - DNA, 25 bp, Homo sapien
tctctcatattatgtaagaatcaat

SEQ ID NO: 5014085 - DNA, 25 bp, Homo sapien
tattatgtaagaatcaattcgcgta

SEQ ID NO: 5014086 - DNA, 25 bp, Homo sapien
ctcatattatgtaagaatcaattcg

SEQ ID NO: 5014087 - DNA, 25 bp, Homo sapien
ctatatctctcatattatgtaagaa

SEQ ID NO: 5014088 - DNA, 25 bp, Homo sapien
aaggaagtgtcctggtatctgcgtc

SEQ ID NO: 5014089 - DNA, 25 bp, Homo sapien
gccaagtgttcaaaaggaagtgtcc

SEQ ID NO: 5014090 - DNA, 25 bp, Homo sapien
agtgtcctggtatctgcgtctttgc

SEQ ID NO: 5014091 - DNA, 25 bp, Homo sapien
cttctgcagccaagtgttcaaaagg

SEQ ID NO: 5014092 - DNA, 25 bp, Homo sapien
gaagttggtatcagaatctcactgt

SEQ ID NO: 5014093 - DNA, 25 bp, Homo sapien
aactggaagttggtatcagaatctc

SEQ ID NO: 5014094 - DNA, 25 bp, Homo sapien
gagttttcacgaagtcttggtgagg

SEQ ID NO: 5014095 - DNA, 25 bp, Homo sapien
agctgaagagttttcacgaagtctt

SEQ ID NO: 5014096 - DNA, 25 bp, Homo sapien
tatcctgggagattacaagaacacc

SEQ ID NO: 5014097 - DNA, 25 bp, Homo sapien
ccctgtgcaccagctaaatgaagct

SEQ ID NO: 5014098 - DNA, 25 bp, Homo sapien
taatggttgggactctctccacatg

SEQ ID NO: 5014099 - DNA, 25 bp, Homo sapien
gatttctatcctgggagattacaag

SEQ ID NO: 5014100 - DNA, 25 bp, Homo sapien
gaagcatatcctcagaaattcctat

SEQ ID NO: 5014101 - DNA, 25 bp, Homo sapien
gtatttctgtgcctcgaggttttca

SEQ ID NO: 5014102 - DNA, 25 bp, Homo sapien
ggtcctaaaggcagttcctataatc

SEQ ID NO: 5014103 - DNA, 25 bp, Homo sapien
gatattccatcaagttctagcccca

SEQ ID NO: 5014104 - DNA, 25 bp, Homo sapien
tttcctgtttcccttcagtctccta

SEQ ID NO: 5014105 - DNA, 25 bp, Homo sapien
cctgtttcccttcagtctcctatat

SEQ ID NO: 5014106 - DNA, 25 bp, Homo sapien
ttcctgtttcccttcagtctcctat

SEQ ID NO: 5014107 - DNA, 25 bp, Homo sapien
tcctgtttcccttcagtctcctata

SEQ ID NO: 5014108 - DNA, 25 bp, Homo sapien
gaggaggaagcacagtatggctttc

SEQ ID NO: 5014109 - DNA, 25 bp, Homo sapien
gaggaagcacagtatggctttcatg

SEQ ID NO: 5014110 - DNA, 25 bp, Homo sapien
ggaaagggattcatgagaaggagga

SEQ ID NO: 5014111 - DNA, 25 bp, Homo sapien
ggaggaaagggattcatgagaagga

SEQ ID NO: 5014112 - DNA, 25 bp, Homo sapien
taaagtaggtggaaacaacagtcta

SEQ ID NO: 5014113 - DNA, 25 bp, Homo sapien
acaacagtctaaacaatatacttta

SEQ ID NO: 5014114 - DNA, 25 bp, Homo sapien
gaaacaacagtctaaacaatatact

SEQ ID NO: 5014115 - DNA, 25 bp, Homo sapien
aaacaacagtctaaacaatatactt

SEQ ID NO: 5014116 - DNA, 25 bp, Homo sapien
tcgattggaaagtgttgacaatggc

SEQ ID NO: 5014117 - DNA, 25 bp, Homo sapien
cgattggaaagtgttgacaatggct

SEQ ID NO: 5014118 - DNA, 25 bp, Homo sapien
ttatttcgattggaaagtgttgaca

SEQ ID NO: 5014119 - DNA, 25 bp, Homo sapien
tttcgattggaaagtgttgacaatg

SEQ ID NO: 5014120 - DNA, 25 bp, Homo sapien
tcctgacgtacctgaataatgaggt

SEQ ID NO: 5014121 - DNA, 25 bp, Homo sapien
cttagcacttcctgacgtacctgaa

SEQ ID NO: 5014122 - DNA, 25 bp, Homo sapien
tagcacttcctgacgtacctgaata

SEQ ID NO: 5014123 - DNA, 25 bp, Homo sapien
acttcctgacgtacctgaataatga

SEQ ID NO: 5014124 - DNA, 25 bp, Homo sapien
tgctcatcatcgactggtgggctgt

SEQ ID NO: 5014125 - DNA, 25 bp, Homo sapien
tcatcgactggtgggctgtcctcct

SEQ ID NO: 5014126 - DNA, 25 bp, Homo sapien
catcatcgactggtgggctgtcctc

SEQ ID NO: 5014127 - DNA, 25 bp, Homo sapien
gcctgctcatcatcgactggtgggc

SEQ ID NO: 5014128 - DNA, 25 bp, Homo sapien
gtatataataaaacccaaggagaca

SEQ ID NO: 5014129 - DNA, 25 bp, Homo sapien
aataaaacccaaggagacatctctt

SEQ ID NO: 5014130 - DNA, 25 bp, Homo sapien
tataataaaacccaaggagacatct

SEQ ID NO: 5014131 - DNA, 25 bp, Homo sapien
tctcttttgttcacagtgtgactct

SEQ ID NO: 5014132 - DNA, 25 bp, Homo sapien
catacagtggaacgagcatcatcta

SEQ ID NO: 5014133 - DNA, 25 bp, Homo sapien
agcttctccaggcatatcagccatg

SEQ ID NO: 5014134 - DNA, 25 bp, Homo sapien
actcaaagcaccatacctttcctgc

SEQ ID NO: 5014135 - DNA, 25 bp, Homo sapien
gcatatcagccatgacttctctaga

SEQ ID NO: 5014136 - DNA, 25 bp, Homo sapien
ctgagttcaacatgttttgggaacc

SEQ ID NO: 5014137 - DNA, 25 bp, Homo sapien
tgagttcaacatgttttgggaaccc

SEQ ID NO: 5014138 - DNA, 25 bp, Homo sapien
ggctgaacaattccgaagactctcg

SEQ ID NO: 5014139 - DNA, 25 bp, Homo sapien
gactctcgttaaatggtccatggaa

SEQ ID NO: 5014140 - DNA, 25 bp, Homo sapien
cattattggctgaacaattccgaag

SEQ ID NO: 5014141 - DNA, 25 bp, Homo sapien
tagatcctgtgagttcattattggc

SEQ ID NO: 5014142 - DNA, 25 bp, Homo sapien
attgctttatgcctataccttctat

SEQ ID NO: 5014143 - DNA, 25 bp, Homo sapien
tatgcctataccttctatacccttg

SEQ ID NO: 5014144 - DNA, 25 bp, Homo sapien
gcctataccttctatacccttgatt

SEQ ID NO: 5014145 - DNA, 25 bp, Homo sapien
gctttatgcctataccttctatacc

SEQ ID NO: 5014146 - DNA, 25 bp, Homo sapien
tttccttcatgtggaagacttggcg

SEQ ID NO: 5014147 - DNA, 25 bp, Homo sapien
tcatgtggaagacttggcgagacat

SEQ ID NO: 5014148 - DNA, 25 bp, Homo sapien
cttcatgtggaagacttggcgagac

SEQ ID NO: 5014149 - DNA, 25 bp, Homo sapien
ctctttccttcatgtggaagacttg

SEQ ID NO: 5014150 - DNA, 25 bp, Homo sapien
gaatagataaacctcatgacttcag

SEQ ID NO: 5014151 - DNA, 25 bp, Homo sapien
ttgaacttctgaatttgagaccagg

SEQ ID NO: 5014152 - DNA, 25 bp, Homo sapien
tgaaatcaatacactacaaccatag

SEQ ID NO: 5014153 - DNA, 25 bp, Homo sapien
agattgtgtcaagtcaaactgacgc

SEQ ID NO: 5014154 - DNA, 25 bp, Homo sapien
aaacaccaagaagacagcaggtggg

SEQ ID NO: 5014155 - DNA, 25 bp, Homo sapien
aaacactttgcagcttccattaact

SEQ ID NO: 5014156 - DNA, 25 bp, Homo sapien
gcagatacagaaggcaaacactttg

SEQ ID NO: 5014157 - DNA, 25 bp, Homo sapien
gggtttccattgcagatacagaagg

SEQ ID NO: 5014158 - DNA, 25 bp, Homo sapien
catcattggagttgtggcctttgcc

SEQ ID NO: 5014159 - DNA, 25 bp, Homo sapien
ggcctttgcctgagctccaagagag

SEQ ID NO: 5014160 - DNA, 25 bp, Homo sapien
ggctgtaacccctacgtctgcacat

SEQ ID NO: 5014161 - DNA, 25 bp, Homo sapien
gacgtgttctacttgcggctgtaac

SEQ ID NO: 5014162 - DNA, 25 bp, Homo sapien
tgactgctcccgctgaaggtctgac

SEQ ID NO: 5014163 - DNA, 25 bp, Homo sapien
ctacttgactgctcccgctgaaggt

SEQ ID NO: 5014164 - DNA, 25 bp, Homo sapien
tgaccaacatttcaagaggctttgt

SEQ ID NO: 5014165 - DNA, 25 bp, Homo sapien
cccgctgaaggtctgaccaacattt

SEQ ID NO: 5014166 - DNA, 25 bp, Homo sapien
gaatgatactggagcctgcgaaact

SEQ ID NO: 5014167 - DNA, 25 bp, Homo sapien
tgcgaaacttgcatccagggcatgg

SEQ ID NO: 5014168 - DNA, 25 bp, Homo sapien
cagggcatggattggctgcataaca

SEQ ID NO: 5014169 - DNA, 25 bp, Homo sapien
tgtccccaggttctaggaagcactg

SEQ ID NO: 5014170 - DNA, 25 bp, Homo sapien
tgtcctttactttgattatatccct

SEQ ID NO: 5014171 - DNA, 25 bp, Homo sapien
tatatcccttgaaacaagatcccct

SEQ ID NO: 5014172 - DNA, 25 bp, Homo sapien
ggaaaccacaataaatgagagcttg

SEQ ID NO: 5014173 - DNA, 25 bp, Homo sapien
cttgggaaaaaactcgtctggcagg

SEQ ID NO: 5014174 - DNA, 25 bp, Homo sapien
gagcatgttcacagatcatagcaac

SEQ ID NO: 5014175 - DNA, 25 bp, Homo sapien
caagagcatgttcacagatcatagc

SEQ ID NO: 5014176 - DNA, 25 bp, Homo sapien
aagagcatgttcacagatcatagca

SEQ ID NO: 5014177 - DNA, 25 bp, Homo sapien
gcatgttcacagatcatagcaacca

SEQ ID NO: 5014178 - DNA, 25 bp, Homo sapien
ctatatactgaaggcatgtgaatta

SEQ ID NO: 5014179 - DNA, 25 bp, Homo sapien
tatatactgaaggcatgtgaattac

SEQ ID NO: 5014180 - DNA, 25 bp, Homo sapien
atgcaaattagaagtacgtaaagct

SEQ ID NO: 5014181 - DNA, 25 bp, Homo sapien
cctgggatctttaatgaggataaag

SEQ ID NO: 5014182 - DNA, 25 bp, Homo sapien
gaagtacgtaaagctttgtctgcac

SEQ ID NO: 5014183 - DNA, 25 bp, Homo sapien
taatgcaaattagaagtacgtaaag

SEQ ID NO: 5014184 - DNA, 25 bp, Homo sapien
actctgcatgagtgaatgcccttca

SEQ ID NO: 5014185 - DNA, 25 bp, Homo sapien
tgactttacattctgctctacctgt

SEQ ID NO: 5014186 - DNA, 25 bp, Homo sapien
agccttgacagttcctagaagtcat

SEQ ID NO: 5014187 - DNA, 25 bp, Homo sapien
tccctctgcttggagacatatcttc

SEQ ID NO: 5014188 - DNA, 25 bp, Homo sapien
ttttgtttggcttcccagaacatgt

SEQ ID NO: 5014189 - DNA, 25 bp, Homo sapien
taatcgagccaactgccctggtggc

SEQ ID NO: 5014190 - DNA, 25 bp, Homo sapien
caaagacttgcaagtccagtgtggc

SEQ ID NO: 5014191 - DNA, 25 bp, Homo sapien
tagacgtggcagtggttaatcgagc

SEQ ID NO: 5014192 - DNA, 25 bp, Homo sapien
cacaaacaggactaagtagggaagt

SEQ ID NO: 5014193 - DNA, 25 bp, Homo sapien
tgtatcaaatacctttccagcagag

SEQ ID NO: 5014194 - DNA, 25 bp, Homo sapien
taatgtcgttaataaggcggctcca

SEQ ID NO: 5014195 - DNA, 25 bp, Homo sapien
atgggctcagaggtccaaagaaaca

SEQ ID NO: 5014196 - DNA, 25 bp, Homo sapien
gaaacactgccaattgcaaatgcct

SEQ ID NO: 5014197 - DNA, 25 bp, Homo sapien
aatgccttatcttgcctcttgacag

SEQ ID NO: 5014198 - DNA, 25 bp, Homo sapien
gaaatctggagtcctttgaaacact

SEQ ID NO: 5014199 - DNA, 25 bp, Homo sapien
ctgggaaatctaggttctttggaga

SEQ ID NO: 5014200 - DNA, 25 bp, Homo sapien
tctgtggagtgaacagtctctgttt

SEQ ID NO: 5014201 - DNA, 25 bp, Homo sapien
ttccttctatccatctccaagaagc

SEQ ID NO: 5014202 - DNA, 25 bp, Homo sapien
ttttggcctgttgaaattgattgga

SEQ ID NO: 5014203 - DNA, 25 bp, Homo sapien
catcatcatattaacatagatgaca

SEQ ID NO: 5014204 - DNA, 25 bp, Homo sapien
gttctgcccaatctgtcaaatgctg

SEQ ID NO: 5014205 - DNA, 25 bp, Homo sapien
cgcacttcgcattttctaattacac

SEQ ID NO: 5014206 - DNA, 25 bp, Homo sapien
agactctttcgtggcagttctgccc

SEQ ID NO: 5014207 - DNA, 25 bp, Homo sapien
tctgtgtcagactctttcgtggcag

SEQ ID NO: 5014208 - DNA, 25 bp, Homo sapien
aggagctgagaagatcgccttgtct

SEQ ID NO: 5014209 - DNA, 25 bp, Homo sapien
ggagctgagaagatcgccttgtctc

SEQ ID NO: 5014210 - DNA, 25 bp, Homo sapien
gatttggaagtaggctcaaagctta

SEQ ID NO: 5014211 - DNA, 25 bp, Homo sapien
ccacctcagcaagctatgtttcaca

SEQ ID NO: 5014212 - DNA, 25 bp, Homo sapien
caaagcttatctcgactctccagac

SEQ ID NO: 5014213 - DNA, 25 bp, Homo sapien
gccaattctgttgcgtcttgatccc

SEQ ID NO: 5014214 - DNA, 25 bp, Homo sapien
catttgtgattctactatccacctt

SEQ ID NO: 5014215 - DNA, 25 bp, Homo sapien
tttgtgattctactatccacctttc

SEQ ID NO: 5014216 - DNA, 25 bp, Homo sapien
acatttgtgattctactatccacct

SEQ ID NO: 5014217 - DNA, 25 bp, Homo sapien
cacatttgtgattctactatccacc

SEQ ID NO: 5014218 - DNA, 25 bp, Homo sapien
ccaaggctgcatcagataaagccat

SEQ ID NO: 5014219 - DNA, 25 bp, Homo sapien
ctgccaaggctgcatcagataaagc

SEQ ID NO: 5014220 - DNA, 25 bp, Homo sapien
ctctgggagttccgggtagcgctgt

SEQ ID NO: 5014221 - DNA, 25 bp, Homo sapien
tagcgctgtaaaacccggcccctgc

SEQ ID NO: 5014222 - DNA, 25 bp, Homo sapien
agattatcaattacattactcataa

SEQ ID NO: 5014223 - DNA, 25 bp, Homo sapien
atcaattacattactcataatttcc

SEQ ID NO: 5014224 - DNA, 25 bp, Homo sapien
gattatcaattacattactcataat

SEQ ID NO: 5014225 - DNA, 25 bp, Homo sapien
tcttgattgttgagagcttgggtat

SEQ ID NO: 5014226 - DNA, 25 bp, Homo sapien
tccttatcagcttaataacgtttgg

SEQ ID NO: 5014227 - DNA, 25 bp, Homo sapien
aattgactttccgtcccctgagcat

SEQ ID NO: 5014228 - DNA, 25 bp, Homo sapien
agtttctaacttccaaacctgctct

SEQ ID NO: 5014229 - DNA, 25 bp, Homo sapien
gctctgcatttagccacaacaatac

SEQ ID NO: 5014230 - DNA, 25 bp, Homo sapien
cttctagtccaactcctcctaccca

SEQ ID NO: 5014231 - DNA, 25 bp, Homo sapien
tctagtccaactcctcctacccaca

SEQ ID NO: 5014232 - DNA, 25 bp, Homo sapien
ttctagtccaactcctcctacccac

SEQ ID NO: 5014233 - DNA, 25 bp, Homo sapien
gactaggctcttgctgtattgatgt

SEQ ID NO: 5014234 - DNA, 25 bp, Homo sapien
gaatctgtctcgcagctggctgctg

SEQ ID NO: 5014235 - DNA, 25 bp, Homo sapien
tttcacctgcattccgtctgggtgg

SEQ ID NO: 5014236 - DNA, 25 bp, Homo sapien
cttgctgtattgatgtttcacctgc

SEQ ID NO: 5014237 - DNA, 25 bp, Homo sapien
gccaaatcctcaacccctattttga

SEQ ID NO: 5014238 - DNA, 25 bp, Homo sapien
caaatcctcaacccctattttgaat

SEQ ID NO: 5014239 - DNA, 25 bp, Homo sapien
gacatgccccacttttaattggctt

SEQ ID NO: 5014240 - DNA, 25 bp, Homo sapien
aatgacatgccccacttttaattgg

SEQ ID NO: 5014241 - DNA, 25 bp, Homo sapien
taatgacatgccccacttttaattg

SEQ ID NO: 5014242 - DNA, 25 bp, Homo sapien
cagtgtaatgacatgccccactttt

SEQ ID NO: 5014243 - DNA, 25 bp, Homo sapien
atggcttgtggccatcagctatggg

SEQ ID NO: 5014244 - DNA, 25 bp, Homo sapien
ctgagatggcttgtggccatcagct

SEQ ID NO: 5014245 - DNA, 25 bp, Homo sapien
gagatggcttgtggccatcagctat

SEQ ID NO: 5014246 - DNA, 25 bp, Homo sapien
gcttgtggccatcagctatgggcac

SEQ ID NO: 5014247 - DNA, 25 bp, Homo sapien
acacagtcacaagccttcttctctg

SEQ ID NO: 5014248 - DNA, 25 bp, Homo sapien
cttacacagtcacaagccttcttct

SEQ ID NO: 5014249 - DNA, 25 bp, Homo sapien
ggtgaagacagtgggtgagaattca

SEQ ID NO: 5014250 - DNA, 25 bp, Homo sapien
tgaagacagtgggtgagaattcaat

SEQ ID NO: 5014251 - DNA, 25 bp, Homo sapien
gactcactctggctttcatcctggt

SEQ ID NO: 5014252 - DNA, 25 bp, Homo sapien
ttaaagataaatctgactcactctg

SEQ ID NO: 5014253 - DNA, 25 bp, Homo sapien
tttaaagataaatctgactcactct

SEQ ID NO: 5014254 - DNA, 25 bp, Homo sapien
taaagataaatctgactcactctgg

SEQ ID NO: 5014255 - DNA, 25 bp, Homo sapien
taatcccttattacagcttcctgaa

SEQ ID NO: 5014256 - DNA, 25 bp, Homo sapien
gcttcctgaaaaggagaccgctttg

SEQ ID NO: 5014257 - DNA, 25 bp, Homo sapien
caacagttccatttggaaccaacca

SEQ ID NO: 5014258 - DNA, 25 bp, Homo sapien
accgctttgtttctggatcaccaac

SEQ ID NO: 5014259 - DNA, 25 bp, Homo sapien
ttagtatctgcctgggtaccagatg

SEQ ID NO: 5014260 - DNA, 25 bp, Homo sapien
tctacacttatgtgctgataattta

SEQ ID NO: 5014261 - DNA, 25 bp, Homo sapien
atgatgtcattgctgtgcgctttaa

SEQ ID NO: 5014262 - DNA, 25 bp, Homo sapien
gctgataatttagtatctgcctggg

SEQ ID NO: 5014263 - DNA, 25 bp, Homo sapien
caaaaacacacatctacttgtatgt

SEQ ID NO: 5014264 - DNA, 25 bp, Homo sapien
acaatagatgttggcaaggttgtag

SEQ ID NO: 5014265 - DNA, 25 bp, Homo sapien
ccagccaatgactactcttaaaaag

SEQ ID NO: 5014266 - DNA, 25 bp, Homo sapien
ctatagaaagcagtgaggggattcc

SEQ ID NO: 5014267 - DNA, 25 bp, Homo sapien
tgtgcccagcagatgtaaaaagctt

SEQ ID NO: 5014268 - DNA, 25 bp, Homo sapien
taaaaagcttggtgcagtgatctgg

SEQ ID NO: 5014269 - DNA, 25 bp, Homo sapien
ggttaatagttgaaggtcgccagcc

SEQ ID NO: 5014270 - DNA, 25 bp, Homo sapien
tctctgcaccttgttgcggccaggc

SEQ ID NO: 5014271 - DNA, 25 bp, Homo sapien
cttgaggcagtaggcaatcacttta

SEQ ID NO: 5014272 - DNA, 25 bp, Homo sapien
gtaggcaatcactttaaaaacctga

SEQ ID NO: 5014273 - DNA, 25 bp, Homo sapien
ggcaacatatggcacactacacaat

SEQ ID NO: 5014274 - DNA, 25 bp, Homo sapien
gaaagcaggcaacatatggcacact

SEQ ID NO: 5014275 - DNA, 25 bp, Homo sapien
cttgccaagcttatcacatgtgaaa

SEQ ID NO: 5014276 - DNA, 25 bp, Homo sapien
tcacaaggcggggtgttaagtctcg

SEQ ID NO: 5014277 - DNA, 25 bp, Homo sapien
gagagaataatcttgctcgcgttca

SEQ ID NO: 5014278 - DNA, 25 bp, Homo sapien
tgttaagtctcggagaacccagggc

SEQ ID NO: 5014279 - DNA, 25 bp, Homo sapien
gccgctttccttagctgcaggcagt

SEQ ID NO: 5014280 - DNA, 25 bp, Homo sapien
cgaggcttggtgcttctgatgttgc

SEQ ID NO: 5014281 - DNA, 25 bp, Homo sapien
caaagctttgcgaggcttggtgctt

SEQ ID NO: 5014282 - DNA, 25 bp, Homo sapien
ggtgcttctgatgttgccgctttcc

SEQ ID NO: 5014283 - DNA, 25 bp, Homo sapien
tcaactcaacttgccgcaaactgaa

SEQ ID NO: 5014284 - DNA, 25 bp, Homo sapien
aacttgccgcaaactgaagaggcag

SEQ ID NO: 5014285 - DNA, 25 bp, Homo sapien
cagcagattcaactcaacttgccgc

SEQ ID NO: 5014286 - DNA, 25 bp, Homo sapien
gattcaactcaacttgccgcaaact

SEQ ID NO: 5014287 - DNA, 25 bp, Homo sapien
gcctcatctggtatggccaacctct

SEQ ID NO: 5014288 - DNA, 25 bp, Homo sapien
tctggtatggccaacctctccccaa

SEQ ID NO: 5014289 - DNA, 25 bp, Homo sapien
tttagcctcatctggtatggccaac

SEQ ID NO: 5014290 - DNA, 25 bp, Homo sapien
tagcctcatctggtatggccaacct

SEQ ID NO: 5014291 - DNA, 25 bp, Homo sapien
tgcatcaattgtcctctgcccaaga

SEQ ID NO: 5014292 - DNA, 25 bp, Homo sapien
aatcttccttcatgtgcatcaattg

SEQ ID NO: 5014293 - DNA, 25 bp, Homo sapien
tcttccttcatgtgcatcaattgtc

SEQ ID NO: 5014294 - DNA, 25 bp, Homo sapien
cagcccattcttcacatgaccttgg

SEQ ID NO: 5014295 - DNA, 25 bp, Homo sapien
tcaatccacgggatacgagtcccac

SEQ ID NO: 5014296 - DNA, 25 bp, Homo sapien
cacaacagacggagaatttggcgca

SEQ ID NO: 5014297 - DNA, 25 bp, Homo sapien
cagacggagaatttggcgcagctct

SEQ ID NO: 5014298 - DNA, 25 bp, Homo sapien
atacgagtcccacacaacagacgga

SEQ ID NO: 5014299 - DNA, 25 bp, Homo sapien
tgagtcccgtatggcgccgtattaa

SEQ ID NO: 5014300 - DNA, 25 bp, Homo sapien
tatggcgccgtattaacgaatggca

SEQ ID NO: 5014301 - DNA, 25 bp, Homo sapien
agtggccacactgagtcccgtatgg

SEQ ID NO: 5014302 - DNA, 25 bp, Homo sapien
tggcatgcaagcaccttctgttgaa

SEQ ID NO: 5014303 - DNA, 25 bp, Homo sapien
tcacagtctgtttggaaatgttaca

SEQ ID NO: 5014304 - DNA, 25 bp, Homo sapien
taaagttcttgtggcgcttgataag

SEQ ID NO: 5014305 - DNA, 25 bp, Homo sapien
cattgcttatgcataagcaccaggg

SEQ ID NO: 5014306 - DNA, 25 bp, Homo sapien
caccagggaactagaatcctgaggc

SEQ ID NO: 5014307 - DNA, 25 bp, Homo sapien
tatcatggacggtcaaggaggcgcc

SEQ ID NO: 5014308 - DNA, 25 bp, Homo sapien
gttataaaacaaccctgatgcaggc

SEQ ID NO: 5014309 - DNA, 25 bp, Homo sapien
cggcaaactcacaaggctcacaggg

SEQ ID NO: 5014310 - DNA, 25 bp, Homo sapien
ggaagcagagctcaacggcaaactc

SEQ ID NO: 5014311 - DNA, 25 bp, Homo sapien
ttcagctatccattgatatcaccag

SEQ ID NO: 5014312 - DNA, 25 bp, Homo sapien
gcttgccatttcatggccataagat

SEQ ID NO: 5014313 - DNA, 25 bp, Homo sapien
catttcatggccataagatggctgc

SEQ ID NO: 5014314 - DNA, 25 bp, Homo sapien
catctctcaggctgtcatggagaaa

SEQ ID NO: 5014315 - DNA, 25 bp, Homo sapien
tacagtgaaagggttgaaataagct

SEQ ID NO: 5014316 - DNA, 25 bp, Homo sapien
cacagtgatagactcccaggtaatg

SEQ ID NO: 5014317 - DNA, 25 bp, Homo sapien
gcagcattgggtcctgttgcactaa

SEQ ID NO: 5014318 - DNA, 25 bp, Homo sapien
tgattgcctgactataaaattctct

SEQ ID NO: 5014319 - DNA, 25 bp, Homo sapien
gtgctgtagtttcttcttttatttc

SEQ ID NO: 5014320 - DNA, 25 bp, Homo sapien
ctgtgctgtagtttcttcttttatt

SEQ ID NO: 5014321 - DNA, 25 bp, Homo sapien
tgtagtttcttcttttatttcgtca

SEQ ID NO: 5014322 - DNA, 25 bp, Homo sapien
tgctgtagtttcttcttttatttcg

SEQ ID NO: 5014323 - DNA, 25 bp, Homo sapien
gccttttcataaaaacttgactcat

SEQ ID NO: 5014324 - DNA, 25 bp, Homo sapien
tcagaaaatgccttttcataaaaac

SEQ ID NO: 5014325 - DNA, 25 bp, Homo sapien
cttttcataaaaacttgactcatgc

SEQ ID NO: 5014326 - DNA, 25 bp, Homo sapien
tttcataaaaacttgactcatgcat

SEQ ID NO: 5014327 - DNA, 25 bp, Homo sapien
tcctgacattctgccactatgtctt

SEQ ID NO: 5014328 - DNA, 25 bp, Homo sapien
ttcctgacattctgccactatgtct

SEQ ID NO: 5014329 - DNA, 25 bp, Homo sapien
ctgccaccagaaaagatgtgtactt

SEQ ID NO: 5014330 - DNA, 25 bp, Homo sapien
tgtactttagtaatcctggtgttac

SEQ ID NO: 5014331 - DNA, 25 bp, Homo sapien
gatgtgtactttagtaatcctggtg

SEQ ID NO: 5014332 - DNA, 25 bp, Homo sapien
aaagatgtgtactttagtaatcctg

SEQ ID NO: 5014333 - DNA, 25 bp, Homo sapien
ggctcagtatgtgatcaagcatctc

SEQ ID NO: 5014334 - DNA, 25 bp, Homo sapien
ctcagtatgtgatcaagcatctcca

SEQ ID NO: 5014335 - DNA, 25 bp, Homo sapien
gctcagtatgtgatcaagcatctcc

SEQ ID NO: 5014336 - DNA, 25 bp, Homo sapien
tggctcagtatgtgatcaagcatct

SEQ ID NO: 5014337 - DNA, 25 bp, Homo sapien
tgttaagttgttagtgtcagatcac

SEQ ID NO: 5014338 - DNA, 25 bp, Homo sapien
gattcttcggttgaagtctgtacac

SEQ ID NO: 5014339 - DNA, 25 bp, Homo sapien
tgtctcctgaacgtgtgtcctgccc

SEQ ID NO: 5014340 - DNA, 25 bp, Homo sapien
ttcacagtagtattagattcttcgg

SEQ ID NO: 5014341 - DNA, 25 bp, Homo sapien
ctctgtgttaaagaagctggaagcc

SEQ ID NO: 5014342 - DNA, 25 bp, Homo sapien
tctgtgttaaagaagctggaagcct

SEQ ID NO: 5014343 - DNA, 25 bp, Homo sapien
tattagcccctggttgtcaacaagg

SEQ ID NO: 5014344 - DNA, 25 bp, Homo sapien
tatccttagggagacatagccgaaa

SEQ ID NO: 5014345 - DNA, 25 bp, Homo sapien
cactatggacaaggaggaacacctg

SEQ ID NO: 5014346 - DNA, 25 bp, Homo sapien
tcaggcaaaccatacaaggcgaggt

SEQ ID NO: 5014347 - DNA, 25 bp, Homo sapien
tttgtggagcatccccagatccatc

SEQ ID NO: 5014348 - DNA, 25 bp, Homo sapien
aatattagacattccccctgccatg

SEQ ID NO: 5014349 - DNA, 25 bp, Homo sapien
cagtgggaatgtcccactagccaac

SEQ ID NO: 5014350 - DNA, 25 bp, Homo sapien
gatccatccctagagtccagcttct

SEQ ID NO: 5014351 - DNA, 25 bp, Homo sapien
ggtgagatttaatgtctagaaaaat

SEQ ID NO: 5014352 - DNA, 25 bp, Homo sapien
agactggcggtaaccccttgaccat

SEQ ID NO: 5014353 - DNA, 25 bp, Homo sapien
tctttgttgggaacaaatggtgaga

SEQ ID NO: 5014354 - DNA, 25 bp, Homo sapien
gaaaaattatcagcgcaagaaacag

SEQ ID NO: 5014355 - DNA, 25 bp, Homo sapien
gttctcgtggaattaacagggtcat

SEQ ID NO: 5014356 - DNA, 25 bp, Homo sapien
atgccagtgttcccggccctgataa

SEQ ID NO: 5014357 - DNA, 25 bp, Homo sapien
gccctgataatagtaagagttctcg

SEQ ID NO: 5014358 - DNA, 25 bp, Homo sapien
taagagttctcgtggaattaacagg

SEQ ID NO: 5014359 - DNA, 25 bp, Homo sapien
tcaaagagttcacgatgtcttccaa

SEQ ID NO: 5014360 - DNA, 25 bp, Homo sapien
gaaatattgatttgagcacccattc

SEQ ID NO: 5014361 - DNA, 25 bp, Homo sapien
gcacccattctgttctagaggctgt

SEQ ID NO: 5014362 - DNA, 25 bp, Homo sapien
ctgtgctggtccctgtaaatatgaa

SEQ ID NO: 5014363 - DNA, 25 bp, Homo sapien
tcctttccaagtccagagagaatta

SEQ ID NO: 5014364 - DNA, 25 bp, Homo sapien
ttccaagtccagagagaattagctt

SEQ ID NO: 5014365 - DNA, 25 bp, Homo sapien
tttccaagtccagagagaattagct

SEQ ID NO: 5014366 - DNA, 25 bp, Homo sapien
tgcttctctgatactccttcctttc

SEQ ID NO: 5014367 - DNA, 25 bp, Homo sapien
ggctctactccaaaggcttccattt

SEQ ID NO: 5014368 - DNA, 25 bp, Homo sapien
gatagctgttatcagtttcagagct

SEQ ID NO: 5014369 - DNA, 25 bp, Homo sapien
ccggatctctgcaccagtgccaggt

SEQ ID NO: 5014370 - DNA, 25 bp, Homo sapien
tggagccggatctctgcaccagtgc

SEQ ID NO: 5014371 - DNA, 25 bp, Homo sapien
ttttggtacacaagtcttcctaggc

SEQ ID NO: 5014372 - DNA, 25 bp, Homo sapien
ttgaagccaatagtcaccatacgtg

SEQ ID NO: 5014373 - DNA, 25 bp, Homo sapien
cacatggaaccagtcaaggcaaaac

SEQ ID NO: 5014374 - DNA, 25 bp, Homo sapien
cagaaactgtcccatagagaaaccc

SEQ ID NO: 5014375 - DNA, 25 bp, Homo sapien
tgttgtgttgtgattctttcctctg

SEQ ID NO: 5014376 - DNA, 25 bp, Homo sapien
tcctctgttgtcacaagtatgaata

SEQ ID NO: 5014377 - DNA, 25 bp, Homo sapien
gaatatcaggtaatgggcaccattc

SEQ ID NO: 5014378 - DNA, 25 bp, Homo sapien
caagtatgaatatcaggtaatgggc

SEQ ID NO: 5014379 - DNA, 25 bp, Homo sapien
aaaatatgtttggaagagctcgtgg

SEQ ID NO: 5014380 - DNA, 25 bp, Homo sapien
aaggaaaatatgtttggaagagctc

SEQ ID NO: 5014381 - DNA, 25 bp, Homo sapien
cttgaagtgtgcttatttaaaaagg

SEQ ID NO: 5014382 - DNA, 25 bp, Homo sapien
ttgaagtgtgcttatttaaaaagga

SEQ ID NO: 5014383 - DNA, 25 bp, Homo sapien
gataacactgtaactcctttcttag

SEQ ID NO: 5014384 - DNA, 25 bp, Homo sapien
acagtcctggtcaatcaccccagat

SEQ ID NO: 5014385 - DNA, 25 bp, Homo sapien
tggtcaatcaccccagataacactg

SEQ ID NO: 5014386 - DNA, 25 bp, Homo sapien
tcatcttcacagtcctggtcaatca

SEQ ID NO: 5014387 - DNA, 25 bp, Homo sapien
ttacaatagatgaaggctacattca

SEQ ID NO: 5014388 - DNA, 25 bp, Homo sapien
acaatagatgaaggctacattcatt

SEQ ID NO: 5014389 - DNA, 25 bp, Homo sapien
tacaatagatgaaggctacattcat

SEQ ID NO: 5014390 - DNA, 25 bp, Homo sapien
aatagatgaaggctacattcatttg

SEQ ID NO: 5014391 - DNA, 25 bp, Homo sapien
gtcacaagaggcctgctgtaaaaat

SEQ ID NO: 5014392 - DNA, 25 bp, Homo sapien
caagaggcctgctgtaaaaatccag

SEQ ID NO: 5014393 - DNA, 25 bp, Homo sapien
tgctgccagtaattaggcagctggg

SEQ ID NO: 5014394 - DNA, 25 bp, Homo sapien
ctgggtggcccagaaattgtcttca

SEQ ID NO: 5014395 - DNA, 25 bp, Homo sapien
gacagctccgccagaaaagcagact

SEQ ID NO: 5014396 - DNA, 25 bp, Homo sapien
cagacagcagtaatacagagactcg

SEQ ID NO: 5014397 - DNA, 25 bp, Homo sapien
aggacagctccgccagaaaagcaga

SEQ ID NO: 5014398 - DNA, 25 bp, Homo sapien
gacagcagtaatacagagactcggg

SEQ ID NO: 5014399 - DNA, 25 bp, Homo sapien
gggatacatttgttacataagtaca

SEQ ID NO: 5014400 - DNA, 25 bp, Homo sapien
tcattttcctgttgagggatacatt

SEQ ID NO: 5014401 - DNA, 25 bp, Homo sapien
tatctgaatggctgtcattttcctg

SEQ ID NO: 5014402 - DNA, 25 bp, Homo sapien
taaaagcattttatctgaatggctg

SEQ ID NO: 5014403 - DNA, 25 bp, Homo sapien
aggcatcctgtgttcatgagttgca

SEQ ID NO: 5014404 - DNA, 25 bp, Homo sapien
tacccaaagctacctacagaatgaa

SEQ ID NO: 5014405 - DNA, 25 bp, Homo sapien
gatatgagatctatcttcaacatac

SEQ ID NO: 5014406 - DNA, 25 bp, Homo sapien
gatgatttctagaactgactcatct

SEQ ID NO: 5014407 - DNA, 25 bp, Homo sapien
taatatctcaagtggccttggagta

SEQ ID NO: 5014408 - DNA, 25 bp, Homo sapien
gctcatgagggcactaaaggacatc

SEQ ID NO: 5014409 - DNA, 25 bp, Homo sapien
ctgctacccatggagtggctgcctg

SEQ ID NO: 5014410 - DNA, 25 bp, Homo sapien
tggctgcctgcaagcggctagactg

SEQ ID NO: 5014411 - DNA, 25 bp, Homo sapien
cagaatgaggtggtggactagccct

SEQ ID NO: 5014412 - DNA, 25 bp, Homo sapien
agtgcatccatgaaaaagttacgcg

SEQ ID NO: 5014413 - DNA, 25 bp, Homo sapien
tcactgagctagtagtaggccaatg

SEQ ID NO: 5014414 - DNA, 25 bp, Homo sapien
gtaattagggtaggcctcactgagc

SEQ ID NO: 5014415 - DNA, 25 bp, Homo sapien
gaattcactgaccttcacgagagca

SEQ ID NO: 5014416 - DNA, 25 bp, Homo sapien
tctagaagggcaagagttatcggac

SEQ ID NO: 5014417 - DNA, 25 bp, Homo sapien
taccactagggatgtgaccagcaag

SEQ ID NO: 5014418 - DNA, 25 bp, Homo sapien
tgtcagcggcaggaaaaacttccat

SEQ ID NO: 5014419 - DNA, 25 bp, Homo sapien
tacacaaagaaactgtgacagactc

SEQ ID NO: 5014420 - DNA, 25 bp, Homo sapien
ttacacaaagaaactgtgacagact

SEQ ID NO: 5014421 - DNA, 25 bp, Homo sapien
taaaaatgccacttggattggtccg

SEQ ID NO: 5014422 - DNA, 25 bp, Homo sapien
gaagaatctagtaaataacaccggc

SEQ ID NO: 5014423 - DNA, 25 bp, Homo sapien
tactggagggaagatacccatgtct

SEQ ID NO: 5014424 - DNA, 25 bp, Homo sapien
tttaaaacagcaggccggatatcac

SEQ ID NO: 5014425 - DNA, 25 bp, Homo sapien
catgtatagggtggctgtcaaagca

SEQ ID NO: 5014426 - DNA, 25 bp, Homo sapien
gcgaactgatactacaagcagccag

SEQ ID NO: 5014427 - DNA, 25 bp, Homo sapien
gaatgtacaggtcattatgctccca

SEQ ID NO: 5014428 - DNA, 25 bp, Homo sapien
ttacaccagttcagacagcccaaga

SEQ ID NO: 5014429 - DNA, 25 bp, Homo sapien
tggtccagatcagggtcaacatccg

SEQ ID NO: 5014430 - DNA, 25 bp, Homo sapien
tcttggtccagatcagggtcaacat

SEQ ID NO: 5014431 - DNA, 25 bp, Homo sapien
tccagatcagggtcaacatccgtgg

SEQ ID NO: 5014432 - DNA, 25 bp, Homo sapien
gatcagggtcaacatccgtggtgag

SEQ ID NO: 5014433 - DNA, 25 bp, Homo sapien
tagtagtgccaatatagctgcaagt

SEQ ID NO: 5014434 - DNA, 25 bp, Homo sapien
atagaaagccagtagtagtgccaat

SEQ ID NO: 5014435 - DNA, 25 bp, Homo sapien
tagctgcaagtacaaggccaacttc

SEQ ID NO: 5014436 - DNA, 25 bp, Homo sapien
aagccagtagtagtgccaatatagc

SEQ ID NO: 5014437 - DNA, 25 bp, Homo sapien
caatcaggagcgaaaagaaggcagt

SEQ ID NO: 5014438 - DNA, 25 bp, Homo sapien
tatatcatctggcagttcaacagct

SEQ ID NO: 5014439 - DNA, 25 bp, Homo sapien
tagcaaattctggaagacaaccaaa

SEQ ID NO: 5014440 - DNA, 25 bp, Homo sapien
tacagcttggtagtaataccttggc

SEQ ID NO: 5014441 - DNA, 25 bp, Homo sapien
tgcttttaatttggttgctcgtaaa

SEQ ID NO: 5014442 - DNA, 25 bp, Homo sapien
ctgcttttaatttggttgctcgtaa

SEQ ID NO: 5014443 - DNA, 25 bp, Homo sapien
cattcagttacccaaagtagcttgt

SEQ ID NO: 5014444 - DNA, 25 bp, Homo sapien
ttattggcattcagttacccaaagt

SEQ ID NO: 5014445 - DNA, 25 bp, Homo sapien
catggttcaatcttagtgagttgta

SEQ ID NO: 5014446 - DNA, 25 bp, Homo sapien
aaatatcacttgtaatgcctccttt

SEQ ID NO: 5014447 - DNA, 25 bp, Homo sapien
tgtgggcaccagctaagttcttccc

SEQ ID NO: 5014448 - DNA, 25 bp, Homo sapien
tgttcagccattttgctcatcaggt

SEQ ID NO: 5014449 - DNA, 25 bp, Homo sapien
tgatcgctagaggattctgttcagc

SEQ ID NO: 5014450 - DNA, 25 bp, Homo sapien
catggccaaaggtgaagtacgggaa

SEQ ID NO: 5014451 - DNA, 25 bp, Homo sapien
aatgccaggcaagatattggtgtcc

SEQ ID NO: 5014452 - DNA, 25 bp, Homo sapien
gatgcatgttcttattatagcctaa

SEQ ID NO: 5014453 - DNA, 25 bp, Homo sapien
gaaaggtacatgcatagttaggagg

SEQ ID NO: 5014454 - DNA, 25 bp, Homo sapien
tatggaagttttatccagacagtag

SEQ ID NO: 5014455 - DNA, 25 bp, Homo sapien
tactgatcaacaggaagttttatag

SEQ ID NO: 5014456 - DNA, 25 bp, Homo sapien
tctgtactgatcaacaggaagtttt

SEQ ID NO: 5014457 - DNA, 25 bp, Homo sapien
gatcaacaggaagttttatagtagc

SEQ ID NO: 5014458 - DNA, 25 bp, Homo sapien
ttgttttctgtactgatcaacagga

SEQ ID NO: 5014459 - DNA, 25 bp, Homo sapien
caagaactagtcatgtcacaagcaa

SEQ ID NO: 5014460 - DNA, 25 bp, Homo sapien
tcctagcctcaattacaatatgtca

SEQ ID NO: 5014461 - DNA, 25 bp, Homo sapien
cattccttctagtaaggcattacaa

SEQ ID NO: 5014462 - DNA, 25 bp, Homo sapien
tattgcagcagagagtacaacctga

SEQ ID NO: 5014463 - DNA, 25 bp, Homo sapien
ggagatgacctctagggtaactctg

SEQ ID NO: 5014464 - DNA, 25 bp, Homo sapien
ggacagctatccaaccaacttgttt

SEQ ID NO: 5014465 - DNA, 25 bp, Homo sapien
acagcctggatcatgaatgactgca

SEQ ID NO: 5014466 - DNA, 25 bp, Homo sapien
taaaaacgttccttgcatactcatt

SEQ ID NO: 5014467 - DNA, 25 bp, Homo sapien
aagataccactccattttaggagag

SEQ ID NO: 5014468 - DNA, 25 bp, Homo sapien
tcactgaggctatctgccaaaatgg

SEQ ID NO: 5014469 - DNA, 25 bp, Homo sapien
gtcatttaagccaacatcccagcag

SEQ ID NO: 5014470 - DNA, 25 bp, Homo sapien
tgtgtgtggctagggaagataccac

SEQ ID NO: 5014471 - DNA, 25 bp, Homo sapien
gactcagacatgtagaacctttaaa

SEQ ID NO: 5014472 - DNA, 25 bp, Homo sapien
ccaagaaatccagggagacattagc

SEQ ID NO: 5014473 - DNA, 25 bp, Homo sapien
gatggttagatagcaaactcccaag

SEQ ID NO: 5014474 - DNA, 25 bp, Homo sapien
caaagccttgcagtaatcatcattc

SEQ ID NO: 5014475 - DNA, 25 bp, Homo sapien
ccttggtaaatggaggagtccccat

SEQ ID NO: 5014476 - DNA, 25 bp, Homo sapien
aaactgcaatgagtactcaggcctc

SEQ ID NO: 5014477 - DNA, 25 bp, Homo sapien
ctgcaatgagtactcaggcctctcc

SEQ ID NO: 5014478 - DNA, 25 bp, Homo sapien
caggagtcagctgtagccttggtaa

SEQ ID NO: 5014479 - DNA, 25 bp, Homo sapien
gctaagagcttaatcaaacaaaagg

SEQ ID NO: 5014480 - DNA, 25 bp, Homo sapien
cacgctaagagcttaatcaaacaaa

SEQ ID NO: 5014481 - DNA, 25 bp, Homo sapien
tgcacgctaagagcttaatcaaaca

SEQ ID NO: 5014482 - DNA, 25 bp, Homo sapien
cactgcacgctaagagcttaatcaa

SEQ ID NO: 5014483 - DNA, 25 bp, Homo sapien
ctgaggttcacaaagggcagtttca

SEQ ID NO: 5014484 - DNA, 25 bp, Homo sapien
tgaggttcacaaagggcagtttcat

SEQ ID NO: 5014485 - DNA, 25 bp, Homo sapien
ttcatatccacttgactattacccg

SEQ ID NO: 5014486 - DNA, 25 bp, Homo sapien
tattacccgacaaaccttcagactg

SEQ ID NO: 5014487 - DNA, 25 bp, Homo sapien
gtaccactgattgacgttgcttccc

SEQ ID NO: 5014488 - DNA, 25 bp, Homo sapien
actcattttccagtaccactgattg

SEQ ID NO: 5014489 - DNA, 25 bp, Homo sapien
tttccagtaccactgattgacgttg

SEQ ID NO: 5014490 - DNA, 25 bp, Homo sapien
cagtaccactgattgacgttgcttc

SEQ ID NO: 5014491 - DNA, 25 bp, Homo sapien
aataagcaattgtcaagtttagccc

SEQ ID NO: 5014492 - DNA, 25 bp, Homo sapien
tctctgtgcacagtaaactgtaacc

SEQ ID NO: 5014493 - DNA, 25 bp, Homo sapien
taacctttccatgtgtaaacagact

SEQ ID NO: 5014494 - DNA, 25 bp, Homo sapien
caggctcaaatgaggcaaacaccaa

SEQ ID NO: 5014495 - DNA, 25 bp, Homo sapien
aagctggcaacttaatctctaatcg

SEQ ID NO: 5014496 - DNA, 25 bp, Homo sapien
tatatacactagtttctcttgagga

SEQ ID NO: 5014497 - DNA, 25 bp, Homo sapien
caaaaggcttacacactagtcccca

SEQ ID NO: 5014498 - DNA, 25 bp, Homo sapien
gctaagtggcttctacaaaagtatc

SEQ ID NO: 5014499 - DNA, 25 bp, Homo sapien
aaaatgcctggcacgttcagagaac

SEQ ID NO: 5014500 - DNA, 25 bp, Homo sapien
ggaacccaggttcattgccagaaaa

SEQ ID NO: 5014501 - DNA, 25 bp, Homo sapien
tgcccagggcaagagaataacgatg

SEQ ID NO: 5014502 - DNA, 25 bp, Homo sapien
agaaaaacctatgcttggaacccag

SEQ ID NO: 5014503 - DNA, 25 bp, Homo sapien
gtctttgatgctgccaagtctaaac

SEQ ID NO: 5014504 - DNA, 25 bp, Homo sapien
gctgccaagtctaaactctggagag

SEQ ID NO: 5014505 - DNA, 25 bp, Homo sapien
gctgccaaggggtaagatgtttcca

SEQ ID NO: 5014506 - DNA, 25 bp, Homo sapien
ttaggtagcagtgcttgcattcctg

SEQ ID NO: 5014507 - DNA, 25 bp, Homo sapien
aagtagataacccttccagatgtgg

SEQ ID NO: 5014508 - DNA, 25 bp, Homo sapien
tgttgctggctttgacgttggaaga

SEQ ID NO: 5014509 - DNA, 25 bp, Homo sapien
caacaaaataagtcagattgctgca

SEQ ID NO: 5014510 - DNA, 25 bp, Homo sapien
gaagaacctcaaaatggacagattg

SEQ ID NO: 5014511 - DNA, 25 bp, Homo sapien
cattaagtatgagccgagtgaagca

SEQ ID NO: 5014512 - DNA, 25 bp, Homo sapien
cacgcggacaccaacatctgatgga

SEQ ID NO: 5014513 - DNA, 25 bp, Homo sapien
tggattcaggaatacaccaagctcc

SEQ ID NO: 5014514 - DNA, 25 bp, Homo sapien
aacagctctacaggtttagcacacc

SEQ ID NO: 5014515 - DNA, 25 bp, Homo sapien
cggactccgggtttctcttgcagag

SEQ ID NO: 5014516 - DNA, 25 bp, Homo sapien
gaggtgcgcccgctttcattcccgg

SEQ ID NO: 5014517 - DNA, 25 bp, Homo sapien
gacggaacgatcgtctcccaaacgc

SEQ ID NO: 5014518 - DNA, 25 bp, Homo sapien
ttagggctcgctaaagaggtgcgcc

SEQ ID NO: 5014519 - DNA, 25 bp, Homo sapien
gctgtccacggttctgtcactcagg

SEQ ID NO: 5014520 - DNA, 25 bp, Homo sapien
ggccgacaaacttcgtgtcctgtgg

SEQ ID NO: 5014521 - DNA, 25 bp, Homo sapien
ctgccaaggcaagggccgacaaact

SEQ ID NO: 5014522 - DNA, 25 bp, Homo sapien
tgggaaatgttgctgtccacggttc

SEQ ID NO: 5014523 - DNA, 25 bp, Homo sapien
ctgaaacaggtgcacttccctgaca

SEQ ID NO: 5014524 - DNA, 25 bp, Homo sapien
caaacagcacttctacatctactag

SEQ ID NO: 5014525 - DNA, 25 bp, Homo sapien
ctacatctactagctgctggacatc

SEQ ID NO: 5014526 - DNA, 25 bp, Homo sapien
tgaaacaggtgcacttccctgacag

SEQ ID NO: 5014527 - DNA, 25 bp, Homo sapien
ccatgggcaccttaccagttttagc

SEQ ID NO: 5014528 - DNA, 25 bp, Homo sapien
ctgaagctgaagaaagcaactagcc

SEQ ID NO: 5014529 - DNA, 25 bp, Homo sapien
ccataatactgaagctgaagaaagc

SEQ ID NO: 5014530 - DNA, 25 bp, Homo sapien
aactagcccagtcttcctagagggc

SEQ ID NO: 5014531 - DNA, 25 bp, Homo sapien
tctgctcatgttccaaggaactccc

SEQ ID NO: 5014532 - DNA, 25 bp, Homo sapien
ggatacctggttgcttaaggtgtat

SEQ ID NO: 5014533 - DNA, 25 bp, Homo sapien
actcccacaatcaaggatacctggt

SEQ ID NO: 5014534 - DNA, 25 bp, Homo sapien
caatcaaggatacctggttgcttaa

SEQ ID NO: 5014535 - DNA, 25 bp, Homo sapien
tattcgacctttcgaaacatatttc

SEQ ID NO: 5014536 - DNA, 25 bp, Homo sapien
tcctttgcaataaatcatcacttat

SEQ ID NO: 5014537 - DNA, 25 bp, Homo sapien
atgtaaaacagaagatatgccagtt

SEQ ID NO: 5014538 - DNA, 25 bp, Homo sapien
gccagttttatgaaagtccaggtta

SEQ ID NO: 5014539 - DNA, 25 bp, Homo sapien
tgttgctattttaggcataaggact

SEQ ID NO: 5014540 - DNA, 25 bp, Homo sapien
ttaatatgtaaagaccaggggactc

SEQ ID NO: 5014541 - DNA, 25 bp, Homo sapien
tactttagtggtgaagtcagacaaa

SEQ ID NO: 5014542 - DNA, 25 bp, Homo sapien
aatgacaaccttaagggactcatac

SEQ ID NO: 5014543 - DNA, 25 bp, Homo sapien
ttttcccaaactcaccagcaggata

SEQ ID NO: 5014544 - DNA, 25 bp, Homo sapien
cactcctgtagtggcagagcatctc

SEQ ID NO: 5014545 - DNA, 25 bp, Homo sapien
caccggcaggcctgtttgcagataa

SEQ ID NO: 5014546 - DNA, 25 bp, Homo sapien
gcagataaggagacgctgcatgccc

SEQ ID NO: 5014547 - DNA, 25 bp, Homo sapien
ctgttccaagtcctgtgagtagcta

SEQ ID NO: 5014548 - DNA, 25 bp, Homo sapien
cataattaggcacatcaagcacaga

SEQ ID NO: 5014549 - DNA, 25 bp, Homo sapien
ttatgtagggaacatagccgtgttg

SEQ ID NO: 5014550 - DNA, 25 bp, Homo sapien
tttaaattcaaagcactgttccaag

SEQ ID NO: 5014551 - DNA, 25 bp, Homo sapien
tcaagaaataaatgcgccgctgtct

SEQ ID NO: 5014552 - DNA, 25 bp, Homo sapien
ttgcaacctgctgtgaaaaatattc

SEQ ID NO: 5014553 - DNA, 25 bp, Homo sapien
caattccttttaatggcacgaggat

SEQ ID NO: 5014554 - DNA, 25 bp, Homo sapien
ctcttaatgataggcctgtggcaca

SEQ ID NO: 5014555 - DNA, 25 bp, Homo sapien
tagctaacctaaggaaagatttaga

SEQ ID NO: 5014556 - DNA, 25 bp, Homo sapien
cacgggtgcttctattagctaacct

SEQ ID NO: 5014557 - DNA, 25 bp, Homo sapien
tcttcaccaatttgctgtaatagca

SEQ ID NO: 5014558 - DNA, 25 bp, Homo sapien
aatttgctgtaatagcagggactga

SEQ ID NO: 5014559 - DNA, 25 bp, Homo sapien
caatgtaaacatgtacttgacaaac

SEQ ID NO: 5014560 - DNA, 25 bp, Homo sapien
aacatgtacttgacaaacaccagca

SEQ ID NO: 5014561 - DNA, 25 bp, Homo sapien
tcttgaaaatttacagcagtcagca

SEQ ID NO: 5014562 - DNA, 25 bp, Homo sapien
gaaaatttacagcagtcagcaatgt

SEQ ID NO: 5014563 - DNA, 25 bp, Homo sapien
atcacattgagtctggtaccaccgc

SEQ ID NO: 5014564 - DNA, 25 bp, Homo sapien
tattcccttcatggatcagcactgg

SEQ ID NO: 5014565 - DNA, 25 bp, Homo sapien
cataggccacagtactctagaggaa

SEQ ID NO: 5014566 - DNA, 25 bp, Homo sapien
gaaatacacaatacaccagaggccc

SEQ ID NO: 5014567 - DNA, 25 bp, Homo sapien
tgtggtggagtctataagcaaaacc

SEQ ID NO: 5014568 - DNA, 25 bp, Homo sapien
ctaatagcctgtgggcttagttgtg

SEQ ID NO: 5014569 - DNA, 25 bp, Homo sapien
tagtgataagcagaatgtatgatgc

SEQ ID NO: 5014570 - DNA, 25 bp, Homo sapien
caagcacatgagaaagtaattggct

SEQ ID NO: 5014571 - DNA, 25 bp, Homo sapien
tccttaatcactatgccagagacgg

SEQ ID NO: 5014572 - DNA, 25 bp, Homo sapien
caagaatgacttggtaaaggcctaa

SEQ ID NO: 5014573 - DNA, 25 bp, Homo sapien
tgtttgctgtaagatgtcacaccaa

SEQ ID NO: 5014574 - DNA, 25 bp, Homo sapien
cagagacggtacctccacaatgcac

SEQ ID NO: 5014575 - DNA, 25 bp, Homo sapien
tgtttaaagcagtcattcccatggg

SEQ ID NO: 5014576 - DNA, 25 bp, Homo sapien
gctgaatgcacgtaaagggctgagc

SEQ ID NO: 5014577 - DNA, 25 bp, Homo sapien
aagggcatgagacacttttgagatg

SEQ ID NO: 5014578 - DNA, 25 bp, Homo sapien
ggctgagccaaccaaagggcatgag

SEQ ID NO: 5014579 - DNA, 25 bp, Homo sapien
tgtagtttttatgaacaggattcaa

SEQ ID NO: 5014580 - DNA, 25 bp, Homo sapien
gtagtttttatgaacaggattcaaa

SEQ ID NO: 5014581 - DNA, 25 bp, Homo sapien
tttgtattccgacgccaaatagcat

SEQ ID NO: 5014582 - DNA, 25 bp, Homo sapien
tttttgtattccgacgccaaatagc

SEQ ID NO: 5014583 - DNA, 25 bp, Homo sapien
ttttgtattccgacgccaaatagca

SEQ ID NO: 5014584 - DNA, 25 bp, Homo sapien
gtcctagccctggcacaactctcag

SEQ ID NO: 5014585 - DNA, 25 bp, Homo sapien
caagaaagacttcttgttgaacacc

SEQ ID NO: 5014586 - DNA, 25 bp, Homo sapien
cagtcctagccctggcacaactctc

SEQ ID NO: 5014587 - DNA, 25 bp, Homo sapien
gcaagaaagacttcttgttgaacac

SEQ ID NO: 5014588 - DNA, 25 bp, Homo sapien
gacacagcttgaatgttgggtggtt

SEQ ID NO: 5014589 - DNA, 25 bp, Homo sapien
cagcttgaatgttgggtggttgttt

SEQ ID NO: 5014590 - DNA, 25 bp, Homo sapien
cagacacagcttgaatgttgggtgg

SEQ ID NO: 5014591 - DNA, 25 bp, Homo sapien
agcagacacagcttgaatgttgggt

SEQ ID NO: 5014592 - DNA, 25 bp, Homo sapien
ctttgaagttgcagagccatgctga

SEQ ID NO: 5014593 - DNA, 25 bp, Homo sapien
tcctcgggcggcagatattctttcc

SEQ ID NO: 5014594 - DNA, 25 bp, Homo sapien
gacactcactgttgcctccataggc

SEQ ID NO: 5014595 - DNA, 25 bp, Homo sapien
aattccactgccactgatgggctct

SEQ ID NO: 5014596 - DNA, 25 bp, Homo sapien
gtcaactggagagtcaaggtttctc

SEQ ID NO: 5014597 - DNA, 25 bp, Homo sapien
catatgccgtgtgtcgagagacaca

SEQ ID NO: 5014598 - DNA, 25 bp, Homo sapien
cagtggtcaactggagagtcaaggt

SEQ ID NO: 5014599 - DNA, 25 bp, Homo sapien
cgtgtgtcgagagacacagtggtca

SEQ ID NO: 5014600 - DNA, 25 bp, Homo sapien
aagagggaggatttgctgtctaaat

SEQ ID NO: 5014601 - DNA, 25 bp, Homo sapien
gaagagggaggatttgctgtctaaa

SEQ ID NO: 5014602 - DNA, 25 bp, Homo sapien
tggattcagaaaacgcattaaaacc

SEQ ID NO: 5014603 - DNA, 25 bp, Homo sapien
cacctccataggagtctctttctgt

SEQ ID NO: 5014604 - DNA, 25 bp, Homo sapien
gatattgatttctccataactccct

SEQ ID NO: 5014605 - DNA, 25 bp, Homo sapien
cattaaaaccccatgctgtcatgag

SEQ ID NO: 5014606 - DNA, 25 bp, Homo sapien
atgtccaattcgcacttccgtcctg

SEQ ID NO: 5014607 - DNA, 25 bp, Homo sapien
tccacaaatgtccaattcgcacttc

SEQ ID NO: 5014608 - DNA, 25 bp, Homo sapien
cctgcctgtctacagggaatattct

SEQ ID NO: 5014609 - DNA, 25 bp, Homo sapien
cttccgtcctgcctgtctacaggga

SEQ ID NO: 5014610 - DNA, 25 bp, Homo sapien
tttggagatcgggttctctttggag

SEQ ID NO: 5014611 - DNA, 25 bp, Homo sapien
aagtcctggcccatgcttgcttgcc

SEQ ID NO: 5014612 - DNA, 25 bp, Homo sapien
aaagtcctggcccatgcttgcttgc

SEQ ID NO: 5014613 - DNA, 25 bp, Homo sapien
ctttggagttcgcatgctgctggat

SEQ ID NO: 5014614 - DNA, 25 bp, Homo sapien
gtgacaattgacagttgttttacaa

SEQ ID NO: 5014615 - DNA, 25 bp, Homo sapien
tcctctgagggtacaagacgatctg

SEQ ID NO: 5014616 - DNA, 25 bp, Homo sapien
agacgatctgaggactcatgtgaca

SEQ ID NO: 5014617 - DNA, 25 bp, Homo sapien
gggatacatctcgagcatttggcat

SEQ ID NO: 5014618 - DNA, 25 bp, Homo sapien
ctgaaaaatgctttttccaacatca

SEQ ID NO: 5014619 - DNA, 25 bp, Homo sapien
tgaaaaatgctttttccaacatcaa

SEQ ID NO: 5014620 - DNA, 25 bp, Homo sapien
aaaatgctttttccaacatcaacta

SEQ ID NO: 5014621 - DNA, 25 bp, Homo sapien
atgctttttccaacatcaactatgc

SEQ ID NO: 5014622 - DNA, 25 bp, Homo sapien
ttcactgtggcaagaggtacaaaca

SEQ ID NO: 5014623 - DNA, 25 bp, Homo sapien
catacttgagggttggtgatacccg

SEQ ID NO: 5014624 - DNA, 25 bp, Homo sapien
gtacaaacaagggagcgaactgcat

SEQ ID NO: 5014625 - DNA, 25 bp, Homo sapien
tatgcgatttgctgacacctgcaag

SEQ ID NO: 5014626 - DNA, 25 bp, Homo sapien
ttctgccatctgtcagcaaacttat

SEQ ID NO: 5014627 - DNA, 25 bp, Homo sapien
tcaactgattctgccatctgtcagc

SEQ ID NO: 5014628 - DNA, 25 bp, Homo sapien
ttgttcttttcatgaagatacatat

SEQ ID NO: 5014629 - DNA, 25 bp, Homo sapien
tgccatctgtcagcaaacttattgc

SEQ ID NO: 5014630 - DNA, 25 bp, Homo sapien
cagtgctcgtggttaaattcattct

SEQ ID NO: 5014631 - DNA, 25 bp, Homo sapien
acagagacacactttgatggaggca

SEQ ID NO: 5014632 - DNA, 25 bp, Homo sapien
ttgtgaccaagccaccagtgctcgt

SEQ ID NO: 5014633 - DNA, 25 bp, Homo sapien
tgtctccccgacacatagccttgtg

SEQ ID NO: 5014634 - DNA, 25 bp, Homo sapien
tttattcttttgtcgttctacagtc

SEQ ID NO: 5014635 - DNA, 25 bp, Homo sapien
gttctacagtctcaatcgtgtatag

SEQ ID NO: 5014636 - DNA, 25 bp, Homo sapien
ttttgtcgttctacagtctcaatcg

SEQ ID NO: 5014637 - DNA, 25 bp, Homo sapien
tgtcgttctacagtctcaatcgtgt

SEQ ID NO: 5014638 - DNA, 25 bp, Homo sapien
tgttggactcagtcttgagctgatc

SEQ ID NO: 5014639 - DNA, 25 bp, Homo sapien
tttgttggactcagtcttgagctga

SEQ ID NO: 5014640 - DNA, 25 bp, Homo sapien
ttgttggactcagtcttgagctgat

SEQ ID NO: 5014641 - DNA, 25 bp, Homo sapien
tagctcaactcttgaagtagccagg

SEQ ID NO: 5014642 - DNA, 25 bp, Homo sapien
cctgtgattagctcaactcttgaag

SEQ ID NO: 5014643 - DNA, 25 bp, Homo sapien
gaatcttccctgtgattagctcaac

SEQ ID NO: 5014644 - DNA, 25 bp, Homo sapien
actgaatcttccctgtgattagctc

SEQ ID NO: 5014645 - DNA, 25 bp, Homo sapien
gaaaattctgacgtgaacacttgag

SEQ ID NO: 5014646 - DNA, 25 bp, Homo sapien
catatcttacggcatcttcatcata

SEQ ID NO: 5014647 - DNA, 25 bp, Homo sapien
taccatagctattgactggacagag

SEQ ID NO: 5014648 - DNA, 25 bp, Homo sapien
ggagacttgagcaatagaggcctta

SEQ ID NO: 5014649 - DNA, 25 bp, Homo sapien
taaatacttcagctcatcagacgct

SEQ ID NO: 5014650 - DNA, 25 bp, Homo sapien
tcagctcatcagacgctgctttact

SEQ ID NO: 5014651 - DNA, 25 bp, Homo sapien
tacttcagctcatcagacgctgctt

SEQ ID NO: 5014652 - DNA, 25 bp, Homo sapien
gctcatcagacgctgctttactcat

SEQ ID NO: 5014653 - DNA, 25 bp, Homo sapien
gagtcatacggtatataacctttgg

SEQ ID NO: 5014654 - DNA, 25 bp, Homo sapien
tctaggacaggaacgaaggtaaggc

SEQ ID NO: 5014655 - DNA, 25 bp, Homo sapien
tttaagaggacatcaaaatctcagt

SEQ ID NO: 5014656 - DNA, 25 bp, Homo sapien
taggcactcgccttgagtactcggg

SEQ ID NO: 5014657 - DNA, 25 bp, Homo sapien
ccaaacggttgaggagcctcttcca

SEQ ID NO: 5014658 - DNA, 25 bp, Homo sapien
tggcctgggtggacctttgtccttg

SEQ ID NO: 5014659 - DNA, 25 bp, Homo sapien
tccatggcctgggtggacctttgtc

SEQ ID NO: 5014660 - DNA, 25 bp, Homo sapien
ctcttccatggcctgggtggacctt

SEQ ID NO: 5014661 - DNA, 25 bp, Homo sapien
gtctccccaaaagacgcctattgag

SEQ ID NO: 5014662 - DNA, 25 bp, Homo sapien
gacgcctattgagagcattgtctgg

SEQ ID NO: 5014663 - DNA, 25 bp, Homo sapien
cattgtctgggcttgtgtattagac

SEQ ID NO: 5014664 - DNA, 25 bp, Homo sapien
cacatcagggtgacaaatcccgtta

SEQ ID NO: 5014665 - DNA, 25 bp, Homo sapien
caattcacctagaatcacgttggct

SEQ ID NO: 5014666 - DNA, 25 bp, Homo sapien
cgttggctaatacaatctgtgcctg

SEQ ID NO: 5014667 - DNA, 25 bp, Homo sapien
aattccaacccagtgaaacctgctg

SEQ ID NO: 5014668 - DNA, 25 bp, Homo sapien
catattcatcctgaacgctgacagt

SEQ ID NO: 5014669 - DNA, 25 bp, Homo sapien
attgagaaagagccgtgtgctcggt

SEQ ID NO: 5014670 - DNA, 25 bp, Homo sapien
agaaagagccgtgtgctcggtgtta

SEQ ID NO: 5014671 - DNA, 25 bp, Homo sapien
ctgattgagaaagagccgtgtgctc

SEQ ID NO: 5014672 - DNA, 25 bp, Homo sapien
tgagaaagagccgtgtgctcggtgt

SEQ ID NO: 5014673 - DNA, 25 bp, Homo sapien
gaacctgactctgcctcaacacggc

SEQ ID NO: 5014674 - DNA, 25 bp, Homo sapien
ctgaacctgactctgcctcaacacg

SEQ ID NO: 5014675 - DNA, 25 bp, Homo sapien
cctgactctgcctcaacacggccat

SEQ ID NO: 5014676 - DNA, 25 bp, Homo sapien
acctgactctgcctcaacacggcca

SEQ ID NO: 5014677 - DNA, 25 bp, Homo sapien
tgtcacctgattggtgaactgcctt

SEQ ID NO: 5014678 - DNA, 25 bp, Homo sapien
ctgtcacctgattggtgaactgcct

SEQ ID NO: 5014679 - DNA, 25 bp, Homo sapien
ctgattggtgaactgccttgagaaa

SEQ ID NO: 5014680 - DNA, 25 bp, Homo sapien
cctgattggtgaactgccttgagaa

SEQ ID NO: 5014681 - DNA, 25 bp, Homo sapien
tcactggcgctgttggcagatactc

SEQ ID NO: 5014682 - DNA, 25 bp, Homo sapien
tgagaggccaagatcaaaagcactt

SEQ ID NO: 5014683 - DNA, 25 bp, Homo sapien
tgcccgtaaacaaggaaggcctgcc

SEQ ID NO: 5014684 - DNA, 25 bp, Homo sapien
ttaagaagcatgaggcgaggagtcc

SEQ ID NO: 5014685 - DNA, 25 bp, Homo sapien
gattcacttgtttaatgttggaaga

SEQ ID NO: 5014686 - DNA, 25 bp, Homo sapien
attgtagagtcaaaagcccccaggc

SEQ ID NO: 5014687 - DNA, 25 bp, Homo sapien
aagagattgtagagtcaaaagcccc

SEQ ID NO: 5014688 - DNA, 25 bp, Homo sapien
gggtgcgcaggattcacttgtttaa

SEQ ID NO: 5014689 - DNA, 25 bp, Homo sapien
tgaagcctgcctgctaatgaaggcc

SEQ ID NO: 5014690 - DNA, 25 bp, Homo sapien
catttaaccggactgattttactgc

SEQ ID NO: 5014691 - DNA, 25 bp, Homo sapien
taaagtctgctctatagaagtaaac

SEQ ID NO: 5014692 - DNA, 25 bp, Homo sapien
gctttgtcaaacttattgggcatga

SEQ ID NO: 5014693 - DNA, 25 bp, Homo sapien
aaatgatgaataactttttctgaag

SEQ ID NO: 5014694 - DNA, 25 bp, Homo sapien
aatgatgaataactttttctgaagc

SEQ ID NO: 5014695 - DNA, 25 bp, Homo sapien
tcctattatctacatggcagtagaa

SEQ ID NO: 5014696 - DNA, 25 bp, Homo sapien
ctccttggactccactttcctatta

SEQ ID NO: 5014697 - DNA, 25 bp, Homo sapien
ccttggactccactttcctattatc

SEQ ID NO: 5014698 - DNA, 25 bp, Homo sapien
ctattatctacatggcagtagaaaa

SEQ ID NO: 5014699 - DNA, 25 bp, Homo sapien
tccaatccctgacaacacggccttt

SEQ ID NO: 5014700 - DNA, 25 bp, Homo sapien
cagctccaatccctgacaacacggc

SEQ ID NO: 5014701 - DNA, 25 bp, Homo sapien
ctgacaacacggcctttctgcaggg

SEQ ID NO: 5014702 - DNA, 25 bp, Homo sapien
caatccctgacaacacggcctttct

SEQ ID NO: 5014703 - DNA, 25 bp, Homo sapien
caaacagagaccggtctttttctct

SEQ ID NO: 5014704 - DNA, 25 bp, Homo sapien
ccacccaatctagaaacccattgtt

SEQ ID NO: 5014705 - DNA, 25 bp, Homo sapien
ttccacccaatctagaaacccattg

SEQ ID NO: 5014706 - DNA, 25 bp, Homo sapien
cttccacccaatctagaaacccatt

SEQ ID NO: 5014707 - DNA, 25 bp, Homo sapien
gaaagtctcacttgtggtgacaaga

SEQ ID NO: 5014708 - DNA, 25 bp, Homo sapien
tgacgaagtattggcaaccctaact

SEQ ID NO: 5014709 - DNA, 25 bp, Homo sapien
tgttaaaaggcaaccatccattctg

SEQ ID NO: 5014710 - DNA, 25 bp, Homo sapien
tgaagacaagaaacgattccagtgc

SEQ ID NO: 5014711 - DNA, 25 bp, Homo sapien
taaattgcgatccacattgcaactc

SEQ ID NO: 5014712 - DNA, 25 bp, Homo sapien
ccaggattaagacatcatggagact

SEQ ID NO: 5014713 - DNA, 25 bp, Homo sapien
tcaattaagggaggcccaggattaa

SEQ ID NO: 5014714 - DNA, 25 bp, Homo sapien
cagttcagcacagttagaagtcaat

SEQ ID NO: 5014715 - DNA, 25 bp, Homo sapien
tcttcagttcaggttcatggtcttt

SEQ ID NO: 5014716 - DNA, 25 bp, Homo sapien
tctttggagcagaagtggttttgaa

SEQ ID NO: 5014717 - DNA, 25 bp, Homo sapien
agcagaagtggttttgaagaggaaa

SEQ ID NO: 5014718 - DNA, 25 bp, Homo sapien
caggttcatggtctttggagcagaa

SEQ ID NO: 5014719 - DNA, 25 bp, Homo sapien
ttagttatttggttattagatccag

SEQ ID NO: 5014720 - DNA, 25 bp, Homo sapien
ggttattagatccagtgatggacat

SEQ ID NO: 5014721 - DNA, 25 bp, Homo sapien
tatttggttattagatccagtgatg

SEQ ID NO: 5014722 - DNA, 25 bp, Homo sapien
ttggttattagatccagtgatggac

SEQ ID NO: 5014723 - DNA, 25 bp, Homo sapien
ctccagaagtttcttgtttttccat

SEQ ID NO: 5014724 - DNA, 25 bp, Homo sapien
ccttcttaattgatgagtctgggat

SEQ ID NO: 5014725 - DNA, 25 bp, Homo sapien
aacctccttcttaattgatgagtct

SEQ ID NO: 5014726 - DNA, 25 bp, Homo sapien
taattgatgagtctgggatgtggaa

SEQ ID NO: 5014727 - DNA, 25 bp, Homo sapien
cttgcaaaaccctcctagcctctct

SEQ ID NO: 5014728 - DNA, 25 bp, Homo sapien
catgacaactgagtgagtacaccag

SEQ ID NO: 5014729 - DNA, 25 bp, Homo sapien
tctgacaccttagttggcatgacaa

SEQ ID NO: 5014730 - DNA, 25 bp, Homo sapien
caccttagttggcatgacaactgag

SEQ ID NO: 5014731 - DNA, 25 bp, Homo sapien
ctgatcttctgacaccttagttggc

SEQ ID NO: 5014732 - DNA, 25 bp, Homo sapien
aagcgtcagtggagagcctttcaga

SEQ ID NO: 5014733 - DNA, 25 bp, Homo sapien
tcaagcgtcagtggagagcctttca

SEQ ID NO: 5014734 - DNA, 25 bp, Homo sapien
taaccatcaagcgtcagtggagagc

SEQ ID NO: 5014735 - DNA, 25 bp, Homo sapien
ccatcaagcgtcagtggagagcctt

SEQ ID NO: 5014736 - DNA, 25 bp, Homo sapien
tgggtgaaaagaaatatttacagta

SEQ ID NO: 5014737 - DNA, 25 bp, Homo sapien
gaaaagaaatatttacagtagctct

SEQ ID NO: 5014738 - DNA, 25 bp, Homo sapien
ctgggtgaaaagaaatatttacagt

SEQ ID NO: 5014739 - DNA, 25 bp, Homo sapien
aagaaatatttacagtagctctgaa

SEQ ID NO: 5014740 - DNA, 25 bp, Homo sapien
tactgacatctttgcgaagctttgc

SEQ ID NO: 5014741 - DNA, 25 bp, Homo sapien
ggatggtgacaattaatactgacat

SEQ ID NO: 5014742 - DNA, 25 bp, Homo sapien
acatctttgcgaagctttgctggga

SEQ ID NO: 5014743 - DNA, 25 bp, Homo sapien
gacaattaatactgacatctttgcg

SEQ ID NO: 5014744 - DNA, 25 bp, Homo sapien
ggacaaattccctttcgcctgcatt

SEQ ID NO: 5014745 - DNA, 25 bp, Homo sapien
ccagagtgcctactcctgacaggct

SEQ ID NO: 5014746 - DNA, 25 bp, Homo sapien
tcgtttcctcatggcggaatgcatg

SEQ ID NO: 5014747 - DNA, 25 bp, Homo sapien
tatggctaggctcatctgcacgctc

SEQ ID NO: 5014748 - DNA, 25 bp, Homo sapien
aaccaaatgaccagtccacagagcc

SEQ ID NO: 5014749 - DNA, 25 bp, Homo sapien
ggaaccaaatgaccagtccacagag

SEQ ID NO: 5014750 - DNA, 25 bp, Homo sapien
gaaccaaatgaccagtccacagagc

SEQ ID NO: 5014751 - DNA, 25 bp, Homo sapien
accaaatgaccagtccacagagcca

SEQ ID NO: 5014752 - DNA, 25 bp, Homo sapien
taagttttcctctaacacgctatcc

SEQ ID NO: 5014753 - DNA, 25 bp, Homo sapien
cattatagtgtatgaggctttccac

SEQ ID NO: 5014754 - DNA, 25 bp, Homo sapien
cacgctatccatagcttgatcagca

SEQ ID NO: 5014755 - DNA, 25 bp, Homo sapien
cacaggacgatggtggttaagtttt

SEQ ID NO: 5014756 - DNA, 25 bp, Homo sapien
cacttgagttaagcaggaggctgca

SEQ ID NO: 5014757 - DNA, 25 bp, Homo sapien
aatttcttcagtcagggtatgggcc

SEQ ID NO: 5014758 - DNA, 25 bp, Homo sapien
gatgctacccgaaatgagcttccag

SEQ ID NO: 5014759 - DNA, 25 bp, Homo sapien
cctgatagccagtagggaggcctta

SEQ ID NO: 5014760 - DNA, 25 bp, Homo sapien
tagaacctggtcctctggcaccctg

SEQ ID NO: 5014761 - DNA, 25 bp, Homo sapien
tccttttcccagaccacctggagtc

SEQ ID NO: 5014762 - DNA, 25 bp, Homo sapien
caatgaatgggctagaacctggtcc

SEQ ID NO: 5014763 - DNA, 25 bp, Homo sapien
ggagtcctccgcaatccagcaatga

SEQ ID NO: 5014764 - DNA, 25 bp, Homo sapien
gatggctgatacttctggattggtt

SEQ ID NO: 5014765 - DNA, 25 bp, Homo sapien
tggctgatacttctggattggttgg

SEQ ID NO: 5014766 - DNA, 25 bp, Homo sapien
ggagatggctgatacttctggattg

SEQ ID NO: 5014767 - DNA, 25 bp, Homo sapien
gctgatacttctggattggttggtg

SEQ ID NO: 5014768 - DNA, 25 bp, Homo sapien
caggattccaagacaaatgggtctt

SEQ ID NO: 5014769 - DNA, 25 bp, Homo sapien
cagatccctctctatagcaaacaat

SEQ ID NO: 5014770 - DNA, 25 bp, Homo sapien
tcctcgttttattagttatctaata

SEQ ID NO: 5014771 - DNA, 25 bp, Homo sapien
tattattacctgttcgttgatctca

SEQ ID NO: 5014772 - DNA, 25 bp, Homo sapien
agagaccacccagaccatctgttgg

SEQ ID NO: 5014773 - DNA, 25 bp, Homo sapien
ggcaggattcagtttgtcataagcc

SEQ ID NO: 5014774 - DNA, 25 bp, Homo sapien
ctctggtcagaggtgctcagctctt

SEQ ID NO: 5014775 - DNA, 25 bp, Homo sapien
acccagaccatctgttggccagagt

SEQ ID NO: 5014776 - DNA, 25 bp, Homo sapien
gctcagtatgaagcaatgtgcttca

SEQ ID NO: 5014777 - DNA, 25 bp, Homo sapien
tgcttcatctctgagaacgctgctc

SEQ ID NO: 5014778 - DNA, 25 bp, Homo sapien
tgtgcttcatctctgagaacgctgc

SEQ ID NO: 5014779 - DNA, 25 bp, Homo sapien
agctggagctcagtatgaagcaatg

SEQ ID NO: 5014780 - DNA, 25 bp, Homo sapien
agaaaacgctcccatccaaggtagg

SEQ ID NO: 5014781 - DNA, 25 bp, Homo sapien
ggatgggaccagattacctccaagg

SEQ ID NO: 5014782 - DNA, 25 bp, Homo sapien
gtaaataactttctgacttgggcaa

SEQ ID NO: 5014783 - DNA, 25 bp, Homo sapien
tacctccaaggtagatgaaatgcca

SEQ ID NO: 5014784 - DNA, 25 bp, Homo sapien
ctagtctcataaaagattgtagtac

SEQ ID NO: 5014785 - DNA, 25 bp, Homo sapien
taagaaccgtcctttgattcattat

SEQ ID NO: 5014786 - DNA, 25 bp, Homo sapien
tctgtctcttaacaggatgctataa

SEQ ID NO: 5014787 - DNA, 25 bp, Homo sapien
agtacttgattcttgagatgctgaa

SEQ ID NO: 5014788 - DNA, 25 bp, Homo sapien
agtatctgctttttctctcctcttc

SEQ ID NO: 5014789 - DNA, 25 bp, Homo sapien
tagagtatctgctttttctctcctc

SEQ ID NO: 5014790 - DNA, 25 bp, Homo sapien
ctttagagtatctgctttttctctc

SEQ ID NO: 5014791 - DNA, 25 bp, Homo sapien
gagtatctgctttttctctcctctt

SEQ ID NO: 5014792 - DNA, 25 bp, Homo sapien
tgactcaaattctggtcctcgctag

SEQ ID NO: 5014793 - DNA, 25 bp, Homo sapien
tctcatcttgctgtgtaagacatcc

SEQ ID NO: 5014794 - DNA, 25 bp, Homo sapien
tctggtcctcgctagagagccaagt

SEQ ID NO: 5014795 - DNA, 25 bp, Homo sapien
tgctgtgtaagacatccccattact

SEQ ID NO: 5014796 - DNA, 25 bp, Homo sapien
ttctgatgcagtgctgttcagtccc

SEQ ID NO: 5014797 - DNA, 25 bp, Homo sapien
cttctgatgcagtgctgttcagtcc

SEQ ID NO: 5014798 - DNA, 25 bp, Homo sapien
cttcagaggctctttggatgtggtt

SEQ ID NO: 5014799 - DNA, 25 bp, Homo sapien
tacagattgaaccacacttcagagg

SEQ ID NO: 5014800 - DNA, 25 bp, Homo sapien
ctattctaaaatggccctgagaggt

SEQ ID NO: 5014801 - DNA, 25 bp, Homo sapien
agaggtagcatacagattgaaccac

SEQ ID NO: 5014802 - DNA, 25 bp, Homo sapien
tatttgaaacgtggagtcccaaggc

SEQ ID NO: 5014803 - DNA, 25 bp, Homo sapien
ggtgcagtgattcagccacccggga

SEQ ID NO: 5014804 - DNA, 25 bp, Homo sapien
cacttgcagtgtcattgcactggcc

SEQ ID NO: 5014805 - DNA, 25 bp, Homo sapien
cgagcctcaaagacacacagctggt

SEQ ID NO: 5014806 - DNA, 25 bp, Homo sapien
tcctgtacatccaagcctagaagtg

SEQ ID NO: 5014807 - DNA, 25 bp, Homo sapien
agttgtcctgtacatccaagcctag

SEQ ID NO: 5014808 - DNA, 25 bp, Homo sapien
tgtcctgtacatccaagcctagaag

SEQ ID NO: 5014809 - DNA, 25 bp, Homo sapien
ctgtacatccaagcctagaagtggc

SEQ ID NO: 5014810 - DNA, 25 bp, Homo sapien
aggcctgggaagcagatggagctta

SEQ ID NO: 5014811 - DNA, 25 bp, Homo sapien
gcctgggaagcagatggagcttaga

SEQ ID NO: 5014812 - DNA, 25 bp, Homo sapien
gggaagcagatggagcttagaaaac

SEQ ID NO: 5014813 - DNA, 25 bp, Homo sapien
ctgggaagcagatggagcttagaaa

SEQ ID NO: 5014814 - DNA, 25 bp, Homo sapien
gacaggtcctccttcttaagtatcc

SEQ ID NO: 5014815 - DNA, 25 bp, Homo sapien
ttgctgtagtcttctataatagttt

SEQ ID NO: 5014816 - DNA, 25 bp, Homo sapien
tgcctacaagacaaatacccttgtt

SEQ ID NO: 5014817 - DNA, 25 bp, Homo sapien
cagcgccaagcaccatcttaaattc

SEQ ID NO: 5014818 - DNA, 25 bp, Homo sapien
ttcaaggtctttggggtgaccacta

SEQ ID NO: 5014819 - DNA, 25 bp, Homo sapien
gggtgaccactagagaagaacgagc

SEQ ID NO: 5014820 - DNA, 25 bp, Homo sapien
aagaacgagctgaagaaactatcac

SEQ ID NO: 5014821 - DNA, 25 bp, Homo sapien
tagagaagaacgagctgaagaaact

SEQ ID NO: 5014822 - DNA, 25 bp, Homo sapien
aggccacccatttcaattgctctca

SEQ ID NO: 5014823 - DNA, 25 bp, Homo sapien
tcaaaggttaacgaggttgcagaac

SEQ ID NO: 5014824 - DNA, 25 bp, Homo sapien
catcctggtcgggagctgtgctctt

SEQ ID NO: 5014825 - DNA, 25 bp, Homo sapien
aattgctctcacgtgctgctcttgt

SEQ ID NO: 5014826 - DNA, 25 bp, Homo sapien
catccctccttcggaggagggttcg

SEQ ID NO: 5014827 - DNA, 25 bp, Homo sapien
tccacaggggttgggttagccatca

SEQ ID NO: 5014828 - DNA, 25 bp, Homo sapien
gttgggttagccatcatccctcctt

SEQ ID NO: 5014829 - DNA, 25 bp, Homo sapien
cttcggaggagggttcgttgggcat

SEQ ID NO: 5014830 - DNA, 25 bp, Homo sapien
gcagattcaattgcatcagggcttc

SEQ ID NO: 5014831 - DNA, 25 bp, Homo sapien
gccaatgaaagtatagctgctgttt

SEQ ID NO: 5014832 - DNA, 25 bp, Homo sapien
ttcaattgcatcagggcttcttgcc

SEQ ID NO: 5014833 - DNA, 25 bp, Homo sapien
tttgctggcagattcaattgcatca

SEQ ID NO: 5014834 - DNA, 25 bp, Homo sapien
taaccatgcaggagctgcttgttcc

SEQ ID NO: 5014835 - DNA, 25 bp, Homo sapien
cataaccatgcaggagctgcttgtt

SEQ ID NO: 5014836 - DNA, 25 bp, Homo sapien
accatgcaggagctgcttgttccat

SEQ ID NO: 5014837 - DNA, 25 bp, Homo sapien
aaccatgcaggagctgcttgttcca

SEQ ID NO: 5014838 - DNA, 25 bp, Homo sapien
ctgcatcatccattagctgattccc

SEQ ID NO: 5014839 - DNA, 25 bp, Homo sapien
tgcatcatccattagctgattccct

SEQ ID NO: 5014840 - DNA, 25 bp, Homo sapien
gcatcatccattagctgattccctc

SEQ ID NO: 5014841 - DNA, 25 bp, Homo sapien
tttgctgcccatgcatgtgacagcc

SEQ ID NO: 5014842 - DNA, 25 bp, Homo sapien
tgtcaaaacgaatctgttaacagga

SEQ ID NO: 5014843 - DNA, 25 bp, Homo sapien
tcatatccgtgaggaaactggtttc

SEQ ID NO: 5014844 - DNA, 25 bp, Homo sapien
tttgtggcaagcgttgggtagctca

SEQ ID NO: 5014845 - DNA, 25 bp, Homo sapien
cactgtcaaaacgaatctgttaaca

SEQ ID NO: 5014846 - DNA, 25 bp, Homo sapien
tctccaagtgaccttttagcatttc

SEQ ID NO: 5014847 - DNA, 25 bp, Homo sapien
tgtaatgattgtgctatttggaggc

SEQ ID NO: 5014848 - DNA, 25 bp, Homo sapien
tgcttttgccgtctgacagatgtgt

SEQ ID NO: 5014849 - DNA, 25 bp, Homo sapien
cgtctgaagtgaaagcgaaggcccc

SEQ ID NO: 5014850 - DNA, 25 bp, Homo sapien
ttcttcagaagcaaaggccatttac

SEQ ID NO: 5014851 - DNA, 25 bp, Homo sapien
cttcagaagcaaaggccatttacga

SEQ ID NO: 5014852 - DNA, 25 bp, Homo sapien
tcttcagaagcaaaggccatttacg

SEQ ID NO: 5014853 - DNA, 25 bp, Homo sapien
cattcttcagaagcaaaggccattt

SEQ ID NO: 5014854 - DNA, 25 bp, Homo sapien
cttgcacaactgcacatctggattt

SEQ ID NO: 5014855 - DNA, 25 bp, Homo sapien
caaaaatccacaccagcttgctctt

SEQ ID NO: 5014856 - DNA, 25 bp, Homo sapien
gctcttgcacaactgcacatctgga

SEQ ID NO: 5014857 - DNA, 25 bp, Homo sapien
aaatccacaccagcttgctcttgca

SEQ ID NO: 5014858 - DNA, 25 bp, Homo sapien
agcatctgagtgtcatccatgtagt

SEQ ID NO: 5014859 - DNA, 25 bp, Homo sapien
catgcattctacatgccatcttcct

SEQ ID NO: 5014860 - DNA, 25 bp, Homo sapien
agatcagcccctcagaatatgccat

SEQ ID NO: 5014861 - DNA, 25 bp, Homo sapien
ccttttctgcagatcagcccctcag

SEQ ID NO: 5014862 - DNA, 25 bp, Homo sapien
cctcctttctcattattgggtgact

SEQ ID NO: 5014863 - DNA, 25 bp, Homo sapien
ctgaattagacccaattttcccact

SEQ ID NO: 5014864 - DNA, 25 bp, Homo sapien
tgaattagacccaattttcccactc

SEQ ID NO: 5014865 - DNA, 25 bp, Homo sapien
aattagacccaattttcccactctg

SEQ ID NO: 5014866 - DNA, 25 bp, Homo sapien
ttagacccaattttcccactctgtc

SEQ ID NO: 5014867 - DNA, 25 bp, Homo sapien
tttttggacacatcactggacttcc

SEQ ID NO: 5014868 - DNA, 25 bp, Homo sapien
atgcagagggtaggagatttcgcct

SEQ ID NO: 5014869 - DNA, 25 bp, Homo sapien
gagatttcgcctcttttttggacac

SEQ ID NO: 5014870 - DNA, 25 bp, Homo sapien
gaatgggtggcagctgtaaaagcat

SEQ ID NO: 5014871 - DNA, 25 bp, Homo sapien
tgctaccataagcagatactaacag

SEQ ID NO: 5014872 - DNA, 25 bp, Homo sapien
tacaatatcacgttctctccttcca

SEQ ID NO: 5014873 - DNA, 25 bp, Homo sapien
aaggaagcacaatgctaccataagc

SEQ ID NO: 5014874 - DNA, 25 bp, Homo sapien
gcagatactaacagagcacagatgc

SEQ ID NO: 5014875 - DNA, 25 bp, Homo sapien
gtagggaatggtcggctgatctgca

SEQ ID NO: 5014876 - DNA, 25 bp, Homo sapien
ctaaagagagggtcgttttgtcgtg

SEQ ID NO: 5014877 - DNA, 25 bp, Homo sapien
gcacagccgcaagagccctaaagag

SEQ ID NO: 5014878 - DNA, 25 bp, Homo sapien
tctgcaagcacagccgcaagagccc

SEQ ID NO: 5014879 - DNA, 25 bp, Homo sapien
cattggccgataaatgggtttccca

SEQ ID NO: 5014880 - DNA, 25 bp, Homo sapien
tctgcgttgtaacctgtggcagtat

SEQ ID NO: 5014881 - DNA, 25 bp, Homo sapien
tgggtttcccagatgaatgggtttc

SEQ ID NO: 5014882 - DNA, 25 bp, Homo sapien
tcaccctggcattggccgataaatg

SEQ ID NO: 5014883 - DNA, 25 bp, Homo sapien
ccagaaaatagagataagcttccag

SEQ ID NO: 5014884 - DNA, 25 bp, Homo sapien
ggttctttacagtccaggctcactt

SEQ ID NO: 5014885 - DNA, 25 bp, Homo sapien
tccagttttccatcccgctgatgac

SEQ ID NO: 5014886 - DNA, 25 bp, Homo sapien
tttgttcatagagggatattgaccc

SEQ ID NO: 5014887 - DNA, 25 bp, Homo sapien
agatatctcacataaataattctgg

SEQ ID NO: 5014888 - DNA, 25 bp, Homo sapien
gatatctcacataaataattctggc

SEQ ID NO: 5014889 - DNA, 25 bp, Homo sapien
ttttcagatatctcacataaataat

SEQ ID NO: 5014890 - DNA, 25 bp, Homo sapien
ttcagatatctcacataaataattc

SEQ ID NO: 5014891 - DNA, 25 bp, Homo sapien
agtgttaaatgagagtgttcttgtc

SEQ ID NO: 5014892 - DNA, 25 bp, Homo sapien
tattccaagcctcattgtcctccct

SEQ ID NO: 5014893 - DNA, 25 bp, Homo sapien
tctcccttaagccagctccaatgct

SEQ ID NO: 5014894 - DNA, 25 bp, Homo sapien
tttgagtgtcaaagaccttactcca

SEQ ID NO: 5014895 - DNA, 25 bp, Homo sapien
gccttcaattcaggagcaacccttg

SEQ ID NO: 5014896 - DNA, 25 bp, Homo sapien
aatccacttgtgagaatacactgct

SEQ ID NO: 5014897 - DNA, 25 bp, Homo sapien
tagtcccaaattgtgcccaaatcca

SEQ ID NO: 5014898 - DNA, 25 bp, Homo sapien
tgtaagattttgacaataccagagc

SEQ ID NO: 5014899 - DNA, 25 bp, Homo sapien
tctagtaactgcttcatctgtacct

SEQ ID NO: 5014900 - DNA, 25 bp, Homo sapien
aaggaagcaaatacccatttttctg

SEQ ID NO: 5014901 - DNA, 25 bp, Homo sapien
tccagatgaccccaacttagtgaaa

SEQ ID NO: 5014902 - DNA, 25 bp, Homo sapien
tttctgattccccaggagtgcgcca

SEQ ID NO: 5014903 - DNA, 25 bp, Homo sapien
gctggaggtcctactaaaagagaat

SEQ ID NO: 5014904 - DNA, 25 bp, Homo sapien
agtgacagaaaaaccctgctggagg

SEQ ID NO: 5014905 - DNA, 25 bp, Homo sapien
cattctgcatgagcagcaagtgaca

SEQ ID NO: 5014906 - DNA, 25 bp, Homo sapien
tacaataatcaagcctgcgcgccat

SEQ ID NO: 5014907 - DNA, 25 bp, Homo sapien
accctttatccttatgtccttgcca

SEQ ID NO: 5014908 - DNA, 25 bp, Homo sapien
tgtacgtacttttccttcttgtgct

SEQ ID NO: 5014909 - DNA, 25 bp, Homo sapien
agaaaagtatctggtggtcagtccc

SEQ ID NO: 5014910 - DNA, 25 bp, Homo sapien
tcaagaggacctgatatgtttgcat

SEQ ID NO: 5014911 - DNA, 25 bp, Homo sapien
cattgttgggggaagagtgaggatc

SEQ ID NO: 5014912 - DNA, 25 bp, Homo sapien
gaagagtgaggatcatgacagtcat

SEQ ID NO: 5014913 - DNA, 25 bp, Homo sapien
ttgggggaagagtgaggatcatgac

SEQ ID NO: 5014914 - DNA, 25 bp, Homo sapien
gggaagagtgaggatcatgacagtc

SEQ ID NO: 5014915 - DNA, 25 bp, Homo sapien
tattgttgcataccgtcatttcttg

SEQ ID NO: 5014916 - DNA, 25 bp, Homo sapien
gatgtctcctgtacataacacaaaa

SEQ ID NO: 5014917 - DNA, 25 bp, Homo sapien
gatactaacattcgaagcagctttc

SEQ ID NO: 5014918 - DNA, 25 bp, Homo sapien
gatacatgttagtctcctgatttac

SEQ ID NO: 5014919 - DNA, 25 bp, Homo sapien
tgataacgtcctaattgccttttgg

SEQ ID NO: 5014920 - DNA, 25 bp, Homo sapien
tggacaacctacttgaccaatcacg

SEQ ID NO: 5014921 - DNA, 25 bp, Homo sapien
ggcacctaatttacacgcattgtga

SEQ ID NO: 5014922 - DNA, 25 bp, Homo sapien
aagtggtggtatgtttgcagcctgc

SEQ ID NO: 5014923 - DNA, 25 bp, Homo sapien
ccttcactgtggttgttctggctag

SEQ ID NO: 5014924 - DNA, 25 bp, Homo sapien
tctagactaggaaataagccctgcc

SEQ ID NO: 5014925 - DNA, 25 bp, Homo sapien
gagcgcacctggagtatccttcagc

SEQ ID NO: 5014926 - DNA, 25 bp, Homo sapien
tacactgatgagcagtgagcgcacc

SEQ ID NO: 5014927 - DNA, 25 bp, Homo sapien
cagccctctttctgacacgtggaga

SEQ ID NO: 5014928 - DNA, 25 bp, Homo sapien
gctgctgcagttcagcacaaacaag

SEQ ID NO: 5014929 - DNA, 25 bp, Homo sapien
agactgagattgagcctggatggcc

SEQ ID NO: 5014930 - DNA, 25 bp, Homo sapien
aacaagatgtagtgtgtctccaggg

SEQ ID NO: 5014931 - DNA, 25 bp, Homo sapien
cagtggaggtcttattgtgccctta

SEQ ID NO: 5014932 - DNA, 25 bp, Homo sapien
ccaacgtagtacactgtggagcctc

SEQ ID NO: 5014933 - DNA, 25 bp, Homo sapien
gtgggcaggcactcaattagagtcc

SEQ ID NO: 5014934 - DNA, 25 bp, Homo sapien
attggaaactacacatggaaagagc

SEQ ID NO: 5014935 - DNA, 25 bp, Homo sapien
tgcattttcctttccttgactgttc

SEQ ID NO: 5014936 - DNA, 25 bp, Homo sapien
attttcctttccttgactgttctgg

SEQ ID NO: 5014937 - DNA, 25 bp, Homo sapien
tcctgcattttcctttccttgactg

SEQ ID NO: 5014938 - DNA, 25 bp, Homo sapien
ttcctttccttgactgttctgggtc

SEQ ID NO: 5014939 - DNA, 25 bp, Homo sapien
gggttcaggatccagccaatagatt

SEQ ID NO: 5014940 - DNA, 25 bp, Homo sapien
gagaagaatgtatccagacagagct

SEQ ID NO: 5014941 - DNA, 25 bp, Homo sapien
tcttttaatgagctttcccagtttg

SEQ ID NO: 5014942 - DNA, 25 bp, Homo sapien
ccagacagagcttccaagggttcag

SEQ ID NO: 5014943 - DNA, 25 bp, Homo sapien
gtgagccatgatctccactatattc

SEQ ID NO: 5014944 - DNA, 25 bp, Homo sapien
gccatgatctccactatattccagc

SEQ ID NO: 5014945 - DNA, 25 bp, Homo sapien
ttccagcctgggagatacagtgaaa

SEQ ID NO: 5014946 - DNA, 25 bp, Homo sapien
gagccatgatctccactatattcca

SEQ ID NO: 5014947 - DNA, 25 bp, Homo sapien
tccaccgtaggatgatacagcaaga

SEQ ID NO: 5014948 - DNA, 25 bp, Homo sapien
ccaccgtaggatgatacagcaagaa

SEQ ID NO: 5014949 - DNA, 25 bp, Homo sapien
caccgtaggatgatacagcaagaag

SEQ ID NO: 5014950 - DNA, 25 bp, Homo sapien
cttccaccgtaggatgatacagcaa

SEQ ID NO: 5014951 - DNA, 25 bp, Homo sapien
gaactgttcgttatttatctcagca

SEQ ID NO: 5014952 - DNA, 25 bp, Homo sapien
ggccaactctaagagccagaactgt

SEQ ID NO: 5014953 - DNA, 25 bp, Homo sapien
caggttcggtgtaagcgttgcctcc

SEQ ID NO: 5014954 - DNA, 25 bp, Homo sapien
gttatttatctcagcacaggttcgg

SEQ ID NO: 5014955 - DNA, 25 bp, Homo sapien
ggcgtcttttctcccctgctcggag

SEQ ID NO: 5014956 - DNA, 25 bp, Homo sapien
ctcggagtagcctagcagcgctgga

SEQ ID NO: 5014957 - DNA, 25 bp, Homo sapien
ggtacgagactacaagtcgcacagg

SEQ ID NO: 5014958 - DNA, 25 bp, Homo sapien
ctcaagagcccacgttttcagattc

SEQ ID NO: 5014959 - DNA, 25 bp, Homo sapien
gagtgtctctctgaaatcggctggc

SEQ ID NO: 5014960 - DNA, 25 bp, Homo sapien
tcggctggcatagaacttagtgtac

SEQ ID NO: 5014961 - DNA, 25 bp, Homo sapien
tgataagggcagagtttgtggctcc

SEQ ID NO: 5014962 - DNA, 25 bp, Homo sapien
cacaacagtagcctcaaagatcagt

SEQ ID NO: 5014963 - DNA, 25 bp, Homo sapien
ggaactcagtatgtagtgaagtagc

SEQ ID NO: 5014964 - DNA, 25 bp, Homo sapien
ctgacatgagcaagaaacatcataa

SEQ ID NO: 5014965 - DNA, 25 bp, Homo sapien
gacaaaaatttagtctcaccaccca

SEQ ID NO: 5014966 - DNA, 25 bp, Homo sapien
aggtacttaaccaggagttgctcct

SEQ ID NO: 5014967 - DNA, 25 bp, Homo sapien
aattaccagaagtggagttcctcct

SEQ ID NO: 5014968 - DNA, 25 bp, Homo sapien
tgggaccaccgtatatatagcatct

SEQ ID NO: 5014969 - DNA, 25 bp, Homo sapien
cataagcacaggtacaatggtgagt

SEQ ID NO: 5014970 - DNA, 25 bp, Homo sapien
tgctggcccagttattctcttgaga

SEQ ID NO: 5014971 - DNA, 25 bp, Homo sapien
cttcgttcagttttccctctaggag

SEQ ID NO: 5014972 - DNA, 25 bp, Homo sapien
gaatatcctatacgctggagagctg

SEQ ID NO: 5014973 - DNA, 25 bp, Homo sapien
tctggtttgcaactatcataaggac

SEQ ID NO: 5014974 - DNA, 25 bp, Homo sapien
aaatgggtgtattggcttgtcatcg

SEQ ID NO: 5014975 - DNA, 25 bp, Homo sapien
ggcaggagtgtcattactaccaagt

SEQ ID NO: 5014976 - DNA, 25 bp, Homo sapien
tctgacctgtgagcaacactgggca

SEQ ID NO: 5014977 - DNA, 25 bp, Homo sapien
tgattccggcaagaacagcacagtt

SEQ ID NO: 5014978 - DNA, 25 bp, Homo sapien
catcatgcttatagaggttacctgc

SEQ ID NO: 5014979 - DNA, 25 bp, Homo sapien
caaaatcttaggtggtaggtgctgc

SEQ ID NO: 5014980 - DNA, 25 bp, Homo sapien
ttacaactacagaagcaggcttaga

SEQ ID NO: 5014981 - DNA, 25 bp, Homo sapien
tgtggccacttagctagtaaatagc

SEQ ID NO: 5014982 - DNA, 25 bp, Homo sapien
tttgactggtgatataagcccactg

SEQ ID NO: 5014983 - DNA, 25 bp, Homo sapien
tgaaggtacgaaagtatttatgctg

SEQ ID NO: 5014984 - DNA, 25 bp, Homo sapien
tatggaagtgtctaccacttaacaa

SEQ ID NO: 5014985 - DNA, 25 bp, Homo sapien
ctctaatatagaagtgaaaaaagcc

SEQ ID NO: 5014986 - DNA, 25 bp, Homo sapien
gaaaaaagccatgtaatcccacata

SEQ ID NO: 5014987 - DNA, 25 bp, Homo sapien
ttgccaaaccctgatctagagagct

SEQ ID NO: 5014988 - DNA, 25 bp, Homo sapien
gacaggtgagcaagaaaccgtactc

SEQ ID NO: 5014989 - DNA, 25 bp, Homo sapien
gagcagattctgaagtccaacttag

SEQ ID NO: 5014990 - DNA, 25 bp, Homo sapien
tctaaagcataacacttgagagcag

SEQ ID NO: 5014991 - DNA, 25 bp, Homo sapien
acgtggcggcagtcaggcaacttaa

SEQ ID NO: 5014992 - DNA, 25 bp, Homo sapien
tagatataatcaccctcaagagaag

SEQ ID NO: 5014993 - DNA, 25 bp, Homo sapien
cacttcagaatgcattatcccaggg

SEQ ID NO: 5014994 - DNA, 25 bp, Homo sapien
tttaagcaatatgccccacgtggcg

SEQ ID NO: 5014995 - DNA, 25 bp, Homo sapien
ttatttcatggatcccaggcaggca

SEQ ID NO: 5014996 - DNA, 25 bp, Homo sapien
gctaatttggtggaatgttgcctca

SEQ ID NO: 5014997 - DNA, 25 bp, Homo sapien
catgatactgcaacttttggaaggc

SEQ ID NO: 5014998 - DNA, 25 bp, Homo sapien
taagcctcaaagtgaagtccaactg

SEQ ID NO: 5014999 - DNA, 25 bp, Homo sapien
cgtgggtttaggcaaattcaagact

SEQ ID NO: 5015000 - DNA, 25 bp, Homo sapien
caaatactgttattcttcgtgggtt

SEQ ID NO: 5015001 - DNA, 25 bp, Homo sapien
caggtaactatgtaaccatgtaaga

SEQ ID NO: 5015002 - DNA, 25 bp, Homo sapien
agtttgtgattttcggagcatgtga

SEQ ID NO: 5015003 - DNA, 25 bp, Homo sapien
gagagagatgtgcaaagatggctcc

SEQ ID NO: 5015004 - DNA, 25 bp, Homo sapien
tgccatggccaatttgttattgaca

SEQ ID NO: 5015005 - DNA, 25 bp, Homo sapien
tattaagccctgatacattataggg

SEQ ID NO: 5015006 - DNA, 25 bp, Homo sapien
agatggctcccaactagaagatacc

SEQ ID NO: 5015007 - DNA, 25 bp, Homo sapien
tccacagtaagtaatccctcacgtt

SEQ ID NO: 5015008 - DNA, 25 bp, Homo sapien
cattgtgcttggtttggatattcca

SEQ ID NO: 5015009 - DNA, 25 bp, Homo sapien
gcttatgtttactctagctggcctc

SEQ ID NO: 5015010 - DNA, 25 bp, Homo sapien
tcaaaatgggtgaccaaatgaacca

SEQ ID NO: 5015011 - DNA, 25 bp, Homo sapien
tttgcatggacacagtttcgaagct

SEQ ID NO: 5015012 - DNA, 25 bp, Homo sapien
tcacagggaataccgagattatgca

SEQ ID NO: 5015013 - DNA, 25 bp, Homo sapien
tactatagaatgtctggtccctccc

SEQ ID NO: 5015014 - DNA, 25 bp, Homo sapien
gagtccccttgcacctataattaga

SEQ ID NO: 5015015 - DNA, 25 bp, Homo sapien
gtcttgaagattaccgatgacatca

SEQ ID NO: 5015016 - DNA, 25 bp, Homo sapien
tgcaggcaggtagcaatgaaaatgc

SEQ ID NO: 5015017 - DNA, 25 bp, Homo sapien
tgacagtctgtccattttgaactat

SEQ ID NO: 5015018 - DNA, 25 bp, Homo sapien
ccatcaatactgcaaggaagataac

SEQ ID NO: 5015019 - DNA, 25 bp, Homo sapien
tatactgtatcgaaactgaatcagg

SEQ ID NO: 5015020 - DNA, 25 bp, Homo sapien
catagcaacaatggcttcccctgta

SEQ ID NO: 5015021 - DNA, 25 bp, Homo sapien
ggcccaactggcctatcatttagat

SEQ ID NO: 5015022 - DNA, 25 bp, Homo sapien
tcccctgtaggtaagccttgctcat

SEQ ID NO: 5015023 - DNA, 25 bp, Homo sapien
aataggagttactctacctgaacca

SEQ ID NO: 5015024 - DNA, 25 bp, Homo sapien
cattcacattagctttaaatggaag

SEQ ID NO: 5015025 - DNA, 25 bp, Homo sapien
aaacttgccaccttctgggcgacca

SEQ ID NO: 5015026 - DNA, 25 bp, Homo sapien
caggaaaacttcccatattatgctt

SEQ ID NO: 5015027 - DNA, 25 bp, Homo sapien
caggagggtgcctaaagtcttcatc

SEQ ID NO: 5015028 - DNA, 25 bp, Homo sapien
tctggtgggtgcctgaaatcttcct

SEQ ID NO: 5015029 - DNA, 25 bp, Homo sapien
ttctaaaatcatcaggcgggctcct

SEQ ID NO: 5015030 - DNA, 25 bp, Homo sapien
taaaattgtcaggaagtctagggtc

SEQ ID NO: 5015031 - DNA, 25 bp, Homo sapien
cgacggaaatgctcctgaggtggcc

SEQ ID NO: 5015032 - DNA, 25 bp, Homo sapien
tgaagtcatcctcgggtggtcgcct

SEQ ID NO: 5015033 - DNA, 25 bp, Homo sapien
ggtggccgcctgaaatcttcctctg

SEQ ID NO: 5015034 - DNA, 25 bp, Homo sapien
ttctccctgaagaggccgcctaaag

SEQ ID NO: 5015035 - DNA, 25 bp, Homo sapien
gaagtcttctggagggtgcctgtca

SEQ ID NO: 5015036 - DNA, 25 bp, Homo sapien
aagtcttcctccctaggtcgcctga

SEQ ID NO: 5015037 - DNA, 25 bp, Homo sapien
aaataaatgggaatggtcacctcgc

SEQ ID NO: 5015038 - DNA, 25 bp, Homo sapien
tcacgtgactgtgagcgagcttgca

SEQ ID NO: 5015039 - DNA, 25 bp, Homo sapien
caaactcctgtatttgtgcctcaga

SEQ ID NO: 5015040 - DNA, 25 bp, Homo sapien
tcttaataacacctctgtccctagg

SEQ ID NO: 5015041 - DNA, 25 bp, Homo sapien
gtttaaacgttcagctttcatggcc

SEQ ID NO: 5015042 - DNA, 25 bp, Homo sapien
aaagcaagtaaatgtcatcctcagc

SEQ ID NO: 5015043 - DNA, 25 bp, Homo sapien
tatttttgtgaaacatgtccgggcc

SEQ ID NO: 5015044 - DNA, 25 bp, Homo sapien
tagaaacaagtaaggattctcggcc

SEQ ID NO: 5015045 - DNA, 25 bp, Homo sapien
aagtgacgaatatccacaggccccg

SEQ ID NO: 5015046 - DNA, 25 bp, Homo sapien
taaaccctcctgaacgacttatggc

SEQ ID NO: 5015047 - DNA, 25 bp, Homo sapien
gctgagctcaaaccacagcaataat

SEQ ID NO: 5015048 - DNA, 25 bp, Homo sapien
ctgagctcaaaccacagcaataatg

SEQ ID NO: 5015049 - DNA, 25 bp, Homo sapien
gagctcaaaccacagcaataatgac

SEQ ID NO: 5015050 - DNA, 25 bp, Homo sapien
tgagctcaaaccacagcaataatga

SEQ ID NO: 5015051 - DNA, 25 bp, Homo sapien
taataaattgcctaccactggccag

SEQ ID NO: 5015052 - DNA, 25 bp, Homo sapien
gctgcttcacaagaccaaactactt

SEQ ID NO: 5015053 - DNA, 25 bp, Homo sapien
tatcttctactgaaacatgagagct

SEQ ID NO: 5015054 - DNA, 25 bp, Homo sapien
gaagaaacatttcgtatcacctatt

SEQ ID NO: 5015055 - DNA, 25 bp, Homo sapien
aagccttaaactctggatatcttac

SEQ ID NO: 5015056 - DNA, 25 bp, Homo sapien
actattctacttcacatgttttttg

SEQ ID NO: 5015057 - DNA, 25 bp, Homo sapien
agaagccatggatacctagatgtac

SEQ ID NO: 5015058 - DNA, 25 bp, Homo sapien
tgttgagcctcaaagccttaaactc

SEQ ID NO: 5015059 - DNA, 25 bp, Homo sapien
cttggagacctgttaactctgtaaa

SEQ ID NO: 5015060 - DNA, 25 bp, Homo sapien
atttcttggagacctgttaactctg

SEQ ID NO: 5015061 - DNA, 25 bp, Homo sapien
ggagacctgttaactctgtaaaagc

SEQ ID NO: 5015062 - DNA, 25 bp, Homo sapien
ttcttggagacctgttaactctgta

SEQ ID NO: 5015063 - DNA, 25 bp, Homo sapien
taaacaacgccagagtaggatatcc

SEQ ID NO: 5015064 - DNA, 25 bp, Homo sapien
caactattctgcactctactaagga

SEQ ID NO: 5015065 - DNA, 25 bp, Homo sapien
tcagggatacccaaactatttcatg

SEQ ID NO: 5015066 - DNA, 25 bp, Homo sapien
ttggaagtagcacgaagaaaggagt

SEQ ID NO: 5015067 - DNA, 25 bp, Homo sapien
gctaaactagcaaagacatcaaatt

SEQ ID NO: 5015068 - DNA, 25 bp, Homo sapien
tacgtagattaaccagaagctaaac

SEQ ID NO: 5015069 - DNA, 25 bp, Homo sapien
tagattaaccagaagctaaactagc

SEQ ID NO: 5015070 - DNA, 25 bp, Homo sapien
taaccagaagctaaactagcaaaga

SEQ ID NO: 5015071 - DNA, 25 bp, Homo sapien
caagactccctcctatgcaaattgg

SEQ ID NO: 5015072 - DNA, 25 bp, Homo sapien
tccatattaaagtcccaagactccc

SEQ ID NO: 5015073 - DNA, 25 bp, Homo sapien
tggcttctggaatacttactttatc

SEQ ID NO: 5015074 - DNA, 25 bp, Homo sapien
aacaaaaactacaaatggcttctgg

SEQ ID NO: 5015075 - DNA, 25 bp, Homo sapien
ccttggagaccaactgtaagagacc

SEQ ID NO: 5015076 - DNA, 25 bp, Homo sapien
ccttgagacagtagggtaatgtacc

SEQ ID NO: 5015077 - DNA, 25 bp, Homo sapien
ccaagtagtttcatgagcacaaatc

SEQ ID NO: 5015078 - DNA, 25 bp, Homo sapien
taagagaccagctctcaaaatgggc

SEQ ID NO: 5015079 - DNA, 25 bp, Homo sapien
taaacgtgagtttcccctgcagaaa

SEQ ID NO: 5015080 - DNA, 25 bp, Homo sapien
ccaaagttgctacgtgggatccgat

SEQ ID NO: 5015081 - DNA, 25 bp, Homo sapien
tgcgactacttcgtaaagcccaagg

SEQ ID NO: 5015082 - DNA, 25 bp, Homo sapien
tctcaagcctaacgagctgggcctg

SEQ ID NO: 5015083 - DNA, 25 bp, Homo sapien
ctatgaaatccttcgagatcttcac

SEQ ID NO: 5015084 - DNA, 25 bp, Homo sapien
aagatccctgggaagcgcacataca

SEQ ID NO: 5015085 - DNA, 25 bp, Homo sapien
tctcaagatccctgggaagcgcaca

SEQ ID NO: 5015086 - DNA, 25 bp, Homo sapien
gaaatccttcgagatcttcactctc

SEQ ID NO: 5015087 - DNA, 25 bp, Homo sapien
gagctacgctagatactggcgcggc

SEQ ID NO: 5015088 - DNA, 25 bp, Homo sapien
ggaactgcttcgcacttggcaataa

SEQ ID NO: 5015089 - DNA, 25 bp, Homo sapien
gaagagtcggtgttttagcaagaaa

SEQ ID NO: 5015090 - DNA, 25 bp, Homo sapien
agggtgccctaacggcaggagctac

SEQ ID NO: 5015091 - DNA, 25 bp, Homo sapien
tcggacacacaaggccggaggctga

SEQ ID NO: 5015092 - DNA, 25 bp, Homo sapien
gaggctgagggaactcttcgtcgca

SEQ ID NO: 5015093 - DNA, 25 bp, Homo sapien
cactgctgccgagtcggacacacaa

SEQ ID NO: 5015094 - DNA, 25 bp, Homo sapien
ctccccaaaacaggtagaccctcag

SEQ ID NO: 5015095 - DNA, 25 bp, Homo sapien
cctgagcaagctctgacaggcgttt

SEQ ID NO: 5015096 - DNA, 25 bp, Homo sapien
tctgtcccctgagcaagctctgaca

SEQ ID NO: 5015097 - DNA, 25 bp, Homo sapien
tcccctgagcaagctctgacaggcg

SEQ ID NO: 5015098 - DNA, 25 bp, Homo sapien
gagcaagctctgacaggcgtttcca

SEQ ID NO: 5015099 - DNA, 25 bp, Homo sapien
cttcatgtgtatgtctaccaggatt

SEQ ID NO: 5015100 - DNA, 25 bp, Homo sapien
gggagatcagcgaaatttcatgcaa

SEQ ID NO: 5015101 - DNA, 25 bp, Homo sapien
catggtgcgcataatttattttaaa

SEQ ID NO: 5015102 - DNA, 25 bp, Homo sapien
tgatctctaataatggaggacctgc

SEQ ID NO: 5015103 - DNA, 25 bp, Homo sapien
tctttaatcttacaccatcagatgg

SEQ ID NO: 5015104 - DNA, 25 bp, Homo sapien
ctttaggcttcatgtagcactgtac

SEQ ID NO: 5015105 - DNA, 25 bp, Homo sapien
cacaggacttggattgagcttctaa

SEQ ID NO: 5015106 - DNA, 25 bp, Homo sapien
taactacttggttctgagatcatca

SEQ ID NO: 5015107 - DNA, 25 bp, Homo sapien
ttaatttctcgtggcagctgttgca

SEQ ID NO: 5015108 - DNA, 25 bp, Homo sapien
tcttgagcagatcaggaccatctaa

SEQ ID NO: 5015109 - DNA, 25 bp, Homo sapien
tgtaaacatccagctatgtctctgc

SEQ ID NO: 5015110 - DNA, 25 bp, Homo sapien
gaccatctaatatgaattccttaag

SEQ ID NO: 5015111 - DNA, 25 bp, Homo sapien
gcccaatcagtttcaccgtgttcct

SEQ ID NO: 5015112 - DNA, 25 bp, Homo sapien
gctccaggcccaatcagtttcaccg

SEQ ID NO: 5015113 - DNA, 25 bp, Homo sapien
caatcagtttcaccgtgttcctcac

SEQ ID NO: 5015114 - DNA, 25 bp, Homo sapien
caggcccaatcagtttcaccgtgtt

SEQ ID NO: 5015115 - DNA, 25 bp, Homo sapien
actagaaagcttggcgttgttttgg

SEQ ID NO: 5015116 - DNA, 25 bp, Homo sapien
atcctaccaaattcaacatgcccag

SEQ ID NO: 5015117 - DNA, 25 bp, Homo sapien
tagtgtctgacaccagtagacacca

SEQ ID NO: 5015118 - DNA, 25 bp, Homo sapien
tcctcatcattcttactagaaagct

SEQ ID NO: 5015119 - DNA, 25 bp, Homo sapien
caggatactgagttgcttgttccaa

SEQ ID NO: 5015120 - DNA, 25 bp, Homo sapien
gcagggactcgaacaggtacttgaa

SEQ ID NO: 5015121 - DNA, 25 bp, Homo sapien
tgaatatccacgttcatggcagcat

SEQ ID NO: 5015122 - DNA, 25 bp, Homo sapien
taagtgatcactgacgcctgcatgc

SEQ ID NO: 5015123 - DNA, 25 bp, Homo sapien
gagccagctaccaaacccaagttag

SEQ ID NO: 5015124 - DNA, 25 bp, Homo sapien
aattttcgctgtgtctgcagcactg

SEQ ID NO: 5015125 - DNA, 25 bp, Homo sapien
acccaagttagcaaggacagcctca

SEQ ID NO: 5015126 - DNA, 25 bp, Homo sapien
gatggaattgactgaaggatggaac

SEQ ID NO: 5015127 - DNA, 25 bp, Homo sapien
caacaagtgctctggtggctaaaac

SEQ ID NO: 5015128 - DNA, 25 bp, Homo sapien
cacttttgaagcaagcccagtgggt

SEQ ID NO: 5015129 - DNA, 25 bp, Homo sapien
tattttaagcttcttggctggcacc

SEQ ID NO: 5015130 - DNA, 25 bp, Homo sapien
ccagtgggtggctaaatggagctcc

SEQ ID NO: 5015131 - DNA, 25 bp, Homo sapien
catgcacgcgaagacattggagccg

SEQ ID NO: 5015132 - DNA, 25 bp, Homo sapien
tactctcgaggttctttgctacgcc

SEQ ID NO: 5015133 - DNA, 25 bp, Homo sapien
gtaagtcactgaagagccctcgaag

SEQ ID NO: 5015134 - DNA, 25 bp, Homo sapien
gagattctaggaagcctgcacgaca

SEQ ID NO: 5015135 - DNA, 25 bp, Homo sapien
accaccgctccctagcgccgcgcag

SEQ ID NO: 5015136 - DNA, 25 bp, Homo sapien
cagaccaccgctccctagcgccgcg

SEQ ID NO: 5015137 - DNA, 25 bp, Homo sapien
caccgctccctagcgccgcgcagcc

SEQ ID NO: 5015138 - DNA, 25 bp, Homo sapien
tcagccaacaccgccgagctccaca

SEQ ID NO: 5015139 - DNA, 25 bp, Homo sapien
tgtcccgggcccagacgaattggta

SEQ ID NO: 5015140 - DNA, 25 bp, Homo sapien
tgtcggctccgtgttgtgatgacag

SEQ ID NO: 5015141 - DNA, 25 bp, Homo sapien
cttgctttcaatgggccggtgctgc

SEQ ID NO: 5015142 - DNA, 25 bp, Homo sapien
cccagacgaattggtaggtattcac

SEQ ID NO: 5015143 - DNA, 25 bp, Homo sapien
gatagaacgctcattaattacagca

SEQ ID NO: 5015144 - DNA, 25 bp, Homo sapien
tactttgactcccaagggtatctga

SEQ ID NO: 5015145 - DNA, 25 bp, Homo sapien
gaatgtatcacttgtaccgatgcgg

SEQ ID NO: 5015146 - DNA, 25 bp, Homo sapien
tctgatctgatggagagaatgtatc

SEQ ID NO: 5015147 - DNA, 25 bp, Homo sapien
gaactgagcaggatctatggcactg

SEQ ID NO: 5015148 - DNA, 25 bp, Homo sapien
gcatatgctaccttttgcaggccaa

SEQ ID NO: 5015149 - DNA, 25 bp, Homo sapien
gaactggtggcagtacacccaagga

SEQ ID NO: 5015150 - DNA, 25 bp, Homo sapien
cagagtcgactgagatacacacctc

SEQ ID NO: 5015151 - DNA, 25 bp, Homo sapien
gaataggccaaaagcaagtatcttg

SEQ ID NO: 5015152 - DNA, 25 bp, Homo sapien
catggcacctgcacttgaagcaagt

SEQ ID NO: 5015153 - DNA, 25 bp, Homo sapien
cctgagaaaattaggatgacctggc

SEQ ID NO: 5015154 - DNA, 25 bp, Homo sapien
ggtcctgcctagctcagatttcatg

SEQ ID NO: 5015155 - DNA, 25 bp, Homo sapien
tattctagcatcactgttaaggctg

SEQ ID NO: 5015156 - DNA, 25 bp, Homo sapien
tgtaatccccaaaggcttggcatgc

SEQ ID NO: 5015157 - DNA, 25 bp, Homo sapien
tattgccatcgggtattgagacagg

SEQ ID NO: 5015158 - DNA, 25 bp, Homo sapien
tagtggcatcaaatgtttgcagcag

SEQ ID NO: 5015159 - DNA, 25 bp, Homo sapien
cgtctgtgtttttcaaagccggcat

SEQ ID NO: 5015160 - DNA, 25 bp, Homo sapien
acgtctgtgtttttcaaagccggca

SEQ ID NO: 5015161 - DNA, 25 bp, Homo sapien
tcagtagataatagccacagatcag

SEQ ID NO: 5015162 - DNA, 25 bp, Homo sapien
cagaagcacctgtggtcaggcgcca

SEQ ID NO: 5015163 - DNA, 25 bp, Homo sapien
gctttctacaacttcctgtcctgga

SEQ ID NO: 5015164 - DNA, 25 bp, Homo sapien
gagtttcatgtgtggtgcaaggtca

SEQ ID NO: 5015165 - DNA, 25 bp, Homo sapien
cctgttcagtcgtgagtcagagctg

SEQ ID NO: 5015166 - DNA, 25 bp, Homo sapien
ccagggagtgctaggaagttgcaaa

SEQ ID NO: 5015167 - DNA, 25 bp, Homo sapien
cacaaaagccacaagcggcatggag

SEQ ID NO: 5015168 - DNA, 25 bp, Homo sapien
caagacagtgtcagttaagatggct

SEQ ID NO: 5015169 - DNA, 25 bp, Homo sapien
ccagcaaagtaagctctggatggat

SEQ ID NO: 5015170 - DNA, 25 bp, Homo sapien
tggacaaacaccacttgagtgagtg

SEQ ID NO: 5015171 - DNA, 25 bp, Homo sapien
agttctttgctgtggttttccagca

SEQ ID NO: 5015172 - DNA, 25 bp, Homo sapien
cagaaactactttccgtaccagcca

SEQ ID NO: 5015173 - DNA, 25 bp, Homo sapien
tttctgtgtcttctcagtgctaata

SEQ ID NO: 5015174 - DNA, 25 bp, Homo sapien
tgtgtgcactttgctcatcatacag

SEQ ID NO: 5015175 - DNA, 25 bp, Homo sapien
tgctcatcatacagaatggatttct

SEQ ID NO: 5015176 - DNA, 25 bp, Homo sapien
tgtcttctcagtgctaataccacac

SEQ ID NO: 5015177 - DNA, 25 bp, Homo sapien
tcccactacagcagctaaagcatat

SEQ ID NO: 5015178 - DNA, 25 bp, Homo sapien
catattcagtgtggacaagtgtacc

SEQ ID NO: 5015179 - DNA, 25 bp, Homo sapien
caagtgtaccagatgggctgagtgt

SEQ ID NO: 5015180 - DNA, 25 bp, Homo sapien
gctgagtgtagtcagcaagaagctg

SEQ ID NO: 5015181 - DNA, 25 bp, Homo sapien
tatttatttagctttccgactctgt

SEQ ID NO: 5015182 - DNA, 25 bp, Homo sapien
tcgtatttatttagctttccgactc

SEQ ID NO: 5015183 - DNA, 25 bp, Homo sapien
tttatttagctttccgactctgtgc

SEQ ID NO: 5015184 - DNA, 25 bp, Homo sapien
gtatttatttagctttccgactctg

SEQ ID NO: 5015185 - DNA, 25 bp, Homo sapien
gaccctgtcacgaacacgtttagca

SEQ ID NO: 5015186 - DNA, 25 bp, Homo sapien
cacgcttgaccctgtcacgaacacg

SEQ ID NO: 5015187 - DNA, 25 bp, Homo sapien
ttgaccctgtcacgaacacgtttag

SEQ ID NO: 5015188 - DNA, 25 bp, Homo sapien
cgcttgaccctgtcacgaacacgtt

SEQ ID NO: 5015189 - DNA, 25 bp, Homo sapien
agcacgaacccctcgaagtcggcct

SEQ ID NO: 5015190 - DNA, 25 bp, Homo sapien
tcgaagtcggcctgggtacacacca

SEQ ID NO: 5015191 - DNA, 25 bp, Homo sapien
ccctcgaagtcggcctgggtacaca

SEQ ID NO: 5015192 - DNA, 25 bp, Homo sapien
cagcacgaacccctcgaagtcggcc

SEQ ID NO: 5015193 - DNA, 25 bp, Homo sapien
gaaagcctacgtcgctatgccaaat

SEQ ID NO: 5015194 - DNA, 25 bp, Homo sapien
cgtcgctatgccaaatgctggacta

SEQ ID NO: 5015195 - DNA, 25 bp, Homo sapien
gcctacgtcgctatgccaaatgctg

SEQ ID NO: 5015196 - DNA, 25 bp, Homo sapien
ctacgtcgctatgccaaatgctgga

SEQ ID NO: 5015197 - DNA, 25 bp, Homo sapien
caattgcccattgaatttccagcat

SEQ ID NO: 5015198 - DNA, 25 bp, Homo sapien
tgtctgcctgtaggcaacctcattg

SEQ ID NO: 5015199 - DNA, 25 bp, Homo sapien
agggcaattgcccattgaatttcca

SEQ ID NO: 5015200 - DNA, 25 bp, Homo sapien
ctctctgtctgcctgtaggcaacct

SEQ ID NO: 5015201 - DNA, 25 bp, Homo sapien
aggaacaactatggcaaatgcagca

SEQ ID NO: 5015202 - DNA, 25 bp, Homo sapien
attgttctctgcttgaggataaaag

SEQ ID NO: 5015203 - DNA, 25 bp, Homo sapien
tcaaggaacaactatggcaaatgca

SEQ ID NO: 5015204 - DNA, 25 bp, Homo sapien
gattgttctctgcttgaggataaaa

SEQ ID NO: 5015205 - DNA, 25 bp, Homo sapien
tctacttgggtgtgtggaaagtcca

SEQ ID NO: 5015206 - DNA, 25 bp, Homo sapien
gccaccttccatacctctacttggg

SEQ ID NO: 5015207 - DNA, 25 bp, Homo sapien
tctccagagccaccttccatacctc

SEQ ID NO: 5015208 - DNA, 25 bp, Homo sapien
acctctacttgggtgtgtggaaagt

SEQ ID NO: 5015209 - DNA, 25 bp, Homo sapien
ccccagcaggtgtacaccatgccat

SEQ ID NO: 5015210 - DNA, 25 bp, Homo sapien
ggaagaacgcagagcaacaaaagca

SEQ ID NO: 5015211 - DNA, 25 bp, Homo sapien
caaataaccaagaacccccagcagg

SEQ ID NO: 5015212 - DNA, 25 bp, Homo sapien
agaacgcagagcaacaaaagcagca

SEQ ID NO: 5015213 - DNA, 25 bp, Homo sapien
gtgccaagcaatatgggtctgctgt

SEQ ID NO: 5015214 - DNA, 25 bp, Homo sapien
ccttgatttgtgctgtgccaagcaa

SEQ ID NO: 5015215 - DNA, 25 bp, Homo sapien
tggagttggcccttgatttgtgctg

SEQ ID NO: 5015216 - DNA, 25 bp, Homo sapien
aattttggagttggcccttgatttg

SEQ ID NO: 5015217 - DNA, 25 bp, Homo sapien
tggtccttaatgaggatttgtgcat

SEQ ID NO: 5015218 - DNA, 25 bp, Homo sapien
cactccctttaagtggtaggtggca

SEQ ID NO: 5015219 - DNA, 25 bp, Homo sapien
agcgttctctaccactccctttaag

SEQ ID NO: 5015220 - DNA, 25 bp, Homo sapien
tctacccttggtccttaatgaggat

SEQ ID NO: 5015221 - DNA, 25 bp, Homo sapien
cccaagctggaagtaggtttttgct

SEQ ID NO: 5015222 - DNA, 25 bp, Homo sapien
tcccaagctggaagtaggtttttgc

SEQ ID NO: 5015223 - DNA, 25 bp, Homo sapien
ttgcttgtaaagctggagcagggag

SEQ ID NO: 5015224 - DNA, 25 bp, Homo sapien
tttgcttgtaaagctggagcaggga

SEQ ID NO: 5015225 - DNA, 25 bp, Homo sapien
agttctctccgtgtagcttcctgac

SEQ ID NO: 5015226 - DNA, 25 bp, Homo sapien
gttctctccgtgtagcttcctgact

SEQ ID NO: 5015227 - DNA, 25 bp, Homo sapien
ctctccgtgtagcttcctgactcac

SEQ ID NO: 5015228 - DNA, 25 bp, Homo sapien
tctctccgtgtagcttcctgactca

SEQ ID NO: 5015229 - DNA, 25 bp, Homo sapien
cagccaacgtgtcttctaccacagg

SEQ ID NO: 5015230 - DNA, 25 bp, Homo sapien
atggcagcgcctttggtatctccag

SEQ ID NO: 5015231 - DNA, 25 bp, Homo sapien
gcctttggtatctccagggctccca

SEQ ID NO: 5015232 - DNA, 25 bp, Homo sapien
ccacaggcatgcagctctttttctg

SEQ ID NO: 5015233 - DNA, 25 bp, Homo sapien
tgcctctatgcctaatttcagctgg

SEQ ID NO: 5015234 - DNA, 25 bp, Homo sapien
agctgcctctatgcctaatttcagc

SEQ ID NO: 5015235 - DNA, 25 bp, Homo sapien
tatgcctaatttcagctggccctgg

SEQ ID NO: 5015236 - DNA, 25 bp, Homo sapien
tctatgcctaatttcagctggccct

SEQ ID NO: 5015237 - DNA, 25 bp, Homo sapien
gcaggaagtactggggatatgtctc

SEQ ID NO: 5015238 - DNA, 25 bp, Homo sapien
tattatataaacatgcgtaatgcag

SEQ ID NO: 5015239 - DNA, 25 bp, Homo sapien
ggaagtactggggatatgtctcttc

SEQ ID NO: 5015240 - DNA, 25 bp, Homo sapien
agtactggggatatgtctcttctac

SEQ ID NO: 5015241 - DNA, 25 bp, Homo sapien
tagaatttatcaatttggatgaagg

SEQ ID NO: 5015242 - DNA, 25 bp, Homo sapien
ccttctgcaactatggtggagacag

SEQ ID NO: 5015243 - DNA, 25 bp, Homo sapien
ggtctctggccgtttaactgtctca

SEQ ID NO: 5015244 - DNA, 25 bp, Homo sapien
gtcactgctgatgacttttgcaaaa

SEQ ID NO: 5015245 - DNA, 25 bp, Homo sapien
gagcccctgtgatcccagtcaaagg

SEQ ID NO: 5015246 - DNA, 25 bp, Homo sapien
gttaaactcataagagcccctgtga

SEQ ID NO: 5015247 - DNA, 25 bp, Homo sapien
aaactcataagagcccctgtgatcc

SEQ ID NO: 5015248 - DNA, 25 bp, Homo sapien
ggttaaactcataagagcccctgtg

SEQ ID NO: 5015249 - DNA, 25 bp, Homo sapien
gatgtcattttggagatgggctttc

SEQ ID NO: 5015250 - DNA, 25 bp, Homo sapien
atgatgtcattttggagatgggctt

SEQ ID NO: 5015251 - DNA, 25 bp, Homo sapien
tgatgtcattttggagatgggcttt

SEQ ID NO: 5015252 - DNA, 25 bp, Homo sapien
ttcagcgtacagttggttattcata

SEQ ID NO: 5015253 - DNA, 25 bp, Homo sapien
gcgtacagttggttattcatatttg

SEQ ID NO: 5015254 - DNA, 25 bp, Homo sapien
cagcgtacagttggttattcatatt

SEQ ID NO: 5015255 - DNA, 25 bp, Homo sapien
ctttcagcgtacagttggttattca

SEQ ID NO: 5015256 - DNA, 25 bp, Homo sapien
gctgcagcgggagggtttcccactt

SEQ ID NO: 5015257 - DNA, 25 bp, Homo sapien
tgagctattactgtgagtgcagcag

SEQ ID NO: 5015258 - DNA, 25 bp, Homo sapien
cttgacctcttacttcagctcctga

SEQ ID NO: 5015259 - DNA, 25 bp, Homo sapien
ggctgcccgcgactcagattttcca

SEQ ID NO: 5015260 - DNA, 25 bp, Homo sapien
gaactttaactcacaatctgcagca

SEQ ID NO: 5015261 - DNA, 25 bp, Homo sapien
gcagcaatctgcctgggagaccaac

SEQ ID NO: 5015262 - DNA, 25 bp, Homo sapien
gccagcctgatataagtccaacttg

SEQ ID NO: 5015263 - DNA, 25 bp, Homo sapien
tatgcaaatggacaatggccagacc

SEQ ID NO: 5015264 - DNA, 25 bp, Homo sapien
caatccacacttcgccagaaaggca

SEQ ID NO: 5015265 - DNA, 25 bp, Homo sapien
tgtgtccccctttggcattcccaat

SEQ ID NO: 5015266 - DNA, 25 bp, Homo sapien
gactccatccaccatagaattgcca

SEQ ID NO: 5015267 - DNA, 25 bp, Homo sapien
cacagattgtccaactctggagtta

SEQ ID NO: 5015268 - DNA, 25 bp, Homo sapien
atggagccgcggtttcccctaatct

SEQ ID NO: 5015269 - DNA, 25 bp, Homo sapien
tcccaaggctgcacatttctgaaga

SEQ ID NO: 5015270 - DNA, 25 bp, Homo sapien
ggctgcacatttctgaagagcacct

SEQ ID NO: 5015271 - DNA, 25 bp, Homo sapien
gatcttgacctacattggaacccgc

SEQ ID NO: 5015272 - DNA, 25 bp, Homo sapien
gtctaatgacatggtagcttccatc

SEQ ID NO: 5015273 - DNA, 25 bp, Homo sapien
ccatctgtctagtggtgggacctaa

SEQ ID NO: 5015274 - DNA, 25 bp, Homo sapien
tggtgggacctaagcagagagcccc

SEQ ID NO: 5015275 - DNA, 25 bp, Homo sapien
gaacacaaatacctgtaaatcaatg

SEQ ID NO: 5015276 - DNA, 25 bp, Homo sapien
gctaccgtgcacatttgctctgttc

SEQ ID NO: 5015277 - DNA, 25 bp, Homo sapien
caaccagcttgctaccgtgcacatt

SEQ ID NO: 5015278 - DNA, 25 bp, Homo sapien
cagcttgctaccgtgcacatttgct

SEQ ID NO: 5015279 - DNA, 25 bp, Homo sapien
agcccccagcggtgcttcacaagtg

SEQ ID NO: 5015280 - DNA, 25 bp, Homo sapien
gagggaggtgcagacattctttgca

SEQ ID NO: 5015281 - DNA, 25 bp, Homo sapien
ggccaagcgtgccatctcccctcat

SEQ ID NO: 5015282 - DNA, 25 bp, Homo sapien
gtcaaagcccctttggacagtggtg

SEQ ID NO: 5015283 - DNA, 25 bp, Homo sapien
agcagcactagtcaaagcccctttg

SEQ ID NO: 5015284 - DNA, 25 bp, Homo sapien
tcagagatgacggtcaatgtcccat

SEQ ID NO: 5015285 - DNA, 25 bp, Homo sapien
tacaccctgctgtaggggcataaaa

SEQ ID NO: 5015286 - DNA, 25 bp, Homo sapien
ggtcaatgtcccattccttctgaac

SEQ ID NO: 5015287 - DNA, 25 bp, Homo sapien
cagggagctcagagatgacggtcaa

SEQ ID NO: 5015288 - DNA, 25 bp, Homo sapien
tctatccaatctttgtcacatacca

SEQ ID NO: 5015289 - DNA, 25 bp, Homo sapien
acataccagttgtgtagcctcagga

SEQ ID NO: 5015290 - DNA, 25 bp, Homo sapien
cacataccagttgtgtagcctcagg

SEQ ID NO: 5015291 - DNA, 25 bp, Homo sapien
aaccctctatccaatctttgtcaca

SEQ ID NO: 5015292 - DNA, 25 bp, Homo sapien
tgtcctgtgaaattctgtgagctcc

SEQ ID NO: 5015293 - DNA, 25 bp, Homo sapien
tctaactggatagagtgtgagccat

SEQ ID NO: 5015294 - DNA, 25 bp, Homo sapien
aacatgggtcataggatttgcaaaa

SEQ ID NO: 5015295 - DNA, 25 bp, Homo sapien
tatgggcaaaaatcttctcggaact

SEQ ID NO: 5015296 - DNA, 25 bp, Homo sapien
gaggctgagaagtcctgtgatgtgc

SEQ ID NO: 5015297 - DNA, 25 bp, Homo sapien
caaaggcaagtggagaaagaacaca

SEQ ID NO: 5015298 - DNA, 25 bp, Homo sapien
aaaggcaagtggagaaagaacacac

SEQ ID NO: 5015299 - DNA, 25 bp, Homo sapien
ctgcaaaggcaagtggagaaagaac

SEQ ID NO: 5015300 - DNA, 25 bp, Homo sapien
tgcaaaggcaagtggagaaagaaca

SEQ ID NO: 5015301 - DNA, 25 bp, Homo sapien
agtcggtaatgtttgtccgaatttg

SEQ ID NO: 5015302 - DNA, 25 bp, Homo sapien
tcggtaatgtttgtccgaatttgct

SEQ ID NO: 5015303 - DNA, 25 bp, Homo sapien
tggaacatatgatgtagtttaaaaa

SEQ ID NO: 5015304 - DNA, 25 bp, Homo sapien
gcttttggaacatatgatgtagttt

SEQ ID NO: 5015305 - DNA, 25 bp, Homo sapien
gccgctcttagttgaaggatctctg

SEQ ID NO: 5015306 - DNA, 25 bp, Homo sapien
tgtgggctgaggaatcttccctgag

SEQ ID NO: 5015307 - DNA, 25 bp, Homo sapien
tcgcaaggttctgccatggtgacag

SEQ ID NO: 5015308 - DNA, 25 bp, Homo sapien
atggtgacagagtgacccaggccgc

SEQ ID NO: 5015309 - DNA, 25 bp, Homo sapien
atttccaagttgaagaatttcagcc

SEQ ID NO: 5015310 - DNA, 25 bp, Homo sapien
tcctttaccaaggtttgcagagtag

SEQ ID NO: 5015311 - DNA, 25 bp, Homo sapien
tgtttgaacaccttctgtgggtctg

SEQ ID NO: 5015312 - DNA, 25 bp, Homo sapien
aatttcagccaaagagcaacatgtc

SEQ ID NO: 5015313 - DNA, 25 bp, Homo sapien
cataaatggaatccaggcagttcta

SEQ ID NO: 5015314 - DNA, 25 bp, Homo sapien
gttgttgctgaaatagcacttgcta

SEQ ID NO: 5015315 - DNA, 25 bp, Homo sapien
tctatgagacaacactgatatatct

SEQ ID NO: 5015316 - DNA, 25 bp, Homo sapien
gtctatagcacatgaaatatctaag

SEQ ID NO: 5015317 - DNA, 25 bp, Homo sapien
tatccttctttatgcggataaacac

SEQ ID NO: 5015318 - DNA, 25 bp, Homo sapien
ttcagatgcttgagcactttcaaca

SEQ ID NO: 5015319 - DNA, 25 bp, Homo sapien
ttctttatgcggataaacacaactg

SEQ ID NO: 5015320 - DNA, 25 bp, Homo sapien
tgacttcagatgcttgagcactttc

SEQ ID NO: 5015321 - DNA, 25 bp, Homo sapien
gggctattgcctgagttgccatttg

SEQ ID NO: 5015322 - DNA, 25 bp, Homo sapien
aggccctgagatgagctcacatttc

SEQ ID NO: 5015323 - DNA, 25 bp, Homo sapien
cttctgggctattgcctgagttgcc

SEQ ID NO: 5015324 - DNA, 25 bp, Homo sapien
ttgccatttgagcagccaccagacc

SEQ ID NO: 5015325 - DNA, 25 bp, Homo sapien
caatcaccagaagggtggtcagcag

SEQ ID NO: 5015326 - DNA, 25 bp, Homo sapien
tgcccacagtgggtatcccagtctg

SEQ ID NO: 5015327 - DNA, 25 bp, Homo sapien
agcagtataccaactgccatgccca

SEQ ID NO: 5015328 - DNA, 25 bp, Homo sapien
gtgacctgctggccggaaacaactt

SEQ ID NO: 5015329 - DNA, 25 bp, Homo sapien
cctggtagacagtcgggcatgagta

SEQ ID NO: 5015330 - DNA, 25 bp, Homo sapien
cctctcctcaaactctgtgtgcctg

SEQ ID NO: 5015331 - DNA, 25 bp, Homo sapien
aagggtggccgacccccatcattga

SEQ ID NO: 5015332 - DNA, 25 bp, Homo sapien
ggatcaagacgacatactccctctc

SEQ ID NO: 5015333 - DNA, 25 bp, Homo sapien
catcagtagcctcgaaaatgagact

SEQ ID NO: 5015334 - DNA, 25 bp, Homo sapien
ttttgtaagcttccactgccgaggg

SEQ ID NO: 5015335 - DNA, 25 bp, Homo sapien
ctcgaaaatgagacttccaggtgca

SEQ ID NO: 5015336 - DNA, 25 bp, Homo sapien
gggaccccgaaataagtgctgatca

SEQ ID NO: 5015337 - DNA, 25 bp, Homo sapien
cgtgtagtccttggctagcctggga

SEQ ID NO: 5015338 - DNA, 25 bp, Homo sapien
taaggatcaggtggaactctgacac

SEQ ID NO: 5015339 - DNA, 25 bp, Homo sapien
ttcacatccataaggatcaggtgga

SEQ ID NO: 5015340 - DNA, 25 bp, Homo sapien
aagaacaagcccgtgtagtccttgg

SEQ ID NO: 5015341 - DNA, 25 bp, Homo sapien
ttcttctcaacatcgtctatgtcca

SEQ ID NO: 5015342 - DNA, 25 bp, Homo sapien
tcttctcaacatcgtctatgtccat

SEQ ID NO: 5015343 - DNA, 25 bp, Homo sapien
tctacgtgaacaggtcagtggtttg

SEQ ID NO: 5015344 - DNA, 25 bp, Homo sapien
aaggatgagagttacaatttaaggc

SEQ ID NO: 5015345 - DNA, 25 bp, Homo sapien
tggtggtctacgtgaacaggtcagt

SEQ ID NO: 5015346 - DNA, 25 bp, Homo sapien
gagcaagtggtggtctacgtgaaca

SEQ ID NO: 5015347 - DNA, 25 bp, Homo sapien
cgatatggacttccggcttctctgt

SEQ ID NO: 5015348 - DNA, 25 bp, Homo sapien
ccagtcacgtggtcaattttaagcc

SEQ ID NO: 5015349 - DNA, 25 bp, Homo sapien
tgtggccaccacttgtacccgatat

SEQ ID NO: 5015350 - DNA, 25 bp, Homo sapien
ggagccacactaaagatctcaccag

SEQ ID NO: 5015351 - DNA, 25 bp, Homo sapien
gttattgatgaaccaccatcccttg

SEQ ID NO: 5015352 - DNA, 25 bp, Homo sapien
aatttcatcattgctgggtatgctg

SEQ ID NO: 5015353 - DNA, 25 bp, Homo sapien
catcccttggaatgcccccagggtg

SEQ ID NO: 5015354 - DNA, 25 bp, Homo sapien
cagcttcctaaaccaaagccaattt

SEQ ID NO: 5015355 - DNA, 25 bp, Homo sapien
ctttcgcttggaatacgtgttggga

SEQ ID NO: 5015356 - DNA, 25 bp, Homo sapien
gaaaattgaggtgcttcattcacat

SEQ ID NO: 5015357 - DNA, 25 bp, Homo sapien
gaacttgcattgtacttcacaccaa

SEQ ID NO: 5015358 - DNA, 25 bp, Homo sapien
tctgtcacaataagcgtgaacttgg

SEQ ID NO: 5015359 - DNA, 25 bp, Homo sapien
tcatctggtaaacccatgacatgct

SEQ ID NO: 5015360 - DNA, 25 bp, Homo sapien
taactgtaagtacattggacggcat

SEQ ID NO: 5015361 - DNA, 25 bp, Homo sapien
ctgcttccaattgagtcatctggta

SEQ ID NO: 5015362 - DNA, 25 bp, Homo sapien
gacggcattgagtgctgcttccaat

SEQ ID NO: 5015363 - DNA, 25 bp, Homo sapien
cttcagcaagagtcaggtttccata

SEQ ID NO: 5015364 - DNA, 25 bp, Homo sapien
cctggatggttaagatggtggaccc

SEQ ID NO: 5015365 - DNA, 25 bp, Homo sapien
taattatgacatatccggtgttggt

SEQ ID NO: 5015366 - DNA, 25 bp, Homo sapien
actcccagtaaatggctcatcagca

SEQ ID NO: 5015367 - DNA, 25 bp, Homo sapien
tgatttgcacaaaacaaagggtctt

SEQ ID NO: 5015368 - DNA, 25 bp, Homo sapien
tatcaataacgttgatttgcacaaa

SEQ ID NO: 5015369 - DNA, 25 bp, Homo sapien
gatttgcacaaaacaaagggtcttg

SEQ ID NO: 5015370 - DNA, 25 bp, Homo sapien
gatcattgatatcaataacgttgat

SEQ ID NO: 5015371 - DNA, 25 bp, Homo sapien
ggctaaagacagatctaagagagat

SEQ ID NO: 5015372 - DNA, 25 bp, Homo sapien
ttttcattgccgtccacctgctgtc

SEQ ID NO: 5015373 - DNA, 25 bp, Homo sapien
tacccaagtggtcaccaagtgtggg

SEQ ID NO: 5015374 - DNA, 25 bp, Homo sapien
ggcagggtggctaaagacagatcta

SEQ ID NO: 5015375 - DNA, 25 bp, Homo sapien
tgtcatgtgcagtaagggtcccgat

SEQ ID NO: 5015376 - DNA, 25 bp, Homo sapien
cataggtttggattaggaagagtcc

SEQ ID NO: 5015377 - DNA, 25 bp, Homo sapien
gctaactgtaacattccagcatagg

SEQ ID NO: 5015378 - DNA, 25 bp, Homo sapien
gggagtttgctccacaatcctgtag

SEQ ID NO: 5015379 - DNA, 25 bp, Homo sapien
tgggagcagaggaccttgtggatca

SEQ ID NO: 5015380 - DNA, 25 bp, Homo sapien
gaaaaccatgtctctgagtgactga

SEQ ID NO: 5015381 - DNA, 25 bp, Homo sapien
tggatcagtcggaagtgaaaggaaa

SEQ ID NO: 5015382 - DNA, 25 bp, Homo sapien
ggactgctggcatcagaggacaccc

SEQ ID NO: 5015383 - DNA, 25 bp, Homo sapien
taacttttacatgaatttccagcgg

SEQ ID NO: 5015384 - DNA, 25 bp, Homo sapien
tccagcggatatgaaagtggttttc

SEQ ID NO: 5015385 - DNA, 25 bp, Homo sapien
caaatacggttactggtgacggaca

SEQ ID NO: 5015386 - DNA, 25 bp, Homo sapien
cattctcctggacctcaaatacggt

SEQ ID NO: 5015387 - DNA, 25 bp, Homo sapien
tgcatccttttcttctcggtccaag

SEQ ID NO: 5015388 - DNA, 25 bp, Homo sapien
agtcacgtaaatatctccttcctgg

SEQ ID NO: 5015389 - DNA, 25 bp, Homo sapien
taaggaatattgtgcaccgggatca

SEQ ID NO: 5015390 - DNA, 25 bp, Homo sapien
tcggtccaagggctgagtcacgtaa

SEQ ID NO: 5015391 - DNA, 25 bp, Homo sapien
actgaaggaattctcactctggcct

SEQ ID NO: 5015392 - DNA, 25 bp, Homo sapien
gtcactatgatatccacagatgtgg

SEQ ID NO: 5015393 - DNA, 25 bp, Homo sapien
gggtgaggatcagttgagttttcca

SEQ ID NO: 5015394 - DNA, 25 bp, Homo sapien
tcactgagatcaccagattatagga

SEQ ID NO: 5015395 - DNA, 25 bp, Homo sapien
gagtggccggatcatccaggtctgt

SEQ ID NO: 5015396 - DNA, 25 bp, Homo sapien
atgggaagctggatgacaatctggt

SEQ ID NO: 5015397 - DNA, 25 bp, Homo sapien
cctctcgggtaagagagatggctcc

SEQ ID NO: 5015398 - DNA, 25 bp, Homo sapien
gagatggctcccgttttgttgttga

SEQ ID NO: 5015399 - DNA, 25 bp, Homo sapien
gaaacgtgggtcgattgtcgttgat

SEQ ID NO: 5015400 - DNA, 25 bp, Homo sapien
tcgtactttgactggagaaacgtgg

SEQ ID NO: 5015401 - DNA, 25 bp, Homo sapien
cgagagttctgccttactgagcctt

SEQ ID NO: 5015402 - DNA, 25 bp, Homo sapien
gatgtccttcacttttatggtgata

SEQ ID NO: 5015403 - DNA, 25 bp, Homo sapien
aattccattagcgtccagggctgca

SEQ ID NO: 5015404 - DNA, 25 bp, Homo sapien
ataattccattagcgtccagggctg

SEQ ID NO: 5015405 - DNA, 25 bp, Homo sapien
ttccattagcgtccagggctgcaac

SEQ ID NO: 5015406 - DNA, 25 bp, Homo sapien
ctataattccattagcgtccagggc

SEQ ID NO: 5015407 - DNA, 25 bp, Homo sapien
tgtaatacagaagtccctcccgttc

SEQ ID NO: 5015408 - DNA, 25 bp, Homo sapien
tcacagcaggaggattggccttaaa

SEQ ID NO: 5015409 - DNA, 25 bp, Homo sapien
gagtagatcttgtttccctgtccaa

SEQ ID NO: 5015410 - DNA, 25 bp, Homo sapien
tccccagttagttcaaaagtcacag

SEQ ID NO: 5015411 - DNA, 25 bp, Homo sapien
caagccagagacctaagagttgtcc

SEQ ID NO: 5015412 - DNA, 25 bp, Homo sapien
gctagcccctaagagcagttgagat

SEQ ID NO: 5015413 - DNA, 25 bp, Homo sapien
tggcacctatataaggaagtctccc

SEQ ID NO: 5015414 - DNA, 25 bp, Homo sapien
tggctgccccacagataaccttaaa

SEQ ID NO: 5015415 - DNA, 25 bp, Homo sapien
cagacctttgactgcatcctgtctc

SEQ ID NO: 5015416 - DNA, 25 bp, Homo sapien
tccgcaggcatgcagacctttgact

SEQ ID NO: 5015417 - DNA, 25 bp, Homo sapien
cctgcagcctgctataggacgaagg

SEQ ID NO: 5015418 - DNA, 25 bp, Homo sapien
cattttcttgacaagtgcacacccc

SEQ ID NO: 5015419 - DNA, 25 bp, Homo sapien
taatttgactcggttcttggccttc

SEQ ID NO: 5015420 - DNA, 25 bp, Homo sapien
ataatttgactcggttcttggcctt

SEQ ID NO: 5015421 - DNA, 25 bp, Homo sapien
aatttgactcggttcttggccttca

SEQ ID NO: 5015422 - DNA, 25 bp, Homo sapien
cattcccagtctcagaacatgggga

SEQ ID NO: 5015423 - DNA, 25 bp, Homo sapien
gtctcagaacatggggagcatcact

SEQ ID NO: 5015424 - DNA, 25 bp, Homo sapien
gaacatggggagcatcactgtagcc

SEQ ID NO: 5015425 - DNA, 25 bp, Homo sapien
catggggagcatcactgtagccctc

SEQ ID NO: 5015426 - DNA, 25 bp, Homo sapien
gatggagtgggcacccacgggaagg

SEQ ID NO: 5015427 - DNA, 25 bp, Homo sapien
aaagcataagaagacacagggagtg

SEQ ID NO: 5015428 - DNA, 25 bp, Homo sapien
gcataagaagacacagggagtgaag

SEQ ID NO: 5015429 - DNA, 25 bp, Homo sapien
aaataaagcataagaagacacaggg

SEQ ID NO: 5015430 - DNA, 25 bp, Homo sapien
acacagggagtgaagatgggcctga

SEQ ID NO: 5015431 - DNA, 25 bp, Homo sapien
aggttgcagccagccatgattgcgc

SEQ ID NO: 5015432 - DNA, 25 bp, Homo sapien
gcagaggttgcagccagccatgatt

SEQ ID NO: 5015433 - DNA, 25 bp, Homo sapien
gcagcctgggtgacagagcgagacc

SEQ ID NO: 5015434 - DNA, 25 bp, Homo sapien
gattgcgccactgcactgcagcctg

SEQ ID NO: 5015435 - DNA, 25 bp, Homo sapien
agaaggcctcggttcccaaactgtg

SEQ ID NO: 5015436 - DNA, 25 bp, Homo sapien
agggcacctgcttgcagacgggaac

SEQ ID NO: 5015437 - DNA, 25 bp, Homo sapien
cagggcacctgcttgcagacgggaa

SEQ ID NO: 5015438 - DNA, 25 bp, Homo sapien
caccacttgctcaacagtagaccag

SEQ ID NO: 5015439 - DNA, 25 bp, Homo sapien
accacttgctcaacagtagaccagg

SEQ ID NO: 5015440 - DNA, 25 bp, Homo sapien
gaccacagaaattaagagacttgcc

SEQ ID NO: 5015441 - DNA, 25 bp, Homo sapien
acttggtggtgaaaaactatcttgc

SEQ ID NO: 5015442 - DNA, 25 bp, Homo sapien
ttgctgcatgcaccgataagacttg

SEQ ID NO: 5015443 - DNA, 25 bp, Homo sapien
cggataacgacaaaggcagcaaaca

SEQ ID NO: 5015444 - DNA, 25 bp, Homo sapien
aaattccattcaccagggcacacac

SEQ ID NO: 5015445 - DNA, 25 bp, Homo sapien
gccagtccatggttttctgatcagc

SEQ ID NO: 5015446 - DNA, 25 bp, Homo sapien
ggcacacacagattgcaggtagccc

SEQ ID NO: 5015447 - DNA, 25 bp, Homo sapien
taaaatttgccagtccatggttttc

SEQ ID NO: 5015448 - DNA, 25 bp, Homo sapien
tctctgttggataatatcaaggcat

SEQ ID NO: 5015449 - DNA, 25 bp, Homo sapien
tagccaggcatcaccattcttgtca

SEQ ID NO: 5015450 - DNA, 25 bp, Homo sapien
gcagagtttcttgcgatggctggac

SEQ ID NO: 5015451 - DNA, 25 bp, Homo sapien
gccgtgctggctccaagttttctca

SEQ ID NO: 5015452 - DNA, 25 bp, Homo sapien
taagtacctcctctcgtacatggcc

SEQ ID NO: 5015453 - DNA, 25 bp, Homo sapien
gtaacggttgcgagattcttttcaa

SEQ ID NO: 5015454 - DNA, 25 bp, Homo sapien
tgggtttagcagctaagtacctcct

SEQ ID NO: 5015455 - DNA, 25 bp, Homo sapien
tgggtttgtaacggttgcgagattc

SEQ ID NO: 5015456 - DNA, 25 bp, Homo sapien
tggcaaagccttgttagcttcaggt

SEQ ID NO: 5015457 - DNA, 25 bp, Homo sapien
gcaaagccttgttagcttcaggttt

SEQ ID NO: 5015458 - DNA, 25 bp, Homo sapien
caaagccttgttagcttcaggtttc

SEQ ID NO: 5015459 - DNA, 25 bp, Homo sapien
ggcaaagccttgttagcttcaggtt

SEQ ID NO: 5015460 - DNA, 25 bp, Homo sapien
tctccctatgttcagaccttccagg

SEQ ID NO: 5015461 - DNA, 25 bp, Homo sapien
tgccttttgtatgagaaaggaggag

SEQ ID NO: 5015462 - DNA, 25 bp, Homo sapien
cttgtacagtctggatctccctatg

SEQ ID NO: 5015463 - DNA, 25 bp, Homo sapien
cttcaccttgaacagtgatgacttt

SEQ ID NO: 5015464 - DNA, 25 bp, Homo sapien
gaccagggacttttatatactcatc

SEQ ID NO: 5015465 - DNA, 25 bp, Homo sapien
gacacagttaagacatgtcagccct

SEQ ID NO: 5015466 - DNA, 25 bp, Homo sapien
gagccctagagcatcttaagaccag

SEQ ID NO: 5015467 - DNA, 25 bp, Homo sapien
caatttctagaatacaagagcccta

SEQ ID NO: 5015468 - DNA, 25 bp, Homo sapien
cgagactcttgctacgactggagta

SEQ ID NO: 5015469 - DNA, 25 bp, Homo sapien
tcttccattcagtggtcgagactct

SEQ ID NO: 5015470 - DNA, 25 bp, Homo sapien
tcttgctacgactggagtatctccc

SEQ ID NO: 5015471 - DNA, 25 bp, Homo sapien
tcagtggtcgagactcttgctacga

SEQ ID NO: 5015472 - DNA, 25 bp, Homo sapien
ttagctgacagccaccttgcgatat

SEQ ID NO: 5015473 - DNA, 25 bp, Homo sapien
tagctgacagccaccttgcgatatt

SEQ ID NO: 5015474 - DNA, 25 bp, Homo sapien
ctttctgagctttatatggttggga

SEQ ID NO: 5015475 - DNA, 25 bp, Homo sapien
tcgcccctcccactcgatctttctg

SEQ ID NO: 5015476 - DNA, 25 bp, Homo sapien
ctcccactcgatctttctgagcttt

SEQ ID NO: 5015477 - DNA, 25 bp, Homo sapien
agctttatatggttgggaatcctgc

SEQ ID NO: 5015478 - DNA, 25 bp, Homo sapien
tacagcaatgctgacctgctgatct

SEQ ID NO: 5015479 - DNA, 25 bp, Homo sapien
taacatggtctgtaaggaccttgga

SEQ ID NO: 5015480 - DNA, 25 bp, Homo sapien
agggtagaaagtggctcccaataca

SEQ ID NO: 5015481 - DNA, 25 bp, Homo sapien
aaatcctcttcaggaccagggtaga

SEQ ID NO: 5015482 - DNA, 25 bp, Homo sapien
ctgggattcacgtccaggtgggtgc

SEQ ID NO: 5015483 - DNA, 25 bp, Homo sapien
tgtcagcatctgaatagtgtaaaat

SEQ ID NO: 5015484 - DNA, 25 bp, Homo sapien
tctgaatagtgtaaaatcgctcctc

SEQ ID NO: 5015485 - DNA, 25 bp, Homo sapien
gtgtaaaatcgctcctctgagctgg

SEQ ID NO: 5015486 - DNA, 25 bp, Homo sapien
caaccaccagggctatcttgagacc

SEQ ID NO: 5015487 - DNA, 25 bp, Homo sapien
ttgagaccctcggagaagtccatac

SEQ ID NO: 5015488 - DNA, 25 bp, Homo sapien
gggctatcttgagaccctcggagaa

SEQ ID NO: 5015489 - DNA, 25 bp, Homo sapien
tcaaggtgtgatgccaaccaccagg

SEQ ID NO: 5015490 - DNA, 25 bp, Homo sapien
tcccaatcagccgcctgagactttt

SEQ ID NO: 5015491 - DNA, 25 bp, Homo sapien
cctgagacttttcactccaatgagc

SEQ ID NO: 5015492 - DNA, 25 bp, Homo sapien
tccaatgagcactcctattggcttc

SEQ ID NO: 5015493 - DNA, 25 bp, Homo sapien
acctggcggcactggtcctccatca

SEQ ID NO: 5015494 - DNA, 25 bp, Homo sapien
tttgcaggatcccagatggcaggca

SEQ ID NO: 5015495 - DNA, 25 bp, Homo sapien
gaatatggtactcgctgtacccgcc

SEQ ID NO: 5015496 - DNA, 25 bp, Homo sapien
gaatctgccaaagggacaggctcct

SEQ ID NO: 5015497 - DNA, 25 bp, Homo sapien
tgtacccgccaagcgctagatagag

SEQ ID NO: 5015498 - DNA, 25 bp, Homo sapien
caaccaatgggaagaacaacgcgtc

SEQ ID NO: 5015499 - DNA, 25 bp, Homo sapien
gcctgatgtaatgtcacgtccctga

SEQ ID NO: 5015500 - DNA, 25 bp, Homo sapien
tgacaatgcctgtgaaagcacacgg

SEQ ID NO: 5015501 - DNA, 25 bp, Homo sapien
gactcagaatgtgacagcggcagga

SEQ ID NO: 5015502 - DNA, 25 bp, Homo sapien
tcttttccacatctaactcaatcat

SEQ ID NO: 5015503 - DNA, 25 bp, Homo sapien
attttcttttccacatctaactcaa

SEQ ID NO: 5015504 - DNA, 25 bp, Homo sapien
aatggcccaattttcttttccacat

SEQ ID NO: 5015505 - DNA, 25 bp, Homo sapien
ttccccaatgctcccacttttccca

SEQ ID NO: 5015506 - DNA, 25 bp, Homo sapien
tacaagggtcaaccaaagtactgga

SEQ ID NO: 5015507 - DNA, 25 bp, Homo sapien
cacgattctgatgagcctagttcta

SEQ ID NO: 5015508 - DNA, 25 bp, Homo sapien
tacgctagctccctgctacaatggg

SEQ ID NO: 5015509 - DNA, 25 bp, Homo sapien
catcaaagggacatctgggtgaccc

SEQ ID NO: 5015510 - DNA, 25 bp, Homo sapien
ctagagtacagagaggtcatggcag

SEQ ID NO: 5015511 - DNA, 25 bp, Homo sapien
tccttttctggtaggccagccgccg

SEQ ID NO: 5015512 - DNA, 25 bp, Homo sapien
gtttttggccacgatcttgccccag

SEQ ID NO: 5015513 - DNA, 25 bp, Homo sapien
cagaggtctcgatgaacttgcagtc

SEQ ID NO: 5015514 - DNA, 25 bp, Homo sapien
tagacaatcaggtatgcgtccccga

SEQ ID NO: 5015515 - DNA, 25 bp, Homo sapien
tcggcaccgcactaagtcacttttg

SEQ ID NO: 5015516 - DNA, 25 bp, Homo sapien
gaagctcgctcggtctgtgattgag

SEQ ID NO: 5015517 - DNA, 25 bp, Homo sapien
gctggattcgcagctcagatgcctt

SEQ ID NO: 5015518 - DNA, 25 bp, Homo sapien
gcatgcagtggtcatggagccattc

SEQ ID NO: 5015519 - DNA, 25 bp, Homo sapien
catgcagtggtcatggagccattca

SEQ ID NO: 5015520 - DNA, 25 bp, Homo sapien
ctgcatgcagtggtcatggagccat

SEQ ID NO: 5015521 - DNA, 25 bp, Homo sapien
tgcatgcagtggtcatggagccatt

SEQ ID NO: 5015522 - DNA, 25 bp, Homo sapien
ggtcacccttgcaccaaacaacttg

SEQ ID NO: 5015523 - DNA, 25 bp, Homo sapien
tataggacaaggtcacccttgcacc

SEQ ID NO: 5015524 - DNA, 25 bp, Homo sapien
gacaaggtcacccttgcaccaaaca

SEQ ID NO: 5015525 - DNA, 25 bp, Homo sapien
taggacaaggtcacccttgcaccaa

SEQ ID NO: 5015526 - DNA, 25 bp, Homo sapien
aaggaatttagagagctacaggctc

SEQ ID NO: 5015527 - DNA, 25 bp, Homo sapien
ttagagagctacaggctctgcatac

SEQ ID NO: 5015528 - DNA, 25 bp, Homo sapien
gaatttagagagctacaggctctgc

SEQ ID NO: 5015529 - DNA, 25 bp, Homo sapien
ctaaaggaatttagagagctacagg

SEQ ID NO: 5015530 - DNA, 25 bp, Homo sapien
tccccatcaaccatcagggttcgtt

SEQ ID NO: 5015531 - DNA, 25 bp, Homo sapien
gagtataatcgttgcactttcccca

SEQ ID NO: 5015532 - DNA, 25 bp, Homo sapien
catatccaggagtataatcgttgca

SEQ ID NO: 5015533 - DNA, 25 bp, Homo sapien
attttcccacatatccaggagtata

SEQ ID NO: 5015534 - DNA, 25 bp, Homo sapien
tgcaacacttctccataagagggtc

SEQ ID NO: 5015535 - DNA, 25 bp, Homo sapien
cagtccttatccagcagaacgtctc

SEQ ID NO: 5015536 - DNA, 25 bp, Homo sapien
tggagtcaggcgaatatgcaacact

SEQ ID NO: 5015537 - DNA, 25 bp, Homo sapien
gaacgtctctctcgaacatgtgtca

SEQ ID NO: 5015538 - DNA, 25 bp, Homo sapien
tgaaaattacggtgttggaggcctg

SEQ ID NO: 5015539 - DNA, 25 bp, Homo sapien
catactgtgttccaatcgctgacgg

SEQ ID NO: 5015540 - DNA, 25 bp, Homo sapien
taaattagacaacgcaagggagact

SEQ ID NO: 5015541 - DNA, 25 bp, Homo sapien
aaaactctgtctcgcccatcgtgtg

SEQ ID NO: 5015542 - DNA, 25 bp, Homo sapien
atgccgggccaaccatgaagctctt

SEQ ID NO: 5015543 - DNA, 25 bp, Homo sapien
gcacccagccaagtcagtgtcagag

SEQ ID NO: 5015544 - DNA, 25 bp, Homo sapien
tactgtgagcatctccgcagaagaa

SEQ ID NO: 5015545 - DNA, 25 bp, Homo sapien
tagttgtccctagggtccagttcag

SEQ ID NO: 5015546 - DNA, 25 bp, Homo sapien
tattagttaatgtgaccctgctctg

SEQ ID NO: 5015547 - DNA, 25 bp, Homo sapien
cagccatatgcctgatgcccaatgt

SEQ ID NO: 5015548 - DNA, 25 bp, Homo sapien
caaaatatctgggaaggctaccttt

SEQ ID NO: 5015549 - DNA, 25 bp, Homo sapien
caatgtgctgtcatattgggcatct

SEQ ID NO: 5015550 - DNA, 25 bp, Homo sapien
cctggtcataccatgtactagtttt

SEQ ID NO: 5015551 - DNA, 25 bp, Homo sapien
ttcacctgtcaaataggtatattaa

SEQ ID NO: 5015552 - DNA, 25 bp, Homo sapien
tcctggtcataccatgtactagttt

SEQ ID NO: 5015553 - DNA, 25 bp, Homo sapien
atttcttcacctgtcaaataggtat

SEQ ID NO: 5015554 - DNA, 25 bp, Homo sapien
tatttatagcccagttcctgagctg

SEQ ID NO: 5015555 - DNA, 25 bp, Homo sapien
gaatcaattgtacaacactggccct

SEQ ID NO: 5015556 - DNA, 25 bp, Homo sapien
gaactgagtcatcgctaagacacct

SEQ ID NO: 5015557 - DNA, 25 bp, Homo sapien
tgtgagtcgcgacagaacacagacc

SEQ ID NO: 5015558 - DNA, 25 bp, Homo sapien
tacttagcagaacatagggctgtgc

SEQ ID NO: 5015559 - DNA, 25 bp, Homo sapien
cctggtcgcatacgctcagactgaa

SEQ ID NO: 5015560 - DNA, 25 bp, Homo sapien
catattacttagcagaacatagggc

SEQ ID NO: 5015561 - DNA, 25 bp, Homo sapien
gacactttatggatggcattggcta

SEQ ID NO: 5015562 - DNA, 25 bp, Homo sapien
gctcccaactctgtgggtaaataag

SEQ ID NO: 5015563 - DNA, 25 bp, Homo sapien
cagattttggtcctgtctacaagca

SEQ ID NO: 5015564 - DNA, 25 bp, Homo sapien
tttcttgcccgaaagcctgtgcttg

SEQ ID NO: 5015565 - DNA, 25 bp, Homo sapien
tctggcccaggatcaacagattttg

SEQ ID NO: 5015566 - DNA, 25 bp, Homo sapien
accactcggtagtaggtgttccctg

SEQ ID NO: 5015567 - DNA, 25 bp, Homo sapien
ccctatgagcaccactcggtagtag

SEQ ID NO: 5015568 - DNA, 25 bp, Homo sapien
tgctcccctatgagcaccactcggt

SEQ ID NO: 5015569 - DNA, 25 bp, Homo sapien
tatgagcaccactcggtagtaggtg

SEQ ID NO: 5015570 - DNA, 25 bp, Homo sapien
ctttctggaccatcagatgcctgcc

SEQ ID NO: 5015571 - DNA, 25 bp, Homo sapien
cccacagtgccctggcgcatggtga

SEQ ID NO: 5015572 - DNA, 25 bp, Homo sapien
gccctggcgcatggtgacattattc

SEQ ID NO: 5015573 - DNA, 25 bp, Homo sapien
cagaatggcggttgcggtggctgta

SEQ ID NO: 5015574 - DNA, 25 bp, Homo sapien
tccgctcaaatacatggtcagtcat

SEQ ID NO: 5015575 - DNA, 25 bp, Homo sapien
gggagcaaagcagccaagatggcag

SEQ ID NO: 5015576 - DNA, 25 bp, Homo sapien
gctcaaatacatggtcagtcatcag

SEQ ID NO: 5015577 - DNA, 25 bp, Homo sapien
gagagctccgctcaaatacatggtc

SEQ ID NO: 5015578 - DNA, 25 bp, Homo sapien
gcccacactgtcagtaaccagctcc

SEQ ID NO: 5015579 - DNA, 25 bp, Homo sapien
gctcctcaggcagactatcatttgc

SEQ ID NO: 5015580 - DNA, 25 bp, Homo sapien
cacactgtcagtaaccagctcctca

SEQ ID NO: 5015581 - DNA, 25 bp, Homo sapien
ctcctcaggcagactatcatttgca

SEQ ID NO: 5015582 - DNA, 25 bp, Homo sapien
taccgaattgaactaaggaacctgc

SEQ ID NO: 5015583 - DNA, 25 bp, Homo sapien
ctcgatctgtagagggaggtgaccc

SEQ ID NO: 5015584 - DNA, 25 bp, Homo sapien
ggaacctgctgatgagaagcgacat

SEQ ID NO: 5015585 - DNA, 25 bp, Homo sapien
tttagtctcaaaagcagcacctcag

SEQ ID NO: 5015586 - DNA, 25 bp, Homo sapien
aatcccagtgctgagcgcacgttcc

SEQ ID NO: 5015587 - DNA, 25 bp, Homo sapien
ttcgaaagttctgcgggctgggaaa

SEQ ID NO: 5015588 - DNA, 25 bp, Homo sapien
tcccagtgctgagcgcacgttccag

SEQ ID NO: 5015589 - DNA, 25 bp, Homo sapien
tcttttctcaacttcgaaagttctg

SEQ ID NO: 5015590 - DNA, 25 bp, Homo sapien
tcagcgtatcgcgtgggtccgcgct

SEQ ID NO: 5015591 - DNA, 25 bp, Homo sapien
gctctgcagcaaactcggagttgca

SEQ ID NO: 5015592 - DNA, 25 bp, Homo sapien
ggcggtttataaccagcccagccga

SEQ ID NO: 5015593 - DNA, 25 bp, Homo sapien
gtccgcgctgggatacccgggccaa

SEQ ID NO: 5015594 - DNA, 25 bp, Homo sapien
gccagcttcaactctgggttggctg

SEQ ID NO: 5015595 - DNA, 25 bp, Homo sapien
cagcttcaactctgggttggctggt

SEQ ID NO: 5015596 - DNA, 25 bp, Homo sapien
agccagcttcaactctgggttggct

SEQ ID NO: 5015597 - DNA, 25 bp, Homo sapien
ccagcttcaactctgggttggctgg

SEQ ID NO: 5015598 - DNA, 25 bp, Homo sapien
caacatgtagataggatatgcgtat

SEQ ID NO: 5015599 - DNA, 25 bp, Homo sapien
ggaaagcctatctgagatggatgaa

SEQ ID NO: 5015600 - DNA, 25 bp, Homo sapien
ggatatgcgtatgcaaaaatagcat

SEQ ID NO: 5015601 - DNA, 25 bp, Homo sapien
aagcctatctgagatggatgaagaa

SEQ ID NO: 5015602 - DNA, 25 bp, Homo sapien
tctgattggctaagcttggatgaaa

SEQ ID NO: 5015603 - DNA, 25 bp, Homo sapien
ccaattccaaagtcccaggaaagag

SEQ ID NO: 5015604 - DNA, 25 bp, Homo sapien
ggatgaaacaatcaaccttggtcca

SEQ ID NO: 5015605 - DNA, 25 bp, Homo sapien
ccatagctctagtccctttgttcca

SEQ ID NO: 5015606 - DNA, 25 bp, Homo sapien
gccacacagaagccttgagtgtgaa

SEQ ID NO: 5015607 - DNA, 25 bp, Homo sapien
cacagaagccttgagtgtgaaagga

SEQ ID NO: 5015608 - DNA, 25 bp, Homo sapien
cacacagaagccttgagtgtgaaag

SEQ ID NO: 5015609 - DNA, 25 bp, Homo sapien
acagaagccttgagtgtgaaaggag

SEQ ID NO: 5015610 - DNA, 25 bp, Homo sapien
ctcttgacttctgtgccacttgact

SEQ ID NO: 5015611 - DNA, 25 bp, Homo sapien
gacttctgtgccacttgactgacag

SEQ ID NO: 5015612 - DNA, 25 bp, Homo sapien
ttctgtgccacttgactgacagcat

SEQ ID NO: 5015613 - DNA, 25 bp, Homo sapien
tgacttctgtgccacttgactgaca

SEQ ID NO: 5015614 - DNA, 25 bp, Homo sapien
tgttgaatgatcagccacccgaagc

SEQ ID NO: 5015615 - DNA, 25 bp, Homo sapien
tgaatgatcagccacccgaagcctt

SEQ ID NO: 5015616 - DNA, 25 bp, Homo sapien
aatgatcagccacccgaagccttct

SEQ ID NO: 5015617 - DNA, 25 bp, Homo sapien
cctgttgaatgatcagccacccgaa

SEQ ID NO: 5015618 - DNA, 25 bp, Homo sapien
tgcaggagaggaatcatctctgctc

SEQ ID NO: 5015619 - DNA, 25 bp, Homo sapien
ttcaaggcatgagtcctcttcccca

SEQ ID NO: 5015620 - DNA, 25 bp, Homo sapien
agatggctaccaagtagccttcaag

SEQ ID NO: 5015621 - DNA, 25 bp, Homo sapien
taccaagtagccttcaaggcatgag

SEQ ID NO: 5015622 - DNA, 25 bp, Homo sapien
cagttctgccaatccagggacaacc

SEQ ID NO: 5015623 - DNA, 25 bp, Homo sapien
gttctgccaatccagggacaacctc

SEQ ID NO: 5015624 - DNA, 25 bp, Homo sapien
aatccagggacaacctccccatgga

SEQ ID NO: 5015625 - DNA, 25 bp, Homo sapien
ccaatccagggacaacctccccatg

SEQ ID NO: 5015626 - DNA, 25 bp, Homo sapien
tctgcatgcttcacgtcttctgacg

SEQ ID NO: 5015627 - DNA, 25 bp, Homo sapien
gggttatcgtagagaagagccacca

SEQ ID NO: 5015628 - DNA, 25 bp, Homo sapien
gctggatggcgtctgcatgcttcac

SEQ ID NO: 5015629 - DNA, 25 bp, Homo sapien
tcttctgacgtagggttatcgtaga

SEQ ID NO: 5015630 - DNA, 25 bp, Homo sapien
tcaccaggctctccaacatttttga

SEQ ID NO: 5015631 - DNA, 25 bp, Homo sapien
tttgacattggcaagggcagccact

SEQ ID NO: 5015632 - DNA, 25 bp, Homo sapien
aaagtcttcatcaattcccagaggg

SEQ ID NO: 5015633 - DNA, 25 bp, Homo sapien
ttccatgtcacatgggttctcccat

SEQ ID NO: 5015634 - DNA, 25 bp, Homo sapien
agatcccatgccacatatgctacct

SEQ ID NO: 5015635 - DNA, 25 bp, Homo sapien
aaatcactctcatgcaggatactgg

SEQ ID NO: 5015636 - DNA, 25 bp, Homo sapien
attttgcaacatatactgtaattta

SEQ ID NO: 5015637 - DNA, 25 bp, Homo sapien
gactattgtatcaaaagtgatatat

SEQ ID NO: 5015638 - DNA, 25 bp, Homo sapien
tgactattgtatcaaaagtgatata

SEQ ID NO: 5015639 - DNA, 25 bp, Homo sapien
ttttgactattgtatcaaaagtgat

SEQ ID NO: 5015640 - DNA, 25 bp, Homo sapien
aaggatctgtaagatttaaatgatc

SEQ ID NO: 5015641 - DNA, 25 bp, Homo sapien
ctatgtgccagtagcttgagtggtt

SEQ ID NO: 5015642 - DNA, 25 bp, Homo sapien
tagatttctggtgatgtggaccaag

SEQ ID NO: 5015643 - DNA, 25 bp, Homo sapien
agatttaaatgatctccagaaaaat

SEQ ID NO: 5015644 - DNA, 25 bp, Homo sapien
acagactaatatagtgggggataaa

SEQ ID NO: 5015645 - DNA, 25 bp, Homo sapien
actctgtaacaatacggaaagatct

SEQ ID NO: 5015646 - DNA, 25 bp, Homo sapien
tatgatatatctatacactggaaga

SEQ ID NO: 5015647 - DNA, 25 bp, Homo sapien
taacaatacggaaagatctcaagat

SEQ ID NO: 5015648 - DNA, 25 bp, Homo sapien
gtcttggtgaggtcgacaactgccc

SEQ ID NO: 5015649 - DNA, 25 bp, Homo sapien
gaacttcttctcctgtacactcaca

SEQ ID NO: 5015650 - DNA, 25 bp, Homo sapien
caaagaccttgcttactgatctgcc

SEQ ID NO: 5015651 - DNA, 25 bp, Homo sapien
tacactcacagtcaagcagatcatg

SEQ ID NO: 5015652 - DNA, 25 bp, Homo sapien
tgaccatctctccatactctagaca

SEQ ID NO: 5015653 - DNA, 25 bp, Homo sapien
catctctccatactctagacattgc

SEQ ID NO: 5015654 - DNA, 25 bp, Homo sapien
atatgtacaggatatttctgaccat

SEQ ID NO: 5015655 - DNA, 25 bp, Homo sapien
atttctgaccatctctccatactct

SEQ ID NO: 5015656 - DNA, 25 bp, Homo sapien
tccaatgaggttaagtcctacacca

SEQ ID NO: 5015657 - DNA, 25 bp, Homo sapien
ccaatcaatgtcatagagaattaag

SEQ ID NO: 5015658 - DNA, 25 bp, Homo sapien
aagtcctacaccaccagcttttgaa

SEQ ID NO: 5015659 - DNA, 25 bp, Homo sapien
ctgaatgtcagtggctggattccaa

SEQ ID NO: 5015660 - DNA, 25 bp, Homo sapien
tcttgtataagcatatccatgacgc

SEQ ID NO: 5015661 - DNA, 25 bp, Homo sapien
tgtatagttggataccaacaccacc

SEQ ID NO: 5015662 - DNA, 25 bp, Homo sapien
caacaatctgctgcctttgagagat

SEQ ID NO: 5015663 - DNA, 25 bp, Homo sapien
gagtgttgactgttaaagccatcaa

SEQ ID NO: 5015664 - DNA, 25 bp, Homo sapien
gagcttggacaacacctgtagtttt

SEQ ID NO: 5015665 - DNA, 25 bp, Homo sapien
cttttcagtaaacaggagagggttg

SEQ ID NO: 5015666 - DNA, 25 bp, Homo sapien
cgtggataaccgctaagagcttgga

SEQ ID NO: 5015667 - DNA, 25 bp, Homo sapien
ttttcagtaggtcgaagttcgtgga

SEQ ID NO: 5015668 - DNA, 25 bp, Homo sapien
ttcatttttatcacaagttgagcta

SEQ ID NO: 5015669 - DNA, 25 bp, Homo sapien
ttatcacaagttgagctacattcct

SEQ ID NO: 5015670 - DNA, 25 bp, Homo sapien
catttttatcacaagttgagctaca

SEQ ID NO: 5015671 - DNA, 25 bp, Homo sapien
ttttatcacaagttgagctacattc

SEQ ID NO: 5015672 - DNA, 25 bp, Homo sapien
tgttactggttacgttccactcaca

SEQ ID NO: 5015673 - DNA, 25 bp, Homo sapien
gacttctcatctcaagctaatcgcg

SEQ ID NO: 5015674 - DNA, 25 bp, Homo sapien
gctaatcgcgacactatctcttctg

SEQ ID NO: 5015675 - DNA, 25 bp, Homo sapien
aaatgctcatgcctgggtcctactc

SEQ ID NO: 5015676 - DNA, 25 bp, Homo sapien
tacttcagctctaggagtgtggaca

SEQ ID NO: 5015677 - DNA, 25 bp, Homo sapien
gaaccatactagatagccagcagag

SEQ ID NO: 5015678 - DNA, 25 bp, Homo sapien
taggaagggagacgatcgccaagta

SEQ ID NO: 5015679 - DNA, 25 bp, Homo sapien
tcgccaagtattagataaggtgcca

SEQ ID NO: 5015680 - DNA, 25 bp, Homo sapien
tacatattagatggggactattttc

SEQ ID NO: 5015681 - DNA, 25 bp, Homo sapien
aaggcaggggtgattgcacagtttt

SEQ ID NO: 5015682 - DNA, 25 bp, Homo sapien
aaaaggcaggggtgattgcacagtt

SEQ ID NO: 5015683 - DNA, 25 bp, Homo sapien
tagatggggactattttccaacaac

SEQ ID NO: 5015684 - DNA, 25 bp, Homo sapien
caacattctctattttaggtgggag

SEQ ID NO: 5015685 - DNA, 25 bp, Homo sapien
cagtgaggcaagtaagttcagctgc

SEQ ID NO: 5015686 - DNA, 25 bp, Homo sapien
gtagtgctcctggtcggcaaaagac

SEQ ID NO: 5015687 - DNA, 25 bp, Homo sapien
gataaagctcaatctgtagtgctcc

SEQ ID NO: 5015688 - DNA, 25 bp, Homo sapien
aagcagaaggttctctcgataaaat

SEQ ID NO: 5015689 - DNA, 25 bp, Homo sapien
aaggttctctcgataaaatgatggg

SEQ ID NO: 5015690 - DNA, 25 bp, Homo sapien
taagatgacaaagagcctaatattc

SEQ ID NO: 5015691 - DNA, 25 bp, Homo sapien
gagcctaatattcctggatttacaa

SEQ ID NO: 5015692 - DNA, 25 bp, Homo sapien
tcctgtaacctccacagaaagctct

SEQ ID NO: 5015693 - DNA, 25 bp, Homo sapien
tatgcttgtagatattcatcaccac

SEQ ID NO: 5015694 - DNA, 25 bp, Homo sapien
gagagatactccacgaatacatttg

SEQ ID NO: 5015695 - DNA, 25 bp, Homo sapien
tcattcagctcttaattgtgggctg

SEQ ID NO: 5015696 - DNA, 25 bp, Homo sapien
gcactgttcttcaaacgatgcccct

SEQ ID NO: 5015697 - DNA, 25 bp, Homo sapien
tccagggaacgaagtaacatttcat

SEQ ID NO: 5015698 - DNA, 25 bp, Homo sapien
gggctgtagttgtcttaatggcact

SEQ ID NO: 5015699 - DNA, 25 bp, Homo sapien
aaacgatgcccctcgtcacagatta

SEQ ID NO: 5015700 - DNA, 25 bp, Homo sapien
tatagacttgatgaattcttcaact

SEQ ID NO: 5015701 - DNA, 25 bp, Homo sapien
aaaatatagacttgatgaattcttc

SEQ ID NO: 5015702 - DNA, 25 bp, Homo sapien
tgatgaattcttcaactttgtggtc

SEQ ID NO: 5015703 - DNA, 25 bp, Homo sapien
acagaataaaatatagacttgatga

SEQ ID NO: 5015704 - DNA, 25 bp, Homo sapien
tggcttgcctccatagggtccctga

SEQ ID NO: 5015705 - DNA, 25 bp, Homo sapien
tgcagggtccagatgagcgaaatac

SEQ ID NO: 5015706 - DNA, 25 bp, Homo sapien
tccaggtgtgacaattagtgtcttc

SEQ ID NO: 5015707 - DNA, 25 bp, Homo sapien
attattcaccaagcttccaggtgtg

SEQ ID NO: 5015708 - DNA, 25 bp, Homo sapien
ttgtaatgacactgaagacttttag

SEQ ID NO: 5015709 - DNA, 25 bp, Homo sapien
aatgacactgaagacttttagtact

SEQ ID NO: 5015710 - DNA, 25 bp, Homo sapien
tacttcattagctgatttacaacac

SEQ ID NO: 5015711 - DNA, 25 bp, Homo sapien
cttcattagctgatttacaacacat

SEQ ID NO: 5015712 - DNA, 25 bp, Homo sapien
actacatccacaagagggaaacagt

SEQ ID NO: 5015713 - DNA, 25 bp, Homo sapien
tctgatgtggtcgaagatgatatac

SEQ ID NO: 5015714 - DNA, 25 bp, Homo sapien
tctggtcgtggcataacgagggaat

SEQ ID NO: 5015715 - DNA, 25 bp, Homo sapien
tatacaaggtaaggatcaatcacta

SEQ ID NO: 5015716 - DNA, 25 bp, Homo sapien
ttcaacattatctcttatgtcagat

SEQ ID NO: 5015717 - DNA, 25 bp, Homo sapien
ataatgtatactttcacctaaaact

SEQ ID NO: 5015718 - DNA, 25 bp, Homo sapien
cttatgtcagattatatatctcaag

SEQ ID NO: 5015719 - DNA, 25 bp, Homo sapien
caaactatattgttatttgacttca

SEQ ID NO: 5015720 - DNA, 25 bp, Homo sapien
ggcgtatatgggtcatggcgtggtt

SEQ ID NO: 5015721 - DNA, 25 bp, Homo sapien
ttggcgtatatgggtcatggcgtgg

SEQ ID NO: 5015722 - DNA, 25 bp, Homo sapien
tggcgtatatgggtcatggcgtggt

SEQ ID NO: 5015723 - DNA, 25 bp, Homo sapien
gcgtatatgggtcatggcgtggttt

SEQ ID NO: 5015724 - DNA, 25 bp, Homo sapien
cctgagaagaatgcgagatagcagt

SEQ ID NO: 5015725 - DNA, 25 bp, Homo sapien
aacctgagaagaatgcgagatagca

SEQ ID NO: 5015726 - DNA, 25 bp, Homo sapien
acctgagaagaatgcgagatagcag

SEQ ID NO: 5015727 - DNA, 25 bp, Homo sapien
tgagaagaatgcgagatagcagtac

SEQ ID NO: 5015728 - DNA, 25 bp, Homo sapien
ttccacaaatcatcagtgtttggcc

SEQ ID NO: 5015729 - DNA, 25 bp, Homo sapien
tccacaaatcatcagtgtttggccc

SEQ ID NO: 5015730 - DNA, 25 bp, Homo sapien
gtcatctggagagattacacccatg

SEQ ID NO: 5015731 - DNA, 25 bp, Homo sapien
tctttgaaggcttacaccaaacaac

SEQ ID NO: 5015732 - DNA, 25 bp, Homo sapien
ggcttacaccaaacaacactgaaat

SEQ ID NO: 5015733 - DNA, 25 bp, Homo sapien
tcttccaatgtctttgccttccaaa

SEQ ID NO: 5015734 - DNA, 25 bp, Homo sapien
tcttgttccttggacactgctactt

SEQ ID NO: 5015735 - DNA, 25 bp, Homo sapien
tattcccagatatctaaattacctg

SEQ ID NO: 5015736 - DNA, 25 bp, Homo sapien
gcgtagcagagactacacatttcat

SEQ ID NO: 5015737 - DNA, 25 bp, Homo sapien
actgaacatgcaaagggcgttttgt

SEQ ID NO: 5015738 - DNA, 25 bp, Homo sapien
cctcatgtcagagcatatatgcaac

SEQ ID NO: 5015739 - DNA, 25 bp, Homo sapien
tagccaaagtatggaaattgccaag

SEQ ID NO: 5015740 - DNA, 25 bp, Homo sapien
tcttgacagaggtttgagctacaca

SEQ ID NO: 5015741 - DNA, 25 bp, Homo sapien
gcctgacgtgcaagaagactgatta

SEQ ID NO: 5015742 - DNA, 25 bp, Homo sapien
cagcaacagaaagcaatgagctact

SEQ ID NO: 5015743 - DNA, 25 bp, Homo sapien
taattagattgcatattctaagaac

SEQ ID NO: 5015744 - DNA, 25 bp, Homo sapien
caatttctcaaaatcgtatacaaag

SEQ ID NO: 5015745 - DNA, 25 bp, Homo sapien
gattttgcttgactgttaatgttta

SEQ ID NO: 5015746 - DNA, 25 bp, Homo sapien
tacaaagattttgcttgactgttaa

SEQ ID NO: 5015747 - DNA, 25 bp, Homo sapien
ttgtttaagtatgcaaccatatttc

SEQ ID NO: 5015748 - DNA, 25 bp, Homo sapien
tttaagtatgcaaccatatttcatc

SEQ ID NO: 5015749 - DNA, 25 bp, Homo sapien
tgtttaagtatgcaaccatatttca

SEQ ID NO: 5015750 - DNA, 25 bp, Homo sapien
catatttcatctaattacttttaag

SEQ ID NO: 5015751 - DNA, 25 bp, Homo sapien
tgtgaaacctgcagatagaaagcca

SEQ ID NO: 5015752 - DNA, 25 bp, Homo sapien
acagcctcggaaaaggattctatgg

SEQ ID NO: 5015753 - DNA, 25 bp, Homo sapien
ggcttaagtgtatagtcatccctca

SEQ ID NO: 5015754 - DNA, 25 bp, Homo sapien
gatagaacagggtagaatgactcct

SEQ ID NO: 5015755 - DNA, 25 bp, Homo sapien
tggtcaggacccatacttggaaaac

SEQ ID NO: 5015756 - DNA, 25 bp, Homo sapien
gatttaggcaccaagcgaggttcca

SEQ ID NO: 5015757 - DNA, 25 bp, Homo sapien
cacaaagtggaagcccaatggctca

SEQ ID NO: 5015758 - DNA, 25 bp, Homo sapien
catgcatcagaatcgctaaagggtt

SEQ ID NO: 5015759 - DNA, 25 bp, Homo sapien
gagattaacaacatttttcaagaac

SEQ ID NO: 5015760 - DNA, 25 bp, Homo sapien
atagagattaacaacatttttcaag

SEQ ID NO: 5015761 - DNA, 25 bp, Homo sapien
aattatcaaattgcaagattgaaaa

SEQ ID NO: 5015762 - DNA, 25 bp, Homo sapien
aaattatcaaattgcaagattgaaa

SEQ ID NO: 5015763 - DNA, 25 bp, Homo sapien
agtgttcaccactctcatgccgaaa

SEQ ID NO: 5015764 - DNA, 25 bp, Homo sapien
gaaggcgacaaggatctttccataa

SEQ ID NO: 5015765 - DNA, 25 bp, Homo sapien
tattcaggtagatcatgccgtaagc

SEQ ID NO: 5015766 - DNA, 25 bp, Homo sapien
tccactgtaatagcaacaggatggt

SEQ ID NO: 5015767 - DNA, 25 bp, Homo sapien
tagtgaactggtaccagcctgtgcc

SEQ ID NO: 5015768 - DNA, 25 bp, Homo sapien
tgaactggtaccagcctgtgcctcc

SEQ ID NO: 5015769 - DNA, 25 bp, Homo sapien
ctgtagtgaactggtaccagcctgt

SEQ ID NO: 5015770 - DNA, 25 bp, Homo sapien
tgtagtgaactggtaccagcctgtg

SEQ ID NO: 5015771 - DNA, 25 bp, Homo sapien
gctgcaatagctcctgtttggcata

SEQ ID NO: 5015772 - DNA, 25 bp, Homo sapien
tgtggttcctgtctcttaccaggca

SEQ ID NO: 5015773 - DNA, 25 bp, Homo sapien
gagggcggtctactccaattgcatt

SEQ ID NO: 5015774 - DNA, 25 bp, Homo sapien
tataaagggtgcgtaggccctgtgc

SEQ ID NO: 5015775 - DNA, 25 bp, Homo sapien
ttggaagatctagcctttcctacca

SEQ ID NO: 5015776 - DNA, 25 bp, Homo sapien
ataaggtaaaattggaagatctagc

SEQ ID NO: 5015777 - DNA, 25 bp, Homo sapien
cggataaggtaaaattggaagatct

SEQ ID NO: 5015778 - DNA, 25 bp, Homo sapien
tcggataaggtaaaattggaagatc

SEQ ID NO: 5015779 - DNA, 25 bp, Homo sapien
tcaaattaagtaggcagtttctgaa

SEQ ID NO: 5015780 - DNA, 25 bp, Homo sapien
ttcaaattaagtaggcagtttctga

SEQ ID NO: 5015781 - DNA, 25 bp, Homo sapien
attaagtaggcagtttctgaaacca

SEQ ID NO: 5015782 - DNA, 25 bp, Homo sapien
tgactgtgtggatcagaaacaatgc

SEQ ID NO: 5015783 - DNA, 25 bp, Homo sapien
gaaacaatgctcatacgcccaaaaa

SEQ ID NO: 5015784 - DNA, 25 bp, Homo sapien
cctaaaggacaaaggatgatctcct

SEQ ID NO: 5015785 - DNA, 25 bp, Homo sapien
cagcagactggactactgactgtgt

SEQ ID NO: 5015786 - DNA, 25 bp, Homo sapien
tgataggtacttggaaagagactga

SEQ ID NO: 5015787 - DNA, 25 bp, Homo sapien
atatcaaagaattttaggcccctag

SEQ ID NO: 5015788 - DNA, 25 bp, Homo sapien
tctctttgagactgcatgacaatca

SEQ ID NO: 5015789 - DNA, 25 bp, Homo sapien
cagattcaccaatcaactggtcaca

SEQ ID NO: 5015790 - DNA, 25 bp, Homo sapien
taatgttgccagtgtaggtgcttca

SEQ ID NO: 5015791 - DNA, 25 bp, Homo sapien
ctaagatcattttgtgacgggagaa

SEQ ID NO: 5015792 - DNA, 25 bp, Homo sapien
tcttcactaggcagatttaaactgc

SEQ ID NO: 5015793 - DNA, 25 bp, Homo sapien
ctgtatgaggtggatctaatgttgc

SEQ ID NO: 5015794 - DNA, 25 bp, Homo sapien
tatgttacatctctctgaccctgct

SEQ ID NO: 5015795 - DNA, 25 bp, Homo sapien
cactcagatcatccagggtaacctc

SEQ ID NO: 5015796 - DNA, 25 bp, Homo sapien
cattaatcacgtcagcaaagtctct

SEQ ID NO: 5015797 - DNA, 25 bp, Homo sapien
tagtttcgcaagttagaactcagac

SEQ ID NO: 5015798 - DNA, 25 bp, Homo sapien
aaggaattcccctgcaactgacttg

SEQ ID NO: 5015799 - DNA, 25 bp, Homo sapien
agacctggattacttcttcctggag

SEQ ID NO: 5015800 - DNA, 25 bp, Homo sapien
gacttggtgctgcagatcgtctcat

SEQ ID NO: 5015801 - DNA, 25 bp, Homo sapien
tctcttcattcagacctggattact

SEQ ID NO: 5015802 - DNA, 25 bp, Homo sapien
gggaaacaggactgaactctaactg

SEQ ID NO: 5015803 - DNA, 25 bp, Homo sapien
ggaaacaggactgaactctaactgc

SEQ ID NO: 5015804 - DNA, 25 bp, Homo sapien
ttctggtaaccagctatcccctcgc

SEQ ID NO: 5015805 - DNA, 25 bp, Homo sapien
tgcaaagaagtccttctggtaacca

SEQ ID NO: 5015806 - DNA, 25 bp, Homo sapien
tggtaaccagctatcccctcgccgc

SEQ ID NO: 5015807 - DNA, 25 bp, Homo sapien
caaagaagtccttctggtaaccagc

SEQ ID NO: 5015808 - DNA, 25 bp, Homo sapien
aaatacggtatgattcggtgtgtgc

SEQ ID NO: 5015809 - DNA, 25 bp, Homo sapien
gataatagaaatgcgtgcatcgcag

SEQ ID NO: 5015810 - DNA, 25 bp, Homo sapien
caccatctgcgtggataagtaataa

SEQ ID NO: 5015811 - DNA, 25 bp, Homo sapien
cgtgcatcgcagaagtatacgatat

SEQ ID NO: 5015812 - DNA, 25 bp, Homo sapien
actctgtattttacgccacttatat

SEQ ID NO: 5015813 - DNA, 25 bp, Homo sapien
ggaaaatatggctactttctcaaag

SEQ ID NO: 5015814 - DNA, 25 bp, Homo sapien
tatatagactcagtgtgttaagacg

SEQ ID NO: 5015815 - DNA, 25 bp, Homo sapien
tcagtgtgttaagacgtatcttggg

SEQ ID NO: 5015816 - DNA, 25 bp, Homo sapien
tgtagcagggcaccttagcaaatta

SEQ ID NO: 5015817 - DNA, 25 bp, Homo sapien
catgggtgccacacaatattttaaa

SEQ ID NO: 5015818 - DNA, 25 bp, Homo sapien
aaaatagtgtcagtaggtccaaagc

SEQ ID NO: 5015819 - DNA, 25 bp, Homo sapien
catgcagtgtccacagttactagtg

SEQ ID NO: 5015820 - DNA, 25 bp, Homo sapien
ttttattgaaatcttgttaggtatc

SEQ ID NO: 5015821 - DNA, 25 bp, Homo sapien
atattctctcagatgtctccagata

SEQ ID NO: 5015822 - DNA, 25 bp, Homo sapien
ttctctcagatgtctccagataact

SEQ ID NO: 5015823 - DNA, 25 bp, Homo sapien
ctctcagatgtctccagataactgc

SEQ ID NO: 5015824 - DNA, 25 bp, Homo sapien
tttttattgtcctcgtgaaatgttc

SEQ ID NO: 5015825 - DNA, 25 bp, Homo sapien
tgttcatatacagttaagatgttcc

SEQ ID NO: 5015826 - DNA, 25 bp, Homo sapien
tgtcctcgtgaaatgttcatataca

SEQ ID NO: 5015827 - DNA, 25 bp, Homo sapien
gttcatatacagttaagatgttccc

SEQ ID NO: 5015828 - DNA, 25 bp, Homo sapien
tctaccactgcctccactaacaaac

SEQ ID NO: 5015829 - DNA, 25 bp, Homo sapien
atgacgacctctaccactgcctcca

SEQ ID NO: 5015830 - DNA, 25 bp, Homo sapien
ctctaccactgcctccactaacaaa

SEQ ID NO: 5015831 - DNA, 25 bp, Homo sapien
cgacctctaccactgcctccactaa

SEQ ID NO: 5015832 - DNA, 25 bp, Homo sapien
gccgctatttgcactagcccaggaa

SEQ ID NO: 5015833 - DNA, 25 bp, Homo sapien
tctagaagcacggtcccgaggactt

SEQ ID NO: 5015834 - DNA, 25 bp, Homo sapien
acgacctctagaagcacggtcccga

SEQ ID NO: 5015835 - DNA, 25 bp, Homo sapien
cttgagcctccactgccgctatttg

SEQ ID NO: 5015836 - DNA, 25 bp, Homo sapien
ttcttttccaagattataaatacta

SEQ ID NO: 5015837 - DNA, 25 bp, Homo sapien
atacagtttttagttccaatgtcct

SEQ ID NO: 5015838 - DNA, 25 bp, Homo sapien
ttttccaagattataaatactaatc

SEQ ID NO: 5015839 - DNA, 25 bp, Homo sapien
tgtcctttcttttccaagattataa

SEQ ID NO: 5015840 - DNA, 25 bp, Homo sapien
tgagcactccaactggagcctcttg

SEQ ID NO: 5015841 - DNA, 25 bp, Homo sapien
ctggcctccacgactttcattgtaa

SEQ ID NO: 5015842 - DNA, 25 bp, Homo sapien
ttcattgtaatttcctcgaggagta

SEQ ID NO: 5015843 - DNA, 25 bp, Homo sapien
gaagagggcctctgttaaaattgct

SEQ ID NO: 5015844 - DNA, 25 bp, Homo sapien
acacaaacagcacaatcaaaatcac

SEQ ID NO: 5015845 - DNA, 25 bp, Homo sapien
aacagcacaatcaaaatcacttttt

SEQ ID NO: 5015846 - DNA, 25 bp, Homo sapien
cttttttcacaacttcagttggatt

SEQ ID NO: 5015847 - DNA, 25 bp, Homo sapien
cttcagttggattcttttaagtgac

SEQ ID NO: 5015848 - DNA, 25 bp, Homo sapien
ctcctctattgcctgaaaacccacc

SEQ ID NO: 5015849 - DNA, 25 bp, Homo sapien
ttctgactgtggaaagcaccccgtc

SEQ ID NO: 5015850 - DNA, 25 bp, Homo sapien
tgactgtggaaagcaccccgtcctc

SEQ ID NO: 5015851 - DNA, 25 bp, Homo sapien
tgtgaaaaacctattctgactgtgg

SEQ ID NO: 5015852 - DNA, 25 bp, Homo sapien
agtcatccacatgcatagatggtgg

SEQ ID NO: 5015853 - DNA, 25 bp, Homo sapien
tatcatgaggtcgtataccctgtcc

SEQ ID NO: 5015854 - DNA, 25 bp, Homo sapien
cttctgtgatactttgagtggccgt

SEQ ID NO: 5015855 - DNA, 25 bp, Homo sapien
tggccgttttggtggaggtattcca

SEQ ID NO: 5015856 - DNA, 25 bp, Homo sapien
ctcttttggcaggttcaatgtattc

SEQ ID NO: 5015857 - DNA, 25 bp, Homo sapien
tggcaggttcaatgtattcagattt

SEQ ID NO: 5015858 - DNA, 25 bp, Homo sapien
aggttcaatgtattcagattttcca

SEQ ID NO: 5015859 - DNA, 25 bp, Homo sapien
gcaggttcaatgtattcagattttc

SEQ ID NO: 5015860 - DNA, 25 bp, Homo sapien
tataaaggtctcatgcttgtgcttc

SEQ ID NO: 5015861 - DNA, 25 bp, Homo sapien
agtttgaatcctttagtagtcttgg

SEQ ID NO: 5015862 - DNA, 25 bp, Homo sapien
tgagcgctctaattctgagtgcaaa

SEQ ID NO: 5015863 - DNA, 25 bp, Homo sapien
tcagagagttcaattaagtcaacct

SEQ ID NO: 5015864 - DNA, 25 bp, Homo sapien
gatctgtatctatctcttcagcctg

SEQ ID NO: 5015865 - DNA, 25 bp, Homo sapien
tggagtgaaccacatagatttcaac

SEQ ID NO: 5015866 - DNA, 25 bp, Homo sapien
actgatcatccatgacatcagcaag

SEQ ID NO: 5015867 - DNA, 25 bp, Homo sapien
cagcctgaaatggagtgaaccacat

SEQ ID NO: 5015868 - DNA, 25 bp, Homo sapien
aagtactggttctacatcctggtca

SEQ ID NO: 5015869 - DNA, 25 bp, Homo sapien
tcactgagaggtaaagggtcacctg

SEQ ID NO: 5015870 - DNA, 25 bp, Homo sapien
gatgactccagcatctgcttaagtc

SEQ ID NO: 5015871 - DNA, 25 bp, Homo sapien
gcttaagtccaactacactgtccaa

SEQ ID NO: 5015872 - DNA, 25 bp, Homo sapien
actctgcagcattaatactcatcgt

SEQ ID NO: 5015873 - DNA, 25 bp, Homo sapien
gcattaatactcatcgtccgtgatg

SEQ ID NO: 5015874 - DNA, 25 bp, Homo sapien
atcgtccgtgatgtatgagctccct

SEQ ID NO: 5015875 - DNA, 25 bp, Homo sapien
tactcatcgtccgtgatgtatgagc

SEQ ID NO: 5015876 - DNA, 25 bp, Homo sapien
ccatgagaccattatcatctccaca

SEQ ID NO: 5015877 - DNA, 25 bp, Homo sapien
ctacttccatgagaccattatcatc

SEQ ID NO: 5015878 - DNA, 25 bp, Homo sapien
gagaccattatcatctccacagcat

SEQ ID NO: 5015879 - DNA, 25 bp, Homo sapien
tacttccatgagaccattatcatct

SEQ ID NO: 5015880 - DNA, 25 bp, Homo sapien
cactggcagttgtaggacgtgacac

SEQ ID NO: 5015881 - DNA, 25 bp, Homo sapien
taccgaatggcaaaacactggcagt

SEQ ID NO: 5015882 - DNA, 25 bp, Homo sapien
aacatatattttactggcaccaaga

SEQ ID NO: 5015883 - DNA, 25 bp, Homo sapien
ttacatcagtacaaatggctagttt

SEQ ID NO: 5015884 - DNA, 25 bp, Homo sapien
cctgtgtccttactaaatgtgctga

SEQ ID NO: 5015885 - DNA, 25 bp, Homo sapien
tctcctgtgtccttactaaatgtgc

SEQ ID NO: 5015886 - DNA, 25 bp, Homo sapien
aagctctcctgtgtccttactaaat

SEQ ID NO: 5015887 - DNA, 25 bp, Homo sapien
tgtgtcagagttaagaatttgtctc

SEQ ID NO: 5015888 - DNA, 25 bp, Homo sapien
agtaaactatgcagagcactactgt

SEQ ID NO: 5015889 - DNA, 25 bp, Homo sapien
cactcgtttcagtaaactatgcaga

SEQ ID NO: 5015890 - DNA, 25 bp, Homo sapien
cgtttcagtaaactatgcagagcac

SEQ ID NO: 5015891 - DNA, 25 bp, Homo sapien
actatgcagagcactactgtttttc

SEQ ID NO: 5015892 - DNA, 25 bp, Homo sapien
ccagccattcctctagaaaacaaaa

SEQ ID NO: 5015893 - DNA, 25 bp, Homo sapien
agctctccatacccatggattctgc

SEQ ID NO: 5015894 - DNA, 25 bp, Homo sapien
gtcccagccattcctctagaaaaca

SEQ ID NO: 5015895 - DNA, 25 bp, Homo sapien
gattctgcatccacggattccacca

SEQ ID NO: 5015896 - DNA, 25 bp, Homo sapien
tagcgtagccaacagacagtcacag

SEQ ID NO: 5015897 - DNA, 25 bp, Homo sapien
gaagagcttggtaagataagtgcaa

SEQ ID NO: 5015898 - DNA, 25 bp, Homo sapien
gctctcagagttagctagcgtagcc

SEQ ID NO: 5015899 - DNA, 25 bp, Homo sapien
taatccataatcatgctctgcaaga

SEQ ID NO: 5015900 - DNA, 25 bp, Homo sapien
tggcgaataacactgtctccaggag

SEQ ID NO: 5015901 - DNA, 25 bp, Homo sapien
tccaggagaccgcaccaaagctaaa

SEQ ID NO: 5015902 - DNA, 25 bp, Homo sapien
caacctggtggtttggctagtatac

SEQ ID NO: 5015903 - DNA, 25 bp, Homo sapien
tgaagccagagcatcaagaagagca

SEQ ID NO: 5015904 - DNA, 25 bp, Homo sapien
gagtacttctttaggattcaccatt

SEQ ID NO: 5015905 - DNA, 25 bp, Homo sapien
gttatctgggcattccaaaccctag

SEQ ID NO: 5015906 - DNA, 25 bp, Homo sapien
gaccttcaagatatcttgcacatga

SEQ ID NO: 5015907 - DNA, 25 bp, Homo sapien
ttgggtataatgacaaattctctgg

SEQ ID NO: 5015908 - DNA, 25 bp, Homo sapien
caattttcgggtgttgagtgccact

SEQ ID NO: 5015909 - DNA, 25 bp, Homo sapien
ggtcacacaattgaacacaaatacg

SEQ ID NO: 5015910 - DNA, 25 bp, Homo sapien
gaaagagcgaactatttcttggagc

SEQ ID NO: 5015911 - DNA, 25 bp, Homo sapien
taatcagaagtgcagttggtgaggc

SEQ ID NO: 5015912 - DNA, 25 bp, Homo sapien
tatttatagtcacaaaaactgttca

SEQ ID NO: 5015913 - DNA, 25 bp, Homo sapien
ttatttatagtcacaaaaactgttc

SEQ ID NO: 5015914 - DNA, 25 bp, Homo sapien
atttatagtcacaaaaactgttcag

SEQ ID NO: 5015915 - DNA, 25 bp, Homo sapien
ggtgaagcaatctagttattggcaa

SEQ ID NO: 5015916 - DNA, 25 bp, Homo sapien
ttagcagttagttgagcagagtcca

SEQ ID NO: 5015917 - DNA, 25 bp, Homo sapien
aatcttattgttctcaggttagcag

SEQ ID NO: 5015918 - DNA, 25 bp, Homo sapien
gcaaattctaacacatggtaaggtg

SEQ ID NO: 5015919 - DNA, 25 bp, Homo sapien
ccatatttcctcaatgaccaacttg

SEQ ID NO: 5015920 - DNA, 25 bp, Homo sapien
cccctcatccggttattttatgtct

SEQ ID NO: 5015921 - DNA, 25 bp, Homo sapien
tgttacccccatatttcctcaatga

SEQ ID NO: 5015922 - DNA, 25 bp, Homo sapien
tcctcaatgaccaacttgtttcagt

SEQ ID NO: 5015923 - DNA, 25 bp, Homo sapien
gatgcatgttatatggaagtgatac

SEQ ID NO: 5015924 - DNA, 25 bp, Homo sapien
agtcatttataagatgcatgttata

SEQ ID NO: 5015925 - DNA, 25 bp, Homo sapien
ttaaaaagtgttactgcagtcattt

SEQ ID NO: 5015926 - DNA, 25 bp, Homo sapien
aaaagtgttactgcagtcatttata

SEQ ID NO: 5015927 - DNA, 25 bp, Homo sapien
cattaactccttgtgtaaaagtcag

SEQ ID NO: 5015928 - DNA, 25 bp, Homo sapien
accaagtattattggccagagtctc

SEQ ID NO: 5015929 - DNA, 25 bp, Homo sapien
ctctgaaaggagtatgagtccagaa

SEQ ID NO: 5015930 - DNA, 25 bp, Homo sapien
tccttcaggaaccttcaagattgaa

SEQ ID NO: 5015931 - DNA, 25 bp, Homo sapien
taactctgtgaagggtagtccccat

SEQ ID NO: 5015932 - DNA, 25 bp, Homo sapien
taacaagcgctgaaggaacacgcat

SEQ ID NO: 5015933 - DNA, 25 bp, Homo sapien
tgtgcagcgagccattgaaatagta

SEQ ID NO: 5015934 - DNA, 25 bp, Homo sapien
ttgcagaactcgaataaacgtgtcc

SEQ ID NO: 5015935 - DNA, 25 bp, Homo sapien
ggccaactccttctggggtcatcaa

SEQ ID NO: 5015936 - DNA, 25 bp, Homo sapien
gcatgcaacattacagagaacacgt

SEQ ID NO: 5015937 - DNA, 25 bp, Homo sapien
gaacacgtaaggcagtggtaaggcc

SEQ ID NO: 5015938 - DNA, 25 bp, Homo sapien
gaggtggtgggcatgcaacattaca

SEQ ID NO: 5015939 - DNA, 25 bp, Homo sapien
catactcaattaagtttgggatgca

SEQ ID NO: 5015940 - DNA, 25 bp, Homo sapien
gcttaacatactcaattaagtttgg

SEQ ID NO: 5015941 - DNA, 25 bp, Homo sapien
agaggttcaagccacttgccaagtt

SEQ ID NO: 5015942 - DNA, 25 bp, Homo sapien
atctaaggtttttcagaggttcaag

SEQ ID NO: 5015943 - DNA, 25 bp, Homo sapien
cttcaagagagatgctgcatgttgt

SEQ ID NO: 5015944 - DNA, 25 bp, Homo sapien
ttgaacatcactggaagactgaacc

SEQ ID NO: 5015945 - DNA, 25 bp, Homo sapien
gaagactgaaccaccaccaaaataa

SEQ ID NO: 5015946 - DNA, 25 bp, Homo sapien
gcgtaattataagctactgacttct

SEQ ID NO: 5015947 - DNA, 25 bp, Homo sapien
tcctgtagccacaaggcaaatgcat

SEQ ID NO: 5015948 - DNA, 25 bp, Homo sapien
aaagattgtgcagggttcccaagag

SEQ ID NO: 5015949 - DNA, 25 bp, Homo sapien
tgtacaacgctgaaaatggctgaac

SEQ ID NO: 5015950 - DNA, 25 bp, Homo sapien
aatgtctgtgttgagtcctgtagcc

SEQ ID NO: 5015951 - DNA, 25 bp, Homo sapien
tctgtgactgtgcaagaaacttcaa

SEQ ID NO: 5015952 - DNA, 25 bp, Homo sapien
ttttgtggcttgcagcacaccaggg

SEQ ID NO: 5015953 - DNA, 25 bp, Homo sapien
cacaccagggtgagcacttgttact

SEQ ID NO: 5015954 - DNA, 25 bp, Homo sapien
ctggaattgacagaagcaaggtaac

SEQ ID NO: 5015955 - DNA, 25 bp, Homo sapien
cactgaggcttcgattgcccctgaa

SEQ ID NO: 5015956 - DNA, 25 bp, Homo sapien
tagcagtcctgtaactccttgagcc

SEQ ID NO: 5015957 - DNA, 25 bp, Homo sapien
taaagcttgcatggtccagtctacc

SEQ ID NO: 5015958 - DNA, 25 bp, Homo sapien
tctggaggtccagtaattcgtgcca

SEQ ID NO: 5015959 - DNA, 25 bp, Homo sapien
tcctcctcaggaatactgtctactg

SEQ ID NO: 5015960 - DNA, 25 bp, Homo sapien
tccgatcaggagaaatgggctcaaa

SEQ ID NO: 5015961 - DNA, 25 bp, Homo sapien
aaagtaatcttctctatgaggagca

SEQ ID NO: 5015962 - DNA, 25 bp, Homo sapien
gtctactgttcgtcgatcatcctca

SEQ ID NO: 5015963 - DNA, 25 bp, Homo sapien
actgcagtgagccactgtactccac

SEQ ID NO: 5015964 - DNA, 25 bp, Homo sapien
cctgggcaacagagtgagaccatct

SEQ ID NO: 5015965 - DNA, 25 bp, Homo sapien
agactgcagtgagccactgtactcc

SEQ ID NO: 5015966 - DNA, 25 bp, Homo sapien
gagaccatctcaaaacaaaaacaaa

SEQ ID NO: 5015967 - DNA, 25 bp, Homo sapien
tggagggcttccattaaactgatct

SEQ ID NO: 5015968 - DNA, 25 bp, Homo sapien
gaggagttcttggtccccttggctg

SEQ ID NO: 5015969 - DNA, 25 bp, Homo sapien
ggagggcttccattaaactgatctt

SEQ ID NO: 5015970 - DNA, 25 bp, Homo sapien
gtgttttatgggagacagaaaaaga

SEQ ID NO: 5015971 - DNA, 25 bp, Homo sapien
agtgttttatgggagacagaaaaag

SEQ ID NO: 5015972 - DNA, 25 bp, Homo sapien
ctagtgttttatgggagacagaaaa

SEQ ID NO: 5015973 - DNA, 25 bp, Homo sapien
tgttttatgggagacagaaaaagaa

SEQ ID NO: 5015974 - DNA, 25 bp, Homo sapien
acagatgacccccgaacaacatggc

SEQ ID NO: 5015975 - DNA, 25 bp, Homo sapien
caaattacagatgacccccgaacaa

SEQ ID NO: 5015976 - DNA, 25 bp, Homo sapien
ttcaaattacagatgacccccgaac

SEQ ID NO: 5015977 - DNA, 25 bp, Homo sapien
ctttcaaattacagatgacccccga

SEQ ID NO: 5015978 - DNA, 25 bp, Homo sapien
cggcatccagcccagataagtattt

SEQ ID NO: 5015979 - DNA, 25 bp, Homo sapien
tgaataagctccatagattacacca

SEQ ID NO: 5015980 - DNA, 25 bp, Homo sapien
ggttatgcaaggctgtacacatgac

SEQ ID NO: 5015981 - DNA, 25 bp, Homo sapien
gattacaccaacaccaattttctgg

SEQ ID NO: 5015982 - DNA, 25 bp, Homo sapien
ggaacacagatgcatatcactgcag

SEQ ID NO: 5015983 - DNA, 25 bp, Homo sapien
catgttttggattccttttcaaact

SEQ ID NO: 5015984 - DNA, 25 bp, Homo sapien
ttagcaccagaccatcagtattcac

SEQ ID NO: 5015985 - DNA, 25 bp, Homo sapien
tatccactgatccatatattgccag

SEQ ID NO: 5015986 - DNA, 25 bp, Homo sapien
agttataccagcctcttagcaccag

SEQ ID NO: 5015987 - DNA, 25 bp, Homo sapien
gagtctctgtcatgacttatcactc

SEQ ID NO: 5015988 - DNA, 25 bp, Homo sapien
ctttgagttaggtctaaagatgatg

SEQ ID NO: 5015989 - DNA, 25 bp, Homo sapien
gatggaagtattctcatcatattcc

SEQ ID NO: 5015990 - DNA, 25 bp, Homo sapien
ttaggtctaaagatgatggaagtat

SEQ ID NO: 5015991 - DNA, 25 bp, Homo sapien
aaagatgatggaagtattctcatca

SEQ ID NO: 5015992 - DNA, 25 bp, Homo sapien
tgagtttaatgtattgtccccaaaa

SEQ ID NO: 5015993 - DNA, 25 bp, Homo sapien
tgtacagccagagtagagaaccact

SEQ ID NO: 5015994 - DNA, 25 bp, Homo sapien
cccagattctggattaattgctttg

SEQ ID NO: 5015995 - DNA, 25 bp, Homo sapien
catcacagttcatgaagacgtctct

SEQ ID NO: 5015996 - DNA, 25 bp, Homo sapien
ctatcgaaaacaggggcacttggtt

SEQ ID NO: 5015997 - DNA, 25 bp, Homo sapien
tcccaacctatcgaaaacaggggca

SEQ ID NO: 5015998 - DNA, 25 bp, Homo sapien
aacctatcgaaaacaggggcacttg

SEQ ID NO: 5015999 - DNA, 25 bp, Homo sapien
tggtttgcttacattgttgaagaat

SEQ ID NO: 5016000 - DNA, 25 bp, Homo sapien
ttcaatcatatgcacccaacaactc

SEQ ID NO: 5016001 - DNA, 25 bp, Homo sapien
attcaatcatatgcacccaacaact

SEQ ID NO: 5016002 - DNA, 25 bp, Homo sapien
atcatatgcacccaacaactctagt

SEQ ID NO: 5016003 - DNA, 25 bp, Homo sapien
caatcatatgcacccaacaactcta

SEQ ID NO: 5016004 - DNA, 25 bp, Homo sapien
gggtatgactcggacttcattgata

SEQ ID NO: 5016005 - DNA, 25 bp, Homo sapien
ggcagactgctatgggctcttactc

SEQ ID NO: 5016006 - DNA, 25 bp, Homo sapien
ggaaaacgaaccacatctatatgag

SEQ ID NO: 5016007 - DNA, 25 bp, Homo sapien
tatgctctattgtctggcagactgc

SEQ ID NO: 5016008 - DNA, 25 bp, Homo sapien
taggtactgaatagccgagataaac

SEQ ID NO: 5016009 - DNA, 25 bp, Homo sapien
gaaagcatttaggtactgaatagcc

SEQ ID NO: 5016010 - DNA, 25 bp, Homo sapien
tactgaatagccgagataaacccct

SEQ ID NO: 5016011 - DNA, 25 bp, Homo sapien
gcatttaggtactgaatagccgaga

SEQ ID NO: 5016012 - DNA, 25 bp, Homo sapien
aacacattctcctactgaagtatgg

SEQ ID NO: 5016013 - DNA, 25 bp, Homo sapien
gaagaagactggtcagattccacaa

SEQ ID NO: 5016014 - DNA, 25 bp, Homo sapien
tataaatgtaccactcccctgatct

SEQ ID NO: 5016015 - DNA, 25 bp, Homo sapien
gatcaaatctagataggtgcctctc

SEQ ID NO: 5016016 - DNA, 25 bp, Homo sapien
ggattttccagtatcgacctagtct

SEQ ID NO: 5016017 - DNA, 25 bp, Homo sapien
cgtgggcaacgggtgtatacattta

SEQ ID NO: 5016018 - DNA, 25 bp, Homo sapien
gaggatcgcccaggtcaaagttgta

SEQ ID NO: 5016019 - DNA, 25 bp, Homo sapien
caaagttgtagtaagccataagcac

SEQ ID NO: 5016020 - DNA, 25 bp, Homo sapien
gagagcaccgtaatcctaaaccaag

SEQ ID NO: 5016021 - DNA, 25 bp, Homo sapien
aacgtaaactgctcagactccggca

SEQ ID NO: 5016022 - DNA, 25 bp, Homo sapien
cataattcccgacagaaaagaggcc

SEQ ID NO: 5016023 - DNA, 25 bp, Homo sapien
caactcgaccaaagacacggagggc

SEQ ID NO: 5016024 - DNA, 25 bp, Homo sapien
aaataacagctccatcgccgagtcc

SEQ ID NO: 5016025 - DNA, 25 bp, Homo sapien
ctcagcgctcgggtgtttaaaagta

SEQ ID NO: 5016026 - DNA, 25 bp, Homo sapien
gcgctcgggtgtttaaaagtatcta

SEQ ID NO: 5016027 - DNA, 25 bp, Homo sapien
taaaaataacagctccatcgccgag

SEQ ID NO: 5016028 - DNA, 25 bp, Homo sapien
ttccagcttcgaactagcagccagg

SEQ ID NO: 5016029 - DNA, 25 bp, Homo sapien
tttgcgcgcgataactgcgtcctgg

SEQ ID NO: 5016030 - DNA, 25 bp, Homo sapien
gttgacagaaaaagaagcgggctcc

SEQ ID NO: 5016031 - DNA, 25 bp, Homo sapien
ggccttttcgcttgaccgttcagaa

SEQ ID NO: 5016032 - DNA, 25 bp, Homo sapien
tggtgctgtaatgctatcgtggctc

SEQ ID NO: 5016033 - DNA, 25 bp, Homo sapien
cactaaaacccaagttgtagagtca

SEQ ID NO: 5016034 - DNA, 25 bp, Homo sapien
gagttacttgtgtctaccgagccaa

SEQ ID NO: 5016035 - DNA, 25 bp, Homo sapien
tcctgcaccctaggcaagtagttgg

SEQ ID NO: 5016036 - DNA, 25 bp, Homo sapien
tttgggaattgatactggtttttca

SEQ ID NO: 5016037 - DNA, 25 bp, Homo sapien
gagatgtagttgtagggatgtattt

SEQ ID NO: 5016038 - DNA, 25 bp, Homo sapien
tttcttaaaggatactggcattctt

SEQ ID NO: 5016039 - DNA, 25 bp, Homo sapien
ggcatgctggcatgtcattttccaa

SEQ ID NO: 5016040 - DNA, 25 bp, Homo sapien
tattgtggcttcatatgtattattt

SEQ ID NO: 5016041 - DNA, 25 bp, Homo sapien
attgaatattgtggcttcatatgta

SEQ ID NO: 5016042 - DNA, 25 bp, Homo sapien
gaatattgtggcttcatatgtatta

SEQ ID NO: 5016043 - DNA, 25 bp, Homo sapien
gtaattgaatattgtggcttcatat

SEQ ID NO: 5016044 - DNA, 25 bp, Homo sapien
ttaagatgcccaaagctgcccaaag

SEQ ID NO: 5016045 - DNA, 25 bp, Homo sapien
gcatgctagactgagaggtaaacac

SEQ ID NO: 5016046 - DNA, 25 bp, Homo sapien
caatggccctttaactgcaatagga

SEQ ID NO: 5016047 - DNA, 25 bp, Homo sapien
tcttcagctgactggcaatggccct

SEQ ID NO: 5016048 - DNA, 25 bp, Homo sapien
tgtgaacaccacggcacttgagcca

SEQ ID NO: 5016049 - DNA, 25 bp, Homo sapien
gaacaccacggcacttgagccagcc

SEQ ID NO: 5016050 - DNA, 25 bp, Homo sapien
gttgtgaacaccacggcacttgagc

SEQ ID NO: 5016051 - DNA, 25 bp, Homo sapien
tgaacaccacggcacttgagccagc

SEQ ID NO: 5016052 - DNA, 25 bp, Homo sapien
tacttatcagcataccatgaacgga

SEQ ID NO: 5016053 - DNA, 25 bp, Homo sapien
tgtcttgcagcggttactagtggta

SEQ ID NO: 5016054 - DNA, 25 bp, Homo sapien
gaataaaactatgagggtgctcccc

SEQ ID NO: 5016055 - DNA, 25 bp, Homo sapien
tctggttttccaacaggcaggtaag

SEQ ID NO: 5016056 - DNA, 25 bp, Homo sapien
taacttgtctatgagaatagtaacc

SEQ ID NO: 5016057 - DNA, 25 bp, Homo sapien
taagctaaaatccaaactgaactcc

SEQ ID NO: 5016058 - DNA, 25 bp, Homo sapien
tctatggtatgtagcacatagcagg

SEQ ID NO: 5016059 - DNA, 25 bp, Homo sapien
tacttgtaattaggtcagagttcta

SEQ ID NO: 5016060 - DNA, 25 bp, Homo sapien
tccagtcttgaaaaataacagagcc

SEQ ID NO: 5016061 - DNA, 25 bp, Homo sapien
gacaggtgtcttccttaccgttaca

SEQ ID NO: 5016062 - DNA, 25 bp, Homo sapien
tactcggtgtcttttgcagatcaga

SEQ ID NO: 5016063 - DNA, 25 bp, Homo sapien
caagctaacctactcaaaatatggg

SEQ ID NO: 5016064 - DNA, 25 bp, Homo sapien
caacacagtttcacagtctaaatgc

SEQ ID NO: 5016065 - DNA, 25 bp, Homo sapien
tagatgtagcctatagatgtgtcat

SEQ ID NO: 5016066 - DNA, 25 bp, Homo sapien
tgttaaacgtacctctgcatacaga

SEQ ID NO: 5016067 - DNA, 25 bp, Homo sapien
taatttggccttatagagagattca

SEQ ID NO: 5016068 - DNA, 25 bp, Homo sapien
taaccatagttacctaagcacacag

SEQ ID NO: 5016069 - DNA, 25 bp, Homo sapien
tctgtacatctgaatagtgagtcac

SEQ ID NO: 5016070 - DNA, 25 bp, Homo sapien
ttaagatagttgcaggcagtgtacc

SEQ ID NO: 5016071 - DNA, 25 bp, Homo sapien
catggtagtacttgtgattagagca

SEQ ID NO: 5016072 - DNA, 25 bp, Homo sapien
actgcaacctccgctcgctgcaacc

SEQ ID NO: 5016073 - DNA, 25 bp, Homo sapien
ctgcaacctccgctcgctgcaacct

SEQ ID NO: 5016074 - DNA, 25 bp, Homo sapien
gaacctaaggagtatgcattgtact

SEQ ID NO: 5016075 - DNA, 25 bp, Homo sapien
cttggtgctttctgttagactggta

SEQ ID NO: 5016076 - DNA, 25 bp, Homo sapien
taagttaatttagcctcccaaatgc

SEQ ID NO: 5016077 - DNA, 25 bp, Homo sapien
gagatgggatctctagcctcctaag

SEQ ID NO: 5016078 - DNA, 25 bp, Homo sapien
ctaaacattatacttactttttcat

SEQ ID NO: 5016079 - DNA, 25 bp, Homo sapien
tgtgtagaattaacactttaaaata

SEQ ID NO: 5016080 - DNA, 25 bp, Homo sapien
taatgtgtagaattaacactttaaa

SEQ ID NO: 5016081 - DNA, 25 bp, Homo sapien
tctgtacattaatgtctaaacatta

SEQ ID NO: 5016082 - DNA, 25 bp, Homo sapien
tcttcgtcaagttatagctgaggaa

SEQ ID NO: 5016083 - DNA, 25 bp, Homo sapien
cctaagtaatgagagattcgctttc

SEQ ID NO: 5016084 - DNA, 25 bp, Homo sapien
tctagaactgatggagtccgtcagg

SEQ ID NO: 5016085 - DNA, 25 bp, Homo sapien
tctaatgccctgtaattcatgagca

SEQ ID NO: 5016086 - DNA, 25 bp, Homo sapien
ctgaggtgtgattgtaactcactgc

SEQ ID NO: 5016087 - DNA, 25 bp, Homo sapien
aaattatcatcccttcttggcccct

SEQ ID NO: 5016088 - DNA, 25 bp, Homo sapien
tcttcagtgatcattattggtgggt

SEQ ID NO: 5016089 - DNA, 25 bp, Homo sapien
taccatgttttagtgaacggagcag

SEQ ID NO: 5016090 - DNA, 25 bp, Homo sapien
ttgagagtggccctggttaatcttt

SEQ ID NO: 5016091 - DNA, 25 bp, Homo sapien
tgccacttaagtaattccataaact

SEQ ID NO: 5016092 - DNA, 25 bp, Homo sapien
catctttccttgagagtggccctgg

SEQ ID NO: 5016093 - DNA, 25 bp, Homo sapien
ctatggctcagcagtccatctttcc

SEQ ID NO: 5016094 - DNA, 25 bp, Homo sapien
gacacacctctaataacatcacttt

SEQ ID NO: 5016095 - DNA, 25 bp, Homo sapien
gaatgcaagcaatccagaagaagtg

SEQ ID NO: 5016096 - DNA, 25 bp, Homo sapien
cggccagacagagttgaatgcaagc

SEQ ID NO: 5016097 - DNA, 25 bp, Homo sapien
tttggaagatcaaagccatcggcca

SEQ ID NO: 5016098 - DNA, 25 bp, Homo sapien
taaggtagcacttatccagtccaaa

SEQ ID NO: 5016099 - DNA, 25 bp, Homo sapien
gcaacctacatgtcaagaaagcccc

SEQ ID NO: 5016100 - DNA, 25 bp, Homo sapien
ttagagcacaggttgaacaccatgt

SEQ ID NO: 5016101 - DNA, 25 bp, Homo sapien
tgtaacttgtgaattggctagggca

SEQ ID NO: 5016102 - DNA, 25 bp, Homo sapien
tttttcagtgctcttcggtggtgtc

SEQ ID NO: 5016103 - DNA, 25 bp, Homo sapien
tccattgcacactggtgacaactgt

SEQ ID NO: 5016104 - DNA, 25 bp, Homo sapien
tcttcggtggtgtcataatgcctcc

SEQ ID NO: 5016105 - DNA, 25 bp, Homo sapien
tggtgtcataatgcctccattgcac

SEQ ID NO: 5016106 - DNA, 25 bp, Homo sapien
tcagcttcactggactagtactttt

SEQ ID NO: 5016107 - DNA, 25 bp, Homo sapien
tctgaaatactgtcccactccaaac

SEQ ID NO: 5016108 - DNA, 25 bp, Homo sapien
tatgtgtctggatattatgtctgtc

SEQ ID NO: 5016109 - DNA, 25 bp, Homo sapien
gacaaaaggtaccatccaatctaca

SEQ ID NO: 5016110 - DNA, 25 bp, Homo sapien
tgaatcaatggctagaatacacaga

SEQ ID NO: 5016111 - DNA, 25 bp, Homo sapien
aggtaaaatggcacaaggcagcagc

SEQ ID NO: 5016112 - DNA, 25 bp, Homo sapien
tctgtactggaactctaatgaatca

SEQ ID NO: 5016113 - DNA, 25 bp, Homo sapien
agcagtcagtattctgtactggaac

SEQ ID NO: 5016114 - DNA, 25 bp, Homo sapien
gttaaaaggctgtataatctaggca

SEQ ID NO: 5016115 - DNA, 25 bp, Homo sapien
tgtttgtcctcattggtccagaagg

SEQ ID NO: 5016116 - DNA, 25 bp, Homo sapien
taatctaggcaataagagctgaact

SEQ ID NO: 5016117 - DNA, 25 bp, Homo sapien
cagtggaatggtatagtgtaaaagg

SEQ ID NO: 5016118 - DNA, 25 bp, Homo sapien
gccaggagatgattgttacaggaca

SEQ ID NO: 5016119 - DNA, 25 bp, Homo sapien
actgaggtagaagaactttaggagc

SEQ ID NO: 5016120 - DNA, 25 bp, Homo sapien
tctttaagagcatcaacttggagaa

SEQ ID NO: 5016121 - DNA, 25 bp, Homo sapien
gaagaactttaggagcatctttaag

SEQ ID NO: 5016122 - DNA, 25 bp, Homo sapien
aagatatcctcttcactgcaagcac

SEQ ID NO: 5016123 - DNA, 25 bp, Homo sapien
agttccatccttaagatatcctctt

SEQ ID NO: 5016124 - DNA, 25 bp, Homo sapien
tcttcactgcaagcaccatcagtga

SEQ ID NO: 5016125 - DNA, 25 bp, Homo sapien
ctttaatataatgagttccatcctt

SEQ ID NO: 5016126 - DNA, 25 bp, Homo sapien
aactcttggagtttaggagcataga

SEQ ID NO: 5016127 - DNA, 25 bp, Homo sapien
ctcttggagtttaggagcatagatt

SEQ ID NO: 5016128 - DNA, 25 bp, Homo sapien
cttggagtttaggagcatagatttc

SEQ ID NO: 5016129 - DNA, 25 bp, Homo sapien
actcttggagtttaggagcatagat

SEQ ID NO: 5016130 - DNA, 25 bp, Homo sapien
tggaagcaatgaataatgaggtaat

SEQ ID NO: 5016131 - DNA, 25 bp, Homo sapien
tgaggtaattccaatgagttgaagc

SEQ ID NO: 5016132 - DNA, 25 bp, Homo sapien
atgaggtaattccaatgagttgaag

SEQ ID NO: 5016133 - DNA, 25 bp, Homo sapien
agtttggaagcaatgaataatgagg

SEQ ID NO: 5016134 - DNA, 25 bp, Homo sapien
tgtgtcaacataaatctatcaaaaa

SEQ ID NO: 5016135 - DNA, 25 bp, Homo sapien
tttatttatatccttttgtgtcaac

SEQ ID NO: 5016136 - DNA, 25 bp, Homo sapien
ccttttgtgtcaacataaatctatc

SEQ ID NO: 5016137 - DNA, 25 bp, Homo sapien
tatttatatccttttgtgtcaacat

SEQ ID NO: 5016138 - DNA, 25 bp, Homo sapien
ttccctatgaagtgtgtatacttca

SEQ ID NO: 5016139 - DNA, 25 bp, Homo sapien
agataaaatgtttccctatgaagtg

SEQ ID NO: 5016140 - DNA, 25 bp, Homo sapien
tccctatgaagtgtgtatacttcac

SEQ ID NO: 5016141 - DNA, 25 bp, Homo sapien
tgtttccctatgaagtgtgtatact

SEQ ID NO: 5016142 - DNA, 25 bp, Homo sapien
gtcatgaacatatctgctctccttt

SEQ ID NO: 5016143 - DNA, 25 bp, Homo sapien
ccagtctagaagtatggacctcatc

SEQ ID NO: 5016144 - DNA, 25 bp, Homo sapien
ctctaaaagccagtctagaagtatg

SEQ ID NO: 5016145 - DNA, 25 bp, Homo sapien
gtctagaagtatggacctcatctgt

SEQ ID NO: 5016146 - DNA, 25 bp, Homo sapien
agctggctattcactttacctggaa

SEQ ID NO: 5016147 - DNA, 25 bp, Homo sapien
ggtctgaagtaatctgtgaaaatag

SEQ ID NO: 5016148 - DNA, 25 bp, Homo sapien
cacgttgcttttcccataagtggtc

SEQ ID NO: 5016149 - DNA, 25 bp, Homo sapien
gctgttaaaagataaccacgttgct

SEQ ID NO: 5016150 - DNA, 25 bp, Homo sapien
gaggtgtttcaatgataatgcaagg

SEQ ID NO: 5016151 - DNA, 25 bp, Homo sapien
cttaaatcaggcaaaggtgaaggat

SEQ ID NO: 5016152 - DNA, 25 bp, Homo sapien
gactgatccccccagataatacagg

SEQ ID NO: 5016153 - DNA, 25 bp, Homo sapien
tctgtaatttgtaaatctggagaaa

SEQ ID NO: 5016154 - DNA, 25 bp, Homo sapien
tatattggacagattaggcgggccc

SEQ ID NO: 5016155 - DNA, 25 bp, Homo sapien
tctactagagtctgcgagggaacaa

SEQ ID NO: 5016156 - DNA, 25 bp, Homo sapien
tctgcagctgtagtaggattcgggc

SEQ ID NO: 5016157 - DNA, 25 bp, Homo sapien
aagaggtaccaaagggctgcgtgcc

SEQ ID NO: 5016158 - DNA, 25 bp, Homo sapien
ttcatactgatgtttcttggtgacc

SEQ ID NO: 5016159 - DNA, 25 bp, Homo sapien
actgatgtttcttggtgacctcctc

SEQ ID NO: 5016160 - DNA, 25 bp, Homo sapien
catactgatgtttcttggtgacctc

SEQ ID NO: 5016161 - DNA, 25 bp, Homo sapien
cctaatttcatactgatgtttcttg

SEQ ID NO: 5016162 - DNA, 25 bp, Homo sapien
tggggggattccgtctggctgggct

SEQ ID NO: 5016163 - DNA, 25 bp, Homo sapien
gggctgctgcttagcttgtaaacgg

SEQ ID NO: 5016164 - DNA, 25 bp, Homo sapien
ctcttctttcaggtgtataaaacct

SEQ ID NO: 5016165 - DNA, 25 bp, Homo sapien
tctcttctttcaggtgtataaaacc

SEQ ID NO: 5016166 - DNA, 25 bp, Homo sapien
gtgccagtaagacgctgattcgcag

SEQ ID NO: 5016167 - DNA, 25 bp, Homo sapien
gccgcagtcaagtacattgtcattc

SEQ ID NO: 5016168 - DNA, 25 bp, Homo sapien
gaggaaaagccgcagtcaagtacat

SEQ ID NO: 5016169 - DNA, 25 bp, Homo sapien
acattctccaagtgccagtaagacg

SEQ ID NO: 5016170 - DNA, 25 bp, Homo sapien
catggtaattcattttggatacaag

SEQ ID NO: 5016171 - DNA, 25 bp, Homo sapien
tgaatgtacagctggaacgcgagtg

SEQ ID NO: 5016172 - DNA, 25 bp, Homo sapien
cgcgagtgtccaaaaatttaccaag

SEQ ID NO: 5016173 - DNA, 25 bp, Homo sapien
ctgacaccttgaacgcgcagggagg

SEQ ID NO: 5016174 - DNA, 25 bp, Homo sapien
gtacaccgggagtggggcttgggca

SEQ ID NO: 5016175 - DNA, 25 bp, Homo sapien
ggcttgggcagcgcccccacgtccc

SEQ ID NO: 5016176 - DNA, 25 bp, Homo sapien
tggggcttgggcagcgcccccacgt

SEQ ID NO: 5016177 - DNA, 25 bp, Homo sapien
gtggggcttgggcagcgcccccacg

SEQ ID NO: 5016178 - DNA, 25 bp, Homo sapien
gagagggggttgtggaggcgaaatg

SEQ ID NO: 5016179 - DNA, 25 bp, Homo sapien
gctggcgccggcgccaacccaatat

SEQ ID NO: 5016180 - DNA, 25 bp, Homo sapien
ctaccgctcggctcagctggcgccg

SEQ ID NO: 5016181 - DNA, 25 bp, Homo sapien
cagctaccgctcggctcagctggcg

SEQ ID NO: 5016182 - DNA, 25 bp, Homo sapien
caacccaatatataggccgggccgg

SEQ ID NO: 5016183 - DNA, 25 bp, Homo sapien
atctcccgccagtttgcttttgctt

SEQ ID NO: 5016184 - DNA, 25 bp, Homo sapien
cactgcaactcctggatttcggggg

SEQ ID NO: 5016185 - DNA, 25 bp, Homo sapien
ttctccgcggctgttctccccgccg

SEQ ID NO: 5016186 - DNA, 25 bp, Homo sapien
ccggcggcggtagggaaactctcag

SEQ ID NO: 5016187 - DNA, 25 bp, Homo sapien
taacgcttaggatggctctcggcgg

SEQ ID NO: 5016188 - DNA, 25 bp, Homo sapien
gcctcccttttgcagtcactcaaaa

SEQ ID NO: 5016189 - DNA, 25 bp, Homo sapien
tctgccatttctaacgcttaggatg

SEQ ID NO: 5016190 - DNA, 25 bp, Homo sapien
tcactcaaaacgcagttagcggtat

SEQ ID NO: 5016191 - DNA, 25 bp, Homo sapien
ccaagacgtctttgtgtggaaagga

SEQ ID NO: 5016192 - DNA, 25 bp, Homo sapien
ttatgtgaacagaatgcaatcatag

SEQ ID NO: 5016193 - DNA, 25 bp, Homo sapien
tagaaaattccaagacgtctttgtg

SEQ ID NO: 5016194 - DNA, 25 bp, Homo sapien
gaatgcaatcatagtaaaggagaaa

SEQ ID NO: 5016195 - DNA, 25 bp, Homo sapien
gctgcctccatttatcaccaaattc

SEQ ID NO: 5016196 - DNA, 25 bp, Homo sapien
ctgtgctgcctccatttatcaccaa

SEQ ID NO: 5016197 - DNA, 25 bp, Homo sapien
ctcttctgttcccaagtcatttcca

SEQ ID NO: 5016198 - DNA, 25 bp, Homo sapien
ttctgttcccaagtcatttccacat

SEQ ID NO: 5016199 - DNA, 25 bp, Homo sapien
agccagacctcctctgactttagga

SEQ ID NO: 5016200 - DNA, 25 bp, Homo sapien
ttcctaccaaggtactcctctgtct

SEQ ID NO: 5016201 - DNA, 25 bp, Homo sapien
tgggtttcaacaagcccagagcttc

SEQ ID NO: 5016202 - DNA, 25 bp, Homo sapien
ttccccagccactgattcggaggca

SEQ ID NO: 5016203 - DNA, 25 bp, Homo sapien
gccctctaggcactctggtgatttc

SEQ ID NO: 5016204 - DNA, 25 bp, Homo sapien
ctgggtgccctctaggcactctggt

SEQ ID NO: 5016205 - DNA, 25 bp, Homo sapien
gtgccctctaggcactctggtgatt

SEQ ID NO: 5016206 - DNA, 25 bp, Homo sapien
gggtgccctctaggcactctggtga

SEQ ID NO: 5016207 - DNA, 25 bp, Homo sapien
ccagggtgagtcttctcctcttggg

SEQ ID NO: 5016208 - DNA, 25 bp, Homo sapien
tcttggtcctgctcatagtggttct

SEQ ID NO: 5016209 - DNA, 25 bp, Homo sapien
ctagtgttcttgccctcttccttct

SEQ ID NO: 5016210 - DNA, 25 bp, Homo sapien
tcctgctcatagtggttctcatcca

SEQ ID NO: 5016211 - DNA, 25 bp, Homo sapien
ccaccagctggactgctgtgcagtt

SEQ ID NO: 5016212 - DNA, 25 bp, Homo sapien
atccaccaccagctggactgctgtg

SEQ ID NO: 5016213 - DNA, 25 bp, Homo sapien
ctggggatggctgggatccaccacc

SEQ ID NO: 5016214 - DNA, 25 bp, Homo sapien
gcagtttctggtgtttcctatggca

SEQ ID NO: 5016215 - DNA, 25 bp, Homo sapien
gataggtaatgtaccagcatcataa

SEQ ID NO: 5016216 - DNA, 25 bp, Homo sapien
cgtgaacacctagtcatcatgttta

SEQ ID NO: 5016217 - DNA, 25 bp, Homo sapien
atcatgtttatgaactccaaaggat

SEQ ID NO: 5016218 - DNA, 25 bp, Homo sapien
taggtaatgtaccagcatcataaca

SEQ ID NO: 5016219 - DNA, 25 bp, Homo sapien
taagtcgtggatccaccttggtggt

SEQ ID NO: 5016220 - DNA, 25 bp, Homo sapien
gcagcactaaaggacatgctgacac

SEQ ID NO: 5016221 - DNA, 25 bp, Homo sapien
gtgtcctggtttaagtcgtggatcc

SEQ ID NO: 5016222 - DNA, 25 bp, Homo sapien
gacatgctgacacagagcagaggga

SEQ ID NO: 5016223 - DNA, 25 bp, Homo sapien
tggtacctcagttattactaaccca

SEQ ID NO: 5016224 - DNA, 25 bp, Homo sapien
agaatattagtggaagcctctttat

SEQ ID NO: 5016225 - DNA, 25 bp, Homo sapien
gggggctgtgaattgatattctgca

SEQ ID NO: 5016226 - DNA, 25 bp, Homo sapien
atattagtggaagcctctttatgct

SEQ ID NO: 5016227 - DNA, 25 bp, Homo sapien
tccctctgggggctgtgaattgata

SEQ ID NO: 5016228 - DNA, 25 bp, Homo sapien
tgctccaagccctctagagtgatag

SEQ ID NO: 5016229 - DNA, 25 bp, Homo sapien
gaatacatagcgttgaatctgccca

SEQ ID NO: 5016230 - DNA, 25 bp, Homo sapien
ggctactgttgttccatcccaggga

SEQ ID NO: 5016231 - DNA, 25 bp, Homo sapien
ccctggtggcactgaacattactat

SEQ ID NO: 5016232 - DNA, 25 bp, Homo sapien
ttctctatgagcatcccgcagctgc

SEQ ID NO: 5016233 - DNA, 25 bp, Homo sapien
gcctccgaagaaatgaaagccttta

SEQ ID NO: 5016234 - DNA, 25 bp, Homo sapien
tctcatttagggttctgcattcagc

SEQ ID NO: 5016235 - DNA, 25 bp, Homo sapien
tgcagctgagcctccgaagaaatga

SEQ ID NO: 5016236 - DNA, 25 bp, Homo sapien
aggttagcagaacaggcatgtcgga

SEQ ID NO: 5016237 - DNA, 25 bp, Homo sapien
aacgattgaaagttgacatgcgacc

SEQ ID NO: 5016238 - DNA, 25 bp, Homo sapien
gaatggccaaaatcgtgcagatggg

SEQ ID NO: 5016239 - DNA, 25 bp, Homo sapien
tccagttgctcttaggcagctcaaa

SEQ ID NO: 5016240 - DNA, 25 bp, Homo sapien
gattccctggacactctgtaagtgg

SEQ ID NO: 5016241 - DNA, 25 bp, Homo sapien
taagtgggcctagcaacagtcttct

SEQ ID NO: 5016242 - DNA, 25 bp, Homo sapien
ctgatcaagctgctagattccctgg

SEQ ID NO: 5016243 - DNA, 25 bp, Homo sapien
tgactgcccacttctagactccata

SEQ ID NO: 5016244 - DNA, 25 bp, Homo sapien
caaagtggggctttcatttcaacct

SEQ ID NO: 5016245 - DNA, 25 bp, Homo sapien
tgctgcttctcaagtcaacgttcat

SEQ ID NO: 5016246 - DNA, 25 bp, Homo sapien
ctgctgcttctcaagtcaacgttca

SEQ ID NO: 5016247 - DNA, 25 bp, Homo sapien
agcccaaagtggggctttcatttca

SEQ ID NO: 5016248 - DNA, 25 bp, Homo sapien
taactggcctacgtgtgaatcgaac

SEQ ID NO: 5016249 - DNA, 25 bp, Homo sapien
gatacatggcaaggctgacaccact

SEQ ID NO: 5016250 - DNA, 25 bp, Homo sapien
cagattcagtagaaaggcccttgga

SEQ ID NO: 5016251 - DNA, 25 bp, Homo sapien
taaaagctccctgcgataggaagtc

SEQ ID NO: 5016252 - DNA, 25 bp, Homo sapien
tccctggtaagattttggcgacgaa

SEQ ID NO: 5016253 - DNA, 25 bp, Homo sapien
ccagaaaagttgtatgagcagcaag

SEQ ID NO: 5016254 - DNA, 25 bp, Homo sapien
gccattgtgcttgacttgccgaggg

SEQ ID NO: 5016255 - DNA, 25 bp, Homo sapien
gctgatgaacaacccagccattgtg

SEQ ID NO: 5016256 - DNA, 25 bp, Homo sapien
aagatgccatataagccccagatgg

SEQ ID NO: 5016257 - DNA, 25 bp, Homo sapien
caacagggcacattttgagatggta

SEQ ID NO: 5016258 - DNA, 25 bp, Homo sapien
gccaactgttactagaaagatgcca

SEQ ID NO: 5016259 - DNA, 25 bp, Homo sapien
tctgtgaccccactgactgatagtg

SEQ ID NO: 5016260 - DNA, 25 bp, Homo sapien
gacaaaatgcatgctcagtggactg

SEQ ID NO: 5016261 - DNA, 25 bp, Homo sapien
cttagctttgaattacagtagagac

SEQ ID NO: 5016262 - DNA, 25 bp, Homo sapien
cagtggactgcctacagagagttaa

SEQ ID NO: 5016263 - DNA, 25 bp, Homo sapien
caacaagttatcttacggaccatct

SEQ ID NO: 5016264 - DNA, 25 bp, Homo sapien
ttcatcagtcccacgggtggcctca

SEQ ID NO: 5016265 - DNA, 25 bp, Homo sapien
gacatgctgggatgttcaatgagaa

SEQ ID NO: 5016266 - DNA, 25 bp, Homo sapien
tatgcacagcatagacagacatgct

SEQ ID NO: 5016267 - DNA, 25 bp, Homo sapien
gaccagggcaggagttatgcacagc

SEQ ID NO: 5016268 - DNA, 25 bp, Homo sapien
agcaggaatcacttgtatcagccaa

SEQ ID NO: 5016269 - DNA, 25 bp, Homo sapien
cattggacatgactcaaactggaga

SEQ ID NO: 5016270 - DNA, 25 bp, Homo sapien
cactcaagagatgccggtaaacagg

SEQ ID NO: 5016271 - DNA, 25 bp, Homo sapien
ggtgctcagtaggtgactcttcact

SEQ ID NO: 5016272 - DNA, 25 bp, Homo sapien
aaaactgagatgcaagtttccattt

SEQ ID NO: 5016273 - DNA, 25 bp, Homo sapien
agatgaaccaccaagtaaccaagtg

SEQ ID NO: 5016274 - DNA, 25 bp, Homo sapien
cactgacattatctagcacagatgg

SEQ ID NO: 5016275 - DNA, 25 bp, Homo sapien
tggtttccttatgcaaaaactgaga

SEQ ID NO: 5016276 - DNA, 25 bp, Homo sapien
tgaagtcaacaagaatccattcatc

SEQ ID NO: 5016277 - DNA, 25 bp, Homo sapien
tgaattctggttcttggttggagga

SEQ ID NO: 5016278 - DNA, 25 bp, Homo sapien
ctatgaagtcaacaagaatccattc

SEQ ID NO: 5016279 - DNA, 25 bp, Homo sapien
aattctggttcttggttggaggaag

SEQ ID NO: 5016280 - DNA, 25 bp, Homo sapien
caggagattaaagtgcacagggtgc

SEQ ID NO: 5016281 - DNA, 25 bp, Homo sapien
caacttaggtgaaaagcaagaagag

SEQ ID NO: 5016282 - DNA, 25 bp, Homo sapien
cacagggtgcttattcaacttaggt

SEQ ID NO: 5016283 - DNA, 25 bp, Homo sapien
ttggcccaatggtaccgacaggaga

SEQ ID NO: 5016284 - DNA, 25 bp, Homo sapien
tattgtggtacttaaagactggctc

SEQ ID NO: 5016285 - DNA, 25 bp, Homo sapien
ggaagagcattctagtttgaccact

SEQ ID NO: 5016286 - DNA, 25 bp, Homo sapien
acttttaagacagcccaccaagagg

SEQ ID NO: 5016287 - DNA, 25 bp, Homo sapien
gaatgcactgttttgtatctcactg

SEQ ID NO: 5016288 - DNA, 25 bp, Homo sapien
ggccgggctgcgctgcacctcgttc

SEQ ID NO: 5016289 - DNA, 25 bp, Homo sapien
cggctccagccctcgggtcgctgcg

SEQ ID NO: 5016290 - DNA, 25 bp, Homo sapien
cggccagtccaagtccttttgttgt

SEQ ID NO: 5016291 - DNA, 25 bp, Homo sapien
ttcaggtacccagacggcaggcgcg

SEQ ID NO: 5016292 - DNA, 25 bp, Homo sapien
ctgctgtagaaaccgccaccgagag

SEQ ID NO: 5016293 - DNA, 25 bp, Homo sapien
gagccggccgggcttgctgcacgct

SEQ ID NO: 5016294 - DNA, 25 bp, Homo sapien
ttgctgcacgctctggattccgcct

SEQ ID NO: 5016295 - DNA, 25 bp, Homo sapien
gcctataggcgaggcacaagggact

SEQ ID NO: 5016296 - DNA, 25 bp, Homo sapien
caacctcagtacgactctgctattt

SEQ ID NO: 5016297 - DNA, 25 bp, Homo sapien
agacgcgcaactcattggtttttgg

SEQ ID NO: 5016298 - DNA, 25 bp, Homo sapien
gttttcacctgaatagacaggtcaa

SEQ ID NO: 5016299 - DNA, 25 bp, Homo sapien
tatacttcatccattgaagacgcgc

SEQ ID NO: 5016300 - DNA, 25 bp, Homo sapien
tccatttcagtatcctccaaagtgt

SEQ ID NO: 5016301 - DNA, 25 bp, Homo sapien
tgctccatttcagtatcctccaaag

SEQ ID NO: 5016302 - DNA, 25 bp, Homo sapien
catttcagtatcctccaaagtgttt

SEQ ID NO: 5016303 - DNA, 25 bp, Homo sapien
aatgctccatttcagtatcctccaa

SEQ ID NO: 5016304 - DNA, 25 bp, Homo sapien
tagaggattccaaaacccaagctgc

SEQ ID NO: 5016305 - DNA, 25 bp, Homo sapien
gctggagacgggttggaacaagggc

SEQ ID NO: 5016306 - DNA, 25 bp, Homo sapien
catctaactaggtaatagaggattc

SEQ ID NO: 5016307 - DNA, 25 bp, Homo sapien
gaacaagggccgtagccagacatct

SEQ ID NO: 5016308 - DNA, 25 bp, Homo sapien
ccacacctgtagatgtttgtccaag

SEQ ID NO: 5016309 - DNA, 25 bp, Homo sapien
cagctagaggcgtggtgctcacttc

SEQ ID NO: 5016310 - DNA, 25 bp, Homo sapien
gtcaaaccaagatctgcgaggttcc

SEQ ID NO: 5016311 - DNA, 25 bp, Homo sapien
gaagtcaaaccaagatctgcgaggt

SEQ ID NO: 5016312 - DNA, 25 bp, Homo sapien
gcctgaaccaagtcatgtgtttgcc

SEQ ID NO: 5016313 - DNA, 25 bp, Homo sapien
cattccaatgctgagttgcccctgg

SEQ ID NO: 5016314 - DNA, 25 bp, Homo sapien
ctgggatagagcaagtcttcctcca

SEQ ID NO: 5016315 - DNA, 25 bp, Homo sapien
cctgtaactgttagggccaggtaga

SEQ ID NO: 5016316 - DNA, 25 bp, Homo sapien
ctgtgggatagctatggttgttacc

SEQ ID NO: 5016317 - DNA, 25 bp, Homo sapien
aaaactgaggcttatggatattaag

SEQ ID NO: 5016318 - DNA, 25 bp, Homo sapien
agtcccccaaatcttgtactggtat

SEQ ID NO: 5016319 - DNA, 25 bp, Homo sapien
ttctaagatcatactatgagtggta

SEQ ID NO: 5016320 - DNA, 25 bp, Homo sapien
tcctgagacatgaaggtccttgagg

SEQ ID NO: 5016321 - DNA, 25 bp, Homo sapien
tcaagggcagaccactcaaaacatt

SEQ ID NO: 5016322 - DNA, 25 bp, Homo sapien
gaagtttttaagtagagccctgata

SEQ ID NO: 5016323 - DNA, 25 bp, Homo sapien
tttgcagctaaccatacagccaggc

SEQ ID NO: 5016324 - DNA, 25 bp, Homo sapien
aacctttggtgcctcaacttgacat

SEQ ID NO: 5016325 - DNA, 25 bp, Homo sapien
caatgacattctgcttagaggccaa

SEQ ID NO: 5016326 - DNA, 25 bp, Homo sapien
aggagagttgagcaccaggccctca

SEQ ID NO: 5016327 - DNA, 25 bp, Homo sapien
gtaactgaggacattgaacaatgcc

SEQ ID NO: 5016328 - DNA, 25 bp, Homo sapien
ggagctgtttgtggtccaatctggc

SEQ ID NO: 5016329 - DNA, 25 bp, Homo sapien
taggaaagcaatggagctgtttgtg

SEQ ID NO: 5016330 - DNA, 25 bp, Homo sapien
agaggtaggaaagcaatggagctgt

SEQ ID NO: 5016331 - DNA, 25 bp, Homo sapien
gagggcattcctgggatagcaaaat

SEQ ID NO: 5016332 - DNA, 25 bp, Homo sapien
cttcactaccatctttccattggcg

SEQ ID NO: 5016333 - DNA, 25 bp, Homo sapien
ctttccattggcgagttcttgctaa

SEQ ID NO: 5016334 - DNA, 25 bp, Homo sapien
tcttgctaaggagttcttgttcacc

SEQ ID NO: 5016335 - DNA, 25 bp, Homo sapien
tggcgagttcttgctaaggagttct

SEQ ID NO: 5016336 - DNA, 25 bp, Homo sapien
tgtgacaaagagaccgaaaggcatc

SEQ ID NO: 5016337 - DNA, 25 bp, Homo sapien
tcatagtgttgctgtcgggagtaac

SEQ ID NO: 5016338 - DNA, 25 bp, Homo sapien
gatataggccgaacgtacagtcact

SEQ ID NO: 5016339 - DNA, 25 bp, Homo sapien
ccttcctggaataccacagcagatt

SEQ ID NO: 5016340 - DNA, 25 bp, Homo sapien
tctgaggtcgcctgtggatgcacgt

SEQ ID NO: 5016341 - DNA, 25 bp, Homo sapien
ttcccgcgactcaaaggagcatagg

SEQ ID NO: 5016342 - DNA, 25 bp, Homo sapien
cgtctggcctgacgtttgagcgagc

SEQ ID NO: 5016343 - DNA, 25 bp, Homo sapien
ggctcttctttgagcggcgtccaga

SEQ ID NO: 5016344 - DNA, 25 bp, Homo sapien
aagttgatcatgcaagtaaaaccgt

SEQ ID NO: 5016345 - DNA, 25 bp, Homo sapien
aagtacttgaatgactaaactacct

SEQ ID NO: 5016346 - DNA, 25 bp, Homo sapien
agttgatcatgcaagtaaaaccgtt

SEQ ID NO: 5016347 - DNA, 25 bp, Homo sapien
gactaaactaccttgaagttgatca

SEQ ID NO: 5016348 - DNA, 25 bp, Homo sapien
aacaagatagcagtaatggaaatca

SEQ ID NO: 5016349 - DNA, 25 bp, Homo sapien
gatagcagtaatggaaatcaggcat

SEQ ID NO: 5016350 - DNA, 25 bp, Homo sapien
gagaaacaagatagcagtaatggaa

SEQ ID NO: 5016351 - DNA, 25 bp, Homo sapien
gttgattacttgtaagagaaacaag

SEQ ID NO: 5016352 - DNA, 25 bp, Homo sapien
ttgttgtgttctataggttccaaaa

SEQ ID NO: 5016353 - DNA, 25 bp, Homo sapien
ccattcttagtagtgagtgagggag

SEQ ID NO: 5016354 - DNA, 25 bp, Homo sapien
tctttgttgtgttctataggttcca

SEQ ID NO: 5016355 - DNA, 25 bp, Homo sapien
tgagtgagggagacaatctaataat

SEQ ID NO: 5016356 - DNA, 25 bp, Homo sapien
cattgattctctgacttggctcctg

SEQ ID NO: 5016357 - DNA, 25 bp, Homo sapien
cactccagttagtgctcaaatgtca

SEQ ID NO: 5016358 - DNA, 25 bp, Homo sapien
tctaaagagttggacacttacctgc

SEQ ID NO: 5016359 - DNA, 25 bp, Homo sapien
tcagcatctaaagtacctggtacat

SEQ ID NO: 5016360 - DNA, 25 bp, Homo sapien
ttctgaagatattggcttaatcgat

SEQ ID NO: 5016361 - DNA, 25 bp, Homo sapien
gcttaatcgattgccttgtctagaa

SEQ ID NO: 5016362 - DNA, 25 bp, Homo sapien
gatattggcttaatcgattgccttg

SEQ ID NO: 5016363 - DNA, 25 bp, Homo sapien
gaaagatccttacagttgtaaacat

SEQ ID NO: 5016364 - DNA, 25 bp, Homo sapien
ggcttttgcgataccacaccagtgg

SEQ ID NO: 5016365 - DNA, 25 bp, Homo sapien
cagtttcccgatgggttacctcaga

SEQ ID NO: 5016366 - DNA, 25 bp, Homo sapien
ggattcccactagacctcgttactg

SEQ ID NO: 5016367 - DNA, 25 bp, Homo sapien
tgttctaatagccacctagcagggc

SEQ ID NO: 5016368 - DNA, 25 bp, Homo sapien
ttctgcgagcgaatgcccaaggctg

SEQ ID NO: 5016369 - DNA, 25 bp, Homo sapien
catgaacaaggtaaacaaggtggct

SEQ ID NO: 5016370 - DNA, 25 bp, Homo sapien
gagggcgcttccacttgagacagta

SEQ ID NO: 5016371 - DNA, 25 bp, Homo sapien
tgttccttggatcgcaaagtccctg

SEQ ID NO: 5016372 - DNA, 25 bp, Homo sapien
gcctgtgggaattttgagggcagcg

SEQ ID NO: 5016373 - DNA, 25 bp, Homo sapien
ccaagaggtggtagcggtgtggcct

SEQ ID NO: 5016374 - DNA, 25 bp, Homo sapien
gagggcagcgggcaaaagtcattcc

SEQ ID NO: 5016375 - DNA, 25 bp, Homo sapien
accccacgccctgtgcttgtttagg

SEQ ID NO: 5016376 - DNA, 25 bp, Homo sapien
actcacatccccttctttcaagtct

SEQ ID NO: 5016377 - DNA, 25 bp, Homo sapien
ctggcagaaggttcagggccggtca

SEQ ID NO: 5016378 - DNA, 25 bp, Homo sapien
ctgcgctggcagaaggttcagggcc

SEQ ID NO: 5016379 - DNA, 25 bp, Homo sapien
ttttcctgccactcacatccccttc

SEQ ID NO: 5016380 - DNA, 25 bp, Homo sapien
tgaggttgggcagatgggcattact

SEQ ID NO: 5016381 - DNA, 25 bp, Homo sapien
gaaatacttgttgctcctgcattga

SEQ ID NO: 5016382 - DNA, 25 bp, Homo sapien
tctctccaagacagagaaatacttg

SEQ ID NO: 5016383 - DNA, 25 bp, Homo sapien
ggcactagtggccaagttgccctga

SEQ ID NO: 5016384 - DNA, 25 bp, Homo sapien
gtggtggtgcaagccactgcttttt

SEQ ID NO: 5016385 - DNA, 25 bp, Homo sapien
ggagcagcacaagagtgaggacaaa

SEQ ID NO: 5016386 - DNA, 25 bp, Homo sapien
tcccaaagttctatcattgaaggag

SEQ ID NO: 5016387 - DNA, 25 bp, Homo sapien
tgctggatgagaaagtcccaaagtt

SEQ ID NO: 5016388 - DNA, 25 bp, Homo sapien
aagagcaaggcccgaggagtgaggg

SEQ ID NO: 5016389 - DNA, 25 bp, Homo sapien
ggggaagagcaaggcccgaggagtg

SEQ ID NO: 5016390 - DNA, 25 bp, Homo sapien
gggaagagcaaggcccgaggagtga

SEQ ID NO: 5016391 - DNA, 25 bp, Homo sapien
agcaaggcccgaggagtgaggggaa

SEQ ID NO: 5016392 - DNA, 25 bp, Homo sapien
gctgtgcgagttcggtgctcagccc

SEQ ID NO: 5016393 - DNA, 25 bp, Homo sapien
aacttctggagaagcgtcagccctc

SEQ ID NO: 5016394 - DNA, 25 bp, Homo sapien
gacagtgtttctgcgcttcctgagg

SEQ ID NO: 5016395 - DNA, 25 bp, Homo sapien
gatcctcgaggttggcctgctttcc

SEQ ID NO: 5016396 - DNA, 25 bp, Homo sapien
tcagcaagatgaggccgagtaggca

SEQ ID NO: 5016397 - DNA, 25 bp, Homo sapien
gccccgtcgcattctcagcaagatg

SEQ ID NO: 5016398 - DNA, 25 bp, Homo sapien
cattctcagcaagatgaggccgagt

SEQ ID NO: 5016399 - DNA, 25 bp, Homo sapien
aagacaggaagctgtcgccccgtcg

SEQ ID NO: 5016400 - DNA, 25 bp, Homo sapien
ggaatatccgggctcgcagaccacg

SEQ ID NO: 5016401 - DNA, 25 bp, Homo sapien
ctccccagggaatatccgggctcgc

SEQ ID NO: 5016402 - DNA, 25 bp, Homo sapien
cccagggaatatccgggctcgcaga

SEQ ID NO: 5016403 - DNA, 25 bp, Homo sapien
aatatccgggctcgcagaccacgcg

SEQ ID NO: 5016404 - DNA, 25 bp, Homo sapien
ccgcaggggtcctgcgaaccccatc

SEQ ID NO: 5016405 - DNA, 25 bp, Homo sapien
gggtcctgcgaaccccatccactgc

SEQ ID NO: 5016406 - DNA, 25 bp, Homo sapien
ttccgcaggggtcctgcgaacccca

SEQ ID NO: 5016407 - DNA, 25 bp, Homo sapien
aggggtcctgcgaaccccatccact

SEQ ID NO: 5016408 - DNA, 25 bp, Homo sapien
ctgacttgtgcgacttgtgtggctc

SEQ ID NO: 5016409 - DNA, 25 bp, Homo sapien
gacttgtgtggctcgtgtgctctca

SEQ ID NO: 5016410 - DNA, 25 bp, Homo sapien
ctgggagtccttttcgttactgact

SEQ ID NO: 5016411 - DNA, 25 bp, Homo sapien
tcgttactgacttgtgcgacttgtg

SEQ ID NO: 5016412 - DNA, 25 bp, Homo sapien
gctactccggaggctcagtggggag

SEQ ID NO: 5016413 - DNA, 25 bp, Homo sapien
ctactccggaggctcagtggggagg

SEQ ID NO: 5016414 - DNA, 25 bp, Homo sapien
taacagccagcctattttcccagct

SEQ ID NO: 5016415 - DNA, 25 bp, Homo sapien
taaacgggctctgtctttatcatcc

SEQ ID NO: 5016416 - DNA, 25 bp, Homo sapien
catgtagtagataattcttcctttc

SEQ ID NO: 5016417 - DNA, 25 bp, Homo sapien
tgcacttgacccatattccttagaa

SEQ ID NO: 5016418 - DNA, 25 bp, Homo sapien
tgtagcatgctgtgctcgtgcctgt

SEQ ID NO: 5016419 - DNA, 25 bp, Homo sapien
ctcgggaggcttgagactgtagcat

SEQ ID NO: 5016420 - DNA, 25 bp, Homo sapien
gcttgagactgtagcatgctgtgct

SEQ ID NO: 5016421 - DNA, 25 bp, Homo sapien
actgtagcatgctgtgctcgtgcct

SEQ ID NO: 5016422 - DNA, 25 bp, Homo sapien
tggcacacatacaattacagcgaaa

SEQ ID NO: 5016423 - DNA, 25 bp, Homo sapien
catcacccagcttttgagacgttca

SEQ ID NO: 5016424 - DNA, 25 bp, Homo sapien
gttcaaacacgggttgctaacatgc

SEQ ID NO: 5016425 - DNA, 25 bp, Homo sapien
acagaaccgcagtgtcttccctggt

SEQ ID NO: 5016426 - DNA, 25 bp, Homo sapien
gcagctgctgtgatgcttgaggcac

SEQ ID NO: 5016427 - DNA, 25 bp, Homo sapien
gcagcactgaagactagctgaccct

SEQ ID NO: 5016428 - DNA, 25 bp, Homo sapien
ggcagctcataaactcttcttggca

SEQ ID NO: 5016429 - DNA, 25 bp, Homo sapien
gaccctgcggatgccatgctggccc

SEQ ID NO: 5016430 - DNA, 25 bp, Homo sapien
tgggctcacagcctcccacaggctg

SEQ ID NO: 5016431 - DNA, 25 bp, Homo sapien
cagcctcccacaggctgcctctcac

SEQ ID NO: 5016432 - DNA, 25 bp, Homo sapien
cacagcctcccacaggctgcctctc

SEQ ID NO: 5016433 - DNA, 25 bp, Homo sapien
ctataaggaccaggtggccacctgg

SEQ ID NO: 5016434 - DNA, 25 bp, Homo sapien
gcccttgtccactctggattctttc

SEQ ID NO: 5016435 - DNA, 25 bp, Homo sapien
atggggtcctaatgtgaggctgccc

SEQ ID NO: 5016436 - DNA, 25 bp, Homo sapien
tggaaagtgacagatatgcccattg

SEQ ID NO: 5016437 - DNA, 25 bp, Homo sapien
cctggcgccctagagtcctggtgtg

SEQ ID NO: 5016438 - DNA, 25 bp, Homo sapien
tgcctggctggattccgctctcttc

SEQ ID NO: 5016439 - DNA, 25 bp, Homo sapien
cttccccacgttgagctagagttga

SEQ ID NO: 5016440 - DNA, 25 bp, Homo sapien
ttgagctagagttgaatattcttcc

SEQ ID NO: 5016441 - DNA, 25 bp, Homo sapien
acctacctcatcagtggtttcccac

SEQ ID NO: 5016442 - DNA, 25 bp, Homo sapien
aagccatcttgaagttcagctcttc

SEQ ID NO: 5016443 - DNA, 25 bp, Homo sapien
atcagggcctggtgtcacctgccat

SEQ ID NO: 5016444 - DNA, 25 bp, Homo sapien
gagcagccacgtgatcatttgaaca

SEQ ID NO: 5016445 - DNA, 25 bp, Homo sapien
caagagagagcagccacgtgatcat

SEQ ID NO: 5016446 - DNA, 25 bp, Homo sapien
cagtgccatcagggcctggtgtcac

SEQ ID NO: 5016447 - DNA, 25 bp, Homo sapien
tcttgagatggttccaacatcttgc

SEQ ID NO: 5016448 - DNA, 25 bp, Homo sapien
ccttggtaaggtgttgtggaaatgt

SEQ ID NO: 5016449 - DNA, 25 bp, Homo sapien
ccaacatcttgctcgtgtaggtagt

SEQ ID NO: 5016450 - DNA, 25 bp, Homo sapien
gctcgtgtaggtagtgccttggtaa

SEQ ID NO: 5016451 - DNA, 25 bp, Homo sapien
gctcatcgtgggcaccagtatcttg

SEQ ID NO: 5016452 - DNA, 25 bp, Homo sapien
cgtgggcaccagtatcttgaccaaa

SEQ ID NO: 5016453 - DNA, 25 bp, Homo sapien
catcgtgggcaccagtatcttgacc

SEQ ID NO: 5016454 - DNA, 25 bp, Homo sapien
tcatcgtgggcaccagtatcttgac

SEQ ID NO: 5016455 - DNA, 25 bp, Homo sapien
tgatttccccgcttataccaaaagc

SEQ ID NO: 5016456 - DNA, 25 bp, Homo sapien
tgctgtgagttcaccagtaagtgac

SEQ ID NO: 5016457 - DNA, 25 bp, Homo sapien
gaggcatggtcccagaagtttaacc

SEQ ID NO: 5016458 - DNA, 25 bp, Homo sapien
cacaggaccgcaaaagcagctggtg

SEQ ID NO: 5016459 - DNA, 25 bp, Homo sapien
gacaactgacaagctggcacatgct

SEQ ID NO: 5016460 - DNA, 25 bp, Homo sapien
tgacaactgacaagctggcacatgc

SEQ ID NO: 5016461 - DNA, 25 bp, Homo sapien
acaactgacaagctggcacatgctc

SEQ ID NO: 5016462 - DNA, 25 bp, Homo sapien
caactgacaagctggcacatgctcc

SEQ ID NO: 5016463 - DNA, 25 bp, Homo sapien
gtttcagactccagggagacctgta

SEQ ID NO: 5016464 - DNA, 25 bp, Homo sapien
cagactccagggagacctgtaagtt

SEQ ID NO: 5016465 - DNA, 25 bp, Homo sapien
tagaaaggagaggacaatgaggtcc

SEQ ID NO: 5016466 - DNA, 25 bp, Homo sapien
gtccctggcctcatgcaggtttcag

SEQ ID NO: 5016467 - DNA, 25 bp, Homo sapien
aaatgtttcttcagggagtgacaca

SEQ ID NO: 5016468 - DNA, 25 bp, Homo sapien
tctcccatagggttgttctaccaca

SEQ ID NO: 5016469 - DNA, 25 bp, Homo sapien
cagtgccgttttactgagatgggca

SEQ ID NO: 5016470 - DNA, 25 bp, Homo sapien
gtacaattctatatggcagcctctg

SEQ ID NO: 5016471 - DNA, 25 bp, Homo sapien
accgcgtctggatcgcgccggctgc

SEQ ID NO: 5016472 - DNA, 25 bp, Homo sapien
ccagcccgcccaccgcgtctggatc

SEQ ID NO: 5016473 - DNA, 25 bp, Homo sapien
agcacacaccctggaaggccccggc

SEQ ID NO: 5016474 - DNA, 25 bp, Homo sapien
agcggctgcgctggcggccagcccg

SEQ ID NO: 5016475 - DNA, 25 bp, Homo sapien
ggtcccggagccgtcgcagcgccgg

SEQ ID NO: 5016476 - DNA, 25 bp, Homo sapien
cgccatgttggggtctgtgagaaac

SEQ ID NO: 5016477 - DNA, 25 bp, Homo sapien
cgacgccatgttggggtctgtgaga

SEQ ID NO: 5016478 - DNA, 25 bp, Homo sapien
cggagccgtcgcagcgccgggaggt

SEQ ID NO: 5016479 - DNA, 25 bp, Homo sapien
tggcatctctgtcccgcagatgtgt

SEQ ID NO: 5016480 - DNA, 25 bp, Homo sapien
gatgtgtttgtcttgtggatgccct

SEQ ID NO: 5016481 - DNA, 25 bp, Homo sapien
gcatctgcccagtggcttaccctta

SEQ ID NO: 5016482 - DNA, 25 bp, Homo sapien
tgtgaaacatatgagagcaggttga

SEQ ID NO: 5016483 - DNA, 25 bp, Homo sapien
taaagactaggatggagcttagaca

SEQ ID NO: 5016484 - DNA, 25 bp, Homo sapien
cataaaagatttgaagccttgggag

SEQ ID NO: 5016485 - DNA, 25 bp, Homo sapien
ggtagacaccccactgaagaacatg

SEQ ID NO: 5016486 - DNA, 25 bp, Homo sapien
aaagtatacaaaatctgggagccta

SEQ ID NO: 5016487 - DNA, 25 bp, Homo sapien
ttttcctgcacctagatcctaagtg

SEQ ID NO: 5016488 - DNA, 25 bp, Homo sapien
atctagtacagctgaaatgacaaca

SEQ ID NO: 5016489 - DNA, 25 bp, Homo sapien
tactcaagtatgatcgcctgtggtg

SEQ ID NO: 5016490 - DNA, 25 bp, Homo sapien
ggcctttgcagttactccttttgtc

SEQ ID NO: 5016491 - DNA, 25 bp, Homo sapien
tatgctgccactgctacggagaaat

SEQ ID NO: 5016492 - DNA, 25 bp, Homo sapien
ggttcctgactctgaggcaactgta

SEQ ID NO: 5016493 - DNA, 25 bp, Homo sapien
caacctttaactatacctggacgag

SEQ ID NO: 5016494 - DNA, 25 bp, Homo sapien
agccagtcctctaagcctgtgcgga

SEQ ID NO: 5016495 - DNA, 25 bp, Homo sapien
gcattagcttctacctttagtaaga

SEQ ID NO: 5016496 - DNA, 25 bp, Homo sapien
cactggtgctctttgaagtgataaa

SEQ ID NO: 5016497 - DNA, 25 bp, Homo sapien
ggctttttcatatacctagtggtgc

SEQ ID NO: 5016498 - DNA, 25 bp, Homo sapien
catctgacagctacaaataactaag

SEQ ID NO: 5016499 - DNA, 25 bp, Homo sapien
ggatgctctccacacctcacttggg

SEQ ID NO: 5016500 - DNA, 25 bp, Homo sapien
tggacatccttctctctcgtactgc

SEQ ID NO: 5016501 - DNA, 25 bp, Homo sapien
tgagctccaacaccctctgctggct

SEQ ID NO: 5016502 - DNA, 25 bp, Homo sapien
tgctggcttgcccgcactgccatgg

SEQ ID NO: 5016503 - DNA, 25 bp, Homo sapien
taggcaccaagctccccacgtagga

SEQ ID NO: 5016504 - DNA, 25 bp, Homo sapien
gctcgaaccagcatgtcaggctgct

SEQ ID NO: 5016505 - DNA, 25 bp, Homo sapien
ctcacagtcctctgtgtgggatcca

SEQ ID NO: 5016506 - DNA, 25 bp, Homo sapien
tctgctgaggctcgaaccagcatgt

SEQ ID NO: 5016507 - DNA, 25 bp, Homo sapien
gccctgctgcttgttgatactcaat

SEQ ID NO: 5016508 - DNA, 25 bp, Homo sapien
caattctccgagtgcaagtgccaag

SEQ ID NO: 5016509 - DNA, 25 bp, Homo sapien
ttatcttcttaaagcaggcaatgga

SEQ ID NO: 5016510 - DNA, 25 bp, Homo sapien
gtgcaagtgccaaggcacgcctggc

SEQ ID NO: 5016511 - DNA, 25 bp, Homo sapien
gctaactgaggcgacagtagggtca

SEQ ID NO: 5016512 - DNA, 25 bp, Homo sapien
tggtccacggctaactgaggcgaca

SEQ ID NO: 5016513 - DNA, 25 bp, Homo sapien
tccagaggcccatggtccacggcta

SEQ ID NO: 5016514 - DNA, 25 bp, Homo sapien
gaggcgacagtagggtcagtcttca

SEQ ID NO: 5016515 - DNA, 25 bp, Homo sapien
taaatgtggtactcttgcctccaac

SEQ ID NO: 5016516 - DNA, 25 bp, Homo sapien
aacacgtgcttgttgggctggtaca

SEQ ID NO: 5016517 - DNA, 25 bp, Homo sapien
tatggtgaccattcaggttcagggc

SEQ ID NO: 5016518 - DNA, 25 bp, Homo sapien
taatgtagagcttaatccgtcacct

SEQ ID NO: 5016519 - DNA, 25 bp, Homo sapien
cactcaagatttctgtctgccgagg

SEQ ID NO: 5016520 - DNA, 25 bp, Homo sapien
atgatctcttgggtggtatccaggc

SEQ ID NO: 5016521 - DNA, 25 bp, Homo sapien
gggtccgaggtgacatgatctcttg

SEQ ID NO: 5016522 - DNA, 25 bp, Homo sapien
actccactcaagatttctgtctgcc

SEQ ID NO: 5016523 - DNA, 25 bp, Homo sapien
gaccacgtatgaagttgatgacctc

SEQ ID NO: 5016524 - DNA, 25 bp, Homo sapien
ggcctgggcatctcttgagactgga

SEQ ID NO: 5016525 - DNA, 25 bp, Homo sapien
tgagactggacctgagcagcttggt

SEQ ID NO: 5016526 - DNA, 25 bp, Homo sapien
gcagcttggtgaaccaatcccaaat

SEQ ID NO: 5016527 - DNA, 25 bp, Homo sapien
cccctgcacccatagaagaggcagt

SEQ ID NO: 5016528 - DNA, 25 bp, Homo sapien
ctggtctagttcttatttctgcccc

SEQ ID NO: 5016529 - DNA, 25 bp, Homo sapien
ggtctagttcttatttctgcccctg

SEQ ID NO: 5016530 - DNA, 25 bp, Homo sapien
tgcccctgcacccatagaagaggca

SEQ ID NO: 5016531 - DNA, 25 bp, Homo sapien
gctgccttggccagcagtcactgag

SEQ ID NO: 5016532 - DNA, 25 bp, Homo sapien
ggccagcagtcactgagcttggaac

SEQ ID NO: 5016533 - DNA, 25 bp, Homo sapien
ttggccagcagtcactgagcttgga

SEQ ID NO: 5016534 - DNA, 25 bp, Homo sapien
gccttggccagcagtcactgagctt

SEQ ID NO: 5016535 - DNA, 25 bp, Homo sapien
catctcaaaggatacacctgtttct

SEQ ID NO: 5016536 - DNA, 25 bp, Homo sapien
tgaccttggggccatctcaaaggat

SEQ ID NO: 5016537 - DNA, 25 bp, Homo sapien
aaggatacacctgtttctgctgcca

SEQ ID NO: 5016538 - DNA, 25 bp, Homo sapien
gggccatctcaaaggatacacctgt

SEQ ID NO: 5016539 - DNA, 25 bp, Homo sapien
gagacgggttgtatccctctcctaa

SEQ ID NO: 5016540 - DNA, 25 bp, Homo sapien
tttctgttgctgagacgggttgtat

SEQ ID NO: 5016541 - DNA, 25 bp, Homo sapien
ttgctgagacgggttgtatccctct

SEQ ID NO: 5016542 - DNA, 25 bp, Homo sapien
ctgttgctgagacgggttgtatccc

SEQ ID NO: 5016543 - DNA, 25 bp, Homo sapien
caagggcacccttagagaaatcagg

SEQ ID NO: 5016544 - DNA, 25 bp, Homo sapien
cctttgtgtgccaatcaagggcacc

SEQ ID NO: 5016545 - DNA, 25 bp, Homo sapien
ggttaatcttcatgacgcccatggt

SEQ ID NO: 5016546 - DNA, 25 bp, Homo sapien
aactcttcgctgagcaggttaatct

SEQ ID NO: 5016547 - DNA, 25 bp, Homo sapien
agctggaggtaggtgagagggtgga

SEQ ID NO: 5016548 - DNA, 25 bp, Homo sapien
aattagctaacacatagttgtagcc

SEQ ID NO: 5016549 - DNA, 25 bp, Homo sapien
cacatagttgtagccactgaaacac

SEQ ID NO: 5016550 - DNA, 25 bp, Homo sapien
agagggtggaagaattagctaacac

SEQ ID NO: 5016551 - DNA, 25 bp, Homo sapien
ggcagcatgtggagggtcctggcta

SEQ ID NO: 5016552 - DNA, 25 bp, Homo sapien
gcatgtggagggtcctggctacttc

SEQ ID NO: 5016553 - DNA, 25 bp, Homo sapien
cagggtcatgggatgagggagcagg

SEQ ID NO: 5016554 - DNA, 25 bp, Homo sapien
cagcatgtggagggtcctggctact

SEQ ID NO: 5016555 - DNA, 25 bp, Homo sapien
tcccaggttgttcagacagagcgag

SEQ ID NO: 5016556 - DNA, 25 bp, Homo sapien
tcctcccaggttgttcagacagagc

SEQ ID NO: 5016557 - DNA, 25 bp, Homo sapien
tcctcctcccaggttgttcagacag

SEQ ID NO: 5016558 - DNA, 25 bp, Homo sapien
ccaggttgttcagacagagcgagtc

SEQ ID NO: 5016559 - DNA, 25 bp, Homo sapien
gaatcaggtatctggtaatgccagg

SEQ ID NO: 5016560 - DNA, 25 bp, Homo sapien
agcagatattttgcagaatcaggta

SEQ ID NO: 5016561 - DNA, 25 bp, Homo sapien
gagcttaagcagctttggagatgac

SEQ ID NO: 5016562 - DNA, 25 bp, Homo sapien
taatgccagggttgtgcagggagct

SEQ ID NO: 5016563 - DNA, 25 bp, Homo sapien
tgcaatctctgtgtaaacattggaa

SEQ ID NO: 5016564 - DNA, 25 bp, Homo sapien
gctgcaatggcaatggctgtacctg

SEQ ID NO: 5016565 - DNA, 25 bp, Homo sapien
ggaaagccactctttcagggcgctt

SEQ ID NO: 5016566 - DNA, 25 bp, Homo sapien
cctgaagtttggtgtaaattccatg

SEQ ID NO: 5016567 - DNA, 25 bp, Homo sapien
tagggaaagctgtcatgcccatggg

SEQ ID NO: 5016568 - DNA, 25 bp, Homo sapien
ctaattcagggagaggtgtcgacga

SEQ ID NO: 5016569 - DNA, 25 bp, Homo sapien
cgaggactccagttcatagggaaag

SEQ ID NO: 5016570 - DNA, 25 bp, Homo sapien
gggagaagacacgtggtcctaaaca

SEQ ID NO: 5016571 - DNA, 25 bp, Homo sapien
gcagaaattggagtattgtggccac

SEQ ID NO: 5016572 - DNA, 25 bp, Homo sapien
gtcaagaagggtcctcagtgctcct

SEQ ID NO: 5016573 - DNA, 25 bp, Homo sapien
tgacttctgcccagcatttcctctg

SEQ ID NO: 5016574 - DNA, 25 bp, Homo sapien
gagagaaatttgatgcacacagaag

SEQ ID NO: 5016575 - DNA, 25 bp, Homo sapien
tggaagaaagttcatgggctgaagt

SEQ ID NO: 5016576 - DNA, 25 bp, Homo sapien
tgcttgacacgctgagtaagcaggc

SEQ ID NO: 5016577 - DNA, 25 bp, Homo sapien
gcaggggaccacgacggcatttttc

SEQ ID NO: 5016578 - DNA, 25 bp, Homo sapien
actcctgcttgacacgctgagtaag

SEQ ID NO: 5016579 - DNA, 25 bp, Homo sapien
gggaatggtatgtgacctcttccca

SEQ ID NO: 5016580 - DNA, 25 bp, Homo sapien
aatatacaggcatcttcctggtgcc

SEQ ID NO: 5016581 - DNA, 25 bp, Homo sapien
catccgtttttatcagcaaatatac

SEQ ID NO: 5016582 - DNA, 25 bp, Homo sapien
tcatccgtttttatcagcaaatata

SEQ ID NO: 5016583 - DNA, 25 bp, Homo sapien
ctcaccctcaattcctgagaaacca

SEQ ID NO: 5016584 - DNA, 25 bp, Homo sapien
gtggtgcccgcagagatcgggctcc

SEQ ID NO: 5016585 - DNA, 25 bp, Homo sapien
gggatgggcgataggtaggtggtgc

SEQ ID NO: 5016586 - DNA, 25 bp, Homo sapien
gtgcccgcagagatcgggctcctca

SEQ ID NO: 5016587 - DNA, 25 bp, Homo sapien
cctgggagaacacagttggtgcccc

SEQ ID NO: 5016588 - DNA, 25 bp, Homo sapien
ttctgggatggcctgggagaacaca

SEQ ID NO: 5016589 - DNA, 25 bp, Homo sapien
cacagttggtgcccctctccgggta

SEQ ID NO: 5016590 - DNA, 25 bp, Homo sapien
gagaacacagttggtgcccctctcc

SEQ ID NO: 5016591 - DNA, 25 bp, Homo sapien
gcccacagcatggttgtccagtctg

SEQ ID NO: 5016592 - DNA, 25 bp, Homo sapien
ctgcagaagtgatagtccaggtgct

SEQ ID NO: 5016593 - DNA, 25 bp, Homo sapien
tggctctatggacaagtgcccacag

SEQ ID NO: 5016594 - DNA, 25 bp, Homo sapien
caggtgctgagagcacgtggccacc

SEQ ID NO: 5016595 - DNA, 25 bp, Homo sapien
gaggatttctgtccctcttggccct

SEQ ID NO: 5016596 - DNA, 25 bp, Homo sapien
cctgggcatactcagctcggtgagc

SEQ ID NO: 5016597 - DNA, 25 bp, Homo sapien
cgtgcatgcactgggttctgactct

SEQ ID NO: 5016598 - DNA, 25 bp, Homo sapien
ctcggtgagctggtttggtgctcat

SEQ ID NO: 5016599 - DNA, 25 bp, Homo sapien
gctaaaattgtagaagttgagagcc

SEQ ID NO: 5016600 - DNA, 25 bp, Homo sapien
aattgtagaagttgagagccaacac

SEQ ID NO: 5016601 - DNA, 25 bp, Homo sapien
gaactggctaaaattgtagaagttg

SEQ ID NO: 5016602 - DNA, 25 bp, Homo sapien
gtagaagttgagagccaacacagtg

SEQ ID NO: 5016603 - DNA, 25 bp, Homo sapien
ttctggatggctcagcctggcaggc

SEQ ID NO: 5016604 - DNA, 25 bp, Homo sapien
ctcagcctggcaggctgcttctgtt

SEQ ID NO: 5016605 - DNA, 25 bp, Homo sapien
cttctggatggctcagcctggcagg

SEQ ID NO: 5016606 - DNA, 25 bp, Homo sapien
tggctcagcctggcaggctgcttct

SEQ ID NO: 5016607 - DNA, 25 bp, Homo sapien
gagcctcgtcttatggcccaggatg

SEQ ID NO: 5016608 - DNA, 25 bp, Homo sapien
ccattcttaaggtgggagcctcgtc

SEQ ID NO: 5016609 - DNA, 25 bp, Homo sapien
cccgctgaccagctaggatgagcaa

SEQ ID NO: 5016610 - DNA, 25 bp, Homo sapien
ttaggtatcccctcacaagctccga

SEQ ID NO: 5016611 - DNA, 25 bp, Homo sapien
atgctgttttcccagcgttcccgca

SEQ ID NO: 5016612 - DNA, 25 bp, Homo sapien
tgctgttttcccagcgttcccgcag

SEQ ID NO: 5016613 - DNA, 25 bp, Homo sapien
caccccttggcaatcctctgctcct

SEQ ID NO: 5016614 - DNA, 25 bp, Homo sapien
ccccaccccttggcaatcctctgct

SEQ ID NO: 5016615 - DNA, 25 bp, Homo sapien
atgtgtgcagaaatgaatgtgcctc

SEQ ID NO: 5016616 - DNA, 25 bp, Homo sapien
caatgcgatctgtggcaaggtcccc

SEQ ID NO: 5016617 - DNA, 25 bp, Homo sapien
gcctaagtaatgtgtgcagaaatga

SEQ ID NO: 5016618 - DNA, 25 bp, Homo sapien
gacttcacggaggagacattagcac

SEQ ID NO: 5016619 - DNA, 25 bp, Homo sapien
tcttcccgaggatgtccttagtaat

SEQ ID NO: 5016620 - DNA, 25 bp, Homo sapien
gtaattgtggctttagtgatgagca

SEQ ID NO: 5016621 - DNA, 25 bp, Homo sapien
gatgagcaacactaggaggccttgg

SEQ ID NO: 5016622 - DNA, 25 bp, Homo sapien
tgtccttagtaattgtggctttagt

SEQ ID NO: 5016623 - DNA, 25 bp, Homo sapien
tggacaggagtggtttgtcttggtt

SEQ ID NO: 5016624 - DNA, 25 bp, Homo sapien
actggacaggagtggtttgtcttgg

SEQ ID NO: 5016625 - DNA, 25 bp, Homo sapien
ctggacaggagtggtttgtcttggt

SEQ ID NO: 5016626 - DNA, 25 bp, Homo sapien
tggggctcccttacaggccttctga

SEQ ID NO: 5016627 - DNA, 25 bp, Homo sapien
ggccttctgacacccttgtgacaca

SEQ ID NO: 5016628 - DNA, 25 bp, Homo sapien
caggccttctgacacccttgtgaca

SEQ ID NO: 5016629 - DNA, 25 bp, Homo sapien
gggctcccttacaggccttctgaca

SEQ ID NO: 5016630 - DNA, 25 bp, Homo sapien
gacagcttctgtggttgtcaggcag

SEQ ID NO: 5016631 - DNA, 25 bp, Homo sapien
cttaggaacaaagtggtgacagctt

SEQ ID NO: 5016632 - DNA, 25 bp, Homo sapien
taggaacaaagtggtgacagcttct

SEQ ID NO: 5016633 - DNA, 25 bp, Homo sapien
ttctgtggttgtcaggcagtggcca

SEQ ID NO: 5016634 - DNA, 25 bp, Homo sapien
gacatagacctggtgcgggtgatgg

SEQ ID NO: 5016635 - DNA, 25 bp, Homo sapien
catagacctggtgcgggtgatggtg

SEQ ID NO: 5016636 - DNA, 25 bp, Homo sapien
gatggctggaaggacatagacctgg

SEQ ID NO: 5016637 - DNA, 25 bp, Homo sapien
ggcagcatttgaggatggctggaag

SEQ ID NO: 5016638 - DNA, 25 bp, Homo sapien
ttgtctacagcccttgggggtggca

SEQ ID NO: 5016639 - DNA, 25 bp, Homo sapien
ttccaagaagcccttggtagaaggc

SEQ ID NO: 5016640 - DNA, 25 bp, Homo sapien
gcaaggtgatggttcacaaacttgt

SEQ ID NO: 5016641 - DNA, 25 bp, Homo sapien
gaaggcttccctgattgcaaggtga

SEQ ID NO: 5016642 - DNA, 25 bp, Homo sapien
ggaacattacacaccagaggctggt

SEQ ID NO: 5016643 - DNA, 25 bp, Homo sapien
ccaccctggcacgtgtataattatt

SEQ ID NO: 5016644 - DNA, 25 bp, Homo sapien
cgcattgctgctttcctcataggga

SEQ ID NO: 5016645 - DNA, 25 bp, Homo sapien
aataaaggtcgccatgtgtacagtc

SEQ ID NO: 5016646 - DNA, 25 bp, Homo sapien
gggaactcacacatacatttctgac

SEQ ID NO: 5016647 - DNA, 25 bp, Homo sapien
ttataaattgccaataaacatggga

SEQ ID NO: 5016648 - DNA, 25 bp, Homo sapien
caaacaggcaaaacatcttgaaagt

SEQ ID NO: 5016649 - DNA, 25 bp, Homo sapien
tagaggcaatgtaggctactttggg

SEQ ID NO: 5016650 - DNA, 25 bp, Homo sapien
agttcaggagatcgacatcattctg

SEQ ID NO: 5016651 - DNA, 25 bp, Homo sapien
taatgtgtcaaattctatgaggttc

SEQ ID NO: 5016652 - DNA, 25 bp, Homo sapien
acttcaatcgacatccccctaggtt

SEQ ID NO: 5016653 - DNA, 25 bp, Homo sapien
gttctaaatgtgtggatcttgttgc

SEQ ID NO: 5016654 - DNA, 25 bp, Homo sapien
tttttccagcagtcgacttcaatcg

SEQ ID NO: 5016655 - DNA, 25 bp, Homo sapien
gtttgtggcagattggaaagctccc

SEQ ID NO: 5016656 - DNA, 25 bp, Homo sapien
gaatgtgctgctattgtagggctcc

SEQ ID NO: 5016657 - DNA, 25 bp, Homo sapien
tgtcaacctgatcctaccagagaag

SEQ ID NO: 5016658 - DNA, 25 bp, Homo sapien
caggaaggagcccaacaggttacct

SEQ ID NO: 5016659 - DNA, 25 bp, Homo sapien
gaagaagtgttgtagacacccctaa

SEQ ID NO: 5016660 - DNA, 25 bp, Homo sapien
catctgtccgaatgtgcagtctgca

SEQ ID NO: 5016661 - DNA, 25 bp, Homo sapien
tgattcatggagaccactctcatgg

SEQ ID NO: 5016662 - DNA, 25 bp, Homo sapien
tttggcaacaaaagatctgactgga

SEQ ID NO: 5016663 - DNA, 25 bp, Homo sapien
tgatctgtctgaaggtcagtcactt

SEQ ID NO: 5016664 - DNA, 25 bp, Homo sapien
agctacactggcaggcatatgcccg

SEQ ID NO: 5016665 - DNA, 25 bp, Homo sapien
gcgaagctgatgatctgtctgaagg

SEQ ID NO: 5016666 - DNA, 25 bp, Homo sapien
gcatatgcccgtgttcctttcttct

SEQ ID NO: 5016667 - DNA, 25 bp, Homo sapien
tgtctctatgaccttgctgctcaca

SEQ ID NO: 5016668 - DNA, 25 bp, Homo sapien
cttgaccctattgtctctatgacct

SEQ ID NO: 5016669 - DNA, 25 bp, Homo sapien
tattgtctctatgaccttgctgctc

SEQ ID NO: 5016670 - DNA, 25 bp, Homo sapien
tgaccctattgtctctatgaccttg

SEQ ID NO: 5016671 - DNA, 25 bp, Homo sapien
agagtgaagttctttagcaacatac

SEQ ID NO: 5016672 - DNA, 25 bp, Homo sapien
ctacttggtacttttttcagagtga

SEQ ID NO: 5016673 - DNA, 25 bp, Homo sapien
ttcagagtgaagttctttagcaaca

SEQ ID NO: 5016674 - DNA, 25 bp, Homo sapien
tacttggtacttttttcagagtgaa

SEQ ID NO: 5016675 - DNA, 25 bp, Homo sapien
gtcccacatatagtcatcatagctg

SEQ ID NO: 5016676 - DNA, 25 bp, Homo sapien
tagctgactaccaagaaatcacagg

SEQ ID NO: 5016677 - DNA, 25 bp, Homo sapien
tatacaacgcagatggtcacatgct

SEQ ID NO: 5016678 - DNA, 25 bp, Homo sapien
taatcacacgatttgtcccacatat

SEQ ID NO: 5016679 - DNA, 25 bp, Homo sapien
tgcatggccactttgcttccactgc

SEQ ID NO: 5016680 - DNA, 25 bp, Homo sapien
atgtatctgcatggccactttgctt

SEQ ID NO: 5016681 - DNA, 25 bp, Homo sapien
tgcctggaaggaagttcactctcct

SEQ ID NO: 5016682 - DNA, 25 bp, Homo sapien
ctgcctggaaggaagttcactctcc

SEQ ID NO: 5016683 - DNA, 25 bp, Homo sapien
aatatttgttccaatcccacatgga

SEQ ID NO: 5016684 - DNA, 25 bp, Homo sapien
catggaatagagcttccaccaaggt

SEQ ID NO: 5016685 - DNA, 25 bp, Homo sapien
caatcccacatggaatagagcttcc

SEQ ID NO: 5016686 - DNA, 25 bp, Homo sapien
tagagcttccaccaaggtacaccgg

SEQ ID NO: 5016687 - DNA, 25 bp, Homo sapien
taccaaggccttcaatggaagctct

SEQ ID NO: 5016688 - DNA, 25 bp, Homo sapien
gccttcaatggaagctctgacagat

SEQ ID NO: 5016689 - DNA, 25 bp, Homo sapien
ttttaccaaggccttcaatggaagc

SEQ ID NO: 5016690 - DNA, 25 bp, Homo sapien
aaggccttcaatggaagctctgaca

SEQ ID NO: 5016691 - DNA, 25 bp, Homo sapien
tgtccaagttgggctcttcaagtat

SEQ ID NO: 5016692 - DNA, 25 bp, Homo sapien
ttataagagatacaggttacactgc

SEQ ID NO: 5016693 - DNA, 25 bp, Homo sapien
cagtattcacgcatgggattgtgaa

SEQ ID NO: 5016694 - DNA, 25 bp, Homo sapien
gactttaggcaagtaactaagcatt

SEQ ID NO: 5016695 - DNA, 25 bp, Homo sapien
cctggtatccagatgtagcatggtc

SEQ ID NO: 5016696 - DNA, 25 bp, Homo sapien
cttggttccggtcgctactgtgggt

SEQ ID NO: 5016697 - DNA, 25 bp, Homo sapien
gacttcatccaagagctcgtccagg

SEQ ID NO: 5016698 - DNA, 25 bp, Homo sapien
tgcaaaacttggactcgacttcatc

SEQ ID NO: 5016699 - DNA, 25 bp, Homo sapien
cataccccgtcttagaaggtcaggt

SEQ ID NO: 5016700 - DNA, 25 bp, Homo sapien
cccacgagggctcgcggcagagaac

SEQ ID NO: 5016701 - DNA, 25 bp, Homo sapien
gtgtctgtgtgactcgcgatgcttt

SEQ ID NO: 5016702 - DNA, 25 bp, Homo sapien
gacagagttcggagctgtctctgca

SEQ ID NO: 5016703 - DNA, 25 bp, Homo sapien
tccaatcgccaaggctccggtggtt

SEQ ID NO: 5016704 - DNA, 25 bp, Homo sapien
cgggcccacgttgtaaccacaagca

SEQ ID NO: 5016705 - DNA, 25 bp, Homo sapien
cacgttgtaaccacaagcacgcatt

SEQ ID NO: 5016706 - DNA, 25 bp, Homo sapien
ttgtaaccacaagcacgcattctcg

SEQ ID NO: 5016707 - DNA, 25 bp, Homo sapien
gtctggcgtggttcctcccgtctcc

SEQ ID NO: 5016708 - DNA, 25 bp, Homo sapien
atggatttctagtccatcgccttaa

SEQ ID NO: 5016709 - DNA, 25 bp, Homo sapien
cccaatggatttctagtccatcgcc

SEQ ID NO: 5016710 - DNA, 25 bp, Homo sapien
agaccccaatggatttctagtccat

SEQ ID NO: 5016711 - DNA, 25 bp, Homo sapien
ccgtagtcggcaggattcgaacctg

SEQ ID NO: 5016712 - DNA, 25 bp, Homo sapien
tgaggaatgacaactgagcaagtgc

SEQ ID NO: 5016713 - DNA, 25 bp, Homo sapien
tgagggatgaacctccacaccaagc

SEQ ID NO: 5016714 - DNA, 25 bp, Homo sapien
ggaatgacaactgagcaagtgcaat

SEQ ID NO: 5016715 - DNA, 25 bp, Homo sapien
ctagtagttggctgagggatgaacc

SEQ ID NO: 5016716 - DNA, 25 bp, Homo sapien
ccatgctcttagatgtacctccact

SEQ ID NO: 5016717 - DNA, 25 bp, Homo sapien
ggtcccagtgcctgtatcttttcaa

SEQ ID NO: 5016718 - DNA, 25 bp, Homo sapien
tcttttcaaacactggccccatgct

SEQ ID NO: 5016719 - DNA, 25 bp, Homo sapien
tcattgggtttgctccacaggtccc

SEQ ID NO: 5016720 - DNA, 25 bp, Homo sapien
ccagaatttgccataggtttttacg

SEQ ID NO: 5016721 - DNA, 25 bp, Homo sapien
ttacgtgtgcctctggtgtgggatc

SEQ ID NO: 5016722 - DNA, 25 bp, Homo sapien
taggtttttacgtgtgcctctggtg

SEQ ID NO: 5016723 - DNA, 25 bp, Homo sapien
tccagaatttgccataggtttttac

SEQ ID NO: 5016724 - DNA, 25 bp, Homo sapien
acagcggtcgcagaatcagacacct

SEQ ID NO: 5016725 - DNA, 25 bp, Homo sapien
agcggtcgcagaatcagacaccttc

SEQ ID NO: 5016726 - DNA, 25 bp, Homo sapien
tgacagcggtcgcagaatcagacac

SEQ ID NO: 5016727 - DNA, 25 bp, Homo sapien
cagcggtcgcagaatcagacacctt

SEQ ID NO: 5016728 - DNA, 25 bp, Homo sapien
ctgcacatcgagcagctggccacat

SEQ ID NO: 5016729 - DNA, 25 bp, Homo sapien
ctgctgcacatcgagcagctggcca

SEQ ID NO: 5016730 - DNA, 25 bp, Homo sapien
tgctgcacatcgagcagctggccac

SEQ ID NO: 5016731 - DNA, 25 bp, Homo sapien
gctgcacatcgagcagctggccaca

SEQ ID NO: 5016732 - DNA, 25 bp, Homo sapien
cctctcctccttgcatctttgctgg

SEQ ID NO: 5016733 - DNA, 25 bp, Homo sapien
tctcctccttgcatctttgctggct

SEQ ID NO: 5016734 - DNA, 25 bp, Homo sapien
tgcatctttgctggctctcatggca

SEQ ID NO: 5016735 - DNA, 25 bp, Homo sapien
ccttgcatctttgctggctctcatg

SEQ ID NO: 5016736 - DNA, 25 bp, Homo sapien
ttccacagtctgaggcacatacaca

SEQ ID NO: 5016737 - DNA, 25 bp, Homo sapien
gcttctaaagctgtggcactcccca

SEQ ID NO: 5016738 - DNA, 25 bp, Homo sapien
tctgcttctaaagctgtggcactcc

SEQ ID NO: 5016739 - DNA, 25 bp, Homo sapien
ttttattgcttgttccacagtctga

SEQ ID NO: 5016740 - DNA, 25 bp, Homo sapien
tgaatctgcctgctgttccagacat

SEQ ID NO: 5016741 - DNA, 25 bp, Homo sapien
cttaaaggttttgaatctgcctgct

SEQ ID NO: 5016742 - DNA, 25 bp, Homo sapien
aaggttttgaatctgcctgctgttc

SEQ ID NO: 5016743 - DNA, 25 bp, Homo sapien
taaaggttttgaatctgcctgctgt

SEQ ID NO: 5016744 - DNA, 25 bp, Homo sapien
taggagtttaccagtccctggagct

SEQ ID NO: 5016745 - DNA, 25 bp, Homo sapien
atctacgaaagggtttttcagcagc

SEQ ID NO: 5016746 - DNA, 25 bp, Homo sapien
tcactgggctgcatctttacctgaa

SEQ ID NO: 5016747 - DNA, 25 bp, Homo sapien
gagtcagttttgatctacgaaaggg

SEQ ID NO: 5016748 - DNA, 25 bp, Homo sapien
ggctgcatctttacctgaaggctgt

SEQ ID NO: 5016749 - DNA, 25 bp, Homo sapien
cagcagtgctctggtatccgtgagg

SEQ ID NO: 5016750 - DNA, 25 bp, Homo sapien
gacatttgcagtagtttggtacaga

SEQ ID NO: 5016751 - DNA, 25 bp, Homo sapien
tattgccaagcaagatagaggagat

SEQ ID NO: 5016752 - DNA, 25 bp, Homo sapien
tacagattgccctgactgcagcagc

SEQ ID NO: 5016753 - DNA, 25 bp, Homo sapien
gccccattctcttggtgccaaatga

SEQ ID NO: 5016754 - DNA, 25 bp, Homo sapien
actgagctgcatctagtcccaagtg

SEQ ID NO: 5016755 - DNA, 25 bp, Homo sapien
tgcatctagtcccaagtgcccatag

SEQ ID NO: 5016756 - DNA, 25 bp, Homo sapien
tgagctgcatctagtcccaagtgcc

SEQ ID NO: 5016757 - DNA, 25 bp, Homo sapien
ttgtcactcttaaacagggccttaa

SEQ ID NO: 5016758 - DNA, 25 bp, Homo sapien
taaacagggccttaagggccacaga

SEQ ID NO: 5016759 - DNA, 25 bp, Homo sapien
tgtcactcttaaacagggccttaag

SEQ ID NO: 5016760 - DNA, 25 bp, Homo sapien
cttgtcactcttaaacagggcctta

SEQ ID NO: 5016761 - DNA, 25 bp, Homo sapien
tccatgtttcgtttgaaaatgagat

SEQ ID NO: 5016762 - DNA, 25 bp, Homo sapien
actttccatgtttcgtttgaaaatg

SEQ ID NO: 5016763 - DNA, 25 bp, Homo sapien
tttccatgtttcgtttgaaaatgag

SEQ ID NO: 5016764 - DNA, 25 bp, Homo sapien
ttccatgtttcgtttgaaaatgaga

SEQ ID NO: 5016765 - DNA, 25 bp, Homo sapien
ggtaagtaacttgtgccaagcaggt

SEQ ID NO: 5016766 - DNA, 25 bp, Homo sapien
tgaaatgccttccatccgctctggg

SEQ ID NO: 5016767 - DNA, 25 bp, Homo sapien
aagcaggtatccaagagccagctgg

SEQ ID NO: 5016768 - DNA, 25 bp, Homo sapien
gcctgggagagcaataaagagactt

SEQ ID NO: 5016769 - DNA, 25 bp, Homo sapien
ccacaatagtagtaagttggctggg

SEQ ID NO: 5016770 - DNA, 25 bp, Homo sapien
catcctggtatttactgtccaggta

SEQ ID NO: 5016771 - DNA, 25 bp, Homo sapien
ataacccacaatagtagtaagttgg

SEQ ID NO: 5016772 - DNA, 25 bp, Homo sapien
gtcatcctggtatttactgtccagg

SEQ ID NO: 5016773 - DNA, 25 bp, Homo sapien
ggtgaaccatagttggatttagcca

SEQ ID NO: 5016774 - DNA, 25 bp, Homo sapien
tagttggatttagccagggtccttc

SEQ ID NO: 5016775 - DNA, 25 bp, Homo sapien
gaggaaggtgaaccatagttggatt

SEQ ID NO: 5016776 - DNA, 25 bp, Homo sapien
ccatagttggatttagccagggtcc

SEQ ID NO: 5016777 - DNA, 25 bp, Homo sapien
ccgtggcgcagcaagtatcttggaa

SEQ ID NO: 5016778 - DNA, 25 bp, Homo sapien
agattgcgctttccaccttcttagg

SEQ ID NO: 5016779 - DNA, 25 bp, Homo sapien
gcaccggcttctacccaagtgggtc

SEQ ID NO: 5016780 - DNA, 25 bp, Homo sapien
tcttggaaaaccttgatgcccgtgc

SEQ ID NO: 5016781 - DNA, 25 bp, Homo sapien
ccagtattgtcacaattaggtagag

SEQ ID NO: 5016782 - DNA, 25 bp, Homo sapien
ctggcccgggctcatcttgctctgt

SEQ ID NO: 5016783 - DNA, 25 bp, Homo sapien
ggcccgggctcatcttgctctgtgc

SEQ ID NO: 5016784 - DNA, 25 bp, Homo sapien
ttctccaggtagtactcctggcccg

SEQ ID NO: 5016785 - DNA, 25 bp, Homo sapien
ccaggtagtactcctggcccgggct

SEQ ID NO: 5016786 - DNA, 25 bp, Homo sapien
gtcccaactagtgcatccagccagt

SEQ ID NO: 5016787 - DNA, 25 bp, Homo sapien
atgatttccccgctgtcaacattgg

SEQ ID NO: 5016788 - DNA, 25 bp, Homo sapien
ggctccatgagcaatgatttccccg

SEQ ID NO: 5016789 - DNA, 25 bp, Homo sapien
caggcctctcatagtcccaactagt

SEQ ID NO: 5016790 - DNA, 25 bp, Homo sapien
caagtgagtcctaactgccctgggt

SEQ ID NO: 5016791 - DNA, 25 bp, Homo sapien
tggatagagctgactttcccatatc

SEQ ID NO: 5016792 - DNA, 25 bp, Homo sapien
gatgctttagtgactgtggaggaaa

SEQ ID NO: 5016793 - DNA, 25 bp, Homo sapien
tgtccaaccaagtgagtcctaactg

SEQ ID NO: 5016794 - DNA, 25 bp, Homo sapien
atggtggtgcactggacaacatctg

SEQ ID NO: 5016795 - DNA, 25 bp, Homo sapien
atctgccgctgcagtggtagcccct

SEQ ID NO: 5016796 - DNA, 25 bp, Homo sapien
tggacaacatctgccgctgcagtgg

SEQ ID NO: 5016797 - DNA, 25 bp, Homo sapien
gatggtggtgcactggacaacatct

SEQ ID NO: 5016798 - DNA, 25 bp, Homo sapien
ccttcagtgtaacctgagaagtgtg

SEQ ID NO: 5016799 - DNA, 25 bp, Homo sapien
gctggacctgttccttggcgtgtgc

SEQ ID NO: 5016800 - DNA, 25 bp, Homo sapien
cgcaggcttcgtgtgaattgacaga

SEQ ID NO: 5016801 - DNA, 25 bp, Homo sapien
gatgtgatttgcttccctcagtacc

SEQ ID NO: 5016802 - DNA, 25 bp, Homo sapien
agtaccagaccgcaggcttcgtgtg

SEQ ID NO: 5016803 - DNA, 25 bp, Homo sapien
tttccataagctaatgaggcgctgg

SEQ ID NO: 5016804 - DNA, 25 bp, Homo sapien
acactgagacacatcgcctgctgct

SEQ ID NO: 5016805 - DNA, 25 bp, Homo sapien
caggcacactgagacacatcgcctg

SEQ ID NO: 5016806 - DNA, 25 bp, Homo sapien
taatgaggcgctggtgcaaggcctc

SEQ ID NO: 5016807 - DNA, 25 bp, Homo sapien
gactgcagacctgaatgctggaaat

SEQ ID NO: 5016808 - DNA, 25 bp, Homo sapien
tgaatgctggaaatcgcttcattct

SEQ ID NO: 5016809 - DNA, 25 bp, Homo sapien
ctggaaatcgcttcattctgctgct

SEQ ID NO: 5016810 - DNA, 25 bp, Homo sapien
gagactgcagacctgaatgctggaa

SEQ ID NO: 5016811 - DNA, 25 bp, Homo sapien
tacaaccctcttagtggcctctttc

SEQ ID NO: 5016812 - DNA, 25 bp, Homo sapien
gaatacaaccctcttagtggcctct

SEQ ID NO: 5016813 - DNA, 25 bp, Homo sapien
agcctgaatacaaccctcttagtgg

SEQ ID NO: 5016814 - DNA, 25 bp, Homo sapien
cagcagcctgaatacaaccctctta

SEQ ID NO: 5016815 - DNA, 25 bp, Homo sapien
gcagaagagctcaaaggcccaaggc

SEQ ID NO: 5016816 - DNA, 25 bp, Homo sapien
cagaagagctcaaaggcccaaggct

SEQ ID NO: 5016817 - DNA, 25 bp, Homo sapien
aaaataataaagaccatggtggtgg

SEQ ID NO: 5016818 - DNA, 25 bp, Homo sapien
aaggcccaaggcttacagctcctga

SEQ ID NO: 5016819 - DNA, 25 bp, Homo sapien
caggcctatctgagtgcgtctccac

SEQ ID NO: 5016820 - DNA, 25 bp, Homo sapien
gagtgggatgaagtaccactccata

SEQ ID NO: 5016821 - DNA, 25 bp, Homo sapien
ctccatagggatgtaccccagtttc

SEQ ID NO: 5016822 - DNA, 25 bp, Homo sapien
ctgtgtggctgttgcaccctgagtg

SEQ ID NO: 5016823 - DNA, 25 bp, Homo sapien
gaaaacctctagatggggtcagtac

SEQ ID NO: 5016824 - DNA, 25 bp, Homo sapien
cttccagcctgatggtagttgccct

SEQ ID NO: 5016825 - DNA, 25 bp, Homo sapien
gggtcagtacccttgtatgatctct

SEQ ID NO: 5016826 - DNA, 25 bp, Homo sapien
cacccttgaccttgtgttagaaagg

SEQ ID NO: 5016827 - DNA, 25 bp, Homo sapien
ttccctgagagcctgcagaagactc

SEQ ID NO: 5016828 - DNA, 25 bp, Homo sapien
tgagagcctgcagaagactctgtcc

SEQ ID NO: 5016829 - DNA, 25 bp, Homo sapien
gagcctgcagaagactctgtcccac

SEQ ID NO: 5016830 - DNA, 25 bp, Homo sapien
cctgagagcctgcagaagactctgt

SEQ ID NO: 5016831 - DNA, 25 bp, Homo sapien
tttattgccgcacagctacatgcca

SEQ ID NO: 5016832 - DNA, 25 bp, Homo sapien
atgccaggccccgataaggagcgtc

SEQ ID NO: 5016833 - DNA, 25 bp, Homo sapien
cagcaggtggtctagttctggatcc

SEQ ID NO: 5016834 - DNA, 25 bp, Homo sapien
tggatcctgaccctttattgccgca

SEQ ID NO: 5016835 - DNA, 25 bp, Homo sapien
gttggcacttatttagctggttggg

SEQ ID NO: 5016836 - DNA, 25 bp, Homo sapien
tcttcttgttggcacttatttagct

SEQ ID NO: 5016837 - DNA, 25 bp, Homo sapien
ttcttgttggcacttatttagctgg

SEQ ID NO: 5016838 - DNA, 25 bp, Homo sapien
cttgttggcacttatttagctggtt

SEQ ID NO: 5016839 - DNA, 25 bp, Homo sapien
tgcatgtatcacttcagatatgtgg

SEQ ID NO: 5016840 - DNA, 25 bp, Homo sapien
catgtatcacttcagatatgtggcc

SEQ ID NO: 5016841 - DNA, 25 bp, Homo sapien
gtatcacttcagatatgtggcctgc

SEQ ID NO: 5016842 - DNA, 25 bp, Homo sapien
cacttcagatatgtggcctgctatt

SEQ ID NO: 5016843 - DNA, 25 bp, Homo sapien
ccaggctctaagaggattgggcttg

SEQ ID NO: 5016844 - DNA, 25 bp, Homo sapien
gtatcaccttggctcattaaaattg

SEQ ID NO: 5016845 - DNA, 25 bp, Homo sapien
aaattgatatatgagcttgtccagg

SEQ ID NO: 5016846 - DNA, 25 bp, Homo sapien
aagtagccagtatcaccttggctca

SEQ ID NO: 5016847 - DNA, 25 bp, Homo sapien
cagagagtcttgaggaaaggtcaga

SEQ ID NO: 5016848 - DNA, 25 bp, Homo sapien
gagagtgtagggctattgtgttcca

SEQ ID NO: 5016849 - DNA, 25 bp, Homo sapien
gtatctgagagtgtagggctattgt

SEQ ID NO: 5016850 - DNA, 25 bp, Homo sapien
tgtagggctattgtgttccattccc

SEQ ID NO: 5016851 - DNA, 25 bp, Homo sapien
tccatcctggccgatggccgattgg

SEQ ID NO: 5016852 - DNA, 25 bp, Homo sapien
gaagttaagcaggagacatgttttt

SEQ ID NO: 5016853 - DNA, 25 bp, Homo sapien
tacttgacatgaaagctggttgaag

SEQ ID NO: 5016854 - DNA, 25 bp, Homo sapien
ggccgattggaccagccaacaagtt

SEQ ID NO: 5016855 - DNA, 25 bp, Homo sapien
caggcgtccactcggaaagggcttt

SEQ ID NO: 5016856 - DNA, 25 bp, Homo sapien
gcttttgcaggagaacctacgacat

SEQ ID NO: 5016857 - DNA, 25 bp, Homo sapien
tacgacatcatgtgattttctggtc

SEQ ID NO: 5016858 - DNA, 25 bp, Homo sapien
catttgccaggcgtccactcggaaa

SEQ ID NO: 5016859 - DNA, 25 bp, Homo sapien
gaatcttgaggggatctgatccaat

SEQ ID NO: 5016860 - DNA, 25 bp, Homo sapien
gatccaatctctccatggctgtttt

SEQ ID NO: 5016861 - DNA, 25 bp, Homo sapien
cttgaggggatctgatccaatctct

SEQ ID NO: 5016862 - DNA, 25 bp, Homo sapien
ctgatccaatctctccatggctgtt

SEQ ID NO: 5016863 - DNA, 25 bp, Homo sapien
ggtaggtcagcctgcaaggtgaact

SEQ ID NO: 5016864 - DNA, 25 bp, Homo sapien
ttctatagaagcaaggtggaggtag

SEQ ID NO: 5016865 - DNA, 25 bp, Homo sapien
gtggaggtaggtcagcctgcaaggt

SEQ ID NO: 5016866 - DNA, 25 bp, Homo sapien
cttctatagaagcaaggtggaggta

SEQ ID NO: 5016867 - DNA, 25 bp, Homo sapien
ggatacaattactcatctggtttaa

SEQ ID NO: 5016868 - DNA, 25 bp, Homo sapien
ggagctctggttctcattaacttgg

SEQ ID NO: 5016869 - DNA, 25 bp, Homo sapien
ttccagaatgtactccgaagctagg

SEQ ID NO: 5016870 - DNA, 25 bp, Homo sapien
gctgaagcttttgatgatatgttgg

SEQ ID NO: 5016871 - DNA, 25 bp, Homo sapien
cctcgctccatccgtgacttttttg

SEQ ID NO: 5016872 - DNA, 25 bp, Homo sapien
tttgaaagggagctgaatggtttaa

SEQ ID NO: 5016873 - DNA, 25 bp, Homo sapien
ctggggaccgcaggcctgcggcgtc

SEQ ID NO: 5016874 - DNA, 25 bp, Homo sapien
gagctgaatggtttaatgtgatgtt

SEQ ID NO: 5016875 - DNA, 25 bp, Homo sapien
aaacacttgcaaaaatcctctggta

SEQ ID NO: 5016876 - DNA, 25 bp, Homo sapien
cttgcaaaaatcctctggtatccat

SEQ ID NO: 5016877 - DNA, 25 bp, Homo sapien
ttcaaacacttgcaaaaatcctctg

SEQ ID NO: 5016878 - DNA, 25 bp, Homo sapien
caggaatgacagtacttgggggtct

SEQ ID NO: 5016879 - DNA, 25 bp, Homo sapien
ccagacctcgtgagaaaacccagag

SEQ ID NO: 5016880 - DNA, 25 bp, Homo sapien
tactgatgatgtgtccagctgtggg

SEQ ID NO: 5016881 - DNA, 25 bp, Homo sapien
ttctgattggctcctactgatgatg

SEQ ID NO: 5016882 - DNA, 25 bp, Homo sapien
ctccagacctcgtgagaaaacccag

SEQ ID NO: 5016883 - DNA, 25 bp, Homo sapien
gagttataatatgtggaccacttaa

SEQ ID NO: 5016884 - DNA, 25 bp, Homo sapien
cagtttgcttttgagtattctgaga

SEQ ID NO: 5016885 - DNA, 25 bp, Homo sapien
ttctgagagttataatatgtggacc

SEQ ID NO: 5016886 - DNA, 25 bp, Homo sapien
aaatgtcttccataagtttcactca

SEQ ID NO: 5016887 - DNA, 25 bp, Homo sapien
tgaaatgatttgtgcttgcaggcaa

SEQ ID NO: 5016888 - DNA, 25 bp, Homo sapien
gagatgtgacgtgaaatgaaatgat

SEQ ID NO: 5016889 - DNA, 25 bp, Homo sapien
gcaggcaaacagcagtctcctcagt

SEQ ID NO: 5016890 - DNA, 25 bp, Homo sapien
gtctcctcagttatcagaaaagcag

SEQ ID NO: 5016891 - DNA, 25 bp, Homo sapien
agcaacagaggggccctcagtgggc

SEQ ID NO: 5016892 - DNA, 25 bp, Homo sapien
tgtttgccctggtgtggggcattca

SEQ ID NO: 5016893 - DNA, 25 bp, Homo sapien
gcaacagaggggccctcagtgggca

SEQ ID NO: 5016894 - DNA, 25 bp, Homo sapien
ctcagtgggcagctgtttgccctgg

SEQ ID NO: 5016895 - DNA, 25 bp, Homo sapien
gagggctgtgatgggagtcccaccc

SEQ ID NO: 5016896 - DNA, 25 bp, Homo sapien
ggctgtgatgggagtcccaccccat

SEQ ID NO: 5016897 - DNA, 25 bp, Homo sapien
agaagagggctgtgatgggagtccc

SEQ ID NO: 5016898 - DNA, 25 bp, Homo sapien
gagaagagggctgtgatgggagtcc

SEQ ID NO: 5016899 - DNA, 25 bp, Homo sapien
tcccacaataccaatatggattcag

SEQ ID NO: 5016900 - DNA, 25 bp, Homo sapien
tatggattcagatcaaggcttgttg

SEQ ID NO: 5016901 - DNA, 25 bp, Homo sapien
taccaatatggattcagatcaaggc

SEQ ID NO: 5016902 - DNA, 25 bp, Homo sapien
ctagggaatgttcccacaataccaa

SEQ ID NO: 5016903 - DNA, 25 bp, Homo sapien
tggtctcacagggtatctttctcct

SEQ ID NO: 5016904 - DNA, 25 bp, Homo sapien
tgtatgttgctctatcgatgattgc

SEQ ID NO: 5016905 - DNA, 25 bp, Homo sapien
ctcctgctcgtagtgtatgttgctc

SEQ ID NO: 5016906 - DNA, 25 bp, Homo sapien
cttcttatgtgaaattggtgggctg

SEQ ID NO: 5016907 - DNA, 25 bp, Homo sapien
gaacaacatatcaggtttggccagc

SEQ ID NO: 5016908 - DNA, 25 bp, Homo sapien
ggtgtgatccacaagtccatggacc

SEQ ID NO: 5016909 - DNA, 25 bp, Homo sapien
atgtgattgacatcgtccagcacct

SEQ ID NO: 5016910 - DNA, 25 bp, Homo sapien
gcacctgagactgaaagacttggag

SEQ ID NO: 5016911 - DNA, 25 bp, Homo sapien
gattgaatagaacaacgtacagctc

SEQ ID NO: 5016912 - DNA, 25 bp, Homo sapien
gaacaacgtacagctcagcagatat

SEQ ID NO: 5016913 - DNA, 25 bp, Homo sapien
tcactaaggattgaatagaacaacg

SEQ ID NO: 5016914 - DNA, 25 bp, Homo sapien
ctggagataggatgatcactaagga

SEQ ID NO: 5016915 - DNA, 25 bp, Homo sapien
ttacaagtaatcttgtctgttgtgc

SEQ ID NO: 5016916 - DNA, 25 bp, Homo sapien
caagtaatcttgtctgttgtgcttc

SEQ ID NO: 5016917 - DNA, 25 bp, Homo sapien
ttgactgtgcttggggacatcatgg

SEQ ID NO: 5016918 - DNA, 25 bp, Homo sapien
tccttttccactccctgggtatcca

SEQ ID NO: 5016919 - DNA, 25 bp, Homo sapien
gcatcagcatgaggtactttgagtt

SEQ ID NO: 5016920 - DNA, 25 bp, Homo sapien
aaagatgattcagcatcagcatgag

SEQ ID NO: 5016921 - DNA, 25 bp, Homo sapien
gaacatctaaagatgattcagcatc

SEQ ID NO: 5016922 - DNA, 25 bp, Homo sapien
tcagggtcgtactccaagaacatct

SEQ ID NO: 5016923 - DNA, 25 bp, Homo sapien
caaaaaggtggaaatgaatcacttc

SEQ ID NO: 5016924 - DNA, 25 bp, Homo sapien
ttcatgtaaataaaacttcaatagt

SEQ ID NO: 5016925 - DNA, 25 bp, Homo sapien
gacaaaaaggtggaaatgaatcact

SEQ ID NO: 5016926 - DNA, 25 bp, Homo sapien
gtggaaatgaatcacttcatgtaaa

SEQ ID NO: 5016927 - DNA, 25 bp, Homo sapien
gcagcagtcaattctaggcttgtcc

SEQ ID NO: 5016928 - DNA, 25 bp, Homo sapien
cttgagggtctaccaagagctgcct

SEQ ID NO: 5016929 - DNA, 25 bp, Homo sapien
aattctaggcttgtcctctacttga

SEQ ID NO: 5016930 - DNA, 25 bp, Homo sapien
tgccaaccaatattgcaaatgcagc

SEQ ID NO: 5016931 - DNA, 25 bp, Homo sapien
cagacatggggaaaagctgcctttc

SEQ ID NO: 5016932 - DNA, 25 bp, Homo sapien
agatacatcatgattaatgatgggc

SEQ ID NO: 5016933 - DNA, 25 bp, Homo sapien
gatacatcatgattaatgatgggct

SEQ ID NO: 5016934 - DNA, 25 bp, Homo sapien
ctcttcagatacatcatgattaatg

SEQ ID NO: 5016935 - DNA, 25 bp, Homo sapien
tcttcagatacatcatgattaatga

SEQ ID NO: 5016936 - DNA, 25 bp, Homo sapien
agcattgtacttttttctctatgaa

SEQ ID NO: 5016937 - DNA, 25 bp, Homo sapien
cagcattgtacttttttctctatga

SEQ ID NO: 5016938 - DNA, 25 bp, Homo sapien
ccagcattgtacttttttctctatg

SEQ ID NO: 5016939 - DNA, 25 bp, Homo sapien
caagccttgggctgtactacctaag

SEQ ID NO: 5016940 - DNA, 25 bp, Homo sapien
cacctactgctgatgtcagccattt

SEQ ID NO: 5016941 - DNA, 25 bp, Homo sapien
tacctaagtctgcatcacctactgc

SEQ ID NO: 5016942 - DNA, 25 bp, Homo sapien
tggaattcgtcccttcaagccttgg

SEQ ID NO: 5016943 - DNA, 25 bp, Homo sapien
caactgtctggcaacaagatggcac

SEQ ID NO: 5016944 - DNA, 25 bp, Homo sapien
gattggacctggatctgacatggcc

SEQ ID NO: 5016945 - DNA, 25 bp, Homo sapien
gaaggtctcgaagccacaactgtct

SEQ ID NO: 5016946 - DNA, 25 bp, Homo sapien
tctgcagtggatgatggattggacc

SEQ ID NO: 5016947 - DNA, 25 bp, Homo sapien
taagggctgcatataaggtcacatt

SEQ ID NO: 5016948 - DNA, 25 bp, Homo sapien
tgggctaccacagataagggctgca

SEQ ID NO: 5016949 - DNA, 25 bp, Homo sapien
agaataccgggcagatgggctacca

SEQ ID NO: 5016950 - DNA, 25 bp, Homo sapien
tctctaagatacagggacaccatag

SEQ ID NO: 5016951 - DNA, 25 bp, Homo sapien
tgtgtgttaaatgaccagctggctc

SEQ ID NO: 5016952 - DNA, 25 bp, Homo sapien
gtgcctttgccataacattcttgag

SEQ ID NO: 5016953 - DNA, 25 bp, Homo sapien
gatcgtattgtggttctccctggaa

SEQ ID NO: 5016954 - DNA, 25 bp, Homo sapien
ttctggtatgggaacattgtctgtg

SEQ ID NO: 5016955 - DNA, 25 bp, Homo sapien
ctgttttcaacgttgtctttattct

SEQ ID NO: 5016956 - DNA, 25 bp, Homo sapien
cctggactgttttcaacgttgtctt

SEQ ID NO: 5016957 - DNA, 25 bp, Homo sapien
tggactgttttcaacgttgtcttta

SEQ ID NO: 5016958 - DNA, 25 bp, Homo sapien
gttttcaacgttgtctttattctca

SEQ ID NO: 5016959 - DNA, 25 bp, Homo sapien
gcatgtaaacgtttgtactctgagt

SEQ ID NO: 5016960 - DNA, 25 bp, Homo sapien
tcccagatactcatagcacctgagt

SEQ ID NO: 5016961 - DNA, 25 bp, Homo sapien
cacctgagtgcatgtaaacgtttgt

SEQ ID NO: 5016962 - DNA, 25 bp, Homo sapien
aaggccagcgtttcaacatgaaacc

SEQ ID NO: 5016963 - DNA, 25 bp, Homo sapien
caactgtagtgaggctgtgttcttc

SEQ ID NO: 5016964 - DNA, 25 bp, Homo sapien
tctgatgagcgccaactgtagtgag

SEQ ID NO: 5016965 - DNA, 25 bp, Homo sapien
tgagcgccaactgtagtgaggctgt

SEQ ID NO: 5016966 - DNA, 25 bp, Homo sapien
aagttcctaatctgatgagcgccaa

SEQ ID NO: 5016967 - DNA, 25 bp, Homo sapien
taatccttcgtagacttatttcatc

SEQ ID NO: 5016968 - DNA, 25 bp, Homo sapien
ttataaattatgtagacaggcttgg

SEQ ID NO: 5016969 - DNA, 25 bp, Homo sapien
gccgttgtcttcctaatccttcgta

SEQ ID NO: 5016970 - DNA, 25 bp, Homo sapien
caggcttggacagccgttgtcttcc

SEQ ID NO: 5016971 - DNA, 25 bp, Homo sapien
ggctatagttatgtcccactctgtt

SEQ ID NO: 5016972 - DNA, 25 bp, Homo sapien
acagtcttctgatggctatagttat

SEQ ID NO: 5016973 - DNA, 25 bp, Homo sapien
tctgatggctatagttatgtcccac

SEQ ID NO: 5016974 - DNA, 25 bp, Homo sapien
tcttctgatggctatagttatgtcc

SEQ ID NO: 5016975 - DNA, 25 bp, Homo sapien
caatagctgtgtgcaaggtctgagc

SEQ ID NO: 5016976 - DNA, 25 bp, Homo sapien
tcacaaagtagagatgcaatagctg

SEQ ID NO: 5016977 - DNA, 25 bp, Homo sapien
tctgagctcaagaaaacccgtaaat

SEQ ID NO: 5016978 - DNA, 25 bp, Homo sapien
cgtacaaaactctcaaagagggaag

SEQ ID NO: 5016979 - DNA, 25 bp, Homo sapien
cagtctctgaacagtagctctacca

SEQ ID NO: 5016980 - DNA, 25 bp, Homo sapien
tctctgaacagtagctctaccactg

SEQ ID NO: 5016981 - DNA, 25 bp, Homo sapien
agtctctgaacagtagctctaccac

SEQ ID NO: 5016982 - DNA, 25 bp, Homo sapien
ctctgaacagtagctctaccactgc

SEQ ID NO: 5016983 - DNA, 25 bp, Homo sapien
ctattgactgggaagtatacacccc

SEQ ID NO: 5016984 - DNA, 25 bp, Homo sapien
tctgaagtagtgaagaacctcattc

SEQ ID NO: 5016985 - DNA, 25 bp, Homo sapien
caattttcctattgactgggaagta

SEQ ID NO: 5016986 - DNA, 25 bp, Homo sapien
tggctgccctgagttcaatttgtgt

SEQ ID NO: 5016987 - DNA, 25 bp, Homo sapien
aagttccacaaagtactggcaggtc

SEQ ID NO: 5016988 - DNA, 25 bp, Homo sapien
gttccacaaagtactggcaggtcat

SEQ ID NO: 5016989 - DNA, 25 bp, Homo sapien
taagttccacaaagtactggcaggt

SEQ ID NO: 5016990 - DNA, 25 bp, Homo sapien
gtaagttccacaaagtactggcagg

SEQ ID NO: 5016991 - DNA, 25 bp, Homo sapien
tgttttggagaaactgaatattatg

SEQ ID NO: 5016992 - DNA, 25 bp, Homo sapien
aaccagagatgttttggagaaactg

SEQ ID NO: 5016993 - DNA, 25 bp, Homo sapien
actttcggtaaccagagatgttttg

SEQ ID NO: 5016994 - DNA, 25 bp, Homo sapien
cggtaaccagagatgttttggagaa

SEQ ID NO: 5016995 - DNA, 25 bp, Homo sapien
ccaactgcccgtgtgaccttgtctc

SEQ ID NO: 5016996 - DNA, 25 bp, Homo sapien
tgcccgtgtgaccttgtctcatcat

SEQ ID NO: 5016997 - DNA, 25 bp, Homo sapien
actgcccgtgtgaccttgtctcatc

SEQ ID NO: 5016998 - DNA, 25 bp, Homo sapien
caactgcccgtgtgaccttgtctca

SEQ ID NO: 5016999 - DNA, 25 bp, Homo sapien
tactggaaggtcttagctgcaaaca

SEQ ID NO: 5017000 - DNA, 25 bp, Homo sapien
tgaaaagcccagagtagtcagcgca

SEQ ID NO: 5017001 - DNA, 25 bp, Homo sapien
gaggtccaagcaggtaaatctgcag

SEQ ID NO: 5017002 - DNA, 25 bp, Homo sapien
tgcagcagcagagacatagtacaac

SEQ ID NO: 5017003 - DNA, 25 bp, Homo sapien
caaactttctaatcagaaacgagtc

SEQ ID NO: 5017004 - DNA, 25 bp, Homo sapien
aatgtagccacttgtgttactgttg

SEQ ID NO: 5017005 - DNA, 25 bp, Homo sapien
tcttgaacttaatccagaatcagga

SEQ ID NO: 5017006 - DNA, 25 bp, Homo sapien
tcagaaacgagtccagttgtatttg

SEQ ID NO: 5017007 - DNA, 25 bp, Homo sapien
caactcttcttgtggtctagctgag

SEQ ID NO: 5017008 - DNA, 25 bp, Homo sapien
tacacctgcgagattgtgggatgca

SEQ ID NO: 5017009 - DNA, 25 bp, Homo sapien
gctgagttaaagctccagtccaagt

SEQ ID NO: 5017010 - DNA, 25 bp, Homo sapien
tactgtttgggagacaaccccatct

SEQ ID NO: 5017011 - DNA, 25 bp, Homo sapien
cagttcttcacagctatcttcttcc

SEQ ID NO: 5017012 - DNA, 25 bp, Homo sapien
ttaactagtttttctgctcagttct

SEQ ID NO: 5017013 - DNA, 25 bp, Homo sapien
tcttcacagctatcttcttcctttc

SEQ ID NO: 5017014 - DNA, 25 bp, Homo sapien
ctcagttcttcacagctatcttctt

SEQ ID NO: 5017015 - DNA, 25 bp, Homo sapien
cctttgttggtggactgtgcacagg

SEQ ID NO: 5017016 - DNA, 25 bp, Homo sapien
ggtggactgtgcacaggttcattaa

SEQ ID NO: 5017017 - DNA, 25 bp, Homo sapien
gactgtgcacaggttcattaaacca

SEQ ID NO: 5017018 - DNA, 25 bp, Homo sapien
tgttggtggactgtgcacaggttca

SEQ ID NO: 5017019 - DNA, 25 bp, Homo sapien
agagcagtctctcctaggctgaaca

SEQ ID NO: 5017020 - DNA, 25 bp, Homo sapien
ttggtgctcccagagcagtctctcc

SEQ ID NO: 5017021 - DNA, 25 bp, Homo sapien
gctactttcggttgaaactggagag

SEQ ID NO: 5017022 - DNA, 25 bp, Homo sapien
tccagagccatgtgctactttcggt

SEQ ID NO: 5017023 - DNA, 25 bp, Homo sapien
ggcatctgcactggatagatatttc

SEQ ID NO: 5017024 - DNA, 25 bp, Homo sapien
tacagctgagtcatacttttcaaga

SEQ ID NO: 5017025 - DNA, 25 bp, Homo sapien
aatgtgggtgtcacagtcagtgatc

SEQ ID NO: 5017026 - DNA, 25 bp, Homo sapien
tgtatgtgcacgacttacagctgag

SEQ ID NO: 5017027 - DNA, 25 bp, Homo sapien
ccctctgggcaggcagtaagatcca

SEQ ID NO: 5017028 - DNA, 25 bp, Homo sapien
tcatccatagaagtgatggccagga

SEQ ID NO: 5017029 - DNA, 25 bp, Homo sapien
ccatagaagtgatggccaggaacag

SEQ ID NO: 5017030 - DNA, 25 bp, Homo sapien
ggctcatccatagaagtgatggcca

SEQ ID NO: 5017031 - DNA, 25 bp, Homo sapien
catccatagaagtgatggccaggaa

SEQ ID NO: 5017032 - DNA, 25 bp, Homo sapien
gaggactaacttttgcatagttgca

SEQ ID NO: 5017033 - DNA, 25 bp, Homo sapien
tctctgggaatgtgatttggacagg

SEQ ID NO: 5017034 - DNA, 25 bp, Homo sapien
cagggaagcagttttgaagagtttg

SEQ ID NO: 5017035 - DNA, 25 bp, Homo sapien
ctactctgagacaaagccgtgagga

SEQ ID NO: 5017036 - DNA, 25 bp, Homo sapien
ttcccagagagtggcctgaaaggct

SEQ ID NO: 5017037 - DNA, 25 bp, Homo sapien
cctgaaaggctttgagtgccagtac

SEQ ID NO: 5017038 - DNA, 25 bp, Homo sapien
tgggattcccagagagtggcctgaa

SEQ ID NO: 5017039 - DNA, 25 bp, Homo sapien
ggattcccagagagtggcctgaaag

SEQ ID NO: 5017040 - DNA, 25 bp, Homo sapien
caaaagccttaattccagtgtccca

SEQ ID NO: 5017041 - DNA, 25 bp, Homo sapien
gaaccatcaccgtactctccttggg

SEQ ID NO: 5017042 - DNA, 25 bp, Homo sapien
tgaatctacatcctaacaatctcct

SEQ ID NO: 5017043 - DNA, 25 bp, Homo sapien
ttctcccatggtatctagcatcaag

SEQ ID NO: 5017044 - DNA, 25 bp, Homo sapien
gaatcttgaacttgatttagaatag

SEQ ID NO: 5017045 - DNA, 25 bp, Homo sapien
gcctaccaccccgtaccacacacag

SEQ ID NO: 5017046 - DNA, 25 bp, Homo sapien
cagaatcttgaacttgatttagaat

SEQ ID NO: 5017047 - DNA, 25 bp, Homo sapien
cttgaacttgatttagaatagagcc

SEQ ID NO: 5017048 - DNA, 25 bp, Homo sapien
ttcagttgcaggataatgaataagg

SEQ ID NO: 5017049 - DNA, 25 bp, Homo sapien
tcagttgcaggataatgaataaggc

SEQ ID NO: 5017050 - DNA, 25 bp, Homo sapien
cttcagttgcaggataatgaataag

SEQ ID NO: 5017051 - DNA, 25 bp, Homo sapien
gaattagggcagcaggggttacttg

SEQ ID NO: 5017052 - DNA, 25 bp, Homo sapien
agaattagggcagcaggggttactt

SEQ ID NO: 5017053 - DNA, 25 bp, Homo sapien
gcaggggttacttggggatcaagga

SEQ ID NO: 5017054 - DNA, 25 bp, Homo sapien
tagagtttacaggtgatgattccct

SEQ ID NO: 5017055 - DNA, 25 bp, Homo sapien
agagtttacaggtgatgattccctt

SEQ ID NO: 5017056 - DNA, 25 bp, Homo sapien
ttagagtttacaggtgatgattccc

SEQ ID NO: 5017057 - DNA, 25 bp, Homo sapien
tttagagtttacaggtgatgattcc

SEQ ID NO: 5017058 - DNA, 25 bp, Homo sapien
actgctatcatccaccatatctcag

SEQ ID NO: 5017059 - DNA, 25 bp, Homo sapien
agccaagaattcctgtcctgaagcc

SEQ ID NO: 5017060 - DNA, 25 bp, Homo sapien
gagccaagaattcctgtcctgaagc

SEQ ID NO: 5017061 - DNA, 25 bp, Homo sapien
ccaagggactgctatcatccaccat

SEQ ID NO: 5017062 - DNA, 25 bp, Homo sapien
tggaggaagtaccaaggcccacagc

SEQ ID NO: 5017063 - DNA, 25 bp, Homo sapien
gtggaggaagtaccaaggcccacag

SEQ ID NO: 5017064 - DNA, 25 bp, Homo sapien
ggtggaggaagtaccaaggcccaca

SEQ ID NO: 5017065 - DNA, 25 bp, Homo sapien
aaaacatcagcaaaggaggacatac

SEQ ID NO: 5017066 - DNA, 25 bp, Homo sapien
gggtgaggaaaacatcagcaaagga

SEQ ID NO: 5017067 - DNA, 25 bp, Homo sapien
ttagagctcatgtggggtgaggaaa

SEQ ID NO: 5017068 - DNA, 25 bp, Homo sapien
cctccagtggggtatgttagagctc

SEQ ID NO: 5017069 - DNA, 25 bp, Homo sapien
agtggcctggcgcactgtgtgggag

SEQ ID NO: 5017070 - DNA, 25 bp, Homo sapien
acagcagtgagtaaggcatctccac

SEQ ID NO: 5017071 - DNA, 25 bp, Homo sapien
gcacaggtgccagctacagcagtga

SEQ ID NO: 5017072 - DNA, 25 bp, Homo sapien
aggagcatcagtgcagggagacaca

SEQ ID NO: 5017073 - DNA, 25 bp, Homo sapien
gcacttgctgcttgaggtaatctac

SEQ ID NO: 5017074 - DNA, 25 bp, Homo sapien
ccatattgtatggtcttgggcttaa

SEQ ID NO: 5017075 - DNA, 25 bp, Homo sapien
taacatagcaataaagtgtttcata

SEQ ID NO: 5017076 - DNA, 25 bp, Homo sapien
taattcctcgaaagtcacctcaaat

SEQ ID NO: 5017077 - DNA, 25 bp, Homo sapien
gttattttctactgcggccttactc

SEQ ID NO: 5017078 - DNA, 25 bp, Homo sapien
gatttgctaaatctgagggtttaag

SEQ ID NO: 5017079 - DNA, 25 bp, Homo sapien
aaaagtattattcaatgataacagc

SEQ ID NO: 5017080 - DNA, 25 bp, Homo sapien
catctggttggccaggatttgctaa

SEQ ID NO: 5017081 - DNA, 25 bp, Homo sapien
ctggtgaatatctccaactcccttt

SEQ ID NO: 5017082 - DNA, 25 bp, Homo sapien
tctggtgaatatctccaactccctt

SEQ ID NO: 5017083 - DNA, 25 bp, Homo sapien
tggtgaatatctccaactccctttg

SEQ ID NO: 5017084 - DNA, 25 bp, Homo sapien
agggtttgagtggtataggagcaaa

SEQ ID NO: 5017085 - DNA, 25 bp, Homo sapien
gagggtttgagtggtataggagcaa

SEQ ID NO: 5017086 - DNA, 25 bp, Homo sapien
taaactggcccatcattgtagactg

SEQ ID NO: 5017087 - DNA, 25 bp, Homo sapien
tcaacagacgggtgggcaatgcaga

SEQ ID NO: 5017088 - DNA, 25 bp, Homo sapien
ttccacaagtacaaccaaatgacct

SEQ ID NO: 5017089 - DNA, 25 bp, Homo sapien
tagggaacagctcatagcaagaaga

SEQ ID NO: 5017090 - DNA, 25 bp, Homo sapien
tcttgccaaaatcactaatgatctg

SEQ ID NO: 5017091 - DNA, 25 bp, Homo sapien
ttgccaaaatcactaatgatctgta

SEQ ID NO: 5017092 - DNA, 25 bp, Homo sapien
cagacagctgcaagacattctccat

SEQ ID NO: 5017093 - DNA, 25 bp, Homo sapien
tctttagcattgtgcttccaacaaa

SEQ ID NO: 5017094 - DNA, 25 bp, Homo sapien
aagaatgaaggcaagcaaagaagtc

SEQ ID NO: 5017095 - DNA, 25 bp, Homo sapien
cagtgggcacctatgggctctaaga

SEQ ID NO: 5017096 - DNA, 25 bp, Homo sapien
tatgggctctaagaatgaaggcaag

SEQ ID NO: 5017097 - DNA, 25 bp, Homo sapien
tcagtgggcacctatgggctctaag

SEQ ID NO: 5017098 - DNA, 25 bp, Homo sapien
ccaattcatgaatctgctgaggatg

SEQ ID NO: 5017099 - DNA, 25 bp, Homo sapien
aaggacaacagctccaattcatgaa

SEQ ID NO: 5017100 - DNA, 25 bp, Homo sapien
catgaatctgctgaggatgattctc

SEQ ID NO: 5017101 - DNA, 25 bp, Homo sapien
caacagctccaattcatgaatctgc

SEQ ID NO: 5017102 - DNA, 25 bp, Homo sapien
cttttcataggagagcaatttacag

SEQ ID NO: 5017103 - DNA, 25 bp, Homo sapien
tcctgaatatggtgggtatgaggcc

SEQ ID NO: 5017104 - DNA, 25 bp, Homo sapien
cctactgtgattaacttgcctgtct

SEQ ID NO: 5017105 - DNA, 25 bp, Homo sapien
gggtcagattcataggtcctaaagg

SEQ ID NO: 5017106 - DNA, 25 bp, Homo sapien
tgattcttctatagcaacctccttc

SEQ ID NO: 5017107 - DNA, 25 bp, Homo sapien
gattcttctatagcaacctccttca

SEQ ID NO: 5017108 - DNA, 25 bp, Homo sapien
ctcaggttgagttcccaaaactctt

SEQ ID NO: 5017109 - DNA, 25 bp, Homo sapien
ttgactctatatcatgtttgccagt

SEQ ID NO: 5017110 - DNA, 25 bp, Homo sapien
gtcttgactctatatcatgtttgcc

SEQ ID NO: 5017111 - DNA, 25 bp, Homo sapien
tgactctatatcatgtttgccagtc

SEQ ID NO: 5017112 - DNA, 25 bp, Homo sapien
gggtcttgactctatatcatgtttg

SEQ ID NO: 5017113 - DNA, 25 bp, Homo sapien
aaaagtacaaattgtgggctgttga

SEQ ID NO: 5017114 - DNA, 25 bp, Homo sapien
tatttactttgagaccaaaagtaca

SEQ ID NO: 5017115 - DNA, 25 bp, Homo sapien
tttgagaccaaaagtacaaattgtg

SEQ ID NO: 5017116 - DNA, 25 bp, Homo sapien
tgggctgttgaatcagctggagttc

SEQ ID NO: 5017117 - DNA, 25 bp, Homo sapien
atgcaccggttaatccttgccaagg

SEQ ID NO: 5017118 - DNA, 25 bp, Homo sapien
cggttaatccttgccaagggctcta

SEQ ID NO: 5017119 - DNA, 25 bp, Homo sapien
caccggttaatccttgccaagggct

SEQ ID NO: 5017120 - DNA, 25 bp, Homo sapien
tgcaccggttaatccttgccaaggg

SEQ ID NO: 5017121 - DNA, 25 bp, Homo sapien
tgaaggaatcactctgagcaagcag

SEQ ID NO: 5017122 - DNA, 25 bp, Homo sapien
gctgtgaaggaatcactctgagcaa

SEQ ID NO: 5017123 - DNA, 25 bp, Homo sapien
gcagctgtgaaggaatcactctgag

SEQ ID NO: 5017124 - DNA, 25 bp, Homo sapien
aaggaatcactctgagcaagcagaa

SEQ ID NO: 5017125 - DNA, 25 bp, Homo sapien
tggagagaagcgctgtgggcccacc

SEQ ID NO: 5017126 - DNA, 25 bp, Homo sapien
gtggagagaagcgctgtgggcccac

SEQ ID NO: 5017127 - DNA, 25 bp, Homo sapien
gagagaagcgctgtgggcccacctc

SEQ ID NO: 5017128 - DNA, 25 bp, Homo sapien
ggagagaagcgctgtgggcccacct

SEQ ID NO: 5017129 - DNA, 25 bp, Homo sapien
tgaagaagtggactagctcctggtg

SEQ ID NO: 5017130 - DNA, 25 bp, Homo sapien
gctgaagaagtggactagctcctgg

SEQ ID NO: 5017131 - DNA, 25 bp, Homo sapien
agaagtggactagctcctggtggaa

SEQ ID NO: 5017132 - DNA, 25 bp, Homo sapien
cccagctgaagaagtggactagctc

SEQ ID NO: 5017133 - DNA, 25 bp, Homo sapien
cttcagactggaaatcaaccaacag

SEQ ID NO: 5017134 - DNA, 25 bp, Homo sapien
aatgttggtggctacgtggcctgat

SEQ ID NO: 5017135 - DNA, 25 bp, Homo sapien
taatctggaatgttggtggctacgt

SEQ ID NO: 5017136 - DNA, 25 bp, Homo sapien
ctggaaatcaaccaacagtaatctg

SEQ ID NO: 5017137 - DNA, 25 bp, Homo sapien
gcgggatggcttccggcctgttcat

SEQ ID NO: 5017138 - DNA, 25 bp, Homo sapien
ctggcgggatggcttccggcctgtt

SEQ ID NO: 5017139 - DNA, 25 bp, Homo sapien
catttgttttgtccggcttggagct

SEQ ID NO: 5017140 - DNA, 25 bp, Homo sapien
aagcgcatttgttttgtccggcttg

SEQ ID NO: 5017141 - DNA, 25 bp, Homo sapien
ggcctgatggagcattggaaaggaa

SEQ ID NO: 5017142 - DNA, 25 bp, Homo sapien
aatgtgcccatgagacgagtgcggg

SEQ ID NO: 5017143 - DNA, 25 bp, Homo sapien
cctgatggagcattggaaaggaatg

SEQ ID NO: 5017144 - DNA, 25 bp, Homo sapien
catgagacgagtgcgggcagaggct

SEQ ID NO: 5017145 - DNA, 25 bp, Homo sapien
aaagaagatactccccctgtgagag

SEQ ID NO: 5017146 - DNA, 25 bp, Homo sapien
ggtggaggactcctacgatgatcat

SEQ ID NO: 5017147 - DNA, 25 bp, Homo sapien
ccaagacagtgatctctgtgttttc

SEQ ID NO: 5017148 - DNA, 25 bp, Homo sapien
tcatctcgagggtgacagtcccaag

SEQ ID NO: 5017149 - DNA, 25 bp, Homo sapien
tcttgctgcagacgttgactgcaat

SEQ ID NO: 5017150 - DNA, 25 bp, Homo sapien
atttcttctgttcatccagaagctg

SEQ ID NO: 5017151 - DNA, 25 bp, Homo sapien
tgctcttgctgcagacgttgactgc

SEQ ID NO: 5017152 - DNA, 25 bp, Homo sapien
tgctgctcttgctgcagacgttgac

SEQ ID NO: 5017153 - DNA, 25 bp, Homo sapien
ctgaggcgaccctcaaagggctggc

SEQ ID NO: 5017154 - DNA, 25 bp, Homo sapien
gaggcgaccctcaaagggctggcag

SEQ ID NO: 5017155 - DNA, 25 bp, Homo sapien
tgaggcgaccctcaaagggctggca

SEQ ID NO: 5017156 - DNA, 25 bp, Homo sapien
gcttctgaaaggaagaacccatcca

SEQ ID NO: 5017157 - DNA, 25 bp, Homo sapien
atagaatgggaggatcacaaagctt

SEQ ID NO: 5017158 - DNA, 25 bp, Homo sapien
gggaggatcacaaagcttctgaaag

SEQ ID NO: 5017159 - DNA, 25 bp, Homo sapien
tgaaaggaagaacccatccatgtag

SEQ ID NO: 5017160 - DNA, 25 bp, Homo sapien
catcccaagatgtctgtcttcccct

SEQ ID NO: 5017161 - DNA, 25 bp, Homo sapien
ccatcccaagatgtctgtcttcccc

SEQ ID NO: 5017162 - DNA, 25 bp, Homo sapien
tcaatctctccatcccaagatgtct

SEQ ID NO: 5017163 - DNA, 25 bp, Homo sapien
tctctccatcccaagatgtctgtct

SEQ ID NO: 5017164 - DNA, 25 bp, Homo sapien
tggggtggaggagatagctggcgtg

SEQ ID NO: 5017165 - DNA, 25 bp, Homo sapien
ctggggtggaggagatagctggcgt

SEQ ID NO: 5017166 - DNA, 25 bp, Homo sapien
ggggtggaggagatagctggcgtgg

SEQ ID NO: 5017167 - DNA, 25 bp, Homo sapien
gggtggaggagatagctggcgtggg

SEQ ID NO: 5017168 - DNA, 25 bp, Homo sapien
cagaggatgatttgagaagtgggaa

SEQ ID NO: 5017169 - DNA, 25 bp, Homo sapien
aatagtagggtgtgcttgatgattg

SEQ ID NO: 5017170 - DNA, 25 bp, Homo sapien
acaggaatagtagggtgtgcttgat

SEQ ID NO: 5017171 - DNA, 25 bp, Homo sapien
ggtggaacagtgctggaagaaatta

SEQ ID NO: 5017172 - DNA, 25 bp, Homo sapien
gagggcattatgttgagcaactcat

SEQ ID NO: 5017173 - DNA, 25 bp, Homo sapien
atgttgagcaactcattaaaatggc

SEQ ID NO: 5017174 - DNA, 25 bp, Homo sapien
aagatagagggcattatgttgagca

SEQ ID NO: 5017175 - DNA, 25 bp, Homo sapien
caactggctgacaaggaacctcaat

SEQ ID NO: 5017176 - DNA, 25 bp, Homo sapien
taagaatgctggtctcttcggactg

SEQ ID NO: 5017177 - DNA, 25 bp, Homo sapien
taatccgattcatgggtgctccgcc

SEQ ID NO: 5017178 - DNA, 25 bp, Homo sapien
aaaaaattgtccctctcagttctgg

SEQ ID NO: 5017179 - DNA, 25 bp, Homo sapien
actattcaggtgtgaaaaggccaac

SEQ ID NO: 5017180 - DNA, 25 bp, Homo sapien
ctggggccctcgaccatttgtttca

SEQ ID NO: 5017181 - DNA, 25 bp, Homo sapien
tggggccctcgaccatttgtttcac

SEQ ID NO: 5017182 - DNA, 25 bp, Homo sapien
tcgaccatttgtttcaccccagcct

SEQ ID NO: 5017183 - DNA, 25 bp, Homo sapien
gccctcgaccatttgtttcacccca

SEQ ID NO: 5017184 - DNA, 25 bp, Homo sapien
gacactagagagaaataatcacaac

SEQ ID NO: 5017185 - DNA, 25 bp, Homo sapien
aagagcaaaggatccaggattcttt

SEQ ID NO: 5017186 - DNA, 25 bp, Homo sapien
gatgtacaaatcattctggcaataa

SEQ ID NO: 5017187 - DNA, 25 bp, Homo sapien
tcccagcaggcagtttgatcttctc

SEQ ID NO: 5017188 - DNA, 25 bp, Homo sapien
catcttgggcaggtccttcagagta

SEQ ID NO: 5017189 - DNA, 25 bp, Homo sapien
catttttatgggagagttgggacgt

SEQ ID NO: 5017190 - DNA, 25 bp, Homo sapien
gattcattgatcaaaaacacatgta

SEQ ID NO: 5017191 - DNA, 25 bp, Homo sapien
gtagggttttataggcatcttgggc

SEQ ID NO: 5017192 - DNA, 25 bp, Homo sapien
agaaaatacagcttcaccaatgtta

SEQ ID NO: 5017193 - DNA, 25 bp, Homo sapien
gaaaatacagcttcaccaatgttag

SEQ ID NO: 5017194 - DNA, 25 bp, Homo sapien
gagaaaatacagcttcaccaatgtt

SEQ ID NO: 5017195 - DNA, 25 bp, Homo sapien
aaaatacagcttcaccaatgttagt

SEQ ID NO: 5017196 - DNA, 25 bp, Homo sapien
aagacattaacagtcattggtgtga

SEQ ID NO: 5017197 - DNA, 25 bp, Homo sapien
aaaagacattaacagtcattggtgt

SEQ ID NO: 5017198 - DNA, 25 bp, Homo sapien
aaagacattaacagtcattggtgtg

SEQ ID NO: 5017199 - DNA, 25 bp, Homo sapien
tatgacggttctcttggcaatagat

SEQ ID NO: 5017200 - DNA, 25 bp, Homo sapien
agatttttgccagagtgtgaaagaa

SEQ ID NO: 5017201 - DNA, 25 bp, Homo sapien
catacctgatacttggggttgaaat

SEQ ID NO: 5017202 - DNA, 25 bp, Homo sapien
cactgcctaggcctcttttatgacg

SEQ ID NO: 5017203 - DNA, 25 bp, Homo sapien
cagagaaagctgatagttcttcctt

SEQ ID NO: 5017204 - DNA, 25 bp, Homo sapien
gagaaagctgatagttcttcctttt

SEQ ID NO: 5017205 - DNA, 25 bp, Homo sapien
ctcagagaaagctgatagttcttcc

SEQ ID NO: 5017206 - DNA, 25 bp, Homo sapien
gcctcagagaaagctgatagttctt

SEQ ID NO: 5017207 - DNA, 25 bp, Homo sapien
taaggaaatgttgcttatcccagtc

SEQ ID NO: 5017208 - DNA, 25 bp, Homo sapien
tcagggatctcaagtaaggctttag

SEQ ID NO: 5017209 - DNA, 25 bp, Homo sapien
ttctggaagtaggaaacatctgggc

SEQ ID NO: 5017210 - DNA, 25 bp, Homo sapien
tctctgggaagggataacgtctcaa

SEQ ID NO: 5017211 - DNA, 25 bp, Homo sapien
taatctaattatcgttaaagttaca

SEQ ID NO: 5017212 - DNA, 25 bp, Homo sapien
tctaatctaattatcgttaaagtta

SEQ ID NO: 5017213 - DNA, 25 bp, Homo sapien
cattctaatctaattatcgttaaag

SEQ ID NO: 5017214 - DNA, 25 bp, Homo sapien
tacattctaatctaattatcgttaa

SEQ ID NO: 5017215 - DNA, 25 bp, Homo sapien
tctgcaagttgtgatggacgtgtta

SEQ ID NO: 5017216 - DNA, 25 bp, Homo sapien
cagttggctggtgtctacacaacac

SEQ ID NO: 5017217 - DNA, 25 bp, Homo sapien
tcctactgatctctgagagttccag

SEQ ID NO: 5017218 - DNA, 25 bp, Homo sapien
gatgatcagagaccaacatttctgc

SEQ ID NO: 5017219 - DNA, 25 bp, Homo sapien
tttgacactgtctactctgcccaaa

SEQ ID NO: 5017220 - DNA, 25 bp, Homo sapien
tgacactgtctactctgcccaaact

SEQ ID NO: 5017221 - DNA, 25 bp, Homo sapien
ttgacactgtctactctgcccaaac

SEQ ID NO: 5017222 - DNA, 25 bp, Homo sapien
attctcagtgtggaggtgaatgact

SEQ ID NO: 5017223 - DNA, 25 bp, Homo sapien
gattctcagtgtggaggtgaatgac

SEQ ID NO: 5017224 - DNA, 25 bp, Homo sapien
catgtggactataaggtctaacacc

SEQ ID NO: 5017225 - DNA, 25 bp, Homo sapien
ctccttgaaggccatgtggactata

SEQ ID NO: 5017226 - DNA, 25 bp, Homo sapien
gccatgtggactataaggtctaaca

SEQ ID NO: 5017227 - DNA, 25 bp, Homo sapien
cttgaaggccatgtggactataagg

SEQ ID NO: 5017228 - DNA, 25 bp, Homo sapien
gacaaagtaagtggtaattgagggc

SEQ ID NO: 5017229 - DNA, 25 bp, Homo sapien
agtactcagtgtggcccaggatgcc

SEQ ID NO: 5017230 - DNA, 25 bp, Homo sapien
ctagtactcagtgtggcccaggatg

SEQ ID NO: 5017231 - DNA, 25 bp, Homo sapien
tagtactcagtgtggcccaggatgc

SEQ ID NO: 5017232 - DNA, 25 bp, Homo sapien
aagtttctccatatggcagatcaag

SEQ ID NO: 5017233 - DNA, 25 bp, Homo sapien
gcagatcaagtccacgactgataca

SEQ ID NO: 5017234 - DNA, 25 bp, Homo sapien
ttggcagtgaggatatggaagacca

SEQ ID NO: 5017235 - DNA, 25 bp, Homo sapien
cattggcagtgaggatatggaagac

SEQ ID NO: 5017236 - DNA, 25 bp, Homo sapien
caatgatggcatggactgtggtcat

SEQ ID NO: 5017237 - DNA, 25 bp, Homo sapien
tgagtagcaatgatggcatggactg

SEQ ID NO: 5017238 - DNA, 25 bp, Homo sapien
ctgagtagcaatgatggcatggact

SEQ ID NO: 5017239 - DNA, 25 bp, Homo sapien
tagcaatgatggcatggactgtggt

SEQ ID NO: 5017240 - DNA, 25 bp, Homo sapien
ccagggaggctaagcagttgttggt

SEQ ID NO: 5017241 - DNA, 25 bp, Homo sapien
ccttggccagggaggctaagcagtt

SEQ ID NO: 5017242 - DNA, 25 bp, Homo sapien
ggccagggaggctaagcagttgttg

SEQ ID NO: 5017243 - DNA, 25 bp, Homo sapien
tgaccttggccagggaggctaagca

SEQ ID NO: 5017244 - DNA, 25 bp, Homo sapien
tccacttctcatggttaatgcccac

SEQ ID NO: 5017245 - DNA, 25 bp, Homo sapien
ttttttccacttctcatggttaatg

SEQ ID NO: 5017246 - DNA, 25 bp, Homo sapien
ttccacttctcatggttaatgccca

SEQ ID NO: 5017247 - DNA, 25 bp, Homo sapien
ttttccacttctcatggttaatgcc

SEQ ID NO: 5017248 - DNA, 25 bp, Homo sapien
cattagcagagaggtaagagatgat

SEQ ID NO: 5017249 - DNA, 25 bp, Homo sapien
atgggggcattagcagagaggtaag

SEQ ID NO: 5017250 - DNA, 25 bp, Homo sapien
gatgatgatccttttggctacccac

SEQ ID NO: 5017251 - DNA, 25 bp, Homo sapien
aggtaagagatgatgatccttttgg

SEQ ID NO: 5017252 - DNA, 25 bp, Homo sapien
atggtgatagtattgccattggtga

SEQ ID NO: 5017253 - DNA, 25 bp, Homo sapien
agatggtgatagtattgccattggt

SEQ ID NO: 5017254 - DNA, 25 bp, Homo sapien
gatggtgatagtattgccattggtg

SEQ ID NO: 5017255 - DNA, 25 bp, Homo sapien
aagatggtgatagtattgccattgg

SEQ ID NO: 5017256 - DNA, 25 bp, Homo sapien
ccagagttaaaagctggtgctgcat

SEQ ID NO: 5017257 - DNA, 25 bp, Homo sapien
cagagttaaaagctggtgctgcatg

SEQ ID NO: 5017258 - DNA, 25 bp, Homo sapien
gccagagttaaaagctggtgctgca

SEQ ID NO: 5017259 - DNA, 25 bp, Homo sapien
ggcagaaaggcaagatgggtcgggc

SEQ ID NO: 5017260 - DNA, 25 bp, Homo sapien
gaaaggcaagatgggtcgggctggg

SEQ ID NO: 5017261 - DNA, 25 bp, Homo sapien
gaagcagccgcattcaggttccatg

SEQ ID NO: 5017262 - DNA, 25 bp, Homo sapien
tccagctctcgtgtgcaggcaagag

SEQ ID NO: 5017263 - DNA, 25 bp, Homo sapien
tattggagttctgattaattgggat

SEQ ID NO: 5017264 - DNA, 25 bp, Homo sapien
ttattggagttctgattaattggga

SEQ ID NO: 5017265 - DNA, 25 bp, Homo sapien
ggttattggagttctgattaattgg

SEQ ID NO: 5017266 - DNA, 25 bp, Homo sapien
attggagttctgattaattgggatt

SEQ ID NO: 5017267 - DNA, 25 bp, Homo sapien
ccttgcccaagcctgtgccggaaag

SEQ ID NO: 5017268 - DNA, 25 bp, Homo sapien
tgtgccggaaagcactatcagggtt

SEQ ID NO: 5017269 - DNA, 25 bp, Homo sapien
tcccagactaggtgagaagataaca

SEQ ID NO: 5017270 - DNA, 25 bp, Homo sapien
taaaggtcacaccaacgaccatgaa

SEQ ID NO: 5017271 - DNA, 25 bp, Homo sapien
tggcccctggaagtacattgtacat

SEQ ID NO: 5017272 - DNA, 25 bp, Homo sapien
gttattttgtctatccagcatctca

SEQ ID NO: 5017273 - DNA, 25 bp, Homo sapien
ggtggcccctggaagtacattgtac

SEQ ID NO: 5017274 - DNA, 25 bp, Homo sapien
tccagcatctcagatgattccatat

SEQ ID NO: 5017275 - DNA, 25 bp, Homo sapien
gctgtcacaagacgaaggaaaccta

SEQ ID NO: 5017276 - DNA, 25 bp, Homo sapien
cccttgttgcagtgatcttagaagg

SEQ ID NO: 5017277 - DNA, 25 bp, Homo sapien
cagggcctgcatgaataagaaataa

SEQ ID NO: 5017278 - DNA, 25 bp, Homo sapien
cagtgatcttagaaggtcgctgctg

SEQ ID NO: 5017279 - DNA, 25 bp, Homo sapien
caccaagggccttgtctattgggaa

SEQ ID NO: 5017280 - DNA, 25 bp, Homo sapien
accaagggccttgtctattgggaag

SEQ ID NO: 5017281 - DNA, 25 bp, Homo sapien
gaaactagagttaagcatagctaaa

SEQ ID NO: 5017282 - DNA, 25 bp, Homo sapien
caagggtactaaggaaattggctgc

SEQ ID NO: 5017283 - DNA, 25 bp, Homo sapien
tcaggaaattctcacgtcccaaaca

SEQ ID NO: 5017284 - DNA, 25 bp, Homo sapien
gctaaactgattttctcaagggtac

SEQ ID NO: 5017285 - DNA, 25 bp, Homo sapien
taaagtccagtggagatacaataca

SEQ ID NO: 5017286 - DNA, 25 bp, Homo sapien
gatgtcagacacgacattttccaat

SEQ ID NO: 5017287 - DNA, 25 bp, Homo sapien
acaatacatggaccaaagatgtcag

SEQ ID NO: 5017288 - DNA, 25 bp, Homo sapien
tggatttggcgtgattgaatactaa

SEQ ID NO: 5017289 - DNA, 25 bp, Homo sapien
gctcctgtggaaaagtctaccctcc

SEQ ID NO: 5017290 - DNA, 25 bp, Homo sapien
tagctgctcctcagtatcagcaggg

SEQ ID NO: 5017291 - DNA, 25 bp, Homo sapien
ttttaaccaatagctccgcttcagg

SEQ ID NO: 5017292 - DNA, 25 bp, Homo sapien
gttcagttcacaaacccaagagtaa

SEQ ID NO: 5017293 - DNA, 25 bp, Homo sapien
agatgagaacagactcctttgctct

SEQ ID NO: 5017294 - DNA, 25 bp, Homo sapien
aagatgagaacagactcctttgctc

SEQ ID NO: 5017295 - DNA, 25 bp, Homo sapien
atgagaacagactcctttgctctca

SEQ ID NO: 5017296 - DNA, 25 bp, Homo sapien
gaaagatgagaacagactcctttgc

SEQ ID NO: 5017297 - DNA, 25 bp, Homo sapien
tgattaacctgaagaatagagccta

SEQ ID NO: 5017298 - DNA, 25 bp, Homo sapien
taacctgaagaatagagcctaatgt

SEQ ID NO: 5017299 - DNA, 25 bp, Homo sapien
acctgaagaatagagcctaatgtct

SEQ ID NO: 5017300 - DNA, 25 bp, Homo sapien
aagaatagagcctaatgtcttcctc

SEQ ID NO: 5017301 - DNA, 25 bp, Homo sapien
agtttccgacatggtatttcaaagg

SEQ ID NO: 5017302 - DNA, 25 bp, Homo sapien
ggctttgccaagaagtttccgacat

SEQ ID NO: 5017303 - DNA, 25 bp, Homo sapien
ggctgatgctgcagacttaaccttc

SEQ ID NO: 5017304 - DNA, 25 bp, Homo sapien
ctgatgctgcagacttaaccttcta

SEQ ID NO: 5017305 - DNA, 25 bp, Homo sapien
agcagaactgagaggagaactgagc

SEQ ID NO: 5017306 - DNA, 25 bp, Homo sapien
gagaggagaactgagcaataccatc

SEQ ID NO: 5017307 - DNA, 25 bp, Homo sapien
gaactgagaggagaactgagcaata

SEQ ID NO: 5017308 - DNA, 25 bp, Homo sapien
caataccatcaacatctcgcctgaa

SEQ ID NO: 5017309 - DNA, 25 bp, Homo sapien
tgactaaagacaaagtcgtctggcc

SEQ ID NO: 5017310 - DNA, 25 bp, Homo sapien
ttagatacgatatcacgatggaggc

SEQ ID NO: 5017311 - DNA, 25 bp, Homo sapien
tgtggccatagcctgctccagactg

SEQ ID NO: 5017312 - DNA, 25 bp, Homo sapien
gatatcacgatggaggctgtcagct

SEQ ID NO: 5017313 - DNA, 25 bp, Homo sapien
gctggtaagaatcctcggaccagaa

SEQ ID NO: 5017314 - DNA, 25 bp, Homo sapien
tggtaagaatcctcggaccagaact

SEQ ID NO: 5017315 - DNA, 25 bp, Homo sapien
gaccagaactgtaacatctgctgga

SEQ ID NO: 5017316 - DNA, 25 bp, Homo sapien
ctgctggtaagaatcctcggaccag

SEQ ID NO: 5017317 - DNA, 25 bp, Homo sapien
gcaggaattacctcctcttcgtagt

SEQ ID NO: 5017318 - DNA, 25 bp, Homo sapien
gccacaagcctgtcagacccaaagt

SEQ ID NO: 5017319 - DNA, 25 bp, Homo sapien
gctgtcaagcaaatactggcaactt

SEQ ID NO: 5017320 - DNA, 25 bp, Homo sapien
tttccatccagtcctgacctgcagg

SEQ ID NO: 5017321 - DNA, 25 bp, Homo sapien
cactagtgcctcattcacgtttaac

SEQ ID NO: 5017322 - DNA, 25 bp, Homo sapien
ccaaaaactcacattgacaagtgtc

SEQ ID NO: 5017323 - DNA, 25 bp, Homo sapien
gcacagaatttctcctaagggacac

SEQ ID NO: 5017324 - DNA, 25 bp, Homo sapien
gtagcttgagtgttgaatcttctcc

SEQ ID NO: 5017325 - DNA, 25 bp, Homo sapien
gaccaatcagagagcaggtagatga

SEQ ID NO: 5017326 - DNA, 25 bp, Homo sapien
tcagctgcccttatgccagcagtta

SEQ ID NO: 5017327 - DNA, 25 bp, Homo sapien
cacgtcaatatttagggaccaatca

SEQ ID NO: 5017328 - DNA, 25 bp, Homo sapien
gccagctgaccaaccctaaggattg

SEQ ID NO: 5017329 - DNA, 25 bp, Homo sapien
taacactttctgtgtgggagggcac

SEQ ID NO: 5017330 - DNA, 25 bp, Homo sapien
aacaatgaaggcagagacctgggcc

SEQ ID NO: 5017331 - DNA, 25 bp, Homo sapien
cagttcctggtaccgaaagaggcca

SEQ ID NO: 5017332 - DNA, 25 bp, Homo sapien
caaagctcttctataggcaggacca

SEQ ID NO: 5017333 - DNA, 25 bp, Homo sapien
cagtgataggcctcgtactccaggg

SEQ ID NO: 5017334 - DNA, 25 bp, Homo sapien
tagaccacattattgcccgcgtcga

SEQ ID NO: 5017335 - DNA, 25 bp, Homo sapien
cccgcgtcgatgtatagaatgctga

SEQ ID NO: 5017336 - DNA, 25 bp, Homo sapien
tcgcatacaccctcgcagtgatagg

SEQ ID NO: 5017337 - DNA, 25 bp, Homo sapien
ctggcatccggggcgcccgacggcg

SEQ ID NO: 5017338 - DNA, 25 bp, Homo sapien
tggcatccggggcgcccgacggcgg

SEQ ID NO: 5017339 - DNA, 25 bp, Homo sapien
cctggcatccggggcgcccgacggc

SEQ ID NO: 5017340 - DNA, 25 bp, Homo sapien
ccagctgctcgcgcatctctgcgaa

SEQ ID NO: 5017341 - DNA, 25 bp, Homo sapien
cagctgctcgcgcatctctgcgaac

SEQ ID NO: 5017342 - DNA, 25 bp, Homo sapien
ttgcgctgggatctggtgaatacca

SEQ ID NO: 5017343 - DNA, 25 bp, Homo sapien
ctgggatctggtgaataccaccagc

SEQ ID NO: 5017344 - DNA, 25 bp, Homo sapien
gttcttgcgctgggatctggtgaat

SEQ ID NO: 5017345 - DNA, 25 bp, Homo sapien
tcttgcgctgggatctggtgaatac

SEQ ID NO: 5017346 - DNA, 25 bp, Homo sapien
ttctttgtctgagagcatggacaca

SEQ ID NO: 5017347 - DNA, 25 bp, Homo sapien
caaatacttctgtctccggagagga

SEQ ID NO: 5017348 - DNA, 25 bp, Homo sapien
aggccctgccacacgtcgaagactt

SEQ ID NO: 5017349 - DNA, 25 bp, Homo sapien
gcgcctggcgaaagagccgcagctc

SEQ ID NO: 5017350 - DNA, 25 bp, Homo sapien
cttgcatctgtccattgagaacatc

SEQ ID NO: 5017351 - DNA, 25 bp, Homo sapien
tactcggggctgaccgtagcactgg

SEQ ID NO: 5017352 - DNA, 25 bp, Homo sapien
gcctctgccacacccagtttgtact

SEQ ID NO: 5017353 - DNA, 25 bp, Homo sapien
ggctggttcactcttacgcacatgc

SEQ ID NO: 5017354 - DNA, 25 bp, Homo sapien
tggctggttcactcttacgcacatg

SEQ ID NO: 5017355 - DNA, 25 bp, Homo sapien
gcagttgatttatggaagccaagac

SEQ ID NO: 5017356 - DNA, 25 bp, Homo sapien
tgtgggaagggttagagaggtgaaa

SEQ ID NO: 5017357 - DNA, 25 bp, Homo sapien
caggcagttgatttatggaagccaa

SEQ ID NO: 5017358 - DNA, 25 bp, Homo sapien
agctgctgcaggcagttgatttatg

SEQ ID NO: 5017359 - DNA, 25 bp, Homo sapien
tgaatacaacaccatgcactgttac

SEQ ID NO: 5017360 - DNA, 25 bp, Homo sapien
atccaacctggggagtgaatacaac

SEQ ID NO: 5017361 - DNA, 25 bp, Homo sapien
tgaagacactttgcctgctgcctgc

SEQ ID NO: 5017362 - DNA, 25 bp, Homo sapien
aagacactttgcctgctgcctgctg

SEQ ID NO: 5017363 - DNA, 25 bp, Homo sapien
cctgaagacactttgcctgctgcct

SEQ ID NO: 5017364 - DNA, 25 bp, Homo sapien
gacactttgcctgctgcctgctgac

SEQ ID NO: 5017365 - DNA, 25 bp, Homo sapien
acagagcctggctcagctgccatga

SEQ ID NO: 5017366 - DNA, 25 bp, Homo sapien
gagcctggctcagctgccatgagcc

SEQ ID NO: 5017367 - DNA, 25 bp, Homo sapien
gcctggctcagctgccatgagccat

SEQ ID NO: 5017368 - DNA, 25 bp, Homo sapien
catcacagagcctggctcagctgcc

SEQ ID NO: 5017369 - DNA, 25 bp, Homo sapien
cagttacaattgctggattagggct

SEQ ID NO: 5017370 - DNA, 25 bp, Homo sapien
cggtgtttgctgaacattagacata

SEQ ID NO: 5017371 - DNA, 25 bp, Homo sapien
ctctgttaacggtgtttgctgaaca

SEQ ID NO: 5017372 - DNA, 25 bp, Homo sapien
agggcttatcttcgtttcctggcag

SEQ ID NO: 5017373 - DNA, 25 bp, Homo sapien
aagacctccaagctcaaaattcatg

SEQ ID NO: 5017374 - DNA, 25 bp, Homo sapien
caaaattcatgactgggcttggagt

SEQ ID NO: 5017375 - DNA, 25 bp, Homo sapien
tcattagtgtaatcaaggtgggctg

SEQ ID NO: 5017376 - DNA, 25 bp, Homo sapien
ccaggaaataggacatagcttcatc

SEQ ID NO: 5017377 - DNA, 25 bp, Homo sapien
tagagccaggtgtactgggtgatta

SEQ ID NO: 5017378 - DNA, 25 bp, Homo sapien
catcaggttggaaatagagccaggt

SEQ ID NO: 5017379 - DNA, 25 bp, Homo sapien
gggcaaagtccatcaggttggaaat

SEQ ID NO: 5017380 - DNA, 25 bp, Homo sapien
tgtactgggtgattaaaaatgagcc

SEQ ID NO: 5017381 - DNA, 25 bp, Homo sapien
tctggctccagtatctgtgccacca

SEQ ID NO: 5017382 - DNA, 25 bp, Homo sapien
gagggcatcaatccctggccggcaa

SEQ ID NO: 5017383 - DNA, 25 bp, Homo sapien
tgtgccaccaccctagacatcccag

SEQ ID NO: 5017384 - DNA, 25 bp, Homo sapien
tagtagagtgggcaatctggctcca

SEQ ID NO: 5017385 - DNA, 25 bp, Homo sapien
cagcagtcattacttcagcagaaga

SEQ ID NO: 5017386 - DNA, 25 bp, Homo sapien
agcagtcattacttcagcagaagaa

SEQ ID NO: 5017387 - DNA, 25 bp, Homo sapien
gggtgcaaatgagataaggtgtgag

SEQ ID NO: 5017388 - DNA, 25 bp, Homo sapien
caaatgagataaggtgtgagagaaa

SEQ ID NO: 5017389 - DNA, 25 bp, Homo sapien
agtcactactgacaatgtggaatga

SEQ ID NO: 5017390 - DNA, 25 bp, Homo sapien
tcactactgacaatgtggaatgagc

SEQ ID NO: 5017391 - DNA, 25 bp, Homo sapien
ccttgtggtccacttctctccacaa

SEQ ID NO: 5017392 - DNA, 25 bp, Homo sapien
gtccttgtggtccacttctctccac

SEQ ID NO: 5017393 - DNA, 25 bp, Homo sapien
tcagtccttgtggtccacttctctc

SEQ ID NO: 5017394 - DNA, 25 bp, Homo sapien
agtccttgtggtccacttctctcca

SEQ ID NO: 5017395 - DNA, 25 bp, Homo sapien
tgccaggtgaacagatgacctccac

SEQ ID NO: 5017396 - DNA, 25 bp, Homo sapien
caccccagccacatcaaggatccag

SEQ ID NO: 5017397 - DNA, 25 bp, Homo sapien
catcaaggatccagcccttcttgca

SEQ ID NO: 5017398 - DNA, 25 bp, Homo sapien
atcatcccgattcttctcagtcctg

SEQ ID NO: 5017399 - DNA, 25 bp, Homo sapien
tgagaggcctaaggattcgtttctt

SEQ ID NO: 5017400 - DNA, 25 bp, Homo sapien
ggggtcaaggccagtgacagccctt

SEQ ID NO: 5017401 - DNA, 25 bp, Homo sapien
ttgtgggggcacgatctgaccacag

SEQ ID NO: 5017402 - DNA, 25 bp, Homo sapien
gcccttgtgctaacccaaatgactc

SEQ ID NO: 5017403 - DNA, 25 bp, Homo sapien
agctccaaggcgctttaaggaaact

SEQ ID NO: 5017404 - DNA, 25 bp, Homo sapien
caggagctccaaggcgctttaagga

SEQ ID NO: 5017405 - DNA, 25 bp, Homo sapien
ggagctccaaggcgctttaaggaaa

SEQ ID NO: 5017406 - DNA, 25 bp, Homo sapien
gctccaaggcgctttaaggaaactc

SEQ ID NO: 5017407 - DNA, 25 bp, Homo sapien
gaggcgcgcacgcggcctgcccttc

SEQ ID NO: 5017408 - DNA, 25 bp, Homo sapien
cactgtcgaccggtaagtcacccgg

SEQ ID NO: 5017409 - DNA, 25 bp, Homo sapien
cttccctgcactgtcgaccggtaag

SEQ ID NO: 5017410 - DNA, 25 bp, Homo sapien
ctgcactgtcgaccggtaagtcacc

SEQ ID NO: 5017411 - DNA, 25 bp, Homo sapien
ggagcaaccaggtcctccacgaagg

SEQ ID NO: 5017412 - DNA, 25 bp, Homo sapien
aggctttttgcaggaccttccagtt

SEQ ID NO: 5017413 - DNA, 25 bp, Homo sapien
tttttgcaggaccttccagttcacc

SEQ ID NO: 5017414 - DNA, 25 bp, Homo sapien
ggacagtggcacaaaccccgtgccc

SEQ ID NO: 5017415 - DNA, 25 bp, Homo sapien
ttgcaggaccttccagttcacctgg

SEQ ID NO: 5017416 - DNA, 25 bp, Homo sapien
ctggcccagctctaggcgggccgct

SEQ ID NO: 5017417 - DNA, 25 bp, Homo sapien
tggcccagctctaggcgggccgctg

SEQ ID NO: 5017418 - DNA, 25 bp, Homo sapien
ctcgccaggccgtccacgcgttggg

SEQ ID NO: 5017419 - DNA, 25 bp, Homo sapien
cctcctcgccaggccgtccacgcgt

SEQ ID NO: 5017420 - DNA, 25 bp, Homo sapien
tccccagactgggtgcacatgcaat

SEQ ID NO: 5017421 - DNA, 25 bp, Homo sapien
ctgtccgggtggtcatgcagcgtct

SEQ ID NO: 5017422 - DNA, 25 bp, Homo sapien
gatctcggtcctgctagtctggagg

SEQ ID NO: 5017423 - DNA, 25 bp, Homo sapien
cattttctgagaacccggagacgcg

SEQ ID NO: 5017424 - DNA, 25 bp, Homo sapien
caaggaacgcgactatgagtgagag

SEQ ID NO: 5017425 - DNA, 25 bp, Homo sapien
atgaacctcgctgacctcgggctgc

SEQ ID NO: 5017426 - DNA, 25 bp, Homo sapien
ctggcgttaatttgccctctggacc

SEQ ID NO: 5017427 - DNA, 25 bp, Homo sapien
agcggcgagaccctcgagcaaggaa

SEQ ID NO: 5017428 - DNA, 25 bp, Homo sapien
attattgtctctctcctttaggagc

SEQ ID NO: 5017429 - DNA, 25 bp, Homo sapien
ggagcttagtttccgatgcctgtgg

SEQ ID NO: 5017430 - DNA, 25 bp, Homo sapien
atgcctgtggatccttccctgattt

SEQ ID NO: 5017431 - DNA, 25 bp, Homo sapien
tctctctcctttaggagcttagttt

SEQ ID NO: 5017432 - DNA, 25 bp, Homo sapien
acacatgcaggcgttcccacagagg

SEQ ID NO: 5017433 - DNA, 25 bp, Homo sapien
cagatcaacgccggtggcaagaagg

SEQ ID NO: 5017434 - DNA, 25 bp, Homo sapien
ggtgcgaggttttcttgagggcact

SEQ ID NO: 5017435 - DNA, 25 bp, Homo sapien
tgcaggcgttcccacagagggtacc

SEQ ID NO: 5017436 - DNA, 25 bp, Homo sapien
ctcaggaatagcgtagagagaggaa

SEQ ID NO: 5017437 - DNA, 25 bp, Homo sapien
gaatagcgtagagagaggaacgtcg

SEQ ID NO: 5017438 - DNA, 25 bp, Homo sapien
tagcgtagagagaggaacgtcgcct

SEQ ID NO: 5017439 - DNA, 25 bp, Homo sapien
tcaggaatagcgtagagagaggaac

SEQ ID NO: 5017440 - DNA, 25 bp, Homo sapien
gctggcattgatgcccagcttctca

SEQ ID NO: 5017441 - DNA, 25 bp, Homo sapien
ccctgtctacaaagctggtgatcgt

SEQ ID NO: 5017442 - DNA, 25 bp, Homo sapien
tctcagcgatggagtaagtcctgta

SEQ ID NO: 5017443 - DNA, 25 bp, Homo sapien
cgtattagccgacttggaagactgg

SEQ ID NO: 5017444 - DNA, 25 bp, Homo sapien
agcctgctggaaaccgggcaaatcc

SEQ ID NO: 5017445 - DNA, 25 bp, Homo sapien
cttgccttccttgcggcttcgcatg

SEQ ID NO: 5017446 - DNA, 25 bp, Homo sapien
cttggtggaacccagctcggcggac

SEQ ID NO: 5017447 - DNA, 25 bp, Homo sapien
tggaaaccgggcaaatcccacagaa

SEQ ID NO: 5017448 - DNA, 25 bp, Homo sapien
acaactgtgcagtatggtatctcct

SEQ ID NO: 5017449 - DNA, 25 bp, Homo sapien
ggaagacgtacaactgtgcagtatg

SEQ ID NO: 5017450 - DNA, 25 bp, Homo sapien
acaccaaacagatggaagacgtaca

SEQ ID NO: 5017451 - DNA, 25 bp, Homo sapien
tgtgcagtatggtatctcctgcccc

SEQ ID NO: 5017452 - DNA, 25 bp, Homo sapien
gagcatgcttacaggcactttcaaa

SEQ ID NO: 5017453 - DNA, 25 bp, Homo sapien
caatactggacaggagcatgcttac

SEQ ID NO: 5017454 - DNA, 25 bp, Homo sapien
accaaaacaatactggacaggagca

SEQ ID NO: 5017455 - DNA, 25 bp, Homo sapien
ggacaggagcatgcttacaggcact

SEQ ID NO: 5017456 - DNA, 25 bp, Homo sapien
tccatttctccatcggtcagtagac

SEQ ID NO: 5017457 - DNA, 25 bp, Homo sapien
gactgctgggatttaacagactgca

SEQ ID NO: 5017458 - DNA, 25 bp, Homo sapien
tccggagcaaggacacagaacagca

SEQ ID NO: 5017459 - DNA, 25 bp, Homo sapien
ggaaggttcgctgactgctgggatt

SEQ ID NO: 5017460 - DNA, 25 bp, Homo sapien
gggtccggagcaaggacacagaaca

SEQ ID NO: 5017461 - DNA, 25 bp, Homo sapien
gcctcaaggttttctactgcaaagg

SEQ ID NO: 5017462 - DNA, 25 bp, Homo sapien
tgtccagagtaagtaacgactttca

SEQ ID NO: 5017463 - DNA, 25 bp, Homo sapien
tcaattattgttccacctgtgtcac

SEQ ID NO: 5017464 - DNA, 25 bp, Homo sapien
caaagtccacgtgaaaaaggctgac

SEQ ID NO: 5017465 - DNA, 25 bp, Homo sapien
agtcagtggtaatctggggagtaaa

SEQ ID NO: 5017466 - DNA, 25 bp, Homo sapien
gtcagtggtaatctggggagtaaag

SEQ ID NO: 5017467 - DNA, 25 bp, Homo sapien
tcagtggtaatctggggagtaaagg

SEQ ID NO: 5017468 - DNA, 25 bp, Homo sapien
cagtggtaatctggggagtaaagga

SEQ ID NO: 5017469 - DNA, 25 bp, Homo sapien
aatacagatctcaccgcgctgacct

SEQ ID NO: 5017470 - DNA, 25 bp, Homo sapien
cgctgacctaggcacagggtccata

SEQ ID NO: 5017471 - DNA, 25 bp, Homo sapien
ttggactgggtcctgccaaaaatac

SEQ ID NO: 5017472 - DNA, 25 bp, Homo sapien
acagggtccatagctgccagcatgc

SEQ ID NO: 5017473 - DNA, 25 bp, Homo sapien
gtgtagattttaggtgctcaccaga

SEQ ID NO: 5017474 - DNA, 25 bp, Homo sapien
tatttgtgcaatctaaaacatgtca

SEQ ID NO: 5017475 - DNA, 25 bp, Homo sapien
cacatacacaaagtactatcgtggt

SEQ ID NO: 5017476 - DNA, 25 bp, Homo sapien
aatttgcttgcctgtagtaatcatt

SEQ ID NO: 5017477 - DNA, 25 bp, Homo sapien
aaagggaccctcgtgattgcttaga

SEQ ID NO: 5017478 - DNA, 25 bp, Homo sapien
gcaaattggaagtccagtattgaaa

SEQ ID NO: 5017479 - DNA, 25 bp, Homo sapien
cagaatctatccaaacactctgctg

SEQ ID NO: 5017480 - DNA, 25 bp, Homo sapien
ggcatctcaatatggcgtacacctt

SEQ ID NO: 5017481 - DNA, 25 bp, Homo sapien
taaccaccgtataatgattcagttc

SEQ ID NO: 5017482 - DNA, 25 bp, Homo sapien
gccagtataaccagaatgtaaacaa

SEQ ID NO: 5017483 - DNA, 25 bp, Homo sapien
taacttagaggcactatccgacctg

SEQ ID NO: 5017484 - DNA, 25 bp, Homo sapien
ggcttttaatatgaacgccagtata

SEQ ID NO: 5017485 - DNA, 25 bp, Homo sapien
cattttggtaccactcgtagagcgt

SEQ ID NO: 5017486 - DNA, 25 bp, Homo sapien
tgtaaagttatagggcatcgccacc

SEQ ID NO: 5017487 - DNA, 25 bp, Homo sapien
gcatggtttctagggtcagagccca

SEQ ID NO: 5017488 - DNA, 25 bp, Homo sapien
catgcaatctggaactaggaccaca

SEQ ID NO: 5017489 - DNA, 25 bp, Homo sapien
ctgataggctatccaaccagtgagg

SEQ ID NO: 5017490 - DNA, 25 bp, Homo sapien
tttctagtatacatgttagcacagg

SEQ ID NO: 5017491 - DNA, 25 bp, Homo sapien
tattcagtagcttccataaggatgt

SEQ ID NO: 5017492 - DNA, 25 bp, Homo sapien
tgcataccagtgaagaggctatttc

SEQ ID NO: 5017493 - DNA, 25 bp, Homo sapien
tttgtttcaagtttaaccatcttca

SEQ ID NO: 5017494 - DNA, 25 bp, Homo sapien
gcatccacagacttcaactacatga

SEQ ID NO: 5017495 - DNA, 25 bp, Homo sapien
atcttcataacagctgcatccacag

SEQ ID NO: 5017496 - DNA, 25 bp, Homo sapien
gtaaaacatcttcagaccaaataat

SEQ ID NO: 5017497 - DNA, 25 bp, Homo sapien
ctttcagatacggttcaaggtagaa

SEQ ID NO: 5017498 - DNA, 25 bp, Homo sapien
cccgaataacctctttcagatacgg

SEQ ID NO: 5017499 - DNA, 25 bp, Homo sapien
gaataacctctttcagatacggttc

SEQ ID NO: 5017500 - DNA, 25 bp, Homo sapien
ttcagatacggttcaaggtagaaat

SEQ ID NO: 5017501 - DNA, 25 bp, Homo sapien
aaatgtcaaatctgtggtgatggtg

SEQ ID NO: 5017502 - DNA, 25 bp, Homo sapien
gatatatcccaaacactcaacaggt

SEQ ID NO: 5017503 - DNA, 25 bp, Homo sapien
tattatatgttaccatcacgtactg

SEQ ID NO: 5017504 - DNA, 25 bp, Homo sapien
tattctcaacctaagaactatctgc

SEQ ID NO: 5017505 - DNA, 25 bp, Homo sapien
ctggagggacactcaatgggctgat

SEQ ID NO: 5017506 - DNA, 25 bp, Homo sapien
tcaaggggtgagagtttgcttcaca

SEQ ID NO: 5017507 - DNA, 25 bp, Homo sapien
gcctagtttcaatgcagttcaaggg

SEQ ID NO: 5017508 - DNA, 25 bp, Homo sapien
tcttttcatctaagtaggaagcaga

SEQ ID NO: 5017509 - DNA, 25 bp, Homo sapien
tctctatattagagacttgcttagt

SEQ ID NO: 5017510 - DNA, 25 bp, Homo sapien
gagacttgcttagtaatttcagaag

SEQ ID NO: 5017511 - DNA, 25 bp, Homo sapien
aagaatcatttcacacgtaagactc

SEQ ID NO: 5017512 - DNA, 25 bp, Homo sapien
cacgtaagactcaatgtggttttct

SEQ ID NO: 5017513 - DNA, 25 bp, Homo sapien
aacactatgcaaatgaacatgtttc

SEQ ID NO: 5017514 - DNA, 25 bp, Homo sapien
tttgacatgactcagagaactctaa

SEQ ID NO: 5017515 - DNA, 25 bp, Homo sapien
ttgacatgactcagagaactctaac

SEQ ID NO: 5017516 - DNA, 25 bp, Homo sapien
actctaacactatgcaaatgaacat

SEQ ID NO: 5017517 - DNA, 25 bp, Homo sapien
cactgtcaggtagataaagctgtgc

SEQ ID NO: 5017518 - DNA, 25 bp, Homo sapien
tgtcaggtagataaagctgtgctac

SEQ ID NO: 5017519 - DNA, 25 bp, Homo sapien
acactgtcaggtagataaagctgtg

SEQ ID NO: 5017520 - DNA, 25 bp, Homo sapien
cctgtcattataaaggttctcagga

SEQ ID NO: 5017521 - DNA, 25 bp, Homo sapien
tcttcatatttggtccactgctctt

SEQ ID NO: 5017522 - DNA, 25 bp, Homo sapien
cactgctctttaggcaagatctgat

SEQ ID NO: 5017523 - DNA, 25 bp, Homo sapien
acatcctgtcattataaaggttctc

SEQ ID NO: 5017524 - DNA, 25 bp, Homo sapien
ggaaccacagtaacacttgcaaaag

SEQ ID NO: 5017525 - DNA, 25 bp, Homo sapien
taccaagtcgaacattttagaggct

SEQ ID NO: 5017526 - DNA, 25 bp, Homo sapien
taatgggttacttcttgaactagac

SEQ ID NO: 5017527 - DNA, 25 bp, Homo sapien
gacaaagttagattgcacatgcatc

SEQ ID NO: 5017528 - DNA, 25 bp, Homo sapien
ttgtaataccattttcgaataccat

SEQ ID NO: 5017529 - DNA, 25 bp, Homo sapien
gtaataccattttcgaataccatcc

SEQ ID NO: 5017530 - DNA, 25 bp, Homo sapien
tttcgaataccatccagccacttgc

SEQ ID NO: 5017531 - DNA, 25 bp, Homo sapien
cattttcgaataccatccagccact

SEQ ID NO: 5017532 - DNA, 25 bp, Homo sapien
tgtagttcccaaacacgcacagaag

SEQ ID NO: 5017533 - DNA, 25 bp, Homo sapien
cacccaaggtcagagttagctaatg

SEQ ID NO: 5017534 - DNA, 25 bp, Homo sapien
gatccataggtacatcgtgtgccct

SEQ ID NO: 5017535 - DNA, 25 bp, Homo sapien
gaagctggcttacagaagtgatccc

SEQ ID NO: 5017536 - DNA, 25 bp, Homo sapien
cccaaaaagctcaatgtcaattagg

SEQ ID NO: 5017537 - DNA, 25 bp, Homo sapien
taacggatgtttctggcaacctgat

SEQ ID NO: 5017538 - DNA, 25 bp, Homo sapien
ctgatgtttcctaacagcttcacaa

SEQ ID NO: 5017539 - DNA, 25 bp, Homo sapien
gctcaatgtcaattaggttaacgga

SEQ ID NO: 5017540 - DNA, 25 bp, Homo sapien
aataaacggtgaagcgcgacgatgc

SEQ ID NO: 5017541 - DNA, 25 bp, Homo sapien
tactccaacttgtaccgccagaggg

SEQ ID NO: 5017542 - DNA, 25 bp, Homo sapien
cacacgatagagcacttgggtcata

SEQ ID NO: 5017543 - DNA, 25 bp, Homo sapien
taatatctccctcgtcgcaatggca

SEQ ID NO: 5017544 - DNA, 25 bp, Homo sapien
tttgaccagaaagagaagcgttgcc

SEQ ID NO: 5017545 - DNA, 25 bp, Homo sapien
ttgaccagaaagagaagcgttgcct

SEQ ID NO: 5017546 - DNA, 25 bp, Homo sapien
tgaccagaaagagaagcgttgcctt

SEQ ID NO: 5017547 - DNA, 25 bp, Homo sapien
tgggtaagtcatagaggacaagctg

SEQ ID NO: 5017548 - DNA, 25 bp, Homo sapien
agtccgcaggcgcgttacgtcacat

SEQ ID NO: 5017549 - DNA, 25 bp, Homo sapien
agctgggcccagtccgcaggcgcgt

SEQ ID NO: 5017550 - DNA, 25 bp, Homo sapien
ctgggtaagtcatagaggacaagct

SEQ ID NO: 5017551 - DNA, 25 bp, Homo sapien
ttttttaaagggcatccagcacacc

SEQ ID NO: 5017552 - DNA, 25 bp, Homo sapien
tgccaagagcaaatgttccaagagg

SEQ ID NO: 5017553 - DNA, 25 bp, Homo sapien
gaattccgctgggtcgttctgctta

SEQ ID NO: 5017554 - DNA, 25 bp, Homo sapien
tacacagtagcttagggtgccaaga

SEQ ID NO: 5017555 - DNA, 25 bp, Homo sapien
atatatattcactttacaatactgc

SEQ ID NO: 5017556 - DNA, 25 bp, Homo sapien
tatatatattcactttacaatactg

SEQ ID NO: 5017557 - DNA, 25 bp, Homo sapien
tatattcactttacaatactgcatt

SEQ ID NO: 5017558 - DNA, 25 bp, Homo sapien
tatatattcactttacaatactgca

SEQ ID NO: 5017559 - DNA, 25 bp, Homo sapien
ggttttgctggatcatactgtgctc

SEQ ID NO: 5017560 - DNA, 25 bp, Homo sapien
tctttgaccttaaacagccttgtat

SEQ ID NO: 5017561 - DNA, 25 bp, Homo sapien
ataggtaagaaacaagtgtctttct

SEQ ID NO: 5017562 - DNA, 25 bp, Homo sapien
gctttggcaatctcttcacaaaata

SEQ ID NO: 5017563 - DNA, 25 bp, Homo sapien
tagcagatcctagtaaagggcttgg

SEQ ID NO: 5017564 - DNA, 25 bp, Homo sapien
tggacaggttacttaaatctcttta

SEQ ID NO: 5017565 - DNA, 25 bp, Homo sapien
agtgattttgatgcatctggtcagc

SEQ ID NO: 5017566 - DNA, 25 bp, Homo sapien
gagttctaatcgtggttctgcccca

SEQ ID NO: 5017567 - DNA, 25 bp, Homo sapien
tgtgcacaaaatcaaacgtctcggt

SEQ ID NO: 5017568 - DNA, 25 bp, Homo sapien
aatcaaacgtctcggtaagtttcat

SEQ ID NO: 5017569 - DNA, 25 bp, Homo sapien
gggattctggtgatcatatgttgaa

SEQ ID NO: 5017570 - DNA, 25 bp, Homo sapien
tggtggggaatgctcatcacattgt

SEQ ID NO: 5017571 - DNA, 25 bp, Homo sapien
tcaaggaattacagcttccggctcc

SEQ ID NO: 5017572 - DNA, 25 bp, Homo sapien
ttcaaggaattacagcttccggctc

SEQ ID NO: 5017573 - DNA, 25 bp, Homo sapien
tatgccagtgccttcaaggaattac

SEQ ID NO: 5017574 - DNA, 25 bp, Homo sapien
tttggagacagctatgccagtgcct

SEQ ID NO: 5017575 - DNA, 25 bp, Homo sapien
ctttcacgggttccagacttccagt

SEQ ID NO: 5017576 - DNA, 25 bp, Homo sapien
ttctttcacgggttccagacttcca

SEQ ID NO: 5017577 - DNA, 25 bp, Homo sapien
gttagcagccttgggagacgaacta

SEQ ID NO: 5017578 - DNA, 25 bp, Homo sapien
ggagacgaactaccagatctctagt

SEQ ID NO: 5017579 - DNA, 25 bp, Homo sapien
gttcagcaaaaatggtgcttttctg

SEQ ID NO: 5017580 - DNA, 25 bp, Homo sapien
ttctgaaaaaatcccaatctgttat

SEQ ID NO: 5017581 - DNA, 25 bp, Homo sapien
aaaatcccaatctgttatccagtct

SEQ ID NO: 5017582 - DNA, 25 bp, Homo sapien
cttcacactaagttcaagttctttc

SEQ ID NO: 5017583 - DNA, 25 bp, Homo sapien
agaggcattttttaggttagtatat

SEQ ID NO: 5017584 - DNA, 25 bp, Homo sapien
gagaggcattttttaggttagtata

SEQ ID NO: 5017585 - DNA, 25 bp, Homo sapien
agagaggcattttttaggttagtat

SEQ ID NO: 5017586 - DNA, 25 bp, Homo sapien
gatgaacacaccctttgacctagca

SEQ ID NO: 5017587 - DNA, 25 bp, Homo sapien
tactagcgagatccgcagcatggac

SEQ ID NO: 5017588 - DNA, 25 bp, Homo sapien
taacagtggactggaaacatactcc

SEQ ID NO: 5017589 - DNA, 25 bp, Homo sapien
tgtacaaggtaagtcactacagcct

SEQ ID NO: 5017590 - DNA, 25 bp, Homo sapien
ttttgtcaggaatgctcccagttgg

SEQ ID NO: 5017591 - DNA, 25 bp, Homo sapien
gttatcctctatacccacatcttta

SEQ ID NO: 5017592 - DNA, 25 bp, Homo sapien
cccagttggttatcctctataccca

SEQ ID NO: 5017593 - DNA, 25 bp, Homo sapien
attttttgtcaggaatgctcccagt

SEQ ID NO: 5017594 - DNA, 25 bp, Homo sapien
ccttatcggagaggagaaagacgac

SEQ ID NO: 5017595 - DNA, 25 bp, Homo sapien
gaaagacgacactgaaatgcctgca

SEQ ID NO: 5017596 - DNA, 25 bp, Homo sapien
tgaaagtttggacggagatcccctg

SEQ ID NO: 5017597 - DNA, 25 bp, Homo sapien
tattgggtatggagagacccgacct

SEQ ID NO: 5017598 - DNA, 25 bp, Homo sapien
gagggtctgcaataatctgaatagc

SEQ ID NO: 5017599 - DNA, 25 bp, Homo sapien
gaatgatccacatagtctcgaagtg

SEQ ID NO: 5017600 - DNA, 25 bp, Homo sapien
tctcgaagtgtgaatgaagctggtg

SEQ ID NO: 5017601 - DNA, 25 bp, Homo sapien
gaaccaacttctgcagagtctcaga

SEQ ID NO: 5017602 - DNA, 25 bp, Homo sapien
gctgcattggagacaatggaggcaa

SEQ ID NO: 5017603 - DNA, 25 bp, Homo sapien
aattggctgcattggagacaatgga

SEQ ID NO: 5017604 - DNA, 25 bp, Homo sapien
ctgaaattggctgcattggagacaa

SEQ ID NO: 5017605 - DNA, 25 bp, Homo sapien
ggagacaatggaggcaattcatcca

SEQ ID NO: 5017606 - DNA, 25 bp, Homo sapien
gctctaatatgcacacttaaaacta

SEQ ID NO: 5017607 - DNA, 25 bp, Homo sapien
caaattagtgctctaatatgcacac

SEQ ID NO: 5017608 - DNA, 25 bp, Homo sapien
ctttcagtggttaaatcttgggatc

SEQ ID NO: 5017609 - DNA, 25 bp, Homo sapien
agaattaaacatccaagtccctaat

SEQ ID NO: 5017610 - DNA, 25 bp, Homo sapien
tctagaaacagctcagaatcaaagc

SEQ ID NO: 5017611 - DNA, 25 bp, Homo sapien
gctggatatattttgtgtcttctgt

SEQ ID NO: 5017612 - DNA, 25 bp, Homo sapien
tcaaagctggatatattttgtgtct

SEQ ID NO: 5017613 - DNA, 25 bp, Homo sapien
gctcagaatcaaagctggatatatt

SEQ ID NO: 5017614 - DNA, 25 bp, Homo sapien
ctgactacttgagctagtagactgg

SEQ ID NO: 5017615 - DNA, 25 bp, Homo sapien
gtagactgggaactattccataagg

SEQ ID NO: 5017616 - DNA, 25 bp, Homo sapien
gactgctttgggcagaattattctc

SEQ ID NO: 5017617 - DNA, 25 bp, Homo sapien
gctttgggcagaattattctcctga

SEQ ID NO: 5017618 - DNA, 25 bp, Homo sapien
caattgtcagaggatatctgaggct

SEQ ID NO: 5017619 - DNA, 25 bp, Homo sapien
tgaggctcctcaacttaactgagtt

SEQ ID NO: 5017620 - DNA, 25 bp, Homo sapien
cttgctggtctagtaaaacgttttg

SEQ ID NO: 5017621 - DNA, 25 bp, Homo sapien
gttgtgcagcattaatgaggctcct

SEQ ID NO: 5017622 - DNA, 25 bp, Homo sapien
gtttttctgcatactggaattcagc

SEQ ID NO: 5017623 - DNA, 25 bp, Homo sapien
aattagaccaaatacttgagggtct

SEQ ID NO: 5017624 - DNA, 25 bp, Homo sapien
aagtttgctgaaagagattttacaa

SEQ ID NO: 5017625 - DNA, 25 bp, Homo sapien
cagcttgttttatgctctaaattag

SEQ ID NO: 5017626 - DNA, 25 bp, Homo sapien
tctggacgcgggtgcgccggaacct

SEQ ID NO: 5017627 - DNA, 25 bp, Homo sapien
cgcgatcctcgtgctggggcagctc

SEQ ID NO: 5017628 - DNA, 25 bp, Homo sapien
ggaacctgaaccctcgccaggagcg

SEQ ID NO: 5017629 - DNA, 25 bp, Homo sapien
gggcgcggtctggacgcgggtgcgc

SEQ ID NO: 5017630 - DNA, 25 bp, Homo sapien
ccgccctacacagcgcagccgcgct

SEQ ID NO: 5017631 - DNA, 25 bp, Homo sapien
tcgctgggccgcacgtcccgtcccg

SEQ ID NO: 5017632 - DNA, 25 bp, Homo sapien
cgggaccgaccaactcgctgggccg

SEQ ID NO: 5017633 - DNA, 25 bp, Homo sapien
cgcagccgcgctcccgggcccacgt

SEQ ID NO: 5017634 - DNA, 25 bp, Homo sapien
attgacttcttctaccggccgcata

SEQ ID NO: 5017635 - DNA, 25 bp, Homo sapien
gagcagcaagtggaggacatcacca

SEQ ID NO: 5017636 - DNA, 25 bp, Homo sapien
ttcaccatcgtcagcctcatgtact

SEQ ID NO: 5017637 - DNA, 25 bp, Homo sapien
aatgcatttccggatgatcaacgag

SEQ ID NO: 5017638 - DNA, 25 bp, Homo sapien
tgcggatttgtgtacttaagtgatc

SEQ ID NO: 5017639 - DNA, 25 bp, Homo sapien
ctagaagacgttgcctttctgcgga

SEQ ID NO: 5017640 - DNA, 25 bp, Homo sapien
taagtgatcatcaatttgtctatgc

SEQ ID NO: 5017641 - DNA, 25 bp, Homo sapien
tatgcttcatttctcctcgatttag

SEQ ID NO: 5017642 - DNA, 25 bp, Homo sapien
tgtcatcactcaatgccatgaccat

SEQ ID NO: 5017643 - DNA, 25 bp, Homo sapien
ctttgtcatcactcaatgccatgac

SEQ ID NO: 5017644 - DNA, 25 bp, Homo sapien
tgatgaacaccacaccaatagtact

SEQ ID NO: 5017645 - DNA, 25 bp, Homo sapien
tgggcccagtgcagttcaaagcaag

SEQ ID NO: 5017646 - DNA, 25 bp, Homo sapien
gataagcttgggtgttcccgccatt

SEQ ID NO: 5017647 - DNA, 25 bp, Homo sapien
gacaccatccctcaagtagactggg

SEQ ID NO: 5017648 - DNA, 25 bp, Homo sapien
gaaatctgtaaatggttgcgatcag

SEQ ID NO: 5017649 - DNA, 25 bp, Homo sapien
cgatcagttagttgtaaacaccccg

SEQ ID NO: 5017650 - DNA, 25 bp, Homo sapien
aaacaccccggcactcagaccagac

SEQ ID NO: 5017651 - DNA, 25 bp, Homo sapien
tcagttagttgtaaacaccccggca

SEQ ID NO: 5017652 - DNA, 25 bp, Homo sapien
tccatcactcttcgaatcagccagt

SEQ ID NO: 5017653 - DNA, 25 bp, Homo sapien
tcccactgcctctgcggctgtcagg

SEQ ID NO: 5017654 - DNA, 25 bp, Homo sapien
tcactaagatctgttaatttgacaa

SEQ ID NO: 5017655 - DNA, 25 bp, Homo sapien
tctgcggctgtcaggacacccattt

SEQ ID NO: 5017656 - DNA, 25 bp, Homo sapien
tgacgattgtgatgataagcacctg

SEQ ID NO: 5017657 - DNA, 25 bp, Homo sapien
taagcacctgtcgttctccacttgc

SEQ ID NO: 5017658 - DNA, 25 bp, Homo sapien
atgggcctctttgtacgcaggtgaa

SEQ ID NO: 5017659 - DNA, 25 bp, Homo sapien
ttggcaatcacaacagaccctttgt

SEQ ID NO: 5017660 - DNA, 25 bp, Homo sapien
tttcctatccatataaccaagaaaa

SEQ ID NO: 5017661 - DNA, 25 bp, Homo sapien
tcattccactcagggccttaagagc

SEQ ID NO: 5017662 - DNA, 25 bp, Homo sapien
ccactcagggccttaagagcatctt

SEQ ID NO: 5017663 - DNA, 25 bp, Homo sapien
actcagggccttaagagcatcttta

SEQ ID NO: 5017664 - DNA, 25 bp, Homo sapien
aacggtcctgcattgattcccactg

SEQ ID NO: 5017665 - DNA, 25 bp, Homo sapien
tcaccactttcctctgtctgtacgg

SEQ ID NO: 5017666 - DNA, 25 bp, Homo sapien
gaggtctgatctctgccacgtccag

SEQ ID NO: 5017667 - DNA, 25 bp, Homo sapien
tttgtaaccggcgtccagacggcag

SEQ ID NO: 5017668 - DNA, 25 bp, Homo sapien
gtagctgcctgcataggagcctcgc

SEQ ID NO: 5017669 - DNA, 25 bp, Homo sapien
tggcgagtatacaccaatcaggaga

SEQ ID NO: 5017670 - DNA, 25 bp, Homo sapien
tgtaagacctcctaccacatggcga

SEQ ID NO: 5017671 - DNA, 25 bp, Homo sapien
tcagacgaggcattaaccccatggt

SEQ ID NO: 5017672 - DNA, 25 bp, Homo sapien
caatagtagattctgcgggagtgga

SEQ ID NO: 5017673 - DNA, 25 bp, Homo sapien
gagaagcgtcagtggcagctccgct

SEQ ID NO: 5017674 - DNA, 25 bp, Homo sapien
ggatttggctgtgatgagcctcagc

SEQ ID NO: 5017675 - DNA, 25 bp, Homo sapien
tccgctcacttggtgagtgagggat

SEQ ID NO: 5017676 - DNA, 25 bp, Homo sapien
tcgcaggtggtgaattcgactttac

SEQ ID NO: 5017677 - DNA, 25 bp, Homo sapien
tcgactttactgtggcattgtgaag

SEQ ID NO: 5017678 - DNA, 25 bp, Homo sapien
ggtgaattcgactttactgtggcat

SEQ ID NO: 5017679 - DNA, 25 bp, Homo sapien
gcagctgtttcgcaggtggtgaatt

SEQ ID NO: 5017680 - DNA, 25 bp, Homo sapien
ccagggcgtcagagcctggtgttcc

SEQ ID NO: 5017681 - DNA, 25 bp, Homo sapien
taaaggagactcttgtggttttaca

SEQ ID NO: 5017682 - DNA, 25 bp, Homo sapien
tcatcccagggcgtcagagcctggt

SEQ ID NO: 5017683 - DNA, 25 bp, Homo sapien
tggatgctgagtaaaggagactctt

SEQ ID NO: 5017684 - DNA, 25 bp, Homo sapien
caggtgcttgcttgattagagatgg

SEQ ID NO: 5017685 - DNA, 25 bp, Homo sapien
tcaggtgcttgcttgattagagatg

SEQ ID NO: 5017686 - DNA, 25 bp, Homo sapien
tgaaatcagtcgagatgccagctct

SEQ ID NO: 5017687 - DNA, 25 bp, Homo sapien
tgtgagtaggcagactccggccttg

SEQ ID NO: 5017688 - DNA, 25 bp, Homo sapien
cagaataactggtgttggccttcgt

SEQ ID NO: 5017689 - DNA, 25 bp, Homo sapien
ctggttgcgtgctctgtggacagaa

SEQ ID NO: 5017690 - DNA, 25 bp, Homo sapien
ttctctggactacatttgagtcaca

SEQ ID NO: 5017691 - DNA, 25 bp, Homo sapien
tgagtgcaatcacaaatgtatccac

SEQ ID NO: 5017692 - DNA, 25 bp, Homo sapien
tgccgctttctctggactacatttg

SEQ ID NO: 5017693 - DNA, 25 bp, Homo sapien
ctttgtgtcttcctgccgctttctc

SEQ ID NO: 5017694 - DNA, 25 bp, Homo sapien
tgacagttccataccagagctgctt

SEQ ID NO: 5017695 - DNA, 25 bp, Homo sapien
gaaccgttggcctctggagatttgt

SEQ ID NO: 5017696 - DNA, 25 bp, Homo sapien
tgcccgtaaggagctggctggatcc

SEQ ID NO: 5017697 - DNA, 25 bp, Homo sapien
acttccccggaacacttgctgatgg

SEQ ID NO: 5017698 - DNA, 25 bp, Homo sapien
cagatgggactgcaatgtttgtcgg

SEQ ID NO: 5017699 - DNA, 25 bp, Homo sapien
tttcagatgggactgcaatgtttgt

SEQ ID NO: 5017700 - DNA, 25 bp, Homo sapien
tgggactgcaatgtttgtcgggggt

SEQ ID NO: 5017701 - DNA, 25 bp, Homo sapien
ctggttttcagatgggactgcaatg

SEQ ID NO: 5017702 - DNA, 25 bp, Homo sapien
tgagccccagggtctaggctgccag

SEQ ID NO: 5017703 - DNA, 25 bp, Homo sapien
gccaggggctgcatctgctctgcat

SEQ ID NO: 5017704 - DNA, 25 bp, Homo sapien
gctgccaggggctgcatctgctctg

SEQ ID NO: 5017705 - DNA, 25 bp, Homo sapien
ctgagccccagggtctaggctgcca

SEQ ID NO: 5017706 - DNA, 25 bp, Homo sapien
acagggagaggtggactcgtcgttc

SEQ ID NO: 5017707 - DNA, 25 bp, Homo sapien
cgttctgtaagattacaatcccata

SEQ ID NO: 5017708 - DNA, 25 bp, Homo sapien
ttacaatcccataatctgcctcctg

SEQ ID NO: 5017709 - DNA, 25 bp, Homo sapien
gactcgtcgttctgtaagattacaa

SEQ ID NO: 5017710 - DNA, 25 bp, Homo sapien
gggaaataaaacagaatagcacatt

SEQ ID NO: 5017711 - DNA, 25 bp, Homo sapien
ctggggaaataaaacagaatagcac

SEQ ID NO: 5017712 - DNA, 25 bp, Homo sapien
ataaaacagaatagcacattttcac

SEQ ID NO: 5017713 - DNA, 25 bp, Homo sapien
aaataaaacagaatagcacattttc

SEQ ID NO: 5017714 - DNA, 25 bp, Homo sapien
tgacttgcaaacagttcaagaagga

SEQ ID NO: 5017715 - DNA, 25 bp, Homo sapien
gcttctgacttgcaaacagttcaag

SEQ ID NO: 5017716 - DNA, 25 bp, Homo sapien
cttctttccgatccaaggagagttg

SEQ ID NO: 5017717 - DNA, 25 bp, Homo sapien
ttctttccgatccaaggagagttgc

SEQ ID NO: 5017718 - DNA, 25 bp, Homo sapien
atggcagaacaccctgtatgagata

SEQ ID NO: 5017719 - DNA, 25 bp, Homo sapien
tggcagaacaccctgtatgagatag

SEQ ID NO: 5017720 - DNA, 25 bp, Homo sapien
actggagaattggccctgccatcac

SEQ ID NO: 5017721 - DNA, 25 bp, Homo sapien
ccactggagaattggccctgccatc

SEQ ID NO: 5017722 - DNA, 25 bp, Homo sapien
cactggagaattggccctgccatca

SEQ ID NO: 5017723 - DNA, 25 bp, Homo sapien
ctccagataggtcctgaccttggtt

SEQ ID NO: 5017724 - DNA, 25 bp, Homo sapien
tccagataggtcctgaccttggtta

SEQ ID NO: 5017725 - DNA, 25 bp, Homo sapien
cctccagataggtcctgaccttggt

SEQ ID NO: 5017726 - DNA, 25 bp, Homo sapien
ggggaagtgtccaaatgagcattcc

SEQ ID NO: 5017727 - DNA, 25 bp, Homo sapien
gcccagttgaattgacccaccttgg

SEQ ID NO: 5017728 - DNA, 25 bp, Homo sapien
cttgggcacctttccatgggattct

SEQ ID NO: 5017729 - DNA, 25 bp, Homo sapien
ttgacccaccttggataacttcctc

SEQ ID NO: 5017730 - DNA, 25 bp, Homo sapien
gggcacctttccatgggattctgct

SEQ ID NO: 5017731 - DNA, 25 bp, Homo sapien
agtgaaggtcggtaaggtgctgtca

SEQ ID NO: 5017732 - DNA, 25 bp, Homo sapien
gctgagtgaaggtcggtaaggtgct

SEQ ID NO: 5017733 - DNA, 25 bp, Homo sapien
gagtgaaggtcggtaaggtgctgtc

SEQ ID NO: 5017734 - DNA, 25 bp, Homo sapien
gagctgagtgaaggtcggtaaggtg

SEQ ID NO: 5017735 - DNA, 25 bp, Homo sapien
agtggctaaacagggttttcaatgt

SEQ ID NO: 5017736 - DNA, 25 bp, Homo sapien
acatcaaagtggctaaacagggttt

SEQ ID NO: 5017737 - DNA, 25 bp, Homo sapien
aagtggctaaacagggttttcaatg

SEQ ID NO: 5017738 - DNA, 25 bp, Homo sapien
tccacatcaaagtggctaaacaggg

SEQ ID NO: 5017739 - DNA, 25 bp, Homo sapien
tgagatcactgtagaagcacatgca

SEQ ID NO: 5017740 - DNA, 25 bp, Homo sapien
aaaaactatagtgtgatatcagacc

SEQ ID NO: 5017741 - DNA, 25 bp, Homo sapien
tacccattttcgaccaacggcaaca

SEQ ID NO: 5017742 - DNA, 25 bp, Homo sapien
tatccctgctattaccctattatag

SEQ ID NO: 5017743 - DNA, 25 bp, Homo sapien
ccctcttgtggtggtctaaggtcca

SEQ ID NO: 5017744 - DNA, 25 bp, Homo sapien
ggtgagagagaattaggagatccct

SEQ ID NO: 5017745 - DNA, 25 bp, Homo sapien
caaccttgaggaactcacttatgag

SEQ ID NO: 5017746 - DNA, 25 bp, Homo sapien
cagcatagctagacttctcaggaaa

SEQ ID NO: 5017747 - DNA, 25 bp, Homo sapien
gacccaacagggatactataggaag

SEQ ID NO: 5017748 - DNA, 25 bp, Homo sapien
ggtagactggagaacaaatcctgga

SEQ ID NO: 5017749 - DNA, 25 bp, Homo sapien
catccaatcagtagagactatgtct

SEQ ID NO: 5017750 - DNA, 25 bp, Homo sapien
ttgctgccatcaactcagagagcct

SEQ ID NO: 5017751 - DNA, 25 bp, Homo sapien
tttgttcacacctgtcatatctcca

SEQ ID NO: 5017752 - DNA, 25 bp, Homo sapien
cacacctgtcatatctccatttata

SEQ ID NO: 5017753 - DNA, 25 bp, Homo sapien
ccatttataacagctattagggaat

SEQ ID NO: 5017754 - DNA, 25 bp, Homo sapien
taacagctattagggaattcctctc

SEQ ID NO: 5017755 - DNA, 25 bp, Homo sapien
tatctgctcatctctccaccatgac

SEQ ID NO: 5017756 - DNA, 25 bp, Homo sapien
ctatctgctcatctctccaccatga

SEQ ID NO: 5017757 - DNA, 25 bp, Homo sapien
cctgcttcatgtgtcggaacaatgg

SEQ ID NO: 5017758 - DNA, 25 bp, Homo sapien
tgctggacgcttggtcaaaggagaa

SEQ ID NO: 5017759 - DNA, 25 bp, Homo sapien
caaaatggagactgctaggaatcac

SEQ ID NO: 5017760 - DNA, 25 bp, Homo sapien
tggtggtatcaacagtaagaactgc

SEQ ID NO: 5017761 - DNA, 25 bp, Homo sapien
aacataggagtgctcagcaccagga

SEQ ID NO: 5017762 - DNA, 25 bp, Homo sapien
tctgtgtttgaaccaacataggagt

SEQ ID NO: 5017763 - DNA, 25 bp, Homo sapien
aaattcctgagaccaccactagggc

SEQ ID NO: 5017764 - DNA, 25 bp, Homo sapien
ttcctgagaccaccactagggcagt

SEQ ID NO: 5017765 - DNA, 25 bp, Homo sapien
gctgcagattgggaggggaaacacc

SEQ ID NO: 5017766 - DNA, 25 bp, Homo sapien
gggaaacaccaaatgccacaaggag

SEQ ID NO: 5017767 - DNA, 25 bp, Homo sapien
tgcagattgggaggggaaacaccaa

SEQ ID NO: 5017768 - DNA, 25 bp, Homo sapien
gctgaccctggctgcagattgggag

SEQ ID NO: 5017769 - DNA, 25 bp, Homo sapien
ctgttgcaccccaaaggatcagtgc

SEQ ID NO: 5017770 - DNA, 25 bp, Homo sapien
aaaggatcagtgcagacaccccacc

SEQ ID NO: 5017771 - DNA, 25 bp, Homo sapien
accccaaaggatcagtgcagacacc

SEQ ID NO: 5017772 - DNA, 25 bp, Homo sapien
gttgcaccccaaaggatcagtgcag

SEQ ID NO: 5017773 - DNA, 25 bp, Homo sapien
agcaccttctgtagtgctgtaagga

SEQ ID NO: 5017774 - DNA, 25 bp, Homo sapien
ctgtagtgctgtaaggactgtaagc

SEQ ID NO: 5017775 - DNA, 25 bp, Homo sapien
gtgctgtaaggactgtaagcacctt

SEQ ID NO: 5017776 - DNA, 25 bp, Homo sapien
accttctgtagtgctgtaaggactg

SEQ ID NO: 5017777 - DNA, 25 bp, Homo sapien
ggtggaccacgctttctcacccaat

SEQ ID NO: 5017778 - DNA, 25 bp, Homo sapien
caagttccgcctacggggtatgagt

SEQ ID NO: 5017779 - DNA, 25 bp, Homo sapien
tatgagtgagtatttaggaaccttc

SEQ ID NO: 5017780 - DNA, 25 bp, Homo sapien
cagacagggttgtgtaacaagttcc

SEQ ID NO: 5017781 - DNA, 25 bp, Homo sapien
tcaccaggaaacgaatccactgtca

SEQ ID NO: 5017782 - DNA, 25 bp, Homo sapien
gaatccactgtcaccttgaccctgg

SEQ ID NO: 5017783 - DNA, 25 bp, Homo sapien
gggtcctcaccaggaaacgaatcca

SEQ ID NO: 5017784 - DNA, 25 bp, Homo sapien
ggaaacgaatccactgtcaccttga

SEQ ID NO: 5017785 - DNA, 25 bp, Homo sapien
tatccttaagagctcacatttgccc

SEQ ID NO: 5017786 - DNA, 25 bp, Homo sapien
ttgcattcctcgaaagggcagagca

SEQ ID NO: 5017787 - DNA, 25 bp, Homo sapien
catctgctaaaagaccaatctgtga

SEQ ID NO: 5017788 - DNA, 25 bp, Homo sapien
gaacagcgtaacttcattgcgcaaa

SEQ ID NO: 5017789 - DNA, 25 bp, Homo sapien
catgcaggaaatgcctggctaacat

SEQ ID NO: 5017790 - DNA, 25 bp, Homo sapien
gagcatattcgtgtgggaaaatgca

SEQ ID NO: 5017791 - DNA, 25 bp, Homo sapien
taacggccgagcatattcgtgtggg

SEQ ID NO: 5017792 - DNA, 25 bp, Homo sapien
cctggctaacataacggccgagcat

SEQ ID NO: 5017793 - DNA, 25 bp, Homo sapien
gcttgaatctgttctgctggcctct

SEQ ID NO: 5017794 - DNA, 25 bp, Homo sapien
cacatttagccttggatttgcttga

SEQ ID NO: 5017795 - DNA, 25 bp, Homo sapien
agggagggtgtggatcttcttcctt

SEQ ID NO: 5017796 - DNA, 25 bp, Homo sapien
ccccttcacatttagccttggattt

SEQ ID NO: 5017797 - DNA, 25 bp, Homo sapien
aatatgggcacttctgtgaaacccg

SEQ ID NO: 5017798 - DNA, 25 bp, Homo sapien
tccatttgatgacgacgggccattt

SEQ ID NO: 5017799 - DNA, 25 bp, Homo sapien
tatggcaggcgtccaaatatgggca

SEQ ID NO: 5017800 - DNA, 25 bp, Homo sapien
taagcttgtaatccgctctgttggc

SEQ ID NO: 5017801 - DNA, 25 bp, Homo sapien
gagactgtcttctccatactcccag

SEQ ID NO: 5017802 - DNA, 25 bp, Homo sapien
caggcctaacacaaagagactgtct

SEQ ID NO: 5017803 - DNA, 25 bp, Homo sapien
cttagggagatgcaggcctaacaca

SEQ ID NO: 5017804 - DNA, 25 bp, Homo sapien
gagatgcaggcctaacacaaagaga

SEQ ID NO: 5017805 - DNA, 25 bp, Homo sapien
tctctgtatcattccaattttagta

SEQ ID NO: 5017806 - DNA, 25 bp, Homo sapien
tagtatatgtgctgctgaagagagc

SEQ ID NO: 5017807 - DNA, 25 bp, Homo sapien
atccttgtgcaagggccatggtaat

SEQ ID NO: 5017808 - DNA, 25 bp, Homo sapien
ccttgtgcaagggccatggtaatct

SEQ ID NO: 5017809 - DNA, 25 bp, Homo sapien
tgtaatgccgatagacatcagggag

SEQ ID NO: 5017810 - DNA, 25 bp, Homo sapien
cacactctgtaatgccgatagacat

SEQ ID NO: 5017811 - DNA, 25 bp, Homo sapien
tgcccctgcatatccctttgccaca

SEQ ID NO: 5017812 - DNA, 25 bp, Homo sapien
tttgccacactctgtaatgccgata

SEQ ID NO: 5017813 - DNA, 25 bp, Homo sapien
caggctttgagcaccagaggctcat

SEQ ID NO: 5017814 - DNA, 25 bp, Homo sapien
tttgagcaccagaggctcatgtcta

SEQ ID NO: 5017815 - DNA, 25 bp, Homo sapien
ggctcatgtctaccacagatggccc

SEQ ID NO: 5017816 - DNA, 25 bp, Homo sapien
agcaccagaggctcatgtctaccac

SEQ ID NO: 5017817 - DNA, 25 bp, Homo sapien
ttcatctgtcaaacatttgtcggta

SEQ ID NO: 5017818 - DNA, 25 bp, Homo sapien
catttgtcggtactagctttgtgca

SEQ ID NO: 5017819 - DNA, 25 bp, Homo sapien
tgtcaaacatttgtcggtactagct

SEQ ID NO: 5017820 - DNA, 25 bp, Homo sapien
aacatttgtcggtactagctttgtg

SEQ ID NO: 5017821 - DNA, 25 bp, Homo sapien
ccaacttggaagatcactttgaccc

SEQ ID NO: 5017822 - DNA, 25 bp, Homo sapien
gaaatgtttatatttggctgcacca

SEQ ID NO: 5017823 - DNA, 25 bp, Homo sapien
aatgtttatatttggctgcaccaac

SEQ ID NO: 5017824 - DNA, 25 bp, Homo sapien
cttggaagatcactttgacccagcc

SEQ ID NO: 5017825 - DNA, 25 bp, Homo sapien
aggtagcccaagaaacactaaggag

SEQ ID NO: 5017826 - DNA, 25 bp, Homo sapien
cagctgtgtaggcacgtgacaggta

SEQ ID NO: 5017827 - DNA, 25 bp, Homo sapien
cacgtgacaggtagcccaagaaaca

SEQ ID NO: 5017828 - DNA, 25 bp, Homo sapien
tgtgtaggcacgtgacaggtagccc

SEQ ID NO: 5017829 - DNA, 25 bp, Homo sapien
tccacgttttcgagtgtcctgcaca

SEQ ID NO: 5017830 - DNA, 25 bp, Homo sapien
gaagcagtctgagtaagtgcagcaa

SEQ ID NO: 5017831 - DNA, 25 bp, Homo sapien
tgcacagtccaaacgtgaaaatccg

SEQ ID NO: 5017832 - DNA, 25 bp, Homo sapien
gaaaatccgagttcagccaccaaat

SEQ ID NO: 5017833 - DNA, 25 bp, Homo sapien
gtgggtatgctaagccttcctggcc

SEQ ID NO: 5017834 - DNA, 25 bp, Homo sapien
gggtatgctaagccttcctggccac

SEQ ID NO: 5017835 - DNA, 25 bp, Homo sapien
tgggtatgctaagccttcctggcca

SEQ ID NO: 5017836 - DNA, 25 bp, Homo sapien
tgagactgaggaccaaggaagagag

SEQ ID NO: 5017837 - DNA, 25 bp, Homo sapien
gagactgaggaccaaggaagagaga

SEQ ID NO: 5017838 - DNA, 25 bp, Homo sapien
ttgagactgaggaccaaggaagaga

SEQ ID NO: 5017839 - DNA, 25 bp, Homo sapien
tctgcccttgagactgaggaccaag

SEQ ID NO: 5017840 - DNA, 25 bp, Homo sapien
gtgtagggacacctgagaagccctt

SEQ ID NO: 5017841 - DNA, 25 bp, Homo sapien
tgtagggacacctgagaagcccttt

SEQ ID NO: 5017842 - DNA, 25 bp, Homo sapien
gcctcttatgaggacagagctggta

SEQ ID NO: 5017843 - DNA, 25 bp, Homo sapien
taaaaataagggcactaggctggtg

SEQ ID NO: 5017844 - DNA, 25 bp, Homo sapien
gcaaatcagtggagtgcacttcctg

SEQ ID NO: 5017845 - DNA, 25 bp, Homo sapien
gctggcgagtagacgaggcctctta

SEQ ID NO: 5017846 - DNA, 25 bp, Homo sapien
cgcgcgccgtttagggtgtttgaag

SEQ ID NO: 5017847 - DNA, 25 bp, Homo sapien
gcggaggatgcgcgcgccgtttagg

SEQ ID NO: 5017848 - DNA, 25 bp, Homo sapien
gcggagtcggtgagtgggccaggcg

SEQ ID NO: 5017849 - DNA, 25 bp, Homo sapien
tgcgtgtcggcggagtcggtgagtg

SEQ ID NO: 5017850 - DNA, 25 bp, Homo sapien
gaggaatgccatctgggtttagatt

SEQ ID NO: 5017851 - DNA, 25 bp, Homo sapien
aatgccatctgggtttagattctca

SEQ ID NO: 5017852 - DNA, 25 bp, Homo sapien
gggtttagattctcactagattgtc

SEQ ID NO: 5017853 - DNA, 25 bp, Homo sapien
gtcctgtgaggaatgccatctgggt

SEQ ID NO: 5017854 - DNA, 25 bp, Homo sapien
ggcagagaagactgatggtgccact

SEQ ID NO: 5017855 - DNA, 25 bp, Homo sapien
cttttgaggttttgaacatgaggca

SEQ ID NO: 5017856 - DNA, 25 bp, Homo sapien
gaggcagagaagactgatggtgcca

SEQ ID NO: 5017857 - DNA, 25 bp, Homo sapien
gaagacagtgtcaatagtcttttga

SEQ ID NO: 5017858 - DNA, 25 bp, Homo sapien
tcaggaggacagaccgatttttttc

SEQ ID NO: 5017859 - DNA, 25 bp, Homo sapien
agatcaggaggacagaccgattttt

SEQ ID NO: 5017860 - DNA, 25 bp, Homo sapien
gatcaggaggacagaccgatttttt

SEQ ID NO: 5017861 - DNA, 25 bp, Homo sapien
cagatcaggaggacagaccgatttt

SEQ ID NO: 5017862 - DNA, 25 bp, Homo sapien
gagtaggaggtaaagttccactgta

SEQ ID NO: 5017863 - DNA, 25 bp, Homo sapien
ggatttcttcctcacagataagagg

SEQ ID NO: 5017864 - DNA, 25 bp, Homo sapien
tgtagctcggatttcttcctcacag

SEQ ID NO: 5017865 - DNA, 25 bp, Homo sapien
taggaggtaaagttccactgtagag

SEQ ID NO: 5017866 - DNA, 25 bp, Homo sapien
tcttggcctttctcacgggacttcc

SEQ ID NO: 5017867 - DNA, 25 bp, Homo sapien
gatttctcataacatgccttcttgg

SEQ ID NO: 5017868 - DNA, 25 bp, Homo sapien
ctttctcacgggacttcctggaaca

SEQ ID NO: 5017869 - DNA, 25 bp, Homo sapien
cctggaacaagatgacttttgttgg

SEQ ID NO: 5017870 - DNA, 25 bp, Homo sapien
tctggggatgtcattatcatggctg

SEQ ID NO: 5017871 - DNA, 25 bp, Homo sapien
tggggatgtcattatcatggctgac

SEQ ID NO: 5017872 - DNA, 25 bp, Homo sapien
atcactctggggatgtcattatcat

SEQ ID NO: 5017873 - DNA, 25 bp, Homo sapien
cactctggggatgtcattatcatgg

SEQ ID NO: 5017874 - DNA, 25 bp, Homo sapien
tgtctgtgcagctccgatcagcttg

SEQ ID NO: 5017875 - DNA, 25 bp, Homo sapien
ctgtgcagctccgatcagcttggct

SEQ ID NO: 5017876 - DNA, 25 bp, Homo sapien
gcttggctttgattaccacccacat

SEQ ID NO: 5017877 - DNA, 25 bp, Homo sapien
tcagcttggctttgattaccaccca

SEQ ID NO: 5017878 - DNA, 25 bp, Homo sapien
aaatctcaagcacactgacaactgg

SEQ ID NO: 5017879 - DNA, 25 bp, Homo sapien
ctgctttatatgaggtccaattcct

SEQ ID NO: 5017880 - DNA, 25 bp, Homo sapien
tgtgcgttgcttgggggcatggaga

SEQ ID NO: 5017881 - DNA, 25 bp, Homo sapien
cttgctgctttatatgaggtccaat

SEQ ID NO: 5017882 - DNA, 25 bp, Homo sapien
tgctgctttatatgaggtccaattc

SEQ ID NO: 5017883 - DNA, 25 bp, Homo sapien
ccgagttagacttgttgagtcttaa

SEQ ID NO: 5017884 - DNA, 25 bp, Homo sapien
agtccgagttagacttgttgagtct

SEQ ID NO: 5017885 - DNA, 25 bp, Homo sapien
gatgaactgggaatcaacatatttg

SEQ ID NO: 5017886 - DNA, 25 bp, Homo sapien
gggaatcaacatatttgggatggat

SEQ ID NO: 5017887 - DNA, 25 bp, Homo sapien
ttagaagttccggtgcccacttagc

SEQ ID NO: 5017888 - DNA, 25 bp, Homo sapien
tagttcctcaggcattaccgccttc

SEQ ID NO: 5017889 - DNA, 25 bp, Homo sapien
tctgggaatgatgtgcttcaaactt

SEQ ID NO: 5017890 - DNA, 25 bp, Homo sapien
tttaactggtccctcatatgccagc

SEQ ID NO: 5017891 - DNA, 25 bp, Homo sapien
gaatgcatgtaatgagtacccagac

SEQ ID NO: 5017892 - DNA, 25 bp, Homo sapien
gggctatgcattcaccttctctgat

SEQ ID NO: 5017893 - DNA, 25 bp, Homo sapien
gtacccagacagcatgacacttttt

SEQ ID NO: 5017894 - DNA, 25 bp, Homo sapien
tggctgagtacatccgggctatgca

SEQ ID NO: 5017895 - DNA, 25 bp, Homo sapien
tggtcctcagtgcaggtgaacttga

SEQ ID NO: 5017896 - DNA, 25 bp, Homo sapien
gcttcccctcccaatatgtagtgct

SEQ ID NO: 5017897 - DNA, 25 bp, Homo sapien
gctggaatagggaacacaaggtcat

SEQ ID NO: 5017898 - DNA, 25 bp, Homo sapien
cattgtcatggattaggatgctctg

SEQ ID NO: 5017899 - DNA, 25 bp, Homo sapien
cgtggatcattttaaccggctgctg

SEQ ID NO: 5017900 - DNA, 25 bp, Homo sapien
tcccaaagccaatgccgtggatcat

SEQ ID NO: 5017901 - DNA, 25 bp, Homo sapien
tttgatgtgcatgtatctcccattt

SEQ ID NO: 5017902 - DNA, 25 bp, Homo sapien
ctttaactggtttgtcttctgctct

SEQ ID NO: 5017903 - DNA, 25 bp, Homo sapien
gacttgaggtcagtgttgctggtaa

SEQ ID NO: 5017904 - DNA, 25 bp, Homo sapien
tatggcagtgaaaaagctttgaccc

SEQ ID NO: 5017905 - DNA, 25 bp, Homo sapien
tgctggtaagtaggcctatggcagt

SEQ ID NO: 5017906 - DNA, 25 bp, Homo sapien
gcagcattgagggtcgtacgcttca

SEQ ID NO: 5017907 - DNA, 25 bp, Homo sapien
aatcaaacaatctgccttgcttcag

SEQ ID NO: 5017908 - DNA, 25 bp, Homo sapien
ctggaatcaaacaatctgccttgct

SEQ ID NO: 5017909 - DNA, 25 bp, Homo sapien
atcaaacaatctgccttgcttcagc

SEQ ID NO: 5017910 - DNA, 25 bp, Homo sapien
ggaatcaaacaatctgccttgcttc

SEQ ID NO: 5017911 - DNA, 25 bp, Homo sapien
cagagccacctgaagacctggagtg

SEQ ID NO: 5017912 - DNA, 25 bp, Homo sapien
aagacctggagtgtgcacctgggat

SEQ ID NO: 5017913 - DNA, 25 bp, Homo sapien
acctgaagacctggagtgtgcacct

SEQ ID NO: 5017914 - DNA, 25 bp, Homo sapien
ttcatggggaaaccctgggatggca

SEQ ID NO: 5017915 - DNA, 25 bp, Homo sapien
gggctgcgctgcaatgtgaccactt

SEQ ID NO: 5017916 - DNA, 25 bp, Homo sapien
gctgcaatgtgaccacttgaacgga

SEQ ID NO: 5017917 - DNA, 25 bp, Homo sapien
ccacttgaacggattgtggtcatca

SEQ ID NO: 5017918 - DNA, 25 bp, Homo sapien
attgtggtcatcaccggtgggccag

SEQ ID NO: 5017919 - DNA, 25 bp, Homo sapien
tgcatgccaaagaggttaccgtggc

SEQ ID NO: 5017920 - DNA, 25 bp, Homo sapien
ccaaagaggttaccgtggcagctgc

SEQ ID NO: 5017921 - DNA, 25 bp, Homo sapien
aggttaccgtggcagctgcaatcat

SEQ ID NO: 5017922 - DNA, 25 bp, Homo sapien
tggcatgcatgccaaagaggttacc

SEQ ID NO: 5017923 - DNA, 25 bp, Homo sapien
cagcaggatgctggaatgtcttcat

SEQ ID NO: 5017924 - DNA, 25 bp, Homo sapien
aaaaggtaaaagagtactatatgat

SEQ ID NO: 5017925 - DNA, 25 bp, Homo sapien
ttctgtcagcaggatgctggaatgt

SEQ ID NO: 5017926 - DNA, 25 bp, Homo sapien
tgtcagcaggatgctggaatgtctt

SEQ ID NO: 5017927 - DNA, 25 bp, Homo sapien
tttgctttgagatggcacaggtcac

SEQ ID NO: 5017928 - DNA, 25 bp, Homo sapien
ttcttcagagaaagtactcatatac

SEQ ID NO: 5017929 - DNA, 25 bp, Homo sapien
caacaggagtcctttctaaaatgcg

SEQ ID NO: 5017930 - DNA, 25 bp, Homo sapien
gcacttcagcacaccaacaggagtc

SEQ ID NO: 5017931 - DNA, 25 bp, Homo sapien
gcatgtcagtttgaccgggagctaa

SEQ ID NO: 5017932 - DNA, 25 bp, Homo sapien
tatactctgcgtgaagcatgtcagt

SEQ ID NO: 5017933 - DNA, 25 bp, Homo sapien
gtgatcatcagtatactctgcgtga

SEQ ID NO: 5017934 - DNA, 25 bp, Homo sapien
cgggagctaatgcttctgccccaac

SEQ ID NO: 5017935 - DNA, 25 bp, Homo sapien
ggcttcatttcctggggaatttcat

SEQ ID NO: 5017936 - DNA, 25 bp, Homo sapien
gcagctcggggaaggcttcatttcc

SEQ ID NO: 5017937 - DNA, 25 bp, Homo sapien
ggtgcagctcggggaaggcttcatt

SEQ ID NO: 5017938 - DNA, 25 bp, Homo sapien
gcttcatttcctggggaatttcatg

SEQ ID NO: 5017939 - DNA, 25 bp, Homo sapien
ggaagctatgaccttggagaacgca

SEQ ID NO: 5017940 - DNA, 25 bp, Homo sapien
tatgcgtaaaactccaacttagtgt

SEQ ID NO: 5017941 - DNA, 25 bp, Homo sapien
cctgctgttggtgtatcgcatgaga

SEQ ID NO: 5017942 - DNA, 25 bp, Homo sapien
catccagtgctgcttatcagaaggc

SEQ ID NO: 5017943 - DNA, 25 bp, Homo sapien
tactttctcgtaatcctggttctgt

SEQ ID NO: 5017944 - DNA, 25 bp, Homo sapien
tatcaggctccctttaacaaatgtt

SEQ ID NO: 5017945 - DNA, 25 bp, Homo sapien
ttgtactttctcgtaatcctggttc

SEQ ID NO: 5017946 - DNA, 25 bp, Homo sapien
tgctcttttgcctatcaggctccct

SEQ ID NO: 5017947 - DNA, 25 bp, Homo sapien
taaaatgagtgacatcgacagctgc

SEQ ID NO: 5017948 - DNA, 25 bp, Homo sapien
aatgagtgacatcgacagctgccat

SEQ ID NO: 5017949 - DNA, 25 bp, Homo sapien
gaatataaaatgagtgacatcgaca

SEQ ID NO: 5017950 - DNA, 25 bp, Homo sapien
tataaaatgagtgacatcgacagct

SEQ ID NO: 5017951 - DNA, 25 bp, Homo sapien
ttctttagataaaggtctgtcagca

SEQ ID NO: 5017952 - DNA, 25 bp, Homo sapien
taagagtgattgtattacattcctg

SEQ ID NO: 5017953 - DNA, 25 bp, Homo sapien
tggctaagagtgattgtattacatt

SEQ ID NO: 5017954 - DNA, 25 bp, Homo sapien
gagtgattgtattacattcctgttt

SEQ ID NO: 5017955 - DNA, 25 bp, Homo sapien
aaaaactgaagttgtgctggcaaga

SEQ ID NO: 5017956 - DNA, 25 bp, Homo sapien
caagcttcccttctttggtgaccca

SEQ ID NO: 5017957 - DNA, 25 bp, Homo sapien
cttctttggcctgtggacggttggt

SEQ ID NO: 5017958 - DNA, 25 bp, Homo sapien
cagtagccagttggagtacagcagg

SEQ ID NO: 5017959 - DNA, 25 bp, Homo sapien
catggagacagaaaccactgtgccc

SEQ ID NO: 5017960 - DNA, 25 bp, Homo sapien
cagcagctagctagtttccaggcag

SEQ ID NO: 5017961 - DNA, 25 bp, Homo sapien
tacttagctcctatgcacttggcaa

SEQ ID NO: 5017962 - DNA, 25 bp, Homo sapien
gagtagcaggtgacagtaagcccta

SEQ ID NO: 5017963 - DNA, 25 bp, Homo sapien
gatttggctattgagtacagctttg

SEQ ID NO: 5017964 - DNA, 25 bp, Homo sapien
tcaaagcatacaaaagggcttacag

SEQ ID NO: 5017965 - DNA, 25 bp, Homo sapien
tcaccaggaggtaaccacaattatg

SEQ ID NO: 5017966 - DNA, 25 bp, Homo sapien
ctgtattttgtggtcctttatgcac

SEQ ID NO: 5017967 - DNA, 25 bp, Homo sapien
cactgttgtgcagtctgtgagctgc

SEQ ID NO: 5017968 - DNA, 25 bp, Homo sapien
tatccgagggctttccaatagaatc

SEQ ID NO: 5017969 - DNA, 25 bp, Homo sapien
tcaaagggaacaatttcctgcgttc

SEQ ID NO: 5017970 - DNA, 25 bp, Homo sapien
gagctgccgactcattatccgaggg

SEQ ID NO: 5017971 - DNA, 25 bp, Homo sapien
caagataagttgtggtacctttgat

SEQ ID NO: 5017972 - DNA, 25 bp, Homo sapien
tcatttcccataacagcgactagag

SEQ ID NO: 5017973 - DNA, 25 bp, Homo sapien
ttggcactccctagaggaaaccagt

SEQ ID NO: 5017974 - DNA, 25 bp, Homo sapien
ccagtgagacatcgggaaataaatc

SEQ ID NO: 5017975 - DNA, 25 bp, Homo sapien
tccgcatagattttgcaagccgtaa

SEQ ID NO: 5017976 - DNA, 25 bp, Homo sapien
tttggatttccgcatagattttgca

SEQ ID NO: 5017977 - DNA, 25 bp, Homo sapien
catagattttgcaagccgtaaatac

SEQ ID NO: 5017978 - DNA, 25 bp, Homo sapien
ttgcaagccgtaaatacaaaatttg

SEQ ID NO: 5017979 - DNA, 25 bp, Homo sapien
cccatcatgatgtaggtcaaaagca

SEQ ID NO: 5017980 - DNA, 25 bp, Homo sapien
cagctagctgtatgacaaagatgcc

SEQ ID NO: 5017981 - DNA, 25 bp, Homo sapien
tattgactctgtgcagccttcgcct

SEQ ID NO: 5017982 - DNA, 25 bp, Homo sapien
caaagatgcctccttttgaacagta

SEQ ID NO: 5017983 - DNA, 25 bp, Homo sapien
cataggcaggcaatataggaggtga

SEQ ID NO: 5017984 - DNA, 25 bp, Homo sapien
tgaaaggctctagcacagccaccag

SEQ ID NO: 5017985 - DNA, 25 bp, Homo sapien
tgaaccgacagtaggtacttatgcc

SEQ ID NO: 5017986 - DNA, 25 bp, Homo sapien
cagccaccaggcatacaattaggga

SEQ ID NO: 5017987 - DNA, 25 bp, Homo sapien
cccttgttagttggcactgaacaca

SEQ ID NO: 5017988 - DNA, 25 bp, Homo sapien
ttgttagttggcactgaacacaaga

SEQ ID NO: 5017989 - DNA, 25 bp, Homo sapien
caaagcttgattgactaagtgggta

SEQ ID NO: 5017990 - DNA, 25 bp, Homo sapien
tttaacccttgttagttggcactga

SEQ ID NO: 5017991 - DNA, 25 bp, Homo sapien
tcatgcagatttggtcacactagat

SEQ ID NO: 5017992 - DNA, 25 bp, Homo sapien
tttctgtagtgatgatagcctctta

SEQ ID NO: 5017993 - DNA, 25 bp, Homo sapien
caccatagaacttggtagggatgag

SEQ ID NO: 5017994 - DNA, 25 bp, Homo sapien
gtgatgatagcctcttacattccct

SEQ ID NO: 5017995 - DNA, 25 bp, Homo sapien
gatagtgctccctatctgaaaagtc

SEQ ID NO: 5017996 - DNA, 25 bp, Homo sapien
cctgactgacacatactactcattt

SEQ ID NO: 5017997 - DNA, 25 bp, Homo sapien
gctttacacctccatgaggtcctga

SEQ ID NO: 5017998 - DNA, 25 bp, Homo sapien
tgtgagcattactctgactcttgga

SEQ ID NO: 5017999 - DNA, 25 bp, Homo sapien
tcaaagtaataggaggactatgcaa

SEQ ID NO: 5018000 - DNA, 25 bp, Homo sapien
tggagacaactcctcaacattgacc

SEQ ID NO: 5018001 - DNA, 25 bp, Homo sapien
cagtccagttccatatgttccattg

SEQ ID NO: 5018002 - DNA, 25 bp, Homo sapien
catagaggagtcgtaagagttgcct

SEQ ID NO: 5018003 - DNA, 25 bp, Homo sapien
ggctgcaggtgaactcaaaagtgga

SEQ ID NO: 5018004 - DNA, 25 bp, Homo sapien
gatggtggtgattccatagcatctg

SEQ ID NO: 5018005 - DNA, 25 bp, Homo sapien
ctgccttaaatggaagcatatcaga

SEQ ID NO: 5018006 - DNA, 25 bp, Homo sapien
tctgcttcaacctctgtgttaccac

SEQ ID NO: 5018007 - DNA, 25 bp, Homo sapien
gctggtgttccccatcgtgcatgca

SEQ ID NO: 5018008 - DNA, 25 bp, Homo sapien
taaacaaggttgcttcccctgctgg

SEQ ID NO: 5018009 - DNA, 25 bp, Homo sapien
gatgaggtctccaaggaaaatcttg

SEQ ID NO: 5018010 - DNA, 25 bp, Homo sapien
ctagatgaggtagccctgaggaagc

SEQ ID NO: 5018011 - DNA, 25 bp, Homo sapien
ttaagggtggatctaggtcactctg

SEQ ID NO: 5018012 - DNA, 25 bp, Homo sapien
gctcctgaggggttgcgctcctaga

SEQ ID NO: 5018013 - DNA, 25 bp, Homo sapien
gaggggttgcgctcctagacttcat

SEQ ID NO: 5018014 - DNA, 25 bp, Homo sapien
ggtggatctaggtcactctggactt

SEQ ID NO: 5018015 - DNA, 25 bp, Homo sapien
acaatgcagttgtgacttccctgga

SEQ ID NO: 5018016 - DNA, 25 bp, Homo sapien
tccctggatgcatcagcgttaaagc

SEQ ID NO: 5018017 - DNA, 25 bp, Homo sapien
aatatgcagggccagaccagcaggt

SEQ ID NO: 5018018 - DNA, 25 bp, Homo sapien
gcgttaaagcagacacaagcactga

SEQ ID NO: 5018019 - DNA, 25 bp, Homo sapien
tcaacagttccagaactgaaagtaa

SEQ ID NO: 5018020 - DNA, 25 bp, Homo sapien
ctgcagccaccgggctgtgctctgt

SEQ ID NO: 5018021 - DNA, 25 bp, Homo sapien
gccaccgggctgtgctctgtagagc

SEQ ID NO: 5018022 - DNA, 25 bp, Homo sapien
cagccaccgggctgtgctctgtaga

SEQ ID NO: 5018023 - DNA, 25 bp, Homo sapien
ccagtagtcatagcatggtagccaa

SEQ ID NO: 5018024 - DNA, 25 bp, Homo sapien
gatccagccgacagtccagttgttg

SEQ ID NO: 5018025 - DNA, 25 bp, Homo sapien
cagttgttgcctatacccgcagtca

SEQ ID NO: 5018026 - DNA, 25 bp, Homo sapien
tcataatcaagaaacgcctccaggc

SEQ ID NO: 5018027 - DNA, 25 bp, Homo sapien
tgacctgggtggaatatccggagca

SEQ ID NO: 5018028 - DNA, 25 bp, Homo sapien
atctgagtgcttgattaaaatgtat

SEQ ID NO: 5018029 - DNA, 25 bp, Homo sapien
catgacctgggtggaatatccggag

SEQ ID NO: 5018030 - DNA, 25 bp, Homo sapien
tgggtggaatatccggagcagttct

SEQ ID NO: 5018031 - DNA, 25 bp, Homo sapien
ttccagacccatacaaatcctcttt

SEQ ID NO: 5018032 - DNA, 25 bp, Homo sapien
tctttggaaagcctctagcacttca

SEQ ID NO: 5018033 - DNA, 25 bp, Homo sapien
gtaatgtccagtggcttgaacgata

SEQ ID NO: 5018034 - DNA, 25 bp, Homo sapien
cttgaacgatagaaagctggagtca

SEQ ID NO: 5018035 - DNA, 25 bp, Homo sapien
taaagctcgtggaaaagcttatatc

SEQ ID NO: 5018036 - DNA, 25 bp, Homo sapien
catgtctccgggtgaagttctcttc

SEQ ID NO: 5018037 - DNA, 25 bp, Homo sapien
cagtgtccccagaagctgtagaatt

SEQ ID NO: 5018038 - DNA, 25 bp, Homo sapien
aagcttatatctcctatgtccagtg

SEQ ID NO: 5018039 - DNA, 25 bp, Homo sapien
ttggaattttcgtttgctgactcat

SEQ ID NO: 5018040 - DNA, 25 bp, Homo sapien
tttggaattttcgtttgctgactca

SEQ ID NO: 5018041 - DNA, 25 bp, Homo sapien
ttttggaattttcgtttgctgactc

SEQ ID NO: 5018042 - DNA, 25 bp, Homo sapien
cctactgtatgtgccagggttccaa

SEQ ID NO: 5018043 - DNA, 25 bp, Homo sapien
catgtgagtaagcaaaaactggcag

SEQ ID NO: 5018044 - DNA, 25 bp, Homo sapien
tacagcatagctccaattcaggaag

SEQ ID NO: 5018045 - DNA, 25 bp, Homo sapien
gattgaaatagtcctcagctctggg

SEQ ID NO: 5018046 - DNA, 25 bp, Homo sapien
ggtggatccatttggactcagtgtc

SEQ ID NO: 5018047 - DNA, 25 bp, Homo sapien
tgtctgcacatctttgatttcgtcc

SEQ ID NO: 5018048 - DNA, 25 bp, Homo sapien
tcatctcataatcaggtggatccat

SEQ ID NO: 5018049 - DNA, 25 bp, Homo sapien
cttcatatgcaccagtaacagaggg

SEQ ID NO: 5018050 - DNA, 25 bp, Homo sapien
tgttcgactgcggtgtattcttccc

SEQ ID NO: 5018051 - DNA, 25 bp, Homo sapien
tcatccagtgcatttctgttcgact

SEQ ID NO: 5018052 - DNA, 25 bp, Homo sapien
tttctgttcgactgcggtgtattct

SEQ ID NO: 5018053 - DNA, 25 bp, Homo sapien
agtgcatttctgttcgactgcggtg

SEQ ID NO: 5018054 - DNA, 25 bp, Homo sapien
gaaaaggagacttcggtcgttctgc

SEQ ID NO: 5018055 - DNA, 25 bp, Homo sapien
gacttcggtcgttctgcttcttgtt

SEQ ID NO: 5018056 - DNA, 25 bp, Homo sapien
cttcggtcgttctgcttcttgttaa

SEQ ID NO: 5018057 - DNA, 25 bp, Homo sapien
aaaggagacttcggtcgttctgctt

SEQ ID NO: 5018058 - DNA, 25 bp, Homo sapien
ggtaccatttgcctaatctgctttt

SEQ ID NO: 5018059 - DNA, 25 bp, Homo sapien
gtccaggtaccatttgcctaatctg

SEQ ID NO: 5018060 - DNA, 25 bp, Homo sapien
gagaacaggatgtcatttctcatgt

SEQ ID NO: 5018061 - DNA, 25 bp, Homo sapien
cagtgaataaagtgagggttgtcca

SEQ ID NO: 5018062 - DNA, 25 bp, Homo sapien
cacacttttgtgatggctttcattg

SEQ ID NO: 5018063 - DNA, 25 bp, Homo sapien
tatggcacacttttgtgatggcttt

SEQ ID NO: 5018064 - DNA, 25 bp, Homo sapien
ggcacacttttgtgatggctttcat

SEQ ID NO: 5018065 - DNA, 25 bp, Homo sapien
cacttttgtgatggctttcattgaa

SEQ ID NO: 5018066 - DNA, 25 bp, Homo sapien
aaatggcattggcacttgtacatca

SEQ ID NO: 5018067 - DNA, 25 bp, Homo sapien
tatggctgagaagtgcatcaaatgg

SEQ ID NO: 5018068 - DNA, 25 bp, Homo sapien
tggcaagcactatagaggtgggtat

SEQ ID NO: 5018069 - DNA, 25 bp, Homo sapien
tattgtagtgtccacccctctctga

SEQ ID NO: 5018070 - DNA, 25 bp, Homo sapien
tctatattagtctagattcctacag

SEQ ID NO: 5018071 - DNA, 25 bp, Homo sapien
ggaaattaagcaagccacggaagga

SEQ ID NO: 5018072 - DNA, 25 bp, Homo sapien
tttggcctcagattttggcatttga

SEQ ID NO: 5018073 - DNA, 25 bp, Homo sapien
actaagttacagaggtctatctcag

SEQ ID NO: 5018074 - DNA, 25 bp, Homo sapien
cattaaaacggggagaaggagtgct

SEQ ID NO: 5018075 - DNA, 25 bp, Homo sapien
tcattaaaacggggagaaggagtgc

SEQ ID NO: 5018076 - DNA, 25 bp, Homo sapien
ctgtggtcaagagctgtagtcatta

SEQ ID NO: 5018077 - DNA, 25 bp, Homo sapien
tggtcaagagctgtagtcattaaaa

SEQ ID NO: 5018078 - DNA, 25 bp, Homo sapien
gagtcctaatgcgtgaagatggcag

SEQ ID NO: 5018079 - DNA, 25 bp, Homo sapien
gagaaggcggcatttgatatgtgcc

SEQ ID NO: 5018080 - DNA, 25 bp, Homo sapien
tctgctttatggcaaaggagtaaga

SEQ ID NO: 5018081 - DNA, 25 bp, Homo sapien
ggaatggaacaaccacctcttatta

SEQ ID NO: 5018082 - DNA, 25 bp, Homo sapien
ttctaagggtgagccatcaaggtct

SEQ ID NO: 5018083 - DNA, 25 bp, Homo sapien
tgtgaacgatctcctctcttcaatg

SEQ ID NO: 5018084 - DNA, 25 bp, Homo sapien
gaaccttgctctgtgaacgatctcc

SEQ ID NO: 5018085 - DNA, 25 bp, Homo sapien
ttcacagctttacccagccctccat

SEQ ID NO: 5018086 - DNA, 25 bp, Homo sapien
gcctctgggataatcgtagcacacc

SEQ ID NO: 5018087 - DNA, 25 bp, Homo sapien
tggtttcaggcttgcgcctctggga

SEQ ID NO: 5018088 - DNA, 25 bp, Homo sapien
tagcacacccacagaagttgggaag

SEQ ID NO: 5018089 - DNA, 25 bp, Homo sapien
taatcgtagcacacccacagaagtt

SEQ ID NO: 5018090 - DNA, 25 bp, Homo sapien
cagaccagtcctcaagagctgggcc

SEQ ID NO: 5018091 - DNA, 25 bp, Homo sapien
ccagtctgctaaaggtacagaaaaa

SEQ ID NO: 5018092 - DNA, 25 bp, Homo sapien
tctgctaaaggtacagaaaaatgtg

SEQ ID NO: 5018093 - DNA, 25 bp, Homo sapien
caactgtggaaacacttagggtttg

SEQ ID NO: 5018094 - DNA, 25 bp, Homo sapien
ctattaaggagggatgccaaatgct

SEQ ID NO: 5018095 - DNA, 25 bp, Homo sapien
gatttcataatactcccaaccccag

SEQ ID NO: 5018096 - DNA, 25 bp, Homo sapien
ggcaccagatttgtgtaattgcagt

SEQ ID NO: 5018097 - DNA, 25 bp, Homo sapien
gcagtggtggagatttaattgtcct

SEQ ID NO: 5018098 - DNA, 25 bp, Homo sapien
actcccacggagacaccatgactgt

SEQ ID NO: 5018099 - DNA, 25 bp, Homo sapien
tccaaagcagatgaatgttgctgct

SEQ ID NO: 5018100 - DNA, 25 bp, Homo sapien
tcttatgttgttgcagacatggaag

SEQ ID NO: 5018101 - DNA, 25 bp, Homo sapien
catgactgtcatggatccaaagcag

SEQ ID NO: 5018102 - DNA, 25 bp, Homo sapien
ctcatatgggatccacccttgtggg

SEQ ID NO: 5018103 - DNA, 25 bp, Homo sapien
ttaggagctcatatgggatccaccc

SEQ ID NO: 5018104 - DNA, 25 bp, Homo sapien
aggagctcatatgggatccaccctt

SEQ ID NO: 5018105 - DNA, 25 bp, Homo sapien
gagctcatatgggatccacccttgt

SEQ ID NO: 5018106 - DNA, 25 bp, Homo sapien
tgccagtgaggcactgttgacccat

SEQ ID NO: 5018107 - DNA, 25 bp, Homo sapien
agctctgacggccacttatttctcc

SEQ ID NO: 5018108 - DNA, 25 bp, Homo sapien
gacggccacttatttctccagaact

SEQ ID NO: 5018109 - DNA, 25 bp, Homo sapien
tgaggcactgttgacccatcgtgcc

SEQ ID NO: 5018110 - DNA, 25 bp, Homo sapien
tgtagaaatagtttctggaagtcat

SEQ ID NO: 5018111 - DNA, 25 bp, Homo sapien
atgtagaaatagtttctggaagtca

SEQ ID NO: 5018112 - DNA, 25 bp, Homo sapien
tgagtcactgtaccattctagttcc

SEQ ID NO: 5018113 - DNA, 25 bp, Homo sapien
tgtaccattctagttcctccaggga

SEQ ID NO: 5018114 - DNA, 25 bp, Homo sapien
gctggcaagatcgtcatttcctccc

SEQ ID NO: 5018115 - DNA, 25 bp, Homo sapien
tatagtctcaaagttccaccagctg

SEQ ID NO: 5018116 - DNA, 25 bp, Homo sapien
ggctggttgttgctcctctatgctc

SEQ ID NO: 5018117 - DNA, 25 bp, Homo sapien
gctggttgttgctcctctatgctcc

SEQ ID NO: 5018118 - DNA, 25 bp, Homo sapien
agctcgggagccctcttgtctggaa

SEQ ID NO: 5018119 - DNA, 25 bp, Homo sapien
agccctcttgtctggaaaggctctt

SEQ ID NO: 5018120 - DNA, 25 bp, Homo sapien
gtgtctacccactgtgttcacttct

SEQ ID NO: 5018121 - DNA, 25 bp, Homo sapien
gccctttatccaagcagacttcctt

SEQ ID NO: 5018122 - DNA, 25 bp, Homo sapien
catccatcccgtagctatcactggg

SEQ ID NO: 5018123 - DNA, 25 bp, Homo sapien
tatcactggggtgtctacccactgt

SEQ ID NO: 5018124 - DNA, 25 bp, Homo sapien
ctggcgtgcagtaggctgccgtcct

SEQ ID NO: 5018125 - DNA, 25 bp, Homo sapien
gctccagccactgacttagagacag

SEQ ID NO: 5018126 - DNA, 25 bp, Homo sapien
tgcctcactgacagcgacggagttc

SEQ ID NO: 5018127 - DNA, 25 bp, Homo sapien
gacggagttccagccatgctgcact

SEQ ID NO: 5018128 - DNA, 25 bp, Homo sapien
tgtgcagtccccctgagaactcagg

SEQ ID NO: 5018129 - DNA, 25 bp, Homo sapien
gatgtccatttggtgcagactcctg

SEQ ID NO: 5018130 - DNA, 25 bp, Homo sapien
cagaacatatgatgggccccaggga

SEQ ID NO: 5018131 - DNA, 25 bp, Homo sapien
actcaggaacttagcctgttgcaga

SEQ ID NO: 5018132 - DNA, 25 bp, Homo sapien
caaaagcgttgcatagaagtcttca

SEQ ID NO: 5018133 - DNA, 25 bp, Homo sapien
actcttttaaaccaccttccatgct

SEQ ID NO: 5018134 - DNA, 25 bp, Homo sapien
ctctgcaaaagcgttgcatagaagt

SEQ ID NO: 5018135 - DNA, 25 bp, Homo sapien
caactcttttaaaccaccttccatg

SEQ ID NO: 5018136 - DNA, 25 bp, Homo sapien
ttgaatcagcttcacaaaacaatgc

SEQ ID NO: 5018137 - DNA, 25 bp, Homo sapien
cagttctccaactcacttgaatcag

SEQ ID NO: 5018138 - DNA, 25 bp, Homo sapien
gatgacttggtatgtgttttctgca

SEQ ID NO: 5018139 - DNA, 25 bp, Homo sapien
caaacaatgtttgttgatgacttgg

SEQ ID NO: 5018140 - DNA, 25 bp, Homo sapien
agagcttcctctgagcgtacctggg

SEQ ID NO: 5018141 - DNA, 25 bp, Homo sapien
ttcctgaatgcccaagcccagagct

SEQ ID NO: 5018142 - DNA, 25 bp, Homo sapien
gcagcattgggttctagtaacttct

SEQ ID NO: 5018143 - DNA, 25 bp, Homo sapien
catggagactatgcttataatgctc

SEQ ID NO: 5018144 - DNA, 25 bp, Homo sapien
gaacagactcaccagattccagggc

SEQ ID NO: 5018145 - DNA, 25 bp, Homo sapien
ccccatgggagttgtggaacagact

SEQ ID NO: 5018146 - DNA, 25 bp, Homo sapien
gaagtcatctgtggagccaaaacca

SEQ ID NO: 5018147 - DNA, 25 bp, Homo sapien
gaagattcgcccacacagaagtcat

SEQ ID NO: 5018148 - DNA, 25 bp, Homo sapien
cccattaggtgggttctgttttgat

SEQ ID NO: 5018149 - DNA, 25 bp, Homo sapien
tctgtcactatattgtcgcttttca

SEQ ID NO: 5018150 - DNA, 25 bp, Homo sapien
gagatttgaaaccatgactgttgac

SEQ ID NO: 5018151 - DNA, 25 bp, Homo sapien
taactacctactgacccactttctg

SEQ ID NO: 5018152 - DNA, 25 bp, Homo sapien
tgtgggtaaaagtgagtggtcattc

SEQ ID NO: 5018153 - DNA, 25 bp, Homo sapien
ccttcagaatggctatctgatgtgg

SEQ ID NO: 5018154 - DNA, 25 bp, Homo sapien
tatctgatgtgggtaaaagtgagtg

SEQ ID NO: 5018155 - DNA, 25 bp, Homo sapien
cagaatggctatctgatgtgggtaa

SEQ ID NO: 5018156 - DNA, 25 bp, Homo sapien
gaagagaggaccaacatttattgcc

SEQ ID NO: 5018157 - DNA, 25 bp, Homo sapien
ctcactttgtggcagagacttctga

SEQ ID NO: 5018158 - DNA, 25 bp, Homo sapien
gcatctcatgtgattaaactagcca

SEQ ID NO: 5018159 - DNA, 25 bp, Homo sapien
tgtgccccttcaccctcgattagta

SEQ ID NO: 5018160 - DNA, 25 bp, Homo sapien
gtcagcatccatatgcctgcttgtc

SEQ ID NO: 5018161 - DNA, 25 bp, Homo sapien
gcttgtcttgcccagcaaagcacct

SEQ ID NO: 5018162 - DNA, 25 bp, Homo sapien
tggccgtgcagtcagcatccatatg

SEQ ID NO: 5018163 - DNA, 25 bp, Homo sapien
gtgtctctgaagtggccgtgcagtc

SEQ ID NO: 5018164 - DNA, 25 bp, Homo sapien
agacgcgggaggacctcacagtgcc

SEQ ID NO: 5018165 - DNA, 25 bp, Homo sapien
gagaacaaatcgctcctctaggtag

SEQ ID NO: 5018166 - DNA, 25 bp, Homo sapien
tggttctccagctaactcccagcag

SEQ ID NO: 5018167 - DNA, 25 bp, Homo sapien
caggacacaaatgccctagccatgg

SEQ ID NO: 5018168 - DNA, 25 bp, Homo sapien
agatacctcctatgtgtgagcattt

SEQ ID NO: 5018169 - DNA, 25 bp, Homo sapien
cagatacctcctatgtgtgagcatt

SEQ ID NO: 5018170 - DNA, 25 bp, Homo sapien
tcagatacctcctatgtgtgagcat

SEQ ID NO: 5018171 - DNA, 25 bp, Homo sapien
gaaagacctcccttataccagaatg

SEQ ID NO: 5018172 - DNA, 25 bp, Homo sapien
caacggtgaaatacctgacttgggc

SEQ ID NO: 5018173 - DNA, 25 bp, Homo sapien
ttagggccaaaatacaggtcaactg

SEQ ID NO: 5018174 - DNA, 25 bp, Homo sapien
gaccagtggaggttattataccgac

SEQ ID NO: 5018175 - DNA, 25 bp, Homo sapien
caatgttgagtgaaccctgaggtag

SEQ ID NO: 5018176 - DNA, 25 bp, Homo sapien
atgttgagtgaaccctgaggtaggt

SEQ ID NO: 5018177 - DNA, 25 bp, Homo sapien
acatccaatgttgagtgaaccctga

SEQ ID NO: 5018178 - DNA, 25 bp, Homo sapien
tccaatgttgagtgaaccctgaggt

SEQ ID NO: 5018179 - DNA, 25 bp, Homo sapien
caaggtaaagctttcttgtcacaag

SEQ ID NO: 5018180 - DNA, 25 bp, Homo sapien
aggtaaagctttcttgtcacaaggg

SEQ ID NO: 5018181 - DNA, 25 bp, Homo sapien
gcacaaggtaaagctttcttgtcac

SEQ ID NO: 5018182 - DNA, 25 bp, Homo sapien
cacaaggtaaagctttcttgtcaca

SEQ ID NO: 5018183 - DNA, 25 bp, Homo sapien
tgagcccatggagaagtagtaaatc

SEQ ID NO: 5018184 - DNA, 25 bp, Homo sapien
caaggactggttcatataagaggca

SEQ ID NO: 5018185 - DNA, 25 bp, Homo sapien
gaatgggttgtccaaggaactgaag

SEQ ID NO: 5018186 - DNA, 25 bp, Homo sapien
gaagattattcctactcaagtcaag

SEQ ID NO: 5018187 - DNA, 25 bp, Homo sapien
ccagagttatgagaccagtacaagc

SEQ ID NO: 5018188 - DNA, 25 bp, Homo sapien
tatcatgcctactcgacggttttgc

SEQ ID NO: 5018189 - DNA, 25 bp, Homo sapien
taccaatctcccaaagtagtcacgg

SEQ ID NO: 5018190 - DNA, 25 bp, Homo sapien
cattttccaagctagggaggtccct

SEQ ID NO: 5018191 - DNA, 25 bp, Homo sapien
tcagggataagagagggaaaggccc

SEQ ID NO: 5018192 - DNA, 25 bp, Homo sapien
taacccggagatccaaaacagattc

SEQ ID NO: 5018193 - DNA, 25 bp, Homo sapien
gagaagcttgagatgctccatattg

SEQ ID NO: 5018194 - DNA, 25 bp, Homo sapien
agctctgcttttacacccactggaa

SEQ ID NO: 5018195 - DNA, 25 bp, Homo sapien
cagaggctaccacaaaggaggaaac

SEQ ID NO: 5018196 - DNA, 25 bp, Homo sapien
tcagaactgtagagcaagcgcagga

SEQ ID NO: 5018197 - DNA, 25 bp, Homo sapien
caacctagtatgtgtgcgcagtgcc

SEQ ID NO: 5018198 - DNA, 25 bp, Homo sapien
ggtttataactcaagcagatgctag

SEQ ID NO: 5018199 - DNA, 25 bp, Homo sapien
agaacccctactatggcactctgct

SEQ ID NO: 5018200 - DNA, 25 bp, Homo sapien
tctgctcacatcttagacgggaata

SEQ ID NO: 5018201 - DNA, 25 bp, Homo sapien
taagggaagttgacaatggtatctg

SEQ ID NO: 5018202 - DNA, 25 bp, Homo sapien
ggattctatataggcccagtcctca

SEQ ID NO: 5018203 - DNA, 25 bp, Homo sapien
gagccacagcataatgacagtgaac

SEQ ID NO: 5018204 - DNA, 25 bp, Homo sapien
acagcataatgacagtgaacacatg

SEQ ID NO: 5018205 - DNA, 25 bp, Homo sapien
ccacagcataatgacagtgaacaca

SEQ ID NO: 5018206 - DNA, 25 bp, Homo sapien
ctggagccacagcataatgacagtg

SEQ ID NO: 5018207 - DNA, 25 bp, Homo sapien
tctcatgcactggtagggggcctcg

SEQ ID NO: 5018208 - DNA, 25 bp, Homo sapien
agggtaggtgtgtgtctcatgcact

SEQ ID NO: 5018209 - DNA, 25 bp, Homo sapien
cagtctggcagccagtagggttcct

SEQ ID NO: 5018210 - DNA, 25 bp, Homo sapien
gggctgacagcaacccagacaaaac

SEQ ID NO: 5018211 - DNA, 25 bp, Homo sapien
cggcatggcgcagatcttgatgaaa

SEQ ID NO: 5018212 - DNA, 25 bp, Homo sapien
ttcaccagtagaagggcccagaagc

SEQ ID NO: 5018213 - DNA, 25 bp, Homo sapien
cttgatagtgacacggcatggcgca

SEQ ID NO: 5018214 - DNA, 25 bp, Homo sapien
gatcttgatgaaagttcaccagtag

SEQ ID NO: 5018215 - DNA, 25 bp, Homo sapien
taacatatgaacagtccgggtgcga

SEQ ID NO: 5018216 - DNA, 25 bp, Homo sapien
tgcatggccagcatgaacacgaagc

SEQ ID NO: 5018217 - DNA, 25 bp, Homo sapien
caagcaggatgggtatcacagacca

SEQ ID NO: 5018218 - DNA, 25 bp, Homo sapien
caaagggtctatagtacacagaggc

SEQ ID NO: 5018219 - DNA, 25 bp, Homo sapien
gaactgcaagggattgggccacaat

SEQ ID NO: 5018220 - DNA, 25 bp, Homo sapien
tggagtagaacgagacaccacctgg

SEQ ID NO: 5018221 - DNA, 25 bp, Homo sapien
gattttgtagcccaatctggcaagg

SEQ ID NO: 5018222 - DNA, 25 bp, Homo sapien
caaacttcctggagagccgaaggta

SEQ ID NO: 5018223 - DNA, 25 bp, Homo sapien
acgccagctctcggtcgggaccgag

SEQ ID NO: 5018224 - DNA, 25 bp, Homo sapien
tgcggctcctgacgccagctctcgg

SEQ ID NO: 5018225 - DNA, 25 bp, Homo sapien
ttcaaagacacgctgtgaccctgcg

SEQ ID NO: 5018226 - DNA, 25 bp, Homo sapien
cagcttcaaagacacgctgtgaccc

SEQ ID NO: 5018227 - DNA, 25 bp, Homo sapien
gtgatgcgcccggtgattggcgccg

SEQ ID NO: 5018228 - DNA, 25 bp, Homo sapien
agaggacgtgatgcgcccggtgatt

SEQ ID NO: 5018229 - DNA, 25 bp, Homo sapien
gatgcgcccggtgattggcgccgcc

SEQ ID NO: 5018230 - DNA, 25 bp, Homo sapien
cgtcgcgagaggacgtgatgcgccc

SEQ ID NO: 5018231 - DNA, 25 bp, Homo sapien
gtgggaacgggcaggcaataacttc

SEQ ID NO: 5018232 - DNA, 25 bp, Homo sapien
cattctggaagcatagtgggaacgg

SEQ ID NO: 5018233 - DNA, 25 bp, Homo sapien
gctcagcaaagccaaggcacacagt

SEQ ID NO: 5018234 - DNA, 25 bp, Homo sapien
caaatgggtgtctgttaccaaaagc

SEQ ID NO: 5018235 - DNA, 25 bp, Homo sapien
gaagatgccgagaaatccatggaat

SEQ ID NO: 5018236 - DNA, 25 bp, Homo sapien
agatgccgagaaatccatggaattt

SEQ ID NO: 5018237 - DNA, 25 bp, Homo sapien
aagatgccgagaaatccatggaatt

SEQ ID NO: 5018238 - DNA, 25 bp, Homo sapien
atccttgatgcctttctcaccccag

SEQ ID NO: 5018239 - DNA, 25 bp, Homo sapien
ttgatgcctttctcaccccagctgt

SEQ ID NO: 5018240 - DNA, 25 bp, Homo sapien
aaatcacatccttgatgcctttctc

SEQ ID NO: 5018241 - DNA, 25 bp, Homo sapien
atcacatccttgatgcctttctcac

SEQ ID NO: 5018242 - DNA, 25 bp, Homo sapien
gcctgtgtccttccgtaaagtgtac

SEQ ID NO: 5018243 - DNA, 25 bp, Homo sapien
gatttactccctgacaccagtctgg

SEQ ID NO: 5018244 - DNA, 25 bp, Homo sapien
ccaagcctggagatttactccctga

SEQ ID NO: 5018245 - DNA, 25 bp, Homo sapien
cgtaaagtgtacaggtgttgacatc

SEQ ID NO: 5018246 - DNA, 25 bp, Homo sapien
ggcaactgtcagagtccagacatgg

SEQ ID NO: 5018247 - DNA, 25 bp, Homo sapien
tctgtccacctaaacagtacatcat

SEQ ID NO: 5018248 - DNA, 25 bp, Homo sapien
agacatggcatcctagagccacaga

SEQ ID NO: 5018249 - DNA, 25 bp, Homo sapien
aaccaatctgtccacctaaacagta

SEQ ID NO: 5018250 - DNA, 25 bp, Homo sapien
ctggtgctctccacccatactccac

SEQ ID NO: 5018251 - DNA, 25 bp, Homo sapien
cttttcatcatccaaccccaaccca

SEQ ID NO: 5018252 - DNA, 25 bp, Homo sapien
tccacccatactccactatccacca

SEQ ID NO: 5018253 - DNA, 25 bp, Homo sapien
ttttcatcatccaaccccaacccat

SEQ ID NO: 5018254 - DNA, 25 bp, Homo sapien
attcagacagtctagaagttcccat

SEQ ID NO: 5018255 - DNA, 25 bp, Homo sapien
aggaaccttgagactggagacaaaa

SEQ ID NO: 5018256 - DNA, 25 bp, Homo sapien
tgactggtgcactatattcagacag

SEQ ID NO: 5018257 - DNA, 25 bp, Homo sapien
aagcaaggtccaaggtcagcgactg

SEQ ID NO: 5018258 - DNA, 25 bp, Homo sapien
ctttttcacatggtagcacagatgg

SEQ ID NO: 5018259 - DNA, 25 bp, Homo sapien
gaggtcagtttccagtagagtttcc

SEQ ID NO: 5018260 - DNA, 25 bp, Homo sapien
ggtcccaagagcgaggtcagtttcc

SEQ ID NO: 5018261 - DNA, 25 bp, Homo sapien
caagagcgaggtcagtttccagtag

SEQ ID NO: 5018262 - DNA, 25 bp, Homo sapien
agggagacatgggtattcccatttg

SEQ ID NO: 5018263 - DNA, 25 bp, Homo sapien
cagggagacatgggtattcccattt

SEQ ID NO: 5018264 - DNA, 25 bp, Homo sapien
aatcggctagcttcatttccctcca

SEQ ID NO: 5018265 - DNA, 25 bp, Homo sapien
tataatcggctagcttcatttccct

SEQ ID NO: 5018266 - DNA, 25 bp, Homo sapien
taatcggctagcttcatttccctcc

SEQ ID NO: 5018267 - DNA, 25 bp, Homo sapien
tagtataatcggctagcttcatttc

SEQ ID NO: 5018268 - DNA, 25 bp, Homo sapien
acgtgaattccatccttatagagcc

SEQ ID NO: 5018269 - DNA, 25 bp, Homo sapien
tatagagcctttggcgcttccctgc

SEQ ID NO: 5018270 - DNA, 25 bp, Homo sapien
tccttatagagcctttggcgcttcc

SEQ ID NO: 5018271 - DNA, 25 bp, Homo sapien
cgccacgtgaattccatccttatag

SEQ ID NO: 5018272 - DNA, 25 bp, Homo sapien
agtcaattgttcacttactgagcaa

SEQ ID NO: 5018273 - DNA, 25 bp, Homo sapien
taagtatttacagtcaattgttcac

SEQ ID NO: 5018274 - DNA, 25 bp, Homo sapien
gaaaagtggtatctgaataagtatt

SEQ ID NO: 5018275 - DNA, 25 bp, Homo sapien
ggtatctgaataagtatttacagtc

SEQ ID NO: 5018276 - DNA, 25 bp, Homo sapien
gctggacactgccacagcctgtcaa

SEQ ID NO: 5018277 - DNA, 25 bp, Homo sapien
caagcctcctaaaggcagctgagtg

SEQ ID NO: 5018278 - DNA, 25 bp, Homo sapien
tcagagatgtaggactccctgcagc

SEQ ID NO: 5018279 - DNA, 25 bp, Homo sapien
cacagcctgtcaagcctcctaaagg

SEQ ID NO: 5018280 - DNA, 25 bp, Homo sapien
tatgaaactgaccagtatatgttgt

SEQ ID NO: 5018281 - DNA, 25 bp, Homo sapien
gtttatgaaactgaccagtatatgt

SEQ ID NO: 5018282 - DNA, 25 bp, Homo sapien
aaactgaccagtatatgttgtggaa

SEQ ID NO: 5018283 - DNA, 25 bp, Homo sapien
tgaaactgaccagtatatgttgtgg

SEQ ID NO: 5018284 - DNA, 25 bp, Homo sapien
tgtcaggctttcctcataacagagg

SEQ ID NO: 5018285 - DNA, 25 bp, Homo sapien
taaaggcaggtaaagctaagctcct

SEQ ID NO: 5018286 - DNA, 25 bp, Homo sapien
aaatctcgtctttactaaaggcagg

SEQ ID NO: 5018287 - DNA, 25 bp, Homo sapien
gcagttggaaaatgacaggctcctc

SEQ ID NO: 5018288 - DNA, 25 bp, Homo sapien
aagagtgacacacgacacaggagca

SEQ ID NO: 5018289 - DNA, 25 bp, Homo sapien
agaagagtgacacacgacacaggag

SEQ ID NO: 5018290 - DNA, 25 bp, Homo sapien
tggagaagagtgacacacgacacag

SEQ ID NO: 5018291 - DNA, 25 bp, Homo sapien
ctggagaagagtgacacacgacaca

SEQ ID NO: 5018292 - DNA, 25 bp, Homo sapien
tccaaaaagcatcgccacaaaccag

SEQ ID NO: 5018293 - DNA, 25 bp, Homo sapien
acatccaaaaagcatcgccacaaac

SEQ ID NO: 5018294 - DNA, 25 bp, Homo sapien
ttgctgggtacaggccccactttct

SEQ ID NO: 5018295 - DNA, 25 bp, Homo sapien
aaaaagcatcgccacaaaccagctg

SEQ ID NO: 5018296 - DNA, 25 bp, Homo sapien
cagtaagcagaagacgtgacaagct

SEQ ID NO: 5018297 - DNA, 25 bp, Homo sapien
aagcagaagacgtgacaagctgagc

SEQ ID NO: 5018298 - DNA, 25 bp, Homo sapien
aaagcagtaagcagaagacgtgaca

SEQ ID NO: 5018299 - DNA, 25 bp, Homo sapien
taagcagaagacgtgacaagctgag

SEQ ID NO: 5018300 - DNA, 25 bp, Homo sapien
tccaactgcccgagattcccagaga

SEQ ID NO: 5018301 - DNA, 25 bp, Homo sapien
tcaggatggaataaacttccaggtc

SEQ ID NO: 5018302 - DNA, 25 bp, Homo sapien
actgagaagtgtacagaaagactcc

SEQ ID NO: 5018303 - DNA, 25 bp, Homo sapien
cagagccacgacgagaactcaggat

SEQ ID NO: 5018304 - DNA, 25 bp, Homo sapien
tcactgatgccttcaaatatccgtg

SEQ ID NO: 5018305 - DNA, 25 bp, Homo sapien
tatccgtgtgtgcacgggaacagtg

SEQ ID NO: 5018306 - DNA, 25 bp, Homo sapien
ccttttcactgatgccttcaaatat

SEQ ID NO: 5018307 - DNA, 25 bp, Homo sapien
gccttcaaatatccgtgtgtgcacg

SEQ ID NO: 5018308 - DNA, 25 bp, Homo sapien
cgactccccggttcctgctggttat

SEQ ID NO: 5018309 - DNA, 25 bp, Homo sapien
tgccaatttaaagaaccaaggcttc

SEQ ID NO: 5018310 - DNA, 25 bp, Homo sapien
atttaaagaaccaaggcttcagagg

SEQ ID NO: 5018311 - DNA, 25 bp, Homo sapien
aggaaaggaaactcatgcgtgcccc

SEQ ID NO: 5018312 - DNA, 25 bp, Homo sapien
aatgaggactgctgattaagtttcc

SEQ ID NO: 5018313 - DNA, 25 bp, Homo sapien
tgagccttcaatgaggactgctgat

SEQ ID NO: 5018314 - DNA, 25 bp, Homo sapien
atttgtggcaaggaggacctgagcc

SEQ ID NO: 5018315 - DNA, 25 bp, Homo sapien
cctgcccaaagccttaagatccctt

SEQ ID NO: 5018316 - DNA, 25 bp, Homo sapien
gcagtcttcggtgacaagaagaaga

SEQ ID NO: 5018317 - DNA, 25 bp, Homo sapien
aaaatgatggctcttagatctagca

SEQ ID NO: 5018318 - DNA, 25 bp, Homo sapien
atggctcttagatctagcaggtgaa

SEQ ID NO: 5018319 - DNA, 25 bp, Homo sapien
gacaaagagggcagtcttcggtgac

SEQ ID NO: 5018320 - DNA, 25 bp, Homo sapien
tgcttgagggcggatttttgaccac

SEQ ID NO: 5018321 - DNA, 25 bp, Homo sapien
cacagtttggtaaagatgaatccct

SEQ ID NO: 5018322 - DNA, 25 bp, Homo sapien
ccgaaatggttccagagcacctgta

SEQ ID NO: 5018323 - DNA, 25 bp, Homo sapien
ttttgaccacttgggcagctctctc

SEQ ID NO: 5018324 - DNA, 25 bp, Homo sapien
aatataagtgccaccctctgctcag

SEQ ID NO: 5018325 - DNA, 25 bp, Homo sapien
ctcagtgaccgccaaatcacttttt

SEQ ID NO: 5018326 - DNA, 25 bp, Homo sapien
caaagtacaatctcagtgaccgcca

SEQ ID NO: 5018327 - DNA, 25 bp, Homo sapien
tgggaatataagtgccaccctctgc

SEQ ID NO: 5018328 - DNA, 25 bp, Homo sapien
tggtacttcgatacacctgcatact

SEQ ID NO: 5018329 - DNA, 25 bp, Homo sapien
tacttcgatacacctgcatactcca

SEQ ID NO: 5018330 - DNA, 25 bp, Homo sapien
tagttggtacttcgatacacctgca

SEQ ID NO: 5018331 - DNA, 25 bp, Homo sapien
ggtagttggtacttcgatacacctg

SEQ ID NO: 5018332 - DNA, 25 bp, Homo sapien
cattggctgggacatacaatggcct

SEQ ID NO: 5018333 - DNA, 25 bp, Homo sapien
aagtgcttggtagagccccattggc

SEQ ID NO: 5018334 - DNA, 25 bp, Homo sapien
gggaaagacatggaaagataagcag

SEQ ID NO: 5018335 - DNA, 25 bp, Homo sapien
catcaagatttttagcagccagagg

SEQ ID NO: 5018336 - DNA, 25 bp, Homo sapien
caagctctggagcagtagaataggc

SEQ ID NO: 5018337 - DNA, 25 bp, Homo sapien
ggcctgggtgaacagttccacttcc

SEQ ID NO: 5018338 - DNA, 25 bp, Homo sapien
agtttgccggacaaagcctctggga

SEQ ID NO: 5018339 - DNA, 25 bp, Homo sapien
ttccacttccgattacccatggctg

SEQ ID NO: 5018340 - DNA, 25 bp, Homo sapien
agatgtcctatgacccaacagggcc

SEQ ID NO: 5018341 - DNA, 25 bp, Homo sapien
cgggaagattctcggcaccagaagg

SEQ ID NO: 5018342 - DNA, 25 bp, Homo sapien
cttgcagcccatgagatatcagcct

SEQ ID NO: 5018343 - DNA, 25 bp, Homo sapien
accagaaggcgagggtctcgagcca

SEQ ID NO: 5018344 - DNA, 25 bp, Homo sapien
aaggctcgaggtagacaccttgagc

SEQ ID NO: 5018345 - DNA, 25 bp, Homo sapien
ggtagacaccttgagcagcaagagg

SEQ ID NO: 5018346 - DNA, 25 bp, Homo sapien
tcaaggctcgaggtagacaccttga

SEQ ID NO: 5018347 - DNA, 25 bp, Homo sapien
ctcgaggtagacaccttgagcagca

SEQ ID NO: 5018348 - DNA, 25 bp, Homo sapien
acaggttcttctaagaagttacatg

SEQ ID NO: 5018349 - DNA, 25 bp, Homo sapien
aacaggttcttctaagaagttacat

SEQ ID NO: 5018350 - DNA, 25 bp, Homo sapien
aagttacatgggacactgagaacat

SEQ ID NO: 5018351 - DNA, 25 bp, Homo sapien
taagaagttacatgggacactgaga

SEQ ID NO: 5018352 - DNA, 25 bp, Homo sapien
cgcaaactttattcaacatccgtga

SEQ ID NO: 5018353 - DNA, 25 bp, Homo sapien
tttcgcaaactttattcaacatccg

SEQ ID NO: 5018354 - DNA, 25 bp, Homo sapien
caacacaagtagcttgaaatccatc

SEQ ID NO: 5018355 - DNA, 25 bp, Homo sapien
gtctccctttcgcaaactttattca

SEQ ID NO: 5018356 - DNA, 25 bp, Homo sapien
tctgaaatcagttcctctctgtcct

SEQ ID NO: 5018357 - DNA, 25 bp, Homo sapien
ctgaaatcagttcctctctgtcctc

SEQ ID NO: 5018358 - DNA, 25 bp, Homo sapien
tctctgaaatcagttcctctctgtc

SEQ ID NO: 5018359 - DNA, 25 bp, Homo sapien
ctctctctgaaatcagttcctctct

SEQ ID NO: 5018360 - DNA, 25 bp, Homo sapien
agttgccctgtcatgggaggcaaag

SEQ ID NO: 5018361 - DNA, 25 bp, Homo sapien
ctcctccagttgccctgtcatggga

SEQ ID NO: 5018362 - DNA, 25 bp, Homo sapien
ccctgtcatgggaggcaaagcatcc

SEQ ID NO: 5018363 - DNA, 25 bp, Homo sapien
gtcatgggaggcaaagcatccccgt

SEQ ID NO: 5018364 - DNA, 25 bp, Homo sapien
tctcgcccacagctgcatatttcat

SEQ ID NO: 5018365 - DNA, 25 bp, Homo sapien
tataacaagcaagggaaacgaggcg

SEQ ID NO: 5018366 - DNA, 25 bp, Homo sapien
caccatcccaaagcaaattggagct

SEQ ID NO: 5018367 - DNA, 25 bp, Homo sapien
gcgagtggaaattgagtaggccact

SEQ ID NO: 5018368 - DNA, 25 bp, Homo sapien
tgactttgaattgttgatgggccca

SEQ ID NO: 5018369 - DNA, 25 bp, Homo sapien
ctccttatggtggacgcagcgctca

SEQ ID NO: 5018370 - DNA, 25 bp, Homo sapien
tagtctgcgcacaggaatctgctct

SEQ ID NO: 5018371 - DNA, 25 bp, Homo sapien
agcagagcatcacaccctctaggtg

SEQ ID NO: 5018372 - DNA, 25 bp, Homo sapien
gcctgcataagtgagccattcatca

SEQ ID NO: 5018373 - DNA, 25 bp, Homo sapien
caaccccatctaataatggcttttg

SEQ ID NO: 5018374 - DNA, 25 bp, Homo sapien
gcccaaccccatctaataatggctt

SEQ ID NO: 5018375 - DNA, 25 bp, Homo sapien
ctgcccaaccccatctaataatggc

SEQ ID NO: 5018376 - DNA, 25 bp, Homo sapien
ccaaccccatctaataatggctttt

SEQ ID NO: 5018377 - DNA, 25 bp, Homo sapien
cgatagcgtagcttctaggccggcc

SEQ ID NO: 5018378 - DNA, 25 bp, Homo sapien
tctccccaatgattctgggccagga

SEQ ID NO: 5018379 - DNA, 25 bp, Homo sapien
ggctctcgcttcagaagacaatgtg

SEQ ID NO: 5018380 - DNA, 25 bp, Homo sapien
gcattttgctgtggtagaccccagg

SEQ ID NO: 5018381 - DNA, 25 bp, Homo sapien
gtacaacgtcccagcgatgaaacac

SEQ ID NO: 5018382 - DNA, 25 bp, Homo sapien
gatgaaacaccctccagccgcttcc

SEQ ID NO: 5018383 - DNA, 25 bp, Homo sapien
tttgtgtacaacgtcccagcgatga

SEQ ID NO: 5018384 - DNA, 25 bp, Homo sapien
cattgtctggttgctttgtgtacaa

SEQ ID NO: 5018385 - DNA, 25 bp, Homo sapien
gctgacaccagcactgaactgtttg

SEQ ID NO: 5018386 - DNA, 25 bp, Homo sapien
cccctgatgtatgaagtttggtcca

SEQ ID NO: 5018387 - DNA, 25 bp, Homo sapien
tccatttccaatagcaatcagaagc

SEQ ID NO: 5018388 - DNA, 25 bp, Homo sapien
gctggcctgcctgtaagaccatctg

SEQ ID NO: 5018389 - DNA, 25 bp, Homo sapien
gaagatgttaatggggatactttta

SEQ ID NO: 5018390 - DNA, 25 bp, Homo sapien
caagtggtgagatgacaggctaaag

SEQ ID NO: 5018391 - DNA, 25 bp, Homo sapien
ctcatcaagaatgcccaagtggtga

SEQ ID NO: 5018392 - DNA, 25 bp, Homo sapien
agtggtgagatgacaggctaaagca

SEQ ID NO: 5018393 - DNA, 25 bp, Homo sapien
tcaagaatgcccaagtggtgagatg

SEQ ID NO: 5018394 - DNA, 25 bp, Homo sapien
taatcaagcttgaatccttctctgt

SEQ ID NO: 5018395 - DNA, 25 bp, Homo sapien
ccattcaggtaatcaagcttgaatc

SEQ ID NO: 5018396 - DNA, 25 bp, Homo sapien
atatccaatcaacaaccaaactttg

SEQ ID NO: 5018397 - DNA, 25 bp, Homo sapien
tgttctcatatccaatcaacaacca

SEQ ID NO: 5018398 - DNA, 25 bp, Homo sapien
ggcagtcatggataccggccatcat

SEQ ID NO: 5018399 - DNA, 25 bp, Homo sapien
aggtgtggcagtcatggataccggc

SEQ ID NO: 5018400 - DNA, 25 bp, Homo sapien
tgtggcagtcatggataccggccat

SEQ ID NO: 5018401 - DNA, 25 bp, Homo sapien
tggcagtcatggataccggccatca

SEQ ID NO: 5018402 - DNA, 25 bp, Homo sapien
ttagctactggggtcgaggcgatgc

SEQ ID NO: 5018403 - DNA, 25 bp, Homo sapien
ccagcgccccgggtgcagggatgag

SEQ ID NO: 5018404 - DNA, 25 bp, Homo sapien
tggggtcgaggcgatgccagcgccc

SEQ ID NO: 5018405 - DNA, 25 bp, Homo sapien
tactggggtcgaggcgatgccagcg

SEQ ID NO: 5018406 - DNA, 25 bp, Homo sapien
gcttgccgaacttgtttccccagta

SEQ ID NO: 5018407 - DNA, 25 bp, Homo sapien
ccgtgtggggcttgccgaacttgtt

SEQ ID NO: 5018408 - DNA, 25 bp, Homo sapien
tgtggggcttgccgaacttgtttcc

SEQ ID NO: 5018409 - DNA, 25 bp, Homo sapien
tgccgaacttgtttccccagtagcc

SEQ ID NO: 5018410 - DNA, 25 bp, Homo sapien
gcgcacggggacagtggagacgttg

SEQ ID NO: 5018411 - DNA, 25 bp, Homo sapien
cgcacggggacagtggagacgttgg

SEQ ID NO: 5018412 - DNA, 25 bp, Homo sapien
gccactgtagtcccctgtggccacc

SEQ ID NO: 5018413 - DNA, 25 bp, Homo sapien
tgtggccaccaacgccttgaacctg

SEQ ID NO: 5018414 - DNA, 25 bp, Homo sapien
ccactgtagtcccctgtggccacca

SEQ ID NO: 5018415 - DNA, 25 bp, Homo sapien
ccctgtggccaccaacgccttgaac

SEQ ID NO: 5018416 - DNA, 25 bp, Homo sapien
aaaagtcaatcatctcagactcctc

SEQ ID NO: 5018417 - DNA, 25 bp, Homo sapien
atcatctcagactcctccatgggca

SEQ ID NO: 5018418 - DNA, 25 bp, Homo sapien
gtcaatcatctcagactcctccatg

SEQ ID NO: 5018419 - DNA, 25 bp, Homo sapien
caatcatctcagactcctccatggg

SEQ ID NO: 5018420 - DNA, 25 bp, Homo sapien
ggcctcagacacttccgcccccgct

SEQ ID NO: 5018421 - DNA, 25 bp, Homo sapien
ctttgaccaggctggcacggcttgg

SEQ ID NO: 5018422 - DNA, 25 bp, Homo sapien
tttgaccaggctggcacggcttggt

SEQ ID NO: 5018423 - DNA, 25 bp, Homo sapien
cagacacttccgcccccgctcatgg

SEQ ID NO: 5018424 - DNA, 25 bp, Homo sapien
ccgcagaagactccgcggttcccca

SEQ ID NO: 5018425 - DNA, 25 bp, Homo sapien
tcggctgtcccagcgccatctacca

SEQ ID NO: 5018426 - DNA, 25 bp, Homo sapien
tcctctctcggctgtcccagcgcca

SEQ ID NO: 5018427 - DNA, 25 bp, Homo sapien
gcctccgcagaagactccgcggttc

SEQ ID NO: 5018428 - DNA, 25 bp, Homo sapien
aggctttctgcgcaccgagctgggc

SEQ ID NO: 5018429 - DNA, 25 bp, Homo sapien
catcctgcgagtccctctgacggga

SEQ ID NO: 5018430 - DNA, 25 bp, Homo sapien
aaatgctctcggtcggcctaggctt

SEQ ID NO: 5018431 - DNA, 25 bp, Homo sapien
atgcgctcggcctgaggttacccgg

SEQ ID NO: 5018432 - DNA, 25 bp, Homo sapien
tgagataagccattaaatttacttg

SEQ ID NO: 5018433 - DNA, 25 bp, Homo sapien
ttattttgagataagccattaaatt

SEQ ID NO: 5018434 - DNA, 25 bp, Homo sapien
ttttgagataagccattaaatttac

SEQ ID NO: 5018435 - DNA, 25 bp, Homo sapien
tttgttaaacagctttattttgaga

SEQ ID NO: 5018436 - DNA, 25 bp, Homo sapien
gagtctcgctctgtttctcaagctg

SEQ ID NO: 5018437 - DNA, 25 bp, Homo sapien
tacagtggcacgatctccgctcact

SEQ ID NO: 5018438 - DNA, 25 bp, Homo sapien
ccctgggttcaagcaattctcctgc

SEQ ID NO: 5018439 - DNA, 25 bp, Homo sapien
gcaacctccacctccctgggttcaa

SEQ ID NO: 5018440 - DNA, 25 bp, Homo sapien
ggaaagcaacctgagacagtaagca

SEQ ID NO: 5018441 - DNA, 25 bp, Homo sapien
tctggaatcactaacctagaaaggg

SEQ ID NO: 5018442 - DNA, 25 bp, Homo sapien
tgtatctggtactgcaggcacgtgc

SEQ ID NO: 5018443 - DNA, 25 bp, Homo sapien
taattttgtagttccgcagcgtctg

SEQ ID NO: 5018444 - DNA, 25 bp, Homo sapien
cctaaaagactatgtgaacccactc

SEQ ID NO: 5018445 - DNA, 25 bp, Homo sapien
gtttgacctggcatcagtgaactca

SEQ ID NO: 5018446 - DNA, 25 bp, Homo sapien
tgtgcgcacgcctgatggaaaacca

SEQ ID NO: 5018447 - DNA, 25 bp, Homo sapien
taagctctggatagtagactgccac

SEQ ID NO: 5018448 - DNA, 25 bp, Homo sapien
aatgggtgacatgttggtatattgc

SEQ ID NO: 5018449 - DNA, 25 bp, Homo sapien
gtatattgcccactcaattgcctaa

SEQ ID NO: 5018450 - DNA, 25 bp, Homo sapien
cctgagaagtctaggctacagtgtg

SEQ ID NO: 5018451 - DNA, 25 bp, Homo sapien
gacatgttggtatattgcccactca

SEQ ID NO: 5018452 - DNA, 25 bp, Homo sapien
ttaaattttagatggtctgtcttct

SEQ ID NO: 5018453 - DNA, 25 bp, Homo sapien
gcaattgggtagacgaagaaagagc

SEQ ID NO: 5018454 - DNA, 25 bp, Homo sapien
tcacttctaaagtcccaggaaccaa

SEQ ID NO: 5018455 - DNA, 25 bp, Homo sapien
ctgtcttctgctgatcccaactctg

SEQ ID NO: 5018456 - DNA, 25 bp, Homo sapien
caaaactgcggacaccaccataaaa

SEQ ID NO: 5018457 - DNA, 25 bp, Homo sapien
ttcctgaattggacatgtgtttgca

SEQ ID NO: 5018458 - DNA, 25 bp, Homo sapien
aaaacaaaactgcggacaccaccat

SEQ ID NO: 5018459 - DNA, 25 bp, Homo sapien
ttgcaaacacttgtcttgaagatta

SEQ ID NO: 5018460 - DNA, 25 bp, Homo sapien
gattgtgccctatctcatctgcagc

SEQ ID NO: 5018461 - DNA, 25 bp, Homo sapien
tctgcagccgaggaataaaggattc

SEQ ID NO: 5018462 - DNA, 25 bp, Homo sapien
tatgtggcgccaagaacgaacctgt

SEQ ID NO: 5018463 - DNA, 25 bp, Homo sapien
cacctatgccagatgttaaagacag

SEQ ID NO: 5018464 - DNA, 25 bp, Homo sapien
tatctgtaccgacaattgagcaaac

SEQ ID NO: 5018465 - DNA, 25 bp, Homo sapien
gactggaatcctacctatctgtacc

SEQ ID NO: 5018466 - DNA, 25 bp, Homo sapien
aaattcttccctactctgaggcagg

SEQ ID NO: 5018467 - DNA, 25 bp, Homo sapien
gaagccactcaaaaggctccctaat

SEQ ID NO: 5018468 - DNA, 25 bp, Homo sapien
gcatcagccttttcagttaaggaaa

SEQ ID NO: 5018469 - DNA, 25 bp, Homo sapien
cagtagatgtagctgcctgccacca

SEQ ID NO: 5018470 - DNA, 25 bp, Homo sapien
catatgtatgaggttggctgtgtcc

SEQ ID NO: 5018471 - DNA, 25 bp, Homo sapien
caagctttgccgctgggaagtcata

SEQ ID NO: 5018472 - DNA, 25 bp, Homo sapien
aggctggccttgaagtccagggctt

SEQ ID NO: 5018473 - DNA, 25 bp, Homo sapien
tggccttgaagtccagggcttaagt

SEQ ID NO: 5018474 - DNA, 25 bp, Homo sapien
tcccactttagcctcagcctccaga

SEQ ID NO: 5018475 - DNA, 25 bp, Homo sapien
gctggccttgaagtccagggcttaa

SEQ ID NO: 5018476 - DNA, 25 bp, Homo sapien
ggacgatgatttctaaccctagcat

SEQ ID NO: 5018477 - DNA, 25 bp, Homo sapien
tctaagtactctaacaggacgatga

SEQ ID NO: 5018478 - DNA, 25 bp, Homo sapien
gaaacttcctatcggcatctgagcc

SEQ ID NO: 5018479 - DNA, 25 bp, Homo sapien
ttggtcccactagccatgaagctgg

SEQ ID NO: 5018480 - DNA, 25 bp, Homo sapien
agcaggagccaatgaaaacttttct

SEQ ID NO: 5018481 - DNA, 25 bp, Homo sapien
caggacaacatgtggagaccccgtc

SEQ ID NO: 5018482 - DNA, 25 bp, Homo sapien
gaaatctttcgggaagcctgcagtc

SEQ ID NO: 5018483 - DNA, 25 bp, Homo sapien
tgccatgtagtatcttcaactaaaa

SEQ ID NO: 5018484 - DNA, 25 bp, Homo sapien
tagaagctgggtgacttgaggatct

SEQ ID NO: 5018485 - DNA, 25 bp, Homo sapien
gggcccgcagaacatgctgatggtg

SEQ ID NO: 5018486 - DNA, 25 bp, Homo sapien
aagctctgccgaggagacttgggct

SEQ ID NO: 5018487 - DNA, 25 bp, Homo sapien
tgcagtggtcaagctctgccgagga

SEQ ID NO: 5018488 - DNA, 25 bp, Homo sapien
gcctccgggaagcagttccttgtgt

SEQ ID NO: 5018489 - DNA, 25 bp, Homo sapien
tggcatactacttattttcgtcctc

SEQ ID NO: 5018490 - DNA, 25 bp, Homo sapien
attttcgtcctctcactcctgtgaa

SEQ ID NO: 5018491 - DNA, 25 bp, Homo sapien
tgtgaaactcacaattatcatggcc

SEQ ID NO: 5018492 - DNA, 25 bp, Homo sapien
tcttgcagaggccttgtgtaactgg

SEQ ID NO: 5018493 - DNA, 25 bp, Homo sapien
tgagaagtgtctcactgccgtcgcc

SEQ ID NO: 5018494 - DNA, 25 bp, Homo sapien
gcttctacacaaaacacgaattggg

SEQ ID NO: 5018495 - DNA, 25 bp, Homo sapien
gacagtagtccgtaggctaaccgca

SEQ ID NO: 5018496 - DNA, 25 bp, Homo sapien
gatgtccttgacacacatcctattt

SEQ ID NO: 5018497 - DNA, 25 bp, Homo sapien
tccttcctctcgtgcaagataagag

SEQ ID NO: 5018498 - DNA, 25 bp, Homo sapien
ttgactggaatagcaccgcgcagtt

SEQ ID NO: 5018499 - DNA, 25 bp, Homo sapien
tctcggtggtggttcaaagtactgc

SEQ ID NO: 5018500 - DNA, 25 bp, Homo sapien
taattgagctgtgaagcggagacaa

SEQ ID NO: 5018501 - DNA, 25 bp, Homo sapien
gacgtcacggactcgggtcacatgg

SEQ ID NO: 5018502 - DNA, 25 bp, Homo sapien
ggagcccgcgatgacgtcacggact

SEQ ID NO: 5018503 - DNA, 25 bp, Homo sapien
acggactcgggtcacatggccaagt

SEQ ID NO: 5018504 - DNA, 25 bp, Homo sapien
ctggagcccgcgatgacgtcacgga

SEQ ID NO: 5018505 - DNA, 25 bp, Homo sapien
ctctcggggtatcgaggaggcaggc

SEQ ID NO: 5018506 - DNA, 25 bp, Homo sapien
ggagctctcggggtatcgaggaggc

SEQ ID NO: 5018507 - DNA, 25 bp, Homo sapien
tctcggggtatcgaggaggcaggcc

SEQ ID NO: 5018508 - DNA, 25 bp, Homo sapien
ggggtatcgaggaggcaggcccgcg

SEQ ID NO: 5018509 - DNA, 25 bp, Homo sapien
gcttgtgctgccatgtccgcaccgg

SEQ ID NO: 5018510 - DNA, 25 bp, Homo sapien
atggtcgcgccctggacgcggttct

SEQ ID NO: 5018511 - DNA, 25 bp, Homo sapien
ggcggtcgacgctcctgaaaacttg

SEQ ID NO: 5018512 - DNA, 25 bp, Homo sapien
cactgcgcccggagcgatgaagatg

SEQ ID NO: 5018513 - DNA, 25 bp, Homo sapien
gcccaggtggtgtgggtcgccgatc

SEQ ID NO: 5018514 - DNA, 25 bp, Homo sapien
ccccgcggcctcgcgtagggcgcac

SEQ ID NO: 5018515 - DNA, 25 bp, Homo sapien
gccccgcggcctcgcgtagggcgca

SEQ ID NO: 5018516 - DNA, 25 bp, Homo sapien
ctgagcttatctgccgagcacgtgt

SEQ ID NO: 5018517 - DNA, 25 bp, Homo sapien
ttgtcaatgctcgttctccctggcc

SEQ ID NO: 5018518 - DNA, 25 bp, Homo sapien
gaggtgacggcgcatattttgcagc

SEQ ID NO: 5018519 - DNA, 25 bp, Homo sapien
gctttgtgtttcgacggctgcggac

SEQ ID NO: 5018520 - DNA, 25 bp, Homo sapien
cggatcccgagttgaagtggttggg

SEQ ID NO: 5018521 - DNA, 25 bp, Homo sapien
ttcggatcccgagttgaagtggttg

SEQ ID NO: 5018522 - DNA, 25 bp, Homo sapien
tcggatcccgagttgaagtggttgg

SEQ ID NO: 5018523 - DNA, 25 bp, Homo sapien
ttgacagactcagcgggcaaatctg

SEQ ID NO: 5018524 - DNA, 25 bp, Homo sapien
cctgcccgtggacagttggtcttca

SEQ ID NO: 5018525 - DNA, 25 bp, Homo sapien
tcagaccttttcttgacagactcag

SEQ ID NO: 5018526 - DNA, 25 bp, Homo sapien
gtgatttactgcgtttccatctgcc

SEQ ID NO: 5018527 - DNA, 25 bp, Homo sapien
tttgtgttgactaacagtagtgggc

SEQ ID NO: 5018528 - DNA, 25 bp, Homo sapien
tagtaacccttagcatgtagtaggt

SEQ ID NO: 5018529 - DNA, 25 bp, Homo sapien
agtaggtacttagatttgtgttgac

SEQ ID NO: 5018530 - DNA, 25 bp, Homo sapien
gttggttccatggtgcagagatggt

SEQ ID NO: 5018531 - DNA, 25 bp, Homo sapien
ggtcttgaatccctaccttaggtga

SEQ ID NO: 5018532 - DNA, 25 bp, Homo sapien
ttgaatccctaccttaggtgatccg

SEQ ID NO: 5018533 - DNA, 25 bp, Homo sapien
ggaacctgacataccctaccatacc

SEQ ID NO: 5018534 - DNA, 25 bp, Homo sapien
cggagatttggtcttattgtccagg

SEQ ID NO: 5018535 - DNA, 25 bp, Homo sapien
ttacgtgcaccctgtgttctttgag

SEQ ID NO: 5018536 - DNA, 25 bp, Homo sapien
tttgagtacgtaatggtgtcttagc

SEQ ID NO: 5018537 - DNA, 25 bp, Homo sapien
tcttgttaattacgtgcaccctgtg

SEQ ID NO: 5018538 - DNA, 25 bp, Homo sapien
ctagacatccttcttgttaattacg

SEQ ID NO: 5018539 - DNA, 25 bp, Homo sapien
cctctatctggacggcctcgcgaag

SEQ ID NO: 5018540 - DNA, 25 bp, Homo sapien
tctggacggcctcgcgaagaaccag

SEQ ID NO: 5018541 - DNA, 25 bp, Homo sapien
tctgtgtcccctctatctggacggc

SEQ ID NO: 5018542 - DNA, 25 bp, Homo sapien
acggcctcgcgaagaaccagggcac

SEQ ID NO: 5018543 - DNA, 25 bp, Homo sapien
agctttttgcccatgaatcccaaat

SEQ ID NO: 5018544 - DNA, 25 bp, Homo sapien
gctttttgcccatgaatcccaaatt

SEQ ID NO: 5018545 - DNA, 25 bp, Homo sapien
gcttggactgctcgactgataatac

SEQ ID NO: 5018546 - DNA, 25 bp, Homo sapien
aatggagtcgctttggttcagatgc

SEQ ID NO: 5018547 - DNA, 25 bp, Homo sapien
taccaagcccctgttcataatggag

SEQ ID NO: 5018548 - DNA, 25 bp, Homo sapien
gaaggcctaacctcctggaagtgca

SEQ ID NO: 5018549 - DNA, 25 bp, Homo sapien
tgagtgccctggctgatccggatca

SEQ ID NO: 5018550 - DNA, 25 bp, Homo sapien
taaattacaaatatagactcgtgag

SEQ ID NO: 5018551 - DNA, 25 bp, Homo sapien
gatgccagtaagtagtagatatttg

SEQ ID NO: 5018552 - DNA, 25 bp, Homo sapien
tattttcaagggcagggaatctgac

SEQ ID NO: 5018553 - DNA, 25 bp, Homo sapien
cccaaatctgatggacctagaagtc

SEQ ID NO: 5018554 - DNA, 25 bp, Homo sapien
ttagaaagcaccaggccgtgggagc

SEQ ID NO: 5018555 - DNA, 25 bp, Homo sapien
caacatatgctttgctggaacactg

SEQ ID NO: 5018556 - DNA, 25 bp, Homo sapien
gatataatgggcttcactaaccttc

SEQ ID NO: 5018557 - DNA, 25 bp, Homo sapien
tgggcttttcgttggccatggccag

SEQ ID NO: 5018558 - DNA, 25 bp, Homo sapien
ggcttttcgttggccatggccagca

SEQ ID NO: 5018559 - DNA, 25 bp, Homo sapien
cttgggcttttcgttggccatggcc

SEQ ID NO: 5018560 - DNA, 25 bp, Homo sapien
ttccttgggcttttcgttggccatg

SEQ ID NO: 5018561 - DNA, 25 bp, Homo sapien
gcccgtgtcatctggattttgttct

SEQ ID NO: 5018562 - DNA, 25 bp, Homo sapien
cctcttcggaacctggtattttcat

SEQ ID NO: 5018563 - DNA, 25 bp, Homo sapien
gattttgttcttgggtctctatggc

SEQ ID NO: 5018564 - DNA, 25 bp, Homo sapien
tctatggcagctaaacctccagctt

SEQ ID NO: 5018565 - DNA, 25 bp, Homo sapien
cttccagggattccccgtcttctag

SEQ ID NO: 5018566 - DNA, 25 bp, Homo sapien
ctgcaggagcgtcccttccagggat

SEQ ID NO: 5018567 - DNA, 25 bp, Homo sapien
tctagggaagctatggaggactccc

SEQ ID NO: 5018568 - DNA, 25 bp, Homo sapien
ccccgtcttctagggaagctatgga

SEQ ID NO: 5018569 - DNA, 25 bp, Homo sapien
gatgagtacaagtctgtgtctaggg

SEQ ID NO: 5018570 - DNA, 25 bp, Homo sapien
ccaagcaaattggaggatgagtaca

SEQ ID NO: 5018571 - DNA, 25 bp, Homo sapien
tatcaaagtgtacagagtttccaag

SEQ ID NO: 5018572 - DNA, 25 bp, Homo sapien
tacgacttctgccaagtaagaatgg

SEQ ID NO: 5018573 - DNA, 25 bp, Homo sapien
tttgccgacctcagtagagagtggg

SEQ ID NO: 5018574 - DNA, 25 bp, Homo sapien
accccgtttgccgacctcagtagag

SEQ ID NO: 5018575 - DNA, 25 bp, Homo sapien
gtgaggcatcaaagaggccaagatg

SEQ ID NO: 5018576 - DNA, 25 bp, Homo sapien
ggtgatacgtgagtgaggcatcaaa

SEQ ID NO: 5018577 - DNA, 25 bp, Homo sapien
ctaactggctttctaaaaccttgct

SEQ ID NO: 5018578 - DNA, 25 bp, Homo sapien
cagacaccagaacacgaagtctggc

SEQ ID NO: 5018579 - DNA, 25 bp, Homo sapien
tctggctgccgcaactaactggctt

SEQ ID NO: 5018580 - DNA, 25 bp, Homo sapien
tttctaaaaccttgcttgctggcag

SEQ ID NO: 5018581 - DNA, 25 bp, Homo sapien
aatgaaatttgttcctaaaggccag

SEQ ID NO: 5018582 - DNA, 25 bp, Homo sapien
gccctcgcccaacgtcccgcctcat

SEQ ID NO: 5018583 - DNA, 25 bp, Homo sapien
ctcatcagccctcgcccaacgtccc

SEQ ID NO: 5018584 - DNA, 25 bp, Homo sapien
tgaaatttgttcctaaaggccagtg

SEQ ID NO: 5018585 - DNA, 25 bp, Homo sapien
actggaaacaagctaaatgatcacc

SEQ ID NO: 5018586 - DNA, 25 bp, Homo sapien
cagatacgtgcatgtttacaaagcc

SEQ ID NO: 5018587 - DNA, 25 bp, Homo sapien
gaagatctttctaaacatgacatga

SEQ ID NO: 5018588 - DNA, 25 bp, Homo sapien
tagttaccagagatcaaaaagtttg

SEQ ID NO: 5018589 - DNA, 25 bp, Homo sapien
ttgcagatttgttaaatggcccagc

SEQ ID NO: 5018590 - DNA, 25 bp, Homo sapien
gaagagattcccatttagcaagcca

SEQ ID NO: 5018591 - DNA, 25 bp, Homo sapien
tgtgtcatcttagcagaagtgggca

SEQ ID NO: 5018592 - DNA, 25 bp, Homo sapien
aaaagcagcttcacttggcctcagg

SEQ ID NO: 5018593 - DNA, 25 bp, Homo sapien
gtaatagctaccattgtttgcgccc

SEQ ID NO: 5018594 - DNA, 25 bp, Homo sapien
gtgttttgacacaccagcatgcttc

SEQ ID NO: 5018595 - DNA, 25 bp, Homo sapien
tctgtgccaagcagtataataagtg

SEQ ID NO: 5018596 - DNA, 25 bp, Homo sapien
caaacaccctagagaaatgatcatt

SEQ ID NO: 5018597 - DNA, 25 bp, Homo sapien
acatgatgaggtctgaagtgcatca

SEQ ID NO: 5018598 - DNA, 25 bp, Homo sapien
taagtatagacaaagaatgttgtag

SEQ ID NO: 5018599 - DNA, 25 bp, Homo sapien
tcaaactcagtactccaaacttttc

SEQ ID NO: 5018600 - DNA, 25 bp, Homo sapien
tgcatcaaaggtacggtaagtatag

SEQ ID NO: 5018601 - DNA, 25 bp, Homo sapien
gccgaggtggccttgcttgagctta

SEQ ID NO: 5018602 - DNA, 25 bp, Homo sapien
tcctagaagtgtgctatggcaaact

SEQ ID NO: 5018603 - DNA, 25 bp, Homo sapien
aaaaccgtggccttatgtagcatca

SEQ ID NO: 5018604 - DNA, 25 bp, Homo sapien
tgtagcatcatggtgaaaactccgt

SEQ ID NO: 5018605 - DNA, 25 bp, Homo sapien
ccaggtgagaatgaataagctatgc

SEQ ID NO: 5018606 - DNA, 25 bp, Homo sapien
tggaaaatcgcctgagatacagatg

SEQ ID NO: 5018607 - DNA, 25 bp, Homo sapien
tacaatgaacgcagtgcagagcccc

SEQ ID NO: 5018608 - DNA, 25 bp, Homo sapien
tacttctgtagaacactggccatag

SEQ ID NO: 5018609 - DNA, 25 bp, Homo sapien
gacctgcataagaatgttactaggc

SEQ ID NO: 5018610 - DNA, 25 bp, Homo sapien
tgcactcagttgatttcagcccata

SEQ ID NO: 5018611 - DNA, 25 bp, Homo sapien
cacaaccctgtaaatctagcaactg

SEQ ID NO: 5018612 - DNA, 25 bp, Homo sapien
tcttgtagtaagaatgcaaatggca

SEQ ID NO: 5018613 - DNA, 25 bp, Homo sapien
tttctctatttttgtttcaatacaa

SEQ ID NO: 5018614 - DNA, 25 bp, Homo sapien
ttttctctatttttgtttcaataca

SEQ ID NO: 5018615 - DNA, 25 bp, Homo sapien
atttcagtatttttctctatttttg

SEQ ID NO: 5018616 - DNA, 25 bp, Homo sapien
tctatttcagtatttttctctattt

SEQ ID NO: 5018617 - DNA, 25 bp, Homo sapien
tgtattgaaacaaaaatagagaaaa

SEQ ID NO: 5018618 - DNA, 25 bp, Homo sapien
aaaatagagaaaaatactgaaatag

SEQ ID NO: 5018619 - DNA, 25 bp, Homo sapien
ttgtattgaaacaaaaatagagaaa

SEQ ID NO: 5018620 - DNA, 25 bp, Homo sapien
aaatagagaaaaatactgaaataga

SEQ ID NO: 5018621 - DNA, 25 bp, Homo sapien
caaaaatagagaaaaatactgaaat

SEQ ID NO: 5018622 - DNA, 25 bp, Homo sapien
ctgcaaaccttaaacctgcaaaatt

SEQ ID NO: 5018623 - DNA, 25 bp, Homo sapien
cctgcaaaccttaaacctgcaaaat

SEQ ID NO: 5018624 - DNA, 25 bp, Homo sapien
tcacctgcaaaccttaaacctgcaa

SEQ ID NO: 5018625 - DNA, 25 bp, Homo sapien
tttcacctgcaaaccttaaacctgc

SEQ ID NO: 5018626 - DNA, 25 bp, Homo sapien
ttcacctgcaaaccttaaacctgca

SEQ ID NO: 5018627 - DNA, 25 bp, Homo sapien
cacctgcaaaccttaaacctgcaaa

SEQ ID NO: 5018628 - DNA, 25 bp, Homo sapien
tttgcaggtttaaggtttgcaggtg

SEQ ID NO: 5018629 - DNA, 25 bp, Homo sapien
ttgcaggtttaaggtttgcaggtga

SEQ ID NO: 5018630 - DNA, 25 bp, Homo sapien
tgcaggtttaaggtttgcaggtgaa

SEQ ID NO: 5018631 - DNA, 25 bp, Homo sapien
attttgcaggtttaaggtttgcagg

SEQ ID NO: 5018632 - DNA, 25 bp, Homo sapien
gcaggtttaaggtttgcaggtgaaa

SEQ ID NO: 5018633 - DNA, 25 bp, Homo sapien
aattttgcaggtttaaggtttgcag

SEQ ID NO: 5018634 - DNA, 25 bp, Homo sapien
ctctgacatcattagaagcatgcca

SEQ ID NO: 5018635 - DNA, 25 bp, Homo sapien
cattagaagcatgccagaacagact

SEQ ID NO: 5018636 - DNA, 25 bp, Homo sapien
tgactctgacatcattagaagcatg

SEQ ID NO: 5018637 - DNA, 25 bp, Homo sapien
gtgactctgacatcattagaagcat

SEQ ID NO: 5018638 - DNA, 25 bp, Homo sapien
gccagaacagactggtgaaaagtaa

SEQ ID NO: 5018639 - DNA, 25 bp, Homo sapien
catcattagaagcatgccagaacag

SEQ ID NO: 5018640 - DNA, 25 bp, Homo sapien
tggcatgcttctaatgatgtcagag

SEQ ID NO: 5018641 - DNA, 25 bp, Homo sapien
ctgttctggcatgcttctaatgatg

SEQ ID NO: 5018642 - DNA, 25 bp, Homo sapien
atgcttctaatgatgtcagagtcac

SEQ ID NO: 5018643 - DNA, 25 bp, Homo sapien
gcatgcttctaatgatgtcagagtc

SEQ ID NO: 5018644 - DNA, 25 bp, Homo sapien
catgcttctaatgatgtcagagtca

SEQ ID NO: 5018645 - DNA, 25 bp, Homo sapien
tacttttcaccagtctgttctggca

SEQ ID NO: 5018646 - DNA, 25 bp, Homo sapien
attatataatggctgtgattctagg

SEQ ID NO: 5018647 - DNA, 25 bp, Homo sapien
tacagctaatgtgataacttttgca

SEQ ID NO: 5018648 - DNA, 25 bp, Homo sapien
gtgctaatttgcagaccattgtcta

SEQ ID NO: 5018649 - DNA, 25 bp, Homo sapien
cagaagggataaccaaaggtagaga

SEQ ID NO: 5018650 - DNA, 25 bp, Homo sapien
tatggtaccagttgctattaaatga

SEQ ID NO: 5018651 - DNA, 25 bp, Homo sapien
ccattgtctacagaagggataacca

SEQ ID NO: 5018652 - DNA, 25 bp, Homo sapien
gaatcacagccattatataatcaca

SEQ ID NO: 5018653 - DNA, 25 bp, Homo sapien
gcaaaagttatcacattagctgtac

SEQ ID NO: 5018654 - DNA, 25 bp, Homo sapien
tggttatcccttctgtagacaatgg

SEQ ID NO: 5018655 - DNA, 25 bp, Homo sapien
taaggttgaccaaagataacctaga

SEQ ID NO: 5018656 - DNA, 25 bp, Homo sapien
tagacaatggtctgcaaattagcac

SEQ ID NO: 5018657 - DNA, 25 bp, Homo sapien
tcatttaatagcaactggtaccata

SEQ ID NO: 5018658 - DNA, 25 bp, Homo sapien
caggacaggctaaacattcgctata

SEQ ID NO: 5018659 - DNA, 25 bp, Homo sapien
gaccatgcatgtgtccccaaaccta

SEQ ID NO: 5018660 - DNA, 25 bp, Homo sapien
gcatgtgtccccaaacctagttctt

SEQ ID NO: 5018661 - DNA, 25 bp, Homo sapien
ttgtaatagtcaggacaggctaaac

SEQ ID NO: 5018662 - DNA, 25 bp, Homo sapien
ctgcgaatattctcgctgttctgat

SEQ ID NO: 5018663 - DNA, 25 bp, Homo sapien
tctcgctgttctgattttgtaatag

SEQ ID NO: 5018664 - DNA, 25 bp, Homo sapien
actattacaaaatcagaacagcgag

SEQ ID NO: 5018665 - DNA, 25 bp, Homo sapien
atcagaacagcgagaatattcgcag

SEQ ID NO: 5018666 - DNA, 25 bp, Homo sapien
acacatgcatggtcttaatatagcg

SEQ ID NO: 5018667 - DNA, 25 bp, Homo sapien
aatatagcgaatgtttagcctgtcc

SEQ ID NO: 5018668 - DNA, 25 bp, Homo sapien
actaggtttggggacacatgcatgg

SEQ ID NO: 5018669 - DNA, 25 bp, Homo sapien
gtttagcctgtcctgactattacaa

SEQ ID NO: 5018670 - DNA, 25 bp, Homo sapien
cctttctaatgtaatgtctggacaa

SEQ ID NO: 5018671 - DNA, 25 bp, Homo sapien
tctagcaaggcatatcgtgtagttg

SEQ ID NO: 5018672 - DNA, 25 bp, Homo sapien
gatagaatatggatctagcaaggca

SEQ ID NO: 5018673 - DNA, 25 bp, Homo sapien
gaacagacatgtaaaattagcttga

SEQ ID NO: 5018674 - DNA, 25 bp, Homo sapien
tactacgcaaatgtctttggttcct

SEQ ID NO: 5018675 - DNA, 25 bp, Homo sapien
tctggacaagtatttcttactacgc

SEQ ID NO: 5018676 - DNA, 25 bp, Homo sapien
tacaaaatacaactacacgatatgc

SEQ ID NO: 5018677 - DNA, 25 bp, Homo sapien
cacgatatgccttgctagatccata

SEQ ID NO: 5018678 - DNA, 25 bp, Homo sapien
taggaaccaaagacatttgcgtagt

SEQ ID NO: 5018679 - DNA, 25 bp, Homo sapien
cgtagtaagaaatacttgtccagac

SEQ ID NO: 5018680 - DNA, 25 bp, Homo sapien
tcaagctaattttacatgtctgttc

SEQ ID NO: 5018681 - DNA, 25 bp, Homo sapien
ttgtccagacattacattagaaagg

SEQ ID NO: 5018682 - DNA, 25 bp, Homo sapien
gtgcacactggctatcattgatcca

SEQ ID NO: 5018683 - DNA, 25 bp, Homo sapien
tgtgcacactggctatcattgatcc

SEQ ID NO: 5018684 - DNA, 25 bp, Homo sapien
ggatcaatgatagccagtgtgcaca

SEQ ID NO: 5018685 - DNA, 25 bp, Homo sapien
tggatcaatgatagccagtgtgcac

SEQ ID NO: 5018686 - DNA, 25 bp, Homo sapien
agtactatgctatgttggctaaaac

SEQ ID NO: 5018687 - DNA, 25 bp, Homo sapien
ctaaaactggtgtccatcactacag

SEQ ID NO: 5018688 - DNA, 25 bp, Homo sapien
tctgaaatagagtactatgctatgt

SEQ ID NO: 5018689 - DNA, 25 bp, Homo sapien
gctatgttggctaaaactggtgtcc

SEQ ID NO: 5018690 - DNA, 25 bp, Homo sapien
gaaatctgaaatagagtactatgct

SEQ ID NO: 5018691 - DNA, 25 bp, Homo sapien
gttggctaaaactggtgtccatcac

SEQ ID NO: 5018692 - DNA, 25 bp, Homo sapien
ctgtagtgatggacaccagttttag

SEQ ID NO: 5018693 - DNA, 25 bp, Homo sapien
tggacaccagttttagccaacatag

SEQ ID NO: 5018694 - DNA, 25 bp, Homo sapien
gtgatggacaccagttttagccaac

SEQ ID NO: 5018695 - DNA, 25 bp, Homo sapien
gttttagccaacatagcatagtact

SEQ ID NO: 5018696 - DNA, 25 bp, Homo sapien
catagcatagtactctatttcagat

SEQ ID NO: 5018697 - DNA, 25 bp, Homo sapien
gacaccagttttagccaacatagca

SEQ ID NO: 5018698 - DNA, 25 bp, Homo sapien
tgaaggccttaacaacattaacact

SEQ ID NO: 5018699 - DNA, 25 bp, Homo sapien
gtatgtggtccttactaatgctaga

SEQ ID NO: 5018700 - DNA, 25 bp, Homo sapien
tagatatttgctggttgccccttca

SEQ ID NO: 5018701 - DNA, 25 bp, Homo sapien
tagtaacatttagtctgtcagtcac

SEQ ID NO: 5018702 - DNA, 25 bp, Homo sapien
tgcatcttaccctcttccgtgagta

SEQ ID NO: 5018703 - DNA, 25 bp, Homo sapien
gtcagtcacttggtatcgcatttat

SEQ ID NO: 5018704 - DNA, 25 bp, Homo sapien
tactcacggaagagggtaagatgca

SEQ ID NO: 5018705 - DNA, 25 bp, Homo sapien
cagtatcaatactcacggaagaggg

SEQ ID NO: 5018706 - DNA, 25 bp, Homo sapien
tctagcattagtaaggaccacatac

SEQ ID NO: 5018707 - DNA, 25 bp, Homo sapien
ataaatgcgataccaagtgactgac

SEQ ID NO: 5018708 - DNA, 25 bp, Homo sapien
tgactgacagactaaatgttactac

SEQ ID NO: 5018709 - DNA, 25 bp, Homo sapien
caacccctactatgtttaagacagt

SEQ ID NO: 5018710 - DNA, 25 bp, Homo sapien
gattacacgcgtgaggccagaaatt

SEQ ID NO: 5018711 - DNA, 25 bp, Homo sapien
cactattgctggtatgtggattcac

SEQ ID NO: 5018712 - DNA, 25 bp, Homo sapien
aggtttagattctggatcctccact

SEQ ID NO: 5018713 - DNA, 25 bp, Homo sapien
ggattcacataattgagtggcaaga

SEQ ID NO: 5018714 - DNA, 25 bp, Homo sapien
caagatagtataggactcctttccg

SEQ ID NO: 5018715 - DNA, 25 bp, Homo sapien
taaaacggtatcacttcccatctgg

SEQ ID NO: 5018716 - DNA, 25 bp, Homo sapien
aatttctggcctcacgcgtgtaatc

SEQ ID NO: 5018717 - DNA, 25 bp, Homo sapien
tccagatgggaagtgataccgtttt

SEQ ID NO: 5018718 - DNA, 25 bp, Homo sapien
tgtgaatccacataccagcaatagt

SEQ ID NO: 5018719 - DNA, 25 bp, Homo sapien
taggaatcggaaaggagtcctatac

SEQ ID NO: 5018720 - DNA, 25 bp, Homo sapien
agtggaggatccagaatctaaacct

SEQ ID NO: 5018721 - DNA, 25 bp, Homo sapien
tcttgccactcaattatgtgaatcc

SEQ ID NO: 5018722 - DNA, 25 bp, Homo sapien
tagaatcacctagtttagcccgcta

SEQ ID NO: 5018723 - DNA, 25 bp, Homo sapien
tagcgattgtggtgtttggcccttc

SEQ ID NO: 5018724 - DNA, 25 bp, Homo sapien
catcgaggtttaatggaaacacaga

SEQ ID NO: 5018725 - DNA, 25 bp, Homo sapien
caaatcgtgtgctccccttctgtga

SEQ ID NO: 5018726 - DNA, 25 bp, Homo sapien
tagcccgctaaatcagttctgagtc

SEQ ID NO: 5018727 - DNA, 25 bp, Homo sapien
tgggctatggagttgcaggctatca

SEQ ID NO: 5018728 - DNA, 25 bp, Homo sapien
gattctatgatagcctgcaactcca

SEQ ID NO: 5018729 - DNA, 25 bp, Homo sapien
tagcgggctaaactaggtgattcta

SEQ ID NO: 5018730 - DNA, 25 bp, Homo sapien
gaagcatcattaaagcacctcaaag

SEQ ID NO: 5018731 - DNA, 25 bp, Homo sapien
aatgaagggccaaacaccacaatcg

SEQ ID NO: 5018732 - DNA, 25 bp, Homo sapien
tcaatttcaaaacagtgagtcaagc

SEQ ID NO: 5018733 - DNA, 25 bp, Homo sapien
gactcagaactgatttagcgggcta

SEQ ID NO: 5018734 - DNA, 25 bp, Homo sapien
tcgtgaacgaatatacaggagtgta

SEQ ID NO: 5018735 - DNA, 25 bp, Homo sapien
ctcgaacacttgcaggataattacg

SEQ ID NO: 5018736 - DNA, 25 bp, Homo sapien
gcctaccgcgaattcatcgtgaacg

SEQ ID NO: 5018737 - DNA, 25 bp, Homo sapien
agactgaacgggcttcgcctaccgc

SEQ ID NO: 5018738 - DNA, 25 bp, Homo sapien
ttgtaatctgagtaccatgaactcg

SEQ ID NO: 5018739 - DNA, 25 bp, Homo sapien
taccatgaactcgaacacttgcagg

SEQ ID NO: 5018740 - DNA, 25 bp, Homo sapien
gagttcatggtactcagattacaag

SEQ ID NO: 5018741 - DNA, 25 bp, Homo sapien
cgttcacgatgaattcgcggtaggc

SEQ ID NO: 5018742 - DNA, 25 bp, Homo sapien
caagtgttcgagttcatggtactca

SEQ ID NO: 5018743 - DNA, 25 bp, Homo sapien
tacactcctgtatattcgttcacga

SEQ ID NO: 5018744 - DNA, 25 bp, Homo sapien
gcggtaggcgaagcccgttcagtct

SEQ ID NO: 5018745 - DNA, 25 bp, Homo sapien
cgtaattatcctgcaagtgttcgag

SEQ ID NO: 5018746 - DNA, 25 bp, Homo sapien
ggctccaactcgttatgaaaagtgg

SEQ ID NO: 5018747 - DNA, 25 bp, Homo sapien
cgaaattggtcattctcgctaacaa

SEQ ID NO: 5018748 - DNA, 25 bp, Homo sapien
cagacaaggcaaagcgaaattggtc

SEQ ID NO: 5018749 - DNA, 25 bp, Homo sapien
tcgatcaactctaggctccaactcg

SEQ ID NO: 5018750 - DNA, 25 bp, Homo sapien
aaaaagtcgctggagtcgatcaact

SEQ ID NO: 5018751 - DNA, 25 bp, Homo sapien
tatgaaaagtgggaagtacgtcctg

SEQ ID NO: 5018752 - DNA, 25 bp, Homo sapien
ttgttagcgagaatgaccaatttcg

SEQ ID NO: 5018753 - DNA, 25 bp, Homo sapien
tgcttgtaccccaggacgtacttcc

SEQ ID NO: 5018754 - DNA, 25 bp, Homo sapien
gcctagagttgatcgactccagcga

SEQ ID NO: 5018755 - DNA, 25 bp, Homo sapien
cgtacttcccacttttcataacgag

SEQ ID NO: 5018756 - DNA, 25 bp, Homo sapien
tcataacgagttggagcctagagtt

SEQ ID NO: 5018757 - DNA, 25 bp, Homo sapien
gaccaatttcgctttgccttgtctg

SEQ ID NO: 5018758 - DNA, 25 bp, Homo sapien
gctcggcttcaaaaagctgggtccg

SEQ ID NO: 5018759 - DNA, 25 bp, Homo sapien
tcacgtggagagatgtcttggccag

SEQ ID NO: 5018760 - DNA, 25 bp, Homo sapien
caggcccggaagacgattcacgtgg

SEQ ID NO: 5018761 - DNA, 25 bp, Homo sapien
tgacttggggtcctcgacttcggaa

SEQ ID NO: 5018762 - DNA, 25 bp, Homo sapien
ttttgaggcggttgcaggcgaggcc

SEQ ID NO: 5018763 - DNA, 25 bp, Homo sapien
ccggaagacgattcacgtggagaga

SEQ ID NO: 5018764 - DNA, 25 bp, Homo sapien
gacccagctttttgaagccgagccc

SEQ ID NO: 5018765 - DNA, 25 bp, Homo sapien
tctctccacgtgaatcgtcttccgg

SEQ ID NO: 5018766 - DNA, 25 bp, Homo sapien
tggccaagacatctctccacgtgaa

SEQ ID NO: 5018767 - DNA, 25 bp, Homo sapien
aggaccccaagtcattgagagggcc

SEQ ID NO: 5018768 - DNA, 25 bp, Homo sapien
acgtgaatcgtcttccgggcctggc

SEQ ID NO: 5018769 - DNA, 25 bp, Homo sapien
ttccgaagtcgaggaccccaagtca

SEQ ID NO: 5018770 - DNA, 25 bp, Homo sapien
tgggggccgtcccgctcctaaggca

SEQ ID NO: 5018771 - DNA, 25 bp, Homo sapien
gggccgtcccgctcctaaggcagga

SEQ ID NO: 5018772 - DNA, 25 bp, Homo sapien
ggccgtcccgctcctaaggcaggaa

SEQ ID NO: 5018773 - DNA, 25 bp, Homo sapien
gccgtcccgctcctaaggcaggaag

SEQ ID NO: 5018774 - DNA, 25 bp, Homo sapien
cttcctgccttaggagcgggacggc

SEQ ID NO: 5018775 - DNA, 25 bp, Homo sapien
ttcctgccttaggagcgggacggcc

SEQ ID NO: 5018776 - DNA, 25 bp, Homo sapien
tcctgccttaggagcgggacggccc

SEQ ID NO: 5018777 - DNA, 25 bp, Homo sapien
tgccttaggagcgggacggccccca

SEQ ID NO: 5018778 - DNA, 25 bp, Homo sapien
gcgggttgccatttgtaactccgga

SEQ ID NO: 5018779 - DNA, 25 bp, Homo sapien
tcctaccgaccgaggtttaggcagc

SEQ ID NO: 5018780 - DNA, 25 bp, Homo sapien
gccatttgtaactccggatcctaaa

SEQ ID NO: 5018781 - DNA, 25 bp, Homo sapien
tgagtgggctcctaccgaccgaggt

SEQ ID NO: 5018782 - DNA, 25 bp, Homo sapien
gagctttgcgggttgccatttgtaa

SEQ ID NO: 5018783 - DNA, 25 bp, Homo sapien
taccgaccgaggtttaggcagcgcg

SEQ ID NO: 5018784 - DNA, 25 bp, Homo sapien
acctcggtcggtaggagcccactca

SEQ ID NO: 5018785 - DNA, 25 bp, Homo sapien
ggagttacaaatggcaacccgcaaa

SEQ ID NO: 5018786 - DNA, 25 bp, Homo sapien
gcgctgcctaaacctcggtcggtag

SEQ ID NO: 5018787 - DNA, 25 bp, Homo sapien
gatccggagttacaaatggcaaccc

SEQ ID NO: 5018788 - DNA, 25 bp, Homo sapien
ttacaaatggcaacccgcaaagctc

SEQ ID NO: 5018789 - DNA, 25 bp, Homo sapien
tttaggatccggagttacaaatggc

SEQ ID NO: 5018790 - DNA, 25 bp, Homo sapien
gttccccggccatcttagcggctgc

SEQ ID NO: 5018791 - DNA, 25 bp, Homo sapien
cgttccccggccatcttagcggctg

SEQ ID NO: 5018792 - DNA, 25 bp, Homo sapien
tcgttccccggccatcttagcggct

SEQ ID NO: 5018793 - DNA, 25 bp, Homo sapien
ttccccggccatcttagcggctgct

SEQ ID NO: 5018794 - DNA, 25 bp, Homo sapien
cccggccatcttagcggctgctgtt

SEQ ID NO: 5018795 - DNA, 25 bp, Homo sapien
ccggccatcttagcggctgctgttg

SEQ ID NO: 5018796 - DNA, 25 bp, Homo sapien
cgctaagatggccggggaacgagaa

SEQ ID NO: 5018797 - DNA, 25 bp, Homo sapien
ctaagatggccggggaacgagaaag

SEQ ID NO: 5018798 - DNA, 25 bp, Homo sapien
caacagcagccgctaagatggccgg

SEQ ID NO: 5018799 - DNA, 25 bp, Homo sapien
gctaagatggccggggaacgagaaa

SEQ ID NO: 5018800 - DNA, 25 bp, Homo sapien
aacagcagccgctaagatggccggg

SEQ ID NO: 5018801 - DNA, 25 bp, Homo sapien
ccgctaagatggccggggaacgaga

SEQ ID NO: 5018802 - DNA, 25 bp, Homo sapien
attgtgggaagtctttcctttctcg

SEQ ID NO: 5018803 - DNA, 25 bp, Homo sapien
gctttgcattgtgggaagtctttcc

SEQ ID NO: 5018804 - DNA, 25 bp, Homo sapien
tcgttccccggccatcttagcggct

SEQ ID NO: 5018805 - DNA, 25 bp, Homo sapien
tgcattgtgggaagtctttcctttc

SEQ ID NO: 5018806 - DNA, 25 bp, Homo sapien
cccggccatcttagcggctgctgtt

SEQ ID NO: 5018807 - DNA, 25 bp, Homo sapien
ccggccatcttagcggctgctgttg

SEQ ID NO: 5018808 - DNA, 25 bp, Homo sapien
ggaaagacttcccacaatgcaaagc

SEQ ID NO: 5018809 - DNA, 25 bp, Homo sapien
cgagaaaggaaagacttcccacaat

SEQ ID NO: 5018810 - DNA, 25 bp, Homo sapien
gaaaggaaagacttcccacaatgca

SEQ ID NO: 5018811 - DNA, 25 bp, Homo sapien
gaaagacttcccacaatgcaaagct

SEQ ID NO: 5018812 - DNA, 25 bp, Homo sapien
aacagcagccgctaagatggccggg

SEQ ID NO: 5018813 - DNA, 25 bp, Homo sapien
caacagcagccgctaagatggccgg

SEQ ID NO: 5018814 - DNA, 25 bp, Homo sapien
ggacaacatagaccacccctgtctc

SEQ ID NO: 5018815 - DNA, 25 bp, Homo sapien
agatctgttgcgtccagctcaaggc

SEQ ID NO: 5018816 - DNA, 25 bp, Homo sapien
gagaggtcgcttgagctcggtaggt

SEQ ID NO: 5018817 - DNA, 25 bp, Homo sapien
ttgaggcgggaagatctgttgcgtc

SEQ ID NO: 5018818 - DNA, 25 bp, Homo sapien
actagaaagtcacaaggcccaatgg

SEQ ID NO: 5018819 - DNA, 25 bp, Homo sapien
ggcccaatggtgacttttccaacca

SEQ ID NO: 5018820 - DNA, 25 bp, Homo sapien
ccatggcagctgtactgttgtagag

SEQ ID NO: 5018821 - DNA, 25 bp, Homo sapien
cacccttagcagttcagtggagaac

SEQ ID NO: 5018822 - DNA, 25 bp, Homo sapien
taagcacattagcacttagctgacc

SEQ ID NO: 5018823 - DNA, 25 bp, Homo sapien
gagtaagcaactctgcctaagcaca

SEQ ID NO: 5018824 - DNA, 25 bp, Homo sapien
tgagtcagcacttaatccattggag

SEQ ID NO: 5018825 - DNA, 25 bp, Homo sapien
ccctaagtctagtacaagtttgtca

SEQ ID NO: 5018826 - DNA, 25 bp, Homo sapien
gttcaactctccctattacatggta

SEQ ID NO: 5018827 - DNA, 25 bp, Homo sapien
tatttctcaggaatagtaactcttc

SEQ ID NO: 5018828 - DNA, 25 bp, Homo sapien
gcagaatcacataacggacatcaaa

SEQ ID NO: 5018829 - DNA, 25 bp, Homo sapien
gttaacaattccagactacacagca

SEQ ID NO: 5018830 - DNA, 25 bp, Homo sapien
actgcttcaatttcaattcggctgc

SEQ ID NO: 5018831 - DNA, 25 bp, Homo sapien
cagtggtccttggatagctactgct

SEQ ID NO: 5018832 - DNA, 25 bp, Homo sapien
tgtcagtggtccttggatagctact

SEQ ID NO: 5018833 - DNA, 25 bp, Homo sapien
tatagtgatgccgttgtcagtggtc

SEQ ID NO: 5018834 - DNA, 25 bp, Homo sapien
gcaacttggtaagcagctctagcag

SEQ ID NO: 5018835 - DNA, 25 bp, Homo sapien
aacttggtaagcagctctagcagga

SEQ ID NO: 5018836 - DNA, 25 bp, Homo sapien
gcagcaacttggtaagcagctctag

SEQ ID NO: 5018837 - DNA, 25 bp, Homo sapien
aagcagcaacttggtaagcagctct

SEQ ID NO: 5018838 - DNA, 25 bp, Homo sapien
cagccagaagaacagttgttttcac

SEQ ID NO: 5018839 - DNA, 25 bp, Homo sapien
gaagtcatttatgtcagccagaaga

SEQ ID NO: 5018840 - DNA, 25 bp, Homo sapien
gatttcattgacagtattgaagtca

SEQ ID NO: 5018841 - DNA, 25 bp, Homo sapien
ttgtagatttcattgacagtattga

SEQ ID NO: 5018842 - DNA, 25 bp, Homo sapien
taaacattgtcattaggtttagtta

SEQ ID NO: 5018843 - DNA, 25 bp, Homo sapien
attgtcattaggtttagttatttgg

SEQ ID NO: 5018844 - DNA, 25 bp, Homo sapien
gaagatataaacattgtcattaggt

SEQ ID NO: 5018845 - DNA, 25 bp, Homo sapien
ctagaagatataaacattgtcatta

SEQ ID NO: 5018846 - DNA, 25 bp, Homo sapien
cagctttcagaatttcacccatgtt

SEQ ID NO: 5018847 - DNA, 25 bp, Homo sapien
agctttcagaatttcacccatgttt

SEQ ID NO: 5018848 - DNA, 25 bp, Homo sapien
taattgttcagccaatgtccacaga

SEQ ID NO: 5018849 - DNA, 25 bp, Homo sapien
tttgtgcgtaaaaagactaggttga

SEQ ID NO: 5018850 - DNA, 25 bp, Homo sapien
gaaaggcctaagtcactgatgttag

SEQ ID NO: 5018851 - DNA, 25 bp, Homo sapien
gaaaaatcctccctactcgcttaca

SEQ ID NO: 5018852 - DNA, 25 bp, Homo sapien
caggcaagtggattcttaatgctct

SEQ ID NO: 5018853 - DNA, 25 bp, Homo sapien
gcaagtggattcttaatgctcttca

SEQ ID NO: 5018854 - DNA, 25 bp, Homo sapien
ggattcttaatgctcttcaacatta

SEQ ID NO: 5018855 - DNA, 25 bp, Homo sapien
ttatctgttaatctctataaaacaa

SEQ ID NO: 5018856 - DNA, 25 bp, Homo sapien
ctgacacaagctgtccacttgaagg

SEQ ID NO: 5018857 - DNA, 25 bp, Homo sapien
tacccctcctgacacaagctgtcca

SEQ ID NO: 5018858 - DNA, 25 bp, Homo sapien
gacacaagctgtccacttgaagggt

SEQ ID NO: 5018859 - DNA, 25 bp, Homo sapien
cacaagctgtccacttgaagggtcc

SEQ ID NO: 5018860 - DNA, 25 bp, Homo sapien
aatggtcctgtcgactaatacagct

SEQ ID NO: 5018861 - DNA, 25 bp, Homo sapien
tggtcctgtcgactaatacagcttg

SEQ ID NO: 5018862 - DNA, 25 bp, Homo sapien
taaatggtcctgtcgactaatacag

SEQ ID NO: 5018863 - DNA, 25 bp, Homo sapien
ggtcctgtcgactaatacagcttga

SEQ ID NO: 5018864 - DNA, 25 bp, Homo sapien
aaaagtgcactgttctactaccagg

SEQ ID NO: 5018865 - DNA, 25 bp, Homo sapien
tatgaggacggtgtgcaaaatgcgc

SEQ ID NO: 5018866 - DNA, 25 bp, Homo sapien
gattggctaattagtgacaacaccc

SEQ ID NO: 5018867 - DNA, 25 bp, Homo sapien
catcatagtctataccacacgggct

SEQ ID NO: 5018868 - DNA, 25 bp, Homo sapien
tgtccctcttgtttggaggtaaaga

SEQ ID NO: 5018869 - DNA, 25 bp, Homo sapien
ggtatgctctttagcaggctccagg

SEQ ID NO: 5018870 - DNA, 25 bp, Homo sapien
ggctccaggacaaagtgtctctaat

SEQ ID NO: 5018871 - DNA, 25 bp, Homo sapien
gaacaaagtccacagagtatctcta

SEQ ID NO: 5018872 - DNA, 25 bp, Homo sapien
gaagtgagccatctcaaagaaatag

SEQ ID NO: 5018873 - DNA, 25 bp, Homo sapien
tgaaccacagtacccggctaaagaa

SEQ ID NO: 5018874 - DNA, 25 bp, Homo sapien
gccaactgcaatatctagctaaaat

SEQ ID NO: 5018875 - DNA, 25 bp, Homo sapien
gcaggcctcaggttttgagccaact

SEQ ID NO: 5018876 - DNA, 25 bp, Homo sapien
atcttacggtacgtgaattatatct

SEQ ID NO: 5018877 - DNA, 25 bp, Homo sapien
gtccacaacaagcaaatccatgaag

SEQ ID NO: 5018878 - DNA, 25 bp, Homo sapien
atgaagatgcaagtagattgtcagg

SEQ ID NO: 5018879 - DNA, 25 bp, Homo sapien
gtgaatcttacggtacgtgaattat

SEQ ID NO: 5018880 - DNA, 25 bp, Homo sapien
tgggtccgacacagcttccaccagc

SEQ ID NO: 5018881 - DNA, 25 bp, Homo sapien
cctgggtccgacacagcttccacca

SEQ ID NO: 5018882 - DNA, 25 bp, Homo sapien
ctgggtccgacacagcttccaccag

SEQ ID NO: 5018883 - DNA, 25 bp, Homo sapien
gccctgggtccgacacagcttccac

SEQ ID NO: 5018884 - DNA, 25 bp, Homo sapien
tgatcacccttctgatcaaggacga

SEQ ID NO: 5018885 - DNA, 25 bp, Homo sapien
cccctggggctttcgcggtgctgat

SEQ ID NO: 5018886 - DNA, 25 bp, Homo sapien
tcacccttctgatcaaggacgacat

SEQ ID NO: 5018887 - DNA, 25 bp, Homo sapien
ttcgcggtgctgatcacccttctga

SEQ ID NO: 5018888 - DNA, 25 bp, Homo sapien
ctgctggcttcttactggactgacc

SEQ ID NO: 5018889 - DNA, 25 bp, Homo sapien
agccccttcaggagaagaagcccca

SEQ ID NO: 5018890 - DNA, 25 bp, Homo sapien
ctggcttcttactggactgaccaac

SEQ ID NO: 5018891 - DNA, 25 bp, Homo sapien
cctcttgcagccccttcaggagaag

SEQ ID NO: 5018892 - DNA, 25 bp, Homo sapien
ggtactgtcgcggaggcttgtcatt

SEQ ID NO: 5018893 - DNA, 25 bp, Homo sapien
gaactgtagtttcggcgacgctcca

SEQ ID NO: 5018894 - DNA, 25 bp, Homo sapien
ggtctggcgcatgcgctctccagcg

SEQ ID NO: 5018895 - DNA, 25 bp, Homo sapien
cctcacagcgtctggcaggttggtc

SEQ ID NO: 5018896 - DNA, 25 bp, Homo sapien
cccggcgcccgtctcccctcttcat

SEQ ID NO: 5018897 - DNA, 25 bp, Homo sapien
tcccggcgcccgtctcccctcttca

SEQ ID NO: 5018898 - DNA, 25 bp, Homo sapien
ctgtatgcggcggcccccctcccgg

SEQ ID NO: 5018899 - DNA, 25 bp, Homo sapien
tatgcggcggcccccctcccggcgc

SEQ ID NO: 5018900 - DNA, 25 bp, Homo sapien
cgctggagccccctacgtcagtcat

SEQ ID NO: 5018901 - DNA, 25 bp, Homo sapien
cctctccctggtgtcgcatctcctt

SEQ ID NO: 5018902 - DNA, 25 bp, Homo sapien
gcccctgcgctggagccccctacgt

SEQ ID NO: 5018903 - DNA, 25 bp, Homo sapien
tggtgtcgcatctccttcggcccct

SEQ ID NO: 5018904 - DNA, 25 bp, Homo sapien
tacatagcctgtagcaactgtgggc

SEQ ID NO: 5018905 - DNA, 25 bp, Homo sapien
tcgtagccagccgatctgaggcctg

SEQ ID NO: 5018906 - DNA, 25 bp, Homo sapien
acagcggttctggttattataggcc

SEQ ID NO: 5018907 - DNA, 25 bp, Homo sapien
cacagagataggtccaggattgagc

SEQ ID NO: 5018908 - DNA, 25 bp, Homo sapien
tcctgtgcctgtagcaggcctgctt

SEQ ID NO: 5018909 - DNA, 25 bp, Homo sapien
cgaaaaagtacatgtctgcaaagtc

SEQ ID NO: 5018910 - DNA, 25 bp, Homo sapien
actgagtaacaaggccatggaaacc

SEQ ID NO: 5018911 - DNA, 25 bp, Homo sapien
ggcctgcttgccattacgaaaaagt

SEQ ID NO: 5018912 - DNA, 25 bp, Homo sapien
gaacgtaatgagagcgtagtgtcga

SEQ ID NO: 5018913 - DNA, 25 bp, Homo sapien
actgcatggtgaagcgtccaggtgg

SEQ ID NO: 5018914 - DNA, 25 bp, Homo sapien
aagcgtccaggtgggaacgtaatga

SEQ ID NO: 5018915 - DNA, 25 bp, Homo sapien
agcgtagtgtcgagggctgggtggc

SEQ ID NO: 5018916 - DNA, 25 bp, Homo sapien
aaggtgcccttggcctacgcctgtg

SEQ ID NO: 5018917 - DNA, 25 bp, Homo sapien
aggtgcccttggcctacgcctgtgc

SEQ ID NO: 5018918 - DNA, 25 bp, Homo sapien
ggtggctaaggcaaggtgcccttgg

SEQ ID NO: 5018919 - DNA, 25 bp, Homo sapien
acatgtaagttctggtggagcctgg

SEQ ID NO: 5018920 - DNA, 25 bp, Homo sapien
ttcttccggtcttggcatcttggag

SEQ ID NO: 5018921 - DNA, 25 bp, Homo sapien
tgtaggctcccacggcatcacactt

SEQ ID NO: 5018922 - DNA, 25 bp, Homo sapien
ttgccaccctcgttcagctgctaga

SEQ ID NO: 5018923 - DNA, 25 bp, Homo sapien
catggcagattctccgaacagagca

SEQ ID NO: 5018924 - DNA, 25 bp, Homo sapien
tacaactggaggttaggagccacca

SEQ ID NO: 5018925 - DNA, 25 bp, Homo sapien
gatgtacggccaaggtcaggtttct

SEQ ID NO: 5018926 - DNA, 25 bp, Homo sapien
tgaggtgcttacagaatccatggga

SEQ ID NO: 5018927 - DNA, 25 bp, Homo sapien
gatgcaactgttggcggctgctaaa

SEQ ID NO: 5018928 - DNA, 25 bp, Homo sapien
tgttggctgcaacgaaggctacttc

SEQ ID NO: 5018929 - DNA, 25 bp, Homo sapien
gctaacagttggctaaaggtcctca

SEQ ID NO: 5018930 - DNA, 25 bp, Homo sapien
catgggacacttgctacgatggcgg

SEQ ID NO: 5018931 - DNA, 25 bp, Homo sapien
caaacattagtcctactttttgtct

SEQ ID NO: 5018932 - DNA, 25 bp, Homo sapien
tagtacatgggctactgaaacaagc

SEQ ID NO: 5018933 - DNA, 25 bp, Homo sapien
ttcctattttagtacatgggctact

SEQ ID NO: 5018934 - DNA, 25 bp, Homo sapien
agtacatgggctactgaaacaagca

SEQ ID NO: 5018935 - DNA, 25 bp, Homo sapien
attttagtacatgggctactgaaac

SEQ ID NO: 5018936 - DNA, 25 bp, Homo sapien
gacctgtggccaaaccgcaaatgta

SEQ ID NO: 5018937 - DNA, 25 bp, Homo sapien
ggagaagccacctatgcgacctgtg

SEQ ID NO: 5018938 - DNA, 25 bp, Homo sapien
ggaagtccccgattgtccatagacg

SEQ ID NO: 5018939 - DNA, 25 bp, Homo sapien
tgaagcaactgacactacccgtggg

SEQ ID NO: 5018940 - DNA, 25 bp, Homo sapien
acttccatcaggcaaagttccatag

SEQ ID NO: 5018941 - DNA, 25 bp, Homo sapien
ctggttgtattttgtccaacatttg

SEQ ID NO: 5018942 - DNA, 25 bp, Homo sapien
tggttgtattttgtccaacatttgt

SEQ ID NO: 5018943 - DNA, 25 bp, Homo sapien
tctggttgtattttgtccaacattt

SEQ ID NO: 5018944 - DNA, 25 bp, Homo sapien
catggaaatcaggtgggtttagtct

SEQ ID NO: 5018945 - DNA, 25 bp, Homo sapien
tctggagattcacatgaagcattca

SEQ ID NO: 5018946 - DNA, 25 bp, Homo sapien
tttagtctggagattcacatgaagc

SEQ ID NO: 5018947 - DNA, 25 bp, Homo sapien
tagtctggagattcacatgaagcat

SEQ ID NO: 5018948 - DNA, 25 bp, Homo sapien
ctccaagcctttctctctggggttg

SEQ ID NO: 5018949 - DNA, 25 bp, Homo sapien
tccaagcctttctctctggggttgt

SEQ ID NO: 5018950 - DNA, 25 bp, Homo sapien
ccaagcctttctctctggggttgtg

SEQ ID NO: 5018951 - DNA, 25 bp, Homo sapien
caagcctttctctctggggttgtgt

SEQ ID NO: 5018952 - DNA, 25 bp, Homo sapien
ttccacgtcgaatgcatataacaac

SEQ ID NO: 5018953 - DNA, 25 bp, Homo sapien
tgacttctaaagctactacggagcc

SEQ ID NO: 5018954 - DNA, 25 bp, Homo sapien
cttttccacgtcgaatgcatataac

SEQ ID NO: 5018955 - DNA, 25 bp, Homo sapien
agctactacggagcctatgcactga

SEQ ID NO: 5018956 - DNA, 25 bp, Homo sapien
ctctaaccatataaggcttctatca

SEQ ID NO: 5018957 - DNA, 25 bp, Homo sapien
cctctaaccatataaggcttctatc

SEQ ID NO: 5018958 - DNA, 25 bp, Homo sapien
ttccttcaaggctctcaaagtggca

SEQ ID NO: 5018959 - DNA, 25 bp, Homo sapien
caaatcgaggaaacatggtcagttc

SEQ ID NO: 5018960 - DNA, 25 bp, Homo sapien
ggtctgctgctggtagtcattgcta

SEQ ID NO: 5018961 - DNA, 25 bp, Homo sapien
tagctgcctaccctttgtccttgga

SEQ ID NO: 5018962 - DNA, 25 bp, Homo sapien
ttttctcgatttcttgtgaccaaaa

SEQ ID NO: 5018963 - DNA, 25 bp, Homo sapien
atcaatataagactgttgcagatgt

SEQ ID NO: 5018964 - DNA, 25 bp, Homo sapien
aatataagactgttgcagatgttcc

SEQ ID NO: 5018965 - DNA, 25 bp, Homo sapien
ttccttttctcgatttcttgtgacc

SEQ ID NO: 5018966 - DNA, 25 bp, Homo sapien
tgtaaggataatattaataaagaat

SEQ ID NO: 5018967 - DNA, 25 bp, Homo sapien
gtaaggataatattaataaagaata

SEQ ID NO: 5018968 - DNA, 25 bp, Homo sapien
aaggataatattaataaagaataca

SEQ ID NO: 5018969 - DNA, 25 bp, Homo sapien
taaggataatattaataaagaatac

SEQ ID NO: 5018970 - DNA, 25 bp, Homo sapien
catggaagctcctatacactggtga

SEQ ID NO: 5018971 - DNA, 25 bp, Homo sapien
tattttgggcgaccctagaggatca

SEQ ID NO: 5018972 - DNA, 25 bp, Homo sapien
tcatgactaaagcaagggatctgcc

SEQ ID NO: 5018973 - DNA, 25 bp, Homo sapien
cccaagagcgaagtaggtctgatac

SEQ ID NO: 5018974 - DNA, 25 bp, Homo sapien
cagcagagatatacctaagtcacaa

SEQ ID NO: 5018975 - DNA, 25 bp, Homo sapien
tccccaatgtttcagaacagcagag

SEQ ID NO: 5018976 - DNA, 25 bp, Homo sapien
gacgctgagccctgtttagggcctt

SEQ ID NO: 5018977 - DNA, 25 bp, Homo sapien
aagtcacaaagccaaagacgctgag

SEQ ID NO: 5018978 - DNA, 25 bp, Homo sapien
taatagaatttcacatgctttacct

SEQ ID NO: 5018979 - DNA, 25 bp, Homo sapien
gaatttcacatgctttacctctgag

SEQ ID NO: 5018980 - DNA, 25 bp, Homo sapien
tcacatgctttacctctgagacatt

SEQ ID NO: 5018981 - DNA, 25 bp, Homo sapien
aagtaatagaatttcacatgcttta

SEQ ID NO: 5018982 - DNA, 25 bp, Homo sapien
agatatataaatacagtgagaaaag

SEQ ID NO: 5018983 - DNA, 25 bp, Homo sapien
gagcaccaaggaattcctgataaaa

SEQ ID NO: 5018984 - DNA, 25 bp, Homo sapien
gccaaagcacactctagcagctgaa

SEQ ID NO: 5018985 - DNA, 25 bp, Homo sapien
gcccagtgatctgttggtctggcca

SEQ ID NO: 5018986 - DNA, 25 bp, Homo sapien
gtctggccacatggcgactcaagtg

SEQ ID NO: 5018987 - DNA, 25 bp, Homo sapien
cacccatgctgtcactcgtggagat

SEQ ID NO: 5018988 - DNA, 25 bp, Homo sapien
caatgatggcactgattgtaaagaa

SEQ ID NO: 5018989 - DNA, 25 bp, Homo sapien
cgtattgtagagtttcgtggcttga

SEQ ID NO: 5018990 - DNA, 25 bp, Homo sapien
tggcaccactgttgtcgtattgtag

SEQ ID NO: 5018991 - DNA, 25 bp, Homo sapien
gagtttcgtggcttgattcaggaac

SEQ ID NO: 5018992 - DNA, 25 bp, Homo sapien
tagttgcattttatccatcacagaa

SEQ ID NO: 5018993 - DNA, 25 bp, Homo sapien
gaaaacacaagatgctatcatgatg

SEQ ID NO: 5018994 - DNA, 25 bp, Homo sapien
cctgagacggcctttactgaaataa

SEQ ID NO: 5018995 - DNA, 25 bp, Homo sapien
tgataaacatgatatagaaaatggg

SEQ ID NO: 5018996 - DNA, 25 bp, Homo sapien
cctggagaacccctgtcttagtatt

SEQ ID NO: 5018997 - DNA, 25 bp, Homo sapien
gaacccctgtcttagtatttatcat

SEQ ID NO: 5018998 - DNA, 25 bp, Homo sapien
caagggccaatcagaaagggtgctg

SEQ ID NO: 5018999 - DNA, 25 bp, Homo sapien
tagccaaaacacttcgcaacctgca

SEQ ID NO: 5019000 - DNA, 25 bp, Homo sapien
tagaattgccaccagggttagcaga

SEQ ID NO: 5019001 - DNA, 25 bp, Homo sapien
ttagcagaatcaccatatgcttcat

SEQ ID NO: 5019002 - DNA, 25 bp, Homo sapien
ccagggttagcagaatcaccatatg

SEQ ID NO: 5019003 - DNA, 25 bp, Homo sapien
tgccaccagggttagcagaatcacc

SEQ ID NO: 5019004 - DNA, 25 bp, Homo sapien
ttttatagaaatacaggagaatgca

SEQ ID NO: 5019005 - DNA, 25 bp, Homo sapien
ttcttttatagaaatacaggagaat

SEQ ID NO: 5019006 - DNA, 25 bp, Homo sapien
tttatagaaatacaggagaatgcag

SEQ ID NO: 5019007 - DNA, 25 bp, Homo sapien
atagaaatacaggagaatgcagaaa

SEQ ID NO: 5019008 - DNA, 25 bp, Homo sapien
gcactaactgttcactctgcctgga

SEQ ID NO: 5019009 - DNA, 25 bp, Homo sapien
gatcataaagtcataggcaactccc

SEQ ID NO: 5019010 - DNA, 25 bp, Homo sapien
gctgtggagcattttgccgtcatca

SEQ ID NO: 5019011 - DNA, 25 bp, Homo sapien
gatctttgcacaatgcctcctccaa

SEQ ID NO: 5019012 - DNA, 25 bp, Homo sapien
ctctgtgaggcttccatttaatgta

SEQ ID NO: 5019013 - DNA, 25 bp, Homo sapien
ctgtgaggcttccatttaatgtaaa

SEQ ID NO: 5019014 - DNA, 25 bp, Homo sapien
gtctctgtgaggcttccatttaatg

SEQ ID NO: 5019015 - DNA, 25 bp, Homo sapien
tctgtgaggcttccatttaatgtaa

SEQ ID NO: 5019016 - DNA, 25 bp, Homo sapien
gaactgcttcggtcctgtacttaga

SEQ ID NO: 5019017 - DNA, 25 bp, Homo sapien
gaaggctagaccagttagcttttga

SEQ ID NO: 5019018 - DNA, 25 bp, Homo sapien
aatttcctcagtagacatgtccctg

SEQ ID NO: 5019019 - DNA, 25 bp, Homo sapien
ctaggcatataaagtaggatcatac

SEQ ID NO: 5019020 - DNA, 25 bp, Homo sapien
aattttggagggcagtttgtctaca

SEQ ID NO: 5019021 - DNA, 25 bp, Homo sapien
ggttgagagtactaatgggaatgta

SEQ ID NO: 5019022 - DNA, 25 bp, Homo sapien
taatgctatccctcatgcttatcat

SEQ ID NO: 5019023 - DNA, 25 bp, Homo sapien
ttggagggcagtttgtctacatcta

SEQ ID NO: 5019024 - DNA, 25 bp, Homo sapien
gtaatactgtactgttcttgctgag

SEQ ID NO: 5019025 - DNA, 25 bp, Homo sapien
tcttgctgagattgcctgagttata

SEQ ID NO: 5019026 - DNA, 25 bp, Homo sapien
gaactgccatccgacaaggtaatac

SEQ ID NO: 5019027 - DNA, 25 bp, Homo sapien
atagatcaggaactgccatccgaca

SEQ ID NO: 5019028 - DNA, 25 bp, Homo sapien
catttatttgagtttcctcgaaaca

SEQ ID NO: 5019029 - DNA, 25 bp, Homo sapien
cctggcgattgctttcagaaatagc

SEQ ID NO: 5019030 - DNA, 25 bp, Homo sapien
gaatcagagcacagtccaaacctgt

SEQ ID NO: 5019031 - DNA, 25 bp, Homo sapien
taattaatccactaagaatcagagc

SEQ ID NO: 5019032 - DNA, 25 bp, Homo sapien
cacagtcacagagtaacatttggca

SEQ ID NO: 5019033 - DNA, 25 bp, Homo sapien
aagctacattttctcaaggcaacgg

SEQ ID NO: 5019034 - DNA, 25 bp, Homo sapien
gaagtgggttacgacatctcagatg

SEQ ID NO: 5019035 - DNA, 25 bp, Homo sapien
aaggcaacggcaacaaaggctcaaa

SEQ ID NO: 5019036 - DNA, 25 bp, Homo sapien
cttaggatatcgcttgttggaggca

SEQ ID NO: 5019037 - DNA, 25 bp, Homo sapien
ctgaggctctcaaattgtctttcag

SEQ ID NO: 5019038 - DNA, 25 bp, Homo sapien
tagtacactataccccattggctcc

SEQ ID NO: 5019039 - DNA, 25 bp, Homo sapien
tacttttcttgttgccaagccacag

SEQ ID NO: 5019040 - DNA, 25 bp, Homo sapien
ggaaactaatttcccatggtagagc

SEQ ID NO: 5019041 - DNA, 25 bp, Homo sapien
catttacattacagcagagctggaa

SEQ ID NO: 5019042 - DNA, 25 bp, Homo sapien
tcaagccactaagaaaagtgatatt

SEQ ID NO: 5019043 - DNA, 25 bp, Homo sapien
ttagagttccggtgacctcatccag

SEQ ID NO: 5019044 - DNA, 25 bp, Homo sapien
aatgtccgtgtgaagtgacactatc

SEQ ID NO: 5019045 - DNA, 25 bp, Homo sapien
tattttctgcatatcttgaacatta

SEQ ID NO: 5019046 - DNA, 25 bp, Homo sapien
gaaaaatggagcgcaatgtgttggt

SEQ ID NO: 5019047 - DNA, 25 bp, Homo sapien
aaaatggagcgcaatgtgttggtgt

SEQ ID NO: 5019048 - DNA, 25 bp, Homo sapien
aatggagcgcaatgtgttggtgtga

SEQ ID NO: 5019049 - DNA, 25 bp, Homo sapien
aaaaatggagcgcaatgtgttggtg

SEQ ID NO: 5019050 - DNA, 25 bp, Homo sapien
aagcttcagctttcaggtttcgatg

SEQ ID NO: 5019051 - DNA, 25 bp, Homo sapien
ggatcaagtcttgccaaggtgggca

SEQ ID NO: 5019052 - DNA, 25 bp, Homo sapien
caggtttcgatgagagcttggatca

SEQ ID NO: 5019053 - DNA, 25 bp, Homo sapien
tctgagtggaagattggaaagcttc

SEQ ID NO: 5019054 - DNA, 25 bp, Homo sapien
tgtgacagcatgacaatggatcgct

SEQ ID NO: 5019055 - DNA, 25 bp, Homo sapien
ggcatcaggctttcacacataggtg

SEQ ID NO: 5019056 - DNA, 25 bp, Homo sapien
gttagagtcacaaaatgcaagtttc

SEQ ID NO: 5019057 - DNA, 25 bp, Homo sapien
ccatgttaacgtgataagaaaccag

SEQ ID NO: 5019058 - DNA, 25 bp, Homo sapien
taacggagcgatcagagtaatggga

SEQ ID NO: 5019059 - DNA, 25 bp, Homo sapien
cataggctgcaaagttccccgtctc

SEQ ID NO: 5019060 - DNA, 25 bp, Homo sapien
cacactcttgaagtatggccttggg

SEQ ID NO: 5019061 - DNA, 25 bp, Homo sapien
taatgggagcaaatccataggctgc

SEQ ID NO: 5019062 - DNA, 25 bp, Homo sapien
tttagagaaatactgatcaccaagt

SEQ ID NO: 5019063 - DNA, 25 bp, Homo sapien
aatatttagagaaatactgatcacc

SEQ ID NO: 5019064 - DNA, 25 bp, Homo sapien
tagagaaatactgatcaccaagttt

SEQ ID NO: 5019065 - DNA, 25 bp, Homo sapien
ctgaatatttagagaaatactgatc

SEQ ID NO: 5019066 - DNA, 25 bp, Homo sapien
gagatgggctaaattttcctactac

SEQ ID NO: 5019067 - DNA, 25 bp, Homo sapien
gaaagatcatcggactacaaggtaa

SEQ ID NO: 5019068 - DNA, 25 bp, Homo sapien
taaggttctatgatctccactggag

SEQ ID NO: 5019069 - DNA, 25 bp, Homo sapien
aataaactgctataccagctcacca

SEQ ID NO: 5019070 - DNA, 25 bp, Homo sapien
ctgttgtttggcagacatagtaaat

SEQ ID NO: 5019071 - DNA, 25 bp, Homo sapien
tgttgtttggcagacatagtaaatg

SEQ ID NO: 5019072 - DNA, 25 bp, Homo sapien
ttgtttggcagacatagtaaatgaa

SEQ ID NO: 5019073 - DNA, 25 bp, Homo sapien
gttgtttggcagacatagtaaatga

SEQ ID NO: 5019074 - DNA, 25 bp, Homo sapien
gtacaggggcccaaggtgcagcaaa

SEQ ID NO: 5019075 - DNA, 25 bp, Homo sapien
gactgcagtatagctggtctggaga

SEQ ID NO: 5019076 - DNA, 25 bp, Homo sapien
gagatgttctgtgccacggatccgt

SEQ ID NO: 5019077 - DNA, 25 bp, Homo sapien
ggtgagtgcattccggcaaagggca

SEQ ID NO: 5019078 - DNA, 25 bp, Homo sapien
ggttacattttggaccctcattgat

SEQ ID NO: 5019079 - DNA, 25 bp, Homo sapien
cattttggaccctcattgattcact

SEQ ID NO: 5019080 - DNA, 25 bp, Homo sapien
atgttggttacattttggaccctca

SEQ ID NO: 5019081 - DNA, 25 bp, Homo sapien
ttcttgaatggaatgttggttacat

SEQ ID NO: 5019082 - DNA, 25 bp, Homo sapien
aaaacagccctggaacgatcagagc

SEQ ID NO: 5019083 - DNA, 25 bp, Homo sapien
ctggaacgatcagagccctgcaagt

SEQ ID NO: 5019084 - DNA, 25 bp, Homo sapien
ccagcctaatgtgggctgtgataag

SEQ ID NO: 5019085 - DNA, 25 bp, Homo sapien
gccctggaacgatcagagccctgca

SEQ ID NO: 5019086 - DNA, 25 bp, Homo sapien
caagataccttgttgaggctaggca

SEQ ID NO: 5019087 - DNA, 25 bp, Homo sapien
atttacattagggatcagtcagcac

SEQ ID NO: 5019088 - DNA, 25 bp, Homo sapien
tatgacctgccaagctcagggtggg

SEQ ID NO: 5019089 - DNA, 25 bp, Homo sapien
gaggcatggagctcataactaaata

SEQ ID NO: 5019090 - DNA, 25 bp, Homo sapien
ggtgaaaatgagtgaattgccccca

SEQ ID NO: 5019091 - DNA, 25 bp, Homo sapien
taactgtaaaaggatcctggggtga

SEQ ID NO: 5019092 - DNA, 25 bp, Homo sapien
gcttctgataacagggtgtcacttt

SEQ ID NO: 5019093 - DNA, 25 bp, Homo sapien
ttctgcttctgataacagggtgtca

SEQ ID NO: 5019094 - DNA, 25 bp, Homo sapien
ctagattccttccgggagaagaggg

SEQ ID NO: 5019095 - DNA, 25 bp, Homo sapien
agattccttccgggagaagagggcg

SEQ ID NO: 5019096 - DNA, 25 bp, Homo sapien
tccgggagaagagggcggacgcagg

SEQ ID NO: 5019097 - DNA, 25 bp, Homo sapien
cttccgggagaagagggcggacgca

SEQ ID NO: 5019098 - DNA, 25 bp, Homo sapien
gcgggaaacattgcatgtcacctct

SEQ ID NO: 5019099 - DNA, 25 bp, Homo sapien
cggacttaggtcaatgcgggaaaca

SEQ ID NO: 5019100 - DNA, 25 bp, Homo sapien
tcttcccactcggagaggccgggtg

SEQ ID NO: 5019101 - DNA, 25 bp, Homo sapien
aggtcaaggccgaagacctgggcgc

SEQ ID NO: 5019102 - DNA, 25 bp, Homo sapien
gcctggtgccccgtacgtgaaattc

SEQ ID NO: 5019103 - DNA, 25 bp, Homo sapien
accagtcgcccgagagggagccgtt

SEQ ID NO: 5019104 - DNA, 25 bp, Homo sapien
aattcagtgacagctcgtccagggc

SEQ ID NO: 5019105 - DNA, 25 bp, Homo sapien
tggttcctgcggtaccagtcgcccg

SEQ ID NO: 5019106 - DNA, 25 bp, Homo sapien
agccacttcctgctcggtgcccggg

SEQ ID NO: 5019107 - DNA, 25 bp, Homo sapien
cgccctgttgcaccgcgaggaggcc

SEQ ID NO: 5019108 - DNA, 25 bp, Homo sapien
gcgcggccgtaggtgctcccagcct

SEQ ID NO: 5019109 - DNA, 25 bp, Homo sapien
ctcctccggtgcgaggtgtcctcgg

SEQ ID NO: 5019110 - DNA, 25 bp, Homo sapien
cctgttcactttacgggatgccaaa

SEQ ID NO: 5019111 - DNA, 25 bp, Homo sapien
gcagagctgtggagattgttccgta

SEQ ID NO: 5019112 - DNA, 25 bp, Homo sapien
ttgttccgtactttgtgacggcctc

SEQ ID NO: 5019113 - DNA, 25 bp, Homo sapien
tacctctcgtgggatttcttcaggg

SEQ ID NO: 5019114 - DNA, 25 bp, Homo sapien
tttccataaccctccgcaactcctg

SEQ ID NO: 5019115 - DNA, 25 bp, Homo sapien
ataaccctccgcaactcctgtcctc

SEQ ID NO: 5019116 - DNA, 25 bp, Homo sapien
ctttccttgacttattgtgaagcct

SEQ ID NO: 5019117 - DNA, 25 bp, Homo sapien
tgtgaagcctttttccataaccctc

SEQ ID NO: 5019118 - DNA, 25 bp, Homo sapien
tcagcatggagtgtcatctgcgtct

SEQ ID NO: 5019119 - DNA, 25 bp, Homo sapien
ttatacaggcttcctctaaaaagct

SEQ ID NO: 5019120 - DNA, 25 bp, Homo sapien
ctgtcttgccagtcaagccccacag

SEQ ID NO: 5019121 - DNA, 25 bp, Homo sapien
cacagctgctctgccgagttataca

SEQ ID NO: 5019122 - DNA, 25 bp, Homo sapien
taagattcaaataatgttgccacag

SEQ ID NO: 5019123 - DNA, 25 bp, Homo sapien
ggactaagattcaaataatgttgcc

SEQ ID NO: 5019124 - DNA, 25 bp, Homo sapien
aatgttgccacagtttagtagctcc

SEQ ID NO: 5019125 - DNA, 25 bp, Homo sapien
tttacatgtaagaggactaagattc

SEQ ID NO: 5019126 - DNA, 25 bp, Homo sapien
ttctgcacttccagctgtgtatgga

SEQ ID NO: 5019127 - DNA, 25 bp, Homo sapien
taattgattgccatgtgattgtcca

SEQ ID NO: 5019128 - DNA, 25 bp, Homo sapien
agaaatgcttttgtacagggcggga

SEQ ID NO: 5019129 - DNA, 25 bp, Homo sapien
tgtacagggcgggacccatgctcct

SEQ ID NO: 5019130 - DNA, 25 bp, Homo sapien
gcgggacccatgctcctctcaattt

SEQ ID NO: 5019131 - DNA, 25 bp, Homo sapien
tgtgcccagctatagccttcaaaat

SEQ ID NO: 5019132 - DNA, 25 bp, Homo sapien
ccatcttgatcagggtgttcactct

SEQ ID NO: 5019133 - DNA, 25 bp, Homo sapien
catggagtttaagacaccatcttga

SEQ ID NO: 5019134 - DNA, 25 bp, Homo sapien
ttcactctgcaatcggtcctgtggg

SEQ ID NO: 5019135 - DNA, 25 bp, Homo sapien
ctggctcgtctctctaacacggtct

SEQ ID NO: 5019136 - DNA, 25 bp, Homo sapien
ggtgaggaatatgccaaaacctggg

SEQ ID NO: 5019137 - DNA, 25 bp, Homo sapien
cgtctctctaacacggtctttggtg

SEQ ID NO: 5019138 - DNA, 25 bp, Homo sapien
aacacggtctttggtgaggaatatg

SEQ ID NO: 5019139 - DNA, 25 bp, Homo sapien
tcacagtccttgcatcactctggaa

SEQ ID NO: 5019140 - DNA, 25 bp, Homo sapien
ggcaattcctaaggccagctgcaga

SEQ ID NO: 5019141 - DNA, 25 bp, Homo sapien
cacagtccttgcatcactctggaag

SEQ ID NO: 5019142 - DNA, 25 bp, Homo sapien
ggtggcaattcctaaggccagctgc

SEQ ID NO: 5019143 - DNA, 25 bp, Homo sapien
caaagatttcaaatactgcacattt

SEQ ID NO: 5019144 - DNA, 25 bp, Homo sapien
ggtttcaaggtctctaagctcatca

SEQ ID NO: 5019145 - DNA, 25 bp, Homo sapien
gatattccttatagaggcctttgtg

SEQ ID NO: 5019146 - DNA, 25 bp, Homo sapien
cagctggtgtccccaaagggtagag

SEQ ID NO: 5019147 - DNA, 25 bp, Homo sapien
ggcctttgtggtttcaaggtctcta

SEQ ID NO: 5019148 - DNA, 25 bp, Homo sapien
tgtgggccagtctggcaaccaaacc

SEQ ID NO: 5019149 - DNA, 25 bp, Homo sapien
taccctgagcaagaaaggcactgtg

SEQ ID NO: 5019150 - DNA, 25 bp, Homo sapien
cataatatcgcttttatggacaggg

SEQ ID NO: 5019151 - DNA, 25 bp, Homo sapien
gggatttccagtgccaaacgactga

SEQ ID NO: 5019152 - DNA, 25 bp, Homo sapien
gggcagattacatataagacctcct

SEQ ID NO: 5019153 - DNA, 25 bp, Homo sapien
taaattgtaattggtgggtctggtg

SEQ ID NO: 5019154 - DNA, 25 bp, Homo sapien
tctctgcgatatagaattaaagtat

SEQ ID NO: 5019155 - DNA, 25 bp, Homo sapien
cattttcaagtgcacgtagcctgtc

SEQ ID NO: 5019156 - DNA, 25 bp, Homo sapien
tgcgctgtgtcattgacagctctgg

SEQ ID NO: 5019157 - DNA, 25 bp, Homo sapien
tctgcgctgtgtcattgacagctct

SEQ ID NO: 5019158 - DNA, 25 bp, Homo sapien
cgctgtgtcattgacagctctggcc

SEQ ID NO: 5019159 - DNA, 25 bp, Homo sapien
ctgtgtcattgacagctctggccat

SEQ ID NO: 5019160 - DNA, 25 bp, Homo sapien
tctgatcccatccagtaaggacgag

SEQ ID NO: 5019161 - DNA, 25 bp, Homo sapien
gccagcagcaggaatgtcactctga

SEQ ID NO: 5019162 - DNA, 25 bp, Homo sapien
tgtaggctgctggatcgcaagtgca

SEQ ID NO: 5019163 - DNA, 25 bp, Homo sapien
gtcacaaagctagggatagtcccca

SEQ ID NO: 5019164 - DNA, 25 bp, Homo sapien
gggcacttccctcttatgggccaat

SEQ ID NO: 5019165 - DNA, 25 bp, Homo sapien
tcttggtggtaatcagcagggacat

SEQ ID NO: 5019166 - DNA, 25 bp, Homo sapien
tgtcctgttaaaccatccagcactg

SEQ ID NO: 5019167 - DNA, 25 bp, Homo sapien
cccctgtagtcgaggctttgcagaa

SEQ ID NO: 5019168 - DNA, 25 bp, Homo sapien
aatcattaaaggctctgaattctca

SEQ ID NO: 5019169 - DNA, 25 bp, Homo sapien
agaggtctccagaatcattaaaggc

SEQ ID NO: 5019170 - DNA, 25 bp, Homo sapien
ggtctccagaatcattaaaggctct

SEQ ID NO: 5019171 - DNA, 25 bp, Homo sapien
ccagaatcattaaaggctctgaatt

SEQ ID NO: 5019172 - DNA, 25 bp, Homo sapien
tgtgatggggctcctaccacttctt

SEQ ID NO: 5019173 - DNA, 25 bp, Homo sapien
atggggctcctaccacttctttcaa

SEQ ID NO: 5019174 - DNA, 25 bp, Homo sapien
tgatggggctcctaccacttctttc

SEQ ID NO: 5019175 - DNA, 25 bp, Homo sapien
ctgtgatggggctcctaccacttct

SEQ ID NO: 5019176 - DNA, 25 bp, Homo sapien
gagcctgcttttttagctctcagac

SEQ ID NO: 5019177 - DNA, 25 bp, Homo sapien
gggggagcctgcttttttagctctc

SEQ ID NO: 5019178 - DNA, 25 bp, Homo sapien
gggagcctgcttttttagctctcag

SEQ ID NO: 5019179 - DNA, 25 bp, Homo sapien
gcctgcttttttagctctcagactt

SEQ ID NO: 5019180 - DNA, 25 bp, Homo sapien
gattcctgaaactgggcccaactga

SEQ ID NO: 5019181 - DNA, 25 bp, Homo sapien
gcccaactgatacggccggttcctg

SEQ ID NO: 5019182 - DNA, 25 bp, Homo sapien
actccagcggccacatgactgaggg

SEQ ID NO: 5019183 - DNA, 25 bp, Homo sapien
ctggaaagcggcctgacagctcatc

SEQ ID NO: 5019184 - DNA, 25 bp, Homo sapien
tcaggtagccaaatagttgatgtgc

SEQ ID NO: 5019185 - DNA, 25 bp, Homo sapien
ggtagccaaatagttgatgtgcaaa

SEQ ID NO: 5019186 - DNA, 25 bp, Homo sapien
ttttcaggtagccaaatagttgatg

SEQ ID NO: 5019187 - DNA, 25 bp, Homo sapien
gccaaatagttgatgtgcaaatggt

SEQ ID NO: 5019188 - DNA, 25 bp, Homo sapien
caatgaacctggttaagctcaggcc

SEQ ID NO: 5019189 - DNA, 25 bp, Homo sapien
taactctgtgtcatctaagcattgg

SEQ ID NO: 5019190 - DNA, 25 bp, Homo sapien
cagttttgctagtgagtccatccca

SEQ ID NO: 5019191 - DNA, 25 bp, Homo sapien
taagcattggcatccgttgactgct

SEQ ID NO: 5019192 - DNA, 25 bp, Homo sapien
tgtggactctccaaagaggtcctgg

SEQ ID NO: 5019193 - DNA, 25 bp, Homo sapien
taaagaggccacagcgttaaatccc

SEQ ID NO: 5019194 - DNA, 25 bp, Homo sapien
taaatcccgtgagttcatcaacagg

SEQ ID NO: 5019195 - DNA, 25 bp, Homo sapien
caccgcctagggtcagagatgcagg

SEQ ID NO: 5019196 - DNA, 25 bp, Homo sapien
aaaatttatgactgttattgctcac

SEQ ID NO: 5019197 - DNA, 25 bp, Homo sapien
ttaggaacacataatctcataaaat

SEQ ID NO: 5019198 - DNA, 25 bp, Homo sapien
ggaacacataatctcataaaattta

SEQ ID NO: 5019199 - DNA, 25 bp, Homo sapien
taaaatttatgactgttattgctca

SEQ ID NO: 5019200 - DNA, 25 bp, Homo sapien
cccggttgacgctctttggcatgag

SEQ ID NO: 5019201 - DNA, 25 bp, Homo sapien
gaaagaagacacattcccggttgac

SEQ ID NO: 5019202 - DNA, 25 bp, Homo sapien
tatgtttctgggttactgtgtgccg

SEQ ID NO: 5019203 - DNA, 25 bp, Homo sapien
tgtgtgccgggctacaagcgagctt

SEQ ID NO: 5019204 - DNA, 25 bp, Homo sapien
gagacaatttggctcaagctcaagc

SEQ ID NO: 5019205 - DNA, 25 bp, Homo sapien
acagagacaatttggctcaagctca

SEQ ID NO: 5019206 - DNA, 25 bp, Homo sapien
tagcaatggataacagagacaattt

SEQ ID NO: 5019207 - DNA, 25 bp, Homo sapien
gacaatttggctcaagctcaagcaa

SEQ ID NO: 5019208 - DNA, 25 bp, Homo sapien
tatctcccgcaaggattgatccaag

SEQ ID NO: 5019209 - DNA, 25 bp, Homo sapien
caagctagcttctattgctcccgag

SEQ ID NO: 5019210 - DNA, 25 bp, Homo sapien
caaaagttgctgatctatctcccgc

SEQ ID NO: 5019211 - DNA, 25 bp, Homo sapien
ggtgctgcctgcgatagtagctcct

SEQ ID NO: 5019212 - DNA, 25 bp, Homo sapien
tgtgctcccggggaggtggtcccag

SEQ ID NO: 5019213 - DNA, 25 bp, Homo sapien
agtagctgttgtgctcccggggagg

SEQ ID NO: 5019214 - DNA, 25 bp, Homo sapien
ctgttgtgctcccggggaggtggtc

SEQ ID NO: 5019215 - DNA, 25 bp, Homo sapien
gtagctgttgtgctcccggggaggt

SEQ ID NO: 5019216 - DNA, 25 bp, Homo sapien
gttactaaaagaagattcactatct

SEQ ID NO: 5019217 - DNA, 25 bp, Homo sapien
taatttttcactttcaccatcaggc

SEQ ID NO: 5019218 - DNA, 25 bp, Homo sapien
ctttcaccatcaggcactggagcat

SEQ ID NO: 5019219 - DNA, 25 bp, Homo sapien
tggcctctcaggaaggtctgggact

SEQ ID NO: 5019220 - DNA, 25 bp, Homo sapien
gtacacctacttgagctattttgag

SEQ ID NO: 5019221 - DNA, 25 bp, Homo sapien
ggtacacctacttgagctattttga

SEQ ID NO: 5019222 - DNA, 25 bp, Homo sapien
ttgccattgctggtacacctacttg

SEQ ID NO: 5019223 - DNA, 25 bp, Homo sapien
ttgattgccattgctggtacaccta

SEQ ID NO: 5019224 - DNA, 25 bp, Homo sapien
taagctatttcctgctgatccctca

SEQ ID NO: 5019225 - DNA, 25 bp, Homo sapien
aagctatttcctgctgatccctcac

SEQ ID NO: 5019226 - DNA, 25 bp, Homo sapien
ttaagctatttcctgctgatccctc

SEQ ID NO: 5019227 - DNA, 25 bp, Homo sapien
gacatcatctaggtcagagacagat

SEQ ID NO: 5019228 - DNA, 25 bp, Homo sapien
agtggcttcagaatgtgccgaagtc

SEQ ID NO: 5019229 - DNA, 25 bp, Homo sapien
gacagatgacaactttgtgtctaaa

SEQ ID NO: 5019230 - DNA, 25 bp, Homo sapien
gtccatttgtgacactagtgacact

SEQ ID NO: 5019231 - DNA, 25 bp, Homo sapien
cagtgtgcaccacaaattggtttag

SEQ ID NO: 5019232 - DNA, 25 bp, Homo sapien
agtgtgcaccacaaattggtttaga

SEQ ID NO: 5019233 - DNA, 25 bp, Homo sapien
acagtgtgcaccacaaattggttta

SEQ ID NO: 5019234 - DNA, 25 bp, Homo sapien
ggtcatgcctgaccccatgagagga

SEQ ID NO: 5019235 - DNA, 25 bp, Homo sapien
aagagttggcaccttggtcaggtca

SEQ ID NO: 5019236 - DNA, 25 bp, Homo sapien
tgttgaagagttggcaccttggtca

SEQ ID NO: 5019237 - DNA, 25 bp, Homo sapien
tcaggtcatgcctgaccccatgaga

SEQ ID NO: 5019238 - DNA, 25 bp, Homo sapien
ccgaaggtctctaaggacaagctgc

SEQ ID NO: 5019239 - DNA, 25 bp, Homo sapien
tggcagaatccaggggactcctcct

SEQ ID NO: 5019240 - DNA, 25 bp, Homo sapien
aaggtctctaaggacaagctgcagc

SEQ ID NO: 5019241 - DNA, 25 bp, Homo sapien
gaaggtctctaaggacaagctgcag

SEQ ID NO: 5019242 - DNA, 25 bp, Homo sapien
ctgagagatttctcacaacttccca

SEQ ID NO: 5019243 - DNA, 25 bp, Homo sapien
cctgagagatttctcacaacttccc

SEQ ID NO: 5019244 - DNA, 25 bp, Homo sapien
gagagatttctcacaacttcccagc

SEQ ID NO: 5019245 - DNA, 25 bp, Homo sapien
tgagagatttctcacaacttcccag

SEQ ID NO: 5019246 - DNA, 25 bp, Homo sapien
cagccaggcttttccaagccctctg

SEQ ID NO: 5019247 - DNA, 25 bp, Homo sapien
caggcttttccaagccctctgtgct

SEQ ID NO: 5019248 - DNA, 25 bp, Homo sapien
gccaggcttttccaagccctctgtg

SEQ ID NO: 5019249 - DNA, 25 bp, Homo sapien
gccctctgtgctccactctgccaca

SEQ ID NO: 5019250 - DNA, 25 bp, Homo sapien
gggcctcagggtgaattgttctgat

SEQ ID NO: 5019251 - DNA, 25 bp, Homo sapien
cagggtgaattgttctgatctgggc

SEQ ID NO: 5019252 - DNA, 25 bp, Homo sapien
tccactccctgaacgcaccggaggg

SEQ ID NO: 5019253 - DNA, 25 bp, Homo sapien
tgaacgcaccggagggcctcagggt

SEQ ID NO: 5019254 - DNA, 25 bp, Homo sapien
caatgatggacccagcagacctaga

SEQ ID NO: 5019255 - DNA, 25 bp, Homo sapien
aatgatggacccagcagacctagat

SEQ ID NO: 5019256 - DNA, 25 bp, Homo sapien
tcacagggatgggtcagacttggat

SEQ ID NO: 5019257 - DNA, 25 bp, Homo sapien
tcgaagccagattaacggtcctcta

SEQ ID NO: 5019258 - DNA, 25 bp, Homo sapien
aacggtcctctacaggtcctccaag

SEQ ID NO: 5019259 - DNA, 25 bp, Homo sapien
ggagcccccattcgaagccagatta

SEQ ID NO: 5019260 - DNA, 25 bp, Homo sapien
gcccacacagagctcccgaccagaa

SEQ ID NO: 5019261 - DNA, 25 bp, Homo sapien
cacagagctcccgaccagaactcag

SEQ ID NO: 5019262 - DNA, 25 bp, Homo sapien
gaccagaactcagcgactcccgccc

SEQ ID NO: 5019263 - DNA, 25 bp, Homo sapien
cgaccagaactcagcgactcccgcc

SEQ ID NO: 5019264 - DNA, 25 bp, Homo sapien
cgccagacccagcggggaaaggtca

SEQ ID NO: 5019265 - DNA, 25 bp, Homo sapien
gcaagccgccctttatttcccagcc

SEQ ID NO: 5019266 - DNA, 25 bp, Homo sapien
aaaggtcaccgtaggcagccccctg

SEQ ID NO: 5019267 - DNA, 25 bp, Homo sapien
gccctgtccccggacacgcgcaagc

SEQ ID NO: 5019268 - DNA, 25 bp, Homo sapien
agccccgctgggtgaggcgcagcgc

SEQ ID NO: 5019269 - DNA, 25 bp, Homo sapien
ccgccgcgatgctcgcccgcgggtt

SEQ ID NO: 5019270 - DNA, 25 bp, Homo sapien
aggcagcggccaccgccgcgatgct

SEQ ID NO: 5019271 - DNA, 25 bp, Homo sapien
aagcgcttccagaacgcgcagggcg

SEQ ID NO: 5019272 - DNA, 25 bp, Homo sapien
tgccagatgagtacacccagaatgc

SEQ ID NO: 5019273 - DNA, 25 bp, Homo sapien
cgtgtgagttctgtacaaaaagccc

SEQ ID NO: 5019274 - DNA, 25 bp, Homo sapien
cactggtctttgcatcgtgggcata

SEQ ID NO: 5019275 - DNA, 25 bp, Homo sapien
ccacaagtcgtccagtagaaatgca

SEQ ID NO: 5019276 - DNA, 25 bp, Homo sapien
tgaagctaaccagggagagtcaggt

SEQ ID NO: 5019277 - DNA, 25 bp, Homo sapien
ttggcaaccaggctgtcagactgac

SEQ ID NO: 5019278 - DNA, 25 bp, Homo sapien
ggtttgaagtttacaggtgctctcc

SEQ ID NO: 5019279 - DNA, 25 bp, Homo sapien
aagtgtcactcccagcatttgaagg

SEQ ID NO: 5019280 - DNA, 25 bp, Homo sapien
agaagctgttgtttattcttggtaa

SEQ ID NO: 5019281 - DNA, 25 bp, Homo sapien
aaatagactgagtatgggccggtcc

SEQ ID NO: 5019282 - DNA, 25 bp, Homo sapien
cctgctgccgaagtaggctccctaa

SEQ ID NO: 5019283 - DNA, 25 bp, Homo sapien
tgtgaaacagacacccctgcaggat

SEQ ID NO: 5019284 - DNA, 25 bp, Homo sapien
gaaccactagcctccttggtagaag

SEQ ID NO: 5019285 - DNA, 25 bp, Homo sapien
ggtgaatcggtaggaaggccactgg

SEQ ID NO: 5019286 - DNA, 25 bp, Homo sapien
aatcggtaggaaggccactgggctg

SEQ ID NO: 5019287 - DNA, 25 bp, Homo sapien
tgaatcggtaggaaggccactgggc

SEQ ID NO: 5019288 - DNA, 25 bp, Homo sapien
tcggtaggaaggccactgggctgac

SEQ ID NO: 5019289 - DNA, 25 bp, Homo sapien
agagcagagagattgcttacaaaca

SEQ ID NO: 5019290 - DNA, 25 bp, Homo sapien
cagaatttctgcatgtctctctatg

SEQ ID NO: 5019291 - DNA, 25 bp, Homo sapien
cattctagccatgagccgatcctga

SEQ ID NO: 5019292 - DNA, 25 bp, Homo sapien
ttcagcagtcagctacaatagacga

SEQ ID NO: 5019293 - DNA, 25 bp, Homo sapien
gcaggtggcctcgtctgtgtatgca

SEQ ID NO: 5019294 - DNA, 25 bp, Homo sapien
aggctgaggaaggacgcacagcact

SEQ ID NO: 5019295 - DNA, 25 bp, Homo sapien
cttgccccgcactcgttaaggctga

SEQ ID NO: 5019296 - DNA, 25 bp, Homo sapien
gaaatctgtgttaaccttgccccgc

SEQ ID NO: 5019297 - DNA, 25 bp, Homo sapien
ctggtagaatagagagcacaggagc

SEQ ID NO: 5019298 - DNA, 25 bp, Homo sapien
cctttgtgaagacaggacttctggg

SEQ ID NO: 5019299 - DNA, 25 bp, Homo sapien
caatgaggacacgaggaaagaggaa

SEQ ID NO: 5019300 - DNA, 25 bp, Homo sapien
ggagccccctggaagcatttttgga

SEQ ID NO: 5019301 - DNA, 25 bp, Homo sapien
ccaccgttggtgctcctgttgaata

SEQ ID NO: 5019302 - DNA, 25 bp, Homo sapien
aatataaccgcagatgccaagggcc

SEQ ID NO: 5019303 - DNA, 25 bp, Homo sapien
gaagtggaaaatctgcacgggccca

SEQ ID NO: 5019304 - DNA, 25 bp, Homo sapien
tagtgacttcttggccaccgttggt

SEQ ID NO: 5019305 - DNA, 25 bp, Homo sapien
ccaggagcggctacgttgtaaccca

SEQ ID NO: 5019306 - DNA, 25 bp, Homo sapien
ctgcccagggttgactccaccagga

SEQ ID NO: 5019307 - DNA, 25 bp, Homo sapien
ggcaaactttgtaggtctgcccagg

SEQ ID NO: 5019308 - DNA, 25 bp, Homo sapien
tttctggcaaactttgtaggtctgc

SEQ ID NO: 5019309 - DNA, 25 bp, Homo sapien
gcccccatgagaatgtgtagatgtg

SEQ ID NO: 5019310 - DNA, 25 bp, Homo sapien
tctgaggactcacttgtgctgatat

SEQ ID NO: 5019311 - DNA, 25 bp, Homo sapien
ctttagagcctgcaaggagctcccg

SEQ ID NO: 5019312 - DNA, 25 bp, Homo sapien
agatgtgtgtcagagctttagagcc

SEQ ID NO: 5019313 - DNA, 25 bp, Homo sapien
cagggcaccgacatccttagcaaag

SEQ ID NO: 5019314 - DNA, 25 bp, Homo sapien
tcaggagtttcagggcaccgacatc

SEQ ID NO: 5019315 - DNA, 25 bp, Homo sapien
tacatagctgcatcaagagtcagga

SEQ ID NO: 5019316 - DNA, 25 bp, Homo sapien
gacatccttagcaaagcctcccagg

SEQ ID NO: 5019317 - DNA, 25 bp, Homo sapien
gctggatctcaaatgaagctggcag

SEQ ID NO: 5019318 - DNA, 25 bp, Homo sapien
gtggttcactggctggatctcaaat

SEQ ID NO: 5019319 - DNA, 25 bp, Homo sapien
tggctggatctcaaatgaagctggc

SEQ ID NO: 5019320 - DNA, 25 bp, Homo sapien
tcactggctggatctcaaatgaagc

SEQ ID NO: 5019321 - DNA, 25 bp, Homo sapien
gatatcagagggaggatgtgcgtac

SEQ ID NO: 5019322 - DNA, 25 bp, Homo sapien
agaggagggatatcagagggaggat

SEQ ID NO: 5019323 - DNA, 25 bp, Homo sapien
agggatatcagagggaggatgtgcg

SEQ ID NO: 5019324 - DNA, 25 bp, Homo sapien
aggagggatatcagagggaggatgt

SEQ ID NO: 5019325 - DNA, 25 bp, Homo sapien
ccagtctagccccaaagggataaag

SEQ ID NO: 5019326 - DNA, 25 bp, Homo sapien
gagttgagggtaggctgctcctggg

SEQ ID NO: 5019327 - DNA, 25 bp, Homo sapien
cagtctagccccaaagggataaagg

SEQ ID NO: 5019328 - DNA, 25 bp, Homo sapien
ggataaaggagttgagggtaggctg

SEQ ID NO: 5019329 - DNA, 25 bp, Homo sapien
ctctggtacataattgtttagacac

SEQ ID NO: 5019330 - DNA, 25 bp, Homo sapien
tctatgtctggtcgaggcatgggcc

SEQ ID NO: 5019331 - DNA, 25 bp, Homo sapien
ggcatgggccatagtccaatcatct

SEQ ID NO: 5019332 - DNA, 25 bp, Homo sapien
tagcaccaatggcacttccagaaat

SEQ ID NO: 5019333 - DNA, 25 bp, Homo sapien
tgtaatgaactttctcagacaccga

SEQ ID NO: 5019334 - DNA, 25 bp, Homo sapien
cgagtgtgaccagtatctaaaggca

SEQ ID NO: 5019335 - DNA, 25 bp, Homo sapien
ggcaccagaaaataggctagctcca

SEQ ID NO: 5019336 - DNA, 25 bp, Homo sapien
gacctctcctaaactgcagggcaga

SEQ ID NO: 5019337 - DNA, 25 bp, Homo sapien
gccatatttgacactcacaagaact

SEQ ID NO: 5019338 - DNA, 25 bp, Homo sapien
tgccatatttgacactcacaagaac

SEQ ID NO: 5019339 - DNA, 25 bp, Homo sapien
attgccatatttgacactcacaaga

SEQ ID NO: 5019340 - DNA, 25 bp, Homo sapien
ttgccatatttgacactcacaagaa

SEQ ID NO: 5019341 - DNA, 25 bp, Homo sapien
tcagactgcccgaccagggtctgta

SEQ ID NO: 5019342 - DNA, 25 bp, Homo sapien
cagactgcccgaccagggtctgtaa

SEQ ID NO: 5019343 - DNA, 25 bp, Homo sapien
ggcatcagactgcccgaccagggtc

SEQ ID NO: 5019344 - DNA, 25 bp, Homo sapien
catcagactgcccgaccagggtctg

SEQ ID NO: 5019345 - DNA, 25 bp, Homo sapien
aaattgcaatgtgagtggaacactt

SEQ ID NO: 5019346 - DNA, 25 bp, Homo sapien
taggtcatcctaaaatgttttggag

SEQ ID NO: 5019347 - DNA, 25 bp, Homo sapien
aactgcagaaaattgcaatgtgagt

SEQ ID NO: 5019348 - DNA, 25 bp, Homo sapien
tagacatagatataataggatataa

SEQ ID NO: 5019349 - DNA, 25 bp, Homo sapien
tattatttgtaagggctcaacaggg

SEQ ID NO: 5019350 - DNA, 25 bp, Homo sapien
gcattacctagggtacaaataccat

SEQ ID NO: 5019351 - DNA, 25 bp, Homo sapien
aatgacactttgaggcattacctag

SEQ ID NO: 5019352 - DNA, 25 bp, Homo sapien
tgtatgtttcatacttatcgttctt

SEQ ID NO: 5019353 - DNA, 25 bp, Homo sapien
tcaaggaatgtaccccatagctccc

SEQ ID NO: 5019354 - DNA, 25 bp, Homo sapien
ggcctagcccatttgagaactactg

SEQ ID NO: 5019355 - DNA, 25 bp, Homo sapien
cactgtcaagatggccatatgtagc

SEQ ID NO: 5019356 - DNA, 25 bp, Homo sapien
taaagcccttcagtgctgtacaatg

SEQ ID NO: 5019357 - DNA, 25 bp, Homo sapien
ttgcatccatcgcatccagaatggg

SEQ ID NO: 5019358 - DNA, 25 bp, Homo sapien
gggtccagtgcttttaaccgcatct

SEQ ID NO: 5019359 - DNA, 25 bp, Homo sapien
cgaagttcttctatctcccgttcca

SEQ ID NO: 5019360 - DNA, 25 bp, Homo sapien
gctgtcttttcgcagtgtatctctg

SEQ ID NO: 5019361 - DNA, 25 bp, Homo sapien
caatgaaattagactttaatgtcta

SEQ ID NO: 5019362 - DNA, 25 bp, Homo sapien
aatgaaattagactttaatgtctaa

SEQ ID NO: 5019363 - DNA, 25 bp, Homo sapien
acaatgaaattagactttaatgtct

SEQ ID NO: 5019364 - DNA, 25 bp, Homo sapien
tacaatgaaattagactttaatgtc

SEQ ID NO: 5019365 - DNA, 25 bp, Homo sapien
tgcaatgaagcaatccgatcctctg

SEQ ID NO: 5019366 - DNA, 25 bp, Homo sapien
gatcactcaagaatgtgacaagact

SEQ ID NO: 5019367 - DNA, 25 bp, Homo sapien
tcagaggtcatatcttgcaagaacc

SEQ ID NO: 5019368 - DNA, 25 bp, Homo sapien
aaatccaccactgccaacaaacaga

SEQ ID NO: 5019369 - DNA, 25 bp, Homo sapien
tcctaggtaatttattgctattact

SEQ ID NO: 5019370 - DNA, 25 bp, Homo sapien
ttcctaggtaatttattgctattac

SEQ ID NO: 5019371 - DNA, 25 bp, Homo sapien
atattcctaggtaatttattgctat

SEQ ID NO: 5019372 - DNA, 25 bp, Homo sapien
tattcctaggtaatttattgctatt

SEQ ID NO: 5019373 - DNA, 25 bp, Homo sapien
gccacaggggtagtgctacccaaga

SEQ ID NO: 5019374 - DNA, 25 bp, Homo sapien
ttggagaccccataaagagtcccca

SEQ ID NO: 5019375 - DNA, 25 bp, Homo sapien
tagtgctacccaagaccatgggagc

SEQ ID NO: 5019376 - DNA, 25 bp, Homo sapien
ccatttggaataagagcatttatcc

SEQ ID NO: 5019377 - DNA, 25 bp, Homo sapien
gtatatgtgctgctgaagtgagcac

SEQ ID NO: 5019378 - DNA, 25 bp, Homo sapien
atcattccaattttagtatatgtgc

SEQ ID NO: 5019379 - DNA, 25 bp, Homo sapien
caggggccatgctaatcttcactgt

SEQ ID NO: 5019380 - DNA, 25 bp, Homo sapien
cacgaatttgcatgtgagccttgca

SEQ ID NO: 5019381 - DNA, 25 bp, Homo sapien
tcaggcacttgataacactatagaa

SEQ ID NO: 5019382 - DNA, 25 bp, Homo sapien
tcctggcactgagaagcatacaaaa

SEQ ID NO: 5019383 - DNA, 25 bp, Homo sapien
caatccaaactactatgaagcctgt

SEQ ID NO: 5019384 - DNA, 25 bp, Homo sapien
tcagagcacctagaagaaacttagg

SEQ ID NO: 5019385 - DNA, 25 bp, Homo sapien
caattacactctttcggctatgcaa

SEQ ID NO: 5019386 - DNA, 25 bp, Homo sapien
tctgtaactagcttactgggtagtc

SEQ ID NO: 5019387 - DNA, 25 bp, Homo sapien
cagcgattctgattagcactttgaa

SEQ ID NO: 5019388 - DNA, 25 bp, Homo sapien
tgggtagtcaaacctctgtggagca

SEQ ID NO: 5019389 - DNA, 25 bp, Homo sapien
aaaatcgtcgcctgaatgaaactga

SEQ ID NO: 5019390 - DNA, 25 bp, Homo sapien
gaataagaatcgtggtctgttaact

SEQ ID NO: 5019391 - DNA, 25 bp, Homo sapien
gctgtcttgtgcaaacttaaaagca

SEQ ID NO: 5019392 - DNA, 25 bp, Homo sapien
gataggaggctcttatgaaaatgtt

SEQ ID NO: 5019393 - DNA, 25 bp, Homo sapien
aaactgccaaaaacactgcaagctg

SEQ ID NO: 5019394 - DNA, 25 bp, Homo sapien
acactgcccatttctggatacccat

SEQ ID NO: 5019395 - DNA, 25 bp, Homo sapien
ccaaaaacactgcaagctggtccac

SEQ ID NO: 5019396 - DNA, 25 bp, Homo sapien
cacaacactgcccatttctggatac

SEQ ID NO: 5019397 - DNA, 25 bp, Homo sapien
agtcttagacggctatgggtaaatg

SEQ ID NO: 5019398 - DNA, 25 bp, Homo sapien
cagcagtcttagacggctatgggta

SEQ ID NO: 5019399 - DNA, 25 bp, Homo sapien
ttagacggctatgggtaaatgttct

SEQ ID NO: 5019400 - DNA, 25 bp, Homo sapien
agcagtcttagacggctatgggtaa

SEQ ID NO: 5019401 - DNA, 25 bp, Homo sapien
cagtgtgatacaatattaaggcagc

SEQ ID NO: 5019402 - DNA, 25 bp, Homo sapien
ggacccagtggtatcatttgaattc

SEQ ID NO: 5019403 - DNA, 25 bp, Homo sapien
tgtgaaagtccaaaggaaatggtgg

SEQ ID NO: 5019404 - DNA, 25 bp, Homo sapien
tgagttccaggtgtcgtttagtaga

SEQ ID NO: 5019405 - DNA, 25 bp, Homo sapien
gcaatttctgatttactccaaaagg

SEQ ID NO: 5019406 - DNA, 25 bp, Homo sapien
tcaagaagacctacaatggcagtta

SEQ ID NO: 5019407 - DNA, 25 bp, Homo sapien
tactgtaaattagcagacagtgtgg

SEQ ID NO: 5019408 - DNA, 25 bp, Homo sapien
gggaacaacattcagtgtggtaaag

SEQ ID NO: 5019409 - DNA, 25 bp, Homo sapien
tttcagcatataaaaatcatcaagt

SEQ ID NO: 5019410 - DNA, 25 bp, Homo sapien
agcatataaaaatcatcaagtatgc

SEQ ID NO: 5019411 - DNA, 25 bp, Homo sapien
ctgccattagctctttcagcatata

SEQ ID NO: 5019412 - DNA, 25 bp, Homo sapien
ttcagcatataaaaatcatcaagta

SEQ ID NO: 5019413 - DNA, 25 bp, Homo sapien
tagttccatgtgcactgttcatctg

SEQ ID NO: 5019414 - DNA, 25 bp, Homo sapien
tataaatagttccatgtgcactgtt

SEQ ID NO: 5019415 - DNA, 25 bp, Homo sapien
taaatagttccatgtgcactgttca

SEQ ID NO: 5019416 - DNA, 25 bp, Homo sapien
ttttataaatagttccatgtgcact

SEQ ID NO: 5019417 - DNA, 25 bp, Homo sapien
tttgcagattctgggtatcagccct

SEQ ID NO: 5019418 - DNA, 25 bp, Homo sapien
ttgttttcatcaggtttgccaaaga

SEQ ID NO: 5019419 - DNA, 25 bp, Homo sapien
tctttgcagattctgggtatcagcc

SEQ ID NO: 5019420 - DNA, 25 bp, Homo sapien
tcttgttttcatcaggtttgccaaa

SEQ ID NO: 5019421 - DNA, 25 bp, Homo sapien
aggttgttccgtttctgtgtagttg

SEQ ID NO: 5019422 - DNA, 25 bp, Homo sapien
aatgtgccccagagaatctggtacg

SEQ ID NO: 5019423 - DNA, 25 bp, Homo sapien
gttccgtttctgtgtagttgtgcag

SEQ ID NO: 5019424 - DNA, 25 bp, Homo sapien
aggagcaggttgttccgtttctgtg

SEQ ID NO: 5019425 - DNA, 25 bp, Homo sapien
gaaatggattatagtgccagctaca

SEQ ID NO: 5019426 - DNA, 25 bp, Homo sapien
tgcccaatcaggtactaactagtct

SEQ ID NO: 5019427 - DNA, 25 bp, Homo sapien
cacaaaagatttaggaaaggtcaag

SEQ ID NO: 5019428 - DNA, 25 bp, Homo sapien
taggcactcttaagattggtataac

SEQ ID NO: 5019429 - DNA, 25 bp, Homo sapien
agctggactgaatactgaataaaga

SEQ ID NO: 5019430 - DNA, 25 bp, Homo sapien
tagcctgctgaagtgttcatagatg

SEQ ID NO: 5019431 - DNA, 25 bp, Homo sapien
ttcatagatgacctggcatatgtcc

SEQ ID NO: 5019432 - DNA, 25 bp, Homo sapien
atactgaataaagaacctgcaaact

SEQ ID NO: 5019433 - DNA, 25 bp, Homo sapien
gatgatgacctctgcctctcttgtc

SEQ ID NO: 5019434 - DNA, 25 bp, Homo sapien
cactcagatgatgacctctgcctct

SEQ ID NO: 5019435 - DNA, 25 bp, Homo sapien
tcagatgatgacctctgcctctctt

SEQ ID NO: 5019436 - DNA, 25 bp, Homo sapien
tcactcagatgatgacctctgcctc

SEQ ID NO: 5019437 - DNA, 25 bp, Homo sapien
gggagaaagcatgccaacagtctta

SEQ ID NO: 5019438 - DNA, 25 bp, Homo sapien
tcttaggccacttaggtggtcttct

SEQ ID NO: 5019439 - DNA, 25 bp, Homo sapien
ccaacagtcttaggccacttaggtg

SEQ ID NO: 5019440 - DNA, 25 bp, Homo sapien
gaaagcatgccaacagtcttaggcc

SEQ ID NO: 5019441 - DNA, 25 bp, Homo sapien
gatgaatttccacatatcgaaagag

SEQ ID NO: 5019442 - DNA, 25 bp, Homo sapien
gaaagagctgctactaaatgatgac

SEQ ID NO: 5019443 - DNA, 25 bp, Homo sapien
tccacatatcgaaagagctgctact

SEQ ID NO: 5019444 - DNA, 25 bp, Homo sapien
tgctactaaatgatgactactagac

SEQ ID NO: 5019445 - DNA, 25 bp, Homo sapien
gagctataattcactgttccacaaa

SEQ ID NO: 5019446 - DNA, 25 bp, Homo sapien
gataatccagaactcgctagtcgtt

SEQ ID NO: 5019447 - DNA, 25 bp, Homo sapien
tagccttggctattaggtagtttca

SEQ ID NO: 5019448 - DNA, 25 bp, Homo sapien
cgttccactggactagttagtacaa

SEQ ID NO: 5019449 - DNA, 25 bp, Homo sapien
gaagtttatatgctcctaggtacag

SEQ ID NO: 5019450 - DNA, 25 bp, Homo sapien
caaaataggtgataaggcagtttta

SEQ ID NO: 5019451 - DNA, 25 bp, Homo sapien
ataggactattatttctgagaaacc

SEQ ID NO: 5019452 - DNA, 25 bp, Homo sapien
ctgagaaaccaagtggaattaacac

SEQ ID NO: 5019453 - DNA, 25 bp, Homo sapien
catatacatatgaactatgcttctc

SEQ ID NO: 5019454 - DNA, 25 bp, Homo sapien
tatatggctgtataatgaatattaa

SEQ ID NO: 5019455 - DNA, 25 bp, Homo sapien
gaactatgcttctcaatttgatgat

SEQ ID NO: 5019456 - DNA, 25 bp, Homo sapien
cacaatttctctaaccatgtatatg

SEQ ID NO: 5019457 - DNA, 25 bp, Homo sapien
ttttggacatagggaagggttcatg

SEQ ID NO: 5019458 - DNA, 25 bp, Homo sapien
tttggacatagggaagggttcatgc

SEQ ID NO: 5019459 - DNA, 25 bp, Homo sapien
ttggacatagggaagggttcatgca

SEQ ID NO: 5019460 - DNA, 25 bp, Homo sapien
tggacatagggaagggttcatgcat

SEQ ID NO: 5019461 - DNA, 25 bp, Homo sapien
ctgattacagttttcgtgactctta

SEQ ID NO: 5019462 - DNA, 25 bp, Homo sapien
tgactcttattcttgaagtcttgct

SEQ ID NO: 5019463 - DNA, 25 bp, Homo sapien
gttctgattacagttttcgtgactc

SEQ ID NO: 5019464 - DNA, 25 bp, Homo sapien
tcaaagtagtccatgaaagatggtc

SEQ ID NO: 5019465 - DNA, 25 bp, Homo sapien
aataacgagagagtgcagaggcacc

SEQ ID NO: 5019466 - DNA, 25 bp, Homo sapien
caagagaggcctggtgctagtccac

SEQ ID NO: 5019467 - DNA, 25 bp, Homo sapien
tgggagaaccctggagaataacgag

SEQ ID NO: 5019468 - DNA, 25 bp, Homo sapien
gcacctgtgctgcttagaagtccag

SEQ ID NO: 5019469 - DNA, 25 bp, Homo sapien
tatcaagtttgtcaaggaaagtcag

SEQ ID NO: 5019470 - DNA, 25 bp, Homo sapien
caaaaagcatgcattgtagcactac

SEQ ID NO: 5019471 - DNA, 25 bp, Homo sapien
taatccagtgaagacaacagcactc

SEQ ID NO: 5019472 - DNA, 25 bp, Homo sapien
tcactgaagcgtatttctagatagc

SEQ ID NO: 5019473 - DNA, 25 bp, Homo sapien
tattaagagtagcagcatacactgg

SEQ ID NO: 5019474 - DNA, 25 bp, Homo sapien
cactgactcttactttggacctcta

SEQ ID NO: 5019475 - DNA, 25 bp, Homo sapien
gctgaggctctcgttatggtcttgt

SEQ ID NO: 5019476 - DNA, 25 bp, Homo sapien
cagtcagggttctcttgatatacca

SEQ ID NO: 5019477 - DNA, 25 bp, Homo sapien
caggctgacctaaaaaacctatggc

SEQ ID NO: 5019478 - DNA, 25 bp, Homo sapien
tgaagtccactattatacagagtag

SEQ ID NO: 5019479 - DNA, 25 bp, Homo sapien
gtttcactgcagaaacatcccaatt

SEQ ID NO: 5019480 - DNA, 25 bp, Homo sapien
gagtatctctttgtcatacacacaa

SEQ ID NO: 5019481 - DNA, 25 bp, Homo sapien
tacggcatggaagtagatgctcaga

SEQ ID NO: 5019482 - DNA, 25 bp, Homo sapien
acaaattgcctcatacttcacgatt

SEQ ID NO: 5019483 - DNA, 25 bp, Homo sapien
attgcctcatacttcacgattttgt

SEQ ID NO: 5019484 - DNA, 25 bp, Homo sapien
caaagaatacggcatggaagtagat

SEQ ID NO: 5019485 - DNA, 25 bp, Homo sapien
ctaagttgaagatgtgttgttttct

SEQ ID NO: 5019486 - DNA, 25 bp, Homo sapien
taagttgaagatgtgttgttttctg

SEQ ID NO: 5019487 - DNA, 25 bp, Homo sapien
ttcaccatggtgtgggaatccagct

SEQ ID NO: 5019488 - DNA, 25 bp, Homo sapien
ccatggtccccaagtcggattccaa

SEQ ID NO: 5019489 - DNA, 25 bp, Homo sapien
tatgttcaatcatggtctgggcccc

SEQ ID NO: 5019490 - DNA, 25 bp, Homo sapien
tcatcgtgcttgtggcccgcatggt

SEQ ID NO: 5019491 - DNA, 25 bp, Homo sapien
ttttctatgacagctggatttctta

SEQ ID NO: 5019492 - DNA, 25 bp, Homo sapien
gtacttccaactctggtaaaggata

SEQ ID NO: 5019493 - DNA, 25 bp, Homo sapien
ttgttattaatacacaaggttgtac

SEQ ID NO: 5019494 - DNA, 25 bp, Homo sapien
actctggtaaaggatagcagttatc

SEQ ID NO: 5019495 - DNA, 25 bp, Homo sapien
agttatcccattgtccttgttatta

SEQ ID NO: 5019496 - DNA, 25 bp, Homo sapien
ggtaactctgatccaactgagctaa

SEQ ID NO: 5019497 - DNA, 25 bp, Homo sapien
tgcccacagtagatcaactggtaac

SEQ ID NO: 5019498 - DNA, 25 bp, Homo sapien
taagtgccacttcaatgtctgacgg

SEQ ID NO: 5019499 - DNA, 25 bp, Homo sapien
ctctttcaaatagccgcccttaagt

SEQ ID NO: 5019500 - DNA, 25 bp, Homo sapien
ctgtctttagcaaacagaaacttca

SEQ ID NO: 5019501 - DNA, 25 bp, Homo sapien
tgtctttagcaaacagaaacttcat

SEQ ID NO: 5019502 - DNA, 25 bp, Homo sapien
ttatattgacaagaactctgtattc

SEQ ID NO: 5019503 - DNA, 25 bp, Homo sapien
cgagtatcacaaatcccaaagaatc

SEQ ID NO: 5019504 - DNA, 25 bp, Homo sapien
aactctaagtgattaatgtctacaa

SEQ ID NO: 5019505 - DNA, 25 bp, Homo sapien
tgtttctattagaggtaataaagca

SEQ ID NO: 5019506 - DNA, 25 bp, Homo sapien
ggcagagacaattcccataaatttg

SEQ ID NO: 5019507 - DNA, 25 bp, Homo sapien
catactctttaaaggtggacttgcc

SEQ ID NO: 5019508 - DNA, 25 bp, Homo sapien
gctccttggtaacaacaaaatgttg

SEQ ID NO: 5019509 - DNA, 25 bp, Homo sapien
tatatcatacacaacactaccgtag

SEQ ID NO: 5019510 - DNA, 25 bp, Homo sapien
cacaggtgtatgcactaaaatttta

SEQ ID NO: 5019511 - DNA, 25 bp, Homo sapien
ctttatattgttataacccatacat

SEQ ID NO: 5019512 - DNA, 25 bp, Homo sapien
aaaaaccaacatatcttgtaatggt

SEQ ID NO: 5019513 - DNA, 25 bp, Homo sapien
aaagccacattataaattgatgaaa

SEQ ID NO: 5019514 - DNA, 25 bp, Homo sapien
gataacaaggggtccaagcttgtac

SEQ ID NO: 5019515 - DNA, 25 bp, Homo sapien
ggtccaagcttgtactttcgttcca

SEQ ID NO: 5019516 - DNA, 25 bp, Homo sapien
caaggggtccaagcttgtactttcg

SEQ ID NO: 5019517 - DNA, 25 bp, Homo sapien
caagcttgtactttcgttccataac

SEQ ID NO: 5019518 - DNA, 25 bp, Homo sapien
tagacccttatcagaagcataattt

SEQ ID NO: 5019519 - DNA, 25 bp, Homo sapien
tttagctcttacatgtagggtgttg

SEQ ID NO: 5019520 - DNA, 25 bp, Homo sapien
caatcagatcttatactaaaaggct

SEQ ID NO: 5019521 - DNA, 25 bp, Homo sapien
gcacccagcttctatacattttgga

SEQ ID NO: 5019522 - DNA, 25 bp, Homo sapien
ctatcatcacacaggaatccagggt

SEQ ID NO: 5019523 - DNA, 25 bp, Homo sapien
gacttaagctcagcgaaggaaagaa

SEQ ID NO: 5019524 - DNA, 25 bp, Homo sapien
tctgaaagactagtgtgacttaagc

SEQ ID NO: 5019525 - DNA, 25 bp, Homo sapien
gaaccaagggtctttacatctccca

SEQ ID NO: 5019526 - DNA, 25 bp, Homo sapien
gacaacggccaaataaataactcat

SEQ ID NO: 5019527 - DNA, 25 bp, Homo sapien
tcctcactaggtagtccatgacaac

SEQ ID NO: 5019528 - DNA, 25 bp, Homo sapien
aataaataactcatgtagctgcata

SEQ ID NO: 5019529 - DNA, 25 bp, Homo sapien
taagtctagaatacaggcttcaagt

SEQ ID NO: 5019530 - DNA, 25 bp, Homo sapien
tacattttcaatcagtaaaacataa

SEQ ID NO: 5019531 - DNA, 25 bp, Homo sapien
aaagaattcccaactggataaccag

SEQ ID NO: 5019532 - DNA, 25 bp, Homo sapien
catactgttacgaaatacattttca

SEQ ID NO: 5019533 - DNA, 25 bp, Homo sapien
cagctctacaaagatgcacatttct

SEQ ID NO: 5019534 - DNA, 25 bp, Homo sapien
tatcaactagatactaggtactgtg

SEQ ID NO: 5019535 - DNA, 25 bp, Homo sapien
caacattacattccactaatcacta

SEQ ID NO: 5019536 - DNA, 25 bp, Homo sapien
caaacccagagttagtatcaactag

SEQ ID NO: 5019537 - DNA, 25 bp, Homo sapien
ggaagttcatcctatcaacattaca

SEQ ID NO: 5019538 - DNA, 25 bp, Homo sapien
tacagacaaataactcagaagaaaa

SEQ ID NO: 5019539 - DNA, 25 bp, Homo sapien
tattttaacagaattacagacaaat

SEQ ID NO: 5019540 - DNA, 25 bp, Homo sapien
tcaactttttgaagataattacaaa

SEQ ID NO: 5019541 - DNA, 25 bp, Homo sapien
tgtatagtaaaacagtaagtgcttt

SEQ ID NO: 5019542 - DNA, 25 bp, Homo sapien
tcctcttccaattctcgttgctgtt

SEQ ID NO: 5019543 - DNA, 25 bp, Homo sapien
tgctgttcctcatgtcttttagctt

SEQ ID NO: 5019544 - DNA, 25 bp, Homo sapien
catgtcttttagctttgatctccat

SEQ ID NO: 5019545 - DNA, 25 bp, Homo sapien
tcttccaattctcgttgctgttcct

SEQ ID NO: 5019546 - DNA, 25 bp, Homo sapien
gcttctgtgatcaggtctcttaata

SEQ ID NO: 5019547 - DNA, 25 bp, Homo sapien
caggtctcttaatattgatacaggt

SEQ ID NO: 5019548 - DNA, 25 bp, Homo sapien
ctgtgatcaggtctcttaatattga

SEQ ID NO: 5019549 - DNA, 25 bp, Homo sapien
gatcaggtctcttaatattgataca

SEQ ID NO: 5019550 - DNA, 25 bp, Homo sapien
ttcctagaagtgcaactgttggatc

SEQ ID NO: 5019551 - DNA, 25 bp, Homo sapien
caatgttctacgaatatttttacac

SEQ ID NO: 5019552 - DNA, 25 bp, Homo sapien
ttaaatagatattgctgtactggca

SEQ ID NO: 5019553 - DNA, 25 bp, Homo sapien
ctggcatctatggagattgagtacc

SEQ ID NO: 5019554 - DNA, 25 bp, Homo sapien
aatatccttcccttcgaggcacaag

SEQ ID NO: 5019555 - DNA, 25 bp, Homo sapien
cattctggatacaaagtctacttac

SEQ ID NO: 5019556 - DNA, 25 bp, Homo sapien
gaaacacacagcaattctggccaat

SEQ ID NO: 5019557 - DNA, 25 bp, Homo sapien
agtccagggatcttgtacttacata

SEQ ID NO: 5019558 - DNA, 25 bp, Homo sapien
ttaacaaaatcggtgaaatcatcgg

SEQ ID NO: 5019559 - DNA, 25 bp, Homo sapien
tgtaaaagttgtgttgcagtagctc

SEQ ID NO: 5019560 - DNA, 25 bp, Homo sapien
tcatcggaccaaagttctggctttc

SEQ ID NO: 5019561 - DNA, 25 bp, Homo sapien
taaaagttgtgttgcagtagctctc

SEQ ID NO: 5019562 - DNA, 25 bp, Homo sapien
gctggaaaaggcacacaaaaccacc

SEQ ID NO: 5019563 - DNA, 25 bp, Homo sapien
tcagacagctccacagttgaggcag

SEQ ID NO: 5019564 - DNA, 25 bp, Homo sapien
tatagactgacctcaaactgcaggt

SEQ ID NO: 5019565 - DNA, 25 bp, Homo sapien
aatatcagaccttataaacccggct

SEQ ID NO: 5019566 - DNA, 25 bp, Homo sapien
caaatgtagtggttcatacaacaca

SEQ ID NO: 5019567 - DNA, 25 bp, Homo sapien
tatttctgctgtagtaagttatcac

SEQ ID NO: 5019568 - DNA, 25 bp, Homo sapien
gcaacatccgcctgcccatttatgg

SEQ ID NO: 5019569 - DNA, 25 bp, Homo sapien
cccagctatccgtctatactagttt

SEQ ID NO: 5019570 - DNA, 25 bp, Homo sapien
ggtggttgaacattaccacacactg

SEQ ID NO: 5019571 - DNA, 25 bp, Homo sapien
taaatgggcagtatcaggctagtat

SEQ ID NO: 5019572 - DNA, 25 bp, Homo sapien
ctagtatgatactgctgtagtgcca

SEQ ID NO: 5019573 - DNA, 25 bp, Homo sapien
caatttacttcatggtttaagatgg

SEQ ID NO: 5019574 - DNA, 25 bp, Homo sapien
ggttaagtccatcctatgagacagt

SEQ ID NO: 5019575 - DNA, 25 bp, Homo sapien
tgattacctaaattcacaccctgac

SEQ ID NO: 5019576 - DNA, 25 bp, Homo sapien
tattacattggcagatcggtcttcg

SEQ ID NO: 5019577 - DNA, 25 bp, Homo sapien
tcttgtctgggtagccaactgatct

SEQ ID NO: 5019578 - DNA, 25 bp, Homo sapien
ggatgccctctctcactgctgctat

SEQ ID NO: 5019579 - DNA, 25 bp, Homo sapien
gttggaagttctggccagggcaatc

SEQ ID NO: 5019580 - DNA, 25 bp, Homo sapien
ctcactgctgctattcaacatagtg

SEQ ID NO: 5019581 - DNA, 25 bp, Homo sapien
atcaggcaggagaaggaaataaagg

SEQ ID NO: 5019582 - DNA, 25 bp, Homo sapien
tttttatatcttgcatcttgaaacc

SEQ ID NO: 5019583 - DNA, 25 bp, Homo sapien
gatttttatatcttgcatcttgaaa

SEQ ID NO: 5019584 - DNA, 25 bp, Homo sapien
atttttatatcttgcatcttgaaac

SEQ ID NO: 5019585 - DNA, 25 bp, Homo sapien
tggactactgaagaagtaacctcct

SEQ ID NO: 5019586 - DNA, 25 bp, Homo sapien
tcctgccgtggtttatgaaggctct

SEQ ID NO: 5019587 - DNA, 25 bp, Homo sapien
gaaggctctaagtgatctggttccc

SEQ ID NO: 5019588 - DNA, 25 bp, Homo sapien
gatatctgagccaaaaacctaggcc

SEQ ID NO: 5019589 - DNA, 25 bp, Homo sapien
cctttgggtaggtcatacagtggct

SEQ ID NO: 5019590 - DNA, 25 bp, Homo sapien
caaccatacggctaacattaaggac

SEQ ID NO: 5019591 - DNA, 25 bp, Homo sapien
ggacagcactcctgcataatatcag

SEQ ID NO: 5019592 - DNA, 25 bp, Homo sapien
taaaatcaagtatgaaccaggcctg

SEQ ID NO: 5019593 - DNA, 25 bp, Homo sapien
actactgcacaggtgacacaaccaa

SEQ ID NO: 5019594 - DNA, 25 bp, Homo sapien
ggtcctgaaattgtgtactcatatc

SEQ ID NO: 5019595 - DNA, 25 bp, Homo sapien
tactcatatccattttcaactactg

SEQ ID NO: 5019596 - DNA, 25 bp, Homo sapien
gcacaggtgacacaaccaatcaagg

SEQ ID NO: 5019597 - DNA, 25 bp, Homo sapien
gccaatttaccaaccctgtgctgtg

SEQ ID NO: 5019598 - DNA, 25 bp, Homo sapien
actgcaagttctggtggaatttacc

SEQ ID NO: 5019599 - DNA, 25 bp, Homo sapien
taaattcttgccctcccaaacagga

SEQ ID NO: 5019600 - DNA, 25 bp, Homo sapien
ggcagtctaaagcaaaggtgttggt

SEQ ID NO: 5019601 - DNA, 25 bp, Homo sapien
gccaaggctcgagaactacgtgaag

SEQ ID NO: 5019602 - DNA, 25 bp, Homo sapien
ctactctgagctacaggaggaaatt

SEQ ID NO: 5019603 - DNA, 25 bp, Homo sapien
aaactactctgagctacaggaggaa

SEQ ID NO: 5019604 - DNA, 25 bp, Homo sapien
tgaaagccaaggctcgagaactacg

SEQ ID NO: 5019605 - DNA, 25 bp, Homo sapien
tcttatttagtatgcttccagtcac

SEQ ID NO: 5019606 - DNA, 25 bp, Homo sapien
tcttcaatttgatacaccctacttg

SEQ ID NO: 5019607 - DNA, 25 bp, Homo sapien
cagtcactctatcattatccattgg

SEQ ID NO: 5019608 - DNA, 25 bp, Homo sapien
taaaggctattaattagtgcgtcct

SEQ ID NO: 5019609 - DNA, 25 bp, Homo sapien
tccatcctttcggtaggaagtagct

SEQ ID NO: 5019610 - DNA, 25 bp, Homo sapien
cattaggtgctataatttgaaccga

SEQ ID NO: 5019611 - DNA, 25 bp, Homo sapien
tatgtccctaaataagctgaagcct

SEQ ID NO: 5019612 - DNA, 25 bp, Homo sapien
tgaaccgatgcagtgtagagtttgc

SEQ ID NO: 5019613 - DNA, 25 bp, Homo sapien
aaactgactcctcattcaaatggca

SEQ ID NO: 5019614 - DNA, 25 bp, Homo sapien
taatctccttaccttgacacaatgg

SEQ ID NO: 5019615 - DNA, 25 bp, Homo sapien
gaaacttcaacacgagttcttccag

SEQ ID NO: 5019616 - DNA, 25 bp, Homo sapien
cactgtcaagaagtaaatttcacct

SEQ ID NO: 5019617 - DNA, 25 bp, Homo sapien
gcaagactcctctaattgatcataa

SEQ ID NO: 5019618 - DNA, 25 bp, Homo sapien
ggttggttcaaatacaggaagacac

SEQ ID NO: 5019619 - DNA, 25 bp, Homo sapien
gcctaccccttagctgacagttcag

SEQ ID NO: 5019620 - DNA, 25 bp, Homo sapien
gcctctgctacttgattacacgtgc

SEQ ID NO: 5019621 - DNA, 25 bp, Homo sapien
acccagaactattgtctgaatccat

SEQ ID NO: 5019622 - DNA, 25 bp, Homo sapien
cacccagaactattgtctgaatcca

SEQ ID NO: 5019623 - DNA, 25 bp, Homo sapien
atcttttgtagataacagtgatatg

SEQ ID NO: 5019624 - DNA, 25 bp, Homo sapien
ctcccaaatatgtagacccagcact

SEQ ID NO: 5019625 - DNA, 25 bp, Homo sapien
tcttttgtagataacagtgatatgg

SEQ ID NO: 5019626 - DNA, 25 bp, Homo sapien
cagcctcccaaatatgtagacccag

SEQ ID NO: 5019627 - DNA, 25 bp, Homo sapien
tatactctctaacccccaaagcgat

SEQ ID NO: 5019628 - DNA, 25 bp, Homo sapien
caaagcgattcatcttcaagataca

SEQ ID NO: 5019629 - DNA, 25 bp, Homo sapien
ggcctctaacctccacctttctata

SEQ ID NO: 5019630 - DNA, 25 bp, Homo sapien
tctaacccccaaagcgattcatctt

SEQ ID NO: 5019631 - DNA, 25 bp, Homo sapien
ctagcagtgtattacctttgtggca

SEQ ID NO: 5019632 - DNA, 25 bp, Homo sapien
gaacctgagcaagatccagaaaaag

SEQ ID NO: 5019633 - DNA, 25 bp, Homo sapien
ttgtggcagtgccaacgggcctaca

SEQ ID NO: 5019634 - DNA, 25 bp, Homo sapien
agtgcacatgataatttcaacatgc

SEQ ID NO: 5019635 - DNA, 25 bp, Homo sapien
tagagtaaatacctgccctcagtat

SEQ ID NO: 5019636 - DNA, 25 bp, Homo sapien
tagtcttctaggacagctgaattct

SEQ ID NO: 5019637 - DNA, 25 bp, Homo sapien
taccctatgcacacctagctattta

SEQ ID NO: 5019638 - DNA, 25 bp, Homo sapien
cctgatagagacaccatttcctcca

SEQ ID NO: 5019639 - DNA, 25 bp, Homo sapien
attaacaatctaacctcacacctaa

SEQ ID NO: 5019640 - DNA, 25 bp, Homo sapien
taacaatctaacctcacacctaaag

SEQ ID NO: 5019641 - DNA, 25 bp, Homo sapien
tagaacatactcaaagactgaccac

SEQ ID NO: 5019642 - DNA, 25 bp, Homo sapien
atactcaaagactgaccacctgctc

SEQ ID NO: 5019643 - DNA, 25 bp, Homo sapien
ctttacttcctgttccaaaatgtgg

SEQ ID NO: 5019644 - DNA, 25 bp, Homo sapien
gagagctttacttcctgttccaaaa

SEQ ID NO: 5019645 - DNA, 25 bp, Homo sapien
cctgttccaaaatgtggtcaatttt

SEQ ID NO: 5019646 - DNA, 25 bp, Homo sapien
acttcctgttccaaaatgtggtcaa

SEQ ID NO: 5019647 - DNA, 25 bp, Homo sapien
cagactcggtttgcctgggtaccag

SEQ ID NO: 5019648 - DNA, 25 bp, Homo sapien
tccagactcggtttgcctgggtacc

SEQ ID NO: 5019649 - DNA, 25 bp, Homo sapien
gcggattttcatgaaccgcgaatgc

SEQ ID NO: 5019650 - DNA, 25 bp, Homo sapien
gaacagcggattttcatgaaccgcg

SEQ ID NO: 5019651 - DNA, 25 bp, Homo sapien
tcctttgcctgattcaagaaatcat

SEQ ID NO: 5019652 - DNA, 25 bp, Homo sapien
cagagtgatccatacagttctttcc

SEQ ID NO: 5019653 - DNA, 25 bp, Homo sapien
tttcctttgcctgattcaagaaatc

SEQ ID NO: 5019654 - DNA, 25 bp, Homo sapien
ccacagagtgatccatacagttctt

SEQ ID NO: 5019655 - DNA, 25 bp, Homo sapien
tatatacagctagtgggcaggcata

SEQ ID NO: 5019656 - DNA, 25 bp, Homo sapien
ctaattatatacagctagtgggcag

SEQ ID NO: 5019657 - DNA, 25 bp, Homo sapien
tatacagctagtgggcaggcatagt

SEQ ID NO: 5019658 - DNA, 25 bp, Homo sapien
aattatatacagctagtgggcaggc

SEQ ID NO: 5019659 - DNA, 25 bp, Homo sapien
catcctaggaagtttgcaatacagg

SEQ ID NO: 5019660 - DNA, 25 bp, Homo sapien
cacaggcataaaatccaagttggga

SEQ ID NO: 5019661 - DNA, 25 bp, Homo sapien
aaacagtgagcaaggcatcctagga

SEQ ID NO: 5019662 - DNA, 25 bp, Homo sapien
ggaagaggccacatattacaattct

SEQ ID NO: 5019663 - DNA, 25 bp, Homo sapien
gataactacagccactagagggcaa

SEQ ID NO: 5019664 - DNA, 25 bp, Homo sapien
tatcatcacaaaccctgaaacacag

SEQ ID NO: 5019665 - DNA, 25 bp, Homo sapien
gagttcacagaagcatataatgatg

SEQ ID NO: 5019666 - DNA, 25 bp, Homo sapien
tgaaacacaggcaattagacttgaa

SEQ ID NO: 5019667 - DNA, 25 bp, Homo sapien
cattttcagcaaaccataattttct

SEQ ID NO: 5019668 - DNA, 25 bp, Homo sapien
acattttcagcaaaccataattttc

SEQ ID NO: 5019669 - DNA, 25 bp, Homo sapien
ctatttcttgaatcacctcaggagc

SEQ ID NO: 5019670 - DNA, 25 bp, Homo sapien
tttctatagaagtaatgccaaggga

SEQ ID NO: 5019671 - DNA, 25 bp, Homo sapien
cctattacagtattgcgttttgcca

SEQ ID NO: 5019672 - DNA, 25 bp, Homo sapien
gtatatcagcataaggaggttttcc

SEQ ID NO: 5019673 - DNA, 25 bp, Homo sapien
ctgcaataatgttacatagccataa

SEQ ID NO: 5019674 - DNA, 25 bp, Homo sapien
atttccagcttttatatctctgtgt

SEQ ID NO: 5019675 - DNA, 25 bp, Homo sapien
aaatattctagtcctttcaatgtag

SEQ ID NO: 5019676 - DNA, 25 bp, Homo sapien
ctttcaatgtagatttaagaatggt

SEQ ID NO: 5019677 - DNA, 25 bp, Homo sapien
tgtagatttaagaatggttgcaatt

SEQ ID NO: 5019678 - DNA, 25 bp, Homo sapien
accctgagtacattaatgggtggct

SEQ ID NO: 5019679 - DNA, 25 bp, Homo sapien
tcaccctgagtacattaatgggtgg

SEQ ID NO: 5019680 - DNA, 25 bp, Homo sapien
ctttcaccctgagtacattaatggg

SEQ ID NO: 5019681 - DNA, 25 bp, Homo sapien
cctgagtacattaatgggtggcttt

SEQ ID NO: 5019682 - DNA, 25 bp, Homo sapien
ctcagaaaccaagtaaggcccagtt

SEQ ID NO: 5019683 - DNA, 25 bp, Homo sapien
tcagccttgtaccaaaacggagaca

SEQ ID NO: 5019684 - DNA, 25 bp, Homo sapien
ttagtggacaccatacagcaggttc

SEQ ID NO: 5019685 - DNA, 25 bp, Homo sapien
taaatctctaacctaacctcatggg

SEQ ID NO: 5019686 - DNA, 25 bp, Homo sapien
gaactacttctttccattgtgacat

SEQ ID NO: 5019687 - DNA, 25 bp, Homo sapien
aagagaactacttctttccattgtg

SEQ ID NO: 5019688 - DNA, 25 bp, Homo sapien
tccattgtgacataaaatttaaagc

SEQ ID NO: 5019689 - DNA, 25 bp, Homo sapien
ttatttggcaacaaagagaactact

SEQ ID NO: 5019690 - DNA, 25 bp, Homo sapien
ggctggataggtccatacccaacta

SEQ ID NO: 5019691 - DNA, 25 bp, Homo sapien
caactatttcaaaatggtcagattt

SEQ ID NO: 5019692 - DNA, 25 bp, Homo sapien
ttctcatatctgtaagacttttcat

SEQ ID NO: 5019693 - DNA, 25 bp, Homo sapien
atatctgtaagacttttcatgaggc

SEQ ID NO: 5019694 - DNA, 25 bp, Homo sapien
gatggaaaagcgttagatccattct

SEQ ID NO: 5019695 - DNA, 25 bp, Homo sapien
tgtaagaattcagctccaagatgga

SEQ ID NO: 5019696 - DNA, 25 bp, Homo sapien
tctgcttcatatagaagaaggtaat

SEQ ID NO: 5019697 - DNA, 25 bp, Homo sapien
ttctcaaatcacagctagcacttcc

SEQ ID NO: 5019698 - DNA, 25 bp, Homo sapien
agatggttttgataggctttagtcc

SEQ ID NO: 5019699 - DNA, 25 bp, Homo sapien
tgataaaaatacacccaccaacttg

SEQ ID NO: 5019700 - DNA, 25 bp, Homo sapien
gaagtctacatctggtttcaattgg

SEQ ID NO: 5019701 - DNA, 25 bp, Homo sapien
caattggtatgaattcactggcaaa

SEQ ID NO: 5019702 - DNA, 25 bp, Homo sapien
ctagtacagcactgatcattagtac

SEQ ID NO: 5019703 - DNA, 25 bp, Homo sapien
ctaagattctagtacagcactgatc

SEQ ID NO: 5019704 - DNA, 25 bp, Homo sapien
taagattctagtacagcactgatca

SEQ ID NO: 5019705 - DNA, 25 bp, Homo sapien
gattctagtacagcactgatcatta

SEQ ID NO: 5019706 - DNA, 25 bp, Homo sapien
ggatcaagccatcctggactaaaga

SEQ ID NO: 5019707 - DNA, 25 bp, Homo sapien
tccttgtaagaacgggccagggaca

SEQ ID NO: 5019708 - DNA, 25 bp, Homo sapien
gggacaccagaaataacaccaggat

SEQ ID NO: 5019709 - DNA, 25 bp, Homo sapien
gactaaagagaaccatgggtctttc

SEQ ID NO: 5019710 - DNA, 25 bp, Homo sapien
caatccagaggtctgtattcttaaa

SEQ ID NO: 5019711 - DNA, 25 bp, Homo sapien
aataactgccatagtactttacaac

SEQ ID NO: 5019712 - DNA, 25 bp, Homo sapien
tgtcttgtttcgtaatctaattatg

SEQ ID NO: 5019713 - DNA, 25 bp, Homo sapien
cgtaatctaattatgtctgagacag

SEQ ID NO: 5019714 - DNA, 25 bp, Homo sapien
caacaggtacttgtttaattgcgac

SEQ ID NO: 5019715 - DNA, 25 bp, Homo sapien
tgcgacaacttgaccggattccttg

SEQ ID NO: 5019716 - DNA, 25 bp, Homo sapien
tgtttaattgcgacaacttgaccgg

SEQ ID NO: 5019717 - DNA, 25 bp, Homo sapien
ccggattccttgtgtattgctttaa

SEQ ID NO: 5019718 - DNA, 25 bp, Homo sapien
gctgcttagtcaaactgtcttcact

SEQ ID NO: 5019719 - DNA, 25 bp, Homo sapien
gcttagtcaaactgtcttcactcag

SEQ ID NO: 5019720 - DNA, 25 bp, Homo sapien
ggctgcttagtcaaactgtcttcac

SEQ ID NO: 5019721 - DNA, 25 bp, Homo sapien
ttagtcaaactgtcttcactcagct

SEQ ID NO: 5019722 - DNA, 25 bp, Homo sapien
tgagaccaatgaaattggccatgcc

SEQ ID NO: 5019723 - DNA, 25 bp, Homo sapien
ctgcgactgtccgttcctgggctca

SEQ ID NO: 5019724 - DNA, 25 bp, Homo sapien
cataagcctgcgactgtccgttcct

SEQ ID NO: 5019725 - DNA, 25 bp, Homo sapien
acatggtcataggtaaacaaaaagg

SEQ ID NO: 5019726 - DNA, 25 bp, Homo sapien
aggggagtgtgttcaaaaacaggtg

SEQ ID NO: 5019727 - DNA, 25 bp, Homo sapien
ggagtgtgttcaaaaacaggtggat

SEQ ID NO: 5019728 - DNA, 25 bp, Homo sapien
ctgaaggtaaaggggagtgtgttca

SEQ ID NO: 5019729 - DNA, 25 bp, Homo sapien
gtgtgttcaaaaacaggtggattct

SEQ ID NO: 5019730 - DNA, 25 bp, Homo sapien
ttctcttgtctgtacatagtggtct

SEQ ID NO: 5019731 - DNA, 25 bp, Homo sapien
gattatacagatcaatcattaaaat

SEQ ID NO: 5019732 - DNA, 25 bp, Homo sapien
cttgtctgtacatagtggtcttggt

SEQ ID NO: 5019733 - DNA, 25 bp, Homo sapien
cccttctcttgtctgtacatagtgg

SEQ ID NO: 5019734 - DNA, 25 bp, Homo sapien
ttacaagtcactgcagcacaacctc

SEQ ID NO: 5019735 - DNA, 25 bp, Homo sapien
atgaagtggtataattacaagtcac

SEQ ID NO: 5019736 - DNA, 25 bp, Homo sapien
taattacaagtcactgcagcacaac

SEQ ID NO: 5019737 - DNA, 25 bp, Homo sapien
cccaagcgcagtccaagctggaatg

SEQ ID NO: 5019738 - DNA, 25 bp, Homo sapien
ttcccatcagcacggcctaaagcaa

SEQ ID NO: 5019739 - DNA, 25 bp, Homo sapien
tccaagaaggaagagccaactgact

SEQ ID NO: 5019740 - DNA, 25 bp, Homo sapien
gacagcagatgctttagggaccaag

SEQ ID NO: 5019741 - DNA, 25 bp, Homo sapien
tgagtttctctagttgacatgcaac

SEQ ID NO: 5019742 - DNA, 25 bp, Homo sapien
tcgcagtaggccctcattatcttct

SEQ ID NO: 5019743 - DNA, 25 bp, Homo sapien
tgtatatcacattaggaattcagtg

SEQ ID NO: 5019744 - DNA, 25 bp, Homo sapien
gattacaaggcgtgcaccatcgcag

SEQ ID NO: 5019745 - DNA, 25 bp, Homo sapien
aattcagtgaaatatctcaggctag

SEQ ID NO: 5019746 - DNA, 25 bp, Homo sapien
ctcttaggcgccggcggctgctcca

SEQ ID NO: 5019747 - DNA, 25 bp, Homo sapien
tcttaggcgccggcggctgctccat

SEQ ID NO: 5019748 - DNA, 25 bp, Homo sapien
tggacggcgaaggccgaaaggagga

SEQ ID NO: 5019749 - DNA, 25 bp, Homo sapien
gacctggtggacggcgaaggccgaa

SEQ ID NO: 5019750 - DNA, 25 bp, Homo sapien
cctggtggacggcgaaggccgaaag

SEQ ID NO: 5019751 - DNA, 25 bp, Homo sapien
tggtggacggcgaaggccgaaagga

SEQ ID NO: 5019752 - DNA, 25 bp, Homo sapien
tagggcaccacagagggaaactctg

SEQ ID NO: 5019753 - DNA, 25 bp, Homo sapien
accacagagggaaactctgggaact

SEQ ID NO: 5019754 - DNA, 25 bp, Homo sapien
cagagggaaactctgggaactcgga

SEQ ID NO: 5019755 - DNA, 25 bp, Homo sapien
cacagagggaaactctgggaactcg

SEQ ID NO: 5019756 - DNA, 25 bp, Homo sapien
cctcccgcttaggagcgcggctcct

SEQ ID NO: 5019757 - DNA, 25 bp, Homo sapien
ccctcccgcttaggagcgcggctcc

SEQ ID NO: 5019758 - DNA, 25 bp, Homo sapien
tccctcccgcttaggagcgcggctc

SEQ ID NO: 5019759 - DNA, 25 bp, Homo sapien
ggtctatgggtaatgtagacttcca

SEQ ID NO: 5019760 - DNA, 25 bp, Homo sapien
tccagcctctgatgtacacgaagtc

SEQ ID NO: 5019761 - DNA, 25 bp, Homo sapien
gaaccaattgatagtgtctgccaca

SEQ ID NO: 5019762 - DNA, 25 bp, Homo sapien
tatgtgatggatgctacatcccatg

SEQ ID NO: 5019763 - DNA, 25 bp, Homo sapien
accaaagccaaagatctgccaggtc

SEQ ID NO: 5019764 - DNA, 25 bp, Homo sapien
catacgcctcgctcttggtttaact

SEQ ID NO: 5019765 - DNA, 25 bp, Homo sapien
ctgaattttgaacccgaacccacag

SEQ ID NO: 5019766 - DNA, 25 bp, Homo sapien
ccagtggttgtctttagtagcagaa

SEQ ID NO: 5019767 - DNA, 25 bp, Homo sapien
aatagggtggtcagcctgggttaca

SEQ ID NO: 5019768 - DNA, 25 bp, Homo sapien
caatttccaggtccaaaggaatagg

SEQ ID NO: 5019769 - DNA, 25 bp, Homo sapien
ttactccttgttcaatttccaggtc

SEQ ID NO: 5019770 - DNA, 25 bp, Homo sapien
tgctaactggccctccttggaggtg

SEQ ID NO: 5019771 - DNA, 25 bp, Homo sapien
acagggtttgaatgatccctaaaag

SEQ ID NO: 5019772 - DNA, 25 bp, Homo sapien
ctacagggtttgaatgatccctaaa

SEQ ID NO: 5019773 - DNA, 25 bp, Homo sapien
tacagggtttgaatgatccctaaaa

SEQ ID NO: 5019774 - DNA, 25 bp, Homo sapien
tttgtgattttaaggtgtcgatttc

SEQ ID NO: 5019775 - DNA, 25 bp, Homo sapien
cagaggttaagaaatccaggtttca

SEQ ID NO: 5019776 - DNA, 25 bp, Homo sapien
ttcttgtcttgagttggagctccag

SEQ ID NO: 5019777 - DNA, 25 bp, Homo sapien
tcaggctgaatgttaccaaatcttc

SEQ ID NO: 5019778 - DNA, 25 bp, Homo sapien
ccacttgggatttagaccttcataa

SEQ ID NO: 5019779 - DNA, 25 bp, Homo sapien
tcctaaggcagatggtaatgccact

SEQ ID NO: 5019780 - DNA, 25 bp, Homo sapien
acagaggctgctccgttcctaaggc

SEQ ID NO: 5019781 - DNA, 25 bp, Homo sapien
tccactgaagagtctagctcagaga

SEQ ID NO: 5019782 - DNA, 25 bp, Homo sapien
tgagttgtaacatttcctccactga

SEQ ID NO: 5019783 - DNA, 25 bp, Homo sapien
ccacagctggctcaatgactgtggc

SEQ ID NO: 5019784 - DNA, 25 bp, Homo sapien
agtacccgcacttggcctgtggctc

SEQ ID NO: 5019785 - DNA, 25 bp, Homo sapien
tttcctctgcatgggttgtacagtg

SEQ ID NO: 5019786 - DNA, 25 bp, Homo sapien
tgtacagtgaagtacccgcacttgg

SEQ ID NO: 5019787 - DNA, 25 bp, Homo sapien
ccatgtcgtgtagagaattccgtgt

SEQ ID NO: 5019788 - DNA, 25 bp, Homo sapien
catgtcgtgtagagaattccgtgta

SEQ ID NO: 5019789 - DNA, 25 bp, Homo sapien
ggaggaagtggtggccggagcggca

SEQ ID NO: 5019790 - DNA, 25 bp, Homo sapien
cggttccacaataggaggaagtggt

SEQ ID NO: 5019791 - DNA, 25 bp, Homo sapien
agcatggctgcagcatgacgcggtt

SEQ ID NO: 5019792 - DNA, 25 bp, Homo sapien
cagcatgacgcggttccacaatagg

SEQ ID NO: 5019793 - DNA, 25 bp, Homo sapien
caagaacttggcaataggtatctgt

SEQ ID NO: 5019794 - DNA, 25 bp, Homo sapien
agcacaagaacttggcaataggtat

SEQ ID NO: 5019795 - DNA, 25 bp, Homo sapien
acaagaacttggcaataggtatctg

SEQ ID NO: 5019796 - DNA, 25 bp, Homo sapien
gcacaagaacttggcaataggtatc

SEQ ID NO: 5019797 - DNA, 25 bp, Homo sapien
atgcagaagctgctgccgctgctgc

SEQ ID NO: 5019798 - DNA, 25 bp, Homo sapien
gcagaagctgctgccgctgctgcta

SEQ ID NO: 5019799 - DNA, 25 bp, Homo sapien
tgcagaagctgctgccgctgctgct

SEQ ID NO: 5019800 - DNA, 25 bp, Homo sapien
cagaagctgctgccgctgctgctac

SEQ ID NO: 5019801 - DNA, 25 bp, Homo sapien
gcccatggtgtaaggcgtgtgaact

SEQ ID NO: 5019802 - DNA, 25 bp, Homo sapien
tggtgtaaggcgtgtgaactgctgc

SEQ ID NO: 5019803 - DNA, 25 bp, Homo sapien
tgtaaggcgtgtgaactgctgcata

SEQ ID NO: 5019804 - DNA, 25 bp, Homo sapien
cccatggtgtaaggcgtgtgaactg

SEQ ID NO: 5019805 - DNA, 25 bp, Homo sapien
ctgatagcagccacactggtctccc

SEQ ID NO: 5019806 - DNA, 25 bp, Homo sapien
tgatagcagccacactggtctccca

SEQ ID NO: 5019807 - DNA, 25 bp, Homo sapien
gatagcagccacactggtctcccat

SEQ ID NO: 5019808 - DNA, 25 bp, Homo sapien
gcagtccgaagtcgggcttgtggac

SEQ ID NO: 5019809 - DNA, 25 bp, Homo sapien
aggggcagtccgaagtcgggcttgt

SEQ ID NO: 5019810 - DNA, 25 bp, Homo sapien
tgaaactctgtgttgtcaaggcccc

SEQ ID NO: 5019811 - DNA, 25 bp, Homo sapien
ttgtcaaggcccctgacggtctcac

SEQ ID NO: 5019812 - DNA, 25 bp, Homo sapien
tgttgtcaaggcccctgacggtctc

SEQ ID NO: 5019813 - DNA, 25 bp, Homo sapien
tctgtgttgtcaaggcccctgacgg

SEQ ID NO: 5019814 - DNA, 25 bp, Homo sapien
tgtatgaggacataatctttcacga

SEQ ID NO: 5019815 - DNA, 25 bp, Homo sapien
tgtgtatggtatcctcagccgccgt

SEQ ID NO: 5019816 - DNA, 25 bp, Homo sapien
tgtgtatgaagtgtatgaggacata

SEQ ID NO: 5019817 - DNA, 25 bp, Homo sapien
gaagcttgtaatgatgcaagttgtg

SEQ ID NO: 5019818 - DNA, 25 bp, Homo sapien
tactgcttgaaaagagagcggatct

SEQ ID NO: 5019819 - DNA, 25 bp, Homo sapien
tgcttgaaaagagagcggatctcct

SEQ ID NO: 5019820 - DNA, 25 bp, Homo sapien
gaaaagagagcggatctcctgctct

SEQ ID NO: 5019821 - DNA, 25 bp, Homo sapien
cttgaaaagagagcggatctcctgc

SEQ ID NO: 5019822 - DNA, 25 bp, Homo sapien
tgggtggcagcggcggaggtagctc

SEQ ID NO: 5019823 - DNA, 25 bp, Homo sapien
ctgggtggcagcggcggaggtagct

SEQ ID NO: 5019824 - DNA, 25 bp, Homo sapien
atttctatagaagctacagtttttc

SEQ ID NO: 5019825 - DNA, 25 bp, Homo sapien
tcaattccaaggataggtaaaaaca

SEQ ID NO: 5019826 - DNA, 25 bp, Homo sapien
ggataggtaaaaacagggcagcacc

SEQ ID NO: 5019827 - DNA, 25 bp, Homo sapien
aaggataggtaaaaacagggcagca

SEQ ID NO: 5019828 - DNA, 25 bp, Homo sapien
tttgccccaaattaaacgtgtctgc

SEQ ID NO: 5019829 - DNA, 25 bp, Homo sapien
cccaaattaaacgtgtctgcttggt

SEQ ID NO: 5019830 - DNA, 25 bp, Homo sapien
gccccaaattaaacgtgtctgcttg

SEQ ID NO: 5019831 - DNA, 25 bp, Homo sapien
caaattaaacgtgtctgcttggtca

SEQ ID NO: 5019832 - DNA, 25 bp, Homo sapien
ttttatgttgccacaagtggtgcag

SEQ ID NO: 5019833 - DNA, 25 bp, Homo sapien
cggagtccattgtaggtttttctca

SEQ ID NO: 5019834 - DNA, 25 bp, Homo sapien
ccagaagctctagtttgttcaaatg

SEQ ID NO: 5019835 - DNA, 25 bp, Homo sapien
cgttgtttggacctggcggagtcca

SEQ ID NO: 5019836 - DNA, 25 bp, Homo sapien
gagctcagctactctgtacccttga

SEQ ID NO: 5019837 - DNA, 25 bp, Homo sapien
atcctggtggtcaataagatgacag

SEQ ID NO: 5019838 - DNA, 25 bp, Homo sapien
tgtcggagatggtcatccacttcaa

SEQ ID NO: 5019839 - DNA, 25 bp, Homo sapien
tcagctgaattaatcctggtggtca

SEQ ID NO: 5019840 - DNA, 25 bp, Homo sapien
tagagcactagggtatacaccatcc

SEQ ID NO: 5019841 - DNA, 25 bp, Homo sapien
catgtagagcactagggtatacacc

SEQ ID NO: 5019842 - DNA, 25 bp, Homo sapien
tttcatgtagagcactagggtatac

SEQ ID NO: 5019843 - DNA, 25 bp, Homo sapien
gagcactagggtatacaccatccat

SEQ ID NO: 5019844 - DNA, 25 bp, Homo sapien
ccctagcactacttgtgaacatggc

SEQ ID NO: 5019845 - DNA, 25 bp, Homo sapien
tagcactacttgtgaacatggcctg

SEQ ID NO: 5019846 - DNA, 25 bp, Homo sapien
cctagcactacttgtgaacatggcc

SEQ ID NO: 5019847 - DNA, 25 bp, Homo sapien
gcactacttgtgaacatggcctgag

SEQ ID NO: 5019848 - DNA, 25 bp, Homo sapien
tgcaggttcagagagtccatttgaa

SEQ ID NO: 5019849 - DNA, 25 bp, Homo sapien
tgaaaattttgtggaggctgttccc

SEQ ID NO: 5019850 - DNA, 25 bp, Homo sapien
tcattgtaccctgaaagagttgtca

SEQ ID NO: 5019851 - DNA, 25 bp, Homo sapien
gagttcatggaggtttgcaggttca

SEQ ID NO: 5019852 - DNA, 25 bp, Homo sapien
gatggctcctgaaaccactatgctc

SEQ ID NO: 5019853 - DNA, 25 bp, Homo sapien
tggctcctgaaaccactatgctcat

SEQ ID NO: 5019854 - DNA, 25 bp, Homo sapien
ccagatggctcctgaaaccactatg

SEQ ID NO: 5019855 - DNA, 25 bp, Homo sapien
cagatggctcctgaaaccactatgc

SEQ ID NO: 5019856 - DNA, 25 bp, Homo sapien
tgcttcagttgacggtctataaacc

SEQ ID NO: 5019857 - DNA, 25 bp, Homo sapien
gttgacggtctataaaccaactgtc

SEQ ID NO: 5019858 - DNA, 25 bp, Homo sapien
gccctgcttcagttgacggtctata

SEQ ID NO: 5019859 - DNA, 25 bp, Homo sapien
taaaccaactgtctctgcacagaca

SEQ ID NO: 5019860 - DNA, 25 bp, Homo sapien
gatgcgaatgctgttggaccacact

SEQ ID NO: 5019861 - DNA, 25 bp, Homo sapien
tctgcagtgagaaatggaacgtcca

SEQ ID NO: 5019862 - DNA, 25 bp, Homo sapien
aaaatataggtttgcagaccgtgcc

SEQ ID NO: 5019863 - DNA, 25 bp, Homo sapien
tactaattaacaacaactggccgtg

SEQ ID NO: 5019864 - DNA, 25 bp, Homo sapien
acccacgttgagcacgacagccggg

SEQ ID NO: 5019865 - DNA, 25 bp, Homo sapien
tgtgtctggggcctgtccttcactg

SEQ ID NO: 5019866 - DNA, 25 bp, Homo sapien
ttttctgtcatccatcgtctaccca

SEQ ID NO: 5019867 - DNA, 25 bp, Homo sapien
catcgtctacccacgttgagcacga

SEQ ID NO: 5019868 - DNA, 25 bp, Homo sapien
gaaaagcaccatgaattcgaagcag

SEQ ID NO: 5019869 - DNA, 25 bp, Homo sapien
tggttcgaaaagcaccatgaattcg

SEQ ID NO: 5019870 - DNA, 25 bp, Homo sapien
gtcacggacactgaagcgcttggtt

SEQ ID NO: 5019871 - DNA, 25 bp, Homo sapien
tgaagcgcttggttcgaaaagcacc

SEQ ID NO: 5019872 - DNA, 25 bp, Homo sapien
gacgcgggatcatgggcgttagcct

SEQ ID NO: 5019873 - DNA, 25 bp, Homo sapien
ttccctggagtcaccggaaggcgaa

SEQ ID NO: 5019874 - DNA, 25 bp, Homo sapien
cggaaggcgaaagcacgctctgtgc

SEQ ID NO: 5019875 - DNA, 25 bp, Homo sapien
tctctccgacgaggcaaactgcagg

SEQ ID NO: 5019876 - DNA, 25 bp, Homo sapien
atcttgcgactagcgaggggctgac

SEQ ID NO: 5019877 - DNA, 25 bp, Homo sapien
ctccagggtcgcggaggcatcttgc

SEQ ID NO: 5019878 - DNA, 25 bp, Homo sapien
cgcggaggcatcttgcgactagcga

SEQ ID NO: 5019879 - DNA, 25 bp, Homo sapien
gtcgcggaggcatcttgcgactagc

SEQ ID NO: 5019880 - DNA, 25 bp, Homo sapien
aacggccaacagtgcgggaagttca

SEQ ID NO: 5019881 - DNA, 25 bp, Homo sapien
acagtgcgggaagttcaaatgcaaa

SEQ ID NO: 5019882 - DNA, 25 bp, Homo sapien
ccaggctctggcgaaaaacggccaa

SEQ ID NO: 5019883 - DNA, 25 bp, Homo sapien
tctggcgaaaaacggccaacagtgc

SEQ ID NO: 5019884 - DNA, 25 bp, Homo sapien
aggcgagtccccggaggtagtggct

SEQ ID NO: 5019885 - DNA, 25 bp, Homo sapien
gaggcgagtccccggaggtagtggc

SEQ ID NO: 5019886 - DNA, 25 bp, Homo sapien
gcgagtccccggaggtagtggctgg

SEQ ID NO: 5019887 - DNA, 25 bp, Homo sapien
ggcgagtccccggaggtagtggctg

SEQ ID NO: 5019888 - DNA, 25 bp, Homo sapien
agtccgagtgggagaggcgcgcggt

SEQ ID NO: 5019889 - DNA, 25 bp, Homo sapien
aaagtttcgaggatccgagtccgag

SEQ ID NO: 5019890 - DNA, 25 bp, Homo sapien
ggagaggctgagagtcaactccagg

SEQ ID NO: 5019891 - DNA, 25 bp, Homo sapien
ccagggaagtctgtgtctgacacct

SEQ ID NO: 5019892 - DNA, 25 bp, Homo sapien
cctccgcgtttcctgtccctggcct

SEQ ID NO: 5019893 - DNA, 25 bp, Homo sapien
ctcctccgcgtttcctgtccctggc

SEQ ID NO: 5019894 - DNA, 25 bp, Homo sapien
ctcctcctccgcgtttcctgtccct

SEQ ID NO: 5019895 - DNA, 25 bp, Homo sapien
cctcctccgcgtttcctgtccctgg

SEQ ID NO: 5019896 - DNA, 25 bp, Homo sapien
cgggtcagcggaaatttcagagcca

SEQ ID NO: 5019897 - DNA, 25 bp, Homo sapien
aatggaacggctccgcggagacagc

SEQ ID NO: 5019898 - DNA, 25 bp, Homo sapien
ttggtgtcgcaagtccagagccgcg

SEQ ID NO: 5019899 - DNA, 25 bp, Homo sapien
ttccctgagagcgtccttggtgtcg

SEQ ID NO: 5019900 - DNA, 25 bp, Homo sapien
gttaataaatctctgtcccgagccc

SEQ ID NO: 5019901 - DNA, 25 bp, Homo sapien
taagagacttgccaccgagcaaaaa

SEQ ID NO: 5019902 - DNA, 25 bp, Homo sapien
ccaccaagcagaagcgattcgttaa

SEQ ID NO: 5019903 - DNA, 25 bp, Homo sapien
tgaatggtctgactgagaccctctg

SEQ ID NO: 5019904 - DNA, 25 bp, Homo sapien
cccttggttgatgtgtgaagctagg

SEQ ID NO: 5019905 - DNA, 25 bp, Homo sapien
tgaagctaggtttctaaggacttct

SEQ ID NO: 5019906 - DNA, 25 bp, Homo sapien
ttcttcagtgttcttattaagaaca

SEQ ID NO: 5019907 - DNA, 25 bp, Homo sapien
cttcccttggttgatgtgtgaagct

SEQ ID NO: 5019908 - DNA, 25 bp, Homo sapien
gttgttgtacttggcctatagtctt

SEQ ID NO: 5019909 - DNA, 25 bp, Homo sapien
cttggcctatagtctttgcgtgcat

SEQ ID NO: 5019910 - DNA, 25 bp, Homo sapien
tacttggcctatagtctttgcgtgc

SEQ ID NO: 5019911 - DNA, 25 bp, Homo sapien
gttgtacttggcctatagtctttgc

SEQ ID NO: 5019912 - DNA, 25 bp, Homo sapien
ttccggcgccggctcatggcttagg

SEQ ID NO: 5019913 - DNA, 25 bp, Homo sapien
tagacagcagatggcctgagcaacc

SEQ ID NO: 5019914 - DNA, 25 bp, Homo sapien
gcccttcagtgccttccgggaactg

SEQ ID NO: 5019915 - DNA, 25 bp, Homo sapien
gaaaggttgccaaaggacctcaggc

SEQ ID NO: 5019916 - DNA, 25 bp, Homo sapien
gagaagccctatccaactctgcgga

SEQ ID NO: 5019917 - DNA, 25 bp, Homo sapien
gactatactgcagtgtgaccgccag

SEQ ID NO: 5019918 - DNA, 25 bp, Homo sapien
gagttgcttctccagtcggtgaacg

SEQ ID NO: 5019919 - DNA, 25 bp, Homo sapien
aagcttctgcggctacagatggcgc

SEQ ID NO: 5019920 - DNA, 25 bp, Homo sapien
gaaaagtagaggcaatgagacccga

SEQ ID NO: 5019921 - DNA, 25 bp, Homo sapien
actgcaaggccgctggatcccggat

SEQ ID NO: 5019922 - DNA, 25 bp, Homo sapien
acaagtgctcggaccgcggagcgtc

SEQ ID NO: 5019923 - DNA, 25 bp, Homo sapien
gaaatagggacttctcgcggcagtc

SEQ ID NO: 5019924 - DNA, 25 bp, Homo sapien
cgagtccgaggtcgggcgcgaaggc

SEQ ID NO: 5019925 - DNA, 25 bp, Homo sapien
acaggtcgccgagtccgaggtcggg

SEQ ID NO: 5019926 - DNA, 25 bp, Homo sapien
ggtcgggcgcgaaggccactcgcat

SEQ ID NO: 5019927 - DNA, 25 bp, Homo sapien
gtgggggacaggtcgccgagtccga

SEQ ID NO: 5019928 - DNA, 25 bp, Homo sapien
tttcccgccttccgcgagcaaccca

SEQ ID NO: 5019929 - DNA, 25 bp, Homo sapien
ttcccgccttccgcgagcaacccag

SEQ ID NO: 5019930 - DNA, 25 bp, Homo sapien
gcgccttcgggaccggcaggaggcg

SEQ ID NO: 5019931 - DNA, 25 bp, Homo sapien
ctgcgccttcgggaccggcaggagg

SEQ ID NO: 5019932 - DNA, 25 bp, Homo sapien
ttccctgcgccttcgggaccggcag

SEQ ID NO: 5019933 - DNA, 25 bp, Homo sapien
tccctgcgccttcgggaccggcagg

SEQ ID NO: 5019934 - DNA, 25 bp, Homo sapien
ttatgaactatatttccccaaacaa

SEQ ID NO: 5019935 - DNA, 25 bp, Homo sapien
tgtgatactgcatgtcatgtagcct

SEQ ID NO: 5019936 - DNA, 25 bp, Homo sapien
gagacaggtgggttcttatatttgc

SEQ ID NO: 5019937 - DNA, 25 bp, Homo sapien
caaaaacagttagcaaagtggtatt

SEQ ID NO: 5019938 - DNA, 25 bp, Homo sapien
gagggtataaggcatgttacagaga

SEQ ID NO: 5019939 - DNA, 25 bp, Homo sapien
gtattattatgagcgtaccattgac

SEQ ID NO: 5019940 - DNA, 25 bp, Homo sapien
tggaggagatatggctagaaatgta

SEQ ID NO: 5019941 - DNA, 25 bp, Homo sapien
gagagagcaaacagaccaatctggt

SEQ ID NO: 5019942 - DNA, 25 bp, Homo sapien
taagcttcagggtaggaatgataga

SEQ ID NO: 5019943 - DNA, 25 bp, Homo sapien
tggcatcagtaagcttcagggtagg

SEQ ID NO: 5019944 - DNA, 25 bp, Homo sapien
tctaattttggcatcagtaagcttc

SEQ ID NO: 5019945 - DNA, 25 bp, Homo sapien
tcagtaagcttcagggtaggaatga

SEQ ID NO: 5019946 - DNA, 25 bp, Homo sapien
tgttgattgctttatctatttaatg

SEQ ID NO: 5019947 - DNA, 25 bp, Homo sapien
ggtttcaggcaactctaaagttatg

SEQ ID NO: 5019948 - DNA, 25 bp, Homo sapien
ggctgacagtattctaattgatttg

SEQ ID NO: 5019949 - DNA, 25 bp, Homo sapien
caacataagaactagtgatacaacg

SEQ ID NO: 5019950 - DNA, 25 bp, Homo sapien
gatgaggaagtctgcaacaggattc

SEQ ID NO: 5019951 - DNA, 25 bp, Homo sapien
tctgcaacaggattcaacacttcct

SEQ ID NO: 5019952 - DNA, 25 bp, Homo sapien
aacatatctttagcccaacattcca

SEQ ID NO: 5019953 - DNA, 25 bp, Homo sapien
ccttttctgccaacatatctttagc

SEQ ID NO: 5019954 - DNA, 25 bp, Homo sapien
atgcacactgggttctttcttaatc

SEQ ID NO: 5019955 - DNA, 25 bp, Homo sapien
gctatgcacactgggttctttctta

SEQ ID NO: 5019956 - DNA, 25 bp, Homo sapien
tatgcacactgggttctttcttaat

SEQ ID NO: 5019957 - DNA, 25 bp, Homo sapien
tgctatgcacactgggttctttctt

SEQ ID NO: 5019958 - DNA, 25 bp, Homo sapien
agagctggcaggtctgagtaaccct

SEQ ID NO: 5019959 - DNA, 25 bp, Homo sapien
gagagctggcaggtctgagtaaccc

SEQ ID NO: 5019960 - DNA, 25 bp, Homo sapien
ttctgcccaaagcaaggaagtgtca

SEQ ID NO: 5019961 - DNA, 25 bp, Homo sapien
ctgatggcttctgcccaaagcaagg

SEQ ID NO: 5019962 - DNA, 25 bp, Homo sapien
tctgcccaaagcaaggaagtgtcat

SEQ ID NO: 5019963 - DNA, 25 bp, Homo sapien
ggcttctgcccaaagcaaggaagtg

SEQ ID NO: 5019964 - DNA, 25 bp, Homo sapien
tagaactattaactccatttacatt

SEQ ID NO: 5019965 - DNA, 25 bp, Homo sapien
tctttagacatcaataggcactgaa

SEQ ID NO: 5019966 - DNA, 25 bp, Homo sapien
cttgggtccactactccattagaac

SEQ ID NO: 5019967 - DNA, 25 bp, Homo sapien
ctgtaacactgtcctgccggtggct

SEQ ID NO: 5019968 - DNA, 25 bp, Homo sapien
tggaaaatctaggataacactcctc

SEQ ID NO: 5019969 - DNA, 25 bp, Homo sapien
tactggatttagagctcacctggaa

SEQ ID NO: 5019970 - DNA, 25 bp, Homo sapien
cctcagctgttaacggtgtcattcc

SEQ ID NO: 5019971 - DNA, 25 bp, Homo sapien
tgtttttgcctcgtccagtttctgg

SEQ ID NO: 5019972 - DNA, 25 bp, Homo sapien
ggaatgattactggcataaaccact

SEQ ID NO: 5019973 - DNA, 25 bp, Homo sapien
ctgaaatgttgggaatgattactgg

SEQ ID NO: 5019974 - DNA, 25 bp, Homo sapien
gttgggaatgattactggcataaac

SEQ ID NO: 5019975 - DNA, 25 bp, Homo sapien
gaaatgttgggaatgattactggca

SEQ ID NO: 5019976 - DNA, 25 bp, Homo sapien
tcaatatagcaggtcatgaactgct

SEQ ID NO: 5019977 - DNA, 25 bp, Homo sapien
ggtttcaaatcattagtagcacaga

SEQ ID NO: 5019978 - DNA, 25 bp, Homo sapien
tatgcatgaccctcaaggaaatgtt

SEQ ID NO: 5019979 - DNA, 25 bp, Homo sapien
gatagttaactactgtcctactgac

SEQ ID NO: 5019980 - DNA, 25 bp, Homo sapien
tattgcttaattcctctccactgtg

SEQ ID NO: 5019981 - DNA, 25 bp, Homo sapien
tagggtatatgcgtcttcaactctg

SEQ ID NO: 5019982 - DNA, 25 bp, Homo sapien
cagtctgataggtatggaataggtc

SEQ ID NO: 5019983 - DNA, 25 bp, Homo sapien
tgttctcagcaacagtgcactaggt

SEQ ID NO: 5019984 - DNA, 25 bp, Homo sapien
tctgtcacttatttcgctcctccta

SEQ ID NO: 5019985 - DNA, 25 bp, Homo sapien
cagtgaacccaaccaagttcctctt

SEQ ID NO: 5019986 - DNA, 25 bp, Homo sapien
tcctaccagcggcctattgcttctg

SEQ ID NO: 5019987 - DNA, 25 bp, Homo sapien
ccttggaactaagttgaaatctgtc

SEQ ID NO: 5019988 - DNA, 25 bp, Homo sapien
ttacgtgctaggtgtggtttcttcc

SEQ ID NO: 5019989 - DNA, 25 bp, Homo sapien
ccttagacacctcctagagctttgt

SEQ ID NO: 5019990 - DNA, 25 bp, Homo sapien
ggagcgccacttccggatctcgagt

SEQ ID NO: 5019991 - DNA, 25 bp, Homo sapien
tcctaactagcagggtcggagctgg

SEQ ID NO: 5019992 - DNA, 25 bp, Homo sapien
gaagctctacttttcttatccttga

SEQ ID NO: 5019993 - DNA, 25 bp, Homo sapien
aatacttgctgcctagtaactgcta

SEQ ID NO: 5019994 - DNA, 25 bp, Homo sapien
ttcttaagagaagctctacttttct

SEQ ID NO: 5019995 - DNA, 25 bp, Homo sapien
tcttatccttgaaatacttgctgcc

SEQ ID NO: 5019996 - DNA, 25 bp, Homo sapien
atttctaagcccctttggtgaccag

SEQ ID NO: 5019997 - DNA, 25 bp, Homo sapien
gaagtgtgcagtattactctcagag

SEQ ID NO: 5019998 - DNA, 25 bp, Homo sapien
tgtgctctccaagtgtacctctgag

SEQ ID NO: 5019999 - DNA, 25 bp, Homo sapien
tctgcttgcgaagtttggtgccaca

SEQ ID NO: 5020000 - DNA, 25 bp, Homo sapien
aaatttgaaaactcatcgttttcat

SEQ ID NO: 5020001 - DNA, 25 bp, Homo sapien
aactcatcgttttcatttaatccca

SEQ ID NO: 5020002 - DNA, 25 bp, Homo sapien
cccattttgctgctaataattttta

SEQ ID NO: 5020003 - DNA, 25 bp, Homo sapien
tcatttaatcccattttgctgctaa

SEQ ID NO: 5020004 - DNA, 25 bp, Homo sapien
tgggacagccatcatagatatatag

SEQ ID NO: 5020005 - DNA, 25 bp, Homo sapien
tgttgacttaggtattgttatgcag

SEQ ID NO: 5020006 - DNA, 25 bp, Homo sapien
tcaggtatatggtattggctattat

SEQ ID NO: 5020007 - DNA, 25 bp, Homo sapien
gccatcatagatatatagtctgttg

SEQ ID NO: 5020008 - DNA, 25 bp, Homo sapien
acagggtccacacagagtgattctg

SEQ ID NO: 5020009 - DNA, 25 bp, Homo sapien
gctgaagtgattctcgttcctcaac

SEQ ID NO: 5020010 - DNA, 25 bp, Homo sapien
ccttgaataacaccacagggtccac

SEQ ID NO: 5020011 - DNA, 25 bp, Homo sapien
gggtccacacagagtgattctggaa

SEQ ID NO: 5020012 - DNA, 25 bp, Homo sapien
tgccagctagcacaaacacttttca

SEQ ID NO: 5020013 - DNA, 25 bp, Homo sapien
gatgaaggatctgaaggtgaagaat

SEQ ID NO: 5020014 - DNA, 25 bp, Homo sapien
gaaaggaatactagagactctaata

SEQ ID NO: 5020015 - DNA, 25 bp, Homo sapien
taccaagaaactcatattagtcagc

SEQ ID NO: 5020016 - DNA, 25 bp, Homo sapien
tactctcatccttgttactaccatg

SEQ ID NO: 5020017 - DNA, 25 bp, Homo sapien
cacttcccacaagcccattggattt

SEQ ID NO: 5020018 - DNA, 25 bp, Homo sapien
cttactctcatccttgttactacca

SEQ ID NO: 5020019 - DNA, 25 bp, Homo sapien
ccatgattgtaagatgaagccgtcc

SEQ ID NO: 5020020 - DNA, 25 bp, Homo sapien
tggctgaattcttgccgacttcttg

SEQ ID NO: 5020021 - DNA, 25 bp, Homo sapien
ctaccaggcttccacccggtaatag

SEQ ID NO: 5020022 - DNA, 25 bp, Homo sapien
tctaccaggcttccacccggtaata

SEQ ID NO: 5020023 - DNA, 25 bp, Homo sapien
gacttcttgcatatcttctaccagg

SEQ ID NO: 5020024 - DNA, 25 bp, Homo sapien
gaccttctcttagactcatcatggg

SEQ ID NO: 5020025 - DNA, 25 bp, Homo sapien
tctaatcagagctaatggtatcaca

SEQ ID NO: 5020026 - DNA, 25 bp, Homo sapien
gggctctactttgtgttaccatgct

SEQ ID NO: 5020027 - DNA, 25 bp, Homo sapien
tcttcctgctaaaccttcctgggct

SEQ ID NO: 5020028 - DNA, 25 bp, Homo sapien
tatccctcctgttgatatacacaga

SEQ ID NO: 5020029 - DNA, 25 bp, Homo sapien
cataattgctgtgagtgtccttccg

SEQ ID NO: 5020030 - DNA, 25 bp, Homo sapien
tgttgcgtagatatgggattgagat

SEQ ID NO: 5020031 - DNA, 25 bp, Homo sapien
tatacacagatgatccataattgct

SEQ ID NO: 5020032 - DNA, 25 bp, Homo sapien
cagtttccctgatactgcgctgtgc

SEQ ID NO: 5020033 - DNA, 25 bp, Homo sapien
agtttccctgatactgcgctgtgca

SEQ ID NO: 5020034 - DNA, 25 bp, Homo sapien
cactagttaagttatgcagttcatt

SEQ ID NO: 5020035 - DNA, 25 bp, Homo sapien
tagttaagttatgcagttcattcac

SEQ ID NO: 5020036 - DNA, 25 bp, Homo sapien
gcactagttaagttatgcagttcat

SEQ ID NO: 5020037 - DNA, 25 bp, Homo sapien
ctgcactagttaagttatgcagttc

SEQ ID NO: 5020038 - DNA, 25 bp, Homo sapien
aggctctggcgagtcttgccagctg

SEQ ID NO: 5020039 - DNA, 25 bp, Homo sapien
tgatggaggctctggcgagtcttgc

SEQ ID NO: 5020040 - DNA, 25 bp, Homo sapien
ccttgatggaggctctggcgagtct

SEQ ID NO: 5020041 - DNA, 25 bp, Homo sapien
gctctggcgagtcttgccagctgtt

SEQ ID NO: 5020042 - DNA, 25 bp, Homo sapien
tgggggtacaggctggagaaagtat

SEQ ID NO: 5020043 - DNA, 25 bp, Homo sapien
cttgataagaatgctgatgcgggaa

SEQ ID NO: 5020044 - DNA, 25 bp, Homo sapien
tgataagaatgctgatgcgggaacg

SEQ ID NO: 5020045 - DNA, 25 bp, Homo sapien
gcgggaacgggccaaactggtgatg

SEQ ID NO: 5020046 - DNA, 25 bp, Homo sapien
agccagcatatcattttcaaaggcc

SEQ ID NO: 5020047 - DNA, 25 bp, Homo sapien
cagcatatcattttcaaaggcctca

SEQ ID NO: 5020048 - DNA, 25 bp, Homo sapien
ccagcatatcattttcaaaggcctc

SEQ ID NO: 5020049 - DNA, 25 bp, Homo sapien
agcatatcattttcaaaggcctcac

SEQ ID NO: 5020050 - DNA, 25 bp, Homo sapien
gccttcttttccaatcagtcttcca

SEQ ID NO: 5020051 - DNA, 25 bp, Homo sapien
cacagtgatggttctttccgggttg

SEQ ID NO: 5020052 - DNA, 25 bp, Homo sapien
gctttcaagaatcgtgtggcatgct

SEQ ID NO: 5020053 - DNA, 25 bp, Homo sapien
ctttcaagaatcgtgtggcatgctt

SEQ ID NO: 5020054 - DNA, 25 bp, Homo sapien
tcagtgatgttcactatggtcaagc

SEQ ID NO: 5020055 - DNA, 25 bp, Homo sapien
atgctttcaagaatcgtgtggcatg

SEQ ID NO: 5020056 - DNA, 25 bp, Homo sapien
ccagggcgtgaccttgctcccggaa

SEQ ID NO: 5020057 - DNA, 25 bp, Homo sapien
gcgtgaccttgctcccggaagagtg

SEQ ID NO: 5020058 - DNA, 25 bp, Homo sapien
gaagagcccccagggcgtgaccttg

SEQ ID NO: 5020059 - DNA, 25 bp, Homo sapien
agggcgtgaccttgctcccggaaga

SEQ ID NO: 5020060 - DNA, 25 bp, Homo sapien
ccaggatgtaggaaatcttgaagga

SEQ ID NO: 5020061 - DNA, 25 bp, Homo sapien
tcttcatccaggatgtaggaaatct

SEQ ID NO: 5020062 - DNA, 25 bp, Homo sapien
tcaaactgatgcccgcttagctcct

SEQ ID NO: 5020063 - DNA, 25 bp, Homo sapien
aatcttgaaggaatagttctcaaac

SEQ ID NO: 5020064 - DNA, 25 bp, Homo sapien
gagccaaaggtgcatccaacatcgc

SEQ ID NO: 5020065 - DNA, 25 bp, Homo sapien
cgtgttgagccaaaggtgcatccaa

SEQ ID NO: 5020066 - DNA, 25 bp, Homo sapien
tccactatcccgtgttgagccaaag

SEQ ID NO: 5020067 - DNA, 25 bp, Homo sapien
cacattctccactatcccgtgttga

SEQ ID NO: 5020068 - DNA, 25 bp, Homo sapien
cttccttaggtttgtgggtcgtgct

SEQ ID NO: 5020069 - DNA, 25 bp, Homo sapien
tggccttcgtttctccaatttcagg

SEQ ID NO: 5020070 - DNA, 25 bp, Homo sapien
taataggcctctaggcagtcccagt

SEQ ID NO: 5020071 - DNA, 25 bp, Homo sapien
gagtatactatagaccaggataggg

SEQ ID NO: 5020072 - DNA, 25 bp, Homo sapien
tggtgaggcccttacatttgacctt

SEQ ID NO: 5020073 - DNA, 25 bp, Homo sapien
ggcttacctgaattacatgagacaa

SEQ ID NO: 5020074 - DNA, 25 bp, Homo sapien
aaacatgtaatatgccaaccggtgg

SEQ ID NO: 5020075 - DNA, 25 bp, Homo sapien
aaatgcaggttcttaggccagtcct

SEQ ID NO: 5020076 - DNA, 25 bp, Homo sapien
tctgaatctatctgtaaaatagtca

SEQ ID NO: 5020077 - DNA, 25 bp, Homo sapien
tcggataagaatgtgaaagatatct

SEQ ID NO: 5020078 - DNA, 25 bp, Homo sapien
attttcgccttggagttattcggat

SEQ ID NO: 5020079 - DNA, 25 bp, Homo sapien
gaaagatatctgaatctatctgtaa

SEQ ID NO: 5020080 - DNA, 25 bp, Homo sapien
gcaggctgagttacaagcatccaga

SEQ ID NO: 5020081 - DNA, 25 bp, Homo sapien
cttgcgggaggtctttgtagacaga

SEQ ID NO: 5020082 - DNA, 25 bp, Homo sapien
catactccatgattcttgcgggagg

SEQ ID NO: 5020083 - DNA, 25 bp, Homo sapien
cagatatgagcaatcctatagttca

SEQ ID NO: 5020084 - DNA, 25 bp, Homo sapien
tgagatgcctatttggagaggcatg

SEQ ID NO: 5020085 - DNA, 25 bp, Homo sapien
ggtgatgaagtcacccctgtttgag

SEQ ID NO: 5020086 - DNA, 25 bp, Homo sapien
actagataccagtggcacccttggt

SEQ ID NO: 5020087 - DNA, 25 bp, Homo sapien
cagacagtgctatatttcctatggg

SEQ ID NO: 5020088 - DNA, 25 bp, Homo sapien
aaatgcagcactttcttccttgcta

SEQ ID NO: 5020089 - DNA, 25 bp, Homo sapien
atgcacaggtgttttgttctccagg

SEQ ID NO: 5020090 - DNA, 25 bp, Homo sapien
tgatgcacaggtgttttgttctcca

SEQ ID NO: 5020091 - DNA, 25 bp, Homo sapien
ctttcttccttgctaggaggctgag

SEQ ID NO: 5020092 - DNA, 25 bp, Homo sapien
acttgggcgaggtgacgcctgctct

SEQ ID NO: 5020093 - DNA, 25 bp, Homo sapien
ctggcacttgggcgaggtgacgcct

SEQ ID NO: 5020094 - DNA, 25 bp, Homo sapien
gctggcacttgggcgaggtgacgcc

SEQ ID NO: 5020095 - DNA, 25 bp, Homo sapien
tggcacttgggcgaggtgacgcctg

SEQ ID NO: 5020096 - DNA, 25 bp, Homo sapien
tgtggcacgcggaccgcctcagagc

SEQ ID NO: 5020097 - DNA, 25 bp, Homo sapien
agttggtggtgtggcacgcggaccg

SEQ ID NO: 5020098 - DNA, 25 bp, Homo sapien
aatgcttccggcttggctttgtgcc

SEQ ID NO: 5020099 - DNA, 25 bp, Homo sapien
cagagcctgcaatgcttccggcttg

SEQ ID NO: 5020100 - DNA, 25 bp, Homo sapien
tcttttctgctgggaattattataa

SEQ ID NO: 5020101 - DNA, 25 bp, Homo sapien
cttttctgctgggaattattataat

SEQ ID NO: 5020102 - DNA, 25 bp, Homo sapien
tttctgctgggaattattataatgc

SEQ ID NO: 5020103 - DNA, 25 bp, Homo sapien
tctgctgggaattattataatgcac

SEQ ID NO: 5020104 - DNA, 25 bp, Homo sapien
gttggtgtgccgcatagtgtggtgg

SEQ ID NO: 5020105 - DNA, 25 bp, Homo sapien
ggtgtgccgcatagtgtggtggtgg

SEQ ID NO: 5020106 - DNA, 25 bp, Homo sapien
tcatgttggtgtgccgcatagtgtg

SEQ ID NO: 5020107 - DNA, 25 bp, Homo sapien
cttcatgttggtgtgccgcatagtg

SEQ ID NO: 5020108 - DNA, 25 bp, Homo sapien
aatgtagtaacgatcactctcaagc

SEQ ID NO: 5020109 - DNA, 25 bp, Homo sapien
atgatgttggtctgtcgtggaagtc

SEQ ID NO: 5020110 - DNA, 25 bp, Homo sapien
gcaaaatgcttctcgtaggactcca

SEQ ID NO: 5020111 - DNA, 25 bp, Homo sapien
tgttggtctgtcgtggaagtctcat

SEQ ID NO: 5020112 - DNA, 25 bp, Homo sapien
taatttacatctctagcaactatgt

SEQ ID NO: 5020113 - DNA, 25 bp, Homo sapien
ggattactgagccatatggtaatct

SEQ ID NO: 5020114 - DNA, 25 bp, Homo sapien
gttaggctgataccatatcttgtct

SEQ ID NO: 5020115 - DNA, 25 bp, Homo sapien
aaaatcagtttatccgttgatagcc

SEQ ID NO: 5020116 - DNA, 25 bp, Homo sapien
gaatctgtaggtcatccaggtcttt

SEQ ID NO: 5020117 - DNA, 25 bp, Homo sapien
ctccaggagctgtaggcacttgttg

SEQ ID NO: 5020118 - DNA, 25 bp, Homo sapien
tgtaggcacttgttgggtgtgctca

SEQ ID NO: 5020119 - DNA, 25 bp, Homo sapien
taaggatatgtgaatctgtaggtca

SEQ ID NO: 5020120 - DNA, 25 bp, Homo sapien
acttcttcccatacatggttgtcag

SEQ ID NO: 5020121 - DNA, 25 bp, Homo sapien
tggttgtcaggaagtaaatctcttg

SEQ ID NO: 5020122 - DNA, 25 bp, Homo sapien
tctgcatctggagcctccaatttgt

SEQ ID NO: 5020123 - DNA, 25 bp, Homo sapien
aagttgatggtgacagaaatggcca

SEQ ID NO: 5020124 - DNA, 25 bp, Homo sapien
ccacagacagtggccaggacaatgc

SEQ ID NO: 5020125 - DNA, 25 bp, Homo sapien
cagtggccaggacaatgcctgccat

SEQ ID NO: 5020126 - DNA, 25 bp, Homo sapien
agacagtggccaggacaatgcctgc

SEQ ID NO: 5020127 - DNA, 25 bp, Homo sapien
gccacagacagtggccaggacaatg

SEQ ID NO: 5020128 - DNA, 25 bp, Homo sapien
tgggatctgtgaataactcttatgc

SEQ ID NO: 5020129 - DNA, 25 bp, Homo sapien
gctgtgacttgcacttgagcccatg

SEQ ID NO: 5020130 - DNA, 25 bp, Homo sapien
gagcccatgagctagcacttgcttg

SEQ ID NO: 5020131 - DNA, 25 bp, Homo sapien
tgtagatctgcttagatcccagtgc

SEQ ID NO: 5020132 - DNA, 25 bp, Homo sapien
ccacagtacctacttcttccacagt

SEQ ID NO: 5020133 - DNA, 25 bp, Homo sapien
ctttgatgtccaaaggccatccctc

SEQ ID NO: 5020134 - DNA, 25 bp, Homo sapien
tgagttggtacagctgttgatcaga

SEQ ID NO: 5020135 - DNA, 25 bp, Homo sapien
gatcagacccactttgatgtccaaa

SEQ ID NO: 5020136 - DNA, 25 bp, Homo sapien
tggatggtggatgatatggccattt

SEQ ID NO: 5020137 - DNA, 25 bp, Homo sapien
agtggatggtggatgatatggccat

SEQ ID NO: 5020138 - DNA, 25 bp, Homo sapien
atggtggatgatatggccatttggc

SEQ ID NO: 5020139 - DNA, 25 bp, Homo sapien
ggtggatgatatggccatttggcca

SEQ ID NO: 5020140 - DNA, 25 bp, Homo sapien
gccatacggtccatagtatcctgaa

SEQ ID NO: 5020141 - DNA, 25 bp, Homo sapien
tatcctgaatgcctatgcaggtaca

SEQ ID NO: 5020142 - DNA, 25 bp, Homo sapien
ctctctgcttatgaactgcactgtg

SEQ ID NO: 5020143 - DNA, 25 bp, Homo sapien
actgtggccatacggtccatagtat

SEQ ID NO: 5020144 - DNA, 25 bp, Homo sapien
tactctgttcagttgcctggggtca

SEQ ID NO: 5020145 - DNA, 25 bp, Homo sapien
tggggtcatctaggtatccatacat

SEQ ID NO: 5020146 - DNA, 25 bp, Homo sapien
cagttgcctggggtcatctaggtat

SEQ ID NO: 5020147 - DNA, 25 bp, Homo sapien
cttactctgttcagttgcctggggt

SEQ ID NO: 5020148 - DNA, 25 bp, Homo sapien
actgatgcacagttaagttcctgga

SEQ ID NO: 5020149 - DNA, 25 bp, Homo sapien
gagttaccaagatagatactactgg

SEQ ID NO: 5020150 - DNA, 25 bp, Homo sapien
tactgggaagcaccttttatgatcg

SEQ ID NO: 5020151 - DNA, 25 bp, Homo sapien
tcataatggcattgatggttccacc

SEQ ID NO: 5020152 - DNA, 25 bp, Homo sapien
tgcagatcccaaggagccaatttaa

SEQ ID NO: 5020153 - DNA, 25 bp, Homo sapien
catggtgatatgacttgctggctaa

SEQ ID NO: 5020154 - DNA, 25 bp, Homo sapien
tatgccgcacttgcactacacctga

SEQ ID NO: 5020155 - DNA, 25 bp, Homo sapien
ggtgtctcatctgtgtatgccgcac

SEQ ID NO: 5020156 - DNA, 25 bp, Homo sapien
agccatgttgaatatatctgaaagc

SEQ ID NO: 5020157 - DNA, 25 bp, Homo sapien
cattgtcagttcctgttaaagccat

SEQ ID NO: 5020158 - DNA, 25 bp, Homo sapien
agaatcccgcccattgtcagttcct

SEQ ID NO: 5020159 - DNA, 25 bp, Homo sapien
tagctattctcgtactcagaatccc

SEQ ID NO: 5020160 - DNA, 25 bp, Homo sapien
tcagtagaattaagctccaggtgtc

SEQ ID NO: 5020161 - DNA, 25 bp, Homo sapien
aggtgtccagggcttaccagcacac

SEQ ID NO: 5020162 - DNA, 25 bp, Homo sapien
cctcagtagaattaagctccaggtg

SEQ ID NO: 5020163 - DNA, 25 bp, Homo sapien
agtagaattaagctccaggtgtcca

SEQ ID NO: 5020164 - DNA, 25 bp, Homo sapien
gtatttttcatcactgaattcatca

SEQ ID NO: 5020165 - DNA, 25 bp, Homo sapien
tttcatcactgaattcatcagtttg

SEQ ID NO: 5020166 - DNA, 25 bp, Homo sapien
tatttttcatcactgaattcatcag

SEQ ID NO: 5020167 - DNA, 25 bp, Homo sapien
catcactgaattcatcagtttggcc

SEQ ID NO: 5020168 - DNA, 25 bp, Homo sapien
tgactattcataggcgcagtcccat

SEQ ID NO: 5020169 - DNA, 25 bp, Homo sapien
caagtacctagactacagacgcaca

SEQ ID NO: 5020170 - DNA, 25 bp, Homo sapien
gcagtcccattactgctcagcacag

SEQ ID NO: 5020171 - DNA, 25 bp, Homo sapien
ggcaacctgttggtctcctgattcc

SEQ ID NO: 5020172 - DNA, 25 bp, Homo sapien
gaaacaatgagatccagaacctcct

SEQ ID NO: 5020173 - DNA, 25 bp, Homo sapien
tccagctctaacaagtcatgattct

SEQ ID NO: 5020174 - DNA, 25 bp, Homo sapien
taacccataagacgttctttgaaga

SEQ ID NO: 5020175 - DNA, 25 bp, Homo sapien
cgtgtcgactaaaggaaagctgtga

SEQ ID NO: 5020176 - DNA, 25 bp, Homo sapien
gtacggctttcagcaccttctccat

SEQ ID NO: 5020177 - DNA, 25 bp, Homo sapien
cagtacggctttcagcaccttctcc

SEQ ID NO: 5020178 - DNA, 25 bp, Homo sapien
agtacggctttcagcaccttctcca

SEQ ID NO: 5020179 - DNA, 25 bp, Homo sapien
tacccagtgcaagctagtaagttat

SEQ ID NO: 5020180 - DNA, 25 bp, Homo sapien
gaagtctattgcttgtggcatggca

SEQ ID NO: 5020181 - DNA, 25 bp, Homo sapien
gatctaactgctgtcaggatctggg

SEQ ID NO: 5020182 - DNA, 25 bp, Homo sapien
ttagtgtttcatgggtgctggcaga

SEQ ID NO: 5020183 - DNA, 25 bp, Homo sapien
tattttcaggaagtataaagcgagc

SEQ ID NO: 5020184 - DNA, 25 bp, Homo sapien
cgagcagtggcaaagttatcctggg

SEQ ID NO: 5020185 - DNA, 25 bp, Homo sapien
tctgaaccagcttatgaacccatta

SEQ ID NO: 5020186 - DNA, 25 bp, Homo sapien
tgacttggcaaaacaggcataacct

SEQ ID NO: 5020187 - DNA, 25 bp, Homo sapien
cattctgttgcgcagagcaagccac

SEQ ID NO: 5020188 - DNA, 25 bp, Homo sapien
gcaagccacaaggttaagccagatc

SEQ ID NO: 5020189 - DNA, 25 bp, Homo sapien
tcagacatctaggtgcactcaaaag

SEQ ID NO: 5020190 - DNA, 25 bp, Homo sapien
tgatctcaccaacaagctagccaag

SEQ ID NO: 5020191 - DNA, 25 bp, Homo sapien
tatactgtggcacttattatttccg

SEQ ID NO: 5020192 - DNA, 25 bp, Homo sapien
gaagagcttgttatttaaaggtcag

SEQ ID NO: 5020193 - DNA, 25 bp, Homo sapien
taaaggtcagaataatgcccaggac

SEQ ID NO: 5020194 - DNA, 25 bp, Homo sapien
ttccagaatattgaagagcttgtta

SEQ ID NO: 5020195 - DNA, 25 bp, Homo sapien
ctcgtggtgttgaagcttggcttgt

SEQ ID NO: 5020196 - DNA, 25 bp, Homo sapien
ctcggagttgtagaatggcttggct

SEQ ID NO: 5020197 - DNA, 25 bp, Homo sapien
gaggcagcaggaattcgatctcgga

SEQ ID NO: 5020198 - DNA, 25 bp, Homo sapien
aagcttggcttgtgctggcgacgca

SEQ ID NO: 5020199 - DNA, 25 bp, Homo sapien
tgttggcactggcatctcaggcagc

SEQ ID NO: 5020200 - DNA, 25 bp, Homo sapien
gccaagtgatctacatgctgaccag

SEQ ID NO: 5020201 - DNA, 25 bp, Homo sapien
gaaacccagtcttgctagagggcct

SEQ ID NO: 5020202 - DNA, 25 bp, Homo sapien
ttgctctcaagctaatgggccatgc

SEQ ID NO: 5020203 - DNA, 25 bp, Homo sapien
cagtgctgagtttaatgttgaatag

SEQ ID NO: 5020204 - DNA, 25 bp, Homo sapien
gctccgtccaaagccactggtttga

SEQ ID NO: 5020205 - DNA, 25 bp, Homo sapien
tttaagacgttctatctgaagaggt

SEQ ID NO: 5020206 - DNA, 25 bp, Homo sapien
agaggtgttctccactttaagacgt

SEQ ID NO: 5020207 - DNA, 25 bp, Homo sapien
gctctatgacacttgcaaaaatctc

SEQ ID NO: 5020208 - DNA, 25 bp, Homo sapien
gaaatgcttaggactttgtggcttg

SEQ ID NO: 5020209 - DNA, 25 bp, Homo sapien
tcaagttgcatctgtttttgggctg

SEQ ID NO: 5020210 - DNA, 25 bp, Homo sapien
caggccttacaatggagagccagag

SEQ ID NO: 5020211 - DNA, 25 bp, Homo sapien
cacatgttgggcataagaagtcact

SEQ ID NO: 5020212 - DNA, 25 bp, Homo sapien
tgacagctgtcaacctcagagtaac

SEQ ID NO: 5020213 - DNA, 25 bp, Homo sapien
tgggtttaatacagctcacatcact

SEQ ID NO: 5020214 - DNA, 25 bp, Homo sapien
gaattactgaccacccatagatgtc

SEQ ID NO: 5020215 - DNA, 25 bp, Homo sapien
tggtggcacagctaccaaatagtgg

SEQ ID NO: 5020216 - DNA, 25 bp, Homo sapien
tactgagtaagaaaccctacatttg

SEQ ID NO: 5020217 - DNA, 25 bp, Homo sapien
tatttcaactatgtggtggtggcac

SEQ ID NO: 5020218 - DNA, 25 bp, Homo sapien
taaagcaatactgagtaagaaaccc

SEQ ID NO: 5020219 - DNA, 25 bp, Homo sapien
tcttagagcccacagtacagtagtc

SEQ ID NO: 5020220 - DNA, 25 bp, Homo sapien
tacagtagtcttacaggctcatgaa

SEQ ID NO: 5020221 - DNA, 25 bp, Homo sapien
catagcccaagaccaagtaactgca

SEQ ID NO: 5020222 - DNA, 25 bp, Homo sapien
ttcttatgctagtaagtgccctgca

SEQ ID NO: 5020223 - DNA, 25 bp, Homo sapien
catgtgtcatagttcaggaacacaa

SEQ ID NO: 5020224 - DNA, 25 bp, Homo sapien
tctaggtaattcaacctgaagaaat

SEQ ID NO: 5020225 - DNA, 25 bp, Homo sapien
acaaacttctaggtaattcaacctg

SEQ ID NO: 5020226 - DNA, 25 bp, Homo sapien
cccacatattcatgtgtcatagttc

SEQ ID NO: 5020227 - DNA, 25 bp, Homo sapien
tatggtgcgctaatcagtgaaggcc

SEQ ID NO: 5020228 - DNA, 25 bp, Homo sapien
taggtattaccgagtcccagaagag

SEQ ID NO: 5020229 - DNA, 25 bp, Homo sapien
tcagagtgctaatgggaacaatggc

SEQ ID NO: 5020230 - DNA, 25 bp, Homo sapien
gaaagacagctagtcactcgtggac

SEQ ID NO: 5020231 - DNA, 25 bp, Homo sapien
gaagcagacagctctacaatagcag

SEQ ID NO: 5020232 - DNA, 25 bp, Homo sapien
tgacagaacaactagatagaaggat

SEQ ID NO: 5020233 - DNA, 25 bp, Homo sapien
tgtagatctaaggacacacaagttg

SEQ ID NO: 5020234 - DNA, 25 bp, Homo sapien
acatacagcaaccaggagaacaggg

SEQ ID NO: 5020235 - DNA, 25 bp, Homo sapien
ctagaaccagacaaggatgcccgct

SEQ ID NO: 5020236 - DNA, 25 bp, Homo sapien
tactgaacatggaaaacgtgaaagc

SEQ ID NO: 5020237 - DNA, 25 bp, Homo sapien
tcaacccaacaatggccaaaaagga

SEQ ID NO: 5020238 - DNA, 25 bp, Homo sapien
gatgtgacataccacactgacagaa

SEQ ID NO: 5020239 - DNA, 25 bp, Homo sapien
cactacagcactacggcctgggtga

SEQ ID NO: 5020240 - DNA, 25 bp, Homo sapien
aaattcgacatcaaaatttctgtgc

SEQ ID NO: 5020241 - DNA, 25 bp, Homo sapien
tatatacagaacaactcaaccaata

SEQ ID NO: 5020242 - DNA, 25 bp, Homo sapien
agcacagcccaggtaatatggtgaa

SEQ ID NO: 5020243 - DNA, 25 bp, Homo sapien
taaacattgtgagggacagtcacct

SEQ ID NO: 5020244 - DNA, 25 bp, Homo sapien
acacttatgttagcctacagctgaa

SEQ ID NO: 5020245 - DNA, 25 bp, Homo sapien
ctcatgtggacaaagatcaaaattc

SEQ ID NO: 5020246 - DNA, 25 bp, Homo sapien
gagtatctcacacaacactacagag

SEQ ID NO: 5020247 - DNA, 25 bp, Homo sapien
ccttctttctttgatcagccacacg

SEQ ID NO: 5020248 - DNA, 25 bp, Homo sapien
tctttctttgatcagccacacgaaa

SEQ ID NO: 5020249 - DNA, 25 bp, Homo sapien
tcatgacatcgtagtttctgtagaa

SEQ ID NO: 5020250 - DNA, 25 bp, Homo sapien
tcaaaatctttcatgacatcgtagt

SEQ ID NO: 5020251 - DNA, 25 bp, Homo sapien
cacgcatccgaggttttggcaaaac

SEQ ID NO: 5020252 - DNA, 25 bp, Homo sapien
atgatttcgcagacgcctggccaga

SEQ ID NO: 5020253 - DNA, 25 bp, Homo sapien
ccccagggatagcacgaatgctaca

SEQ ID NO: 5020254 - DNA, 25 bp, Homo sapien
tagcacgaatgctacagccatatga

SEQ ID NO: 5020255 - DNA, 25 bp, Homo sapien
ggtagttactgtccttgatacgtat

SEQ ID NO: 5020256 - DNA, 25 bp, Homo sapien
gtagttactgtccttgatacgtatg

SEQ ID NO: 5020257 - DNA, 25 bp, Homo sapien
tgctggccttcagctaacgcggccg

SEQ ID NO: 5020258 - DNA, 25 bp, Homo sapien
aaacttttgcgtccctgctggcctt

SEQ ID NO: 5020259 - DNA, 25 bp, Homo sapien
cctaaaaacttttgcgtccctgctg

SEQ ID NO: 5020260 - DNA, 25 bp, Homo sapien
ctggccttcagctaacgcggccggg

SEQ ID NO: 5020261 - DNA, 25 bp, Homo sapien
gcttcggtggggccgtcgcaaccca

SEQ ID NO: 5020262 - DNA, 25 bp, Homo sapien
caatggctgtgaaaaagcgcagcgg

SEQ ID NO: 5020263 - DNA, 25 bp, Homo sapien
ccccgggccagctcactccgaagcc

SEQ ID NO: 5020264 - DNA, 25 bp, Homo sapien
aaagcgcagcgggtaccagccccgg

SEQ ID NO: 5020265 - DNA, 25 bp, Homo sapien
ggcggagacacacagtcacgactaa

SEQ ID NO: 5020266 - DNA, 25 bp, Homo sapien
gactaaatccgaggcagagagaaag

SEQ ID NO: 5020267 - DNA, 25 bp, Homo sapien
tgcaccacggcggagacacacagtc

SEQ ID NO: 5020268 - DNA, 25 bp, Homo sapien
gccgttgtgacaacccgcagtgtcg

SEQ ID NO: 5020269 - DNA, 25 bp, Homo sapien
gaataagagtgcacagcgagaacgc

SEQ ID NO: 5020270 - DNA, 25 bp, Homo sapien
gaaaaacgaaccgtgctgtagccgc

SEQ ID NO: 5020271 - DNA, 25 bp, Homo sapien
gttcaaaagacctctagtgcgccca

SEQ ID NO: 5020272 - DNA, 25 bp, Homo sapien
tgaccttgcaaaacgggcttgacct

SEQ ID NO: 5020273 - DNA, 25 bp, Homo sapien
ggagaggagctaaacacatgtgctt

SEQ ID NO: 5020274 - DNA, 25 bp, Homo sapien
gtctattgccaacagattctctcag

SEQ ID NO: 5020275 - DNA, 25 bp, Homo sapien
ctcaagtactcttttcagctggtaa

SEQ ID NO: 5020276 - DNA, 25 bp, Homo sapien
gcaggctgccatctgggatcatttc

SEQ ID NO: 5020277 - DNA, 25 bp, Homo sapien
taacccgtgatgacacgtcacattt

SEQ ID NO: 5020278 - DNA, 25 bp, Homo sapien
tataagtctagcatctaacccgtga

SEQ ID NO: 5020279 - DNA, 25 bp, Homo sapien
taatggctgtactacccaagagtga

SEQ ID NO: 5020280 - DNA, 25 bp, Homo sapien
gtgaatatgctgtaatgaacgtggg

SEQ ID NO: 5020281 - DNA, 25 bp, Homo sapien
tcctttattagtatagtggtttaca

SEQ ID NO: 5020282 - DNA, 25 bp, Homo sapien
aatttgctttaaggttcttggatgt

SEQ ID NO: 5020283 - DNA, 25 bp, Homo sapien
cctttattagtatagtggtttacat

SEQ ID NO: 5020284 - DNA, 25 bp, Homo sapien
ccaatttgctttaaggttcttggat

SEQ ID NO: 5020285 - DNA, 25 bp, Homo sapien
tagttaatgcttgactgatttacct

SEQ ID NO: 5020286 - DNA, 25 bp, Homo sapien
gttaatgcttgactgatttaccttc

SEQ ID NO: 5020287 - DNA, 25 bp, Homo sapien
agttaatgcttgactgatttacctt

SEQ ID NO: 5020288 - DNA, 25 bp, Homo sapien
gcactgaactttcttagatgagcag

SEQ ID NO: 5020289 - DNA, 25 bp, Homo sapien
catttttatgaatagcattgcactg

SEQ ID NO: 5020290 - DNA, 25 bp, Homo sapien
tggaaagccaaataacaactgtatt

SEQ ID NO: 5020291 - DNA, 25 bp, Homo sapien
atctgagagacatgacaaacacata

SEQ ID NO: 5020292 - DNA, 25 bp, Homo sapien
gtcatgtgtacagaatagctataat

SEQ ID NO: 5020293 - DNA, 25 bp, Homo sapien
cttatagtcttgtatgtcatgtgta

SEQ ID NO: 5020294 - DNA, 25 bp, Homo sapien
catgtgtacagaatagctataattt

SEQ ID NO: 5020295 - DNA, 25 bp, Homo sapien
taaacagttcttatagtcttgtatg

SEQ ID NO: 5020296 - DNA, 25 bp, Homo sapien
gatgttaggcttgctctgatacaga

SEQ ID NO: 5020297 - DNA, 25 bp, Homo sapien
aactttatttagatgttaggcttgc

SEQ ID NO: 5020298 - DNA, 25 bp, Homo sapien
taggcttgctctgatacagaccttc

SEQ ID NO: 5020299 - DNA, 25 bp, Homo sapien
tgttaggcttgctctgatacagacc

SEQ ID NO: 5020300 - DNA, 25 bp, Homo sapien
tcatgtcagcagaatctggtttaaa

SEQ ID NO: 5020301 - DNA, 25 bp, Homo sapien
catgtcagcagaatctggtttaaag

SEQ ID NO: 5020302 - DNA, 25 bp, Homo sapien
tgtcagcagaatctggtttaaagaa

SEQ ID NO: 5020303 - DNA, 25 bp, Homo sapien
tcagcagaatctggtttaaagaatt

SEQ ID NO: 5020304 - DNA, 25 bp, Homo sapien
caaaaaacttatatagaattgttga

SEQ ID NO: 5020305 - DNA, 25 bp, Homo sapien
aaaacttatatagaattgttgatat

SEQ ID NO: 5020306 - DNA, 25 bp, Homo sapien
cttatatagaattgttgatatggtt

SEQ ID NO: 5020307 - DNA, 25 bp, Homo sapien
aacttatatagaattgttgatatgg

SEQ ID NO: 5020308 - DNA, 25 bp, Homo sapien
cctatcagcagcaggatgtaaacat

SEQ ID NO: 5020309 - DNA, 25 bp, Homo sapien
gcagcaggatgtaaacattcacaag

SEQ ID NO: 5020310 - DNA, 25 bp, Homo sapien
ttgaacctatcagcagcaggatgta

SEQ ID NO: 5020311 - DNA, 25 bp, Homo sapien
tcagcagcaggatgtaaacattcac

SEQ ID NO: 5020312 - DNA, 25 bp, Homo sapien
ttgaagagctagccttaaaatttgt

SEQ ID NO: 5020313 - DNA, 25 bp, Homo sapien
caaagacatagttgaagagctagcc

SEQ ID NO: 5020314 - DNA, 25 bp, Homo sapien
aagagctagccttaaaatttgtgag

SEQ ID NO: 5020315 - DNA, 25 bp, Homo sapien
gaagagctagccttaaaatttgtga

SEQ ID NO: 5020316 - DNA, 25 bp, Homo sapien
ttctctcctgttctaaggcttctat

SEQ ID NO: 5020317 - DNA, 25 bp, Homo sapien
tgtcggccatatggttggaggccta

SEQ ID NO: 5020318 - DNA, 25 bp, Homo sapien
ctgtcggccatatggttggaggcct

SEQ ID NO: 5020319 - DNA, 25 bp, Homo sapien
ccatatggttggaggcctaggaagg

SEQ ID NO: 5020320 - DNA, 25 bp, Homo sapien
cggccatatggttggaggcctagga

SEQ ID NO: 5020321 - DNA, 25 bp, Homo sapien
gaagtatttgcatattgtttgattc

SEQ ID NO: 5020322 - DNA, 25 bp, Homo sapien
gagtaaagcagttttgatagcaggc

SEQ ID NO: 5020323 - DNA, 25 bp, Homo sapien
aagcagttttgatagcaggcactga

SEQ ID NO: 5020324 - DNA, 25 bp, Homo sapien
ggcactgaagtatttgcatattgtt

SEQ ID NO: 5020325 - DNA, 25 bp, Homo sapien
tctctaaaacactcataatattttc

SEQ ID NO: 5020326 - DNA, 25 bp, Homo sapien
tctctctaaaacactcataatattt

SEQ ID NO: 5020327 - DNA, 25 bp, Homo sapien
ctttccagatttttcgtcttctagg

SEQ ID NO: 5020328 - DNA, 25 bp, Homo sapien
cgtcttctaggactgccaatttttt

SEQ ID NO: 5020329 - DNA, 25 bp, Homo sapien
ctgaggccagaatttaaacagaacc

SEQ ID NO: 5020330 - DNA, 25 bp, Homo sapien
tgaggccagaatttaaacagaaccc

SEQ ID NO: 5020331 - DNA, 25 bp, Homo sapien
catatggtcctaactccttccggtg

SEQ ID NO: 5020332 - DNA, 25 bp, Homo sapien
tggaatgtcaatttgtaaagctggt

SEQ ID NO: 5020333 - DNA, 25 bp, Homo sapien
tccggtgttcaataatcttctgggc

SEQ ID NO: 5020334 - DNA, 25 bp, Homo sapien
tggaatactggaattaataaagcag

SEQ ID NO: 5020335 - DNA, 25 bp, Homo sapien
taatgctttgcgaaaagcaatgatt

SEQ ID NO: 5020336 - DNA, 25 bp, Homo sapien
cacaaaacgttgaaattgtcttgaa

SEQ ID NO: 5020337 - DNA, 25 bp, Homo sapien
ttgaaattgtcttgaagtaactgga

SEQ ID NO: 5020338 - DNA, 25 bp, Homo sapien
tgaagtaactggattcaataatgct

SEQ ID NO: 5020339 - DNA, 25 bp, Homo sapien
tctgtagtaagagctcttctgctat

SEQ ID NO: 5020340 - DNA, 25 bp, Homo sapien
gccttctgtagtaagagctcttctg

SEQ ID NO: 5020341 - DNA, 25 bp, Homo sapien
tttcagccttctgtagtaagagctc

SEQ ID NO: 5020342 - DNA, 25 bp, Homo sapien
gtagtaagagctcttctgctatgtc

SEQ ID NO: 5020343 - DNA, 25 bp, Homo sapien
ctttatcttctgacgtgctgcaaac

SEQ ID NO: 5020344 - DNA, 25 bp, Homo sapien
tcttctgacgtgctgcaaactgttc

SEQ ID NO: 5020345 - DNA, 25 bp, Homo sapien
ttatcttctgacgtgctgcaaactg

SEQ ID NO: 5020346 - DNA, 25 bp, Homo sapien
tatcttctgacgtgctgcaaactgt

SEQ ID NO: 5020347 - DNA, 25 bp, Homo sapien
tagaacaggtgcatcaagctgctca

SEQ ID NO: 5020348 - DNA, 25 bp, Homo sapien
caagctgctcatgaagaatcttccc

SEQ ID NO: 5020349 - DNA, 25 bp, Homo sapien
gatttcaactagaacaggtgcatca

SEQ ID NO: 5020350 - DNA, 25 bp, Homo sapien
gcttctggatttcaactagaacagg

SEQ ID NO: 5020351 - DNA, 25 bp, Homo sapien
ttctccggaactgctcaatgtctgt

SEQ ID NO: 5020352 - DNA, 25 bp, Homo sapien
tgccttcctttgatttcgatctctg

SEQ ID NO: 5020353 - DNA, 25 bp, Homo sapien
tacagagaagctggactgttgggtc

SEQ ID NO: 5020354 - DNA, 25 bp, Homo sapien
gtctgtccagcacataagatccatg

SEQ ID NO: 5020355 - DNA, 25 bp, Homo sapien
taagcagatcactaaacttaaaatg

SEQ ID NO: 5020356 - DNA, 25 bp, Homo sapien
gaaatgttcaaactccagtttgttg

SEQ ID NO: 5020357 - DNA, 25 bp, Homo sapien
tctcaagaaactgacggaaatgttc

SEQ ID NO: 5020358 - DNA, 25 bp, Homo sapien
gtttgttgttaagcagatcactaaa

SEQ ID NO: 5020359 - DNA, 25 bp, Homo sapien
gagtgataaaatgccagttccaatt

SEQ ID NO: 5020360 - DNA, 25 bp, Homo sapien
cgtttagagacgttagagagtgata

SEQ ID NO: 5020361 - DNA, 25 bp, Homo sapien
ccaatattctgttcgtttagagacg

SEQ ID NO: 5020362 - DNA, 25 bp, Homo sapien
tattctgcaggaacattatcccaat

SEQ ID NO: 5020363 - DNA, 25 bp, Homo sapien
tctgaagtatgtggagtctaactgt

SEQ ID NO: 5020364 - DNA, 25 bp, Homo sapien
aagtatgtggagtctaactgtcgag

SEQ ID NO: 5020365 - DNA, 25 bp, Homo sapien
tatgtggagtctaactgtcgagttt

SEQ ID NO: 5020366 - DNA, 25 bp, Homo sapien
tagctttctgaagtatgtggagtct

SEQ ID NO: 5020367 - DNA, 25 bp, Homo sapien
taagcaatttggtccgattttacca

SEQ ID NO: 5020368 - DNA, 25 bp, Homo sapien
aggaggagaaggatatattcctctg

SEQ ID NO: 5020369 - DNA, 25 bp, Homo sapien
atctttgtccatggctcaagaagga

SEQ ID NO: 5020370 - DNA, 25 bp, Homo sapien
ctctgctgtgtcaaaaaggtcttca

SEQ ID NO: 5020371 - DNA, 25 bp, Homo sapien
cagaaggagcaacgtatgtggcaaa

SEQ ID NO: 5020372 - DNA, 25 bp, Homo sapien
tcctgttggagtccaatgtcaagag

SEQ ID NO: 5020373 - DNA, 25 bp, Homo sapien
gagcaacgtatgtggcaaaaagata

SEQ ID NO: 5020374 - DNA, 25 bp, Homo sapien
gttggagtccaatgtcaagagtggc

SEQ ID NO: 5020375 - DNA, 25 bp, Homo sapien
tctgaaggttattctcgtcctctaa

SEQ ID NO: 5020376 - DNA, 25 bp, Homo sapien
gaaggttattctcgtcctctaaata

SEQ ID NO: 5020377 - DNA, 25 bp, Homo sapien
cttcagcacaatctgaaggttattc

SEQ ID NO: 5020378 - DNA, 25 bp, Homo sapien
cacaatctgaaggttattctcgtcc

SEQ ID NO: 5020379 - DNA, 25 bp, Homo sapien
tcctccactccctgagtgtctgtct

SEQ ID NO: 5020380 - DNA, 25 bp, Homo sapien
gtggtcttgaaacattctttcctcc

SEQ ID NO: 5020381 - DNA, 25 bp, Homo sapien
ctatttggcttcagggtggtcttga

SEQ ID NO: 5020382 - DNA, 25 bp, Homo sapien
ttcctccactccctgagtgtctgtc

SEQ ID NO: 5020383 - DNA, 25 bp, Homo sapien
tgtacttagtgcttcacattgaacc

SEQ ID NO: 5020384 - DNA, 25 bp, Homo sapien
tctttatcagaagaacaagtagttg

SEQ ID NO: 5020385 - DNA, 25 bp, Homo sapien
tcaaatacagtaatcccatggcaac

SEQ ID NO: 5020386 - DNA, 25 bp, Homo sapien
tgcctttttgcctgcgatcccagat

SEQ ID NO: 5020387 - DNA, 25 bp, Homo sapien
tggtagaaaagctgatgataagcct

SEQ ID NO: 5020388 - DNA, 25 bp, Homo sapien
ggtagaaaagctgatgataagcctg

SEQ ID NO: 5020389 - DNA, 25 bp, Homo sapien
ggctgaagtgtttcttggtagaaaa

SEQ ID NO: 5020390 - DNA, 25 bp, Homo sapien
gtagaaaagctgatgataagcctgc

SEQ ID NO: 5020391 - DNA, 25 bp, Homo sapien
tgctcgcagaatttagtaaagaaga

SEQ ID NO: 5020392 - DNA, 25 bp, Homo sapien
caacaaattttccatgtcagatcct

SEQ ID NO: 5020393 - DNA, 25 bp, Homo sapien
ttctacatacaaagattgcaacaaa

SEQ ID NO: 5020394 - DNA, 25 bp, Homo sapien
cctgaatgctcgcagaatttagtaa

SEQ ID NO: 5020395 - DNA, 25 bp, Homo sapien
cctaggttcttctgtataagcgtat

SEQ ID NO: 5020396 - DNA, 25 bp, Homo sapien
tgtataagcgtatcttctatccagc

SEQ ID NO: 5020397 - DNA, 25 bp, Homo sapien
gctggggcttgagacattcagaaat

SEQ ID NO: 5020398 - DNA, 25 bp, Homo sapien
ttctatccagctggggcttgagaca

SEQ ID NO: 5020399 - DNA, 25 bp, Homo sapien
ctaaattataaggatgagaactaaa

SEQ ID NO: 5020400 - DNA, 25 bp, Homo sapien
aaattataaggatgagaactaaaat

SEQ ID NO: 5020401 - DNA, 25 bp, Homo sapien
attataaggatgagaactaaaatta

SEQ ID NO: 5020402 - DNA, 25 bp, Homo sapien
ttataaggatgagaactaaaattat

SEQ ID NO: 5020403 - DNA, 25 bp, Homo sapien
cttgcaggttcttctcacacaaaat

SEQ ID NO: 5020404 - DNA, 25 bp, Homo sapien
ttcttctcacacaaaatgtatgtac

SEQ ID NO: 5020405 - DNA, 25 bp, Homo sapien
gttcttctcacacaaaatgtatgta

SEQ ID NO: 5020406 - DNA, 25 bp, Homo sapien
gcaggttcttctcacacaaaatgta

SEQ ID NO: 5020407 - DNA, 25 bp, Homo sapien
agccaccgtgtctggtcagtaacaa

SEQ ID NO: 5020408 - DNA, 25 bp, Homo sapien
tgccctggtctccaaaatgctgcga

SEQ ID NO: 5020409 - DNA, 25 bp, Homo sapien
gacaatattcttgagagtcttataa

SEQ ID NO: 5020410 - DNA, 25 bp, Homo sapien
gagacatgatctcagtatattacct

SEQ ID NO: 5020411 - DNA, 25 bp, Homo sapien
gaacctggatacaaaagctcccgct

SEQ ID NO: 5020412 - DNA, 25 bp, Homo sapien
agctcccgcttccaaggcttttgag

SEQ ID NO: 5020413 - DNA, 25 bp, Homo sapien
gaggttgtgataagctgaattcttc

SEQ ID NO: 5020414 - DNA, 25 bp, Homo sapien
caaggcttttgagttgctgttttta

SEQ ID NO: 5020415 - DNA, 25 bp, Homo sapien
caaagatacccttggtccacataag

SEQ ID NO: 5020416 - DNA, 25 bp, Homo sapien
tgcctcctacaatgcttcccaataa

SEQ ID NO: 5020417 - DNA, 25 bp, Homo sapien
tacttccaccattgtgaaagaagac

SEQ ID NO: 5020418 - DNA, 25 bp, Homo sapien
tcctacttttatgcaagctgcaaag

SEQ ID NO: 5020419 - DNA, 25 bp, Homo sapien
tggatctcaggtatctgtggaatgc

SEQ ID NO: 5020420 - DNA, 25 bp, Homo sapien
cttggttttgcttgacggaggtgcc

SEQ ID NO: 5020421 - DNA, 25 bp, Homo sapien
tgtggaaaagggtcaatatccttcc

SEQ ID NO: 5020422 - DNA, 25 bp, Homo sapien
gaggtgccagaatttcagttcagca

SEQ ID NO: 5020423 - DNA, 25 bp, Homo sapien
gaatgagtaacacagaatcttggtg

SEQ ID NO: 5020424 - DNA, 25 bp, Homo sapien
atgagtaacacagaatcttggtgcc

SEQ ID NO: 5020425 - DNA, 25 bp, Homo sapien
tgaatgagtaacacagaatcttggt

SEQ ID NO: 5020426 - DNA, 25 bp, Homo sapien
ctgaatgagtaacacagaatcttgg

SEQ ID NO: 5020427 - DNA, 25 bp, Homo sapien
cccagtattttgggaagccatggtg

SEQ ID NO: 5020428 - DNA, 25 bp, Homo sapien
agcctggacaacataccaagcttgt

SEQ ID NO: 5020429 - DNA, 25 bp, Homo sapien
agtattttgggaagccatggtggga

SEQ ID NO: 5020430 - DNA, 25 bp, Homo sapien
ggattgcttgaggccaggagttcaa

SEQ ID NO: 5020431 - DNA, 25 bp, Homo sapien
ttcttaaatgctcttcattccactg

SEQ ID NO: 5020432 - DNA, 25 bp, Homo sapien
aaacttcagactgaatatttcttaa

SEQ ID NO: 5020433 - DNA, 25 bp, Homo sapien
cattccactgtgatccatctaacag

SEQ ID NO: 5020434 - DNA, 25 bp, Homo sapien
gtaatctccattgctcactagatag

SEQ ID NO: 5020435 - DNA, 25 bp, Homo sapien
taacctctcaatatccatccatagc

SEQ ID NO: 5020436 - DNA, 25 bp, Homo sapien
taagaacttttaacctctcaatatc

SEQ ID NO: 5020437 - DNA, 25 bp, Homo sapien
tatccatccatagccaccaatatct

SEQ ID NO: 5020438 - DNA, 25 bp, Homo sapien
tagccaccaatatctctctcccaat

SEQ ID NO: 5020439 - DNA, 25 bp, Homo sapien
tgctctctggtccagcgctctcatt

SEQ ID NO: 5020440 - DNA, 25 bp, Homo sapien
cctttctattgccaatgtcataagt

SEQ ID NO: 5020441 - DNA, 25 bp, Homo sapien
gccaatgtcataagtcctatgagaa

SEQ ID NO: 5020442 - DNA, 25 bp, Homo sapien
tattgccaatgtcataagtcctatg

SEQ ID NO: 5020443 - DNA, 25 bp, Homo sapien
taaacttgtttgttctatctcttct

SEQ ID NO: 5020444 - DNA, 25 bp, Homo sapien
tgtttgttctatctcttctgacctc

SEQ ID NO: 5020445 - DNA, 25 bp, Homo sapien
cttaaacttgtttgttctatctctt

SEQ ID NO: 5020446 - DNA, 25 bp, Homo sapien
tttgttctatctcttctgacctctc

SEQ ID NO: 5020447 - DNA, 25 bp, Homo sapien
aattcttcacatgttgagaaatgca

SEQ ID NO: 5020448 - DNA, 25 bp, Homo sapien
gaattgctcctctcaaaataaagta

SEQ ID NO: 5020449 - DNA, 25 bp, Homo sapien
tcttgccatgaatagactcaaaaca

SEQ ID NO: 5020450 - DNA, 25 bp, Homo sapien
aatgcattgtcaggctttcatcaac

SEQ ID NO: 5020451 - DNA, 25 bp, Homo sapien
ctagggtgaactccatcatcaaaga

SEQ ID NO: 5020452 - DNA, 25 bp, Homo sapien
tcaatttgttggttttagatgggtc

SEQ ID NO: 5020453 - DNA, 25 bp, Homo sapien
gggtgaactccatcatcaaagataa

SEQ ID NO: 5020454 - DNA, 25 bp, Homo sapien
cttgtagagatacagacacctcttc

SEQ ID NO: 5020455 - DNA, 25 bp, Homo sapien
taagtttgttgtagggtacacaaca

SEQ ID NO: 5020456 - DNA, 25 bp, Homo sapien
tgtagggtacacaacagggtaacga

SEQ ID NO: 5020457 - DNA, 25 bp, Homo sapien
ttgttgtagggtacacaacagggta

SEQ ID NO: 5020458 - DNA, 25 bp, Homo sapien
tgaaatagctggtgatttaagtttg

SEQ ID NO: 5020459 - DNA, 25 bp, Homo sapien
ttttgctaatgcaaaccaatctttt

SEQ ID NO: 5020460 - DNA, 25 bp, Homo sapien
tttgctaatgcaaaccaatcttttg

SEQ ID NO: 5020461 - DNA, 25 bp, Homo sapien
gtgatacatagaactttttcataat

SEQ ID NO: 5020462 - DNA, 25 bp, Homo sapien
agtgatacatagaactttttcataa

SEQ ID NO: 5020463 - DNA, 25 bp, Homo sapien
ctcaccaagtgatacatagaacttt

SEQ ID NO: 5020464 - DNA, 25 bp, Homo sapien
accaagtgatacatagaactttttc

SEQ ID NO: 5020465 - DNA, 25 bp, Homo sapien
ctgtgaaattcatgccggacttgct

SEQ ID NO: 5020466 - DNA, 25 bp, Homo sapien
agaaaaatttgatcctactgtgaaa

SEQ ID NO: 5020467 - DNA, 25 bp, Homo sapien
tggttttttcacgatccagggagaa

SEQ ID NO: 5020468 - DNA, 25 bp, Homo sapien
atcttacttgtgagaccaatttggc

SEQ ID NO: 5020469 - DNA, 25 bp, Homo sapien
tcaaagtaacaatcactttccagaa

SEQ ID NO: 5020470 - DNA, 25 bp, Homo sapien
tgtattcaaagtaacaatcactttc

SEQ ID NO: 5020471 - DNA, 25 bp, Homo sapien
taataccttcttcacgactgagaca

SEQ ID NO: 5020472 - DNA, 25 bp, Homo sapien
ttttgatccacttaataccttcttc

SEQ ID NO: 5020473 - DNA, 25 bp, Homo sapien
cattcatttgaacaggtttaacctc

SEQ ID NO: 5020474 - DNA, 25 bp, Homo sapien
taaatgggatttcgaggttgctggt

SEQ ID NO: 5020475 - DNA, 25 bp, Homo sapien
tttccttacaacatcataaatggga

SEQ ID NO: 5020476 - DNA, 25 bp, Homo sapien
gaaattgtggagcatcattagctac

SEQ ID NO: 5020477 - DNA, 25 bp, Homo sapien
catctcagagatgacctaagggccc

SEQ ID NO: 5020478 - DNA, 25 bp, Homo sapien
caatccggttataggaccttgggca

SEQ ID NO: 5020479 - DNA, 25 bp, Homo sapien
tatatctacactctagggcttaggc

SEQ ID NO: 5020480 - DNA, 25 bp, Homo sapien
gatcttacaatgtgtcccaagggta

SEQ ID NO: 5020481 - DNA, 25 bp, Homo sapien
gatacagaaaagacctgtccttgcc

SEQ ID NO: 5020482 - DNA, 25 bp, Homo sapien
gaacacaacggtctaagtgcagtct

SEQ ID NO: 5020483 - DNA, 25 bp, Homo sapien
tccagagtgatcattggctaagact

SEQ ID NO: 5020484 - DNA, 25 bp, Homo sapien
tttctctcataaatgctggccgtgg

SEQ ID NO: 5020485 - DNA, 25 bp, Homo sapien
ggcaattttgtcatgctactgggtc

SEQ ID NO: 5020486 - DNA, 25 bp, Homo sapien
gatgtaatcacaaatcccaagacac

SEQ ID NO: 5020487 - DNA, 25 bp, Homo sapien
ggtggcaggattatcacatttttgg

SEQ ID NO: 5020488 - DNA, 25 bp, Homo sapien
cccacaggaaagactatgtaatctg

SEQ ID NO: 5020489 - DNA, 25 bp, Homo sapien
taatttccataatgggtccagagac

SEQ ID NO: 5020490 - DNA, 25 bp, Homo sapien
ctaatttccataatgggtccagaga

SEQ ID NO: 5020491 - DNA, 25 bp, Homo sapien
tggtgtgtcaatctaatttccataa

SEQ ID NO: 5020492 - DNA, 25 bp, Homo sapien
caggagctttggtgtgtcaatctaa

SEQ ID NO: 5020493 - DNA, 25 bp, Homo sapien
gaattcattaaagtagtctacaagg

SEQ ID NO: 5020494 - DNA, 25 bp, Homo sapien
cattaaagtagtctacaaggaaatc

SEQ ID NO: 5020495 - DNA, 25 bp, Homo sapien
ttcattaaagtagtctacaaggaaa

SEQ ID NO: 5020496 - DNA, 25 bp, Homo sapien
aggaattcattaaagtagtctacaa

SEQ ID NO: 5020497 - DNA, 25 bp, Homo sapien
aaattcttcttctgtaatagttggt

SEQ ID NO: 5020498 - DNA, 25 bp, Homo sapien
ttcttcttctgtaatagttggtggc

SEQ ID NO: 5020499 - DNA, 25 bp, Homo sapien
attcttcttctgtaatagttggtgg

SEQ ID NO: 5020500 - DNA, 25 bp, Homo sapien
tcttcttctgtaatagttggtggct

SEQ ID NO: 5020501 - DNA, 25 bp, Homo sapien
gcacctagccctacgttatacacag

SEQ ID NO: 5020502 - DNA, 25 bp, Homo sapien
caaacgtagcacatttctggccctc

SEQ ID NO: 5020503 - DNA, 25 bp, Homo sapien
acatggcttgcattttaagttggaa

SEQ ID NO: 5020504 - DNA, 25 bp, Homo sapien
taagttggaattcaaggtggaagtg

SEQ ID NO: 5020505 - DNA, 25 bp, Homo sapien
ccgcggtgagcctcttctcgggcat

SEQ ID NO: 5020506 - DNA, 25 bp, Homo sapien
cgcgcgggccgtcagggccctagcg

SEQ ID NO: 5020507 - DNA, 25 bp, Homo sapien
gtcagggccctagcgcgcgggtcca

SEQ ID NO: 5020508 - DNA, 25 bp, Homo sapien
ccgctgcccgcgcctggagcccgcg

SEQ ID NO: 5020509 - DNA, 25 bp, Homo sapien
tggagcccgcgcgggccgtcagggc

SEQ ID NO: 5020510 - DNA, 25 bp, Homo sapien
cctgtagcagacactagagcactgg

SEQ ID NO: 5020511 - DNA, 25 bp, Homo sapien
gacatatagtttactgcctggccaa

SEQ ID NO: 5020512 - DNA, 25 bp, Homo sapien
gggttagcagcaccaaagttgggct

SEQ ID NO: 5020513 - DNA, 25 bp, Homo sapien
taatagtcgtactgcctcatagggt

SEQ ID NO: 5020514 - DNA, 25 bp, Homo sapien
ttaggacctgaactgaacactacct

SEQ ID NO: 5020515 - DNA, 25 bp, Homo sapien
aggacctgaactgaacactaccttt

SEQ ID NO: 5020516 - DNA, 25 bp, Homo sapien
taggacctgaactgaacactacctt

SEQ ID NO: 5020517 - DNA, 25 bp, Homo sapien
cattgctccttctactcctctggct

SEQ ID NO: 5020518 - DNA, 25 bp, Homo sapien
ctataaggccatctgtctagagttc

SEQ ID NO: 5020519 - DNA, 25 bp, Homo sapien
aaaatgattgaagaacatgtcaaga

SEQ ID NO: 5020520 - DNA, 25 bp, Homo sapien
tataaggccatctgtctagagttca

SEQ ID NO: 5020521 - DNA, 25 bp, Homo sapien
tgtcaagagtgatgaaatgcacaaa

SEQ ID NO: 5020522 - DNA, 25 bp, Homo sapien
gcatgggggagttctatatttagtc

SEQ ID NO: 5020523 - DNA, 25 bp, Homo sapien
aatgggaagatttgcatgtattcaa

SEQ ID NO: 5020524 - DNA, 25 bp, Homo sapien
aacatacaatgacatcgattataat

SEQ ID NO: 5020525 - DNA, 25 bp, Homo sapien
caatgacatcgattataatatatac

SEQ ID NO: 5020526 - DNA, 25 bp, Homo sapien
cttatatggctggtacttagcaggg

SEQ ID NO: 5020527 - DNA, 25 bp, Homo sapien
ttaaattccgcttactctgggcact

SEQ ID NO: 5020528 - DNA, 25 bp, Homo sapien
ttcagacccatgataagcacacaga

SEQ ID NO: 5020529 - DNA, 25 bp, Homo sapien
tgttcggctacacagtccccttttc

SEQ ID NO: 5020530 - DNA, 25 bp, Homo sapien
tctccccagggagataatgttgacc

SEQ ID NO: 5020531 - DNA, 25 bp, Homo sapien
tttaaaagctggagccgagtggcag

SEQ ID NO: 5020532 - DNA, 25 bp, Homo sapien
ggcagcatcctcgacatttaataca

SEQ ID NO: 5020533 - DNA, 25 bp, Homo sapien
tgcctgcacagatcttaaagctgag

SEQ ID NO: 5020534 - DNA, 25 bp, Homo sapien
gaagcagccatgagctctgaacagg

SEQ ID NO: 5020535 - DNA, 25 bp, Homo sapien
gagttacatggagggttgccagcac

SEQ ID NO: 5020536 - DNA, 25 bp, Homo sapien
cctgtcaatctatatctgggtgttc

SEQ ID NO: 5020537 - DNA, 25 bp, Homo sapien
taagtctgtccctagcatatagggc

SEQ ID NO: 5020538 - DNA, 25 bp, Homo sapien
tgtaatctgagcactggcacagtta

SEQ ID NO: 5020539 - DNA, 25 bp, Homo sapien
taattaggatccagcatatcattgg

SEQ ID NO: 5020540 - DNA, 25 bp, Homo sapien
gttaagagcacacccacgtaagcag

SEQ ID NO: 5020541 - DNA, 25 bp, Homo sapien
gtaatgtccactcaaaagactcggt

SEQ ID NO: 5020542 - DNA, 25 bp, Homo sapien
caatttcacgccaatttctgcttac

SEQ ID NO: 5020543 - DNA, 25 bp, Homo sapien
gaacaacaatttcacgccaatttct

SEQ ID NO: 5020544 - DNA, 25 bp, Homo sapien
atcttgaacaacaatttcacgccaa

SEQ ID NO: 5020545 - DNA, 25 bp, Homo sapien
tttcacgccaatttctgcttacttt

SEQ ID NO: 5020546 - DNA, 25 bp, Homo sapien
tgttccacatgacttctctccttca

SEQ ID NO: 5020547 - DNA, 25 bp, Homo sapien
tcattgccacggcattcccatgggt

SEQ ID NO: 5020548 - DNA, 25 bp, Homo sapien
cacggcattcccatgggtcttgtct

SEQ ID NO: 5020549 - DNA, 25 bp, Homo sapien
ttcccatgggtcttgtcttctgata

SEQ ID NO: 5020550 - DNA, 25 bp, Homo sapien
gtaactcccccaaattggcatgaac

SEQ ID NO: 5020551 - DNA, 25 bp, Homo sapien
taactcccccaaattggcatgaaca

SEQ ID NO: 5020552 - DNA, 25 bp, Homo sapien
tgtaactcccccaaattggcatgaa

SEQ ID NO: 5020553 - DNA, 25 bp, Homo sapien
ttatttcataaacaactcttacttc

SEQ ID NO: 5020554 - DNA, 25 bp, Homo sapien
gatgtccagtttttctatacccatt

SEQ ID NO: 5020555 - DNA, 25 bp, Homo sapien
tatacccattttcttgccgatcagt

SEQ ID NO: 5020556 - DNA, 25 bp, Homo sapien
tgcataggctctctgcggtcaagga

SEQ ID NO: 5020557 - DNA, 25 bp, Homo sapien
caaggactctaaaaccatagcaaga

SEQ ID NO: 5020558 - DNA, 25 bp, Homo sapien
tgtcttcaggcgttgaaatactgcc

SEQ ID NO: 5020559 - DNA, 25 bp, Homo sapien
tcctggtcagacagggaatcttctg

SEQ ID NO: 5020560 - DNA, 25 bp, Homo sapien
tgttcccgaagggtggacagtcttc

SEQ ID NO: 5020561 - DNA, 25 bp, Homo sapien
tctgactgcgagctttgttcccgaa

SEQ ID NO: 5020562 - DNA, 25 bp, Homo sapien
tgccagcttgacctgagtgcctttg

SEQ ID NO: 5020563 - DNA, 25 bp, Homo sapien
attggaggagagtccgccccatttc

SEQ ID NO: 5020564 - DNA, 25 bp, Homo sapien
tggagtacttggagttgacaattgg

SEQ ID NO: 5020565 - DNA, 25 bp, Homo sapien
gcttgacctgagtgcctttgcgaca

SEQ ID NO: 5020566 - DNA, 25 bp, Homo sapien
gtgacaacaaagttattctgccttt

SEQ ID NO: 5020567 - DNA, 25 bp, Homo sapien
gacaacaaagttattctgcctttga

SEQ ID NO: 5020568 - DNA, 25 bp, Homo sapien
aagtgacaacaaagttattctgcct

SEQ ID NO: 5020569 - DNA, 25 bp, Homo sapien
caacaaagttattctgcctttgaaa

SEQ ID NO: 5020570 - DNA, 25 bp, Homo sapien
ctaccacatcagagaatgaagtact

SEQ ID NO: 5020571 - DNA, 25 bp, Homo sapien
ccacatcagagaatgaagtacttac

SEQ ID NO: 5020572 - DNA, 25 bp, Homo sapien
taccacatcagagaatgaagtactt

SEQ ID NO: 5020573 - DNA, 25 bp, Homo sapien
accacatcagagaatgaagtactta

SEQ ID NO: 5020574 - DNA, 25 bp, Homo sapien
atgttcttcatttgttaaagtggaa

SEQ ID NO: 5020575 - DNA, 25 bp, Homo sapien
tcatttgttaaagtggaaactctta

SEQ ID NO: 5020576 - DNA, 25 bp, Homo sapien
tcttcatttgttaaagtggaaactc

SEQ ID NO: 5020577 - DNA, 25 bp, Homo sapien
attaaacccaaatgttcttcatttg

SEQ ID NO: 5020578 - DNA, 25 bp, Homo sapien
catcagtaaatcttgagctcttaga

SEQ ID NO: 5020579 - DNA, 25 bp, Homo sapien
tcaaagttacgtaggcttccaaaca

SEQ ID NO: 5020580 - DNA, 25 bp, Homo sapien
gctcttagatgtcaaagttacgtag

SEQ ID NO: 5020581 - DNA, 25 bp, Homo sapien
tagatgtcaaagttacgtaggcttc

SEQ ID NO: 5020582 - DNA, 25 bp, Homo sapien
acacagggtgcatgccgcagggatt

SEQ ID NO: 5020583 - DNA, 25 bp, Homo sapien
tgctcaaagtcgaagggtacacagg

SEQ ID NO: 5020584 - DNA, 25 bp, Homo sapien
gtcaaagatccgctaggcccagaaa

SEQ ID NO: 5020585 - DNA, 25 bp, Homo sapien
aattcgggttcctgaaaaggcagcg

SEQ ID NO: 5020586 - DNA, 25 bp, Homo sapien
acacacaataaagggtaaagttgct

SEQ ID NO: 5020587 - DNA, 25 bp, Homo sapien
tttaatcaaaacctagaatcatctg

SEQ ID NO: 5020588 - DNA, 25 bp, Homo sapien
tcaaaacctagaatcatctgcagtc

SEQ ID NO: 5020589 - DNA, 25 bp, Homo sapien
cacacttttaatcaaaacctagaat

SEQ ID NO: 5020590 - DNA, 25 bp, Homo sapien
tggacctctcacaccaactcttatg

SEQ ID NO: 5020591 - DNA, 25 bp, Homo sapien
tgcccaattggtcctctgccagtga

SEQ ID NO: 5020592 - DNA, 25 bp, Homo sapien
ggaaggtgaacctgtggccgtcggc

SEQ ID NO: 5020593 - DNA, 25 bp, Homo sapien
gaggaagtggacctctcacaccaac

SEQ ID NO: 5020594 - DNA, 25 bp, Homo sapien
tgccggccgggaatataggacttgt

SEQ ID NO: 5020595 - DNA, 25 bp, Homo sapien
ggcgcggtggcaacgctggagttcc

SEQ ID NO: 5020596 - DNA, 25 bp, Homo sapien
taggacttgtcgcatctcagccctt

SEQ ID NO: 5020597 - DNA, 25 bp, Homo sapien
tggcaacgctggagttcccgggtcc

SEQ ID NO: 5020598 - DNA, 25 bp, Homo sapien
caatctgagaccattgcggctgggc

SEQ ID NO: 5020599 - DNA, 25 bp, Homo sapien
ttcttttcggtctccgactgcaggg

SEQ ID NO: 5020600 - DNA, 25 bp, Homo sapien
tggcgccgctgtacatagaaaccgt

SEQ ID NO: 5020601 - DNA, 25 bp, Homo sapien
gcgcggtcagccctggtgacccaag

SEQ ID NO: 5020602 - DNA, 25 bp, Homo sapien
ctgtggatgcaggaaagagggtgcc

SEQ ID NO: 5020603 - DNA, 25 bp, Homo sapien
gggctgaaagaaatacttctatgaa

SEQ ID NO: 5020604 - DNA, 25 bp, Homo sapien
agggctgaaagaaatacttctatga

SEQ ID NO: 5020605 - DNA, 25 bp, Homo sapien
ggtctagaactcttgttggccactt

SEQ ID NO: 5020606 - DNA, 25 bp, Homo sapien
agttagtctccttctcacttgcctt

SEQ ID NO: 5020607 - DNA, 25 bp, Homo sapien
gccactttgcaagttagtctccttc

SEQ ID NO: 5020608 - DNA, 25 bp, Homo sapien
agaactcttgttggccactttgcaa

SEQ ID NO: 5020609 - DNA, 25 bp, Homo sapien
tggaccaatgcagttcaaacttata

SEQ ID NO: 5020610 - DNA, 25 bp, Homo sapien
tattctcagagttgggtatcagaaa

SEQ ID NO: 5020611 - DNA, 25 bp, Homo sapien
ccaatgcagttcaaacttatattgt

SEQ ID NO: 5020612 - DNA, 25 bp, Homo sapien
tggtgccatttatggtctgtaagtg

SEQ ID NO: 5020613 - DNA, 25 bp, Homo sapien
actgcctgacgcaacagtgatggcc

SEQ ID NO: 5020614 - DNA, 25 bp, Homo sapien
tgtgacccataaggaggtgcgctac

SEQ ID NO: 5020615 - DNA, 25 bp, Homo sapien
taactagactaaagtcctgccaggg

SEQ ID NO: 5020616 - DNA, 25 bp, Homo sapien
gatggcctcccgagacagttgccag

SEQ ID NO: 5020617 - DNA, 25 bp, Homo sapien
ctcgagggagcggactgggccgact

SEQ ID NO: 5020618 - DNA, 25 bp, Homo sapien
gatggctctgagatgccggttttca

SEQ ID NO: 5020619 - DNA, 25 bp, Homo sapien
cacaggcccttcagcgcttaaacag

SEQ ID NO: 5020620 - DNA, 25 bp, Homo sapien
gagacagggtacgtttctggccgaa

SEQ ID NO: 5020621 - DNA, 25 bp, Homo sapien
gggcgatggcctatgaaactctaga

SEQ ID NO: 5020622 - DNA, 25 bp, Homo sapien
gacaatctgttgaaaccctgctgtg

SEQ ID NO: 5020623 - DNA, 25 bp, Homo sapien
catgttgcctggttcccaagacgaa

SEQ ID NO: 5020624 - DNA, 25 bp, Homo sapien
gaaacctcttctgaggcgggcgatg

SEQ ID NO: 5020625 - DNA, 25 bp, Homo sapien
ctgggctaacaggtgtgagtagcct

SEQ ID NO: 5020626 - DNA, 25 bp, Homo sapien
aacatgaaacatgggcagaaatatt

SEQ ID NO: 5020627 - DNA, 25 bp, Homo sapien
tttatacaatttgtgcagagggaca

SEQ ID NO: 5020628 - DNA, 25 bp, Homo sapien
taggctatgtgagatcttttgaaac

SEQ ID NO: 5020629 - DNA, 25 bp, Homo sapien
cgcacccagccgagtttataggttt

SEQ ID NO: 5020630 - DNA, 25 bp, Homo sapien
ccagccgagtttataggttttgatg

SEQ ID NO: 5020631 - DNA, 25 bp, Homo sapien
gaggtggctgaaagtcaattgatat

SEQ ID NO: 5020632 - DNA, 25 bp, Homo sapien
aggtggctgaaagtcaattgatatc

SEQ ID NO: 5020633 - DNA, 25 bp, Homo sapien
tgccactgcaggtatgcttcacagt

SEQ ID NO: 5020634 - DNA, 25 bp, Homo sapien
aatttccagtaccacattgcaggag

SEQ ID NO: 5020635 - DNA, 25 bp, Homo sapien
tagtgacccaagttcgaaaatagcc

SEQ ID NO: 5020636 - DNA, 25 bp, Homo sapien
cagacaggagacttacgaagcaacc

SEQ ID NO: 5020637 - DNA, 25 bp, Homo sapien
tgaagtgactggttatcaactctga

SEQ ID NO: 5020638 - DNA, 25 bp, Homo sapien
tccctgccctcatgagactagagtt

SEQ ID NO: 5020639 - DNA, 25 bp, Homo sapien
tatattttacctccatgcaggacaa

SEQ ID NO: 5020640 - DNA, 25 bp, Homo sapien
tcaactctgaattgagtccagaaac

SEQ ID NO: 5020641 - DNA, 25 bp, Homo sapien
gaaaacgctcagtagcaccataatg

SEQ ID NO: 5020642 - DNA, 25 bp, Homo sapien
aactggcactagtgttataagcata

SEQ ID NO: 5020643 - DNA, 25 bp, Homo sapien
taacgtatgcagtttacacactcat

SEQ ID NO: 5020644 - DNA, 25 bp, Homo sapien
gcatattaatggacctggtagggaa

SEQ ID NO: 5020645 - DNA, 25 bp, Homo sapien
taaaacccagtcgatcccaaaggca

SEQ ID NO: 5020646 - DNA, 25 bp, Homo sapien
tagttcaaccagctccaaacacggt

SEQ ID NO: 5020647 - DNA, 25 bp, Homo sapien
tccaaggtgaccagagaagacatgg

SEQ ID NO: 5020648 - DNA, 25 bp, Homo sapien
tatgataatgaaacccggcttttgc

SEQ ID NO: 5020649 - DNA, 25 bp, Homo sapien
ttcagtctgaattgcaacttttaat

SEQ ID NO: 5020650 - DNA, 25 bp, Homo sapien
tccattgtctgatgtgagtggttgt

SEQ ID NO: 5020651 - DNA, 25 bp, Homo sapien
cattgtctgatgtgagtggttgtta

SEQ ID NO: 5020652 - DNA, 25 bp, Homo sapien
aattccattgtctgatgtgagtggt

SEQ ID NO: 5020653 - DNA, 25 bp, Homo sapien
gacggtcattttctacctcaggaag

SEQ ID NO: 5020654 - DNA, 25 bp, Homo sapien
tgaaccgccagcatgacttcgggtg

SEQ ID NO: 5020655 - DNA, 25 bp, Homo sapien
tgttaacagtagcaaagcgggtgtg

SEQ ID NO: 5020656 - DNA, 25 bp, Homo sapien
gatttaccttcaggcaagccactgg

SEQ ID NO: 5020657 - DNA, 25 bp, Homo sapien
taacgcagaacacgttctacttaaa

SEQ ID NO: 5020658 - DNA, 25 bp, Homo sapien
gggtttctatgtggaaaattcagac

SEQ ID NO: 5020659 - DNA, 25 bp, Homo sapien
tatatataagctatgagaacacctt

SEQ ID NO: 5020660 - DNA, 25 bp, Homo sapien
aaacataattgctgacttctttttg

SEQ ID NO: 5020661 - DNA, 25 bp, Homo sapien
cattgctttggtgctggcattatca

SEQ ID NO: 5020662 - DNA, 25 bp, Homo sapien
gaattcagaatggatcctgccattg

SEQ ID NO: 5020663 - DNA, 25 bp, Homo sapien
ttgtccaatgggatgtaggaattca

SEQ ID NO: 5020664 - DNA, 25 bp, Homo sapien
tccacttagactgtaccgttctttc

SEQ ID NO: 5020665 - DNA, 25 bp, Homo sapien
gctgtagcaacgatttataatataa

SEQ ID NO: 5020666 - DNA, 25 bp, Homo sapien
taagatctaggcttaagtactgcct

SEQ ID NO: 5020667 - DNA, 25 bp, Homo sapien
tgcttcaatgtctactgaagcagct

SEQ ID NO: 5020668 - DNA, 25 bp, Homo sapien
taatatctggctgttgttacccaca

SEQ ID NO: 5020669 - DNA, 25 bp, Homo sapien
gacatagtagggttatatataatca

SEQ ID NO: 5020670 - DNA, 25 bp, Homo sapien
catcatgctttatgttcaaaattct

SEQ ID NO: 5020671 - DNA, 25 bp, Homo sapien
taacattactattttgaaccttgac

SEQ ID NO: 5020672 - DNA, 25 bp, Homo sapien
tataatcatcatgctttatgttcaa

SEQ ID NO: 5020673 - DNA, 25 bp, Homo sapien
gatggctcctattcgatccatgtgg

SEQ ID NO: 5020674 - DNA, 25 bp, Homo sapien
cactcaggttgtctcggatggctcc

SEQ ID NO: 5020675 - DNA, 25 bp, Homo sapien
agactccccgttatactggctccag

SEQ ID NO: 5020676 - DNA, 25 bp, Homo sapien
catgtggcttccacttgcactcaaa

SEQ ID NO: 5020677 - DNA, 25 bp, Homo sapien
tttcaggctagtccactagaagcag

SEQ ID NO: 5020678 - DNA, 25 bp, Homo sapien
catgtacgtacatgtctgtgagcca

SEQ ID NO: 5020679 - DNA, 25 bp, Homo sapien
gccacagttctgtctacaagctatt

SEQ ID NO: 5020680 - DNA, 25 bp, Homo sapien
gcagtgggaatagagccaacaattt

SEQ ID NO: 5020681 - DNA, 25 bp, Homo sapien
tgtattaggttacgtggaggccact

SEQ ID NO: 5020682 - DNA, 25 bp, Homo sapien
gtatttcaagaagggtagagtctct

SEQ ID NO: 5020683 - DNA, 25 bp, Homo sapien
caaagattaatgagacggactggcc

SEQ ID NO: 5020684 - DNA, 25 bp, Homo sapien
tatactgttaagatgaggaccaaga

SEQ ID NO: 5020685 - DNA, 25 bp, Homo sapien
tggaactacgccatagacataagct

SEQ ID NO: 5020686 - DNA, 25 bp, Homo sapien
cacaacctccgcttcgacaaagaga

SEQ ID NO: 5020687 - DNA, 25 bp, Homo sapien
taagctaacataataggaacaccga

SEQ ID NO: 5020688 - DNA, 25 bp, Homo sapien
tacagctgtgttagttccaccaaca

SEQ ID NO: 5020689 - DNA, 25 bp, Homo sapien
tgccaggcctccgaactgtacttgg

SEQ ID NO: 5020690 - DNA, 25 bp, Homo sapien
caaccaagacttactgcaggctcaa

SEQ ID NO: 5020691 - DNA, 25 bp, Homo sapien
gttaagcaaattcaaggttcccagc

SEQ ID NO: 5020692 - DNA, 25 bp, Homo sapien
catacagagaaaagcgccagggttc

SEQ ID NO: 5020693 - DNA, 25 bp, Homo sapien
gtgctttgaaacatccttgccttca

SEQ ID NO: 5020694 - DNA, 25 bp, Homo sapien
acctgctatggccaaattccgtttg

SEQ ID NO: 5020695 - DNA, 25 bp, Homo sapien
agctactactggagacacgattaca

SEQ ID NO: 5020696 - DNA, 25 bp, Homo sapien
gacaacgttacaccacctgctatgg

SEQ ID NO: 5020697 - DNA, 25 bp, Homo sapien
cctgggaaacttagcactgaagaag

SEQ ID NO: 5020698 - DNA, 25 bp, Homo sapien
caggcagagatggtagaccttccca

SEQ ID NO: 5020699 - DNA, 25 bp, Homo sapien
tcccagcattgactagaggttcctt

SEQ ID NO: 5020700 - DNA, 25 bp, Homo sapien
cctacacagtccatgcaggcagaga

SEQ ID NO: 5020701 - DNA, 25 bp, Homo sapien
tgtcatcagccccaaaactaatttt

SEQ ID NO: 5020702 - DNA, 25 bp, Homo sapien
agcttccttaatagcgggggctaca

SEQ ID NO: 5020703 - DNA, 25 bp, Homo sapien
tcctggattaatgcaatcctccctc

SEQ ID NO: 5020704 - DNA, 25 bp, Homo sapien
cactcccagctgattatttagtttt

SEQ ID NO: 5020705 - DNA, 25 bp, Homo sapien
caattagaggccagtggtagtcact

SEQ ID NO: 5020706 - DNA, 25 bp, Homo sapien
cctgagggcatgtgttatttagcta

SEQ ID NO: 5020707 - DNA, 25 bp, Homo sapien
caacagacttcttaggacctcataa

SEQ ID NO: 5020708 - DNA, 25 bp, Homo sapien
gctaattattctttgcctgagggca

SEQ ID NO: 5020709 - DNA, 25 bp, Homo sapien
gaataagataatggactaacaagaa

SEQ ID NO: 5020710 - DNA, 25 bp, Homo sapien
tacacctaaagatttagaataagat

SEQ ID NO: 5020711 - DNA, 25 bp, Homo sapien
aaagatttagaataagataatggac

SEQ ID NO: 5020712 - DNA, 25 bp, Homo sapien
taagataatggactaacaagaagta

SEQ ID NO: 5020713 - DNA, 25 bp, Homo sapien
ttgcaggaatagcaatgccagctat

SEQ ID NO: 5020714 - DNA, 25 bp, Homo sapien
tgccagctattaaagcgattccgac

SEQ ID NO: 5020715 - DNA, 25 bp, Homo sapien
aaagcgattccgacaggagcaccaa

SEQ ID NO: 5020716 - DNA, 25 bp, Homo sapien
taatcattgcaggaatagcaatgcc

SEQ ID NO: 5020717 - DNA, 25 bp, Homo sapien
tatataagcagcacatcgtggacat

SEQ ID NO: 5020718 - DNA, 25 bp, Homo sapien
catgtcatgtgattgcagctcccat

SEQ ID NO: 5020719 - DNA, 25 bp, Homo sapien
gcacatgtcatgtgattgcagctcc

SEQ ID NO: 5020720 - DNA, 25 bp, Homo sapien
ctttattatataagcagcacatcgt

SEQ ID NO: 5020721 - DNA, 25 bp, Homo sapien
aggagaatcaaggacagctctaggc

SEQ ID NO: 5020722 - DNA, 25 bp, Homo sapien
taggcaaattgtgaactacgtaaag

SEQ ID NO: 5020723 - DNA, 25 bp, Homo sapien
tgaatggtagttcccggttccagaa

SEQ ID NO: 5020724 - DNA, 25 bp, Homo sapien
tagtgaatgaacactaacaggaggt

SEQ ID NO: 5020725 - DNA, 25 bp, Homo sapien
tatggttacaatgcacaatggcgtc

SEQ ID NO: 5020726 - DNA, 25 bp, Homo sapien
gaatcagtacccaaaatacaaggaa

SEQ ID NO: 5020727 - DNA, 25 bp, Homo sapien
ggctatgaacgttataaaccatgga

SEQ ID NO: 5020728 - DNA, 25 bp, Homo sapien
tcaactgttgttggtctatgctcct

SEQ ID NO: 5020729 - DNA, 25 bp, Homo sapien
gaaatgctaatcctatctgcgtaag

SEQ ID NO: 5020730 - DNA, 25 bp, Homo sapien
tagtaggtatctcaacaagacaggg

SEQ ID NO: 5020731 - DNA, 25 bp, Homo sapien
tgatactctaagcagccagaccagg

SEQ ID NO: 5020732 - DNA, 25 bp, Homo sapien
aaaagctggcttttatgcctgatac

SEQ ID NO: 5020733 - DNA, 25 bp, Homo sapien
taaaaaagagcctcaagtggatgca

SEQ ID NO: 5020734 - DNA, 25 bp, Homo sapien
tccaagtgcctaaacctcctagtag

SEQ ID NO: 5020735 - DNA, 25 bp, Homo sapien
tactgctaaaatatgggccattgtc

SEQ ID NO: 5020736 - DNA, 25 bp, Homo sapien
taagccaccgttccccgatatgaaa

SEQ ID NO: 5020737 - DNA, 25 bp, Homo sapien
caatggctactgctgactcttcagg

SEQ ID NO: 5020738 - DNA, 25 bp, Homo sapien
gctcaggattgctcacggagtaagt

SEQ ID NO: 5020739 - DNA, 25 bp, Homo sapien
tttccaagtgaactacccaatggct

SEQ ID NO: 5020740 - DNA, 25 bp, Homo sapien
tctgaattgcttctggacccatacc

SEQ ID NO: 5020741 - DNA, 25 bp, Homo sapien
tgtttacagtggtagcaaaactctg

SEQ ID NO: 5020742 - DNA, 25 bp, Homo sapien
ctaatggatgaagaacgtatagttc

SEQ ID NO: 5020743 - DNA, 25 bp, Homo sapien
gactcttgactataactaatggatg

SEQ ID NO: 5020744 - DNA, 25 bp, Homo sapien
tctcaaacgtaagctctgggctctc

SEQ ID NO: 5020745 - DNA, 25 bp, Homo sapien
cttcagctgaaggtctctaggtact

SEQ ID NO: 5020746 - DNA, 25 bp, Homo sapien
tccttctctatccttcagctgaagg

SEQ ID NO: 5020747 - DNA, 25 bp, Homo sapien
aggtactgtacttgaaatgcttaac

SEQ ID NO: 5020748 - DNA, 25 bp, Homo sapien
tctctaggtactgtacttgaaatgc

SEQ ID NO: 5020749 - DNA, 25 bp, Homo sapien
tgcagacaggatgcattctggttct

SEQ ID NO: 5020750 - DNA, 25 bp, Homo sapien
caaagggaggttcatctcctggttc

SEQ ID NO: 5020751 - DNA, 25 bp, Homo sapien
ccttttttaggatttgcaacctgca

SEQ ID NO: 5020752 - DNA, 25 bp, Homo sapien
gaaggtctagacaaagggaggttca

SEQ ID NO: 5020753 - DNA, 25 bp, Homo sapien
caaagggcactctatgaagtctcca

SEQ ID NO: 5020754 - DNA, 25 bp, Homo sapien
gaatgccgcaaaaggcacaaagggc

SEQ ID NO: 5020755 - DNA, 25 bp, Homo sapien
taaaccgttcagtacattctgggca

SEQ ID NO: 5020756 - DNA, 25 bp, Homo sapien
gatctcgatctgaacccatttgccg

SEQ ID NO: 5020757 - DNA, 25 bp, Homo sapien
aatgcttgttagaattgagacaggg

SEQ ID NO: 5020758 - DNA, 25 bp, Homo sapien
tagagataaaacctatttcttgttc

SEQ ID NO: 5020759 - DNA, 25 bp, Homo sapien
cacagcccttcattatatttagaga

SEQ ID NO: 5020760 - DNA, 25 bp, Homo sapien
acagggtcagtgtttacacacagcc

SEQ ID NO: 5020761 - DNA, 25 bp, Homo sapien
tgtaagaatatcctacttggttcct

SEQ ID NO: 5020762 - DNA, 25 bp, Homo sapien
attcttgaaaagttcgatttacaga

SEQ ID NO: 5020763 - DNA, 25 bp, Homo sapien
tcacattaagtcatgatgtaagaat

SEQ ID NO: 5020764 - DNA, 25 bp, Homo sapien
gatttacagaagactgctatcatgg

SEQ ID NO: 5020765 - DNA, 25 bp, Homo sapien
gcttcaggattcgtaaaacatgtta

SEQ ID NO: 5020766 - DNA, 25 bp, Homo sapien
aatagccacctatctgcctaaatga

SEQ ID NO: 5020767 - DNA, 25 bp, Homo sapien
tctgtgatccttaagccatacggcc

SEQ ID NO: 5020768 - DNA, 25 bp, Homo sapien
acttcagcagcatctaatagccacc

SEQ ID NO: 5020769 - DNA, 25 bp, Homo sapien
tgggaatccacgaggaacatttgct

SEQ ID NO: 5020770 - DNA, 25 bp, Homo sapien
ggcaataatgctcacggctgctcgc

SEQ ID NO: 5020771 - DNA, 25 bp, Homo sapien
aatctttcttgtgcagcggtgccca

SEQ ID NO: 5020772 - DNA, 25 bp, Homo sapien
tagatccctcgagtgcagttcgcaa

SEQ ID NO: 5020773 - DNA, 25 bp, Homo sapien
ccagcctccgggcattattcttact

SEQ ID NO: 5020774 - DNA, 25 bp, Homo sapien
tcttactgcccaggtaatagtattt

SEQ ID NO: 5020775 - DNA, 25 bp, Homo sapien
tccgggcattattcttactgcccag

SEQ ID NO: 5020776 - DNA, 25 bp, Homo sapien
accacgaccagcctccgggcattat

SEQ ID NO: 5020777 - DNA, 25 bp, Homo sapien
cattatgtggatagatggccggccc

SEQ ID NO: 5020778 - DNA, 25 bp, Homo sapien
tttcatggctaaacaaagtctccga

SEQ ID NO: 5020779 - DNA, 25 bp, Homo sapien
caatgtgtccttagacgcgtgagca

SEQ ID NO: 5020780 - DNA, 25 bp, Homo sapien
tctccaaggagtctaaagtacaatg

SEQ ID NO: 5020781 - DNA, 25 bp, Homo sapien
cagcccgggtgacaagagcaaaact

SEQ ID NO: 5020782 - DNA, 25 bp, Homo sapien
gaggttgagtaagccaagattgtgc

SEQ ID NO: 5020783 - DNA, 25 bp, Homo sapien
aggttgagtaagccaagattgtgcc

SEQ ID NO: 5020784 - DNA, 25 bp, Homo sapien
attgcactccagcccgggtgacaag

SEQ ID NO: 5020785 - DNA, 25 bp, Homo sapien
ggaaggctgaggtggcagggttgct

SEQ ID NO: 5020786 - DNA, 25 bp, Homo sapien
tgtattccaccctgggtgacacagt

SEQ ID NO: 5020787 - DNA, 25 bp, Homo sapien
cacaccactgtattccaccctgggt

SEQ ID NO: 5020788 - DNA, 25 bp, Homo sapien
atgatcacaccactgtattccaccc

SEQ ID NO: 5020789 - DNA, 25 bp, Homo sapien
tccaatctccgcctccatgagcaca

SEQ ID NO: 5020790 - DNA, 25 bp, Homo sapien
actataagcattcctcggcttgcgg

SEQ ID NO: 5020791 - DNA, 25 bp, Homo sapien
tcggcttgcggttacatcactccaa

SEQ ID NO: 5020792 - DNA, 25 bp, Homo sapien
cattcctcggcttgcggttacatca

SEQ ID NO: 5020793 - DNA, 25 bp, Homo sapien
taagtctactgatcaactgaggcat

SEQ ID NO: 5020794 - DNA, 25 bp, Homo sapien
gaatctcctggaagctaagatagtg

SEQ ID NO: 5020795 - DNA, 25 bp, Homo sapien
gcacctctcgtgtgttaggcagaaa

SEQ ID NO: 5020796 - DNA, 25 bp, Homo sapien
ccaataaaatagaggtgacccaagt

SEQ ID NO: 5020797 - DNA, 25 bp, Homo sapien
taaggccccaggcagcacggcttgc

SEQ ID NO: 5020798 - DNA, 25 bp, Homo sapien
gcgatgtcccggctccaaatttgca

SEQ ID NO: 5020799 - DNA, 25 bp, Homo sapien
cagcgaggcccggaaatcggtcccg

SEQ ID NO: 5020800 - DNA, 25 bp, Homo sapien
tcggtcccgttagagccgatttcac

SEQ ID NO: 5020801 - DNA, 25 bp, Homo sapien
gtcaggaatgcgttccgcccccgcc

SEQ ID NO: 5020802 - DNA, 25 bp, Homo sapien
tcaggaatgcgttccgcccccgccg

SEQ ID NO: 5020803 - DNA, 25 bp, Homo sapien
ccgtcaggaatgcgttccgcccccg

SEQ ID NO: 5020804 - DNA, 25 bp, Homo sapien
cgtcaggaatgcgttccgcccccgc

SEQ ID NO: 5020805 - DNA, 25 bp, Homo sapien
gcagttgtggctcgacggctgctcc

SEQ ID NO: 5020806 - DNA, 25 bp, Homo sapien
ccgatgcgccgaggcgcctctcaac

SEQ ID NO: 5020807 - DNA, 25 bp, Homo sapien
tggcgggcgagtaggcccatctccc

SEQ ID NO: 5020808 - DNA, 25 bp, Homo sapien
gggagggtccctccgatgcgccgag

SEQ ID NO: 5020809 - DNA, 25 bp, Homo sapien
cactttgagaagcagaggtggttgg

SEQ ID NO: 5020810 - DNA, 25 bp, Homo sapien
ctttgagaagcagaggtggttggat

SEQ ID NO: 5020811 - DNA, 25 bp, Homo sapien
gcactttgagaagcagaggtggttg

SEQ ID NO: 5020812 - DNA, 25 bp, Homo sapien
ttgagaagcagaggtggttggatca

SEQ ID NO: 5020813 - DNA, 25 bp, Homo sapien
agaggctgtaacttagtttggtctc

SEQ ID NO: 5020814 - DNA, 25 bp, Homo sapien
tagtttggtctctcaaactaacgtc

SEQ ID NO: 5020815 - DNA, 25 bp, Homo sapien
caaactaacgtcaattcttctgaca

SEQ ID NO: 5020816 - DNA, 25 bp, Homo sapien
ggtctctcaaactaacgtcaattct

SEQ ID NO: 5020817 - DNA, 25 bp, Homo sapien
gggtagcgaagaaatgcagggcatg

SEQ ID NO: 5020818 - DNA, 25 bp, Homo sapien
agaagctgtggggtagcgaagaaat

SEQ ID NO: 5020819 - DNA, 25 bp, Homo sapien
gtggggtagcgaagaaatgcagggc

SEQ ID NO: 5020820 - DNA, 25 bp, Homo sapien
agctgtggggtagcgaagaaatgca

SEQ ID NO: 5020821 - DNA, 25 bp, Homo sapien
taaagattccggactgccaagctca

SEQ ID NO: 5020822 - DNA, 25 bp, Homo sapien
ttctcaacaatgcaaaggcgtcctg

SEQ ID NO: 5020823 - DNA, 25 bp, Homo sapien
gccaaacacaatgagtctgcaggct

SEQ ID NO: 5020824 - DNA, 25 bp, Homo sapien
tgccacgcccagagacttcggaatt

SEQ ID NO: 5020825 - DNA, 25 bp, Homo sapien
tcctgcattggcctcatcactcgta

SEQ ID NO: 5020826 - DNA, 25 bp, Homo sapien
agtgaattcactcccttgtcctctg

SEQ ID NO: 5020827 - DNA, 25 bp, Homo sapien
ttgtcctctgccaagcctctcctgc

SEQ ID NO: 5020828 - DNA, 25 bp, Homo sapien
ggcctcatcactcgtatgctgatca

SEQ ID NO: 5020829 - DNA, 25 bp, Homo sapien
aaatggaagttctggtgtacggtat

SEQ ID NO: 5020830 - DNA, 25 bp, Homo sapien
aggaggaagacaccagtccccactt

SEQ ID NO: 5020831 - DNA, 25 bp, Homo sapien
gaagtcccacagaacacttgttagg

SEQ ID NO: 5020832 - DNA, 25 bp, Homo sapien
caaactgtggcatgtggtcctttct

SEQ ID NO: 5020833 - DNA, 25 bp, Homo sapien
catcctgagatgtcctgtgaagcta

SEQ ID NO: 5020834 - DNA, 25 bp, Homo sapien
tagatgcaggtagctaaggatctca

SEQ ID NO: 5020835 - DNA, 25 bp, Homo sapien
tctgggtcaggattattctatcaac

SEQ ID NO: 5020836 - DNA, 25 bp, Homo sapien
tggagctgagaaccatgtgtcataa

SEQ ID NO: 5020837 - DNA, 25 bp, Homo sapien
tcctcttttgcaggcttgatgcagg

SEQ ID NO: 5020838 - DNA, 25 bp, Homo sapien
cattgttgcagagattgactaagtc

SEQ ID NO: 5020839 - DNA, 25 bp, Homo sapien
aatgaaatatgagtggcctgacccc

SEQ ID NO: 5020840 - DNA, 25 bp, Homo sapien
gcagggcaatcttggaagctccata

SEQ ID NO: 5020841 - DNA, 25 bp, Homo sapien
ggcagctgtacgtttgctggtcctt

SEQ ID NO: 5020842 - DNA, 25 bp, Homo sapien
cagctgtacgtttgctggtccttcc

SEQ ID NO: 5020843 - DNA, 25 bp, Homo sapien
tgagaggcagctgtacgtttgctgg

SEQ ID NO: 5020844 - DNA, 25 bp, Homo sapien
gaggcagctgtacgtttgctggtcc

SEQ ID NO: 5020845 - DNA, 25 bp, Homo sapien
cctgagcaagtcccagggagattgc

SEQ ID NO: 5020846 - DNA, 25 bp, Homo sapien
ctgcttcatgtaggggggtaaaaat

SEQ ID NO: 5020847 - DNA, 25 bp, Homo sapien
tgcttcatgtaggggggtaaaaatc

SEQ ID NO: 5020848 - DNA, 25 bp, Homo sapien
ctctgcttcatgtaggggggtaaaa

SEQ ID NO: 5020849 - DNA, 25 bp, Homo sapien
tgtgttgagtcatcagagcctgcct

SEQ ID NO: 5020850 - DNA, 25 bp, Homo sapien
tgctaaagtgaccaattgtgggtgg

SEQ ID NO: 5020851 - DNA, 25 bp, Homo sapien
caggaaagctgtaagggttgctaaa

SEQ ID NO: 5020852 - DNA, 25 bp, Homo sapien
gctgtaagggttgctaaagtgacca

SEQ ID NO: 5020853 - DNA, 25 bp, Homo sapien
ccaattgtgggtggtttggctttag

SEQ ID NO: 5020854 - DNA, 25 bp, Homo sapien
tgtgacgcctgcttcggaaacaacc

SEQ ID NO: 5020855 - DNA, 25 bp, Homo sapien
agccctgattcctgagtatctctgg

SEQ ID NO: 5020856 - DNA, 25 bp, Homo sapien
tacagtcatggatttcccagaccag

SEQ ID NO: 5020857 - DNA, 25 bp, Homo sapien
taggacccacgtcagcactgttcac

SEQ ID NO: 5020858 - DNA, 25 bp, Homo sapien
atcgtagatggttgtaagtaatgaa

SEQ ID NO: 5020859 - DNA, 25 bp, Homo sapien
catgaaatcgtagatggttgtaagt

SEQ ID NO: 5020860 - DNA, 25 bp, Homo sapien
gaaatcgtagatggttgtaagtaat

SEQ ID NO: 5020861 - DNA, 25 bp, Homo sapien
aatcgtagatggttgtaagtaatga

SEQ ID NO: 5020862 - DNA, 25 bp, Homo sapien
ttgtgtcactcattagatatgcatg

SEQ ID NO: 5020863 - DNA, 25 bp, Homo sapien
tgtttgtgtcactcattagatatgc

SEQ ID NO: 5020864 - DNA, 25 bp, Homo sapien
tgtgtttgtgtcactcattagatat

SEQ ID NO: 5020865 - DNA, 25 bp, Homo sapien
gtgtcactcattagatatgcatgga

SEQ ID NO: 5020866 - DNA, 25 bp, Homo sapien
cctcctgtcctctatggaactgatg

SEQ ID NO: 5020867 - DNA, 25 bp, Homo sapien
caagacaatggtcaagagagactcc

SEQ ID NO: 5020868 - DNA, 25 bp, Homo sapien
tcagggcacacaactcaagacaatg

SEQ ID NO: 5020869 - DNA, 25 bp, Homo sapien
gaactgatgtcaactgtcccctctt

SEQ ID NO: 5020870 - DNA, 25 bp, Homo sapien
tgcatcttgaagtaaacctcgggaa

SEQ ID NO: 5020871 - DNA, 25 bp, Homo sapien
gcccaattgcatcttgaagtaaacc

SEQ ID NO: 5020872 - DNA, 25 bp, Homo sapien
agtaaacctcgggaatgtggtagat

SEQ ID NO: 5020873 - DNA, 25 bp, Homo sapien
gcttgacaggcaggcccaattgcat

SEQ ID NO: 5020874 - DNA, 25 bp, Homo sapien
gagtgctgctgctattgctgtctct

SEQ ID NO: 5020875 - DNA, 25 bp, Homo sapien
ggagtgctgctgctattgctgtctc

SEQ ID NO: 5020876 - DNA, 25 bp, Homo sapien
tgctgctgctattgctgtctcttac

SEQ ID NO: 5020877 - DNA, 25 bp, Homo sapien
ctattccagaggtggagtgctgctg

SEQ ID NO: 5020878 - DNA, 25 bp, Homo sapien
tgcctcctgtacttgagtgcagggt

SEQ ID NO: 5020879 - DNA, 25 bp, Homo sapien
gcctcctgtacttgagtgcagggta

SEQ ID NO: 5020880 - DNA, 25 bp, Homo sapien
gcaggaaggcgtgcacttctagctg

SEQ ID NO: 5020881 - DNA, 25 bp, Homo sapien
gtgcacttctagctggagcccactc

SEQ ID NO: 5020882 - DNA, 25 bp, Homo sapien
gaaggcgtgcacttctagctggagc

SEQ ID NO: 5020883 - DNA, 25 bp, Homo sapien
ggcgtgcacttctagctggagccca

SEQ ID NO: 5020884 - DNA, 25 bp, Homo sapien
aatgccaaggcaagaccgggctgga

SEQ ID NO: 5020885 - DNA, 25 bp, Homo sapien
cctggaccgtcttggatctcttggg

SEQ ID NO: 5020886 - DNA, 25 bp, Homo sapien
aaacacaactttcttgcctggaccg

SEQ ID NO: 5020887 - DNA, 25 bp, Homo sapien
ggctggactgacaggtccttcaaga

SEQ ID NO: 5020888 - DNA, 25 bp, Homo sapien
tgctttcagcaagtcccaggcagag

SEQ ID NO: 5020889 - DNA, 25 bp, Homo sapien
gagtgtcacctcagtgcctggcatg

SEQ ID NO: 5020890 - DNA, 25 bp, Homo sapien
ggctggccatgttgccagcgagtgg

SEQ ID NO: 5020891 - DNA, 25 bp, Homo sapien
gaattgccgttttcattctctggct

SEQ ID NO: 5020892 - DNA, 25 bp, Homo sapien
gatgattgctttgacttctgctgca

SEQ ID NO: 5020893 - DNA, 25 bp, Homo sapien
ttgctttgacttctgctgcatagtt

SEQ ID NO: 5020894 - DNA, 25 bp, Homo sapien
ttgggtctcttgaagatgattgctt

SEQ ID NO: 5020895 - DNA, 25 bp, Homo sapien
cccaaaagtgttggcttgggtctct

SEQ ID NO: 5020896 - DNA, 25 bp, Homo sapien
ctgcctgggtgttacatctcgtata

SEQ ID NO: 5020897 - DNA, 25 bp, Homo sapien
tacatctcgtataaggtttacttgc

SEQ ID NO: 5020898 - DNA, 25 bp, Homo sapien
tcgtataaggtttacttgcattttc

SEQ ID NO: 5020899 - DNA, 25 bp, Homo sapien
tgggtgttacatctcgtataaggtt

SEQ ID NO: 5020900 - DNA, 25 bp, Homo sapien
tcataaagcctgatcctaccgggaa

SEQ ID NO: 5020901 - DNA, 25 bp, Homo sapien
gagtttctgaaaaggtggtgcccca

SEQ ID NO: 5020902 - DNA, 25 bp, Homo sapien
tatagagtagatgtgccaggtgtca

SEQ ID NO: 5020903 - DNA, 25 bp, Homo sapien
gaagagctgggtacatccaagggac

SEQ ID NO: 5020904 - DNA, 25 bp, Homo sapien
ctgttgcctgaagacagtgtcaaat

SEQ ID NO: 5020905 - DNA, 25 bp, Homo sapien
tattatcaggtggatctcagaagcc

SEQ ID NO: 5020906 - DNA, 25 bp, Homo sapien
cctgaagacagtgtcaaatattatc

SEQ ID NO: 5020907 - DNA, 25 bp, Homo sapien
tgtcaaatattatcaggtggatctc

SEQ ID NO: 5020908 - DNA, 25 bp, Homo sapien
gaaagcatgtggttccccatcataa

SEQ ID NO: 5020909 - DNA, 25 bp, Homo sapien
tttggtggatagaaacaaccactcc

SEQ ID NO: 5020910 - DNA, 25 bp, Homo sapien
acactagagtggtccgggctggtcc

SEQ ID NO: 5020911 - DNA, 25 bp, Homo sapien
aaccactccttgtgttgacatatag

SEQ ID NO: 5020912 - DNA, 25 bp, Homo sapien
tatagaatattgtgaaggaggcctc

SEQ ID NO: 5020913 - DNA, 25 bp, Homo sapien
ggtctttggactagttcaaccctca

SEQ ID NO: 5020914 - DNA, 25 bp, Homo sapien
tcctcaggcctgttatctctaatgg

SEQ ID NO: 5020915 - DNA, 25 bp, Homo sapien
gcctagcttcccttgactgcacagt

SEQ ID NO: 5020916 - DNA, 25 bp, Homo sapien
tccatggctgtatttgcacgatggt

SEQ ID NO: 5020917 - DNA, 25 bp, Homo sapien
tgcaggcatgtctaagcaagtctgg

SEQ ID NO: 5020918 - DNA, 25 bp, Homo sapien
tatttgcacgatggtctgaggctcc

SEQ ID NO: 5020919 - DNA, 25 bp, Homo sapien
ctggagaagctagacttccatggct

SEQ ID NO: 5020920 - DNA, 25 bp, Homo sapien
gattgctcttggtggataactcccc

SEQ ID NO: 5020921 - DNA, 25 bp, Homo sapien
gaatcctgatttcattgggaccgaa

SEQ ID NO: 5020922 - DNA, 25 bp, Homo sapien
tgcagccatactgaagccctgacgg

SEQ ID NO: 5020923 - DNA, 25 bp, Homo sapien
tctttcccagctaggcaaggtgtgg

SEQ ID NO: 5020924 - DNA, 25 bp, Homo sapien
catcttggagtgaagctattggtgc

SEQ ID NO: 5020925 - DNA, 25 bp, Homo sapien
aagctattggtgctgccaatacgac

SEQ ID NO: 5020926 - DNA, 25 bp, Homo sapien
gggatcatcttggagtgaagctatt

SEQ ID NO: 5020927 - DNA, 25 bp, Homo sapien
tgccaatacgaccagtgcttttact

SEQ ID NO: 5020928 - DNA, 25 bp, Homo sapien
agctggtaccgccagtgtgcccagg

SEQ ID NO: 5020929 - DNA, 25 bp, Homo sapien
gacctggggcaagctggtaccgcca

SEQ ID NO: 5020930 - DNA, 25 bp, Homo sapien
cctggggcaagctggtaccgccagt

SEQ ID NO: 5020931 - DNA, 25 bp, Homo sapien
ggcaagctggtaccgccagtgtgcc

SEQ ID NO: 5020932 - DNA, 25 bp, Homo sapien
cctttattcaggtgccaagggccca

SEQ ID NO: 5020933 - DNA, 25 bp, Homo sapien
tgtaatcctggtgagactacaccct

SEQ ID NO: 5020934 - DNA, 25 bp, Homo sapien
gggccagtcaaaacacactagagag

SEQ ID NO: 5020935 - DNA, 25 bp, Homo sapien
gctgcaccagccaaggtttaggcca

SEQ ID NO: 5020936 - DNA, 25 bp, Homo sapien
tagtcctcattgaaggcccaagatt

SEQ ID NO: 5020937 - DNA, 25 bp, Homo sapien
ttagggatgcttgtagcttttgtgt

SEQ ID NO: 5020938 - DNA, 25 bp, Homo sapien
gggtgtagtcctcattgaaggccca

SEQ ID NO: 5020939 - DNA, 25 bp, Homo sapien
cagtgcgttactggggtgtagtcct

SEQ ID NO: 5020940 - DNA, 25 bp, Homo sapien
ggccactgtgaccaccatgattaat

SEQ ID NO: 5020941 - DNA, 25 bp, Homo sapien
acttgactgagcgttcctgctgccc

SEQ ID NO: 5020942 - DNA, 25 bp, Homo sapien
tgttgtcctcccaactgacgggatg

SEQ ID NO: 5020943 - DNA, 25 bp, Homo sapien
ggatgctcttggacagtgatgccag

SEQ ID NO: 5020944 - DNA, 25 bp, Homo sapien
tgcttcctttagcaatccctactgc

SEQ ID NO: 5020945 - DNA, 25 bp, Homo sapien
gcaatccctactgctagggctccaa

SEQ ID NO: 5020946 - DNA, 25 bp, Homo sapien
tactgctagggctccaacatgcctc

SEQ ID NO: 5020947 - DNA, 25 bp, Homo sapien
tccaacatgcctcagccagaaagct

SEQ ID NO: 5020948 - DNA, 25 bp, Homo sapien
tagagacagcagctttggccttcgg

SEQ ID NO: 5020949 - DNA, 25 bp, Homo sapien
gcagctttggccttcggctcaaaga

SEQ ID NO: 5020950 - DNA, 25 bp, Homo sapien
gatgtcccttgtaggcgagtcctgg

SEQ ID NO: 5020951 - DNA, 25 bp, Homo sapien
tgctgtcggaatccctgatcataga

SEQ ID NO: 5020952 - DNA, 25 bp, Homo sapien
tgagttctgggaaggtctgatgact

SEQ ID NO: 5020953 - DNA, 25 bp, Homo sapien
attggtaagctcaggttacttcagg

SEQ ID NO: 5020954 - DNA, 25 bp, Homo sapien
aaaagcagattggtaagctcaggtt

SEQ ID NO: 5020955 - DNA, 25 bp, Homo sapien
gaaggtctgatgacttagtttcagt

SEQ ID NO: 5020956 - DNA, 25 bp, Homo sapien
tatttctcaagtatatgctgagcaa

SEQ ID NO: 5020957 - DNA, 25 bp, Homo sapien
acaggagcacatcctatatgattca

SEQ ID NO: 5020958 - DNA, 25 bp, Homo sapien
tctcaagtatatgctgagcaaaaaa

SEQ ID NO: 5020959 - DNA, 25 bp, Homo sapien
gaaactactcatagatacagcaaca

SEQ ID NO: 5020960 - DNA, 25 bp, Homo sapien
gagcttgggccctgagcttaggcct

SEQ ID NO: 5020961 - DNA, 25 bp, Homo sapien
cactgaggttcatgtgggcagccac

SEQ ID NO: 5020962 - DNA, 25 bp, Homo sapien
cagcgtcagtacaggcctggaagag

SEQ ID NO: 5020963 - DNA, 25 bp, Homo sapien
tgcctgatcggacctgggccagcgt

SEQ ID NO: 5020964 - DNA, 25 bp, Homo sapien
ttgccactgggtcacggagagtctc

SEQ ID NO: 5020965 - DNA, 25 bp, Homo sapien
gcaggtcaaccatttacgagaggga

SEQ ID NO: 5020966 - DNA, 25 bp, Homo sapien
cacccgcctgggagttgtcatttca

SEQ ID NO: 5020967 - DNA, 25 bp, Homo sapien
tgatgctccatgacacaagtcgtga

SEQ ID NO: 5020968 - DNA, 25 bp, Homo sapien
ttctgtcttgccttgcaaagcttcc

SEQ ID NO: 5020969 - DNA, 25 bp, Homo sapien
tcttgccttgcaaagcttccaagcc

SEQ ID NO: 5020970 - DNA, 25 bp, Homo sapien
ttagatggcctggattcggcttctg

SEQ ID NO: 5020971 - DNA, 25 bp, Homo sapien
cctggattcggcttctgtcttgcct

SEQ ID NO: 5020972 - DNA, 25 bp, Homo sapien
cagggcaggccttggaaaggtatag

SEQ ID NO: 5020973 - DNA, 25 bp, Homo sapien
tcttccacctgcagctcaaggctag

SEQ ID NO: 5020974 - DNA, 25 bp, Homo sapien
ttagaaataagataggacagagctc

SEQ ID NO: 5020975 - DNA, 25 bp, Homo sapien
ggccttggaaaggtatagaattaga

SEQ ID NO: 5020976 - DNA, 25 bp, Homo sapien
taatatcggcttattcagctgaaca

SEQ ID NO: 5020977 - DNA, 25 bp, Homo sapien
caggtatgctagaaaccaagactgc

SEQ ID NO: 5020978 - DNA, 25 bp, Homo sapien
aagacacaaataaggtaaactgaca

SEQ ID NO: 5020979 - DNA, 25 bp, Homo sapien
ttagaatgctagaatagaactcagg

SEQ ID NO: 5020980 - DNA, 25 bp, Homo sapien
cagggcctccaaataggattgcaca

SEQ ID NO: 5020981 - DNA, 25 bp, Homo sapien
tctgcaagctgatcctgaagcagcc

SEQ ID NO: 5020982 - DNA, 25 bp, Homo sapien
tctttgatgactaggatactcggga

SEQ ID NO: 5020983 - DNA, 25 bp, Homo sapien
taaagagtttatgacacccagtacg

SEQ ID NO: 5020984 - DNA, 25 bp, Homo sapien
tacttcaattggtcctatattagga

SEQ ID NO: 5020985 - DNA, 25 bp, Homo sapien
tatcaaacaaggctacgtgtaggct

SEQ ID NO: 5020986 - DNA, 25 bp, Homo sapien
tctctagtcacttccgtgtttttat

SEQ ID NO: 5020987 - DNA, 25 bp, Homo sapien
gttttgatagcaaggacttcctagc

SEQ ID NO: 5020988 - DNA, 25 bp, Homo sapien
cagaggtagcgttaggatgcaatat

SEQ ID NO: 5020989 - DNA, 25 bp, Homo sapien
gccctcactgctttgcgctaagaaa

SEQ ID NO: 5020990 - DNA, 25 bp, Homo sapien
tgcaaaaagaacatgtactgccctc

SEQ ID NO: 5020991 - DNA, 25 bp, Homo sapien
tacaaagtcaggttgagtcagaggt

SEQ ID NO: 5020992 - DNA, 25 bp, Homo sapien
ttccacgaagggtagcaccccactc

SEQ ID NO: 5020993 - DNA, 25 bp, Homo sapien
tcaggctggttttccacgaagggta

SEQ ID NO: 5020994 - DNA, 25 bp, Homo sapien
gctggttttccacgaagggtagcac

SEQ ID NO: 5020995 - DNA, 25 bp, Homo sapien
ttaatgcaccagttcaggctggttt

SEQ ID NO: 5020996 - DNA, 25 bp, Homo sapien
caccttgctgcaggttgggattgag

SEQ ID NO: 5020997 - DNA, 25 bp, Homo sapien
tcctgccacgtggttcggaagctgg

SEQ ID NO: 5020998 - DNA, 25 bp, Homo sapien
gatcaacagcaatactctccagaag

SEQ ID NO: 5020999 - DNA, 25 bp, Homo sapien
ccaagagacagcaaagcaatgacga

SEQ ID NO: 5021000 - DNA, 25 bp, Homo sapien
ttatttactcctctgcgctttgcca

SEQ ID NO: 5021001 - DNA, 25 bp, Homo sapien
tctcagctgtttgcatggtctccag

SEQ ID NO: 5021002 - DNA, 25 bp, Homo sapien
caaagattccagcaatcggatgaca

SEQ ID NO: 5021003 - DNA, 25 bp, Homo sapien
tctccagtttcgagtgggttcctct

SEQ ID NO: 5021004 - DNA, 25 bp, Homo sapien
tgtggccagaagatcggcaccgaat

SEQ ID NO: 5021005 - DNA, 25 bp, Homo sapien
caaggtgaaggcctgttctgcccct

SEQ ID NO: 5021006 - DNA, 25 bp, Homo sapien
tacattccctcgagctgctgcaagg

SEQ ID NO: 5021007 - DNA, 25 bp, Homo sapien
tgcccctgctgtcacgaatatttgg

SEQ ID NO: 5021008 - DNA, 25 bp, Homo sapien
agaatcatttacaaaaacatacgac

SEQ ID NO: 5021009 - DNA, 25 bp, Homo sapien
ctgagaagaatcatttacaaaaaca

SEQ ID NO: 5021010 - DNA, 25 bp, Homo sapien
aatcatttacaaaaacatacgacat

SEQ ID NO: 5021011 - DNA, 25 bp, Homo sapien
gaagaatcatttacaaaaacatacg

SEQ ID NO: 5021012 - DNA, 25 bp, Homo sapien
ttctgatgtggtggatggaacacgc

SEQ ID NO: 5021013 - DNA, 25 bp, Homo sapien
tgttctgatgtggtggatggaacac

SEQ ID NO: 5021014 - DNA, 25 bp, Homo sapien
gttctgatgtggtggatggaacacg

SEQ ID NO: 5021015 - DNA, 25 bp, Homo sapien
tggtgtttaaacatcaaagaactac

SEQ ID NO: 5021016 - DNA, 25 bp, Homo sapien
caacaaagacctgtagagtgttatg

SEQ ID NO: 5021017 - DNA, 25 bp, Homo sapien
taaatgctactgctggtagacattc

SEQ ID NO: 5021018 - DNA, 25 bp, Homo sapien
ttgtcagaacacatagataacatgg

SEQ ID NO: 5021019 - DNA, 25 bp, Homo sapien
cccactggcgcacctgaactcaggt

SEQ ID NO: 5021020 - DNA, 25 bp, Homo sapien
cagtttgcccacatctctttcacag

SEQ ID NO: 5021021 - DNA, 25 bp, Homo sapien
cctggccccactggcgcacctgaac

SEQ ID NO: 5021022 - DNA, 25 bp, Homo sapien
ctttcacagatgtttcctggcccca

SEQ ID NO: 5021023 - DNA, 25 bp, Homo sapien
ctgctgagtttggtgagattgctgc

SEQ ID NO: 5021024 - DNA, 25 bp, Homo sapien
gggctgccttacacaagggctctgc

SEQ ID NO: 5021025 - DNA, 25 bp, Homo sapien
gattgctgcccctattcctttcaac

SEQ ID NO: 5021026 - DNA, 25 bp, Homo sapien
tggtgagattgctgcccctattcct

SEQ ID NO: 5021027 - DNA, 25 bp, Homo sapien
aaagagtgggcattaacatacactg

SEQ ID NO: 5021028 - DNA, 25 bp, Homo sapien
ggaaagagtgggcattaacatacac

SEQ ID NO: 5021029 - DNA, 25 bp, Homo sapien
ctgtggaaagagtgggcattaacat

SEQ ID NO: 5021030 - DNA, 25 bp, Homo sapien
tgtggaaagagtgggcattaacata

SEQ ID NO: 5021031 - DNA, 25 bp, Homo sapien
gcgatgagctgtgattgagccacag

SEQ ID NO: 5021032 - DNA, 25 bp, Homo sapien
ctgttcgggacgctgaggtgagagg

SEQ ID NO: 5021033 - DNA, 25 bp, Homo sapien
ggaggtcgaggttgcgatgagctgt

SEQ ID NO: 5021034 - DNA, 25 bp, Homo sapien
tgttcgggacgctgaggtgagagga

SEQ ID NO: 5021035 - DNA, 25 bp, Homo sapien
gatacttctgagtgttggctcagca

SEQ ID NO: 5021036 - DNA, 25 bp, Homo sapien
tcttgtggtttgcagactaggatac

SEQ ID NO: 5021037 - DNA, 25 bp, Homo sapien
tgtgtccctgagcaactactaaact

SEQ ID NO: 5021038 - DNA, 25 bp, Homo sapien
tggacaagcttgcacagtattgaat

SEQ ID NO: 5021039 - DNA, 25 bp, Homo sapien
gatcttttcgttcagtggtcactca

SEQ ID NO: 5021040 - DNA, 25 bp, Homo sapien
ccttaagattagatcttttcgttca

SEQ ID NO: 5021041 - DNA, 25 bp, Homo sapien
aatattctgtaatgtgctggcaagg

SEQ ID NO: 5021042 - DNA, 25 bp, Homo sapien
gaattctcaagaaggttcaacaaaa

SEQ ID NO: 5021043 - DNA, 25 bp, Homo sapien
ttaagttataatagaagtgtggtga

SEQ ID NO: 5021044 - DNA, 25 bp, Homo sapien
aattaagttataatagaagtgtggt

SEQ ID NO: 5021045 - DNA, 25 bp, Homo sapien
aagttataatagaagtgtggtgaga

SEQ ID NO: 5021046 - DNA, 25 bp, Homo sapien
taagttataatagaagtgtggtgag

SEQ ID NO: 5021047 - DNA, 25 bp, Homo sapien
ggaagaaagcttgcatacagcactg

SEQ ID NO: 5021048 - DNA, 25 bp, Homo sapien
tagttggcagtaaagacctccagga

SEQ ID NO: 5021049 - DNA, 25 bp, Homo sapien
gtcaatatgggaataaccacgcccc

SEQ ID NO: 5021050 - DNA, 25 bp, Homo sapien
catagtctagtgcaagaacagtcaa

SEQ ID NO: 5021051 - DNA, 25 bp, Homo sapien
ggttcagaggcagactagctggcat

SEQ ID NO: 5021052 - DNA, 25 bp, Homo sapien
tggttcccaaggaacagtgtccatg

SEQ ID NO: 5021053 - DNA, 25 bp, Homo sapien
cccaaggaacagtgtccatgaggaa

SEQ ID NO: 5021054 - DNA, 25 bp, Homo sapien
tggttcagaggcagactagctggca

SEQ ID NO: 5021055 - DNA, 25 bp, Homo sapien
tagcctgacacttaaaactcctcac

SEQ ID NO: 5021056 - DNA, 25 bp, Homo sapien
ttttgagggctggtgtagcctgaca

SEQ ID NO: 5021057 - DNA, 25 bp, Homo sapien
tgtagcctgacacttaaaactcctc

SEQ ID NO: 5021058 - DNA, 25 bp, Homo sapien
ggtgtagcctgacacttaaaactcc

SEQ ID NO: 5021059 - DNA, 25 bp, Homo sapien
gggagaacattagtctagcatacac

SEQ ID NO: 5021060 - DNA, 25 bp, Homo sapien
cttaaactgtagaaacaatacctgg

SEQ ID NO: 5021061 - DNA, 25 bp, Homo sapien
tgtcttcatcaaacataagggagaa

SEQ ID NO: 5021062 - DNA, 25 bp, Homo sapien
tctcaagtacttcctactgattggg

SEQ ID NO: 5021063 - DNA, 25 bp, Homo sapien
gagggtacctctgttataactgatg

SEQ ID NO: 5021064 - DNA, 25 bp, Homo sapien
cattactagtatcacaactgagctg

SEQ ID NO: 5021065 - DNA, 25 bp, Homo sapien
tagcatcaggcagattaggttcact

SEQ ID NO: 5021066 - DNA, 25 bp, Homo sapien
taactgatgatcctacactaacaca

SEQ ID NO: 5021067 - DNA, 25 bp, Homo sapien
gactgcccagaagctgaaggtctct

SEQ ID NO: 5021068 - DNA, 25 bp, Homo sapien
ggtacacgacaagatagagctcttt

SEQ ID NO: 5021069 - DNA, 25 bp, Homo sapien
acgacaagatagagctctttgtggg

SEQ ID NO: 5021070 - DNA, 25 bp, Homo sapien
ggggctggttgtcgagcagtcttac

SEQ ID NO: 5021071 - DNA, 25 bp, Homo sapien
aggccatatgggccaccaccctgtt

SEQ ID NO: 5021072 - DNA, 25 bp, Homo sapien
tccttggaggccatatgggccacca

SEQ ID NO: 5021073 - DNA, 25 bp, Homo sapien
gccatatgggccaccaccctgttgc

SEQ ID NO: 5021074 - DNA, 25 bp, Homo sapien
aattcactgttgtacgaggaaatga

SEQ ID NO: 5021075 - DNA, 25 bp, Homo sapien
gtcagaggaaacaacctggtgttca

SEQ ID NO: 5021076 - DNA, 25 bp, Homo sapien
aaagtcagaggaaacaacctggtgt

SEQ ID NO: 5021077 - DNA, 25 bp, Homo sapien
ggaaacaacctggtgttcagtgtag

SEQ ID NO: 5021078 - DNA, 25 bp, Homo sapien
agaggaaacaacctggtgttcagtg

SEQ ID NO: 5021079 - DNA, 25 bp, Homo sapien
ggggccctctgacgcctgcttcacc

SEQ ID NO: 5021080 - DNA, 25 bp, Homo sapien
cttgaggggccctctgacgcctgct

SEQ ID NO: 5021081 - DNA, 25 bp, Homo sapien
tgaggggccctctgacgcctgcttc

SEQ ID NO: 5021082 - DNA, 25 bp, Homo sapien
ggccctctgacgcctgcttcaccac

SEQ ID NO: 5021083 - DNA, 25 bp, Homo sapien
ccagatggcaggtcaggtccacaac

SEQ ID NO: 5021084 - DNA, 25 bp, Homo sapien
atggcaggtcaggtccacaaccaac

SEQ ID NO: 5021085 - DNA, 25 bp, Homo sapien
tttggcaggtttctccagatggcag

SEQ ID NO: 5021086 - DNA, 25 bp, Homo sapien
agatggcaggtcaggtccacaacca

SEQ ID NO: 5021087 - DNA, 25 bp, Homo sapien
acgtttgcagaaggacacggaaggc

SEQ ID NO: 5021088 - DNA, 25 bp, Homo sapien
ctggagagccccacagacatatgcc

SEQ ID NO: 5021089 - DNA, 25 bp, Homo sapien
ggagagccccacagacatatgccac

SEQ ID NO: 5021090 - DNA, 25 bp, Homo sapien
agccccacagacatatgccacagtt

SEQ ID NO: 5021091 - DNA, 25 bp, Homo sapien
agagccccacagacatatgccacag

SEQ ID NO: 5021092 - DNA, 25 bp, Homo sapien
gaggccatcgagtcttctgggcagg

SEQ ID NO: 5021093 - DNA, 25 bp, Homo sapien
gagtggcagcatggattgtggtcac

SEQ ID NO: 5021094 - DNA, 25 bp, Homo sapien
agtggcagcatggattgtggtcaca

SEQ ID NO: 5021095 - DNA, 25 bp, Homo sapien
agaggccatcgagtcttctgggcag

SEQ ID NO: 5021096 - DNA, 25 bp, Homo sapien
ggatcatgcccattatgaatatggg

SEQ ID NO: 5021097 - DNA, 25 bp, Homo sapien
cttggccgggggattaagcagttgg

SEQ ID NO: 5021098 - DNA, 25 bp, Homo sapien
cttctcagggatcatgcccattatg

SEQ ID NO: 5021099 - DNA, 25 bp, Homo sapien
ctcagggatcatgcccattatgaat

SEQ ID NO: 5021100 - DNA, 25 bp, Homo sapien
gccccagccttctctatggtcatga

SEQ ID NO: 5021101 - DNA, 25 bp, Homo sapien
tggactccacggcatactcagcttc

SEQ ID NO: 5021102 - DNA, 25 bp, Homo sapien
agccttctctatggtcatgaagatg

SEQ ID NO: 5021103 - DNA, 25 bp, Homo sapien
cccagccttctctatggtcatgaag

SEQ ID NO: 5021104 - DNA, 25 bp, Homo sapien
ggtgacaatatccactttactagag

SEQ ID NO: 5021105 - DNA, 25 bp, Homo sapien
gtagttgaggtcaatgaagggtcat

SEQ ID NO: 5021106 - DNA, 25 bp, Homo sapien
tgaagggtcattgatggtgacaata

SEQ ID NO: 5021107 - DNA, 25 bp, Homo sapien
gacaatatccactttactagagtta

SEQ ID NO: 5021108 - DNA, 25 bp, Homo sapien
tttaatgtctaagtattcagtgatt

SEQ ID NO: 5021109 - DNA, 25 bp, Homo sapien
taagtattcagtgattttccggcta

SEQ ID NO: 5021110 - DNA, 25 bp, Homo sapien
ttcagtgattttccggctatctttc

SEQ ID NO: 5021111 - DNA, 25 bp, Homo sapien
gctatctttctgttatcaaattgta

SEQ ID NO: 5021112 - DNA, 25 bp, Homo sapien
taaatccaatggtcatctcctagtc

SEQ ID NO: 5021113 - DNA, 25 bp, Homo sapien
tacttggccttcagtactccatact

SEQ ID NO: 5021114 - DNA, 25 bp, Homo sapien
ccaaagagctgtccatactgcagtc

SEQ ID NO: 5021115 - DNA, 25 bp, Homo sapien
gaaagtgctcttgcaaggtcaccaa

SEQ ID NO: 5021116 - DNA, 25 bp, Homo sapien
gaaggcactcaatatacgcttgcta

SEQ ID NO: 5021117 - DNA, 25 bp, Homo sapien
gctcctggaagacaaggacttcatt

SEQ ID NO: 5021118 - DNA, 25 bp, Homo sapien
tcctccagtgacatgttagctcctg

SEQ ID NO: 5021119 - DNA, 25 bp, Homo sapien
gactccagatacgttaactttcaca

SEQ ID NO: 5021120 - DNA, 25 bp, Homo sapien
ctttgctagctttctgaccttggag

SEQ ID NO: 5021121 - DNA, 25 bp, Homo sapien
ttgctagctttctgaccttggagaa

SEQ ID NO: 5021122 - DNA, 25 bp, Homo sapien
cagcctttgctagctttctgacctt

SEQ ID NO: 5021123 - DNA, 25 bp, Homo sapien
gcctttgctagctttctgaccttgg

SEQ ID NO: 5021124 - DNA, 25 bp, Homo sapien
gccatgtgccattctggagagctca

SEQ ID NO: 5021125 - DNA, 25 bp, Homo sapien
gaagtttgcgattacccgagcccta

SEQ ID NO: 5021126 - DNA, 25 bp, Homo sapien
tatcaagtggctctagcccaggcgc

SEQ ID NO: 5021127 - DNA, 25 bp, Homo sapien
ctacagggacggtgcaggagatatc

SEQ ID NO: 5021128 - DNA, 25 bp, Homo sapien
tgcgactcgaacgagcagcagcgac

SEQ ID NO: 5021129 - DNA, 25 bp, Homo sapien
gcgactcgaacgagcagcagcgaca

SEQ ID NO: 5021130 - DNA, 25 bp, Homo sapien
ctgcgactcgaacgagcagcagcga

SEQ ID NO: 5021131 - DNA, 25 bp, Homo sapien
cgactcgaacgagcagcagcgacag

SEQ ID NO: 5021132 - DNA, 25 bp, Homo sapien
tgacgaatgaccatgagagggagac

SEQ ID NO: 5021133 - DNA, 25 bp, Homo sapien
gctcctgacaggtgttgcttccgtg

SEQ ID NO: 5021134 - DNA, 25 bp, Homo sapien
tgagagggagacatgctcctgacag

SEQ ID NO: 5021135 - DNA, 25 bp, Homo sapien
tggtttctgtagtactgacgaatga

SEQ ID NO: 5021136 - DNA, 25 bp, Homo sapien
tcctccagttcctttctggccctgg

SEQ ID NO: 5021137 - DNA, 25 bp, Homo sapien
ctccagttcctttctggccctggtt

SEQ ID NO: 5021138 - DNA, 25 bp, Homo sapien
cctccagttcctttctggccctggt

SEQ ID NO: 5021139 - DNA, 25 bp, Homo sapien
ttcctccagttcctttctggccctg

SEQ ID NO: 5021140 - DNA, 25 bp, Homo sapien
taacaatggtcaagcagagaacagg

SEQ ID NO: 5021141 - DNA, 25 bp, Homo sapien
cagggcagcgtttcactttgagtac

SEQ ID NO: 5021142 - DNA, 25 bp, Homo sapien
cactgatggtaggtagcccacctga

SEQ ID NO: 5021143 - DNA, 25 bp, Homo sapien
tattctcctccgttgaagagtcaca

SEQ ID NO: 5021144 - DNA, 25 bp, Homo sapien
tcttgatagaaaactagaatagtct

SEQ ID NO: 5021145 - DNA, 25 bp, Homo sapien
ccaaaaacgcagtcatctttagcta

SEQ ID NO: 5021146 - DNA, 25 bp, Homo sapien
ctttatgttcccaaaaacgcagtca

SEQ ID NO: 5021147 - DNA, 25 bp, Homo sapien
gcagtcatctttagctatcttaatc

SEQ ID NO: 5021148 - DNA, 25 bp, Homo sapien
ctggctttgttgaatgtggtatttt

SEQ ID NO: 5021149 - DNA, 25 bp, Homo sapien
tttgctttgttccggaacttcaatc

SEQ ID NO: 5021150 - DNA, 25 bp, Homo sapien
tgctttgttccggaacttcaatctg

SEQ ID NO: 5021151 - DNA, 25 bp, Homo sapien
gctttgttgaatgtggtatttttta

SEQ ID NO: 5021152 - DNA, 25 bp, Homo sapien
ttaagatgatcaaaatcttggactc

SEQ ID NO: 5021153 - DNA, 25 bp, Homo sapien
tttactactctctagcacatcttga

SEQ ID NO: 5021154 - DNA, 25 bp, Homo sapien
cacatcttgaattgttcagtcacca

SEQ ID NO: 5021155 - DNA, 25 bp, Homo sapien
taatctcagcctaagagggtccatc

SEQ ID NO: 5021156 - DNA, 25 bp, Homo sapien
ctgcctgagaggttggattttatta

SEQ ID NO: 5021157 - DNA, 25 bp, Homo sapien
tcaagcagctactcagcaaaaaagc

SEQ ID NO: 5021158 - DNA, 25 bp, Homo sapien
taccatcttttctgagatcatcttt

SEQ ID NO: 5021159 - DNA, 25 bp, Homo sapien
catctttttcaagcagctactcagc

SEQ ID NO: 5021160 - DNA, 25 bp, Homo sapien
ttctcagcagctagctttaccatct

SEQ ID NO: 5021161 - DNA, 25 bp, Homo sapien
atttgctcctttcccacttatcctt

SEQ ID NO: 5021162 - DNA, 25 bp, Homo sapien
gaacttagcgcagggctgtgttcag

SEQ ID NO: 5021163 - DNA, 25 bp, Homo sapien
ctgccaatcaaagttgaggctagaa

SEQ ID NO: 5021164 - DNA, 25 bp, Homo sapien
agttgaggctagaagaacttagcgc

SEQ ID NO: 5021165 - DNA, 25 bp, Homo sapien
aatctgagctctaagttctggttga

SEQ ID NO: 5021166 - DNA, 25 bp, Homo sapien
gcaactatcctcactgtattgaaat

SEQ ID NO: 5021167 - DNA, 25 bp, Homo sapien
ggcccatccgtatccagcagagttc

SEQ ID NO: 5021168 - DNA, 25 bp, Homo sapien
taagttctggttgagagttctctgg

SEQ ID NO: 5021169 - DNA, 25 bp, Homo sapien
tacttgaaatgaataggaggaggaa

SEQ ID NO: 5021170 - DNA, 25 bp, Homo sapien
taaagtatgttccatacactcagga

SEQ ID NO: 5021171 - DNA, 25 bp, Homo sapien
taaaatttgcaacgtttagcatgcc

SEQ ID NO: 5021172 - DNA, 25 bp, Homo sapien
tcaatagtacatactcaatgtcagg

SEQ ID NO: 5021173 - DNA, 25 bp, Homo sapien
caaggtacagattcaaatggcaaac

SEQ ID NO: 5021174 - DNA, 25 bp, Homo sapien
tcaaggtacagattcaaatggcaaa

SEQ ID NO: 5021175 - DNA, 25 bp, Homo sapien
actttgtcatccaagggtactagga

SEQ ID NO: 5021176 - DNA, 25 bp, Homo sapien
tgtctccctagtgtcaactttgtca

SEQ ID NO: 5021177 - DNA, 25 bp, Homo sapien
gtactaggatttttaagtcatgggc

SEQ ID NO: 5021178 - DNA, 25 bp, Homo sapien
caaagcaaggtgccaagatactcac

SEQ ID NO: 5021179 - DNA, 25 bp, Homo sapien
ggtatccatagtgccgtacctcccg

SEQ ID NO: 5021180 - DNA, 25 bp, Homo sapien
gcaggtatccatagtgccgtacctc

SEQ ID NO: 5021181 - DNA, 25 bp, Homo sapien
tcacaggtacaaggatccagctgca

SEQ ID NO: 5021182 - DNA, 25 bp, Homo sapien
gctccagagcctgattctgggtagt

SEQ ID NO: 5021183 - DNA, 25 bp, Homo sapien
atcctttttcaatgtcctgtattgc

SEQ ID NO: 5021184 - DNA, 25 bp, Homo sapien
tctggaaagcttctaatttctgcct

SEQ ID NO: 5021185 - DNA, 25 bp, Homo sapien
aagcttctaatttctgcctctgtgc

SEQ ID NO: 5021186 - DNA, 25 bp, Homo sapien
gcctgtgtgggtttggcccatcctt

SEQ ID NO: 5021187 - DNA, 25 bp, Homo sapien
ttcagtctcacacgctctagtgtcc

SEQ ID NO: 5021188 - DNA, 25 bp, Homo sapien
tcagtctcacacgctctagtgtcct

SEQ ID NO: 5021189 - DNA, 25 bp, Homo sapien
tatgttggcggcagcaccggctgac

SEQ ID NO: 5021190 - DNA, 25 bp, Homo sapien
cagaattgtggagccaagcctggaa

SEQ ID NO: 5021191 - DNA, 25 bp, Homo sapien
aagatcaggtctccgaagatggcgg

SEQ ID NO: 5021192 - DNA, 25 bp, Homo sapien
ctttcttcccagaattgtggagcca

SEQ ID NO: 5021193 - DNA, 25 bp, Homo sapien
tgtctgagctcttggtgaccctcac

SEQ ID NO: 5021194 - DNA, 25 bp, Homo sapien
caacatggcctatgatctacggtgc

SEQ ID NO: 5021195 - DNA, 25 bp, Homo sapien
tccaagccaacatggcctatgatct

SEQ ID NO: 5021196 - DNA, 25 bp, Homo sapien
tatgatctacggtgctgtctgagct

SEQ ID NO: 5021197 - DNA, 25 bp, Homo sapien
tccatcagcacggagtcgagggatg

SEQ ID NO: 5021198 - DNA, 25 bp, Homo sapien
gtagagcaaatctaccgccaccctg

SEQ ID NO: 5021199 - DNA, 25 bp, Homo sapien
ctgcatgtagagcaaatctaccgcc

SEQ ID NO: 5021200 - DNA, 25 bp, Homo sapien
accctgcagtccatcagcacggagt

SEQ ID NO: 5021201 - DNA, 25 bp, Homo sapien
gggtgcataaggtcctgctgctcag

SEQ ID NO: 5021202 - DNA, 25 bp, Homo sapien
gagagagcgagcctaaggagcaatc

SEQ ID NO: 5021203 - DNA, 25 bp, Homo sapien
ccacggtaataaacactgggagctg

SEQ ID NO: 5021204 - DNA, 25 bp, Homo sapien
taacagaataaatgggctgggagag

SEQ ID NO: 5021205 - DNA, 25 bp, Homo sapien
ttccaagactaacataagggagttc

SEQ ID NO: 5021206 - DNA, 25 bp, Homo sapien
cacctcagaacttccaagactaaca

SEQ ID NO: 5021207 - DNA, 25 bp, Homo sapien
agactaacataagggagttcaaagt

SEQ ID NO: 5021208 - DNA, 25 bp, Homo sapien
ccaagactaacataagggagttcaa

SEQ ID NO: 5021209 - DNA, 25 bp, Homo sapien
gacacagtccaattttgtgtgacac

SEQ ID NO: 5021210 - DNA, 25 bp, Homo sapien
gtagcccaagagctctcgacacagt

SEQ ID NO: 5021211 - DNA, 25 bp, Homo sapien
cctccttgccaaaccgaatgagaaa

SEQ ID NO: 5021212 - DNA, 25 bp, Homo sapien
caaaccgaatgagaaagaggccgaa

SEQ ID NO: 5021213 - DNA, 25 bp, Homo sapien
cagttctctaggtggcagttgtaca

SEQ ID NO: 5021214 - DNA, 25 bp, Homo sapien
agagctgctttacccacgactccca

SEQ ID NO: 5021215 - DNA, 25 bp, Homo sapien
ctctgtaccacgcaaggagaggcct

SEQ ID NO: 5021216 - DNA, 25 bp, Homo sapien
taaatcacctctgtaccacgcaagg

SEQ ID NO: 5021217 - DNA, 25 bp, Homo sapien
gagcagctgaggaatagtttcacca

SEQ ID NO: 5021218 - DNA, 25 bp, Homo sapien
gagatacataaattacccccaggaa

SEQ ID NO: 5021219 - DNA, 25 bp, Homo sapien
tatgagtgggtgttctcagcatagc

SEQ ID NO: 5021220 - DNA, 25 bp, Homo sapien
ccaggaagcagtctgattaggtggc

SEQ ID NO: 5021221 - DNA, 25 bp, Homo sapien
gatgatgtcaacgtcttgggtctga

SEQ ID NO: 5021222 - DNA, 25 bp, Homo sapien
ggtctgaatttctcacaagccaaca

SEQ ID NO: 5021223 - DNA, 25 bp, Homo sapien
tgtcaacgtcttgggtctgaatttc

SEQ ID NO: 5021224 - DNA, 25 bp, Homo sapien
tgatctgatgatgtcaacgtcttgg

SEQ ID NO: 5021225 - DNA, 25 bp, Homo sapien
gactgcaaatgtacttcatcaaatg

SEQ ID NO: 5021226 - DNA, 25 bp, Homo sapien
ttttctgactgcaaatgtacttcat

SEQ ID NO: 5021227 - DNA, 25 bp, Homo sapien
gcaaatgtacttcatcaaatgtatg

SEQ ID NO: 5021228 - DNA, 25 bp, Homo sapien
ctgactgcaaatgtacttcatcaaa

SEQ ID NO: 5021229 - DNA, 25 bp, Homo sapien
gcagtgtctgatgttataatttcga

SEQ ID NO: 5021230 - DNA, 25 bp, Homo sapien
tactctgttcattgggcagaaatat

SEQ ID NO: 5021231 - DNA, 25 bp, Homo sapien
taatttcgattctaatactctgttc

SEQ ID NO: 5021232 - DNA, 25 bp, Homo sapien
agctttcttggtggcgatgtcaaat

SEQ ID NO: 5021233 - DNA, 25 bp, Homo sapien
ccctaaagcccatatccctgatttt

SEQ ID NO: 5021234 - DNA, 25 bp, Homo sapien
cctaaagcccatatccctgattttt

SEQ ID NO: 5021235 - DNA, 25 bp, Homo sapien
aaaatctgagctgcacaaactgtga

SEQ ID NO: 5021236 - DNA, 25 bp, Homo sapien
gctcctgctggacacaactctgcag

SEQ ID NO: 5021237 - DNA, 25 bp, Homo sapien
ttgctatagcaaaaatctgagctgc

SEQ ID NO: 5021238 - DNA, 25 bp, Homo sapien
cagtgaagggaagtgagttgccatc

SEQ ID NO: 5021239 - DNA, 25 bp, Homo sapien
tgtgtgctagaagcaggaacaaatc

SEQ ID NO: 5021240 - DNA, 25 bp, Homo sapien
cattgttaggccatcagagttcagg

SEQ ID NO: 5021241 - DNA, 25 bp, Homo sapien
ggctgaattgttactccagctgcta

SEQ ID NO: 5021242 - DNA, 25 bp, Homo sapien
agcacaggctgaattgttactccag

SEQ ID NO: 5021243 - DNA, 25 bp, Homo sapien
ctgtcagtccacagacctgcttcat

SEQ ID NO: 5021244 - DNA, 25 bp, Homo sapien
taaaggcgatgctgtcagtccacag

SEQ ID NO: 5021245 - DNA, 25 bp, Homo sapien
gcatctcctaaaggcgatgctgtca

SEQ ID NO: 5021246 - DNA, 25 bp, Homo sapien
cttggcatctcctaaaggcgatgct

SEQ ID NO: 5021247 - DNA, 25 bp, Homo sapien
gccattggtcaggatgagaggaatt

SEQ ID NO: 5021248 - DNA, 25 bp, Homo sapien
gaattggtggcccactgccccttac

SEQ ID NO: 5021249 - DNA, 25 bp, Homo sapien
gaggaattggtggcccactgcccct

SEQ ID NO: 5021250 - DNA, 25 bp, Homo sapien
ccattggtcaggatgagaggaattg

SEQ ID NO: 5021251 - DNA, 25 bp, Homo sapien
cagctggggctgctaatcttgaagc

SEQ ID NO: 5021252 - DNA, 25 bp, Homo sapien
ctccaggtttcgatgctcagtgcaa

SEQ ID NO: 5021253 - DNA, 25 bp, Homo sapien
aattctcactccctcggaagaagga

SEQ ID NO: 5021254 - DNA, 25 bp, Homo sapien
tctggcacgtcctccaggtttcgat

SEQ ID NO: 5021255 - DNA, 25 bp, Homo sapien
gggctgccaagtgcgttgaaaattg

SEQ ID NO: 5021256 - DNA, 25 bp, Homo sapien
agaagggctgccaagtgcgttgaaa

SEQ ID NO: 5021257 - DNA, 25 bp, Homo sapien
aagggctgccaagtgcgttgaaaat

SEQ ID NO: 5021258 - DNA, 25 bp, Homo sapien
ctgccaagtgcgttgaaaattgaac

SEQ ID NO: 5021259 - DNA, 25 bp, Homo sapien
gcacacttggttcatgaagagtgtc

SEQ ID NO: 5021260 - DNA, 25 bp, Homo sapien
tgcacacttggttcatgaagagtgt

SEQ ID NO: 5021261 - DNA, 25 bp, Homo sapien
ctgcacacttggttcatgaagagtg

SEQ ID NO: 5021262 - DNA, 25 bp, Homo sapien
tgcagaggaatgatggccccattaa

SEQ ID NO: 5021263 - DNA, 25 bp, Homo sapien
agaggaatgatggccccattaaaga

SEQ ID NO: 5021264 - DNA, 25 bp, Homo sapien
gcagaggaatgatggccccattaaa

SEQ ID NO: 5021265 - DNA, 25 bp, Homo sapien
cagaggaatgatggccccattaaag

SEQ ID NO: 5021266 - DNA, 25 bp, Homo sapien
aagacatcacttctcaacacgtttg

SEQ ID NO: 5021267 - DNA, 25 bp, Homo sapien
aacgaagacatcacttctcaacacg

SEQ ID NO: 5021268 - DNA, 25 bp, Homo sapien
cacttctcaacacgtttgggtccat

SEQ ID NO: 5021269 - DNA, 25 bp, Homo sapien
ttaaaaactcaacgaagacatcact

SEQ ID NO: 5021270 - DNA, 25 bp, Homo sapien
ggcaagctgttgtactgtaagcctc

SEQ ID NO: 5021271 - DNA, 25 bp, Homo sapien
cgtgacagcctaatcttgccaacaa

SEQ ID NO: 5021272 - DNA, 25 bp, Homo sapien
aacaacagttttgctgtacacagca

SEQ ID NO: 5021273 - DNA, 25 bp, Homo sapien
gtacacagcatttctaggacccagg

SEQ ID NO: 5021274 - DNA, 25 bp, Homo sapien
cagccatagctgtggtcattgccag

SEQ ID NO: 5021275 - DNA, 25 bp, Homo sapien
caaatattgttccagttggtccctc

SEQ ID NO: 5021276 - DNA, 25 bp, Homo sapien
tgccagatagtactttggtgggaag

SEQ ID NO: 5021277 - DNA, 25 bp, Homo sapien
tattgttccagttggtccctcctct

SEQ ID NO: 5021278 - DNA, 25 bp, Homo sapien
acccgtccaggtgcacggagtacag

SEQ ID NO: 5021279 - DNA, 25 bp, Homo sapien
gcaccctgcagaagaggaacccgtc

SEQ ID NO: 5021280 - DNA, 25 bp, Homo sapien
ggaacccgtccaggtgcacggagta

SEQ ID NO: 5021281 - DNA, 25 bp, Homo sapien
cctgcagaagaggaacccgtccagg

SEQ ID NO: 5021282 - DNA, 25 bp, Homo sapien
ccctccctgcccaccctgaccccag

SEQ ID NO: 5021283 - DNA, 25 bp, Homo sapien
caccctgaccccagccctgggcgca

SEQ ID NO: 5021284 - DNA, 25 bp, Homo sapien
accctgaccccagccctgggcgcac

SEQ ID NO: 5021285 - DNA, 25 bp, Homo sapien
tccctgcccaccctgaccccagccc

SEQ ID NO: 5021286 - DNA, 25 bp, Homo sapien
gccccccagcgcgtcggaccgctgc

SEQ ID NO: 5021287 - DNA, 25 bp, Homo sapien
ctgggacaccgggatacagaaatgc

SEQ ID NO: 5021288 - DNA, 25 bp, Homo sapien
cggccccccagcgcgtcggaccgct

SEQ ID NO: 5021289 - DNA, 25 bp, Homo sapien
tgggacaccgggatacagaaatgca

SEQ ID NO: 5021290 - DNA, 25 bp, Homo sapien
gtcttgggagtagcgctgggaaccc

SEQ ID NO: 5021291 - DNA, 25 bp, Homo sapien
ggcctgccacgcgactcagagcgaa

SEQ ID NO: 5021292 - DNA, 25 bp, Homo sapien
tagcgctgggaacccgacctgcggc

SEQ ID NO: 5021293 - DNA, 25 bp, Homo sapien
tctgaactcggcagcggtggacgca

SEQ ID NO: 5021294 - DNA, 25 bp, Homo sapien
gcctcagtcccctaaccttatggag

SEQ ID NO: 5021295 - DNA, 25 bp, Homo sapien
tatggagcctaagcttatttacaga

SEQ ID NO: 5021296 - DNA, 25 bp, Homo sapien
gtgcttcttatgagccaggcgctgc

SEQ ID NO: 5021297 - DNA, 25 bp, Homo sapien
aggctgttagacatggcagcctcag

SEQ ID NO: 5021298 - DNA, 25 bp, Homo sapien
aagaatgaagtggactacttgggag

SEQ ID NO: 5021299 - DNA, 25 bp, Homo sapien
tgaagaatgaagtggactacttggg

SEQ ID NO: 5021300 - DNA, 25 bp, Homo sapien
tccagaggtgaagaatgaagtggac

SEQ ID NO: 5021301 - DNA, 25 bp, Homo sapien
gaggtgaagaatgaagtggactact

SEQ ID NO: 5021302 - DNA, 25 bp, Homo sapien
tcgcgcagcgcgtttgctacttgaa

SEQ ID NO: 5021303 - DNA, 25 bp, Homo sapien
gctcttttctcgacagtacaactgg

SEQ ID NO: 5021304 - DNA, 25 bp, Homo sapien
gctacttgaacgacgggaccatcag

SEQ ID NO: 5021305 - DNA, 25 bp, Homo sapien
tatactccgtctaacagagctgcgc

SEQ ID NO: 5021306 - DNA, 25 bp, Homo sapien
catgtgaattaagacggcgatgtcc

SEQ ID NO: 5021307 - DNA, 25 bp, Homo sapien
tgaagcagtcacagtggagccctct

SEQ ID NO: 5021308 - DNA, 25 bp, Homo sapien
ctcagttgcgaggataccatgtgaa

SEQ ID NO: 5021309 - DNA, 25 bp, Homo sapien
ctcttcctcagttgcgaggatacca

SEQ ID NO: 5021310 - DNA, 25 bp, Homo sapien
ttgttctcatcaactggttgcccat

SEQ ID NO: 5021311 - DNA, 25 bp, Homo sapien
gcattgttctcatcaactggttgcc

SEQ ID NO: 5021312 - DNA, 25 bp, Homo sapien
aagcaaaggatttgcattgttctca

SEQ ID NO: 5021313 - DNA, 25 bp, Homo sapien
agcaaaggatttgcattgttctcat

SEQ ID NO: 5021314 - DNA, 25 bp, Homo sapien
ccagtaggggcactgttactcttcg

SEQ ID NO: 5021315 - DNA, 25 bp, Homo sapien
ctgtcataagcactcgccagtaggg

SEQ ID NO: 5021316 - DNA, 25 bp, Homo sapien
ggaggtttcctgctgtcaaattcac

SEQ ID NO: 5021317 - DNA, 25 bp, Homo sapien
gcactgttactcttcgcagccactt

SEQ ID NO: 5021318 - DNA, 25 bp, Homo sapien
tcacagaggtgtagaatggcaaatg

SEQ ID NO: 5021319 - DNA, 25 bp, Homo sapien
tactttagtactaagtaaatcgatg

SEQ ID NO: 5021320 - DNA, 25 bp, Homo sapien
cacagaggtgtagaatggcaaatgg

SEQ ID NO: 5021321 - DNA, 25 bp, Homo sapien
ttagtactaagtaaatcgatggcac

SEQ ID NO: 5021322 - DNA, 25 bp, Homo sapien
tccaagttggtggtttctgtacttc

SEQ ID NO: 5021323 - DNA, 25 bp, Homo sapien
ctccaagttggtggtttctgtactt

SEQ ID NO: 5021324 - DNA, 25 bp, Homo sapien
caagttggtggtttctgtacttcct

SEQ ID NO: 5021325 - DNA, 25 bp, Homo sapien
acctccggggcggtgctatctttgc

SEQ ID NO: 5021326 - DNA, 25 bp, Homo sapien
tccggggcggtgctatctttgctat

SEQ ID NO: 5021327 - DNA, 25 bp, Homo sapien
cggtgctatctttgctatggtatct

SEQ ID NO: 5021328 - DNA, 25 bp, Homo sapien
gggcggtgctatctttgctatggta

SEQ ID NO: 5021329 - DNA, 25 bp, Homo sapien
aagcagaagatagggttggtgggca

SEQ ID NO: 5021330 - DNA, 25 bp, Homo sapien
cttattgctccttgaattctggccc

SEQ ID NO: 5021331 - DNA, 25 bp, Homo sapien
ctccttgaattctggccctggctcc

SEQ ID NO: 5021332 - DNA, 25 bp, Homo sapien
cctggctccagtttggggccaagca

SEQ ID NO: 5021333 - DNA, 25 bp, Homo sapien
gaggtatcggacaaacccagattga

SEQ ID NO: 5021334 - DNA, 25 bp, Homo sapien
aactagatccttttgctacggagga

SEQ ID NO: 5021335 - DNA, 25 bp, Homo sapien
caggccaccagacaggatgtaatga

SEQ ID NO: 5021336 - DNA, 25 bp, Homo sapien
gctgatcgttttcatggcggtgtca

SEQ ID NO: 5021337 - DNA, 25 bp, Homo sapien
gacaactcgtcactaggattccttt

SEQ ID NO: 5021338 - DNA, 25 bp, Homo sapien
gaacaggaatatgaacaagctcagc

SEQ ID NO: 5021339 - DNA, 25 bp, Homo sapien
tacccagcacggttaaagatctcct

SEQ ID NO: 5021340 - DNA, 25 bp, Homo sapien
gaatgtctgatattccccaggcagt

SEQ ID NO: 5021341 - DNA, 25 bp, Homo sapien
tgccaagcctaaaagtgtgaactct

SEQ ID NO: 5021342 - DNA, 25 bp, Homo sapien
actctagtctgtatgtaggcttgga

SEQ ID NO: 5021343 - DNA, 25 bp, Homo sapien
tcagactgaaggtagtccaagtacc

SEQ ID NO: 5021344 - DNA, 25 bp, Homo sapien
gacaagtcgcggttcagtttgatgc

SEQ ID NO: 5021345 - DNA, 25 bp, Homo sapien
cattgctggccataattgcagtgcc

SEQ ID NO: 5021346 - DNA, 25 bp, Homo sapien
cacatgagcttggttcctcaggcaa

SEQ ID NO: 5021347 - DNA, 25 bp, Homo sapien
cctgcttctttttagtgcacatgag

SEQ ID NO: 5021348 - DNA, 25 bp, Homo sapien
tttgtaaagaatagtcacccatact

SEQ ID NO: 5021349 - DNA, 25 bp, Homo sapien
aaattcatcggtgtagggccaagtg

SEQ ID NO: 5021350 - DNA, 25 bp, Homo sapien
aattcatcggtgtagggccaagtgc

SEQ ID NO: 5021351 - DNA, 25 bp, Homo sapien
aaaaattcatcggtgtagggccaag

SEQ ID NO: 5021352 - DNA, 25 bp, Homo sapien
ttcatcggtgtagggccaagtgcag

SEQ ID NO: 5021353 - DNA, 25 bp, Homo sapien
aaaagattcttatgtcggctcagca

SEQ ID NO: 5021354 - DNA, 25 bp, Homo sapien
taatccgtatggaaaccttaactca

SEQ ID NO: 5021355 - DNA, 25 bp, Homo sapien
ttatcttcaaaagtggatgggtgtc

SEQ ID NO: 5021356 - DNA, 25 bp, Homo sapien
gccttatgcttatgcttgagcccag

SEQ ID NO: 5021357 - DNA, 25 bp, Homo sapien
cctggcatttgctcggtacataagg

SEQ ID NO: 5021358 - DNA, 25 bp, Homo sapien
ttctgagctattccacagtaaagaa

SEQ ID NO: 5021359 - DNA, 25 bp, Homo sapien
tagcattatgtttgctagacctggc

SEQ ID NO: 5021360 - DNA, 25 bp, Homo sapien
ctgagctattccacagtaaagaatt

SEQ ID NO: 5021361 - DNA, 25 bp, Homo sapien
ccataatatttaagtttttcgatgt

SEQ ID NO: 5021362 - DNA, 25 bp, Homo sapien
tagatatttttcttcggtgaagcac

SEQ ID NO: 5021363 - DNA, 25 bp, Homo sapien
ttcttcggtgaagcacaagtttctt

SEQ ID NO: 5021364 - DNA, 25 bp, Homo sapien
agtttcttttcatggtccctgatca

SEQ ID NO: 5021365 - DNA, 25 bp, Homo sapien
gtcttgacatggtaacactggaaca

SEQ ID NO: 5021366 - DNA, 25 bp, Homo sapien
aaagacagtagtagagacccaaggg

SEQ ID NO: 5021367 - DNA, 25 bp, Homo sapien
tactatacaaaatctggcagggcgc

SEQ ID NO: 5021368 - DNA, 25 bp, Homo sapien
gatcgcgtcaatgcactccaggttg

SEQ ID NO: 5021369 - DNA, 25 bp, Homo sapien
tggtgggcttgtagtacagctacag

SEQ ID NO: 5021370 - DNA, 25 bp, Homo sapien
ggtggcactgttaactgctttctgg

SEQ ID NO: 5021371 - DNA, 25 bp, Homo sapien
aaacagttggaacaccggtggcact

SEQ ID NO: 5021372 - DNA, 25 bp, Homo sapien
gcttgtagtacagctacagcttcat

SEQ ID NO: 5021373 - DNA, 25 bp, Homo sapien
aatagcgccacaggttattatgcag

SEQ ID NO: 5021374 - DNA, 25 bp, Homo sapien
tttctccactagagaaagcagcagc

SEQ ID NO: 5021375 - DNA, 25 bp, Homo sapien
tattatgcagactttacaactgtac

SEQ ID NO: 5021376 - DNA, 25 bp, Homo sapien
agaattatgaatcgctcccctgcac

SEQ ID NO: 5021377 - DNA, 25 bp, Homo sapien
ttagaacggagtgactctggagact

SEQ ID NO: 5021378 - DNA, 25 bp, Homo sapien
taccagcaagagtagggtgcatggc

SEQ ID NO: 5021379 - DNA, 25 bp, Homo sapien
gactctggagactcgagcatatgaa

SEQ ID NO: 5021380 - DNA, 25 bp, Homo sapien
aagttctgaattatcaatctccaac

SEQ ID NO: 5021381 - DNA, 25 bp, Homo sapien
atggaagcagtcaaaggttcctgac

SEQ ID NO: 5021382 - DNA, 25 bp, Homo sapien
caacatttgcttttgctcttgagga

SEQ ID NO: 5021383 - DNA, 25 bp, Homo sapien
gccaacatggaagcagtcaaaggtt

SEQ ID NO: 5021384 - DNA, 25 bp, Homo sapien
gcagatgccaacatggaagcagtca

SEQ ID NO: 5021385 - DNA, 25 bp, Homo sapien
atatttatactgtggaacggtgcgg

SEQ ID NO: 5021386 - DNA, 25 bp, Homo sapien
cggtgcggacagcaggagtagctgc

SEQ ID NO: 5021387 - DNA, 25 bp, Homo sapien
tatactgtggaacggtgcggacagc

SEQ ID NO: 5021388 - DNA, 25 bp, Homo sapien
tgcagctgcaggacgtggacccatt

SEQ ID NO: 5021389 - DNA, 25 bp, Homo sapien
agctggtctcatagtactaaatggt

SEQ ID NO: 5021390 - DNA, 25 bp, Homo sapien
aagctggtctcatagtactaaatgg

SEQ ID NO: 5021391 - DNA, 25 bp, Homo sapien
tgtcttcttcgatctgaggtttgca

SEQ ID NO: 5021392 - DNA, 25 bp, Homo sapien
tacattaactgggaaaacttactga

SEQ ID NO: 5021393 - DNA, 25 bp, Homo sapien
ctgggaaaacttactgagtgaaaag

SEQ ID NO: 5021394 - DNA, 25 bp, Homo sapien
gaaaagtgtttatgctgtcttcttc

SEQ ID NO: 5021395 - DNA, 25 bp, Homo sapien
tttgccgcccacacttataaatata

SEQ ID NO: 5021396 - DNA, 25 bp, Homo sapien
tggtttgccgcccacacttataaat

SEQ ID NO: 5021397 - DNA, 25 bp, Homo sapien
cgcccacacttataaatatacctga

SEQ ID NO: 5021398 - DNA, 25 bp, Homo sapien
gggtggtttgccgcccacacttata

SEQ ID NO: 5021399 - DNA, 25 bp, Homo sapien
aggtctggcaccctgagcagtccag

SEQ ID NO: 5021400 - DNA, 25 bp, Homo sapien
cgaggacttggtcttagttgagcaa

SEQ ID NO: 5021401 - DNA, 25 bp, Homo sapien
taggaggatagtatgcagcacggtt

SEQ ID NO: 5021402 - DNA, 25 bp, Homo sapien
tgagcaatttggctaggaggatagt

SEQ ID NO: 5021403 - DNA, 25 bp, Homo sapien
acgaaaaccttcatggttctggttg

SEQ ID NO: 5021404 - DNA, 25 bp, Homo sapien
caaatacgaaaaccttcatggttct

SEQ ID NO: 5021405 - DNA, 25 bp, Homo sapien
aatgaccaaatacgaaaaccttcat

SEQ ID NO: 5021406 - DNA, 25 bp, Homo sapien
tgaccaaatacgaaaaccttcatgg

SEQ ID NO: 5021407 - DNA, 25 bp, Homo sapien
catgaagtaacctgaaggaggtgct

SEQ ID NO: 5021408 - DNA, 25 bp, Homo sapien
tggggaggagaaacatacaaaacca

SEQ ID NO: 5021409 - DNA, 25 bp, Homo sapien
tacaaaaccaaaccctttgctgcga

SEQ ID NO: 5021410 - DNA, 25 bp, Homo sapien
ttgctgcgaccaccctccatcataa

SEQ ID NO: 5021411 - DNA, 25 bp, Homo sapien
tttgctgcgaccaccctccatcata

SEQ ID NO: 5021412 - DNA, 25 bp, Homo sapien
atatgcattaccctagccaggtcag

SEQ ID NO: 5021413 - DNA, 25 bp, Homo sapien
ttagacaattataaatcactgaatc

SEQ ID NO: 5021414 - DNA, 25 bp, Homo sapien
tcaaataactaaaccctgttaatgc

SEQ ID NO: 5021415 - DNA, 25 bp, Homo sapien
tattaagggcaaactacacatatgc

SEQ ID NO: 5021416 - DNA, 25 bp, Homo sapien
tatccagggaacacactgaagacaa

SEQ ID NO: 5021417 - DNA, 25 bp, Homo sapien
tatgctgatgcacaacactcaattt

SEQ ID NO: 5021418 - DNA, 25 bp, Homo sapien
taaaagcattcttgggccgcatgtg

SEQ ID NO: 5021419 - DNA, 25 bp, Homo sapien
tcaggaataaattctatcgtactcc

SEQ ID NO: 5021420 - DNA, 25 bp, Homo sapien
ctttccggagacgttcatcatcaat

SEQ ID NO: 5021421 - DNA, 25 bp, Homo sapien
atggagaaaactctttccggagacg

SEQ ID NO: 5021422 - DNA, 25 bp, Homo sapien
ccggagacgttcatcatcaatacca

SEQ ID NO: 5021423 - DNA, 25 bp, Homo sapien
gacgttcatcatcaataccatcatc

SEQ ID NO: 5021424 - DNA, 25 bp, Homo sapien
ctttttctgagctcgaccaacataa

SEQ ID NO: 5021425 - DNA, 25 bp, Homo sapien
atctggtgatcctatcttgtttcat

SEQ ID NO: 5021426 - DNA, 25 bp, Homo sapien
gtctgccgttccacctttttctgag

SEQ ID NO: 5021427 - DNA, 25 bp, Homo sapien
aatttgcgcttaagttccgtctgcc

SEQ ID NO: 5021428 - DNA, 25 bp, Homo sapien
ctgtgcatcttcatgcctttcaaag

SEQ ID NO: 5021429 - DNA, 25 bp, Homo sapien
aaagcttacaaatccaaatcctttg

SEQ ID NO: 5021430 - DNA, 25 bp, Homo sapien
tcaaagcttacaaatccaaatcctt

SEQ ID NO: 5021431 - DNA, 25 bp, Homo sapien
cttcatgcctttcaaagcttacaaa

SEQ ID NO: 5021432 - DNA, 25 bp, Homo sapien
ccgggctagtctaaaacttgtggct

SEQ ID NO: 5021433 - DNA, 25 bp, Homo sapien
tttagaagatgtatgggccaaggca

SEQ ID NO: 5021434 - DNA, 25 bp, Homo sapien
ttggcctacccgactttcaacagga

SEQ ID NO: 5021435 - DNA, 25 bp, Homo sapien
ttgacctccccaagcgctagggtta

SEQ ID NO: 5021436 - DNA, 25 bp, Homo sapien
ctcgttctttacgagacttaaatcg

SEQ ID NO: 5021437 - DNA, 25 bp, Homo sapien
cattggtgaattcttttgccctagc

SEQ ID NO: 5021438 - DNA, 25 bp, Homo sapien
tacgagacttaaatcgtccaacaaa

SEQ ID NO: 5021439 - DNA, 25 bp, Homo sapien
atccttaaggcgctcatcatccatg

SEQ ID NO: 5021440 - DNA, 25 bp, Homo sapien
tgtaccatgccaataaaaagacctc

SEQ ID NO: 5021441 - DNA, 25 bp, Homo sapien
taaacttcccaatcgtgtactctaa

SEQ ID NO: 5021442 - DNA, 25 bp, Homo sapien
tcttctctagctaacctagggttaa

SEQ ID NO: 5021443 - DNA, 25 bp, Homo sapien
gggatcactcccatcaatacaaatg

SEQ ID NO: 5021444 - DNA, 25 bp, Homo sapien
cttatgtgcatctaacttctccctg

SEQ ID NO: 5021445 - DNA, 25 bp, Homo sapien
atatgattagctagatatttataac

SEQ ID NO: 5021446 - DNA, 25 bp, Homo sapien
tgtatgttacacttactgtgtagaa

SEQ ID NO: 5021447 - DNA, 25 bp, Homo sapien
aatgaatggatttggaattattaaa

SEQ ID NO: 5021448 - DNA, 25 bp, Homo sapien
tcagctgcttcctgcgtctcaaagt

SEQ ID NO: 5021449 - DNA, 25 bp, Homo sapien
cgtctcaaagtgtacaaatccatag

SEQ ID NO: 5021450 - DNA, 25 bp, Homo sapien
gcgatcatttaggagcattccattc

SEQ ID NO: 5021451 - DNA, 25 bp, Homo sapien
tccatagcccttggaaccattttca

SEQ ID NO: 5021452 - DNA, 25 bp, Homo sapien
tgttgagagacaatctgttagccat

SEQ ID NO: 5021453 - DNA, 25 bp, Homo sapien
tttcaagcactaaactaaatgtagc

SEQ ID NO: 5021454 - DNA, 25 bp, Homo sapien
aaagatatccattactgcacagttc

SEQ ID NO: 5021455 - DNA, 25 bp, Homo sapien
tagccatctaacctggatatttgtg

SEQ ID NO: 5021456 - DNA, 25 bp, Homo sapien
tattatcaatggatttgtccagatt

SEQ ID NO: 5021457 - DNA, 25 bp, Homo sapien
tttattatcaatggatttgtccaga

SEQ ID NO: 5021458 - DNA, 25 bp, Homo sapien
ttattatcaatggatttgtccagat

SEQ ID NO: 5021459 - DNA, 25 bp, Homo sapien
aattcatggtgtccaaagcacgctc

SEQ ID NO: 5021460 - DNA, 25 bp, Homo sapien
tggcttgccctttataacatcaaaa

SEQ ID NO: 5021461 - DNA, 25 bp, Homo sapien
caaaattcatggtgtccaaagcacg

SEQ ID NO: 5021462 - DNA, 25 bp, Homo sapien
attcatggtgtccaaagcacgctcc

SEQ ID NO: 5021463 - DNA, 25 bp, Homo sapien
gacattacgcaacagatttatctac

SEQ ID NO: 5021464 - DNA, 25 bp, Homo sapien
taacttcttcccaactacttgctaa

SEQ ID NO: 5021465 - DNA, 25 bp, Homo sapien
catttcattgctaataactaacaat

SEQ ID NO: 5021466 - DNA, 25 bp, Homo sapien
tatgaaaactagtccatttcctaaa

SEQ ID NO: 5021467 - DNA, 25 bp, Homo sapien
gacaggatgaattttccggccacct

SEQ ID NO: 5021468 - DNA, 25 bp, Homo sapien
taggttgtgataacctgccccaaag

SEQ ID NO: 5021469 - DNA, 25 bp, Homo sapien
tgacatgcattgatacatcctgcct

SEQ ID NO: 5021470 - DNA, 25 bp, Homo sapien
gtaaccacggcaacctgaagttcaa

SEQ ID NO: 5021471 - DNA, 25 bp, Homo sapien
gatttacaggtatcatgggccactt

SEQ ID NO: 5021472 - DNA, 25 bp, Homo sapien
gccttcaaagtggtcggctgccaca

SEQ ID NO: 5021473 - DNA, 25 bp, Homo sapien
catgctacagataagactggtccag

SEQ ID NO: 5021474 - DNA, 25 bp, Homo sapien
tactcgaaaaccaccagtactgtga

SEQ ID NO: 5021475 - DNA, 25 bp, Homo sapien
cccggccgggctgaacttctcgtag

SEQ ID NO: 5021476 - DNA, 25 bp, Homo sapien
cccccacgtagagcgaggccatggg

SEQ ID NO: 5021477 - DNA, 25 bp, Homo sapien
gctgctggaagttcacatacgcgta

SEQ ID NO: 5021478 - DNA, 25 bp, Homo sapien
gctgaacttctcgtagagcatcgcc

SEQ ID NO: 5021479 - DNA, 25 bp, Homo sapien
acggctgcccgcagggccacaggcc

SEQ ID NO: 5021480 - DNA, 25 bp, Homo sapien
ctcggcacggctgcccgcagggcca

SEQ ID NO: 5021481 - DNA, 25 bp, Homo sapien
gctgcccgcagggccacaggccgcg

SEQ ID NO: 5021482 - DNA, 25 bp, Homo sapien
tgcccgcagggccacaggccgcgac

SEQ ID NO: 5021483 - DNA, 25 bp, Homo sapien
ctttccgtgagaggaggagagcgag

SEQ ID NO: 5021484 - DNA, 25 bp, Homo sapien
ccgtgagaggaggagagcgagtgcc

SEQ ID NO: 5021485 - DNA, 25 bp, Homo sapien
tgagaggaggagagcgagtgccggg

SEQ ID NO: 5021486 - DNA, 25 bp, Homo sapien
tttccgtgagaggaggagagcgagt

SEQ ID NO: 5021487 - DNA, 25 bp, Homo sapien
gggagcaagcgcagagggacaaaaa

SEQ ID NO: 5021488 - DNA, 25 bp, Homo sapien
ggagcggggagcaagcgcagaggga

SEQ ID NO: 5021489 - DNA, 25 bp, Homo sapien
gagcaagcgcagagggacaaaaatc

SEQ ID NO: 5021490 - DNA, 25 bp, Homo sapien
aggggagcggggagcaagcgcagag

SEQ ID NO: 5021491 - DNA, 25 bp, Homo sapien
cgctggctgccggctgccggcgggg

SEQ ID NO: 5021492 - DNA, 25 bp, Homo sapien
gctgccggctgccggcggggagcga

SEQ ID NO: 5021493 - DNA, 25 bp, Homo sapien
gggtcgatccactgccgctggctgc

SEQ ID NO: 5021494 - DNA, 25 bp, Homo sapien
ggggtcgatccactgccgctggctg

SEQ ID NO: 5021495 - DNA, 25 bp, Homo sapien
cagcgggaaggcctcggtctcttgg

SEQ ID NO: 5021496 - DNA, 25 bp, Homo sapien
ggtggcggtgtcgggtccgggcagc

SEQ ID NO: 5021497 - DNA, 25 bp, Homo sapien
gcggtgtcgggtccgggcagcggga

SEQ ID NO: 5021498 - DNA, 25 bp, Homo sapien
cctcggtctcttggttccttcttgg

SEQ ID NO: 5021499 - DNA, 25 bp, Homo sapien
aataaatgtgtgttccgagcccgga

SEQ ID NO: 5021500 - DNA, 25 bp, Homo sapien
ctacgcgagcgtcagcgccggagta

SEQ ID NO: 5021501 - DNA, 25 bp, Homo sapien
ctccaccaggaggagcgttaacccg

SEQ ID NO: 5021502 - DNA, 25 bp, Homo sapien
cgaaacgtgcgtagatggagccagc

SEQ ID NO: 5021503 - DNA, 25 bp, Homo sapien
ccggaccgcactacgagtcccagcc

SEQ ID NO: 5021504 - DNA, 25 bp, Homo sapien
ctacgagtcccagccggcaccgccg

SEQ ID NO: 5021505 - DNA, 25 bp, Homo sapien
gccgccacgcgcgtcggccgcagaa

SEQ ID NO: 5021506 - DNA, 25 bp, Homo sapien
cgcgtcggccgcagaagcggtgcct

SEQ ID NO: 5021507 - DNA, 25 bp, Homo sapien
ccccaaccgtcctgcgcgctggacc

SEQ ID NO: 5021508 - DNA, 25 bp, Homo sapien
ccgcggcgctcgctgacaccaactg

SEQ ID NO: 5021509 - DNA, 25 bp, Homo sapien
gacaccaactggctgcgcgggtcct

SEQ ID NO: 5021510 - DNA, 25 bp, Homo sapien
ctgcgcgctggaccccggcaccgct

SEQ ID NO: 5021511 - DNA, 25 bp, Homo sapien
tctcagctccacaagctgtttcggg

SEQ ID NO: 5021512 - DNA, 25 bp, Homo sapien
agctgtttcggggagcgcttcctga

SEQ ID NO: 5021513 - DNA, 25 bp, Homo sapien
cacaagctgtttcggggagcgcttc

SEQ ID NO: 5021514 - DNA, 25 bp, Homo sapien
ttcggggagcgcttcctgacatgct

SEQ ID NO: 5021515 - DNA, 25 bp, Homo sapien
tcctgttgtccagaagtccttgctt

SEQ ID NO: 5021516 - DNA, 25 bp, Homo sapien
gcttgtccctgcttgcctgactttg

SEQ ID NO: 5021517 - DNA, 25 bp, Homo sapien
gcactagaaatgagaacccagccag

SEQ ID NO: 5021518 - DNA, 25 bp, Homo sapien
gctcctggagtttagagctaacatg

SEQ ID NO: 5021519 - DNA, 25 bp, Homo sapien
ccttgtcaagagttgtgccaatttt

SEQ ID NO: 5021520 - DNA, 25 bp, Homo sapien
ttgtcaagagttgtgccaattttct

SEQ ID NO: 5021521 - DNA, 25 bp, Homo sapien
cttgtcaagagttgtgccaattttc

SEQ ID NO: 5021522 - DNA, 25 bp, Homo sapien
tccttgtcaagagttgtgccaattt

SEQ ID NO: 5021523 - DNA, 25 bp, Homo sapien
gattccagtatgctcaggaagcctc

SEQ ID NO: 5021524 - DNA, 25 bp, Homo sapien
attccagtatgctcaggaagcctct

SEQ ID NO: 5021525 - DNA, 25 bp, Homo sapien
ttgatgacccattacaacctgaacc

SEQ ID NO: 5021526 - DNA, 25 bp, Homo sapien
gttgatgacccattacaacctgaac

SEQ ID NO: 5021527 - DNA, 25 bp, Homo sapien
ttgtccaaaggcagtcctgacggga

SEQ ID NO: 5021528 - DNA, 25 bp, Homo sapien
tcctgacgggatggcaggaataagt

SEQ ID NO: 5021529 - DNA, 25 bp, Homo sapien
gaactagatttagcaaagcactctc

SEQ ID NO: 5021530 - DNA, 25 bp, Homo sapien
taggagtaaaatagtggacgcaata

SEQ ID NO: 5021531 - DNA, 25 bp, Homo sapien
tgaccaggatgaagactttagttat

SEQ ID NO: 5021532 - DNA, 25 bp, Homo sapien
gaccaggatgaagactttagttatc

SEQ ID NO: 5021533 - DNA, 25 bp, Homo sapien
agttgaccaggatgaagactttagt

SEQ ID NO: 5021534 - DNA, 25 bp, Homo sapien
gttgaccaggatgaagactttagtt

SEQ ID NO: 5021535 - DNA, 25 bp, Homo sapien
cattcaagagctgcaccgtatttcc

SEQ ID NO: 5021536 - DNA, 25 bp, Homo sapien
tcaagagctgcaccgtatttccaag

SEQ ID NO: 5021537 - DNA, 25 bp, Homo sapien
agtcatcattcaagagctgcaccgt

SEQ ID NO: 5021538 - DNA, 25 bp, Homo sapien
gctgcaccgtatttccaagttcttg

SEQ ID NO: 5021539 - DNA, 25 bp, Homo sapien
aggaatcagtagctggttgtgataa

SEQ ID NO: 5021540 - DNA, 25 bp, Homo sapien
ggaatcagtagctggttgtgataaa

SEQ ID NO: 5021541 - DNA, 25 bp, Homo sapien
gaatcagtagctggttgtgataaat

SEQ ID NO: 5021542 - DNA, 25 bp, Homo sapien
aaggaatcagtagctggttgtgata

SEQ ID NO: 5021543 - DNA, 25 bp, Homo sapien
tgatacctctgtgcctatgcaggag

SEQ ID NO: 5021544 - DNA, 25 bp, Homo sapien
gacccgccctgagtctaattgacac

SEQ ID NO: 5021545 - DNA, 25 bp, Homo sapien
tcctatttgcttgagcagacccgcc

SEQ ID NO: 5021546 - DNA, 25 bp, Homo sapien
ccaggtgggtttatgggcttctcct

SEQ ID NO: 5021547 - DNA, 25 bp, Homo sapien
aatgtggccagtgagagatattttc

SEQ ID NO: 5021548 - DNA, 25 bp, Homo sapien
acatgtgagttgaggtggccgaata

SEQ ID NO: 5021549 - DNA, 25 bp, Homo sapien
accatcaatgacaatagaaggcagt

SEQ ID NO: 5021550 - DNA, 25 bp, Homo sapien
aaggcagtatagatagagcaccaac

SEQ ID NO: 5021551 - DNA, 25 bp, Homo sapien
gctccatgcgtgtctttctggtgtc

SEQ ID NO: 5021552 - DNA, 25 bp, Homo sapien
gctggatagcttgacttcagttctg

SEQ ID NO: 5021553 - DNA, 25 bp, Homo sapien
caggggttttcctttgcggctggat

SEQ ID NO: 5021554 - DNA, 25 bp, Homo sapien
tgttcctagtccagaacgagttgct

SEQ ID NO: 5021555 - DNA, 25 bp, Homo sapien
ggcttcagaacacctgggggttgat

SEQ ID NO: 5021556 - DNA, 25 bp, Homo sapien
tgtttctcaagtcccagggctcagg

SEQ ID NO: 5021557 - DNA, 25 bp, Homo sapien
cagccacaatggtcaagaaagagaa

SEQ ID NO: 5021558 - DNA, 25 bp, Homo sapien
gatgtcttacacttggtgtttctca

SEQ ID NO: 5021559 - DNA, 25 bp, Homo sapien
ggccagctactcagcaagacatcag

SEQ ID NO: 5021560 - DNA, 25 bp, Homo sapien
gaaataggatcgtttcacataaaca

SEQ ID NO: 5021561 - DNA, 25 bp, Homo sapien
tccagttaaagcagacgagcctgtt

SEQ ID NO: 5021562 - DNA, 25 bp, Homo sapien
gaccccattgttcaaagttcttgcc

SEQ ID NO: 5021563 - DNA, 25 bp, Homo sapien
tgattgccctcctataagctggaga

SEQ ID NO: 5021564 - DNA, 25 bp, Homo sapien
tgtcctgaagcgtccttgtcatcca

SEQ ID NO: 5021565 - DNA, 25 bp, Homo sapien
tctcttggacttctctgttgggata

SEQ ID NO: 5021566 - DNA, 25 bp, Homo sapien
tatttcacgggcacctcaaactcaa

SEQ ID NO: 5021567 - DNA, 25 bp, Homo sapien
gaagatcagcttcggcaaacttttt

SEQ ID NO: 5021568 - DNA, 25 bp, Homo sapien
tcagcttcggcaaactttttgtccc

SEQ ID NO: 5021569 - DNA, 25 bp, Homo sapien
tttccatgaagatcagcttcggcaa

SEQ ID NO: 5021570 - DNA, 25 bp, Homo sapien
ttttcccaggggagcactttgctct

SEQ ID NO: 5021571 - DNA, 25 bp, Homo sapien
ctccagtaaaaagggggcgtgcttg

SEQ ID NO: 5021572 - DNA, 25 bp, Homo sapien
gatccttgagacctttgatggcagg

SEQ ID NO: 5021573 - DNA, 25 bp, Homo sapien
aagggggcgtgcttggtagagatcc

SEQ ID NO: 5021574 - DNA, 25 bp, Homo sapien
tgtttacgggcagccgctggcttcc

SEQ ID NO: 5021575 - DNA, 25 bp, Homo sapien
cacagacgacacaggaaagacgttt

SEQ ID NO: 5021576 - DNA, 25 bp, Homo sapien
ttcggagccctgtcctagcttaggc

SEQ ID NO: 5021577 - DNA, 25 bp, Homo sapien
ggcagtaatactacgacagcgaggg

SEQ ID NO: 5021578 - DNA, 25 bp, Homo sapien
ccaggagaggcagcgctacgcacat

SEQ ID NO: 5021579 - DNA, 25 bp, Homo sapien
cctcctagctttaggcacacttaaa

SEQ ID NO: 5021580 - DNA, 25 bp, Homo sapien
tagctttaggcacacttaaagcagc

SEQ ID NO: 5021581 - DNA, 25 bp, Homo sapien
gagaggggtcctcctagctttaggc

SEQ ID NO: 5021582 - DNA, 25 bp, Homo sapien
gggtcctcctagctttaggcacact

SEQ ID NO: 5021583 - DNA, 25 bp, Homo sapien
ctgccaggaaggaaatgcgggggct

SEQ ID NO: 5021584 - DNA, 25 bp, Homo sapien
ccaggaaggaaatgcgggggctcca

SEQ ID NO: 5021585 - DNA, 25 bp, Homo sapien
tgccaggaaggaaatgcgggggctc

SEQ ID NO: 5021586 - DNA, 25 bp, Homo sapien
caggaaggaaatgcgggggctccac

SEQ ID NO: 5021587 - DNA, 25 bp, Homo sapien
ggagagctcaggttctggggagtcc

SEQ ID NO: 5021588 - DNA, 25 bp, Homo sapien
agatcaggtaaggagtcctcagggt

SEQ ID NO: 5021589 - DNA, 25 bp, Homo sapien
ctcccagatcaggtaaggagtcctc

SEQ ID NO: 5021590 - DNA, 25 bp, Homo sapien
cccagatcaggtaaggagtcctcag

SEQ ID NO: 5021591 - DNA, 25 bp, Homo sapien
gcaccacgtagagcttgggtcccat

SEQ ID NO: 5021592 - DNA, 25 bp, Homo sapien
ggacagcaccacgtagagcttgggt

SEQ ID NO: 5021593 - DNA, 25 bp, Homo sapien
tggacagcaccacgtagagcttggg

SEQ ID NO: 5021594 - DNA, 25 bp, Homo sapien
acagcaccacgtagagcttgggtcc

SEQ ID NO: 5021595 - DNA, 25 bp, Homo sapien
tccagccaccggaagcgtccttctg

SEQ ID NO: 5021596 - DNA, 25 bp, Homo sapien
gaagcgtccttctgctccttgacca

SEQ ID NO: 5021597 - DNA, 25 bp, Homo sapien
ggaagcgtccttctgctccttgacc

SEQ ID NO: 5021598 - DNA, 25 bp, Homo sapien
accggaagcgtccttctgctccttg

SEQ ID NO: 5021599 - DNA, 25 bp, Homo sapien
gagagtatgagctccgcaaaggctc

SEQ ID NO: 5021600 - DNA, 25 bp, Homo sapien
tgtcccagggcgtaaggaattctgt

SEQ ID NO: 5021601 - DNA, 25 bp, Homo sapien
gcttcgacgctctgtgaatccggga

SEQ ID NO: 5021602 - DNA, 25 bp, Homo sapien
agacaagggccccatctgacactag

SEQ ID NO: 5021603 - DNA, 25 bp, Homo sapien
tgtagggtgaagctacccatctccc

SEQ ID NO: 5021604 - DNA, 25 bp, Homo sapien
tacacctgcaaaagtttgtcctggc

SEQ ID NO: 5021605 - DNA, 25 bp, Homo sapien
aaaggttggcattcagatcctggac

SEQ ID NO: 5021606 - DNA, 25 bp, Homo sapien
tctggtcagaagaatggcgaggcac

SEQ ID NO: 5021607 - DNA, 25 bp, Homo sapien
actcatcgtggcagggtactgagaa

SEQ ID NO: 5021608 - DNA, 25 bp, Homo sapien
tcattggctgccattgcacaaagtt

SEQ ID NO: 5021609 - DNA, 25 bp, Homo sapien
tatatttcaactcatcgtggcaggg

SEQ ID NO: 5021610 - DNA, 25 bp, Homo sapien
gagaagagttttccattagcaataa

SEQ ID NO: 5021611 - DNA, 25 bp, Homo sapien
tcatgtcctcgagacagggttggac

SEQ ID NO: 5021612 - DNA, 25 bp, Homo sapien
agaccaggtgtgaccaagcagaacc

SEQ ID NO: 5021613 - DNA, 25 bp, Homo sapien
gaaccccgtgactctgaaatgcatc

SEQ ID NO: 5021614 - DNA, 25 bp, Homo sapien
ggcagggaccccaaggacttcatgt

SEQ ID NO: 5021615 - DNA, 25 bp, Homo sapien
gccgggaaagccgtcagtcctgcgt

SEQ ID NO: 5021616 - DNA, 25 bp, Homo sapien
gtcagtcctgcgttttgccttggct

SEQ ID NO: 5021617 - DNA, 25 bp, Homo sapien
agaggagctagtgggccgggaaagc

SEQ ID NO: 5021618 - DNA, 25 bp, Homo sapien
gaaagccgtcagtcctgcgttttgc

SEQ ID NO: 5021619 - DNA, 25 bp, Homo sapien
aacaccgacgaggtcattagcagct

SEQ ID NO: 5021620 - DNA, 25 bp, Homo sapien
gacagtccatgtttaaacaccgacg

SEQ ID NO: 5021621 - DNA, 25 bp, Homo sapien
ccaggttaagacatgtggactagac

SEQ ID NO: 5021622 - DNA, 25 bp, Homo sapien
gtccccatctagattcaggtcccag

SEQ ID NO: 5021623 - DNA, 25 bp, Homo sapien
ccctggctcctgaaaggtgctgagg

SEQ ID NO: 5021624 - DNA, 25 bp, Homo sapien
tgccccgaatggcatgggtccctgg

SEQ ID NO: 5021625 - DNA, 25 bp, Homo sapien
aagccctgtgccgtgtgccccgaat

SEQ ID NO: 5021626 - DNA, 25 bp, Homo sapien
gagccagccagtattcagtcctggg

SEQ ID NO: 5021627 - DNA, 25 bp, Homo sapien
ctgcagcagacatggatgaggggct

SEQ ID NO: 5021628 - DNA, 25 bp, Homo sapien
tgcagcagacatggatgaggggctt

SEQ ID NO: 5021629 - DNA, 25 bp, Homo sapien
gcagattttattagctcatactgag

SEQ ID NO: 5021630 - DNA, 25 bp, Homo sapien
ctgggggactcagctctcaggagca

SEQ ID NO: 5021631 - DNA, 25 bp, Homo sapien
tctctagggctattcctagcctggg

SEQ ID NO: 5021632 - DNA, 25 bp, Homo sapien
tactgagaagtacagagaggcacag

SEQ ID NO: 5021633 - DNA, 25 bp, Homo sapien
tgcgcatccgctggccttgtctgtc

SEQ ID NO: 5021634 - DNA, 25 bp, Homo sapien
cccaggacttgtgggcgctcaacag

SEQ ID NO: 5021635 - DNA, 25 bp, Homo sapien
tccccctgctggatgtaatctgcgg

SEQ ID NO: 5021636 - DNA, 25 bp, Homo sapien
ggcgctcaacagagtgacagcagga

SEQ ID NO: 5021637 - DNA, 25 bp, Homo sapien
ctgatcccaaaatgaacttcgtgat

SEQ ID NO: 5021638 - DNA, 25 bp, Homo sapien
cctggtgttcgtcagcctctttctc

SEQ ID NO: 5021639 - DNA, 25 bp, Homo sapien
tggtttcacctggtgttcgtcagcc

SEQ ID NO: 5021640 - DNA, 25 bp, Homo sapien
tctgagcagactctgctttgtgact

SEQ ID NO: 5021641 - DNA, 25 bp, Homo sapien
ggctccacatctcgccgcagcaggg

SEQ ID NO: 5021642 - DNA, 25 bp, Homo sapien
cggcttcggaatgaggcggctccac

SEQ ID NO: 5021643 - DNA, 25 bp, Homo sapien
gggcaggggcggcttcggaatgagg

SEQ ID NO: 5021644 - DNA, 25 bp, Homo sapien
gcttcggaatgaggcggctccacat

SEQ ID NO: 5021645 - DNA, 25 bp, Homo sapien
cggagtcaggccgtcagttcccaga

SEQ ID NO: 5021646 - DNA, 25 bp, Homo sapien
agtcaggccgtcagttcccagaaga

SEQ ID NO: 5021647 - DNA, 25 bp, Homo sapien
cccggagtcaggccgtcagttccca

SEQ ID NO: 5021648 - DNA, 25 bp, Homo sapien
ggagtcaggccgtcagttcccagaa

SEQ ID NO: 5021649 - DNA, 25 bp, Homo sapien
atcccgctttcactctgggggaatt

SEQ ID NO: 5021650 - DNA, 25 bp, Homo sapien
tcccgctttcactctgggggaatta

SEQ ID NO: 5021651 - DNA, 25 bp, Homo sapien
agtctggtgggacaggtaagctgat

SEQ ID NO: 5021652 - DNA, 25 bp, Homo sapien
tggtgggacaggtaagctgatgttc

SEQ ID NO: 5021653 - DNA, 25 bp, Homo sapien
tctggtgggacaggtaagctgatgt

SEQ ID NO: 5021654 - DNA, 25 bp, Homo sapien
tgggacaggtaagctgatgttctct

SEQ ID NO: 5021655 - DNA, 25 bp, Homo sapien
tgcaggggcatctgacctagccgtc

SEQ ID NO: 5021656 - DNA, 25 bp, Homo sapien
ttctccaggcgccatccatacctct

SEQ ID NO: 5021657 - DNA, 25 bp, Homo sapien
tctcaggctcacacctggttggctg

SEQ ID NO: 5021658 - DNA, 25 bp, Homo sapien
gacctagccgtccttcctccagtct

SEQ ID NO: 5021659 - DNA, 25 bp, Homo sapien
aggtggccccaaagaaatcacagca

SEQ ID NO: 5021660 - DNA, 25 bp, Homo sapien
caggtggccccaaagaaatcacagc

SEQ ID NO: 5021661 - DNA, 25 bp, Homo sapien
tcaccaggtggccccaaagaaatca

SEQ ID NO: 5021662 - DNA, 25 bp, Homo sapien
accaggtggccccaaagaaatcaca

SEQ ID NO: 5021663 - DNA, 25 bp, Homo sapien
tgtaagccacttcacaagttaaggc

SEQ ID NO: 5021664 - DNA, 25 bp, Homo sapien
cttttgcagacacaaggatagtagc

SEQ ID NO: 5021665 - DNA, 25 bp, Homo sapien
gacctggaagcactcaatctctttg

SEQ ID NO: 5021666 - DNA, 25 bp, Homo sapien
gacctgctatcggacatgtaagcca

SEQ ID NO: 5021667 - DNA, 25 bp, Homo sapien
ggtggcttcgacctggggactcatt

SEQ ID NO: 5021668 - DNA, 25 bp, Homo sapien
aagatggtcctaaacccacatggtg

SEQ ID NO: 5021669 - DNA, 25 bp, Homo sapien
gctgctttcagagacaaagatggtc

SEQ ID NO: 5021670 - DNA, 25 bp, Homo sapien
aggaacccatcttctagagctgctt

SEQ ID NO: 5021671 - DNA, 25 bp, Homo sapien
ccatctcggccacttccgaaggcat

SEQ ID NO: 5021672 - DNA, 25 bp, Homo sapien
gagggagtgcaggttcgattcctca

SEQ ID NO: 5021673 - DNA, 25 bp, Homo sapien
aacatccagaatgagggagtgcagg

SEQ ID NO: 5021674 - DNA, 25 bp, Homo sapien
gtgcaggttcgattcctcaaggccc

SEQ ID NO: 5021675 - DNA, 25 bp, Homo sapien
ccagtccacatgacagacacatgac

SEQ ID NO: 5021676 - DNA, 25 bp, Homo sapien
acagacacatgacctgctcatagct

SEQ ID NO: 5021677 - DNA, 25 bp, Homo sapien
tctctgtccacaggggaattctgca

SEQ ID NO: 5021678 - DNA, 25 bp, Homo sapien
tgcagacaggactctattctcttct

SEQ ID NO: 5021679 - DNA, 25 bp, Homo sapien
ccatatcatggcatccaaggattcg

SEQ ID NO: 5021680 - DNA, 25 bp, Homo sapien
tgccttccatatcatggcatccaag

SEQ ID NO: 5021681 - DNA, 25 bp, Homo sapien
ggcatccaaggattcgtccataaga

SEQ ID NO: 5021682 - DNA, 25 bp, Homo sapien
aaggattcgtccataagaacatatg

SEQ ID NO: 5021683 - DNA, 25 bp, Homo sapien
tccatgcaaacaagccagccctggg

SEQ ID NO: 5021684 - DNA, 25 bp, Homo sapien
caggaattgtgaatggttcctcaag

SEQ ID NO: 5021685 - DNA, 25 bp, Homo sapien
ccaggaattgtgaatggttcctcaa

SEQ ID NO: 5021686 - DNA, 25 bp, Homo sapien
agtctccatgcaaacaagccagccc

SEQ ID NO: 5021687 - DNA, 25 bp, Homo sapien
gacatttctgaagtgagcgtcttcg

SEQ ID NO: 5021688 - DNA, 25 bp, Homo sapien
cgtgcagcctattcgctgcactaac

SEQ ID NO: 5021689 - DNA, 25 bp, Homo sapien
cattactgtgtgagttgtgcaattc

SEQ ID NO: 5021690 - DNA, 25 bp, Homo sapien
tgaagtgagcgtcttcgatgcctat

SEQ ID NO: 5021691 - DNA, 25 bp, Homo sapien
gactgtagcatttcactaatatgag

SEQ ID NO: 5021692 - DNA, 25 bp, Homo sapien
tagtcacattcgtagacatagaaag

SEQ ID NO: 5021693 - DNA, 25 bp, Homo sapien
tggtggttgcataaattgtgaatgt

SEQ ID NO: 5021694 - DNA, 25 bp, Homo sapien
gaaagtatgtagaatgctggtcact

SEQ ID NO: 5021695 - DNA, 25 bp, Homo sapien
gggccagagtagctactcattagat

SEQ ID NO: 5021696 - DNA, 25 bp, Homo sapien
tcagtgaagtacgaacagagaggag

SEQ ID NO: 5021697 - DNA, 25 bp, Homo sapien
cttacatcagatgggtagttggact

SEQ ID NO: 5021698 - DNA, 25 bp, Homo sapien
tccagcagaacagcctggagttcat

SEQ ID NO: 5021699 - DNA, 25 bp, Homo sapien
gaccaaaactttgctcagtcccgga

SEQ ID NO: 5021700 - DNA, 25 bp, Homo sapien
tgagaagctcttatccgcaggcagg

SEQ ID NO: 5021701 - DNA, 25 bp, Homo sapien
tctggagaagccacgcatctggagc

SEQ ID NO: 5021702 - DNA, 25 bp, Homo sapien
cagcgggtccgagttcttgtcgcaa

SEQ ID NO: 5021703 - DNA, 25 bp, Homo sapien
agcttagttggtactattgataccc

SEQ ID NO: 5021704 - DNA, 25 bp, Homo sapien
gtgcccagcttagttggtactattg

SEQ ID NO: 5021705 - DNA, 25 bp, Homo sapien
ggtactattgataccctatgtcaga

SEQ ID NO: 5021706 - DNA, 25 bp, Homo sapien
gttggtactattgataccctatgtc

SEQ ID NO: 5021707 - DNA, 25 bp, Homo sapien
agactagagacctaacaactaaatt

SEQ ID NO: 5021708 - DNA, 25 bp, Homo sapien
gtatcatagcagtgtaaatttctga

SEQ ID NO: 5021709 - DNA, 25 bp, Homo sapien
tctccaaaattgtcaaggccatgaa

SEQ ID NO: 5021710 - DNA, 25 bp, Homo sapien
aaacttactggcttatactctccaa

SEQ ID NO: 5021711 - DNA, 25 bp, Homo sapien
agtgcttccgttgtttgcagaccca

SEQ ID NO: 5021712 - DNA, 25 bp, Homo sapien
gatcaagttttggtgcgccagtgct

SEQ ID NO: 5021713 - DNA, 25 bp, Homo sapien
caaatcaagcagagggtgggaatat

SEQ ID NO: 5021714 - DNA, 25 bp, Homo sapien
tgtggtccagggtataaaggatctg

SEQ ID NO: 5021715 - DNA, 25 bp, Homo sapien
tcaccccctggctgcactggcttca

SEQ ID NO: 5021716 - DNA, 25 bp, Homo sapien
ttcttcaccccctggctgcactggc

SEQ ID NO: 5021717 - DNA, 25 bp, Homo sapien
ttcaccccctggctgcactggcttc

SEQ ID NO: 5021718 - DNA, 25 bp, Homo sapien
cactccttcttcaccccctggctgc

SEQ ID NO: 5021719 - DNA, 25 bp, Homo sapien
aaagcccagttgctcttaagatagc

SEQ ID NO: 5021720 - DNA, 25 bp, Homo sapien
tcccacatagactgcttcaaaagcc

SEQ ID NO: 5021721 - DNA, 25 bp, Homo sapien
gacctgtcgctgattctctcttgag

SEQ ID NO: 5021722 - DNA, 25 bp, Homo sapien
tccacaaaccttgagggaataggcc

SEQ ID NO: 5021723 - DNA, 25 bp, Homo sapien
tcctctgctcatggtaccaatcttg

SEQ ID NO: 5021724 - DNA, 25 bp, Homo sapien
tgtgtccattttaagagagctttcc

SEQ ID NO: 5021725 - DNA, 25 bp, Homo sapien
tacagacgaagatttgctcactcat

SEQ ID NO: 5021726 - DNA, 25 bp, Homo sapien
tatcccacttaaatgggagccctga

SEQ ID NO: 5021727 - DNA, 25 bp, Homo sapien
tctggcaaggttggacatcctgtta

SEQ ID NO: 5021728 - DNA, 25 bp, Homo sapien
tcaaggagactgtgactactaccag

SEQ ID NO: 5021729 - DNA, 25 bp, Homo sapien
aagtaatcaattaagaccagttagg

SEQ ID NO: 5021730 - DNA, 25 bp, Homo sapien
ggtatcacctaggattggctaacat

SEQ ID NO: 5021731 - DNA, 25 bp, Homo sapien
cattgagcatagagcaccagttttc

SEQ ID NO: 5021732 - DNA, 25 bp, Homo sapien
tgacaaaagcagacgtaaagcctgg

SEQ ID NO: 5021733 - DNA, 25 bp, Homo sapien
cattgagccatgacaagactggtga

SEQ ID NO: 5021734 - DNA, 25 bp, Homo sapien
taatatcacatctctactgggcgcg

SEQ ID NO: 5021735 - DNA, 25 bp, Homo sapien
tgtaatatttgggacaattattcaa

SEQ ID NO: 5021736 - DNA, 25 bp, Homo sapien
gaatgtaatatttgggacaattatt

SEQ ID NO: 5021737 - DNA, 25 bp, Homo sapien
atatttgggacaattattcaaaagg

SEQ ID NO: 5021738 - DNA, 25 bp, Homo sapien
taatatttgggacaattattcaaaa

SEQ ID NO: 5021739 - DNA, 25 bp, Homo sapien
tttaatctgaggtcataataaaaca

SEQ ID NO: 5021740 - DNA, 25 bp, Homo sapien
taatctgaggtcataataaaacaag

SEQ ID NO: 5021741 - DNA, 25 bp, Homo sapien
ttaatctgaggtcataataaaacaa

SEQ ID NO: 5021742 - DNA, 25 bp, Homo sapien
aatctgaggtcataataaaacaagc

SEQ ID NO: 5021743 - DNA, 25 bp, Homo sapien
ttctcacccttatcatcaagactca

SEQ ID NO: 5021744 - DNA, 25 bp, Homo sapien
gatttcagtttctcacccttatcat

SEQ ID NO: 5021745 - DNA, 25 bp, Homo sapien
gtttctcacccttatcatcaagact

SEQ ID NO: 5021746 - DNA, 25 bp, Homo sapien
cagtttctcacccttatcatcaaga

SEQ ID NO: 5021747 - DNA, 25 bp, Homo sapien
aacttggtaagagcccattagctgc

SEQ ID NO: 5021748 - DNA, 25 bp, Homo sapien
gaaccaagactaatttacatgaaaa

SEQ ID NO: 5021749 - DNA, 25 bp, Homo sapien
gacatggaaacagtagttatattag

SEQ ID NO: 5021750 - DNA, 25 bp, Homo sapien
gctgccaagagggaataaggaataa

SEQ ID NO: 5021751 - DNA, 25 bp, Homo sapien
agccacaatgtaccaaaagtactat

SEQ ID NO: 5021752 - DNA, 25 bp, Homo sapien
gccacaatgtaccaaaagtactatg

SEQ ID NO: 5021753 - DNA, 25 bp, Homo sapien
cacaatgtaccaaaagtactatgcc

SEQ ID NO: 5021754 - DNA, 25 bp, Homo sapien
caatgtaccaaaagtactatgccaa

SEQ ID NO: 5021755 - DNA, 25 bp, Homo sapien
ttcagcttcgtctccttgggtatcc

SEQ ID NO: 5021756 - DNA, 25 bp, Homo sapien
tcgtctccttgggtatccgatgtcc

SEQ ID NO: 5021757 - DNA, 25 bp, Homo sapien
ctccttgggtatccgatgtccacaa

SEQ ID NO: 5021758 - DNA, 25 bp, Homo sapien
cagcttcgtctccttgggtatccga

SEQ ID NO: 5021759 - DNA, 25 bp, Homo sapien
gctagggttgactactctccactgg

SEQ ID NO: 5021760 - DNA, 25 bp, Homo sapien
gtgtcagaacctaaagagccccaat

SEQ ID NO: 5021761 - DNA, 25 bp, Homo sapien
gacgtccaaggtgagtgcaactata

SEQ ID NO: 5021762 - DNA, 25 bp, Homo sapien
ggttaagtacaccacagagttgcct

SEQ ID NO: 5021763 - DNA, 25 bp, Homo sapien
gcaattcctacctctttacctgaca

SEQ ID NO: 5021764 - DNA, 25 bp, Homo sapien
tctgcaattcctacctctttacctg

SEQ ID NO: 5021765 - DNA, 25 bp, Homo sapien
aattcctacctctttacctgacaca

SEQ ID NO: 5021766 - DNA, 25 bp, Homo sapien
tgatctgcaattcctacctctttac

SEQ ID NO: 5021767 - DNA, 25 bp, Homo sapien
agcctcaaaatttcaaatctagtat

SEQ ID NO: 5021768 - DNA, 25 bp, Homo sapien
cctcaaaatttcaaatctagtattt

SEQ ID NO: 5021769 - DNA, 25 bp, Homo sapien
tcaaaatttcaaatctagtatttat

SEQ ID NO: 5021770 - DNA, 25 bp, Homo sapien
ctaagcctcaaaatttcaaatctag

SEQ ID NO: 5021771 - DNA, 25 bp, Homo sapien
tgcagtatcccaaggacaatcacga

SEQ ID NO: 5021772 - DNA, 25 bp, Homo sapien
cacttggattctgtagatacctgag

SEQ ID NO: 5021773 - DNA, 25 bp, Homo sapien
gaagctaggcaaaatagacttccac

SEQ ID NO: 5021774 - DNA, 25 bp, Homo sapien
tgagaagacctaagaaacaaacgag

SEQ ID NO: 5021775 - DNA, 25 bp, Homo sapien
cattattagcgtgctgtctttgtat

SEQ ID NO: 5021776 - DNA, 25 bp, Homo sapien
ctcagtaattgcattattagcgtgc

SEQ ID NO: 5021777 - DNA, 25 bp, Homo sapien
tgcattattagcgtgctgtctttgt

SEQ ID NO: 5021778 - DNA, 25 bp, Homo sapien
taattgcattattagcgtgctgtct

SEQ ID NO: 5021779 - DNA, 25 bp, Homo sapien
ccagacccagtctgataggatgtgt

SEQ ID NO: 5021780 - DNA, 25 bp, Homo sapien
cagagaagttaagggccagacccag

SEQ ID NO: 5021781 - DNA, 25 bp, Homo sapien
ggagttcagaatctcataatagaac

SEQ ID NO: 5021782 - DNA, 25 bp, Homo sapien
cagaatctcataatagaacacagag

SEQ ID NO: 5021783 - DNA, 25 bp, Homo sapien
caccagcggcaacctcagccaagta

SEQ ID NO: 5021784 - DNA, 25 bp, Homo sapien
ttgtcatcaccagcggcaacctcag

SEQ ID NO: 5021785 - DNA, 25 bp, Homo sapien
cagcggcaacctcagccaagtaacg

SEQ ID NO: 5021786 - DNA, 25 bp, Homo sapien
gcggcaacctcagccaagtaacggt

SEQ ID NO: 5021787 - DNA, 25 bp, Homo sapien
taacccagatgaagtggcagtaggg

SEQ ID NO: 5021788 - DNA, 25 bp, Homo sapien
tgcactgtgctatataaagaggtta

SEQ ID NO: 5021789 - DNA, 25 bp, Homo sapien
taaaggtgagaaaagtcaacctgaa

SEQ ID NO: 5021790 - DNA, 25 bp, Homo sapien
tcacttgaggtgagcctcgtcaaca

SEQ ID NO: 5021791 - DNA, 25 bp, Homo sapien
gaattacagcactatacaccgtgtg

SEQ ID NO: 5021792 - DNA, 25 bp, Homo sapien
taacaccagacaccatgctagaagc

SEQ ID NO: 5021793 - DNA, 25 bp, Homo sapien
tcacctgtaaggcagagacctctaa

SEQ ID NO: 5021794 - DNA, 25 bp, Homo sapien
cataatctagctgtagagacaaggc

SEQ ID NO: 5021795 - DNA, 25 bp, Homo sapien
tatgctgaactaagcagttccctgg

SEQ ID NO: 5021796 - DNA, 25 bp, Homo sapien
tagaacccacaagtaacaggagggc

SEQ ID NO: 5021797 - DNA, 25 bp, Homo sapien
gagtaacactgcctaatcacgtctt

SEQ ID NO: 5021798 - DNA, 25 bp, Homo sapien
gagatgaaggccataaacacatgca

SEQ ID NO: 5021799 - DNA, 25 bp, Homo sapien
tcaggataatggaaagaacaggaca

SEQ ID NO: 5021800 - DNA, 25 bp, Homo sapien
gaaaacttatgagtggtccagtact

SEQ ID NO: 5021801 - DNA, 25 bp, Homo sapien
caggaatcaaagttatggcgagtat

SEQ ID NO: 5021802 - DNA, 25 bp, Homo sapien
gctccaagagacaagaccaattaaa

SEQ ID NO: 5021803 - DNA, 25 bp, Homo sapien
accgtatttagaacgaagtctcgct

SEQ ID NO: 5021804 - DNA, 25 bp, Homo sapien
tgtgttaggagcactgcaattcttc

SEQ ID NO: 5021805 - DNA, 25 bp, Homo sapien
catggaggtgcaccaagtagagaat

SEQ ID NO: 5021806 - DNA, 25 bp, Homo sapien
tcagagaatatcctgctcaacacag

SEQ ID NO: 5021807 - DNA, 25 bp, Homo sapien
tcaccttgacaaaactctgaaatct

SEQ ID NO: 5021808 - DNA, 25 bp, Homo sapien
taaattcaaactctgtcaccttgac

SEQ ID NO: 5021809 - DNA, 25 bp, Homo sapien
tgaaatcttcctgggtctcagattc

SEQ ID NO: 5021810 - DNA, 25 bp, Homo sapien
tgcctaaattcaaactctgtcacct

SEQ ID NO: 5021811 - DNA, 25 bp, Homo sapien
tgctacatacccaaataatagaata

SEQ ID NO: 5021812 - DNA, 25 bp, Homo sapien
agtgaggaggtacgggctggttgtg

SEQ ID NO: 5021813 - DNA, 25 bp, Homo sapien
gctacatacccaaataatagaatac

SEQ ID NO: 5021814 - DNA, 25 bp, Homo sapien
tgaggaggtacgggctggttgtggt

SEQ ID NO: 5021815 - DNA, 25 bp, Homo sapien
tacatgctatgctcttaacacctaa

SEQ ID NO: 5021816 - DNA, 25 bp, Homo sapien
cacctaaattcttaggagcaagtac

SEQ ID NO: 5021817 - DNA, 25 bp, Homo sapien
ttcttaggagcaagtacaatttaaa

SEQ ID NO: 5021818 - DNA, 25 bp, Homo sapien
gcaggatgaggttacagcagcttta

SEQ ID NO: 5021819 - DNA, 25 bp, Homo sapien
tatcaaagcaaaacaatcaacctct

SEQ ID NO: 5021820 - DNA, 25 bp, Homo sapien
gaaatttgcgaatacagctgggcta

SEQ ID NO: 5021821 - DNA, 25 bp, Homo sapien
caccaaatatgtgagtgggagaaag

SEQ ID NO: 5021822 - DNA, 25 bp, Homo sapien
ttcgcacaaagataattagacatcg

SEQ ID NO: 5021823 - DNA, 25 bp, Homo sapien
taaatagctgaacccctgagctgca

SEQ ID NO: 5021824 - DNA, 25 bp, Homo sapien
tgacctcatgtaaatagctgaaccc

SEQ ID NO: 5021825 - DNA, 25 bp, Homo sapien
tcatgtaaatagctgaacccctgag

SEQ ID NO: 5021826 - DNA, 25 bp, Homo sapien
tgtatgacctcatgtaaatagctga

SEQ ID NO: 5021827 - DNA, 25 bp, Homo sapien
aggcgggtggatcatctgaggtcag

SEQ ID NO: 5021828 - DNA, 25 bp, Homo sapien
tgtaatcaatcccactttggaggcc

SEQ ID NO: 5021829 - DNA, 25 bp, Homo sapien
gagttcaagaccagccttaccaaca

SEQ ID NO: 5021830 - DNA, 25 bp, Homo sapien
tggagaaaccccatctctactaaaa

SEQ ID NO: 5021831 - DNA, 25 bp, Homo sapien
tggtggtggtagttaaaacgcctca

SEQ ID NO: 5021832 - DNA, 25 bp, Homo sapien
tattgacactcactgaaggcgttcc

SEQ ID NO: 5021833 - DNA, 25 bp, Homo sapien
gctttttagcttgtaagtggcacgc

SEQ ID NO: 5021834 - DNA, 25 bp, Homo sapien
tctaggcctgcgctgaagtttctca

SEQ ID NO: 5021835 - DNA, 25 bp, Homo sapien
tggacgacaaggtgagactgctatc

SEQ ID NO: 5021836 - DNA, 25 bp, Homo sapien
tttgctatttaacaccaccacaggg

SEQ ID NO: 5021837 - DNA, 25 bp, Homo sapien
agaaacattccgcataccagtgggt

SEQ ID NO: 5021838 - DNA, 25 bp, Homo sapien
tgatgctagtcctccattagatggc

SEQ ID NO: 5021839 - DNA, 25 bp, Homo sapien
tgtatcagggatagtgagacgacca

SEQ ID NO: 5021840 - DNA, 25 bp, Homo sapien
taaaagcctcttgcagggaattctg

SEQ ID NO: 5021841 - DNA, 25 bp, Homo sapien
taacaagtccaagtgaatgaccaca

SEQ ID NO: 5021842 - DNA, 25 bp, Homo sapien
cgtgaatgtaaaggatagggaacca

SEQ ID NO: 5021843 - DNA, 25 bp, Homo sapien
aattttacactgcttcctctcggag

SEQ ID NO: 5021844 - DNA, 25 bp, Homo sapien
tgcactattataggcaggctcacac

SEQ ID NO: 5021845 - DNA, 25 bp, Homo sapien
gactgtaagttaagagacccctgca

SEQ ID NO: 5021846 - DNA, 25 bp, Homo sapien
gaaaatttgatggttggcatggacc

SEQ ID NO: 5021847 - DNA, 25 bp, Homo sapien
tataatgaagccagactgaattgat

SEQ ID NO: 5021848 - DNA, 25 bp, Homo sapien
taatgaagccagactgaattgattc

SEQ ID NO: 5021849 - DNA, 25 bp, Homo sapien
agtataatgaagccagactgaattg

SEQ ID NO: 5021850 - DNA, 25 bp, Homo sapien
gaagccagactgaattgattctcac

SEQ ID NO: 5021851 - DNA, 25 bp, Homo sapien
tgttcaatacttgagacgaccctcc

SEQ ID NO: 5021852 - DNA, 25 bp, Homo sapien
gcagatatctcttagctccgtctca

SEQ ID NO: 5021853 - DNA, 25 bp, Homo sapien
tcagcaccttccgtcttttgttcaa

SEQ ID NO: 5021854 - DNA, 25 bp, Homo sapien
acgaccctccaagatgacctacggg

SEQ ID NO: 5021855 - DNA, 25 bp, Homo sapien
gctccttgctcagttacagacttca

SEQ ID NO: 5021856 - DNA, 25 bp, Homo sapien
cagttacagacttcatgcaggctgc

SEQ ID NO: 5021857 - DNA, 25 bp, Homo sapien
gtcatcatatcgctcagcctgctcg

SEQ ID NO: 5021858 - DNA, 25 bp, Homo sapien
ctgctcggccagtttggccttctga

SEQ ID NO: 5021859 - DNA, 25 bp, Homo sapien
taagccagtacaaaggattctctcc

SEQ ID NO: 5021860 - DNA, 25 bp, Homo sapien
tggcagctggctcccgaatattaat

SEQ ID NO: 5021861 - DNA, 25 bp, Homo sapien
tgcaagttgccgaacagcacaaaga

SEQ ID NO: 5021862 - DNA, 25 bp, Homo sapien
cactttggatgcaaggtactggctc

SEQ ID NO: 5021863 - DNA, 25 bp, Homo sapien
gggcagacccggactttaaagtgca

SEQ ID NO: 5021864 - DNA, 25 bp, Homo sapien
aaagtgcaaattctccggtccgcgt

SEQ ID NO: 5021865 - DNA, 25 bp, Homo sapien
aaattctccggtccgcgtatcgcaa

SEQ ID NO: 5021866 - DNA, 25 bp, Homo sapien
aagtcggagccacggctcaagtccc

SEQ ID NO: 5021867 - DNA, 25 bp, Homo sapien
cccgcagaagcggaaccactaccag

SEQ ID NO: 5021868 - DNA, 25 bp, Homo sapien
gcccgcagaagcggaaccactacca

SEQ ID NO: 5021869 - DNA, 25 bp, Homo sapien
cagcccgcagaagcggaaccactac

SEQ ID NO: 5021870 - DNA, 25 bp, Homo sapien
agcccgcagaagcggaaccactacc

SEQ ID NO: 5021871 - DNA, 25 bp, Homo sapien
cgatcagcgccggtgaccgtgtaca

SEQ ID NO: 5021872 - DNA, 25 bp, Homo sapien
tacagcgtctctaagggaccgacag

SEQ ID NO: 5021873 - DNA, 25 bp, Homo sapien
tgaccgtgtacagcgtctctaaggg

SEQ ID NO: 5021874 - DNA, 25 bp, Homo sapien
gcgccggtgaccgtgtacagcgtct

SEQ ID NO: 5021875 - DNA, 25 bp, Homo sapien
catcaagcacgggagccgactgcgg

SEQ ID NO: 5021876 - DNA, 25 bp, Homo sapien
caccagcggctatgctcaggctcac

SEQ ID NO: 5021877 - DNA, 25 bp, Homo sapien
cccaaagcaggatatgcgtccccaa

SEQ ID NO: 5021878 - DNA, 25 bp, Homo sapien
ccagttctagtccatcaagcacggg

SEQ ID NO: 5021879 - DNA, 25 bp, Homo sapien
caccctgttctctaccccgacctgg

SEQ ID NO: 5021880 - DNA, 25 bp, Homo sapien
tcccccgcccgttcacaaggagcaa

SEQ ID NO: 5021881 - DNA, 25 bp, Homo sapien
gttctctaccccgacctggacttgc

SEQ ID NO: 5021882 - DNA, 25 bp, Homo sapien
ctcccccgcccgttcacaaggagca

SEQ ID NO: 5021883 - DNA, 25 bp, Homo sapien
gtccttcctcccaccgcggagccca

SEQ ID NO: 5021884 - DNA, 25 bp, Homo sapien
tcagctctaggtcccaggcgagccc

SEQ ID NO: 5021885 - DNA, 25 bp, Homo sapien
attcagctctaggtcccaggcgagc

SEQ ID NO: 5021886 - DNA, 25 bp, Homo sapien
agctctaggtcccaggcgagcccca

SEQ ID NO: 5021887 - DNA, 25 bp, Homo sapien
ggcgcgcagcctcgccccggtctac

SEQ ID NO: 5021888 - DNA, 25 bp, Homo sapien
ccgcagtggactcccctcccgccgg

SEQ ID NO: 5021889 - DNA, 25 bp, Homo sapien
ccctcccgccggcgcgcagcctcgc

SEQ ID NO: 5021890 - DNA, 25 bp, Homo sapien
cccgcagtggactcccctcccgccg

SEQ ID NO: 5021891 - DNA, 25 bp, Homo sapien
gccaggcctttccctcgcgcttggg

SEQ ID NO: 5021892 - DNA, 25 bp, Homo sapien
caggcctttccctcgcgcttgggtc

SEQ ID NO: 5021893 - DNA, 25 bp, Homo sapien
ccaggcctttccctcgcgcttgggt

SEQ ID NO: 5021894 - DNA, 25 bp, Homo sapien
ggccaggcctttccctcgcgcttgg

SEQ ID NO: 5021895 - DNA, 25 bp, Homo sapien
gcggcggacggacgggctcagcagt

SEQ ID NO: 5021896 - DNA, 25 bp, Homo sapien
cagcagcggcgaggctgagactctg

SEQ ID NO: 5021897 - DNA, 25 bp, Homo sapien
gtccctggatctcgctgctcacagg

SEQ ID NO: 5021898 - DNA, 25 bp, Homo sapien
gactctgtccctggatctcgctgct

SEQ ID NO: 5021899 - DNA, 25 bp, Homo sapien
ggctgagactctgtccctggatctc

SEQ ID NO: 5021900 - DNA, 25 bp, Homo sapien
cagccgctccgcagacacggggttt

SEQ ID NO: 5021901 - DNA, 25 bp, Homo sapien
acagccgctccgcagacacggggtt

SEQ ID NO: 5021902 - DNA, 25 bp, Homo sapien
ctacagccgctccgcagacacgggg

SEQ ID NO: 5021903 - DNA, 25 bp, Homo sapien
cagacacggggtttcctccaatcac

SEQ ID NO: 5021904 - DNA, 25 bp, Homo sapien
gggcaccacacgcacgatgacgtca

SEQ ID NO: 5021905 - DNA, 25 bp, Homo sapien
gcaggggcaccacacgcacgatgac

SEQ ID NO: 5021906 - DNA, 25 bp, Homo sapien
accacacgcacgatgacgtcaaacg

SEQ ID NO: 5021907 - DNA, 25 bp, Homo sapien
gcaccacacgcacgatgacgtcaaa

SEQ ID NO: 5021908 - DNA, 25 bp, Homo sapien
gcaaccgttgattggtgcccacagc

SEQ ID NO: 5021909 - DNA, 25 bp, Homo sapien
ttgattggtgcccacagcgatcggg

SEQ ID NO: 5021910 - DNA, 25 bp, Homo sapien
tatggcaaccgttgattggtgccca

SEQ ID NO: 5021911 - DNA, 25 bp, Homo sapien
ctgctatggcaaccgttgattggtg

SEQ ID NO: 5021912 - DNA, 25 bp, Homo sapien
ctcctctacgcttgtcccgagtgca

SEQ ID NO: 5021913 - DNA, 25 bp, Homo sapien
cagctcctctacgcttgtcccgagt

SEQ ID NO: 5021914 - DNA, 25 bp, Homo sapien
agctcctctacgcttgtcccgagtg

SEQ ID NO: 5021915 - DNA, 25 bp, Homo sapien
gctcctctacgcttgtcccgagtgc

SEQ ID NO: 5021916 - DNA, 25 bp, Homo sapien
ttgggtccccaacgccctctctctc

SEQ ID NO: 5021917 - DNA, 25 bp, Homo sapien
tcagccggcgggaaggcgttctctc

SEQ ID NO: 5021918 - DNA, 25 bp, Homo sapien
ttagctttcgctcagcccgtctgcg

SEQ ID NO: 5021919 - DNA, 25 bp, Homo sapien
gggctcccgttcagcaacatccggg

SEQ ID NO: 5021920 - DNA, 25 bp, Homo sapien
cctccgtgcttcgcggtagtaactg

SEQ ID NO: 5021921 - DNA, 25 bp, Homo sapien
gcttcgcggtagtaactgccccagg

SEQ ID NO: 5021922 - DNA, 25 bp, Homo sapien
tgacaagggtggctcggcggctccg

SEQ ID NO: 5021923 - DNA, 25 bp, Homo sapien
ggatgacaagggtggctcggcggct

SEQ ID NO: 5021924 - DNA, 25 bp, Homo sapien
cggcctccctcccgccgccgcggct

SEQ ID NO: 5021925 - DNA, 25 bp, Homo sapien
ttccaatcgagagcgcgggatctgc

SEQ ID NO: 5021926 - DNA, 25 bp, Homo sapien
ttttatggctcggaaacgggagtga

SEQ ID NO: 5021927 - DNA, 25 bp, Homo sapien
gaagcggtcctagaccttttatggc

SEQ ID NO: 5021928 - DNA, 25 bp, Homo sapien
agtgaggcgtccagcccctgagtgt

SEQ ID NO: 5021929 - DNA, 25 bp, Homo sapien
gggacaatgggtgggcgccgaggtg

SEQ ID NO: 5021930 - DNA, 25 bp, Homo sapien
ggacaatgggtgggcgccgaggtgg

SEQ ID NO: 5021931 - DNA, 25 bp, Homo sapien
tggcagccttgacccggagacaggc

SEQ ID NO: 5021932 - DNA, 25 bp, Homo sapien
agacaggcagtcaggcgtgaccgca

SEQ ID NO: 5021933 - DNA, 25 bp, Homo sapien
aaggacagccttctcgggcggaggg

SEQ ID NO: 5021934 - DNA, 25 bp, Homo sapien
aggcgcggccgctttagggaagcca

SEQ ID NO: 5021935 - DNA, 25 bp, Homo sapien
tcatactgcacatgacgatcattac

SEQ ID NO: 5021936 - DNA, 25 bp, Homo sapien
tgaagacctcatactgcacatgacg

SEQ ID NO: 5021937 - DNA, 25 bp, Homo sapien
aaataaagctttcacgtgaagacct

SEQ ID NO: 5021938 - DNA, 25 bp, Homo sapien
gctttcacgtgaagacctcatactg

SEQ ID NO: 5021939 - DNA, 25 bp, Homo sapien
tatctcctagaagcaaggtttgagg

SEQ ID NO: 5021940 - DNA, 25 bp, Homo sapien
ttttatctcctagaagcaaggtttg

SEQ ID NO: 5021941 - DNA, 25 bp, Homo sapien
ctttttatctcctagaagcaaggtt

SEQ ID NO: 5021942 - DNA, 25 bp, Homo sapien
gcaaggtttgagggacgtcgtagtc

SEQ ID NO: 5021943 - DNA, 25 bp, Homo sapien
gccacaggccgggtgatgagccggg

SEQ ID NO: 5021944 - DNA, 25 bp, Homo sapien
aggccgggtgatgagccgggacggg

SEQ ID NO: 5021945 - DNA, 25 bp, Homo sapien
gccgggtgatgagccgggacgggag

SEQ ID NO: 5021946 - DNA, 25 bp, Homo sapien
cacaggccgggtgatgagccgggac

SEQ ID NO: 5021947 - DNA, 25 bp, Homo sapien
ttgatctgtaactgtgaaaaatcaa

SEQ ID NO: 5021948 - DNA, 25 bp, Homo sapien
agtttgatctgtaactgtgaaaaat

SEQ ID NO: 5021949 - DNA, 25 bp, Homo sapien
gaagggagaaagagtagaacaagga

SEQ ID NO: 5021950 - DNA, 25 bp, Homo sapien
taagaccatttaagtgcagtagtga

SEQ ID NO: 5021951 - DNA, 25 bp, Homo sapien
tgcaatcgatagtgctggccagggg

SEQ ID NO: 5021952 - DNA, 25 bp, Homo sapien
ctgcaatcgatagtgctggccaggg

SEQ ID NO: 5021953 - DNA, 25 bp, Homo sapien
gtggcttgatgtgaaactgtcccat

SEQ ID NO: 5021954 - DNA, 25 bp, Homo sapien
ggaggtggcttgatgtgaaactgtc

SEQ ID NO: 5021955 - DNA, 25 bp, Homo sapien
aggtggcttgatgtgaaactgtccc

SEQ ID NO: 5021956 - DNA, 25 bp, Homo sapien
gctggaggtggcttgatgtgaaact

SEQ ID NO: 5021957 - DNA, 25 bp, Homo sapien
tctggccactaggatagaggattcc

SEQ ID NO: 5021958 - DNA, 25 bp, Homo sapien
ccactaggatagaggattcctttca

SEQ ID NO: 5021959 - DNA, 25 bp, Homo sapien
tggccactaggatagaggattcctt

SEQ ID NO: 5021960 - DNA, 25 bp, Homo sapien
gccactaggatagaggattcctttc

SEQ ID NO: 5021961 - DNA, 25 bp, Homo sapien
acttgaattttggtgtctgtcttac

SEQ ID NO: 5021962 - DNA, 25 bp, Homo sapien
gtctatctatggtggcatcaaccac

SEQ ID NO: 5021963 - DNA, 25 bp, Homo sapien
tatctatggtggcatcaaccactcc

SEQ ID NO: 5021964 - DNA, 25 bp, Homo sapien
tcttgtctatctatggtggcatcaa

SEQ ID NO: 5021965 - DNA, 25 bp, Homo sapien
ttgtctatctatggtggcatcaacc

SEQ ID NO: 5021966 - DNA, 25 bp, Homo sapien
tgaccctgaagactttaaagccagt

SEQ ID NO: 5021967 - DNA, 25 bp, Homo sapien
cagtgaccctgaagactttaaagcc

SEQ ID NO: 5021968 - DNA, 25 bp, Homo sapien
agtgaccctgaagactttaaagcca

SEQ ID NO: 5021969 - DNA, 25 bp, Homo sapien
gtgaccctgaagactttaaagccag

SEQ ID NO: 5021970 - DNA, 25 bp, Homo sapien
cagcagtcaagaagacttcccaagg

SEQ ID NO: 5021971 - DNA, 25 bp, Homo sapien
ttccttcccttacggcatccaggtc

SEQ ID NO: 5021972 - DNA, 25 bp, Homo sapien
cttcccttacggcatccaggtcctc

SEQ ID NO: 5021973 - DNA, 25 bp, Homo sapien
ccccagcagtcaagaagacttccca

SEQ ID NO: 5021974 - DNA, 25 bp, Homo sapien
ctgtcaaagaaggaggatagaacct

SEQ ID NO: 5021975 - DNA, 25 bp, Homo sapien
tcaaagaaggaggatagaacctggg

SEQ ID NO: 5021976 - DNA, 25 bp, Homo sapien
gaggatagaacctggggccaacttc

SEQ ID NO: 5021977 - DNA, 25 bp, Homo sapien
aggatagaacctggggccaacttct

SEQ ID NO: 5021978 - DNA, 25 bp, Homo sapien
gcaggctccgtttagcctgtgtgag

SEQ ID NO: 5021979 - DNA, 25 bp, Homo sapien
ggaaacatcactcgttgcaggctcc

SEQ ID NO: 5021980 - DNA, 25 bp, Homo sapien
gtttagcctgtgtgaggccttcagc

SEQ ID NO: 5021981 - DNA, 25 bp, Homo sapien
tcactcgttgcaggctccgtttagc

SEQ ID NO: 5021982 - DNA, 25 bp, Homo sapien
gctgctcattgattagctgaaagcc

SEQ ID NO: 5021983 - DNA, 25 bp, Homo sapien
aaggtattgtgtgtaggattttgga

SEQ ID NO: 5021984 - DNA, 25 bp, Homo sapien
ggctgctcattgattagctgaaagc

SEQ ID NO: 5021985 - DNA, 25 bp, Homo sapien
gcagagcatgctcctaaggtattgt

SEQ ID NO: 5021986 - DNA, 25 bp, Homo sapien
tctgggaaagcgagctggacaccag

SEQ ID NO: 5021987 - DNA, 25 bp, Homo sapien
agcccaaactctgggaaagcgagct

SEQ ID NO: 5021988 - DNA, 25 bp, Homo sapien
ccaaactctgggaaagcgagctgga

SEQ ID NO: 5021989 - DNA, 25 bp, Homo sapien
gggaaagcgagctggacaccagacc

SEQ ID NO: 5021990 - DNA, 25 bp, Homo sapien
gcgccagctaacttcctgtgtgtct

SEQ ID NO: 5021991 - DNA, 25 bp, Homo sapien
tggaattccctgtcccgggatgact

SEQ ID NO: 5021992 - DNA, 25 bp, Homo sapien
agctccgggaactgcgtggaattcc

SEQ ID NO: 5021993 - DNA, 25 bp, Homo sapien
cgggatgactcagcgccagctaact

SEQ ID NO: 5021994 - DNA, 25 bp, Homo sapien
tctcctcttgggatagggtccctct

SEQ ID NO: 5021995 - DNA, 25 bp, Homo sapien
tgtcaccaacgcttgctacatgcac

SEQ ID NO: 5021996 - DNA, 25 bp, Homo sapien
tctgtatgtagctctgctatccggg

SEQ ID NO: 5021997 - DNA, 25 bp, Homo sapien
gggctccacgggcttaaaacacagc

SEQ ID NO: 5021998 - DNA, 25 bp, Homo sapien
gtaggagaagaacattgcatgggtc

SEQ ID NO: 5021999 - DNA, 25 bp, Homo sapien
attgcatgggtccagctctcgccat

SEQ ID NO: 5022000 - DNA, 25 bp, Homo sapien
tgtaggagaagaacattgcatgggt

SEQ ID NO: 5022001 - DNA, 25 bp, Homo sapien
cattgcatgggtccagctctcgcca

SEQ ID NO: 5022002 - DNA, 25 bp, Homo sapien
tgtggtgccctgtctaccaggttgt

SEQ ID NO: 5022003 - DNA, 25 bp, Homo sapien
ggccagcagccacactttttccttt

SEQ ID NO: 5022004 - DNA, 25 bp, Homo sapien
ctgcagatgtggaacgaagtgatct

SEQ ID NO: 5022005 - DNA, 25 bp, Homo sapien
tgaggttggcagagctttggacccc

SEQ ID NO: 5022006 - DNA, 25 bp, Homo sapien
tcttatggttgttgcagagtgggct

SEQ ID NO: 5022007 - DNA, 25 bp, Homo sapien
tgttcaatgcttgccctcttatggt

SEQ ID NO: 5022008 - DNA, 25 bp, Homo sapien
gggttgaacttcctctatgttcaat

SEQ ID NO: 5022009 - DNA, 25 bp, Homo sapien
cagaactctcccctgtaaccacttt

SEQ ID NO: 5022010 - DNA, 25 bp, Homo sapien
gcagggtgaagttatcttttctaca

SEQ ID NO: 5022011 - DNA, 25 bp, Homo sapien
cagggtgaagttatcttttctacaa

SEQ ID NO: 5022012 - DNA, 25 bp, Homo sapien
tgcagggtgaagttatcttttctac

SEQ ID NO: 5022013 - DNA, 25 bp, Homo sapien
ctgcagggtgaagttatcttttcta

SEQ ID NO: 5022014 - DNA, 25 bp, Homo sapien
ctggagggacacagcggcaccctgc

SEQ ID NO: 5022015 - DNA, 25 bp, Homo sapien
tggagggacacagcggcaccctgca

SEQ ID NO: 5022016 - DNA, 25 bp, Homo sapien
aggtctaggagacaccgtcaggtga

SEQ ID NO: 5022017 - DNA, 25 bp, Homo sapien
gggtactgacgtgatgaggcaaaca

SEQ ID NO: 5022018 - DNA, 25 bp, Homo sapien
ctgagcatgacagtcccagggatgg

SEQ ID NO: 5022019 - DNA, 25 bp, Homo sapien
tcccgcttaaggcaaaaaatgtgca

SEQ ID NO: 5022020 - DNA, 25 bp, Homo sapien
tacagaacatgtttcaacatgtttc

SEQ ID NO: 5022021 - DNA, 25 bp, Homo sapien
taaatacctgtttaagttcatgtat

SEQ ID NO: 5022022 - DNA, 25 bp, Homo sapien
cacagcctagtgagagatcctgcac

SEQ ID NO: 5022023 - DNA, 25 bp, Homo sapien
cccgtcaacattttgagcacagcct

SEQ ID NO: 5022024 - DNA, 25 bp, Homo sapien
ttgctcgaggaagctgagtccccag

SEQ ID NO: 5022025 - DNA, 25 bp, Homo sapien
tgaggcctgatgcttgctcgaggaa

SEQ ID NO: 5022026 - DNA, 25 bp, Homo sapien
tgagtccccagaggcatttgcagcc

SEQ ID NO: 5022027 - DNA, 25 bp, Homo sapien
gatgcttgctcgaggaagctgagtc

SEQ ID NO: 5022028 - DNA, 25 bp, Homo sapien
caaggcccgctctcctatttatggg

SEQ ID NO: 5022029 - DNA, 25 bp, Homo sapien
acagattggcaaggcccgctctcct

SEQ ID NO: 5022030 - DNA, 25 bp, Homo sapien
cacacagattggcaaggcccgctct

SEQ ID NO: 5022031 - DNA, 25 bp, Homo sapien
tggcaaggcccgctctcctatttat

SEQ ID NO: 5022032 - DNA, 25 bp, Homo sapien
cattagtatctatgggtggaggctg

SEQ ID NO: 5022033 - DNA, 25 bp, Homo sapien
gaaaacactcgctggaacaatctgg

SEQ ID NO: 5022034 - DNA, 25 bp, Homo sapien
caatcagtcaaccagttggtcagtc

SEQ ID NO: 5022035 - DNA, 25 bp, Homo sapien
tcaacagacatatctcaggcacacg

SEQ ID NO: 5022036 - DNA, 25 bp, Homo sapien
tcatggactcagggggcctaaatcc

SEQ ID NO: 5022037 - DNA, 25 bp, Homo sapien
ctaaatccaatagcctggatttgtc

SEQ ID NO: 5022038 - DNA, 25 bp, Homo sapien
gggcctaaatccaatagcctggatt

SEQ ID NO: 5022039 - DNA, 25 bp, Homo sapien
aatccaatagcctggatttgtcact

SEQ ID NO: 5022040 - DNA, 25 bp, Homo sapien
caggctgtgccacctacatccagct

SEQ ID NO: 5022041 - DNA, 25 bp, Homo sapien
ctggggattcctcttaagtgttttg

SEQ ID NO: 5022042 - DNA, 25 bp, Homo sapien
cagccctcatgtctcagcagggcct

SEQ ID NO: 5022043 - DNA, 25 bp, Homo sapien
gattcctcttaagtgttttgagcag

SEQ ID NO: 5022044 - DNA, 25 bp, Homo sapien
ggcctggcccctaggaacatagcct

SEQ ID NO: 5022045 - DNA, 25 bp, Homo sapien
tctggggtcttagaagccctggata

SEQ ID NO: 5022046 - DNA, 25 bp, Homo sapien
gaagccctggatagtggtgtaaccc

SEQ ID NO: 5022047 - DNA, 25 bp, Homo sapien
gtggcctggcccctaggaacatagc

SEQ ID NO: 5022048 - DNA, 25 bp, Homo sapien
tcctatggcctttaggggcacatga

SEQ ID NO: 5022049 - DNA, 25 bp, Homo sapien
gcaggaaccggcttctctagcctct

SEQ ID NO: 5022050 - DNA, 25 bp, Homo sapien
tccctggagccccttgcaaggactg

SEQ ID NO: 5022051 - DNA, 25 bp, Homo sapien
ggaatatagccccagtaagggctca

SEQ ID NO: 5022052 - DNA, 25 bp, Homo sapien
caagttcgtgtttatgctgggagcc

SEQ ID NO: 5022053 - DNA, 25 bp, Homo sapien
gggcgcccagtacagtgcaagtgat

SEQ ID NO: 5022054 - DNA, 25 bp, Homo sapien
agtgtccacggataagggcgtcccg

SEQ ID NO: 5022055 - DNA, 25 bp, Homo sapien
ccacagccacgggtcaagttcgtgt

SEQ ID NO: 5022056 - DNA, 25 bp, Homo sapien
ggggaggcggctgtctccttggtct

SEQ ID NO: 5022057 - DNA, 25 bp, Homo sapien
acgcggctcccgctcagttccacag

SEQ ID NO: 5022058 - DNA, 25 bp, Homo sapien
ggctcccgctcagttccacagtcag

SEQ ID NO: 5022059 - DNA, 25 bp, Homo sapien
tgcaccgggttctttgaaaatcagc

SEQ ID NO: 5022060 - DNA, 25 bp, Homo sapien
ccagcccccttacctggaaggctca

SEQ ID NO: 5022061 - DNA, 25 bp, Homo sapien
cagcccccttacctggaaggctcac

SEQ ID NO: 5022062 - DNA, 25 bp, Homo sapien
tctttgcagacccagccaaagtcct

SEQ ID NO: 5022063 - DNA, 25 bp, Homo sapien
tatcttctttgcagacccagccaaa

SEQ ID NO: 5022064 - DNA, 25 bp, Homo sapien
tcttctttgcagacccagccaaagt

SEQ ID NO: 5022065 - DNA, 25 bp, Homo sapien
tttatcttctttgcagacccagcca

SEQ ID NO: 5022066 - DNA, 25 bp, Homo sapien
gagctcctttccctgagctccgcag

SEQ ID NO: 5022067 - DNA, 25 bp, Homo sapien
ttccctgagctccgcaggtcctgga

SEQ ID NO: 5022068 - DNA, 25 bp, Homo sapien
tcctttccctgagctccgcaggtcc

SEQ ID NO: 5022069 - DNA, 25 bp, Homo sapien
ccctgagctccgcaggtcctggagt

SEQ ID NO: 5022070 - DNA, 25 bp, Homo sapien
ttggaggtggacgccaagacttgtg

SEQ ID NO: 5022071 - DNA, 25 bp, Homo sapien
ggccctgggctcttcattgccttcc

SEQ ID NO: 5022072 - DNA, 25 bp, Homo sapien
ctgggctcttcattgccttccccac

SEQ ID NO: 5022073 - DNA, 25 bp, Homo sapien
tggaggtggacgccaagacttgtgt

SEQ ID NO: 5022074 - DNA, 25 bp, Homo sapien
agcaggcccgatggaggatcctaca

SEQ ID NO: 5022075 - DNA, 25 bp, Homo sapien
gacctcaccagggaagttggttgcc

SEQ ID NO: 5022076 - DNA, 25 bp, Homo sapien
ctctgctgttcctgaatccccacgg

SEQ ID NO: 5022077 - DNA, 25 bp, Homo sapien
ctgagcagccttggcggtgtgcgag

SEQ ID NO: 5022078 - DNA, 25 bp, Homo sapien
acagggatatggctgagatcatcct

SEQ ID NO: 5022079 - DNA, 25 bp, Homo sapien
catggacagggatatggctgagatc

SEQ ID NO: 5022080 - DNA, 25 bp, Homo sapien
agggatatggctgagatcatccttc

SEQ ID NO: 5022081 - DNA, 25 bp, Homo sapien
ggacagggatatggctgagatcatc

SEQ ID NO: 5022082 - DNA, 25 bp, Homo sapien
gaaggcaagcactggtttgtggaaa

SEQ ID NO: 5022083 - DNA, 25 bp, Homo sapien
ctgtgaatcacaggaaggcaagcac

SEQ ID NO: 5022084 - DNA, 25 bp, Homo sapien
ggcaagcactggtttgtggaaatac

SEQ ID NO: 5022085 - DNA, 25 bp, Homo sapien
ggaaggcaagcactggtttgtggaa

SEQ ID NO: 5022086 - DNA, 25 bp, Homo sapien
tcattgacccttaggccaaggctta

SEQ ID NO: 5022087 - DNA, 25 bp, Homo sapien
ctgctcattgacccttaggccaagg

SEQ ID NO: 5022088 - DNA, 25 bp, Homo sapien
gctcattgacccttaggccaaggct

SEQ ID NO: 5022089 - DNA, 25 bp, Homo sapien
cattgacccttaggccaaggcttac

SEQ ID NO: 5022090 - DNA, 25 bp, Homo sapien
gaatcctccagttccccgcttggat

SEQ ID NO: 5022091 - DNA, 25 bp, Homo sapien
taccaaggagtctagaatcctccag

SEQ ID NO: 5022092 - DNA, 25 bp, Homo sapien
tggcgctaccaaggagtctagaatc

SEQ ID NO: 5022093 - DNA, 25 bp, Homo sapien
gagtctagaatcctccagttccccg

SEQ ID NO: 5022094 - DNA, 25 bp, Homo sapien
ctggaggaggaacccacagtgcacc

SEQ ID NO: 5022095 - DNA, 25 bp, Homo sapien
ggaggaggaacccacagtgcaccag

SEQ ID NO: 5022096 - DNA, 25 bp, Homo sapien
cccctggaggaggaacccacagtgc

SEQ ID NO: 5022097 - DNA, 25 bp, Homo sapien
aggaggaacccacagtgcaccagcc

SEQ ID NO: 5022098 - DNA, 25 bp, Homo sapien
caagtgatgagcgtgtgcatatctg

SEQ ID NO: 5022099 - DNA, 25 bp, Homo sapien
agggcaggacaagtgatgagcgtgt

SEQ ID NO: 5022100 - DNA, 25 bp, Homo sapien
gaggtgctggtgaaggagtaactca

SEQ ID NO: 5022101 - DNA, 25 bp, Homo sapien
cagtgtcccgtgtcgtctggggctc

SEQ ID NO: 5022102 - DNA, 25 bp, Homo sapien
acaagcccagaacaccaacgatcaa

SEQ ID NO: 5022103 - DNA, 25 bp, Homo sapien
cacaagcccagaacaccaacgatca

SEQ ID NO: 5022104 - DNA, 25 bp, Homo sapien
agccacaagcccagaacaccaacga

SEQ ID NO: 5022105 - DNA, 25 bp, Homo sapien
cttgagccacaagcccagaacacca

SEQ ID NO: 5022106 - DNA, 25 bp, Homo sapien
gacagctgcattgaggagaggcctt

SEQ ID NO: 5022107 - DNA, 25 bp, Homo sapien
aggccttgaacaggaagagaattcc

SEQ ID NO: 5022108 - DNA, 25 bp, Homo sapien
gagcaggtgagctgacagctgcatt

SEQ ID NO: 5022109 - DNA, 25 bp, Homo sapien
tgggtgaatgggaccctggacagcc

SEQ ID NO: 5022110 - DNA, 25 bp, Homo sapien
aggacaggacgaggccagatctgct

SEQ ID NO: 5022111 - DNA, 25 bp, Homo sapien
acaggacgaggccagatctgctcgg

SEQ ID NO: 5022112 - DNA, 25 bp, Homo sapien
ggacgaggccagatctgctcggctt

SEQ ID NO: 5022113 - DNA, 25 bp, Homo sapien
cgaggccagatctgctcggcttctc

SEQ ID NO: 5022114 - DNA, 25 bp, Homo sapien
tctcagccgtaagtagggcattggc

SEQ ID NO: 5022115 - DNA, 25 bp, Homo sapien
tcgttcgctaaagacatccgctgcc

SEQ ID NO: 5022116 - DNA, 25 bp, Homo sapien
ggcctgggctttgtcgttcgctaaa

SEQ ID NO: 5022117 - DNA, 25 bp, Homo sapien
tggctgttgccccattgaggcgaca

SEQ ID NO: 5022118 - DNA, 25 bp, Homo sapien
ggtatgaggccttcacccgatccta

SEQ ID NO: 5022119 - DNA, 25 bp, Homo sapien
gaaaatgacaatcacaccagggggt

SEQ ID NO: 5022120 - DNA, 25 bp, Homo sapien
tacaatggggtggaaaatgacaatc

SEQ ID NO: 5022121 - DNA, 25 bp, Homo sapien
acaatcacaccagggggtatgaggc

SEQ ID NO: 5022122 - DNA, 25 bp, Homo sapien
ctgaattttctcctaggctggtcct

SEQ ID NO: 5022123 - DNA, 25 bp, Homo sapien
gtggtcagtgatgcacggccccttc

SEQ ID NO: 5022124 - DNA, 25 bp, Homo sapien
ggctggtcctcctatcaaaaagcat

SEQ ID NO: 5022125 - DNA, 25 bp, Homo sapien
tgtctagtgtgcctccagggcagct

SEQ ID NO: 5022126 - DNA, 25 bp, Homo sapien
catcagctgtaaggatctgggcaga

SEQ ID NO: 5022127 - DNA, 25 bp, Homo sapien
tctcagcagctcttcaggatagtcc

SEQ ID NO: 5022128 - DNA, 25 bp, Homo sapien
gaacacatggctagtgacagcacct

SEQ ID NO: 5022129 - DNA, 25 bp, Homo sapien
catttattgagaccacggtgtgcca

SEQ ID NO: 5022130 - DNA, 25 bp, Homo sapien
ctggggcttctttagtggggtgagg

SEQ ID NO: 5022131 - DNA, 25 bp, Homo sapien
gcaaccttggtacctgcgctgcagt

SEQ ID NO: 5022132 - DNA, 25 bp, Homo sapien
tgcctgacagccaatcaggagagag

SEQ ID NO: 5022133 - DNA, 25 bp, Homo sapien
aggcgtggtcaagggcgagtggctc

SEQ ID NO: 5022134 - DNA, 25 bp, Homo sapien
ctcctttgtaaagtgcgaattacgt

SEQ ID NO: 5022135 - DNA, 25 bp, Homo sapien
ctgctgaatctcatcctctgggaac

SEQ ID NO: 5022136 - DNA, 25 bp, Homo sapien
ctgacaaggcttccagatgactcca

SEQ ID NO: 5022137 - DNA, 25 bp, Homo sapien
gcagaggaactttttgggccatgct

SEQ ID NO: 5022138 - DNA, 25 bp, Homo sapien
cgtacctcaggcaggtatgggactg

SEQ ID NO: 5022139 - DNA, 25 bp, Homo sapien
cctaaagggctttgtagaatagaag

SEQ ID NO: 5022140 - DNA, 25 bp, Homo sapien
tgattagagcaatgagccctttggg

SEQ ID NO: 5022141 - DNA, 25 bp, Homo sapien
tcaagcccctggacgggtgattaga

SEQ ID NO: 5022142 - DNA, 25 bp, Homo sapien
atcgtgacggacctgcactgggtga

SEQ ID NO: 5022143 - DNA, 25 bp, Homo sapien
agccaggttccctcggcaaggggcg

SEQ ID NO: 5022144 - DNA, 25 bp, Homo sapien
ctcgatacgggcggggatccccaga

SEQ ID NO: 5022145 - DNA, 25 bp, Homo sapien
ttccctcggcaaggggcgctcgata

SEQ ID NO: 5022146 - DNA, 25 bp, Homo sapien
cgctcgatacgggcggggatcccca

SEQ ID NO: 5022147 - DNA, 25 bp, Homo sapien
ggacacccaaactgtcaccgtcctg

SEQ ID NO: 5022148 - DNA, 25 bp, Homo sapien
gcgcacgggcggaaaggacacccaa

SEQ ID NO: 5022149 - DNA, 25 bp, Homo sapien
gacagacagcgttcccaaggaggaa

SEQ ID NO: 5022150 - DNA, 25 bp, Homo sapien
tgtcaccgtcctgtcactgtgtctc

SEQ ID NO: 5022151 - DNA, 25 bp, Homo sapien
gaagattcctggtgccctgagtcct

SEQ ID NO: 5022152 - DNA, 25 bp, Homo sapien
ggtcagctgtattggatgctttcgc

SEQ ID NO: 5022153 - DNA, 25 bp, Homo sapien
cacgtttctagtgaggaggaggcga

SEQ ID NO: 5022154 - DNA, 25 bp, Homo sapien
tttcgctctctagtggccctcttgg

SEQ ID NO: 5022155 - DNA, 25 bp, Homo sapien
aaccagtattctgagttggcgtagg

SEQ ID NO: 5022156 - DNA, 25 bp, Homo sapien
ttaaccagtattctgagttggcgta

SEQ ID NO: 5022157 - DNA, 25 bp, Homo sapien
cagtattctgagttggcgtagggcc

SEQ ID NO: 5022158 - DNA, 25 bp, Homo sapien
tgagttggcgtagggccgatcgtgc

SEQ ID NO: 5022159 - DNA, 25 bp, Homo sapien
gaatatgtctcatttagtggctcag

SEQ ID NO: 5022160 - DNA, 25 bp, Homo sapien
ctctggatgaaagctagctgccttc

SEQ ID NO: 5022161 - DNA, 25 bp, Homo sapien
tagtggctcagtgaaggggttggaa

SEQ ID NO: 5022162 - DNA, 25 bp, Homo sapien
tctggatgaaagctagctgccttcc

SEQ ID NO: 5022163 - DNA, 25 bp, Homo sapien
taactcatgtccagctctctttcca

SEQ ID NO: 5022164 - DNA, 25 bp, Homo sapien
gccagtgcctcggtaactcatgtcc

SEQ ID NO: 5022165 - DNA, 25 bp, Homo sapien
tcggtaactcatgtccagctctctt

SEQ ID NO: 5022166 - DNA, 25 bp, Homo sapien
gcctcggtaactcatgtccagctct

SEQ ID NO: 5022167 - DNA, 25 bp, Homo sapien
tgtagtcaccagcacaacgatgaag

SEQ ID NO: 5022168 - DNA, 25 bp, Homo sapien
cagcgaggcggctgcatgggaactt

SEQ ID NO: 5022169 - DNA, 25 bp, Homo sapien
tgcatgggaacttggtcctctccca

SEQ ID NO: 5022170 - DNA, 25 bp, Homo sapien
tcttctaagaggctgattgtagtca

SEQ ID NO: 5022171 - DNA, 25 bp, Homo sapien
gaagccctgacctctccgttactga

SEQ ID NO: 5022172 - DNA, 25 bp, Homo sapien
tccgttactgactggatcccaatgt

SEQ ID NO: 5022173 - DNA, 25 bp, Homo sapien
cctgacctctccgttactgactgga

SEQ ID NO: 5022174 - DNA, 25 bp, Homo sapien
gacctctccgttactgactggatcc

SEQ ID NO: 5022175 - DNA, 25 bp, Homo sapien
ggttgatgccacagatccctgactg

SEQ ID NO: 5022176 - DNA, 25 bp, Homo sapien
ccaattgttgccgtggccacaggtg

SEQ ID NO: 5022177 - DNA, 25 bp, Homo sapien
atgtccacaccctgcggccaattgt

SEQ ID NO: 5022178 - DNA, 25 bp, Homo sapien
cacaggtgtaagagttcctgtctga

SEQ ID NO: 5022179 - DNA, 25 bp, Homo sapien
tctggctgtgtaacctccgaaaaga

SEQ ID NO: 5022180 - DNA, 25 bp, Homo sapien
gaactgacctattctgggtgtcctg

SEQ ID NO: 5022181 - DNA, 25 bp, Homo sapien
gatggacaggctctgaccgcttttg

SEQ ID NO: 5022182 - DNA, 25 bp, Homo sapien
agtagaaaaagaccacctccaggtg

SEQ ID NO: 5022183 - DNA, 25 bp, Homo sapien
gacgcaaaacagtagtttagaattc

SEQ ID NO: 5022184 - DNA, 25 bp, Homo sapien
tctttaatctgcagtactgcagagc

SEQ ID NO: 5022185 - DNA, 25 bp, Homo sapien
tatgtcctaacgaagacgcaaaaca

SEQ ID NO: 5022186 - DNA, 25 bp, Homo sapien
tagaattctcttccggttcatggag

SEQ ID NO: 5022187 - DNA, 25 bp, Homo sapien
cagaggttagcattttttccaggtc

SEQ ID NO: 5022188 - DNA, 25 bp, Homo sapien
tttctattgaattatcaagtgtaaa

SEQ ID NO: 5022189 - DNA, 25 bp, Homo sapien
ttccaggtcttaatttttctattga

SEQ ID NO: 5022190 - DNA, 25 bp, Homo sapien
ctattgaattatcaagtgtaaaggg

SEQ ID NO: 5022191 - DNA, 25 bp, Homo sapien
gatgcagcctgatacggacacttaa

SEQ ID NO: 5022192 - DNA, 25 bp, Homo sapien
tgtctatcgagaatgaagccccagc

SEQ ID NO: 5022193 - DNA, 25 bp, Homo sapien
tccaggaagtcatgcaatgccaggc

SEQ ID NO: 5022194 - DNA, 25 bp, Homo sapien
cttaaacgatatctccaggacctgg

SEQ ID NO: 5022195 - DNA, 25 bp, Homo sapien
tgctgctaaggtgcacccactcaca

SEQ ID NO: 5022196 - DNA, 25 bp, Homo sapien
gagatacgatctgaacctgaagaag

SEQ ID NO: 5022197 - DNA, 25 bp, Homo sapien
cacatgactctgctagctccatggg

SEQ ID NO: 5022198 - DNA, 25 bp, Homo sapien
gagaaacagatgtgcacttccagcc

SEQ ID NO: 5022199 - DNA, 25 bp, Homo sapien
tttcccttgggtagatgaggtgtcc

SEQ ID NO: 5022200 - DNA, 25 bp, Homo sapien
agatgaggtgtccactgagtttgaa

SEQ ID NO: 5022201 - DNA, 25 bp, Homo sapien
aggtgagttggtaacagccagattg

SEQ ID NO: 5022202 - DNA, 25 bp, Homo sapien
gggataggatggtagagaggcaggg

SEQ ID NO: 5022203 - DNA, 25 bp, Homo sapien
ctgaggggatcccatagcaaagaag

SEQ ID NO: 5022204 - DNA, 25 bp, Homo sapien
tgaggggatcccatagcaaagaaga

SEQ ID NO: 5022205 - DNA, 25 bp, Homo sapien
aaccctgaccaatgcaaagaagggc

SEQ ID NO: 5022206 - DNA, 25 bp, Homo sapien
catttcttgtcagagcacacataaa

SEQ ID NO: 5022207 - DNA, 25 bp, Homo sapien
gacagacgcatataccagctgacac

SEQ ID NO: 5022208 - DNA, 25 bp, Homo sapien
aaaatgcgttctcatgagcacagcc

SEQ ID NO: 5022209 - DNA, 25 bp, Homo sapien
gggtttattctcatcacgttgtcgc

SEQ ID NO: 5022210 - DNA, 25 bp, Homo sapien
gagccaagccgggtttattctcatc

SEQ ID NO: 5022211 - DNA, 25 bp, Homo sapien
tattctcatcacgttgtcgctccca

SEQ ID NO: 5022212 - DNA, 25 bp, Homo sapien
caagccgggtttattctcatcacgt

SEQ ID NO: 5022213 - DNA, 25 bp, Homo sapien
tactgtggtagtctgcctgtcttcg

SEQ ID NO: 5022214 - DNA, 25 bp, Homo sapien
ctgtggtagtctgcctgtcttcggg

SEQ ID NO: 5022215 - DNA, 25 bp, Homo sapien
tgcctgtcttcggggcctccacccc

SEQ ID NO: 5022216 - DNA, 25 bp, Homo sapien
gctactgtggtagtctgcctgtctt

SEQ ID NO: 5022217 - DNA, 25 bp, Homo sapien
cacacacagaggcttatacttggca

SEQ ID NO: 5022218 - DNA, 25 bp, Homo sapien
agtgacatgtgttcctcctagacca

SEQ ID NO: 5022219 - DNA, 25 bp, Homo sapien
ctgtcaagctagagaatgaggtgcc

SEQ ID NO: 5022220 - DNA, 25 bp, Homo sapien
gattaactggacttggaccacctgc

SEQ ID NO: 5022221 - DNA, 25 bp, Homo sapien
ggggcactggaaatgaatgtgtcca

SEQ ID NO: 5022222 - DNA, 25 bp, Homo sapien
aagaaggtaactggaaagcaaattg

SEQ ID NO: 5022223 - DNA, 25 bp, Homo sapien
gggaaagcctaagttatttgcagaa

SEQ ID NO: 5022224 - DNA, 25 bp, Homo sapien
gagaaggaactgcttagtctgggaa

SEQ ID NO: 5022225 - DNA, 25 bp, Homo sapien
aaagagtacaccctatacatgccga

SEQ ID NO: 5022226 - DNA, 25 bp, Homo sapien
gggagctatgagtcaaccactgaat

SEQ ID NO: 5022227 - DNA, 25 bp, Homo sapien
catgtaatgatggaacagagctgac

SEQ ID NO: 5022228 - DNA, 25 bp, Homo sapien
ggttatcaagtatgcacagccagcc

SEQ ID NO: 5022229 - DNA, 25 bp, Homo sapien
gcaataagatgggagatacctggca

SEQ ID NO: 5022230 - DNA, 25 bp, Homo sapien
tcatgtgattggaaaactgggctac

SEQ ID NO: 5022231 - DNA, 25 bp, Homo sapien
gatgagggccatcccctagagataa

SEQ ID NO: 5022232 - DNA, 25 bp, Homo sapien
caacgttcgttggtgaaattggcca

SEQ ID NO: 5022233 - DNA, 25 bp, Homo sapien
tcccagaagggtaagacatcagctt

SEQ ID NO: 5022234 - DNA, 25 bp, Homo sapien
aacagaatctagtgtgaggctccca

SEQ ID NO: 5022235 - DNA, 25 bp, Homo sapien
catgccctagttaaagaggactgat

SEQ ID NO: 5022236 - DNA, 25 bp, Homo sapien
tgaagcccatagtggcaagccatcc

SEQ ID NO: 5022237 - DNA, 25 bp, Homo sapien
gatctctctccaggttaaacatcat

SEQ ID NO: 5022238 - DNA, 25 bp, Homo sapien
cattccactatcgatgaggtttgaa

SEQ ID NO: 5022239 - DNA, 25 bp, Homo sapien
gaatgtagttgctcaagcagctgta

SEQ ID NO: 5022240 - DNA, 25 bp, Homo sapien
gaggttcacaactataggtttcaaa

SEQ ID NO: 5022241 - DNA, 25 bp, Homo sapien
tgaatgggcaagaacctcacagacc

SEQ ID NO: 5022242 - DNA, 25 bp, Homo sapien
cacttgaggaatgtattgaaaacgc

SEQ ID NO: 5022243 - DNA, 25 bp, Homo sapien
tgtcccttgaccagcagatctaaaa

SEQ ID NO: 5022244 - DNA, 25 bp, Homo sapien
catatactcatggaagctctgagca

SEQ ID NO: 5022245 - DNA, 25 bp, Homo sapien
tcttgcctctcgcagtttgaaactg

SEQ ID NO: 5022246 - DNA, 25 bp, Homo sapien
catattctagtcctgagccctgtgt

SEQ ID NO: 5022247 - DNA, 25 bp, Homo sapien
aacatggcctatggatggtagtggc

SEQ ID NO: 5022248 - DNA, 25 bp, Homo sapien
cacctcttcgtgcaggcttctggct

SEQ ID NO: 5022249 - DNA, 25 bp, Homo sapien
tcttgatgaggttaccaaatctctg

SEQ ID NO: 5022250 - DNA, 25 bp, Homo sapien
aacagggcttatagtttcacttgag

SEQ ID NO: 5022251 - DNA, 25 bp, Homo sapien
aggagtccatcgttctgccataaca

SEQ ID NO: 5022252 - DNA, 25 bp, Homo sapien
gcttcggcccttgctaggagtccat

SEQ ID NO: 5022253 - DNA, 25 bp, Homo sapien
cttgtcttccctgtagctgtggcca

SEQ ID NO: 5022254 - DNA, 25 bp, Homo sapien
ttgtcttccctgtagctgtggccat

SEQ ID NO: 5022255 - DNA, 25 bp, Homo sapien
cactatgccctcaggttaccgagag

SEQ ID NO: 5022256 - DNA, 25 bp, Homo sapien
tgagagtctaatcctggcaaagtgg

SEQ ID NO: 5022257 - DNA, 25 bp, Homo sapien
tactttctacatgttggcaactctg

SEQ ID NO: 5022258 - DNA, 25 bp, Homo sapien
taatctggcatgcatcctccccagt

SEQ ID NO: 5022259 - DNA, 25 bp, Homo sapien
ctcaagcagtaacgcaagccatggg

SEQ ID NO: 5022260 - DNA, 25 bp, Homo sapien
tcagcagaatgggtaaccacgggca

SEQ ID NO: 5022261 - DNA, 25 bp, Homo sapien
aacatgtgttcccaccggagtcagc

SEQ ID NO: 5022262 - DNA, 25 bp, Homo sapien
taacttgtacgatgtggcacttctc

SEQ ID NO: 5022263 - DNA, 25 bp, Homo sapien
cacaaggagcttctgcatatgccag

SEQ ID NO: 5022264 - DNA, 25 bp, Homo sapien
ggaatctgacagtagccacaacaat

SEQ ID NO: 5022265 - DNA, 25 bp, Homo sapien
tatgacatcagctgtaggcacgcct

SEQ ID NO: 5022266 - DNA, 25 bp, Homo sapien
caaatggcattagaaggctgggcta

SEQ ID NO: 5022267 - DNA, 25 bp, Homo sapien
tgaattgttaaccatgaagcacgta

SEQ ID NO: 5022268 - DNA, 25 bp, Homo sapien
gaagtgagtttactcctccaggtca

SEQ ID NO: 5022269 - DNA, 25 bp, Homo sapien
tggacaccccgatgcagcaatgtat

SEQ ID NO: 5022270 - DNA, 25 bp, Homo sapien
gaacacttatacctctccagactgg

SEQ ID NO: 5022271 - DNA, 25 bp, Homo sapien
ttcacccagagcaaatacccagttc

SEQ ID NO: 5022272 - DNA, 25 bp, Homo sapien
cactcatggtatgtgcccaatacag

SEQ ID NO: 5022273 - DNA, 25 bp, Homo sapien
aatatttgtaccctaagtgtacagt

SEQ ID NO: 5022274 - DNA, 25 bp, Homo sapien
gcccaatacaggtctaacattttgt

SEQ ID NO: 5022275 - DNA, 25 bp, Homo sapien
aaggtgaagtaacctgtccaaaatg

SEQ ID NO: 5022276 - DNA, 25 bp, Homo sapien
agtaacctgtccaaaatgagaaagg

SEQ ID NO: 5022277 - DNA, 25 bp, Homo sapien
ctcactgggtcattcgactacagct

SEQ ID NO: 5022278 - DNA, 25 bp, Homo sapien
gggtcattcgactacagctttaaat

SEQ ID NO: 5022279 - DNA, 25 bp, Homo sapien
tacagtaaggtttcaaaatgacaag

SEQ ID NO: 5022280 - DNA, 25 bp, Homo sapien
taagagccaattctaagctcagaaa

SEQ ID NO: 5022281 - DNA, 25 bp, Homo sapien
aatctaccaacctatacttaagagc

SEQ ID NO: 5022282 - DNA, 25 bp, Homo sapien
ccctttccaacaattcacacttatt

SEQ ID NO: 5022283 - DNA, 25 bp, Homo sapien
tatcagccctgaagcttttccttgg

SEQ ID NO: 5022284 - DNA, 25 bp, Homo sapien
taagacattacagcacacaactgag

SEQ ID NO: 5022285 - DNA, 25 bp, Homo sapien
cagatggaagtcatactgtacacca

SEQ ID NO: 5022286 - DNA, 25 bp, Homo sapien
ggctctaagcagttaccagtaagta

SEQ ID NO: 5022287 - DNA, 25 bp, Homo sapien
gggctcactgacaatccaaccgctt

SEQ ID NO: 5022288 - DNA, 25 bp, Homo sapien
ccgcttttaggaagctatcagttat

SEQ ID NO: 5022289 - DNA, 25 bp, Homo sapien
ctttcacaagggctcactgacaatc

SEQ ID NO: 5022290 - DNA, 25 bp, Homo sapien
cactgacaatccaaccgcttttagg

SEQ ID NO: 5022291 - DNA, 25 bp, Homo sapien
cagttagagccaggtcatactgcaa

SEQ ID NO: 5022292 - DNA, 25 bp, Homo sapien
taaccgcaatatactaaggcagcag

SEQ ID NO: 5022293 - DNA, 25 bp, Homo sapien
catttttcacctagatcatcagctg

SEQ ID NO: 5022294 - DNA, 25 bp, Homo sapien
tacagggtacacctgactggcagtt

SEQ ID NO: 5022295 - DNA, 25 bp, Homo sapien
tataacaaggatggactgattttca

SEQ ID NO: 5022296 - DNA, 25 bp, Homo sapien
caaggatggactgattttcatattt

SEQ ID NO: 5022297 - DNA, 25 bp, Homo sapien
acagaattgtctttgcatgaagccc

SEQ ID NO: 5022298 - DNA, 25 bp, Homo sapien
ttttttataacaaggatggactgat

SEQ ID NO: 5022299 - DNA, 25 bp, Homo sapien
agacagtagaagagtcaaaggtgtc

SEQ ID NO: 5022300 - DNA, 25 bp, Homo sapien
ctgatcaacagtttgttagaaaagc

SEQ ID NO: 5022301 - DNA, 25 bp, Homo sapien
tacctaaggtctgagacagtagaag

SEQ ID NO: 5022302 - DNA, 25 bp, Homo sapien
taaggtctgagacagtagaagagtc

SEQ ID NO: 5022303 - DNA, 25 bp, Homo sapien
aatgaatgttaccattgcacaaatg

SEQ ID NO: 5022304 - DNA, 25 bp, Homo sapien
aatatctggtaaacttgtcaactcg

SEQ ID NO: 5022305 - DNA, 25 bp, Homo sapien
cactatgaagataatatctggtaaa

SEQ ID NO: 5022306 - DNA, 25 bp, Homo sapien
atatctggtaaacttgtcaactcga

SEQ ID NO: 5022307 - DNA, 25 bp, Homo sapien
aacatcagctaattctggaggaagt

SEQ ID NO: 5022308 - DNA, 25 bp, Homo sapien
gaacatcagctaattctggaggaag

SEQ ID NO: 5022309 - DNA, 25 bp, Homo sapien
acatcagctaattctggaggaagtg

SEQ ID NO: 5022310 - DNA, 25 bp, Homo sapien
ctaacaaaaaattgtgcaaaagaga

SEQ ID NO: 5022311 - DNA, 25 bp, Homo sapien
taacaaaaaattgtgcaaaagagag

SEQ ID NO: 5022312 - DNA, 25 bp, Homo sapien
gaatcctgaaccttctcagtataga

SEQ ID NO: 5022313 - DNA, 25 bp, Homo sapien
gactggcatatgaagagggactttg

SEQ ID NO: 5022314 - DNA, 25 bp, Homo sapien
cagtatagacaattatcccaaaaac

SEQ ID NO: 5022315 - DNA, 25 bp, Homo sapien
aaattcctacaacttagtgactggc

SEQ ID NO: 5022316 - DNA, 25 bp, Homo sapien
aaaacacctggctctatgtgtggca

SEQ ID NO: 5022317 - DNA, 25 bp, Homo sapien
aattctaggaaaagctctcaacgtg

SEQ ID NO: 5022318 - DNA, 25 bp, Homo sapien
tatggtaagcactcaaaagtagctg

SEQ ID NO: 5022319 - DNA, 25 bp, Homo sapien
gcatattatatagctctaagagtgt

SEQ ID NO: 5022320 - DNA, 25 bp, Homo sapien
cacctagagatttttgcctggccac

SEQ ID NO: 5022321 - DNA, 25 bp, Homo sapien
cccacgggagagctgtatctttcaa

SEQ ID NO: 5022322 - DNA, 25 bp, Homo sapien
tgtaaagcatctattttgccatggt

SEQ ID NO: 5022323 - DNA, 25 bp, Homo sapien
aaataatcagctctcaaacctacta

SEQ ID NO: 5022324 - DNA, 25 bp, Homo sapien
ctgaattttctgctgtccacgagcc

SEQ ID NO: 5022325 - DNA, 25 bp, Homo sapien
tgaattttctgctgtccacgagcca

SEQ ID NO: 5022326 - DNA, 25 bp, Homo sapien
gaattttctgctgtccacgagccat

SEQ ID NO: 5022327 - DNA, 25 bp, Homo sapien
atgcaaatgttatgtacaccaagac

SEQ ID NO: 5022328 - DNA, 25 bp, Homo sapien
cagagtaatcaaagcataagaacgt

SEQ ID NO: 5022329 - DNA, 25 bp, Homo sapien
gtttattctatgagccagcaattcc

SEQ ID NO: 5022330 - DNA, 25 bp, Homo sapien
agtatcaattgacacaaccctgtgg

SEQ ID NO: 5022331 - DNA, 25 bp, Homo sapien
agaggttgcagtgacgcgtgatggc

SEQ ID NO: 5022332 - DNA, 25 bp, Homo sapien
ctgcagcctgggcgacagtgagact

SEQ ID NO: 5022333 - DNA, 25 bp, Homo sapien
gcactgcagcctgggcgacagtgag

SEQ ID NO: 5022334 - DNA, 25 bp, Homo sapien
gcagtgacgcgtgatggcaccactg

SEQ ID NO: 5022335 - DNA, 25 bp, Homo sapien
taccgatgatctgacgtgaacccaa

SEQ ID NO: 5022336 - DNA, 25 bp, Homo sapien
tttatattagggtagcacacgagcc

SEQ ID NO: 5022337 - DNA, 25 bp, Homo sapien
gattaaatgcgacaaactggaggga

SEQ ID NO: 5022338 - DNA, 25 bp, Homo sapien
ggatttgtatcaacttcaccaggga

SEQ ID NO: 5022339 - DNA, 25 bp, Homo sapien
gtttttaatgcaactctcagtgtgg

SEQ ID NO: 5022340 - DNA, 25 bp, Homo sapien
gctggtttttaatgcaactctcagt

SEQ ID NO: 5022341 - DNA, 25 bp, Homo sapien
tggtttttaatgcaactctcagtgt

SEQ ID NO: 5022342 - DNA, 25 bp, Homo sapien
aaatacctacatgctggtttttaat

SEQ ID NO: 5022343 - DNA, 25 bp, Homo sapien
tctcgtaggaggcaacaagtaagct

SEQ ID NO: 5022344 - DNA, 25 bp, Homo sapien
gtccaggaagtaggctcattctcca

SEQ ID NO: 5022345 - DNA, 25 bp, Homo sapien
cataaccatcggaaaggaagaggcc

SEQ ID NO: 5022346 - DNA, 25 bp, Homo sapien
gaaacgagttctaaaatgaggcgct

SEQ ID NO: 5022347 - DNA, 25 bp, Homo sapien
agtcctcacggaccctggaccaaga

SEQ ID NO: 5022348 - DNA, 25 bp, Homo sapien
tggaccaagacgcgcctcctggagg

SEQ ID NO: 5022349 - DNA, 25 bp, Homo sapien
tcctggaggccgagactgcccgaaa

SEQ ID NO: 5022350 - DNA, 25 bp, Homo sapien
actctggcagctgaccggcggctgt

SEQ ID NO: 5022351 - DNA, 25 bp, Homo sapien
gcctggcaggcgcccgaactcatcc

SEQ ID NO: 5022352 - DNA, 25 bp, Homo sapien
gggcctggcaggcgcccgaactcat

SEQ ID NO: 5022353 - DNA, 25 bp, Homo sapien
tggcaggcgcccgaactcatcccct

SEQ ID NO: 5022354 - DNA, 25 bp, Homo sapien
agggcctggcaggcgcccgaactca

SEQ ID NO: 5022355 - DNA, 25 bp, Homo sapien
agccgggagcacaacagcctcgcac

SEQ ID NO: 5022356 - DNA, 25 bp, Homo sapien
ttaggggagaccactacgcctcgtg

SEQ ID NO: 5022357 - DNA, 25 bp, Homo sapien
gccgcctcagccttaggggagacca

SEQ ID NO: 5022358 - DNA, 25 bp, Homo sapien
gccgggacagtcttgcgtcggagag

SEQ ID NO: 5022359 - DNA, 25 bp, Homo sapien
ccctgtaagtccaggcggagaggct

SEQ ID NO: 5022360 - DNA, 25 bp, Homo sapien
tatttccgggtatgatttctcagcc

SEQ ID NO: 5022361 - DNA, 25 bp, Homo sapien
tgcctctgacggtggaaatgccaga

SEQ ID NO: 5022362 - DNA, 25 bp, Homo sapien
accccatgcctctgacggtggaaat

SEQ ID NO: 5022363 - DNA, 25 bp, Homo sapien
gatgaaacggtctggcaagagcctc

SEQ ID NO: 5022364 - DNA, 25 bp, Homo sapien
gccggtgcgactgcgtctctgatgt

SEQ ID NO: 5022365 - DNA, 25 bp, Homo sapien
cacccggattgttgtggccctgccg

SEQ ID NO: 5022366 - DNA, 25 bp, Homo sapien
catcatcccaagcatgtccacgaag

SEQ ID NO: 5022367 - DNA, 25 bp, Homo sapien
catgagacgggacatcctgatcctt

SEQ ID NO: 5022368 - DNA, 25 bp, Homo sapien
aacgcgggatcttcggactccatgt

SEQ ID NO: 5022369 - DNA, 25 bp, Homo sapien
gggttcgcttcttcgcgtgctgcag

SEQ ID NO: 5022370 - DNA, 25 bp, Homo sapien
tcttcgcgtgctgcaggatcagggt

SEQ ID NO: 5022371 - DNA, 25 bp, Homo sapien
ttttccataagacatcctagtgctc

SEQ ID NO: 5022372 - DNA, 25 bp, Homo sapien
ttccataagacatcctagtgctcat

SEQ ID NO: 5022373 - DNA, 25 bp, Homo sapien
tttttccataagacatcctagtgct

SEQ ID NO: 5022374 - DNA, 25 bp, Homo sapien
tttccataagacatcctagtgctca

SEQ ID NO: 5022375 - DNA, 25 bp, Homo sapien
agagtccaaatctgctagatgttcc

SEQ ID NO: 5022376 - DNA, 25 bp, Homo sapien
gtgagggaatcttgatgagaatggg

SEQ ID NO: 5022377 - DNA, 25 bp, Homo sapien
gagggaatcttgatgagaatgggaa

SEQ ID NO: 5022378 - DNA, 25 bp, Homo sapien
agtcacaactggaagttttggtgac

SEQ ID NO: 5022379 - DNA, 25 bp, Homo sapien
tgcgtggaacacgaggctctagctg

SEQ ID NO: 5022380 - DNA, 25 bp, Homo sapien
tactgaaacattgggccccaagtga

SEQ ID NO: 5022381 - DNA, 25 bp, Homo sapien
ctgcgtggaacacgaggctctagct

SEQ ID NO: 5022382 - DNA, 25 bp, Homo sapien
tgggccccaagtgagatggccccat

SEQ ID NO: 5022383 - DNA, 25 bp, Homo sapien
ccgtggcaccgaagaaaatgacatt

SEQ ID NO: 5022384 - DNA, 25 bp, Homo sapien
taatgtgtgcccaaaagagactatg

SEQ ID NO: 5022385 - DNA, 25 bp, Homo sapien
tatgtccagcccatgtacttgactg

SEQ ID NO: 5022386 - DNA, 25 bp, Homo sapien
ttttggagacaaggtggcacatatg

SEQ ID NO: 5022387 - DNA, 25 bp, Homo sapien
tccacttccggcctgatggcttcat

SEQ ID NO: 5022388 - DNA, 25 bp, Homo sapien
ctgcgcctggtctctagtctcaact

SEQ ID NO: 5022389 - DNA, 25 bp, Homo sapien
tagtctcaactttcggctccacttc

SEQ ID NO: 5022390 - DNA, 25 bp, Homo sapien
ttccggcctgatggcttcatgctca

SEQ ID NO: 5022391 - DNA, 25 bp, Homo sapien
aaggtgtatggggaaagatcagaat

SEQ ID NO: 5022392 - DNA, 25 bp, Homo sapien
aatgaagacaggctctacaggcctc

SEQ ID NO: 5022393 - DNA, 25 bp, Homo sapien
tctggtctgctagagcagaaggtgt

SEQ ID NO: 5022394 - DNA, 25 bp, Homo sapien
tccaaatggttgcagctgtgaagaa

SEQ ID NO: 5022395 - DNA, 25 bp, Homo sapien
cactggcccactctgcaggtcaaat

SEQ ID NO: 5022396 - DNA, 25 bp, Homo sapien
agagaacaagatgttggcttcctca

SEQ ID NO: 5022397 - DNA, 25 bp, Homo sapien
ttcctcagcatggagagggcactgg

SEQ ID NO: 5022398 - DNA, 25 bp, Homo sapien
gaacaagatgttggcttcctcagca

SEQ ID NO: 5022399 - DNA, 25 bp, Homo sapien
aattgtgtggttggagccagaatat

SEQ ID NO: 5022400 - DNA, 25 bp, Homo sapien
gaatattctggattcgaccttcatc

SEQ ID NO: 5022401 - DNA, 25 bp, Homo sapien
tctggattcgaccttcatctgtgca

SEQ ID NO: 5022402 - DNA, 25 bp, Homo sapien
tttatgtctgcctgcatctggtccc

SEQ ID NO: 5022403 - DNA, 25 bp, Homo sapien
gaactcagggttataactaggaaca

SEQ ID NO: 5022404 - DNA, 25 bp, Homo sapien
tgtaggtgacatgctgaatctgggt

SEQ ID NO: 5022405 - DNA, 25 bp, Homo sapien
ggtctgattttgagataccctttca

SEQ ID NO: 5022406 - DNA, 25 bp, Homo sapien
tatatgagttatacaggtttgtgta

SEQ ID NO: 5022407 - DNA, 25 bp, Homo sapien
aaaacaattccatcgactctagtag

SEQ ID NO: 5022408 - DNA, 25 bp, Homo sapien
gggaagaagagtttgcataccctcc

SEQ ID NO: 5022409 - DNA, 25 bp, Homo sapien
catggctacagcataacctggtaca

SEQ ID NO: 5022410 - DNA, 25 bp, Homo sapien
gcaacagctactggatttgctgaga

SEQ ID NO: 5022411 - DNA, 25 bp, Homo sapien
aggaatcagaggcaccactgttaac

SEQ ID NO: 5022412 - DNA, 25 bp, Homo sapien
aagcaaactgctcccagacggtttc

SEQ ID NO: 5022413 - DNA, 25 bp, Homo sapien
agtgggctggtggtatctcctggaa

SEQ ID NO: 5022414 - DNA, 25 bp, Homo sapien
cagacggtttcctccacttgatgcc

SEQ ID NO: 5022415 - DNA, 25 bp, Homo sapien
ccaggactttgcatgggccagtggc

SEQ ID NO: 5022416 - DNA, 25 bp, Homo sapien
ttcagaatcgagctcttgatctgct

SEQ ID NO: 5022417 - DNA, 25 bp, Homo sapien
tcccaggactttgcatgggccagtg

SEQ ID NO: 5022418 - DNA, 25 bp, Homo sapien
ctggcctaggttcttcagaatcgag

SEQ ID NO: 5022419 - DNA, 25 bp, Homo sapien
aaggaggcaagaagttgctggcata

SEQ ID NO: 5022420 - DNA, 25 bp, Homo sapien
tgttttagaatctttgtcaacttgt

SEQ ID NO: 5022421 - DNA, 25 bp, Homo sapien
gaagttgctggcataaaatggccac

SEQ ID NO: 5022422 - DNA, 25 bp, Homo sapien
tggactgagaaaacaccctaaaagc

SEQ ID NO: 5022423 - DNA, 25 bp, Homo sapien
cccaagtggcaaaccttgtagttga

SEQ ID NO: 5022424 - DNA, 25 bp, Homo sapien
tatagaccgcgactgagagcaggac

SEQ ID NO: 5022425 - DNA, 25 bp, Homo sapien
tctccaaaagttcaatgatgcctcc

SEQ ID NO: 5022426 - DNA, 25 bp, Homo sapien
gtactgcggtgagcacattactgcg

SEQ ID NO: 5022427 - DNA, 25 bp, Homo sapien
tattctctttaatctcatgtcttct

SEQ ID NO: 5022428 - DNA, 25 bp, Homo sapien
gtagacccagccttatcaaaacagg

SEQ ID NO: 5022429 - DNA, 25 bp, Homo sapien
ttgtcaagttgttctcacagtgaga

SEQ ID NO: 5022430 - DNA, 25 bp, Homo sapien
gaatcgttatccaaacctagtctta

SEQ ID NO: 5022431 - DNA, 25 bp, Homo sapien
gccataataaaggacaatccctggg

SEQ ID NO: 5022432 - DNA, 25 bp, Homo sapien
aaggacaatccctgggagctcttcc

SEQ ID NO: 5022433 - DNA, 25 bp, Homo sapien
taataaaggacaatccctgggagct

SEQ ID NO: 5022434 - DNA, 25 bp, Homo sapien
tagaaagccataataaaggacaatc

SEQ ID NO: 5022435 - DNA, 25 bp, Homo sapien
cagtcttgaaaaatttccgctttgc

SEQ ID NO: 5022436 - DNA, 25 bp, Homo sapien
cttgaaaaatttccgctttgctggt

SEQ ID NO: 5022437 - DNA, 25 bp, Homo sapien
gtcttgaaaaatttccgctttgctg

SEQ ID NO: 5022438 - DNA, 25 bp, Homo sapien
tcagtcttgaaaaatttccgctttg

SEQ ID NO: 5022439 - DNA, 25 bp, Homo sapien
gaggcgccgtaggtggtacaacact

SEQ ID NO: 5022440 - DNA, 25 bp, Homo sapien
ccgtaggtggtacaacactgtctgg

SEQ ID NO: 5022441 - DNA, 25 bp, Homo sapien
tgcataattgagaggcgccgtaggt

SEQ ID NO: 5022442 - DNA, 25 bp, Homo sapien
agagtgcataattgagaggcgccgt

SEQ ID NO: 5022443 - DNA, 25 bp, Homo sapien
catcttgtgtgaagaggtgtctttg

SEQ ID NO: 5022444 - DNA, 25 bp, Homo sapien
tgtgtgaagaggtgtctttggtcat

SEQ ID NO: 5022445 - DNA, 25 bp, Homo sapien
cttgtgtgaagaggtgtctttggtc

SEQ ID NO: 5022446 - DNA, 25 bp, Homo sapien
tcttgtgtgaagaggtgtctttggt

SEQ ID NO: 5022447 - DNA, 25 bp, Homo sapien
tcctgggcctacattatatctgtga

SEQ ID NO: 5022448 - DNA, 25 bp, Homo sapien
tatgacctgtgtatgactctcctcg

SEQ ID NO: 5022449 - DNA, 25 bp, Homo sapien
tttgaactttctgagcaggaaacaa

SEQ ID NO: 5022450 - DNA, 25 bp, Homo sapien
gacctgctgatccagcttcacctga

SEQ ID NO: 5022451 - DNA, 25 bp, Homo sapien
cttctgatacatctgcagaaagtgg

SEQ ID NO: 5022452 - DNA, 25 bp, Homo sapien
tcagagggttctggtataccctggc

SEQ ID NO: 5022453 - DNA, 25 bp, Homo sapien
aagaagaggtgttagcatcagtgga

SEQ ID NO: 5022454 - DNA, 25 bp, Homo sapien
gggctccacaaatagaagaagaggt

SEQ ID NO: 5022455 - DNA, 25 bp, Homo sapien
agagagtggatgttgtgtagcccat

SEQ ID NO: 5022456 - DNA, 25 bp, Homo sapien
aagagagtggatgttgtgtagccca

SEQ ID NO: 5022457 - DNA, 25 bp, Homo sapien
ggaagagagtggatgttgtgtagcc

SEQ ID NO: 5022458 - DNA, 25 bp, Homo sapien
gaggaagagagtggatgttgtgtag

SEQ ID NO: 5022459 - DNA, 25 bp, Homo sapien
agagtctcagactgtagccttattc

SEQ ID NO: 5022460 - DNA, 25 bp, Homo sapien
gaacgccaccatgttcaatcattgg

SEQ ID NO: 5022461 - DNA, 25 bp, Homo sapien
gaagccaacaacgctgggaaaacca

SEQ ID NO: 5022462 - DNA, 25 bp, Homo sapien
ctgtgaaggaggattaagtaggaag

SEQ ID NO: 5022463 - DNA, 25 bp, Homo sapien
cagtgagttccacatgtcgagaagc

SEQ ID NO: 5022464 - DNA, 25 bp, Homo sapien
ttgccaggaggttagtaggggccaa

SEQ ID NO: 5022465 - DNA, 25 bp, Homo sapien
taaagcgtttctaatgtccacctcc

SEQ ID NO: 5022466 - DNA, 25 bp, Homo sapien
tgtccccagacgttgtattgcctca

SEQ ID NO: 5022467 - DNA, 25 bp, Homo sapien
gttgagcctctgtgtcataaagggc

SEQ ID NO: 5022468 - DNA, 25 bp, Homo sapien
gacctccatctgacgaaagttctag

SEQ ID NO: 5022469 - DNA, 25 bp, Homo sapien
catctatcaagcagttggatgagac

SEQ ID NO: 5022470 - DNA, 25 bp, Homo sapien
tctttaagaaccaggaccttggcca

SEQ ID NO: 5022471 - DNA, 25 bp, Homo sapien
ccttggccaagtcagttcactcagc

SEQ ID NO: 5022472 - DNA, 25 bp, Homo sapien
atgtcctcatctatcaagcagttgg

SEQ ID NO: 5022473 - DNA, 25 bp, Homo sapien
cacaaggccaatcattgtattgtat

SEQ ID NO: 5022474 - DNA, 25 bp, Homo sapien
tattgtattttagctctggggtggg

SEQ ID NO: 5022475 - DNA, 25 bp, Homo sapien
catttggtgaacctgaaccccacag

SEQ ID NO: 5022476 - DNA, 25 bp, Homo sapien
gaacaatagggctccattagtttgt

SEQ ID NO: 5022477 - DNA, 25 bp, Homo sapien
ggctgggctcggtgagctaagaaaa

SEQ ID NO: 5022478 - DNA, 25 bp, Homo sapien
agttcttgctccagttgccccagtg

SEQ ID NO: 5022479 - DNA, 25 bp, Homo sapien
gaaaagtattgagcccagaggaaca

SEQ ID NO: 5022480 - DNA, 25 bp, Homo sapien
ctgagtaagccatttaatgacctgt

SEQ ID NO: 5022481 - DNA, 25 bp, Homo sapien
agtggctattccaggtgcgattgca

SEQ ID NO: 5022482 - DNA, 25 bp, Homo sapien
gacaccaggtagacatagctcacga

SEQ ID NO: 5022483 - DNA, 25 bp, Homo sapien
caggtgcgattgcatgactgctcag

SEQ ID NO: 5022484 - DNA, 25 bp, Homo sapien
gattgcatgactgctcagcacggga

SEQ ID NO: 5022485 - DNA, 25 bp, Homo sapien
tctcctcctcttagatgtgagttca

SEQ ID NO: 5022486 - DNA, 25 bp, Homo sapien
tgggcctatgcgcttgtctcctcct

SEQ ID NO: 5022487 - DNA, 25 bp, Homo sapien
cctgtgttgtaaagaacatgggcct

SEQ ID NO: 5022488 - DNA, 25 bp, Homo sapien
tctatttccgtcagtatcaccctgt

SEQ ID NO: 5022489 - DNA, 25 bp, Homo sapien
tcaagtgtgtgggtcccaaactctg

SEQ ID NO: 5022490 - DNA, 25 bp, Homo sapien
tctgggcccggaatccttagtccag

SEQ ID NO: 5022491 - DNA, 25 bp, Homo sapien
aacctcccactcttatagcatgtag

SEQ ID NO: 5022492 - DNA, 25 bp, Homo sapien
tccacgggtaatccatgaaacctcc

SEQ ID NO: 5022493 - DNA, 25 bp, Homo sapien
gagttccctcgattatttcagccag

SEQ ID NO: 5022494 - DNA, 25 bp, Homo sapien
ctttccatagttccgagttccctcg

SEQ ID NO: 5022495 - DNA, 25 bp, Homo sapien
gctgatttaaatccgaaagatgact

SEQ ID NO: 5022496 - DNA, 25 bp, Homo sapien
ccctggatggtaaggctgatcgtgc

SEQ ID NO: 5022497 - DNA, 25 bp, Homo sapien
tccgggcggcgaagccccagcagag

SEQ ID NO: 5022498 - DNA, 25 bp, Homo sapien
agagcgagcagagtgcgtgcactcc

SEQ ID NO: 5022499 - DNA, 25 bp, Homo sapien
tctgggtgccactcattcatgaggg

SEQ ID NO: 5022500 - DNA, 25 bp, Homo sapien
tcaacaactgctgtcatcagggaga

SEQ ID NO: 5022501 - DNA, 25 bp, Homo sapien
ggcttcgggtctctcacacagtcat

SEQ ID NO: 5022502 - DNA, 25 bp, Homo sapien
cagtggcttcgggtctctcacacag

SEQ ID NO: 5022503 - DNA, 25 bp, Homo sapien
gggtctctcacacagtcatcatttg

SEQ ID NO: 5022504 - DNA, 25 bp, Homo sapien
ttgcagtggcttcgggtctctcaca

SEQ ID NO: 5022505 - DNA, 25 bp, Homo sapien
gatgtgctttccctaatccctagga

SEQ ID NO: 5022506 - DNA, 25 bp, Homo sapien
tattagtcccctttacacagatggt

SEQ ID NO: 5022507 - DNA, 25 bp, Homo sapien
tacaacctgatggtgttttacgacc

SEQ ID NO: 5022508 - DNA, 25 bp, Homo sapien
taaattcttaatacgtgctaggtcc

SEQ ID NO: 5022509 - DNA, 25 bp, Homo sapien
gatttttcgaatcaaaagtgttctg

SEQ ID NO: 5022510 - DNA, 25 bp, Homo sapien
aaatgacacccttcccaggcactac

SEQ ID NO: 5022511 - DNA, 25 bp, Homo sapien
tctgcactcagtgggcattgcaatt

SEQ ID NO: 5022512 - DNA, 25 bp, Homo sapien
ttgcctgattccagatcaaatgaca

SEQ ID NO: 5022513 - DNA, 25 bp, Homo sapien
tgtaattgtcttttgtagttgacat

SEQ ID NO: 5022514 - DNA, 25 bp, Homo sapien
ctctctcaattgtatttgacatttg

SEQ ID NO: 5022515 - DNA, 25 bp, Homo sapien
cattttggcctccacctttaatctt

SEQ ID NO: 5022516 - DNA, 25 bp, Homo sapien
ttttgtagttgacattttggcctcc

SEQ ID NO: 5022517 - DNA, 25 bp, Homo sapien
tatttattttgagaccgtgttttgc

SEQ ID NO: 5022518 - DNA, 25 bp, Homo sapien
ttcggctcaccacaatctccgcctc

SEQ ID NO: 5022519 - DNA, 25 bp, Homo sapien
ctggagtatgatggcgtgatttcgg

SEQ ID NO: 5022520 - DNA, 25 bp, Homo sapien
tcttgttgcctaggctggagtatga

SEQ ID NO: 5022521 - DNA, 25 bp, Homo sapien
gccctttgttgctcttaaatagtac

SEQ ID NO: 5022522 - DNA, 25 bp, Homo sapien
tggtataagaagctcattagaggct

SEQ ID NO: 5022523 - DNA, 25 bp, Homo sapien
cactgatgatctctgacctcatgtt

SEQ ID NO: 5022524 - DNA, 25 bp, Homo sapien
tgtgagggtggaactgaacgacttt

SEQ ID NO: 5022525 - DNA, 25 bp, Homo sapien
catatgtacgagctagattccagtc

SEQ ID NO: 5022526 - DNA, 25 bp, Homo sapien
taaatgccttgtggcgtactgcgca

SEQ ID NO: 5022527 - DNA, 25 bp, Homo sapien
cctgcccagctcgtaaaaggatgct

SEQ ID NO: 5022528 - DNA, 25 bp, Homo sapien
tgcctgcctggaaacgtcaaatgac

SEQ ID NO: 5022529 - DNA, 25 bp, Homo sapien
ttgcaggtgttgcattcccccaacc

SEQ ID NO: 5022530 - DNA, 25 bp, Homo sapien
caatccctagtgtttgcaggtgttg

SEQ ID NO: 5022531 - DNA, 25 bp, Homo sapien
ttccgctcgacccacaatccctagt

SEQ ID NO: 5022532 - DNA, 25 bp, Homo sapien
tttcttctcttcaaccagtagcctc

SEQ ID NO: 5022533 - DNA, 25 bp, Homo sapien
gaaggaggaaaacgcagcttgagat

SEQ ID NO: 5022534 - DNA, 25 bp, Homo sapien
cttgagatctactcgaagaactgac

SEQ ID NO: 5022535 - DNA, 25 bp, Homo sapien
ggagaaggaggaaaacgcagcttga

SEQ ID NO: 5022536 - DNA, 25 bp, Homo sapien
cgcagcttgagatctactcgaagaa

SEQ ID NO: 5022537 - DNA, 25 bp, Homo sapien
atgccgccgctccactcgggtaaac

SEQ ID NO: 5022538 - DNA, 25 bp, Homo sapien
gagctgcaagcatgccgccgctcca

SEQ ID NO: 5022539 - DNA, 25 bp, Homo sapien
cactcgggtaaacttcggagtgagt

SEQ ID NO: 5022540 - DNA, 25 bp, Homo sapien
ctgccgccgagctgcaagcatgccg

SEQ ID NO: 5022541 - DNA, 25 bp, Homo sapien
cagctcacctgagggagctccccag

SEQ ID NO: 5022542 - DNA, 25 bp, Homo sapien
ctgagcgcgcctctgccaatggcag

SEQ ID NO: 5022543 - DNA, 25 bp, Homo sapien
atcgcgcagctcgtccctcgggctt

SEQ ID NO: 5022544 - DNA, 25 bp, Homo sapien
ctgcactcggagaagggccttacct

SEQ ID NO: 5022545 - DNA, 25 bp, Homo sapien
cggaaaagcagaattacctgtagct

SEQ ID NO: 5022546 - DNA, 25 bp, Homo sapien
ggcgagcgagcgagagtggtgaggg

SEQ ID NO: 5022547 - DNA, 25 bp, Homo sapien
tatcccacctttccggctaggtgag

SEQ ID NO: 5022548 - DNA, 25 bp, Homo sapien
gtctgcccattgccacgatccagga

SEQ ID NO: 5022549 - DNA, 25 bp, Homo sapien
tactactaccactttgggctgatgg

SEQ ID NO: 5022550 - DNA, 25 bp, Homo sapien
actactaccactttgggctgatggc

SEQ ID NO: 5022551 - DNA, 25 bp, Homo sapien
ttaggaatggtctcagctcccgctc

SEQ ID NO: 5022552 - DNA, 25 bp, Homo sapien
gctgagttccttcgatttgtccaaa

SEQ ID NO: 5022553 - DNA, 25 bp, Homo sapien
ttagggccatttggaagttcagctg

SEQ ID NO: 5022554 - DNA, 25 bp, Homo sapien
tgttttagctgctcccaccgatctg

SEQ ID NO: 5022555 - DNA, 25 bp, Homo sapien
ttctcggggtgctctcgccgtcaag

SEQ ID NO: 5022556 - DNA, 25 bp, Homo sapien
tcggacgcggcaggcgggactgcgt

SEQ ID NO: 5022557 - DNA, 25 bp, Homo sapien
cggacaggcactccagacgcgtcgg

SEQ ID NO: 5022558 - DNA, 25 bp, Homo sapien
agttggccgccacctcggacgcggc

SEQ ID NO: 5022559 - DNA, 25 bp, Homo sapien
gaaggactagcctcaacataaagcc

SEQ ID NO: 5022560 - DNA, 25 bp, Homo sapien
tcctgaaggtgtctcgccggagagg

SEQ ID NO: 5022561 - DNA, 25 bp, Homo sapien
gccgctgggcctgtcatggagaagt

SEQ ID NO: 5022562 - DNA, 25 bp, Homo sapien
cccaagttgagggaccacgagggag

SEQ ID NO: 5022563 - DNA, 25 bp, Homo sapien
cactagggtactgatactctcttcc

SEQ ID NO: 5022564 - DNA, 25 bp, Homo sapien
cactcatgatccctggcattcacta

SEQ ID NO: 5022565 - DNA, 25 bp, Homo sapien
caatgactcttgttcaattataaaa

SEQ ID NO: 5022566 - DNA, 25 bp, Homo sapien
aattataaaaactaggcctggccag

SEQ ID NO: 5022567 - DNA, 25 bp, Homo sapien
taagaggtcagcttgaccttcctct

SEQ ID NO: 5022568 - DNA, 25 bp, Homo sapien
tctggcgagtttcccattacaaact

SEQ ID NO: 5022569 - DNA, 25 bp, Homo sapien
ttcctctctggcgagtttcccatta

SEQ ID NO: 5022570 - DNA, 25 bp, Homo sapien
ctaagaggtcagcttgaccttcctc

SEQ ID NO: 5022571 - DNA, 25 bp, Homo sapien
cagcatcatcctgttcctgtggtgg

SEQ ID NO: 5022572 - DNA, 25 bp, Homo sapien
gatcaagttcactccatatctgcag

SEQ ID NO: 5022573 - DNA, 25 bp, Homo sapien
tggttaaatgttctggatcaagttc

SEQ ID NO: 5022574 - DNA, 25 bp, Homo sapien
agcatcatcctgttcctgtggtggg

SEQ ID NO: 5022575 - DNA, 25 bp, Homo sapien
tctgcttcgattgaggaccgtcgct

SEQ ID NO: 5022576 - DNA, 25 bp, Homo sapien
ggaccgtcgctttggctcttcacat

SEQ ID NO: 5022577 - DNA, 25 bp, Homo sapien
gattgaggaccgtcgctttggctct

SEQ ID NO: 5022578 - DNA, 25 bp, Homo sapien
gggcctctgcttcgattgaggaccg

SEQ ID NO: 5022579 - DNA, 25 bp, Homo sapien
tgtgctgtcagtctagtggactctt

SEQ ID NO: 5022580 - DNA, 25 bp, Homo sapien
gagtgcagggaaagtgtccaggcag

SEQ ID NO: 5022581 - DNA, 25 bp, Homo sapien
ttaagcaagccactaatggccacca

SEQ ID NO: 5022582 - DNA, 25 bp, Homo sapien
tggccaccagcgcaaagggctgtgc

SEQ ID NO: 5022583 - DNA, 25 bp, Homo sapien
ttctgatctgagacttcgtccacag

SEQ ID NO: 5022584 - DNA, 25 bp, Homo sapien
gatctgagacttcgtccacagtata

SEQ ID NO: 5022585 - DNA, 25 bp, Homo sapien
cacagtatagcagccttttcctaaa

SEQ ID NO: 5022586 - DNA, 25 bp, Homo sapien
gacttcgtccacagtatagcagcct

SEQ ID NO: 5022587 - DNA, 25 bp, Homo sapien
atcacatacttccctgcctctaata

SEQ ID NO: 5022588 - DNA, 25 bp, Homo sapien
acatacttccctgcctctaataatc

SEQ ID NO: 5022589 - DNA, 25 bp, Homo sapien
tcacatacttccctgcctctaataa

SEQ ID NO: 5022590 - DNA, 25 bp, Homo sapien
atacttccctgcctctaataatcat

SEQ ID NO: 5022591 - DNA, 25 bp, Homo sapien
tgtgaagtgatagactctcgcttgg

SEQ ID NO: 5022592 - DNA, 25 bp, Homo sapien
tgtatttcggtatgcagtcaaagtg

SEQ ID NO: 5022593 - DNA, 25 bp, Homo sapien
aactcctactcaaagcactgcacga

SEQ ID NO: 5022594 - DNA, 25 bp, Homo sapien
cactcaagtctgaacacgtagtttg

SEQ ID NO: 5022595 - DNA, 25 bp, Homo sapien
tccaggttcatgataggtttgttgt

SEQ ID NO: 5022596 - DNA, 25 bp, Homo sapien
cctttagcttatccaggttcatgat

SEQ ID NO: 5022597 - DNA, 25 bp, Homo sapien
gataggtttgttgttagatgacaga

SEQ ID NO: 5022598 - DNA, 25 bp, Homo sapien
gcttatccaggttcatgataggttt

SEQ ID NO: 5022599 - DNA, 25 bp, Homo sapien
gacagggatttctatggggctttgt

SEQ ID NO: 5022600 - DNA, 25 bp, Homo sapien
tgacagggatttctatggggctttg

SEQ ID NO: 5022601 - DNA, 25 bp, Homo sapien
tgcttccacgtcaacagttttttca

SEQ ID NO: 5022602 - DNA, 25 bp, Homo sapien
ctgcttccacgtcaacagttttttc

SEQ ID NO: 5022603 - DNA, 25 bp, Homo sapien
ctgacccggaagcagatcatccact

SEQ ID NO: 5022604 - DNA, 25 bp, Homo sapien
gcagatcatccactaatggtttaga

SEQ ID NO: 5022605 - DNA, 25 bp, Homo sapien
tgttacataagaagccctgacccgg

SEQ ID NO: 5022606 - DNA, 25 bp, Homo sapien
gagggagctgccctgttacataaga

SEQ ID NO: 5022607 - DNA, 25 bp, Homo sapien
ccattagttattgtacaaatgctgt

SEQ ID NO: 5022608 - DNA, 25 bp, Homo sapien
tgtggacaaacgtcatgccgtggcc

SEQ ID NO: 5022609 - DNA, 25 bp, Homo sapien
cttgcaattattgtggacaaacgtc

SEQ ID NO: 5022610 - DNA, 25 bp, Homo sapien
caattattgtggacaaacgtcatgc

SEQ ID NO: 5022611 - DNA, 25 bp, Homo sapien
tattgtggacaaacgtcatgccgtg

SEQ ID NO: 5022612 - DNA, 25 bp, Homo sapien
tatcactccatgatcccatgtgagg

SEQ ID NO: 5022613 - DNA, 25 bp, Homo sapien
caacggaatcatcatgctatttggg

SEQ ID NO: 5022614 - DNA, 25 bp, Homo sapien
cattagtcacagaagagtgtatgga

SEQ ID NO: 5022615 - DNA, 25 bp, Homo sapien
gatgtggtccaatgtcaacggaatc

SEQ ID NO: 5022616 - DNA, 25 bp, Homo sapien
tttctcaatccaacataatctgtct

SEQ ID NO: 5022617 - DNA, 25 bp, Homo sapien
tgtcacccatttctcaatccaacat

SEQ ID NO: 5022618 - DNA, 25 bp, Homo sapien
caggcacctcatgtttcttaaaaga

SEQ ID NO: 5022619 - DNA, 25 bp, Homo sapien
tcttaaaagaggagcctacacttcc

SEQ ID NO: 5022620 - DNA, 25 bp, Homo sapien
gctgtctcgtgggaaaggtcattct

SEQ ID NO: 5022621 - DNA, 25 bp, Homo sapien
ccttcatctcaagtggccctttaaa

SEQ ID NO: 5022622 - DNA, 25 bp, Homo sapien
tccttggctatcaggagaatcctgg

SEQ ID NO: 5022623 - DNA, 25 bp, Homo sapien
aggtcattctgtctgagaccccagc

SEQ ID NO: 5022624 - DNA, 25 bp, Homo sapien
gcttcctgcgctcccacctcatctg

SEQ ID NO: 5022625 - DNA, 25 bp, Homo sapien
gggcttcctgcgctcccacctcatc

SEQ ID NO: 5022626 - DNA, 25 bp, Homo sapien
ggcttcctgcgctcccacctcatct

SEQ ID NO: 5022627 - DNA, 25 bp, Homo sapien
tgctgtgtgtcctctgggcatgtta

SEQ ID NO: 5022628 - DNA, 25 bp, Homo sapien
gctgtgtgtcctctgggcatgttaa

SEQ ID NO: 5022629 - DNA, 25 bp, Homo sapien
cttgctgtgtgtcctctgggcatgt

SEQ ID NO: 5022630 - DNA, 25 bp, Homo sapien
ctgtgtgtcctctgggcatgttaac

SEQ ID NO: 5022631 - DNA, 25 bp, Homo sapien
caaaggtttgcatcgtggatccagc

SEQ ID NO: 5022632 - DNA, 25 bp, Homo sapien
tctgtggggccaaaggtttgcatcg

SEQ ID NO: 5022633 - DNA, 25 bp, Homo sapien
gcatcgtggatccagctgtgctcca

SEQ ID NO: 5022634 - DNA, 25 bp, Homo sapien
ccctccagggtactaatggggctct

SEQ ID NO: 5022635 - DNA, 25 bp, Homo sapien
tgcatcctcggagcaccccagtttg

SEQ ID NO: 5022636 - DNA, 25 bp, Homo sapien
gcatgtttcctaagtccttgagcaa

SEQ ID NO: 5022637 - DNA, 25 bp, Homo sapien
caattgccacaagggatatgaggcc

SEQ ID NO: 5022638 - DNA, 25 bp, Homo sapien
gaaactgtttgtttgccagtcctgc

SEQ ID NO: 5022639 - DNA, 25 bp, Homo sapien
ctgagcgaaacactccaaagagata

SEQ ID NO: 5022640 - DNA, 25 bp, Homo sapien
gataggaaaacttgccgcctcttct

SEQ ID NO: 5022641 - DNA, 25 bp, Homo sapien
aagagataggaaaacttgccgcctc

SEQ ID NO: 5022642 - DNA, 25 bp, Homo sapien
gcgaaacactccaaagagataggaa

SEQ ID NO: 5022643 - DNA, 25 bp, Homo sapien
cctgcccagaaacttaggaagcatg

SEQ ID NO: 5022644 - DNA, 25 bp, Homo sapien
gaagttcggaccaacagaaaaatgc

SEQ ID NO: 5022645 - DNA, 25 bp, Homo sapien
tttgtgccaaatgctatgaacggcc

SEQ ID NO: 5022646 - DNA, 25 bp, Homo sapien
tttctaaaagagtaaggcatgtccc

SEQ ID NO: 5022647 - DNA, 25 bp, Homo sapien
caccccagtgttaaatgtgaagagg

SEQ ID NO: 5022648 - DNA, 25 bp, Homo sapien
gcttgtgtgtgaccacggcaggctc

SEQ ID NO: 5022649 - DNA, 25 bp, Homo sapien
ccagggtggttattcttggccagtc

SEQ ID NO: 5022650 - DNA, 25 bp, Homo sapien
tccatgtgacgtgggaaaattctag

SEQ ID NO: 5022651 - DNA, 25 bp, Homo sapien
gctgaggatacgagctggtctccac

SEQ ID NO: 5022652 - DNA, 25 bp, Homo sapien
ttaggtgctcgccatgtgtgccaac

SEQ ID NO: 5022653 - DNA, 25 bp, Homo sapien
gctccaaggcttgttgtcatgactg

SEQ ID NO: 5022654 - DNA, 25 bp, Homo sapien
cagagtcttctggagagatcctggg

SEQ ID NO: 5022655 - DNA, 25 bp, Homo sapien
agttcgattactctggacctgatgt

SEQ ID NO: 5022656 - DNA, 25 bp, Homo sapien
cgatgacggttgtcagtgtcgtgaa

SEQ ID NO: 5022657 - DNA, 25 bp, Homo sapien
agttccctggaatgagacgctggtt

SEQ ID NO: 5022658 - DNA, 25 bp, Homo sapien
tcgtgaagttcagtaccagctcttg

SEQ ID NO: 5022659 - DNA, 25 bp, Homo sapien
ggtgcaaaaggatagtgatctggaa

SEQ ID NO: 5022660 - DNA, 25 bp, Homo sapien
tatagtggggcctctgatcagccag

SEQ ID NO: 5022661 - DNA, 25 bp, Homo sapien
caaaaggatagtgatctggaaactt

SEQ ID NO: 5022662 - DNA, 25 bp, Homo sapien
aggatagtgatctggaaactttggg

SEQ ID NO: 5022663 - DNA, 25 bp, Homo sapien
gcaacagccaacaccatgattggaa

SEQ ID NO: 5022664 - DNA, 25 bp, Homo sapien
tgtaaggaagcccatatgaagacca

SEQ ID NO: 5022665 - DNA, 25 bp, Homo sapien
gagtgtaggctctgcctcatgtcat

SEQ ID NO: 5022666 - DNA, 25 bp, Homo sapien
cctaacatttggactctagtttgag

SEQ ID NO: 5022667 - DNA, 25 bp, Homo sapien
cacagtcaactgatttacgggccac

SEQ ID NO: 5022668 - DNA, 25 bp, Homo sapien
tacgggccactccataggctatgat

SEQ ID NO: 5022669 - DNA, 25 bp, Homo sapien
aaacatgctttaatgccaggcaaga

SEQ ID NO: 5022670 - DNA, 25 bp, Homo sapien
cctcccactctgaatgatgtatgaa

SEQ ID NO: 5022671 - DNA, 25 bp, Homo sapien
taagccactttattccagtcccttg

SEQ ID NO: 5022672 - DNA, 25 bp, Homo sapien
tattccagtcccttgaacatcacag

SEQ ID NO: 5022673 - DNA, 25 bp, Homo sapien
caggtcgtaagccactttattccag

SEQ ID NO: 5022674 - DNA, 25 bp, Homo sapien
gccactttattccagtcccttgaac

SEQ ID NO: 5022675 - DNA, 25 bp, Homo sapien
taggacttcgattcagagcagggaa

SEQ ID NO: 5022676 - DNA, 25 bp, Homo sapien
caaacttgagtgcactggattcgac

SEQ ID NO: 5022677 - DNA, 25 bp, Homo sapien
gaaccactgtgaggaactgacccct

SEQ ID NO: 5022678 - DNA, 25 bp, Homo sapien
gattcgacatacaaagaccttcctg

SEQ ID NO: 5022679 - DNA, 25 bp, Homo sapien
tctcttagtggcaagttccccatca

SEQ ID NO: 5022680 - DNA, 25 bp, Homo sapien
tatgactcgcctgtaaccagcaaat

SEQ ID NO: 5022681 - DNA, 25 bp, Homo sapien
gcaaatatacccactagggacctct

SEQ ID NO: 5022682 - DNA, 25 bp, Homo sapien
caaccttgagaatttgggcctccct

SEQ ID NO: 5022683 - DNA, 25 bp, Homo sapien
ctgcattcaaagagcacggcaatgg

SEQ ID NO: 5022684 - DNA, 25 bp, Homo sapien
gaggtcaccagaccaaacagcaact

SEQ ID NO: 5022685 - DNA, 25 bp, Homo sapien
agagcacggcaatggaaaatacttt

SEQ ID NO: 5022686 - DNA, 25 bp, Homo sapien
gcaactcagacttgtgctgtcactt

SEQ ID NO: 5022687 - DNA, 25 bp, Homo sapien
gaatttgatgactgcccaacctctg

SEQ ID NO: 5022688 - DNA, 25 bp, Homo sapien
catgcacatagattaaaccactggg

SEQ ID NO: 5022689 - DNA, 25 bp, Homo sapien
ccatgccgccagtctaatgctgtca

SEQ ID NO: 5022690 - DNA, 25 bp, Homo sapien
tgtgcaaagacagatatgacttcca

SEQ ID NO: 5022691 - DNA, 25 bp, Homo sapien
ttagctcaactagtgtaaacctgtg

SEQ ID NO: 5022692 - DNA, 25 bp, Homo sapien
agcttagaaactacagcctgctggg

SEQ ID NO: 5022693 - DNA, 25 bp, Homo sapien
tcacaataggcaacaagatgggtct

SEQ ID NO: 5022694 - DNA, 25 bp, Homo sapien
cctacggcacgtgtgacaacagatt

SEQ ID NO: 5022695 - DNA, 25 bp, Homo sapien
caaaagaagctgaaggcgtcacgga

SEQ ID NO: 5022696 - DNA, 25 bp, Homo sapien
gaatcaaaagggaacacaagcagct

SEQ ID NO: 5022697 - DNA, 25 bp, Homo sapien
ccgagtcttacgttttagaacagag

SEQ ID NO: 5022698 - DNA, 25 bp, Homo sapien
tctacaattcgattggtgggcgcag

SEQ ID NO: 5022699 - DNA, 25 bp, Homo sapien
gcttttggctcctcggatgaactct

SEQ ID NO: 5022700 - DNA, 25 bp, Homo sapien
tggccggcactgctcgggtcgcact

SEQ ID NO: 5022701 - DNA, 25 bp, Homo sapien
cgcactgcaggaggcgcacaatgga

SEQ ID NO: 5022702 - DNA, 25 bp, Homo sapien
ttggctcctcggatgaactcttcca

SEQ ID NO: 5022703 - DNA, 25 bp, Homo sapien
ggtttgctgcaagagcccatcctat

SEQ ID NO: 5022704 - DNA, 25 bp, Homo sapien
cagcacccggttggttcccataatg

SEQ ID NO: 5022705 - DNA, 25 bp, Homo sapien
gagccacttcgtgttcttcaggcca

SEQ ID NO: 5022706 - DNA, 25 bp, Homo sapien
tgtttgttcatacaccacgggaaga

SEQ ID NO: 5022707 - DNA, 25 bp, Homo sapien
ctggagctcggcatgacgtctggct

SEQ ID NO: 5022708 - DNA, 25 bp, Homo sapien
ctgtctgcatgattcagagttggct

SEQ ID NO: 5022709 - DNA, 25 bp, Homo sapien
tgtgctcccttgagtaccagtaaaa

SEQ ID NO: 5022710 - DNA, 25 bp, Homo sapien
tagagcacagcacaaacccattgtg

SEQ ID NO: 5022711 - DNA, 25 bp, Homo sapien
ctgaagagctgtctggacctagagc

SEQ ID NO: 5022712 - DNA, 25 bp, Homo sapien
ctgtgacatctgatcttctcccatc

SEQ ID NO: 5022713 - DNA, 25 bp, Homo sapien
aagccgccttctgctgttctataga

SEQ ID NO: 5022714 - DNA, 25 bp, Homo sapien
gttctatagatcagcgccaggtggg

SEQ ID NO: 5022715 - DNA, 25 bp, Homo sapien
gagacagaggctctctgtactgcga

SEQ ID NO: 5022716 - DNA, 25 bp, Homo sapien
tctctgtactgcgaagccgccttct

SEQ ID NO: 5022717 - DNA, 25 bp, Homo sapien
gttgacaagaattgccgaggcctct

SEQ ID NO: 5022718 - DNA, 25 bp, Homo sapien
gacaagaattgccgaggcctctgaa

SEQ ID NO: 5022719 - DNA, 25 bp, Homo sapien
ttgacaagaattgccgaggcctctg

SEQ ID NO: 5022720 - DNA, 25 bp, Homo sapien
acaagaattgccgaggcctctgaac

SEQ ID NO: 5022721 - DNA, 25 bp, Homo sapien
cgggcaccccagtgactatgggagc

SEQ ID NO: 5022722 - DNA, 25 bp, Homo sapien
ccccagtgactatgggagcccactg

SEQ ID NO: 5022723 - DNA, 25 bp, Homo sapien
cagtgactatgggagcccactgtct

SEQ ID NO: 5022724 - DNA, 25 bp, Homo sapien
gcaccccagtgactatgggagccca

SEQ ID NO: 5022725 - DNA, 25 bp, Homo sapien
tctggggttgactcatcttcaggca

SEQ ID NO: 5022726 - DNA, 25 bp, Homo sapien
ctggcggaagatcttttctgttctt

SEQ ID NO: 5022727 - DNA, 25 bp, Homo sapien
gtccatctggcggaagatcttttct

SEQ ID NO: 5022728 - DNA, 25 bp, Homo sapien
attggtgtccatctggcggaagatc

SEQ ID NO: 5022729 - DNA, 25 bp, Homo sapien
tacagaggaaaccatcttatagatt

SEQ ID NO: 5022730 - DNA, 25 bp, Homo sapien
cagaggaaaccatcttatagattgc

SEQ ID NO: 5022731 - DNA, 25 bp, Homo sapien
tttcattacagaggaaaccatctta

SEQ ID NO: 5022732 - DNA, 25 bp, Homo sapien
cattacagaggaaaccatcttatag

SEQ ID NO: 5022733 - DNA, 25 bp, Homo sapien
taaacctcccaaatgcgggctgaag

SEQ ID NO: 5022734 - DNA, 25 bp, Homo sapien
gcaggctccatttcataggctcaag

SEQ ID NO: 5022735 - DNA, 25 bp, Homo sapien
gggaatgtccccatccgcattggac

SEQ ID NO: 5022736 - DNA, 25 bp, Homo sapien
aggaagacccagtagacccctgtgt

SEQ ID NO: 5022737 - DNA, 25 bp, Homo sapien
gatgcctatcatggacccttgagag

SEQ ID NO: 5022738 - DNA, 25 bp, Homo sapien
gaattattatgcatcctcaggcctg

SEQ ID NO: 5022739 - DNA, 25 bp, Homo sapien
agtgcatgccacatgtttccccagg

SEQ ID NO: 5022740 - DNA, 25 bp, Homo sapien
caaggttcccactttgaggagcaag

SEQ ID NO: 5022741 - DNA, 25 bp, Homo sapien
gactctgcagcgacttggtctggga

SEQ ID NO: 5022742 - DNA, 25 bp, Homo sapien
actctgcagcgacttggtctgggag

SEQ ID NO: 5022743 - DNA, 25 bp, Homo sapien
ctgcagcgacttggtctgggaggta

SEQ ID NO: 5022744 - DNA, 25 bp, Homo sapien
ctgactctgcagcgacttggtctgg

SEQ ID NO: 5022745 - DNA, 25 bp, Homo sapien
gaaacaacagtttaccagacgctgg

SEQ ID NO: 5022746 - DNA, 25 bp, Homo sapien
catttgtggactttatgaatagcac

SEQ ID NO: 5022747 - DNA, 25 bp, Homo sapien
tcatgagatttgtcttcccagtggt

SEQ ID NO: 5022748 - DNA, 25 bp, Homo sapien
aatggtgctaaatcccttggcatca

SEQ ID NO: 5022749 - DNA, 25 bp, Homo sapien
ggggccaactacattctttcctgga

SEQ ID NO: 5022750 - DNA, 25 bp, Homo sapien
atgtgtgactgtgggctcagatcaa

SEQ ID NO: 5022751 - DNA, 25 bp, Homo sapien
tgggctcagatcaataaggtttggg

SEQ ID NO: 5022752 - DNA, 25 bp, Homo sapien
gctcagaagttttagcttgttccca

SEQ ID NO: 5022753 - DNA, 25 bp, Homo sapien
tgagatacatgcccttcttttttta

SEQ ID NO: 5022754 - DNA, 25 bp, Homo sapien
gagatacatgcccttctttttttaa

SEQ ID NO: 5022755 - DNA, 25 bp, Homo sapien
ttgagatacatgcccttcttttttt

SEQ ID NO: 5022756 - DNA, 25 bp, Homo sapien
catctccatttgcatcgaaggtgcg

SEQ ID NO: 5022757 - DNA, 25 bp, Homo sapien
aatttggaagcatccccataaggga

SEQ ID NO: 5022758 - DNA, 25 bp, Homo sapien
gaaggtgcggaagacatgctctgca

SEQ ID NO: 5022759 - DNA, 25 bp, Homo sapien
gatatagccatttccgtccaggtcg

SEQ ID NO: 5022760 - DNA, 25 bp, Homo sapien
acctggccgtcagaccattgcaaca

SEQ ID NO: 5022761 - DNA, 25 bp, Homo sapien
ggccgtcagaccattgcaacagagc

SEQ ID NO: 5022762 - DNA, 25 bp, Homo sapien
aggcttcagatgaagtccacatgtc

SEQ ID NO: 5022763 - DNA, 25 bp, Homo sapien
tcttcaccatcagaccacctggccg

SEQ ID NO: 5022764 - DNA, 25 bp, Homo sapien
ggggtgtagaaccagaaccatcctc

SEQ ID NO: 5022765 - DNA, 25 bp, Homo sapien
caggggtgtagaaccagaaccatcc

SEQ ID NO: 5022766 - DNA, 25 bp, Homo sapien
ggtgtagaaccagaaccatcctctt

SEQ ID NO: 5022767 - DNA, 25 bp, Homo sapien
tcccaggggtgtagaaccagaacca

SEQ ID NO: 5022768 - DNA, 25 bp, Homo sapien
ccaccactcagagcaagcaagaaga

SEQ ID NO: 5022769 - DNA, 25 bp, Homo sapien
tgccacaggccatactgcaaaatat

SEQ ID NO: 5022770 - DNA, 25 bp, Homo sapien
gaaaaggattgccacaggccatact

SEQ ID NO: 5022771 - DNA, 25 bp, Homo sapien
agccaccactcagagcaagcaagaa

SEQ ID NO: 5022772 - DNA, 25 bp, Homo sapien
gcccagccaaggcctacttttaata

SEQ ID NO: 5022773 - DNA, 25 bp, Homo sapien
tggacaatagatgctcaactgaaga

SEQ ID NO: 5022774 - DNA, 25 bp, Homo sapien
tacagcggtgtgatatcgactcact

SEQ ID NO: 5022775 - DNA, 25 bp, Homo sapien
taaaaaatggacaatagatgctcaa

SEQ ID NO: 5022776 - DNA, 25 bp, Homo sapien
tgtgtgtgaaattttgtgtgcatct

SEQ ID NO: 5022777 - DNA, 25 bp, Homo sapien
gagatccctaacctgagcttctaag

SEQ ID NO: 5022778 - DNA, 25 bp, Homo sapien
gatacatacatatcagagatcccta

SEQ ID NO: 5022779 - DNA, 25 bp, Homo sapien
acaaattcgccagacagaaaaacat

SEQ ID NO: 5022780 - DNA, 25 bp, Homo sapien
atacacataatatacacactcctgt

SEQ ID NO: 5022781 - DNA, 25 bp, Homo sapien
ccagctcaactgtatgaaggttaaa

SEQ ID NO: 5022782 - DNA, 25 bp, Homo sapien
ggcatctttcaccagctcaactgta

SEQ ID NO: 5022783 - DNA, 25 bp, Homo sapien
tgcaacggcatctttcaccagctca

SEQ ID NO: 5022784 - DNA, 25 bp, Homo sapien
tttcaccagctcaactgtatgaagg

SEQ ID NO: 5022785 - DNA, 25 bp, Homo sapien
taaatttagaagcactgtgaaatct

SEQ ID NO: 5022786 - DNA, 25 bp, Homo sapien
gggatgcggagaatcaggtaaccta

SEQ ID NO: 5022787 - DNA, 25 bp, Homo sapien
gaagcactgtgaaatctcaaacaaa

SEQ ID NO: 5022788 - DNA, 25 bp, Homo sapien
aaaggctgagccacttacattctca

SEQ ID NO: 5022789 - DNA, 25 bp, Homo sapien
ttcaaacagctgtgtgaagttcaaa

SEQ ID NO: 5022790 - DNA, 25 bp, Homo sapien
tagaggacaaatagcctctggccaa

SEQ ID NO: 5022791 - DNA, 25 bp, Homo sapien
ctggccaactgggaataggactgag

SEQ ID NO: 5022792 - DNA, 25 bp, Homo sapien
caactgggaataggactgagcatac

SEQ ID NO: 5022793 - DNA, 25 bp, Homo sapien
tttgtcttctgaactagaggacaaa

SEQ ID NO: 5022794 - DNA, 25 bp, Homo sapien
gaacagattgctcacaaatgaggcc

SEQ ID NO: 5022795 - DNA, 25 bp, Homo sapien
gaatccctgacactgatgggaacag

SEQ ID NO: 5022796 - DNA, 25 bp, Homo sapien
tcactctggtgtaaaacctaatggt

SEQ ID NO: 5022797 - DNA, 25 bp, Homo sapien
aatgaggccggctgttcaccagctg

SEQ ID NO: 5022798 - DNA, 25 bp, Homo sapien
taagaatgtccgaaactatacacaa

SEQ ID NO: 5022799 - DNA, 25 bp, Homo sapien
gagaaaagtacataggcttcaccag

SEQ ID NO: 5022800 - DNA, 25 bp, Homo sapien
gtccacagcaccaaacgggttaaga

SEQ ID NO: 5022801 - DNA, 25 bp, Homo sapien
aacataattctgagaaaagtacata

SEQ ID NO: 5022802 - DNA, 25 bp, Homo sapien
cattgagattttgccatcaacgctg

SEQ ID NO: 5022803 - DNA, 25 bp, Homo sapien
tgaaatcaacatagtctcaatgctg

SEQ ID NO: 5022804 - DNA, 25 bp, Homo sapien
gacctgtagattctagagcatctct

SEQ ID NO: 5022805 - DNA, 25 bp, Homo sapien
tctctgctttcacagcataggttgt

SEQ ID NO: 5022806 - DNA, 25 bp, Homo sapien
taagatccagagcaaattgtgagtg

SEQ ID NO: 5022807 - DNA, 25 bp, Homo sapien
caattcaacctgtatgtcatgaaag

SEQ ID NO: 5022808 - DNA, 25 bp, Homo sapien
catgtagtgctctaaaatttgcccc

SEQ ID NO: 5022809 - DNA, 25 bp, Homo sapien
gagtgactacttctatctgtgtttg

SEQ ID NO: 5022810 - DNA, 25 bp, Homo sapien
caaggtccagcatccaccagattct

SEQ ID NO: 5022811 - DNA, 25 bp, Homo sapien
gcaagatttaacagtccatgctctg

SEQ ID NO: 5022812 - DNA, 25 bp, Homo sapien
aagatttaacagtccatgctctgca

SEQ ID NO: 5022813 - DNA, 25 bp, Homo sapien
agcagcaaggtccagcatccaccag

SEQ ID NO: 5022814 - DNA, 25 bp, Homo sapien
caccaaggtcattacatagtggact

SEQ ID NO: 5022815 - DNA, 25 bp, Homo sapien
ggtaattaaattgaccaaagtggca

SEQ ID NO: 5022816 - DNA, 25 bp, Homo sapien
caaaggcagaatgaagtaagcccaa

SEQ ID NO: 5022817 - DNA, 25 bp, Homo sapien
aagaggaatctggacgctatcatcc

SEQ ID NO: 5022818 - DNA, 25 bp, Homo sapien
tgatatgtatatcccaccctgcagt

SEQ ID NO: 5022819 - DNA, 25 bp, Homo sapien
gagctcattgtctggaaggtctgtc

SEQ ID NO: 5022820 - DNA, 25 bp, Homo sapien
cagaaggttgggtctcgcagttaac

SEQ ID NO: 5022821 - DNA, 25 bp, Homo sapien
tatacagtagggatactcctgcacc

SEQ ID NO: 5022822 - DNA, 25 bp, Homo sapien
atgagacaatatgcaggaagtgaag

SEQ ID NO: 5022823 - DNA, 25 bp, Homo sapien
caattcttggagaggaatactttta

SEQ ID NO: 5022824 - DNA, 25 bp, Homo sapien
cacatgctgagtgaagggcaacatg

SEQ ID NO: 5022825 - DNA, 25 bp, Homo sapien
aagttgcttgtccattctgtcagag

SEQ ID NO: 5022826 - DNA, 25 bp, Homo sapien
tcaacttaagttttggctggaagga

SEQ ID NO: 5022827 - DNA, 25 bp, Homo sapien
agctttccctggtgggtgagaacct

SEQ ID NO: 5022828 - DNA, 25 bp, Homo sapien
tggtaaggccaatgctcagctttcc

SEQ ID NO: 5022829 - DNA, 25 bp, Homo sapien
tggcacaaaggctcacacattcaga

SEQ ID NO: 5022830 - DNA, 25 bp, Homo sapien
catttgccatactggcttgccagtc

SEQ ID NO: 5022831 - DNA, 25 bp, Homo sapien
catgcccggctgaggatctttttaa

SEQ ID NO: 5022832 - DNA, 25 bp, Homo sapien
cccacatgcatactcctcagattta

SEQ ID NO: 5022833 - DNA, 25 bp, Homo sapien
aataaaacacccacatgcatactcc

SEQ ID NO: 5022834 - DNA, 25 bp, Homo sapien
gcatacaacgtgtcatggtaaaagc

SEQ ID NO: 5022835 - DNA, 25 bp, Homo sapien
taaaagctgggtaattgggatgtcc

SEQ ID NO: 5022836 - DNA, 25 bp, Homo sapien
caacgtgtcatggtaaaagctgggt

SEQ ID NO: 5022837 - DNA, 25 bp, Homo sapien
tgggatgtccgtcacctccaacatt

SEQ ID NO: 5022838 - DNA, 25 bp, Homo sapien
ttatcacgctcatgagctacaacag

SEQ ID NO: 5022839 - DNA, 25 bp, Homo sapien
aattatcacgctcatgagctacaac

SEQ ID NO: 5022840 - DNA, 25 bp, Homo sapien
tatcacgctcatgagctacaacagg

SEQ ID NO: 5022841 - DNA, 25 bp, Homo sapien
attatcacgctcatgagctacaaca

SEQ ID NO: 5022842 - DNA, 25 bp, Homo sapien
catgactggcattgaatttgaaagg

SEQ ID NO: 5022843 - DNA, 25 bp, Homo sapien
cattccataaatctgccctgaacag

SEQ ID NO: 5022844 - DNA, 25 bp, Homo sapien
caagcagagacaagctagcgctaac

SEQ ID NO: 5022845 - DNA, 25 bp, Homo sapien
gaacagaattacgagcaagcagaga

SEQ ID NO: 5022846 - DNA, 25 bp, Homo sapien
tggggcagcgtccattcatagagca

SEQ ID NO: 5022847 - DNA, 25 bp, Homo sapien
agcaggtcctcgctgtactggggca

SEQ ID NO: 5022848 - DNA, 25 bp, Homo sapien
gaggaataagtattgaagactaaga

SEQ ID NO: 5022849 - DNA, 25 bp, Homo sapien
gttacaaggaggaataagtattgaa

SEQ ID NO: 5022850 - DNA, 25 bp, Homo sapien
caggacaccaggggttccctggagg

SEQ ID NO: 5022851 - DNA, 25 bp, Homo sapien
ctctgcaggacaccaggggttccct

SEQ ID NO: 5022852 - DNA, 25 bp, Homo sapien
tgcaggacaccaggggttccctgga

SEQ ID NO: 5022853 - DNA, 25 bp, Homo sapien
gacaccaggggttccctggaggcag

SEQ ID NO: 5022854 - DNA, 25 bp, Homo sapien
ccagccccatagcttgctgctctcc

SEQ ID NO: 5022855 - DNA, 25 bp, Homo sapien
acaaagccagatccagtcctcaaac

SEQ ID NO: 5022856 - DNA, 25 bp, Homo sapien
agccccatagcttgctgctctccac

SEQ ID NO: 5022857 - DNA, 25 bp, Homo sapien
ttgctgctctccacaaagccagatc

SEQ ID NO: 5022858 - DNA, 25 bp, Homo sapien
ttccctgttcaattggtctgagctg

SEQ ID NO: 5022859 - DNA, 25 bp, Homo sapien
cagggatcccggaattccctgttca

SEQ ID NO: 5022860 - DNA, 25 bp, Homo sapien
agaatagggtcggaaggcaggacac

SEQ ID NO: 5022861 - DNA, 25 bp, Homo sapien
aaggcaggacacctaaggctgattc

SEQ ID NO: 5022862 - DNA, 25 bp, Homo sapien
tttcctccaagtccgtcttaactgc

SEQ ID NO: 5022863 - DNA, 25 bp, Homo sapien
gtccgtcttaactgctctagattca

SEQ ID NO: 5022864 - DNA, 25 bp, Homo sapien
tccaagtccgtcttaactgctctag

SEQ ID NO: 5022865 - DNA, 25 bp, Homo sapien
gtcttaactgctctagattcagaca

SEQ ID NO: 5022866 - DNA, 25 bp, Homo sapien
gccctcactggctttggtaacttct

SEQ ID NO: 5022867 - DNA, 25 bp, Homo sapien
caagtaaacaaataccatgggcaga

SEQ ID NO: 5022868 - DNA, 25 bp, Homo sapien
tccttccaagtaaacaaataccatg

SEQ ID NO: 5022869 - DNA, 25 bp, Homo sapien
aggaccgatcaactgagccttgatg

SEQ ID NO: 5022870 - DNA, 25 bp, Homo sapien
tttcccctcagcgagtctctgccat

SEQ ID NO: 5022871 - DNA, 25 bp, Homo sapien
tccttggtgggtaagatgcccttct

SEQ ID NO: 5022872 - DNA, 25 bp, Homo sapien
aagatgcccttcttgtctaagatgt

SEQ ID NO: 5022873 - DNA, 25 bp, Homo sapien
gggtaagatgcccttcttgtctaag

SEQ ID NO: 5022874 - DNA, 25 bp, Homo sapien
tgggacctgaatgacaaaagcctgg

SEQ ID NO: 5022875 - DNA, 25 bp, Homo sapien
tcaccccaggaaatagtagcagaac

SEQ ID NO: 5022876 - DNA, 25 bp, Homo sapien
caaaattctttcagtgtggaggcta

SEQ ID NO: 5022877 - DNA, 25 bp, Homo sapien
taagattcacaatttcacaccaggg

SEQ ID NO: 5022878 - DNA, 25 bp, Homo sapien
agctgactgaagtggagtctttgtg

SEQ ID NO: 5022879 - DNA, 25 bp, Homo sapien
catttaagtttggtgccaaggacca

SEQ ID NO: 5022880 - DNA, 25 bp, Homo sapien
gtatcacgacagattttaacaccag

SEQ ID NO: 5022881 - DNA, 25 bp, Homo sapien
ctcagtgcctgggatctcggggcct

SEQ ID NO: 5022882 - DNA, 25 bp, Homo sapien
gggccttcctcggtatcacgacaga

SEQ ID NO: 5022883 - DNA, 25 bp, Homo sapien
caccaggagatcagatgccttgcaa

SEQ ID NO: 5022884 - DNA, 25 bp, Homo sapien
ttcactttcaccaacaactgtgttg

SEQ ID NO: 5022885 - DNA, 25 bp, Homo sapien
tgtgttgctctccaaggctaacgga

SEQ ID NO: 5022886 - DNA, 25 bp, Homo sapien
tgacctaactaaataccacctagac

SEQ ID NO: 5022887 - DNA, 25 bp, Homo sapien
cattatgacattgtgcacatgtgtg

SEQ ID NO: 5022888 - DNA, 25 bp, Homo sapien
ggaaaagtggctaagagattgtggc

SEQ ID NO: 5022889 - DNA, 25 bp, Homo sapien
gaaaagtggctaagagattgtggct

SEQ ID NO: 5022890 - DNA, 25 bp, Homo sapien
cctggctgccttttgacctcagctt

SEQ ID NO: 5022891 - DNA, 25 bp, Homo sapien
agaggaaaagtggctaagagattgt

SEQ ID NO: 5022892 - DNA, 25 bp, Homo sapien
tagtctccaaacaactggaagttcg

SEQ ID NO: 5022893 - DNA, 25 bp, Homo sapien
ctgatccaagaacatctgagtgctt

SEQ ID NO: 5022894 - DNA, 25 bp, Homo sapien
gttcgaaatcactgccaaaaccaca

SEQ ID NO: 5022895 - DNA, 25 bp, Homo sapien
tctctcgatttactttttgaactct

SEQ ID NO: 5022896 - DNA, 25 bp, Homo sapien
gaggaaacagtgttttgatccgaca

SEQ ID NO: 5022897 - DNA, 25 bp, Homo sapien
gatgggaaaagtggtcccaagaaga

SEQ ID NO: 5022898 - DNA, 25 bp, Homo sapien
ggaggtatgagggatggtggcaggt

SEQ ID NO: 5022899 - DNA, 25 bp, Homo sapien
ttttgatccgacatgagaggaggag

SEQ ID NO: 5022900 - DNA, 25 bp, Homo sapien
taaattactgcaatatatatttcct

SEQ ID NO: 5022901 - DNA, 25 bp, Homo sapien
gctactaatgagctgcgtttccacg

SEQ ID NO: 5022902 - DNA, 25 bp, Homo sapien
tgcccagcccctcttgtgagtttct

SEQ ID NO: 5022903 - DNA, 25 bp, Homo sapien
aatgagctgcgtttccacgaattac

SEQ ID NO: 5022904 - DNA, 25 bp, Homo sapien
catgtctgagacataaatagcaaag

SEQ ID NO: 5022905 - DNA, 25 bp, Homo sapien
tggctgcatgtctgagacataaata

SEQ ID NO: 5022906 - DNA, 25 bp, Homo sapien
ggtggctgcatgtctgagacataaa

SEQ ID NO: 5022907 - DNA, 25 bp, Homo sapien
gctgcatgtctgagacataaatagc

SEQ ID NO: 5022908 - DNA, 25 bp, Homo sapien
ctgtcagcaacgagtggtcccagga

SEQ ID NO: 5022909 - DNA, 25 bp, Homo sapien
tgactgtcagcaacgagtggtccca

SEQ ID NO: 5022910 - DNA, 25 bp, Homo sapien
gtcagcaacgagtggtcccaggaga

SEQ ID NO: 5022911 - DNA, 25 bp, Homo sapien
gcaacgagtggtcccaggagaccaa

SEQ ID NO: 5022912 - DNA, 25 bp, Homo sapien
tgcagtctgtctgattctccctcct

SEQ ID NO: 5022913 - DNA, 25 bp, Homo sapien
agcccactgcagtctgtctgattct

SEQ ID NO: 5022914 - DNA, 25 bp, Homo sapien
actgcagtctgtctgattctccctc

SEQ ID NO: 5022915 - DNA, 25 bp, Homo sapien
ccactgcagtctgtctgattctccc

SEQ ID NO: 5022916 - DNA, 25 bp, Homo sapien
aagtgtcctcccagctccgtgtggc

SEQ ID NO: 5022917 - DNA, 25 bp, Homo sapien
ttggtggggcatccaatcccagact

SEQ ID NO: 5022918 - DNA, 25 bp, Homo sapien
tcctattactctcagggaaaacata

SEQ ID NO: 5022919 - DNA, 25 bp, Homo sapien
gaatgtggatttcattctcagtgca

SEQ ID NO: 5022920 - DNA, 25 bp, Homo sapien
tgtcactaagcctgatgtccgccag

SEQ ID NO: 5022921 - DNA, 25 bp, Homo sapien
agtactcattatctgggttccaaga

SEQ ID NO: 5022922 - DNA, 25 bp, Homo sapien
caagcctatagtgaattaagtactc

SEQ ID NO: 5022923 - DNA, 25 bp, Homo sapien
aagcaaacatccaccccaggtgaaa

SEQ ID NO: 5022924 - DNA, 25 bp, Homo sapien
aatggtgatttggactttacaaaag

SEQ ID NO: 5022925 - DNA, 25 bp, Homo sapien
atggtgatttggactttacaaaaga

SEQ ID NO: 5022926 - DNA, 25 bp, Homo sapien
gaatgatccttatgccccaggttga

SEQ ID NO: 5022927 - DNA, 25 bp, Homo sapien
gaaggttcactagtcgtcacaggtc

SEQ ID NO: 5022928 - DNA, 25 bp, Homo sapien
tctgagcagcacgtaattaaagccg

SEQ ID NO: 5022929 - DNA, 25 bp, Homo sapien
gaaggccatccaaatagaccaagtg

SEQ ID NO: 5022930 - DNA, 25 bp, Homo sapien
aaatatgaatcctaaggcggtagcc

SEQ ID NO: 5022931 - DNA, 25 bp, Homo sapien
cagatttacgttgcataatccccaa

SEQ ID NO: 5022932 - DNA, 25 bp, Homo sapien
caggaattagcaggaccaggcattt

SEQ ID NO: 5022933 - DNA, 25 bp, Homo sapien
ggcggtagccggaaagccaagaagc

SEQ ID NO: 5022934 - DNA, 25 bp, Homo sapien
tgcaggcaatgccaaccagacacgt

SEQ ID NO: 5022935 - DNA, 25 bp, Homo sapien
taggtcacaggtagcaatatattat

SEQ ID NO: 5022936 - DNA, 25 bp, Homo sapien
ttttggaggccgcaggtgctagacc

SEQ ID NO: 5022937 - DNA, 25 bp, Homo sapien
tcttggttttgggaataggtcacag

SEQ ID NO: 5022938 - DNA, 25 bp, Homo sapien
gatcctcaagctacagagatgcctg

SEQ ID NO: 5022939 - DNA, 25 bp, Homo sapien
tcctgggtctcgttcagcaataagt

SEQ ID NO: 5022940 - DNA, 25 bp, Homo sapien
catccacaggtaggaccaagtggcc

SEQ ID NO: 5022941 - DNA, 25 bp, Homo sapien
taagtttccacgatggatatccatc

SEQ ID NO: 5022942 - DNA, 25 bp, Homo sapien
gcctatcttggagcctagaacaagg

SEQ ID NO: 5022943 - DNA, 25 bp, Homo sapien
tatcttggagcctagaacaaggcaa

SEQ ID NO: 5022944 - DNA, 25 bp, Homo sapien
ctatcttggagcctagaacaaggca

SEQ ID NO: 5022945 - DNA, 25 bp, Homo sapien
tgggcctatcttggagcctagaaca

SEQ ID NO: 5022946 - DNA, 25 bp, Homo sapien
cagtcaggagtccaatgctaaggcc

SEQ ID NO: 5022947 - DNA, 25 bp, Homo sapien
tgtcttggaaaactcgctggcagcc

SEQ ID NO: 5022948 - DNA, 25 bp, Homo sapien
taaacaagaagttgccctccgcagc

SEQ ID NO: 5022949 - DNA, 25 bp, Homo sapien
gcagccaaagagcataatacccagg

SEQ ID NO: 5022950 - DNA, 25 bp, Homo sapien
ctgaggggcctcatgagctcactca

SEQ ID NO: 5022951 - DNA, 25 bp, Homo sapien
agggcctgaggggcctcatgagctc

SEQ ID NO: 5022952 - DNA, 25 bp, Homo sapien
cctgaggggcctcatgagctcactc

SEQ ID NO: 5022953 - DNA, 25 bp, Homo sapien
ggcctgaggggcctcatgagctcac

SEQ ID NO: 5022954 - DNA, 25 bp, Homo sapien
gtggtggtggtcctgtgaaggcttg

SEQ ID NO: 5022955 - DNA, 25 bp, Homo sapien
ggtggtggtcctgtgaaggcttggc

SEQ ID NO: 5022956 - DNA, 25 bp, Homo sapien
ggtggtcctgtgaaggcttggcagc

SEQ ID NO: 5022957 - DNA, 25 bp, Homo sapien
tggtggtcctgtgaaggcttggcag

SEQ ID NO: 5022958 - DNA, 25 bp, Homo sapien
aaacacagtgctgagccaaggccaa

SEQ ID NO: 5022959 - DNA, 25 bp, Homo sapien
agtgctgagccaaggccaaaatggg

SEQ ID NO: 5022960 - DNA, 25 bp, Homo sapien
ctgaggggcaaaaacacagtgctga

SEQ ID NO: 5022961 - DNA, 25 bp, Homo sapien
gcagggggcactggttgattccaca

SEQ ID NO: 5022962 - DNA, 25 bp, Homo sapien
gctgagaacttaggcaccccacaca

SEQ ID NO: 5022963 - DNA, 25 bp, Homo sapien
tctctgctgagaacttaggcacccc

SEQ ID NO: 5022964 - DNA, 25 bp, Homo sapien
tctgctgagaacttaggcaccccac

SEQ ID NO: 5022965 - DNA, 25 bp, Homo sapien
ctgctgagaacttaggcaccccaca

SEQ ID NO: 5022966 - DNA, 25 bp, Homo sapien
gctggaatacctcccatggacacca

SEQ ID NO: 5022967 - DNA, 25 bp, Homo sapien
gggagctggaatacctcccatggac

SEQ ID NO: 5022968 - DNA, 25 bp, Homo sapien
gagctggaatacctcccatggacac

SEQ ID NO: 5022969 - DNA, 25 bp, Homo sapien
ttgggagctggaatacctcccatgg

SEQ ID NO: 5022970 - DNA, 25 bp, Homo sapien
gaggacatttagactctatttcccc

SEQ ID NO: 5022971 - DNA, 25 bp, Homo sapien
agaggttctgtacagcaagaagagc

SEQ ID NO: 5022972 - DNA, 25 bp, Homo sapien
gagagagaaaatcccctagaggaca

SEQ ID NO: 5022973 - DNA, 25 bp, Homo sapien
actctatttccccagagaggttctg

SEQ ID NO: 5022974 - DNA, 25 bp, Homo sapien
ggatcttgcccatagctgttgctca

SEQ ID NO: 5022975 - DNA, 25 bp, Homo sapien
tacagcaccgagcattggatcttgc

SEQ ID NO: 5022976 - DNA, 25 bp, Homo sapien
caaggtgaagaagcaagtggacatg

SEQ ID NO: 5022977 - DNA, 25 bp, Homo sapien
caactggctgagagtttttaagcag

SEQ ID NO: 5022978 - DNA, 25 bp, Homo sapien
tgagcctcgcagcagaagttcttaa

SEQ ID NO: 5022979 - DNA, 25 bp, Homo sapien
catcactgcagataggaggctgaga

SEQ ID NO: 5022980 - DNA, 25 bp, Homo sapien
gaatgtaatcttctcggcatggcgt

SEQ ID NO: 5022981 - DNA, 25 bp, Homo sapien
agttcttaaatgatcctgggaccag

SEQ ID NO: 5022982 - DNA, 25 bp, Homo sapien
ttctttagttcctagagtttgattc

SEQ ID NO: 5022983 - DNA, 25 bp, Homo sapien
agaaagggtaatcatctctcctttc

SEQ ID NO: 5022984 - DNA, 25 bp, Homo sapien
ttgggggtggaaccaagatggcaga

SEQ ID NO: 5022985 - DNA, 25 bp, Homo sapien
ctttagttcctagagtttgattcac

SEQ ID NO: 5022986 - DNA, 25 bp, Homo sapien
tctgtgcccgggaacagtatggtcc

SEQ ID NO: 5022987 - DNA, 25 bp, Homo sapien
ttaatccaggcacagttaactagcc

SEQ ID NO: 5022988 - DNA, 25 bp, Homo sapien
tgttgagttcctctaacaggaggca

SEQ ID NO: 5022989 - DNA, 25 bp, Homo sapien
tccgagctagaggaggtaagtccag

SEQ ID NO: 5022990 - DNA, 25 bp, Homo sapien
ctagtggtagatctctcacagcaca

SEQ ID NO: 5022991 - DNA, 25 bp, Homo sapien
ggtagatctctcacagcacactgca

SEQ ID NO: 5022992 - DNA, 25 bp, Homo sapien
actgcaggctcaagtcagaagaaat

SEQ ID NO: 5022993 - DNA, 25 bp, Homo sapien
tgcaggctcaagtcagaagaaatca

SEQ ID NO: 5022994 - DNA, 25 bp, Homo sapien
ctttgaaggaatcaggaaggacttc

SEQ ID NO: 5022995 - DNA, 25 bp, Homo sapien
ctgggaattcggaggagtgatattt

SEQ ID NO: 5022996 - DNA, 25 bp, Homo sapien
tcggaggagtgatatttctttgaag

SEQ ID NO: 5022997 - DNA, 25 bp, Homo sapien
aaggaatcaggaaggacttcgtgga

SEQ ID NO: 5022998 - DNA, 25 bp, Homo sapien
cagcattcaccagaatagcacatga

SEQ ID NO: 5022999 - DNA, 25 bp, Homo sapien
tattcattagtaacccattccacaa

SEQ ID NO: 5023000 - DNA, 25 bp, Homo sapien
catagcagcaaagtccctagaagcc

SEQ ID NO: 5023001 - DNA, 25 bp, Homo sapien
ggccttgattattcccatagcagca

SEQ ID NO: 5023002 - DNA, 25 bp, Homo sapien
aaactcatgtcctgagggtctgttg

SEQ ID NO: 5023003 - DNA, 25 bp, Homo sapien
ggtaaactcatgtcctgagggtctg

SEQ ID NO: 5023004 - DNA, 25 bp, Homo sapien
ctcatgtcctgagggtctgttgtac

SEQ ID NO: 5023005 - DNA, 25 bp, Homo sapien
aggtaaactcatgtcctgagggtct

SEQ ID NO: 5023006 - DNA, 25 bp, Homo sapien
gttattcagcagcacggtactccga

SEQ ID NO: 5023007 - DNA, 25 bp, Homo sapien
tgagctgacatttgcgttattcagc

SEQ ID NO: 5023008 - DNA, 25 bp, Homo sapien
tccgaagggcaatagccttgaaccc

SEQ ID NO: 5023009 - DNA, 25 bp, Homo sapien
ttgaaccctttcagctcatgaccaa

SEQ ID NO: 5023010 - DNA, 25 bp, Homo sapien
gatcccagacaattcagctccaaag

SEQ ID NO: 5023011 - DNA, 25 bp, Homo sapien
tacagtggagcaaaccgagacatga

SEQ ID NO: 5023012 - DNA, 25 bp, Homo sapien
catgaagctaatacacagtggagcc

SEQ ID NO: 5023013 - DNA, 25 bp, Homo sapien
tataaggaagctacccaactatgca

SEQ ID NO: 5023014 - DNA, 25 bp, Homo sapien
aaatcacaaggagctatcacccctt

SEQ ID NO: 5023015 - DNA, 25 bp, Homo sapien
atcacaaggagctatcaccccttca

SEQ ID NO: 5023016 - DNA, 25 bp, Homo sapien
gaaatcacaaggagctatcacccct

SEQ ID NO: 5023017 - DNA, 25 bp, Homo sapien
acaaggagctatcaccccttcaccc

SEQ ID NO: 5023018 - DNA, 25 bp, Homo sapien
ttgttccactgtcccatccagttga

SEQ ID NO: 5023019 - DNA, 25 bp, Homo sapien
agacttgttccactgtcccatccag

SEQ ID NO: 5023020 - DNA, 25 bp, Homo sapien
gttccactgtcccatccagttgatg

SEQ ID NO: 5023021 - DNA, 25 bp, Homo sapien
tgtcccatccagttgatgagactta

SEQ ID NO: 5023022 - DNA, 25 bp, Homo sapien
tctggaaacaaagcgacaaaagccg

SEQ ID NO: 5023023 - DNA, 25 bp, Homo sapien
tgttctagggcatagatcaccctgg

SEQ ID NO: 5023024 - DNA, 25 bp, Homo sapien
ggctgccaggcaagtacggaaaatt

SEQ ID NO: 5023025 - DNA, 25 bp, Homo sapien
tgtgtcccgagtacttcaggcttta

SEQ ID NO: 5023026 - DNA, 25 bp, Homo sapien
taatctcttttatggctctgatgga

SEQ ID NO: 5023027 - DNA, 25 bp, Homo sapien
ccccagggtgaatggataatctctt

SEQ ID NO: 5023028 - DNA, 25 bp, Homo sapien
tctgatggacatccaagtacttcat

SEQ ID NO: 5023029 - DNA, 25 bp, Homo sapien
gagccccccagggtgaatggataat

SEQ ID NO: 5023030 - DNA, 25 bp, Homo sapien
tgtccatagggttaccccagcagcc

SEQ ID NO: 5023031 - DNA, 25 bp, Homo sapien
gactgtgtccatagggttaccccag

SEQ ID NO: 5023032 - DNA, 25 bp, Homo sapien
actgtgtccatagggttaccccagc

SEQ ID NO: 5023033 - DNA, 25 bp, Homo sapien
tgtgtccatagggttaccccagcag

SEQ ID NO: 5023034 - DNA, 25 bp, Homo sapien
aatggtgacaacatcactagccaag

SEQ ID NO: 5023035 - DNA, 25 bp, Homo sapien
gctgagaggagaagatcccttgagt

SEQ ID NO: 5023036 - DNA, 25 bp, Homo sapien
caaaaatgtcgaagttggctgggca

SEQ ID NO: 5023037 - DNA, 25 bp, Homo sapien
aaagtcagagtagaggtagtccgcc

SEQ ID NO: 5023038 - DNA, 25 bp, Homo sapien
tgagctgccacgtgctacataaaga

SEQ ID NO: 5023039 - DNA, 25 bp, Homo sapien
ttcaatttgaatacggtgccgactg

SEQ ID NO: 5023040 - DNA, 25 bp, Homo sapien
tttggcctatacttgacgcagatgc

SEQ ID NO: 5023041 - DNA, 25 bp, Homo sapien
taatgaatttcaactcaggaccgac

SEQ ID NO: 5023042 - DNA, 25 bp, Homo sapien
ctcgagttagaggttttgcaggaca

SEQ ID NO: 5023043 - DNA, 25 bp, Homo sapien
tctcacataaggtagccagagttgc

SEQ ID NO: 5023044 - DNA, 25 bp, Homo sapien
gtccacagggtatcacatgggctgc

SEQ ID NO: 5023045 - DNA, 25 bp, Homo sapien
ggcagttgaattggaacacctcgag

SEQ ID NO: 5023046 - DNA, 25 bp, Homo sapien
cattattgagtagcaaagtgcctag

SEQ ID NO: 5023047 - DNA, 25 bp, Homo sapien
gaactatcctaggtgctctacaaag

SEQ ID NO: 5023048 - DNA, 25 bp, Homo sapien
aatgacttcactaaacgctgaggaa

SEQ ID NO: 5023049 - DNA, 25 bp, Homo sapien
gactcagagattgctagctgccaac

SEQ ID NO: 5023050 - DNA, 25 bp, Homo sapien
caggactgtcaccaatgccaagacg

SEQ ID NO: 5023051 - DNA, 25 bp, Homo sapien
atgcatttagagttccaaataagac

SEQ ID NO: 5023052 - DNA, 25 bp, Homo sapien
aagacatagcgtctcagtgcctctg

SEQ ID NO: 5023053 - DNA, 25 bp, Homo sapien
tgccaagacgccagtggtggccaag

SEQ ID NO: 5023054 - DNA, 25 bp, Homo sapien
cagcatcagcacttctattggtgag

SEQ ID NO: 5023055 - DNA, 25 bp, Homo sapien
cgtctgtgtcgcttcgggcgaggcg

SEQ ID NO: 5023056 - DNA, 25 bp, Homo sapien
gcgtctgtgtcgcttcgggcgaggc

SEQ ID NO: 5023057 - DNA, 25 bp, Homo sapien
gagacccaagtgtccttgtgatatg

SEQ ID NO: 5023058 - DNA, 25 bp, Homo sapien
tctgagacccaagtgtccttgtgat

SEQ ID NO: 5023059 - DNA, 25 bp, Homo sapien
ttctgagacccaagtgtccttgtga

SEQ ID NO: 5023060 - DNA, 25 bp, Homo sapien
ctgagacccaagtgtccttgtgata

SEQ ID NO: 5023061 - DNA, 25 bp, Homo sapien
tacatgtgagcaaaaccttgaagcc

SEQ ID NO: 5023062 - DNA, 25 bp, Homo sapien
cttgaagccatagaggtcgggaatc

SEQ ID NO: 5023063 - DNA, 25 bp, Homo sapien
caatacaggtcctaaggcaatggga

SEQ ID NO: 5023064 - DNA, 25 bp, Homo sapien
gctgcaattcttgtacatgtgagca

SEQ ID NO: 5023065 - DNA, 25 bp, Homo sapien
caacgtctttcatggaacgggccat

SEQ ID NO: 5023066 - DNA, 25 bp, Homo sapien
gctaggtcaccttggtctttctcca

SEQ ID NO: 5023067 - DNA, 25 bp, Homo sapien
aacgggccatgtccagtgctaggtc

SEQ ID NO: 5023068 - DNA, 25 bp, Homo sapien
catgtccagtgctaggtcaccttgg

SEQ ID NO: 5023069 - DNA, 25 bp, Homo sapien
tcagtcatcagcaacttcatcttca

SEQ ID NO: 5023070 - DNA, 25 bp, Homo sapien
catcttcatcttcatcatcatgagc

SEQ ID NO: 5023071 - DNA, 25 bp, Homo sapien
tcttcatcttcatcatcatgagcca

SEQ ID NO: 5023072 - DNA, 25 bp, Homo sapien
ttcatcttcatcatcatgagccaat

SEQ ID NO: 5023073 - DNA, 25 bp, Homo sapien
attagggtagcccttgcacttataa

SEQ ID NO: 5023074 - DNA, 25 bp, Homo sapien
tattagggtagcccttgcacttata

SEQ ID NO: 5023075 - DNA, 25 bp, Homo sapien
ttattagggtagcccttgcacttat

SEQ ID NO: 5023076 - DNA, 25 bp, Homo sapien
tagtttatttcaacatactaagcca

SEQ ID NO: 5023077 - DNA, 25 bp, Homo sapien
gtttatttcaacatactaagccaaa

SEQ ID NO: 5023078 - DNA, 25 bp, Homo sapien
tatttcaacatactaagccaaaaaa

SEQ ID NO: 5023079 - DNA, 25 bp, Homo sapien
ccatagtttatttcaacatactaag

SEQ ID NO: 5023080 - DNA, 25 bp, Homo sapien
aacaaattctgtacatgcaggcttg

SEQ ID NO: 5023081 - DNA, 25 bp, Homo sapien
tctaaaagcaatggatcaaactgtc

SEQ ID NO: 5023082 - DNA, 25 bp, Homo sapien
tataattggacagcaaaacccagtc

SEQ ID NO: 5023083 - DNA, 25 bp, Homo sapien
aatgcctcgggaatatgagattctc

SEQ ID NO: 5023084 - DNA, 25 bp, Homo sapien
caattgctggtacactattcaggct

SEQ ID NO: 5023085 - DNA, 25 bp, Homo sapien
tgttctgaggaacactagctgggtg

SEQ ID NO: 5023086 - DNA, 25 bp, Homo sapien
cagtgacgatgagcagatcttggcc

SEQ ID NO: 5023087 - DNA, 25 bp, Homo sapien
tatgtataaatggttctcggccagc

SEQ ID NO: 5023088 - DNA, 25 bp, Homo sapien
gacttgccaagggtcacacactgga

SEQ ID NO: 5023089 - DNA, 25 bp, Homo sapien
cgaggtttaccaagattaactgact

SEQ ID NO: 5023090 - DNA, 25 bp, Homo sapien
acactggagtaagggcagaacctta

SEQ ID NO: 5023091 - DNA, 25 bp, Homo sapien
caaaagcatttaggtcacactcttg

SEQ ID NO: 5023092 - DNA, 25 bp, Homo sapien
gaagacgttatctgtggtttctgcc

SEQ ID NO: 5023093 - DNA, 25 bp, Homo sapien
ctgcatccaaggtgaagacgttatc

SEQ ID NO: 5023094 - DNA, 25 bp, Homo sapien
tgatactctgaaactcgtttctcaa

SEQ ID NO: 5023095 - DNA, 25 bp, Homo sapien
tctgccataactgcaaaacgctgat

SEQ ID NO: 5023096 - DNA, 25 bp, Homo sapien
tccaagttccacaagtaatctgtca

SEQ ID NO: 5023097 - DNA, 25 bp, Homo sapien
tcattccaatgaggccaactggcaa

SEQ ID NO: 5023098 - DNA, 25 bp, Homo sapien
tgcaattcattccaatgaggccaac

SEQ ID NO: 5023099 - DNA, 25 bp, Homo sapien
agctacaaactcaatgtactgtttc

SEQ ID NO: 5023100 - DNA, 25 bp, Homo sapien
atttactaagtattggaacatcagg

SEQ ID NO: 5023101 - DNA, 25 bp, Homo sapien
ttgacagcatcaacaatgatctccc

SEQ ID NO: 5023102 - DNA, 25 bp, Homo sapien
tcaacaatgatctccctgacccttt

SEQ ID NO: 5023103 - DNA, 25 bp, Homo sapien
ctaagtattggaacatcaggcaagc

SEQ ID NO: 5023104 - DNA, 25 bp, Homo sapien
tcattggaaaaagtgagtcctggca

SEQ ID NO: 5023105 - DNA, 25 bp, Homo sapien
tgagtcctggcataagacctctctt

SEQ ID NO: 5023106 - DNA, 25 bp, Homo sapien
cagaatatagcagcaaaagatcctg

SEQ ID NO: 5023107 - DNA, 25 bp, Homo sapien
cttctttagccagaatatagcagca

SEQ ID NO: 5023108 - DNA, 25 bp, Homo sapien
gatcacctgtctcagtcttccaaag

SEQ ID NO: 5023109 - DNA, 25 bp, Homo sapien
gggcttaagtggtcctcctctctca

SEQ ID NO: 5023110 - DNA, 25 bp, Homo sapien
catgcctggctgcttttctcattct

SEQ ID NO: 5023111 - DNA, 25 bp, Homo sapien
gctgcagcacagtggatcatagctc

SEQ ID NO: 5023112 - DNA, 25 bp, Homo sapien
ggcactttggagtgctcaataattt

SEQ ID NO: 5023113 - DNA, 25 bp, Homo sapien
taagaatgagatgggtacttagagc

SEQ ID NO: 5023114 - DNA, 25 bp, Homo sapien
atataatgggttgattattgctatc

SEQ ID NO: 5023115 - DNA, 25 bp, Homo sapien
gctatcttagaatgcactaataaat

SEQ ID NO: 5023116 - DNA, 25 bp, Homo sapien
tgctatccatcgcaaggcccaatct

SEQ ID NO: 5023117 - DNA, 25 bp, Homo sapien
tttctatctgctatccatcgcaagg

SEQ ID NO: 5023118 - DNA, 25 bp, Homo sapien
tagggcatggtttcaattgcattaa

SEQ ID NO: 5023119 - DNA, 25 bp, Homo sapien
ttaacatagggcatggtttcaattg

SEQ ID NO: 5023120 - DNA, 25 bp, Homo sapien
tctgagtgaacattctcgatgagaa

SEQ ID NO: 5023121 - DNA, 25 bp, Homo sapien
tgtaagtgtctatcagcaaactgta

SEQ ID NO: 5023122 - DNA, 25 bp, Homo sapien
actgtacatctctgagtgaacattc

SEQ ID NO: 5023123 - DNA, 25 bp, Homo sapien
cattctcgatgagaatttgaaagcc

SEQ ID NO: 5023124 - DNA, 25 bp, Homo sapien
tggctgcaaaaaaggctaagatgtg

SEQ ID NO: 5023125 - DNA, 25 bp, Homo sapien
caaaaaaggctaagatgtgagagat

SEQ ID NO: 5023126 - DNA, 25 bp, Homo sapien
gctaagatgtgagagatgaagtact

SEQ ID NO: 5023127 - DNA, 25 bp, Homo sapien
atcactggctgcaaaaaaggctaag

SEQ ID NO: 5023128 - DNA, 25 bp, Homo sapien
gcagaagaagatggtccccagcgag

SEQ ID NO: 5023129 - DNA, 25 bp, Homo sapien
gagagagagatcatatctctcatgt

SEQ ID NO: 5023130 - DNA, 25 bp, Homo sapien
agtgacatgtattcctgttttccca

SEQ ID NO: 5023131 - DNA, 25 bp, Homo sapien
aagatggtccccagcgaggactcca

SEQ ID NO: 5023132 - DNA, 25 bp, Homo sapien
cttctgctgtccagaaggaagcctg

SEQ ID NO: 5023133 - DNA, 25 bp, Homo sapien
ccagaaggaagcctgtgcctgttta

SEQ ID NO: 5023134 - DNA, 25 bp, Homo sapien
gaaggaagcctgtgcctgtttatac

SEQ ID NO: 5023135 - DNA, 25 bp, Homo sapien
aaggaagcctgtgcctgtttataca

SEQ ID NO: 5023136 - DNA, 25 bp, Homo sapien
tttccaaatatcagggtactggatt

SEQ ID NO: 5023137 - DNA, 25 bp, Homo sapien
ccaaatatcagggtactggattgga

SEQ ID NO: 5023138 - DNA, 25 bp, Homo sapien
tatcagggtactggattggaaagat

SEQ ID NO: 5023139 - DNA, 25 bp, Homo sapien
atatcagggtactggattggaaaga

SEQ ID NO: 5023140 - DNA, 25 bp, Homo sapien
cggcgagaactctttcttaggagtg

SEQ ID NO: 5023141 - DNA, 25 bp, Homo sapien
ctttatttcactttcgttggtgtct

SEQ ID NO: 5023142 - DNA, 25 bp, Homo sapien
tatttcactttcgttggtgtctgaa

SEQ ID NO: 5023143 - DNA, 25 bp, Homo sapien
cactttcgttggtgtctgaagatga

SEQ ID NO: 5023144 - DNA, 25 bp, Homo sapien
tttcactttcgttggtgtctgaaga

SEQ ID NO: 5023145 - DNA, 25 bp, Homo sapien
tgtgtgaccatagaaagctgcttaa

SEQ ID NO: 5023146 - DNA, 25 bp, Homo sapien
taaacatacatctaaggaagtcagg

SEQ ID NO: 5023147 - DNA, 25 bp, Homo sapien
gcctctctgataagattgctggaat

SEQ ID NO: 5023148 - DNA, 25 bp, Homo sapien
tgaggataagtacaaagctagaccc

SEQ ID NO: 5023149 - DNA, 25 bp, Homo sapien
tgtgacaggcccgttatgttcctta

SEQ ID NO: 5023150 - DNA, 25 bp, Homo sapien
tctctctctactgtgacaggcccgt

SEQ ID NO: 5023151 - DNA, 25 bp, Homo sapien
tctactgtgacaggcccgttatgtt

SEQ ID NO: 5023152 - DNA, 25 bp, Homo sapien
gcccgttatgttccttactccagcg

SEQ ID NO: 5023153 - DNA, 25 bp, Homo sapien
actgcactcaggcctggtgacagag

SEQ ID NO: 5023154 - DNA, 25 bp, Homo sapien
ccactgcactcaggcctggtgacag

SEQ ID NO: 5023155 - DNA, 25 bp, Homo sapien
gcactcaggcctggtgacagagcaa

SEQ ID NO: 5023156 - DNA, 25 bp, Homo sapien
tgcactcaggcctggtgacagagca

SEQ ID NO: 5023157 - DNA, 25 bp, Homo sapien
agcagagccgccacagtcctctttc

SEQ ID NO: 5023158 - DNA, 25 bp, Homo sapien
atcccaaatggtatgcacctctcca

SEQ ID NO: 5023159 - DNA, 25 bp, Homo sapien
gtcaatttccacacgcgttctccaa

SEQ ID NO: 5023160 - DNA, 25 bp, Homo sapien
actccttgtcaccatcccaaatggt

SEQ ID NO: 5023161 - DNA, 25 bp, Homo sapien
gcgggacgcaaacccaaagtcagct

SEQ ID NO: 5023162 - DNA, 25 bp, Homo sapien
caacttgcaatctaacgggctggcg

SEQ ID NO: 5023163 - DNA, 25 bp, Homo sapien
tgaccgcggcgaataacatttccta

SEQ ID NO: 5023164 - DNA, 25 bp, Homo sapien
tgaggcctccaagcgtcgtccttgg

SEQ ID NO: 5023165 - DNA, 25 bp, Homo sapien
ctgatccagcccggccgcttccggc

SEQ ID NO: 5023166 - DNA, 25 bp, Homo sapien
ctcatcctgatccagcccggccgct

SEQ ID NO: 5023167 - DNA, 25 bp, Homo sapien
atccagcccggccgcttccggcctt

SEQ ID NO: 5023168 - DNA, 25 bp, Homo sapien
tcatcctgatccagcccggccgctt

SEQ ID NO: 5023169 - DNA, 25 bp, Homo sapien
gcgcagactccgccgaagctacggg

SEQ ID NO: 5023170 - DNA, 25 bp, Homo sapien
cgcgcagactccgccgaagctacgg

SEQ ID NO: 5023171 - DNA, 25 bp, Homo sapien
cgcagactccgccgaagctacgggc

SEQ ID NO: 5023172 - DNA, 25 bp, Homo sapien
gcagactccgccgaagctacgggcg

SEQ ID NO: 5023173 - DNA, 25 bp, Homo sapien
ggtcctgctttctcgcctgtccatt

SEQ ID NO: 5023174 - DNA, 25 bp, Homo sapien
agctctagggactcggccggccccg

SEQ ID NO: 5023175 - DNA, 25 bp, Homo sapien
gggctccgcctaacttcggccagcc

SEQ ID NO: 5023176 - DNA, 25 bp, Homo sapien
aggtggtccgctggtccgctgggtc

SEQ ID NO: 5023177 - DNA, 25 bp, Homo sapien
tgcaggccggctcgagattcccgag

SEQ ID NO: 5023178 - DNA, 25 bp, Homo sapien
ggtactttgcgctagcctggcctgt

SEQ ID NO: 5023179 - DNA, 25 bp, Homo sapien
gctcgccctcgtggtgttccaggaa

SEQ ID NO: 5023180 - DNA, 25 bp, Homo sapien
gggacagctacaccgccaaacactt

SEQ ID NO: 5023181 - DNA, 25 bp, Homo sapien
tggctggtttcgtgcgtaaacaacc

SEQ ID NO: 5023182 - DNA, 25 bp, Homo sapien
gctggctggtttcgtgcgtaaacaa

SEQ ID NO: 5023183 - DNA, 25 bp, Homo sapien
gggctggctggtttcgtgcgtaaac

SEQ ID NO: 5023184 - DNA, 25 bp, Homo sapien
gctggtttcgtgcgtaaacaaccga

SEQ ID NO: 5023185 - DNA, 25 bp, Homo sapien
ataggattgttgttctcaatcttgc

SEQ ID NO: 5023186 - DNA, 25 bp, Homo sapien
tcagccagagtcttcttagctgcca

SEQ ID NO: 5023187 - DNA, 25 bp, Homo sapien
taggattgttgttctcaatcttgcc

SEQ ID NO: 5023188 - DNA, 25 bp, Homo sapien
ctggtggtgtagttatgaggaccat

SEQ ID NO: 5023189 - DNA, 25 bp, Homo sapien
taatgttactgttcgtgtactgttt

SEQ ID NO: 5023190 - DNA, 25 bp, Homo sapien
tactgtttgatgcatcagacttcct

SEQ ID NO: 5023191 - DNA, 25 bp, Homo sapien
tactgttcgtgtactgtttgatgca

SEQ ID NO: 5023192 - DNA, 25 bp, Homo sapien
tgttagatttaaacactaaacaaga

SEQ ID NO: 5023193 - DNA, 25 bp, Homo sapien
ttcaattgttagatttaaacactaa

SEQ ID NO: 5023194 - DNA, 25 bp, Homo sapien
tagatttaaacactaaacaagacca

SEQ ID NO: 5023195 - DNA, 25 bp, Homo sapien
tcaattgttagatttaaacactaaa

SEQ ID NO: 5023196 - DNA, 25 bp, Homo sapien
tagtccaggtgtatataaacttcca

SEQ ID NO: 5023197 - DNA, 25 bp, Homo sapien
gaacatgaagactatcctcaaggcc

SEQ ID NO: 5023198 - DNA, 25 bp, Homo sapien
ccatcatgtgcatacagaggttaag

SEQ ID NO: 5023199 - DNA, 25 bp, Homo sapien
taacagggctgagaatatcatgtgg

SEQ ID NO: 5023200 - DNA, 25 bp, Homo sapien
tacaaaagtagttaagctgctcacg

SEQ ID NO: 5023201 - DNA, 25 bp, Homo sapien
tatacatgatacacagttgcagcca

SEQ ID NO: 5023202 - DNA, 25 bp, Homo sapien
gataaaagtattgtgcattggcccc

SEQ ID NO: 5023203 - DNA, 25 bp, Homo sapien
taatatcctagagctcaatgcagtc

SEQ ID NO: 5023204 - DNA, 25 bp, Homo sapien
aaatgttgctagtgctccttaggcc

SEQ ID NO: 5023205 - DNA, 25 bp, Homo sapien
gctgaaacagtttccacaaaggcag

SEQ ID NO: 5023206 - DNA, 25 bp, Homo sapien
taggcctttaagctataaactcagc

SEQ ID NO: 5023207 - DNA, 25 bp, Homo sapien
tattccctctatacaagaacctttg

SEQ ID NO: 5023208 - DNA, 25 bp, Homo sapien
tagagtgggacgtaaagtcgagaaa

SEQ ID NO: 5023209 - DNA, 25 bp, Homo sapien
tcttaatggcgagtaacaatttctg

SEQ ID NO: 5023210 - DNA, 25 bp, Homo sapien
ttgcagtaggaagatgttggtcatc

SEQ ID NO: 5023211 - DNA, 25 bp, Homo sapien
tgagggcataggctggaatccttct

SEQ ID NO: 5023212 - DNA, 25 bp, Homo sapien
tggaaaccctataagttgcaggact

SEQ ID NO: 5023213 - DNA, 25 bp, Homo sapien
ggttaaccagggtagatgacctcac

SEQ ID NO: 5023214 - DNA, 25 bp, Homo sapien
gcacagttgtatgggaaagctcatc

SEQ ID NO: 5023215 - DNA, 25 bp, Homo sapien
gacctcactgctggatctctaagaa

SEQ ID NO: 5023216 - DNA, 25 bp, Homo sapien
aagatcttgtcgttctgtcatgctc

SEQ ID NO: 5023217 - DNA, 25 bp, Homo sapien
gctcatcttctctactattgaccag

SEQ ID NO: 5023218 - DNA, 25 bp, Homo sapien
ccaacgcttgaactgcagaagcttc

SEQ ID NO: 5023219 - DNA, 25 bp, Homo sapien
tactattgaccagaaccaacgcttg

SEQ ID NO: 5023220 - DNA, 25 bp, Homo sapien
tctaaaacgctttcagatgatgcca

SEQ ID NO: 5023221 - DNA, 25 bp, Homo sapien
tctgaggatcatacttggagtggca

SEQ ID NO: 5023222 - DNA, 25 bp, Homo sapien
gatgatgccaatgctactgatctga

SEQ ID NO: 5023223 - DNA, 25 bp, Homo sapien
tgtattacaaggtagcacaaaaact

SEQ ID NO: 5023224 - DNA, 25 bp, Homo sapien
aaaagcctattcctagaccatagga

SEQ ID NO: 5023225 - DNA, 25 bp, Homo sapien
cacagctaaaaagcctattcctaga

SEQ ID NO: 5023226 - DNA, 25 bp, Homo sapien
gaatataggtataatcctttcacag

SEQ ID NO: 5023227 - DNA, 25 bp, Homo sapien
ctttgtgtacataataatcttggaa

SEQ ID NO: 5023228 - DNA, 25 bp, Homo sapien
gcttgagtaatacagcaatttccca

SEQ ID NO: 5023229 - DNA, 25 bp, Homo sapien
tgggtccagctctatagagcaatca

SEQ ID NO: 5023230 - DNA, 25 bp, Homo sapien
gaaaatgctgactgacctatctata

SEQ ID NO: 5023231 - DNA, 25 bp, Homo sapien
tctttcaagaggactttcactacca

SEQ ID NO: 5023232 - DNA, 25 bp, Homo sapien
ttttggaagcacatctagtagacct

SEQ ID NO: 5023233 - DNA, 25 bp, Homo sapien
agcctaaaatcttctgccgttaaat

SEQ ID NO: 5023234 - DNA, 25 bp, Homo sapien
acattgacttcaccgcagccattta

SEQ ID NO: 5023235 - DNA, 25 bp, Homo sapien
cgcagccatttaccaaaagcctaaa

SEQ ID NO: 5023236 - DNA, 25 bp, Homo sapien
acattctgtgttctgcgtatttccg

SEQ ID NO: 5023237 - DNA, 25 bp, Homo sapien
atgtaagggctgttctgcaactacc

SEQ ID NO: 5023238 - DNA, 25 bp, Homo sapien
gcgtatttccgcacatactcatata

SEQ ID NO: 5023239 - DNA, 25 bp, Homo sapien
ggctgttctgcaactaccaacattc

SEQ ID NO: 5023240 - DNA, 25 bp, Homo sapien
ttacaccattaggaatgagttcaac

SEQ ID NO: 5023241 - DNA, 25 bp, Homo sapien
tatttacaccattaggaatgagttc

SEQ ID NO: 5023242 - DNA, 25 bp, Homo sapien
tggtatatttacaccattaggaatg

SEQ ID NO: 5023243 - DNA, 25 bp, Homo sapien
ctggtatatttacaccattaggaat

SEQ ID NO: 5023244 - DNA, 25 bp, Homo sapien
cgcgaggattagttgccgcaaactc

SEQ ID NO: 5023245 - DNA, 25 bp, Homo sapien
tctgagacgcgaggattagttgccg

SEQ ID NO: 5023246 - DNA, 25 bp, Homo sapien
ttagttgccgcaaactctcatacat

SEQ ID NO: 5023247 - DNA, 25 bp, Homo sapien
tctgaactctgagacgcgaggatta

SEQ ID NO: 5023248 - DNA, 25 bp, Homo sapien
atactttaattacatgtctattcaa

SEQ ID NO: 5023249 - DNA, 25 bp, Homo sapien
gataggacatagttcattctgtaac

SEQ ID NO: 5023250 - DNA, 25 bp, Homo sapien
gaaacaattcaaccttgcttctgtg

SEQ ID NO: 5023251 - DNA, 25 bp, Homo sapien
taaatccatatctactacacttcga

SEQ ID NO: 5023252 - DNA, 25 bp, Homo sapien
gactagagccatggcgctttcggtt

SEQ ID NO: 5023253 - DNA, 25 bp, Homo sapien
ttgccaggccttggagtataaaatc

SEQ ID NO: 5023254 - DNA, 25 bp, Homo sapien
tatcagagagtaagccccaagattc

SEQ ID NO: 5023255 - DNA, 25 bp, Homo sapien
caagctgactgacactttcctccaa

SEQ ID NO: 5023256 - DNA, 25 bp, Homo sapien
caaatcactgtttccctataggtaa

SEQ ID NO: 5023257 - DNA, 25 bp, Homo sapien
tcagaatgtgacacacaaagcttgt

SEQ ID NO: 5023258 - DNA, 25 bp, Homo sapien
caagtgggtcatctcgtggttgcca

SEQ ID NO: 5023259 - DNA, 25 bp, Homo sapien
cacacctggtgaattagtcctagga

SEQ ID NO: 5023260 - DNA, 25 bp, Homo sapien
tcaagctgtgctcaaatggatgcca

SEQ ID NO: 5023261 - DNA, 25 bp, Homo sapien
ctttgaagaatgagtcccaggagtc

SEQ ID NO: 5023262 - DNA, 25 bp, Homo sapien
caagatccaggatactatcagctcc

SEQ ID NO: 5023263 - DNA, 25 bp, Homo sapien
gagtctactaatccaagatccagga

SEQ ID NO: 5023264 - DNA, 25 bp, Homo sapien
gatccaggatactatcagctccatt

SEQ ID NO: 5023265 - DNA, 25 bp, Homo sapien
cttttctgaggagtctactaatcca

SEQ ID NO: 5023266 - DNA, 25 bp, Homo sapien
caaaaagcctttcacattccagata

SEQ ID NO: 5023267 - DNA, 25 bp, Homo sapien
gcctttcacattccagataacggag

SEQ ID NO: 5023268 - DNA, 25 bp, Homo sapien
ttcacattccagataacggagactt

SEQ ID NO: 5023269 - DNA, 25 bp, Homo sapien
aaagcctttcacattccagataacg

SEQ ID NO: 5023270 - DNA, 25 bp, Homo sapien
ctagaatttagcgtataatttaaat

SEQ ID NO: 5023271 - DNA, 25 bp, Homo sapien
tcaagatagtggactaaaggctccc

SEQ ID NO: 5023272 - DNA, 25 bp, Homo sapien
tggcttggaccattaaaaggctcta

SEQ ID NO: 5023273 - DNA, 25 bp, Homo sapien
gaacacttctacaatgctcagaggg

SEQ ID NO: 5023274 - DNA, 25 bp, Homo sapien
gacagggcagaggaataaacgaaca

SEQ ID NO: 5023275 - DNA, 25 bp, Homo sapien
agtgtatctaatctaaattcctaac

SEQ ID NO: 5023276 - DNA, 25 bp, Homo sapien
gtatctaatctaaattcctaactca

SEQ ID NO: 5023277 - DNA, 25 bp, Homo sapien
ctctaggagtgtatctaatctaaat

SEQ ID NO: 5023278 - DNA, 25 bp, Homo sapien
tctaggagtgtatctaatctaaatt

SEQ ID NO: 5023279 - DNA, 25 bp, Homo sapien
tgggtatcagattagccccaggata

SEQ ID NO: 5023280 - DNA, 25 bp, Homo sapien
gcataaatgtgacctatcttccctt

SEQ ID NO: 5023281 - DNA, 25 bp, Homo sapien
aagtttcaaactgggtatcagatta

SEQ ID NO: 5023282 - DNA, 25 bp, Homo sapien
caggatagaaactacagcataaatg

SEQ ID NO: 5023283 - DNA, 25 bp, Homo sapien
actgaaatgccttcccaattgtaca

SEQ ID NO: 5023284 - DNA, 25 bp, Homo sapien
attttaagatatgatggcacccaca

SEQ ID NO: 5023285 - DNA, 25 bp, Homo sapien
gaaactaagctgtctcattcatgga

SEQ ID NO: 5023286 - DNA, 25 bp, Homo sapien
ccacatactgaaagtaagtagctga

SEQ ID NO: 5023287 - DNA, 25 bp, Homo sapien
tgtgcaataatgagttccatggcct

SEQ ID NO: 5023288 - DNA, 25 bp, Homo sapien
tccatgtgcaataatgagttccatg

SEQ ID NO: 5023289 - DNA, 25 bp, Homo sapien
catgtgcaataatgagttccatggc

SEQ ID NO: 5023290 - DNA, 25 bp, Homo sapien
cgtccatgtgcaataatgagttcca

SEQ ID NO: 5023291 - DNA, 25 bp, Homo sapien
agctgagctggggataattccaaca

SEQ ID NO: 5023292 - DNA, 25 bp, Homo sapien
tgccagtgattttacttgcaaatgc

SEQ ID NO: 5023293 - DNA, 25 bp, Homo sapien
tgagctggggataattccaacaaca

SEQ ID NO: 5023294 - DNA, 25 bp, Homo sapien
tggggataattccaacaacatgcca

SEQ ID NO: 5023295 - DNA, 25 bp, Homo sapien
tgtttaaggctgaggacttgctgga

SEQ ID NO: 5023296 - DNA, 25 bp, Homo sapien
taatgtgttccaactacagcttgct

SEQ ID NO: 5023297 - DNA, 25 bp, Homo sapien
gaataaacagtccatgcagtaccac

SEQ ID NO: 5023298 - DNA, 25 bp, Homo sapien
tcaattatagagaaacttggcaggg

SEQ ID NO: 5023299 - DNA, 25 bp, Homo sapien
gcattgcttgtacacgaggataaag

SEQ ID NO: 5023300 - DNA, 25 bp, Homo sapien
ccttcagaggctggtctaaagggcc

SEQ ID NO: 5023301 - DNA, 25 bp, Homo sapien
tggcaaaggctcaggatcatcgcta

SEQ ID NO: 5023302 - DNA, 25 bp, Homo sapien
cctagtgtcgatggaaagctgtctt

SEQ ID NO: 5023303 - DNA, 25 bp, Homo sapien
tgccaaaacagatgatggttaggaa

SEQ ID NO: 5023304 - DNA, 25 bp, Homo sapien
tacctaggtggtagagtgccaaaac

SEQ ID NO: 5023305 - DNA, 25 bp, Homo sapien
tcatttcctttgactaacaagtaaa

SEQ ID NO: 5023306 - DNA, 25 bp, Homo sapien
ccagagcatataggttgttcagtta

SEQ ID NO: 5023307 - DNA, 25 bp, Homo sapien
acaggcctatctctaattcatccaa

SEQ ID NO: 5023308 - DNA, 25 bp, Homo sapien
attctttcatttacaggcctatctc

SEQ ID NO: 5023309 - DNA, 25 bp, Homo sapien
tctttcatttacaggcctatctcta

SEQ ID NO: 5023310 - DNA, 25 bp, Homo sapien
catttacaggcctatctctaattca

SEQ ID NO: 5023311 - DNA, 25 bp, Homo sapien
gagaacctgctcgcaaaccactact

SEQ ID NO: 5023312 - DNA, 25 bp, Homo sapien
tctctcctcggttccttaatctctg

SEQ ID NO: 5023313 - DNA, 25 bp, Homo sapien
ctatcccggtccctccgagaacctg

SEQ ID NO: 5023314 - DNA, 25 bp, Homo sapien
tcgcaaaccactactcctcctcatt

SEQ ID NO: 5023315 - DNA, 25 bp, Homo sapien
tgaaagcattaaaggccaccagaat

SEQ ID NO: 5023316 - DNA, 25 bp, Homo sapien
tacctggcacgaaatagatgttcac

SEQ ID NO: 5023317 - DNA, 25 bp, Homo sapien
gcaagtaaggttatgatagtgtcac

SEQ ID NO: 5023318 - DNA, 25 bp, Homo sapien
ggtgattgtgtagaatatacctggc

SEQ ID NO: 5023319 - DNA, 25 bp, Homo sapien
tgtagtagcacatcttcgaccaaag

SEQ ID NO: 5023320 - DNA, 25 bp, Homo sapien
cgaccaaagtgattgttaagctgcc

SEQ ID NO: 5023321 - DNA, 25 bp, Homo sapien
gctgaatgagaagatctcgatcccg

SEQ ID NO: 5023322 - DNA, 25 bp, Homo sapien
taaaaacttcgtgctacaccactgc

SEQ ID NO: 5023323 - DNA, 25 bp, Homo sapien
caacaaagtaattggagttctcaga

SEQ ID NO: 5023324 - DNA, 25 bp, Homo sapien
ttctatgtacaatctgaaaatctag

SEQ ID NO: 5023325 - DNA, 25 bp, Homo sapien
tcaatgttggaaagtagcttgaatt

SEQ ID NO: 5023326 - DNA, 25 bp, Homo sapien
aattcaatgttggaaagtagcttga

SEQ ID NO: 5023327 - DNA, 25 bp, Homo sapien
tctcttgactgctggtttctcagtt

SEQ ID NO: 5023328 - DNA, 25 bp, Homo sapien
acaaatctcttgactgctggtttct

SEQ ID NO: 5023329 - DNA, 25 bp, Homo sapien
aatctcttgactgctggtttctcag

SEQ ID NO: 5023330 - DNA, 25 bp, Homo sapien
ttccatttctctgcggaattttgat

SEQ ID NO: 5023331 - DNA, 25 bp, Homo sapien
gcgccaacgtcctagcagcatatca

SEQ ID NO: 5023332 - DNA, 25 bp, Homo sapien
cagttctaaagaaaggcgccaacgt

SEQ ID NO: 5023333 - DNA, 25 bp, Homo sapien
cattcccataaagctacactgtggc

SEQ ID NO: 5023334 - DNA, 25 bp, Homo sapien
gaataccctgccgaacagttctaaa

SEQ ID NO: 5023335 - DNA, 25 bp, Homo sapien
tgtgagaggtggcccttcactttca

SEQ ID NO: 5023336 - DNA, 25 bp, Homo sapien
tgtgcagcaagatcatgagcagatg

SEQ ID NO: 5023337 - DNA, 25 bp, Homo sapien
agattggcagcataagacatttttg

SEQ ID NO: 5023338 - DNA, 25 bp, Homo sapien
gtaagtcctatttctgctagtaagc

SEQ ID NO: 5023339 - DNA, 25 bp, Homo sapien
ctacattataccacaaggcaggaat

SEQ ID NO: 5023340 - DNA, 25 bp, Homo sapien
ttttcagccacatacagcagtcagc

SEQ ID NO: 5023341 - DNA, 25 bp, Homo sapien
cagacaaagcacatatggaggctgg

SEQ ID NO: 5023342 - DNA, 25 bp, Homo sapien
cagggtgataatgcattctaccaaa

SEQ ID NO: 5023343 - DNA, 25 bp, Homo sapien
aaagatcctcctttctagcatttgg

SEQ ID NO: 5023344 - DNA, 25 bp, Homo sapien
taaacatttcccactactggcagat

SEQ ID NO: 5023345 - DNA, 25 bp, Homo sapien
ctctaggcagtttctatccactgta

SEQ ID NO: 5023346 - DNA, 25 bp, Homo sapien
ccctgacttggacggccaaaaagat

SEQ ID NO: 5023347 - DNA, 25 bp, Homo sapien
cccaaggaatgtcatggagtctgaa

SEQ ID NO: 5023348 - DNA, 25 bp, Homo sapien
tcaaatggatttgggggtatacacc

SEQ ID NO: 5023349 - DNA, 25 bp, Homo sapien
tctgaacgtcggaaaaatggatggt

SEQ ID NO: 5023350 - DNA, 25 bp, Homo sapien
ggaagagagtcatcatccttatcat

SEQ ID NO: 5023351 - DNA, 25 bp, Homo sapien
ttcattatcaatacccagttccaag

SEQ ID NO: 5023352 - DNA, 25 bp, Homo sapien
cttcattatcaatacccagttccaa

SEQ ID NO: 5023353 - DNA, 25 bp, Homo sapien
tcattatcaatacccagttccaaga

SEQ ID NO: 5023354 - DNA, 25 bp, Homo sapien
cattatcaatacccagttccaagag

SEQ ID NO: 5023355 - DNA, 25 bp, Homo sapien
tgttgtctgctgattcattgcctta

SEQ ID NO: 5023356 - DNA, 25 bp, Homo sapien
tccagtatataagtgcttgaaaaac

SEQ ID NO: 5023357 - DNA, 25 bp, Homo sapien
cttttgcgttctagttgaggtgtat

SEQ ID NO: 5023358 - DNA, 25 bp, Homo sapien
gcttcaatgagcaaacatccaaaac

SEQ ID NO: 5023359 - DNA, 25 bp, Homo sapien
acagagcataatttaggaagtctcc

SEQ ID NO: 5023360 - DNA, 25 bp, Homo sapien
gaatgctcatcattatgagaccgca

SEQ ID NO: 5023361 - DNA, 25 bp, Homo sapien
tcctcgtgcagacatcattccttga

SEQ ID NO: 5023362 - DNA, 25 bp, Homo sapien
tgagaccgcattagagacagagcat

SEQ ID NO: 5023363 - DNA, 25 bp, Homo sapien
gatttggatgtccaggatcaccagc

SEQ ID NO: 5023364 - DNA, 25 bp, Homo sapien
tgcagaaccataacgtaattgagct

SEQ ID NO: 5023365 - DNA, 25 bp, Homo sapien
taagctagcttcttctcgcgcagtc

SEQ ID NO: 5023366 - DNA, 25 bp, Homo sapien
caccagcagatgctaatgcagaacc

SEQ ID NO: 5023367 - DNA, 25 bp, Homo sapien
actggaattctcataattgacagcc

SEQ ID NO: 5023368 - DNA, 25 bp, Homo sapien
gaataaggcccatcaagtccgagat

SEQ ID NO: 5023369 - DNA, 25 bp, Homo sapien
taatgacaatgctgtaagccctggc

SEQ ID NO: 5023370 - DNA, 25 bp, Homo sapien
tgatggtaccactccggcgtaagtt

SEQ ID NO: 5023371 - DNA, 25 bp, Homo sapien
taactgctggcgttgctagcttcca

SEQ ID NO: 5023372 - DNA, 25 bp, Homo sapien
aattgtgtttctctgggattatata

SEQ ID NO: 5023373 - DNA, 25 bp, Homo sapien
aatgtcagttgctaattgtgtttct

SEQ ID NO: 5023374 - DNA, 25 bp, Homo sapien
ccacaatgagctaatgtcagttgct

SEQ ID NO: 5023375 - DNA, 25 bp, Homo sapien
tctgggattatatatacttacgtaa

SEQ ID NO: 5023376 - DNA, 25 bp, Homo sapien
ggtgttgcggacagcccactgcatt

SEQ ID NO: 5023377 - DNA, 25 bp, Homo sapien
gctcatcaagcataaaggtctcctg

SEQ ID NO: 5023378 - DNA, 25 bp, Homo sapien
gcaccattggcatgggagctatttg

SEQ ID NO: 5023379 - DNA, 25 bp, Homo sapien
tggttctttctaatggctcatcaag

SEQ ID NO: 5023380 - DNA, 25 bp, Homo sapien
cagaaaagaaggcaggaacactgct

SEQ ID NO: 5023381 - DNA, 25 bp, Homo sapien
aagaaggcaggaacactgcttgctc

SEQ ID NO: 5023382 - DNA, 25 bp, Homo sapien
aaaagaaggcaggaacactgcttgc

SEQ ID NO: 5023383 - DNA, 25 bp, Homo sapien
cttcagaaaagaaggcaggaacact

SEQ ID NO: 5023384 - DNA, 25 bp, Homo sapien
gcgcccactagcattatcttggttg

SEQ ID NO: 5023385 - DNA, 25 bp, Homo sapien
agtgacaacgcttctgcgcccacta

SEQ ID NO: 5023386 - DNA, 25 bp, Homo sapien
gcttctgcgcccactagcattatct

SEQ ID NO: 5023387 - DNA, 25 bp, Homo sapien
cactagcattatcttggttgctgtg

SEQ ID NO: 5023388 - DNA, 25 bp, Homo sapien
ctgatttactcatactgagtaattt

SEQ ID NO: 5023389 - DNA, 25 bp, Homo sapien
tcatactgagtaatttctcaaataa

SEQ ID NO: 5023390 - DNA, 25 bp, Homo sapien
tactcatactgagtaatttctcaaa

SEQ ID NO: 5023391 - DNA, 25 bp, Homo sapien
tttactcatactgagtaatttctca

SEQ ID NO: 5023392 - DNA, 25 bp, Homo sapien
cctgttcatcatgatgatcctcttc

SEQ ID NO: 5023393 - DNA, 25 bp, Homo sapien
tcatcatgttgtccctctgcctcag

SEQ ID NO: 5023394 - DNA, 25 bp, Homo sapien
ttcctgttcatcatgatgatcctct

SEQ ID NO: 5023395 - DNA, 25 bp, Homo sapien
tcatcatgctcatcatgttgtccct

SEQ ID NO: 5023396 - DNA, 25 bp, Homo sapien
tactcttcttttctcataaaataaa

SEQ ID NO: 5023397 - DNA, 25 bp, Homo sapien
cttcttttctcataaaataaaagct

SEQ ID NO: 5023398 - DNA, 25 bp, Homo sapien
tttaaatctaccacaattaaaatca

SEQ ID NO: 5023399 - DNA, 25 bp, Homo sapien
ttaaatctaccacaattaaaatcac

SEQ ID NO: 5023400 - DNA, 25 bp, Homo sapien
catctctgccccgaacgggctgtga

SEQ ID NO: 5023401 - DNA, 25 bp, Homo sapien
cttcatctctgccccgaacgggctg

SEQ ID NO: 5023402 - DNA, 25 bp, Homo sapien
ctctgccccgaacgggctgtgactg

SEQ ID NO: 5023403 - DNA, 25 bp, Homo sapien
tctctgccccgaacgggctgtgact

SEQ ID NO: 5023404 - DNA, 25 bp, Homo sapien
tggattcctgatgatgtaggatgac

SEQ ID NO: 5023405 - DNA, 25 bp, Homo sapien
ctgtggattcctgatgatgtaggat

SEQ ID NO: 5023406 - DNA, 25 bp, Homo sapien
tgatgatgtaggatgactgagactg

SEQ ID NO: 5023407 - DNA, 25 bp, Homo sapien
ttcctgatgatgtaggatgactgag

SEQ ID NO: 5023408 - DNA, 25 bp, Homo sapien
gttcctcacagggtatcaagatcag

SEQ ID NO: 5023409 - DNA, 25 bp, Homo sapien
tactatgggagagctctgtcagaca

SEQ ID NO: 5023410 - DNA, 25 bp, Homo sapien
gatttagattaaagggacacctgac

SEQ ID NO: 5023411 - DNA, 25 bp, Homo sapien
gaaaaattgggacacatatactggc

SEQ ID NO: 5023412 - DNA, 25 bp, Homo sapien
tagtactagccagggtaaatggtgc

SEQ ID NO: 5023413 - DNA, 25 bp, Homo sapien
tacgttgcacaattcttccacagcg

SEQ ID NO: 5023414 - DNA, 25 bp, Homo sapien
tgcagttggacgagcaatccccatt

SEQ ID NO: 5023415 - DNA, 25 bp, Homo sapien
ttccacagcgtaaggtagcaatgct

SEQ ID NO: 5023416 - DNA, 25 bp, Homo sapien
gaagccatttccacactcagaataa

SEQ ID NO: 5023417 - DNA, 25 bp, Homo sapien
tcttgccactgaacgtagaaacctc

SEQ ID NO: 5023418 - DNA, 25 bp, Homo sapien
ttttggagttctttcactagtgtac

SEQ ID NO: 5023419 - DNA, 25 bp, Homo sapien
aatagcttcttctctacgtccaggt

SEQ ID NO: 5023420 - DNA, 25 bp, Homo sapien
tccctatctgagtgtgttattacca

SEQ ID NO: 5023421 - DNA, 25 bp, Homo sapien
tattaccataacctcattcgcactg

SEQ ID NO: 5023422 - DNA, 25 bp, Homo sapien
tatttatgacaggttctgagggcac

SEQ ID NO: 5023423 - DNA, 25 bp, Homo sapien
ccagagaaaggaacgatgcaatgcc

SEQ ID NO: 5023424 - DNA, 25 bp, Homo sapien
gtacttgtaatacacattcaaagaa

SEQ ID NO: 5023425 - DNA, 25 bp, Homo sapien
tgtacttgtaatacacattcaaaga

SEQ ID NO: 5023426 - DNA, 25 bp, Homo sapien
tgccactttgctgattgaggtatac

SEQ ID NO: 5023427 - DNA, 25 bp, Homo sapien
aagatggcctattctactgctggca

SEQ ID NO: 5023428 - DNA, 25 bp, Homo sapien
taaggcaatgagtgaaacagtccag

SEQ ID NO: 5023429 - DNA, 25 bp, Homo sapien
aacagtccagccgaattgtgccact

SEQ ID NO: 5023430 - DNA, 25 bp, Homo sapien
ggcattccagtcctgtagaacacgc

SEQ ID NO: 5023431 - DNA, 25 bp, Homo sapien
tgcaagctgggcaaatcttggaggc

SEQ ID NO: 5023432 - DNA, 25 bp, Homo sapien
tcttggaggctctaaatcatgatct

SEQ ID NO: 5023433 - DNA, 25 bp, Homo sapien
tagaacacgctccaatgcaagctgg

SEQ ID NO: 5023434 - DNA, 25 bp, Homo sapien
tgtattgacaatgctccaccgtctg

SEQ ID NO: 5023435 - DNA, 25 bp, Homo sapien
tttcggttacgatcttccctgattc

SEQ ID NO: 5023436 - DNA, 25 bp, Homo sapien
tccctgattcgaggtggcctgtatt

SEQ ID NO: 5023437 - DNA, 25 bp, Homo sapien
ggtggcctgtattgacaatgctcca

SEQ ID NO: 5023438 - DNA, 25 bp, Homo sapien
taaagtagatcaagacgagcagatt

SEQ ID NO: 5023439 - DNA, 25 bp, Homo sapien
taaccagattagtagcagtgagcag

SEQ ID NO: 5023440 - DNA, 25 bp, Homo sapien
tagcagtgagcaggcgataaagtag

SEQ ID NO: 5023441 - DNA, 25 bp, Homo sapien
ggcagagtaaccagattagtagcag

SEQ ID NO: 5023442 - DNA, 25 bp, Homo sapien
tttctcccaacaatcacagtaggct

SEQ ID NO: 5023443 - DNA, 25 bp, Homo sapien
taggctgttggtgatgtccgtttga

SEQ ID NO: 5023444 - DNA, 25 bp, Homo sapien
agtaggctgttggtgatgtccgttt

SEQ ID NO: 5023445 - DNA, 25 bp, Homo sapien
aacaatcacagtaggctgttggtga

SEQ ID NO: 5023446 - DNA, 25 bp, Homo sapien
gacaaacccttgcacattccgtaca

SEQ ID NO: 5023447 - DNA, 25 bp, Homo sapien
gccacaagttcgacactcaaaaata

SEQ ID NO: 5023448 - DNA, 25 bp, Homo sapien
tcatgacctttatgacaaacccttg

SEQ ID NO: 5023449 - DNA, 25 bp, Homo sapien
aacacagtgactccagcaagccaca

SEQ ID NO: 5023450 - DNA, 25 bp, Homo sapien
cagggttggtacctgatgggcaaac

SEQ ID NO: 5023451 - DNA, 25 bp, Homo sapien
tgcaagtgtcattacaacataaaac

SEQ ID NO: 5023452 - DNA, 25 bp, Homo sapien
aacatataaaggagagtcatcaggg

SEQ ID NO: 5023453 - DNA, 25 bp, Homo sapien
tccagtccatgtaaaactgcaagtg

SEQ ID NO: 5023454 - DNA, 25 bp, Homo sapien
taagatggtaattgcagcaggataa

SEQ ID NO: 5023455 - DNA, 25 bp, Homo sapien
aagatggtaattgcagcaggataag

SEQ ID NO: 5023456 - DNA, 25 bp, Homo sapien
ctaagatggtaattgcagcaggata

SEQ ID NO: 5023457 - DNA, 25 bp, Homo sapien
ttacagctgacataaatggggtcat

SEQ ID NO: 5023458 - DNA, 25 bp, Homo sapien
gatccttggattctactacagatgg

SEQ ID NO: 5023459 - DNA, 25 bp, Homo sapien
gaaagaagttctcgtagatagggct

SEQ ID NO: 5023460 - DNA, 25 bp, Homo sapien
tagatagggctggagaaccacactg

SEQ ID NO: 5023461 - DNA, 25 bp, Homo sapien
gagcattcgcctttcgatccttgga

SEQ ID NO: 5023462 - DNA, 25 bp, Homo sapien
ggaggtgcttggtccttgaccagta

SEQ ID NO: 5023463 - DNA, 25 bp, Homo sapien
acagcgggggccaggataaaatcaa

SEQ ID NO: 5023464 - DNA, 25 bp, Homo sapien
ctgtggtaagagatcccacagcggg

SEQ ID NO: 5023465 - DNA, 25 bp, Homo sapien
ccagtaccggttgctgctgtggtaa

SEQ ID NO: 5023466 - DNA, 25 bp, Homo sapien
tcaggaacccaactagggggagcta

SEQ ID NO: 5023467 - DNA, 25 bp, Homo sapien
gtctcatcatttcccgtaatctcaa

SEQ ID NO: 5023468 - DNA, 25 bp, Homo sapien
aaccagctgctctcaacgaacgtct

SEQ ID NO: 5023469 - DNA, 25 bp, Homo sapien
gatccatcgcaggagggtcaggaac

SEQ ID NO: 5023470 - DNA, 25 bp, Homo sapien
taatcctgacatgaaaaaaagatgg

SEQ ID NO: 5023471 - DNA, 25 bp, Homo sapien
gagtccaacttgatttgcacctgta

SEQ ID NO: 5023472 - DNA, 25 bp, Homo sapien
gcactggcattggaccaaccatatc

SEQ ID NO: 5023473 - DNA, 25 bp, Homo sapien
gctccttttagtctttgccttcaaa

SEQ ID NO: 5023474 - DNA, 25 bp, Homo sapien
cacgacaggtaagagatatactgct

SEQ ID NO: 5023475 - DNA, 25 bp, Homo sapien
gtcccagctctaccttaaactctaa

SEQ ID NO: 5023476 - DNA, 25 bp, Homo sapien
ccaccaattcatgtacacgacaggt

SEQ ID NO: 5023477 - DNA, 25 bp, Homo sapien
taagtgtcccagctctaccttaaac

SEQ ID NO: 5023478 - DNA, 25 bp, Homo sapien
gatccagcccgattacctgggccat

SEQ ID NO: 5023479 - DNA, 25 bp, Homo sapien
aatgtatttctttcagaacgctccg

SEQ ID NO: 5023480 - DNA, 25 bp, Homo sapien
atttgcaatggcctcaacagcagaa

SEQ ID NO: 5023481 - DNA, 25 bp, Homo sapien
cctgggccattacttgaaacaactg

SEQ ID NO: 5023482 - DNA, 25 bp, Homo sapien
ggcctcatagtcacagcgcagaatg

SEQ ID NO: 5023483 - DNA, 25 bp, Homo sapien
cattagatattgtcgacaggcctca

SEQ ID NO: 5023484 - DNA, 25 bp, Homo sapien
gctctaaaacaaccgcttgctcaag

SEQ ID NO: 5023485 - DNA, 25 bp, Homo sapien
gcaaactgatacacaagcatgcaaa

SEQ ID NO: 5023486 - DNA, 25 bp, Homo sapien
ttaataagattcacaaaggttgctc

SEQ ID NO: 5023487 - DNA, 25 bp, Homo sapien
tttaggtagcgttaggtgaacacac

SEQ ID NO: 5023488 - DNA, 25 bp, Homo sapien
aatcaaaagcacgtcattcactggc

SEQ ID NO: 5023489 - DNA, 25 bp, Homo sapien
tctgtccgggtatcgcttcttaaag

SEQ ID NO: 5023490 - DNA, 25 bp, Homo sapien
tattcctcccatgcaatctttggcc

SEQ ID NO: 5023491 - DNA, 25 bp, Homo sapien
ccattccaagactactaataggtgg

SEQ ID NO: 5023492 - DNA, 25 bp, Homo sapien
taggtggaagatccagccaatcggg

SEQ ID NO: 5023493 - DNA, 25 bp, Homo sapien
tctacagccatgatgataacagcag

SEQ ID NO: 5023494 - DNA, 25 bp, Homo sapien
tagcaagatcaaagatacagtatcg

SEQ ID NO: 5023495 - DNA, 25 bp, Homo sapien
ctgtagcaagatcaaagatacagta

SEQ ID NO: 5023496 - DNA, 25 bp, Homo sapien
gatcaaagatacagtatcgtaccca

SEQ ID NO: 5023497 - DNA, 25 bp, Homo sapien
tacagtatcgtacccaatttccagt

SEQ ID NO: 5023498 - DNA, 25 bp, Homo sapien
ttcaggtatacaaagctttttagga

SEQ ID NO: 5023499 - DNA, 25 bp, Homo sapien
accagagctgttctgacagttagta

SEQ ID NO: 5023500 - DNA, 25 bp, Homo sapien
tctaagtaacctacaatcctgcagg

SEQ ID NO: 5023501 - DNA, 25 bp, Homo sapien
gacagttagtattactggaggttcc

SEQ ID NO: 5023502 - DNA, 25 bp, Homo sapien
aacataggcaccatctacttttagc

SEQ ID NO: 5023503 - DNA, 25 bp, Homo sapien
aaaccacttcccgaagagaccactg

SEQ ID NO: 5023504 - DNA, 25 bp, Homo sapien
acttcccgaagagaccactgctctt

SEQ ID NO: 5023505 - DNA, 25 bp, Homo sapien
gccaacaggaacattcttgacatct

SEQ ID NO: 5023506 - DNA, 25 bp, Homo sapien
ttggtgcaggggttgaccgtcgtcg

SEQ ID NO: 5023507 - DNA, 25 bp, Homo sapien
tgatgcactgctggcaattgaggat

SEQ ID NO: 5023508 - DNA, 25 bp, Homo sapien
catcactacacgtggatgctggaga

SEQ ID NO: 5023509 - DNA, 25 bp, Homo sapien
tgaggatgcatcactacacgtggat

SEQ ID NO: 5023510 - DNA, 25 bp, Homo sapien
ctggagatggtggaggacccatttc

SEQ ID NO: 5023511 - DNA, 25 bp, Homo sapien
ttttcaagctttcaggagatctaag

SEQ ID NO: 5023512 - DNA, 25 bp, Homo sapien
gacaccaactttaggaatcccagca

SEQ ID NO: 5023513 - DNA, 25 bp, Homo sapien
aactgactccattaagacaccaact

SEQ ID NO: 5023514 - DNA, 25 bp, Homo sapien
gagatctaagttgaaatctacagct

SEQ ID NO: 5023515 - DNA, 25 bp, Homo sapien
taatgaaggccgatcaataatgttc

SEQ ID NO: 5023516 - DNA, 25 bp, Homo sapien
agagagagcataccctgtccaaaga

SEQ ID NO: 5023517 - DNA, 25 bp, Homo sapien
tcgaagaccaataggcagaagaaca

SEQ ID NO: 5023518 - DNA, 25 bp, Homo sapien
caaagaagggatcctacaaaggagg

SEQ ID NO: 5023519 - DNA, 25 bp, Homo sapien
ctgggtaccaacagtgatgttcggc

SEQ ID NO: 5023520 - DNA, 25 bp, Homo sapien
caacagtgatgttcggcattgaaga

SEQ ID NO: 5023521 - DNA, 25 bp, Homo sapien
ttttttgctctagctttctctaaca

SEQ ID NO: 5023522 - DNA, 25 bp, Homo sapien
gatgttcggcattgaagaaatacca

SEQ ID NO: 5023523 - DNA, 25 bp, Homo sapien
caatgtaaagaaactatccgctctc

SEQ ID NO: 5023524 - DNA, 25 bp, Homo sapien
tgagcagtgtgctctaatttagaag

SEQ ID NO: 5023525 - DNA, 25 bp, Homo sapien
agctgagcgcaggtgtaaagggcac

SEQ ID NO: 5023526 - DNA, 25 bp, Homo sapien
cagtgtgctctaatttagaagccac

SEQ ID NO: 5023527 - DNA, 25 bp, Homo sapien
ggaggactatcttttcattggttaa

SEQ ID NO: 5023528 - DNA, 25 bp, Homo sapien
tctgtagctacagttgctcttatgc

SEQ ID NO: 5023529 - DNA, 25 bp, Homo sapien
caaaaatgttgctcgtggatgatgt

SEQ ID NO: 5023530 - DNA, 25 bp, Homo sapien
ctatttgcagacaggaggactatct

SEQ ID NO: 5023531 - DNA, 25 bp, Homo sapien
gttcagaatacagagccccaataca

SEQ ID NO: 5023532 - DNA, 25 bp, Homo sapien
agttcagaatacagagccccaatac

SEQ ID NO: 5023533 - DNA, 25 bp, Homo sapien
ttcagaatacagagccccaatacag

SEQ ID NO: 5023534 - DNA, 25 bp, Homo sapien
taatccacagcacttcacaacttga

SEQ ID NO: 5023535 - DNA, 25 bp, Homo sapien
gatgacactatgtacagaaccacca

SEQ ID NO: 5023536 - DNA, 25 bp, Homo sapien
ggtatccaattaaggtggccctggc

SEQ ID NO: 5023537 - DNA, 25 bp, Homo sapien
tatacgaagtctttagcacagccta

SEQ ID NO: 5023538 - DNA, 25 bp, Homo sapien
aatgctcaatgtacgtaatcagtcc

SEQ ID NO: 5023539 - DNA, 25 bp, Homo sapien
ccttcagtcctaacatggtaaagtg

SEQ ID NO: 5023540 - DNA, 25 bp, Homo sapien
ggtaaagtgaattactgcctggcat

SEQ ID NO: 5023541 - DNA, 25 bp, Homo sapien
tgcctggcatatgtttcaccttacc

SEQ ID NO: 5023542 - DNA, 25 bp, Homo sapien
ccatcatgccagtaatgttcacctc

SEQ ID NO: 5023543 - DNA, 25 bp, Homo sapien
gcattctcataaccgacttttgatt

SEQ ID NO: 5023544 - DNA, 25 bp, Homo sapien
tgaacaactgtagcattctcataac

SEQ ID NO: 5023545 - DNA, 25 bp, Homo sapien
ccctgctttggttgagatcctcaca

SEQ ID NO: 5023546 - DNA, 25 bp, Homo sapien
aaaatagtaactgtgagatgataga

SEQ ID NO: 5023547 - DNA, 25 bp, Homo sapien
accatgggctgacaagcagtgtggg

SEQ ID NO: 5023548 - DNA, 25 bp, Homo sapien
taaatacatgtatcctataacctgt

SEQ ID NO: 5023549 - DNA, 25 bp, Homo sapien
gacatgtaggatgcaaatctagagc

SEQ ID NO: 5023550 - DNA, 25 bp, Homo sapien
tacttcgaaatacccaactgggctc

SEQ ID NO: 5023551 - DNA, 25 bp, Homo sapien
tcactttggtacatataggctgccc

SEQ ID NO: 5023552 - DNA, 25 bp, Homo sapien
caatgcctcctgtgctactgtgtag

SEQ ID NO: 5023553 - DNA, 25 bp, Homo sapien
gaacttagagcacagacttaggcac

SEQ ID NO: 5023554 - DNA, 25 bp, Homo sapien
tccttgctggtagaacccctttcat

SEQ ID NO: 5023555 - DNA, 25 bp, Homo sapien
gagatactggactttgaacaggtgt

SEQ ID NO: 5023556 - DNA, 25 bp, Homo sapien
gattcacgttcacgcaacagctcag

SEQ ID NO: 5023557 - DNA, 25 bp, Homo sapien
catcaagccaccttcgttcacgtaa

SEQ ID NO: 5023558 - DNA, 25 bp, Homo sapien
tcgagatgagcctagcctggaaagt

SEQ ID NO: 5023559 - DNA, 25 bp, Homo sapien
ggtaaccaaaatagctaatgtcttc

SEQ ID NO: 5023560 - DNA, 25 bp, Homo sapien
catcaataatgacacttgggtgggc

SEQ ID NO: 5023561 - DNA, 25 bp, Homo sapien
tgaatgtcggcatcaaggagagaca

SEQ ID NO: 5023562 - DNA, 25 bp, Homo sapien
tctgaagttctcgaataatgacact

SEQ ID NO: 5023563 - DNA, 25 bp, Homo sapien
tatttacagcaaggttcacatcaag

SEQ ID NO: 5023564 - DNA, 25 bp, Homo sapien
taatgacacttctggatttgccttg

SEQ ID NO: 5023565 - DNA, 25 bp, Homo sapien
ggcaaataagattcgctggctgtat

SEQ ID NO: 5023566 - DNA, 25 bp, Homo sapien
gagctccagctgatgacctaccaga

SEQ ID NO: 5023567 - DNA, 25 bp, Homo sapien
tcgatcccgtcctgtccgaataact

SEQ ID NO: 5023568 - DNA, 25 bp, Homo sapien
tgccggcgggaatctcgagctccag

SEQ ID NO: 5023569 - DNA, 25 bp, Homo sapien
ataactcgagtctgccggcgggaat

SEQ ID NO: 5023570 - DNA, 25 bp, Homo sapien
ccaggagttctggaacagccctggc

SEQ ID NO: 5023571 - DNA, 25 bp, Homo sapien
caaaatcccaatggcttttcttctt

SEQ ID NO: 5023572 - DNA, 25 bp, Homo sapien
ccctggcaacacattgagacctgtc

SEQ ID NO: 5023573 - DNA, 25 bp, Homo sapien
ttggcaagcaaaggcgggaggatcg

SEQ ID NO: 5023574 - DNA, 25 bp, Homo sapien
tgatcccgttatacagttctcaagg

SEQ ID NO: 5023575 - DNA, 25 bp, Homo sapien
agtccccgtacgtcaatcgccatta

SEQ ID NO: 5023576 - DNA, 25 bp, Homo sapien
cttgcaaacttaaagcccatgggcc

SEQ ID NO: 5023577 - DNA, 25 bp, Homo sapien
gacaaccgtcaaaatatctctccag

SEQ ID NO: 5023578 - DNA, 25 bp, Homo sapien
tctgggactcaacagatccactcac

SEQ ID NO: 5023579 - DNA, 25 bp, Homo sapien
tgatcagccttcaaacacgtggtga

SEQ ID NO: 5023580 - DNA, 25 bp, Homo sapien
aatgagtaaaagcacctgacttgaa

SEQ ID NO: 5023581 - DNA, 25 bp, Homo sapien
taccaatttgtggtctggagggaaa

SEQ ID NO: 5023582 - DNA, 25 bp, Homo sapien
gaagatgatcattcagactgagagc

SEQ ID NO: 5023583 - DNA, 25 bp, Homo sapien
tataaattgacaagcaaaacctggg

SEQ ID NO: 5023584 - DNA, 25 bp, Homo sapien
taggatcaggaacaaacgccagtat

SEQ ID NO: 5023585 - DNA, 25 bp, Homo sapien
tgctttggaggctagtctgtcccaa

SEQ ID NO: 5023586 - DNA, 25 bp, Homo sapien
gcctgcctagagtctcagaacctga

SEQ ID NO: 5023587 - DNA, 25 bp, Homo sapien
gagaaaccatggagagtcgcttgtc

SEQ ID NO: 5023588 - DNA, 25 bp, Homo sapien
ccccgagttgctgttcaactttgac

SEQ ID NO: 5023589 - DNA, 25 bp, Homo sapien
agagtcgcttgtcctaccaggcctt

SEQ ID NO: 5023590 - DNA, 25 bp, Homo sapien
ttattatcaggtttacccaattcca

SEQ ID NO: 5023591 - DNA, 25 bp, Homo sapien
cccaattccaatctgtctggctgta

SEQ ID NO: 5023592 - DNA, 25 bp, Homo sapien
caatctgtctggctgtactgaaaaa

SEQ ID NO: 5023593 - DNA, 25 bp, Homo sapien
tctgtctggctgtactgaaaaacca

SEQ ID NO: 5023594 - DNA, 25 bp, Homo sapien
tgtttaatagtagcctgttccaata

SEQ ID NO: 5023595 - DNA, 25 bp, Homo sapien
agaagaaaggcagcatgatttggtc

SEQ ID NO: 5023596 - DNA, 25 bp, Homo sapien
aagaagaaaggcagcatgatttggt

SEQ ID NO: 5023597 - DNA, 25 bp, Homo sapien
tagtagcctgttccaatacattcaa

SEQ ID NO: 5023598 - DNA, 25 bp, Homo sapien
atttgttcagcttctcagaaacttc

SEQ ID NO: 5023599 - DNA, 25 bp, Homo sapien
attatatttgttcagcttctcagaa

SEQ ID NO: 5023600 - DNA, 25 bp, Homo sapien
aaattatatttgttcagcttctcag

SEQ ID NO: 5023601 - DNA, 25 bp, Homo sapien
tatatttgttcagcttctcagaaac

SEQ ID NO: 5023602 - DNA, 25 bp, Homo sapien
gtaacaatgataatcgtattaatcc

SEQ ID NO: 5023603 - DNA, 25 bp, Homo sapien
tcagtaacaatgataatcgtattaa

SEQ ID NO: 5023604 - DNA, 25 bp, Homo sapien
acaatgataatcgtattaatcccat

SEQ ID NO: 5023605 - DNA, 25 bp, Homo sapien
cctcagtaacaatgataatcgtatt

SEQ ID NO: 5023606 - DNA, 25 bp, Homo sapien
gctcaacggatctacttgtcttggc

SEQ ID NO: 5023607 - DNA, 25 bp, Homo sapien
tgggctcaacggatctacttgtctt

SEQ ID NO: 5023608 - DNA, 25 bp, Homo sapien
tcaacggatctacttgtcttggcct

SEQ ID NO: 5023609 - DNA, 25 bp, Homo sapien
atcccccaggctcaatctatcttcc

SEQ ID NO: 5023610 - DNA, 25 bp, Homo sapien
gaaagcaggtattgccaaaacaaaa

SEQ ID NO: 5023611 - DNA, 25 bp, Homo sapien
agaaagcaggtattgccaaaacaaa

SEQ ID NO: 5023612 - DNA, 25 bp, Homo sapien
aagtaaacaggcagtcagtcctcaa

SEQ ID NO: 5023613 - DNA, 25 bp, Homo sapien
gatggtagagacaagcacctttcta

SEQ ID NO: 5023614 - DNA, 25 bp, Homo sapien
cctgccagccactatagctagggaa

SEQ ID NO: 5023615 - DNA, 25 bp, Homo sapien
taaacgctgcttctcatgccaactg

SEQ ID NO: 5023616 - DNA, 25 bp, Homo sapien
tgatcttcggtactccaactttggg

SEQ ID NO: 5023617 - DNA, 25 bp, Homo sapien
caatggcgaaccacctaaggcaagt

SEQ ID NO: 5023618 - DNA, 25 bp, Homo sapien
ttacgacaaacattaggagctacct

SEQ ID NO: 5023619 - DNA, 25 bp, Homo sapien
aaactgagtcttcggcttgtgctgc

SEQ ID NO: 5023620 - DNA, 25 bp, Homo sapien
tgccaaagacctggtattactggtg

SEQ ID NO: 5023621 - DNA, 25 bp, Homo sapien
gctgccaaagacctggtattactgg

SEQ ID NO: 5023622 - DNA, 25 bp, Homo sapien
caaagacctggtattactggtgtca

SEQ ID NO: 5023623 - DNA, 25 bp, Homo sapien
caaatgatcccgtctgccttgggct

SEQ ID NO: 5023624 - DNA, 25 bp, Homo sapien
tcagctccgttcgaaacaggaaaag

SEQ ID NO: 5023625 - DNA, 25 bp, Homo sapien
tgctagcagataagaccgaaagact

SEQ ID NO: 5023626 - DNA, 25 bp, Homo sapien
gaaatggtcactttacgtcctaagc

SEQ ID NO: 5023627 - DNA, 25 bp, Homo sapien
caaaaaagtgtagcatccgaccaaa

SEQ ID NO: 5023628 - DNA, 25 bp, Homo sapien
tgccttctgcacacatagctactag

SEQ ID NO: 5023629 - DNA, 25 bp, Homo sapien
tacagatattagacagactgacaga

SEQ ID NO: 5023630 - DNA, 25 bp, Homo sapien
gactgacagaataactatatcccta

SEQ ID NO: 5023631 - DNA, 25 bp, Homo sapien
tagctactagtctcaggcctacact

SEQ ID NO: 5023632 - DNA, 25 bp, Homo sapien
ctcactgccaaacaaactcttaagg

SEQ ID NO: 5023633 - DNA, 25 bp, Homo sapien
ggacattcatgtcttagctctaagc

SEQ ID NO: 5023634 - DNA, 25 bp, Homo sapien
gggagcttaacaaacggacattcat

SEQ ID NO: 5023635 - DNA, 25 bp, Homo sapien
tacctagtacatatttcccaacagc

SEQ ID NO: 5023636 - DNA, 25 bp, Homo sapien
ccaatcacctatgaggaagggaagt

SEQ ID NO: 5023637 - DNA, 25 bp, Homo sapien
aataacttatattctggctaaataa

SEQ ID NO: 5023638 - DNA, 25 bp, Homo sapien
taataccaatcacctatgaggaagg

SEQ ID NO: 5023639 - DNA, 25 bp, Homo sapien
taccaatcacctatgaggaagggaa

SEQ ID NO: 5023640 - DNA, 25 bp, Homo sapien
tggaaatcacttgctagttacagag

SEQ ID NO: 5023641 - DNA, 25 bp, Homo sapien
aaagcataacaagtttattggtatc

SEQ ID NO: 5023642 - DNA, 25 bp, Homo sapien
tcaaagcataacaagtttattggta

SEQ ID NO: 5023643 - DNA, 25 bp, Homo sapien
aagcataacaagtttattggtatca

SEQ ID NO: 5023644 - DNA, 25 bp, Homo sapien
caaagcataacaagtttattggtat

SEQ ID NO: 5023645 - DNA, 25 bp, Homo sapien
aatgtttgtaaaacgcggtcgccat

SEQ ID NO: 5023646 - DNA, 25 bp, Homo sapien
gggtatatgcgaacactaaactcat

SEQ ID NO: 5023647 - DNA, 25 bp, Homo sapien
tacaatacagcagtgtagccctcct

SEQ ID NO: 5023648 - DNA, 25 bp, Homo sapien
gccagatgctctttgtaactgccac

SEQ ID NO: 5023649 - DNA, 25 bp, Homo sapien
cagatgtggttggtcctgttatctc

SEQ ID NO: 5023650 - DNA, 25 bp, Homo sapien
attctacagatgtggttggtcctgt

SEQ ID NO: 5023651 - DNA, 25 bp, Homo sapien
cctgattgtcgacagtcagtgtaaa

SEQ ID NO: 5023652 - DNA, 25 bp, Homo sapien
tgaccactccaccaaccctgattgt

SEQ ID NO: 5023653 - DNA, 25 bp, Homo sapien
tagagatgatgcattgagttcaccc

SEQ ID NO: 5023654 - DNA, 25 bp, Homo sapien
tgggttcatcctagaagccagttag

SEQ ID NO: 5023655 - DNA, 25 bp, Homo sapien
tataaaccaatcagctctcgaccag

SEQ ID NO: 5023656 - DNA, 25 bp, Homo sapien
tatgactttcgaatcaagagggagg

SEQ ID NO: 5023657 - DNA, 25 bp, Homo sapien
aagacgaggctagtgcattcaacaa

SEQ ID NO: 5023658 - DNA, 25 bp, Homo sapien
tgaagcctgagggtaacgcaaaaca

SEQ ID NO: 5023659 - DNA, 25 bp, Homo sapien
tgggaatacacccagaatcggcgtg

SEQ ID NO: 5023660 - DNA, 25 bp, Homo sapien
gctggaaagccgacagacaagtggc

SEQ ID NO: 5023661 - DNA, 25 bp, Homo sapien
cacatccaggcattttgtacaaagt

SEQ ID NO: 5023662 - DNA, 25 bp, Homo sapien
tttgaagtgtcatctctgatactgc

SEQ ID NO: 5023663 - DNA, 25 bp, Homo sapien
caattaatcacttactgctttgaag

SEQ ID NO: 5023664 - DNA, 25 bp, Homo sapien
tatatagtaagcttacccttaagga

SEQ ID NO: 5023665 - DNA, 25 bp, Homo sapien
agggagacctccacaaaacaataat

SEQ ID NO: 5023666 - DNA, 25 bp, Homo sapien
agaaacttacattcctcggtctcca

SEQ ID NO: 5023667 - DNA, 25 bp, Homo sapien
tgattaacaaaaagttcctggtcag

SEQ ID NO: 5023668 - DNA, 25 bp, Homo sapien
attataaaactcacagtccattagg

SEQ ID NO: 5023669 - DNA, 25 bp, Homo sapien
gaagagtaacgtgctgatgacgtca

SEQ ID NO: 5023670 - DNA, 25 bp, Homo sapien
gctgatgacgtcataacaagatttg

SEQ ID NO: 5023671 - DNA, 25 bp, Homo sapien
gacttgccttgtgattctgacctag

SEQ ID NO: 5023672 - DNA, 25 bp, Homo sapien
taaagaactaatcgctagctcacat

SEQ ID NO: 5023673 - DNA, 25 bp, Homo sapien
gaaaatacaccctgagtctgagcag

SEQ ID NO: 5023674 - DNA, 25 bp, Homo sapien
tactagtgacgtcaaagaaacacat

SEQ ID NO: 5023675 - DNA, 25 bp, Homo sapien
ttggaaaaatggtctccgaacatcc

SEQ ID NO: 5023676 - DNA, 25 bp, Homo sapien
gttatgcttcatataatccctggca

SEQ ID NO: 5023677 - DNA, 25 bp, Homo sapien
caagcagctttcaactattataacc

SEQ ID NO: 5023678 - DNA, 25 bp, Homo sapien
ggctcctactgagtgaagatatgcc

SEQ ID NO: 5023679 - DNA, 25 bp, Homo sapien
gatatgcctgagtctttaaaacctc

SEQ ID NO: 5023680 - DNA, 25 bp, Homo sapien
cgggtgaaccacgaaatggatggac

SEQ ID NO: 5023681 - DNA, 25 bp, Homo sapien
gaaccacgaaatggatggacgtcat

SEQ ID NO: 5023682 - DNA, 25 bp, Homo sapien
ctcggtgcccggcagcgggtgaacc

SEQ ID NO: 5023683 - DNA, 25 bp, Homo sapien
gcagcgggtgaaccacgaaatggat

SEQ ID NO: 5023684 - DNA, 25 bp, Homo sapien
ccttctcgtcctccactcgagggcg

SEQ ID NO: 5023685 - DNA, 25 bp, Homo sapien
ttccttctcgtcctccactcgaggg

SEQ ID NO: 5023686 - DNA, 25 bp, Homo sapien
tttccttctcgtcctccactcgagg

SEQ ID NO: 5023687 - DNA, 25 bp, Homo sapien
gctttccttctcgtcctccactcga

SEQ ID NO: 5023688 - DNA, 25 bp, Homo sapien
tccagagtgagtgttccggagagca

SEQ ID NO: 5023689 - DNA, 25 bp, Homo sapien
acgacgctgtaaggcgcgtgccgat

SEQ ID NO: 5023690 - DNA, 25 bp, Homo sapien
acgttgtcgggccacgacgctgtaa

SEQ ID NO: 5023691 - DNA, 25 bp, Homo sapien
cgtgccgattggtccgttcggctcc

SEQ ID NO: 5023692 - DNA, 25 bp, Homo sapien
tctatgacgttattctcttctccgc

SEQ ID NO: 5023693 - DNA, 25 bp, Homo sapien
cgttattctcttctccgcagttagg

SEQ ID NO: 5023694 - DNA, 25 bp, Homo sapien
tctccgcagttaggagagatggctc

SEQ ID NO: 5023695 - DNA, 25 bp, Homo sapien
actgctactcccctctatgacgtta

SEQ ID NO: 5023696 - DNA, 25 bp, Homo sapien
tcctaggggcatcttttagctccat

SEQ ID NO: 5023697 - DNA, 25 bp, Homo sapien
agggttcctgtcctaggggcatctt

SEQ ID NO: 5023698 - DNA, 25 bp, Homo sapien
gttcctgtcctaggggcatctttta

SEQ ID NO: 5023699 - DNA, 25 bp, Homo sapien
ctgtcctaggggcatcttttagctc

SEQ ID NO: 5023700 - DNA, 25 bp, Homo sapien
agcagctctagagccggctttggcc

SEQ ID NO: 5023701 - DNA, 25 bp, Homo sapien
ctctagagccggctttggcctgccc

SEQ ID NO: 5023702 - DNA, 25 bp, Homo sapien
agctctagagccggctttggcctgc

SEQ ID NO: 5023703 - DNA, 25 bp, Homo sapien
ctagagccggctttggcctgcccca

SEQ ID NO: 5023704 - DNA, 25 bp, Homo sapien
cctttcttgtggcttggttcataag

SEQ ID NO: 5023705 - DNA, 25 bp, Homo sapien
tatacttttgccatagggtgacatg

SEQ ID NO: 5023706 - DNA, 25 bp, Homo sapien
tctgacattgctagagaaaagtgaa

SEQ ID NO: 5023707 - DNA, 25 bp, Homo sapien
tatgctgctgacaataattcccctt

SEQ ID NO: 5023708 - DNA, 25 bp, Homo sapien
aactgaattagggagagcctcagag

SEQ ID NO: 5023709 - DNA, 25 bp, Homo sapien
gcaggcaggcgagcctggaactgaa

SEQ ID NO: 5023710 - DNA, 25 bp, Homo sapien
agtgtttcctgaacaggactgggct

SEQ ID NO: 5023711 - DNA, 25 bp, Homo sapien
agcctggaactgaattagggagagc

SEQ ID NO: 5023712 - DNA, 25 bp, Homo sapien
gacaaccatgcaggccaagagctct

SEQ ID NO: 5023713 - DNA, 25 bp, Homo sapien
ctccttttcctcacgtctatctttt

SEQ ID NO: 5023714 - DNA, 25 bp, Homo sapien
tccttttcctcacgtctatcttttc

SEQ ID NO: 5023715 - DNA, 25 bp, Homo sapien
tgacaaccatgcaggccaagagctc

SEQ ID NO: 5023716 - DNA, 25 bp, Homo sapien
tattttattgctcgaaatgtccagc

SEQ ID NO: 5023717 - DNA, 25 bp, Homo sapien
tatgtataccaatatgggctcacag

SEQ ID NO: 5023718 - DNA, 25 bp, Homo sapien
tgtgatgcttcgttctttttggcac

SEQ ID NO: 5023719 - DNA, 25 bp, Homo sapien
tgctccgggatcatcttgtatattc

SEQ ID NO: 5023720 - DNA, 25 bp, Homo sapien
gccatggcaatgattaatttctgtt

SEQ ID NO: 5023721 - DNA, 25 bp, Homo sapien
agccaactgttcgaatttcaatgcc

SEQ ID NO: 5023722 - DNA, 25 bp, Homo sapien
gccaactgttcgaatttcaatgcca

SEQ ID NO: 5023723 - DNA, 25 bp, Homo sapien
atgccatggcaatgattaatttctg

SEQ ID NO: 5023724 - DNA, 25 bp, Homo sapien
tcgacgttgctgcttggtttggctt

SEQ ID NO: 5023725 - DNA, 25 bp, Homo sapien
gattccctaaggtcgacgttgctgc

SEQ ID NO: 5023726 - DNA, 25 bp, Homo sapien
tgctgcttggtttggcttgtccatt

SEQ ID NO: 5023727 - DNA, 25 bp, Homo sapien
cattggtttgatcttagattcccta

SEQ ID NO: 5023728 - DNA, 25 bp, Homo sapien
tgtgattagagtcagcagcaagaaa

SEQ ID NO: 5023729 - DNA, 25 bp, Homo sapien
tgattagagtcagcagcaagaaaga

SEQ ID NO: 5023730 - DNA, 25 bp, Homo sapien
gatgtgattagagtcagcagcaaga

SEQ ID NO: 5023731 - DNA, 25 bp, Homo sapien
agtgatgtgattagagtcagcagca

SEQ ID NO: 5023732 - DNA, 25 bp, Homo sapien
caatagaattagtaaggacttcaac

SEQ ID NO: 5023733 - DNA, 25 bp, Homo sapien
agttctcctaaaactagcttgagtg

SEQ ID NO: 5023734 - DNA, 25 bp, Homo sapien
accattgcaatagaattagtaagga

SEQ ID NO: 5023735 - DNA, 25 bp, Homo sapien
cccgagttctcctaaaactagcttg

SEQ ID NO: 5023736 - DNA, 25 bp, Homo sapien
tgtgggaggatggactggtaaggct

SEQ ID NO: 5023737 - DNA, 25 bp, Homo sapien
ggatggactggtaaggctttctctt

SEQ ID NO: 5023738 - DNA, 25 bp, Homo sapien
tgttatcttctgtcccagaccggat

SEQ ID NO: 5023739 - DNA, 25 bp, Homo sapien
ccagaccggatgtctgtcacagtca

SEQ ID NO: 5023740 - DNA, 25 bp, Homo sapien
tgtaatgccaggaggtgtagcacga

SEQ ID NO: 5023741 - DNA, 25 bp, Homo sapien
taatgccaggaggtgtagcacgaga

SEQ ID NO: 5023742 - DNA, 25 bp, Homo sapien
ctgaagcgaggaaatcctagaggga

SEQ ID NO: 5023743 - DNA, 25 bp, Homo sapien
gggacacactgaagcgaggaaatcc

SEQ ID NO: 5023744 - DNA, 25 bp, Homo sapien
caactttaggatgtttgctgccaaa

SEQ ID NO: 5023745 - DNA, 25 bp, Homo sapien
ttccaactttaggatgtttgctgcc

SEQ ID NO: 5023746 - DNA, 25 bp, Homo sapien
ccaactttaggatgtttgctgccaa

SEQ ID NO: 5023747 - DNA, 25 bp, Homo sapien
tcattccaactttaggatgtttgct

SEQ ID NO: 5023748 - DNA, 25 bp, Homo sapien
cattgtgtgtgattcagcagttagc

SEQ ID NO: 5023749 - DNA, 25 bp, Homo sapien
attgtgtgtgattcagcagttagct

SEQ ID NO: 5023750 - DNA, 25 bp, Homo sapien
tcgctgagatctctagaggagactg

SEQ ID NO: 5023751 - DNA, 25 bp, Homo sapien
gccccactgcgggatctcaaggcag

SEQ ID NO: 5023752 - DNA, 25 bp, Homo sapien
ctggcaactgataagctaggcccca

SEQ ID NO: 5023753 - DNA, 25 bp, Homo sapien
gcaactgataagctaggccccactg

SEQ ID NO: 5023754 - DNA, 25 bp, Homo sapien
ctctccagcttttagcaccaggagc

SEQ ID NO: 5023755 - DNA, 25 bp, Homo sapien
ggccatccagtcccgctattcatag

SEQ ID NO: 5023756 - DNA, 25 bp, Homo sapien
tctctccagcttttagcaccaggag

SEQ ID NO: 5023757 - DNA, 25 bp, Homo sapien
ccatccagtcccgctattcatagag

SEQ ID NO: 5023758 - DNA, 25 bp, Homo sapien
gtgcagctgtaagagaatatacgaa

SEQ ID NO: 5023759 - DNA, 25 bp, Homo sapien
gttgggtgcagctgtaagagaatat

SEQ ID NO: 5023760 - DNA, 25 bp, Homo sapien
ctgttgggtgcagctgtaagagaat

SEQ ID NO: 5023761 - DNA, 25 bp, Homo sapien
cagctgtaagagaatatacgaacac

SEQ ID NO: 5023762 - DNA, 25 bp, Homo sapien
tagcaggaagatatttgctaaagac

SEQ ID NO: 5023763 - DNA, 25 bp, Homo sapien
ggaagatatttgctaaagaccttgt

SEQ ID NO: 5023764 - DNA, 25 bp, Homo sapien
agatatttgctaaagaccttgtggg

SEQ ID NO: 5023765 - DNA, 25 bp, Homo sapien
tatttagcaggaagatatttgctaa

SEQ ID NO: 5023766 - DNA, 25 bp, Homo sapien
cagggacagtgttcatgtaggggtc

SEQ ID NO: 5023767 - DNA, 25 bp, Homo sapien
ggacagtgttcatgtaggggtcttc

SEQ ID NO: 5023768 - DNA, 25 bp, Homo sapien
tccagggacagtgttcatgtagggg

SEQ ID NO: 5023769 - DNA, 25 bp, Homo sapien
cagtgttcatgtaggggtcttcctg

SEQ ID NO: 5023770 - DNA, 25 bp, Homo sapien
gcagcacttaatggtggagggtggg

SEQ ID NO: 5023771 - DNA, 25 bp, Homo sapien
tggacagaccaaattccagatgtcc

SEQ ID NO: 5023772 - DNA, 25 bp, Homo sapien
tgatggacagaccaaattccagatg

SEQ ID NO: 5023773 - DNA, 25 bp, Homo sapien
gacagaccaaattccagatgtccat

SEQ ID NO: 5023774 - DNA, 25 bp, Homo sapien
ggatgatggacagaccaaattccag

SEQ ID NO: 5023775 - DNA, 25 bp, Homo sapien
cttgtatctggaattaggtctatca

SEQ ID NO: 5023776 - DNA, 25 bp, Homo sapien
ttgtatctggaattaggtctatcat

SEQ ID NO: 5023777 - DNA, 25 bp, Homo sapien
cacttctccttgcagcccctgcagc

SEQ ID NO: 5023778 - DNA, 25 bp, Homo sapien
ccttgcacttctccttgcagcccct

SEQ ID NO: 5023779 - DNA, 25 bp, Homo sapien
cctgcagcccctgcaacccctgcag

SEQ ID NO: 5023780 - DNA, 25 bp, Homo sapien
gcagcccctgcaacccctgcagccc

SEQ ID NO: 5023781 - DNA, 25 bp, Homo sapien
cctccggggaggtttgtgttgctga

SEQ ID NO: 5023782 - DNA, 25 bp, Homo sapien
gaagccgtcctcatatacctgccct

SEQ ID NO: 5023783 - DNA, 25 bp, Homo sapien
cgtcctcatatacctgcccttctgg

SEQ ID NO: 5023784 - DNA, 25 bp, Homo sapien
ggtttgtgttgctgaagtagaaagc

SEQ ID NO: 5023785 - DNA, 25 bp, Homo sapien
gaagaatcagggatggtgcatctgc

SEQ ID NO: 5023786 - DNA, 25 bp, Homo sapien
aagaaacgcctttcctgcccgtcag

SEQ ID NO: 5023787 - DNA, 25 bp, Homo sapien
tggttcttgaagaatcagggatggt

SEQ ID NO: 5023788 - DNA, 25 bp, Homo sapien
agggattcaagaaacgcctttcctg

SEQ ID NO: 5023789 - DNA, 25 bp, Homo sapien
ccctgtttccatatggtcacaccct

SEQ ID NO: 5023790 - DNA, 25 bp, Homo sapien
tttccatatggtcacaccctcttct

SEQ ID NO: 5023791 - DNA, 25 bp, Homo sapien
ctttcagactctgcaggttctgagg

SEQ ID NO: 5023792 - DNA, 25 bp, Homo sapien
agggctctggtgatttctagatctt

SEQ ID NO: 5023793 - DNA, 25 bp, Homo sapien
aaaggaagctaacgcggaagccact

SEQ ID NO: 5023794 - DNA, 25 bp, Homo sapien
tcaaaggaagctaacgcggaagcca

SEQ ID NO: 5023795 - DNA, 25 bp, Homo sapien
gaagctaacgcggaagccactcttg

SEQ ID NO: 5023796 - DNA, 25 bp, Homo sapien
gctaacgcggaagccactcttgcct

SEQ ID NO: 5023797 - DNA, 25 bp, Homo sapien
ggcatgccatgagggctgaatgtcc

SEQ ID NO: 5023798 - DNA, 25 bp, Homo sapien
catgggcatgccatgagggctgaat

SEQ ID NO: 5023799 - DNA, 25 bp, Homo sapien
cttgctgtaccaacatgggcatgcc

SEQ ID NO: 5023800 - DNA, 25 bp, Homo sapien
taccaacatgggcatgccatgaggg

SEQ ID NO: 5023801 - DNA, 25 bp, Homo sapien
agatgggttgccgacaagccctcca

SEQ ID NO: 5023802 - DNA, 25 bp, Homo sapien
ccagatgggttgccgacaagccctc

SEQ ID NO: 5023803 - DNA, 25 bp, Homo sapien
gatgggttgccgacaagccctccat

SEQ ID NO: 5023804 - DNA, 25 bp, Homo sapien
tccagatgggttgccgacaagccct

SEQ ID NO: 5023805 - DNA, 25 bp, Homo sapien
cagttcactgccctgcggttttgca

SEQ ID NO: 5023806 - DNA, 25 bp, Homo sapien
tgttgccgcaaatctaaccctagga

SEQ ID NO: 5023807 - DNA, 25 bp, Homo sapien
tattaaagcgggaaacttctgcagg

SEQ ID NO: 5023808 - DNA, 25 bp, Homo sapien
gctttccggagctgttcagactgca

SEQ ID NO: 5023809 - DNA, 25 bp, Homo sapien
tcccaaaggagctatagccagtata

SEQ ID NO: 5023810 - DNA, 25 bp, Homo sapien
gtctgcagtgcatgctcagctttag

SEQ ID NO: 5023811 - DNA, 25 bp, Homo sapien
gagctatagccagtatataaacacc

SEQ ID NO: 5023812 - DNA, 25 bp, Homo sapien
tgctcagctttagacctcgcacctt

SEQ ID NO: 5023813 - DNA, 25 bp, Homo sapien
tggtcaccgtgaagcatgcagattc

SEQ ID NO: 5023814 - DNA, 25 bp, Homo sapien
cagcaaccccactcgttcaccaggg

SEQ ID NO: 5023815 - DNA, 25 bp, Homo sapien
caggtggtcaccgtgaagcatgcag

SEQ ID NO: 5023816 - DNA, 25 bp, Homo sapien
tgctccaaagctgacaccccaggtg

SEQ ID NO: 5023817 - DNA, 25 bp, Homo sapien
agaagaatggcgtgctgtcccctgt

SEQ ID NO: 5023818 - DNA, 25 bp, Homo sapien
gaaagaagaatggcgtgctgtcccc

SEQ ID NO: 5023819 - DNA, 25 bp, Homo sapien
ctgactggtaagtggtcggcaatgg

SEQ ID NO: 5023820 - DNA, 25 bp, Homo sapien
tgtggcccgggttctctgactggta

SEQ ID NO: 5023821 - DNA, 25 bp, Homo sapien
taattttgaacccccaaatcaggca

SEQ ID NO: 5023822 - DNA, 25 bp, Homo sapien
gctagaggagcagaacataacttgc

SEQ ID NO: 5023823 - DNA, 25 bp, Homo sapien
ttgcactccttgttggaaactagaa

SEQ ID NO: 5023824 - DNA, 25 bp, Homo sapien
tgcactccttgttggaaactagaac

SEQ ID NO: 5023825 - DNA, 25 bp, Homo sapien
cctgctagaggagcagaacataact

SEQ ID NO: 5023826 - DNA, 25 bp, Homo sapien
caagtggtggaaccggctatgtcag

SEQ ID NO: 5023827 - DNA, 25 bp, Homo sapien
tatgtcagcacacatcaagcatgcg

SEQ ID NO: 5023828 - DNA, 25 bp, Homo sapien
caatttcacccaaaggacaagtggt

SEQ ID NO: 5023829 - DNA, 25 bp, Homo sapien
tgacatctggaagggagcatcagga

SEQ ID NO: 5023830 - DNA, 25 bp, Homo sapien
atccccattcatgggctgtctctcc

SEQ ID NO: 5023831 - DNA, 25 bp, Homo sapien
gcctgcatcttgcgggtatccccat

SEQ ID NO: 5023832 - DNA, 25 bp, Homo sapien
atcttgcgggtatccccattcatgg

SEQ ID NO: 5023833 - DNA, 25 bp, Homo sapien
aatctggccagtctgtaccagcaga

SEQ ID NO: 5023834 - DNA, 25 bp, Homo sapien
ggttgagcatcctaggatcagcctg

SEQ ID NO: 5023835 - DNA, 25 bp, Homo sapien
ggctgggttgagcatcctaggatca

SEQ ID NO: 5023836 - DNA, 25 bp, Homo sapien
gctgggttgagcatcctaggatcag

SEQ ID NO: 5023837 - DNA, 25 bp, Homo sapien
tgggttgagcatcctaggatcagcc

SEQ ID NO: 5023838 - DNA, 25 bp, Homo sapien
ctgaagttgttcttgcctgttaacc

SEQ ID NO: 5023839 - DNA, 25 bp, Homo sapien
cagagcagaggagtcaaggccaggg

SEQ ID NO: 5023840 - DNA, 25 bp, Homo sapien
caaggccagggccaagttcttgctc

SEQ ID NO: 5023841 - DNA, 25 bp, Homo sapien
ctggccactgcagagaccacctagg

SEQ ID NO: 5023842 - DNA, 25 bp, Homo sapien
agagaccacctagggtgcctgtgca

SEQ ID NO: 5023843 - DNA, 25 bp, Homo sapien
cgacgtggcattcgctctgtgccag

SEQ ID NO: 5023844 - DNA, 25 bp, Homo sapien
ggcatcgtcattctcgtaaacactt

SEQ ID NO: 5023845 - DNA, 25 bp, Homo sapien
acgtagacaggatccttgtggctgt

SEQ ID NO: 5023846 - DNA, 25 bp, Homo sapien
gacaggatccttgtggctgttgaaa

SEQ ID NO: 5023847 - DNA, 25 bp, Homo sapien
agcatagaagtgacaccagcatgat

SEQ ID NO: 5023848 - DNA, 25 bp, Homo sapien
gcatagaagtgacaccagcatgatg

SEQ ID NO: 5023849 - DNA, 25 bp, Homo sapien
ttacatttgtagccagcatagaagt

SEQ ID NO: 5023850 - DNA, 25 bp, Homo sapien
catttgtagccagcatagaagtgac

SEQ ID NO: 5023851 - DNA, 25 bp, Homo sapien
gctctgcttaagttggtcagcaaaa

SEQ ID NO: 5023852 - DNA, 25 bp, Homo sapien
cccttaaggtgttgcccagaagatc

SEQ ID NO: 5023853 - DNA, 25 bp, Homo sapien
gaggcagtgctcttcgaaaatcaac

SEQ ID NO: 5023854 - DNA, 25 bp, Homo sapien
ccaggactggattaaggcatcagaa

SEQ ID NO: 5023855 - DNA, 25 bp, Homo sapien
atgtccagtgcccttgatggaagtc

SEQ ID NO: 5023856 - DNA, 25 bp, Homo sapien
cccttgatggaagtctccatttctg

SEQ ID NO: 5023857 - DNA, 25 bp, Homo sapien
ccagggctctgctgatgtccagtgc

SEQ ID NO: 5023858 - DNA, 25 bp, Homo sapien
tgtctctgccttattctgaaagtct

SEQ ID NO: 5023859 - DNA, 25 bp, Homo sapien
cacgaagggacttagtgagcctagt

SEQ ID NO: 5023860 - DNA, 25 bp, Homo sapien
tagcagtgagctagacccacagggt

SEQ ID NO: 5023861 - DNA, 25 bp, Homo sapien
taagcctgtgctacgtgtcagggac

SEQ ID NO: 5023862 - DNA, 25 bp, Homo sapien
gaagcattagactcacacgaaggga

SEQ ID NO: 5023863 - DNA, 25 bp, Homo sapien
caaagtgagtgaggttagcagcatc

SEQ ID NO: 5023864 - DNA, 25 bp, Homo sapien
cagcatcaggagtgcatatggacac

SEQ ID NO: 5023865 - DNA, 25 bp, Homo sapien
tgaaagagctaacaagggccaaagg

SEQ ID NO: 5023866 - DNA, 25 bp, Homo sapien
ccaaaggtgggacaaatgagtcaca

SEQ ID NO: 5023867 - DNA, 25 bp, Homo sapien
aacgggtggcatagtttcatgggcc

SEQ ID NO: 5023868 - DNA, 25 bp, Homo sapien
tcagataccaactaggactgcaaag

SEQ ID NO: 5023869 - DNA, 25 bp, Homo sapien
ttcatgggccacatcattacaaggg

SEQ ID NO: 5023870 - DNA, 25 bp, Homo sapien
aaagaatacggccaacgggtggcat

SEQ ID NO: 5023871 - DNA, 25 bp, Homo sapien
tgccaagtgagtacacggtccctta

SEQ ID NO: 5023872 - DNA, 25 bp, Homo sapien
tgagaaacctgtcctacaactgctg

SEQ ID NO: 5023873 - DNA, 25 bp, Homo sapien
ttccaagaaaagtagcaacaggtgt

SEQ ID NO: 5023874 - DNA, 25 bp, Homo sapien
tcaacaatgaggcagactctaggtc

SEQ ID NO: 5023875 - DNA, 25 bp, Homo sapien
tctagaggtaagcaatttactcgct

SEQ ID NO: 5023876 - DNA, 25 bp, Homo sapien
taaatttgaatgagacccttagaga

SEQ ID NO: 5023877 - DNA, 25 bp, Homo sapien
ggcctcactttgtatactctctaaa

SEQ ID NO: 5023878 - DNA, 25 bp, Homo sapien
tgccacggcagtttcattgcttgta

SEQ ID NO: 5023879 - DNA, 25 bp, Homo sapien
ttattgtaaacaagatataaagtac

SEQ ID NO: 5023880 - DNA, 25 bp, Homo sapien
ggaattctttattgtaaacaagata

SEQ ID NO: 5023881 - DNA, 25 bp, Homo sapien
gtacaacaaaagaaatattgtgcaa

SEQ ID NO: 5023882 - DNA, 25 bp, Homo sapien
aacaagatataaagtacaacaaaag

SEQ ID NO: 5023883 - DNA, 25 bp, Homo sapien
tacatccacgatgttgactggaaag

SEQ ID NO: 5023884 - DNA, 25 bp, Homo sapien
tggccgaagcccttttagtcaccta

SEQ ID NO: 5023885 - DNA, 25 bp, Homo sapien
tctgtgctacctgtgttgacctcat

SEQ ID NO: 5023886 - DNA, 25 bp, Homo sapien
gggccctcttagcaatatacagtcg

SEQ ID NO: 5023887 - DNA, 25 bp, Homo sapien
ggaggtagagcaatgtcatttagct

SEQ ID NO: 5023888 - DNA, 25 bp, Homo sapien
tggaggtagagcaatgtcatttagc

SEQ ID NO: 5023889 - DNA, 25 bp, Homo sapien
ttggaggtagagcaatgtcatttag

SEQ ID NO: 5023890 - DNA, 25 bp, Homo sapien
ggttggaggtagagcaatgtcattt

SEQ ID NO: 5023891 - DNA, 25 bp, Homo sapien
tcatgaaccgccggtcacacatggg

SEQ ID NO: 5023892 - DNA, 25 bp, Homo sapien
gcgccgggcatgcttggtcaaatgg

SEQ ID NO: 5023893 - DNA, 25 bp, Homo sapien
gtcactcctcatgaaccgccggtca

SEQ ID NO: 5023894 - DNA, 25 bp, Homo sapien
agtttggtagcttcttggctgatag

SEQ ID NO: 5023895 - DNA, 25 bp, Homo sapien
catcagaacgggcaaacctcctttc

SEQ ID NO: 5023896 - DNA, 25 bp, Homo sapien
gcctgtgtctggacagttcatcaga

SEQ ID NO: 5023897 - DNA, 25 bp, Homo sapien
tctggacagttcatcagaacgggca

SEQ ID NO: 5023898 - DNA, 25 bp, Homo sapien
acaacctttccagctacagctgaaa

SEQ ID NO: 5023899 - DNA, 25 bp, Homo sapien
cattattatgcataagattgccgta

SEQ ID NO: 5023900 - DNA, 25 bp, Homo sapien
tatgcataagattgccgtaaattat

SEQ ID NO: 5023901 - DNA, 25 bp, Homo sapien
taagattgccgtaaattatatgttc

SEQ ID NO: 5023902 - DNA, 25 bp, Homo sapien
tattatgcataagattgccgtaaat

SEQ ID NO: 5023903 - DNA, 25 bp, Homo sapien
caaggattatggcactcgtgagcgg

SEQ ID NO: 5023904 - DNA, 25 bp, Homo sapien
ggcaagttattccttatcatcctgg

SEQ ID NO: 5023905 - DNA, 25 bp, Homo sapien
gagcggcctccaatacagccttttg

SEQ ID NO: 5023906 - DNA, 25 bp, Homo sapien
tggaggaccttgcactggtaaatac

SEQ ID NO: 5023907 - DNA, 25 bp, Homo sapien
tgcgtcctcgtgtgggccttcagat

SEQ ID NO: 5023908 - DNA, 25 bp, Homo sapien
tcctgggtggctacagatgtgactc

SEQ ID NO: 5023909 - DNA, 25 bp, Homo sapien
aaagtatgtcttgccacatcctggg

SEQ ID NO: 5023910 - DNA, 25 bp, Homo sapien
ttgatgaatcaatctgaggagtgac

SEQ ID NO: 5023911 - DNA, 25 bp, Homo sapien
gggtaccacaaacatgacagcgcct

SEQ ID NO: 5023912 - DNA, 25 bp, Homo sapien
tctgatagttgaggatgctggctgc

SEQ ID NO: 5023913 - DNA, 25 bp, Homo sapien
tttgaactctgcacaacgggctggg

SEQ ID NO: 5023914 - DNA, 25 bp, Homo sapien
tcctctttgaaaggtgcggcaatgt

SEQ ID NO: 5023915 - DNA, 25 bp, Homo sapien
cagatactggtgtaacaggtctgtt

SEQ ID NO: 5023916 - DNA, 25 bp, Homo sapien
atactctcttttggcctttcagaaa

SEQ ID NO: 5023917 - DNA, 25 bp, Homo sapien
tttgttccaggaatacatactctct

SEQ ID NO: 5023918 - DNA, 25 bp, Homo sapien
gaaaatcaggtgttcccggaagcag

SEQ ID NO: 5023919 - DNA, 25 bp, Homo sapien
caaacctcacagtagtggcaataaa

SEQ ID NO: 5023920 - DNA, 25 bp, Homo sapien
gagaggcacacctactaccattaag

SEQ ID NO: 5023921 - DNA, 25 bp, Homo sapien
cagctacacttgttaggtaggtaac

SEQ ID NO: 5023922 - DNA, 25 bp, Homo sapien
tacctgcaactggagtcgggcaaaa

SEQ ID NO: 5023923 - DNA, 25 bp, Homo sapien
aatataattgcataatcgcgcccgc

SEQ ID NO: 5023924 - DNA, 25 bp, Homo sapien
tgtaagctgcaatggacagcgcgcg

SEQ ID NO: 5023925 - DNA, 25 bp, Homo sapien
aatcctaagaaaacgagccattgct

SEQ ID NO: 5023926 - DNA, 25 bp, Homo sapien
acagcgcgcgtgtgtgtaacagccc

SEQ ID NO: 5023927 - DNA, 25 bp, Homo sapien
ctgctggagagaggcaccgaagttg

SEQ ID NO: 5023928 - DNA, 25 bp, Homo sapien
gctggagagaggcaccgaagttgag

SEQ ID NO: 5023929 - DNA, 25 bp, Homo sapien
tggagagaggcaccgaagttgagca

SEQ ID NO: 5023930 - DNA, 25 bp, Homo sapien
tctgctggagagaggcaccgaagtt

SEQ ID NO: 5023931 - DNA, 25 bp, Homo sapien
ggttggctgcttggccgccggcggc

SEQ ID NO: 5023932 - DNA, 25 bp, Homo sapien
gttggctgcttggccgccggcggca

SEQ ID NO: 5023933 - DNA, 25 bp, Homo sapien
tggctgcttggccgccggcggcaag

SEQ ID NO: 5023934 - DNA, 25 bp, Homo sapien
ttggctgcttggccgccggcggcaa

SEQ ID NO: 5023935 - DNA, 25 bp, Homo sapien
gctgcttggccacagacgggcgcac

SEQ ID NO: 5023936 - DNA, 25 bp, Homo sapien
ggccggccaatcaacggcaaaggtg

SEQ ID NO: 5023937 - DNA, 25 bp, Homo sapien
acgggcgcacggagacactcgacgc

SEQ ID NO: 5023938 - DNA, 25 bp, Homo sapien
tgtcagtggagcgtgtacacaatcc

SEQ ID NO: 5023939 - DNA, 25 bp, Homo sapien
tttatccttctctggcgccgacact

SEQ ID NO: 5023940 - DNA, 25 bp, Homo sapien
cgacactcggctgcggaatcgagtt

SEQ ID NO: 5023941 - DNA, 25 bp, Homo sapien
cggaatcgagtttgagctcggtgta

SEQ ID NO: 5023942 - DNA, 25 bp, Homo sapien
agacccgagtttttatccttctctg

SEQ ID NO: 5023943 - DNA, 25 bp, Homo sapien
cgtcctgcctggaagccgcttgtgg

SEQ ID NO: 5023944 - DNA, 25 bp, Homo sapien
taaattgtagctgtttcaaaggtag

SEQ ID NO: 5023945 - DNA, 25 bp, Homo sapien
aagacctctggaagcgtcctgcctg

SEQ ID NO: 5023946 - DNA, 25 bp, Homo sapien
gagggctctcctagggtctccaggc

SEQ ID NO: 5023947 - DNA, 25 bp, Homo sapien
tggcaccactaccgccccacccacc

SEQ ID NO: 5023948 - DNA, 25 bp, Homo sapien
gccgttccctgaaactggcaccact

SEQ ID NO: 5023949 - DNA, 25 bp, Homo sapien
cggccgttccctgaaactggcacca

SEQ ID NO: 5023950 - DNA, 25 bp, Homo sapien
ttgccggccgttccctgaaactggc

SEQ ID NO: 5023951 - DNA, 25 bp, Homo sapien
gggctaggccttctgatcaggaaag

SEQ ID NO: 5023952 - DNA, 25 bp, Homo sapien
ggccgtttgtgcgtgatcacagcag

SEQ ID NO: 5023953 - DNA, 25 bp, Homo sapien
gccctgctttggcacggatttgccc

SEQ ID NO: 5023954 - DNA, 25 bp, Homo sapien
aaaggaagccgcccgtgtgctgcgc

SEQ ID NO: 5023955 - DNA, 25 bp, Homo sapien
ttgctctcagcgtacattgtccaca

SEQ ID NO: 5023956 - DNA, 25 bp, Homo sapien
aggcttccttcataacaccgggatg

SEQ ID NO: 5023957 - DNA, 25 bp, Homo sapien
ttctttgctctcagcgtacattgtc

SEQ ID NO: 5023958 - DNA, 25 bp, Homo sapien
caccgggatgaattgatggttcttc

SEQ ID NO: 5023959 - DNA, 25 bp, Homo sapien
caggatatgtgcaaacgcctaggtg

SEQ ID NO: 5023960 - DNA, 25 bp, Homo sapien
tagcttgtgtcattgcagggtcaga

SEQ ID NO: 5023961 - DNA, 25 bp, Homo sapien
cataatccccacttgtcgagttggg

SEQ ID NO: 5023962 - DNA, 25 bp, Homo sapien
gacccactggagttacagacaggat

SEQ ID NO: 5023963 - DNA, 25 bp, Homo sapien
tgccaatattacttttgtcaccttc

SEQ ID NO: 5023964 - DNA, 25 bp, Homo sapien
caatttgccaatattacttttgtca

SEQ ID NO: 5023965 - DNA, 25 bp, Homo sapien
cactctgctcttcaattgtgaactg

SEQ ID NO: 5023966 - DNA, 25 bp, Homo sapien
gcactctgctcttcaattgtgaact

SEQ ID NO: 5023967 - DNA, 25 bp, Homo sapien
aggcacatgcctgtccatctgatgg

SEQ ID NO: 5023968 - DNA, 25 bp, Homo sapien
tgtggcctacagtatcagtcctccc

SEQ ID NO: 5023969 - DNA, 25 bp, Homo sapien
gagagaattggcctaaaggagcaac

SEQ ID NO: 5023970 - DNA, 25 bp, Homo sapien
tgaaggatagcactctcctgtcctt

SEQ ID NO: 5023971 - DNA, 25 bp, Homo sapien
tgcaggtctggtaggagtctccaaa

SEQ ID NO: 5023972 - DNA, 25 bp, Homo sapien
agtggggactcctttactgcagaga

SEQ ID NO: 5023973 - DNA, 25 bp, Homo sapien
cagagtttggcatccggtagcaatg

SEQ ID NO: 5023974 - DNA, 25 bp, Homo sapien
gtctccctgcgctgcagttgccctt

SEQ ID NO: 5023975 - DNA, 25 bp, Homo sapien
gagccctgcaggctatcaaaccatc

SEQ ID NO: 5023976 - DNA, 25 bp, Homo sapien
cggttcctgatgcaagcctgggcag

SEQ ID NO: 5023977 - DNA, 25 bp, Homo sapien
ctctgcttgtgggtggaatccggca

SEQ ID NO: 5023978 - DNA, 25 bp, Homo sapien
gtggaatccggcagctcggacaccg

SEQ ID NO: 5023979 - DNA, 25 bp, Homo sapien
gaaaattcagaccacgaacatagca

SEQ ID NO: 5023980 - DNA, 25 bp, Homo sapien
ttttgctttactgtgggtccactgg

SEQ ID NO: 5023981 - DNA, 25 bp, Homo sapien
gacttggcgaggcaatacggcttcc

SEQ ID NO: 5023982 - DNA, 25 bp, Homo sapien
tgctcagattctttgggacctatct

SEQ ID NO: 5023983 - DNA, 25 bp, Homo sapien
gttgtacacagtccacactgggtct

SEQ ID NO: 5023984 - DNA, 25 bp, Homo sapien
gtctccttactccagaaagatcccc

SEQ ID NO: 5023985 - DNA, 25 bp, Homo sapien
tgcatggccttcatctagatctttt

SEQ ID NO: 5023986 - DNA, 25 bp, Homo sapien
gccagttgtacacagtccacactgg

SEQ ID NO: 5023987 - DNA, 25 bp, Homo sapien
tccacagggtaagagctgctcctga

SEQ ID NO: 5023988 - DNA, 25 bp, Homo sapien
tggaaagctgactcatagccgaata

SEQ ID NO: 5023989 - DNA, 25 bp, Homo sapien
tcagtattgtcatgaggctccgtgc

SEQ ID NO: 5023990 - DNA, 25 bp, Homo sapien
gctcctgacgcagggcaaacactgg

SEQ ID NO: 5023991 - DNA, 25 bp, Homo sapien
agggcagaggagctcccatgtgtca

SEQ ID NO: 5023992 - DNA, 25 bp, Homo sapien
ggagggcagaggagctcccatgtgt

SEQ ID NO: 5023993 - DNA, 25 bp, Homo sapien
gaggagggcagaggagctcccatgt

SEQ ID NO: 5023994 - DNA, 25 bp, Homo sapien
gggcagaggagctcccatgtgtcat

SEQ ID NO: 5023995 - DNA, 25 bp, Homo sapien
gctcttggggtgaatgtctccttgc

SEQ ID NO: 5023996 - DNA, 25 bp, Homo sapien
aggctcttggggtgaatgtctcctt

SEQ ID NO: 5023997 - DNA, 25 bp, Homo sapien
tcttggggtgaatgtctccttgcct

SEQ ID NO: 5023998 - DNA, 25 bp, Homo sapien
ctcttggggtgaatgtctccttgcc

SEQ ID NO: 5023999 - DNA, 25 bp, Homo sapien
cacatctgatcacactgggcttaaa

SEQ ID NO: 5024000 - DNA, 25 bp, Homo sapien
ctgtctccggtcacatctgatcaca

SEQ ID NO: 5024001 - DNA, 25 bp, Homo sapien
cggtcacatctgatcacactgggct

SEQ ID NO: 5024002 - DNA, 25 bp, Homo sapien
tctccggtcacatctgatcacactg

SEQ ID NO: 5024003 - DNA, 25 bp, Homo sapien
gaccagtttccacaagctcttcctg

SEQ ID NO: 5024004 - DNA, 25 bp, Homo sapien
tttccacaagctcttcctggctcct

SEQ ID NO: 5024005 - DNA, 25 bp, Homo sapien
tcttcctggctccttgcctgggcat

SEQ ID NO: 5024006 - DNA, 25 bp, Homo sapien
caagctcttcctggctccttgcctg

SEQ ID NO: 5024007 - DNA, 25 bp, Homo sapien
cattccgggctatcaggtgaaccag

SEQ ID NO: 5024008 - DNA, 25 bp, Homo sapien
ctaatcccacggagcattccgggct

SEQ ID NO: 5024009 - DNA, 25 bp, Homo sapien
gagcattccgggctatcaggtgaac

SEQ ID NO: 5024010 - DNA, 25 bp, Homo sapien
ccacggagcattccgggctatcagg

SEQ ID NO: 5024011 - DNA, 25 bp, Homo sapien
gctgcgtgcacactcatcactctgg

SEQ ID NO: 5024012 - DNA, 25 bp, Homo sapien
tctggccgtgtcctgtacatcgact

SEQ ID NO: 5024013 - DNA, 25 bp, Homo sapien
taagaagccggtactatggagcatc

SEQ ID NO: 5024014 - DNA, 25 bp, Homo sapien
agagcctaaagcatacgcctttcgg

SEQ ID NO: 5024015 - DNA, 25 bp, Homo sapien
gtagtggacagcagagtcactggaa

SEQ ID NO: 5024016 - DNA, 25 bp, Homo sapien
cttcatccccgaaagacagtccctg

SEQ ID NO: 5024017 - DNA, 25 bp, Homo sapien
tttcaagcagtggaaacttcatccc

SEQ ID NO: 5024018 - DNA, 25 bp, Homo sapien
acaggctgtggcactcttgagtgat

SEQ ID NO: 5024019 - DNA, 25 bp, Homo sapien
catttcttatgctccctggtacccg

SEQ ID NO: 5024020 - DNA, 25 bp, Homo sapien
agagtaagaactcctcctcaggcag

SEQ ID NO: 5024021 - DNA, 25 bp, Homo sapien
tggtacccgctactgtctgtgccac

SEQ ID NO: 5024022 - DNA, 25 bp, Homo sapien
gctggaccctgatccagtccactgg

SEQ ID NO: 5024023 - DNA, 25 bp, Homo sapien
ttactgctgtaaggcgatgatgagg

SEQ ID NO: 5024024 - DNA, 25 bp, Homo sapien
aacacagtgacccaatatgatggga

SEQ ID NO: 5024025 - DNA, 25 bp, Homo sapien
tgagaaatagccaaggccaaaaggg

SEQ ID NO: 5024026 - DNA, 25 bp, Homo sapien
gataaggaaggcttgactccctctg

SEQ ID NO: 5024027 - DNA, 25 bp, Homo sapien
aggacagccttgtaggccccaggga

SEQ ID NO: 5024028 - DNA, 25 bp, Homo sapien
agctcatgtccctgaattggcagga

SEQ ID NO: 5024029 - DNA, 25 bp, Homo sapien
tttgggtggtgcacaaataaccagt

SEQ ID NO: 5024030 - DNA, 25 bp, Homo sapien
tcagtgacctcagtctcagagaatg

SEQ ID NO: 5024031 - DNA, 25 bp, Homo sapien
tcctcagccacgaacgcaggcagag

SEQ ID NO: 5024032 - DNA, 25 bp, Homo sapien
tcagttttctgacgcagttcctcct

SEQ ID NO: 5024033 - DNA, 25 bp, Homo sapien
agcattggaaccaccccgctgagtc

SEQ ID NO: 5024034 - DNA, 25 bp, Homo sapien
gaaccaccccgctgagtctggaaat

SEQ ID NO: 5024035 - DNA, 25 bp, Homo sapien
tacgtgctaccaagagcagctccac

SEQ ID NO: 5024036 - DNA, 25 bp, Homo sapien
gaactcccatgttgacagcagggcc

SEQ ID NO: 5024037 - DNA, 25 bp, Homo sapien
gtgtgacacagcgtacgtgctacca

SEQ ID NO: 5024038 - DNA, 25 bp, Homo sapien
cgaacatgggctggcaagtttcctc

SEQ ID NO: 5024039 - DNA, 25 bp, Homo sapien
cagagggtgggctacagcgggatct

SEQ ID NO: 5024040 - DNA, 25 bp, Homo sapien
gactgctgctctgaagcaacaaagc

SEQ ID NO: 5024041 - DNA, 25 bp, Homo sapien
ctacagcgggatctggcttgttgct

SEQ ID NO: 5024042 - DNA, 25 bp, Homo sapien
catcactgaaggtccgcgattatca

SEQ ID NO: 5024043 - DNA, 25 bp, Homo sapien
tgctaacaagggatgccagatgttt

SEQ ID NO: 5024044 - DNA, 25 bp, Homo sapien
tatgccaaaccttttgaggcagatg

SEQ ID NO: 5024045 - DNA, 25 bp, Homo sapien
tcagtggaaggcagcttgtcagtag

SEQ ID NO: 5024046 - DNA, 25 bp, Homo sapien
tcagtttcatctccaccttttctgg

SEQ ID NO: 5024047 - DNA, 25 bp, Homo sapien
agtggttacccagcaccaactcagg

SEQ ID NO: 5024048 - DNA, 25 bp, Homo sapien
aggaaggtgactctcaatggactgg

SEQ ID NO: 5024049 - DNA, 25 bp, Homo sapien
tagtgcccagccttgttacagcgag

SEQ ID NO: 5024050 - DNA, 25 bp, Homo sapien
cattctagaaccacagatgcagcct

SEQ ID NO: 5024051 - DNA, 25 bp, Homo sapien
cgctcgcgctgcgttattgggagaa

SEQ ID NO: 5024052 - DNA, 25 bp, Homo sapien
aaggcgccgtggcactcaggaaatg

SEQ ID NO: 5024053 - DNA, 25 bp, Homo sapien
gtcactgactgctaaccacaaggcg

SEQ ID NO: 5024054 - DNA, 25 bp, Homo sapien
cacgtgctgggtaaaaaggcctggt

SEQ ID NO: 5024055 - DNA, 25 bp, Homo sapien
gagcaggtggcatgctcaagggtgt

SEQ ID NO: 5024056 - DNA, 25 bp, Homo sapien
gcaagaggagggagcggttaaccag

SEQ ID NO: 5024057 - DNA, 25 bp, Homo sapien
tggacaaggtgtaggatagccaggg

SEQ ID NO: 5024058 - DNA, 25 bp, Homo sapien
ggtgtggacaaggtgtaggatagcc

SEQ ID NO: 5024059 - DNA, 25 bp, Homo sapien
ggcacatccttagtgggcctgacgt

SEQ ID NO: 5024060 - DNA, 25 bp, Homo sapien
cattttgtggccataggcacatcct

SEQ ID NO: 5024061 - DNA, 25 bp, Homo sapien
gacgtctccgacttgaaggagttgg

SEQ ID NO: 5024062 - DNA, 25 bp, Homo sapien
gatgcatcaaagtaagcaaacttgg

SEQ ID NO: 5024063 - DNA, 25 bp, Homo sapien
cacagttgcatgtgcaggtcccatg

SEQ ID NO: 5024064 - DNA, 25 bp, Homo sapien
gctgcagactcgcagttgtagctca

SEQ ID NO: 5024065 - DNA, 25 bp, Homo sapien
agctgctgcagactcgcagttgtag

SEQ ID NO: 5024066 - DNA, 25 bp, Homo sapien
ctgcagactcgcagttgtagctcat

SEQ ID NO: 5024067 - DNA, 25 bp, Homo sapien
ctgctgcagactcgcagttgtagct

SEQ ID NO: 5024068 - DNA, 25 bp, Homo sapien
ggtgatctgcctgcctcagcctcct

SEQ ID NO: 5024069 - DNA, 25 bp, Homo sapien
cagcctcgagtagctggcacaggtg

SEQ ID NO: 5024070 - DNA, 25 bp, Homo sapien
gtgtgcgccaccatgcctggctaat

SEQ ID NO: 5024071 - DNA, 25 bp, Homo sapien
gatctgcctgcctcagcctcctgaa

SEQ ID NO: 5024072 - DNA, 25 bp, Homo sapien
ctatttcagatagaagccaaagtaa

SEQ ID NO: 5024073 - DNA, 25 bp, Homo sapien
tttacctctatttcagatagaagcc

SEQ ID NO: 5024074 - DNA, 25 bp, Homo sapien
caaggcctgtatagtcaagccaagg

SEQ ID NO: 5024075 - DNA, 25 bp, Homo sapien
gataataagtgtgcttcaccccaac

SEQ ID NO: 5024076 - DNA, 25 bp, Homo sapien
taaacattccgtgcaaaagagcaac

SEQ ID NO: 5024077 - DNA, 25 bp, Homo sapien
aaaggtttggcatttctggaccaca

SEQ ID NO: 5024078 - DNA, 25 bp, Homo sapien
taaatgaaaaatgcaccgagccaaa

SEQ ID NO: 5024079 - DNA, 25 bp, Homo sapien
taaacatcatgcttactgcacatca

SEQ ID NO: 5024080 - DNA, 25 bp, Homo sapien
ttcaaaacagtccatatacacatct

SEQ ID NO: 5024081 - DNA, 25 bp, Homo sapien
acagttgatttatgcaggattaaca

SEQ ID NO: 5024082 - DNA, 25 bp, Homo sapien
catacaagggttacattaggtcaac

SEQ ID NO: 5024083 - DNA, 25 bp, Homo sapien
tttattgcaatcatacaagggttac

SEQ ID NO: 5024084 - DNA, 25 bp, Homo sapien
caagggttacattaggtcaacaaat

SEQ ID NO: 5024085 - DNA, 25 bp, Homo sapien
gcaatcatacaagggttacattagg

SEQ ID NO: 5024086 - DNA, 25 bp, Homo sapien
catttgatatatctgggtgaaagac

SEQ ID NO: 5024087 - DNA, 25 bp, Homo sapien
ccaattaatgggcttccatctccac

SEQ ID NO: 5024088 - DNA, 25 bp, Homo sapien
caaatccttagtataaaaactgtgt

SEQ ID NO: 5024089 - DNA, 25 bp, Homo sapien
cactaaacgttatctaatgaagtca

SEQ ID NO: 5024090 - DNA, 25 bp, Homo sapien
tcagatctaaagaagcgttaatgcc

SEQ ID NO: 5024091 - DNA, 25 bp, Homo sapien
tgtctggtcccaaatagctattact

SEQ ID NO: 5024092 - DNA, 25 bp, Homo sapien
caaactggtaggtttaaatctggat

SEQ ID NO: 5024093 - DNA, 25 bp, Homo sapien
tgttgaccagacaagcttaacctgc

SEQ ID NO: 5024094 - DNA, 25 bp, Homo sapien
gctcagctgaatgcaagaaggcaca

SEQ ID NO: 5024095 - DNA, 25 bp, Homo sapien
gtcttcttggctcagctgaatgcaa

SEQ ID NO: 5024096 - DNA, 25 bp, Homo sapien
tcttggctcagctgaatgcaagaag

SEQ ID NO: 5024097 - DNA, 25 bp, Homo sapien
tcagctgaatgcaagaaggcacaaa

SEQ ID NO: 5024098 - DNA, 25 bp, Homo sapien
ctgaatgacatcatgtaataaatgg

SEQ ID NO: 5024099 - DNA, 25 bp, Homo sapien
tggctggcctctgaaaatcattaaa

SEQ ID NO: 5024100 - DNA, 25 bp, Homo sapien
gaatctgctcccatgttatcaaaga

SEQ ID NO: 5024101 - DNA, 25 bp, Homo sapien
cattaaaagcagatggttcatggaa

SEQ ID NO: 5024102 - DNA, 25 bp, Homo sapien
ctcatcacaggatggaccccaaagg

SEQ ID NO: 5024103 - DNA, 25 bp, Homo sapien
accccaaaggctgcttgtaaacaga

SEQ ID NO: 5024104 - DNA, 25 bp, Homo sapien
taaacagaggctcatcttccttgta

SEQ ID NO: 5024105 - DNA, 25 bp, Homo sapien
ccaaaggctgcttgtaaacagaggc

SEQ ID NO: 5024106 - DNA, 25 bp, Homo sapien
ctctggaatggtatttaagtcctca

SEQ ID NO: 5024107 - DNA, 25 bp, Homo sapien
ggtatttaagtcctcagacagttta

SEQ ID NO: 5024108 - DNA, 25 bp, Homo sapien
aatacatgaaggctggttcatcact

SEQ ID NO: 5024109 - DNA, 25 bp, Homo sapien
tataatacatgaaggctggttcatc

SEQ ID NO: 5024110 - DNA, 25 bp, Homo sapien
gctatgatattaactgcgagtgtaa

SEQ ID NO: 5024111 - DNA, 25 bp, Homo sapien
gaaagtagatatccaacagagggct

SEQ ID NO: 5024112 - DNA, 25 bp, Homo sapien
cagaagacacatagtagcttccggg

SEQ ID NO: 5024113 - DNA, 25 bp, Homo sapien
acagagggctgataacatgattaac

SEQ ID NO: 5024114 - DNA, 25 bp, Homo sapien
aaagttagctaggtctactaactgc

SEQ ID NO: 5024115 - DNA, 25 bp, Homo sapien
agagatgttatagggtttagtttct

SEQ ID NO: 5024116 - DNA, 25 bp, Homo sapien
taactgcctattccttttctaagaa

SEQ ID NO: 5024117 - DNA, 25 bp, Homo sapien
gtaaaaatcctgctctacacatcca

SEQ ID NO: 5024118 - DNA, 25 bp, Homo sapien
gaatcctccaccaatgtctaacatg

SEQ ID NO: 5024119 - DNA, 25 bp, Homo sapien
tgaaattcagttcccgtgaatcctc

SEQ ID NO: 5024120 - DNA, 25 bp, Homo sapien
acatgttcatcgtaaagccaatttc

SEQ ID NO: 5024121 - DNA, 25 bp, Homo sapien
ccaccaatgtctaacatgttcatcg

SEQ ID NO: 5024122 - DNA, 25 bp, Homo sapien
agccatgtcaaacacacatcgagca

SEQ ID NO: 5024123 - DNA, 25 bp, Homo sapien
gatagagcatgtacatatacttgag

SEQ ID NO: 5024124 - DNA, 25 bp, Homo sapien
tctttgcaagcactcgaaacatgaa

SEQ ID NO: 5024125 - DNA, 25 bp, Homo sapien
tatacttgagattctttgcaagcac

SEQ ID NO: 5024126 - DNA, 25 bp, Homo sapien
gccaaacttcatgttaccctcttca

SEQ ID NO: 5024127 - DNA, 25 bp, Homo sapien
gttaccctcttcacctccaatatta

SEQ ID NO: 5024128 - DNA, 25 bp, Homo sapien
cattccaagagatgcctacagttct

SEQ ID NO: 5024129 - DNA, 25 bp, Homo sapien
cttcagggtagtgccaaacttcatg

SEQ ID NO: 5024130 - DNA, 25 bp, Homo sapien
tggtttacatcatcatcagcacatg

SEQ ID NO: 5024131 - DNA, 25 bp, Homo sapien
tcagcacatgtgaagcctgaagatt

SEQ ID NO: 5024132 - DNA, 25 bp, Homo sapien
agtgtgttgattatgttgccagtgc

SEQ ID NO: 5024133 - DNA, 25 bp, Homo sapien
cagcgacggatgaatcaagtgaacc

SEQ ID NO: 5024134 - DNA, 25 bp, Homo sapien
ggagctgagtaattacaaactgcta

SEQ ID NO: 5024135 - DNA, 25 bp, Homo sapien
tccgcctcatgagagtgcctcctga

SEQ ID NO: 5024136 - DNA, 25 bp, Homo sapien
ttcatgtgtttaaacagcagccttc

SEQ ID NO: 5024137 - DNA, 25 bp, Homo sapien
tggcaaccaagacaagatgactaaa

SEQ ID NO: 5024138 - DNA, 25 bp, Homo sapien
cattcaagaactatggcctagggta

SEQ ID NO: 5024139 - DNA, 25 bp, Homo sapien
gattatcacaccaactatcaaggat

SEQ ID NO: 5024140 - DNA, 25 bp, Homo sapien
tgctgaccaaagtttatcctgttcc

SEQ ID NO: 5024141 - DNA, 25 bp, Homo sapien
caaatctatggtctaggcttcgaag

SEQ ID NO: 5024142 - DNA, 25 bp, Homo sapien
tatctgagacacttgcttgcaagga

SEQ ID NO: 5024143 - DNA, 25 bp, Homo sapien
gggtgattacgtgcaattttcttca

SEQ ID NO: 5024144 - DNA, 25 bp, Homo sapien
tgtcacatgtcaggatattcactcc

SEQ ID NO: 5024145 - DNA, 25 bp, Homo sapien
ttctggaggtacacccaactcttgc

SEQ ID NO: 5024146 - DNA, 25 bp, Homo sapien
tccaagagctgccaaaatctcaagt

SEQ ID NO: 5024147 - DNA, 25 bp, Homo sapien
tttccaagatctcccacaaaaaatg

SEQ ID NO: 5024148 - DNA, 25 bp, Homo sapien
ttactggaacaagcaaatccggttc

SEQ ID NO: 5024149 - DNA, 25 bp, Homo sapien
cactgtgtagaatggctttatctga

SEQ ID NO: 5024150 - DNA, 25 bp, Homo sapien
ctttggcagttcaggatataatttc

SEQ ID NO: 5024151 - DNA, 25 bp, Homo sapien
aaaactgcaccttaagacaacatgg

SEQ ID NO: 5024152 - DNA, 25 bp, Homo sapien
taaaacaagctatatatcgccatta

SEQ ID NO: 5024153 - DNA, 25 bp, Homo sapien
aaataagagaccatcttcactggga

SEQ ID NO: 5024154 - DNA, 25 bp, Homo sapien
ttccttcatccaacaggccaacgga

SEQ ID NO: 5024155 - DNA, 25 bp, Homo sapien
catccaacaggccaacggagtagtt

SEQ ID NO: 5024156 - DNA, 25 bp, Homo sapien
ccaacggagtagtttgcatcatcaa

SEQ ID NO: 5024157 - DNA, 25 bp, Homo sapien
tagttatcaataacatttccaaggt

SEQ ID NO: 5024158 - DNA, 25 bp, Homo sapien
aaagacaagagacgggccaccaagc

SEQ ID NO: 5024159 - DNA, 25 bp, Homo sapien
gacgggccaccaagcctatgtctgg

SEQ ID NO: 5024160 - DNA, 25 bp, Homo sapien
ggaaagacaagagacgggccaccaa

SEQ ID NO: 5024161 - DNA, 25 bp, Homo sapien
caagagacgggccaccaagcctatg

SEQ ID NO: 5024162 - DNA, 25 bp, Homo sapien
tgaaatgccacttggaaacccagta

SEQ ID NO: 5024163 - DNA, 25 bp, Homo sapien
gcctctcttaagtgctgatattacc

SEQ ID NO: 5024164 - DNA, 25 bp, Homo sapien
caactgaaaagggacaagtaggtgg

SEQ ID NO: 5024165 - DNA, 25 bp, Homo sapien
gagtctttcatatgttgtgccccaa

SEQ ID NO: 5024166 - DNA, 25 bp, Homo sapien
ctctcaaataatcacaagataattc

SEQ ID NO: 5024167 - DNA, 25 bp, Homo sapien
caccaagctggatgaatatgagtct

SEQ ID NO: 5024168 - DNA, 25 bp, Homo sapien
cagttgattgtacttcagaagaaac

SEQ ID NO: 5024169 - DNA, 25 bp, Homo sapien
aacagcccacttgacaccaagctgg

SEQ ID NO: 5024170 - DNA, 25 bp, Homo sapien
ctaacctctgtaataaatgcaaaag

SEQ ID NO: 5024171 - DNA, 25 bp, Homo sapien
aacctctgtaataaatgcaaaagcc

SEQ ID NO: 5024172 - DNA, 25 bp, Homo sapien
aaactaacctctgtaataaatgcaa

SEQ ID NO: 5024173 - DNA, 25 bp, Homo sapien
acagattggtagtcagtattaattt

SEQ ID NO: 5024174 - DNA, 25 bp, Homo sapien
gacataatatgcattgtacccgggc

SEQ ID NO: 5024175 - DNA, 25 bp, Homo sapien
taatgtgcacacaagccacctggat

SEQ ID NO: 5024176 - DNA, 25 bp, Homo sapien
gaaagccagtataggaaaccctcta

SEQ ID NO: 5024177 - DNA, 25 bp, Homo sapien
gatgctaatgcaattcgtccgaaga

SEQ ID NO: 5024178 - DNA, 25 bp, Homo sapien
tggacaagttgggagatggaacccc

SEQ ID NO: 5024179 - DNA, 25 bp, Homo sapien
atggacaagttgggagatggaaccc

SEQ ID NO: 5024180 - DNA, 25 bp, Homo sapien
gttgggagatggaacccccctatca

SEQ ID NO: 5024181 - DNA, 25 bp, Homo sapien
cagctaggttcccaaggtggctcag

SEQ ID NO: 5024182 - DNA, 25 bp, Homo sapien
gaagtcgaactgctctctatacagc

SEQ ID NO: 5024183 - DNA, 25 bp, Homo sapien
tctctatacagcacttctcctaggc

SEQ ID NO: 5024184 - DNA, 25 bp, Homo sapien
ctctgggtagttgtatacttggtca

SEQ ID NO: 5024185 - DNA, 25 bp, Homo sapien
tctatctaggagaagctgatcacat

SEQ ID NO: 5024186 - DNA, 25 bp, Homo sapien
tgtttcatctatctaggagaagctg

SEQ ID NO: 5024187 - DNA, 25 bp, Homo sapien
caggatcaaggcactcctggtggag

SEQ ID NO: 5024188 - DNA, 25 bp, Homo sapien
ctcaatgaatgacatttatggatga

SEQ ID NO: 5024189 - DNA, 25 bp, Homo sapien
ctccaccagagggggaccgcgctcc

SEQ ID NO: 5024190 - DNA, 25 bp, Homo sapien
cagagggggaccgcgctccccgcgc

SEQ ID NO: 5024191 - DNA, 25 bp, Homo sapien
caccagagggggaccgcgctccccg

SEQ ID NO: 5024192 - DNA, 25 bp, Homo sapien
tccaccagagggggaccgcgctccc

SEQ ID NO: 5024193 - DNA, 25 bp, Homo sapien
aaaggaaaaactgcggccgcgatca

SEQ ID NO: 5024194 - DNA, 25 bp, Homo sapien
gattcggactcgtcacactgcagag

SEQ ID NO: 5024195 - DNA, 25 bp, Homo sapien
cggcggccgaaggagaaatagaaca

SEQ ID NO: 5024196 - DNA, 25 bp, Homo sapien
aagagtcgggtaaagcgtcttctct

SEQ ID NO: 5024197 - DNA, 25 bp, Homo sapien
gatgcggtactcctttagggaagcg

SEQ ID NO: 5024198 - DNA, 25 bp, Homo sapien
tcagtgctcgaacgttgcaatacgg

SEQ ID NO: 5024199 - DNA, 25 bp, Homo sapien
gaagcgagttcctcgtggccagaaa

SEQ ID NO: 5024200 - DNA, 25 bp, Homo sapien
tgtgaccacgtgaaaatgtcctcag

SEQ ID NO: 5024201 - DNA, 25 bp, Homo sapien
tattcggtagaatcaggagctgtgg

SEQ ID NO: 5024202 - DNA, 25 bp, Homo sapien
tactttgagcagcactgtggttgat

SEQ ID NO: 5024203 - DNA, 25 bp, Homo sapien
tgtgttgacacacccctctgaagtt

SEQ ID NO: 5024204 - DNA, 25 bp, Homo sapien
gcttcgcaacacatagcacaaatgg

SEQ ID NO: 5024205 - DNA, 25 bp, Homo sapien
gctctgtgaacccagttcccttggg

SEQ ID NO: 5024206 - DNA, 25 bp, Homo sapien
gggatgtgaaacctccatgccctcc

SEQ ID NO: 5024207 - DNA, 25 bp, Homo sapien
acacatagggcaagatacaggggga

SEQ ID NO: 5024208 - DNA, 25 bp, Homo sapien
cccagggtacagggcagattctttc

SEQ ID NO: 5024209 - DNA, 25 bp, Homo sapien
agttggaggggttcacactttctga

SEQ ID NO: 5024210 - DNA, 25 bp, Homo sapien
aaacaatatggtactagtgtgagga

SEQ ID NO: 5024211 - DNA, 25 bp, Homo sapien
ggtactagtgtgaggacatatagac

SEQ ID NO: 5024212 - DNA, 25 bp, Homo sapien
caatatggtactagtgtgaggacat

SEQ ID NO: 5024213 - DNA, 25 bp, Homo sapien
catccgtcgatactgtgaggtctct

SEQ ID NO: 5024214 - DNA, 25 bp, Homo sapien
taaatgctcctttttacctcactgg

SEQ ID NO: 5024215 - DNA, 25 bp, Homo sapien
gggtgaaacccagcaactctttgtg

SEQ ID NO: 5024216 - DNA, 25 bp, Homo sapien
gaaagagcagccatgttgtgcctca

SEQ ID NO: 5024217 - DNA, 25 bp, Homo sapien
tagagcctgcatgcggctccctcag

SEQ ID NO: 5024218 - DNA, 25 bp, Homo sapien
cctcagagccttggggtggccaatc

SEQ ID NO: 5024219 - DNA, 25 bp, Homo sapien
atgcagagccctgttgagtcaccat

SEQ ID NO: 5024220 - DNA, 25 bp, Homo sapien
ccatgcagagccctgttgagtcacc

SEQ ID NO: 5024221 - DNA, 25 bp, Homo sapien
gaaatgatttgcagtcccagcgaag

SEQ ID NO: 5024222 - DNA, 25 bp, Homo sapien
gtttgaaactttgaacagaatcagt

SEQ ID NO: 5024223 - DNA, 25 bp, Homo sapien
tccatatcttgtactctgagaacct

SEQ ID NO: 5024224 - DNA, 25 bp, Homo sapien
gaatcagtttgtagggatgaaaccc

SEQ ID NO: 5024225 - DNA, 25 bp, Homo sapien
cccactgattgggagtgctgagcca

SEQ ID NO: 5024226 - DNA, 25 bp, Homo sapien
cagccaggggaataccccagaaaga

SEQ ID NO: 5024227 - DNA, 25 bp, Homo sapien
gcccatgtcgtgcttcgctgatgca

SEQ ID NO: 5024228 - DNA, 25 bp, Homo sapien
cactggtgattggagtccagcagtc

SEQ ID NO: 5024229 - DNA, 25 bp, Homo sapien
ggctgggctgaagaaagagctcttt

SEQ ID NO: 5024230 - DNA, 25 bp, Homo sapien
gagctctttgaatttttcatagaaa

SEQ ID NO: 5024231 - DNA, 25 bp, Homo sapien
agagctctttgaatttttcatagaa

SEQ ID NO: 5024232 - DNA, 25 bp, Homo sapien
ctctttgaatttttcatagaaaaga

SEQ ID NO: 5024233 - DNA, 25 bp, Homo sapien
ggtacagcaaagtcctcccagaatc

SEQ ID NO: 5024234 - DNA, 25 bp, Homo sapien
ccagggctcgagaatgaggctgcct

SEQ ID NO: 5024235 - DNA, 25 bp, Homo sapien
gcaggacaccagggctgaaaggtac

SEQ ID NO: 5024236 - DNA, 25 bp, Homo sapien
agggatttgcatcacagactggcca

SEQ ID NO: 5024237 - DNA, 25 bp, Homo sapien
gccttcatgtggagtgaaaacccag

SEQ ID NO: 5024238 - DNA, 25 bp, Homo sapien
caattgtacaaccaggagccagagg

SEQ ID NO: 5024239 - DNA, 25 bp, Homo sapien
gaaaacccagacctgtgtgagcagc

SEQ ID NO: 5024240 - DNA, 25 bp, Homo sapien
gatggacgcatgtcagaagccacct

SEQ ID NO: 5024241 - DNA, 25 bp, Homo sapien
cagcttcttgggttgggacacattg

SEQ ID NO: 5024242 - DNA, 25 bp, Homo sapien
tgtctatttgttgcgtgtgtggaga

SEQ ID NO: 5024243 - DNA, 25 bp, Homo sapien
acattgtctatttgttgcgtgtgtg

SEQ ID NO: 5024244 - DNA, 25 bp, Homo sapien
tcagcttcttgggttgggacacatt

SEQ ID NO: 5024245 - DNA, 25 bp, Homo sapien
cttttccagtcctattagtctcaga

SEQ ID NO: 5024246 - DNA, 25 bp, Homo sapien
tttccagtcctattagtctcagatg

SEQ ID NO: 5024247 - DNA, 25 bp, Homo sapien
tcagatgcatgtttcctggtcactg

SEQ ID NO: 5024248 - DNA, 25 bp, Homo sapien
tagtctcagatgcatgtttcctggt

SEQ ID NO: 5024249 - DNA, 25 bp, Homo sapien
cagtgtttcacttgctctagcctga

SEQ ID NO: 5024250 - DNA, 25 bp, Homo sapien
ccacagtgtttcacttgctctagcc

SEQ ID NO: 5024251 - DNA, 25 bp, Homo sapien
acttgctctagcctgaatgtcagca

SEQ ID NO: 5024252 - DNA, 25 bp, Homo sapien
tgtttcacttgctctagcctgaatg

SEQ ID NO: 5024253 - DNA, 25 bp, Homo sapien
gaatattctgcaagatttgaagctg

SEQ ID NO: 5024254 - DNA, 25 bp, Homo sapien
tttgctcgtccaaccttctttactc

SEQ ID NO: 5024255 - DNA, 25 bp, Homo sapien
tttactcccatatttggcctttgca

SEQ ID NO: 5024256 - DNA, 25 bp, Homo sapien
gctgtggcatggtttgctcgtccaa

SEQ ID NO: 5024257 - DNA, 25 bp, Homo sapien
caagtttacggaattctggaaggca

SEQ ID NO: 5024258 - DNA, 25 bp, Homo sapien
cagtgttctatgtgctggtcctgag

SEQ ID NO: 5024259 - DNA, 25 bp, Homo sapien
gagccaattgtagtgtttaaacagc

SEQ ID NO: 5024260 - DNA, 25 bp, Homo sapien
caatcattatttagtcagggacaga

SEQ ID NO: 5024261 - DNA, 25 bp, Homo sapien
tgaggacagagtgcctgtgctgtaa

SEQ ID NO: 5024262 - DNA, 25 bp, Homo sapien
cctgtgctgtaattagatgtgactc

SEQ ID NO: 5024263 - DNA, 25 bp, Homo sapien
cagagtgcctgtgctgtaattagat

SEQ ID NO: 5024264 - DNA, 25 bp, Homo sapien
attagatgtgactcctccacagcca

SEQ ID NO: 5024265 - DNA, 25 bp, Homo sapien
agcactgctcctatttcttgccagc

SEQ ID NO: 5024266 - DNA, 25 bp, Homo sapien
tatttcttgccagccgatctcagcc

SEQ ID NO: 5024267 - DNA, 25 bp, Homo sapien
tctcagtgacgattcttccatgaca

SEQ ID NO: 5024268 - DNA, 25 bp, Homo sapien
ctgggcacaagggaccagctgcacg

SEQ ID NO: 5024269 - DNA, 25 bp, Homo sapien
caagcaagggacattttgggacggt

SEQ ID NO: 5024270 - DNA, 25 bp, Homo sapien
tccaagcaagggacattttgggacg

SEQ ID NO: 5024271 - DNA, 25 bp, Homo sapien
tttcttccaagcaagggacattttg

SEQ ID NO: 5024272 - DNA, 25 bp, Homo sapien
cttccaagcaagggacattttggga

SEQ ID NO: 5024273 - DNA, 25 bp, Homo sapien
ccttgatgtacttccggtgtatttc

SEQ ID NO: 5024274 - DNA, 25 bp, Homo sapien
ggcccttgatgtacttccggtgtat

SEQ ID NO: 5024275 - DNA, 25 bp, Homo sapien
catagaccggattctttcgtatagt

SEQ ID NO: 5024276 - DNA, 25 bp, Homo sapien
ttcgtatagtagcatgacctttctt

SEQ ID NO: 5024277 - DNA, 25 bp, Homo sapien
caaatagcaggttaaggtgcctggc

SEQ ID NO: 5024278 - DNA, 25 bp, Homo sapien
atccaaatagcaggttaaggtgcct

SEQ ID NO: 5024279 - DNA, 25 bp, Homo sapien
aaatagcaggttaaggtgcctggct

SEQ ID NO: 5024280 - DNA, 25 bp, Homo sapien
ctgcaggccaacagcaggctagtac

SEQ ID NO: 5024281 - DNA, 25 bp, Homo sapien
aggccaacagcaggctagtacaata

SEQ ID NO: 5024282 - DNA, 25 bp, Homo sapien
gcaggccaacagcaggctagtacaa

SEQ ID NO: 5024283 - DNA, 25 bp, Homo sapien
tagtacaatatgctgcagcatcatt

SEQ ID NO: 5024284 - DNA, 25 bp, Homo sapien
ttaccctctagttgtcttctgaatt

SEQ ID NO: 5024285 - DNA, 25 bp, Homo sapien
tattcttaacaacttgaacaacaaa

SEQ ID NO: 5024286 - DNA, 25 bp, Homo sapien
taccctctagttgtcttctgaattt

SEQ ID NO: 5024287 - DNA, 25 bp, Homo sapien
atctaagttgttgccaaacttccaa

SEQ ID NO: 5024288 - DNA, 25 bp, Homo sapien
caaaatagctctttagtctgttctt

SEQ ID NO: 5024289 - DNA, 25 bp, Homo sapien
aaaatagctctttagtctgttcttt

SEQ ID NO: 5024290 - DNA, 25 bp, Homo sapien
ccaaaatagctctttagtctgttct

SEQ ID NO: 5024291 - DNA, 25 bp, Homo sapien
ctcctagtgagttcttctctagagc

SEQ ID NO: 5024292 - DNA, 25 bp, Homo sapien
caggatgactgggacgtgaggggct

SEQ ID NO: 5024293 - DNA, 25 bp, Homo sapien
ctcctttgctcctagtgagttcttc

SEQ ID NO: 5024294 - DNA, 25 bp, Homo sapien
cctttgctcctagtgagttcttctc

SEQ ID NO: 5024295 - DNA, 25 bp, Homo sapien
ttgggactgccccatttatcagagg

SEQ ID NO: 5024296 - DNA, 25 bp, Homo sapien
gggactgccccatttatcagaggag

SEQ ID NO: 5024297 - DNA, 25 bp, Homo sapien
gactgccccatttatcagaggagtt

SEQ ID NO: 5024298 - DNA, 25 bp, Homo sapien
ggactgccccatttatcagaggagt

SEQ ID NO: 5024299 - DNA, 25 bp, Homo sapien
tcaggaacaacacctataagggagt

SEQ ID NO: 5024300 - DNA, 25 bp, Homo sapien
ccctgtaaaatggactcagagatgg

SEQ ID NO: 5024301 - DNA, 25 bp, Homo sapien
ggctctggcaactgtgaataggaca

SEQ ID NO: 5024302 - DNA, 25 bp, Homo sapien
tctatttggaaagtaggctctggca

SEQ ID NO: 5024303 - DNA, 25 bp, Homo sapien
catctttcctggatcccctgtcctc

SEQ ID NO: 5024304 - DNA, 25 bp, Homo sapien
tacgtagcctcttaaatgggccttc

SEQ ID NO: 5024305 - DNA, 25 bp, Homo sapien
tctttcctggatcccctgtcctcaa

SEQ ID NO: 5024306 - DNA, 25 bp, Homo sapien
tgtcctcaagaagtcgggtctgcat

SEQ ID NO: 5024307 - DNA, 25 bp, Homo sapien
gaggatacatgggcaagtgatttat

SEQ ID NO: 5024308 - DNA, 25 bp, Homo sapien
tcagcttaaacctgatcccacaggg

SEQ ID NO: 5024309 - DNA, 25 bp, Homo sapien
agagtctcagcttaaacctgatccc

SEQ ID NO: 5024310 - DNA, 25 bp, Homo sapien
tggagtttatcccaacttgaagcaa

SEQ ID NO: 5024311 - DNA, 25 bp, Homo sapien
ggatagactcccatgcacttccatc

SEQ ID NO: 5024312 - DNA, 25 bp, Homo sapien
ggtttagagtgggatagactcccat

SEQ ID NO: 5024313 - DNA, 25 bp, Homo sapien
tagggtttagagtgggatagactcc

SEQ ID NO: 5024314 - DNA, 25 bp, Homo sapien
gagtgggatagactcccatgcactt

SEQ ID NO: 5024315 - DNA, 25 bp, Homo sapien
tgctagggacaacgttagaaacttg

SEQ ID NO: 5024316 - DNA, 25 bp, Homo sapien
ccttgtgctagggacaacgttagaa

SEQ ID NO: 5024317 - DNA, 25 bp, Homo sapien
gtcctgcctctcatctagtcttcca

SEQ ID NO: 5024318 - DNA, 25 bp, Homo sapien
ggccttgtgctagggacaacgttag

SEQ ID NO: 5024319 - DNA, 25 bp, Homo sapien
tgccagtcaaatttaacattgtggg

SEQ ID NO: 5024320 - DNA, 25 bp, Homo sapien
taagctgtgataacccaccaccatt

SEQ ID NO: 5024321 - DNA, 25 bp, Homo sapien
ctgtgataacccaccaccattggac

SEQ ID NO: 5024322 - DNA, 25 bp, Homo sapien
taacattgtgggggtgttgtatacc

SEQ ID NO: 5024323 - DNA, 25 bp, Homo sapien
gagctgtggagtgcagagcctttaa

SEQ ID NO: 5024324 - DNA, 25 bp, Homo sapien
gttcacatggtccagcaggtggtag

SEQ ID NO: 5024325 - DNA, 25 bp, Homo sapien
tactggtagcccattgagggtagca

SEQ ID NO: 5024326 - DNA, 25 bp, Homo sapien
tgagaacaggcatacagttacagga

SEQ ID NO: 5024327 - DNA, 25 bp, Homo sapien
tacaatggccctaagctcaatttta

SEQ ID NO: 5024328 - DNA, 25 bp, Homo sapien
caaatgctccaataaggtttctgaa

SEQ ID NO: 5024329 - DNA, 25 bp, Homo sapien
gagtaaaggtgattatggcaggcat

SEQ ID NO: 5024330 - DNA, 25 bp, Homo sapien
caccaggtcccaatagcatatgaat

SEQ ID NO: 5024331 - DNA, 25 bp, Homo sapien
taaattgctaatttcccggcactgg

SEQ ID NO: 5024332 - DNA, 25 bp, Homo sapien
gacaagcaataccaccagacgatag

SEQ ID NO: 5024333 - DNA, 25 bp, Homo sapien
tctttcaggtggacaagatatggca

SEQ ID NO: 5024334 - DNA, 25 bp, Homo sapien
tgggctcagccctttacgtacgtgg

SEQ ID NO: 5024335 - DNA, 25 bp, Homo sapien
catgtgaacaggctgaaattcagag

SEQ ID NO: 5024336 - DNA, 25 bp, Homo sapien
ttcccttgcgctgaacaactccgtg

SEQ ID NO: 5024337 - DNA, 25 bp, Homo sapien
aacacctggtatctattcccttgcg

SEQ ID NO: 5024338 - DNA, 25 bp, Homo sapien
ggagagcctggattcaacacctggt

SEQ ID NO: 5024339 - DNA, 25 bp, Homo sapien
gctggcacgtgacttgttctgtgtt

SEQ ID NO: 5024340 - DNA, 25 bp, Homo sapien
ttctgtgttcgcttgggtagaggaa

SEQ ID NO: 5024341 - DNA, 25 bp, Homo sapien
cttaggtcgggaagggatggatcgc

SEQ ID NO: 5024342 - DNA, 25 bp, Homo sapien
gatggatcgctgagccgatagcgtc

SEQ ID NO: 5024343 - DNA, 25 bp, Homo sapien
tgctgctacttcctcgtttgacacc

SEQ ID NO: 5024344 - DNA, 25 bp, Homo sapien
agtgagcgatggctctccccggatg

SEQ ID NO: 5024345 - DNA, 25 bp, Homo sapien
tcaggccgaagcatgagctccggtc

SEQ ID NO: 5024346 - DNA, 25 bp, Homo sapien
gggtcagtgagcgatggctctcccc

SEQ ID NO: 5024347 - DNA, 25 bp, Homo sapien
tgtgtctggtttctcggcgccaatt

SEQ ID NO: 5024348 - DNA, 25 bp, Homo sapien
tctcggcgccaattcaccgtcttgg

SEQ ID NO: 5024349 - DNA, 25 bp, Homo sapien
caattcaccgtcttgggcctaggtt

SEQ ID NO: 5024350 - DNA, 25 bp, Homo sapien
gtttctcggcgccaattcaccgtct

SEQ ID NO: 5024351 - DNA, 25 bp, Homo sapien
ggaatgccaaagtaaacctttgcca

SEQ ID NO: 5024352 - DNA, 25 bp, Homo sapien
caactggaatgccaaagtaaacctt

SEQ ID NO: 5024353 - DNA, 25 bp, Homo sapien
gagataataccattggccaactgga

SEQ ID NO: 5024354 - DNA, 25 bp, Homo sapien
cattggccaactggaatgccaaagt

SEQ ID NO: 5024355 - DNA, 25 bp, Homo sapien
ctgacttgtgtaagtgacaagttga

SEQ ID NO: 5024356 - DNA, 25 bp, Homo sapien
cggatgttactccatttatttgaag

SEQ ID NO: 5024357 - DNA, 25 bp, Homo sapien
gattagttggcagaatcagtctaca

SEQ ID NO: 5024358 - DNA, 25 bp, Homo sapien
aaatttctgcaaataagtcagctgg

SEQ ID NO: 5024359 - DNA, 25 bp, Homo sapien
taggatcacagtgtcaaatttctgc

SEQ ID NO: 5024360 - DNA, 25 bp, Homo sapien
gttactattgtgcacaaaagccctg

SEQ ID NO: 5024361 - DNA, 25 bp, Homo sapien
tcaatgagcactgtcaacacccaca

SEQ ID NO: 5024362 - DNA, 25 bp, Homo sapien
taaagaatatgtgaccatcttcagg

SEQ ID NO: 5024363 - DNA, 25 bp, Homo sapien
ggtatgggatttctgaacgtttcaa

SEQ ID NO: 5024364 - DNA, 25 bp, Homo sapien
cattcttttaactggctgcgtggcg

SEQ ID NO: 5024365 - DNA, 25 bp, Homo sapien
cagcatatgtctgaaacgacgggac

SEQ ID NO: 5024366 - DNA, 25 bp, Homo sapien
tctcatgagagtaggtacagactgc

SEQ ID NO: 5024367 - DNA, 25 bp, Homo sapien
gtggcgctactctctctatcatggg

SEQ ID NO: 5024368 - DNA, 25 bp, Homo sapien
gcatatgcacaaggttaaaaaccac

SEQ ID NO: 5024369 - DNA, 25 bp, Homo sapien
cttataatgaaaaccttgcctgcct

SEQ ID NO: 5024370 - DNA, 25 bp, Homo sapien
gaatgagtgcatatccagtagtacc

SEQ ID NO: 5024371 - DNA, 25 bp, Homo sapien
tgtttgcatgccaatttcagtagcc

SEQ ID NO: 5024372 - DNA, 25 bp, Homo sapien
tctgcacccgaaagttctctgcagc

SEQ ID NO: 5024373 - DNA, 25 bp, Homo sapien
taaacccggaagtgtgccagactct

SEQ ID NO: 5024374 - DNA, 25 bp, Homo sapien
cagactctgcacccgaaagttctct

SEQ ID NO: 5024375 - DNA, 25 bp, Homo sapien
ctttaagagtgttctgcaaacacac

SEQ ID NO: 5024376 - DNA, 25 bp, Homo sapien
ttatgaaactacaggccaaaggagg

SEQ ID NO: 5024377 - DNA, 25 bp, Homo sapien
tgattaaagtacacccaacccatga

SEQ ID NO: 5024378 - DNA, 25 bp, Homo sapien
gtgaagcacacatagaccgcccatt

SEQ ID NO: 5024379 - DNA, 25 bp, Homo sapien
gaatagagagcttaattgaataagg

SEQ ID NO: 5024380 - DNA, 25 bp, Homo sapien
gcattctaatcagttagcttccatc

SEQ ID NO: 5024381 - DNA, 25 bp, Homo sapien
gagctccaacgtcacaaaaacttag

SEQ ID NO: 5024382 - DNA, 25 bp, Homo sapien
actagattggtgagctccaacgtca

SEQ ID NO: 5024383 - DNA, 25 bp, Homo sapien
agttaacagctaaagcattctaatc

SEQ ID NO: 5024384 - DNA, 25 bp, Homo sapien
attggcaattcagtgtgaacattca

SEQ ID NO: 5024385 - DNA, 25 bp, Homo sapien
aattggcaattcagtgtgaacattc

SEQ ID NO: 5024386 - DNA, 25 bp, Homo sapien
tacaatccaatgcttattcagctac

SEQ ID NO: 5024387 - DNA, 25 bp, Homo sapien
caatccaatgcttattcagctactt

SEQ ID NO: 5024388 - DNA, 25 bp, Homo sapien
tttacaatccaatgcttattcagct

SEQ ID NO: 5024389 - DNA, 25 bp, Homo sapien
taaatttacaatccaatgcttattc

SEQ ID NO: 5024390 - DNA, 25 bp, Homo sapien
attaataatcttcacaatctgagag

SEQ ID NO: 5024391 - DNA, 25 bp, Homo sapien
caattccatctcattgataggctta

SEQ ID NO: 5024392 - DNA, 25 bp, Homo sapien
tccatctcattgataggcttatata

SEQ ID NO: 5024393 - DNA, 25 bp, Homo sapien
atgcaattccatctcattgataggc

SEQ ID NO: 5024394 - DNA, 25 bp, Homo sapien
ctacaacttgaatggcctcctggct

SEQ ID NO: 5024395 - DNA, 25 bp, Homo sapien
gaactgccaagaaagtaccgagaat

SEQ ID NO: 5024396 - DNA, 25 bp, Homo sapien
taccgagaattatcagtagtggaac

SEQ ID NO: 5024397 - DNA, 25 bp, Homo sapien
tgcccattagcatatcagacatttg

SEQ ID NO: 5024398 - DNA, 25 bp, Homo sapien
tacttcttaactggtttcaagccga

SEQ ID NO: 5024399 - DNA, 25 bp, Homo sapien
aactggtttcaagccgatttcatca

SEQ ID NO: 5024400 - DNA, 25 bp, Homo sapien
ggtttcaagccgatttcatcacaat

SEQ ID NO: 5024401 - DNA, 25 bp, Homo sapien
tcttaactggtttcaagccgatttc

SEQ ID NO: 5024402 - DNA, 25 bp, Homo sapien
aagcatgagcatacttagatcagcc

SEQ ID NO: 5024403 - DNA, 25 bp, Homo sapien
tagttataagcatgagcatacttag

SEQ ID NO: 5024404 - DNA, 25 bp, Homo sapien
aattagttataagcatgagcatact

SEQ ID NO: 5024405 - DNA, 25 bp, Homo sapien
tataagcatgagcatacttagatca

SEQ ID NO: 5024406 - DNA, 25 bp, Homo sapien
gatctttcaggaataaggtctcctt

SEQ ID NO: 5024407 - DNA, 25 bp, Homo sapien
tgagttagctcctgaacccatggat

SEQ ID NO: 5024408 - DNA, 25 bp, Homo sapien
tcagtgggaacgaccttcagaaagc

SEQ ID NO: 5024409 - DNA, 25 bp, Homo sapien
tgtcttgggctccattaacctctcc

SEQ ID NO: 5024410 - DNA, 25 bp, Homo sapien
ctcttgtggaggaacagatttagca

SEQ ID NO: 5024411 - DNA, 25 bp, Homo sapien
tctgttatctatgcggatgtggctg

SEQ ID NO: 5024412 - DNA, 25 bp, Homo sapien
tgtgtgttgatatggcatctctgtt

SEQ ID NO: 5024413 - DNA, 25 bp, Homo sapien
ccttgctgtgtgttgatatggcatc

SEQ ID NO: 5024414 - DNA, 25 bp, Homo sapien
taatattgactccacctgtagtgcc

SEQ ID NO: 5024415 - DNA, 25 bp, Homo sapien
tctcctgttgtctaatattgactcc

SEQ ID NO: 5024416 - DNA, 25 bp, Homo sapien
gcattttgtcacgttgggtctttcc

SEQ ID NO: 5024417 - DNA, 25 bp, Homo sapien
caggtttgacgggaacaacggatag

SEQ ID NO: 5024418 - DNA, 25 bp, Homo sapien
agtggctcatcagcagtggtgttgc

SEQ ID NO: 5024419 - DNA, 25 bp, Homo sapien
tctgcagcctgcgattagtacttac

SEQ ID NO: 5024420 - DNA, 25 bp, Homo sapien
caacccttgctggtagcatgtgact

SEQ ID NO: 5024421 - DNA, 25 bp, Homo sapien
gcatgtgactagatccctctgcagc

SEQ ID NO: 5024422 - DNA, 25 bp, Homo sapien
gcaatgccgagtgttgcacagacgt

SEQ ID NO: 5024423 - DNA, 25 bp, Homo sapien
gccgagtgttgcacagacgtgctgc

SEQ ID NO: 5024424 - DNA, 25 bp, Homo sapien
aatgccgagtgttgcacagacgtgc

SEQ ID NO: 5024425 - DNA, 25 bp, Homo sapien
tgccgagtgttgcacagacgtgctg

SEQ ID NO: 5024426 - DNA, 25 bp, Homo sapien
ggttcgtttctagctgtgcttggcc

SEQ ID NO: 5024427 - DNA, 25 bp, Homo sapien
gatcctgctctagctatttggtctg

SEQ ID NO: 5024428 - DNA, 25 bp, Homo sapien
gctgacagccagcatggttcgtttc

SEQ ID NO: 5024429 - DNA, 25 bp, Homo sapien
gccgtgaagttcagctgatcctgct

SEQ ID NO: 5024430 - DNA, 25 bp, Homo sapien
ctctaacagccagcactcgcatatc

SEQ ID NO: 5024431 - DNA, 25 bp, Homo sapien
ctgaagagttgtgacattatgttta

SEQ ID NO: 5024432 - DNA, 25 bp, Homo sapien
aagagttgtgacattatgtttaagg

SEQ ID NO: 5024433 - DNA, 25 bp, Homo sapien
tatgtttaaggggctctaacagcca

SEQ ID NO: 5024434 - DNA, 25 bp, Homo sapien
aaacctatgagacaatcctgctttc

SEQ ID NO: 5024435 - DNA, 25 bp, Homo sapien
agggcacaaaacctatgagacaatc

SEQ ID NO: 5024436 - DNA, 25 bp, Homo sapien
ctggggaatttcctcaggcagggca

SEQ ID NO: 5024437 - DNA, 25 bp, Homo sapien
cacaaaacctatgagacaatcctgc

SEQ ID NO: 5024438 - DNA, 25 bp, Homo sapien
gcgtgcctccaatgcctataaattt

SEQ ID NO: 5024439 - DNA, 25 bp, Homo sapien
gcagcgtgcctccaatgcctataaa

SEQ ID NO: 5024440 - DNA, 25 bp, Homo sapien
cagcgtgcctccaatgcctataaat

SEQ ID NO: 5024441 - DNA, 25 bp, Homo sapien
tgcctccaatgcctataaatttcct

SEQ ID NO: 5024442 - DNA, 25 bp, Homo sapien
cagtgtctgggtggctcatggagcc

SEQ ID NO: 5024443 - DNA, 25 bp, Homo sapien
caggctgattagttgccaaagccca

SEQ ID NO: 5024444 - DNA, 25 bp, Homo sapien
cttttagatgcaggctgattagttg

SEQ ID NO: 5024445 - DNA, 25 bp, Homo sapien
gtctgggtggctcatggagcccctc

SEQ ID NO: 5024446 - DNA, 25 bp, Homo sapien
tcttagcctaatagcatgctcctta

SEQ ID NO: 5024447 - DNA, 25 bp, Homo sapien
tcccattttcctcttagcctaatag

SEQ ID NO: 5024448 - DNA, 25 bp, Homo sapien
cctaatagcatgctccttaagctac

SEQ ID NO: 5024449 - DNA, 25 bp, Homo sapien
tttcctcttagcctaatagcatgct

SEQ ID NO: 5024450 - DNA, 25 bp, Homo sapien
gaggagagaggactgttgcctcctt

SEQ ID NO: 5024451 - DNA, 25 bp, Homo sapien
ttagcttttattagtcactggagtg

SEQ ID NO: 5024452 - DNA, 25 bp, Homo sapien
aggagagaggactgttgcctccttg

SEQ ID NO: 5024453 - DNA, 25 bp, Homo sapien
cttttattagtcactggagtggagg

SEQ ID NO: 5024454 - DNA, 25 bp, Homo sapien
cccatatatcagaaaaggtgccctt

SEQ ID NO: 5024455 - DNA, 25 bp, Homo sapien
aaaggtgcccttctagggagcgaca

SEQ ID NO: 5024456 - DNA, 25 bp, Homo sapien
ggtgcccttctagggagcgacaccc

SEQ ID NO: 5024457 - DNA, 25 bp, Homo sapien
cccatctgacccatatatcagaaaa

SEQ ID NO: 5024458 - DNA, 25 bp, Homo sapien
gagaggggcctccatacttccagag

SEQ ID NO: 5024459 - DNA, 25 bp, Homo sapien
gcatctgtgcagaaaccaggtgttg

SEQ ID NO: 5024460 - DNA, 25 bp, Homo sapien
gcttgcccccactctttttgtcttg

SEQ ID NO: 5024461 - DNA, 25 bp, Homo sapien
ccaggtgttgcctgtgagttctgcc

SEQ ID NO: 5024462 - DNA, 25 bp, Homo sapien
tgtcagcgagcacgtaagttcaccc

SEQ ID NO: 5024463 - DNA, 25 bp, Homo sapien
tccagcagcccaatgctctttggcc

SEQ ID NO: 5024464 - DNA, 25 bp, Homo sapien
cccaatgctctttggccttgtccaa

SEQ ID NO: 5024465 - DNA, 25 bp, Homo sapien
tgtccaaagcttgctcgctggtcgg

SEQ ID NO: 5024466 - DNA, 25 bp, Homo sapien
ccaaagcttgctcgctggtcgggag

SEQ ID NO: 5024467 - DNA, 25 bp, Homo sapien
caagtaattatagcgcagagatgca

SEQ ID NO: 5024468 - DNA, 25 bp, Homo sapien
gccacagactgacctttaatcataa

SEQ ID NO: 5024469 - DNA, 25 bp, Homo sapien
catgcctactaaatagagctgtcac

SEQ ID NO: 5024470 - DNA, 25 bp, Homo sapien
catttttaaggaccaaagctggctc

SEQ ID NO: 5024471 - DNA, 25 bp, Homo sapien
gccttaatcccttcagcacaggtca

SEQ ID NO: 5024472 - DNA, 25 bp, Homo sapien
catgctcttgagttgggtgggattc

SEQ ID NO: 5024473 - DNA, 25 bp, Homo sapien
tcaggaagaatatggcatcacgcag

SEQ ID NO: 5024474 - DNA, 25 bp, Homo sapien
catcacgcagagtaaggtagagggt

SEQ ID NO: 5024475 - DNA, 25 bp, Homo sapien
aatcagattcagacagggcttcttc

SEQ ID NO: 5024476 - DNA, 25 bp, Homo sapien
tcttctgagacggtggaatgttctt

SEQ ID NO: 5024477 - DNA, 25 bp, Homo sapien
tagagagttgggtgcagctaccatg

SEQ ID NO: 5024478 - DNA, 25 bp, Homo sapien
agctaccatggcctgagttgttttc

SEQ ID NO: 5024479 - DNA, 25 bp, Homo sapien
tgagggtttttggaaagtcgctgca

SEQ ID NO: 5024480 - DNA, 25 bp, Homo sapien
ctgtaatgccagaaatgagggtttt

SEQ ID NO: 5024481 - DNA, 25 bp, Homo sapien
gcatgtctgcttggttgtgagtctg

SEQ ID NO: 5024482 - DNA, 25 bp, Homo sapien
ttaactctgttattgccacaggctg

SEQ ID NO: 5024483 - DNA, 25 bp, Homo sapien
agggggcttccagccattatgtaag

SEQ ID NO: 5024484 - DNA, 25 bp, Homo sapien
cagcatatgaaagtgcctgtttccc

SEQ ID NO: 5024485 - DNA, 25 bp, Homo sapien
tgatggccattagggctgttcccaa

SEQ ID NO: 5024486 - DNA, 25 bp, Homo sapien
cactgaagactatatcccagatatc

SEQ ID NO: 5024487 - DNA, 25 bp, Homo sapien
tatagctgcatagcgctcgattgtg

SEQ ID NO: 5024488 - DNA, 25 bp, Homo sapien
ttgtaaatggagagtcagcgcccat

SEQ ID NO: 5024489 - DNA, 25 bp, Homo sapien
cttgtaaatggagagtcagcgccca

SEQ ID NO: 5024490 - DNA, 25 bp, Homo sapien
gcagctttcagcaccactgacctgg

SEQ ID NO: 5024491 - DNA, 25 bp, Homo sapien
cagctttcagcaccactgacctggc

SEQ ID NO: 5024492 - DNA, 25 bp, Homo sapien
tcagttgtcccaggtctaagtatca

SEQ ID NO: 5024493 - DNA, 25 bp, Homo sapien
tatgctgaggactcggccagtgctt

SEQ ID NO: 5024494 - DNA, 25 bp, Homo sapien
tgttcttagaatgccgcagacccgc

SEQ ID NO: 5024495 - DNA, 25 bp, Homo sapien
gggactccactgcaccgaattgtat

SEQ ID NO: 5024496 - DNA, 25 bp, Homo sapien
tttccagggacctccttgaatccag

SEQ ID NO: 5024497 - DNA, 25 bp, Homo sapien
tggcaaggagattgtcccacagtca

SEQ ID NO: 5024498 - DNA, 25 bp, Homo sapien
caaggagattgtcccacagtcagca

SEQ ID NO: 5024499 - DNA, 25 bp, Homo sapien
acactggcaaggagattgtcccaca

SEQ ID NO: 5024500 - DNA, 25 bp, Homo sapien
gccctggggctatagcttttcccaa

SEQ ID NO: 5024501 - DNA, 25 bp, Homo sapien
caatatccagattctagtccctcca

SEQ ID NO: 5024502 - DNA, 25 bp, Homo sapien
tccacacagattcctctagggactt

SEQ ID NO: 5024503 - DNA, 25 bp, Homo sapien
ggaaaatcttccagcaatatgaacc

SEQ ID NO: 5024504 - DNA, 25 bp, Homo sapien
ccaggttttgattctgcctcaacgt

SEQ ID NO: 5024505 - DNA, 25 bp, Homo sapien
caacgttgccgcagctgccttggct

SEQ ID NO: 5024506 - DNA, 25 bp, Homo sapien
gctgccttggcttagaattgttagt

SEQ ID NO: 5024507 - DNA, 25 bp, Homo sapien
cttctaagtgtgaatgactgggctt

SEQ ID NO: 5024508 - DNA, 25 bp, Homo sapien
tctgggaagcaactgtggtgagact

SEQ ID NO: 5024509 - DNA, 25 bp, Homo sapien
ttttctgggaagcaactgtggtgag

SEQ ID NO: 5024510 - DNA, 25 bp, Homo sapien
gtgttttctgggaagcaactgtggt

SEQ ID NO: 5024511 - DNA, 25 bp, Homo sapien
ggaagcaactgtggtgagactggac

SEQ ID NO: 5024512 - DNA, 25 bp, Homo sapien
ccttcacagactcatagcatggcct

SEQ ID NO: 5024513 - DNA, 25 bp, Homo sapien
cgattttctgggctcaacttgtgaa

SEQ ID NO: 5024514 - DNA, 25 bp, Homo sapien
tgctgcaaggatgccagttagccga

SEQ ID NO: 5024515 - DNA, 25 bp, Homo sapien
tgctactcttccagccatgaccttg

SEQ ID NO: 5024516 - DNA, 25 bp, Homo sapien
tttagcatccttcaagcccttgcct

SEQ ID NO: 5024517 - DNA, 25 bp, Homo sapien
ttcctcgtgactcaccagggagaga

SEQ ID NO: 5024518 - DNA, 25 bp, Homo sapien
ggaggcttccaactttagcatcctt

SEQ ID NO: 5024519 - DNA, 25 bp, Homo sapien
agcccttgcctcgttcctcgtgact

SEQ ID NO: 5024520 - DNA, 25 bp, Homo sapien
ctgctaccattgggggtcctatttt

SEQ ID NO: 5024521 - DNA, 25 bp, Homo sapien
aggtaatatcggccacgtgctgttc

SEQ ID NO: 5024522 - DNA, 25 bp, Homo sapien
tctgctaccattgggggtcctattt

SEQ ID NO: 5024523 - DNA, 25 bp, Homo sapien
ttctgctaccattgggggtcctatt

SEQ ID NO: 5024524 - DNA, 25 bp, Homo sapien
gaggttttccacagggattcttgta

SEQ ID NO: 5024525 - DNA, 25 bp, Homo sapien
cagtagtgtagagtcttgataagcc

SEQ ID NO: 5024526 - DNA, 25 bp, Homo sapien
ccttctcggtgatgcatgagctgcg

SEQ ID NO: 5024527 - DNA, 25 bp, Homo sapien
gagctgcgtgttctgatttctagga

SEQ ID NO: 5024528 - DNA, 25 bp, Homo sapien
gctagttgtactaaggtcagaaaat

SEQ ID NO: 5024529 - DNA, 25 bp, Homo sapien
gtgccaactacagttgatgtggaaa

SEQ ID NO: 5024530 - DNA, 25 bp, Homo sapien
gaaaaaggacacttatatactgttg

SEQ ID NO: 5024531 - DNA, 25 bp, Homo sapien
tcagaaaatgtcaaggagtaaaaaa

SEQ ID NO: 5024532 - DNA, 25 bp, Homo sapien
acccctaaaattcatggcttgaagg

SEQ ID NO: 5024533 - DNA, 25 bp, Homo sapien
tgcaaggtaatatggcctgagctgt

SEQ ID NO: 5024534 - DNA, 25 bp, Homo sapien
tcttatgtgagatcataaatgttat

SEQ ID NO: 5024535 - DNA, 25 bp, Homo sapien
gtgtacccctaaaattcatggcttg

SEQ ID NO: 5024536 - DNA, 25 bp, Homo sapien
gtggtgctcttgaagcaaaggtgaa

SEQ ID NO: 5024537 - DNA, 25 bp, Homo sapien
gcaactcctgtaatacggtctggtg

SEQ ID NO: 5024538 - DNA, 25 bp, Homo sapien
aactgctgcctgatttgttgggacc

SEQ ID NO: 5024539 - DNA, 25 bp, Homo sapien
ggcaagactgtcttacctggcagca

SEQ ID NO: 5024540 - DNA, 25 bp, Homo sapien
tagcagagagtccaagcagaagggc

SEQ ID NO: 5024541 - DNA, 25 bp, Homo sapien
caatctggatttcacggagacagca

SEQ ID NO: 5024542 - DNA, 25 bp, Homo sapien
actggcattactcagcaggagcccc

SEQ ID NO: 5024543 - DNA, 25 bp, Homo sapien
tgtgattcatatgtccccactggca

SEQ ID NO: 5024544 - DNA, 25 bp, Homo sapien
gcagtgatcctgcaagttcaagggc

SEQ ID NO: 5024545 - DNA, 25 bp, Homo sapien
ttgggcaacatagcaagacaccatc

SEQ ID NO: 5024546 - DNA, 25 bp, Homo sapien
tgggcaacatagcaagacaccatct

SEQ ID NO: 5024547 - DNA, 25 bp, Homo sapien
gatgccaggaatttaagaccagctt

SEQ ID NO: 5024548 - DNA, 25 bp, Homo sapien
ggatcacttgatgccaggaatttaa

SEQ ID NO: 5024549 - DNA, 25 bp, Homo sapien
gatggcctgtgaagcaaggtatggc

SEQ ID NO: 5024550 - DNA, 25 bp, Homo sapien
ggcttcaggtacagaagaccaatcc

SEQ ID NO: 5024551 - DNA, 25 bp, Homo sapien
ctaggagtacttaagccagagggag

SEQ ID NO: 5024552 - DNA, 25 bp, Homo sapien
cctaactggatgtttcatggctctg

SEQ ID NO: 5024553 - DNA, 25 bp, Homo sapien
gtaaagtcctacagtttagatacac

SEQ ID NO: 5024554 - DNA, 25 bp, Homo sapien
tgcctattaggtgctgtattggttc

SEQ ID NO: 5024555 - DNA, 25 bp, Homo sapien
cccatgcatgtctgcttaggcagaa

SEQ ID NO: 5024556 - DNA, 25 bp, Homo sapien
gatacacaaacccatgcatgtctgc

SEQ ID NO: 5024557 - DNA, 25 bp, Homo sapien
gatccaaaccatatccggtgccaag

SEQ ID NO: 5024558 - DNA, 25 bp, Homo sapien
tacaggaatttgcttcttggccaga

SEQ ID NO: 5024559 - DNA, 25 bp, Homo sapien
tagacgacaaccagacagcaacttg

SEQ ID NO: 5024560 - DNA, 25 bp, Homo sapien
tctgacccaggaacttgagctactg

SEQ ID NO: 5024561 - DNA, 25 bp, Homo sapien
tgcacacgacagacagtatccggac

SEQ ID NO: 5024562 - DNA, 25 bp, Homo sapien
cactcttgtaggtgcacaggaaaca

SEQ ID NO: 5024563 - DNA, 25 bp, Homo sapien
gagctatggccagacaaggctcctt

SEQ ID NO: 5024564 - DNA, 25 bp, Homo sapien
cagtccatagacttaggtgttcaag

SEQ ID NO: 5024565 - DNA, 25 bp, Homo sapien
tttcctcacactctaagacagggct

SEQ ID NO: 5024566 - DNA, 25 bp, Homo sapien
tctgataacagacctggctatacag

SEQ ID NO: 5024567 - DNA, 25 bp, Homo sapien
gcagtttatgacatgggaacccaaa

SEQ ID NO: 5024568 - DNA, 25 bp, Homo sapien
caagcggataatctgtgactggaag

SEQ ID NO: 5024569 - DNA, 25 bp, Homo sapien
catgttgttatggagctgtctcagc

SEQ ID NO: 5024570 - DNA, 25 bp, Homo sapien
ggtctttgacgcctgtatcctcaca

SEQ ID NO: 5024571 - DNA, 25 bp, Homo sapien
gaagacactgccttgactccataca

SEQ ID NO: 5024572 - DNA, 25 bp, Homo sapien
gactgcagggcaaccaaaggaactg

SEQ ID NO: 5024573 - DNA, 25 bp, Homo sapien
tgaccacaaagctgactgagcagat

SEQ ID NO: 5024574 - DNA, 25 bp, Homo sapien
taaatggtgtgcctaagcattgaca

SEQ ID NO: 5024575 - DNA, 25 bp, Homo sapien
gcagatttcaatggctatacactac

SEQ ID NO: 5024576 - DNA, 25 bp, Homo sapien
cacttactggtttcaggtatctaag

SEQ ID NO: 5024577 - DNA, 25 bp, Homo sapien
tgagggccagtgcttccaagactat

SEQ ID NO: 5024578 - DNA, 25 bp, Homo sapien
catctagagtgaggatgaagcctcc

SEQ ID NO: 5024579 - DNA, 25 bp, Homo sapien
gaaagtcgcaggtgcttccaatagg

SEQ ID NO: 5024580 - DNA, 25 bp, Homo sapien
tgggcgggtaatcaataacagctgc

SEQ ID NO: 5024581 - DNA, 25 bp, Homo sapien
tatgaactaagccttacatcctgct

SEQ ID NO: 5024582 - DNA, 25 bp, Homo sapien
cgtggcttggaaatgaaggaccctc

SEQ ID NO: 5024583 - DNA, 25 bp, Homo sapien
tgaactaagccttacatcctgctgt

SEQ ID NO: 5024584 - DNA, 25 bp, Homo sapien
ctgctgtactcgtggcttggaaatg

SEQ ID NO: 5024585 - DNA, 25 bp, Homo sapien
ctctctttctacaggtggtagagtt

SEQ ID NO: 5024586 - DNA, 25 bp, Homo sapien
gcgtatcttagactgcctgtggttg

SEQ ID NO: 5024587 - DNA, 25 bp, Homo sapien
ccaaatcgtttaagctgtcttccag

SEQ ID NO: 5024588 - DNA, 25 bp, Homo sapien
acctcactatgggtagggcagctcc

SEQ ID NO: 5024589 - DNA, 25 bp, Homo sapien
caaattctggcctggtagagacagc

SEQ ID NO: 5024590 - DNA, 25 bp, Homo sapien
tatcttcttagtgtgattttaggga

SEQ ID NO: 5024591 - DNA, 25 bp, Homo sapien
cttagtgtgattttagggatgctga

SEQ ID NO: 5024592 - DNA, 25 bp, Homo sapien
gccccaaattctggcctggtagaga

SEQ ID NO: 5024593 - DNA, 25 bp, Homo sapien
ggtaaaatcacattcgtggttcatc

SEQ ID NO: 5024594 - DNA, 25 bp, Homo sapien
tcacatgggcttaagcttccgacag

SEQ ID NO: 5024595 - DNA, 25 bp, Homo sapien
cagagtttgctgcaaggcttaaatg

SEQ ID NO: 5024596 - DNA, 25 bp, Homo sapien
cacattcgtggttcatcacatgggc

SEQ ID NO: 5024597 - DNA, 25 bp, Homo sapien
caagttcctcaatctctgcgagcca

SEQ ID NO: 5024598 - DNA, 25 bp, Homo sapien
aagttcctcaatctctgcgagccat

SEQ ID NO: 5024599 - DNA, 25 bp, Homo sapien
gggcaagttcctcaatctctgcgag

SEQ ID NO: 5024600 - DNA, 25 bp, Homo sapien
ttgggcaagttcctcaatctctgcg

SEQ ID NO: 5024601 - DNA, 25 bp, Homo sapien
caaggaactctggattggagaaagg

SEQ ID NO: 5024602 - DNA, 25 bp, Homo sapien
aattcttcctttggcagcaaggaac

SEQ ID NO: 5024603 - DNA, 25 bp, Homo sapien
agggacaaaagctggcagggcttac

SEQ ID NO: 5024604 - DNA, 25 bp, Homo sapien
gcagcaaggaactctggattggaga

SEQ ID NO: 5024605 - DNA, 25 bp, Homo sapien
aaagatcttccatgtacatgggctg

SEQ ID NO: 5024606 - DNA, 25 bp, Homo sapien
ttccatgtacatgggctgctcaggg

SEQ ID NO: 5024607 - DNA, 25 bp, Homo sapien
gatcttccatgtacatgggctgctc

SEQ ID NO: 5024608 - DNA, 25 bp, Homo sapien
tcttccatgtacatgggctgctcag

SEQ ID NO: 5024609 - DNA, 25 bp, Homo sapien
tcctttcgaactcaagtcacttggg

SEQ ID NO: 5024610 - DNA, 25 bp, Homo sapien
cctgaaatccgcaaggaagtgggtt

SEQ ID NO: 5024611 - DNA, 25 bp, Homo sapien
ggtgaccaggctccccgaattaata

SEQ ID NO: 5024612 - DNA, 25 bp, Homo sapien
ggttcttttagagccagcgccaaga

SEQ ID NO: 5024613 - DNA, 25 bp, Homo sapien
tctgtgtagagcatggcacctgtgt

SEQ ID NO: 5024614 - DNA, 25 bp, Homo sapien
tctgttaggaatccaggacacttcc

SEQ ID NO: 5024615 - DNA, 25 bp, Homo sapien
cttgagtgcctcagatgggaagtgt

SEQ ID NO: 5024616 - DNA, 25 bp, Homo sapien
ggtagagaactcacgccttttcttg

SEQ ID NO: 5024617 - DNA, 25 bp, Homo sapien
catctggcctgttgagaacttctcc

SEQ ID NO: 5024618 - DNA, 25 bp, Homo sapien
taacagtaggaaaggataggatggc

SEQ ID NO: 5024619 - DNA, 25 bp, Homo sapien
tgaatgtgtggatctcatctggcct

SEQ ID NO: 5024620 - DNA, 25 bp, Homo sapien
gataggatcccaagcatagatgaca

SEQ ID NO: 5024621 - DNA, 25 bp, Homo sapien
tctaggcactagagttacaacaggc

SEQ ID NO: 5024622 - DNA, 25 bp, Homo sapien
atttatatgagaagacggtgaggcc

SEQ ID NO: 5024623 - DNA, 25 bp, Homo sapien
tatgagattgcctactcagtttcaa

SEQ ID NO: 5024624 - DNA, 25 bp, Homo sapien
caagtcaccaaggatgatgacagca

SEQ ID NO: 5024625 - DNA, 25 bp, Homo sapien
gtcttaaagtgatcctgctatatta

SEQ ID NO: 5024626 - DNA, 25 bp, Homo sapien
ccatcacagtgtatcaaattaagca

SEQ ID NO: 5024627 - DNA, 25 bp, Homo sapien
tcctgactctgtgcggtattaactg

SEQ ID NO: 5024628 - DNA, 25 bp, Homo sapien
tacttgccttatacgttgtccataa

SEQ ID NO: 5024629 - DNA, 25 bp, Homo sapien
tacttatcataatggcaggccaggg

SEQ ID NO: 5024630 - DNA, 25 bp, Homo sapien
tgaccggaaatgaaagactacccac

SEQ ID NO: 5024631 - DNA, 25 bp, Homo sapien
tatcttgcaccagtaacttagggtc

SEQ ID NO: 5024632 - DNA, 25 bp, Homo sapien
gactacccacgttgaaagcatatag

SEQ ID NO: 5024633 - DNA, 25 bp, Homo sapien
tccaacagctgggtaatcaatttcc

SEQ ID NO: 5024634 - DNA, 25 bp, Homo sapien
tgatggttcaatccccgtgcacttg

SEQ ID NO: 5024635 - DNA, 25 bp, Homo sapien
gccggagtatgggtggaacttcttc

SEQ ID NO: 5024636 - DNA, 25 bp, Homo sapien
gaagtctaagaactgagccggagta

SEQ ID NO: 5024637 - DNA, 25 bp, Homo sapien
gtcctgggcttgtttttgttgatag

SEQ ID NO: 5024638 - DNA, 25 bp, Homo sapien
gcttgtttttgttgataggctatta

SEQ ID NO: 5024639 - DNA, 25 bp, Homo sapien
ctgggcttgtttttgttgataggct

SEQ ID NO: 5024640 - DNA, 25 bp, Homo sapien
gggcttgtttttgttgataggctat

SEQ ID NO: 5024641 - DNA, 25 bp, Homo sapien
catttgcagaactgccgcgacctgc

SEQ ID NO: 5024642 - DNA, 25 bp, Homo sapien
gaaaacctgcatgggtctataggga

SEQ ID NO: 5024643 - DNA, 25 bp, Homo sapien
gcaaattatataaccagccctggct

SEQ ID NO: 5024644 - DNA, 25 bp, Homo sapien
ttagttagttaccagcccaggactg

SEQ ID NO: 5024645 - DNA, 25 bp, Homo sapien
taccatttggtagagaatatcagac

SEQ ID NO: 5024646 - DNA, 25 bp, Homo sapien
aatgaccaatccagtaatgcccaga

SEQ ID NO: 5024647 - DNA, 25 bp, Homo sapien
tacagtatgccagcaaaccaacttg

SEQ ID NO: 5024648 - DNA, 25 bp, Homo sapien
tactggaaaacaaggcagctatgaa

SEQ ID NO: 5024649 - DNA, 25 bp, Homo sapien
tgtggtgtgcttatttcagcagcac

SEQ ID NO: 5024650 - DNA, 25 bp, Homo sapien
gagacaaatgtggtgtgcttatttc

SEQ ID NO: 5024651 - DNA, 25 bp, Homo sapien
aataagagacaaatgtggtgtgctt

SEQ ID NO: 5024652 - DNA, 25 bp, Homo sapien
catcatgtaaactaaaccaatgata

SEQ ID NO: 5024653 - DNA, 25 bp, Homo sapien
gaaaacacacgaacatagggaagga

SEQ ID NO: 5024654 - DNA, 25 bp, Homo sapien
tgagaagatactgtggaggccatga

SEQ ID NO: 5024655 - DNA, 25 bp, Homo sapien
gaaggccagcttacgaggctgttaa

SEQ ID NO: 5024656 - DNA, 25 bp, Homo sapien
gaagatatatgaagagcccacagac

SEQ ID NO: 5024657 - DNA, 25 bp, Homo sapien
gtgtaataccctaaaagcacaggca

SEQ ID NO: 5024658 - DNA, 25 bp, Homo sapien
gagagaatagattagagaaatgtca

SEQ ID NO: 5024659 - DNA, 25 bp, Homo sapien
tgccactctgaagaatacacctctg

SEQ ID NO: 5024660 - DNA, 25 bp, Homo sapien
tccaaagttagttcttgtgtaatac

SEQ ID NO: 5024661 - DNA, 25 bp, Homo sapien
tccctcaaagcaagagtcaatcgat

SEQ ID NO: 5024662 - DNA, 25 bp, Homo sapien
acatgcttgaggtgacggatgcccc

SEQ ID NO: 5024663 - DNA, 25 bp, Homo sapien
gcagggatggaaaggatcgactcca

SEQ ID NO: 5024664 - DNA, 25 bp, Homo sapien
aaatgctatcaaacaccaccacaag

SEQ ID NO: 5024665 - DNA, 25 bp, Homo sapien
tgttaagtccaagtccgaaagctgg

SEQ ID NO: 5024666 - DNA, 25 bp, Homo sapien
cctcagctgattggactgcgtccac

SEQ ID NO: 5024667 - DNA, 25 bp, Homo sapien
gcctttttgttgaatgcagccctca

SEQ ID NO: 5024668 - DNA, 25 bp, Homo sapien
aaagattgcaactcactgaaggctg

SEQ ID NO: 5024669 - DNA, 25 bp, Homo sapien
ccatatagcataatcgtggaggtgc

SEQ ID NO: 5024670 - DNA, 25 bp, Homo sapien
tacaggtttcaaccatgctcaaggg

SEQ ID NO: 5024671 - DNA, 25 bp, Homo sapien
tacaagagagggaaagtcacgacat

SEQ ID NO: 5024672 - DNA, 25 bp, Homo sapien
tctgcttatcagactgccacctggt

SEQ ID NO: 5024673 - DNA, 25 bp, Homo sapien
aatatagaggtagttggaggtggaa

SEQ ID NO: 5024674 - DNA, 25 bp, Homo sapien
ggaagctatagatatcaaccataac

SEQ ID NO: 5024675 - DNA, 25 bp, Homo sapien
gttggaggtggaagctatagatatc

SEQ ID NO: 5024676 - DNA, 25 bp, Homo sapien
caaccataactttgtgaccattaca

SEQ ID NO: 5024677 - DNA, 25 bp, Homo sapien
catcttgtctatgtctggattggct

SEQ ID NO: 5024678 - DNA, 25 bp, Homo sapien
gtctatgtctggattggcttggaac

SEQ ID NO: 5024679 - DNA, 25 bp, Homo sapien
ttccacatcttgtctatgtctggat

SEQ ID NO: 5024680 - DNA, 25 bp, Homo sapien
taaatgcaatatcccatgctccctc

SEQ ID NO: 5024681 - DNA, 25 bp, Homo sapien
tggcccaggcacactaagcgccttt

SEQ ID NO: 5024682 - DNA, 25 bp, Homo sapien
ttcagactccatcgaccaggtccaa

SEQ ID NO: 5024683 - DNA, 25 bp, Homo sapien
taccctagctgctgtaggtgttggc

SEQ ID NO: 5024684 - DNA, 25 bp, Homo sapien
taatcctctcaataatcctacggct

SEQ ID NO: 5024685 - DNA, 25 bp, Homo sapien
tgagatattccttacgagttcttaa

SEQ ID NO: 5024686 - DNA, 25 bp, Homo sapien
cgagttcttaatctatagctgtaat

SEQ ID NO: 5024687 - DNA, 25 bp, Homo sapien
actcttaccaggctttgtgagatat

SEQ ID NO: 5024688 - DNA, 25 bp, Homo sapien
agaactcttaccaggctttgtgaga

SEQ ID NO: 5024689 - DNA, 25 bp, Homo sapien
catctgcatgttataagatattaca

SEQ ID NO: 5024690 - DNA, 25 bp, Homo sapien
aacttataaagcattcatctgcatg

SEQ ID NO: 5024691 - DNA, 25 bp, Homo sapien
gggactaatatcaagatttcatatg

SEQ ID NO: 5024692 - DNA, 25 bp, Homo sapien
tattcatttgggagtacataggcgg

SEQ ID NO: 5024693 - DNA, 25 bp, Homo sapien
gcaatccaggcaagtaagctcacaa

SEQ ID NO: 5024694 - DNA, 25 bp, Homo sapien
caaatagatggtagtgcaacagcac

SEQ ID NO: 5024695 - DNA, 25 bp, Homo sapien
aaagagcttgttgctgccttgggca

SEQ ID NO: 5024696 - DNA, 25 bp, Homo sapien
gccatttcaggcagaggtagccaag

SEQ ID NO: 5024697 - DNA, 25 bp, Homo sapien
gtaaaaaatgtgagacgttttcata

SEQ ID NO: 5024698 - DNA, 25 bp, Homo sapien
tctaaggtcaagtaaaaaatgtgag

SEQ ID NO: 5024699 - DNA, 25 bp, Homo sapien
aaaaaatgtgagacgttttcatata

SEQ ID NO: 5024700 - DNA, 25 bp, Homo sapien
tctctaaggtcaagtaaaaaatgtg

SEQ ID NO: 5024701 - DNA, 25 bp, Homo sapien
aatcaaattaggagcaattcccttg

SEQ ID NO: 5024702 - DNA, 25 bp, Homo sapien
gagtcactctaatcaaattaggagc

SEQ ID NO: 5024703 - DNA, 25 bp, Homo sapien
tacagcaggctggagtcactctaat

SEQ ID NO: 5024704 - DNA, 25 bp, Homo sapien
cttgtaaaatccaccgacgccttct

SEQ ID NO: 5024705 - DNA, 25 bp, Homo sapien
caacaggatggtctaagatatgcaa

SEQ ID NO: 5024706 - DNA, 25 bp, Homo sapien
gcaaggtaccttgtcaaagcaattt

SEQ ID NO: 5024707 - DNA, 25 bp, Homo sapien
ggcctttgctataaaactagtatca

SEQ ID NO: 5024708 - DNA, 25 bp, Homo sapien
catggtcacatacgtaataactggg

SEQ ID NO: 5024709 - DNA, 25 bp, Homo sapien
gaagacgagctcttacgacttgata

SEQ ID NO: 5024710 - DNA, 25 bp, Homo sapien
acatgtgttgatcctgaagacgagc

SEQ ID NO: 5024711 - DNA, 25 bp, Homo sapien
tgtgattacatctattacaccactg

SEQ ID NO: 5024712 - DNA, 25 bp, Homo sapien
gatatgggtatgttgctgcgacagc

SEQ ID NO: 5024713 - DNA, 25 bp, Homo sapien
taatctattgatatgctggttgtac

SEQ ID NO: 5024714 - DNA, 25 bp, Homo sapien
acttcaacttcagcaattcatatgc

SEQ ID NO: 5024715 - DNA, 25 bp, Homo sapien
caactgggcttctggtaatctattg

SEQ ID NO: 5024716 - DNA, 25 bp, Homo sapien
ggcaccatgcgatgttccaaacagc

SEQ ID NO: 5024717 - DNA, 25 bp, Homo sapien
catataaagaagacccacactgtca

SEQ ID NO: 5024718 - DNA, 25 bp, Homo sapien
tgtgagtgggaaactaaattctgga

SEQ ID NO: 5024719 - DNA, 25 bp, Homo sapien
ggtcagtaaaatcatatcagcctta

SEQ ID NO: 5024720 - DNA, 25 bp, Homo sapien
taagcaatagatgggaatagaaggc

SEQ ID NO: 5024721 - DNA, 25 bp, Homo sapien
cccataatgggtttgtaatgcagag

SEQ ID NO: 5024722 - DNA, 25 bp, Homo sapien
cataaggcgagtttttgttacccat

SEQ ID NO: 5024723 - DNA, 25 bp, Homo sapien
gggagttaacaacagcatcatactg

SEQ ID NO: 5024724 - DNA, 25 bp, Homo sapien
cattcctttatattgtcggtgtggg

SEQ ID NO: 5024725 - DNA, 25 bp, Homo sapien
gggcatatttaaactcaggtgttca

SEQ ID NO: 5024726 - DNA, 25 bp, Homo sapien
gatttaatacagttagatgggcata

SEQ ID NO: 5024727 - DNA, 25 bp, Homo sapien
gcaggattatcgcttgaaacccgaa

SEQ ID NO: 5024728 - DNA, 25 bp, Homo sapien
tcttgaaatctgcacagagtaatca

SEQ ID NO: 5024729 - DNA, 25 bp, Homo sapien
tgttgcctctaaacgttcagctctt

SEQ ID NO: 5024730 - DNA, 25 bp, Homo sapien
acaaggtattctgttgcctctaaac

SEQ ID NO: 5024731 - DNA, 25 bp, Homo sapien
gagacaaggtattctgttgcctcta

SEQ ID NO: 5024732 - DNA, 25 bp, Homo sapien
tgagacaaggtattctgttgcctct

SEQ ID NO: 5024733 - DNA, 25 bp, Homo sapien
gcagtttaatttgaataggtgtcat

SEQ ID NO: 5024734 - DNA, 25 bp, Homo sapien
tacagtgcgatgatggtttgtgtcc

SEQ ID NO: 5024735 - DNA, 25 bp, Homo sapien
gatcagaggcgtgctcagagcagca

SEQ ID NO: 5024736 - DNA, 25 bp, Homo sapien
taaataagctgaatgtgcctgccac

SEQ ID NO: 5024737 - DNA, 25 bp, Homo sapien
ccataaacttatgggagatcaagca

SEQ ID NO: 5024738 - DNA, 25 bp, Homo sapien
gtagagtccccaggataaacctgca

SEQ ID NO: 5024739 - DNA, 25 bp, Homo sapien
tcggtctcagttccaatccatcact

SEQ ID NO: 5024740 - DNA, 25 bp, Homo sapien
gtttccaaatggtagtcaagcaatg

SEQ ID NO: 5024741 - DNA, 25 bp, Homo sapien
tccttgataaagtccccgtagtcca

SEQ ID NO: 5024742 - DNA, 25 bp, Homo sapien
tttaaggaaatattagattagctct

SEQ ID NO: 5024743 - DNA, 25 bp, Homo sapien
aagtgtttattgagggcatactaag

SEQ ID NO: 5024744 - DNA, 25 bp, Homo sapien
tagctcttaatccaaaagtctctta

SEQ ID NO: 5024745 - DNA, 25 bp, Homo sapien
tactaagcactcaaataatatttaa

SEQ ID NO: 5024746 - DNA, 25 bp, Homo sapien
ggatcactatttaccattgccagga

SEQ ID NO: 5024747 - DNA, 25 bp, Homo sapien
ccaacgttacagcatgaagggagat

SEQ ID NO: 5024748 - DNA, 25 bp, Homo sapien
tgatacgtaacctccctaattcgct

SEQ ID NO: 5024749 - DNA, 25 bp, Homo sapien
gtacatcaggttttgtcagaagacc

SEQ ID NO: 5024750 - DNA, 25 bp, Homo sapien
gttatcctcatctgtatagcagata

SEQ ID NO: 5024751 - DNA, 25 bp, Homo sapien
gcagatatcataaactcacaggatt

SEQ ID NO: 5024752 - DNA, 25 bp, Homo sapien
gcaagttagtcaacttctgttatcc

SEQ ID NO: 5024753 - DNA, 25 bp, Homo sapien
tttacaaacttgtgacttgggcaag

SEQ ID NO: 5024754 - DNA, 25 bp, Homo sapien
tcttcacgaggtcgagcggatgcag

SEQ ID NO: 5024755 - DNA, 25 bp, Homo sapien
gcgcaaggttggataagacgccgcc

SEQ ID NO: 5024756 - DNA, 25 bp, Homo sapien
cggcgaagcggatcttcacgaggtc

SEQ ID NO: 5024757 - DNA, 25 bp, Homo sapien
gatgcagcgcaaggttggataagac

SEQ ID NO: 5024758 - DNA, 25 bp, Homo sapien
cataccggacgtggcggaataccgt

SEQ ID NO: 5024759 - DNA, 25 bp, Homo sapien
gcccgctatcaggttctcataccgg

SEQ ID NO: 5024760 - DNA, 25 bp, Homo sapien
tctcataccggacgtggcggaatac

SEQ ID NO: 5024761 - DNA, 25 bp, Homo sapien
tcaggttctcataccggacgtggcg

SEQ ID NO: 5024762 - DNA, 25 bp, Homo sapien
acgacccggacgccgactggccctg

SEQ ID NO: 5024763 - DNA, 25 bp, Homo sapien
gccgacgacccggacgccgactggc

SEQ ID NO: 5024764 - DNA, 25 bp, Homo sapien
gacccggacgccgactggccctggc

SEQ ID NO: 5024765 - DNA, 25 bp, Homo sapien
ctccacgccgacgacccggacgccg

SEQ ID NO: 5024766 - DNA, 25 bp, Homo sapien
gcgaagccggagactctagtactga

SEQ ID NO: 5024767 - DNA, 25 bp, Homo sapien
ctccgggaccaacgagaggactctt

SEQ ID NO: 5024768 - DNA, 25 bp, Homo sapien
tcttatgcccaaggcgcgtgagcga

SEQ ID NO: 5024769 - DNA, 25 bp, Homo sapien
gacggtcgccccttgtgagcgcaac

SEQ ID NO: 5024770 - DNA, 25 bp, Homo sapien
ggaagaccacggagaaaaagataga

SEQ ID NO: 5024771 - DNA, 25 bp, Homo sapien
tcagcttgtctagttgatgtcatca

SEQ ID NO: 5024772 - DNA, 25 bp, Homo sapien
cagaatttcttagttgaaagactcc

SEQ ID NO: 5024773 - DNA, 25 bp, Homo sapien
tgtttttagccagaggatacaatga

SEQ ID NO: 5024774 - DNA, 25 bp, Homo sapien
cagtcctacagaaggttgggccagg

SEQ ID NO: 5024775 - DNA, 25 bp, Homo sapien
cctaacacctgtggtaagagatgga

SEQ ID NO: 5024776 - DNA, 25 bp, Homo sapien
gcagctaatgtagtggtgaatccag

SEQ ID NO: 5024777 - DNA, 25 bp, Homo sapien
tcacttgtgtaggacaaagcggagg

SEQ ID NO: 5024778 - DNA, 25 bp, Homo sapien
cctttgacagctgtcttagcttggg

SEQ ID NO: 5024779 - DNA, 25 bp, Homo sapien
tcagaggtcctggttagcggctttc

SEQ ID NO: 5024780 - DNA, 25 bp, Homo sapien
ggttagcggctttcagatgtctacc

SEQ ID NO: 5024781 - DNA, 25 bp, Homo sapien
ggctttcagatgtctacctttgaca

SEQ ID NO: 5024782 - DNA, 25 bp, Homo sapien
tgttgagtagtgtcatggaaccctg

SEQ ID NO: 5024783 - DNA, 25 bp, Homo sapien
tataatgagggcttggaatccagtt

SEQ ID NO: 5024784 - DNA, 25 bp, Homo sapien
agttaagctccctagaccctcagtg

SEQ ID NO: 5024785 - DNA, 25 bp, Homo sapien
gcctctggtgctactgaatgaaata

SEQ ID NO: 5024786 - DNA, 25 bp, Homo sapien
ctctgcctttcgttacctttcctag

SEQ ID NO: 5024787 - DNA, 25 bp, Homo sapien
tcccaagtcaccgcaattacaggtg

SEQ ID NO: 5024788 - DNA, 25 bp, Homo sapien
cccaagtcaccgcaattacaggtgt

SEQ ID NO: 5024789 - DNA, 25 bp, Homo sapien
ccaccatttcatgtgataggagaca

SEQ ID NO: 5024790 - DNA, 25 bp, Homo sapien
gaaggccatcttagtttccgtatgc

SEQ ID NO: 5024791 - DNA, 25 bp, Homo sapien
tccgtatgcctccagtagtgtgtgc

SEQ ID NO: 5024792 - DNA, 25 bp, Homo sapien
tcagggatgttagccagccattttc

SEQ ID NO: 5024793 - DNA, 25 bp, Homo sapien
tttgtgtttacagtgatttcacccc

SEQ ID NO: 5024794 - DNA, 25 bp, Homo sapien
atacctgaccaatttggatgctggg

SEQ ID NO: 5024795 - DNA, 25 bp, Homo sapien
tagaaaatttgatgcctgacctcat

SEQ ID NO: 5024796 - DNA, 25 bp, Homo sapien
gggaatacatcagtgcacaagacaa

SEQ ID NO: 5024797 - DNA, 25 bp, Homo sapien
gagtagaagttaatcatcaggcacc

SEQ ID NO: 5024798 - DNA, 25 bp, Homo sapien
caattattacttgaagccattacgg

SEQ ID NO: 5024799 - DNA, 25 bp, Homo sapien
ttatcttagtaccaacccagcacag

SEQ ID NO: 5024800 - DNA, 25 bp, Homo sapien
aaatctgttaaatctcatattccca

SEQ ID NO: 5024801 - DNA, 25 bp, Homo sapien
attaagtcaggtttacaagagcatc

SEQ ID NO: 5024802 - DNA, 25 bp, Homo sapien
gggtctgtcatcacttccatttgca

SEQ ID NO: 5024803 - DNA, 25 bp, Homo sapien
catcttgggttgtaatagggaagca

SEQ ID NO: 5024804 - DNA, 25 bp, Homo sapien
catttgcaagggatgaagactgcca

SEQ ID NO: 5024805 - DNA, 25 bp, Homo sapien
gagtgaagttgcttgagtgaaccca

SEQ ID NO: 5024806 - DNA, 25 bp, Homo sapien
tgtaatatacttagggaggcaagac

SEQ ID NO: 5024807 - DNA, 25 bp, Homo sapien
gctctctgttgcagctcagcactga

SEQ ID NO: 5024808 - DNA, 25 bp, Homo sapien
gtgaacccagggactcattgcttaa

SEQ ID NO: 5024809 - DNA, 25 bp, Homo sapien
gagaacacgacccaaccagggtgaa

SEQ ID NO: 5024810 - DNA, 25 bp, Homo sapien
taacagcgtccagactttaacttgg

SEQ ID NO: 5024811 - DNA, 25 bp, Homo sapien
ttttgctagatgtaagctgagggcc

SEQ ID NO: 5024812 - DNA, 25 bp, Homo sapien
tatgcatgtgaagcctggaaccagt

SEQ ID NO: 5024813 - DNA, 25 bp, Homo sapien
agcctggtgacagaatgagattcca

SEQ ID NO: 5024814 - DNA, 25 bp, Homo sapien
gcctggtgacagaatgagattccat

SEQ ID NO: 5024815 - DNA, 25 bp, Homo sapien
caaatttccaattctcttataaaag

SEQ ID NO: 5024816 - DNA, 25 bp, Homo sapien
tccaaatttccaattctcttataaa

SEQ ID NO: 5024817 - DNA, 25 bp, Homo sapien
tgtccaaatttccaattctcttata

SEQ ID NO: 5024818 - DNA, 25 bp, Homo sapien
ggatgatgaggttggattagaaatt

SEQ ID NO: 5024819 - DNA, 25 bp, Homo sapien
taggatgatgaggttggattagaaa

SEQ ID NO: 5024820 - DNA, 25 bp, Homo sapien
gatgatgaggttggattagaaattc

SEQ ID NO: 5024821 - DNA, 25 bp, Homo sapien
cataggatgatgaggttggattaga

SEQ ID NO: 5024822 - DNA, 25 bp, Homo sapien
tagacgattcttgctcctttcaccc

SEQ ID NO: 5024823 - DNA, 25 bp, Homo sapien
ccagcccgtctctagacgattcttg

SEQ ID NO: 5024824 - DNA, 25 bp, Homo sapien
tcacagcctccagtggtcgcttcat

SEQ ID NO: 5024825 - DNA, 25 bp, Homo sapien
tgagcgccaaaaagggcctgacaga

SEQ ID NO: 5024826 - DNA, 25 bp, Homo sapien
tgaggttcccaagagtggataattc

SEQ ID NO: 5024827 - DNA, 25 bp, Homo sapien
atgatgaggttcccaagagtggata

SEQ ID NO: 5024828 - DNA, 25 bp, Homo sapien
caaaattgaagtagactttctcatt

SEQ ID NO: 5024829 - DNA, 25 bp, Homo sapien
ttcaaaattgaagtagactttctca

SEQ ID NO: 5024830 - DNA, 25 bp, Homo sapien
gaatgcccgcagagctttgccagaa

SEQ ID NO: 5024831 - DNA, 25 bp, Homo sapien
tagaagaactgatttgaatgcccgc

SEQ ID NO: 5024832 - DNA, 25 bp, Homo sapien
tgtgtagccccattattgagtcgat

SEQ ID NO: 5024833 - DNA, 25 bp, Homo sapien
ttgagtcgattacagctagaagaac

SEQ ID NO: 5024834 - DNA, 25 bp, Homo sapien
caccatcatccccaagagcctgctc

SEQ ID NO: 5024835 - DNA, 25 bp, Homo sapien
cagtatgagctatattgttgaaacc

SEQ ID NO: 5024836 - DNA, 25 bp, Homo sapien
aggaagagactatcagtatgagcta

SEQ ID NO: 5024837 - DNA, 25 bp, Homo sapien
gagctatattgttgaaaccaccatc

SEQ ID NO: 5024838 - DNA, 25 bp, Homo sapien
tgcttgctcacattccagacattgg

SEQ ID NO: 5024839 - DNA, 25 bp, Homo sapien
ttaatttgcatactgggccttggag

SEQ ID NO: 5024840 - DNA, 25 bp, Homo sapien
cattggagccattgccatagtgagt

SEQ ID NO: 5024841 - DNA, 25 bp, Homo sapien
tgtggctgcactgtgcttgctcaca

SEQ ID NO: 5024842 - DNA, 25 bp, Homo sapien
cacatctgtgttcccgttcttggct

SEQ ID NO: 5024843 - DNA, 25 bp, Homo sapien
tgttcccgttcttggctcttggctg

SEQ ID NO: 5024844 - DNA, 25 bp, Homo sapien
tctgtgttcccgttcttggctcttg

SEQ ID NO: 5024845 - DNA, 25 bp, Homo sapien
gcacatctgtgttcccgttcttggc

SEQ ID NO: 5024846 - DNA, 25 bp, Homo sapien
tctttctgggccttcttggtcagga

SEQ ID NO: 5024847 - DNA, 25 bp, Homo sapien
gccttcttggtcaggaaaaatgtcc

SEQ ID NO: 5024848 - DNA, 25 bp, Homo sapien
tcaggaaaaatgtccatgtgttcat

SEQ ID NO: 5024849 - DNA, 25 bp, Homo sapien
ctgtctttctgggccttcttggtca

SEQ ID NO: 5024850 - DNA, 25 bp, Homo sapien
gaaaatgagtagtctgtgctccagt

SEQ ID NO: 5024851 - DNA, 25 bp, Homo sapien
tctaccatacaggagtttacattct

SEQ ID NO: 5024852 - DNA, 25 bp, Homo sapien
cagctctcctgtaaatgaatgtgca

SEQ ID NO: 5024853 - DNA, 25 bp, Homo sapien
ggcactgttctagaaatttgggaca

SEQ ID NO: 5024854 - DNA, 25 bp, Homo sapien
acaagttagcctgccgtggtttcag

SEQ ID NO: 5024855 - DNA, 25 bp, Homo sapien
taaaactagtgctagcacactgagg

SEQ ID NO: 5024856 - DNA, 25 bp, Homo sapien
cactgtcaactcatggtggatccag

SEQ ID NO: 5024857 - DNA, 25 bp, Homo sapien
gatgaagggctgttggttactcaca

SEQ ID NO: 5024858 - DNA, 25 bp, Homo sapien
ttcagaacaataagtcagtgcatct

SEQ ID NO: 5024859 - DNA, 25 bp, Homo sapien
gaaacaagggacatcgatgaattgc

SEQ ID NO: 5024860 - DNA, 25 bp, Homo sapien
gaattgccttccaacagagtattag

SEQ ID NO: 5024861 - DNA, 25 bp, Homo sapien
atcttctcacaggacatgaagaaac

SEQ ID NO: 5024862 - DNA, 25 bp, Homo sapien
gtaaggcttaccatctaaatctgag

SEQ ID NO: 5024863 - DNA, 25 bp, Homo sapien
caatcagtgctataagaagctgagc

SEQ ID NO: 5024864 - DNA, 25 bp, Homo sapien
tattcactggtgctataagtctgga

SEQ ID NO: 5024865 - DNA, 25 bp, Homo sapien
taagggagtagcctataaagcagct

SEQ ID NO: 5024866 - DNA, 25 bp, Homo sapien
tcagtgttacgagtggtacttggct

SEQ ID NO: 5024867 - DNA, 25 bp, Homo sapien
acgagtggtacttggctggtagaca

SEQ ID NO: 5024868 - DNA, 25 bp, Homo sapien
ttgggactccctgcgttgtttcagt

SEQ ID NO: 5024869 - DNA, 25 bp, Homo sapien
ccctgcgttgtttcagtgttacgag

SEQ ID NO: 5024870 - DNA, 25 bp, Homo sapien
ctatactctgtcctggcgaaggaca

SEQ ID NO: 5024871 - DNA, 25 bp, Homo sapien
tatactctgtcctggcgaaggacat

SEQ ID NO: 5024872 - DNA, 25 bp, Homo sapien
tctatactctgtcctggcgaaggac

SEQ ID NO: 5024873 - DNA, 25 bp, Homo sapien
ctctatactctgtcctggcgaagga

SEQ ID NO: 5024874 - DNA, 25 bp, Homo sapien
tgcaattcctttggtgtctttgcca

SEQ ID NO: 5024875 - DNA, 25 bp, Homo sapien
atttggttaagttacttgtagatgt

SEQ ID NO: 5024876 - DNA, 25 bp, Homo sapien
aattcctttggtgtctttgccatga

SEQ ID NO: 5024877 - DNA, 25 bp, Homo sapien
caattcctttggtgtctttgccatg

SEQ ID NO: 5024878 - DNA, 25 bp, Homo sapien
agagcaggtcttccacgtcaattac

SEQ ID NO: 5024879 - DNA, 25 bp, Homo sapien
ggccgcacctgagattttctaccaa

SEQ ID NO: 5024880 - DNA, 25 bp, Homo sapien
tacctggatgttgaggagctgagcc

SEQ ID NO: 5024881 - DNA, 25 bp, Homo sapien
tccagctggccactgcatatcatgg

SEQ ID NO: 5024882 - DNA, 25 bp, Homo sapien
ccgtggtgaggctgcttgccgtgcc

SEQ ID NO: 5024883 - DNA, 25 bp, Homo sapien
cagcccgtggtgaggctgcttgccg

SEQ ID NO: 5024884 - DNA, 25 bp, Homo sapien
gaggcagcccgtggtgaggctgctt

SEQ ID NO: 5024885 - DNA, 25 bp, Homo sapien
caccagggaggcagcccgtggtgag

SEQ ID NO: 5024886 - DNA, 25 bp, Homo sapien
ctgcagtaccacaagatcatggcgg

SEQ ID NO: 5024887 - DNA, 25 bp, Homo sapien
gcagcaagtgaagcgctagctggac

SEQ ID NO: 5024888 - DNA, 25 bp, Homo sapien
caagtgaagcgctagctggactcat

SEQ ID NO: 5024889 - DNA, 25 bp, Homo sapien
ccacaagatcatggcgggcagcaag

SEQ ID NO: 5024890 - DNA, 25 bp, Homo sapien
tgatgttttggtgcctttgcatctg

SEQ ID NO: 5024891 - DNA, 25 bp, Homo sapien
ttgatgttttggtgcctttgcatct

SEQ ID NO: 5024892 - DNA, 25 bp, Homo sapien
atgttttggtgcctttgcatctggc

SEQ ID NO: 5024893 - DNA, 25 bp, Homo sapien
catttgatgttttggtgcctttgca

SEQ ID NO: 5024894 - DNA, 25 bp, Homo sapien
ctcacgctgactttccagcttcttc

SEQ ID NO: 5024895 - DNA, 25 bp, Homo sapien
ccagcttcttctattgtattttcct

SEQ ID NO: 5024896 - DNA, 25 bp, Homo sapien
cacgctgactttccagcttcttcta

SEQ ID NO: 5024897 - DNA, 25 bp, Homo sapien
gactttccagcttcttctattgtat

SEQ ID NO: 5024898 - DNA, 25 bp, Homo sapien
ttttatgcctatcacaattttgcat

SEQ ID NO: 5024899 - DNA, 25 bp, Homo sapien
tatgcctatcacaattttgcatgtc

SEQ ID NO: 5024900 - DNA, 25 bp, Homo sapien
cttattccaaatgagaatactttca

SEQ ID NO: 5024901 - DNA, 25 bp, Homo sapien
tatcacaattttgcatgtctttcat

SEQ ID NO: 5024902 - DNA, 25 bp, Homo sapien
cctcaagtggtccccccacctcagc

SEQ ID NO: 5024903 - DNA, 25 bp, Homo sapien
atggagtcttactttgttgcccaga

SEQ ID NO: 5024904 - DNA, 25 bp, Homo sapien
tcaagtggtccccccacctcagctt

SEQ ID NO: 5024905 - DNA, 25 bp, Homo sapien
agtggtccccccacctcagcttcct

SEQ ID NO: 5024906 - DNA, 25 bp, Homo sapien
tcagggactaagtgtttggcagtgc

SEQ ID NO: 5024907 - DNA, 25 bp, Homo sapien
cagactatcgattggatgagctgca

SEQ ID NO: 5024908 - DNA, 25 bp, Homo sapien
tcaggtttattgagaagtgcaagtc

SEQ ID NO: 5024909 - DNA, 25 bp, Homo sapien
tgcaggttgtgtagcagcataagcc

SEQ ID NO: 5024910 - DNA, 25 bp, Homo sapien
gatttccagacctattgtagatctc

SEQ ID NO: 5024911 - DNA, 25 bp, Homo sapien
ttagagacacagacaccatggatct

SEQ ID NO: 5024912 - DNA, 25 bp, Homo sapien
tcatgggaatgctttagggtaatgc

SEQ ID NO: 5024913 - DNA, 25 bp, Homo sapien
ggtaatgctctggttgagcctctgg

SEQ ID NO: 5024914 - DNA, 25 bp, Homo sapien
gaatgtttagtagatttcacgtgtg

SEQ ID NO: 5024915 - DNA, 25 bp, Homo sapien
cgtgtgaattcacctggtcttgagc

SEQ ID NO: 5024916 - DNA, 25 bp, Homo sapien
catgagtcaggtaggattccctcct

SEQ ID NO: 5024917 - DNA, 25 bp, Homo sapien
cattggagatattgatctctatctc

SEQ ID NO: 5024918 - DNA, 25 bp, Homo sapien
tagctgggactgggagctacatgcc

SEQ ID NO: 5024919 - DNA, 25 bp, Homo sapien
ctgggactgggagctacatgccacc

SEQ ID NO: 5024920 - DNA, 25 bp, Homo sapien
gctgggactgggagctacatgccac

SEQ ID NO: 5024921 - DNA, 25 bp, Homo sapien
agtagctgggactgggagctacatg

SEQ ID NO: 5024922 - DNA, 25 bp, Homo sapien
gccttcgtggttaataaagctacat

SEQ ID NO: 5024923 - DNA, 25 bp, Homo sapien
tctcctacatgggtttgcattgtca

SEQ ID NO: 5024924 - DNA, 25 bp, Homo sapien
taaaattccaatgagaagaagttgc

SEQ ID NO: 5024925 - DNA, 25 bp, Homo sapien
catttttctgccaatgccttcgtgg

SEQ ID NO: 5024926 - DNA, 25 bp, Homo sapien
tcagcccagtaacatgatgaggtgg

SEQ ID NO: 5024927 - DNA, 25 bp, Homo sapien
tcagttctcaagctaccaagaaaac

SEQ ID NO: 5024928 - DNA, 25 bp, Homo sapien
ctgctgcagcgtcagttctcaagct

SEQ ID NO: 5024929 - DNA, 25 bp, Homo sapien
ctttgtgcctgctacaggaagagct

SEQ ID NO: 5024930 - DNA, 25 bp, Homo sapien
gtccagctttatggaattttcacca

SEQ ID NO: 5024931 - DNA, 25 bp, Homo sapien
tgctcttccaattggaccatataat

SEQ ID NO: 5024932 - DNA, 25 bp, Homo sapien
aagagaagcagacctgtccaacctg

SEQ ID NO: 5024933 - DNA, 25 bp, Homo sapien
gagctgaagaccaatgatgacaatc

SEQ ID NO: 5024934 - DNA, 25 bp, Homo sapien
tttaatgatccatcggctgacagtg

SEQ ID NO: 5024935 - DNA, 25 bp, Homo sapien
catatttgctctaaggttggcccag

SEQ ID NO: 5024936 - DNA, 25 bp, Homo sapien
taacaaagcacaatcaagaccatgg

SEQ ID NO: 5024937 - DNA, 25 bp, Homo sapien
ctacctttaggtgctgcaggacagc

SEQ ID NO: 5024938 - DNA, 25 bp, Homo sapien
taaatcaggctcttagactagttaa

SEQ ID NO: 5024939 - DNA, 25 bp, Homo sapien
tgcacccggccctaaaggatcattt

SEQ ID NO: 5024940 - DNA, 25 bp, Homo sapien
tcaatacctgatccctattaaagtg

SEQ ID NO: 5024941 - DNA, 25 bp, Homo sapien
tgaaaagtcttaagccaaaatagtg

SEQ ID NO: 5024942 - DNA, 25 bp, Homo sapien
ttcttgtacatacaccaagtgcacc

SEQ ID NO: 5024943 - DNA, 25 bp, Homo sapien
tctcaggaactaattggctaataca

SEQ ID NO: 5024944 - DNA, 25 bp, Homo sapien
ctcataaaggtggattttgaagaac

SEQ ID NO: 5024945 - DNA, 25 bp, Homo sapien
taaaggtggattttgaagaacagag

SEQ ID NO: 5024946 - DNA, 25 bp, Homo sapien
aaaggtggattttgaagaacagaga

SEQ ID NO: 5024947 - DNA, 25 bp, Homo sapien
cataaaggtggattttgaagaacag

SEQ ID NO: 5024948 - DNA, 25 bp, Homo sapien
ctttgcctgtatctccagctgtggc

SEQ ID NO: 5024949 - DNA, 25 bp, Homo sapien
taagtaagataattggtagattccc

SEQ ID NO: 5024950 - DNA, 25 bp, Homo sapien
tgaacctgaaatcaggaaccctgag

SEQ ID NO: 5024951 - DNA, 25 bp, Homo sapien
tgcagtcttttattcaaggccgtgt

SEQ ID NO: 5024952 - DNA, 25 bp, Homo sapien
gacattctgtcaggattgatgtaag

SEQ ID NO: 5024953 - DNA, 25 bp, Homo sapien
tctgccacttcgtagttaagcaagt

SEQ ID NO: 5024954 - DNA, 25 bp, Homo sapien
gactttcagccagcattgtgatgtc

SEQ ID NO: 5024955 - DNA, 25 bp, Homo sapien
taaccactgattccgttctcagact

SEQ ID NO: 5024956 - DNA, 25 bp, Homo sapien
tcaggcataaccactgattccgttc

SEQ ID NO: 5024957 - DNA, 25 bp, Homo sapien
ggcataaccactgattccgttctca

SEQ ID NO: 5024958 - DNA, 25 bp, Homo sapien
tccggccgctgattggcggggaccg

SEQ ID NO: 5024959 - DNA, 25 bp, Homo sapien
ccctccggccgctgattggcgggga

SEQ ID NO: 5024960 - DNA, 25 bp, Homo sapien
tccccctccggccgctgattggcgg

SEQ ID NO: 5024961 - DNA, 25 bp, Homo sapien
cggccgctgattggcggggaccgca

SEQ ID NO: 5024962 - DNA, 25 bp, Homo sapien
ctcggacgttcactgcgagcagccg

SEQ ID NO: 5024963 - DNA, 25 bp, Homo sapien
tcggacgttcactgcgagcagccgc

SEQ ID NO: 5024964 - DNA, 25 bp, Homo sapien
cggacgttcactgcgagcagccgct

SEQ ID NO: 5024965 - DNA, 25 bp, Homo sapien
cagagccggagtagcctgtctgcct

SEQ ID NO: 5024966 - DNA, 25 bp, Homo sapien
aaaagcgggtcctcgtccaagatgg

SEQ ID NO: 5024967 - DNA, 25 bp, Homo sapien
tggccggctactttccctgcatgaa

SEQ ID NO: 5024968 - DNA, 25 bp, Homo sapien
gcgtatcttgtaccgcgggaaaagc

SEQ ID NO: 5024969 - DNA, 25 bp, Homo sapien
tcgcagtccgggtattagcattcgg

SEQ ID NO: 5024970 - DNA, 25 bp, Homo sapien
ccttcgcagtccgggtattagcatt

SEQ ID NO: 5024971 - DNA, 25 bp, Homo sapien
cgcagtccgggtattagcattcggc

SEQ ID NO: 5024972 - DNA, 25 bp, Homo sapien
ttcgcagtccgggtattagcattcg

SEQ ID NO: 5024973 - DNA, 25 bp, Homo sapien
aaaactttgaaacaggaatgtcagc

SEQ ID NO: 5024974 - DNA, 25 bp, Homo sapien
cagcaaaactttgaaacaggaatgt

SEQ ID NO: 5024975 - DNA, 25 bp, Homo sapien
cagcagcaaaactttgaaacaggaa

SEQ ID NO: 5024976 - DNA, 25 bp, Homo sapien
gcaaaactttgaaacaggaatgtca

SEQ ID NO: 5024977 - DNA, 25 bp, Homo sapien
ctgttaggaacccatgagcattctt

SEQ ID NO: 5024978 - DNA, 25 bp, Homo sapien
ttaggaacccatgagcattcttttc

SEQ ID NO: 5024979 - DNA, 25 bp, Homo sapien
ccatttcttgccgttgattctgtct

SEQ ID NO: 5024980 - DNA, 25 bp, Homo sapien
ggagccagaaggctgttaggaaccc

SEQ ID NO: 5024981 - DNA, 25 bp, Homo sapien
tttggtccatcccaatacagccaga

SEQ ID NO: 5024982 - DNA, 25 bp, Homo sapien
tggtccatcccaatacagccagaag

SEQ ID NO: 5024983 - DNA, 25 bp, Homo sapien
gtccatcccaatacagccagaaggc

SEQ ID NO: 5024984 - DNA, 25 bp, Homo sapien
ccagtttggtccatcccaatacagc

SEQ ID NO: 5024985 - DNA, 25 bp, Homo sapien
taattgtaatatccagtgctgaccc

SEQ ID NO: 5024986 - DNA, 25 bp, Homo sapien
ggagtaatactttggtaccacatga

SEQ ID NO: 5024987 - DNA, 25 bp, Homo sapien
ccagtaaactggaggttagacctag

SEQ ID NO: 5024988 - DNA, 25 bp, Homo sapien
taagaggtgactgctagtttctctc

SEQ ID NO: 5024989 - DNA, 25 bp, Homo sapien
ggcgggaatcagagcagtcagtcca

SEQ ID NO: 5024990 - DNA, 25 bp, Homo sapien
tgtaatcctaggaagcatcaggtga

SEQ ID NO: 5024991 - DNA, 25 bp, Homo sapien
tacagccatgaagcggtgttacagg

SEQ ID NO: 5024992 - DNA, 25 bp, Homo sapien
cagactttgtagctccatgggcacg

SEQ ID NO: 5024993 - DNA, 25 bp, Homo sapien
taaaacgccaaaggatttctgctca

SEQ ID NO: 5024994 - DNA, 25 bp, Homo sapien
actatgccagtgaccgttgttgccc

SEQ ID NO: 5024995 - DNA, 25 bp, Homo sapien
tagcagcggccctcagtagagcatt

SEQ ID NO: 5024996 - DNA, 25 bp, Homo sapien
tctcgataacataagtggactgctg

SEQ ID NO: 5024997 - DNA, 25 bp, Homo sapien
tctttgctggactgtctcatctgaa

SEQ ID NO: 5024998 - DNA, 25 bp, Homo sapien
tccctgctggatttggcgacgactc

SEQ ID NO: 5024999 - DNA, 25 bp, Homo sapien
tctcatctgaagcacaagtcttcta

SEQ ID NO: 5025000 - DNA, 25 bp, Homo sapien
tctaagggaagcaaagagttccctc

SEQ ID NO: 5025001 - DNA, 25 bp, Homo sapien
tcttgggtgggctcacagtcacacc

SEQ ID NO: 5025002 - DNA, 25 bp, Homo sapien
tgtaacaattcggtccctgtctggg

SEQ ID NO: 5025003 - DNA, 25 bp, Homo sapien
gcaaatcttatgctctcgctggaga

SEQ ID NO: 5025004 - DNA, 25 bp, Homo sapien
agagcccctgcggactacagtggaa

SEQ ID NO: 5025005 - DNA, 25 bp, Homo sapien
tttgaagtcatctggactgagtgtt

SEQ ID NO: 5025006 - DNA, 25 bp, Homo sapien
ggactgagtgttctcattttgacta

SEQ ID NO: 5025007 - DNA, 25 bp, Homo sapien
agtcatctggactgagtgttctcat

SEQ ID NO: 5025008 - DNA, 25 bp, Homo sapien
ctggactgagtgttctcattttgac

SEQ ID NO: 5025009 - DNA, 25 bp, Homo sapien
ccacgatggcagagcgtcctgttcc

SEQ ID NO: 5025010 - DNA, 25 bp, Homo sapien
gccacgatggcagagcgtcctgttc

SEQ ID NO: 5025011 - DNA, 25 bp, Homo sapien
tgccacgatggcagagcgtcctgtt

SEQ ID NO: 5025012 - DNA, 25 bp, Homo sapien
gctgacttcgaatcatacatctttg

SEQ ID NO: 5025013 - DNA, 25 bp, Homo sapien
cctgtttaaaatcaagctgacttcg

SEQ ID NO: 5025014 - DNA, 25 bp, Homo sapien
cttctcctgtttaaaatcaagctga

SEQ ID NO: 5025015 - DNA, 25 bp, Homo sapien
taaaatcaagctgacttcgaatcat

SEQ ID NO: 5025016 - DNA, 25 bp, Homo sapien
ggtagcccttggtatggagctctcc

SEQ ID NO: 5025017 - DNA, 25 bp, Homo sapien
tccagggtgtcctttcaggtggggc

SEQ ID NO: 5025018 - DNA, 25 bp, Homo sapien
tttcaggtggggcacctttgtagaa

SEQ ID NO: 5025019 - DNA, 25 bp, Homo sapien
gagggccaggaggattcagtcctcc

SEQ ID NO: 5025020 - DNA, 25 bp, Homo sapien
tggtcaattgcttcttttgcggggc

SEQ ID NO: 5025021 - DNA, 25 bp, Homo sapien
cctgcctaaacagatgcctgcctgt

SEQ ID NO: 5025022 - DNA, 25 bp, Homo sapien
tttcctgcctaaacagatgcctgcc

SEQ ID NO: 5025023 - DNA, 25 bp, Homo sapien
gcctaaacagatgcctgcctgttat

SEQ ID NO: 5025024 - DNA, 25 bp, Homo sapien
cttttcctgcctaaacagatgcctg

SEQ ID NO: 5025025 - DNA, 25 bp, Homo sapien
actcacacagaaatcgtaaagcatt

SEQ ID NO: 5025026 - DNA, 25 bp, Homo sapien
tgtggcccctggcaatccctgtcat

SEQ ID NO: 5025027 - DNA, 25 bp, Homo sapien
ccagacccctttaggaagattcata

SEQ ID NO: 5025028 - DNA, 25 bp, Homo sapien
gattcataaagcgaatcactggtgc

SEQ ID NO: 5025029 - DNA, 25 bp, Homo sapien
aatcactggtgcttccgagtgggtg

SEQ ID NO: 5025030 - DNA, 25 bp, Homo sapien
gcttgcttcctgtgccatcgcaggc

SEQ ID NO: 5025031 - DNA, 25 bp, Homo sapien
atcagcttgcttcctgtgccatcgc

SEQ ID NO: 5025032 - DNA, 25 bp, Homo sapien
gcctgtgtcattcctctttgctcta

SEQ ID NO: 5025033 - DNA, 25 bp, Homo sapien
aagagcagggctggcatgactgcct

SEQ ID NO: 5025034 - DNA, 25 bp, Homo sapien
tgttaactccccttgaggtcagaaa

SEQ ID NO: 5025035 - DNA, 25 bp, Homo sapien
actgttaactccccttgaggtcaga

SEQ ID NO: 5025036 - DNA, 25 bp, Homo sapien
ctgttaactccccttgaggtcagaa

SEQ ID NO: 5025037 - DNA, 25 bp, Homo sapien
tacccaacaagacaaactaccacag

SEQ ID NO: 5025038 - DNA, 25 bp, Homo sapien
acaaactaccacagggcaggtcaag

SEQ ID NO: 5025039 - DNA, 25 bp, Homo sapien
caagacaaactaccacagggcaggt

SEQ ID NO: 5025040 - DNA, 25 bp, Homo sapien
ctgtttatacccaacaagacaaact

SEQ ID NO: 5025041 - DNA, 25 bp, Homo sapien
ccattggaccaatgggtgcttccat

SEQ ID NO: 5025042 - DNA, 25 bp, Homo sapien
gatacccacttaatggatcccattg

SEQ ID NO: 5025043 - DNA, 25 bp, Homo sapien
ttaatggatcccattggaccaatgg

SEQ ID NO: 5025044 - DNA, 25 bp, Homo sapien
tgccgactgccagatacccacttaa

SEQ ID NO: 5025045 - DNA, 25 bp, Homo sapien
gcctcttggctagatgttttcccat

SEQ ID NO: 5025046 - DNA, 25 bp, Homo sapien
aatccctgcctcttggctagatgtt

SEQ ID NO: 5025047 - DNA, 25 bp, Homo sapien
tttcccatcttgagagctgaagtca

SEQ ID NO: 5025048 - DNA, 25 bp, Homo sapien
cctgcctcttggctagatgttttcc

SEQ ID NO: 5025049 - DNA, 25 bp, Homo sapien
tgtgccggccagttaaccgttctcc

SEQ ID NO: 5025050 - DNA, 25 bp, Homo sapien
ggggtccttggatcatcttctccca

SEQ ID NO: 5025051 - DNA, 25 bp, Homo sapien
caggaggctttgtcgcctctacccg

SEQ ID NO: 5025052 - DNA, 25 bp, Homo sapien
gggctgacatgtggaacagccactg

SEQ ID NO: 5025053 - DNA, 25 bp, Homo sapien
tcaccagactgggaattcctcaaag

SEQ ID NO: 5025054 - DNA, 25 bp, Homo sapien
tacatatttgagtaggtcaccagac

SEQ ID NO: 5025055 - DNA, 25 bp, Homo sapien
gcgcccggccataacatggtggttc

SEQ ID NO: 5025056 - DNA, 25 bp, Homo sapien
tctggtgggtgagctaaaactgcct

SEQ ID NO: 5025057 - DNA, 25 bp, Homo sapien
gcatggtacagatgacagggcctgc

SEQ ID NO: 5025058 - DNA, 25 bp, Homo sapien
cacatcacgcagagccatggaattg

SEQ ID NO: 5025059 - DNA, 25 bp, Homo sapien
tgagagatatccttacagagtcaac

SEQ ID NO: 5025060 - DNA, 25 bp, Homo sapien
gaagcaaaatggtgcctcataaagg

SEQ ID NO: 5025061 - DNA, 25 bp, Homo sapien
ggaggcacagctaaatgacagcaaa

SEQ ID NO: 5025062 - DNA, 25 bp, Homo sapien
cacagggatcgtcatcttgggacac

SEQ ID NO: 5025063 - DNA, 25 bp, Homo sapien
gaagtcctgagcgtcttgtaccaga

SEQ ID NO: 5025064 - DNA, 25 bp, Homo sapien
taccagatggcaacaaccacagagg

SEQ ID NO: 5025065 - DNA, 25 bp, Homo sapien
taaagtcagattgccatgtcagtgg

SEQ ID NO: 5025066 - DNA, 25 bp, Homo sapien
ttttctaagcgagcagtactctcac

SEQ ID NO: 5025067 - DNA, 25 bp, Homo sapien
gctaccaagtagcttagccaaagca

SEQ ID NO: 5025068 - DNA, 25 bp, Homo sapien
taaaaattggaggaactggtctcta

SEQ ID NO: 5025069 - DNA, 25 bp, Homo sapien
tctgctgctattgctgttttgtaga

SEQ ID NO: 5025070 - DNA, 25 bp, Homo sapien
tgtagatgtgaaaactgaggcacaa

SEQ ID NO: 5025071 - DNA, 25 bp, Homo sapien
ctgctattgctgttttgtagatgtg

SEQ ID NO: 5025072 - DNA, 25 bp, Homo sapien
tgctgctattgctgttttgtagatg

SEQ ID NO: 5025073 - DNA, 25 bp, Homo sapien
tgtattcaagccgattcaaggtgtc

SEQ ID NO: 5025074 - DNA, 25 bp, Homo sapien
cctagttatctttcgcagggctgaa

SEQ ID NO: 5025075 - DNA, 25 bp, Homo sapien
cacagacccaacgaattagcagcag

SEQ ID NO: 5025076 - DNA, 25 bp, Homo sapien
tactcataggtactggtgtgtccgg

SEQ ID NO: 5025077 - DNA, 25 bp, Homo sapien
ctaaggccctccagctaagatgcag

SEQ ID NO: 5025078 - DNA, 25 bp, Homo sapien
gatgcaggatgctccattttttcct

SEQ ID NO: 5025079 - DNA, 25 bp, Homo sapien
tcctgttagacccagtggcataacc

SEQ ID NO: 5025080 - DNA, 25 bp, Homo sapien
ttcccatttcctgttagacccagtg

SEQ ID NO: 5025081 - DNA, 25 bp, Homo sapien
tcatttaccagctggcgccccgtcc

SEQ ID NO: 5025082 - DNA, 25 bp, Homo sapien
gcgggtcgcgttgcttgcagtctca

SEQ ID NO: 5025083 - DNA, 25 bp, Homo sapien
cacacttctgacgacgctcctgttt

SEQ ID NO: 5025084 - DNA, 25 bp, Homo sapien
gacgctcctgttttccagcgaggaa

SEQ ID NO: 5025085 - DNA, 25 bp, Homo sapien
tgtggtcattagactgaaattgatt

SEQ ID NO: 5025086 - DNA, 25 bp, Homo sapien
ttaaatgccagaatattatcttgcc

SEQ ID NO: 5025087 - DNA, 25 bp, Homo sapien
tgccacctaagcatgatcatcagag

SEQ ID NO: 5025088 - DNA, 25 bp, Homo sapien
caattattatcctagattggactgt

SEQ ID NO: 5025089 - DNA, 25 bp, Homo sapien
cctgaatgctagatttatcataagg

SEQ ID NO: 5025090 - DNA, 25 bp, Homo sapien
ggctgctccaagagagacatccgta

SEQ ID NO: 5025091 - DNA, 25 bp, Homo sapien
tatcataaggaatcaagtctgattc

SEQ ID NO: 5025092 - DNA, 25 bp, Homo sapien
gagacatccgtacctgaatgctaga

SEQ ID NO: 5025093 - DNA, 25 bp, Homo sapien
tccatgggttgacaatgtttggctg

SEQ ID NO: 5025094 - DNA, 25 bp, Homo sapien
aaaatcaaagaagcctatagtggtg

SEQ ID NO: 5025095 - DNA, 25 bp, Homo sapien
tcctagggagttgaataaggcctgc

SEQ ID NO: 5025096 - DNA, 25 bp, Homo sapien
gtaagaaatctagtacaagcaaaga

SEQ ID NO: 5025097 - DNA, 25 bp, Homo sapien
gttaagtcttgtgcagatggccacg

SEQ ID NO: 5025098 - DNA, 25 bp, Homo sapien
tgacaaggatgatgatacgaggcac

SEQ ID NO: 5025099 - DNA, 25 bp, Homo sapien
gatggccacgtgttgaactgtctga

SEQ ID NO: 5025100 - DNA, 25 bp, Homo sapien
catggcatgtagcacagagggcttt

SEQ ID NO: 5025101 - DNA, 25 bp, Homo sapien
caacccttatgaggagagatgctaa

SEQ ID NO: 5025102 - DNA, 25 bp, Homo sapien
ccttgagtcttggatcactgtgaag

SEQ ID NO: 5025103 - DNA, 25 bp, Homo sapien
tatgttatcagcctccttagtgcaa

SEQ ID NO: 5025104 - DNA, 25 bp, Homo sapien
gcccaaggccttctacaatctggaa

SEQ ID NO: 5025105 - DNA, 25 bp, Homo sapien
tgtcactctggatttcagtgtggcg

SEQ ID NO: 5025106 - DNA, 25 bp, Homo sapien
tttcctggtccctgctgtggcatct

SEQ ID NO: 5025107 - DNA, 25 bp, Homo sapien
gtttcctggtccctgctgtggcatc

SEQ ID NO: 5025108 - DNA, 25 bp, Homo sapien
cttttgtcactctggatttcagtgt

SEQ ID NO: 5025109 - DNA, 25 bp, Homo sapien
tgcacgctccacaggggtaggtgtg

SEQ ID NO: 5025110 - DNA, 25 bp, Homo sapien
gcacgctccacaggggtaggtgtgc

SEQ ID NO: 5025111 - DNA, 25 bp, Homo sapien
ggtgcacgctccacaggggtaggtg

SEQ ID NO: 5025112 - DNA, 25 bp, Homo sapien
agggtgcacgctccacaggggtagg

SEQ ID NO: 5025113 - DNA, 25 bp, Homo sapien
gtgtagctccctttatgaattgcga

SEQ ID NO: 5025114 - DNA, 25 bp, Homo sapien
tataaatttatcacgtgcctcccca

SEQ ID NO: 5025115 - DNA, 25 bp, Homo sapien
ggcctttcacggaaattcctggcaa

SEQ ID NO: 5025116 - DNA, 25 bp, Homo sapien
ttcctggcaaccttgagaatctgga

SEQ ID NO: 5025117 - DNA, 25 bp, Homo sapien
tctagcaattgggtacgctttccac

SEQ ID NO: 5025118 - DNA, 25 bp, Homo sapien
gagtttgcagtgcttctttgtacct

SEQ ID NO: 5025119 - DNA, 25 bp, Homo sapien
cgttggtgaccgactatgcagcaga

SEQ ID NO: 5025120 - DNA, 25 bp, Homo sapien
tcctaacactctcagagcagttgct

SEQ ID NO: 5025121 - DNA, 25 bp, Homo sapien
cattgtagtgatcaacagtgtgacc

SEQ ID NO: 5025122 - DNA, 25 bp, Homo sapien
gagtacaccaaacaccgaggatcca

SEQ ID NO: 5025123 - DNA, 25 bp, Homo sapien
tgaagcactgcatcgggtgtgcact

SEQ ID NO: 5025124 - DNA, 25 bp, Homo sapien
tcctgcagccacagaacttgaagca

SEQ ID NO: 5025125 - DNA, 25 bp, Homo sapien
cacttaaacctagggtgactgtaca

SEQ ID NO: 5025126 - DNA, 25 bp, Homo sapien
cgtaagtataatccaggcccgtctg

SEQ ID NO: 5025127 - DNA, 25 bp, Homo sapien
cacttcttagcatgaaaagggcact

SEQ ID NO: 5025128 - DNA, 25 bp, Homo sapien
ggcccgtctgagcaaaccaagattt

SEQ ID NO: 5025129 - DNA, 25 bp, Homo sapien
taactgagcagacttttgtgccgcc

SEQ ID NO: 5025130 - DNA, 25 bp, Homo sapien
tctggagcatgtgacctaactgagc

SEQ ID NO: 5025131 - DNA, 25 bp, Homo sapien
caatcttcaggctcttttgcagtga

SEQ ID NO: 5025132 - DNA, 25 bp, Homo sapien
actccgtcttgggaactgactgccc

SEQ ID NO: 5025133 - DNA, 25 bp, Homo sapien
caagcactcaatagatatgggtaga

SEQ ID NO: 5025134 - DNA, 25 bp, Homo sapien
tcatcagtctaggaagctttggccc

SEQ ID NO: 5025135 - DNA, 25 bp, Homo sapien
tcactcagaacagggcttgctctac

SEQ ID NO: 5025136 - DNA, 25 bp, Homo sapien
tcctggtagcttccggtcagggcca

SEQ ID NO: 5025137 - DNA, 25 bp, Homo sapien
caggagtcctgtgctgtctcactct

SEQ ID NO: 5025138 - DNA, 25 bp, Homo sapien
cctgcgtgcacggccacctcagaaa

SEQ ID NO: 5025139 - DNA, 25 bp, Homo sapien
gagtcctgtgctgtctcactctcca

SEQ ID NO: 5025140 - DNA, 25 bp, Homo sapien
acacctgcgtgcacggccacctcag

SEQ ID NO: 5025141 - DNA, 25 bp, Homo sapien
gaattgggttacataagctctatga

SEQ ID NO: 5025142 - DNA, 25 bp, Homo sapien
ttgctcatccttagaattgggttac

SEQ ID NO: 5025143 - DNA, 25 bp, Homo sapien
agctctatgatggctagactcatgc

SEQ ID NO: 5025144 - DNA, 25 bp, Homo sapien
ccttagaattgggttacataagctc

SEQ ID NO: 5025145 - DNA, 25 bp, Homo sapien
gctgtggtttgaatgtttgtcccct

SEQ ID NO: 5025146 - DNA, 25 bp, Homo sapien
tggtttgaatgtttgtcccctctca

SEQ ID NO: 5025147 - DNA, 25 bp, Homo sapien
gtggtttgaatgtttgtcccctctc

SEQ ID NO: 5025148 - DNA, 25 bp, Homo sapien
gctgttgctgtggtttgaatgtttg

SEQ ID NO: 5025149 - DNA, 25 bp, Homo sapien
tctctagatgccagcgcctcgttct

SEQ ID NO: 5025150 - DNA, 25 bp, Homo sapien
aatgacaagtttggcccctttggct

SEQ ID NO: 5025151 - DNA, 25 bp, Homo sapien
tggacttcatagcatcctgaaatgt

SEQ ID NO: 5025152 - DNA, 25 bp, Homo sapien
tgctgttatcttaggagtgcattcc

SEQ ID NO: 5025153 - DNA, 25 bp, Homo sapien
agatccagtaacagtaatagctgca

SEQ ID NO: 5025154 - DNA, 25 bp, Homo sapien
caattctccaaagctgtcaaatcag

SEQ ID NO: 5025155 - DNA, 25 bp, Homo sapien
taggatcagctgtctacattttaaa

SEQ ID NO: 5025156 - DNA, 25 bp, Homo sapien
tagctgcatggtatggtgttgacaa

SEQ ID NO: 5025157 - DNA, 25 bp, Homo sapien
gcttggcagatagtgctcaaaacag

SEQ ID NO: 5025158 - DNA, 25 bp, Homo sapien
taaaccacttagtacagagcttggc

SEQ ID NO: 5025159 - DNA, 25 bp, Homo sapien
tccagtggtacagtgggaatcaaaa

SEQ ID NO: 5025160 - DNA, 25 bp, Homo sapien
aaaagaccttatcacaaatcctggc

SEQ ID NO: 5025161 - DNA, 25 bp, Homo sapien
taagcagggtttatgtcctggctct

SEQ ID NO: 5025162 - DNA, 25 bp, Homo sapien
aagattggccctaccttggatccac

SEQ ID NO: 5025163 - DNA, 25 bp, Homo sapien
aggcgtcacataatctatcatccag

SEQ ID NO: 5025164 - DNA, 25 bp, Homo sapien
ctggctctgccatacacttgcttgt

SEQ ID NO: 5025165 - DNA, 25 bp, Homo sapien
tatagtgacagagaccttagcagtg

SEQ ID NO: 5025166 - DNA, 25 bp, Homo sapien
cagtgtgtcttgcattcagtaagca

SEQ ID NO: 5025167 - DNA, 25 bp, Homo sapien
gaaacaccgaggatcctaggattct

SEQ ID NO: 5025168 - DNA, 25 bp, Homo sapien
ccctcccagggttattatagtgaca

SEQ ID NO: 5025169 - DNA, 25 bp, Homo sapien
ctagtccaagggtggcaaacactac

SEQ ID NO: 5025170 - DNA, 25 bp, Homo sapien
caagtaatgtgtgaagccttctggg

SEQ ID NO: 5025171 - DNA, 25 bp, Homo sapien
tctggcccattggacccatgtggga

SEQ ID NO: 5025172 - DNA, 25 bp, Homo sapien
agggagaagccttagaactagtcca

SEQ ID NO: 5025173 - DNA, 25 bp, Homo sapien
gaacactccggcttcatataccact

SEQ ID NO: 5025174 - DNA, 25 bp, Homo sapien
cactttgcctcttgaaatagtcaca

SEQ ID NO: 5025175 - DNA, 25 bp, Homo sapien
aaccatgccctcgaaaatgttgaag

SEQ ID NO: 5025176 - DNA, 25 bp, Homo sapien
tcagcaaatggttttcgaggaataa

SEQ ID NO: 5025177 - DNA, 25 bp, Homo sapien
tgcagaactgcagacctcgaaactg

SEQ ID NO: 5025178 - DNA, 25 bp, Homo sapien
ttcaccagggagcacgcctgaggac

SEQ ID NO: 5025179 - DNA, 25 bp, Homo sapien
gctggcgctaatgtagtcactgtaa

SEQ ID NO: 5025180 - DNA, 25 bp, Homo sapien
taggaagcacaatcagctggcgcta

SEQ ID NO: 5025181 - DNA, 25 bp, Homo sapien
cactgatgatggcatctatacctag

SEQ ID NO: 5025182 - DNA, 25 bp, Homo sapien
tctatacctagagctctggtggagg

SEQ ID NO: 5025183 - DNA, 25 bp, Homo sapien
agggtggaagtgacgcagcagccat

SEQ ID NO: 5025184 - DNA, 25 bp, Homo sapien
tggcatctatacctagagctctggt

SEQ ID NO: 5025185 - DNA, 25 bp, Homo sapien
caggaggtgcctcctccacgcagac

SEQ ID NO: 5025186 - DNA, 25 bp, Homo sapien
aggaggtgcctcctccacgcagaca

SEQ ID NO: 5025187 - DNA, 25 bp, Homo sapien
ggaggtgcctcctccacgcagacag

SEQ ID NO: 5025188 - DNA, 25 bp, Homo sapien
gatttgcagggatgcaggccacgct

SEQ ID NO: 5025189 - DNA, 25 bp, Homo sapien
aaaccgatgtccaggagcgttggca

SEQ ID NO: 5025190 - DNA, 25 bp, Homo sapien
caagtgcacacttgtaaccaaggac

SEQ ID NO: 5025191 - DNA, 25 bp, Homo sapien
cactgccagcaggatatgcttgaaa

SEQ ID NO: 5025192 - DNA, 25 bp, Homo sapien
aaatagacttccactgtagtcttct

SEQ ID NO: 5025193 - DNA, 25 bp, Homo sapien
gacttccactgtagtcttctagagg

SEQ ID NO: 5025194 - DNA, 25 bp, Homo sapien
tagacttccactgtagtcttctaga

SEQ ID NO: 5025195 - DNA, 25 bp, Homo sapien
tccactgtagtcttctagagggagg

SEQ ID NO: 5025196 - DNA, 25 bp, Homo sapien
ccatcccttcttaggctgagaatat

SEQ ID NO: 5025197 - DNA, 25 bp, Homo sapien
tcatgtcgatgactgctctaactcc

SEQ ID NO: 5025198 - DNA, 25 bp, Homo sapien
gcctctcgtgtgatattcttaaccc

SEQ ID NO: 5025199 - DNA, 25 bp, Homo sapien
tctctcgtacgatttcatgtcgatg

SEQ ID NO: 5025200 - DNA, 25 bp, Homo sapien
gaaagctggtgctgtgatcgaccca

SEQ ID NO: 5025201 - DNA, 25 bp, Homo sapien
caccagtagtggtaagtcgtgctca

SEQ ID NO: 5025202 - DNA, 25 bp, Homo sapien
taataatagtggcaaccagctgtgg

SEQ ID NO: 5025203 - DNA, 25 bp, Homo sapien
taagtcaaagaaatccaagggaggc

SEQ ID NO: 5025204 - DNA, 25 bp, Homo sapien
gctgcaggtgttgcctgtactaacg

SEQ ID NO: 5025205 - DNA, 25 bp, Homo sapien
tgcaggtgttgcctgtactaacgtc

SEQ ID NO: 5025206 - DNA, 25 bp, Homo sapien
ctgcaggtgttgcctgtactaacgt

SEQ ID NO: 5025207 - DNA, 25 bp, Homo sapien
aactcgggcatttgccaggcactga

SEQ ID NO: 5025208 - DNA, 25 bp, Homo sapien
ctttcttccatgtgaactcgggcat

SEQ ID NO: 5025209 - DNA, 25 bp, Homo sapien
gagaatgcaacacaacttctacatc

SEQ ID NO: 5025210 - DNA, 25 bp, Homo sapien
tacagatccattgtcagagaatgca

SEQ ID NO: 5025211 - DNA, 25 bp, Homo sapien
gcatttgtgctggtaactgccacaa

SEQ ID NO: 5025212 - DNA, 25 bp, Homo sapien
tcagcatctgatcctacagctattc

SEQ ID NO: 5025213 - DNA, 25 bp, Homo sapien
ttggctgcatttgtgctggtaactg

SEQ ID NO: 5025214 - DNA, 25 bp, Homo sapien
tgccacaaatctgttttcatccatt

SEQ ID NO: 5025215 - DNA, 25 bp, Homo sapien
tacggacatccgatcttcaacacca

SEQ ID NO: 5025216 - DNA, 25 bp, Homo sapien
tcccaagagctttctggcaggtgtt

SEQ ID NO: 5025217 - DNA, 25 bp, Homo sapien
tggtaaaatcatccttcccaagagc

SEQ ID NO: 5025218 - DNA, 25 bp, Homo sapien
gttgaaagtgcagttatcagtccct

SEQ ID NO: 5025219 - DNA, 25 bp, Homo sapien
ctgacaggtcaagtagaagagaata

SEQ ID NO: 5025220 - DNA, 25 bp, Homo sapien
taaggtgtaatgaagagccctgggt

SEQ ID NO: 5025221 - DNA, 25 bp, Homo sapien
gaaaggctttgacaacatatcacag

SEQ ID NO: 5025222 - DNA, 25 bp, Homo sapien
gatccagatgggaggacgagctccc

SEQ ID NO: 5025223 - DNA, 25 bp, Homo sapien
tgtgccaagactggctgctatgggt

SEQ ID NO: 5025224 - DNA, 25 bp, Homo sapien
tatgggttcaccatagaccaccttc

SEQ ID NO: 5025225 - DNA, 25 bp, Homo sapien
gtctggtcgcaaaggtggacccatg

SEQ ID NO: 5025226 - DNA, 25 bp, Homo sapien
ttctttattccagtagtgagtgcca

SEQ ID NO: 5025227 - DNA, 25 bp, Homo sapien
cactttacaagtcgctgactgagga

SEQ ID NO: 5025228 - DNA, 25 bp, Homo sapien
tgatctgcaatcactttacaagtcg

SEQ ID NO: 5025229 - DNA, 25 bp, Homo sapien
tcagagacttgatctgcaatcactt

SEQ ID NO: 5025230 - DNA, 25 bp, Homo sapien
acaagtcgctgactgaggattttcc

SEQ ID NO: 5025231 - DNA, 25 bp, Homo sapien
tgacaacttgtttgttcaacttcac

SEQ ID NO: 5025232 - DNA, 25 bp, Homo sapien
gggctatggagcaagggagacaaac

SEQ ID NO: 5025233 - DNA, 25 bp, Homo sapien
attcttcggacaaaaactggactga

SEQ ID NO: 5025234 - DNA, 25 bp, Homo sapien
gggctggcagactggactgtccaca

SEQ ID NO: 5025235 - DNA, 25 bp, Homo sapien
catctctccttgcatccgctatcac

SEQ ID NO: 5025236 - DNA, 25 bp, Homo sapien
gctgcagacttgctcatcacatgca

SEQ ID NO: 5025237 - DNA, 25 bp, Homo sapien
agttcacagcgctggctatggtgat

SEQ ID NO: 5025238 - DNA, 25 bp, Homo sapien
atggtgatggctctcagcgtggcct

SEQ ID NO: 5025239 - DNA, 25 bp, Homo sapien
agggcctgttatccccagagccaac

SEQ ID NO: 5025240 - DNA, 25 bp, Homo sapien
caccatgtacagatctttataggcc

SEQ ID NO: 5025241 - DNA, 25 bp, Homo sapien
ttataggccataaacatcttgaaag

SEQ ID NO: 5025242 - DNA, 25 bp, Homo sapien
ttgctccaatttccttgcaccgaga

SEQ ID NO: 5025243 - DNA, 25 bp, Homo sapien
ccgagagaaggcttcgtacagctcc

SEQ ID NO: 5025244 - DNA, 25 bp, Homo sapien
gccacatgaaggctgtagtcgcagc

SEQ ID NO: 5025245 - DNA, 25 bp, Homo sapien
tctcgaaggcctcaatgagggagcc

SEQ ID NO: 5025246 - DNA, 25 bp, Homo sapien
cgaaggcctcaatgagggagccacc

SEQ ID NO: 5025247 - DNA, 25 bp, Homo sapien
agtcgcagcaaactttgggatcagc

SEQ ID NO: 5025248 - DNA, 25 bp, Homo sapien
ctgaggaatggcgaaatcaataatc

SEQ ID NO: 5025249 - DNA, 25 bp, Homo sapien
gaggaatggcgaaatcaataatcat

SEQ ID NO: 5025250 - DNA, 25 bp, Homo sapien
tgaggaatggcgaaatcaataatca

SEQ ID NO: 5025251 - DNA, 25 bp, Homo sapien
tggttgagccaaggctgctcggctg

SEQ ID NO: 5025252 - DNA, 25 bp, Homo sapien
gagtcgagggcatctggttgagcca

SEQ ID NO: 5025253 - DNA, 25 bp, Homo sapien
gaggagtcgagggcatctggttgag

SEQ ID NO: 5025254 - DNA, 25 bp, Homo sapien
gctgctcggctgccgccgagaaggg

SEQ ID NO: 5025255 - DNA, 25 bp, Homo sapien
tgcgtgtgtgtgtcgatgcctccgg

SEQ ID NO: 5025256 - DNA, 25 bp, Homo sapien
tcgatggaccgcgagcccatgaagg

SEQ ID NO: 5025257 - DNA, 25 bp, Homo sapien
atgcctccgggcaggacgagcttgc

SEQ ID NO: 5025258 - DNA, 25 bp, Homo sapien
gagaagtcatcgttgaccacgcgac

SEQ ID NO: 5025259 - DNA, 25 bp, Homo sapien
caccgacagcccccgagctctgcct

SEQ ID NO: 5025260 - DNA, 25 bp, Homo sapien
tgcaaggtccccaccgacagccccc

SEQ ID NO: 5025261 - DNA, 25 bp, Homo sapien
acttgtagaatgtcaccgaggtggg

SEQ ID NO: 5025262 - DNA, 25 bp, Homo sapien
aatgttagctcacagaacagaaggg

SEQ ID NO: 5025263 - DNA, 25 bp, Homo sapien
cctccgtgggcagtaaacaagaatc

SEQ ID NO: 5025264 - DNA, 25 bp, Homo sapien
tcattcccgcacactagcttgcagg

SEQ ID NO: 5025265 - DNA, 25 bp, Homo sapien
gaactctgactttattatctgttat

SEQ ID NO: 5025266 - DNA, 25 bp, Homo sapien
aataggcttgtacttgggagccaga

SEQ ID NO: 5025267 - DNA, 25 bp, Homo sapien
ataggcttgtacttgggagccagac

SEQ ID NO: 5025268 - DNA, 25 bp, Homo sapien
tactgcatcttgtgagatacgtcaa

SEQ ID NO: 5025269 - DNA, 25 bp, Homo sapien
gatacatcaattgaagggcaatctc

SEQ ID NO: 5025270 - DNA, 25 bp, Homo sapien
tggtaacccaaattctgccagtaga

SEQ ID NO: 5025271 - DNA, 25 bp, Homo sapien
taccctcgagtactggtaaaagcta

SEQ ID NO: 5025272 - DNA, 25 bp, Homo sapien
tgtgcactaagctcatctgagacct

SEQ ID NO: 5025273 - DNA, 25 bp, Homo sapien
cattaccaggtggaacttatcttgt

SEQ ID NO: 5025274 - DNA, 25 bp, Homo sapien
aatgcaagcgcaaccctgtattagg

SEQ ID NO: 5025275 - DNA, 25 bp, Homo sapien
aaatccctagggtccaatgcaagcg

SEQ ID NO: 5025276 - DNA, 25 bp, Homo sapien
tgtcgaatttaaccatgcaggctaa

SEQ ID NO: 5025277 - DNA, 25 bp, Homo sapien
agacagtttgtttcccactgacaag

SEQ ID NO: 5025278 - DNA, 25 bp, Homo sapien
tgtcaaacaaatgaaaacgcaggtg

SEQ ID NO: 5025279 - DNA, 25 bp, Homo sapien
tgccagtaatttatcgaactctgcc

SEQ ID NO: 5025280 - DNA, 25 bp, Homo sapien
tactggtactctgactagggacaac

SEQ ID NO: 5025281 - DNA, 25 bp, Homo sapien
taagcaagtgtctggtatctgggca

SEQ ID NO: 5025282 - DNA, 25 bp, Homo sapien
cattatctgcatgaccacctcgggt

SEQ ID NO: 5025283 - DNA, 25 bp, Homo sapien
cttctactgccgttgtgggagggac

SEQ ID NO: 5025284 - DNA, 25 bp, Homo sapien
ggaaaatcttcaactggtggaatta

SEQ ID NO: 5025285 - DNA, 25 bp, Homo sapien
tcaattgtccatacgagggaggagc

SEQ ID NO: 5025286 - DNA, 25 bp, Homo sapien
ccctgagcaatcaattgtccatacg

SEQ ID NO: 5025287 - DNA, 25 bp, Homo sapien
gtccatacgagggaggagcttctct

SEQ ID NO: 5025288 - DNA, 25 bp, Homo sapien
ggcagtctgtcttcatagggcttta

SEQ ID NO: 5025289 - DNA, 25 bp, Homo sapien
gaatacaaagctgacgcaggcagtc

SEQ ID NO: 5025290 - DNA, 25 bp, Homo sapien
tctcctgggactgaaggtcattgtc

SEQ ID NO: 5025291 - DNA, 25 bp, Homo sapien
gaatatacgttgaagccactgcgcc

SEQ ID NO: 5025292 - DNA, 25 bp, Homo sapien
taggtcaaggcagtcaatgttccca

SEQ ID NO: 5025293 - DNA, 25 bp, Homo sapien
tatgacgagtaacaggccacagatg

SEQ ID NO: 5025294 - DNA, 25 bp, Homo sapien
tcttgtaggcacgattactgggcaa

SEQ ID NO: 5025295 - DNA, 25 bp, Homo sapien
agatgaggctccctatgacggcagc

SEQ ID NO: 5025296 - DNA, 25 bp, Homo sapien
cgaatgaaacctaatccagatgtgg

SEQ ID NO: 5025297 - DNA, 25 bp, Homo sapien
tattgtcaaccagtccaaattgcac

SEQ ID NO: 5025298 - DNA, 25 bp, Homo sapien
tatacggaggtggaattgtggaacc

SEQ ID NO: 5025299 - DNA, 25 bp, Homo sapien
gaaaaatatgccagtctgaaaccct

SEQ ID NO: 5025300 - DNA, 25 bp, Homo sapien
ctgcttaatgaaaagtttgcagctg

SEQ ID NO: 5025301 - DNA, 25 bp, Homo sapien
ttaatgaaaagtttgcagctgacat

SEQ ID NO: 5025302 - DNA, 25 bp, Homo sapien
gcttaatgaaaagtttgcagctgac

SEQ ID NO: 5025303 - DNA, 25 bp, Homo sapien
cttaatgaaaagtttgcagctgaca

SEQ ID NO: 5025304 - DNA, 25 bp, Homo sapien
caccttctgatctgtatacatcgaa

SEQ ID NO: 5025305 - DNA, 25 bp, Homo sapien
tctgatctgtatacatcgaaattca

SEQ ID NO: 5025306 - DNA, 25 bp, Homo sapien
aaaatcaccttctgatctgtataca

SEQ ID NO: 5025307 - DNA, 25 bp, Homo sapien
attactaaaatcaccttctgatctg

SEQ ID NO: 5025308 - DNA, 25 bp, Homo sapien
tgtgattatgccacttggtgctcgt

SEQ ID NO: 5025309 - DNA, 25 bp, Homo sapien
taatgatttcgcctgggtttgccct

SEQ ID NO: 5025310 - DNA, 25 bp, Homo sapien
tggtgctcgtatttgctctggagtc

SEQ ID NO: 5025311 - DNA, 25 bp, Homo sapien
ggtttgcccttatgaaccagctaca

SEQ ID NO: 5025312 - DNA, 25 bp, Homo sapien
tgccctggaattagggtgcactgcc

SEQ ID NO: 5025313 - DNA, 25 bp, Homo sapien
tcatatcgaaaaatgggtctgccct

SEQ ID NO: 5025314 - DNA, 25 bp, Homo sapien
tagaataacctactccctgaagaaa

SEQ ID NO: 5025315 - DNA, 25 bp, Homo sapien
tcagaacagattcatggcatacagc

SEQ ID NO: 5025316 - DNA, 25 bp, Homo sapien
tggagaatcaacaattatatatggc

SEQ ID NO: 5025317 - DNA, 25 bp, Homo sapien
tttcttccactatgcagggaattgg

SEQ ID NO: 5025318 - DNA, 25 bp, Homo sapien
taagatttccagtcaacagcatgct

SEQ ID NO: 5025319 - DNA, 25 bp, Homo sapien
cagcatgctattgagtacttaaact

SEQ ID NO: 5025320 - DNA, 25 bp, Homo sapien
ggcttgctgatctcaacagaaagca

SEQ ID NO: 5025321 - DNA, 25 bp, Homo sapien
tgctgatctcaacagaaagcaagtc

SEQ ID NO: 5025322 - DNA, 25 bp, Homo sapien
ctgtggcttgctgatctcaacagaa

SEQ ID NO: 5025323 - DNA, 25 bp, Homo sapien
gctgatctcaacagaaagcaagtcc

SEQ ID NO: 5025324 - DNA, 25 bp, Homo sapien
agttgacactcctgaaatatgcaca

SEQ ID NO: 5025325 - DNA, 25 bp, Homo sapien
gaatgttctgcaagagcaccatttc

SEQ ID NO: 5025326 - DNA, 25 bp, Homo sapien
ttttcagaatgttctgcaagagcac

SEQ ID NO: 5025327 - DNA, 25 bp, Homo sapien
cagttgacactcctgaaatatgcac

SEQ ID NO: 5025328 - DNA, 25 bp, Homo sapien
taagaatagattccatcgtccccac

SEQ ID NO: 5025329 - DNA, 25 bp, Homo sapien
gataagtgcgaacaaatatgtccag

SEQ ID NO: 5025330 - DNA, 25 bp, Homo sapien
tatgtccagtcaagcaaccaacact

SEQ ID NO: 5025331 - DNA, 25 bp, Homo sapien
gatgttcccttgtaatcaatcccgc

SEQ ID NO: 5025332 - DNA, 25 bp, Homo sapien
agaacagtatcactgtaaattcatg

SEQ ID NO: 5025333 - DNA, 25 bp, Homo sapien
ttcaattcatctggatactcaatgc

SEQ ID NO: 5025334 - DNA, 25 bp, Homo sapien
gaacagtatcactgtaaattcatgg

SEQ ID NO: 5025335 - DNA, 25 bp, Homo sapien
catctggatactcaatgctattgaa

SEQ ID NO: 5025336 - DNA, 25 bp, Homo sapien
cagacatcaaatctgccagtgcctc

SEQ ID NO: 5025337 - DNA, 25 bp, Homo sapien
gacatcaaatctgccagtgcctcga

SEQ ID NO: 5025338 - DNA, 25 bp, Homo sapien
agacatcaaatctgccagtgcctcg

SEQ ID NO: 5025339 - DNA, 25 bp, Homo sapien
ctccaccgcggagactcttttgtgc

SEQ ID NO: 5025340 - DNA, 25 bp, Homo sapien
tcttttgtgctccagcgacaggcca

SEQ ID NO: 5025341 - DNA, 25 bp, Homo sapien
cttttgtgctccagcgacaggccat

SEQ ID NO: 5025342 - DNA, 25 bp, Homo sapien
accgcggagactcttttgtgctcca

SEQ ID NO: 5025343 - DNA, 25 bp, Homo sapien
caccccgggcggtgcgagagcccca

SEQ ID NO: 5025344 - DNA, 25 bp, Homo sapien
gctcgcgcgccagcgcgagacgaga

SEQ ID NO: 5025345 - DNA, 25 bp, Homo sapien
ggagaagctggaggtagacgacgcc

SEQ ID NO: 5025346 - DNA, 25 bp, Homo sapien
gggcaagggcaaggagctcgcgcgc

SEQ ID NO: 5025347 - DNA, 25 bp, Homo sapien
aaggagcaaggcagcgccaatcgat

SEQ ID NO: 5025348 - DNA, 25 bp, Homo sapien
atttccacgcgacgggagcccaagg

SEQ ID NO: 5025349 - DNA, 25 bp, Homo sapien
atgacagagcgtgcgaacgccggct

SEQ ID NO: 5025350 - DNA, 25 bp, Homo sapien
tcgggccgatttccacgcgacggga

SEQ ID NO: 5025351 - DNA, 25 bp, Homo sapien
gaagatgcagtctttctggtacaag

SEQ ID NO: 5025352 - DNA, 25 bp, Homo sapien
cagctttaattctctcggttgtgtg

SEQ ID NO: 5025353 - DNA, 25 bp, Homo sapien
gctgaaaaaccctgattgccagcct

SEQ ID NO: 5025354 - DNA, 25 bp, Homo sapien
gagttattaaatccgtaagagctga

SEQ ID NO: 5025355 - DNA, 25 bp, Homo sapien
attagattcaccggagctttggact

SEQ ID NO: 5025356 - DNA, 25 bp, Homo sapien
agattagattcaccggagctttgga

SEQ ID NO: 5025357 - DNA, 25 bp, Homo sapien
gagattagattcaccggagctttgg

SEQ ID NO: 5025358 - DNA, 25 bp, Homo sapien
gattagattcaccggagctttggac

SEQ ID NO: 5025359 - DNA, 25 bp, Homo sapien
gggctccagtgttgcaatgggcggt

SEQ ID NO: 5025360 - DNA, 25 bp, Homo sapien
ccagtgttgcaatgggcggtgcact

SEQ ID NO: 5025361 - DNA, 25 bp, Homo sapien
gctccagtgttgcaatgggcggtgc

SEQ ID NO: 5025362 - DNA, 25 bp, Homo sapien
tgatgggggctccagtgttgcaatg

SEQ ID NO: 5025363 - DNA, 25 bp, Homo sapien
tcactttggcgtctttaagatggtc

SEQ ID NO: 5025364 - DNA, 25 bp, Homo sapien
gcaaggaaggaattggtgctcccat

SEQ ID NO: 5025365 - DNA, 25 bp, Homo sapien
ggtcttctgtgtagtagatgctagc

SEQ ID NO: 5025366 - DNA, 25 bp, Homo sapien
caaggatcaacatccagacttaaga

SEQ ID NO: 5025367 - DNA, 25 bp, Homo sapien
agcctgttggattccttgctgcaag

SEQ ID NO: 5025368 - DNA, 25 bp, Homo sapien
tccaggatctgtagcctgcttgaag

SEQ ID NO: 5025369 - DNA, 25 bp, Homo sapien
tccttgctgcaagagttgctgaagg

SEQ ID NO: 5025370 - DNA, 25 bp, Homo sapien
gcagcagcaaaactctggttttagc

SEQ ID NO: 5025371 - DNA, 25 bp, Homo sapien
caatggagtggttaatgctgtgtgc

SEQ ID NO: 5025372 - DNA, 25 bp, Homo sapien
ggttaatgctgtgtgctgatatcca

SEQ ID NO: 5025373 - DNA, 25 bp, Homo sapien
cactctctccataaggtgcttccat

SEQ ID NO: 5025374 - DNA, 25 bp, Homo sapien
tgtgctgatatccactctctccata

SEQ ID NO: 5025375 - DNA, 25 bp, Homo sapien
gatgttgacaagcacctatcctcct

SEQ ID NO: 5025376 - DNA, 25 bp, Homo sapien
ctgctggatgttgacaagcacctat

SEQ ID NO: 5025377 - DNA, 25 bp, Homo sapien
tatcctcctatagtggtgactttct

SEQ ID NO: 5025378 - DNA, 25 bp, Homo sapien
gacaagcacctatcctcctatagtg

SEQ ID NO: 5025379 - DNA, 25 bp, Homo sapien
agtcactcagattattaccataggg

SEQ ID NO: 5025380 - DNA, 25 bp, Homo sapien
tctgcttgacaatacaccacctgtg

SEQ ID NO: 5025381 - DNA, 25 bp, Homo sapien
tagtccactgcagcgaatgtttatc

SEQ ID NO: 5025382 - DNA, 25 bp, Homo sapien
ttatctggatgtgactgcccacagc

SEQ ID NO: 5025383 - DNA, 25 bp, Homo sapien
cactatcaccaaagagctccaaaaa

SEQ ID NO: 5025384 - DNA, 25 bp, Homo sapien
aacactatcaccaaagagctccaaa

SEQ ID NO: 5025385 - DNA, 25 bp, Homo sapien
ataaacactatcaccaaagagctcc

SEQ ID NO: 5025386 - DNA, 25 bp, Homo sapien
taaacactatcaccaaagagctcca

SEQ ID NO: 5025387 - DNA, 25 bp, Homo sapien
tgtacgcccgccctgcaaagaccat

SEQ ID NO: 5025388 - DNA, 25 bp, Homo sapien
ttgcagttgctggttgtgggggaca

SEQ ID NO: 5025389 - DNA, 25 bp, Homo sapien
tcagtgtacgcccgccctgcaaaga

SEQ ID NO: 5025390 - DNA, 25 bp, Homo sapien
aagtcctcagtgtacgcccgccctg

SEQ ID NO: 5025391 - DNA, 25 bp, Homo sapien
ctcttaggcatttgaatgatttagg

SEQ ID NO: 5025392 - DNA, 25 bp, Homo sapien
tcttaggcatttgaatgatttagga

SEQ ID NO: 5025393 - DNA, 25 bp, Homo sapien
atgatttaggaattccttgcagatc

SEQ ID NO: 5025394 - DNA, 25 bp, Homo sapien
atttaggaattccttgcagatctgc

SEQ ID NO: 5025395 - DNA, 25 bp, Homo sapien
aaagcagacggactgtgacagcagc

SEQ ID NO: 5025396 - DNA, 25 bp, Homo sapien
ttcccagataaccaaccaaaagcag

SEQ ID NO: 5025397 - DNA, 25 bp, Homo sapien
caatttgctgtgttgggagtttccc

SEQ ID NO: 5025398 - DNA, 25 bp, Homo sapien
gcagcatctgggtcatccgaggcat

SEQ ID NO: 5025399 - DNA, 25 bp, Homo sapien
tacaaatcttctcaagagaggcacc

SEQ ID NO: 5025400 - DNA, 25 bp, Homo sapien
cttggctgagctgccgctttagaag

SEQ ID NO: 5025401 - DNA, 25 bp, Homo sapien
ctgagctgccgctttagaagtacaa

SEQ ID NO: 5025402 - DNA, 25 bp, Homo sapien
agaagtacaaatcttctcaagagag

SEQ ID NO: 5025403 - DNA, 25 bp, Homo sapien
cctcagtgagatggtcatacaggct

SEQ ID NO: 5025404 - DNA, 25 bp, Homo sapien
gagtctgaccgctctttccacagca

SEQ ID NO: 5025405 - DNA, 25 bp, Homo sapien
gagacctgagctatttgtggccaca

SEQ ID NO: 5025406 - DNA, 25 bp, Homo sapien
caagaaacggaatggactgtcccca

SEQ ID NO: 5025407 - DNA, 25 bp, Homo sapien
ctgggactcgagaggcagccagaag

SEQ ID NO: 5025408 - DNA, 25 bp, Homo sapien
tgggactcgagaggcagccagaagc

SEQ ID NO: 5025409 - DNA, 25 bp, Homo sapien
tggcaaaacaggaggcagtagatga

SEQ ID NO: 5025410 - DNA, 25 bp, Homo sapien
cagtagatgagccagctgatgcttt

SEQ ID NO: 5025411 - DNA, 25 bp, Homo sapien
gcttggcaaaacaggaggcagtaga

SEQ ID NO: 5025412 - DNA, 25 bp, Homo sapien
cttggcaaaacaggaggcagtagat

SEQ ID NO: 5025413 - DNA, 25 bp, Homo sapien
tcctcagtggggagcatacaacagg

SEQ ID NO: 5025414 - DNA, 25 bp, Homo sapien
cctcagtggggagcatacaacaggg

SEQ ID NO: 5025415 - DNA, 25 bp, Homo sapien
gtttgtggtacggaagcattggcat

SEQ ID NO: 5025416 - DNA, 25 bp, Homo sapien
atgatgtgtttgtggtacggaagca

SEQ ID NO: 5025417 - DNA, 25 bp, Homo sapien
tgcttatctgattctttacatgcaa

SEQ ID NO: 5025418 - DNA, 25 bp, Homo sapien
ctgcttgcttatctgattctttaca

SEQ ID NO: 5025419 - DNA, 25 bp, Homo sapien
tccacgagtcaccaaatgcttattg

SEQ ID NO: 5025420 - DNA, 25 bp, Homo sapien
gcattgactaattctgctttatgca

SEQ ID NO: 5025421 - DNA, 25 bp, Homo sapien
tgcttattgttaagctgtagcttaa

SEQ ID NO: 5025422 - DNA, 25 bp, Homo sapien
atttctctcatgaagcgtgcctcca

SEQ ID NO: 5025423 - DNA, 25 bp, Homo sapien
tgggctgagacaatgggggttttct

SEQ ID NO: 5025424 - DNA, 25 bp, Homo sapien
ctgagacaatgggggttttctagat

SEQ ID NO: 5025425 - DNA, 25 bp, Homo sapien
gagacaatgggggttttctagataa

SEQ ID NO: 5025426 - DNA, 25 bp, Homo sapien
tgggggttttctagataaacaatca

SEQ ID NO: 5025427 - DNA, 25 bp, Homo sapien
tgttactggtgaggaactgcattcc

SEQ ID NO: 5025428 - DNA, 25 bp, Homo sapien
attcctttggaggaggagaggcact

SEQ ID NO: 5025429 - DNA, 25 bp, Homo sapien
gttctgttactggtgaggaactgca

SEQ ID NO: 5025430 - DNA, 25 bp, Homo sapien
tctgttactggtgaggaactgcatt

SEQ ID NO: 5025431 - DNA, 25 bp, Homo sapien
ttgcacagacaaacatttgccaagc

SEQ ID NO: 5025432 - DNA, 25 bp, Homo sapien
tgcttgcagaacagcggcccctggt

SEQ ID NO: 5025433 - DNA, 25 bp, Homo sapien
aagtccaccagcccaattgcacaga

SEQ ID NO: 5025434 - DNA, 25 bp, Homo sapien
gtccctgcaggtgtcgctgcttgca

SEQ ID NO: 5025435 - DNA, 25 bp, Homo sapien
ctgctccaatgtggtcatcaggtct

SEQ ID NO: 5025436 - DNA, 25 bp, Homo sapien
tccaatgtggtcatcaggtctttct

SEQ ID NO: 5025437 - DNA, 25 bp, Homo sapien
gctccaatgtggtcatcaggtcttt

SEQ ID NO: 5025438 - DNA, 25 bp, Homo sapien
tgctccaatgtggtcatcaggtctt

SEQ ID NO: 5025439 - DNA, 25 bp, Homo sapien
cttttctcaaatcgattgtaaactg

SEQ ID NO: 5025440 - DNA, 25 bp, Homo sapien
caaatcgattgtaaactgctttaga

SEQ ID NO: 5025441 - DNA, 25 bp, Homo sapien
tctcaaatcgattgtaaactgcttt

SEQ ID NO: 5025442 - DNA, 25 bp, Homo sapien
tttctcaaatcgattgtaaactgct

SEQ ID NO: 5025443 - DNA, 25 bp, Homo sapien
tacgatgatgtcctgtgcctaagag

SEQ ID NO: 5025444 - DNA, 25 bp, Homo sapien
agttaagtagaaggagttcaccaca

SEQ ID NO: 5025445 - DNA, 25 bp, Homo sapien
tgacaggagccactggattcaaggg

SEQ ID NO: 5025446 - DNA, 25 bp, Homo sapien
gctctgagagcaggagttaagtaga

SEQ ID NO: 5025447 - DNA, 25 bp, Homo sapien
tgcacacgggcacaggacggtcact

SEQ ID NO: 5025448 - DNA, 25 bp, Homo sapien
gcacacgggcacaggacggtcactt

SEQ ID NO: 5025449 - DNA, 25 bp, Homo sapien
atgcacacgggcacaggacggtcac

SEQ ID NO: 5025450 - DNA, 25 bp, Homo sapien
atgttctcgtagctcctcacagaac

SEQ ID NO: 5025451 - DNA, 25 bp, Homo sapien
gatggttggaagatgttctcgtagc

SEQ ID NO: 5025452 - DNA, 25 bp, Homo sapien
tctcgtagctcctcacagaacaatg

SEQ ID NO: 5025453 - DNA, 25 bp, Homo sapien
aaacagtgatggttggaagatgttc

SEQ ID NO: 5025454 - DNA, 25 bp, Homo sapien
ccttctaggagatccaggaaacagt

SEQ ID NO: 5025455 - DNA, 25 bp, Homo sapien
ggaaacagttgtatctcctctctga

SEQ ID NO: 5025456 - DNA, 25 bp, Homo sapien
taattgaaaccctcagataatctgc

SEQ ID NO: 5025457 - DNA, 25 bp, Homo sapien
tctctatgcaagatagaatgagggt

SEQ ID NO: 5025458 - DNA, 25 bp, Homo sapien
agaaattggcactttctctagccat

SEQ ID NO: 5025459 - DNA, 25 bp, Homo sapien
gaccaagaaattggcactttctcta

SEQ ID NO: 5025460 - DNA, 25 bp, Homo sapien
ctggaacttcaccttgcttgaccaa

SEQ ID NO: 5025461 - DNA, 25 bp, Homo sapien
aacttcaccttgcttgaccaagaaa

SEQ ID NO: 5025462 - DNA, 25 bp, Homo sapien
ggctggctctagatagggtacaacc

SEQ ID NO: 5025463 - DNA, 25 bp, Homo sapien
tatgtaggtggctgcctgctttgtc

SEQ ID NO: 5025464 - DNA, 25 bp, Homo sapien
tttccataaatcatatgtaggtggc

SEQ ID NO: 5025465 - DNA, 25 bp, Homo sapien
tcagggctggctctagatagggtac

SEQ ID NO: 5025466 - DNA, 25 bp, Homo sapien
agctttgagatactccctggccatc

SEQ ID NO: 5025467 - DNA, 25 bp, Homo sapien
cctggccatctacgttcctctttag

SEQ ID NO: 5025468 - DNA, 25 bp, Homo sapien
aaggatctatgtttctctttagagc

SEQ ID NO: 5025469 - DNA, 25 bp, Homo sapien
catctacgttcctctttagagcttt

SEQ ID NO: 5025470 - DNA, 25 bp, Homo sapien
ctgaccatctagtctgttcttgagg

SEQ ID NO: 5025471 - DNA, 25 bp, Homo sapien
caagtgttggtcctctgaattatct

SEQ ID NO: 5025472 - DNA, 25 bp, Homo sapien
cccagtctccaagttctctatctga

SEQ ID NO: 5025473 - DNA, 25 bp, Homo sapien
tttcgcctcatggtattctatgcat

SEQ ID NO: 5025474 - DNA, 25 bp, Homo sapien
agagttgttcttgccccgttgttga

SEQ ID NO: 5025475 - DNA, 25 bp, Homo sapien
tttatcaagagttgttcttgccccg

SEQ ID NO: 5025476 - DNA, 25 bp, Homo sapien
aagctgcggaaactcttctgcatcc

SEQ ID NO: 5025477 - DNA, 25 bp, Homo sapien
tggtgagaagctgcggaaactcttc

SEQ ID NO: 5025478 - DNA, 25 bp, Homo sapien
ctctcttcgttcttttcagttttga

SEQ ID NO: 5025479 - DNA, 25 bp, Homo sapien
cgttcttttcagttttgaccacact

SEQ ID NO: 5025480 - DNA, 25 bp, Homo sapien
tcttcgttcttttcagttttgacca

SEQ ID NO: 5025481 - DNA, 25 bp, Homo sapien
tcttttcagttttgaccacactctc

SEQ ID NO: 5025482 - DNA, 25 bp, Homo sapien
gctgccaggctgatgcaacttgccc

SEQ ID NO: 5025483 - DNA, 25 bp, Homo sapien
tgccaggctgatgcaacttgcccag

SEQ ID NO: 5025484 - DNA, 25 bp, Homo sapien
ggctgatgcaacttgcccagctgcc

SEQ ID NO: 5025485 - DNA, 25 bp, Homo sapien
caggctgatgcaacttgcccagctg

SEQ ID NO: 5025486 - DNA, 25 bp, Homo sapien
tgagactggctaagagccaatgtgc

SEQ ID NO: 5025487 - DNA, 25 bp, Homo sapien
ggcctgtggcactccctttgtctgg

SEQ ID NO: 5025488 - DNA, 25 bp, Homo sapien
ctaggcctgtggcactccctttgtc

SEQ ID NO: 5025489 - DNA, 25 bp, Homo sapien
ccaaaactccctgagactggctaag

SEQ ID NO: 5025490 - DNA, 25 bp, Homo sapien
ttgagaaaagccctcattgcaactc

SEQ ID NO: 5025491 - DNA, 25 bp, Homo sapien
ctgagctcctttgcacagtagcact

SEQ ID NO: 5025492 - DNA, 25 bp, Homo sapien
tcctttgcacagtagcacttccttc

SEQ ID NO: 5025493 - DNA, 25 bp, Homo sapien
tgacttgagaaaagccctcattgca

SEQ ID NO: 5025494 - DNA, 25 bp, Homo sapien
gggccaaccaagagatgctctttgc

SEQ ID NO: 5025495 - DNA, 25 bp, Homo sapien
cctcttgggccaaccaagagatgct

SEQ ID NO: 5025496 - DNA, 25 bp, Homo sapien
ctcttgggccaaccaagagatgctc

SEQ ID NO: 5025497 - DNA, 25 bp, Homo sapien
ggccaaccaagagatgctctttgcc

SEQ ID NO: 5025498 - DNA, 25 bp, Homo sapien
attgtcacaagagggcatatcattc

SEQ ID NO: 5025499 - DNA, 25 bp, Homo sapien
ttaatcatccagattgtcacaagag

SEQ ID NO: 5025500 - DNA, 25 bp, Homo sapien
tcatccagattgtcacaagagggca

SEQ ID NO: 5025501 - DNA, 25 bp, Homo sapien
cagattgtcacaagagggcatatca

SEQ ID NO: 5025502 - DNA, 25 bp, Homo sapien
gtcctgaatcttcatcagccacact

SEQ ID NO: 5025503 - DNA, 25 bp, Homo sapien
tcttcatcagccacactttttcaca

SEQ ID NO: 5025504 - DNA, 25 bp, Homo sapien
atcagccacactttttcacagctca

SEQ ID NO: 5025505 - DNA, 25 bp, Homo sapien
tatgttttgtcctgaatcttcatca

SEQ ID NO: 5025506 - DNA, 25 bp, Homo sapien
tagagcgctgatagtgtggtattgc

SEQ ID NO: 5025507 - DNA, 25 bp, Homo sapien
tcctgaggtccaaggttctgttccc

SEQ ID NO: 5025508 - DNA, 25 bp, Homo sapien
tctgttccctttcgtggtggcttcc

SEQ ID NO: 5025509 - DNA, 25 bp, Homo sapien
ttcccggagacagtcatagagctct

SEQ ID NO: 5025510 - DNA, 25 bp, Homo sapien
gtacccaagggctctaacaggacca

SEQ ID NO: 5025511 - DNA, 25 bp, Homo sapien
tacccaagggctctaacaggaccaa

SEQ ID NO: 5025512 - DNA, 25 bp, Homo sapien
tggaggcatttcagggtacccaagg

SEQ ID NO: 5025513 - DNA, 25 bp, Homo sapien
agtgctggaggcatttcagggtacc

SEQ ID NO: 5025514 - DNA, 25 bp, Homo sapien
gatcttggacagttttggataaacc

SEQ ID NO: 5025515 - DNA, 25 bp, Homo sapien
taagggacagtttgattgagctgag

SEQ ID NO: 5025516 - DNA, 25 bp, Homo sapien
catcaatcaatgcacttggccggaa

SEQ ID NO: 5025517 - DNA, 25 bp, Homo sapien
ggtaatacagaaacaagagttcaga

SEQ ID NO: 5025518 - DNA, 25 bp, Homo sapien
agaggtattccttgatccaatttca

SEQ ID NO: 5025519 - DNA, 25 bp, Homo sapien
tccatccacagttgcacaagaggta

SEQ ID NO: 5025520 - DNA, 25 bp, Homo sapien
aagaggtattccttgatccaatttc

SEQ ID NO: 5025521 - DNA, 25 bp, Homo sapien
atccacagttgcacaagaggtattc

SEQ ID NO: 5025522 - DNA, 25 bp, Homo sapien
tctaatgaatcacgtctcaggccca

SEQ ID NO: 5025523 - DNA, 25 bp, Homo sapien
tcttatcagcgtgcagactggactc

SEQ ID NO: 5025524 - DNA, 25 bp, Homo sapien
tattttggctggaactttatcaccc

SEQ ID NO: 5025525 - DNA, 25 bp, Homo sapien
gattttgatgtgattcacccgacgc

SEQ ID NO: 5025526 - DNA, 25 bp, Homo sapien
ctaaactgcggtttctgaccactcc

SEQ ID NO: 5025527 - DNA, 25 bp, Homo sapien
ctcctccttcaggcccattgcaaag

SEQ ID NO: 5025528 - DNA, 25 bp, Homo sapien
cacacactccattccatgcgctctc

SEQ ID NO: 5025529 - DNA, 25 bp, Homo sapien
actccattccatgcgctctcttggc

SEQ ID NO: 5025530 - DNA, 25 bp, Homo sapien
tccttcaggcccattgcaaagcctt

SEQ ID NO: 5025531 - DNA, 25 bp, Homo sapien
gaagagaagtgttggcagctctggg

SEQ ID NO: 5025532 - DNA, 25 bp, Homo sapien
ccacctgaggagactttgtggacac

SEQ ID NO: 5025533 - DNA, 25 bp, Homo sapien
gcatttttgcacaagtttcttactg

SEQ ID NO: 5025534 - DNA, 25 bp, Homo sapien
gagctcagcacggtgattctgccat

SEQ ID NO: 5025535 - DNA, 25 bp, Homo sapien
ctctggaacaagcatcaacttgcag

SEQ ID NO: 5025536 - DNA, 25 bp, Homo sapien
caaagtctgttgtcagcattgctga

SEQ ID NO: 5025537 - DNA, 25 bp, Homo sapien
cagagaattgagaacgggccacatt

SEQ ID NO: 5025538 - DNA, 25 bp, Homo sapien
gaggaggctgcactctggaacaagc

SEQ ID NO: 5025539 - DNA, 25 bp, Homo sapien
gattctcttgacttaattccgtact

SEQ ID NO: 5025540 - DNA, 25 bp, Homo sapien
cgtagatcaacttgattctcttgac

SEQ ID NO: 5025541 - DNA, 25 bp, Homo sapien
tgacttaattccgtacttggctttg

SEQ ID NO: 5025542 - DNA, 25 bp, Homo sapien
cttcctcaactctttataccgtaga

SEQ ID NO: 5025543 - DNA, 25 bp, Homo sapien
ctctactgataagtgactgattttc

SEQ ID NO: 5025544 - DNA, 25 bp, Homo sapien
tgccaggcaatgaataatgccatgt

SEQ ID NO: 5025545 - DNA, 25 bp, Homo sapien
aataatgccatgttcaatattctaa

SEQ ID NO: 5025546 - DNA, 25 bp, Homo sapien
aatgagctgcatggaactctactga

SEQ ID NO: 5025547 - DNA, 25 bp, Homo sapien
tagatcagggaagtgtgttagtgct

SEQ ID NO: 5025548 - DNA, 25 bp, Homo sapien
gggtagatgtgcttaatattgctcc

SEQ ID NO: 5025549 - DNA, 25 bp, Homo sapien
tctttctccaagctaattgggtaga

SEQ ID NO: 5025550 - DNA, 25 bp, Homo sapien
ctgcctggtggagttagatcaggga

SEQ ID NO: 5025551 - DNA, 25 bp, Homo sapien
cgatgatgtgcagattttcagcttc

SEQ ID NO: 5025552 - DNA, 25 bp, Homo sapien
ccatcagcatagtggatcactggtc

SEQ ID NO: 5025553 - DNA, 25 bp, Homo sapien
tgatctccttcatcacgatgatgtg

SEQ ID NO: 5025554 - DNA, 25 bp, Homo sapien
ctgtcccatcagcatagtggatcac

SEQ ID NO: 5025555 - DNA, 25 bp, Homo sapien
tccactctcttcacatcgtagttct

SEQ ID NO: 5025556 - DNA, 25 bp, Homo sapien
aagggaagtgggtacacaggacatt

SEQ ID NO: 5025557 - DNA, 25 bp, Homo sapien
cattgggatatgaattttgacaccc

SEQ ID NO: 5025558 - DNA, 25 bp, Homo sapien
tctcttcacatcgtagttctctaat

SEQ ID NO: 5025559 - DNA, 25 bp, Homo sapien
tccaatgtcagagtatgagcgagag

SEQ ID NO: 5025560 - DNA, 25 bp, Homo sapien
tgagcgagagtagaaacagtctttc

SEQ ID NO: 5025561 - DNA, 25 bp, Homo sapien
caatgtcagagtatgagcgagagta

SEQ ID NO: 5025562 - DNA, 25 bp, Homo sapien
cagagtatgagcgagagtagaaaca

SEQ ID NO: 5025563 - DNA, 25 bp, Homo sapien
gactctaagacagtgtagattattc

SEQ ID NO: 5025564 - DNA, 25 bp, Homo sapien
tatgtgagatcgtgaaatactttaa

SEQ ID NO: 5025565 - DNA, 25 bp, Homo sapien
tactttaaagactctaagacagtgt

SEQ ID NO: 5025566 - DNA, 25 bp, Homo sapien
tcctttgatcgaagcttgtctttcc

SEQ ID NO: 5025567 - DNA, 25 bp, Homo sapien
caaatgctgattctgcccataaagg

SEQ ID NO: 5025568 - DNA, 25 bp, Homo sapien
cataaaggtactgagcctttcttca

SEQ ID NO: 5025569 - DNA, 25 bp, Homo sapien
gctgattctgcccataaaggtactg

SEQ ID NO: 5025570 - DNA, 25 bp, Homo sapien
tctgcccataaaggtactgagcctt

SEQ ID NO: 5025571 - DNA, 25 bp, Homo sapien
ctgtcttgcaggaattggctgccag

SEQ ID NO: 5025572 - DNA, 25 bp, Homo sapien
gccagtactgatttcttgggctgca

SEQ ID NO: 5025573 - DNA, 25 bp, Homo sapien
gcaaatagggcaacagctgtgcctt

SEQ ID NO: 5025574 - DNA, 25 bp, Homo sapien
gaattggctgccagtactgatttct

SEQ ID NO: 5025575 - DNA, 25 bp, Homo sapien
ggctttcaattgagcagcaggaagt

SEQ ID NO: 5025576 - DNA, 25 bp, Homo sapien
gggctttcaattgagcagcaggaag

SEQ ID NO: 5025577 - DNA, 25 bp, Homo sapien
tgacctgtccttccgatctagttcg

SEQ ID NO: 5025578 - DNA, 25 bp, Homo sapien
cactttgacctgtccttccgatcta

SEQ ID NO: 5025579 - DNA, 25 bp, Homo sapien
ctgctcccactttgacctgtccttc

SEQ ID NO: 5025580 - DNA, 25 bp, Homo sapien
ccttccgatctagttcgagtcccat

SEQ ID NO: 5025581 - DNA, 25 bp, Homo sapien
tgatatggctgcatactctattctc

SEQ ID NO: 5025582 - DNA, 25 bp, Homo sapien
tgccagaaggtgtatatatggtgca

SEQ ID NO: 5025583 - DNA, 25 bp, Homo sapien
ggtttctgaaactggtcccctgata

SEQ ID NO: 5025584 - DNA, 25 bp, Homo sapien
gtgatgccaaatattggtttctgaa

SEQ ID NO: 5025585 - DNA, 25 bp, Homo sapien
aagcacattcccgatgaaagaaaca

SEQ ID NO: 5025586 - DNA, 25 bp, Homo sapien
agaaacagctaactgatgtttcatc

SEQ ID NO: 5025587 - DNA, 25 bp, Homo sapien
cacattcccgatgaaagaaacagct

SEQ ID NO: 5025588 - DNA, 25 bp, Homo sapien
taataagcacattcccgatgaaaga

SEQ ID NO: 5025589 - DNA, 25 bp, Homo sapien
gttccaagcaccactatagaagtta

SEQ ID NO: 5025590 - DNA, 25 bp, Homo sapien
tgcacttcctagtacaatatcttga

SEQ ID NO: 5025591 - DNA, 25 bp, Homo sapien
tcccagttcagtagccatttttatg

SEQ ID NO: 5025592 - DNA, 25 bp, Homo sapien
gatgtcatatcactgtcaccttgca

SEQ ID NO: 5025593 - DNA, 25 bp, Homo sapien
gggctgatttactgactgattctcc

SEQ ID NO: 5025594 - DNA, 25 bp, Homo sapien
ccttgggctgatttactgactgatt

SEQ ID NO: 5025595 - DNA, 25 bp, Homo sapien
catggccttgggctgatttactgac

SEQ ID NO: 5025596 - DNA, 25 bp, Homo sapien
ttggtgcattgcctaatacagcaac

SEQ ID NO: 5025597 - DNA, 25 bp, Homo sapien
attcatctcttgtgtttgtgcatac

SEQ ID NO: 5025598 - DNA, 25 bp, Homo sapien
catgtgtggttcaatagggtaattt

SEQ ID NO: 5025599 - DNA, 25 bp, Homo sapien
gcatgtgtggttcaatagggtaatt

SEQ ID NO: 5025600 - DNA, 25 bp, Homo sapien
atgtgtggttcaatagggtaatttt

SEQ ID NO: 5025601 - DNA, 25 bp, Homo sapien
cccttgtacttagggcactctttgc

SEQ ID NO: 5025602 - DNA, 25 bp, Homo sapien
tctttcccttgtacttagggcactc

SEQ ID NO: 5025603 - DNA, 25 bp, Homo sapien
acttagggcactctttgcaggcttg

SEQ ID NO: 5025604 - DNA, 25 bp, Homo sapien
ttgtacttagggcactctttgcagg

SEQ ID NO: 5025605 - DNA, 25 bp, Homo sapien
tgtttattgaggatccagtcaatat

SEQ ID NO: 5025606 - DNA, 25 bp, Homo sapien
cagcaactgagctatcaagaagacc

SEQ ID NO: 5025607 - DNA, 25 bp, Homo sapien
tcagcaactgagctatcaagaagac

SEQ ID NO: 5025608 - DNA, 25 bp, Homo sapien
gcaactgagctatcaagaagaccat

SEQ ID NO: 5025609 - DNA, 25 bp, Homo sapien
tcatcagcaactgagctatcaagaa

SEQ ID NO: 5025610 - DNA, 25 bp, Homo sapien
gaactacaagttcttccacaagtgg

SEQ ID NO: 5025611 - DNA, 25 bp, Homo sapien
gaggcccatccagtgatgcagataa

SEQ ID NO: 5025612 - DNA, 25 bp, Homo sapien
cagcaggttaggcatggagctctca

SEQ ID NO: 5025613 - DNA, 25 bp, Homo sapien
caaagaagtcaccttgccaggactg

SEQ ID NO: 5025614 - DNA, 25 bp, Homo sapien
tttggaagagtagaagtgccagccc

SEQ ID NO: 5025615 - DNA, 25 bp, Homo sapien
cgatgttttgattgggacgtgtgca

SEQ ID NO: 5025616 - DNA, 25 bp, Homo sapien
ggcaccctccttacgaacagacaaa

SEQ ID NO: 5025617 - DNA, 25 bp, Homo sapien
gacgtgtgcattcctctttaattca

SEQ ID NO: 5025618 - DNA, 25 bp, Homo sapien
tacatttataggtcttataaaccag

SEQ ID NO: 5025619 - DNA, 25 bp, Homo sapien
cagggtctgatctggtgaacttata

SEQ ID NO: 5025620 - DNA, 25 bp, Homo sapien
ggtcttataaaccagggtctgatct

SEQ ID NO: 5025621 - DNA, 25 bp, Homo sapien
gggtctgatctggtgaacttatatc

SEQ ID NO: 5025622 - DNA, 25 bp, Homo sapien
ccattgtgaacaaatatgactttct

SEQ ID NO: 5025623 - DNA, 25 bp, Homo sapien
acccaggcccccattgtgaacaaat

SEQ ID NO: 5025624 - DNA, 25 bp, Homo sapien
caggcccccattgtgaacaaatatg

SEQ ID NO: 5025625 - DNA, 25 bp, Homo sapien
ccccattgtgaacaaatatgacttt

SEQ ID NO: 5025626 - DNA, 25 bp, Homo sapien
tggatataaggtttagaggaccaag

SEQ ID NO: 5025627 - DNA, 25 bp, Homo sapien
cctctggatataaggtttagaggac

SEQ ID NO: 5025628 - DNA, 25 bp, Homo sapien
ccacctctggatataaggtttagag

SEQ ID NO: 5025629 - DNA, 25 bp, Homo sapien
tctggatataaggtttagaggacca

SEQ ID NO: 5025630 - DNA, 25 bp, Homo sapien
cttgagctcagacacaggttcattc

SEQ ID NO: 5025631 - DNA, 25 bp, Homo sapien
tagctttcttaaggagcccattctc

SEQ ID NO: 5025632 - DNA, 25 bp, Homo sapien
tttagctttcttaaggagcccattc

SEQ ID NO: 5025633 - DNA, 25 bp, Homo sapien
gctttcttaaggagcccattctcca

SEQ ID NO: 5025634 - DNA, 25 bp, Homo sapien
gatgtaatgctagcatcccattcat

SEQ ID NO: 5025635 - DNA, 25 bp, Homo sapien
cagcacaggcatcagatgtaatgct

SEQ ID NO: 5025636 - DNA, 25 bp, Homo sapien
cacaggcatcagatgtaatgctagc

SEQ ID NO: 5025637 - DNA, 25 bp, Homo sapien
catcagatgtaatgctagcatccca

SEQ ID NO: 5025638 - DNA, 25 bp, Homo sapien
tccgcctgtgggatcttcatgggct

SEQ ID NO: 5025639 - DNA, 25 bp, Homo sapien
tttccgcctgtgggatcttcatggg

SEQ ID NO: 5025640 - DNA, 25 bp, Homo sapien
cgcctgtgggatcttcatgggctgc

SEQ ID NO: 5025641 - DNA, 25 bp, Homo sapien
gcctgtgggatcttcatgggctgcc

SEQ ID NO: 5025642 - DNA, 25 bp, Homo sapien
ctgtgtccttgtcaaggaactggta

SEQ ID NO: 5025643 - DNA, 25 bp, Homo sapien
acactgtattagcagggactgtgtc

SEQ ID NO: 5025644 - DNA, 25 bp, Homo sapien
gatggggtagcatattccaagagac

SEQ ID NO: 5025645 - DNA, 25 bp, Homo sapien
gtccttgtcaaggaactggtagatg

SEQ ID NO: 5025646 - DNA, 25 bp, Homo sapien
cacattttatgctgaactggactcc

SEQ ID NO: 5025647 - DNA, 25 bp, Homo sapien
aaaggttcatgtaactagattcaca

SEQ ID NO: 5025648 - DNA, 25 bp, Homo sapien
ctcattgaaacactgtgataagata

SEQ ID NO: 5025649 - DNA, 25 bp, Homo sapien
gaatacactttacttatcattgagt

SEQ ID NO: 5025650 - DNA, 25 bp, Homo sapien
cattgtgtgggagtactaaggagct

SEQ ID NO: 5025651 - DNA, 25 bp, Homo sapien
tttggaaacaagctcttacattgtg

SEQ ID NO: 5025652 - DNA, 25 bp, Homo sapien
catccctcctgtggatcttagtcca

SEQ ID NO: 5025653 - DNA, 25 bp, Homo sapien
tcatgtctctggcaatgcgacagaa

SEQ ID NO: 5025654 - DNA, 25 bp, Homo sapien
aaacaacgttcccatcttgctccaa

SEQ ID NO: 5025655 - DNA, 25 bp, Homo sapien
cccaggccagatttctgctttggtt

SEQ ID NO: 5025656 - DNA, 25 bp, Homo sapien
tgctccaaagccccaggccagattt

SEQ ID NO: 5025657 - DNA, 25 bp, Homo sapien
ttgaaaacaacgttcccatcttgct

SEQ ID NO: 5025658 - DNA, 25 bp, Homo sapien
caggcattccacagatacattcaaa

SEQ ID NO: 5025659 - DNA, 25 bp, Homo sapien
cggtgaagagcgtttgataaaaatc

SEQ ID NO: 5025660 - DNA, 25 bp, Homo sapien
attcattgtccggtgaagagcgttt

SEQ ID NO: 5025661 - DNA, 25 bp, Homo sapien
tttctgcggcccattgtcatacttc

SEQ ID NO: 5025662 - DNA, 25 bp, Homo sapien
ccggagagcttgttcgggcttatgt

SEQ ID NO: 5025663 - DNA, 25 bp, Homo sapien
tgctgattatgtgagccgggctcct

SEQ ID NO: 5025664 - DNA, 25 bp, Homo sapien
gagaagatagcacagccgttgcaca

SEQ ID NO: 5025665 - DNA, 25 bp, Homo sapien
tttggaaaccgagcttgaatgtcac

SEQ ID NO: 5025666 - DNA, 25 bp, Homo sapien
agtccacaggtgatcagttccaaag

SEQ ID NO: 5025667 - DNA, 25 bp, Homo sapien
gtctctttggtccatccacaatcat

SEQ ID NO: 5025668 - DNA, 25 bp, Homo sapien
tgagtctctttggtccatccacaat

SEQ ID NO: 5025669 - DNA, 25 bp, Homo sapien
gagtctctttggtccatccacaatc

SEQ ID NO: 5025670 - DNA, 25 bp, Homo sapien
agtctctttggtccatccacaatca

SEQ ID NO: 5025671 - DNA, 25 bp, Homo sapien
tgttatgctgcatcttcaaaatccc

SEQ ID NO: 5025672 - DNA, 25 bp, Homo sapien
tcaaaatcccacttatctctatact

SEQ ID NO: 5025673 - DNA, 25 bp, Homo sapien
tcttccttcaagggtcacaggaggg

SEQ ID NO: 5025674 - DNA, 25 bp, Homo sapien
ggtcacaggagggtcactgaacaca

SEQ ID NO: 5025675 - DNA, 25 bp, Homo sapien
acttgtactccgtggaattgccctg

SEQ ID NO: 5025676 - DNA, 25 bp, Homo sapien
gagtttgaactcagtagggtataaa

SEQ ID NO: 5025677 - DNA, 25 bp, Homo sapien
tttttaatgaattcttgggcagatt

SEQ ID NO: 5025678 - DNA, 25 bp, Homo sapien
tgatgtgtagctagctgattgagga

SEQ ID NO: 5025679 - DNA, 25 bp, Homo sapien
ggatggcttctaaagtcccctgaag

SEQ ID NO: 5025680 - DNA, 25 bp, Homo sapien
caaatacgtgtaaaaccaaggcatg

SEQ ID NO: 5025681 - DNA, 25 bp, Homo sapien
tatacagcctaacacttggagggcc

SEQ ID NO: 5025682 - DNA, 25 bp, Homo sapien
gaattatattccaggcccctaagga

SEQ ID NO: 5025683 - DNA, 25 bp, Homo sapien
tgcagctaggaagaaatcctcaggt

SEQ ID NO: 5025684 - DNA, 25 bp, Homo sapien
cagctaggaagaaatcctcaggtct

SEQ ID NO: 5025685 - DNA, 25 bp, Homo sapien
cctcaggtctttaggctccaccagc

SEQ ID NO: 5025686 - DNA, 25 bp, Homo sapien
taggaagaaatcctcaggtctttag

SEQ ID NO: 5025687 - DNA, 25 bp, Homo sapien
aggaaatggtcagcacgactagcga

SEQ ID NO: 5025688 - DNA, 25 bp, Homo sapien
cacgactagcgaatgggagcttctt

SEQ ID NO: 5025689 - DNA, 25 bp, Homo sapien
gtggcaatggaaggatataccctca

SEQ ID NO: 5025690 - DNA, 25 bp, Homo sapien
tggaaggatataccctcatggccct

SEQ ID NO: 5025691 - DNA, 25 bp, Homo sapien
ttaacaaattgtccctctggtaatg

SEQ ID NO: 5025692 - DNA, 25 bp, Homo sapien
gcagggtattctttttggagctgga

SEQ ID NO: 5025693 - DNA, 25 bp, Homo sapien
tcctacagttatgccaccagtggtg

SEQ ID NO: 5025694 - DNA, 25 bp, Homo sapien
tgtaatagtgcatcaaaccccaggc

SEQ ID NO: 5025695 - DNA, 25 bp, Homo sapien
gaaagttcaaaatcactcccaaagc

SEQ ID NO: 5025696 - DNA, 25 bp, Homo sapien
tcactgaaagttcaaaatcactccc

SEQ ID NO: 5025697 - DNA, 25 bp, Homo sapien
gttcaaaatcactcccaaagccttc

SEQ ID NO: 5025698 - DNA, 25 bp, Homo sapien
aagccttcccctcatcatccacttg

SEQ ID NO: 5025699 - DNA, 25 bp, Homo sapien
gaccatggtccctattgctgaatag

SEQ ID NO: 5025700 - DNA, 25 bp, Homo sapien
cagtactttaggttacagatgtcgt

SEQ ID NO: 5025701 - DNA, 25 bp, Homo sapien
caaatctgttccaaatcattgaggc

SEQ ID NO: 5025702 - DNA, 25 bp, Homo sapien
cagatgtcgtctgtactgccaaatc

SEQ ID NO: 5025703 - DNA, 25 bp, Homo sapien
cagtcaccttcactcccacatcctt

SEQ ID NO: 5025704 - DNA, 25 bp, Homo sapien
tttgacaccacctgccacaccttca

SEQ ID NO: 5025705 - DNA, 25 bp, Homo sapien
tcccacatccttcagaccctgctgc

SEQ ID NO: 5025706 - DNA, 25 bp, Homo sapien
caccttcactgaagccagtcacctt

SEQ ID NO: 5025707 - DNA, 25 bp, Homo sapien
tgtgaatgctgtcattagtactgga

SEQ ID NO: 5025708 - DNA, 25 bp, Homo sapien
cattagtactggagaccactgcact

SEQ ID NO: 5025709 - DNA, 25 bp, Homo sapien
tggatgtctgagtgaggctgcttac

SEQ ID NO: 5025710 - DNA, 25 bp, Homo sapien
tgcttacttccaaccacttaatcca

SEQ ID NO: 5025711 - DNA, 25 bp, Homo sapien
tttaatcttctgtaggacatgattc

SEQ ID NO: 5025712 - DNA, 25 bp, Homo sapien
agtgggtggagacaccatcagtctc

SEQ ID NO: 5025713 - DNA, 25 bp, Homo sapien
gagtgggtggagacaccatcagtct

SEQ ID NO: 5025714 - DNA, 25 bp, Homo sapien
tctgtaggacatgattcagagctgt

SEQ ID NO: 5025715 - DNA, 25 bp, Homo sapien
aaaatccagtatgtgtatcatccac

SEQ ID NO: 5025716 - DNA, 25 bp, Homo sapien
gtatgtgcagtttaagagttaccaa

SEQ ID NO: 5025717 - DNA, 25 bp, Homo sapien
tacaactgctttagcagccccaaaa

SEQ ID NO: 5025718 - DNA, 25 bp, Homo sapien
taccaatgatgcaaggagaaacttt

SEQ ID NO: 5025719 - DNA, 25 bp, Homo sapien
aatttggacatcaaacccagttgat

SEQ ID NO: 5025720 - DNA, 25 bp, Homo sapien
tggaggtttcggcatcttcaatctg

SEQ ID NO: 5025721 - DNA, 25 bp, Homo sapien
agtcaaggatgggagttgttctaat

SEQ ID NO: 5025722 - DNA, 25 bp, Homo sapien
tgggaggagagtggtcacggagatt

SEQ ID NO: 5025723 - DNA, 25 bp, Homo sapien
gattttataggtgatgtattgatac

SEQ ID NO: 5025724 - DNA, 25 bp, Homo sapien
ttttataggtgatgtattgatacac

SEQ ID NO: 5025725 - DNA, 25 bp, Homo sapien
agagattttataggtgatgtattga

SEQ ID NO: 5025726 - DNA, 25 bp, Homo sapien
ttataggtgatgtattgatacacat

SEQ ID NO: 5025727 - DNA, 25 bp, Homo sapien
tacctggagagctactctgaagtac

SEQ ID NO: 5025728 - DNA, 25 bp, Homo sapien
gagctactctgaagtactgaaaggt

SEQ ID NO: 5025729 - DNA, 25 bp, Homo sapien
aggtaattggaggtacttcttgact

SEQ ID NO: 5025730 - DNA, 25 bp, Homo sapien
tacttcttgactgctgcagttccag

SEQ ID NO: 5025731 - DNA, 25 bp, Homo sapien
tccgggtttctcatactcttctgtg

SEQ ID NO: 5025732 - DNA, 25 bp, Homo sapien
gtcccacaagaggtaaaagttgtca

SEQ ID NO: 5025733 - DNA, 25 bp, Homo sapien
tagaacaagattggccctactttcc

SEQ ID NO: 5025734 - DNA, 25 bp, Homo sapien
gatgaactaccctccatgtcaaccg

SEQ ID NO: 5025735 - DNA, 25 bp, Homo sapien
gcctgagttccctggttctcctctt

SEQ ID NO: 5025736 - DNA, 25 bp, Homo sapien
gggcctgagttccctggttctcctc

SEQ ID NO: 5025737 - DNA, 25 bp, Homo sapien
ggcctgagttccctggttctcctct

SEQ ID NO: 5025738 - DNA, 25 bp, Homo sapien
agttccctggttctcctctttcttg

SEQ ID NO: 5025739 - DNA, 25 bp, Homo sapien
gccctctgtctcctgtgtattgtat

SEQ ID NO: 5025740 - DNA, 25 bp, Homo sapien
gggataatcatgcttaacgtatcgc

SEQ ID NO: 5025741 - DNA, 25 bp, Homo sapien
taacgtatcgcaaactatcatagtg

SEQ ID NO: 5025742 - DNA, 25 bp, Homo sapien
tgtcctcaaggaatacttctgttgc

SEQ ID NO: 5025743 - DNA, 25 bp, Homo sapien
gaacatggtgtcgtgtgttataaag

SEQ ID NO: 5025744 - DNA, 25 bp, Homo sapien
tcagaacatggtgtcgtgtgttata

SEQ ID NO: 5025745 - DNA, 25 bp, Homo sapien
tggtgtcgtgtgttataaagatggc

SEQ ID NO: 5025746 - DNA, 25 bp, Homo sapien
cgtgtgttataaagatggctgccat

SEQ ID NO: 5025747 - DNA, 25 bp, Homo sapien
actatgcaaatcacctcaaaatttg

SEQ ID NO: 5025748 - DNA, 25 bp, Homo sapien
aataataactatgcaaatcacctca

SEQ ID NO: 5025749 - DNA, 25 bp, Homo sapien
cttttggcttgcagttgccgatata

SEQ ID NO: 5025750 - DNA, 25 bp, Homo sapien
ctaacctcatacagtttaacttggc

SEQ ID NO: 5025751 - DNA, 25 bp, Homo sapien
aatcttttattagtcgatcggtgct

SEQ ID NO: 5025752 - DNA, 25 bp, Homo sapien
cttttattagtcgatcggtgcttcc

SEQ ID NO: 5025753 - DNA, 25 bp, Homo sapien
acagcaagatcaaatcttttattag

SEQ ID NO: 5025754 - DNA, 25 bp, Homo sapien
ccgcttgggaaattacagcaagatc

SEQ ID NO: 5025755 - DNA, 25 bp, Homo sapien
aaatggaaactgtgggtgacagaac

SEQ ID NO: 5025756 - DNA, 25 bp, Homo sapien
taaaatggaaactgtgggtgacaga

SEQ ID NO: 5025757 - DNA, 25 bp, Homo sapien
ttaaaatggaaactgtgggtgacag

SEQ ID NO: 5025758 - DNA, 25 bp, Homo sapien
atggaaactgtgggtgacagaacac

SEQ ID NO: 5025759 - DNA, 25 bp, Homo sapien
cagatgagcggacttaactggcccc

SEQ ID NO: 5025760 - DNA, 25 bp, Homo sapien
gccttgagagcaaagaaatggtctt

SEQ ID NO: 5025761 - DNA, 25 bp, Homo sapien
aaatggtcttctgagagcctgggca

SEQ ID NO: 5025762 - DNA, 25 bp, Homo sapien
tttgtgatcatctggctctcgccga

SEQ ID NO: 5025763 - DNA, 25 bp, Homo sapien
tgctttgtgcgattgacgtgggact

SEQ ID NO: 5025764 - DNA, 25 bp, Homo sapien
ccggcgctgtcgtccagccggaggg

SEQ ID NO: 5025765 - DNA, 25 bp, Homo sapien
ctcctttagacgcttattattgttg

SEQ ID NO: 5025766 - DNA, 25 bp, Homo sapien
gacgtgggactactcttgggaacca

SEQ ID NO: 5025767 - DNA, 25 bp, Homo sapien
agtaaccagggtagaaacttctcag

SEQ ID NO: 5025768 - DNA, 25 bp, Homo sapien
ccagggtagaaacttctcagaaaag

SEQ ID NO: 5025769 - DNA, 25 bp, Homo sapien
taaccagggtagaaacttctcagaa

SEQ ID NO: 5025770 - DNA, 25 bp, Homo sapien
tagtaaccagggtagaaacttctca

SEQ ID NO: 5025771 - DNA, 25 bp, Homo sapien
aagtagcgatatcgtttttgaagac

SEQ ID NO: 5025772 - DNA, 25 bp, Homo sapien
cagttttaatcaagtagcgatatcg

SEQ ID NO: 5025773 - DNA, 25 bp, Homo sapien
taatcaagtagcgatatcgtttttg

SEQ ID NO: 5025774 - DNA, 25 bp, Homo sapien
tggctcaaagcagttttaatcaagt

SEQ ID NO: 5025775 - DNA, 25 bp, Homo sapien
gctgatgctactcttgtgttacaag

SEQ ID NO: 5025776 - DNA, 25 bp, Homo sapien
tatgtccacctcatataattgaaga

SEQ ID NO: 5025777 - DNA, 25 bp, Homo sapien
ttaagtatcaaaaatgcttgaaagt

SEQ ID NO: 5025778 - DNA, 25 bp, Homo sapien
ttatatatttattcacagtgagcat

SEQ ID NO: 5025779 - DNA, 25 bp, Homo sapien
cttctttctcttcttgaagtgacat

SEQ ID NO: 5025780 - DNA, 25 bp, Homo sapien
tcaaattctcattttggtagccttt

SEQ ID NO: 5025781 - DNA, 25 bp, Homo sapien
tctcaaattctcattttggtagcct

SEQ ID NO: 5025782 - DNA, 25 bp, Homo sapien
ctcaaattctcattttggtagcctt

SEQ ID NO: 5025783 - DNA, 25 bp, Homo sapien
gcgtctgataaaacctgattgattg

SEQ ID NO: 5025784 - DNA, 25 bp, Homo sapien
taagcttctgaagtcagggctacaa

SEQ ID NO: 5025785 - DNA, 25 bp, Homo sapien
gattgattgatgtctggcttcccca

SEQ ID NO: 5025786 - DNA, 25 bp, Homo sapien
aactgggtcagatgataagatgagc

SEQ ID NO: 5025787 - DNA, 25 bp, Homo sapien
gacccggattgtgtgtctgttcgga

SEQ ID NO: 5025788 - DNA, 25 bp, Homo sapien
gattgataattcgactgcatctgca

SEQ ID NO: 5025789 - DNA, 25 bp, Homo sapien
taatgaggagaagtgacattggacc

SEQ ID NO: 5025790 - DNA, 25 bp, Homo sapien
tctgcaaacagacgcccaaaaatca

SEQ ID NO: 5025791 - DNA, 25 bp, Homo sapien
gcatctttgacaaacttcttagtct

SEQ ID NO: 5025792 - DNA, 25 bp, Homo sapien
ctatactttcagacaatctggagct

SEQ ID NO: 5025793 - DNA, 25 bp, Homo sapien
aacttcttagtcttgtgcatctttt

SEQ ID NO: 5025794 - DNA, 25 bp, Homo sapien
gacaatctggagctttttcagcatc

SEQ ID NO: 5025795 - DNA, 25 bp, Homo sapien
cattatccttttatgtaggacaggg

SEQ ID NO: 5025796 - DNA, 25 bp, Homo sapien
cagccaatatttggaatgggttaag

SEQ ID NO: 5025797 - DNA, 25 bp, Homo sapien
gggccacactgcaattgacagccaa

SEQ ID NO: 5025798 - DNA, 25 bp, Homo sapien
ccattttgtcagtgaaagggcttct

SEQ ID NO: 5025799 - DNA, 25 bp, Homo sapien
cagacatggcatatgtcagagtgct

SEQ ID NO: 5025800 - DNA, 25 bp, Homo sapien
tggccctaccgcacagttggtttga

SEQ ID NO: 5025801 - DNA, 25 bp, Homo sapien
ttacttcatttacagacatggcata

SEQ ID NO: 5025802 - DNA, 25 bp, Homo sapien
tatgtcagagtgcttggccctaccg

SEQ ID NO: 5025803 - DNA, 25 bp, Homo sapien
tttcctgaaggacagaagttgtctc

SEQ ID NO: 5025804 - DNA, 25 bp, Homo sapien
ttcctgaaggacagaagttgtctct

SEQ ID NO: 5025805 - DNA, 25 bp, Homo sapien
tgtaccgaattattatcacttccac

SEQ ID NO: 5025806 - DNA, 25 bp, Homo sapien
agaagttgtctctgtaccgaattat

SEQ ID NO: 5025807 - DNA, 25 bp, Homo sapien
gggtcaaggactttgcacaaatcgg

SEQ ID NO: 5025808 - DNA, 25 bp, Homo sapien
tgcacaaatcggactacatgaatat

SEQ ID NO: 5025809 - DNA, 25 bp, Homo sapien
caaatcggactacatgaatattgca

SEQ ID NO: 5025810 - DNA, 25 bp, Homo sapien
gactttgcacaaatcggactacatg

SEQ ID NO: 5025811 - DNA, 25 bp, Homo sapien
tctcactattccatcgtgattggcg

SEQ ID NO: 5025812 - DNA, 25 bp, Homo sapien
ccaggagacctcttgttggcaaatt

SEQ ID NO: 5025813 - DNA, 25 bp, Homo sapien
tcagcattagatgaaagcagaggat

SEQ ID NO: 5025814 - DNA, 25 bp, Homo sapien
ggcaaattgccttggtcttctattc

SEQ ID NO: 5025815 - DNA, 25 bp, Homo sapien
atgtaggttttgtataggcagagcc

SEQ ID NO: 5025816 - DNA, 25 bp, Homo sapien
taaacatgagcatgacatggcccca

SEQ ID NO: 5025817 - DNA, 25 bp, Homo sapien
catagtaaactagtcttgggtgaaa

SEQ ID NO: 5025818 - DNA, 25 bp, Homo sapien
tagttccagagatacttaccaatag

SEQ ID NO: 5025819 - DNA, 25 bp, Homo sapien
ctctggcagaattggtgtcctggaa

SEQ ID NO: 5025820 - DNA, 25 bp, Homo sapien
gattagaactcccttcaccagttga

SEQ ID NO: 5025821 - DNA, 25 bp, Homo sapien
tgtcctggaatataaccaagcagat

SEQ ID NO: 5025822 - DNA, 25 bp, Homo sapien
gtatgctcagtgttccaactgctgg

SEQ ID NO: 5025823 - DNA, 25 bp, Homo sapien
tgtagacacaatcccgtggacacct

SEQ ID NO: 5025824 - DNA, 25 bp, Homo sapien
aatgccccatttgtcatttacaaac

SEQ ID NO: 5025825 - DNA, 25 bp, Homo sapien
aaactgcagatcattgaaacaacca

SEQ ID NO: 5025826 - DNA, 25 bp, Homo sapien
ccaaatgaaaaatcatccgatatac

SEQ ID NO: 5025827 - DNA, 25 bp, Homo sapien
aatgaaaaatcatccgatataccca

SEQ ID NO: 5025828 - DNA, 25 bp, Homo sapien
gcttcactgtacattgggctgtcca

SEQ ID NO: 5025829 - DNA, 25 bp, Homo sapien
aagcttcactgtacattgggctgtc

SEQ ID NO: 5025830 - DNA, 25 bp, Homo sapien
ttggtactgactagatgaaaagctt

SEQ ID NO: 5025831 - DNA, 25 bp, Homo sapien
cccagattgcacagcgcagctgttg

SEQ ID NO: 5025832 - DNA, 25 bp, Homo sapien
cacccttgcatgactttgcaaattg

SEQ ID NO: 5025833 - DNA, 25 bp, Homo sapien
ctccagcagtaattttctgaaacca

SEQ ID NO: 5025834 - DNA, 25 bp, Homo sapien
aggaactccagcagtaattttctga

SEQ ID NO: 5025835 - DNA, 25 bp, Homo sapien
gaactccagcagtaattttctgaaa

SEQ ID NO: 5025836 - DNA, 25 bp, Homo sapien
agggcttgaagattacagttctgat

SEQ ID NO: 5025837 - DNA, 25 bp, Homo sapien
gattacagttctgatttcgtttcct

SEQ ID NO: 5025838 - DNA, 25 bp, Homo sapien
ctttactagtccaaagaagggcttg

SEQ ID NO: 5025839 - DNA, 25 bp, Homo sapien
ctctttactagtccaaagaagggct

SEQ ID NO: 5025840 - DNA, 25 bp, Homo sapien
tgaagataagagctctgtaccacta

SEQ ID NO: 5025841 - DNA, 25 bp, Homo sapien
tctgtaccactataatgaaccatca

SEQ ID NO: 5025842 - DNA, 25 bp, Homo sapien
tcaatctttggaaggaaatgactct

SEQ ID NO: 5025843 - DNA, 25 bp, Homo sapien
ggaaatgactcttgccggatgaaga

SEQ ID NO: 5025844 - DNA, 25 bp, Homo sapien
ttatggcccatccagaacagctcag

SEQ ID NO: 5025845 - DNA, 25 bp, Homo sapien
tgagggcttcgcagttttgcagaac

SEQ ID NO: 5025846 - DNA, 25 bp, Homo sapien
gagctgatagccatgaattttgtga

SEQ ID NO: 5025847 - DNA, 25 bp, Homo sapien
tagcccaaccaacatattgtaagtg

SEQ ID NO: 5025848 - DNA, 25 bp, Homo sapien
cattgtagcttagaggtattgtaac

SEQ ID NO: 5025849 - DNA, 25 bp, Homo sapien
cagagcacacaaatctagaaacatt

SEQ ID NO: 5025850 - DNA, 25 bp, Homo sapien
caaatctagaaacattgtagcttag

SEQ ID NO: 5025851 - DNA, 25 bp, Homo sapien
ttgtagcttagaggtattgtaacca

SEQ ID NO: 5025852 - DNA, 25 bp, Homo sapien
cccattgctctccagctggtgtact

SEQ ID NO: 5025853 - DNA, 25 bp, Homo sapien
cattgctctccagctggtgtactca

SEQ ID NO: 5025854 - DNA, 25 bp, Homo sapien
attgctctccagctggtgtactcat

SEQ ID NO: 5025855 - DNA, 25 bp, Homo sapien
ctgcccattgctctccagctggtgt

SEQ ID NO: 5025856 - DNA, 25 bp, Homo sapien
ttcgggatcctttgctatcaacacc

SEQ ID NO: 5025857 - DNA, 25 bp, Homo sapien
cgggatcctttgctatcaacaccaa

SEQ ID NO: 5025858 - DNA, 25 bp, Homo sapien
tcgggatcctttgctatcaacacca

SEQ ID NO: 5025859 - DNA, 25 bp, Homo sapien
catcattccgtttatcacagtgcac

SEQ ID NO: 5025860 - DNA, 25 bp, Homo sapien
acaagccggcattaattaaagcaaa

SEQ ID NO: 5025861 - DNA, 25 bp, Homo sapien
tccggactgtgagatgaatttcaat

SEQ ID NO: 5025862 - DNA, 25 bp, Homo sapien
cacaggctggccgttaagtaaattc

SEQ ID NO: 5025863 - DNA, 25 bp, Homo sapien
taccaaaaggagagagtccaagttc

SEQ ID NO: 5025864 - DNA, 25 bp, Homo sapien
agaggcatgtagataagccaaatcc

SEQ ID NO: 5025865 - DNA, 25 bp, Homo sapien
gaattggactggtatagaggcatgt

SEQ ID NO: 5025866 - DNA, 25 bp, Homo sapien
agcagcatctggtgtcttacgggca

SEQ ID NO: 5025867 - DNA, 25 bp, Homo sapien
gcttgtcaagaagtaaggaacaggg

SEQ ID NO: 5025868 - DNA, 25 bp, Homo sapien
gctttcttagagataactcccctag

SEQ ID NO: 5025869 - DNA, 25 bp, Homo sapien
aatgtttgtattctgtggcttgtca

SEQ ID NO: 5025870 - DNA, 25 bp, Homo sapien
tcatccctcttaattgcatacagga

SEQ ID NO: 5025871 - DNA, 25 bp, Homo sapien
tcttgtggagaggttgcaaaacacc

SEQ ID NO: 5025872 - DNA, 25 bp, Homo sapien
aaaggtctctgggtgaaatggcatg

SEQ ID NO: 5025873 - DNA, 25 bp, Homo sapien
tactggatcgtggactcaggcacta

SEQ ID NO: 5025874 - DNA, 25 bp, Homo sapien
gatagcaaacaccattcagtcatga

SEQ ID NO: 5025875 - DNA, 25 bp, Homo sapien
aggtctgcaggcagtatgggacccc

SEQ ID NO: 5025876 - DNA, 25 bp, Homo sapien
ggtgttgaagacaacaggtctgcag

SEQ ID NO: 5025877 - DNA, 25 bp, Homo sapien
cacaggcagttccttggtgttgaag

SEQ ID NO: 5025878 - DNA, 25 bp, Homo sapien
tgcccatagcactcaggaatgctgt

SEQ ID NO: 5025879 - DNA, 25 bp, Homo sapien
ctgagcaagaatggccttcaacact

SEQ ID NO: 5025880 - DNA, 25 bp, Homo sapien
gagcaagaatggccttcaacactgg

SEQ ID NO: 5025881 - DNA, 25 bp, Homo sapien
tgagcaagaatggccttcaacactg

SEQ ID NO: 5025882 - DNA, 25 bp, Homo sapien
ttgcagataatagtggtttagacat

SEQ ID NO: 5025883 - DNA, 25 bp, Homo sapien
agtggtttagacattctctgttcaa

SEQ ID NO: 5025884 - DNA, 25 bp, Homo sapien
taatagtggtttagacattctctgt

SEQ ID NO: 5025885 - DNA, 25 bp, Homo sapien
gcagataatagtggtttagacattc

SEQ ID NO: 5025886 - DNA, 25 bp, Homo sapien
tttgaaggacacagggtataacatt

SEQ ID NO: 5025887 - DNA, 25 bp, Homo sapien
gacacagggtataacattatcatct

SEQ ID NO: 5025888 - DNA, 25 bp, Homo sapien
cattatcatctttagtaactcggga

SEQ ID NO: 5025889 - DNA, 25 bp, Homo sapien
catctttagtaactcgggaagcttt

SEQ ID NO: 5025890 - DNA, 25 bp, Homo sapien
gggagaggatgtacactaaacaaaa

SEQ ID NO: 5025891 - DNA, 25 bp, Homo sapien
gagaggatgtacactaaacaaaatc

SEQ ID NO: 5025892 - DNA, 25 bp, Homo sapien
gaggatgtacactaaacaaaatctc

SEQ ID NO: 5025893 - DNA, 25 bp, Homo sapien
agaggggagaggatgtacactaaac

SEQ ID NO: 5025894 - DNA, 25 bp, Homo sapien
tttgtggaacccttcactacacttc

SEQ ID NO: 5025895 - DNA, 25 bp, Homo sapien
aacccttcactacacttcagtaatt

SEQ ID NO: 5025896 - DNA, 25 bp, Homo sapien
ctgaaaacaagatttgtggaaccct

SEQ ID NO: 5025897 - DNA, 25 bp, Homo sapien
tggaacccttcactacacttcagta

SEQ ID NO: 5025898 - DNA, 25 bp, Homo sapien
gcatgttcatacaggagtctgctgc

SEQ ID NO: 5025899 - DNA, 25 bp, Homo sapien
tgcaatttccttgtgcttggtggat

SEQ ID NO: 5025900 - DNA, 25 bp, Homo sapien
taacatagatacaattatacttcat

SEQ ID NO: 5025901 - DNA, 25 bp, Homo sapien
atcagcatgttcatacaggagtctg

SEQ ID NO: 5025902 - DNA, 25 bp, Homo sapien
ataagatggcattctccgaatacat

SEQ ID NO: 5025903 - DNA, 25 bp, Homo sapien
ccttgctaaattggatcccataatc

SEQ ID NO: 5025904 - DNA, 25 bp, Homo sapien
gataaaacagtaggtcatcactgcc

SEQ ID NO: 5025905 - DNA, 25 bp, Homo sapien
gagtagtaatgatcttcaaagttct

SEQ ID NO: 5025906 - DNA, 25 bp, Homo sapien
aatcacaggagtagtaatgatcttc

SEQ ID NO: 5025907 - DNA, 25 bp, Homo sapien
gtatcttttgctagtgcacacacag

SEQ ID NO: 5025908 - DNA, 25 bp, Homo sapien
tctttcagttgctttgacagcatct

SEQ ID NO: 5025909 - DNA, 25 bp, Homo sapien
tttgacagcatctaaaggaatgggc

SEQ ID NO: 5025910 - DNA, 25 bp, Homo sapien
tagctactgagagctttgaaaggag

SEQ ID NO: 5025911 - DNA, 25 bp, Homo sapien
ctaagaaacgccctctaatgtgtta

SEQ ID NO: 5025912 - DNA, 25 bp, Homo sapien
aaactattgtcgttacttctgttgc

SEQ ID NO: 5025913 - DNA, 25 bp, Homo sapien
aatgtgttacaaccatataaaacta

SEQ ID NO: 5025914 - DNA, 25 bp, Homo sapien
tcgttacttctgttgcagataagag

SEQ ID NO: 5025915 - DNA, 25 bp, Homo sapien
tccttttaaatcagcctgtctcctc

SEQ ID NO: 5025916 - DNA, 25 bp, Homo sapien
gttcgttgacaaagaatgcagtaag

SEQ ID NO: 5025917 - DNA, 25 bp, Homo sapien
cttgttcgttgacaaagaatgcagt

SEQ ID NO: 5025918 - DNA, 25 bp, Homo sapien
tcctcttgacttccagctaacttgc

SEQ ID NO: 5025919 - DNA, 25 bp, Homo sapien
tgggttatgctcctgaacttatact

SEQ ID NO: 5025920 - DNA, 25 bp, Homo sapien
ggcagctgacaaagaatcgtttttc

SEQ ID NO: 5025921 - DNA, 25 bp, Homo sapien
tggcagctgacaaagaatcgttttt

SEQ ID NO: 5025922 - DNA, 25 bp, Homo sapien
atgctcctgaacttatacttggcag

SEQ ID NO: 5025923 - DNA, 25 bp, Homo sapien
gttagcagaagttctctggaatttc

SEQ ID NO: 5025924 - DNA, 25 bp, Homo sapien
cgaagacatttgttagcagaagttc

SEQ ID NO: 5025925 - DNA, 25 bp, Homo sapien
cacattctactcgaagacatttgtt

SEQ ID NO: 5025926 - DNA, 25 bp, Homo sapien
tctactcgaagacatttgttagcag

SEQ ID NO: 5025927 - DNA, 25 bp, Homo sapien
aaatgtccccacctgtatgccttca

SEQ ID NO: 5025928 - DNA, 25 bp, Homo sapien
ggcattaaattgcaatgctgcttct

SEQ ID NO: 5025929 - DNA, 25 bp, Homo sapien
aaagaaaatgctgctctactctact

SEQ ID NO: 5025930 - DNA, 25 bp, Homo sapien
tgggaacacttattgctatttgtct

SEQ ID NO: 5025931 - DNA, 25 bp, Homo sapien
gaacatcagtgaacggacaggagtc

SEQ ID NO: 5025932 - DNA, 25 bp, Homo sapien
gccttatcttgagagactgtcaggg

SEQ ID NO: 5025933 - DNA, 25 bp, Homo sapien
tggacaaggtttaaatctgcagact

SEQ ID NO: 5025934 - DNA, 25 bp, Homo sapien
tctggagagttatgatgctccataa

SEQ ID NO: 5025935 - DNA, 25 bp, Homo sapien
tataacctattttgtagtgacgcct

SEQ ID NO: 5025936 - DNA, 25 bp, Homo sapien
catcagaactgagtataaaaggtct

SEQ ID NO: 5025937 - DNA, 25 bp, Homo sapien
gaaagcaccttagggatcctagcaa

SEQ ID NO: 5025938 - DNA, 25 bp, Homo sapien
ggtcattctattcaagcagctccat

SEQ ID NO: 5025939 - DNA, 25 bp, Homo sapien
taatcttccactccggagaggcttg

SEQ ID NO: 5025940 - DNA, 25 bp, Homo sapien
ttttaatcttccactccggagaggc

SEQ ID NO: 5025941 - DNA, 25 bp, Homo sapien
ctccggagaggcttgttgacagaga

SEQ ID NO: 5025942 - DNA, 25 bp, Homo sapien
ttccactccggagaggcttgttgac

SEQ ID NO: 5025943 - DNA, 25 bp, Homo sapien
gctggcaaaagcacgaagcagctgc

SEQ ID NO: 5025944 - DNA, 25 bp, Homo sapien
aagcagctgcagtatccaaagattg

SEQ ID NO: 5025945 - DNA, 25 bp, Homo sapien
taactctgaagttggttcaagcaca

SEQ ID NO: 5025946 - DNA, 25 bp, Homo sapien
gtaaaaatagcaccggaccctgtca

SEQ ID NO: 5025947 - DNA, 25 bp, Homo sapien
tcttttggggctgtcccttctgatg

SEQ ID NO: 5025948 - DNA, 25 bp, Homo sapien
aaaggaatccttgtatttgaccact

SEQ ID NO: 5025949 - DNA, 25 bp, Homo sapien
cttttgtcctgtgtaatcttttggg

SEQ ID NO: 5025950 - DNA, 25 bp, Homo sapien
ccttgtatttgaccacttcttttgt

SEQ ID NO: 5025951 - DNA, 25 bp, Homo sapien
gtgcatgataacacagattcccctg

SEQ ID NO: 5025952 - DNA, 25 bp, Homo sapien
attcccctgaattccggcactccac

SEQ ID NO: 5025953 - DNA, 25 bp, Homo sapien
tttttggtgtgcctgtgattctatc

SEQ ID NO: 5025954 - DNA, 25 bp, Homo sapien
taacggcgatggctagtttttggtg

SEQ ID NO: 5025955 - DNA, 25 bp, Homo sapien
aagcaaccctgccatggatttcaga

SEQ ID NO: 5025956 - DNA, 25 bp, Homo sapien
taaagcaaccctgccatggatttca

SEQ ID NO: 5025957 - DNA, 25 bp, Homo sapien
agcaaccctgccatggatttcagag

SEQ ID NO: 5025958 - DNA, 25 bp, Homo sapien
cttaaagcaaccctgccatggattt

SEQ ID NO: 5025959 - DNA, 25 bp, Homo sapien
ttaggaagcagttgccaaattggga

SEQ ID NO: 5025960 - DNA, 25 bp, Homo sapien
agttgccaaattgggaaatggctca

SEQ ID NO: 5025961 - DNA, 25 bp, Homo sapien
cttaggaagcagttgccaaattggg

SEQ ID NO: 5025962 - DNA, 25 bp, Homo sapien
aagcagttgccaaattgggaaatgg

SEQ ID NO: 5025963 - DNA, 25 bp, Homo sapien
gacacattgactgggaagagcattg

SEQ ID NO: 5025964 - DNA, 25 bp, Homo sapien
tacagccatgaacccttgcctatga

SEQ ID NO: 5025965 - DNA, 25 bp, Homo sapien
taaagtaagcatagccgtaatccag

SEQ ID NO: 5025966 - DNA, 25 bp, Homo sapien
cgtaatccagcctcctttatggtag

SEQ ID NO: 5025967 - DNA, 25 bp, Homo sapien
gagttagaaggatcaataggctgtc

SEQ ID NO: 5025968 - DNA, 25 bp, Homo sapien
tcaataggctgtccatgatctagag

SEQ ID NO: 5025969 - DNA, 25 bp, Homo sapien
ggctgtccatgatctagaggataca

SEQ ID NO: 5025970 - DNA, 25 bp, Homo sapien
gctttgctgcagagttagaaggatc

SEQ ID NO: 5025971 - DNA, 25 bp, Homo sapien
tacactgggccagtgtatcgagaag

SEQ ID NO: 5025972 - DNA, 25 bp, Homo sapien
tatcgagaaggacaccggacaggaa

SEQ ID NO: 5025973 - DNA, 25 bp, Homo sapien
aaccacaagcttccgcaccagggat

SEQ ID NO: 5025974 - DNA, 25 bp, Homo sapien
cggacaggaaccacaagcttccgca

SEQ ID NO: 5025975 - DNA, 25 bp, Homo sapien
gattagggattcaccaggtctaccc

SEQ ID NO: 5025976 - DNA, 25 bp, Homo sapien
tgagagtctctgctgaacacagtga

SEQ ID NO: 5025977 - DNA, 25 bp, Homo sapien
gagagtctctgctgaacacagtgag

SEQ ID NO: 5025978 - DNA, 25 bp, Homo sapien
aacacagtgagaagattagggattc

SEQ ID NO: 5025979 - DNA, 25 bp, Homo sapien
tttggcagtaattcagtaaaggaaa

SEQ ID NO: 5025980 - DNA, 25 bp, Homo sapien
gatttggcagtaattcagtaaagga

SEQ ID NO: 5025981 - DNA, 25 bp, Homo sapien
aggatttggcagtaattcagtaaag

SEQ ID NO: 5025982 - DNA, 25 bp, Homo sapien
cacttggaaggatttggcagtaatt

SEQ ID NO: 5025983 - DNA, 25 bp, Homo sapien
gagatgcatcctagaacagtcccat

SEQ ID NO: 5025984 - DNA, 25 bp, Homo sapien
gggctctgaaaggactcccacttgg

SEQ ID NO: 5025985 - DNA, 25 bp, Homo sapien
cagtcccattgttttggcatccacc

SEQ ID NO: 5025986 - DNA, 25 bp, Homo sapien
catctgtaaaagtagggtcttgggc

SEQ ID NO: 5025987 - DNA, 25 bp, Homo sapien
cacacagcatctcttcaagtaggtt

SEQ ID NO: 5025988 - DNA, 25 bp, Homo sapien
agcttaatttgtgggaagagggcca

SEQ ID NO: 5025989 - DNA, 25 bp, Homo sapien
cagcatctcttcaagtaggttttct

SEQ ID NO: 5025990 - DNA, 25 bp, Homo sapien
tcagttttagcttaatttgtgggaa

SEQ ID NO: 5025991 - DNA, 25 bp, Homo sapien
gtcagcaaagaacaactaattccag

SEQ ID NO: 5025992 - DNA, 25 bp, Homo sapien
cctgcaaaggattactctgttggta

SEQ ID NO: 5025993 - DNA, 25 bp, Homo sapien
ccagaaatgttctaggctaccaagt

SEQ ID NO: 5025994 - DNA, 25 bp, Homo sapien
taaagtgtcattaacagccaaatgc

SEQ ID NO: 5025995 - DNA, 25 bp, Homo sapien
cagtgtcatctgtgatagcgtgagg

SEQ ID NO: 5025996 - DNA, 25 bp, Homo sapien
attattcttgattgtcaagtgatcc

SEQ ID NO: 5025997 - DNA, 25 bp, Homo sapien
tccttgttatgtactagctgagcac

SEQ ID NO: 5025998 - DNA, 25 bp, Homo sapien
gaagatggcatctatataactatta

SEQ ID NO: 5025999 - DNA, 25 bp, Homo sapien
ttgccttggaaatgtcatcaccaac

SEQ ID NO: 5026000 - DNA, 25 bp, Homo sapien
cagttgccttggaaatgtcatcacc

SEQ ID NO: 5026001 - DNA, 25 bp, Homo sapien
caatcaccagttgccttggaaatgt

SEQ ID NO: 5026002 - DNA, 25 bp, Homo sapien
tcaatcaccagttgccttggaaatg

SEQ ID NO: 5026003 - DNA, 25 bp, Homo sapien
gggtgagagcagacatgggacctaa

SEQ ID NO: 5026004 - DNA, 25 bp, Homo sapien
ggtgagagcagacatgggacctaat

SEQ ID NO: 5026005 - DNA, 25 bp, Homo sapien
gtgagagcagacatgggacctaatt

SEQ ID NO: 5026006 - DNA, 25 bp, Homo sapien
ggggtgagagcagacatgggaccta

SEQ ID NO: 5026007 - DNA, 25 bp, Homo sapien
gcttatcaacatgccgatagtacca

SEQ ID NO: 5026008 - DNA, 25 bp, Homo sapien
gctctgtgcttggattttcaaggca

SEQ ID NO: 5026009 - DNA, 25 bp, Homo sapien
gccgatagtaccataactcattaca

SEQ ID NO: 5026010 - DNA, 25 bp, Homo sapien
tcttctttgggctatagcttatcaa

SEQ ID NO: 5026011 - DNA, 25 bp, Homo sapien
ggttgtttgtggcaacagcatgcat

SEQ ID NO: 5026012 - DNA, 25 bp, Homo sapien
gatatggagtcagttgcaaagcagg

SEQ ID NO: 5026013 - DNA, 25 bp, Homo sapien
caatagattatttactcctttgtca

SEQ ID NO: 5026014 - DNA, 25 bp, Homo sapien
gtcataaacaggaaacagttggttg

SEQ ID NO: 5026015 - DNA, 25 bp, Homo sapien
atttaccaagttcctcactggctta

SEQ ID NO: 5026016 - DNA, 25 bp, Homo sapien
cactggcttattcagttgcaagatg

SEQ ID NO: 5026017 - DNA, 25 bp, Homo sapien
tctttccacagttttggaagatgca

SEQ ID NO: 5026018 - DNA, 25 bp, Homo sapien
catgcccatgcaagaggaatgtgat

SEQ ID NO: 5026019 - DNA, 25 bp, Homo sapien
attttctgtgatttcaggtgccacc

SEQ ID NO: 5026020 - DNA, 25 bp, Homo sapien
tctgtgatttcaggtgccacctgtt

SEQ ID NO: 5026021 - DNA, 25 bp, Homo sapien
caataaagtgctcttcatagttcat

SEQ ID NO: 5026022 - DNA, 25 bp, Homo sapien
tttctgtgatttcaggtgccacctg

SEQ ID NO: 5026023 - DNA, 25 bp, Homo sapien
ggttaccacatgaatgcagagagca

SEQ ID NO: 5026024 - DNA, 25 bp, Homo sapien
tcctaaatgttgagataccccaagt

SEQ ID NO: 5026025 - DNA, 25 bp, Homo sapien
gcagagagcatccatggtcaattag

SEQ ID NO: 5026026 - DNA, 25 bp, Homo sapien
gcctgtatgtcttctccaagttcca

SEQ ID NO: 5026027 - DNA, 25 bp, Homo sapien
gctcctctgatttcgacatgatatg

SEQ ID NO: 5026028 - DNA, 25 bp, Homo sapien
aagctaatcgcagaagccttcaggg

SEQ ID NO: 5026029 - DNA, 25 bp, Homo sapien
tgaatgcccataagggaaggaaggc

SEQ ID NO: 5026030 - DNA, 25 bp, Homo sapien
tgtctacagttgcaagtagtttgga

SEQ ID NO: 5026031 - DNA, 25 bp, Homo sapien
tcagatacattcgtgaaaagtagtt

SEQ ID NO: 5026032 - DNA, 25 bp, Homo sapien
cttttctagcattttagtgtatttg

SEQ ID NO: 5026033 - DNA, 25 bp, Homo sapien
cacaaatttggggtctgtagtctta

SEQ ID NO: 5026034 - DNA, 25 bp, Homo sapien
aacaatcatatactctcacagatgg

SEQ ID NO: 5026035 - DNA, 25 bp, Homo sapien
tgcaactctgccatatcatatactg

SEQ ID NO: 5026036 - DNA, 25 bp, Homo sapien
tgcccaacgtttctctaaaacaatg

SEQ ID NO: 5026037 - DNA, 25 bp, Homo sapien
ttaaaacttaatcagctggcttaat

SEQ ID NO: 5026038 - DNA, 25 bp, Homo sapien
aatcagctggcttaattaattgccc

SEQ ID NO: 5026039 - DNA, 25 bp, Homo sapien
aaaaaatgaagtgcagttgaaaaga

SEQ ID NO: 5026040 - DNA, 25 bp, Homo sapien
taatgcacaacatgtgatcgttgac

SEQ ID NO: 5026041 - DNA, 25 bp, Homo sapien
tttcaggaagttcaatcagggtaaa

SEQ ID NO: 5026042 - DNA, 25 bp, Homo sapien
ttgacatgcagtgccagagtatatc

SEQ ID NO: 5026043 - DNA, 25 bp, Homo sapien
gtagcagacatagcagagtacaact

SEQ ID NO: 5026044 - DNA, 25 bp, Homo sapien
ttcctagtctcgatggtctttacgt

SEQ ID NO: 5026045 - DNA, 25 bp, Homo sapien
aatatagttttgtgtgaatttgaac

SEQ ID NO: 5026046 - DNA, 25 bp, Homo sapien
taatatagttttgtgtgaatttgaa

SEQ ID NO: 5026047 - DNA, 25 bp, Homo sapien
gtctcgatggtctttacgttttggc

SEQ ID NO: 5026048 - DNA, 25 bp, Homo sapien
caatacaaggtcagatttggtcacc

SEQ ID NO: 5026049 - DNA, 25 bp, Homo sapien
tgtacatgccctagcctgaagacat

SEQ ID NO: 5026050 - DNA, 25 bp, Homo sapien
tgtctaacgtgaacatgtgccactg

SEQ ID NO: 5026051 - DNA, 25 bp, Homo sapien
tactgacacagaagcttgggagcaa

SEQ ID NO: 5026052 - DNA, 25 bp, Homo sapien
ataaatatcttaggccaggcagtgg

SEQ ID NO: 5026053 - DNA, 25 bp, Homo sapien
atttaaaataaatatcttaggccag

SEQ ID NO: 5026054 - DNA, 25 bp, Homo sapien
catcactataaatgaatattttttc

SEQ ID NO: 5026055 - DNA, 25 bp, Homo sapien
aaataaatatcttaggccaggcagt

SEQ ID NO: 5026056 - DNA, 25 bp, Homo sapien
ctgcactgcagcctaggtaacacag

SEQ ID NO: 5026057 - DNA, 25 bp, Homo sapien
tgcactgcagcctaggtaacacagt

SEQ ID NO: 5026058 - DNA, 25 bp, Homo sapien
cactgcactgcagcctaggtaacac

SEQ ID NO: 5026059 - DNA, 25 bp, Homo sapien
cactgcagcctaggtaacacagtga

SEQ ID NO: 5026060 - DNA, 25 bp, Homo sapien
taaatgctgctttacccacagttgg

SEQ ID NO: 5026061 - DNA, 25 bp, Homo sapien
cacagttggtttcaaatggacagca

SEQ ID NO: 5026062 - DNA, 25 bp, Homo sapien
gatatattcccttgcaagtcctgtg

SEQ ID NO: 5026063 - DNA, 25 bp, Homo sapien
agtgagcggaatctgcaggcccatt

SEQ ID NO: 5026064 - DNA, 25 bp, Homo sapien
tgatgtaagtgcttatagcaaaact

SEQ ID NO: 5026065 - DNA, 25 bp, Homo sapien
cattgaccactggttatttgggacc

SEQ ID NO: 5026066 - DNA, 25 bp, Homo sapien
tggttttgatcccattacttgttat

SEQ ID NO: 5026067 - DNA, 25 bp, Homo sapien
cagtttatcggaatatatttgctca

SEQ ID NO: 5026068 - DNA, 25 bp, Homo sapien
atgaaaattatctctcgactgtcaa

SEQ ID NO: 5026069 - DNA, 25 bp, Homo sapien
tctcgactgtcaatgtaacatcttc

SEQ ID NO: 5026070 - DNA, 25 bp, Homo sapien
gcagcatgaaattctgtcaaacaga

SEQ ID NO: 5026071 - DNA, 25 bp, Homo sapien
gatgaggcatatctctgggacaccc

SEQ ID NO: 5026072 - DNA, 25 bp, Homo sapien
gacagaaggcaaaagagaaacaggc

SEQ ID NO: 5026073 - DNA, 25 bp, Homo sapien
ggcaaaagagaaacaggcacctctt

SEQ ID NO: 5026074 - DNA, 25 bp, Homo sapien
aaggcaaaagagaaacaggcacctc

SEQ ID NO: 5026075 - DNA, 25 bp, Homo sapien
caaaagagaaacaggcacctcttca

SEQ ID NO: 5026076 - DNA, 25 bp, Homo sapien
gaaacttctgagcacaagcacttta

SEQ ID NO: 5026077 - DNA, 25 bp, Homo sapien
gaaaatacctcgaaggagaaatgta

SEQ ID NO: 5026078 - DNA, 25 bp, Homo sapien
aagaaacctcacaaaattagtcaga

SEQ ID NO: 5026079 - DNA, 25 bp, Homo sapien
aatgataagcaagccatagactgga

SEQ ID NO: 5026080 - DNA, 25 bp, Homo sapien
agtgttgaaggtgcctcctgacctc

SEQ ID NO: 5026081 - DNA, 25 bp, Homo sapien
tagacaaggagatctccaataaaag

SEQ ID NO: 5026082 - DNA, 25 bp, Homo sapien
aggagatctccaataaaagtgttga

SEQ ID NO: 5026083 - DNA, 25 bp, Homo sapien
ctgatgatctagacaaggagatctc

SEQ ID NO: 5026084 - DNA, 25 bp, Homo sapien
aggagttcaatgtataactgactgt

SEQ ID NO: 5026085 - DNA, 25 bp, Homo sapien
gtagtgagaagcagggaaaaagtag

SEQ ID NO: 5026086 - DNA, 25 bp, Homo sapien
gagaagcagggaaaaagtagaacaa

SEQ ID NO: 5026087 - DNA, 25 bp, Homo sapien
aacaaggagttcaatgtataactga

SEQ ID NO: 5026088 - DNA, 25 bp, Homo sapien
tcagaagtggttcgcctgtgagatg

SEQ ID NO: 5026089 - DNA, 25 bp, Homo sapien
agctcagaagtggttcgcctgtgag

SEQ ID NO: 5026090 - DNA, 25 bp, Homo sapien
cctcaaggataaaaccagacaagct

SEQ ID NO: 5026091 - DNA, 25 bp, Homo sapien
aagtggttcgcctgtgagatgctga

SEQ ID NO: 5026092 - DNA, 25 bp, Homo sapien
ttcattgtgataattccgcatgagg

SEQ ID NO: 5026093 - DNA, 25 bp, Homo sapien
tgataattccgcatgaggatatgaa

SEQ ID NO: 5026094 - DNA, 25 bp, Homo sapien
cattgtgataattccgcatgaggat

SEQ ID NO: 5026095 - DNA, 25 bp, Homo sapien
aattccgcatgaggatatgaatgaa

SEQ ID NO: 5026096 - DNA, 25 bp, Homo sapien
ttttactgtataagctatcattccc

SEQ ID NO: 5026097 - DNA, 25 bp, Homo sapien
tttactgtataagctatcattccca

SEQ ID NO: 5026098 - DNA, 25 bp, Homo sapien
ggttttactgtataagctatcattc

SEQ ID NO: 5026099 - DNA, 25 bp, Homo sapien
gttttactgtataagctatcattcc

SEQ ID NO: 5026100 - DNA, 25 bp, Homo sapien
tcaagaccggaaggctgtgagactg

SEQ ID NO: 5026101 - DNA, 25 bp, Homo sapien
gaccttgaacttgtgagatcctgag

SEQ ID NO: 5026102 - DNA, 25 bp, Homo sapien
caggagagtcctagaaccagacact

SEQ ID NO: 5026103 - DNA, 25 bp, Homo sapien
tacaaggtgtgggatttcaagaccg

SEQ ID NO: 5026104 - DNA, 25 bp, Homo sapien
tggaagcattaccaggttgatagcc

SEQ ID NO: 5026105 - DNA, 25 bp, Homo sapien
tctggactttcctgatgtataagca

SEQ ID NO: 5026106 - DNA, 25 bp, Homo sapien
tatccaatggtaaagatgcctctct

SEQ ID NO: 5026107 - DNA, 25 bp, Homo sapien
taccaggttgatagcccaaacgtgt

SEQ ID NO: 5026108 - DNA, 25 bp, Homo sapien
gtgaccccagacttctattgtttct

SEQ ID NO: 5026109 - DNA, 25 bp, Homo sapien
tcaagtttcaaatcaattctacaga

SEQ ID NO: 5026110 - DNA, 25 bp, Homo sapien
tctagtgaccccagacttctattgt

SEQ ID NO: 5026111 - DNA, 25 bp, Homo sapien
ttctgatctagtgaccccagacttc

SEQ ID NO: 5026112 - DNA, 25 bp, Homo sapien
gctaacttcaaattacgcttgtgtt

SEQ ID NO: 5026113 - DNA, 25 bp, Homo sapien
ccttgtacctagctcaatacctgac

SEQ ID NO: 5026114 - DNA, 25 bp, Homo sapien
tgtcttctgatgctgataaaatcct

SEQ ID NO: 5026115 - DNA, 25 bp, Homo sapien
cctgacacatggtctatatatgaca

SEQ ID NO: 5026116 - DNA, 25 bp, Homo sapien
cagctcagtcgatgtttctgaaaag

SEQ ID NO: 5026117 - DNA, 25 bp, Homo sapien
aatgagccttggcatgtatgttgca

SEQ ID NO: 5026118 - DNA, 25 bp, Homo sapien
gaaaagccttaacatggacaggaac

SEQ ID NO: 5026119 - DNA, 25 bp, Homo sapien
gtaatgcctgcaggaactctgacaa

SEQ ID NO: 5026120 - DNA, 25 bp, Homo sapien
gtcaaaatacggaagtggaaggctc

SEQ ID NO: 5026121 - DNA, 25 bp, Homo sapien
gcttttctttagtgggcttgtggat

SEQ ID NO: 5026122 - DNA, 25 bp, Homo sapien
cacagctgtccccaacgaaaaggaa

SEQ ID NO: 5026123 - DNA, 25 bp, Homo sapien
gaaggctcgaggatgcttctggttt

SEQ ID NO: 5026124 - DNA, 25 bp, Homo sapien
gtgaaaggccacaaaaggagattct

SEQ ID NO: 5026125 - DNA, 25 bp, Homo sapien
aaaggccacaaaaggagattctggt

SEQ ID NO: 5026126 - DNA, 25 bp, Homo sapien
ggccacaaaaggagattctggtagc

SEQ ID NO: 5026127 - DNA, 25 bp, Homo sapien
ttatgcggcatctgcagctgcatct

SEQ ID NO: 5026128 - DNA, 25 bp, Homo sapien
cagaagtaaccagcccagaaacctc

SEQ ID NO: 5026129 - DNA, 25 bp, Homo sapien
cgagggtaaatagagcaggttgtat

SEQ ID NO: 5026130 - DNA, 25 bp, Homo sapien
agggtaaatagagcaggttgtatgg

SEQ ID NO: 5026131 - DNA, 25 bp, Homo sapien
gtaaatagagcaggttgtatggagc

SEQ ID NO: 5026132 - DNA, 25 bp, Homo sapien
tttgaggttcaaattctttgttgat

SEQ ID NO: 5026133 - DNA, 25 bp, Homo sapien
tgttgataagatgtgtacaggaatt

SEQ ID NO: 5026134 - DNA, 25 bp, Homo sapien
ctgctggtggattcattgtaggaaa

SEQ ID NO: 5026135 - DNA, 25 bp, Homo sapien
tctgctggtggattcattgtaggaa

SEQ ID NO: 5026136 - DNA, 25 bp, Homo sapien
cctgggcacatagaatgtaggtttg

SEQ ID NO: 5026137 - DNA, 25 bp, Homo sapien
tgggcacatagaatgtaggtttgtg

SEQ ID NO: 5026138 - DNA, 25 bp, Homo sapien
gtaggtttgtggttgaataccctca

SEQ ID NO: 5026139 - DNA, 25 bp, Homo sapien
ggtttgtggttgaataccctcacca

SEQ ID NO: 5026140 - DNA, 25 bp, Homo sapien
cttggaactcggcagagcccactgt

SEQ ID NO: 5026141 - DNA, 25 bp, Homo sapien
cagcttcagctgacttatatgtccc

SEQ ID NO: 5026142 - DNA, 25 bp, Homo sapien
ataagggacaggctgcctcttcaag

SEQ ID NO: 5026143 - DNA, 25 bp, Homo sapien
ctaccaggaacttggaactcggcag

SEQ ID NO: 5026144 - DNA, 25 bp, Homo sapien
tctctcggcaaaacccctacaagac

SEQ ID NO: 5026145 - DNA, 25 bp, Homo sapien
caaaacccctacaagacagaagaga

SEQ ID NO: 5026146 - DNA, 25 bp, Homo sapien
tcggcaaaacccctacaagacagaa

SEQ ID NO: 5026147 - DNA, 25 bp, Homo sapien
ggcaaaacccctacaagacagaaga

SEQ ID NO: 5026148 - DNA, 25 bp, Homo sapien
ctgttccattccaggtagttcttta

SEQ ID NO: 5026149 - DNA, 25 bp, Homo sapien
tctcttcttccttacatacattgcc

SEQ ID NO: 5026150 - DNA, 25 bp, Homo sapien
cattccaggtagttctttaccacca

SEQ ID NO: 5026151 - DNA, 25 bp, Homo sapien
aggtagttctttaccaccactctgc

SEQ ID NO: 5026152 - DNA, 25 bp, Homo sapien
cagtttggctagagcacagataata

SEQ ID NO: 5026153 - DNA, 25 bp, Homo sapien
cacggagaaatcagacagaggtact

SEQ ID NO: 5026154 - DNA, 25 bp, Homo sapien
gacagaggtactgcaagcacaggag

SEQ ID NO: 5026155 - DNA, 25 bp, Homo sapien
gataatacgtaaagcaccaggaggt

SEQ ID NO: 5026156 - DNA, 25 bp, Homo sapien
ttttaagagaatcatggagggtgac

SEQ ID NO: 5026157 - DNA, 25 bp, Homo sapien
aattggagtcattgcttggttgagg

SEQ ID NO: 5026158 - DNA, 25 bp, Homo sapien
ctttgttaagtcagcacctcatggg

SEQ ID NO: 5026159 - DNA, 25 bp, Homo sapien
ggtatcagtaaagtccttcagtagt

SEQ ID NO: 5026160 - DNA, 25 bp, Homo sapien
gagatttccatccaattgccttcag

SEQ ID NO: 5026161 - DNA, 25 bp, Homo sapien
catgctgttcggtagcaacctgtaa

SEQ ID NO: 5026162 - DNA, 25 bp, Homo sapien
gatcgtacttaatctctgggcagag

SEQ ID NO: 5026163 - DNA, 25 bp, Homo sapien
tgattaaggaatggccctgacagct

SEQ ID NO: 5026164 - DNA, 25 bp, Homo sapien
atggatttatgtgaaagagcctgat

SEQ ID NO: 5026165 - DNA, 25 bp, Homo sapien
tctgagggcataaactttaataatg

SEQ ID NO: 5026166 - DNA, 25 bp, Homo sapien
ctgagggcataaactttaataatgt

SEQ ID NO: 5026167 - DNA, 25 bp, Homo sapien
ctttgagtggccaagcctttcagtt

SEQ ID NO: 5026168 - DNA, 25 bp, Homo sapien
ctttgcactggaaattattaggggg

SEQ ID NO: 5026169 - DNA, 25 bp, Homo sapien
ttgcactggaaattattagggggta

SEQ ID NO: 5026170 - DNA, 25 bp, Homo sapien
tctttgcactggaaattattagggg

SEQ ID NO: 5026171 - DNA, 25 bp, Homo sapien
tgcactggaaattattagggggtac

SEQ ID NO: 5026172 - DNA, 25 bp, Homo sapien
tgctgatgcctttgcagttccccag

SEQ ID NO: 5026173 - DNA, 25 bp, Homo sapien
cctggctgtacattagccgctgcag

SEQ ID NO: 5026174 - DNA, 25 bp, Homo sapien
cgctgagtgtttgcaaggcagttgt

SEQ ID NO: 5026175 - DNA, 25 bp, Homo sapien
gattaaacaaatggccgctgagtgt

SEQ ID NO: 5026176 - DNA, 25 bp, Homo sapien
tgatgagaggtaacacagagaactc

SEQ ID NO: 5026177 - DNA, 25 bp, Homo sapien
tgccatctcagttagccatgaagag

SEQ ID NO: 5026178 - DNA, 25 bp, Homo sapien
cttgatagctgggtgtgaaacaatc

SEQ ID NO: 5026179 - DNA, 25 bp, Homo sapien
gagtgttttaagtggcaaagctcac

SEQ ID NO: 5026180 - DNA, 25 bp, Homo sapien
cacgtttgtgttagattcagaggca

SEQ ID NO: 5026181 - DNA, 25 bp, Homo sapien
ttctgcaagaactaagccacgtttg

SEQ ID NO: 5026182 - DNA, 25 bp, Homo sapien
tgtgtgatccttaatgtcccatgac

SEQ ID NO: 5026183 - DNA, 25 bp, Homo sapien
gaaagggccatcagagctaagtctt

SEQ ID NO: 5026184 - DNA, 25 bp, Homo sapien
tacattgcttgtagaagattctcag

SEQ ID NO: 5026185 - DNA, 25 bp, Homo sapien
ctagtctatacattgcttgtagaag

SEQ ID NO: 5026186 - DNA, 25 bp, Homo sapien
tatacattgcttgtagaagattctc

SEQ ID NO: 5026187 - DNA, 25 bp, Homo sapien
tctatacattgcttgtagaagattc

SEQ ID NO: 5026188 - DNA, 25 bp, Homo sapien
catttgaaatcgacagcatggagcg

SEQ ID NO: 5026189 - DNA, 25 bp, Homo sapien
gaagcatcaagcctttcgattccgt

SEQ ID NO: 5026190 - DNA, 25 bp, Homo sapien
tcgattccgtagcacaatacgttgc

SEQ ID NO: 5026191 - DNA, 25 bp, Homo sapien
gcatggagcgtattgagaagcatca

SEQ ID NO: 5026192 - DNA, 25 bp, Homo sapien
gaatccaaacttctgtgcgatggag

SEQ ID NO: 5026193 - DNA, 25 bp, Homo sapien
tggacacacccatgcagaatgcaga

SEQ ID NO: 5026194 - DNA, 25 bp, Homo sapien
tccctgggctatgagaatttagtac

SEQ ID NO: 5026195 - DNA, 25 bp, Homo sapien
gacagctggccatgaaaacagatgg

SEQ ID NO: 5026196 - DNA, 25 bp, Homo sapien
gcagaagtccaagtgttgactctga

SEQ ID NO: 5026197 - DNA, 25 bp, Homo sapien
ctgggtttgcagaagtccaagtgtt

SEQ ID NO: 5026198 - DNA, 25 bp, Homo sapien
gtccaagtgttgactctgaattcat

SEQ ID NO: 5026199 - DNA, 25 bp, Homo sapien
gaagtccaagtgttgactctgaatt

SEQ ID NO: 5026200 - DNA, 25 bp, Homo sapien
tgcatgtggaacattgccgacagcc

SEQ ID NO: 5026201 - DNA, 25 bp, Homo sapien
gaacattgccgacagcctgagcatt

SEQ ID NO: 5026202 - DNA, 25 bp, Homo sapien
tggaacattgccgacagcctgagca

SEQ ID NO: 5026203 - DNA, 25 bp, Homo sapien
atgtggaacattgccgacagcctga

SEQ ID NO: 5026204 - DNA, 25 bp, Homo sapien
catgtgccacttttatgcggccttt

SEQ ID NO: 5026205 - DNA, 25 bp, Homo sapien
gttcttgaaaacttaactcatgtgc

SEQ ID NO: 5026206 - DNA, 25 bp, Homo sapien
taactcatgtgccacttttatgcgg

SEQ ID NO: 5026207 - DNA, 25 bp, Homo sapien
ttatgcggcctttcatatcttttaa

SEQ ID NO: 5026208 - DNA, 25 bp, Homo sapien
ccacatactgaaggataatgcaaac

SEQ ID NO: 5026209 - DNA, 25 bp, Homo sapien
gataatgcaaactgaacctctgtcc

SEQ ID NO: 5026210 - DNA, 25 bp, Homo sapien
tgaacctctgtcctgaagagtgagt

SEQ ID NO: 5026211 - DNA, 25 bp, Homo sapien
tactgaaggataatgcaaactgaac

SEQ ID NO: 5026212 - DNA, 25 bp, Homo sapien
agcagtgtcccagggtgagtcccat

SEQ ID NO: 5026213 - DNA, 25 bp, Homo sapien
tgagcagtgtcccagggtgagtccc

SEQ ID NO: 5026214 - DNA, 25 bp, Homo sapien
ccttttcaattgagcagtgtcccag

SEQ ID NO: 5026215 - DNA, 25 bp, Homo sapien
ttttcaattgagcagtgtcccaggg

SEQ ID NO: 5026216 - DNA, 25 bp, Homo sapien
cctgacaagtagctaggaacaaggt

SEQ ID NO: 5026217 - DNA, 25 bp, Homo sapien
cagcctggcactcctgtgttcaaga

SEQ ID NO: 5026218 - DNA, 25 bp, Homo sapien
gaacaaggtgtgtaccattatgccc

SEQ ID NO: 5026219 - DNA, 25 bp, Homo sapien
cagcctgacaagtagctaggaacaa

SEQ ID NO: 5026220 - DNA, 25 bp, Homo sapien
tatgtgtattggaccatcttgatca

SEQ ID NO: 5026221 - DNA, 25 bp, Homo sapien
ttctggagctcctacaatatgtgta

SEQ ID NO: 5026222 - DNA, 25 bp, Homo sapien
tagtgaatcctttctatcttggtga

SEQ ID NO: 5026223 - DNA, 25 bp, Homo sapien
tctggaatattgtctgatgaatacc

SEQ ID NO: 5026224 - DNA, 25 bp, Homo sapien
tcaaactgattgcttcatgggttct

SEQ ID NO: 5026225 - DNA, 25 bp, Homo sapien
ggttggtgtctatctgaaagccttc

SEQ ID NO: 5026226 - DNA, 25 bp, Homo sapien
ttcttcaaactgattgcttcatggg

SEQ ID NO: 5026227 - DNA, 25 bp, Homo sapien
tcttctagcagaagtaatttcgggt

SEQ ID NO: 5026228 - DNA, 25 bp, Homo sapien
aaattgcattaagaagcagctgcag

SEQ ID NO: 5026229 - DNA, 25 bp, Homo sapien
cttatcttcctgacaaaaattgcat

SEQ ID NO: 5026230 - DNA, 25 bp, Homo sapien
tgcagccgttttcccgtaggcagca

SEQ ID NO: 5026231 - DNA, 25 bp, Homo sapien
agctgcagccgttttcccgtaggca

SEQ ID NO: 5026232 - DNA, 25 bp, Homo sapien
tactatagtgattagcagcagtcaa

SEQ ID NO: 5026233 - DNA, 25 bp, Homo sapien
aagctcttctgtaggcaagctgtaa

SEQ ID NO: 5026234 - DNA, 25 bp, Homo sapien
cttctgtaggcaagctgtaaaacca

SEQ ID NO: 5026235 - DNA, 25 bp, Homo sapien
cataactccggtttttgtactatag

SEQ ID NO: 5026236 - DNA, 25 bp, Homo sapien
actgattttgcaagatgacatcttt

SEQ ID NO: 5026237 - DNA, 25 bp, Homo sapien
ctagtgaaggctcaactgattttgc

SEQ ID NO: 5026238 - DNA, 25 bp, Homo sapien
aactgattttgcaagatgacatctt

SEQ ID NO: 5026239 - DNA, 25 bp, Homo sapien
caactgattttgcaagatgacatct

SEQ ID NO: 5026240 - DNA, 25 bp, Homo sapien
catcttgtggaggtgatagtaattc

SEQ ID NO: 5026241 - DNA, 25 bp, Homo sapien
taaagactggacagcatcttgtgga

SEQ ID NO: 5026242 - DNA, 25 bp, Homo sapien
cttgtggaggtgatagtaattcttc

SEQ ID NO: 5026243 - DNA, 25 bp, Homo sapien
tggtccccaaatctgttaaagactg

SEQ ID NO: 5026244 - DNA, 25 bp, Homo sapien
cagaggaagtagagacttgaactgt

SEQ ID NO: 5026245 - DNA, 25 bp, Homo sapien
tgaactgtctctatttgtggaacaa

SEQ ID NO: 5026246 - DNA, 25 bp, Homo sapien
cactgttttgcaaactacttgtcct

SEQ ID NO: 5026247 - DNA, 25 bp, Homo sapien
tacttgtcctatttgtgctgctaaa

SEQ ID NO: 5026248 - DNA, 25 bp, Homo sapien
caagtgttctttaggggttgataat

SEQ ID NO: 5026249 - DNA, 25 bp, Homo sapien
tgataatgggtcacatatatcatct

SEQ ID NO: 5026250 - DNA, 25 bp, Homo sapien
atcaagtgttctttaggggttgata

SEQ ID NO: 5026251 - DNA, 25 bp, Homo sapien
gttgataatgggtcacatatatcat

SEQ ID NO: 5026252 - DNA, 25 bp, Homo sapien
taggacctaggcttcctgcttggtg

SEQ ID NO: 5026253 - DNA, 25 bp, Homo sapien
catttttgcgcttgttaggacctag

SEQ ID NO: 5026254 - DNA, 25 bp, Homo sapien
tggagctgtcccagtcacaggcctt

SEQ ID NO: 5026255 - DNA, 25 bp, Homo sapien
ggtgtggaccctgattatgattact

SEQ ID NO: 5026256 - DNA, 25 bp, Homo sapien
catttttaccatcatttccaaccat

SEQ ID NO: 5026257 - DNA, 25 bp, Homo sapien
agtcatcatttttaccatcatttcc

SEQ ID NO: 5026258 - DNA, 25 bp, Homo sapien
catcatttttaccatcatttccaac

SEQ ID NO: 5026259 - DNA, 25 bp, Homo sapien
caagtcatcatttttaccatcattt

SEQ ID NO: 5026260 - DNA, 25 bp, Homo sapien
attcattgagtcatatgaccgtctc

SEQ ID NO: 5026261 - DNA, 25 bp, Homo sapien
cattcattgagtcatatgaccgtct

SEQ ID NO: 5026262 - DNA, 25 bp, Homo sapien
gctgtggtatgggcatgcctgctcc

SEQ ID NO: 5026263 - DNA, 25 bp, Homo sapien
gcctttctatacttccgcatcttgg

SEQ ID NO: 5026264 - DNA, 25 bp, Homo sapien
ctcatggcctttctatacttccgca

SEQ ID NO: 5026265 - DNA, 25 bp, Homo sapien
tcttggtggaggaagtattagtgat

SEQ ID NO: 5026266 - DNA, 25 bp, Homo sapien
tgtcaatgtaataactccccaatgt

SEQ ID NO: 5026267 - DNA, 25 bp, Homo sapien
ctggtacccagtgcccagatcagga

SEQ ID NO: 5026268 - DNA, 25 bp, Homo sapien
tatacgtagaatcatagggcatgcc

SEQ ID NO: 5026269 - DNA, 25 bp, Homo sapien
gggcatgccctcttttatatctgga

SEQ ID NO: 5026270 - DNA, 25 bp, Homo sapien
tccatgttaggccttatgtcagcta

SEQ ID NO: 5026271 - DNA, 25 bp, Homo sapien
caaaggaaatatgcatgagcaggga

SEQ ID NO: 5026272 - DNA, 25 bp, Homo sapien
tgacacttaacatcagcctgcagaa

SEQ ID NO: 5026273 - DNA, 25 bp, Homo sapien
tgcagaagtaccaagggccaatagt

SEQ ID NO: 5026274 - DNA, 25 bp, Homo sapien
cgctgaaattatgaatctggacatc

SEQ ID NO: 5026275 - DNA, 25 bp, Homo sapien
tctactgcaaaaccgctgaaattat

SEQ ID NO: 5026276 - DNA, 25 bp, Homo sapien
tatgaatctggacatctgtagagga

SEQ ID NO: 5026277 - DNA, 25 bp, Homo sapien
catctgtagaggagctggacagctg

SEQ ID NO: 5026278 - DNA, 25 bp, Homo sapien
tccaaatggagacttgacgtagata

SEQ ID NO: 5026279 - DNA, 25 bp, Homo sapien
cttgacgtagataggttcagggttc

SEQ ID NO: 5026280 - DNA, 25 bp, Homo sapien
ggaatatactctccatcccaaaaaa

SEQ ID NO: 5026281 - DNA, 25 bp, Homo sapien
tcagagaggggggaatatactctcc

SEQ ID NO: 5026282 - DNA, 25 bp, Homo sapien
cagtacctcgccaaaactgagttta

SEQ ID NO: 5026283 - DNA, 25 bp, Homo sapien
caaaactgagtttagtaaattggtg

SEQ ID NO: 5026284 - DNA, 25 bp, Homo sapien
agtacctcgccaaaactgagtttag

SEQ ID NO: 5026285 - DNA, 25 bp, Homo sapien
agtttagtaaattggtggctgatac

SEQ ID NO: 5026286 - DNA, 25 bp, Homo sapien
ggttcctactggtaatggactcatc

SEQ ID NO: 5026287 - DNA, 25 bp, Homo sapien
ttcctactggtaatggactcatcag

SEQ ID NO: 5026288 - DNA, 25 bp, Homo sapien
tggttcctactggtaatggactcat

SEQ ID NO: 5026289 - DNA, 25 bp, Homo sapien
tttggttcctactggtaatggactc

SEQ ID NO: 5026290 - DNA, 25 bp, Homo sapien
ctctgaaacgtactcccagtcccaa

SEQ ID NO: 5026291 - DNA, 25 bp, Homo sapien
cgtactcccagtcccaaataaatct

SEQ ID NO: 5026292 - DNA, 25 bp, Homo sapien
ctgtcctctgaaacgtactcccagt

SEQ ID NO: 5026293 - DNA, 25 bp, Homo sapien
ctgaaacgtactcccagtcccaaat

SEQ ID NO: 5026294 - DNA, 25 bp, Homo sapien
tcaccctttctgcttgcctgtagat

SEQ ID NO: 5026295 - DNA, 25 bp, Homo sapien
taaaagctgccatcaccctttctgc

SEQ ID NO: 5026296 - DNA, 25 bp, Homo sapien
tctgcttgcctgtagatcaagtaca

SEQ ID NO: 5026297 - DNA, 25 bp, Homo sapien
tctggtaaaagctgccatcaccctt

SEQ ID NO: 5026298 - DNA, 25 bp, Homo sapien
gaacttccgctttaccactgagtag

SEQ ID NO: 5026299 - DNA, 25 bp, Homo sapien
tcaccatgtacagagtgggcgtaac

SEQ ID NO: 5026300 - DNA, 25 bp, Homo sapien
caatcatggcttcacagagttactg

SEQ ID NO: 5026301 - DNA, 25 bp, Homo sapien
gaatcacatgagtaatgaactccta

SEQ ID NO: 5026302 - DNA, 25 bp, Homo sapien
cttctatgggagttgtgtaaaactg

SEQ ID NO: 5026303 - DNA, 25 bp, Homo sapien
tttacttctatgggagttgtgtaaa

SEQ ID NO: 5026304 - DNA, 25 bp, Homo sapien
ttctatgggagttgtgtaaaactgg

SEQ ID NO: 5026305 - DNA, 25 bp, Homo sapien
tacttctatgggagttgtgtaaaac

SEQ ID NO: 5026306 - DNA, 25 bp, Homo sapien
gcagacatccagatgtagttcccat

SEQ ID NO: 5026307 - DNA, 25 bp, Homo sapien
aggattgctcgaagcagacatccag

SEQ ID NO: 5026308 - DNA, 25 bp, Homo sapien
taggattgctcgaagcagacatcca

SEQ ID NO: 5026309 - DNA, 25 bp, Homo sapien
ctaggattgctcgaagcagacatcc

SEQ ID NO: 5026310 - DNA, 25 bp, Homo sapien
gtgctgacctgagtgactttggctc

SEQ ID NO: 5026311 - DNA, 25 bp, Homo sapien
gacctgagtgactttggctccaaat

SEQ ID NO: 5026312 - DNA, 25 bp, Homo sapien
ctgagtgactttggctccaaatagc

SEQ ID NO: 5026313 - DNA, 25 bp, Homo sapien
gctgacctgagtgactttggctcca

SEQ ID NO: 5026314 - DNA, 25 bp, Homo sapien
atatacccaataccaccttctttat

SEQ ID NO: 5026315 - DNA, 25 bp, Homo sapien
ttattgctgactgggaatgtcctct

SEQ ID NO: 5026316 - DNA, 25 bp, Homo sapien
ttctttattgctgactgggaatgtc

SEQ ID NO: 5026317 - DNA, 25 bp, Homo sapien
aaagctcctaaaattcttgactgtc

SEQ ID NO: 5026318 - DNA, 25 bp, Homo sapien
cagtaaaccctaggatagatccaac

SEQ ID NO: 5026319 - DNA, 25 bp, Homo sapien
gtaaaccctaggatagatccaacaa

SEQ ID NO: 5026320 - DNA, 25 bp, Homo sapien
agtaaaccctaggatagatccaaca

SEQ ID NO: 5026321 - DNA, 25 bp, Homo sapien
tgagctgattgatgtgttcaccccg

SEQ ID NO: 5026322 - DNA, 25 bp, Homo sapien
agctcagctggcgggtgagctgatt

SEQ ID NO: 5026323 - DNA, 25 bp, Homo sapien
ctagctcagctggcgggtgagctga

SEQ ID NO: 5026324 - DNA, 25 bp, Homo sapien
tgattgatgtgttcaccccgatagc

SEQ ID NO: 5026325 - DNA, 25 bp, Homo sapien
ttctgccttcagtgtgagtacataa

SEQ ID NO: 5026326 - DNA, 25 bp, Homo sapien
cctgttttcagacctcctagtgttc

SEQ ID NO: 5026327 - DNA, 25 bp, Homo sapien
gacctcctagtgttctcatctgcct

SEQ ID NO: 5026328 - DNA, 25 bp, Homo sapien
ctcttctcagagcaagtttagttga

SEQ ID NO: 5026329 - DNA, 25 bp, Homo sapien
gccgggctataggtgctgcccttta

SEQ ID NO: 5026330 - DNA, 25 bp, Homo sapien
taagtcagaagcagccgggctatag

SEQ ID NO: 5026331 - DNA, 25 bp, Homo sapien
aacagtaagtcagaagcagccgggc

SEQ ID NO: 5026332 - DNA, 25 bp, Homo sapien
aagcagccgggctataggtgctgcc

SEQ ID NO: 5026333 - DNA, 25 bp, Homo sapien
tctatagctactgcctccaaaatgc

SEQ ID NO: 5026334 - DNA, 25 bp, Homo sapien
tcaaagtccagatgagctgtatgga

SEQ ID NO: 5026335 - DNA, 25 bp, Homo sapien
gttggaggttctatagctactgcct

SEQ ID NO: 5026336 - DNA, 25 bp, Homo sapien
tatggatctgtgacgatgcagttgg

SEQ ID NO: 5026337 - DNA, 25 bp, Homo sapien
taagtcggcactctgaggacatatt

SEQ ID NO: 5026338 - DNA, 25 bp, Homo sapien
tatattctgtaataagtcggcactc

SEQ ID NO: 5026339 - DNA, 25 bp, Homo sapien
gcattgaatgcctattatattctgt

SEQ ID NO: 5026340 - DNA, 25 bp, Homo sapien
tctgtaataagtcggcactctgagg

SEQ ID NO: 5026341 - DNA, 25 bp, Homo sapien
ttggaattcagaagaaaaaacatca

SEQ ID NO: 5026342 - DNA, 25 bp, Homo sapien
cagaagaaaaaacatcaaacagaag

SEQ ID NO: 5026343 - DNA, 25 bp, Homo sapien
agaagaaaaaacatcaaacagaagt

SEQ ID NO: 5026344 - DNA, 25 bp, Homo sapien
attcagaagaaaaaacatcaaacag

SEQ ID NO: 5026345 - DNA, 25 bp, Homo sapien
tgaagaactggagactgaagaaaca

SEQ ID NO: 5026346 - DNA, 25 bp, Homo sapien
aagaactggagactgaagaaacagt

SEQ ID NO: 5026347 - DNA, 25 bp, Homo sapien
gaactggagactgaagaaacagttt

SEQ ID NO: 5026348 - DNA, 25 bp, Homo sapien
gaagaactggagactgaagaaacag

SEQ ID NO: 5026349 - DNA, 25 bp, Homo sapien
atgattaaaacctcatgccacttag

SEQ ID NO: 5026350 - DNA, 25 bp, Homo sapien
ttctaacctatattcctagaacctc

SEQ ID NO: 5026351 - DNA, 25 bp, Homo sapien
cctatattcctagaacctcctgttt

SEQ ID NO: 5026352 - DNA, 25 bp, Homo sapien
taacctatattcctagaacctcctg

SEQ ID NO: 5026353 - DNA, 25 bp, Homo sapien
tatattcctagaacctcctgttttc

SEQ ID NO: 5026354 - DNA, 25 bp, Homo sapien
ttttaaagtatgtgggctctctctt

SEQ ID NO: 5026355 - DNA, 25 bp, Homo sapien
ccattgtcttcgtaccctcagggat

SEQ ID NO: 5026356 - DNA, 25 bp, Homo sapien
cactaacacttcaactaacactcag

SEQ ID NO: 5026357 - DNA, 25 bp, Homo sapien
gatgttcagcattcaatatctgttg

SEQ ID NO: 5026358 - DNA, 25 bp, Homo sapien
catgctgtgttgctgcctgtgctag

SEQ ID NO: 5026359 - DNA, 25 bp, Homo sapien
tcatgctgtgttgctgcctgtgcta

SEQ ID NO: 5026360 - DNA, 25 bp, Homo sapien
tccaccttaggatgattttgaacca

SEQ ID NO: 5026361 - DNA, 25 bp, Homo sapien
atcgacaataatctcccttggtttt

SEQ ID NO: 5026362 - DNA, 25 bp, Homo sapien
gaatcgacaataatctcccttggtt

SEQ ID NO: 5026363 - DNA, 25 bp, Homo sapien
ctgaatcgacaataatctcccttgg

SEQ ID NO: 5026364 - DNA, 25 bp, Homo sapien
tagacggtacattcttccaaccttg

SEQ ID NO: 5026365 - DNA, 25 bp, Homo sapien
aaaccgttttgtcttgctaccagct

SEQ ID NO: 5026366 - DNA, 25 bp, Homo sapien
cagaatcagatagccctaagagtat

SEQ ID NO: 5026367 - DNA, 25 bp, Homo sapien
gtaaattagctcctatcaaatcaga

SEQ ID NO: 5026368 - DNA, 25 bp, Homo sapien
ctctgctctgacctggcgggaggct

SEQ ID NO: 5026369 - DNA, 25 bp, Homo sapien
taggctcccgaactccatgcaactc

SEQ ID NO: 5026370 - DNA, 25 bp, Homo sapien
gacccgtccagcttgcttaaaagcc

SEQ ID NO: 5026371 - DNA, 25 bp, Homo sapien
ctgcagtcctgaaagtccggtccga

SEQ ID NO: 5026372 - DNA, 25 bp, Homo sapien
gcatttagaagccacaagaaaaact

SEQ ID NO: 5026373 - DNA, 25 bp, Homo sapien
tatgtgacaagctaagttctgcctc

SEQ ID NO: 5026374 - DNA, 25 bp, Homo sapien
gttccaggaagaatacacctatgtg

SEQ ID NO: 5026375 - DNA, 25 bp, Homo sapien
ccccgacgcgtggtttcctgatggt

SEQ ID NO: 5026376 - DNA, 25 bp, Homo sapien
gaagactgaaccagttatgacgtcc

SEQ ID NO: 5026377 - DNA, 25 bp, Homo sapien
cttggattcttgaagagcgctgtgc

SEQ ID NO: 5026378 - DNA, 25 bp, Homo sapien
tatgacgtccgtgttttcagtcttg

SEQ ID NO: 5026379 - DNA, 25 bp, Homo sapien
aagactttcagctgcgtgccagctc

SEQ ID NO: 5026380 - DNA, 25 bp, Homo sapien
gaatagcctgactcatgtgcccaca

SEQ ID NO: 5026381 - DNA, 25 bp, Homo sapien
tagagaagtctcatgcaagccagcc

SEQ ID NO: 5026382 - DNA, 25 bp, Homo sapien
tagaatgtcctccttgattctggag

SEQ ID NO: 5026383 - DNA, 25 bp, Homo sapien
gctaagaagtacaattttggctcca

SEQ ID NO: 5026384 - DNA, 25 bp, Homo sapien
gcagcaaattagacaccgcagagga

SEQ ID NO: 5026385 - DNA, 25 bp, Homo sapien
ggcccacggtaactctagatattct

SEQ ID NO: 5026386 - DNA, 25 bp, Homo sapien
ttaaagagagaatggctggccaaca

SEQ ID NO: 5026387 - DNA, 25 bp, Homo sapien
tagagaatagaaacaggcccacggt

SEQ ID NO: 5026388 - DNA, 25 bp, Homo sapien
aaattctttaaatcgacaaactcat

SEQ ID NO: 5026389 - DNA, 25 bp, Homo sapien
aattctttaaatcgacaaactcatc

SEQ ID NO: 5026390 - DNA, 25 bp, Homo sapien
caaattctttaaatcgacaaactca

SEQ ID NO: 5026391 - DNA, 25 bp, Homo sapien
atattaaccactcgtgggagggcag

SEQ ID NO: 5026392 - DNA, 25 bp, Homo sapien
catgtatattaaccactcgtgggag

SEQ ID NO: 5026393 - DNA, 25 bp, Homo sapien
tgtatattaaccactcgtgggaggg

SEQ ID NO: 5026394 - DNA, 25 bp, Homo sapien
tacatgtatattaaccactcgtggg

SEQ ID NO: 5026395 - DNA, 25 bp, Homo sapien
aaggatctggtgtggcatccagtag

SEQ ID NO: 5026396 - DNA, 25 bp, Homo sapien
caaaggatctggtgtggcatccagt

SEQ ID NO: 5026397 - DNA, 25 bp, Homo sapien
aaaggatctggtgtggcatccagta

SEQ ID NO: 5026398 - DNA, 25 bp, Homo sapien
tcaaaggatctggtgtggcatccag

SEQ ID NO: 5026399 - DNA, 25 bp, Homo sapien
ctgagatgccccccatctgtagccc

SEQ ID NO: 5026400 - DNA, 25 bp, Homo sapien
atgccccccatctgtagcccgatca

SEQ ID NO: 5026401 - DNA, 25 bp, Homo sapien
agatgccccccatctgtagcccgat

SEQ ID NO: 5026402 - DNA, 25 bp, Homo sapien
tgagatgccccccatctgtagcccg

SEQ ID NO: 5026403 - DNA, 25 bp, Homo sapien
tgccctcttgcagctggttatccga

SEQ ID NO: 5026404 - DNA, 25 bp, Homo sapien
tcttgcagctggttatccgagaagt

SEQ ID NO: 5026405 - DNA, 25 bp, Homo sapien
tatccgagaagttccgaggattctc

SEQ ID NO: 5026406 - DNA, 25 bp, Homo sapien
gctggttatccgagaagttccgagg

SEQ ID NO: 5026407 - DNA, 25 bp, Homo sapien
ccaggctactgccaacccacccaga

SEQ ID NO: 5026408 - DNA, 25 bp, Homo sapien
tcccaggctactgccaacccaccca

SEQ ID NO: 5026409 - DNA, 25 bp, Homo sapien
atcccaggctactgccaacccaccc

SEQ ID NO: 5026410 - DNA, 25 bp, Homo sapien
catcccaggctactgccaacccacc

SEQ ID NO: 5026411 - DNA, 25 bp, Homo sapien
gcattattgagctcacataacaccg

SEQ ID NO: 5026412 - DNA, 25 bp, Homo sapien
attattgagctcacataacaccgtg

SEQ ID NO: 5026413 - DNA, 25 bp, Homo sapien
ttattgagctcacataacaccgtgc

SEQ ID NO: 5026414 - DNA, 25 bp, Homo sapien
tattgagctcacataacaccgtgcc

SEQ ID NO: 5026415 - DNA, 25 bp, Homo sapien
gcacctcctggctcaggccataatg

SEQ ID NO: 5026416 - DNA, 25 bp, Homo sapien
cctggctcaggccataatgcaggtc

SEQ ID NO: 5026417 - DNA, 25 bp, Homo sapien
cctcctggctcaggccataatgcag

SEQ ID NO: 5026418 - DNA, 25 bp, Homo sapien
tgcacctcctggctcaggccataat

SEQ ID NO: 5026419 - DNA, 25 bp, Homo sapien
tggccattccaatgggtggcggtgg

SEQ ID NO: 5026420 - DNA, 25 bp, Homo sapien
ttggccattccaatgggtggcggtg

SEQ ID NO: 5026421 - DNA, 25 bp, Homo sapien
tgttggccattccaatgggtggcgg

SEQ ID NO: 5026422 - DNA, 25 bp, Homo sapien
ctgttggccattccaatgggtggcg

SEQ ID NO: 5026423 - DNA, 25 bp, Homo sapien
tctctccaatattgtgtgcattaac

SEQ ID NO: 5026424 - DNA, 25 bp, Homo sapien
tgtatgtgatcttgaacatccgcag

SEQ ID NO: 5026425 - DNA, 25 bp, Homo sapien
cttgaacatccgcagtaactttttt

SEQ ID NO: 5026426 - DNA, 25 bp, Homo sapien
tattgtgtgcattaactgtatgtga

SEQ ID NO: 5026427 - DNA, 25 bp, Homo sapien
ttttatcatttttaaaagcaatatc

SEQ ID NO: 5026428 - DNA, 25 bp, Homo sapien
atcatttttaaaagcaatatctgcc

SEQ ID NO: 5026429 - DNA, 25 bp, Homo sapien
ttatcatttttaaaagcaatatctg

SEQ ID NO: 5026430 - DNA, 25 bp, Homo sapien
tcatttttaaaagcaatatctgcca

SEQ ID NO: 5026431 - DNA, 25 bp, Homo sapien
catatttaggtagtgtcagtggctg

SEQ ID NO: 5026432 - DNA, 25 bp, Homo sapien
tcaactgtcagtggaattattgtct

SEQ ID NO: 5026433 - DNA, 25 bp, Homo sapien
ggatcgatgctctaaatactgaaga

SEQ ID NO: 5026434 - DNA, 25 bp, Homo sapien
tcagtggctgagtatcaccgcagga

SEQ ID NO: 5026435 - DNA, 25 bp, Homo sapien
ccacgcccaactgaaaaaggaatgt

SEQ ID NO: 5026436 - DNA, 25 bp, Homo sapien
caccacgcccaactgaaaaaggaat

SEQ ID NO: 5026437 - DNA, 25 bp, Homo sapien
aataccacttgacccagcaaatccc

SEQ ID NO: 5026438 - DNA, 25 bp, Homo sapien
caactgttgtagaagacagtgtggc

SEQ ID NO: 5026439 - DNA, 25 bp, Homo sapien
tacatatgatctgcaggtttgggca

SEQ ID NO: 5026440 - DNA, 25 bp, Homo sapien
caggtaacatttggacatgttcatc

SEQ ID NO: 5026441 - DNA, 25 bp, Homo sapien
taacgatgttgcaggtattctcaat

SEQ ID NO: 5026442 - DNA, 25 bp, Homo sapien
aatacatacttcatagaccactgag

SEQ ID NO: 5026443 - DNA, 25 bp, Homo sapien
ggagaatgcataacaagctaagccc

SEQ ID NO: 5026444 - DNA, 25 bp, Homo sapien
gattaggcccgaataagaacagtgg

SEQ ID NO: 5026445 - DNA, 25 bp, Homo sapien
tgcattcaattagagggagcattac

SEQ ID NO: 5026446 - DNA, 25 bp, Homo sapien
gatattttgtatcccgtaggttcag

SEQ ID NO: 5026447 - DNA, 25 bp, Homo sapien
tcttcatgaccttagggtaagcata

SEQ ID NO: 5026448 - DNA, 25 bp, Homo sapien
gaaggttggtttcataggtagacac

SEQ ID NO: 5026449 - DNA, 25 bp, Homo sapien
agtgaacgttcatatgcatgtgtcc

SEQ ID NO: 5026450 - DNA, 25 bp, Homo sapien
gaaggtgtccaataagagtgaaagc

SEQ ID NO: 5026451 - DNA, 25 bp, Homo sapien
ggaaacctgttagaatccaagccca

SEQ ID NO: 5026452 - DNA, 25 bp, Homo sapien
catttggcgtaggtttcacttgtaa

SEQ ID NO: 5026453 - DNA, 25 bp, Homo sapien
gcttgactcgttatatgctgacatg

SEQ ID NO: 5026454 - DNA, 25 bp, Homo sapien
tacttttagtgagggtgtgccttcc

SEQ ID NO: 5026455 - DNA, 25 bp, Homo sapien
gagtagcgtaatcacaacatggtca

SEQ ID NO: 5026456 - DNA, 25 bp, Homo sapien
tgtttcctggcacgcatgagaatgc

SEQ ID NO: 5026457 - DNA, 25 bp, Homo sapien
catggccagctcgtaatcaaactct

SEQ ID NO: 5026458 - DNA, 25 bp, Homo sapien
tagatgtgctcctcagcacgcttgg

SEQ ID NO: 5026459 - DNA, 25 bp, Homo sapien
tcacttcccgaaatctggttaccca

SEQ ID NO: 5026460 - DNA, 25 bp, Homo sapien
catccaaactcacttcccgaaatct

SEQ ID NO: 5026461 - DNA, 25 bp, Homo sapien
tccaaactcacttcccgaaatctgg

SEQ ID NO: 5026462 - DNA, 25 bp, Homo sapien
caaactcacttcccgaaatctggtt

SEQ ID NO: 5026463 - DNA, 25 bp, Homo sapien
tcatgccagacttaacagctgaggt

SEQ ID NO: 5026464 - DNA, 25 bp, Homo sapien
caaggccatcctagcagagcataaa

SEQ ID NO: 5026465 - DNA, 25 bp, Homo sapien
taattatgtcggtatccagatagca

SEQ ID NO: 5026466 - DNA, 25 bp, Homo sapien
tattcttcaatatcaagcccaaggc

SEQ ID NO: 5026467 - DNA, 25 bp, Homo sapien
ccaactccatagatcttcctgtaga

SEQ ID NO: 5026468 - DNA, 25 bp, Homo sapien
tcctgtagagggagtatttctcctc

SEQ ID NO: 5026469 - DNA, 25 bp, Homo sapien
caaaatgcatgggacgcctaaaggc

SEQ ID NO: 5026470 - DNA, 25 bp, Homo sapien
tctgtctccgatctgtatggagaaa

SEQ ID NO: 5026471 - DNA, 25 bp, Homo sapien
cgtatcttccggagggcgctcttgg

SEQ ID NO: 5026472 - DNA, 25 bp, Homo sapien
ctcgggccaagctgatgaccagggt

SEQ ID NO: 5026473 - DNA, 25 bp, Homo sapien
taagtcttgctgaccaccgttttgg

SEQ ID NO: 5026474 - DNA, 25 bp, Homo sapien
tgatgctgttctcattcgcccactg

SEQ ID NO: 5026475 - DNA, 25 bp, Homo sapien
tctctgctgatagcctggacactgg

SEQ ID NO: 5026476 - DNA, 25 bp, Homo sapien
tagcctggacactggctaaaatgag

SEQ ID NO: 5026477 - DNA, 25 bp, Homo sapien
gctgatagcctggacactggctaaa

SEQ ID NO: 5026478 - DNA, 25 bp, Homo sapien
cctggacactggctaaaatgagtgt

SEQ ID NO: 5026479 - DNA, 25 bp, Homo sapien
caagggccgaaaatgtttggtggct

SEQ ID NO: 5026480 - DNA, 25 bp, Homo sapien
tggctctgacgttcccggggccagc

SEQ ID NO: 5026481 - DNA, 25 bp, Homo sapien
tcactctccatttcgatgtttgttt

SEQ ID NO: 5026482 - DNA, 25 bp, Homo sapien
cttcacctgcccctaaaggacggag

SEQ ID NO: 5026483 - DNA, 25 bp, Homo sapien
cacctgatctggctcctttacaaga

SEQ ID NO: 5026484 - DNA, 25 bp, Homo sapien
aagagccacatggatgtttgccacc

SEQ ID NO: 5026485 - DNA, 25 bp, Homo sapien
gatgtttgccacctgatctggctcc

SEQ ID NO: 5026486 - DNA, 25 bp, Homo sapien
gctcctttacaagaatttgacttgc

SEQ ID NO: 5026487 - DNA, 25 bp, Homo sapien
tatttcaagttgacaaacattcatt

SEQ ID NO: 5026488 - DNA, 25 bp, Homo sapien
gctatttcaagttgacaaacattca

SEQ ID NO: 5026489 - DNA, 25 bp, Homo sapien
ctatttcaagttgacaaacattcat

SEQ ID NO: 5026490 - DNA, 25 bp, Homo sapien
tgctatttcaagttgacaaacattc

SEQ ID NO: 5026491 - DNA, 25 bp, Homo sapien
ctgtaggcccaaaggagaaagctgc

SEQ ID NO: 5026492 - DNA, 25 bp, Homo sapien
gagcgtgcattccacactgaactca

SEQ ID NO: 5026493 - DNA, 25 bp, Homo sapien
acattcttggcaataatcatcttcc

SEQ ID NO: 5026494 - DNA, 25 bp, Homo sapien
gaaagctgcttctcactagagcgtg

SEQ ID NO: 5026495 - DNA, 25 bp, Homo sapien
caaaacagagggtctatagctacag

SEQ ID NO: 5026496 - DNA, 25 bp, Homo sapien
ccaattttgccctccaaattagaca

SEQ ID NO: 5026497 - DNA, 25 bp, Homo sapien
tccaaattagacacgtgccttccat

SEQ ID NO: 5026498 - DNA, 25 bp, Homo sapien
aataggagccatgtgtgtgcagttg

SEQ ID NO: 5026499 - DNA, 25 bp, Homo sapien
tctccggttccacttttagcctcaa

SEQ ID NO: 5026500 - DNA, 25 bp, Homo sapien
tatctgctatgttgacagggagctc

SEQ ID NO: 5026501 - DNA, 25 bp, Homo sapien
gcctcaattctaacttcaatgtggg

SEQ ID NO: 5026502 - DNA, 25 bp, Homo sapien
ggcaaagaatttagtatctctagcc

SEQ ID NO: 5026503 - DNA, 25 bp, Homo sapien
tgcaatagtctaccttttccaattt

SEQ ID NO: 5026504 - DNA, 25 bp, Homo sapien
gtgttgtcttatcaacttgcaatag

SEQ ID NO: 5026505 - DNA, 25 bp, Homo sapien
tatcaacttgcaatagtctaccttt

SEQ ID NO: 5026506 - DNA, 25 bp, Homo sapien
tgtcttatcaacttgcaatagtcta

SEQ ID NO: 5026507 - DNA, 25 bp, Homo sapien
ggtttcactgaagttatcatctctt

SEQ ID NO: 5026508 - DNA, 25 bp, Homo sapien
aaggtttcactgaagttatcatctc

SEQ ID NO: 5026509 - DNA, 25 bp, Homo sapien
gacctcgtccttcagaaaggtttca

SEQ ID NO: 5026510 - DNA, 25 bp, Homo sapien
ttcactgaagttatcatctctttgg

SEQ ID NO: 5026511 - DNA, 25 bp, Homo sapien
gatgccatcaacttggtcaaggcca

SEQ ID NO: 5026512 - DNA, 25 bp, Homo sapien
tcagcttttgatgccatcaacttgg

SEQ ID NO: 5026513 - DNA, 25 bp, Homo sapien
gctgtggaatgtgtgccatgaagtt

SEQ ID NO: 5026514 - DNA, 25 bp, Homo sapien
tgtggaatgtgtgccatgaagtttg

SEQ ID NO: 5026515 - DNA, 25 bp, Homo sapien
tgttaacagccctggcttttgtgct

SEQ ID NO: 5026516 - DNA, 25 bp, Homo sapien
atgttaacagccctggcttttgtgc

SEQ ID NO: 5026517 - DNA, 25 bp, Homo sapien
aatgttaacagccctggcttttgtg

SEQ ID NO: 5026518 - DNA, 25 bp, Homo sapien
ctttctgccctgtaatgttaacagc

SEQ ID NO: 5026519 - DNA, 25 bp, Homo sapien
gagaatggactcgtctactgcctgt

SEQ ID NO: 5026520 - DNA, 25 bp, Homo sapien
gagagagaatggactcgtctactgc

SEQ ID NO: 5026521 - DNA, 25 bp, Homo sapien
tggactcgtctactgcctgtttgag

SEQ ID NO: 5026522 - DNA, 25 bp, Homo sapien
aatggactcgtctactgcctgtttg

SEQ ID NO: 5026523 - DNA, 25 bp, Homo sapien
actggactacagagtcaatccagga

SEQ ID NO: 5026524 - DNA, 25 bp, Homo sapien
ggtactggactacagagtcaatcca

SEQ ID NO: 5026525 - DNA, 25 bp, Homo sapien
ccctggtactggactacagagtcaa

SEQ ID NO: 5026526 - DNA, 25 bp, Homo sapien
cctggtactggactacagagtcaat

SEQ ID NO: 5026527 - DNA, 25 bp, Homo sapien
cctgtgttccctggtacagaagtat

SEQ ID NO: 5026528 - DNA, 25 bp, Homo sapien
ctgtatcatatcctgtgttccctgg

SEQ ID NO: 5026529 - DNA, 25 bp, Homo sapien
tgttccctggtacagaagtatactt

SEQ ID NO: 5026530 - DNA, 25 bp, Homo sapien
tccctggtacagaagtatacttcat

SEQ ID NO: 5026531 - DNA, 25 bp, Homo sapien
tcttgactttcagaaagtttctgtg

SEQ ID NO: 5026532 - DNA, 25 bp, Homo sapien
ctcttgactttcagaaagtttctgt

SEQ ID NO: 5026533 - DNA, 25 bp, Homo sapien
actgctgctttagctcagacttccc

SEQ ID NO: 5026534 - DNA, 25 bp, Homo sapien
cccactgctctgactaactgctgct

SEQ ID NO: 5026535 - DNA, 25 bp, Homo sapien
gttgatttagtccagctcgatgccc

SEQ ID NO: 5026536 - DNA, 25 bp, Homo sapien
acttcccttctctatgggctgggtc

SEQ ID NO: 5026537 - DNA, 25 bp, Homo sapien
cttttgtgacaccagtggttgtctc

SEQ ID NO: 5026538 - DNA, 25 bp, Homo sapien
ttgtctccaaggaggtgcagtattt

SEQ ID NO: 5026539 - DNA, 25 bp, Homo sapien
ttttgtgacaccagtggttgtctcc

SEQ ID NO: 5026540 - DNA, 25 bp, Homo sapien
cagtggttgtctccaaggaggtgca

SEQ ID NO: 5026541 - DNA, 25 bp, Homo sapien
tcgtgctaataagaaacagagcgtg

SEQ ID NO: 5026542 - DNA, 25 bp, Homo sapien
tatggctaacctctgtatcacaggc

SEQ ID NO: 5026543 - DNA, 25 bp, Homo sapien
gatgagttcatttacagagggctgg

SEQ ID NO: 5026544 - DNA, 25 bp, Homo sapien
catgaatatcgaaggacagacaagc

SEQ ID NO: 5026545 - DNA, 25 bp, Homo sapien
cttgtgaatgttaatggccccgcta

SEQ ID NO: 5026546 - DNA, 25 bp, Homo sapien
tagcccttggctactgcactctgct

SEQ ID NO: 5026547 - DNA, 25 bp, Homo sapien
gaagtcacagacttctgtccggcag

SEQ ID NO: 5026548 - DNA, 25 bp, Homo sapien
tgtccggcagcctctttgcatacaa

SEQ ID NO: 5026549 - DNA, 25 bp, Homo sapien
tcattactgagatctcatcaatgcc

SEQ ID NO: 5026550 - DNA, 25 bp, Homo sapien
actgagatctcatcaatgcctagtt

SEQ ID NO: 5026551 - DNA, 25 bp, Homo sapien
ttactgagatctcatcaatgcctag

SEQ ID NO: 5026552 - DNA, 25 bp, Homo sapien
attcattactgagatctcatcaatg

SEQ ID NO: 5026553 - DNA, 25 bp, Homo sapien
tgaaagtcctctttgcagaagtagc

SEQ ID NO: 5026554 - DNA, 25 bp, Homo sapien
tccctttgagggagtagatcttcca

SEQ ID NO: 5026555 - DNA, 25 bp, Homo sapien
tcagagtaagctctcagtggagtct

SEQ ID NO: 5026556 - DNA, 25 bp, Homo sapien
tctgattggaatccctcttcgccag

SEQ ID NO: 5026557 - DNA, 25 bp, Homo sapien
catctggtatgccttaaagtggaat

SEQ ID NO: 5026558 - DNA, 25 bp, Homo sapien
tgttgatgataaccagggaatcctg

SEQ ID NO: 5026559 - DNA, 25 bp, Homo sapien
cagcacagagcgaaaaggccaattg

SEQ ID NO: 5026560 - DNA, 25 bp, Homo sapien
tgctcaagaaacactagactggatt

SEQ ID NO: 5026561 - DNA, 25 bp, Homo sapien
agcccaggcgttcaatgatgcagca

SEQ ID NO: 5026562 - DNA, 25 bp, Homo sapien
cagcagcacttgtcttttgttcagt

SEQ ID NO: 5026563 - DNA, 25 bp, Homo sapien
cagttactaagtccaatggacatgt

SEQ ID NO: 5026564 - DNA, 25 bp, Homo sapien
tgtgtttctgtaagccacaagccgg

SEQ ID NO: 5026565 - DNA, 25 bp, Homo sapien
caagccggatttcagaaatattaga

SEQ ID NO: 5026566 - DNA, 25 bp, Homo sapien
tttacaatgtctagagtcttcctgg

SEQ ID NO: 5026567 - DNA, 25 bp, Homo sapien
ttacaatgtctagagtcttcctgga

SEQ ID NO: 5026568 - DNA, 25 bp, Homo sapien
gatttacaatgtctagagtcttcct

SEQ ID NO: 5026569 - DNA, 25 bp, Homo sapien
ctgatttacaatgtctagagtcttc

SEQ ID NO: 5026570 - DNA, 25 bp, Homo sapien
atatccctcataataggttcagtgg

SEQ ID NO: 5026571 - DNA, 25 bp, Homo sapien
aggttcagtggtcagcaaaattgaa

SEQ ID NO: 5026572 - DNA, 25 bp, Homo sapien
tctgtgtaggaagctcatatccctc

SEQ ID NO: 5026573 - DNA, 25 bp, Homo sapien
cagatactgtgtatctgtggatcat

SEQ ID NO: 5026574 - DNA, 25 bp, Homo sapien
agtcacacattcatgacctttgttc

SEQ ID NO: 5026575 - DNA, 25 bp, Homo sapien
ctatctgagtaatctccttttaaat

SEQ ID NO: 5026576 - DNA, 25 bp, Homo sapien
tcctctctctgtagagtcacacatt

SEQ ID NO: 5026577 - DNA, 25 bp, Homo sapien
gagtcacacattcatgacctttgtt

SEQ ID NO: 5026578 - DNA, 25 bp, Homo sapien
gtagccttgtctatttggattcccg

SEQ ID NO: 5026579 - DNA, 25 bp, Homo sapien
tctatttggattcccgcatataaac

SEQ ID NO: 5026580 - DNA, 25 bp, Homo sapien
tcagtttaggcttaagtaacctgta

SEQ ID NO: 5026581 - DNA, 25 bp, Homo sapien
taagtaacctgtagccttgtctatt

SEQ ID NO: 5026582 - DNA, 25 bp, Homo sapien
cccatggcaggttctacacagtttt

SEQ ID NO: 5026583 - DNA, 25 bp, Homo sapien
ccatggcaggttctacacagttttc

SEQ ID NO: 5026584 - DNA, 25 bp, Homo sapien
ccccatggcaggttctacacagttt

SEQ ID NO: 5026585 - DNA, 25 bp, Homo sapien
caaagggtccagggatacacttaag

SEQ ID NO: 5026586 - DNA, 25 bp, Homo sapien
agacctcattgttgcatccccaaag

SEQ ID NO: 5026587 - DNA, 25 bp, Homo sapien
aagtcagacctcattgttgcatccc

SEQ ID NO: 5026588 - DNA, 25 bp, Homo sapien
tccagggatacacttaagaacaatt

SEQ ID NO: 5026589 - DNA, 25 bp, Homo sapien
tgaaaatgaaatagcgagtgaagac

SEQ ID NO: 5026590 - DNA, 25 bp, Homo sapien
tgaagtttagggaagtccatgtctg

SEQ ID NO: 5026591 - DNA, 25 bp, Homo sapien
cagattgaagtttagggaagtccat

SEQ ID NO: 5026592 - DNA, 25 bp, Homo sapien
gaaatagcgagtgaagactctgagg

SEQ ID NO: 5026593 - DNA, 25 bp, Homo sapien
ctccaatggataggccgggatgtac

SEQ ID NO: 5026594 - DNA, 25 bp, Homo sapien
tttagctccatgtacagcaatatat

SEQ ID NO: 5026595 - DNA, 25 bp, Homo sapien
tctccaatggataggccgggatgta

SEQ ID NO: 5026596 - DNA, 25 bp, Homo sapien
tttcctttagctccatgtacagcaa

SEQ ID NO: 5026597 - DNA, 25 bp, Homo sapien
cctcttcagtacattggaatccttg

SEQ ID NO: 5026598 - DNA, 25 bp, Homo sapien
ctcttcagtacattggaatccttga

SEQ ID NO: 5026599 - DNA, 25 bp, Homo sapien
gcctcttcagtacattggaatcctt

SEQ ID NO: 5026600 - DNA, 25 bp, Homo sapien
agagggctataggtttcaatttctt

SEQ ID NO: 5026601 - DNA, 25 bp, Homo sapien
aagagggctataggtttcaatttct

SEQ ID NO: 5026602 - DNA, 25 bp, Homo sapien
taagagggctataggtttcaatttc

SEQ ID NO: 5026603 - DNA, 25 bp, Homo sapien
ttcctcctatctaagcacttcttcg

SEQ ID NO: 5026604 - DNA, 25 bp, Homo sapien
tcctatctaagcacttcttcgaaaa

SEQ ID NO: 5026605 - DNA, 25 bp, Homo sapien
tagcagacatagtcttcctcctatc

SEQ ID NO: 5026606 - DNA, 25 bp, Homo sapien
tttagcagacatagtcttcctccta

SEQ ID NO: 5026607 - DNA, 25 bp, Homo sapien
tgcctatcggcttcttaggacctcc

SEQ ID NO: 5026608 - DNA, 25 bp, Homo sapien
gcctatcggcttcttaggacctcct

SEQ ID NO: 5026609 - DNA, 25 bp, Homo sapien
ctatcggcttcttaggacctccttt

SEQ ID NO: 5026610 - DNA, 25 bp, Homo sapien
tttgcctatcggcttcttaggacct

SEQ ID NO: 5026611 - DNA, 25 bp, Homo sapien
atgcctttgcaaacatcatttcacg

SEQ ID NO: 5026612 - DNA, 25 bp, Homo sapien
tttgcaaacatcatttcacgaacat

SEQ ID NO: 5026613 - DNA, 25 bp, Homo sapien
gcctttgcaaacatcatttcacgaa

SEQ ID NO: 5026614 - DNA, 25 bp, Homo sapien
tcatgcctttgcaaacatcatttca

SEQ ID NO: 5026615 - DNA, 25 bp, Homo sapien
gcctgttttgcacatttgcttttac

SEQ ID NO: 5026616 - DNA, 25 bp, Homo sapien
gtggcctgttttgcacatttgcttt

SEQ ID NO: 5026617 - DNA, 25 bp, Homo sapien
ggcctgttttgcacatttgctttta

SEQ ID NO: 5026618 - DNA, 25 bp, Homo sapien
agtggcctgttttgcacatttgctt

SEQ ID NO: 5026619 - DNA, 25 bp, Homo sapien
ctttttctgatacccatttgaccat

SEQ ID NO: 5026620 - DNA, 25 bp, Homo sapien
ctgcctggacctgcggctgtagttt

SEQ ID NO: 5026621 - DNA, 25 bp, Homo sapien
cctgcggctgtagtttgcatcctcc

SEQ ID NO: 5026622 - DNA, 25 bp, Homo sapien
ccagtcagctcaaattcaaccaatg

SEQ ID NO: 5026623 - DNA, 25 bp, Homo sapien
cagagctgcactaggtatgatggag

SEQ ID NO: 5026624 - DNA, 25 bp, Homo sapien
tatgatggagatcagccctatgctc

SEQ ID NO: 5026625 - DNA, 25 bp, Homo sapien
tttttgtgcaatcaggcagagctgc

SEQ ID NO: 5026626 - DNA, 25 bp, Homo sapien
gaagacatcattactgtgaagctgc

SEQ ID NO: 5026627 - DNA, 25 bp, Homo sapien
gctctgttcttttggtctgcttttc

SEQ ID NO: 5026628 - DNA, 25 bp, Homo sapien
tctgttcttttggtctgcttttcac

SEQ ID NO: 5026629 - DNA, 25 bp, Homo sapien
ggcctgaatgctctgttcttttggt

SEQ ID NO: 5026630 - DNA, 25 bp, Homo sapien
gaatgctctgttcttttggtctgct

SEQ ID NO: 5026631 - DNA, 25 bp, Homo sapien
catgtcagtaagtgccccaggtaca

SEQ ID NO: 5026632 - DNA, 25 bp, Homo sapien
ccaggtacagggcatacagtggtaa

SEQ ID NO: 5026633 - DNA, 25 bp, Homo sapien
cagtggtaaacaaacccgatctggc

SEQ ID NO: 5026634 - DNA, 25 bp, Homo sapien
tacataatacacaaggcacagggac

SEQ ID NO: 5026635 - DNA, 25 bp, Homo sapien
ataaaatggaaggcattccagacag

SEQ ID NO: 5026636 - DNA, 25 bp, Homo sapien
tatgtttgaggatcatatttagaac

SEQ ID NO: 5026637 - DNA, 25 bp, Homo sapien
cagggccatccttctaatggacaca

SEQ ID NO: 5026638 - DNA, 25 bp, Homo sapien
ccaaatgcgcaagtataagggactt

SEQ ID NO: 5026639 - DNA, 25 bp, Homo sapien
gaataggaacggctccggtctacag

SEQ ID NO: 5026640 - DNA, 25 bp, Homo sapien
ctgcttgggaggagccaagatggcc

SEQ ID NO: 5026641 - DNA, 25 bp, Homo sapien
cgggtgatttctgcatttccatctg

SEQ ID NO: 5026642 - DNA, 25 bp, Homo sapien
ctcccagcgtgagtgacgcagaaga

SEQ ID NO: 5026643 - DNA, 25 bp, Homo sapien
gaatacacatgttaaattgccataa

SEQ ID NO: 5026644 - DNA, 25 bp, Homo sapien
tctcaaacccagacaacaaaacagt

SEQ ID NO: 5026645 - DNA, 25 bp, Homo sapien
gacaaaattcgaatacctaattatc

SEQ ID NO: 5026646 - DNA, 25 bp, Homo sapien
ttgtgatgatatgaagaactttgca

SEQ ID NO: 5026647 - DNA, 25 bp, Homo sapien
taccacttattgctggaagggagac

SEQ ID NO: 5026648 - DNA, 25 bp, Homo sapien
ttttaaagcccgacagtcagtggag

SEQ ID NO: 5026649 - DNA, 25 bp, Homo sapien
ttttctatagtcgagccacgtgagc

SEQ ID NO: 5026650 - DNA, 25 bp, Homo sapien
aaacggctccagattcacggtcaag

SEQ ID NO: 5026651 - DNA, 25 bp, Homo sapien
agtagtgccactttatcccattcag

SEQ ID NO: 5026652 - DNA, 25 bp, Homo sapien
agttttccatggttttgtcccgcag

SEQ ID NO: 5026653 - DNA, 25 bp, Homo sapien
agtaactgggccctttgaagtagtg

SEQ ID NO: 5026654 - DNA, 25 bp, Homo sapien
tcaaaaatctaaaggtcgaatcatc

SEQ ID NO: 5026655 - DNA, 25 bp, Homo sapien
tctaatcagcagtatgcaaaacagc

SEQ ID NO: 5026656 - DNA, 25 bp, Homo sapien
gaggcaaagaaccttgctagaagtc

SEQ ID NO: 5026657 - DNA, 25 bp, Homo sapien
aagaagcagctgcatgggtcttgca

SEQ ID NO: 5026658 - DNA, 25 bp, Homo sapien
caaagttggccctacgcaaagcaag

SEQ ID NO: 5026659 - DNA, 25 bp, Homo sapien
tgccaaaaggatagttcaaagatta

SEQ ID NO: 5026660 - DNA, 25 bp, Homo sapien
gaaaaagctcaagacctaccttgtg

SEQ ID NO: 5026661 - DNA, 25 bp, Homo sapien
tagatttgtagcaactagttttggg

SEQ ID NO: 5026662 - DNA, 25 bp, Homo sapien
gagggaggagtcataaaattacata

SEQ ID NO: 5026663 - DNA, 25 bp, Homo sapien
aatcagcaccgtgtaagatcaggct

SEQ ID NO: 5026664 - DNA, 25 bp, Homo sapien
cattatcagcatctttagtgctgaa

SEQ ID NO: 5026665 - DNA, 25 bp, Homo sapien
tgcacatacagttgtcattatcagc

SEQ ID NO: 5026666 - DNA, 25 bp, Homo sapien
tgctgaaatcagcaccgtgtaagat

SEQ ID NO: 5026667 - DNA, 25 bp, Homo sapien
tctgccacaagcagcggttctcctt

SEQ ID NO: 5026668 - DNA, 25 bp, Homo sapien
tcccaagtctgccacaagcagcggt

SEQ ID NO: 5026669 - DNA, 25 bp, Homo sapien
caagtctgccacaagcagcggttct

SEQ ID NO: 5026670 - DNA, 25 bp, Homo sapien
cacaagcagcggttctcctttctct

SEQ ID NO: 5026671 - DNA, 25 bp, Homo sapien
catatccatcacatatgggtatgca

SEQ ID NO: 5026672 - DNA, 25 bp, Homo sapien
tgaactgactgtgttcgtggcattg

SEQ ID NO: 5026673 - DNA, 25 bp, Homo sapien
cgtggcattgtaattgcctgtttgg

SEQ ID NO: 5026674 - DNA, 25 bp, Homo sapien
aattgcctgtttggctgtctgcaac

SEQ ID NO: 5026675 - DNA, 25 bp, Homo sapien
gaccaagtcaactgaccaaaacctc

SEQ ID NO: 5026676 - DNA, 25 bp, Homo sapien
aaaaacctagtatgaatttcatagt

SEQ ID NO: 5026677 - DNA, 25 bp, Homo sapien
ttatatttcagtcggaatttagttg

SEQ ID NO: 5026678 - DNA, 25 bp, Homo sapien
cggaatttagttgaatttgaccaag

SEQ ID NO: 5026679 - DNA, 25 bp, Homo sapien
tatttttccctagtagacgagcttc

SEQ ID NO: 5026680 - DNA, 25 bp, Homo sapien
gatagtcaacctacgaaaactgaaa

SEQ ID NO: 5026681 - DNA, 25 bp, Homo sapien
tgataaccacagaacaacagtatgc

SEQ ID NO: 5026682 - DNA, 25 bp, Homo sapien
ggtagtcgaacactacactgtagca

SEQ ID NO: 5026683 - DNA, 25 bp, Homo sapien
caatattcaccggagggatttccaa

SEQ ID NO: 5026684 - DNA, 25 bp, Homo sapien
tcatactgtgaataggctcggttcc

SEQ ID NO: 5026685 - DNA, 25 bp, Homo sapien
cctctgactggtaatggcaaaaata

SEQ ID NO: 5026686 - DNA, 25 bp, Homo sapien
ttaactcaattcttagcatgtactg

SEQ ID NO: 5026687 - DNA, 25 bp, Homo sapien
tttgcttccaagtacttaagtatct

SEQ ID NO: 5026688 - DNA, 25 bp, Homo sapien
cttagtgctatctctttcaagccct

SEQ ID NO: 5026689 - DNA, 25 bp, Homo sapien
ctcccttagtgctatctctttcaag

SEQ ID NO: 5026690 - DNA, 25 bp, Homo sapien
tgtttccttcgactctcccttagtg

SEQ ID NO: 5026691 - DNA, 25 bp, Homo sapien
tttggaaatctagacttccatcttc

SEQ ID NO: 5026692 - DNA, 25 bp, Homo sapien
tccaacctcccccattgacatccat

SEQ ID NO: 5026693 - DNA, 25 bp, Homo sapien
tatattccttccagcctctttggaa

SEQ ID NO: 5026694 - DNA, 25 bp, Homo sapien
gatgttgtattacagtccaacctcc

SEQ ID NO: 5026695 - DNA, 25 bp, Homo sapien
tcaaagagcgaattgtccatgtact

SEQ ID NO: 5026696 - DNA, 25 bp, Homo sapien
taggaataaggcgaacaggtctgca

SEQ ID NO: 5026697 - DNA, 25 bp, Homo sapien
tagtcacgaacaataacaggagaac

SEQ ID NO: 5026698 - DNA, 25 bp, Homo sapien
tatcgtcggagagcaatcactgtaa

SEQ ID NO: 5026699 - DNA, 25 bp, Homo sapien
atcttgtaaacaaacacttctggtt

SEQ ID NO: 5026700 - DNA, 25 bp, Homo sapien
gcttgatatacatctgcacagtctc

SEQ ID NO: 5026701 - DNA, 25 bp, Homo sapien
tattaaaaccagcttgatatacatc

SEQ ID NO: 5026702 - DNA, 25 bp, Homo sapien
tgcacagtctctaaatggtttctct

SEQ ID NO: 5026703 - DNA, 25 bp, Homo sapien
ttaatataaatagtgtagattccac

SEQ ID NO: 5026704 - DNA, 25 bp, Homo sapien
tagtgcaaagattgacaaggttgtg

SEQ ID NO: 5026705 - DNA, 25 bp, Homo sapien
tgacaaggttgtggactgtgtccat

SEQ ID NO: 5026706 - DNA, 25 bp, Homo sapien
caaagattgacaaggttgtggactg

SEQ ID NO: 5026707 - DNA, 25 bp, Homo sapien
cttctttagtgcaaagattgacaag

SEQ ID NO: 5026708 - DNA, 25 bp, Homo sapien
ctgttgttggtggtagctctgttta

SEQ ID NO: 5026709 - DNA, 25 bp, Homo sapien
ttgacgagtaaccaagccttgaagg

SEQ ID NO: 5026710 - DNA, 25 bp, Homo sapien
taaggtgtccaactcttccttgtgt

SEQ ID NO: 5026711 - DNA, 25 bp, Homo sapien
cagctcctggattatatatgtttga

SEQ ID NO: 5026712 - DNA, 25 bp, Homo sapien
ttctaagattttatgttctaataaa

SEQ ID NO: 5026713 - DNA, 25 bp, Homo sapien
gatcagcatggtagatggtgatgat

SEQ ID NO: 5026714 - DNA, 25 bp, Homo sapien
cttgtggatggatcagcatggtaga

SEQ ID NO: 5026715 - DNA, 25 bp, Homo sapien
tgatgatgtcaatcatactagtcat

SEQ ID NO: 5026716 - DNA, 25 bp, Homo sapien
tgatgatgatgtcaatcatactagt

SEQ ID NO: 5026717 - DNA, 25 bp, Homo sapien
cactggcttgtggaaaagatctgct

SEQ ID NO: 5026718 - DNA, 25 bp, Homo sapien
catttcttcacttggagcgccctta

SEQ ID NO: 5026719 - DNA, 25 bp, Homo sapien
cgcacattagcacgttagacagaac

SEQ ID NO: 5026720 - DNA, 25 bp, Homo sapien
ccatggaactaagaaggctactcta

SEQ ID NO: 5026721 - DNA, 25 bp, Homo sapien
taggttcttggttgtgtaattccaa

SEQ ID NO: 5026722 - DNA, 25 bp, Homo sapien
gagttacagattccttactcccaag

SEQ ID NO: 5026723 - DNA, 25 bp, Homo sapien
tttaagtttcgggtagcatccaaca

SEQ ID NO: 5026724 - DNA, 25 bp, Homo sapien
ccaattatatggttgagttacagat

SEQ ID NO: 5026725 - DNA, 25 bp, Homo sapien
caaactggaagctttttagagtgac

SEQ ID NO: 5026726 - DNA, 25 bp, Homo sapien
ctggaagctttttagagtgactccc

SEQ ID NO: 5026727 - DNA, 25 bp, Homo sapien
gctttttagagtgactccctctgga

SEQ ID NO: 5026728 - DNA, 25 bp, Homo sapien
ggaagctttttagagtgactccctc

SEQ ID NO: 5026729 - DNA, 25 bp, Homo sapien
ttgaagaagttgcttctctagcttg

SEQ ID NO: 5026730 - DNA, 25 bp, Homo sapien
caagtcgagaagtttgatttagtac

SEQ ID NO: 5026731 - DNA, 25 bp, Homo sapien
taggtggataatgaattctccagca

SEQ ID NO: 5026732 - DNA, 25 bp, Homo sapien
gctgtatctcaagtcgagaagtttg

SEQ ID NO: 5026733 - DNA, 25 bp, Homo sapien
gccaaaaatctctttcaacgactca

SEQ ID NO: 5026734 - DNA, 25 bp, Homo sapien
gaattaaggttgatacatgcagagg

SEQ ID NO: 5026735 - DNA, 25 bp, Homo sapien
tcattaactttgaaataggccctgt

SEQ ID NO: 5026736 - DNA, 25 bp, Homo sapien
aacataaaatatgatgccttggcaa

SEQ ID NO: 5026737 - DNA, 25 bp, Homo sapien
tgggccatctccgacttcatgtttt

SEQ ID NO: 5026738 - DNA, 25 bp, Homo sapien
attctgctgtatctgggccatctcc

SEQ ID NO: 5026739 - DNA, 25 bp, Homo sapien
tatctccagcatggtagccgtgtgg

SEQ ID NO: 5026740 - DNA, 25 bp, Homo sapien
tgagagaggaggctggttcctatct

SEQ ID NO: 5026741 - DNA, 25 bp, Homo sapien
ccatctggcggggatcctctacatc

SEQ ID NO: 5026742 - DNA, 25 bp, Homo sapien
aatcagccatctggcggggatcctc

SEQ ID NO: 5026743 - DNA, 25 bp, Homo sapien
tggcaaatcagccatctggcgggga

SEQ ID NO: 5026744 - DNA, 25 bp, Homo sapien
catctggcggggatcctctacatct

SEQ ID NO: 5026745 - DNA, 25 bp, Homo sapien
cctggttcctgctacttgctttgcc

SEQ ID NO: 5026746 - DNA, 25 bp, Homo sapien
ttgcctttgctgattcctgatttgg

SEQ ID NO: 5026747 - DNA, 25 bp, Homo sapien
tgatttggatctcccctttcgccaa

SEQ ID NO: 5026748 - DNA, 25 bp, Homo sapien
tggttcctgctacttgctttgcctt

SEQ ID NO: 5026749 - DNA, 25 bp, Homo sapien
aacccctgcttcatagcttggagcc

SEQ ID NO: 5026750 - DNA, 25 bp, Homo sapien
cccctgcttcatagcttggagcctg

SEQ ID NO: 5026751 - DNA, 25 bp, Homo sapien
tgaacccctgcttcatagcttggag

SEQ ID NO: 5026752 - DNA, 25 bp, Homo sapien
gaacccctgcttcatagcttggagc

SEQ ID NO: 5026753 - DNA, 25 bp, Homo sapien
ctcatgaagactcctgaattccatc

SEQ ID NO: 5026754 - DNA, 25 bp, Homo sapien
atactcatgaagactcctgaattcc

SEQ ID NO: 5026755 - DNA, 25 bp, Homo sapien
tcctgaattccatctttgtgaaact

SEQ ID NO: 5026756 - DNA, 25 bp, Homo sapien
ctgaagaggaattatactcatgaag

SEQ ID NO: 5026757 - DNA, 25 bp, Homo sapien
aacgcacacccgtgaatctgtaaag

SEQ ID NO: 5026758 - DNA, 25 bp, Homo sapien
gattgagacagtaacattctgtatc

SEQ ID NO: 5026759 - DNA, 25 bp, Homo sapien
atagtctctagagtggacctgcttt

SEQ ID NO: 5026760 - DNA, 25 bp, Homo sapien
tgcagaattttcaacgcacacccgt

SEQ ID NO: 5026761 - DNA, 25 bp, Homo sapien
aagtttctccgaaaatgtgacagtc

SEQ ID NO: 5026762 - DNA, 25 bp, Homo sapien
gggctgaatcttctgggtatgggag

SEQ ID NO: 5026763 - DNA, 25 bp, Homo sapien
tctctggttcccatcataatgtggg

SEQ ID NO: 5026764 - DNA, 25 bp, Homo sapien
taatgtggggctgaatcttctgggt

SEQ ID NO: 5026765 - DNA, 25 bp, Homo sapien
agaagctgttgaccggcacttcagc

SEQ ID NO: 5026766 - DNA, 25 bp, Homo sapien
ctagtagtgaggatgttcagtaagg

SEQ ID NO: 5026767 - DNA, 25 bp, Homo sapien
ctttctatctagtagtgaggatgtt

SEQ ID NO: 5026768 - DNA, 25 bp, Homo sapien
cagtaagggatgtgaacaaatgttg

SEQ ID NO: 5026769 - DNA, 25 bp, Homo sapien
ggtcccattcccaaggtgtatgatt

SEQ ID NO: 5026770 - DNA, 25 bp, Homo sapien
cattcccaaggtgtatgattatata

SEQ ID NO: 5026771 - DNA, 25 bp, Homo sapien
cccattcccaaggtgtatgattata

SEQ ID NO: 5026772 - DNA, 25 bp, Homo sapien
aacattgtttaaggaagaacattat

SEQ ID NO: 5026773 - DNA, 25 bp, Homo sapien
tatatgtgatgaaagcctgcagtgt

SEQ ID NO: 5026774 - DNA, 25 bp, Homo sapien
caatgacgcttccacagatttgacc

SEQ ID NO: 5026775 - DNA, 25 bp, Homo sapien
tgcatatggccctcagtaggcggat

SEQ ID NO: 5026776 - DNA, 25 bp, Homo sapien
gacatggccagagggcattcttctc

SEQ ID NO: 5026777 - DNA, 25 bp, Homo sapien
tagagaagaccagctagaagttaac

SEQ ID NO: 5026778 - DNA, 25 bp, Homo sapien
acctttggtgtcagattattctttt

SEQ ID NO: 5026779 - DNA, 25 bp, Homo sapien
cattgcccatttggtgtgggtatag

SEQ ID NO: 5026780 - DNA, 25 bp, Homo sapien
ctttcttaaatagtagttgagatca

SEQ ID NO: 5026781 - DNA, 25 bp, Homo sapien
caagaacaaaccactgaagtttaca

SEQ ID NO: 5026782 - DNA, 25 bp, Homo sapien
attcctggatacatatgggagaaat

SEQ ID NO: 5026783 - DNA, 25 bp, Homo sapien
gacagcccctcagattctgtgctca

SEQ ID NO: 5026784 - DNA, 25 bp, Homo sapien
aagtgctcgtactgggacaagaaca

SEQ ID NO: 5026785 - DNA, 25 bp, Homo sapien
tgtgtagggcactctggaggatgct

SEQ ID NO: 5026786 - DNA, 25 bp, Homo sapien
tgaccctgctggacctgcgtgacta

SEQ ID NO: 5026787 - DNA, 25 bp, Homo sapien
cactctggcgtggagaaaatctcat

SEQ ID NO: 5026788 - DNA, 25 bp, Homo sapien
gaacagcagaacctgtgtagggcac

SEQ ID NO: 5026789 - DNA, 25 bp, Homo sapien
tgttattctaagcatccgataggtg

SEQ ID NO: 5026790 - DNA, 25 bp, Homo sapien
taagcatccgataggtgccaaacac

SEQ ID NO: 5026791 - DNA, 25 bp, Homo sapien
actgaaccttgttattctaagcatc

SEQ ID NO: 5026792 - DNA, 25 bp, Homo sapien
ccaaacaccttaaccctccacaatg

SEQ ID NO: 5026793 - DNA, 25 bp, Homo sapien
tgagctcagcagtctagaagcacga

SEQ ID NO: 5026794 - DNA, 25 bp, Homo sapien
tctagaagcacgaggtcctatccct

SEQ ID NO: 5026795 - DNA, 25 bp, Homo sapien
ggtcctatccctcattctcagtgaa

SEQ ID NO: 5026796 - DNA, 25 bp, Homo sapien
ttctgtttatgtcagttggtcagcc

SEQ ID NO: 5026797 - DNA, 25 bp, Homo sapien
cctagaattccttcaagagttataa

SEQ ID NO: 5026798 - DNA, 25 bp, Homo sapien
tgctcctaggttcctagaattcctt

SEQ ID NO: 5026799 - DNA, 25 bp, Homo sapien
gtcccttggaaatgctcctaggttc

SEQ ID NO: 5026800 - DNA, 25 bp, Homo sapien
tggaaatgctcctaggttcctagaa

SEQ ID NO: 5026801 - DNA, 25 bp, Homo sapien
tctattttacattgtaggcaatctg

SEQ ID NO: 5026802 - DNA, 25 bp, Homo sapien
tacattgtaggcaatctgttcacac

SEQ ID NO: 5026803 - DNA, 25 bp, Homo sapien
caattaacttttatcgggcatctag

SEQ ID NO: 5026804 - DNA, 25 bp, Homo sapien
tttatcgggcatctagccaagagtc

SEQ ID NO: 5026805 - DNA, 25 bp, Homo sapien
acgcagcaatatagatgagtttccc

SEQ ID NO: 5026806 - DNA, 25 bp, Homo sapien
tctgtgttatgtgataaaggtggtg

SEQ ID NO: 5026807 - DNA, 25 bp, Homo sapien
gatttcttgacgcagcaatatagat

SEQ ID NO: 5026808 - DNA, 25 bp, Homo sapien
aaaggtggtgatttcttgacgcagc

SEQ ID NO: 5026809 - DNA, 25 bp, Homo sapien
agctttagacttcttcggtacatgg

SEQ ID NO: 5026810 - DNA, 25 bp, Homo sapien
tcactttatattcgccaatataagc

SEQ ID NO: 5026811 - DNA, 25 bp, Homo sapien
ttatattcgccaatataagctttag

SEQ ID NO: 5026812 - DNA, 25 bp, Homo sapien
gacttcttcggtacatggtccaaca

SEQ ID NO: 5026813 - DNA, 25 bp, Homo sapien
tgcaagctgtacaactaaacatgag

SEQ ID NO: 5026814 - DNA, 25 bp, Homo sapien
tgtattgtcagctatctcctgagag

SEQ ID NO: 5026815 - DNA, 25 bp, Homo sapien
taaacatgagaggtcacttcccagc

SEQ ID NO: 5026816 - DNA, 25 bp, Homo sapien
aacagtatctactgggcacctgcaa

SEQ ID NO: 5026817 - DNA, 25 bp, Homo sapien
cctcgccatgcaaaggtgggtgaaa

SEQ ID NO: 5026818 - DNA, 25 bp, Homo sapien
ggttttggtttacctcgccatgcaa

SEQ ID NO: 5026819 - DNA, 25 bp, Homo sapien
tagacagcgcaggtcaagcaagtga

SEQ ID NO: 5026820 - DNA, 25 bp, Homo sapien
gcaagtgaatatgcgctgagttgtt

SEQ ID NO: 5026821 - DNA, 25 bp, Homo sapien
ggagggcgatctttttcccacacaa

SEQ ID NO: 5026822 - DNA, 25 bp, Homo sapien
aattcccttgtttgtgtgcctctaa

SEQ ID NO: 5026823 - DNA, 25 bp, Homo sapien
taattcctcttgcaatatagggcag

SEQ ID NO: 5026824 - DNA, 25 bp, Homo sapien
aaatggcttagtcaggctctctgcc

SEQ ID NO: 5026825 - DNA, 25 bp, Homo sapien
tggacttcggcgctgattgctgcac

SEQ ID NO: 5026826 - DNA, 25 bp, Homo sapien
cattgcccatgttgaatccggttat

SEQ ID NO: 5026827 - DNA, 25 bp, Homo sapien
tctggaagaatgaaagtgtaggcac

SEQ ID NO: 5026828 - DNA, 25 bp, Homo sapien
gagaaatccggttccacgtgtggag

SEQ ID NO: 5026829 - DNA, 25 bp, Homo sapien
tatgtgagtcagaatggcagcgagg

SEQ ID NO: 5026830 - DNA, 25 bp, Homo sapien
ctatgtgagtcagaatggcagcgag

SEQ ID NO: 5026831 - DNA, 25 bp, Homo sapien
tccttccgtgcctctcgcaaaactt

SEQ ID NO: 5026832 - DNA, 25 bp, Homo sapien
gtgcctctcgcaaaacttgctcctt

SEQ ID NO: 5026833 - DNA, 25 bp, Homo sapien
tgcctctcgcaaaacttgctccttt

SEQ ID NO: 5026834 - DNA, 25 bp, Homo sapien
ttccgtgcctctcgcaaaacttgct

SEQ ID NO: 5026835 - DNA, 25 bp, Homo sapien
aagcaggcagcctttcacaagatga

SEQ ID NO: 5026836 - DNA, 25 bp, Homo sapien
tctgtgtgaccgttcagcatggagc

SEQ ID NO: 5026837 - DNA, 25 bp, Homo sapien
tattaaggttgcacatccaagccaa

SEQ ID NO: 5026838 - DNA, 25 bp, Homo sapien
cttgacaggaatgcatgagtgtgcc

SEQ ID NO: 5026839 - DNA, 25 bp, Homo sapien
aatgaaactggtgtcctgatcagaa

SEQ ID NO: 5026840 - DNA, 25 bp, Homo sapien
aactggtgtcctgatcagaatgcaa

SEQ ID NO: 5026841 - DNA, 25 bp, Homo sapien
gaaactggtgtcctgatcagaatgc

SEQ ID NO: 5026842 - DNA, 25 bp, Homo sapien
ttaaatgaaactggtgtcctgatca

SEQ ID NO: 5026843 - DNA, 25 bp, Homo sapien
caatactctacgatctgaagtttac

SEQ ID NO: 5026844 - DNA, 25 bp, Homo sapien
ccccaatactctacgatctgaagtt

SEQ ID NO: 5026845 - DNA, 25 bp, Homo sapien
ttaacccccaatactctacgatctg

SEQ ID NO: 5026846 - DNA, 25 bp, Homo sapien
tgtgttcttaacccccaatactcta

SEQ ID NO: 5026847 - DNA, 25 bp, Homo sapien
tccacatttaggcactccgatttcc

SEQ ID NO: 5026848 - DNA, 25 bp, Homo sapien
ttcccttccacatttaggcactccg

SEQ ID NO: 5026849 - DNA, 25 bp, Homo sapien
cccatctcatcacccactctgatcc

SEQ ID NO: 5026850 - DNA, 25 bp, Homo sapien
ccttccacatttaggcactccgatt

SEQ ID NO: 5026851 - DNA, 25 bp, Homo sapien
cctgtaactttgtgcttcgacctca

SEQ ID NO: 5026852 - DNA, 25 bp, Homo sapien
tgccatgtcctgtaactttgtgctt

SEQ ID NO: 5026853 - DNA, 25 bp, Homo sapien
tgcttcgacctcagtgtgacagctg

SEQ ID NO: 5026854 - DNA, 25 bp, Homo sapien
tgtcccgcttcctggatgccatgtc

SEQ ID NO: 5026855 - DNA, 25 bp, Homo sapien
gaattatcttctgggagcaaggcag

SEQ ID NO: 5026856 - DNA, 25 bp, Homo sapien
tattaggaactaaggaattatcttc

SEQ ID NO: 5026857 - DNA, 25 bp, Homo sapien
aatcccacagcttcctacaacaggc

SEQ ID NO: 5026858 - DNA, 25 bp, Homo sapien
gcaaggcaggtcctggaatcccaca

SEQ ID NO: 5026859 - DNA, 25 bp, Homo sapien
gaatgactcttgaatgaacatccct

SEQ ID NO: 5026860 - DNA, 25 bp, Homo sapien
tgactcttgaatgaacatccctctt

SEQ ID NO: 5026861 - DNA, 25 bp, Homo sapien
aatgactcttgaatgaacatccctc

SEQ ID NO: 5026862 - DNA, 25 bp, Homo sapien
gactcttgaatgaacatccctcttt

SEQ ID NO: 5026863 - DNA, 25 bp, Homo sapien
actaatagcgaagaaggcaaggact

SEQ ID NO: 5026864 - DNA, 25 bp, Homo sapien
ctaatagcgaagaaggcaaggactg

SEQ ID NO: 5026865 - DNA, 25 bp, Homo sapien
ctgcacgtccagtagttccttctga

SEQ ID NO: 5026866 - DNA, 25 bp, Homo sapien
gacctgcacgtccagtagttccttc

SEQ ID NO: 5026867 - DNA, 25 bp, Homo sapien
ctgacctgcacgtccagtagttcct

SEQ ID NO: 5026868 - DNA, 25 bp, Homo sapien
cgtccagtagttccttctgatctcc

SEQ ID NO: 5026869 - DNA, 25 bp, Homo sapien
gagagctgtctagcatgtaagcact

SEQ ID NO: 5026870 - DNA, 25 bp, Homo sapien
ttgcaggctactcctccaagagagc

SEQ ID NO: 5026871 - DNA, 25 bp, Homo sapien
tccaagagagctgtctagcatgtaa

SEQ ID NO: 5026872 - DNA, 25 bp, Homo sapien
tatagtttttgcaggctactcctcc

SEQ ID NO: 5026873 - DNA, 25 bp, Homo sapien
gccaatggtgctgatttcatggtgt

SEQ ID NO: 5026874 - DNA, 25 bp, Homo sapien
catggtgtgtattcagacagtcaat

SEQ ID NO: 5026875 - DNA, 25 bp, Homo sapien
cattagggcctgtctttgctgcaaa

SEQ ID NO: 5026876 - DNA, 25 bp, Homo sapien
tgctgcaaacattaggatccaatca

SEQ ID NO: 5026877 - DNA, 25 bp, Homo sapien
cccttgggaaatttagttgcatgcc

SEQ ID NO: 5026878 - DNA, 25 bp, Homo sapien
ctgttcttgaagtatgcccttggga

SEQ ID NO: 5026879 - DNA, 25 bp, Homo sapien
tcactgaggtctaaacaagtgccct

SEQ ID NO: 5026880 - DNA, 25 bp, Homo sapien
cagggattggctttcaggactagca

SEQ ID NO: 5026881 - DNA, 25 bp, Homo sapien
tcttatttcctattctctcttccat

SEQ ID NO: 5026882 - DNA, 25 bp, Homo sapien
cgtacacaattccctttcttcttat

SEQ ID NO: 5026883 - DNA, 25 bp, Homo sapien
ttcttcttatttcctattctctctt

SEQ ID NO: 5026884 - DNA, 25 bp, Homo sapien
tactattaatttctaaccgtacaca

SEQ ID NO: 5026885 - DNA, 25 bp, Homo sapien
accatccatcaagtcagacctcagc

SEQ ID NO: 5026886 - DNA, 25 bp, Homo sapien
ccatcaagtcagacctcagcctctt

SEQ ID NO: 5026887 - DNA, 25 bp, Homo sapien
tccatcaagtcagacctcagcctct

SEQ ID NO: 5026888 - DNA, 25 bp, Homo sapien
catccatcaagtcagacctcagcct

SEQ ID NO: 5026889 - DNA, 25 bp, Homo sapien
tcttaaatccaggagcctaaaggcc

SEQ ID NO: 5026890 - DNA, 25 bp, Homo sapien
tcatctatctgctgtatcaaagcca

SEQ ID NO: 5026891 - DNA, 25 bp, Homo sapien
caagacctgaactcctaatgccatc

SEQ ID NO: 5026892 - DNA, 25 bp, Homo sapien
cagattataaagacctggtgttcca

SEQ ID NO: 5026893 - DNA, 25 bp, Homo sapien
cgagcaggaggctcattgttcctag

SEQ ID NO: 5026894 - DNA, 25 bp, Homo sapien
gctaccagacagcaacgagcaggag

SEQ ID NO: 5026895 - DNA, 25 bp, Homo sapien
cataaggctcacaaaatcgctgttc

SEQ ID NO: 5026896 - DNA, 25 bp, Homo sapien
cacttttgcagcgaggcatggagag

SEQ ID NO: 5026897 - DNA, 25 bp, Homo sapien
tgccagaaggatcaactcttgttcc

SEQ ID NO: 5026898 - DNA, 25 bp, Homo sapien
tatggtgtgcttgccagaaggatca

SEQ ID NO: 5026899 - DNA, 25 bp, Homo sapien
ctagcctaatgcagcacctccatca

SEQ ID NO: 5026900 - DNA, 25 bp, Homo sapien
gcatgctaaagacacatgtcaacat

SEQ ID NO: 5026901 - DNA, 25 bp, Homo sapien
caatctctatcacactcagtttcca

SEQ ID NO: 5026902 - DNA, 25 bp, Homo sapien
cacaatctctatcacactcagtttc

SEQ ID NO: 5026903 - DNA, 25 bp, Homo sapien
tcacaatctctatcacactcagttt

SEQ ID NO: 5026904 - DNA, 25 bp, Homo sapien
aatctctatcacactcagtttccag

SEQ ID NO: 5026905 - DNA, 25 bp, Homo sapien
cattcatggacagagtgaccttggg

SEQ ID NO: 5026906 - DNA, 25 bp, Homo sapien
caggctctggttgtaggctgttcac

SEQ ID NO: 5026907 - DNA, 25 bp, Homo sapien
ggctgttcacaactggcttcatcat

SEQ ID NO: 5026908 - DNA, 25 bp, Homo sapien
tgaccttgggcttaatacctctgtg

SEQ ID NO: 5026909 - DNA, 25 bp, Homo sapien
cttcactggagtcttgaagggggtc

SEQ ID NO: 5026910 - DNA, 25 bp, Homo sapien
agggggtcattgaacagaatccgtc

SEQ ID NO: 5026911 - DNA, 25 bp, Homo sapien
gaatccgtcttccctgcctgcattc

SEQ ID NO: 5026912 - DNA, 25 bp, Homo sapien
ctgccagatcctgaacttcactgga

SEQ ID NO: 5026913 - DNA, 25 bp, Homo sapien
taccgaactctagaatctaaatctc

SEQ ID NO: 5026914 - DNA, 25 bp, Homo sapien
atctgcaggcaaatgtgataccgaa

SEQ ID NO: 5026915 - DNA, 25 bp, Homo sapien
tgtgataccgaactctagaatctaa

SEQ ID NO: 5026916 - DNA, 25 bp, Homo sapien
gcaaatgtgataccgaactctagaa

SEQ ID NO: 5026917 - DNA, 25 bp, Homo sapien
gacagaagataaagtaatcagagta

SEQ ID NO: 5026918 - DNA, 25 bp, Homo sapien
cagaagataaagtaatcagagtata

SEQ ID NO: 5026919 - DNA, 25 bp, Homo sapien
ttattcatgcagtgacagaagataa

SEQ ID NO: 5026920 - DNA, 25 bp, Homo sapien
gtgacagaagataaagtaatcagag

SEQ ID NO: 5026921 - DNA, 25 bp, Homo sapien
tgtagcctaaaatcgctccaaaatg

SEQ ID NO: 5026922 - DNA, 25 bp, Homo sapien
cagaagatccaatgcagaggtatgt

SEQ ID NO: 5026923 - DNA, 25 bp, Homo sapien
tcagggtcctggattcagcatggac

SEQ ID NO: 5026924 - DNA, 25 bp, Homo sapien
tgatgagcaacagtatgtagcctaa

SEQ ID NO: 5026925 - DNA, 25 bp, Homo sapien
tattgttgtaaaccaggtggctctt

SEQ ID NO: 5026926 - DNA, 25 bp, Homo sapien
aatcaaaggactggtactgagaaca

SEQ ID NO: 5026927 - DNA, 25 bp, Homo sapien
tccctcatacactgtgctgccatgg

SEQ ID NO: 5026928 - DNA, 25 bp, Homo sapien
cctgcaaagtctgtaatggagcttc

SEQ ID NO: 5026929 - DNA, 25 bp, Homo sapien
gatagccatctatgcagagagctct

SEQ ID NO: 5026930 - DNA, 25 bp, Homo sapien
tgcttccctgcaagtgctctcctgg

SEQ ID NO: 5026931 - DNA, 25 bp, Homo sapien
ttccagggtctgtggcacgtgcagc

SEQ ID NO: 5026932 - DNA, 25 bp, Homo sapien
tgttccagcgagaagttcaaccagg

SEQ ID NO: 5026933 - DNA, 25 bp, Homo sapien
tcagtacaagactcttctttctgag

SEQ ID NO: 5026934 - DNA, 25 bp, Homo sapien
tacaagactcttctttctgagattt

SEQ ID NO: 5026935 - DNA, 25 bp, Homo sapien
cagtacaagactcttctttctgaga

SEQ ID NO: 5026936 - DNA, 25 bp, Homo sapien
ctttcagtacaagactcttctttct

SEQ ID NO: 5026937 - DNA, 25 bp, Homo sapien
cagttcctggctttacacagtacag

SEQ ID NO: 5026938 - DNA, 25 bp, Homo sapien
gtgatccattcatggctagcataac

SEQ ID NO: 5026939 - DNA, 25 bp, Homo sapien
cacagtacagtgatccattcatggc

SEQ ID NO: 5026940 - DNA, 25 bp, Homo sapien
gttcctggctttacacagtacagtg

SEQ ID NO: 5026941 - DNA, 25 bp, Homo sapien
ctcctcgatcttaagaaagaatttg

SEQ ID NO: 5026942 - DNA, 25 bp, Homo sapien
cctcgatcttaagaaagaatttgag

SEQ ID NO: 5026943 - DNA, 25 bp, Homo sapien
tcctcgatcttaagaaagaatttga

SEQ ID NO: 5026944 - DNA, 25 bp, Homo sapien
cacgagtgagtagcgcattgcctgc

SEQ ID NO: 5026945 - DNA, 25 bp, Homo sapien
gatgaagcactatataaggagaccc

SEQ ID NO: 5026946 - DNA, 25 bp, Homo sapien
gcagtttcatcgcacaacagtgtga

SEQ ID NO: 5026947 - DNA, 25 bp, Homo sapien
gaaacctgttaagatctgactggca

SEQ ID NO: 5026948 - DNA, 25 bp, Homo sapien
gaacagatactgggcagagcagcac

SEQ ID NO: 5026949 - DNA, 25 bp, Homo sapien
cacactgagccaagtcacgggctgt

SEQ ID NO: 5026950 - DNA, 25 bp, Homo sapien
gacggattctctcagcacacactga

SEQ ID NO: 5026951 - DNA, 25 bp, Homo sapien
cctaaaaatctaccggatctcttgt

SEQ ID NO: 5026952 - DNA, 25 bp, Homo sapien
tccttcgcctttggtgttctcttcc

SEQ ID NO: 5026953 - DNA, 25 bp, Homo sapien
tattggttagctctgtctgtagcta

SEQ ID NO: 5026954 - DNA, 25 bp, Homo sapien
tctgtctgtagctaggaagacgctg

SEQ ID NO: 5026955 - DNA, 25 bp, Homo sapien
tagctaggaagacgctgtgttgctc

SEQ ID NO: 5026956 - DNA, 25 bp, Homo sapien
caaataatatgcacactgctcttgg

SEQ ID NO: 5026957 - DNA, 25 bp, Homo sapien
caagctttaaatacacgaactcgca

SEQ ID NO: 5026958 - DNA, 25 bp, Homo sapien
tacatccacaattctcgcagttggg

SEQ ID NO: 5026959 - DNA, 25 bp, Homo sapien
ggaccaatggcaagttacatgcccc

SEQ ID NO: 5026960 - DNA, 25 bp, Homo sapien
catccttctgcgtatggattctcaa

SEQ ID NO: 5026961 - DNA, 25 bp, Homo sapien
gagcctgcaacatcagttccataat

SEQ ID NO: 5026962 - DNA, 25 bp, Homo sapien
aatgttaaacctcacgagcctgcaa

SEQ ID NO: 5026963 - DNA, 25 bp, Homo sapien
tatcagagatgtgtccaagtccaca

SEQ ID NO: 5026964 - DNA, 25 bp, Homo sapien
tcaaggaactgatcgcaaaagaatc

SEQ ID NO: 5026965 - DNA, 25 bp, Homo sapien
taaatttgcaattctacattacggc

SEQ ID NO: 5026966 - DNA, 25 bp, Homo sapien
aagtggagccccaaggtggtgtcaa

SEQ ID NO: 5026967 - DNA, 25 bp, Homo sapien
ggaacagattggcatcaactagaga

SEQ ID NO: 5026968 - DNA, 25 bp, Homo sapien
ggcgtggaccttataccaatcatat

SEQ ID NO: 5026969 - DNA, 25 bp, Homo sapien
tataccaatcatatcccgactctga

SEQ ID NO: 5026970 - DNA, 25 bp, Homo sapien
tggtggattggcgtggaccttatac

SEQ ID NO: 5026971 - DNA, 25 bp, Homo sapien
catatcccgactctgaaataattat

SEQ ID NO: 5026972 - DNA, 25 bp, Homo sapien
cctggtggagaaatttcacgtagcg

SEQ ID NO: 5026973 - DNA, 25 bp, Homo sapien
cacgtagcggttcttgggatatcca

SEQ ID NO: 5026974 - DNA, 25 bp, Homo sapien
ggatatccaggtcttatgtttctga

SEQ ID NO: 5026975 - DNA, 25 bp, Homo sapien
gaagcaaactggtaatggcaacaca

SEQ ID NO: 5026976 - DNA, 25 bp, Homo sapien
tttccttctcttctacaagccccat

SEQ ID NO: 5026977 - DNA, 25 bp, Homo sapien
gataaactagtgataaactctaggc

SEQ ID NO: 5026978 - DNA, 25 bp, Homo sapien
gttttatcactagataaactagtga

SEQ ID NO: 5026979 - DNA, 25 bp, Homo sapien
aactctaggcctagagtttccttct

SEQ ID NO: 5026980 - DNA, 25 bp, Homo sapien
aatcaagatgtaaaaagggataaag

SEQ ID NO: 5026981 - DNA, 25 bp, Homo sapien
tttgtcaaagcagatcactgaaatc

SEQ ID NO: 5026982 - DNA, 25 bp, Homo sapien
ctccattcttccactagtcgccatg

SEQ ID NO: 5026983 - DNA, 25 bp, Homo sapien
atttttgcatggtttgtcaaagcag

SEQ ID NO: 5026984 - DNA, 25 bp, Homo sapien
tcctggattcagcaatggttggaca

SEQ ID NO: 5026985 - DNA, 25 bp, Homo sapien
tccacatgtgcgattatttctgcta

SEQ ID NO: 5026986 - DNA, 25 bp, Homo sapien
ttctgctacaagttccccattcgct

SEQ ID NO: 5026987 - DNA, 25 bp, Homo sapien
acaatttgccgtgttctggtttcca

SEQ ID NO: 5026988 - DNA, 25 bp, Homo sapien
tcatcaaagcaacggcctctatgca

SEQ ID NO: 5026989 - DNA, 25 bp, Homo sapien
atgcaaataaaagcctactttgcac

SEQ ID NO: 5026990 - DNA, 25 bp, Homo sapien
gcctactttgcacttggtacaaaag

SEQ ID NO: 5026991 - DNA, 25 bp, Homo sapien
tacaaaagtctttgctaaagcaaga

SEQ ID NO: 5026992 - DNA, 25 bp, Homo sapien
cctctcctaagttgcatatccagca

SEQ ID NO: 5026993 - DNA, 25 bp, Homo sapien
gcaatacaggatagacaaaaccaaa

SEQ ID NO: 5026994 - DNA, 25 bp, Homo sapien
taagttgcatatccagcaatacagg

SEQ ID NO: 5026995 - DNA, 25 bp, Homo sapien
aacttagctcctctcctaagttgca

SEQ ID NO: 5026996 - DNA, 25 bp, Homo sapien
gggctcggtgtccatagtacccgga

SEQ ID NO: 5026997 - DNA, 25 bp, Homo sapien
atctgttcatatctggggctcggtg

SEQ ID NO: 5026998 - DNA, 25 bp, Homo sapien
ggtgtccatagtacccggatgggca

SEQ ID NO: 5026999 - DNA, 25 bp, Homo sapien
catagtacccggatgggcaggaatg

SEQ ID NO: 5027000 - DNA, 25 bp, Homo sapien
acttctgttgacatcggctacaccc

SEQ ID NO: 5027001 - DNA, 25 bp, Homo sapien
ccttctcttcgaaggaagaagaaca

SEQ ID NO: 5027002 - DNA, 25 bp, Homo sapien
caaatgggatttgatacataactag

SEQ ID NO: 5027003 - DNA, 25 bp, Homo sapien
tttgaacaagacaaacaacccttgc

SEQ ID NO: 5027004 - DNA, 25 bp, Homo sapien
taattcaggcctttatcacttctca

SEQ ID NO: 5027005 - DNA, 25 bp, Homo sapien
ataattcaggcctttatcacttctc

SEQ ID NO: 5027006 - DNA, 25 bp, Homo sapien
ctccaatcttcaatcatgatgctgc

SEQ ID NO: 5027007 - DNA, 25 bp, Homo sapien
tctccaatcttcaatcatgatgctg

SEQ ID NO: 5027008 - DNA, 25 bp, Homo sapien
tcttcaatcatgatgctgctcagtg

SEQ ID NO: 5027009 - DNA, 25 bp, Homo sapien
ctttctccaatcttcaatcatgatg

SEQ ID NO: 5027010 - DNA, 25 bp, Homo sapien
gaatgcctatagtaatgacacatgg

SEQ ID NO: 5027011 - DNA, 25 bp, Homo sapien
gaaggctcagtctacagaatcttgc

SEQ ID NO: 5027012 - DNA, 25 bp, Homo sapien
tgagaccacatcaagtaaaaccagg

SEQ ID NO: 5027013 - DNA, 25 bp, Homo sapien
ggccacagatgagtactttcctaca

SEQ ID NO: 5027014 - DNA, 25 bp, Homo sapien
ggagtcctgaaatagaacttgagca

SEQ ID NO: 5027015 - DNA, 25 bp, Homo sapien
tatcgacaggagttattacagcttg

SEQ ID NO: 5027016 - DNA, 25 bp, Homo sapien
caacatttatcacagcattcccaag

SEQ ID NO: 5027017 - DNA, 25 bp, Homo sapien
ccttagtggatgagaagagggtatc

SEQ ID NO: 5027018 - DNA, 25 bp, Homo sapien
gcagtgatgcactccatattcccat

SEQ ID NO: 5027019 - DNA, 25 bp, Homo sapien
cacagttagcagtgatgcactccat

SEQ ID NO: 5027020 - DNA, 25 bp, Homo sapien
ggaaaaggcacccacagttagcagt

SEQ ID NO: 5027021 - DNA, 25 bp, Homo sapien
tcctcacatggcttgcaggagagct

SEQ ID NO: 5027022 - DNA, 25 bp, Homo sapien
tcaaaagaacctctacaagccagaa

SEQ ID NO: 5027023 - DNA, 25 bp, Homo sapien
aattgtaaagaccattgaggctagg

SEQ ID NO: 5027024 - DNA, 25 bp, Homo sapien
gacagtgggggccaatattcaacat

SEQ ID NO: 5027025 - DNA, 25 bp, Homo sapien
aacagcagatctctcaaaagaacct

SEQ ID NO: 5027026 - DNA, 25 bp, Homo sapien
caaagggccaaagtatgagagaagc

SEQ ID NO: 5027027 - DNA, 25 bp, Homo sapien
gcatcgaaataaataggtccctcta

SEQ ID NO: 5027028 - DNA, 25 bp, Homo sapien
caaagtggctgtagaagctggaatc

SEQ ID NO: 5027029 - DNA, 25 bp, Homo sapien
ccggccgatgccagagaatttttca

SEQ ID NO: 5027030 - DNA, 25 bp, Homo sapien
gctggaaagctacaacagctatttc

SEQ ID NO: 5027031 - DNA, 25 bp, Homo sapien
gatgcctcaagtcagatcaatgcca

SEQ ID NO: 5027032 - DNA, 25 bp, Homo sapien
caggagcccacttggccagaattga

SEQ ID NO: 5027033 - DNA, 25 bp, Homo sapien
gaaacaaagatctagcaggagccca

SEQ ID NO: 5027034 - DNA, 25 bp, Homo sapien
tatccatattggcagtaattgggag

SEQ ID NO: 5027035 - DNA, 25 bp, Homo sapien
gcagtaattgggagatctgagtgta

SEQ ID NO: 5027036 - DNA, 25 bp, Homo sapien
gatctgagtgtaggataatctgaag

SEQ ID NO: 5027037 - DNA, 25 bp, Homo sapien
agtaattgggagatctgagtgtagg

SEQ ID NO: 5027038 - DNA, 25 bp, Homo sapien
tctggaggcgaggactccccagaaa

SEQ ID NO: 5027039 - DNA, 25 bp, Homo sapien
aaaccagcgcgggaattgctgctta

SEQ ID NO: 5027040 - DNA, 25 bp, Homo sapien
ctccccagaaaaccagcgcgggaat

SEQ ID NO: 5027041 - DNA, 25 bp, Homo sapien
cccagaaaaccagcgcgggaattgc

SEQ ID NO: 5027042 - DNA, 25 bp, Homo sapien
cagtggctgtaatccatgcagttca

SEQ ID NO: 5027043 - DNA, 25 bp, Homo sapien
gcgtctccatcggttgccttggcag

SEQ ID NO: 5027044 - DNA, 25 bp, Homo sapien
tcgcttactgcgtctccatcggttg

SEQ ID NO: 5027045 - DNA, 25 bp, Homo sapien
caaaggagaaaaggcgaaactgcat

SEQ ID NO: 5027046 - DNA, 25 bp, Homo sapien
gacgcctctcaaagtctaggaactg

SEQ ID NO: 5027047 - DNA, 25 bp, Homo sapien
ggtcagttcagcgcgatcagcatct

SEQ ID NO: 5027048 - DNA, 25 bp, Homo sapien
gaactggagggttcgcccaaagagc

SEQ ID NO: 5027049 - DNA, 25 bp, Homo sapien
aggactcagagggagactcgccact

SEQ ID NO: 5027050 - DNA, 25 bp, Homo sapien
catttggagtccacggcggtgtacc

SEQ ID NO: 5027051 - DNA, 25 bp, Homo sapien
gcgcagggctaaaagaacgctctta

SEQ ID NO: 5027052 - DNA, 25 bp, Homo sapien
cagtgaattagcaacctctgccgag

SEQ ID NO: 5027053 - DNA, 25 bp, Homo sapien
ggcttaatccagagcgggcagctgc

SEQ ID NO: 5027054 - DNA, 25 bp, Homo sapien
tgtagaaggcagaacgctctcggga

SEQ ID NO: 5027055 - DNA, 25 bp, Homo sapien
taaccaattgtgtcgcttcctgcgc

SEQ ID NO: 5027056 - DNA, 25 bp, Homo sapien
tccgaagggatgtggcaagcgcact

SEQ ID NO: 5027057 - DNA, 25 bp, Homo sapien
tttccgatggagatgcagaccggct

SEQ ID NO: 5027058 - DNA, 25 bp, Homo sapien
ctgcctcggagttcctgggtcctaa

SEQ ID NO: 5027059 - DNA, 25 bp, Homo sapien
tcggagttcctgggtcctaaagcca

SEQ ID NO: 5027060 - DNA, 25 bp, Homo sapien
tgcctcggagttcctgggtcctaaa

SEQ ID NO: 5027061 - DNA, 25 bp, Homo sapien
cattgtgaaatattagtaaatctaa

SEQ ID NO: 5027062 - DNA, 25 bp, Homo sapien
acttggcctgttctttgctgcatca

SEQ ID NO: 5027063 - DNA, 25 bp, Homo sapien
taaatctaatataacagattgtgtc

SEQ ID NO: 5027064 - DNA, 25 bp, Homo sapien
tctaatataacagattgtgtcatcc

SEQ ID NO: 5027065 - DNA, 25 bp, Homo sapien
ttctgaggggttatgcctaagcagc

SEQ ID NO: 5027066 - DNA, 25 bp, Homo sapien
tgaggggttatgcctaagcagcttg

SEQ ID NO: 5027067 - DNA, 25 bp, Homo sapien
ctgaggggttatgcctaagcagctt

SEQ ID NO: 5027068 - DNA, 25 bp, Homo sapien
tctgaggggttatgcctaagcagct

SEQ ID NO: 5027069 - DNA, 25 bp, Homo sapien
ggctcatagccgagtgctccgatgt

SEQ ID NO: 5027070 - DNA, 25 bp, Homo sapien
aatccaccttctcggtgtgcgcgcg

SEQ ID NO: 5027071 - DNA, 25 bp, Homo sapien
gacgattcgcccataggcctcattg

SEQ ID NO: 5027072 - DNA, 25 bp, Homo sapien
gagtgctccgatgtaccacaaatcc

SEQ ID NO: 5027073 - DNA, 25 bp, Homo sapien
ttatctggcttcatgtctgggagtc

SEQ ID NO: 5027074 - DNA, 25 bp, Homo sapien
tatctggcttcatgtctgggagtca

SEQ ID NO: 5027075 - DNA, 25 bp, Homo sapien
tagaatccagtagatttttctcagg

SEQ ID NO: 5027076 - DNA, 25 bp, Homo sapien
ggctctttcgcagctcctggtacag

SEQ ID NO: 5027077 - DNA, 25 bp, Homo sapien
tggcgggggcgtactctagaatcca

SEQ ID NO: 5027078 - DNA, 25 bp, Homo sapien
tgttggcttcttgtcaaaggtgcgg

SEQ ID NO: 5027079 - DNA, 25 bp, Homo sapien
tttccatctgcctgcgcatctggtg

SEQ ID NO: 5027080 - DNA, 25 bp, Homo sapien
atctgcctgcgcatctggtgctccc

SEQ ID NO: 5027081 - DNA, 25 bp, Homo sapien
ttccatctgcctgcgcatctggtgc

SEQ ID NO: 5027082 - DNA, 25 bp, Homo sapien
catctgcctgcgcatctggtgctcc

SEQ ID NO: 5027083 - DNA, 25 bp, Homo sapien
gttctctaccacctcatggccaggg

SEQ ID NO: 5027084 - DNA, 25 bp, Homo sapien
ttgccatagggccagggataactgt

SEQ ID NO: 5027085 - DNA, 25 bp, Homo sapien
tcaaggtcgtcgaccaggaagggcc

SEQ ID NO: 5027086 - DNA, 25 bp, Homo sapien
agatgctgcgcttcccacaactgtt

SEQ ID NO: 5027087 - DNA, 25 bp, Homo sapien
ttatatttttcaggcgaataggatc

SEQ ID NO: 5027088 - DNA, 25 bp, Homo sapien
ggcgaataggatcaagcagcaaaaa

SEQ ID NO: 5027089 - DNA, 25 bp, Homo sapien
gcagaacctcctccctgaatcttct

SEQ ID NO: 5027090 - DNA, 25 bp, Homo sapien
aaataagtgcactcaggtttctctg

SEQ ID NO: 5027091 - DNA, 25 bp, Homo sapien
gtggagagaagctacagggacacca

SEQ ID NO: 5027092 - DNA, 25 bp, Homo sapien
gctgccagcgtggagagaagctaca

SEQ ID NO: 5027093 - DNA, 25 bp, Homo sapien
agagaagctacagggacaccaggaa

SEQ ID NO: 5027094 - DNA, 25 bp, Homo sapien
agctgccagcgtggagagaagctac

SEQ ID NO: 5027095 - DNA, 25 bp, Homo sapien
actcgaggtcacatcatgccatttg

SEQ ID NO: 5027096 - DNA, 25 bp, Homo sapien
atttgccattgcctgacctgctcat

SEQ ID NO: 5027097 - DNA, 25 bp, Homo sapien
ttgactcgaggtcacatcatgccat

SEQ ID NO: 5027098 - DNA, 25 bp, Homo sapien
tttgatgcctccgatgttgactcga

SEQ ID NO: 5027099 - DNA, 25 bp, Homo sapien
atggctcgatcttgggcccactgca

SEQ ID NO: 5027100 - DNA, 25 bp, Homo sapien
cagatggctcgatcttgggcccact

SEQ ID NO: 5027101 - DNA, 25 bp, Homo sapien
gaactgttagcaggcacattgtggg

SEQ ID NO: 5027102 - DNA, 25 bp, Homo sapien
gggcccactgcaactgaactgttag

SEQ ID NO: 5027103 - DNA, 25 bp, Homo sapien
tgtgcaaaaacatctgataagattt

SEQ ID NO: 5027104 - DNA, 25 bp, Homo sapien
gtgcaaaaacatctgataagatttt

SEQ ID NO: 5027105 - DNA, 25 bp, Homo sapien
ttatgacccagacacaacaacttca

SEQ ID NO: 5027106 - DNA, 25 bp, Homo sapien
ttggctgtttgggaagctcagcagc

SEQ ID NO: 5027107 - DNA, 25 bp, Homo sapien
caaaaatgattcaaggcatctaagc

SEQ ID NO: 5027108 - DNA, 25 bp, Homo sapien
tatggaaatttcaggagatggtatc

SEQ ID NO: 5027109 - DNA, 25 bp, Homo sapien
ctgattaaaggctacaggatcaaag

SEQ ID NO: 5027110 - DNA, 25 bp, Homo sapien
ttaaaggctacaggatcaaagagca

SEQ ID NO: 5027111 - DNA, 25 bp, Homo sapien
attaaaggctacaggatcaaagagc

SEQ ID NO: 5027112 - DNA, 25 bp, Homo sapien
gattaaaggctacaggatcaaagag

SEQ ID NO: 5027113 - DNA, 25 bp, Homo sapien
tattcttctgaatttcgtatcctta

SEQ ID NO: 5027114 - DNA, 25 bp, Homo sapien
aaagtgttgtgcaggtattatttga

SEQ ID NO: 5027115 - DNA, 25 bp, Homo sapien
tgattgtgttccaaaagtttattct

SEQ ID NO: 5027116 - DNA, 25 bp, Homo sapien
tcgtatccttattttccaccaccaa

SEQ ID NO: 5027117 - DNA, 25 bp, Homo sapien
catataaatgatcatagatggatgt

SEQ ID NO: 5027118 - DNA, 25 bp, Homo sapien
tcatataaatgatcatagatggatg

SEQ ID NO: 5027119 - DNA, 25 bp, Homo sapien
ataaatgatcatagatggatgttat

SEQ ID NO: 5027120 - DNA, 25 bp, Homo sapien
tataaatgatcatagatggatgtta

SEQ ID NO: 5027121 - DNA, 25 bp, Homo sapien
tgcatataagccatgcctctggtcc

SEQ ID NO: 5027122 - DNA, 25 bp, Homo sapien
gcattgttctcccaatctcatcaga

SEQ ID NO: 5027123 - DNA, 25 bp, Homo sapien
tgccttctagcatcaatcaatttgg

SEQ ID NO: 5027124 - DNA, 25 bp, Homo sapien
gaattgtgcctacatttccaagctg

SEQ ID NO: 5027125 - DNA, 25 bp, Homo sapien
catttcactccagcagatagtttgc

SEQ ID NO: 5027126 - DNA, 25 bp, Homo sapien
gatagtttgcccctgaccttgacta

SEQ ID NO: 5027127 - DNA, 25 bp, Homo sapien
ttacggctgaatttttactactggc

SEQ ID NO: 5027128 - DNA, 25 bp, Homo sapien
tcttactgctggtctttacggctga

SEQ ID NO: 5027129 - DNA, 25 bp, Homo sapien
tcttcaaggtacatgagggtatttg

SEQ ID NO: 5027130 - DNA, 25 bp, Homo sapien
gggtatttgaggatatctgtaccgc

SEQ ID NO: 5027131 - DNA, 25 bp, Homo sapien
gtaccgctatgctttgttcacaaag

SEQ ID NO: 5027132 - DNA, 25 bp, Homo sapien
tgctcctgtgttagtggcacgggaa

SEQ ID NO: 5027133 - DNA, 25 bp, Homo sapien
tagagaagggctatgatgtttctgg

SEQ ID NO: 5027134 - DNA, 25 bp, Homo sapien
tgtctgtcccagacgtaaactgtga

SEQ ID NO: 5027135 - DNA, 25 bp, Homo sapien
ggtacttaatcccaaatagccaggc

SEQ ID NO: 5027136 - DNA, 25 bp, Homo sapien
taagtctaagtgttttcacatacag

SEQ ID NO: 5027137 - DNA, 25 bp, Homo sapien
ttatgccattctgaacattcattga

SEQ ID NO: 5027138 - DNA, 25 bp, Homo sapien
catggtcccattcccagtcgagaga

SEQ ID NO: 5027139 - DNA, 25 bp, Homo sapien
tgacagtctaggacaggcattgacc

SEQ ID NO: 5027140 - DNA, 25 bp, Homo sapien
gacccttgaacacatcacagtttga

SEQ ID NO: 5027141 - DNA, 25 bp, Homo sapien
ttgagggcctaataagagccagaca

SEQ ID NO: 5027142 - DNA, 25 bp, Homo sapien
cacatggcacatcaataccagttaa

SEQ ID NO: 5027143 - DNA, 25 bp, Homo sapien
taggtacatggttaaaccacatggc

SEQ ID NO: 5027144 - DNA, 25 bp, Homo sapien
caaaatatagcgatgaggaacagat

SEQ ID NO: 5027145 - DNA, 25 bp, Homo sapien
taccagttaaaccacgtggcacatc

SEQ ID NO: 5027146 - DNA, 25 bp, Homo sapien
caaaatgtaagtcaccctttatata

SEQ ID NO: 5027147 - DNA, 25 bp, Homo sapien
agaagccagaatcttgagttgccca

SEQ ID NO: 5027148 - DNA, 25 bp, Homo sapien
gaatcttgagttgcccagttaggag

SEQ ID NO: 5027149 - DNA, 25 bp, Homo sapien
cagaatcttgagttgcccagttagg

SEQ ID NO: 5027150 - DNA, 25 bp, Homo sapien
agccagaatcttgagttgcccagtt

SEQ ID NO: 5027151 - DNA, 25 bp, Homo sapien
tgcaattactagatgtcagatgtcc

SEQ ID NO: 5027152 - DNA, 25 bp, Homo sapien
tattatctggtatagcttttggcca

SEQ ID NO: 5027153 - DNA, 25 bp, Homo sapien
gggtctctgcatatcccacaactgc

SEQ ID NO: 5027154 - DNA, 25 bp, Homo sapien
taaaggattattctgcggacacaaa

SEQ ID NO: 5027155 - DNA, 25 bp, Homo sapien
tgtaagttatcatctgccagtatca

SEQ ID NO: 5027156 - DNA, 25 bp, Homo sapien
caaaatcagctacaactcatcaata

SEQ ID NO: 5027157 - DNA, 25 bp, Homo sapien
gttgctaaaccccagacagaataga

SEQ ID NO: 5027158 - DNA, 25 bp, Homo sapien
catttcgaacacttgaaagagggct

SEQ ID NO: 5027159 - DNA, 25 bp, Homo sapien
agactgcattgttacccataaccac

SEQ ID NO: 5027160 - DNA, 25 bp, Homo sapien
catctggcttctaaaggaaaggctt

SEQ ID NO: 5027161 - DNA, 25 bp, Homo sapien
gactgcattgttacccataaccaca

SEQ ID NO: 5027162 - DNA, 25 bp, Homo sapien
aaaagcatgacatacctttgcgcat

SEQ ID NO: 5027163 - DNA, 25 bp, Homo sapien
gaaacacagggaaattgatcctata

SEQ ID NO: 5027164 - DNA, 25 bp, Homo sapien
tgacatacctttgcgcatattttaa

SEQ ID NO: 5027165 - DNA, 25 bp, Homo sapien
tgatcctataatgttaatgactgag

SEQ ID NO: 5027166 - DNA, 25 bp, Homo sapien
gtatgtagcatagctaacataatac

SEQ ID NO: 5027167 - DNA, 25 bp, Homo sapien
gtagcatagctaacataatactcac

SEQ ID NO: 5027168 - DNA, 25 bp, Homo sapien
gatagtatgtagcatagctaacata

SEQ ID NO: 5027169 - DNA, 25 bp, Homo sapien
taagaattcccaaaagtataatcag

SEQ ID NO: 5027170 - DNA, 25 bp, Homo sapien
atcaatcttggcatccagtcttgca

SEQ ID NO: 5027171 - DNA, 25 bp, Homo sapien
taatttagaatcaatcttggcatcc

SEQ ID NO: 5027172 - DNA, 25 bp, Homo sapien
tagaatcaatcttggcatccagtct

SEQ ID NO: 5027173 - DNA, 25 bp, Homo sapien
atttagaatcaatcttggcatccag

SEQ ID NO: 5027174 - DNA, 25 bp, Homo sapien
aactgacgggcattgtgtatatttg

SEQ ID NO: 5027175 - DNA, 25 bp, Homo sapien
gcactccctggagctatatactata

SEQ ID NO: 5027176 - DNA, 25 bp, Homo sapien
tatttgtgctataaactgtgggggc

SEQ ID NO: 5027177 - DNA, 25 bp, Homo sapien
aaataaaactgacgggcattgtgta

SEQ ID NO: 5027178 - DNA, 25 bp, Homo sapien
aagagggccattgcagagcttaatt

SEQ ID NO: 5027179 - DNA, 25 bp, Homo sapien
aaacacaccagtcttagtaaatagg

SEQ ID NO: 5027180 - DNA, 25 bp, Homo sapien
tccaattttatgatcaggttgaaga

SEQ ID NO: 5027181 - DNA, 25 bp, Homo sapien
tgatatcaaccaatctgcattttgt

SEQ ID NO: 5027182 - DNA, 25 bp, Homo sapien
tacatgtaaccaaagtgcacgcacc

SEQ ID NO: 5027183 - DNA, 25 bp, Homo sapien
tatcgacactgtatacgctacccgc

SEQ ID NO: 5027184 - DNA, 25 bp, Homo sapien
gcagcatgactcctcatacacagga

SEQ ID NO: 5027185 - DNA, 25 bp, Homo sapien
aaactgttctggctagcatgatgac

SEQ ID NO: 5027186 - DNA, 25 bp, Homo sapien
tctgttgccagcctttacagagttt

SEQ ID NO: 5027187 - DNA, 25 bp, Homo sapien
ttaaacatcgcttgatcttgggagg

SEQ ID NO: 5027188 - DNA, 25 bp, Homo sapien
gggtcttgacttaaacatcgcttga

SEQ ID NO: 5027189 - DNA, 25 bp, Homo sapien
gatgctactggcaaaacatcctctg

SEQ ID NO: 5027190 - DNA, 25 bp, Homo sapien
aattgatggcatctcagtttatcta

SEQ ID NO: 5027191 - DNA, 25 bp, Homo sapien
tgaaataaggcccaaggaatactag

SEQ ID NO: 5027192 - DNA, 25 bp, Homo sapien
atcactctgactgaattaaagaatg

SEQ ID NO: 5027193 - DNA, 25 bp, Homo sapien
tatctaagctgctgattatcactct

SEQ ID NO: 5027194 - DNA, 25 bp, Homo sapien
cctctggcttaaagaacaagtactt

SEQ ID NO: 5027195 - DNA, 25 bp, Homo sapien
taaaggttaggctcagtcatatagt

SEQ ID NO: 5027196 - DNA, 25 bp, Homo sapien
cggattacaaattcttggagtccaa

SEQ ID NO: 5027197 - DNA, 25 bp, Homo sapien
tttacagcaatgattccccaaggct

SEQ ID NO: 5027198 - DNA, 25 bp, Homo sapien
accaagaagaagtcattcacaagca

SEQ ID NO: 5027199 - DNA, 25 bp, Homo sapien
ccaagaagaagtcattcacaagcac

SEQ ID NO: 5027200 - DNA, 25 bp, Homo sapien
gtaattgggtctttatatgtgtaag

SEQ ID NO: 5027201 - DNA, 25 bp, Homo sapien
tgtaattgggtctttatatgtgtaa

SEQ ID NO: 5027202 - DNA, 25 bp, Homo sapien
taattgggtctttatatgtgtaaga

SEQ ID NO: 5027203 - DNA, 25 bp, Homo sapien
ctgtaattgggtctttatatgtgta

SEQ ID NO: 5027204 - DNA, 25 bp, Homo sapien
aactagatcttttagaacctgccga

SEQ ID NO: 5027205 - DNA, 25 bp, Homo sapien
taactagatcttttagaacctgccg

SEQ ID NO: 5027206 - DNA, 25 bp, Homo sapien
actagatcttttagaacctgccgac

SEQ ID NO: 5027207 - DNA, 25 bp, Homo sapien
aaacctccgcttcccagattcaaga

SEQ ID NO: 5027208 - DNA, 25 bp, Homo sapien
cgcttcccagattcaagagattctc

SEQ ID NO: 5027209 - DNA, 25 bp, Homo sapien
gtggcaccatctcagttcactgaaa

SEQ ID NO: 5027210 - DNA, 25 bp, Homo sapien
accatctcagttcactgaaacctcc

SEQ ID NO: 5027211 - DNA, 25 bp, Homo sapien
tgaacttggaaatgcatctgctaca

SEQ ID NO: 5027212 - DNA, 25 bp, Homo sapien
tcctatttagcaatgaaggtctccc

SEQ ID NO: 5027213 - DNA, 25 bp, Homo sapien
taaacaagtttacttcactggacag

SEQ ID NO: 5027214 - DNA, 25 bp, Homo sapien
caactgttctcgctgaaaggttaat

SEQ ID NO: 5027215 - DNA, 25 bp, Homo sapien
catggtccatagtttgcagatcctt

SEQ ID NO: 5027216 - DNA, 25 bp, Homo sapien
ggtccatagtttgcagatccttggt

SEQ ID NO: 5027217 - DNA, 25 bp, Homo sapien
gcagatccttggtatacagtatcac

SEQ ID NO: 5027218 - DNA, 25 bp, Homo sapien
cccatggtccatagtttgcagatcc

SEQ ID NO: 5027219 - DNA, 25 bp, Homo sapien
gttttacttccctggcttatctctc

SEQ ID NO: 5027220 - DNA, 25 bp, Homo sapien
ttacttccctggcttatctctcttc

SEQ ID NO: 5027221 - DNA, 25 bp, Homo sapien
tacttccctggcttatctctcttct

SEQ ID NO: 5027222 - DNA, 25 bp, Homo sapien
ttgttttacttccctggcttatctc

SEQ ID NO: 5027223 - DNA, 25 bp, Homo sapien
gacactaagtagacctccagatgag

SEQ ID NO: 5027224 - DNA, 25 bp, Homo sapien
ggtaaactatctgcacgacaaagag

SEQ ID NO: 5027225 - DNA, 25 bp, Homo sapien
caaattctggacatcacatagtgga

SEQ ID NO: 5027226 - DNA, 25 bp, Homo sapien
cgaaggaagtaaatctgagctggac

SEQ ID NO: 5027227 - DNA, 25 bp, Homo sapien
cactgtcacggctgtccttaaggaa

SEQ ID NO: 5027228 - DNA, 25 bp, Homo sapien
gctattcagacattcagacttggga

SEQ ID NO: 5027229 - DNA, 25 bp, Homo sapien
tatgtccttgaatcacgtagcccaa

SEQ ID NO: 5027230 - DNA, 25 bp, Homo sapien
gaaaatagttccacaggcatgatgg

SEQ ID NO: 5027231 - DNA, 25 bp, Homo sapien
ggcctacattcaataattcttaaca

SEQ ID NO: 5027232 - DNA, 25 bp, Homo sapien
gcgcccggcctacattcaataattc

SEQ ID NO: 5027233 - DNA, 25 bp, Homo sapien
acattcaataattcttaacagtgta

SEQ ID NO: 5027234 - DNA, 25 bp, Homo sapien
cccggcctacattcaataattctta

SEQ ID NO: 5027235 - DNA, 25 bp, Homo sapien
caataatattatcgcgacctttggg

SEQ ID NO: 5027236 - DNA, 25 bp, Homo sapien
ggtcaataatattatcgcgaccttt

SEQ ID NO: 5027237 - DNA, 25 bp, Homo sapien
tcaataatattatcgcgacctttgg

SEQ ID NO: 5027238 - DNA, 25 bp, Homo sapien
ataatattatcgcgacctttggggt

SEQ ID NO: 5027239 - DNA, 25 bp, Homo sapien
taggtggcactaacagcatagtgtc

SEQ ID NO: 5027240 - DNA, 25 bp, Homo sapien
tcaataatgtctactgaagacgctc

SEQ ID NO: 5027241 - DNA, 25 bp, Homo sapien
tctctaagagccaaaagaagtctga

SEQ ID NO: 5027242 - DNA, 25 bp, Homo sapien
ggagattcaaactagtcaagccact

SEQ ID NO: 5027243 - DNA, 25 bp, Homo sapien
tattatctatggtctcttttaaccg

SEQ ID NO: 5027244 - DNA, 25 bp, Homo sapien
ggctgcatcccaattctgcattaag

SEQ ID NO: 5027245 - DNA, 25 bp, Homo sapien
tccccagagtgaacttaaagcattt

SEQ ID NO: 5027246 - DNA, 25 bp, Homo sapien
taaccgtgtaaggtcttccatggct

SEQ ID NO: 5027247 - DNA, 25 bp, Homo sapien
taagtgacataagacatacagggat

SEQ ID NO: 5027248 - DNA, 25 bp, Homo sapien
tcatcgcagagataggtatacagat

SEQ ID NO: 5027249 - DNA, 25 bp, Homo sapien
gatagaacccacctcagttgtatag

SEQ ID NO: 5027250 - DNA, 25 bp, Homo sapien
taaataacatttggcacactaagag

SEQ ID NO: 5027251 - DNA, 25 bp, Homo sapien
gaaagcaggtcaatggatgcccagg

SEQ ID NO: 5027252 - DNA, 25 bp, Homo sapien
tattatggagccagatcaaaggcca

SEQ ID NO: 5027253 - DNA, 25 bp, Homo sapien
gaccatgggtggagtatggccacaa

SEQ ID NO: 5027254 - DNA, 25 bp, Homo sapien
tcttgacttaatgtagccacacaag

SEQ ID NO: 5027255 - DNA, 25 bp, Homo sapien
gccaacaggaagcaacaaactctcg

SEQ ID NO: 5027256 - DNA, 25 bp, Homo sapien
cactgttagcctgccaatatgccaa

SEQ ID NO: 5027257 - DNA, 25 bp, Homo sapien
cacagatcttgtggtagtggctatc

SEQ ID NO: 5027258 - DNA, 25 bp, Homo sapien
gaaatcttagacaggcagggtgcag

SEQ ID NO: 5027259 - DNA, 25 bp, Homo sapien
ctgtagagtgtatctaaatattcct

SEQ ID NO: 5027260 - DNA, 25 bp, Homo sapien
tctgtagagtgtatctaaatattcc

SEQ ID NO: 5027261 - DNA, 25 bp, Homo sapien
atatctgtagagtgtatctaaatat

SEQ ID NO: 5027262 - DNA, 25 bp, Homo sapien
atctgtagagtgtatctaaatattc

SEQ ID NO: 5027263 - DNA, 25 bp, Homo sapien
gcttgtccgccaggtagtcaaagag

SEQ ID NO: 5027264 - DNA, 25 bp, Homo sapien
tccgccaggtagtcaaagagcatcc

SEQ ID NO: 5027265 - DNA, 25 bp, Homo sapien
accatgcttgtccgccaggtagtca

SEQ ID NO: 5027266 - DNA, 25 bp, Homo sapien
caggtagtcaaagagcatcctacca

SEQ ID NO: 5027267 - DNA, 25 bp, Homo sapien
tggccggccgcagtgactgatacct

SEQ ID NO: 5027268 - DNA, 25 bp, Homo sapien
tgtttcaccacaactaaggtaaggc

SEQ ID NO: 5027269 - DNA, 25 bp, Homo sapien
atttctagtaaggtcagtagtctac

SEQ ID NO: 5027270 - DNA, 25 bp, Homo sapien
tataagaagtatacaaggagagcta

SEQ ID NO: 5027271 - DNA, 25 bp, Homo sapien
caagtgaatttactggtagctagga

SEQ ID NO: 5027272 - DNA, 25 bp, Homo sapien
gcacggcaaaatatccagcaattcc

SEQ ID NO: 5027273 - DNA, 25 bp, Homo sapien
tatagtacgctatagtatggcacag

SEQ ID NO: 5027274 - DNA, 25 bp, Homo sapien
gaaatcaaaggtatagcacggcaaa

SEQ ID NO: 5027275 - DNA, 25 bp, Homo sapien
ggttctgtttctgcctgaagctgtt

SEQ ID NO: 5027276 - DNA, 25 bp, Homo sapien
caaacatcttcacaattggttctgt

SEQ ID NO: 5027277 - DNA, 25 bp, Homo sapien
ctgtttcagttgtgcaaccactgtg

SEQ ID NO: 5027278 - DNA, 25 bp, Homo sapien
tgaagctgtttcagttgtgcaacca

SEQ ID NO: 5027279 - DNA, 25 bp, Homo sapien
catgaggaatatcatcagaataaag

SEQ ID NO: 5027280 - DNA, 25 bp, Homo sapien
tatcactaagaaggtccaatttacc

SEQ ID NO: 5027281 - DNA, 25 bp, Homo sapien
tggtatcactaagaaggtccaattt

SEQ ID NO: 5027282 - DNA, 25 bp, Homo sapien
cactaagaaggtccaatttaccttg

SEQ ID NO: 5027283 - DNA, 25 bp, Homo sapien
gttggtatcactaagaaggtccaat

SEQ ID NO: 5027284 - DNA, 25 bp, Homo sapien
aatggctaaaagataggcacttcgc

SEQ ID NO: 5027285 - DNA, 25 bp, Homo sapien
ttaagtcaaccatgtcagatcaggc

SEQ ID NO: 5027286 - DNA, 25 bp, Homo sapien
tagccatgagagcaaaatcgaacct

SEQ ID NO: 5027287 - DNA, 25 bp, Homo sapien
tattcacggacagaaatgcttcagc

SEQ ID NO: 5027288 - DNA, 25 bp, Homo sapien
gtttaaggatgtcgccaggcgcagt

SEQ ID NO: 5027289 - DNA, 25 bp, Homo sapien
gagtagtgactaacaggggtcaaga

SEQ ID NO: 5027290 - DNA, 25 bp, Homo sapien
aaggtttaaggatgtcgccaggcgc

SEQ ID NO: 5027291 - DNA, 25 bp, Homo sapien
gatgaaggtttaaggatgtcgccag

SEQ ID NO: 5027292 - DNA, 25 bp, Homo sapien
tctcttggtgcaatgtaatagtctc

SEQ ID NO: 5027293 - DNA, 25 bp, Homo sapien
ttggtgcaatgtaatagtctcccct

SEQ ID NO: 5027294 - DNA, 25 bp, Homo sapien
caatcataaaaagcctttatgccag

SEQ ID NO: 5027295 - DNA, 25 bp, Homo sapien
tgccagactcatattatgtgctgag

SEQ ID NO: 5027296 - DNA, 25 bp, Homo sapien
aaagtgcgcgatgcgagtagtcaag

SEQ ID NO: 5027297 - DNA, 25 bp, Homo sapien
caaaaagtgcgcgatgcgagtagtc

SEQ ID NO: 5027298 - DNA, 25 bp, Homo sapien
agtgcgcgatgcgagtagtcaagtc

SEQ ID NO: 5027299 - DNA, 25 bp, Homo sapien
aaaaagtgcgcgatgcgagtagtca

SEQ ID NO: 5027300 - DNA, 25 bp, Homo sapien
aagggagtctgtgctcactaaaact

SEQ ID NO: 5027301 - DNA, 25 bp, Homo sapien
actttattggtagcgccgacaaacg

SEQ ID NO: 5027302 - DNA, 25 bp, Homo sapien
tagcgccgacaaacgaacagacaga

SEQ ID NO: 5027303 - DNA, 25 bp, Homo sapien
agacagatcctgtactgcgcatgtg

SEQ ID NO: 5027304 - DNA, 25 bp, Homo sapien
atctgtccccaacactaggccctgg

SEQ ID NO: 5027305 - DNA, 25 bp, Homo sapien
tccccaacactaggccctggaatgt

SEQ ID NO: 5027306 - DNA, 25 bp, Homo sapien
ctcatctgtccccaacactaggccc

SEQ ID NO: 5027307 - DNA, 25 bp, Homo sapien
tgtccccaacactaggccctggaat

SEQ ID NO: 5027308 - DNA, 25 bp, Homo sapien
tgagcagtggcgagtcacaggtttt

SEQ ID NO: 5027309 - DNA, 25 bp, Homo sapien
ccatttatcccaatgctgctttgga

SEQ ID NO: 5027310 - DNA, 25 bp, Homo sapien
cagtggcttgctttctgggatttcc

SEQ ID NO: 5027311 - DNA, 25 bp, Homo sapien
gctttggattgtttgcagcagattc

SEQ ID NO: 5027312 - DNA, 25 bp, Homo sapien
tctgtgactgttgaggggttaccac

SEQ ID NO: 5027313 - DNA, 25 bp, Homo sapien
ccgcacagaacctgacagtctgtga

SEQ ID NO: 5027314 - DNA, 25 bp, Homo sapien
tggcagtgatctcagtcctcagctt

SEQ ID NO: 5027315 - DNA, 25 bp, Homo sapien
tcagcttcatggctaccttcttcct

SEQ ID NO: 5027316 - DNA, 25 bp, Homo sapien
gtgtctctggagtgtttagcatctg

SEQ ID NO: 5027317 - DNA, 25 bp, Homo sapien
cagtaatgagagatagagcaggcca

SEQ ID NO: 5027318 - DNA, 25 bp, Homo sapien
ggatacagccgtcatcacagtaatg

SEQ ID NO: 5027319 - DNA, 25 bp, Homo sapien
atgaagtgttttgagtctttagcac

SEQ ID NO: 5027320 - DNA, 25 bp, Homo sapien
tagtactaataatattagaaggact

SEQ ID NO: 5027321 - DNA, 25 bp, Homo sapien
tattagaaggacttctgaaatataa

SEQ ID NO: 5027322 - DNA, 25 bp, Homo sapien
ctaataatattagaaggacttctga

SEQ ID NO: 5027323 - DNA, 25 bp, Homo sapien
tctctttttcaataatagtactaat

SEQ ID NO: 5027324 - DNA, 25 bp, Homo sapien
ttttttagaggaaggccatgaactg

SEQ ID NO: 5027325 - DNA, 25 bp, Homo sapien
caaaaagtgactttgcgaagcaggg

SEQ ID NO: 5027326 - DNA, 25 bp, Homo sapien
taggtttggccctggcagagagaca

SEQ ID NO: 5027327 - DNA, 25 bp, Homo sapien
tctgaaggtctggtgttgaacagcc

SEQ ID NO: 5027328 - DNA, 25 bp, Homo sapien
tgacactccttagcgaatttcgact

SEQ ID NO: 5027329 - DNA, 25 bp, Homo sapien
tccttagcgaatttcgacttccatg

SEQ ID NO: 5027330 - DNA, 25 bp, Homo sapien
agcgaatttcgacttccatggccac

SEQ ID NO: 5027331 - DNA, 25 bp, Homo sapien
agttgtttgacactccttagcgaat

SEQ ID NO: 5027332 - DNA, 25 bp, Homo sapien
tgctttatttgcaagctgaagtctc

SEQ ID NO: 5027333 - DNA, 25 bp, Homo sapien
ctacccagctgcagaatgtgtatgc

SEQ ID NO: 5027334 - DNA, 25 bp, Homo sapien
tatttgcaagctgaagtctcagagg

SEQ ID NO: 5027335 - DNA, 25 bp, Homo sapien
tatgcaatgattgcatctgttgaca

SEQ ID NO: 5027336 - DNA, 25 bp, Homo sapien
taggtatgtaggtgttcctctctcc

SEQ ID NO: 5027337 - DNA, 25 bp, Homo sapien
aatcacctgatatctcactatgcag

SEQ ID NO: 5027338 - DNA, 25 bp, Homo sapien
catttgttggctcccagctacagag

SEQ ID NO: 5027339 - DNA, 25 bp, Homo sapien
tatgcagtgagaacctctaggtatg

SEQ ID NO: 5027340 - DNA, 25 bp, Homo sapien
tttagattaacagtccacttaaggc

SEQ ID NO: 5027341 - DNA, 25 bp, Homo sapien
tatacagatatgcagttgttccagc

SEQ ID NO: 5027342 - DNA, 25 bp, Homo sapien
gcctattccatgactgcaaagatat

SEQ ID NO: 5027343 - DNA, 25 bp, Homo sapien
tacattgcccaactagtcttgcatt

SEQ ID NO: 5027344 - DNA, 25 bp, Homo sapien
ctgtttcgtggttttcaaagtggag

SEQ ID NO: 5027345 - DNA, 25 bp, Homo sapien
acgtcaatcttaccgatcacttagg

SEQ ID NO: 5027346 - DNA, 25 bp, Homo sapien
tgagtcttgcaaccaaccaagtgca

SEQ ID NO: 5027347 - DNA, 25 bp, Homo sapien
ccattctgagttagaagtacgtcaa

SEQ ID NO: 5027348 - DNA, 25 bp, Homo sapien
cctgttgctctacgttctcaccgaa

SEQ ID NO: 5027349 - DNA, 25 bp, Homo sapien
tgtatggacaggacttttcaattca

SEQ ID NO: 5027350 - DNA, 25 bp, Homo sapien
tttccatggcttgatagtgcattgc

SEQ ID NO: 5027351 - DNA, 25 bp, Homo sapien
tacaaatagtacttcagtgaattcc

SEQ ID NO: 5027352 - DNA, 25 bp, Homo sapien
tgccaatagccagatccatgattag

SEQ ID NO: 5027353 - DNA, 25 bp, Homo sapien
tccattgggccaaatctacattctc

SEQ ID NO: 5027354 - DNA, 25 bp, Homo sapien
tcaaactggtagcacttcgggtact

SEQ ID NO: 5027355 - DNA, 25 bp, Homo sapien
gactttcctctaggttgaattacaa

SEQ ID NO: 5027356 - DNA, 25 bp, Homo sapien
ccctattttgtccacagtgtaggca

SEQ ID NO: 5027357 - DNA, 25 bp, Homo sapien
cttatgtttggtcttagcaaagtga

SEQ ID NO: 5027358 - DNA, 25 bp, Homo sapien
ttaagaacatccctattttgtccac

SEQ ID NO: 5027359 - DNA, 25 bp, Homo sapien
tttggtcttagcaaagtgaagaaac

SEQ ID NO: 5027360 - DNA, 25 bp, Homo sapien
aattaaatccaaacttccctcatca

SEQ ID NO: 5027361 - DNA, 25 bp, Homo sapien
tctggtgctcgtgaaaacatgggtt

SEQ ID NO: 5027362 - DNA, 25 bp, Homo sapien
taatatccatgtgtctcaaagtgaa

SEQ ID NO: 5027363 - DNA, 25 bp, Homo sapien
cctctttgagaacttggtgaatctg

SEQ ID NO: 5027364 - DNA, 25 bp, Homo sapien
gatcttcccatgacacttgccagaa

SEQ ID NO: 5027365 - DNA, 25 bp, Homo sapien
caacagtaagttgctgatcttccca

SEQ ID NO: 5027366 - DNA, 25 bp, Homo sapien
ttgccagaagaaagtctgggacacc

SEQ ID NO: 5027367 - DNA, 25 bp, Homo sapien
cctctccagatgtaacccagtaaag

SEQ ID NO: 5027368 - DNA, 25 bp, Homo sapien
aagtttcggtatttctgtactgcct

SEQ ID NO: 5027369 - DNA, 25 bp, Homo sapien
gtttcggtatttctgtactgcctgg

SEQ ID NO: 5027370 - DNA, 25 bp, Homo sapien
tgtactgcctggatctacttcaatg

SEQ ID NO: 5027371 - DNA, 25 bp, Homo sapien
tctgtactgcctggatctacttcaa

SEQ ID NO: 5027372 - DNA, 25 bp, Homo sapien
ttgtctcttctttctctctcctcct

SEQ ID NO: 5027373 - DNA, 25 bp, Homo sapien
ctcaggaacataattgtctcttctt

SEQ ID NO: 5027374 - DNA, 25 bp, Homo sapien
tgtctcttctttctctctcctcctc

SEQ ID NO: 5027375 - DNA, 25 bp, Homo sapien
aggaacataattgtctcttctttct

SEQ ID NO: 5027376 - DNA, 25 bp, Homo sapien
tgggaccctctgagtctgctccatc

SEQ ID NO: 5027377 - DNA, 25 bp, Homo sapien
gagtctgctccatcagatgggttac

SEQ ID NO: 5027378 - DNA, 25 bp, Homo sapien
cctctgagtctgctccatcagatgg

SEQ ID NO: 5027379 - DNA, 25 bp, Homo sapien
tctgagtctgctccatcagatgggt

SEQ ID NO: 5027380 - DNA, 25 bp, Homo sapien
acaggctgctatcttgttccagaga

SEQ ID NO: 5027381 - DNA, 25 bp, Homo sapien
atgcttgttggtgtggaagtcattg

SEQ ID NO: 5027382 - DNA, 25 bp, Homo sapien
tccagagattcttgcagggcataat

SEQ ID NO: 5027383 - DNA, 25 bp, Homo sapien
taatggcaatttcctcgcacacatg

SEQ ID NO: 5027384 - DNA, 25 bp, Homo sapien
acctttctcatggttttggtgcgaa

SEQ ID NO: 5027385 - DNA, 25 bp, Homo sapien
cacctttctcatggttttggtgcga

SEQ ID NO: 5027386 - DNA, 25 bp, Homo sapien
cctttctcatggttttggtgcgaat

SEQ ID NO: 5027387 - DNA, 25 bp, Homo sapien
ggcctaagctcatcattgcacaatg

SEQ ID NO: 5027388 - DNA, 25 bp, Homo sapien
ttgtaagggattttcaagaagactg

SEQ ID NO: 5027389 - DNA, 25 bp, Homo sapien
tcaagtactgtaaacatggctgcct

SEQ ID NO: 5027390 - DNA, 25 bp, Homo sapien
caagaagactgacttaggcctaagc

SEQ ID NO: 5027391 - DNA, 25 bp, Homo sapien
gacttttcactctgcaggataccaa

SEQ ID NO: 5027392 - DNA, 25 bp, Homo sapien
aaggtttaagacatggaggcacaag

SEQ ID NO: 5027393 - DNA, 25 bp, Homo sapien
aatggttgaaagtggctaggtgccc

SEQ ID NO: 5027394 - DNA, 25 bp, Homo sapien
tattaggtatgagaagctctggaac

SEQ ID NO: 5027395 - DNA, 25 bp, Homo sapien
tgtgatgcaaggatcatgcagcagc

SEQ ID NO: 5027396 - DNA, 25 bp, Homo sapien
cagttctttagtaagcggagattca

SEQ ID NO: 5027397 - DNA, 25 bp, Homo sapien
caaatggcttcgatgagaatctgct

SEQ ID NO: 5027398 - DNA, 25 bp, Homo sapien
tgcagcagcccaaacaacagttctt

SEQ ID NO: 5027399 - DNA, 25 bp, Homo sapien
taggtgtctctggataaatcacagg

SEQ ID NO: 5027400 - DNA, 25 bp, Homo sapien
ggataaatcacaggtaagacaatac

SEQ ID NO: 5027401 - DNA, 25 bp, Homo sapien
ggtatacgtaggtgtctctggataa

SEQ ID NO: 5027402 - DNA, 25 bp, Homo sapien
catcaaagagggtatacgtaggtgt

SEQ ID NO: 5027403 - DNA, 25 bp, Homo sapien
cagcagatgctaactaaggctgcct

SEQ ID NO: 5027404 - DNA, 25 bp, Homo sapien
gatgctaactaaggctgccttggca

SEQ ID NO: 5027405 - DNA, 25 bp, Homo sapien
acagcagatgctaactaaggctgcc

SEQ ID NO: 5027406 - DNA, 25 bp, Homo sapien
cagatgctaactaaggctgccttgg

SEQ ID NO: 5027407 - DNA, 25 bp, Homo sapien
ctgcggccggccatgaagagaataa

SEQ ID NO: 5027408 - DNA, 25 bp, Homo sapien
ttcagagcgcaaaggaagaatccca

SEQ ID NO: 5027409 - DNA, 25 bp, Homo sapien
tatcctgagattgcgggagcgccac

SEQ ID NO: 5027410 - DNA, 25 bp, Homo sapien
tgaaaagccaggattgacggacact

SEQ ID NO: 5027411 - DNA, 25 bp, Homo sapien
gcccttctggttggagaaaattgag

SEQ ID NO: 5027412 - DNA, 25 bp, Homo sapien
tcttgtagagtagtaggttgtcctc

SEQ ID NO: 5027413 - DNA, 25 bp, Homo sapien
ttctattcctcctaccacacagttg

SEQ ID NO: 5027414 - DNA, 25 bp, Homo sapien
cattctagggtttggaaaattgact

SEQ ID NO: 5027415 - DNA, 25 bp, Homo sapien
aaaatgccttttactgctaagtggg

SEQ ID NO: 5027416 - DNA, 25 bp, Homo sapien
cattgcagatcacccagtcttaagg

SEQ ID NO: 5027417 - DNA, 25 bp, Homo sapien
gcacaattgaacttattggcctgta

SEQ ID NO: 5027418 - DNA, 25 bp, Homo sapien
aggctgtcgaagacatgttggaaac

SEQ ID NO: 5027419 - DNA, 25 bp, Homo sapien
ctagcattctaagccaacagaggtg

SEQ ID NO: 5027420 - DNA, 25 bp, Homo sapien
cctgatatggcattgttgaacaccc

SEQ ID NO: 5027421 - DNA, 25 bp, Homo sapien
aagtaatgtcttagtgcagctcagc

SEQ ID NO: 5027422 - DNA, 25 bp, Homo sapien
taatcccattacagcaggcagttgc

SEQ ID NO: 5027423 - DNA, 25 bp, Homo sapien
tcagtgcagcgatggttaccagatc

SEQ ID NO: 5027424 - DNA, 25 bp, Homo sapien
tacttgtgacgttaacatttggaac

SEQ ID NO: 5027425 - DNA, 25 bp, Homo sapien
ccattttgctaaaaggttcagaaca

SEQ ID NO: 5027426 - DNA, 25 bp, Homo sapien
tactgtgaaccaaaccagatggtga

SEQ ID NO: 5027427 - DNA, 25 bp, Homo sapien
tctctgtggaaggaaagtagtattc

SEQ ID NO: 5027428 - DNA, 25 bp, Homo sapien
gggacactgacacccactactgaag

SEQ ID NO: 5027429 - DNA, 25 bp, Homo sapien
catctctgtggaaggaaagtagtat

SEQ ID NO: 5027430 - DNA, 25 bp, Homo sapien
gctggccatgggacactgacaccca

SEQ ID NO: 5027431 - DNA, 25 bp, Homo sapien
gatgcttggtcataatggtggtcag

SEQ ID NO: 5027432 - DNA, 25 bp, Homo sapien
cataatggtggtcagtacatatttt

SEQ ID NO: 5027433 - DNA, 25 bp, Homo sapien
tggtcataatggtggtcagtacata

SEQ ID NO: 5027434 - DNA, 25 bp, Homo sapien
cccatgatgcttggtcataatggtg

SEQ ID NO: 5027435 - DNA, 25 bp, Homo sapien
cttcaaggcttggctcagtttcttt

SEQ ID NO: 5027436 - DNA, 25 bp, Homo sapien
cctgagaaacttgccacagtgttga

SEQ ID NO: 5027437 - DNA, 25 bp, Homo sapien
tgccacagtgttgatctttatagta

SEQ ID NO: 5027438 - DNA, 25 bp, Homo sapien
tcttcttctgtgtacacttcaaggc

SEQ ID NO: 5027439 - DNA, 25 bp, Homo sapien
aggactggcaatagcaacaagccat

SEQ ID NO: 5027440 - DNA, 25 bp, Homo sapien
caccaagagaggactggcaatagca

SEQ ID NO: 5027441 - DNA, 25 bp, Homo sapien
caagagaggactggcaatagcaaca

SEQ ID NO: 5027442 - DNA, 25 bp, Homo sapien
ttcaccaagagaggactggcaatag

SEQ ID NO: 5027443 - DNA, 25 bp, Homo sapien
tgtaaaggaaaatcaatcaagagca

SEQ ID NO: 5027444 - DNA, 25 bp, Homo sapien
gaagaccaacctggaaggaatgccc

SEQ ID NO: 5027445 - DNA, 25 bp, Homo sapien
ctctcagaagaccaacctggaagga

SEQ ID NO: 5027446 - DNA, 25 bp, Homo sapien
tcagaagaccaacctggaaggaatg

SEQ ID NO: 5027447 - DNA, 25 bp, Homo sapien
caggtgctgctccttcacttacaca

SEQ ID NO: 5027448 - DNA, 25 bp, Homo sapien
cttcacttacacatctctcacctcc

SEQ ID NO: 5027449 - DNA, 25 bp, Homo sapien
gtgctgctccttcacttacacatct

SEQ ID NO: 5027450 - DNA, 25 bp, Homo sapien
tcaggtgctgctccttcacttacac

SEQ ID NO: 5027451 - DNA, 25 bp, Homo sapien
gagggaatcaatccagagttgggcc

SEQ ID NO: 5027452 - DNA, 25 bp, Homo sapien
cattcatggcataccactggaaagc

SEQ ID NO: 5027453 - DNA, 25 bp, Homo sapien
ggaaagctctgctgtacgacatata

SEQ ID NO: 5027454 - DNA, 25 bp, Homo sapien
ttgggccacccaactatactttgct

SEQ ID NO: 5027455 - DNA, 25 bp, Homo sapien
aatgtgtatcattgttgaggtcccc

SEQ ID NO: 5027456 - DNA, 25 bp, Homo sapien
cttctcacagtgcagtaatcttggg

SEQ ID NO: 5027457 - DNA, 25 bp, Homo sapien
tgcacaatatatacatcgaggagtc

SEQ ID NO: 5027458 - DNA, 25 bp, Homo sapien
tatagtgatgacaccacccaccatg

SEQ ID NO: 5027459 - DNA, 25 bp, Homo sapien
tcttagaaactgtagataaagaatc

SEQ ID NO: 5027460 - DNA, 25 bp, Homo sapien
ttttccagaggtcttggaatcaaac

SEQ ID NO: 5027461 - DNA, 25 bp, Homo sapien
ccatcttagaaactgtagataaaga

SEQ ID NO: 5027462 - DNA, 25 bp, Homo sapien
aatcttttccagaggtcttggaatc

SEQ ID NO: 5027463 - DNA, 25 bp, Homo sapien
tctgggtcccaccaacatcatttcc

SEQ ID NO: 5027464 - DNA, 25 bp, Homo sapien
gggtcccaccaacatcatttcctga

SEQ ID NO: 5027465 - DNA, 25 bp, Homo sapien
tttcctgaatgatgaagctccccat

SEQ ID NO: 5027466 - DNA, 25 bp, Homo sapien
cctgccaaacctctgggtcccacca

SEQ ID NO: 5027467 - DNA, 25 bp, Homo sapien
atcattggtacagctatcactgttt

SEQ ID NO: 5027468 - DNA, 25 bp, Homo sapien
tcattggtacagctatcactgtttg

SEQ ID NO: 5027469 - DNA, 25 bp, Homo sapien
tatcactgtttgtcttaaattgact

SEQ ID NO: 5027470 - DNA, 25 bp, Homo sapien
gctatcactgtttgtcttaaattga

SEQ ID NO: 5027471 - DNA, 25 bp, Homo sapien
ttaacatcaatgtcttgaccacttc

SEQ ID NO: 5027472 - DNA, 25 bp, Homo sapien
caatgtcttgaccacttctggaatc

SEQ ID NO: 5027473 - DNA, 25 bp, Homo sapien
aggccaggtttggagaatagcttga

SEQ ID NO: 5027474 - DNA, 25 bp, Homo sapien
gaatcttcttgaatcttctctgctg

SEQ ID NO: 5027475 - DNA, 25 bp, Homo sapien
gaaaaaagatatagctaaggatgga

SEQ ID NO: 5027476 - DNA, 25 bp, Homo sapien
caattgagctgcataatcctgttaa

SEQ ID NO: 5027477 - DNA, 25 bp, Homo sapien
tattcttataaacgacatcagctca

SEQ ID NO: 5027478 - DNA, 25 bp, Homo sapien
acaaatgcaggattatctaagaagg

SEQ ID NO: 5027479 - DNA, 25 bp, Homo sapien
tgatcaaaataagggtgcctaattc

SEQ ID NO: 5027480 - DNA, 25 bp, Homo sapien
tgggagtcctaacaaatgcaatgag

SEQ ID NO: 5027481 - DNA, 25 bp, Homo sapien
tctgagagaaggaatggaacaatat

SEQ ID NO: 5027482 - DNA, 25 bp, Homo sapien
tagtaaaacaggttgatacaatgtc

SEQ ID NO: 5027483 - DNA, 25 bp, Homo sapien
aatatatccacgaataagcagaaga

SEQ ID NO: 5027484 - DNA, 25 bp, Homo sapien
atatccacgaataagcagaagaatg

SEQ ID NO: 5027485 - DNA, 25 bp, Homo sapien
aaaataatccaactaaatagcaata

SEQ ID NO: 5027486 - DNA, 25 bp, Homo sapien
tccacgaataagcagaagaatgtgt

SEQ ID NO: 5027487 - DNA, 25 bp, Homo sapien
gtcatttccactgtccctaaagttc

SEQ ID NO: 5027488 - DNA, 25 bp, Homo sapien
catttccactgtccctaaagttctt

SEQ ID NO: 5027489 - DNA, 25 bp, Homo sapien
catctttgatctttaatgtgtccac

SEQ ID NO: 5027490 - DNA, 25 bp, Homo sapien
ctttgatctttaatgtgtccacagt

SEQ ID NO: 5027491 - DNA, 25 bp, Homo sapien
cacttcccataaatctttgaccagg

SEQ ID NO: 5027492 - DNA, 25 bp, Homo sapien
gctctcacttcccataaatctttga

SEQ ID NO: 5027493 - DNA, 25 bp, Homo sapien
ataattcccggatgagctgggcaag

SEQ ID NO: 5027494 - DNA, 25 bp, Homo sapien
agaataattcccggatgagctgggc

SEQ ID NO: 5027495 - DNA, 25 bp, Homo sapien
aaaacaattttctccttcacttgtg

SEQ ID NO: 5027496 - DNA, 25 bp, Homo sapien
acaattttctccttcacttgtgcct

SEQ ID NO: 5027497 - DNA, 25 bp, Homo sapien
aacaattttctccttcacttgtgcc

SEQ ID NO: 5027498 - DNA, 25 bp, Homo sapien
caaaaacaattttctccttcacttg

SEQ ID NO: 5027499 - DNA, 25 bp, Homo sapien
aaagcctttgtgggcattgcctttt

SEQ ID NO: 5027500 - DNA, 25 bp, Homo sapien
aataaaagcctttgtgggcattgcc

SEQ ID NO: 5027501 - DNA, 25 bp, Homo sapien
taaaagcctttgtgggcattgcctt

SEQ ID NO: 5027502 - DNA, 25 bp, Homo sapien
agcctttgtgggcattgccttttga

SEQ ID NO: 5027503 - DNA, 25 bp, Homo sapien
gatataggcattacacctgtttctg

SEQ ID NO: 5027504 - DNA, 25 bp, Homo sapien
cctggaatgaaagccaggggagcaa

SEQ ID NO: 5027505 - DNA, 25 bp, Homo sapien
tttcctggaatgaaagccaggggag

SEQ ID NO: 5027506 - DNA, 25 bp, Homo sapien
gttgatataggcattacacctgttt

SEQ ID NO: 5027507 - DNA, 25 bp, Homo sapien
tattttggtttctattcgttcatca

SEQ ID NO: 5027508 - DNA, 25 bp, Homo sapien
ttcatcaattcgttcctccatcaat

SEQ ID NO: 5027509 - DNA, 25 bp, Homo sapien
gttcctccatcaatccactaaacat

SEQ ID NO: 5027510 - DNA, 25 bp, Homo sapien
aattcgttcctccatcaatccacta

SEQ ID NO: 5027511 - DNA, 25 bp, Homo sapien
gaaaaaatagggagagctgttcctg

SEQ ID NO: 5027512 - DNA, 25 bp, Homo sapien
catcaagtgccctaagaaagagctc

SEQ ID NO: 5027513 - DNA, 25 bp, Homo sapien
taacagcacgatgagaaccacaggg

SEQ ID NO: 5027514 - DNA, 25 bp, Homo sapien
gacatttgtttggagcctggctagg

SEQ ID NO: 5027515 - DNA, 25 bp, Homo sapien
cagcactggtccaattgggtcccta

SEQ ID NO: 5027516 - DNA, 25 bp, Homo sapien
gaactcatattttaagcagacagca

SEQ ID NO: 5027517 - DNA, 25 bp, Homo sapien
aattgtaccttgaagggcatgtgcc

SEQ ID NO: 5027518 - DNA, 25 bp, Homo sapien
cacacataagtttggcagcgcagtc

SEQ ID NO: 5027519 - DNA, 25 bp, Homo sapien
gaagtgctcgttgcttggcctacag

SEQ ID NO: 5027520 - DNA, 25 bp, Homo sapien
cagcaagtgatacagcctgcgaggc

SEQ ID NO: 5027521 - DNA, 25 bp, Homo sapien
taaggactgttgctaccatgaggga

SEQ ID NO: 5027522 - DNA, 25 bp, Homo sapien
gaccctggctaatatctggcaccaa

SEQ ID NO: 5027523 - DNA, 25 bp, Homo sapien
gtagaagttcttggccattacagat

SEQ ID NO: 5027524 - DNA, 25 bp, Homo sapien
tgtgtgtaggaccacctagtgtcca

SEQ ID NO: 5027525 - DNA, 25 bp, Homo sapien
gattagcaattgatcctactgtgtg

SEQ ID NO: 5027526 - DNA, 25 bp, Homo sapien
tagagaacaaaaacacttactggct

SEQ ID NO: 5027527 - DNA, 25 bp, Homo sapien
taagagatgatcacgagcaggatcc

SEQ ID NO: 5027528 - DNA, 25 bp, Homo sapien
ccggttccgctgctccaagttgatg

SEQ ID NO: 5027529 - DNA, 25 bp, Homo sapien
aaagatatggcagcctcttgggacc

SEQ ID NO: 5027530 - DNA, 25 bp, Homo sapien
tgaccaagaacaagatggcgctgat

SEQ ID NO: 5027531 - DNA, 25 bp, Homo sapien
agtttagacccttccatctcggttg

SEQ ID NO: 5027532 - DNA, 25 bp, Homo sapien
gagaagtcctggtggaaaggcatct

SEQ ID NO: 5027533 - DNA, 25 bp, Homo sapien
tctggctgaagagtactgttttgca

SEQ ID NO: 5027534 - DNA, 25 bp, Homo sapien
tcttagcaaggtagtggagctccat

SEQ ID NO: 5027535 - DNA, 25 bp, Homo sapien
gagagctagtcagacatcccccagc

SEQ ID NO: 5027536 - DNA, 25 bp, Homo sapien
cagctgcacctgtttagcccctttt

SEQ ID NO: 5027537 - DNA, 25 bp, Homo sapien
gataagaacccaacagaagctaagg

SEQ ID NO: 5027538 - DNA, 25 bp, Homo sapien
agtgtggaagggacaaatgctctca

SEQ ID NO: 5027539 - DNA, 25 bp, Homo sapien
gaagctaaggttgtacttccaggag

SEQ ID NO: 5027540 - DNA, 25 bp, Homo sapien
aaggactcgcgcattcctgcaaaag

SEQ ID NO: 5027541 - DNA, 25 bp, Homo sapien
aaaggatccctcaaacgagaaggca

SEQ ID NO: 5027542 - DNA, 25 bp, Homo sapien
caaatttattcaaggactcgcgcat

SEQ ID NO: 5027543 - DNA, 25 bp, Homo sapien
taacactgagaaacttaagtcaggg

SEQ ID NO: 5027544 - DNA, 25 bp, Homo sapien
aatcaccagctacggcacttgtagc

SEQ ID NO: 5027545 - DNA, 25 bp, Homo sapien
gtgcggctccagcaccgcgcgctct

SEQ ID NO: 5027546 - DNA, 25 bp, Homo sapien
gctctcccggcacggttcccggaga

SEQ ID NO: 5027547 - DNA, 25 bp, Homo sapien
tacggcacttgtagcctctgcacgc

SEQ ID NO: 5027548 - DNA, 25 bp, Homo sapien
aatgtgataaacacaggaggtttct

SEQ ID NO: 5027549 - DNA, 25 bp, Homo sapien
gtgggtacttcagtctctgcaggac

SEQ ID NO: 5027550 - DNA, 25 bp, Homo sapien
tgtgggtacttcagtctctgcagga

SEQ ID NO: 5027551 - DNA, 25 bp, Homo sapien
tgtgataaacacaggaggtttctca

SEQ ID NO: 5027552 - DNA, 25 bp, Homo sapien
cctagtagaccaccagactggagat

SEQ ID NO: 5027553 - DNA, 25 bp, Homo sapien
cagagaaggaaagcctagtagacca

SEQ ID NO: 5027554 - DNA, 25 bp, Homo sapien
gaaagcctagtagaccaccagactg

SEQ ID NO: 5027555 - DNA, 25 bp, Homo sapien
gaaggaaagcctagtagaccaccag

SEQ ID NO: 5027556 - DNA, 25 bp, Homo sapien
aagcagcagccaaggtcgagaggaa

SEQ ID NO: 5027557 - DNA, 25 bp, Homo sapien
gtcatggtagttagcaggaagcagc

SEQ ID NO: 5027558 - DNA, 25 bp, Homo sapien
tcgagaggaattagcggaccagtca

SEQ ID NO: 5027559 - DNA, 25 bp, Homo sapien
tgcccctgctttctggtgaaggctg

SEQ ID NO: 5027560 - DNA, 25 bp, Homo sapien
ggctctatcagcaatcgagcctcat

SEQ ID NO: 5027561 - DNA, 25 bp, Homo sapien
gagcctcatcacccttgtccttttg

SEQ ID NO: 5027562 - DNA, 25 bp, Homo sapien
tctatcagcaatcgagcctcatcac

SEQ ID NO: 5027563 - DNA, 25 bp, Homo sapien
agcaatcgagcctcatcacccttgt

SEQ ID NO: 5027564 - DNA, 25 bp, Homo sapien
ctttgtcaatatcaattgctttacg

SEQ ID NO: 5027565 - DNA, 25 bp, Homo sapien
tacgattgcctcctcgaattaaata

SEQ ID NO: 5027566 - DNA, 25 bp, Homo sapien
tgcctcctcgaattaaataacatgt

SEQ ID NO: 5027567 - DNA, 25 bp, Homo sapien
aattgctttacgattgcctcctcga

SEQ ID NO: 5027568 - DNA, 25 bp, Homo sapien
aatgtggtctatcagacagttaact

SEQ ID NO: 5027569 - DNA, 25 bp, Homo sapien
tggaaaaatgtggtctatcagacag

SEQ ID NO: 5027570 - DNA, 25 bp, Homo sapien
gaaaaatgtggtctatcagacagtt

SEQ ID NO: 5027571 - DNA, 25 bp, Homo sapien
ggtctatcagacagttaactttctt

SEQ ID NO: 5027572 - DNA, 25 bp, Homo sapien
acctggaaatcatgaacaaccagaa

SEQ ID NO: 5027573 - DNA, 25 bp, Homo sapien
tggaaatcatgaacaaccagaactt

SEQ ID NO: 5027574 - DNA, 25 bp, Homo sapien
ccactctcagttgcttgatttctga

SEQ ID NO: 5027575 - DNA, 25 bp, Homo sapien
gaaatcatgaacaaccagaactttg

SEQ ID NO: 5027576 - DNA, 25 bp, Homo sapien
tatgagacaattgcccaatggaaca

SEQ ID NO: 5027577 - DNA, 25 bp, Homo sapien
tcactagtgagaaccatgtcttagc

SEQ ID NO: 5027578 - DNA, 25 bp, Homo sapien
tacactcaatgacaaaagctgttag

SEQ ID NO: 5027579 - DNA, 25 bp, Homo sapien
gctatttctggcgatgtatctccag

SEQ ID NO: 5027580 - DNA, 25 bp, Homo sapien
ctgagccttgaagattattttcttc

SEQ ID NO: 5027581 - DNA, 25 bp, Homo sapien
tgcatctccaggtcacatgtctaga

SEQ ID NO: 5027582 - DNA, 25 bp, Homo sapien
catctccaggtcacatgtctagagt

SEQ ID NO: 5027583 - DNA, 25 bp, Homo sapien
gcatctccaggtcacatgtctagag

SEQ ID NO: 5027584 - DNA, 25 bp, Homo sapien
aatgccacccttttgcaaccagaaa

SEQ ID NO: 5027585 - DNA, 25 bp, Homo sapien
atactttccaagaatataggacaac

SEQ ID NO: 5027586 - DNA, 25 bp, Homo sapien
gtttcaatatctgctcctacaaaaa

SEQ ID NO: 5027587 - DNA, 25 bp, Homo sapien
tctttgcaaaaaggtctccagatac

SEQ ID NO: 5027588 - DNA, 25 bp, Homo sapien
gttgtgggcacattctaaatggcag

SEQ ID NO: 5027589 - DNA, 25 bp, Homo sapien
tattattgatttggcagttgtgggc

SEQ ID NO: 5027590 - DNA, 25 bp, Homo sapien
tgaagactcagggattccccttgct

SEQ ID NO: 5027591 - DNA, 25 bp, Homo sapien
ttaagaaggtgtggctcttactcca

SEQ ID NO: 5027592 - DNA, 25 bp, Homo sapien
tcatgcaactcaaaccgactctgct

SEQ ID NO: 5027593 - DNA, 25 bp, Homo sapien
agaagatgtcagtcatgcaactcaa

SEQ ID NO: 5027594 - DNA, 25 bp, Homo sapien
taatatccactgtagccagaagatg

SEQ ID NO: 5027595 - DNA, 25 bp, Homo sapien
gctcctctcccggagtagctcaaaa

SEQ ID NO: 5027596 - DNA, 25 bp, Homo sapien
ccttttgttgagaacctgttgccct

SEQ ID NO: 5027597 - DNA, 25 bp, Homo sapien
gatgccgggagcccatggagcctgg

SEQ ID NO: 5027598 - DNA, 25 bp, Homo sapien
ctgttgccctatgctcatcagcttt

SEQ ID NO: 5027599 - DNA, 25 bp, Homo sapien
tgttgagaacctgttgccctatgct

SEQ ID NO: 5027600 - DNA, 25 bp, Homo sapien
aaggcagagaggagcaagtcccgtc

SEQ ID NO: 5027601 - DNA, 25 bp, Homo sapien
gaaggcagagaggagcaagtcccgt

SEQ ID NO: 5027602 - DNA, 25 bp, Homo sapien
agtccacagtctcaagtctcatcca

SEQ ID NO: 5027603 - DNA, 25 bp, Homo sapien
tctcaagtctcatccaagacaaggc

SEQ ID NO: 5027604 - DNA, 25 bp, Homo sapien
cagtctcaagtctcatccaagacaa

SEQ ID NO: 5027605 - DNA, 25 bp, Homo sapien
gtccacagtctcaagtctcatccaa

SEQ ID NO: 5027606 - DNA, 25 bp, Homo sapien
cacacaaaggggagataatcagtga

SEQ ID NO: 5027607 - DNA, 25 bp, Homo sapien
gggctgccttctcaccctctatgca

SEQ ID NO: 5027608 - DNA, 25 bp, Homo sapien
tatgcagacctcacgaattcttcgg

SEQ ID NO: 5027609 - DNA, 25 bp, Homo sapien
tggctcaccctcatcacacaaaggg

SEQ ID NO: 5027610 - DNA, 25 bp, Homo sapien
agttggagggatttcagaacgagtc

SEQ ID NO: 5027611 - DNA, 25 bp, Homo sapien
ccatcatgcttggtcaatgagaaat

SEQ ID NO: 5027612 - DNA, 25 bp, Homo sapien
gaaatcaatggctcaaggagttgga

SEQ ID NO: 5027613 - DNA, 25 bp, Homo sapien
ttctatactgtaggcatcctggagg

SEQ ID NO: 5027614 - DNA, 25 bp, Homo sapien
agaaaatgcaagtgagtcactcttg

SEQ ID NO: 5027615 - DNA, 25 bp, Homo sapien
gaaaatgcaagtgagtcactcttgc

SEQ ID NO: 5027616 - DNA, 25 bp, Homo sapien
aaatgcaagtgagtcactcttgctg

SEQ ID NO: 5027617 - DNA, 25 bp, Homo sapien
aatgcaagtgagtcactcttgctga

SEQ ID NO: 5027618 - DNA, 25 bp, Homo sapien
ccttcaaataaatcatcatttccta

SEQ ID NO: 5027619 - DNA, 25 bp, Homo sapien
ctccttcaaataaatcatcatttcc

SEQ ID NO: 5027620 - DNA, 25 bp, Homo sapien
ttcaaataaatcatcatttcctatc

SEQ ID NO: 5027621 - DNA, 25 bp, Homo sapien
tcaaataaatcatcatttcctatca

SEQ ID NO: 5027622 - DNA, 25 bp, Homo sapien
tggaattgagacagcaggtagcagt

SEQ ID NO: 5027623 - DNA, 25 bp, Homo sapien
gactccgaataatggccttgcctgt

SEQ ID NO: 5027624 - DNA, 25 bp, Homo sapien
cattgtccagcctcctaaaccaggt

SEQ ID NO: 5027625 - DNA, 25 bp, Homo sapien
caatagaccacaacctacttggagg

SEQ ID NO: 5027626 - DNA, 25 bp, Homo sapien
taacgtctaaatctccacctgcagg

SEQ ID NO: 5027627 - DNA, 25 bp, Homo sapien
taggagcctgtacacttgcaaaccg

SEQ ID NO: 5027628 - DNA, 25 bp, Homo sapien
gaaaattgggagacacatcgcagca

SEQ ID NO: 5027629 - DNA, 25 bp, Homo sapien
caggtgcaggtgctgaaacatagcc

SEQ ID NO: 5027630 - DNA, 25 bp, Homo sapien
agccggacgtccgggggaggcatca

SEQ ID NO: 5027631 - DNA, 25 bp, Homo sapien
gccggacgtccgggggaggcatcac

SEQ ID NO: 5027632 - DNA, 25 bp, Homo sapien
ccggacgtccgggggaggcatcaca

SEQ ID NO: 5027633 - DNA, 25 bp, Homo sapien
gtgacatacatccttctcggctgac

SEQ ID NO: 5027634 - DNA, 25 bp, Homo sapien
ggtgacatacatccttctcggctga

SEQ ID NO: 5027635 - DNA, 25 bp, Homo sapien
cctgcccggctcactggcggtcaga

SEQ ID NO: 5027636 - DNA, 25 bp, Homo sapien
atggctctgtcctgcccggctcact

SEQ ID NO: 5027637 - DNA, 25 bp, Homo sapien
tatcagaaccaagctagaatgcatt

SEQ ID NO: 5027638 - DNA, 25 bp, Homo sapien
tgcagcctacacagtcctcctaagg

SEQ ID NO: 5027639 - DNA, 25 bp, Homo sapien
caacaggtggtgattacaattccag

SEQ ID NO: 5027640 - DNA, 25 bp, Homo sapien
tgtgctaggtccagtattaggtcct

SEQ ID NO: 5027641 - DNA, 25 bp, Homo sapien
tgttccagaatctgacagggaccag

SEQ ID NO: 5027642 - DNA, 25 bp, Homo sapien
tatagagtcagcctagaacggctgc

SEQ ID NO: 5027643 - DNA, 25 bp, Homo sapien
ggtaaaggtgtcctctgcaatcccc

SEQ ID NO: 5027644 - DNA, 25 bp, Homo sapien
gaagctggcaggttctagactgatc

SEQ ID NO: 5027645 - DNA, 25 bp, Homo sapien
cagcctgagtgcagccaaaggaaag

SEQ ID NO: 5027646 - DNA, 25 bp, Homo sapien
agcctgagtgcagccaaaggaaagt

SEQ ID NO: 5027647 - DNA, 25 bp, Homo sapien
ttggaatctacccttagtgacaacc

SEQ ID NO: 5027648 - DNA, 25 bp, Homo sapien
agtttggaatctacccttagtgaca

SEQ ID NO: 5027649 - DNA, 25 bp, Homo sapien
tcaaatacatggttctcgtgatagt

SEQ ID NO: 5027650 - DNA, 25 bp, Homo sapien
attgtaagttatctgagccatgcgg

SEQ ID NO: 5027651 - DNA, 25 bp, Homo sapien
tatctgagccatgcggagctgtgag

SEQ ID NO: 5027652 - DNA, 25 bp, Homo sapien
gacatcaaatacatggttctcgtga

SEQ ID NO: 5027653 - DNA, 25 bp, Homo sapien
tggactcacggaggtgaggcaatct

SEQ ID NO: 5027654 - DNA, 25 bp, Homo sapien
caccctgtttattgtcctctggaca

SEQ ID NO: 5027655 - DNA, 25 bp, Homo sapien
gacactgtgacatggatggcaaggc

SEQ ID NO: 5027656 - DNA, 25 bp, Homo sapien
taatgaagtcatgtccccgtttctc

SEQ ID NO: 5027657 - DNA, 25 bp, Homo sapien
ttaacaaactgtggcatgaccatac

SEQ ID NO: 5027658 - DNA, 25 bp, Homo sapien
tcagtaccgcaaaagtattacgtta

SEQ ID NO: 5027659 - DNA, 25 bp, Homo sapien
tattcataaccgcaaaagaaaactg

SEQ ID NO: 5027660 - DNA, 25 bp, Homo sapien
gaagctggacgcaaaagactatatc

SEQ ID NO: 5027661 - DNA, 25 bp, Homo sapien
ttctcttctaccacattcaatcatg

SEQ ID NO: 5027662 - DNA, 25 bp, Homo sapien
tcttctaccacattcaatcatgtta

SEQ ID NO: 5027663 - DNA, 25 bp, Homo sapien
tctcttctaccacattcaatcatgt

SEQ ID NO: 5027664 - DNA, 25 bp, Homo sapien
tcttctcttctaccacattcaatca

SEQ ID NO: 5027665 - DNA, 25 bp, Homo sapien
gccgaactgcgagttgattaaacct

SEQ ID NO: 5027666 - DNA, 25 bp, Homo sapien
cttcgtagcagtgtaagaatagact

SEQ ID NO: 5027667 - DNA, 25 bp, Homo sapien
caagaagtggggaacaaatgtcaag

SEQ ID NO: 5027668 - DNA, 25 bp, Homo sapien
ttccccagcaatgccgaactgcgag

SEQ ID NO: 5027669 - DNA, 25 bp, Homo sapien
caatttgaaagatagcagctcagat

SEQ ID NO: 5027670 - DNA, 25 bp, Homo sapien
aggctctgagggctaaatgtcagga

SEQ ID NO: 5027671 - DNA, 25 bp, Homo sapien
tttgtttattgacactgcttcttcc

SEQ ID NO: 5027672 - DNA, 25 bp, Homo sapien
ggaagaataattcaggccatcatca

SEQ ID NO: 5027673 - DNA, 25 bp, Homo sapien
tgccactagatgctctcattgctgc

SEQ ID NO: 5027674 - DNA, 25 bp, Homo sapien
gctctcattgctgctagacactgca

SEQ ID NO: 5027675 - DNA, 25 bp, Homo sapien
cactgccactagatgctctcattgc

SEQ ID NO: 5027676 - DNA, 25 bp, Homo sapien
cagcactgccactagatgctctcat

SEQ ID NO: 5027677 - DNA, 25 bp, Homo sapien
ttgggtctcctatccttgagctgag

SEQ ID NO: 5027678 - DNA, 25 bp, Homo sapien
ggtctcctatccttgagctgaggga

SEQ ID NO: 5027679 - DNA, 25 bp, Homo sapien
tgggtctcctatccttgagctgagg

SEQ ID NO: 5027680 - DNA, 25 bp, Homo sapien
tctcctatccttgagctgagggaac

SEQ ID NO: 5027681 - DNA, 25 bp, Homo sapien
gaattgcttggtagtgcttcaatgg

SEQ ID NO: 5027682 - DNA, 25 bp, Homo sapien
tcttgtagtacagatctgctggttc

SEQ ID NO: 5027683 - DNA, 25 bp, Homo sapien
gggaccccggttacatatatattga

SEQ ID NO: 5027684 - DNA, 25 bp, Homo sapien
gaacccaggcataaaaggccacata

SEQ ID NO: 5027685 - DNA, 25 bp, Homo sapien
tctgaagatactgaatactgacaat

SEQ ID NO: 5027686 - DNA, 25 bp, Homo sapien
gagacttgggacacatatgacttaa

SEQ ID NO: 5027687 - DNA, 25 bp, Homo sapien
gactgagaagtacatttgtgcccca

SEQ ID NO: 5027688 - DNA, 25 bp, Homo sapien
tgcagaaacaggtaaccaagcagca

SEQ ID NO: 5027689 - DNA, 25 bp, Homo sapien
ggaatcctaccatctgtagcctatt

SEQ ID NO: 5027690 - DNA, 25 bp, Homo sapien
catctgtagcctattatgactggct

SEQ ID NO: 5027691 - DNA, 25 bp, Homo sapien
catgcccagcgagatctgccttttc

SEQ ID NO: 5027692 - DNA, 25 bp, Homo sapien
ccatgcccagcgagatctgcctttt

SEQ ID NO: 5027693 - DNA, 25 bp, Homo sapien
aattcggtggtaatgcattctgtca

SEQ ID NO: 5027694 - DNA, 25 bp, Homo sapien
ttagtttcctatggccgctgtaatg

SEQ ID NO: 5027695 - DNA, 25 bp, Homo sapien
tgtgtttgtaattgcactctgcctc

SEQ ID NO: 5027696 - DNA, 25 bp, Homo sapien
tgctctagcactcctcggcttgtgg

SEQ ID NO: 5027697 - DNA, 25 bp, Homo sapien
tatcttgatatctagttgggtacct

SEQ ID NO: 5027698 - DNA, 25 bp, Homo sapien
tatctctgactaaaatcaactgacc

SEQ ID NO: 5027699 - DNA, 25 bp, Homo sapien
tctggatcttaagaagccttctcaa

SEQ ID NO: 5027700 - DNA, 25 bp, Homo sapien
gaatacccaattgtttttgcgccac

SEQ ID NO: 5027701 - DNA, 25 bp, Homo sapien
tacaaggtactatattcttagcact

SEQ ID NO: 5027702 - DNA, 25 bp, Homo sapien
tatcctgagagctttcaattcaaca

SEQ ID NO: 5027703 - DNA, 25 bp, Homo sapien
aatagcttgaaatcacggctctaga

SEQ ID NO: 5027704 - DNA, 25 bp, Homo sapien
ttttaacgtaggtcaacatgcgaca

SEQ ID NO: 5027705 - DNA, 25 bp, Homo sapien
gaagattcgtctagtctactggagg

SEQ ID NO: 5027706 - DNA, 25 bp, Homo sapien
tgtacaggatcgataagctcttgca

SEQ ID NO: 5027707 - DNA, 25 bp, Homo sapien
gagtcaaatacttgcccagacaggc

SEQ ID NO: 5027708 - DNA, 25 bp, Homo sapien
tccgctgtcagcttgtgtagtcccc

SEQ ID NO: 5027709 - DNA, 25 bp, Homo sapien
gacctccaggtaccactgaatactt

SEQ ID NO: 5027710 - DNA, 25 bp, Homo sapien
gaatacttttccagtacaaagaggc

SEQ ID NO: 5027711 - DNA, 25 bp, Homo sapien
catgagattctagcctgttttaaaa

SEQ ID NO: 5027712 - DNA, 25 bp, Homo sapien
caaagaggccaatatgttagaataa

SEQ ID NO: 5027713 - DNA, 25 bp, Homo sapien
taggatcattggtttctaggcttgc

SEQ ID NO: 5027714 - DNA, 25 bp, Homo sapien
gagcaggctgacgatagatgaatac

SEQ ID NO: 5027715 - DNA, 25 bp, Homo sapien
gctgcttagcaacctgtcctacttg

SEQ ID NO: 5027716 - DNA, 25 bp, Homo sapien
aatactcgacgaaggcactcacaaa

SEQ ID NO: 5027717 - DNA, 25 bp, Homo sapien
ctgcatacgagtaatttggagcaca

SEQ ID NO: 5027718 - DNA, 25 bp, Homo sapien
tacgagtaatttggagcacaggcaa

SEQ ID NO: 5027719 - DNA, 25 bp, Homo sapien
tctctctttgatgcttggacatagc

SEQ ID NO: 5027720 - DNA, 25 bp, Homo sapien
tgtctctctttgatgcttggacata

SEQ ID NO: 5027721 - DNA, 25 bp, Homo sapien
tataccataaggtatataattctga

SEQ ID NO: 5027722 - DNA, 25 bp, Homo sapien
tatataccataaggtatataattct

SEQ ID NO: 5027723 - DNA, 25 bp, Homo sapien
atataccataaggtatataattctg

SEQ ID NO: 5027724 - DNA, 25 bp, Homo sapien
cttagaattaagcatagaattcccc

SEQ ID NO: 5027725 - DNA, 25 bp, Homo sapien
caggctaaccttgacagaataatgt

SEQ ID NO: 5027726 - DNA, 25 bp, Homo sapien
ccccacaagtagaatgttgatcact

SEQ ID NO: 5027727 - DNA, 25 bp, Homo sapien
tagatagtgacatggttagcaaatg

SEQ ID NO: 5027728 - DNA, 25 bp, Homo sapien
ttctttaggatccactatgacagag

SEQ ID NO: 5027729 - DNA, 25 bp, Homo sapien
gaaaaggtactggttgcttccaaga

SEQ ID NO: 5027730 - DNA, 25 bp, Homo sapien
agtagggcatcaacatcatggcgca

SEQ ID NO: 5027731 - DNA, 25 bp, Homo sapien
ttgaaagttgcgatgtgctcccaca

SEQ ID NO: 5027732 - DNA, 25 bp, Homo sapien
gcaagcagactggagaaccgtaaaa

SEQ ID NO: 5027733 - DNA, 25 bp, Homo sapien
cacaggctattggtcacaggagaat

SEQ ID NO: 5027734 - DNA, 25 bp, Homo sapien
gaagtggagacctgacctgaattca

SEQ ID NO: 5027735 - DNA, 25 bp, Homo sapien
caggagaatacagtgtcagagcaac

SEQ ID NO: 5027736 - DNA, 25 bp, Homo sapien
gaatagaggaccttgaaccacgaag

SEQ ID NO: 5027737 - DNA, 25 bp, Homo sapien
aggtaggtgccttattatgagcccc

SEQ ID NO: 5027738 - DNA, 25 bp, Homo sapien
gaccaccaagggagatcaatcatga

SEQ ID NO: 5027739 - DNA, 25 bp, Homo sapien
tgtttgacagacctaacactgcttc

SEQ ID NO: 5027740 - DNA, 25 bp, Homo sapien
gttttcaaccactacacctgcagca

SEQ ID NO: 5027741 - DNA, 25 bp, Homo sapien
gattattacctgtctaggaaagccc

SEQ ID NO: 5027742 - DNA, 25 bp, Homo sapien
cctaacaagagggtgactagggtca

SEQ ID NO: 5027743 - DNA, 25 bp, Homo sapien
gagcctccagaatgaatgtagtccc

SEQ ID NO: 5027744 - DNA, 25 bp, Homo sapien
tctgtatgtagtaagagactatgtg

SEQ ID NO: 5027745 - DNA, 25 bp, Homo sapien
tagtaagagactatgtgatactcat

SEQ ID NO: 5027746 - DNA, 25 bp, Homo sapien
aaactaagtatttcatacagctaaa

SEQ ID NO: 5027747 - DNA, 25 bp, Homo sapien
ggtgcctggcaagaattgttgaatt

SEQ ID NO: 5027748 - DNA, 25 bp, Homo sapien
tcctccagtggtaggagacttctaa

SEQ ID NO: 5027749 - DNA, 25 bp, Homo sapien
taataacctggatgattttctgccc

SEQ ID NO: 5027750 - DNA, 25 bp, Homo sapien
gacttcatacttttcccacagcaga

SEQ ID NO: 5027751 - DNA, 25 bp, Homo sapien
gatgtgcttcctagcctgatggtga

SEQ ID NO: 5027752 - DNA, 25 bp, Homo sapien
cagccaatagcttatgagcagtgga

SEQ ID NO: 5027753 - DNA, 25 bp, Homo sapien
cttggtagccaagagcaaaacagga

SEQ ID NO: 5027754 - DNA, 25 bp, Homo sapien
ggctttgggtacatgcactgccaga

SEQ ID NO: 5027755 - DNA, 25 bp, Homo sapien
ccatcgagtttacaacttggtagcc

SEQ ID NO: 5027756 - DNA, 25 bp, Homo sapien
cattcttctaactcttgagcattgc

SEQ ID NO: 5027757 - DNA, 25 bp, Homo sapien
aaatctgcataaactggagctctct

SEQ ID NO: 5027758 - DNA, 25 bp, Homo sapien
aatctgcataaactggagctctctt

SEQ ID NO: 5027759 - DNA, 25 bp, Homo sapien
cattgcaaggtggtttttctttatc

SEQ ID NO: 5027760 - DNA, 25 bp, Homo sapien
aacaagggaatgggtttcttcatct

SEQ ID NO: 5027761 - DNA, 25 bp, Homo sapien
gtcaaatgcatcaaacgttcagcta

SEQ ID NO: 5027762 - DNA, 25 bp, Homo sapien
ttgtttatctccaattactagctct

SEQ ID NO: 5027763 - DNA, 25 bp, Homo sapien
tgaatctcttataagttccccttgt

SEQ ID NO: 5027764 - DNA, 25 bp, Homo sapien
aacgttcagctattgcagcacactg

SEQ ID NO: 5027765 - DNA, 25 bp, Homo sapien
ttgatgtgatcaggcaaaaactgta

SEQ ID NO: 5027766 - DNA, 25 bp, Homo sapien
tggaagccgtatggttactgtcaaa

SEQ ID NO: 5027767 - DNA, 25 bp, Homo sapien
tgaatgtcctccttagtactgtctt

SEQ ID NO: 5027768 - DNA, 25 bp, Homo sapien
gatcaatagatgaatagagttttcc

SEQ ID NO: 5027769 - DNA, 25 bp, Homo sapien
aatagcagcataatgtggcactgac

SEQ ID NO: 5027770 - DNA, 25 bp, Homo sapien
ggatacaatcattagaccatttcca

SEQ ID NO: 5027771 - DNA, 25 bp, Homo sapien
tgttaaagacttgtaggatacaatc

SEQ ID NO: 5027772 - DNA, 25 bp, Homo sapien
actttccacggagaatatcacgctt

SEQ ID NO: 5027773 - DNA, 25 bp, Homo sapien
tgtgaattataataaaaggatcccc

SEQ ID NO: 5027774 - DNA, 25 bp, Homo sapien
tactgatagtgacccactccagaga

SEQ ID NO: 5027775 - DNA, 25 bp, Homo sapien
tctattcgaagaagtagggtagcta

SEQ ID NO: 5027776 - DNA, 25 bp, Homo sapien
gcatttagcagtgagatactgtgaa

SEQ ID NO: 5027777 - DNA, 25 bp, Homo sapien
tgcacaaagacggttgtcacatgct

SEQ ID NO: 5027778 - DNA, 25 bp, Homo sapien
taggaagtcgaaacacctctcgtgg

SEQ ID NO: 5027779 - DNA, 25 bp, Homo sapien
gaagcgctatttccacgttcacctg

SEQ ID NO: 5027780 - DNA, 25 bp, Homo sapien
catctgacaaggtaacccaggtaga

SEQ ID NO: 5027781 - DNA, 25 bp, Homo sapien
ccacaaatgctactgggacaccaga

SEQ ID NO: 5027782 - DNA, 25 bp, Homo sapien
catttggtctgttaagtggaggtca

SEQ ID NO: 5027783 - DNA, 25 bp, Homo sapien
taaattgcagctccaactctgatgg

SEQ ID NO: 5027784 - DNA, 25 bp, Homo sapien
caagcttactgtggtcttccatcag

SEQ ID NO: 5027785 - DNA, 25 bp, Homo sapien
ggaggttgctagaagtctaattatc

SEQ ID NO: 5027786 - DNA, 25 bp, Homo sapien
tcagataaatgggtacaatatccaa

SEQ ID NO: 5027787 - DNA, 25 bp, Homo sapien
tgggtacaatatccaatagaatgat

SEQ ID NO: 5027788 - DNA, 25 bp, Homo sapien
ctggttatacatgacggaggttgct

SEQ ID NO: 5027789 - DNA, 25 bp, Homo sapien
caacacgtattagagctacattaca

SEQ ID NO: 5027790 - DNA, 25 bp, Homo sapien
gtattagagctacattacatgtgcc

SEQ ID NO: 5027791 - DNA, 25 bp, Homo sapien
ctccctaacaacacgtattagagct

SEQ ID NO: 5027792 - DNA, 25 bp, Homo sapien
gagctacattacatgtgccacaaga

SEQ ID NO: 5027793 - DNA, 25 bp, Homo sapien
cagaggtaagatgtcaaggcaagct

SEQ ID NO: 5027794 - DNA, 25 bp, Homo sapien
ttagctggccttgtgcagaaaagcg

SEQ ID NO: 5027795 - DNA, 25 bp, Homo sapien
cagcaaaagcgagcaacaagagact

SEQ ID NO: 5027796 - DNA, 25 bp, Homo sapien
acaagagactatctggcccacaaag

SEQ ID NO: 5027797 - DNA, 25 bp, Homo sapien
caaaagcatgcatgtgttccagtgt

SEQ ID NO: 5027798 - DNA, 25 bp, Homo sapien
ccaagggtatcaatatagtagacac

SEQ ID NO: 5027799 - DNA, 25 bp, Homo sapien
tgatcatctcgaagttttacctctg

SEQ ID NO: 5027800 - DNA, 25 bp, Homo sapien
tgataccatgaatcacagtgcaggt

SEQ ID NO: 5027801 - DNA, 25 bp, Homo sapien
catgctccaaccctggagataaagc

SEQ ID NO: 5027802 - DNA, 25 bp, Homo sapien
ggcatgctccaaccctggagataaa

SEQ ID NO: 5027803 - DNA, 25 bp, Homo sapien
gcatgctccaaccctggagataaag

SEQ ID NO: 5027804 - DNA, 25 bp, Homo sapien
gacatgggacccttcaatacaaaat

SEQ ID NO: 5027805 - DNA, 25 bp, Homo sapien
aagaaaacatactggatgctacgaa

SEQ ID NO: 5027806 - DNA, 25 bp, Homo sapien
tgaaaacgatggacatgggaccctt

SEQ ID NO: 5027807 - DNA, 25 bp, Homo sapien
ggatgctacgaagtatgataaagtc

SEQ ID NO: 5027808 - DNA, 25 bp, Homo sapien
ttcgcttgccagtcagaaagaaaga

SEQ ID NO: 5027809 - DNA, 25 bp, Homo sapien
tgtggtttctcaacgcacacgttca

SEQ ID NO: 5027810 - DNA, 25 bp, Homo sapien
acacgttcacaagcgatgctccagg

SEQ ID NO: 5027811 - DNA, 25 bp, Homo sapien
tctcttctaagaaacggctctcggt

SEQ ID NO: 5027812 - DNA, 25 bp, Homo sapien
cagctggtaacaaggcagcggctca

SEQ ID NO: 5027813 - DNA, 25 bp, Homo sapien
gaggtctcttcacccgtagggagca

SEQ ID NO: 5027814 - DNA, 25 bp, Homo sapien
gagagcttgtaaccctcgaagcggg

SEQ ID NO: 5027815 - DNA, 25 bp, Homo sapien
gtagggagcaattagccgccacctc

SEQ ID NO: 5027816 - DNA, 25 bp, Homo sapien
gggccgcagcgtgagaattaataaa

SEQ ID NO: 5027817 - DNA, 25 bp, Homo sapien
tgcatgctgggctatgtagttctcc

SEQ ID NO: 5027818 - DNA, 25 bp, Homo sapien
gaaaacactgcggtgcgaactgcct

SEQ ID NO: 5027819 - DNA, 25 bp, Homo sapien
tagttctcctggtacttaacgcgcg

SEQ ID NO: 5027820 - DNA, 25 bp, Homo sapien
cctagcaaccaggaggcggcccgcg

SEQ ID NO: 5027821 - DNA, 25 bp, Homo sapien
ccagaggccctagcaaccaggaggc

SEQ ID NO: 5027822 - DNA, 25 bp, Homo sapien
aggccctagcaaccaggaggcggcc

SEQ ID NO: 5027823 - DNA, 25 bp, Homo sapien
agaggccctagcaaccaggaggcgg

SEQ ID NO: 5027824 - DNA, 25 bp, Homo sapien
tataggcagggtggcgagaccccgc

SEQ ID NO: 5027825 - DNA, 25 bp, Homo sapien
atgcgtgttctagctttctgtgtgc

SEQ ID NO: 5027826 - DNA, 25 bp, Homo sapien
ctttctgtgtgcttaggtgcccgag

SEQ ID NO: 5027827 - DNA, 25 bp, Homo sapien
cccggaaatgcgtgttctagctttc

SEQ ID NO: 5027828 - DNA, 25 bp, Homo sapien
agagtgtggtaggtaacggtcctca

SEQ ID NO: 5027829 - DNA, 25 bp, Homo sapien
tctaagtccgggcagccgaagagtg

SEQ ID NO: 5027830 - DNA, 25 bp, Homo sapien
caagggtcatttcgtcgctgggaag

SEQ ID NO: 5027831 - DNA, 25 bp, Homo sapien
gtggtgagctatgcccgtggtcctc

SEQ ID NO: 5027832 - DNA, 25 bp, Homo sapien
gcagtctctgcagaagtgatcggca

SEQ ID NO: 5027833 - DNA, 25 bp, Homo sapien
tatcaccccttcagttaatagaatg

SEQ ID NO: 5027834 - DNA, 25 bp, Homo sapien
ggatgcctgcctagaggatttagca

SEQ ID NO: 5027835 - DNA, 25 bp, Homo sapien
ccaggttagcaagatgaacaaagat

SEQ ID NO: 5027836 - DNA, 25 bp, Homo sapien
gccatgccctgttaaggtgttggag

SEQ ID NO: 5027837 - DNA, 25 bp, Homo sapien
gttggaggtaacagtagtagacaaa

SEQ ID NO: 5027838 - DNA, 25 bp, Homo sapien
gatggtgatgagcactagaggaaca

SEQ ID NO: 5027839 - DNA, 25 bp, Homo sapien
gaagaaatcagaaggaggccgtgca

SEQ ID NO: 5027840 - DNA, 25 bp, Homo sapien
tctgtttctgttaagcgtgagcact

SEQ ID NO: 5027841 - DNA, 25 bp, Homo sapien
tggaacactttagggttggcagact

SEQ ID NO: 5027842 - DNA, 25 bp, Homo sapien
gatggattatacatgtcactaaggg

SEQ ID NO: 5027843 - DNA, 25 bp, Homo sapien
gcttttgatataatggaactctgga

SEQ ID NO: 5027844 - DNA, 25 bp, Homo sapien
ctcccaaaagcattgataacaagtg

SEQ ID NO: 5027845 - DNA, 25 bp, Homo sapien
tgtactgcaatagtgttctgcttcc

SEQ ID NO: 5027846 - DNA, 25 bp, Homo sapien
taggtcaagagagattatcaccctc

SEQ ID NO: 5027847 - DNA, 25 bp, Homo sapien
gatcacgtatctccctctaggaaca

SEQ ID NO: 5027848 - DNA, 25 bp, Homo sapien
agacgggtggcctctatctacaggg

SEQ ID NO: 5027849 - DNA, 25 bp, Homo sapien
gaataaatacccgtaaagagctcac

SEQ ID NO: 5027850 - DNA, 25 bp, Homo sapien
gaacgtagtactagcagccatgagg

SEQ ID NO: 5027851 - DNA, 25 bp, Homo sapien
cactgcataaacactcatggagaga

SEQ ID NO: 5027852 - DNA, 25 bp, Homo sapien
gagatgagggcaaataatgcacaca

SEQ ID NO: 5027853 - DNA, 25 bp, Homo sapien
aatgcacacaatggatgtaaatggc

SEQ ID NO: 5027854 - DNA, 25 bp, Homo sapien
gacaattggtcatgacatagtcacc

SEQ ID NO: 5027855 - DNA, 25 bp, Homo sapien
gattactagaagcactgatacacag

SEQ ID NO: 5027856 - DNA, 25 bp, Homo sapien
ttaacaccttctgcgatgaaatctt

SEQ ID NO: 5027857 - DNA, 25 bp, Homo sapien
ttcctcatcaaacatacagcagcat

SEQ ID NO: 5027858 - DNA, 25 bp, Homo sapien
caccacttaagtcaatacaggccac

SEQ ID NO: 5027859 - DNA, 25 bp, Homo sapien
ggccacattaacaccttctgcgatg

SEQ ID NO: 5027860 - DNA, 25 bp, Homo sapien
aaaaacagaagaccgcagctatggg

SEQ ID NO: 5027861 - DNA, 25 bp, Homo sapien
cagcatctgctactgtgatattttc

SEQ ID NO: 5027862 - DNA, 25 bp, Homo sapien
gcactggcccagtaaaggagatctg

SEQ ID NO: 5027863 - DNA, 25 bp, Homo sapien
tgcagccaatacttataggaggaac

SEQ ID NO: 5027864 - DNA, 25 bp, Homo sapien
cctgctcaagatctgagaaagttgg

SEQ ID NO: 5027865 - DNA, 25 bp, Homo sapien
tcaggcaagagctccatgtttaagg

SEQ ID NO: 5027866 - DNA, 25 bp, Homo sapien
gggagatcattacccagtgatatgg

SEQ ID NO: 5027867 - DNA, 25 bp, Homo sapien
gcaacaggctacaacaaatagtggt

SEQ ID NO: 5027868 - DNA, 25 bp, Homo sapien
cattggtaaacaaagattggtagga

SEQ ID NO: 5027869 - DNA, 25 bp, Homo sapien
gctgtgttttgctcaggtaagacta

SEQ ID NO: 5027870 - DNA, 25 bp, Homo sapien
tataatgtgatggagcaatgcaaag

SEQ ID NO: 5027871 - DNA, 25 bp, Homo sapien
gaaatgcatgataatgcttcattgg

SEQ ID NO: 5027872 - DNA, 25 bp, Homo sapien
cataggtcagatgcagttatctgaa

SEQ ID NO: 5027873 - DNA, 25 bp, Homo sapien
cccataggtcagatgcagttatctg

SEQ ID NO: 5027874 - DNA, 25 bp, Homo sapien
tccccataggtcagatgcagttatc

SEQ ID NO: 5027875 - DNA, 25 bp, Homo sapien
ttttccccataggtcagatgcagtt

SEQ ID NO: 5027876 - DNA, 25 bp, Homo sapien
ggaacatttgccatgtccagagagc

SEQ ID NO: 5027877 - DNA, 25 bp, Homo sapien
catgtccagagagcattgatacttc

SEQ ID NO: 5027878 - DNA, 25 bp, Homo sapien
cttcattgtacagcaccaggtaaca

SEQ ID NO: 5027879 - DNA, 25 bp, Homo sapien
cagagcacttttatactcccctcag

SEQ ID NO: 5027880 - DNA, 25 bp, Homo sapien
tggttagagggagatccccaaacaa

SEQ ID NO: 5027881 - DNA, 25 bp, Homo sapien
tacagtaacttatgcatttaggcag

SEQ ID NO: 5027882 - DNA, 25 bp, Homo sapien
tgtacagtatacatagaccaactcc

SEQ ID NO: 5027883 - DNA, 25 bp, Homo sapien
tctggtatgtcttaaagggcatggg

SEQ ID NO: 5027884 - DNA, 25 bp, Homo sapien
cagaagtatgatgtggctgaacctc

SEQ ID NO: 5027885 - DNA, 25 bp, Homo sapien
taacgatgtggacattagccagaag

SEQ ID NO: 5027886 - DNA, 25 bp, Homo sapien
tcaaggtcaaagtcacgatgtccat

SEQ ID NO: 5027887 - DNA, 25 bp, Homo sapien
aaaggtcttagactgccagatgctg

SEQ ID NO: 5027888 - DNA, 25 bp, Homo sapien
cacatccaaatcttcctgagacaga

SEQ ID NO: 5027889 - DNA, 25 bp, Homo sapien
ttccttggtcgcatctgacacaggg

SEQ ID NO: 5027890 - DNA, 25 bp, Homo sapien
gagatccctcatttgttgcagtgta

SEQ ID NO: 5027891 - DNA, 25 bp, Homo sapien
gagggggtctgtctagccacatcca

SEQ ID NO: 5027892 - DNA, 25 bp, Homo sapien
tgaggcggagtgcagaagcgagggc

SEQ ID NO: 5027893 - DNA, 25 bp, Homo sapien
ctggagacagccgagagccgccttc

SEQ ID NO: 5027894 - DNA, 25 bp, Homo sapien
gtttcccgatgaaggggcggccatg

SEQ ID NO: 5027895 - DNA, 25 bp, Homo sapien
agacagccgagagccgccttcaagg

SEQ ID NO: 5027896 - DNA, 25 bp, Homo sapien
cctctggggtgaggaaactgcgact

SEQ ID NO: 5027897 - DNA, 25 bp, Homo sapien
aactgcgactgggagcgggacccag

SEQ ID NO: 5027898 - DNA, 25 bp, Homo sapien
gacccaggcgtgcagcattcgccat

SEQ ID NO: 5027899 - DNA, 25 bp, Homo sapien
agacctccctcgacgcccgacagct

SEQ ID NO: 5027900 - DNA, 25 bp, Homo sapien
tcagcttatatggagagacagcctc

SEQ ID NO: 5027901 - DNA, 25 bp, Homo sapien
tagtaggccacttccaggttaggca

SEQ ID NO: 5027902 - DNA, 25 bp, Homo sapien
tatgtacaaaactacttgagtattg

SEQ ID NO: 5027903 - DNA, 25 bp, Homo sapien
tgctaaggtaacattttagagccct

SEQ ID NO: 5027904 - DNA, 25 bp, Homo sapien
tgcggtcaagaggataacttggtac

SEQ ID NO: 5027905 - DNA, 25 bp, Homo sapien
caacaaagtgaaacgctgattccta

SEQ ID NO: 5027906 - DNA, 25 bp, Homo sapien
gtcatttgcactttgtttcagtagc

SEQ ID NO: 5027907 - DNA, 25 bp, Homo sapien
aaaggcaggatttctacctactgcg

SEQ ID NO: 5027908 - DNA, 25 bp, Homo sapien
tattatttcagctagtaaccaggtc

SEQ ID NO: 5027909 - DNA, 25 bp, Homo sapien
caggtcaaaacttcgttatcttact

SEQ ID NO: 5027910 - DNA, 25 bp, Homo sapien
tattgaacatcagcagagtgatgaa

SEQ ID NO: 5027911 - DNA, 25 bp, Homo sapien
tatcttacttgtttataacctagcc

SEQ ID NO: 5027912 - DNA, 25 bp, Homo sapien
tacatttcactcactgtagttaata

SEQ ID NO: 5027913 - DNA, 25 bp, Homo sapien
tgtttatgactgagaactgtacata

SEQ ID NO: 5027914 - DNA, 25 bp, Homo sapien
gtagttaatattgagctcccccaga

SEQ ID NO: 5027915 - DNA, 25 bp, Homo sapien
gtacatacatttcactcactgtagt

SEQ ID NO: 5027916 - DNA, 25 bp, Homo sapien
tgatgctttttaagtaagggtagga

SEQ ID NO: 5027917 - DNA, 25 bp, Homo sapien
cttatacatagaagtaaaatcacag

SEQ ID NO: 5027918 - DNA, 25 bp, Homo sapien
caatttttacagaccccctattgat

SEQ ID NO: 5027919 - DNA, 25 bp, Homo sapien
tttattcagaaatgatgctttttaa

SEQ ID NO: 5027920 - DNA, 25 bp, Homo sapien
gcaaacactcaaatcttatcaaccc

SEQ ID NO: 5027921 - DNA, 25 bp, Homo sapien
tatgcacagtttcatcaattaacag

SEQ ID NO: 5027922 - DNA, 25 bp, Homo sapien
cagtaaagagctattcaagacttct

SEQ ID NO: 5027923 - DNA, 25 bp, Homo sapien
tagtacattgtaaacttatgcacag

SEQ ID NO: 5027924 - DNA, 25 bp, Homo sapien
gataagaacgggtacctcagacgac

SEQ ID NO: 5027925 - DNA, 25 bp, Homo sapien
gggacacattggcacacggtaacaa

SEQ ID NO: 5027926 - DNA, 25 bp, Homo sapien
catgcctttgaagatacctccggtt

SEQ ID NO: 5027927 - DNA, 25 bp, Homo sapien
gagcatgctttctataccccactgg

SEQ ID NO: 5027928 - DNA, 25 bp, Homo sapien
catgaggcggtttgcatgaacttct

SEQ ID NO: 5027929 - DNA, 25 bp, Homo sapien
gagcaaggccccgatgttatacaca

SEQ ID NO: 5027930 - DNA, 25 bp, Homo sapien
caaaatccagctctctcatgaggcg

SEQ ID NO: 5027931 - DNA, 25 bp, Homo sapien
tgggatgacaccatccaacctctct

SEQ ID NO: 5027932 - DNA, 25 bp, Homo sapien
tgctccgcatggtttcgatgacctg

SEQ ID NO: 5027933 - DNA, 25 bp, Homo sapien
taggcacagttcgtccctcagagag

SEQ ID NO: 5027934 - DNA, 25 bp, Homo sapien
tgggaagctctccatcgagtctggt

SEQ ID NO: 5027935 - DNA, 25 bp, Homo sapien
tgtagggcaccacgtcggtctgaac

SEQ ID NO: 5027936 - DNA, 25 bp, Homo sapien
ggaagtatgggattgttcccgcacg

SEQ ID NO: 5027937 - DNA, 25 bp, Homo sapien
cattcatgcacggatataaacacgg

SEQ ID NO: 5027938 - DNA, 25 bp, Homo sapien
gagaaagaagttgtcctacacccca

SEQ ID NO: 5027939 - DNA, 25 bp, Homo sapien
ataaacacggcttaattggtccacg

SEQ ID NO: 5027940 - DNA, 25 bp, Homo sapien
tttctgctgcagtggagtcaaatac

SEQ ID NO: 5027941 - DNA, 25 bp, Homo sapien
ggagtcggcgctcagattccttcag

SEQ ID NO: 5027942 - DNA, 25 bp, Homo sapien
caccgcaagacatgtaccttccaga

SEQ ID NO: 5027943 - DNA, 25 bp, Homo sapien
tgacaccatgattttcaccgcaaga

SEQ ID NO: 5027944 - DNA, 25 bp, Homo sapien
ggatggatattgacagggctcagct

SEQ ID NO: 5027945 - DNA, 25 bp, Homo sapien
tgagttgctactgcttggggaagaa

SEQ ID NO: 5027946 - DNA, 25 bp, Homo sapien
gatggggctacagtcgcttcctttg

SEQ ID NO: 5027947 - DNA, 25 bp, Homo sapien
aagaaggtgcataactgggatggat

SEQ ID NO: 5027948 - DNA, 25 bp, Homo sapien
agctccattactccgcccatgagga

SEQ ID NO: 5027949 - DNA, 25 bp, Homo sapien
tgtgacgaagctccattactccgcc

SEQ ID NO: 5027950 - DNA, 25 bp, Homo sapien
attactccgcccatgaggacctcga

SEQ ID NO: 5027951 - DNA, 25 bp, Homo sapien
caggcttgtgtgacgaagctccatt

SEQ ID NO: 5027952 - DNA, 25 bp, Homo sapien
ccaatttatagagttgaaaggcgca

SEQ ID NO: 5027953 - DNA, 25 bp, Homo sapien
gggctaatgtcttactccttaaatc

SEQ ID NO: 5027954 - DNA, 25 bp, Homo sapien
caattattcgtgtagactgtcctta

SEQ ID NO: 5027955 - DNA, 25 bp, Homo sapien
actgtccttaggagcggccttcttc

SEQ ID NO: 5027956 - DNA, 25 bp, Homo sapien
tttctctccttgtgacatcagcaca

SEQ ID NO: 5027957 - DNA, 25 bp, Homo sapien
tgacatcagcacaagcaacctctcc

SEQ ID NO: 5027958 - DNA, 25 bp, Homo sapien
tctccttgtgacatcagcacaagca

SEQ ID NO: 5027959 - DNA, 25 bp, Homo sapien
ccttgtgacatcagcacaagcaacc

SEQ ID NO: 5027960 - DNA, 25 bp, Homo sapien
tatttgcatttggttcatgtcaggg

SEQ ID NO: 5027961 - DNA, 25 bp, Homo sapien
ctaagaacatacacaatgtagaata

SEQ ID NO: 5027962 - DNA, 25 bp, Homo sapien
ggtaccccatacaggaggaggagaa

SEQ ID NO: 5027963 - DNA, 25 bp, Homo sapien
gaaaacagggcaagataaacagagc

SEQ ID NO: 5027964 - DNA, 25 bp, Homo sapien
ttgcgtgaagaagaagaccgcttgc

SEQ ID NO: 5027965 - DNA, 25 bp, Homo sapien
tggacctcaggagcggaaatgctgc

SEQ ID NO: 5027966 - DNA, 25 bp, Homo sapien
tgcttcccgcagtcgacatatggac

SEQ ID NO: 5027967 - DNA, 25 bp, Homo sapien
aagaagaccgcttgcttcccgcagt

SEQ ID NO: 5027968 - DNA, 25 bp, Homo sapien
tctctcccatcctccttctccaccc

SEQ ID NO: 5027969 - DNA, 25 bp, Homo sapien
tctcccatcctccttctccacccat

SEQ ID NO: 5027970 - DNA, 25 bp, Homo sapien
cttctctcccatcctccttctccac

SEQ ID NO: 5027971 - DNA, 25 bp, Homo sapien
ccttctctcccatcctccttctcca

SEQ ID NO: 5027972 - DNA, 25 bp, Homo sapien
ccctggattttctcagtagcactga

SEQ ID NO: 5027973 - DNA, 25 bp, Homo sapien
cctggattttctcagtagcactgac

SEQ ID NO: 5027974 - DNA, 25 bp, Homo sapien
tccctggattttctcagtagcactg

SEQ ID NO: 5027975 - DNA, 25 bp, Homo sapien
cctccactgcatttaaacagagcag

SEQ ID NO: 5027976 - DNA, 25 bp, Homo sapien
ccacctccactgcatttaaacagag

SEQ ID NO: 5027977 - DNA, 25 bp, Homo sapien
cacctccactgcatttaaacagagc

SEQ ID NO: 5027978 - DNA, 25 bp, Homo sapien
tccacctccactgcatttaaacaga

SEQ ID NO: 5027979 - DNA, 25 bp, Homo sapien
ttaaccctgacatgtgttcaaggaa

SEQ ID NO: 5027980 - DNA, 25 bp, Homo sapien
caggcggaacagttcctgcacgcct

SEQ ID NO: 5027981 - DNA, 25 bp, Homo sapien
acagttcctgcacgcctgccttggg

SEQ ID NO: 5027982 - DNA, 25 bp, Homo sapien
aatatttccaagataagtcctggca

SEQ ID NO: 5027983 - DNA, 25 bp, Homo sapien
agagcccagtgtccgccccaggagg

SEQ ID NO: 5027984 - DNA, 25 bp, Homo sapien
gatgcctcgctcctacttctgtctt

SEQ ID NO: 5027985 - DNA, 25 bp, Homo sapien
tgggatgcctcgctcctacttctgt

SEQ ID NO: 5027986 - DNA, 25 bp, Homo sapien
gcactgggatgcctcgctcctactt

SEQ ID NO: 5027987 - DNA, 25 bp, Homo sapien
tgctcacaaattatgctctgcattt

SEQ ID NO: 5027988 - DNA, 25 bp, Homo sapien
tgctctgctcacaaattatgctctg

SEQ ID NO: 5027989 - DNA, 25 bp, Homo sapien
tttgctctgctcacaaattatgctc

SEQ ID NO: 5027990 - DNA, 25 bp, Homo sapien
tctgctcacaaattatgctctgcat

SEQ ID NO: 5027991 - DNA, 25 bp, Homo sapien
tttgtttagagctgccagatgtcag

SEQ ID NO: 5027992 - DNA, 25 bp, Homo sapien
aaaattgagccatgactaaccgttg

SEQ ID NO: 5027993 - DNA, 25 bp, Homo sapien
cctttgcctaagtagtcatgagcat

SEQ ID NO: 5027994 - DNA, 25 bp, Homo sapien
caggcattaatcatttgcccagcag

SEQ ID NO: 5027995 - DNA, 25 bp, Homo sapien
ccagcacaggctggggtatgtcttt

SEQ ID NO: 5027996 - DNA, 25 bp, Homo sapien
agaaggtaagctccatagactttca

SEQ ID NO: 5027997 - DNA, 25 bp, Homo sapien
tgtgcagctcatatctcagtagagt

SEQ ID NO: 5027998 - DNA, 25 bp, Homo sapien
tgcagaaatacagtgtgtgcagctc

SEQ ID NO: 5027999 - DNA, 25 bp, Homo sapien
gtatttgaggctcgggtttgctgcc

SEQ ID NO: 5028000 - DNA, 25 bp, Homo sapien
ttcaagcccacagttacatctaatg

SEQ ID NO: 5028001 - DNA, 25 bp, Homo sapien
aaatttcagagtgttattcaagccc

SEQ ID NO: 5028002 - DNA, 25 bp, Homo sapien
gtatctgaaatagcttacagcctgt

SEQ ID NO: 5028003 - DNA, 25 bp, Homo sapien
atcctctgctattgtcgtaaggtta

SEQ ID NO: 5028004 - DNA, 25 bp, Homo sapien
taggtctccaatttcagtagcaggg

SEQ ID NO: 5028005 - DNA, 25 bp, Homo sapien
tagagttcagcttagctaggtctcc

SEQ ID NO: 5028006 - DNA, 25 bp, Homo sapien
gctattgtcgtaaggttattagagt

SEQ ID NO: 5028007 - DNA, 25 bp, Homo sapien
aactaaatacgggaggagcacctgg

SEQ ID NO: 5028008 - DNA, 25 bp, Homo sapien
cagattcagccttgcgtgttttgca

SEQ ID NO: 5028009 - DNA, 25 bp, Homo sapien
taccagtctccttaatagcctccag

SEQ ID NO: 5028010 - DNA, 25 bp, Homo sapien
gaggaggttctttgtcacaacttcc

SEQ ID NO: 5028011 - DNA, 25 bp, Homo sapien
cccttccccgaggtcctgtgacata

SEQ ID NO: 5028012 - DNA, 25 bp, Homo sapien
gcaaggtacaggcttgctcggctca

SEQ ID NO: 5028013 - DNA, 25 bp, Homo sapien
agtttccagaaccagttcctgcctg

SEQ ID NO: 5028014 - DNA, 25 bp, Homo sapien
tgccgggccctgttggcaaggtaca

SEQ ID NO: 5028015 - DNA, 25 bp, Homo sapien
gaatctagagcaagagacctaaaat

SEQ ID NO: 5028016 - DNA, 25 bp, Homo sapien
gcagtgttccagaatctagagcaag

SEQ ID NO: 5028017 - DNA, 25 bp, Homo sapien
ttttaataactccttcctgaggtga

SEQ ID NO: 5028018 - DNA, 25 bp, Homo sapien
cttcctgaggtgaacagcagtgttc

SEQ ID NO: 5028019 - DNA, 25 bp, Homo sapien
taccgtacagaattaggtcgcactc

SEQ ID NO: 5028020 - DNA, 25 bp, Homo sapien
tgagcctccgtataagagccactaa

SEQ ID NO: 5028021 - DNA, 25 bp, Homo sapien
cagagaactataggtcacggtgcag

SEQ ID NO: 5028022 - DNA, 25 bp, Homo sapien
ggtcgcactcaaaaaagctgtagca

SEQ ID NO: 5028023 - DNA, 25 bp, Homo sapien
ctgctcaggtgatatttatgcctct

SEQ ID NO: 5028024 - DNA, 25 bp, Homo sapien
aactgctcaggtgatatttatgcct

SEQ ID NO: 5028025 - DNA, 25 bp, Homo sapien
aaaactgctcaggtgatatttatgc

SEQ ID NO: 5028026 - DNA, 25 bp, Homo sapien
taaaaactgctcaggtgatatttat

SEQ ID NO: 5028027 - DNA, 25 bp, Homo sapien
aagggtcattgaactaggattcata

SEQ ID NO: 5028028 - DNA, 25 bp, Homo sapien
ggaagggtcattgaactaggattca

SEQ ID NO: 5028029 - DNA, 25 bp, Homo sapien
gggaagggtcattgaactaggattc

SEQ ID NO: 5028030 - DNA, 25 bp, Homo sapien
gggtcattgaactaggattcataaa

SEQ ID NO: 5028031 - DNA, 25 bp, Homo sapien
ctgaatcccatagcctacctttgct

SEQ ID NO: 5028032 - DNA, 25 bp, Homo sapien
gactgagtctctaatgtgcactaga

SEQ ID NO: 5028033 - DNA, 25 bp, Homo sapien
ccatagcctacctttgctgttgagg

SEQ ID NO: 5028034 - DNA, 25 bp, Homo sapien
gcaaaaagaggatggtagggccagc

SEQ ID NO: 5028035 - DNA, 25 bp, Homo sapien
taagaaacaaggactcatgcaagcc

SEQ ID NO: 5028036 - DNA, 25 bp, Homo sapien
tgtgtacatcagtgactcaggaaga

SEQ ID NO: 5028037 - DNA, 25 bp, Homo sapien
tatcaggcaccactaggaaatagag

SEQ ID NO: 5028038 - DNA, 25 bp, Homo sapien
tagaggatacctcccaatgacgatg

SEQ ID NO: 5028039 - DNA, 25 bp, Homo sapien
ctggtttcacaaggcctgactttga

SEQ ID NO: 5028040 - DNA, 25 bp, Homo sapien
tccagcatctgagggtgtcttcaca

SEQ ID NO: 5028041 - DNA, 25 bp, Homo sapien
tatatcgagaggactgaatgcttcc

SEQ ID NO: 5028042 - DNA, 25 bp, Homo sapien
tcacttccagggcaaaagccaatgg

SEQ ID NO: 5028043 - DNA, 25 bp, Homo sapien
gtacactctgcttatgaagcccagg

SEQ ID NO: 5028044 - DNA, 25 bp, Homo sapien
cttatgaagcccaggttaactgctg

SEQ ID NO: 5028045 - DNA, 25 bp, Homo sapien
actcgcacacgtacactctgcttat

SEQ ID NO: 5028046 - DNA, 25 bp, Homo sapien
ccaggttaactgctgtggactctcc

SEQ ID NO: 5028047 - DNA, 25 bp, Homo sapien
gagaacccttcttggtggctgttgc

SEQ ID NO: 5028048 - DNA, 25 bp, Homo sapien
cagtcttcgggctcttttaaatacg

SEQ ID NO: 5028049 - DNA, 25 bp, Homo sapien
tggtttttagggtgctgctcatgcc

SEQ ID NO: 5028050 - DNA, 25 bp, Homo sapien
ctgaagaaactctggccctgaataa

SEQ ID NO: 5028051 - DNA, 25 bp, Homo sapien
tcccatcgccaacagtgggaaaacc

SEQ ID NO: 5028052 - DNA, 25 bp, Homo sapien
ccaaatgcacccatcgagtcttctt

SEQ ID NO: 5028053 - DNA, 25 bp, Homo sapien
cttcccatcgccaacagtgggaaaa

SEQ ID NO: 5028054 - DNA, 25 bp, Homo sapien
aaatgcacccatcgagtcttcttcc

SEQ ID NO: 5028055 - DNA, 25 bp, Homo sapien
aggatttctgagctattttggagct

SEQ ID NO: 5028056 - DNA, 25 bp, Homo sapien
ccataaaagtcactctggcgaagcc

SEQ ID NO: 5028057 - DNA, 25 bp, Homo sapien
tattttggagcttcgagtgctccca

SEQ ID NO: 5028058 - DNA, 25 bp, Homo sapien
gcttcgagtgctcccataaaagtca

SEQ ID NO: 5028059 - DNA, 25 bp, Homo sapien
tcaaaaccttgcttatgtgccagct

SEQ ID NO: 5028060 - DNA, 25 bp, Homo sapien
cacaacactggagtcatggttctat

SEQ ID NO: 5028061 - DNA, 25 bp, Homo sapien
gagatgctaaactcctcaggacagg

SEQ ID NO: 5028062 - DNA, 25 bp, Homo sapien
aaaagatctctcttctagatgccca

SEQ ID NO: 5028063 - DNA, 25 bp, Homo sapien
ggtcatcggcttttctaacagtggc

SEQ ID NO: 5028064 - DNA, 25 bp, Homo sapien
ctaggtcatcggcttttctaacagt

SEQ ID NO: 5028065 - DNA, 25 bp, Homo sapien
aggtcatcggcttttctaacagtgg

SEQ ID NO: 5028066 - DNA, 25 bp, Homo sapien
taggtcatcggcttttctaacagtg

SEQ ID NO: 5028067 - DNA, 25 bp, Homo sapien
ttgctgaagtatagctaccatccac

SEQ ID NO: 5028068 - DNA, 25 bp, Homo sapien
gaattcccttaactaggcatggccc

SEQ ID NO: 5028069 - DNA, 25 bp, Homo sapien
tggccccttttacatgagtgaatgt

SEQ ID NO: 5028070 - DNA, 25 bp, Homo sapien
tactggaaggttgcgaagctatgat

SEQ ID NO: 5028071 - DNA, 25 bp, Homo sapien
gagttcatccacactcaccagggtg

SEQ ID NO: 5028072 - DNA, 25 bp, Homo sapien
cagtttgaaatgacgtgcccagagt

SEQ ID NO: 5028073 - DNA, 25 bp, Homo sapien
gaactgagttatgtacacaaagctc

SEQ ID NO: 5028074 - DNA, 25 bp, Homo sapien
ttgattacagggagagaataccagg

SEQ ID NO: 5028075 - DNA, 25 bp, Homo sapien
atatggggccgaagaatcaaccggg

SEQ ID NO: 5028076 - DNA, 25 bp, Homo sapien
tgctgctaacggtcctcgctgagcg

SEQ ID NO: 5028077 - DNA, 25 bp, Homo sapien
gggaattcggcttcgagaaatctcc

SEQ ID NO: 5028078 - DNA, 25 bp, Homo sapien
gaagctgttgctgctaacggtcctc

SEQ ID NO: 5028079 - DNA, 25 bp, Homo sapien
cagcaggtaccatgcgccagccact

SEQ ID NO: 5028080 - DNA, 25 bp, Homo sapien
gaggccggcacatggcataaattga

SEQ ID NO: 5028081 - DNA, 25 bp, Homo sapien
gcagcctcggattcgccctgcacat

SEQ ID NO: 5028082 - DNA, 25 bp, Homo sapien
ttgaagggtaaacctcagcaatggg

SEQ ID NO: 5028083 - DNA, 25 bp, Homo sapien
ctgcccgccggctcctcgcgccgcc

SEQ ID NO: 5028084 - DNA, 25 bp, Homo sapien
gctgccgccgtccaggaggaggcac

SEQ ID NO: 5028085 - DNA, 25 bp, Homo sapien
cgccgctgccgccgtccaggaggag

SEQ ID NO: 5028086 - DNA, 25 bp, Homo sapien
cgctgccgccgtccaggaggaggca

SEQ ID NO: 5028087 - DNA, 25 bp, Homo sapien
agcacggagcgaggagactgcgctg

SEQ ID NO: 5028088 - DNA, 25 bp, Homo sapien
gagcacggagcgaggagactgcgct

SEQ ID NO: 5028089 - DNA, 25 bp, Homo sapien
tgcctcgcccgagagctgcagagat

SEQ ID NO: 5028090 - DNA, 25 bp, Homo sapien
tggcgttggatggagtgactgagaa

SEQ ID NO: 5028091 - DNA, 25 bp, Homo sapien
ggcctccaggtcttaagtcagccta

SEQ ID NO: 5028092 - DNA, 25 bp, Homo sapien
gactgagaaaagctgcgacatcaca

SEQ ID NO: 5028093 - DNA, 25 bp, Homo sapien
aaggccttcagtggtcagcgcagct

SEQ ID NO: 5028094 - DNA, 25 bp, Homo sapien
tctgggttccgggatctgaaaggct

SEQ ID NO: 5028095 - DNA, 25 bp, Homo sapien
gaagtagctccagcacactgctaag

SEQ ID NO: 5028096 - DNA, 25 bp, Homo sapien
gaagccaggctgctatgtagccaga

SEQ ID NO: 5028097 - DNA, 25 bp, Homo sapien
ctgtgagggttaggtgaggaaaaca

SEQ ID NO: 5028098 - DNA, 25 bp, Homo sapien
ccaaagggcagctaagtcaggtcca

SEQ ID NO: 5028099 - DNA, 25 bp, Homo sapien
ctctaggatagctgtgagggttagg

SEQ ID NO: 5028100 - DNA, 25 bp, Homo sapien
agctaagtcaggtccagatgatcca

SEQ ID NO: 5028101 - DNA, 25 bp, Homo sapien
tattccaagcagtgcgacactctga

SEQ ID NO: 5028102 - DNA, 25 bp, Homo sapien
agtgcgacactctgatccttatgca

SEQ ID NO: 5028103 - DNA, 25 bp, Homo sapien
attggagaatattccaagcagtgcg

SEQ ID NO: 5028104 - DNA, 25 bp, Homo sapien
caagcagtgcgacactctgatcctt

SEQ ID NO: 5028105 - DNA, 25 bp, Homo sapien
ggaggactgtgctcctcgaaaactg

SEQ ID NO: 5028106 - DNA, 25 bp, Homo sapien
cctcaactctcaagcctaagaatat

SEQ ID NO: 5028107 - DNA, 25 bp, Homo sapien
gagggtcattgtcccctttcatcca

SEQ ID NO: 5028108 - DNA, 25 bp, Homo sapien
gaatatatgttgtgagtctagagag

SEQ ID NO: 5028109 - DNA, 25 bp, Homo sapien
ctctcggtgacctaatgttgggtga

SEQ ID NO: 5028110 - DNA, 25 bp, Homo sapien
tcagggctgacaaagcaccatctcc

SEQ ID NO: 5028111 - DNA, 25 bp, Homo sapien
taatcctatcagctgtgtgagcaag

SEQ ID NO: 5028112 - DNA, 25 bp, Homo sapien
tgagcaagagctgctgtctctctcg

SEQ ID NO: 5028113 - DNA, 25 bp, Homo sapien
ctttggatttgcctccaaggtcttc

SEQ ID NO: 5028114 - DNA, 25 bp, Homo sapien
gatttgcctccaaggtcttctctgt

SEQ ID NO: 5028115 - DNA, 25 bp, Homo sapien
tttgcctccaaggtcttctctgtct

SEQ ID NO: 5028116 - DNA, 25 bp, Homo sapien
ttggatttgcctccaaggtcttctc

SEQ ID NO: 5028117 - DNA, 25 bp, Homo sapien
tgtactcacagctctaccaaatagc

SEQ ID NO: 5028118 - DNA, 25 bp, Homo sapien
cacacactaagcactcaatgaacgt

SEQ ID NO: 5028119 - DNA, 25 bp, Homo sapien
tcgtttacctgaactctggatccca

SEQ ID NO: 5028120 - DNA, 25 bp, Homo sapien
aacatggaagagcaccctgcacaca

SEQ ID NO: 5028121 - DNA, 25 bp, Homo sapien
tttgcctttcgggtatattcactgg

SEQ ID NO: 5028122 - DNA, 25 bp, Homo sapien
tgccagagtcatggcatttgctcct

SEQ ID NO: 5028123 - DNA, 25 bp, Homo sapien
gataaaatgattttcggcttcgaaa

SEQ ID NO: 5028124 - DNA, 25 bp, Homo sapien
tattcactggataatttgatttgcc

SEQ ID NO: 5028125 - DNA, 25 bp, Homo sapien
tgtgcaacagcaagaaccataggtt

SEQ ID NO: 5028126 - DNA, 25 bp, Homo sapien
tgtccaattagtgttgctattacta

SEQ ID NO: 5028127 - DNA, 25 bp, Homo sapien
aacttaaaagtattgtgcaacagca

SEQ ID NO: 5028128 - DNA, 25 bp, Homo sapien
cagcttactgtatatgtccaattag

SEQ ID NO: 5028129 - DNA, 25 bp, Homo sapien
tccaaatgtacaagtggagaaaact

SEQ ID NO: 5028130 - DNA, 25 bp, Homo sapien
catagagaatacctgactccttttg

SEQ ID NO: 5028131 - DNA, 25 bp, Homo sapien
gacaggtgctactgctctccaaatg

SEQ ID NO: 5028132 - DNA, 25 bp, Homo sapien
ctgactccttttgccccaagggcgc

SEQ ID NO: 5028133 - DNA, 25 bp, Homo sapien
gatatccagatgttatagctgccct

SEQ ID NO: 5028134 - DNA, 25 bp, Homo sapien
cagaggacgcaagaggaacctagca

SEQ ID NO: 5028135 - DNA, 25 bp, Homo sapien
gaacctagcagtggagtctcctgtt

SEQ ID NO: 5028136 - DNA, 25 bp, Homo sapien
tccttgatagcactacctgctggac

SEQ ID NO: 5028137 - DNA, 25 bp, Homo sapien
agaaacttgaaaagtgtcctctggg

SEQ ID NO: 5028138 - DNA, 25 bp, Homo sapien
gcttcctggagaacacctattctta

SEQ ID NO: 5028139 - DNA, 25 bp, Homo sapien
ggacttgggactgtctccctctttg

SEQ ID NO: 5028140 - DNA, 25 bp, Homo sapien
taatgaaccttccttatcaaaagcc

SEQ ID NO: 5028141 - DNA, 25 bp, Homo sapien
tgagagtgcccttgattccccattt

SEQ ID NO: 5028142 - DNA, 25 bp, Homo sapien
gtgcatcgccgagcaccctggatac

SEQ ID NO: 5028143 - DNA, 25 bp, Homo sapien
gagagtgcccttgattccccatttt

SEQ ID NO: 5028144 - DNA, 25 bp, Homo sapien
ttccacgaccttcttctgtgcatcg

SEQ ID NO: 5028145 - DNA, 25 bp, Homo sapien
gccctcattgtaccgaagaccatca

SEQ ID NO: 5028146 - DNA, 25 bp, Homo sapien
tgtaccgaagaccatcagttgccct

SEQ ID NO: 5028147 - DNA, 25 bp, Homo sapien
actgccctcattgtaccgaagacca

SEQ ID NO: 5028148 - DNA, 25 bp, Homo sapien
aagaccatcagttgccctcccgtgt

SEQ ID NO: 5028149 - DNA, 25 bp, Homo sapien
cagcagagaccgcataggcgccccg

SEQ ID NO: 5028150 - DNA, 25 bp, Homo sapien
agagaccgcataggcgccccggtct

SEQ ID NO: 5028151 - DNA, 25 bp, Homo sapien
tgacagcagagaccgcataggcgcc

SEQ ID NO: 5028152 - DNA, 25 bp, Homo sapien
ctgacagcagagaccgcataggcgc

SEQ ID NO: 5028153 - DNA, 25 bp, Homo sapien
cctttctcgcccagaagggccccat

SEQ ID NO: 5028154 - DNA, 25 bp, Homo sapien
ggacgggaccccgcgtcgctgctgg

SEQ ID NO: 5028155 - DNA, 25 bp, Homo sapien
acgggaccccgcgtcgctgctggtt

SEQ ID NO: 5028156 - DNA, 25 bp, Homo sapien
ggaccccgcgtcgctgctggtttgc

SEQ ID NO: 5028157 - DNA, 25 bp, Homo sapien
cgggaccccgcgtcgctgctggttt

SEQ ID NO: 5028158 - DNA, 25 bp, Homo sapien
gccttagcccggcttggacacgtgg

SEQ ID NO: 5028159 - DNA, 25 bp, Homo sapien
cttggacacgtggtgccgcggaatc

SEQ ID NO: 5028160 - DNA, 25 bp, Homo sapien
atcccttgcgctccggtgccctcgg

SEQ ID NO: 5028161 - DNA, 25 bp, Homo sapien
gtggtgccgcggaatcccttgcgct

SEQ ID NO: 5028162 - DNA, 25 bp, Homo sapien
tcatcttcgtagactttcttgagat

SEQ ID NO: 5028163 - DNA, 25 bp, Homo sapien
tcgtagactttcttgagatgattta

SEQ ID NO: 5028164 - DNA, 25 bp, Homo sapien
gactttcttgagatgatttatcaaa

SEQ ID NO: 5028165 - DNA, 25 bp, Homo sapien
tcttcgtagactttcttgagatgat

SEQ ID NO: 5028166 - DNA, 25 bp, Homo sapien
taccaatagccctgcaccttaagaa

SEQ ID NO: 5028167 - DNA, 25 bp, Homo sapien
tgcaaagccccaaaggttgcccagg

SEQ ID NO: 5028168 - DNA, 25 bp, Homo sapien
aaagtaggatataagcaatgatatg

SEQ ID NO: 5028169 - DNA, 25 bp, Homo sapien
caaagcattgcgagtggaaggatag

SEQ ID NO: 5028170 - DNA, 25 bp, Homo sapien
tatagcctgccccactgttagtagc

SEQ ID NO: 5028171 - DNA, 25 bp, Homo sapien
agggctactagtggctatagcctgc

SEQ ID NO: 5028172 - DNA, 25 bp, Homo sapien
tactagtggctatagcctgccccac

SEQ ID NO: 5028173 - DNA, 25 bp, Homo sapien
ctgttagtagcaccaaaatattgca

SEQ ID NO: 5028174 - DNA, 25 bp, Homo sapien
cagtttgaaacttttgttatccgtg

SEQ ID NO: 5028175 - DNA, 25 bp, Homo sapien
tgatggcccccgttcttctagtgta

SEQ ID NO: 5028176 - DNA, 25 bp, Homo sapien
gttatccgtgactcttctctgtttc

SEQ ID NO: 5028177 - DNA, 25 bp, Homo sapien
ccgttcttctagtgtaccagtttga

SEQ ID NO: 5028178 - DNA, 25 bp, Homo sapien
gctccttcctattgccatcatacat

SEQ ID NO: 5028179 - DNA, 25 bp, Homo sapien
ttgctccttcctattgccatcatac

SEQ ID NO: 5028180 - DNA, 25 bp, Homo sapien
gcaatgaccaaatctcgtagaatct

SEQ ID NO: 5028181 - DNA, 25 bp, Homo sapien
gaatctacctctgcagtgtctctct

SEQ ID NO: 5028182 - DNA, 25 bp, Homo sapien
cttatttcccatgatgtccttctgc

SEQ ID NO: 5028183 - DNA, 25 bp, Homo sapien
tctggttagtcctcctgctgttata

SEQ ID NO: 5028184 - DNA, 25 bp, Homo sapien
tgctgttatactgctaggagctggc

SEQ ID NO: 5028185 - DNA, 25 bp, Homo sapien
tactggttccgtgatctatctcaac

SEQ ID NO: 5028186 - DNA, 25 bp, Homo sapien
aacttggatgttgccctgaggtctc

SEQ ID NO: 5028187 - DNA, 25 bp, Homo sapien
aggtataagaaggacattttagtct

SEQ ID NO: 5028188 - DNA, 25 bp, Homo sapien
ggtataagaaggacattttagtcta

SEQ ID NO: 5028189 - DNA, 25 bp, Homo sapien
gtataagaaggacattttagtctat

SEQ ID NO: 5028190 - DNA, 25 bp, Homo sapien
caccatggacacttaagggatgaga

SEQ ID NO: 5028191 - DNA, 25 bp, Homo sapien
gtgttgactttactaggagtggctc

SEQ ID NO: 5028192 - DNA, 25 bp, Homo sapien
gcagatcaatctcatcaccatggac

SEQ ID NO: 5028193 - DNA, 25 bp, Homo sapien
agtggctctaatgtgaaagttgacc

SEQ ID NO: 5028194 - DNA, 25 bp, Homo sapien
gagctgtaaaggttccaataatatt

SEQ ID NO: 5028195 - DNA, 25 bp, Homo sapien
tagtagagtccacgtagcctgtggg

SEQ ID NO: 5028196 - DNA, 25 bp, Homo sapien
ccaccatctgcatgacctattgcag

SEQ ID NO: 5028197 - DNA, 25 bp, Homo sapien
tgtgggaccacctgttgatgctcct

SEQ ID NO: 5028198 - DNA, 25 bp, Homo sapien
ttctgcgagcgtcttgcaatcatcc

SEQ ID NO: 5028199 - DNA, 25 bp, Homo sapien
tttccccttatcatacccaagattg

SEQ ID NO: 5028200 - DNA, 25 bp, Homo sapien
tgtttcgcaaactctgggccttctg

SEQ ID NO: 5028201 - DNA, 25 bp, Homo sapien
catacccaagattgtggttaacaca

SEQ ID NO: 5028202 - DNA, 25 bp, Homo sapien
agaaagcacacccctctttgtgttc

SEQ ID NO: 5028203 - DNA, 25 bp, Homo sapien
tcctgagaaagcacacccctctttg

SEQ ID NO: 5028204 - DNA, 25 bp, Homo sapien
tgagaaagcacacccctctttgtgt

SEQ ID NO: 5028205 - DNA, 25 bp, Homo sapien
gagaaagcacacccctctttgtgtt

SEQ ID NO: 5028206 - DNA, 25 bp, Homo sapien
gaactttcacctttatccaggtgct

SEQ ID NO: 5028207 - DNA, 25 bp, Homo sapien
tgtcatggtggtacttgaactttca

SEQ ID NO: 5028208 - DNA, 25 bp, Homo sapien
catggtggtacttgaactttcacct

SEQ ID NO: 5028209 - DNA, 25 bp, Homo sapien
tgaactttcacctttatccaggtgc

SEQ ID NO: 5028210 - DNA, 25 bp, Homo sapien
ttttcctagccaactctgaactcat

SEQ ID NO: 5028211 - DNA, 25 bp, Homo sapien
catggacagcctccgaaccttccat

SEQ ID NO: 5028212 - DNA, 25 bp, Homo sapien
ttcatggacagcctccgaaccttcc

SEQ ID NO: 5028213 - DNA, 25 bp, Homo sapien
tggacagcctccgaaccttccattt

SEQ ID NO: 5028214 - DNA, 25 bp, Homo sapien
aatgtttagaagtgggttcatttat

SEQ ID NO: 5028215 - DNA, 25 bp, Homo sapien
atgtttagaagtgggttcatttata

SEQ ID NO: 5028216 - DNA, 25 bp, Homo sapien
caaatacagtgtctagtatgggcaa

SEQ ID NO: 5028217 - DNA, 25 bp, Homo sapien
tctagtatgggcaatttctgaaggg

SEQ ID NO: 5028218 - DNA, 25 bp, Homo sapien
tataccctctttcgtcttcggcatg

SEQ ID NO: 5028219 - DNA, 25 bp, Homo sapien
tcacagggcctgtgtatgtctttgt

SEQ ID NO: 5028220 - DNA, 25 bp, Homo sapien
ctcttaggagactggaataaatctg

SEQ ID NO: 5028221 - DNA, 25 bp, Homo sapien
tgagactcttgtcagcttttggctg

SEQ ID NO: 5028222 - DNA, 25 bp, Homo sapien
caaacttagaagtgaattctccaga

SEQ ID NO: 5028223 - DNA, 25 bp, Homo sapien
ctgatgctctctgcaaacttagaag

SEQ ID NO: 5028224 - DNA, 25 bp, Homo sapien
ttagaagtgaattctccagagatcc

SEQ ID NO: 5028225 - DNA, 25 bp, Homo sapien
tctccagagatcctgtccagggacc

SEQ ID NO: 5028226 - DNA, 25 bp, Homo sapien
agtcatggccggagtaagtgatgcc

SEQ ID NO: 5028227 - DNA, 25 bp, Homo sapien
taagtgatgcctgcgatatgcatgc

SEQ ID NO: 5028228 - DNA, 25 bp, Homo sapien
tcagggtcacccgagtcatggccgg

SEQ ID NO: 5028229 - DNA, 25 bp, Homo sapien
gccggagtaagtgatgcctgcgata

SEQ ID NO: 5028230 - DNA, 25 bp, Homo sapien
cattggaaccactgattagatcaca

SEQ ID NO: 5028231 - DNA, 25 bp, Homo sapien
gagctcaggcagcactactatcgtg

SEQ ID NO: 5028232 - DNA, 25 bp, Homo sapien
taccataccatgcagggaagagctg

SEQ ID NO: 5028233 - DNA, 25 bp, Homo sapien
tactatcgtgggactatgggatgcc

SEQ ID NO: 5028234 - DNA, 25 bp, Homo sapien
gtataataccagtggagaaaataaa

SEQ ID NO: 5028235 - DNA, 25 bp, Homo sapien
tcacaaattctgtccttcactgatg

SEQ ID NO: 5028236 - DNA, 25 bp, Homo sapien
tgtccttcactgatgctgtggtcag

SEQ ID NO: 5028237 - DNA, 25 bp, Homo sapien
caaattctgtccttcactgatgctg

SEQ ID NO: 5028238 - DNA, 25 bp, Homo sapien
gtccttcactgatgctgtggtcagc

SEQ ID NO: 5028239 - DNA, 25 bp, Homo sapien
gaaactccttgctaagcttcttgca

SEQ ID NO: 5028240 - DNA, 25 bp, Homo sapien
gcttcttgcaccacctactgttagg

SEQ ID NO: 5028241 - DNA, 25 bp, Homo sapien
cagccctctggaattaacctttctt

SEQ ID NO: 5028242 - DNA, 25 bp, Homo sapien
tagactcaacctgaattccccatgg

SEQ ID NO: 5028243 - DNA, 25 bp, Homo sapien
gtttttaatagctcagtctcagctg

SEQ ID NO: 5028244 - DNA, 25 bp, Homo sapien
cagctgtcaggaacatttgtgttaa

SEQ ID NO: 5028245 - DNA, 25 bp, Homo sapien
atctctgctgagagcattcccacag

SEQ ID NO: 5028246 - DNA, 25 bp, Homo sapien
tctgctgagagcattcccacagttt

SEQ ID NO: 5028247 - DNA, 25 bp, Homo sapien
gagctggcaatctaaaatacaaacc

SEQ ID NO: 5028248 - DNA, 25 bp, Homo sapien
tacaaacctgactcatttcacctgc

SEQ ID NO: 5028249 - DNA, 25 bp, Homo sapien
tccacactcataccagagctggcaa

SEQ ID NO: 5028250 - DNA, 25 bp, Homo sapien
tttcccttgctgatccaatttccac

SEQ ID NO: 5028251 - DNA, 25 bp, Homo sapien
caatcctttgagaccttgctcacta

SEQ ID NO: 5028252 - DNA, 25 bp, Homo sapien
tgagaccttgctcactattctccat

SEQ ID NO: 5028253 - DNA, 25 bp, Homo sapien
tggaagttttaccaatcctttgaga

SEQ ID NO: 5028254 - DNA, 25 bp, Homo sapien
tcttttgctgcctttggaagtttta

SEQ ID NO: 5028255 - DNA, 25 bp, Homo sapien
ctctaggcccttgtaaggatcagag

SEQ ID NO: 5028256 - DNA, 25 bp, Homo sapien
tcggggagtctagggccagctgttc

SEQ ID NO: 5028257 - DNA, 25 bp, Homo sapien
tgctacagccagtcggggagtctag

SEQ ID NO: 5028258 - DNA, 25 bp, Homo sapien
ccttgaggatgtggttgtggcctgg

SEQ ID NO: 5028259 - DNA, 25 bp, Homo sapien
ctgcaggtcacctgttatggttccc

SEQ ID NO: 5028260 - DNA, 25 bp, Homo sapien
tgcaggtcacctgttatggttccca

SEQ ID NO: 5028261 - DNA, 25 bp, Homo sapien
cctgcaggtcacctgttatggttcc

SEQ ID NO: 5028262 - DNA, 25 bp, Homo sapien
acctgcaggtcacctgttatggttc

SEQ ID NO: 5028263 - DNA, 25 bp, Homo sapien
aacaagggtggccagttggtatgag

SEQ ID NO: 5028264 - DNA, 25 bp, Homo sapien
aaacaagggtggccagttggtatga

SEQ ID NO: 5028265 - DNA, 25 bp, Homo sapien
agggtggccagttggtatgagtcat

SEQ ID NO: 5028266 - DNA, 25 bp, Homo sapien
caagggtggccagttggtatgagtc

SEQ ID NO: 5028267 - DNA, 25 bp, Homo sapien
gctttggttgccattccagtgagga

SEQ ID NO: 5028268 - DNA, 25 bp, Homo sapien
gagcaaggatatcagtcacccaaag

SEQ ID NO: 5028269 - DNA, 25 bp, Homo sapien
acaggaatttgtgccaaatcagacc

SEQ ID NO: 5028270 - DNA, 25 bp, Homo sapien
gctgaattagagcaaggatatcagt

SEQ ID NO: 5028271 - DNA, 25 bp, Homo sapien
tgtgcataccttttaacagctgaat

SEQ ID NO: 5028272 - DNA, 25 bp, Homo sapien
tacttgttgacttccaagtacacca

SEQ ID NO: 5028273 - DNA, 25 bp, Homo sapien
caagagagctggcaatgaattacat

SEQ ID NO: 5028274 - DNA, 25 bp, Homo sapien
gaatgtcattggtatactctcccta

SEQ ID NO: 5028275 - DNA, 25 bp, Homo sapien
aatgttcaagagagctggcaatgaa

SEQ ID NO: 5028276 - DNA, 25 bp, Homo sapien
cacaaaaggtggttgcaacgaaagc

SEQ ID NO: 5028277 - DNA, 25 bp, Homo sapien
tacaaaagtctaatattccagcatc

SEQ ID NO: 5028278 - DNA, 25 bp, Homo sapien
cagatgctggcgaagttatggagca

SEQ ID NO: 5028279 - DNA, 25 bp, Homo sapien
gagcaattggaacgcatatacactg

SEQ ID NO: 5028280 - DNA, 25 bp, Homo sapien
agattggtattcagcgctggctctg

SEQ ID NO: 5028281 - DNA, 25 bp, Homo sapien
tccacctctgagaataagctgatat

SEQ ID NO: 5028282 - DNA, 25 bp, Homo sapien
tcgttttccgggtcaggcagattgg

SEQ ID NO: 5028283 - DNA, 25 bp, Homo sapien
caagaagttggcttgcctgcctaaa

SEQ ID NO: 5028284 - DNA, 25 bp, Homo sapien
caggaggtagtacatgcgatatttc

SEQ ID NO: 5028285 - DNA, 25 bp, Homo sapien
tctgaaatccggatgcattttacag

SEQ ID NO: 5028286 - DNA, 25 bp, Homo sapien
ttcagagcttaaccatgcataccag

SEQ ID NO: 5028287 - DNA, 25 bp, Homo sapien
taatggcatcttacaattgactggc

SEQ ID NO: 5028288 - DNA, 25 bp, Homo sapien
tctaagcagttttgggattcccacc

SEQ ID NO: 5028289 - DNA, 25 bp, Homo sapien
tttaccccaacaatcagaaagctgt

SEQ ID NO: 5028290 - DNA, 25 bp, Homo sapien
gatgagcagtactctgaagagactc

SEQ ID NO: 5028291 - DNA, 25 bp, Homo sapien
gctttaactgatagagaacggagta

SEQ ID NO: 5028292 - DNA, 25 bp, Homo sapien
tcatctcccccgctgctcctagtac

SEQ ID NO: 5028293 - DNA, 25 bp, Homo sapien
aaaaccagaaatcatctcccccgct

SEQ ID NO: 5028294 - DNA, 25 bp, Homo sapien
tcaaaaccagaaatcatctcccccg

SEQ ID NO: 5028295 - DNA, 25 bp, Homo sapien
aatcatctcccccgctgctcctagt

SEQ ID NO: 5028296 - DNA, 25 bp, Homo sapien
cagtagtcatagaggtggtggccca

SEQ ID NO: 5028297 - DNA, 25 bp, Homo sapien
taggccgacttcttcgtaacactgg

SEQ ID NO: 5028298 - DNA, 25 bp, Homo sapien
gattcccacggatagaaataggagc

SEQ ID NO: 5028299 - DNA, 25 bp, Homo sapien
tatacacatgaaggccacgattttg

SEQ ID NO: 5028300 - DNA, 25 bp, Homo sapien
ccttgtaaagtttaagacaatcagg

SEQ ID NO: 5028301 - DNA, 25 bp, Homo sapien
tgtaaagtttaagacaatcaggaac

SEQ ID NO: 5028302 - DNA, 25 bp, Homo sapien
cttgtaaagtttaagacaatcagga

SEQ ID NO: 5028303 - DNA, 25 bp, Homo sapien
ttccttgtaaagtttaagacaatca

SEQ ID NO: 5028304 - DNA, 25 bp, Homo sapien
tgattacaggaaagccagaaaaagt

SEQ ID NO: 5028305 - DNA, 25 bp, Homo sapien
agccagaaaaagtaaacaatgggca

SEQ ID NO: 5028306 - DNA, 25 bp, Homo sapien
cagaaaaagtaaacaatgggcacca

SEQ ID NO: 5028307 - DNA, 25 bp, Homo sapien
agaaaaagtaaacaatgggcaccat

SEQ ID NO: 5028308 - DNA, 25 bp, Homo sapien
gaagcagcagaagcaagttaggcat

SEQ ID NO: 5028309 - DNA, 25 bp, Homo sapien
agcaacaaagtgaagcagcagaagc

SEQ ID NO: 5028310 - DNA, 25 bp, Homo sapien
agtgaagcagcagaagcaagttagg

SEQ ID NO: 5028311 - DNA, 25 bp, Homo sapien
gcaacaaagtgaagcagcagaagca

SEQ ID NO: 5028312 - DNA, 25 bp, Homo sapien
tgacatgagaacatcacatgtatat

SEQ ID NO: 5028313 - DNA, 25 bp, Homo sapien
taaaattgacatgagaacatcacat

SEQ ID NO: 5028314 - DNA, 25 bp, Homo sapien
gataaaattgacatgagaacatcac

SEQ ID NO: 5028315 - DNA, 25 bp, Homo sapien
gagaacatcacatgtatattcaggg

SEQ ID NO: 5028316 - DNA, 25 bp, Homo sapien
ctgtggtcaaaaaacgaatgcttac

SEQ ID NO: 5028317 - DNA, 25 bp, Homo sapien
caaattaaaaggcatcagtgaaatg

SEQ ID NO: 5028318 - DNA, 25 bp, Homo sapien
atggcaaattaaaaggcatcagtga

SEQ ID NO: 5028319 - DNA, 25 bp, Homo sapien
aattaaaaggcatcagtgaaatgtg

SEQ ID NO: 5028320 - DNA, 25 bp, Homo sapien
aatggcaaattaaaaggcatcagtg

SEQ ID NO: 5028321 - DNA, 25 bp, Homo sapien
tgacgccaaagatacgggcagctgt

SEQ ID NO: 5028322 - DNA, 25 bp, Homo sapien
ttcttaggaagcgacacctgtcccg

SEQ ID NO: 5028323 - DNA, 25 bp, Homo sapien
taatgatggacaccaccacgaagat

SEQ ID NO: 5028324 - DNA, 25 bp, Homo sapien
gagcttctggcgaacagtgggacaa

SEQ ID NO: 5028325 - DNA, 25 bp, Homo sapien
tcgctgcagaagacactagagtcca

SEQ ID NO: 5028326 - DNA, 25 bp, Homo sapien
catcgtcgcaaagctccagagggct

SEQ ID NO: 5028327 - DNA, 25 bp, Homo sapien
gatgctgagctcatcgatgccccag

SEQ ID NO: 5028328 - DNA, 25 bp, Homo sapien
gtagtgcaggacatatcggaacgcc

SEQ ID NO: 5028329 - DNA, 25 bp, Homo sapien
caaagttggggacacgccggaagct

SEQ ID NO: 5028330 - DNA, 25 bp, Homo sapien
acgccggaagctttggtcccgcgag

SEQ ID NO: 5028331 - DNA, 25 bp, Homo sapien
cgccacaaagttggggacacgccgg

SEQ ID NO: 5028332 - DNA, 25 bp, Homo sapien
gacacgccggaagctttggtcccgc

SEQ ID NO: 5028333 - DNA, 25 bp, Homo sapien
ttacctctccttggcgcaccctctc

SEQ ID NO: 5028334 - DNA, 25 bp, Homo sapien
tacctctccttggcgcaccctctcc

SEQ ID NO: 5028335 - DNA, 25 bp, Homo sapien
tcgcgctaagagagaggatcaggtg

SEQ ID NO: 5028336 - DNA, 25 bp, Homo sapien
ggagcagaggaagggtcgcgctaag

SEQ ID NO: 5028337 - DNA, 25 bp, Homo sapien
ctagggagccgggagtgcgcggaag

SEQ ID NO: 5028338 - DNA, 25 bp, Homo sapien
gaagcagcgcacaagtggcagaaag

SEQ ID NO: 5028339 - DNA, 25 bp, Homo sapien
tgatcactgacgctccattttcttc

SEQ ID NO: 5028340 - DNA, 25 bp, Homo sapien
tgcccgcaggagaccaaaacaaaaa

SEQ ID NO: 5028341 - DNA, 25 bp, Homo sapien
cactctcattctagtctgatgatca

SEQ ID NO: 5028342 - DNA, 25 bp, Homo sapien
acttgagaatttatattcctccctt

SEQ ID NO: 5028343 - DNA, 25 bp, Homo sapien
tcttttgatcctcttagtctacacg

SEQ ID NO: 5028344 - DNA, 25 bp, Homo sapien
gcacatctggtctgcgcacaaccgg

SEQ ID NO: 5028345 - DNA, 25 bp, Homo sapien
caggtaacgtactcttcttttgatc

SEQ ID NO: 5028346 - DNA, 25 bp, Homo sapien
caaccggcgccgcaggtaacgtact

SEQ ID NO: 5028347 - DNA, 25 bp, Homo sapien
gagccactcgcccagtgcttccagc

SEQ ID NO: 5028348 - DNA, 25 bp, Homo sapien
gccactcgcccagtgcttccagcac

SEQ ID NO: 5028349 - DNA, 25 bp, Homo sapien
gagagccactcgcccagtgcttcca

SEQ ID NO: 5028350 - DNA, 25 bp, Homo sapien
agccactcgcccagtgcttccagca

SEQ ID NO: 5028351 - DNA, 25 bp, Homo sapien
catccaagttattggattctccagc

SEQ ID NO: 5028352 - DNA, 25 bp, Homo sapien
ctacatccaagttattggattctcc

SEQ ID NO: 5028353 - DNA, 25 bp, Homo sapien
atccaagttattggattctccagct

SEQ ID NO: 5028354 - DNA, 25 bp, Homo sapien
acatccaagttattggattctccag

SEQ ID NO: 5028355 - DNA, 25 bp, Homo sapien
gccagagtcaggacatgaatttctt

SEQ ID NO: 5028356 - DNA, 25 bp, Homo sapien
gaaccaatttaggtgaggtctgaac

SEQ ID NO: 5028357 - DNA, 25 bp, Homo sapien
ctagtcattggtaacctcttcctgg

SEQ ID NO: 5028358 - DNA, 25 bp, Homo sapien
tctgctattttagatatagccagag

SEQ ID NO: 5028359 - DNA, 25 bp, Homo sapien
tgcactggagattcattgcaggtat

SEQ ID NO: 5028360 - DNA, 25 bp, Homo sapien
ggagattcattgcaggtatggaaag

SEQ ID NO: 5028361 - DNA, 25 bp, Homo sapien
gtgcactggagattcattgcaggta

SEQ ID NO: 5028362 - DNA, 25 bp, Homo sapien
gattcattgcaggtatggaaagaga

SEQ ID NO: 5028363 - DNA, 25 bp, Homo sapien
ttggtctggatagttaaaagacttc

SEQ ID NO: 5028364 - DNA, 25 bp, Homo sapien
tggtctggatagttaaaagacttca

SEQ ID NO: 5028365 - DNA, 25 bp, Homo sapien
tttatgctgcctagggattccacca

SEQ ID NO: 5028366 - DNA, 25 bp, Homo sapien
caatcataagaggagggcaaatagg

SEQ ID NO: 5028367 - DNA, 25 bp, Homo sapien
gattgttgtctcacatccttcagga

SEQ ID NO: 5028368 - DNA, 25 bp, Homo sapien
gatgaatgcgactagacaaataccc

SEQ ID NO: 5028369 - DNA, 25 bp, Homo sapien
caggagccccgtttccattggcaaa

SEQ ID NO: 5028370 - DNA, 25 bp, Homo sapien
ctgtgctcggtagcctgcatgcagg

SEQ ID NO: 5028371 - DNA, 25 bp, Homo sapien
ttgtcatgtggcctaccctcagcag

SEQ ID NO: 5028372 - DNA, 25 bp, Homo sapien
tcagcaggatctacaccacttttct

SEQ ID NO: 5028373 - DNA, 25 bp, Homo sapien
gagaggctggtgctcagccctggga

SEQ ID NO: 5028374 - DNA, 25 bp, Homo sapien
ataagatgcctctgagaggctggtg

SEQ ID NO: 5028375 - DNA, 25 bp, Homo sapien
ggtaggcagactaacataagatgcc

SEQ ID NO: 5028376 - DNA, 25 bp, Homo sapien
aatggtaggcagactaacataagat

SEQ ID NO: 5028377 - DNA, 25 bp, Homo sapien
tccagtggaagcaacaaacatcatc

SEQ ID NO: 5028378 - DNA, 25 bp, Homo sapien
catttgtgtcataggtgcaatcact

SEQ ID NO: 5028379 - DNA, 25 bp, Homo sapien
tggtagtgaagattccaagagtgaa

SEQ ID NO: 5028380 - DNA, 25 bp, Homo sapien
cccagttcctcttgacatttgtgtc

SEQ ID NO: 5028381 - DNA, 25 bp, Homo sapien
caccttgagtgggttgctactgcaa

SEQ ID NO: 5028382 - DNA, 25 bp, Homo sapien
tttgtagatacactgttcaatttgt

SEQ ID NO: 5028383 - DNA, 25 bp, Homo sapien
gtgggttgctactgcaaggaattta

SEQ ID NO: 5028384 - DNA, 25 bp, Homo sapien
taagtcaaggttggcaccaccttga

SEQ ID NO: 5028385 - DNA, 25 bp, Homo sapien
cagagctattatcaaaacctggagc

SEQ ID NO: 5028386 - DNA, 25 bp, Homo sapien
atgctgcagagctattatcaaaacc

SEQ ID NO: 5028387 - DNA, 25 bp, Homo sapien
ttatcaaaacctggagcagatactg

SEQ ID NO: 5028388 - DNA, 25 bp, Homo sapien
ggagcagatactgggctttctttca

SEQ ID NO: 5028389 - DNA, 25 bp, Homo sapien
accttatgctcaagctttggttctt

SEQ ID NO: 5028390 - DNA, 25 bp, Homo sapien
ttaatgcaagtggttgagtaacctt

SEQ ID NO: 5028391 - DNA, 25 bp, Homo sapien
tgcaagtggttgagtaaccttatgc

SEQ ID NO: 5028392 - DNA, 25 bp, Homo sapien
ggttgagtaaccttatgctcaagct

SEQ ID NO: 5028393 - DNA, 25 bp, Homo sapien
gaacgcatattctagaattccaatt

SEQ ID NO: 5028394 - DNA, 25 bp, Homo sapien
gctgaacgcatattctagaattcca

SEQ ID NO: 5028395 - DNA, 25 bp, Homo sapien
gggctgaacgcatattctagaattc

SEQ ID NO: 5028396 - DNA, 25 bp, Homo sapien
ccagggctgaacgcatattctagaa

SEQ ID NO: 5028397 - DNA, 25 bp, Homo sapien
ccgggaattgcatttgccaaactaa

SEQ ID NO: 5028398 - DNA, 25 bp, Homo sapien
tttatgaatatctgggcctcggtgt

SEQ ID NO: 5028399 - DNA, 25 bp, Homo sapien
ttaggaatgttgttcagtgccccgg

SEQ ID NO: 5028400 - DNA, 25 bp, Homo sapien
gtgtcacagcttggattaggaatgt

SEQ ID NO: 5028401 - DNA, 25 bp, Homo sapien
actaagccacttcccgtgatactaa

SEQ ID NO: 5028402 - DNA, 25 bp, Homo sapien
tgtgcccacttgaactaagccactt

SEQ ID NO: 5028403 - DNA, 25 bp, Homo sapien
cacttcccgtgatactaagaagcat

SEQ ID NO: 5028404 - DNA, 25 bp, Homo sapien
tggcagacggctgtgcccacttgaa

SEQ ID NO: 5028405 - DNA, 25 bp, Homo sapien
agaatacattaccaggatcccaatt

SEQ ID NO: 5028406 - DNA, 25 bp, Homo sapien
tgccttctttcgttgacttttcaga

SEQ ID NO: 5028407 - DNA, 25 bp, Homo sapien
acagaatacattaccaggatcccaa

SEQ ID NO: 5028408 - DNA, 25 bp, Homo sapien
taacagaatacattaccaggatccc

SEQ ID NO: 5028409 - DNA, 25 bp, Homo sapien
gcaggagagttgcaaattgtagcac

SEQ ID NO: 5028410 - DNA, 25 bp, Homo sapien
ttcttgtgatatgcaggagagttgc

SEQ ID NO: 5028411 - DNA, 25 bp, Homo sapien
tcattaatcttagtatcttttcttc

SEQ ID NO: 5028412 - DNA, 25 bp, Homo sapien
tgtagcacccaattgtcaccatttc

SEQ ID NO: 5028413 - DNA, 25 bp, Homo sapien
ctggccacttgcaaagttgatggcc

SEQ ID NO: 5028414 - DNA, 25 bp, Homo sapien
ggccacttgcaaagttgatggccat

SEQ ID NO: 5028415 - DNA, 25 bp, Homo sapien
tggccacttgcaaagttgatggcca

SEQ ID NO: 5028416 - DNA, 25 bp, Homo sapien
tcacaccatagaattttgtaccttg

SEQ ID NO: 5028417 - DNA, 25 bp, Homo sapien
catactctttgctagctttaccctc

SEQ ID NO: 5028418 - DNA, 25 bp, Homo sapien
cattcttagttttcacaccatagaa

SEQ ID NO: 5028419 - DNA, 25 bp, Homo sapien
tgtaccttgatttgccaggtcatac

SEQ ID NO: 5028420 - DNA, 25 bp, Homo sapien
aaatccactgagtatttcttttagc

SEQ ID NO: 5028421 - DNA, 25 bp, Homo sapien
atccactgagtatttcttttagcat

SEQ ID NO: 5028422 - DNA, 25 bp, Homo sapien
aatccactgagtatttcttttagca

SEQ ID NO: 5028423 - DNA, 25 bp, Homo sapien
caaatccactgagtatttcttttag

SEQ ID NO: 5028424 - DNA, 25 bp, Homo sapien
gtgtaatgagcagttccggacttca

SEQ ID NO: 5028425 - DNA, 25 bp, Homo sapien
actggataaagtttgctcactgaca

SEQ ID NO: 5028426 - DNA, 25 bp, Homo sapien
cacatacataaagggattcagcact

SEQ ID NO: 5028427 - DNA, 25 bp, Homo sapien
ggacttcacatccatacaacacagc

SEQ ID NO: 5028428 - DNA, 25 bp, Homo sapien
ccttaagcgtcagccgacttgagaa

SEQ ID NO: 5028429 - DNA, 25 bp, Homo sapien
tgtcccaattactggggaacctgcc

SEQ ID NO: 5028430 - DNA, 25 bp, Homo sapien
ctgtcccaattactggggaacctgc

SEQ ID NO: 5028431 - DNA, 25 bp, Homo sapien
ttaagcgtcagccgacttgagaaat

SEQ ID NO: 5028432 - DNA, 25 bp, Homo sapien
tctggtaggactgtgcttgttttat

SEQ ID NO: 5028433 - DNA, 25 bp, Homo sapien
gacctctggtaggactgtgcttgtt

SEQ ID NO: 5028434 - DNA, 25 bp, Homo sapien
cctctggtaggactgtgcttgtttt

SEQ ID NO: 5028435 - DNA, 25 bp, Homo sapien
aagacctctggtaggactgtgcttg

SEQ ID NO: 5028436 - DNA, 25 bp, Homo sapien
gctttcatgccagaccaagtattct

SEQ ID NO: 5028437 - DNA, 25 bp, Homo sapien
tcatgccagaccaagtattctcttt

SEQ ID NO: 5028438 - DNA, 25 bp, Homo sapien
tttcatgccagaccaagtattctct

SEQ ID NO: 5028439 - DNA, 25 bp, Homo sapien
atgctttcatgccagaccaagtatt

SEQ ID NO: 5028440 - DNA, 25 bp, Homo sapien
ctagctgggctcttgtttaaatgat

SEQ ID NO: 5028441 - DNA, 25 bp, Homo sapien
tgtgttgtcttggtaaccataacca

SEQ ID NO: 5028442 - DNA, 25 bp, Homo sapien
ggtgagactgtgttgtcttggtaac

SEQ ID NO: 5028443 - DNA, 25 bp, Homo sapien
tgagactgtgttgtcttggtaacca

SEQ ID NO: 5028444 - DNA, 25 bp, Homo sapien
gactgtgttgtcttggtaaccataa

SEQ ID NO: 5028445 - DNA, 25 bp, Homo sapien
tggtggcattcttcagcatccctgg

SEQ ID NO: 5028446 - DNA, 25 bp, Homo sapien
tccgagcttctggtcgctggtggca

SEQ ID NO: 5028447 - DNA, 25 bp, Homo sapien
gaaatttgttctgtctcagtcctag

SEQ ID NO: 5028448 - DNA, 25 bp, Homo sapien
cagggctggttcctgtagcaggcac

SEQ ID NO: 5028449 - DNA, 25 bp, Homo sapien
gtctttatgcactgattcttgccag

SEQ ID NO: 5028450 - DNA, 25 bp, Homo sapien
catgttcaccataagggattctgtc

SEQ ID NO: 5028451 - DNA, 25 bp, Homo sapien
ctgagtttccaagtgccgtctttat

SEQ ID NO: 5028452 - DNA, 25 bp, Homo sapien
tggtaattctttaaccgctctggtg

SEQ ID NO: 5028453 - DNA, 25 bp, Homo sapien
gatgatacattaaagccaaaaggaa

SEQ ID NO: 5028454 - DNA, 25 bp, Homo sapien
agggtccccagttggccactgtctg

SEQ ID NO: 5028455 - DNA, 25 bp, Homo sapien
cctgaatcagacatcgagggtcccc

SEQ ID NO: 5028456 - DNA, 25 bp, Homo sapien
aattgtaatagcctgaagttcctga

SEQ ID NO: 5028457 - DNA, 25 bp, Homo sapien
tgcgatgcactcagtccaggactgg

SEQ ID NO: 5028458 - DNA, 25 bp, Homo sapien
taagcagcaataagacgatgcgatg

SEQ ID NO: 5028459 - DNA, 25 bp, Homo sapien
tcatctgcaagggtaagcagcaata

SEQ ID NO: 5028460 - DNA, 25 bp, Homo sapien
ccaggactggttggactcagagcaa

SEQ ID NO: 5028461 - DNA, 25 bp, Homo sapien
tcttactcttccatagcatgcaatt

SEQ ID NO: 5028462 - DNA, 25 bp, Homo sapien
aaatccttgtccattcatatagaga

SEQ ID NO: 5028463 - DNA, 25 bp, Homo sapien
tactcttccatagcatgcaattccc

SEQ ID NO: 5028464 - DNA, 25 bp, Homo sapien
catatagagatgcacttaggcatct

SEQ ID NO: 5028465 - DNA, 25 bp, Homo sapien
taggcctgactaaggagaacagaga

SEQ ID NO: 5028466 - DNA, 25 bp, Homo sapien
gagaatgtaccccatgtttgacatg

SEQ ID NO: 5028467 - DNA, 25 bp, Homo sapien
tagtttcttttgacggtaggcctga

SEQ ID NO: 5028468 - DNA, 25 bp, Homo sapien
caagaacctctatgagctttgaaga

SEQ ID NO: 5028469 - DNA, 25 bp, Homo sapien
ttttctctttaatttcatcaatcaa

SEQ ID NO: 5028470 - DNA, 25 bp, Homo sapien
gaatttttctctttaatttcatcaa

SEQ ID NO: 5028471 - DNA, 25 bp, Homo sapien
atttttctctttaatttcatcaatc

SEQ ID NO: 5028472 - DNA, 25 bp, Homo sapien
tgaagaatttttctctttaatttca

SEQ ID NO: 5028473 - DNA, 25 bp, Homo sapien
caagcagctgctcatatgttccata

SEQ ID NO: 5028474 - DNA, 25 bp, Homo sapien
ctaaactgcccccaccattggagag

SEQ ID NO: 5028475 - DNA, 25 bp, Homo sapien
cccaccattggagagcatcagagaa

SEQ ID NO: 5028476 - DNA, 25 bp, Homo sapien
gcagctgctcatatgttccatatga

SEQ ID NO: 5028477 - DNA, 25 bp, Homo sapien
tattggtttatccttcaaagagtcc

SEQ ID NO: 5028478 - DNA, 25 bp, Homo sapien
aatgtagatgtgaggacaataaatc

SEQ ID NO: 5028479 - DNA, 25 bp, Homo sapien
taatgtagatgtgaggacaataaat

SEQ ID NO: 5028480 - DNA, 25 bp, Homo sapien
cagttttgcttgtggtgataagagc

SEQ ID NO: 5028481 - DNA, 25 bp, Homo sapien
cttgaggtctcggtagcatgctgag

SEQ ID NO: 5028482 - DNA, 25 bp, Homo sapien
cttgtggtgataagagcttgaggtc

SEQ ID NO: 5028483 - DNA, 25 bp, Homo sapien
catgctgagtactccagagtttcca

SEQ ID NO: 5028484 - DNA, 25 bp, Homo sapien
gttttcagatcctgaatagacatca

SEQ ID NO: 5028485 - DNA, 25 bp, Homo sapien
actgtgtatcagtgaatcaaacacc

SEQ ID NO: 5028486 - DNA, 25 bp, Homo sapien
ccttctttgcattcagtaggagcat

SEQ ID NO: 5028487 - DNA, 25 bp, Homo sapien
caaacaccttctttgcattcagtag

SEQ ID NO: 5028488 - DNA, 25 bp, Homo sapien
tggagaccgtatcttgttggaacct

SEQ ID NO: 5028489 - DNA, 25 bp, Homo sapien
gacttgtcataaggcatcactgctg

SEQ ID NO: 5028490 - DNA, 25 bp, Homo sapien
gcagagttcagaccaggtgctgact

SEQ ID NO: 5028491 - DNA, 25 bp, Homo sapien
ttcagtgcaaagagagcagagttca

SEQ ID NO: 5028492 - DNA, 25 bp, Homo sapien
gtatcattggttccacataatctcc

SEQ ID NO: 5028493 - DNA, 25 bp, Homo sapien
aactggtccaaagtcatcaatacta

SEQ ID NO: 5028494 - DNA, 25 bp, Homo sapien
tggttccacataatctcccatcttc

SEQ ID NO: 5028495 - DNA, 25 bp, Homo sapien
atgccaactggtccaaagtcatcaa

SEQ ID NO: 5028496 - DNA, 25 bp, Homo sapien
gctccagattggaaactgttattcc

SEQ ID NO: 5028497 - DNA, 25 bp, Homo sapien
atgctccagattggaaactgttatt

SEQ ID NO: 5028498 - DNA, 25 bp, Homo sapien
tccagattggaaactgttattccat

SEQ ID NO: 5028499 - DNA, 25 bp, Homo sapien
tgctccagattggaaactgttattc

SEQ ID NO: 5028500 - DNA, 25 bp, Homo sapien
tggtcatcatgagttgatgtaggag

SEQ ID NO: 5028501 - DNA, 25 bp, Homo sapien
tgcaggactaccctctctctgggag

SEQ ID NO: 5028502 - DNA, 25 bp, Homo sapien
tggcctttaatcattcgcgtgcagg

SEQ ID NO: 5028503 - DNA, 25 bp, Homo sapien
taatcattcgcgtgcaggactaccc

SEQ ID NO: 5028504 - DNA, 25 bp, Homo sapien
taagatgtaatggaaatgagctaca

SEQ ID NO: 5028505 - DNA, 25 bp, Homo sapien
gctcctactgataagatgtaatgga

SEQ ID NO: 5028506 - DNA, 25 bp, Homo sapien
tacggctcctactgataagatgtaa

SEQ ID NO: 5028507 - DNA, 25 bp, Homo sapien
ctgataagatgtaatggaaatgagc

SEQ ID NO: 5028508 - DNA, 25 bp, Homo sapien
cagctgggtcagacaatgtagtgtt

SEQ ID NO: 5028509 - DNA, 25 bp, Homo sapien
gctgggtcagacaatgtagtgttga

SEQ ID NO: 5028510 - DNA, 25 bp, Homo sapien
tagcatagtaatgccggcggctagg

SEQ ID NO: 5028511 - DNA, 25 bp, Homo sapien
gttgagattacagtcagttaatagc

SEQ ID NO: 5028512 - DNA, 25 bp, Homo sapien
taagtataatttacttgctaaaggc

SEQ ID NO: 5028513 - DNA, 25 bp, Homo sapien
gctaaaggctttgaaggccattggt

SEQ ID NO: 5028514 - DNA, 25 bp, Homo sapien
cttgctaaaggctttgaaggccatt

SEQ ID NO: 5028515 - DNA, 25 bp, Homo sapien
tacttgctaaaggctttgaaggcca

SEQ ID NO: 5028516 - DNA, 25 bp, Homo sapien
tacacaagtcctcattagaggcctg

SEQ ID NO: 5028517 - DNA, 25 bp, Homo sapien
catataaacggcctaagaatacaca

SEQ ID NO: 5028518 - DNA, 25 bp, Homo sapien
cggcctaagaatacacaagtcctca

SEQ ID NO: 5028519 - DNA, 25 bp, Homo sapien
catatacatataaacggcctaagaa

SEQ ID NO: 5028520 - DNA, 25 bp, Homo sapien
catactgggtatctaactaaaactg

SEQ ID NO: 5028521 - DNA, 25 bp, Homo sapien
aatgtgcatgtgaatcatactgggt

SEQ ID NO: 5028522 - DNA, 25 bp, Homo sapien
tatggtagtgctatatggaatgcaa

SEQ ID NO: 5028523 - DNA, 25 bp, Homo sapien
cacactttgagtaccagggctctag

SEQ ID NO: 5028524 - DNA, 25 bp, Homo sapien
tggccatggatgataggtaatctat

SEQ ID NO: 5028525 - DNA, 25 bp, Homo sapien
tgtatcaatcaatttcctgtagact

SEQ ID NO: 5028526 - DNA, 25 bp, Homo sapien
gattataattcttgagagacagaca

SEQ ID NO: 5028527 - DNA, 25 bp, Homo sapien
tattatcaatgtggatatcagagtg

SEQ ID NO: 5028528 - DNA, 25 bp, Homo sapien
ccagtttggtctcaagatgaagtgc

SEQ ID NO: 5028529 - DNA, 25 bp, Homo sapien
tctcggtgtatatgcaaaggaactg

SEQ ID NO: 5028530 - DNA, 25 bp, Homo sapien
gacagaaagatcctagtcaaggttc

SEQ ID NO: 5028531 - DNA, 25 bp, Homo sapien
tttaagaggtatatgcacttccatg

SEQ ID NO: 5028532 - DNA, 25 bp, Homo sapien
tttgatacataggagagaaggcgtc

SEQ ID NO: 5028533 - DNA, 25 bp, Homo sapien
tcaatggtctgagggttgccacaga

SEQ ID NO: 5028534 - DNA, 25 bp, Homo sapien
aacgtccaaatgtgtgatttgatac

SEQ ID NO: 5028535 - DNA, 25 bp, Homo sapien
tcagtcaacgtccaaatgtgtgatt

SEQ ID NO: 5028536 - DNA, 25 bp, Homo sapien
tgcttttccacagagtcatttatta

SEQ ID NO: 5028537 - DNA, 25 bp, Homo sapien
atgcttttccacagagtcatttatt

SEQ ID NO: 5028538 - DNA, 25 bp, Homo sapien
aatgcttttccacagagtcatttat

SEQ ID NO: 5028539 - DNA, 25 bp, Homo sapien
ggtatagtctggaagcagcaccttt

SEQ ID NO: 5028540 - DNA, 25 bp, Homo sapien
gctttggcaatagatttcaattcgg

SEQ ID NO: 5028541 - DNA, 25 bp, Homo sapien
tgcaacagatatctgtagctttctg

SEQ ID NO: 5028542 - DNA, 25 bp, Homo sapien
tatctgtagctttctgtcttaaagg

SEQ ID NO: 5028543 - DNA, 25 bp, Homo sapien
tccatttaccctaaggatagcctct

SEQ ID NO: 5028544 - DNA, 25 bp, Homo sapien
ccatttaccctaaggatagcctctt

SEQ ID NO: 5028545 - DNA, 25 bp, Homo sapien
catttaccctaaggatagcctcttt

SEQ ID NO: 5028546 - DNA, 25 bp, Homo sapien
ttccatttaccctaaggatagcctc

SEQ ID NO: 5028547 - DNA, 25 bp, Homo sapien
gcttatgtcatgtatagtcctcctc

SEQ ID NO: 5028548 - DNA, 25 bp, Homo sapien
tcctcaggaaaactgtacttacacc

SEQ ID NO: 5028549 - DNA, 25 bp, Homo sapien
aaactgtacttacacccataaccat

SEQ ID NO: 5028550 - DNA, 25 bp, Homo sapien
ttaatgcttatgtcatgtatagtcc

SEQ ID NO: 5028551 - DNA, 25 bp, Homo sapien
tgattattgttcctgtgtcaggtga

SEQ ID NO: 5028552 - DNA, 25 bp, Homo sapien
tatattgtaggagatgggagtctac

SEQ ID NO: 5028553 - DNA, 25 bp, Homo sapien
cctatgttcactcaaagccctggag

SEQ ID NO: 5028554 - DNA, 25 bp, Homo sapien
tatgtcctcttgtgagaaatacctt

SEQ ID NO: 5028555 - DNA, 25 bp, Homo sapien
cactcaggatgtttgcagaactctc

SEQ ID NO: 5028556 - DNA, 25 bp, Homo sapien
ttcaacatgttgactgactagggca

SEQ ID NO: 5028557 - DNA, 25 bp, Homo sapien
gactagggcagggttctcatctgga

SEQ ID NO: 5028558 - DNA, 25 bp, Homo sapien
gggcctgctatcagctcctagaaat

SEQ ID NO: 5028559 - DNA, 25 bp, Homo sapien
tttgaacttcttatgtataccattt

SEQ ID NO: 5028560 - DNA, 25 bp, Homo sapien
ttctctaaaggcttctattttacat

SEQ ID NO: 5028561 - DNA, 25 bp, Homo sapien
cacttcttctctaaaggcttctatt

SEQ ID NO: 5028562 - DNA, 25 bp, Homo sapien
tattttacatttgaacttcttatgt

SEQ ID NO: 5028563 - DNA, 25 bp, Homo sapien
tgcgttatggatgatacactactgc

SEQ ID NO: 5028564 - DNA, 25 bp, Homo sapien
cttatttgcgttatggatgatacac

SEQ ID NO: 5028565 - DNA, 25 bp, Homo sapien
gatgatacactactgcagcccagag

SEQ ID NO: 5028566 - DNA, 25 bp, Homo sapien
tatggatgatacactactgcagccc

SEQ ID NO: 5028567 - DNA, 25 bp, Homo sapien
gcttctaaaaatgcattagcaccca

SEQ ID NO: 5028568 - DNA, 25 bp, Homo sapien
agcttctaaaaatgcattagcaccc

SEQ ID NO: 5028569 - DNA, 25 bp, Homo sapien
ttcagcttctaaaaatgcattagca

SEQ ID NO: 5028570 - DNA, 25 bp, Homo sapien
cagcttctaaaaatgcattagcacc

SEQ ID NO: 5028571 - DNA, 25 bp, Homo sapien
atggatgtctgaatttctcctgttg

SEQ ID NO: 5028572 - DNA, 25 bp, Homo sapien
catggatgtctgaatttctcctgtt

SEQ ID NO: 5028573 - DNA, 25 bp, Homo sapien
ggcatggatgtctgaatttctcctg

SEQ ID NO: 5028574 - DNA, 25 bp, Homo sapien
gcatggatgtctgaatttctcctgt

SEQ ID NO: 5028575 - DNA, 25 bp, Homo sapien
tgcactgtggactgagaatatagtt

SEQ ID NO: 5028576 - DNA, 25 bp, Homo sapien
gctttatggtggagcatttggtcaa

SEQ ID NO: 5028577 - DNA, 25 bp, Homo sapien
gacatgaaaatagcaacccctaatt

SEQ ID NO: 5028578 - DNA, 25 bp, Homo sapien
gtctggtttccatgcaattgtatgg

SEQ ID NO: 5028579 - DNA, 25 bp, Homo sapien
ccttagttatggtagctgagacatc

SEQ ID NO: 5028580 - DNA, 25 bp, Homo sapien
gagacatctgggtgaggctcaactt

SEQ ID NO: 5028581 - DNA, 25 bp, Homo sapien
taaactagctcttgaactaaaaggc

SEQ ID NO: 5028582 - DNA, 25 bp, Homo sapien
caaatggtccaatttatgcagctcc

SEQ ID NO: 5028583 - DNA, 25 bp, Homo sapien
gctcttactatttttagatacatcc

SEQ ID NO: 5028584 - DNA, 25 bp, Homo sapien
ctatttttagatacatcccatcaat

SEQ ID NO: 5028585 - DNA, 25 bp, Homo sapien
cttactatttttagatacatcccat

SEQ ID NO: 5028586 - DNA, 25 bp, Homo sapien
agctcttactatttttagatacatc

SEQ ID NO: 5028587 - DNA, 25 bp, Homo sapien
tgaatgtctttgctcttgcttccta

SEQ ID NO: 5028588 - DNA, 25 bp, Homo sapien
ttttgttctgtatccagtagtcatt

SEQ ID NO: 5028589 - DNA, 25 bp, Homo sapien
gcttcctagttctttcaattgtgat

SEQ ID NO: 5028590 - DNA, 25 bp, Homo sapien
ttatttccaccttcattttgttctg

SEQ ID NO: 5028591 - DNA, 25 bp, Homo sapien
gccagtctgtgttaagtctttattt

SEQ ID NO: 5028592 - DNA, 25 bp, Homo sapien
cagtctgtgttaagtctttatttta

SEQ ID NO: 5028593 - DNA, 25 bp, Homo sapien
tgccagtctgtgttaagtctttatt

SEQ ID NO: 5028594 - DNA, 25 bp, Homo sapien
ttgccagtctgtgttaagtctttat

SEQ ID NO: 5028595 - DNA, 25 bp, Homo sapien
aaccaagggaagcactgttggaaga

SEQ ID NO: 5028596 - DNA, 25 bp, Homo sapien
caaccaagggaagcactgttggaag

SEQ ID NO: 5028597 - DNA, 25 bp, Homo sapien
tcaaccaagggaagcactgttggaa

SEQ ID NO: 5028598 - DNA, 25 bp, Homo sapien
tattgataccatcatcgggtatttc

SEQ ID NO: 5028599 - DNA, 25 bp, Homo sapien
tcttcaaaacaacatgaatgattaa

SEQ ID NO: 5028600 - DNA, 25 bp, Homo sapien
caatcttgagttctgttagcagacc

SEQ ID NO: 5028601 - DNA, 25 bp, Homo sapien
tagcaataagagcaatattgatacc

SEQ ID NO: 5028602 - DNA, 25 bp, Homo sapien
attgcacagcagagtatacttgccc

SEQ ID NO: 5028603 - DNA, 25 bp, Homo sapien
cagcagagtatacttgcccgtgcat

SEQ ID NO: 5028604 - DNA, 25 bp, Homo sapien
gcacagcagagtatacttgcccgtg

SEQ ID NO: 5028605 - DNA, 25 bp, Homo sapien
ttgcacagcagagtatacttgcccg

SEQ ID NO: 5028606 - DNA, 25 bp, Homo sapien
gttgattctaacaatgatctggatg

SEQ ID NO: 5028607 - DNA, 25 bp, Homo sapien
cagcttctttgatgttgattctaac

SEQ ID NO: 5028608 - DNA, 25 bp, Homo sapien
gcttctttgatgttgattctaacaa

SEQ ID NO: 5028609 - DNA, 25 bp, Homo sapien
tttgatgttgattctaacaatgatc

SEQ ID NO: 5028610 - DNA, 25 bp, Homo sapien
gagaagtcaacatcacttgcccttg

SEQ ID NO: 5028611 - DNA, 25 bp, Homo sapien
catgcatgcattccaaacgtacaga

SEQ ID NO: 5028612 - DNA, 25 bp, Homo sapien
tacagactatataacgccacacagt

SEQ ID NO: 5028613 - DNA, 25 bp, Homo sapien
cctggccagctgatgagattgctat

SEQ ID NO: 5028614 - DNA, 25 bp, Homo sapien
ccccaatgttagtccagcctatgct

SEQ ID NO: 5028615 - DNA, 25 bp, Homo sapien
acttctaatactgtgactttaggca

SEQ ID NO: 5028616 - DNA, 25 bp, Homo sapien
tagctacaccttgaatttagtgaga

SEQ ID NO: 5028617 - DNA, 25 bp, Homo sapien
tttagtgagattactataacttcta

SEQ ID NO: 5028618 - DNA, 25 bp, Homo sapien
gccttaggtgatccagctgtaacca

SEQ ID NO: 5028619 - DNA, 25 bp, Homo sapien
gcagctgaactgtccatgatgtcat

SEQ ID NO: 5028620 - DNA, 25 bp, Homo sapien
catatacctgttggttccttccctc

SEQ ID NO: 5028621 - DNA, 25 bp, Homo sapien
gctgtaaccatgatactctcccttt

SEQ ID NO: 5028622 - DNA, 25 bp, Homo sapien
ccaagtatcattggcctggagcgag

SEQ ID NO: 5028623 - DNA, 25 bp, Homo sapien
ccatgttgatgagggacgtcttgac

SEQ ID NO: 5028624 - DNA, 25 bp, Homo sapien
ggatttacagtaggagtcaatatcc

SEQ ID NO: 5028625 - DNA, 25 bp, Homo sapien
ggagcttggtagattaagacatcaa

SEQ ID NO: 5028626 - DNA, 25 bp, Homo sapien
aattatttatggcagagagacagaa

SEQ ID NO: 5028627 - DNA, 25 bp, Homo sapien
gattagactatttattcccaggtgc

SEQ ID NO: 5028628 - DNA, 25 bp, Homo sapien
tttattcccaactgaccattggcca

SEQ ID NO: 5028629 - DNA, 25 bp, Homo sapien
tcataagtaacctagacagaccagg

SEQ ID NO: 5028630 - DNA, 25 bp, Homo sapien
tctccactgaaaaacggatgccttc

SEQ ID NO: 5028631 - DNA, 25 bp, Homo sapien
aaacggatgccttctatggaggatg

SEQ ID NO: 5028632 - DNA, 25 bp, Homo sapien
ctaagcaagaggtgtctccactgaa

SEQ ID NO: 5028633 - DNA, 25 bp, Homo sapien
taagcaagaggtgtctccactgaaa

SEQ ID NO: 5028634 - DNA, 25 bp, Homo sapien
tcttcaatttcagagtttcagacat

SEQ ID NO: 5028635 - DNA, 25 bp, Homo sapien
cagctgaagatgtaacaggtggttc

SEQ ID NO: 5028636 - DNA, 25 bp, Homo sapien
ggatgtcctaaagttgatgttcaag

SEQ ID NO: 5028637 - DNA, 25 bp, Homo sapien
tgagaagagtgtgaggcagctgcca

SEQ ID NO: 5028638 - DNA, 25 bp, Homo sapien
aggtggttcataagtccatgctgca

SEQ ID NO: 5028639 - DNA, 25 bp, Homo sapien
aactttgcaggcgaaattaaattct

SEQ ID NO: 5028640 - DNA, 25 bp, Homo sapien
tctggaagcagatgcaactttccac

SEQ ID NO: 5028641 - DNA, 25 bp, Homo sapien
ggcgaaattaaattcttctgcacag

SEQ ID NO: 5028642 - DNA, 25 bp, Homo sapien
gaagcagatgcaactttccactgtg

SEQ ID NO: 5028643 - DNA, 25 bp, Homo sapien
tagcaatactaacaatatcccctga

SEQ ID NO: 5028644 - DNA, 25 bp, Homo sapien
cgactccttagcagtcctgagaatt

SEQ ID NO: 5028645 - DNA, 25 bp, Homo sapien
attccctcaaaatccgactccttag

SEQ ID NO: 5028646 - DNA, 25 bp, Homo sapien
tattagcaatactaacaatatcccc

SEQ ID NO: 5028647 - DNA, 25 bp, Homo sapien
tactaggaccccacacaaaatgatt

SEQ ID NO: 5028648 - DNA, 25 bp, Homo sapien
aaggtatgatggtactatctactag

SEQ ID NO: 5028649 - DNA, 25 bp, Homo sapien
tatgatggtactatctactaggacc

SEQ ID NO: 5028650 - DNA, 25 bp, Homo sapien
ggtactatctactaggaccccacac

SEQ ID NO: 5028651 - DNA, 25 bp, Homo sapien
catctaagttttaagttctacatgc

SEQ ID NO: 5028652 - DNA, 25 bp, Homo sapien
caccgcgcctgtcccttcatctaag

SEQ ID NO: 5028653 - DNA, 25 bp, Homo sapien
tcctgtgttaaattactgaggatga

SEQ ID NO: 5028654 - DNA, 25 bp, Homo sapien
gaaaggccatggtgtgtaatgttcc

SEQ ID NO: 5028655 - DNA, 25 bp, Homo sapien
acttggtctccacaagcccttatat

SEQ ID NO: 5028656 - DNA, 25 bp, Homo sapien
aaactgaggccttaagattaatagc

SEQ ID NO: 5028657 - DNA, 25 bp, Homo sapien
gacaataaagtaactctctcaacca

SEQ ID NO: 5028658 - DNA, 25 bp, Homo sapien
ggttggacatgcctccttatgccct

SEQ ID NO: 5028659 - DNA, 25 bp, Homo sapien
tttcagaagtcctcctagtatacct

SEQ ID NO: 5028660 - DNA, 25 bp, Homo sapien
taaagagtaagttgaacacacaaac

SEQ ID NO: 5028661 - DNA, 25 bp, Homo sapien
tcagtcctgtatccatcctatcaat

SEQ ID NO: 5028662 - DNA, 25 bp, Homo sapien
acatatacataacactagcctcaag

SEQ ID NO: 5028663 - DNA, 25 bp, Homo sapien
gtcaatgggaacgtaggttgattcc

SEQ ID NO: 5028664 - DNA, 25 bp, Homo sapien
tattgtaaataacatggcaatgtac

SEQ ID NO: 5028665 - DNA, 25 bp, Homo sapien
ctctctagtagcgttcaatgttggt

SEQ ID NO: 5028666 - DNA, 25 bp, Homo sapien
catgtgttgcttgatatattgatct

SEQ ID NO: 5028667 - DNA, 25 bp, Homo sapien
caaatgtagtgaccagcctgaggaa

SEQ ID NO: 5028668 - DNA, 25 bp, Homo sapien
tgccagagcacattaggagcccctt

SEQ ID NO: 5028669 - DNA, 25 bp, Homo sapien
tcagtggccagtaagagtcatttcc

SEQ ID NO: 5028670 - DNA, 25 bp, Homo sapien
catctggaatgggtgtgagaccaca

SEQ ID NO: 5028671 - DNA, 25 bp, Homo sapien
tgtctctacaagctgacatgcctcc

SEQ ID NO: 5028672 - DNA, 25 bp, Homo sapien
ggtgtgagcaaccactctcggatgg

SEQ ID NO: 5028673 - DNA, 25 bp, Homo sapien
tccccaaaacagacttgttagatag

SEQ ID NO: 5028674 - DNA, 25 bp, Homo sapien
cagatctgtaggactccagattgaa

SEQ ID NO: 5028675 - DNA, 25 bp, Homo sapien
agaagatcaaagagatccctgagaa

SEQ ID NO: 5028676 - DNA, 25 bp, Homo sapien
caaagagatccctgagaaagctcat

SEQ ID NO: 5028677 - DNA, 25 bp, Homo sapien
cacgtcctgactgagaagatcaaag

SEQ ID NO: 5028678 - DNA, 25 bp, Homo sapien
agatcaaagagatccctgagaaagc

SEQ ID NO: 5028679 - DNA, 25 bp, Homo sapien
ggctgttggtaagttggctttagca

SEQ ID NO: 5028680 - DNA, 25 bp, Homo sapien
ctctcctagcagttctgtgttggct

SEQ ID NO: 5028681 - DNA, 25 bp, Homo sapien
ttagcaaaacaagggtgtagcacac

SEQ ID NO: 5028682 - DNA, 25 bp, Homo sapien
gttggcttcattctcgggctgttgg

SEQ ID NO: 5028683 - DNA, 25 bp, Homo sapien
gatgaaatcttcaataggccaagaa

SEQ ID NO: 5028684 - DNA, 25 bp, Homo sapien
tcttcaataggccaagaagataagc

SEQ ID NO: 5028685 - DNA, 25 bp, Homo sapien
gaaatcttcaataggccaagaagat

SEQ ID NO: 5028686 - DNA, 25 bp, Homo sapien
ttgatgaaatcttcaataggccaag

SEQ ID NO: 5028687 - DNA, 25 bp, Homo sapien
tgatattcagctatcattcccttca

SEQ ID NO: 5028688 - DNA, 25 bp, Homo sapien
tttgttacaccacccaaagccagag

SEQ ID NO: 5028689 - DNA, 25 bp, Homo sapien
aaagccagagcttctaccacttggc

SEQ ID NO: 5028690 - DNA, 25 bp, Homo sapien
tggaagactgatattcagctatcat

SEQ ID NO: 5028691 - DNA, 25 bp, Homo sapien
gtgttttgccaggtcctcgaataag

SEQ ID NO: 5028692 - DNA, 25 bp, Homo sapien
tcagcagtttacattgattggtaac

SEQ ID NO: 5028693 - DNA, 25 bp, Homo sapien
tcaggcttctttaaatagtgaattg

SEQ ID NO: 5028694 - DNA, 25 bp, Homo sapien
gaataagctaagcaaccgcgtcaca

SEQ ID NO: 5028695 - DNA, 25 bp, Homo sapien
tgatcttcaatacacgcagtctcag

SEQ ID NO: 5028696 - DNA, 25 bp, Homo sapien
gatcttcaatacacgcagtctcagc

SEQ ID NO: 5028697 - DNA, 25 bp, Homo sapien
atcttcaatacacgcagtctcagca

SEQ ID NO: 5028698 - DNA, 25 bp, Homo sapien
cttcaatacacgcagtctcagcact

SEQ ID NO: 5028699 - DNA, 25 bp, Homo sapien
ccaagtcagctaagatcaggttaac

SEQ ID NO: 5028700 - DNA, 25 bp, Homo sapien
tgtcccactatcaagatatccaagg

SEQ ID NO: 5028701 - DNA, 25 bp, Homo sapien
gaacaaacatgtgtccttacattgg

SEQ ID NO: 5028702 - DNA, 25 bp, Homo sapien
caatctgcctgtgatagtaaggtaa

SEQ ID NO: 5028703 - DNA, 25 bp, Homo sapien
gcaatagatactgatcaatctttgc

SEQ ID NO: 5028704 - DNA, 25 bp, Homo sapien
atagatactgatcaatctttgcacc

SEQ ID NO: 5028705 - DNA, 25 bp, Homo sapien
tctttgcaccaaacttttctatctt

SEQ ID NO: 5028706 - DNA, 25 bp, Homo sapien
ctagcaatagatactgatcaatctt

SEQ ID NO: 5028707 - DNA, 25 bp, Homo sapien
tgtcccatctacatctgtgactatg

SEQ ID NO: 5028708 - DNA, 25 bp, Homo sapien
catctgtgactatggagctttctgt

SEQ ID NO: 5028709 - DNA, 25 bp, Homo sapien
tgaaagtacttggtaactgtcattg

SEQ ID NO: 5028710 - DNA, 25 bp, Homo sapien
aggagatggatactctagcctctgt

SEQ ID NO: 5028711 - DNA, 25 bp, Homo sapien
acatttttgatataccacatgaact

SEQ ID NO: 5028712 - DNA, 25 bp, Homo sapien
tatgtcatataactaacagtatatg

SEQ ID NO: 5028713 - DNA, 25 bp, Homo sapien
ttaaaaaggagtatatgtcatataa

SEQ ID NO: 5028714 - DNA, 25 bp, Homo sapien
tataccacatgaactaagaacaaaa

SEQ ID NO: 5028715 - DNA, 25 bp, Homo sapien
gatagtgccatatataaccttttca

SEQ ID NO: 5028716 - DNA, 25 bp, Homo sapien
taaattctattactgatagtgccat

SEQ ID NO: 5028717 - DNA, 25 bp, Homo sapien
ccacaagagagacctctgagtctca

SEQ ID NO: 5028718 - DNA, 25 bp, Homo sapien
tttctcattaccatcatgttgtacc

SEQ ID NO: 5028719 - DNA, 25 bp, Homo sapien
tggatttatttagcagaacagcaga

SEQ ID NO: 5028720 - DNA, 25 bp, Homo sapien
gcagaggattcagtaggagagttat

SEQ ID NO: 5028721 - DNA, 25 bp, Homo sapien
gtttccggatgcaattgcactattt

SEQ ID NO: 5028722 - DNA, 25 bp, Homo sapien
ttatttagcagaacagcagaggtgg

SEQ ID NO: 5028723 - DNA, 25 bp, Homo sapien
ttcactctgattatacttgaacaaa

SEQ ID NO: 5028724 - DNA, 25 bp, Homo sapien
tacttgaacaaatctaagtagtctg

SEQ ID NO: 5028725 - DNA, 25 bp, Homo sapien
tctaagtagtctgctttccttttag

SEQ ID NO: 5028726 - DNA, 25 bp, Homo sapien
cactctgattatacttgaacaaatc

SEQ ID NO: 5028727 - DNA, 25 bp, Homo sapien
tctgccattgcagcacgagaggaac

SEQ ID NO: 5028728 - DNA, 25 bp, Homo sapien
tatttgcataaataggcaatgggcc

SEQ ID NO: 5028729 - DNA, 25 bp, Homo sapien
cgagaggaaccatagacagcaagta

SEQ ID NO: 5028730 - DNA, 25 bp, Homo sapien
ccaggtccaggtctaaatgtagcag

SEQ ID NO: 5028731 - DNA, 25 bp, Homo sapien
tacacctagagctcaaatacaggca

SEQ ID NO: 5028732 - DNA, 25 bp, Homo sapien
tacaggcaggtagccagtctacata

SEQ ID NO: 5028733 - DNA, 25 bp, Homo sapien
ctttcccagtgagcaaaaacatgac

SEQ ID NO: 5028734 - DNA, 25 bp, Homo sapien
ggataactggagaacgagcactgcg

SEQ ID NO: 5028735 - DNA, 25 bp, Homo sapien
caaaggagttaagcatgccaaggcc

SEQ ID NO: 5028736 - DNA, 25 bp, Homo sapien
taagcaacgggagctctcccaaagg

SEQ ID NO: 5028737 - DNA, 25 bp, Homo sapien
tgagcaagggcagtatgacaaagga

SEQ ID NO: 5028738 - DNA, 25 bp, Homo sapien
tgacaaaggactttagaggtggttg

SEQ ID NO: 5028739 - DNA, 25 bp, Homo sapien
tagaggaggaacttccactgaggac

SEQ ID NO: 5028740 - DNA, 25 bp, Homo sapien
cactgaggacattttggtagctggg

SEQ ID NO: 5028741 - DNA, 25 bp, Homo sapien
tccactgaggacattttggtagctg

SEQ ID NO: 5028742 - DNA, 25 bp, Homo sapien
cttggccacctagaggaggaacttc

SEQ ID NO: 5028743 - DNA, 25 bp, Homo sapien
aatagacagggagagtccaagaagc

SEQ ID NO: 5028744 - DNA, 25 bp, Homo sapien
gacagggagagtccaagaagctttt

SEQ ID NO: 5028745 - DNA, 25 bp, Homo sapien
caacaggatcgagtggcaggtagta

SEQ ID NO: 5028746 - DNA, 25 bp, Homo sapien
caaaatcccttgcaacaggatcgag

SEQ ID NO: 5028747 - DNA, 25 bp, Homo sapien
gattttctgtagtgactctgtggcc

SEQ ID NO: 5028748 - DNA, 25 bp, Homo sapien
tgaaggattttctgtagtgactctg

SEQ ID NO: 5028749 - DNA, 25 bp, Homo sapien
caattgaaggattttctgtagtgac

SEQ ID NO: 5028750 - DNA, 25 bp, Homo sapien
ttttctgtagtgactctgtggccct

SEQ ID NO: 5028751 - DNA, 25 bp, Homo sapien
tctctctttctattcatcatctggc

SEQ ID NO: 5028752 - DNA, 25 bp, Homo sapien
tctgagggttttccatgtctggctc

SEQ ID NO: 5028753 - DNA, 25 bp, Homo sapien
ctctctttctattcatcatctggca

SEQ ID NO: 5028754 - DNA, 25 bp, Homo sapien
gggttttccatgtctggctctcact

SEQ ID NO: 5028755 - DNA, 25 bp, Homo sapien
cagatagaatttctagtgttggttg

SEQ ID NO: 5028756 - DNA, 25 bp, Homo sapien
gatgttaactcgtttttctctccag

SEQ ID NO: 5028757 - DNA, 25 bp, Homo sapien
ttgaaattgagagtagagggcagca

SEQ ID NO: 5028758 - DNA, 25 bp, Homo sapien
gggacctggttgctgattgaattga

SEQ ID NO: 5028759 - DNA, 25 bp, Homo sapien
aggattattctcctcacaatattca

SEQ ID NO: 5028760 - DNA, 25 bp, Homo sapien
aggctgataaatctacgaagatgag

SEQ ID NO: 5028761 - DNA, 25 bp, Homo sapien
ggaaaaacgagtgccaaaacgctga

SEQ ID NO: 5028762 - DNA, 25 bp, Homo sapien
gatgaggaaaaacgagtgccaaaac

SEQ ID NO: 5028763 - DNA, 25 bp, Homo sapien
tcaccaacgtcaaaggccaaaggct

SEQ ID NO: 5028764 - DNA, 25 bp, Homo sapien
tgtttccctctctggtgaagcgcat

SEQ ID NO: 5028765 - DNA, 25 bp, Homo sapien
aacaatttttatctctttgaaatca

SEQ ID NO: 5028766 - DNA, 25 bp, Homo sapien
tctttgaaatcattagtgtttccct

SEQ ID NO: 5028767 - DNA, 25 bp, Homo sapien
ttgaaatcattagtgtttccctctc

SEQ ID NO: 5028768 - DNA, 25 bp, Homo sapien
ttcagctctactgccgccattttgg

SEQ ID NO: 5028769 - DNA, 25 bp, Homo sapien
gaacgttcatggactgttgcagccc

SEQ ID NO: 5028770 - DNA, 25 bp, Homo sapien
tgtatcggttgttagtcctgggtcc

SEQ ID NO: 5028771 - DNA, 25 bp, Homo sapien
ggtccaaggaaaatggtcgtgtatc

SEQ ID NO: 5028772 - DNA, 25 bp, Homo sapien
tgaacctcctgaaatgtaacactgg

SEQ ID NO: 5028773 - DNA, 25 bp, Homo sapien
caggaaaggtgagctaacagcagcc

SEQ ID NO: 5028774 - DNA, 25 bp, Homo sapien
cagtgtagctgtgattaagggcatt

SEQ ID NO: 5028775 - DNA, 25 bp, Homo sapien
caggaggtagaccaagatctgggct

SEQ ID NO: 5028776 - DNA, 25 bp, Homo sapien
ttgctgctgtgcttgttcgatatat

SEQ ID NO: 5028777 - DNA, 25 bp, Homo sapien
tgctgctgtgcttgttcgatatatt

SEQ ID NO: 5028778 - DNA, 25 bp, Homo sapien
gttgctgctgtgcttgttcgatata

SEQ ID NO: 5028779 - DNA, 25 bp, Homo sapien
gctgctgtgcttgttcgatatattt

SEQ ID NO: 5028780 - DNA, 25 bp, Homo sapien
ttctctcacccagatcatcagaaat

SEQ ID NO: 5028781 - DNA, 25 bp, Homo sapien
gtcctgggtctattcttccctgaga

SEQ ID NO: 5028782 - DNA, 25 bp, Homo sapien
gagaaatgaatacgcatgtgctccc

SEQ ID NO: 5028783 - DNA, 25 bp, Homo sapien
aaatccagtcctgggtctattcttc

SEQ ID NO: 5028784 - DNA, 25 bp, Homo sapien
tcctttggattgaaacctgatatat

SEQ ID NO: 5028785 - DNA, 25 bp, Homo sapien
aatgagaaccacaggatatcaaatg

SEQ ID NO: 5028786 - DNA, 25 bp, Homo sapien
tatttgatctcttacttcctttgga

SEQ ID NO: 5028787 - DNA, 25 bp, Homo sapien
tgccaaatgcttttgtgaggcctca

SEQ ID NO: 5028788 - DNA, 25 bp, Homo sapien
taaagtgccgagcatatctgtagac

SEQ ID NO: 5028789 - DNA, 25 bp, Homo sapien
tccacacccacattcactgtaaagt

SEQ ID NO: 5028790 - DNA, 25 bp, Homo sapien
ctgtagactccagaaagtgtcccac

SEQ ID NO: 5028791 - DNA, 25 bp, Homo sapien
atctgtagactccagaaagtgtccc

SEQ ID NO: 5028792 - DNA, 25 bp, Homo sapien
tctgccgctgctgcacttttgtggg

SEQ ID NO: 5028793 - DNA, 25 bp, Homo sapien
gcttacaaacaaggtgggtgttgag

SEQ ID NO: 5028794 - DNA, 25 bp, Homo sapien
cccgagattcctggttggctcttcc

SEQ ID NO: 5028795 - DNA, 25 bp, Homo sapien
ccagtctcctgctgcatccgataag

SEQ ID NO: 5028796 - DNA, 25 bp, Homo sapien
gctgtgtgtgaggaataatgtagca

SEQ ID NO: 5028797 - DNA, 25 bp, Homo sapien
aacattctttgcatatgaagaatca

SEQ ID NO: 5028798 - DNA, 25 bp, Homo sapien
tacagcttcactaagttttccatgg

SEQ ID NO: 5028799 - DNA, 25 bp, Homo sapien
tatgaagaatcaaaggcatttctgg

SEQ ID NO: 5028800 - DNA, 25 bp, Homo sapien
gaagctttttcatgaatagatttag

SEQ ID NO: 5028801 - DNA, 25 bp, Homo sapien
atgaagctttttcatgaatagattt

SEQ ID NO: 5028802 - DNA, 25 bp, Homo sapien
aagctttttcatgaatagatttagc

SEQ ID NO: 5028803 - DNA, 25 bp, Homo sapien
agctttttcatgaatagatttagct

SEQ ID NO: 5028804 - DNA, 25 bp, Homo sapien
cacctttggtgatttgtgtgaattc

SEQ ID NO: 5028805 - DNA, 25 bp, Homo sapien
acctttggtgatttgtgtgaattca

SEQ ID NO: 5028806 - DNA, 25 bp, Homo sapien
tccaaaattggtcaacacatcttgg

SEQ ID NO: 5028807 - DNA, 25 bp, Homo sapien
tttccaaaattggtcaacacatctt

SEQ ID NO: 5028808 - DNA, 25 bp, Homo sapien
tatgatacagtttaaatgagccacc

SEQ ID NO: 5028809 - DNA, 25 bp, Homo sapien
tagagatagagccaagcagcgctcc

SEQ ID NO: 5028810 - DNA, 25 bp, Homo sapien
ggagggtagcacaatgaacttgccc

SEQ ID NO: 5028811 - DNA, 25 bp, Homo sapien
gcatcctgccagtagagtaccatgt

SEQ ID NO: 5028812 - DNA, 25 bp, Homo sapien
tgtcatacatgggattttcaaaagc

SEQ ID NO: 5028813 - DNA, 25 bp, Homo sapien
ctttgcgttggtgtcatacatggga

SEQ ID NO: 5028814 - DNA, 25 bp, Homo sapien
ttgggatcaaatcgtaccgccttcc

SEQ ID NO: 5028815 - DNA, 25 bp, Homo sapien
gcaaaccgtgttcaagttgggatca

SEQ ID NO: 5028816 - DNA, 25 bp, Homo sapien
tgtttataaagataaaatccaaatc

SEQ ID NO: 5028817 - DNA, 25 bp, Homo sapien
tactatttgtaccatgaggttgatt

SEQ ID NO: 5028818 - DNA, 25 bp, Homo sapien
tatttgtaccatgaggttgatttga

SEQ ID NO: 5028819 - DNA, 25 bp, Homo sapien
tttgtaccatgaggttgatttgaag

SEQ ID NO: 5028820 - DNA, 25 bp, Homo sapien
actactatttgtaccatgaggttga

SEQ ID NO: 5028821 - DNA, 25 bp, Homo sapien
aaattgtccataatctttgccttga

SEQ ID NO: 5028822 - DNA, 25 bp, Homo sapien
ccttgaaatacataagtagctccat

SEQ ID NO: 5028823 - DNA, 25 bp, Homo sapien
aattgtccataatctttgccttgaa

SEQ ID NO: 5028824 - DNA, 25 bp, Homo sapien
tacataagtagctccatcaggctca

SEQ ID NO: 5028825 - DNA, 25 bp, Homo sapien
aaagccatccattgcccaattttct

SEQ ID NO: 5028826 - DNA, 25 bp, Homo sapien
taagatatatgcgtaacattaggcg

SEQ ID NO: 5028827 - DNA, 25 bp, Homo sapien
gtaacattaggcgagcttcctggct

SEQ ID NO: 5028828 - DNA, 25 bp, Homo sapien
gcatgagcaggtactttaataagat

SEQ ID NO: 5028829 - DNA, 25 bp, Homo sapien
cagtggaagcattgaaactagtaac

SEQ ID NO: 5028830 - DNA, 25 bp, Homo sapien
cgttaactctcccagtggaagcatt

SEQ ID NO: 5028831 - DNA, 25 bp, Homo sapien
ttgctcagtgttgcgttaactctcc

SEQ ID NO: 5028832 - DNA, 25 bp, Homo sapien
atgttgctattgctcagtgttgcgt

SEQ ID NO: 5028833 - DNA, 25 bp, Homo sapien
gcaggtctaggatctttcaccaata

SEQ ID NO: 5028834 - DNA, 25 bp, Homo sapien
cagtgcaggtctaggatctttcacc

SEQ ID NO: 5028835 - DNA, 25 bp, Homo sapien
cccagtgcaggtctaggatctttca

SEQ ID NO: 5028836 - DNA, 25 bp, Homo sapien
gttcccagtgcaggtctaggatctt

SEQ ID NO: 5028837 - DNA, 25 bp, Homo sapien
tgtatacccatgagatggaaggtcc

SEQ ID NO: 5028838 - DNA, 25 bp, Homo sapien
ccctacgacatttgcatgagcagga

SEQ ID NO: 5028839 - DNA, 25 bp, Homo sapien
gttccacctgctaagaagaagccag

SEQ ID NO: 5028840 - DNA, 25 bp, Homo sapien
cagtccaggtgttatcggatctaca

SEQ ID NO: 5028841 - DNA, 25 bp, Homo sapien
aatcccactccacgtaagatcaggg

SEQ ID NO: 5028842 - DNA, 25 bp, Homo sapien
tttgcaatggaactgtacaacactt

SEQ ID NO: 5028843 - DNA, 25 bp, Homo sapien
caggtgcgtgttgtagacccttgga

SEQ ID NO: 5028844 - DNA, 25 bp, Homo sapien
tgtagacccttggagaaggtgtcct

SEQ ID NO: 5028845 - DNA, 25 bp, Homo sapien
ctagaagatctcttatccctggatg

SEQ ID NO: 5028846 - DNA, 25 bp, Homo sapien
atccttttcaaagtatcgtcttcct

SEQ ID NO: 5028847 - DNA, 25 bp, Homo sapien
ttgttctgagatccatgccgaggca

SEQ ID NO: 5028848 - DNA, 25 bp, Homo sapien
gaaatccgaatgtattgttctgaga

SEQ ID NO: 5028849 - DNA, 25 bp, Homo sapien
ccatgccgaggcacacctgggtttt

SEQ ID NO: 5028850 - DNA, 25 bp, Homo sapien
gcacacctgggttttcacaagaggt

SEQ ID NO: 5028851 - DNA, 25 bp, Homo sapien
ccttgggcaggtataccagggtcac

SEQ ID NO: 5028852 - DNA, 25 bp, Homo sapien
ctgactggtatataaagcttttgcc

SEQ ID NO: 5028853 - DNA, 25 bp, Homo sapien
catattctggtgcttgatcccacta

SEQ ID NO: 5028854 - DNA, 25 bp, Homo sapien
tatgcagtgaggtgatgaaccactc

SEQ ID NO: 5028855 - DNA, 25 bp, Homo sapien
aggtcatgagacaggtagagtcctc

SEQ ID NO: 5028856 - DNA, 25 bp, Homo sapien
caaggtcatgagacaggtagagtcc

SEQ ID NO: 5028857 - DNA, 25 bp, Homo sapien
gtcatgagacaggtagagtcctcct

SEQ ID NO: 5028858 - DNA, 25 bp, Homo sapien
tgtcaaggtcatgagacaggtagag

SEQ ID NO: 5028859 - DNA, 25 bp, Homo sapien
gatttgggaacaaatttcagagtat

SEQ ID NO: 5028860 - DNA, 25 bp, Homo sapien
ccaatcattatcatgacaaatgcca

SEQ ID NO: 5028861 - DNA, 25 bp, Homo sapien
tgtaaaatcccaatcattatcatga

SEQ ID NO: 5028862 - DNA, 25 bp, Homo sapien
tagaagtgacatggatttattgccg

SEQ ID NO: 5028863 - DNA, 25 bp, Homo sapien
gtaagcactgcggtacttcaccact

SEQ ID NO: 5028864 - DNA, 25 bp, Homo sapien
cctggagaacagatgtagctaatac

SEQ ID NO: 5028865 - DNA, 25 bp, Homo sapien
tacacaggtcaaaacagcagggaag

SEQ ID NO: 5028866 - DNA, 25 bp, Homo sapien
gaaggatagctcatagcctggagaa

SEQ ID NO: 5028867 - DNA, 25 bp, Homo sapien
tttaaatgttgaagaaatcattatc

SEQ ID NO: 5028868 - DNA, 25 bp, Homo sapien
taaatgttgaagaaatcattatcat

SEQ ID NO: 5028869 - DNA, 25 bp, Homo sapien
ttttaaatgttgaagaaatcattat

SEQ ID NO: 5028870 - DNA, 25 bp, Homo sapien
aatgttgaagaaatcattatcatac

SEQ ID NO: 5028871 - DNA, 25 bp, Homo sapien
caattccatcgtgtagcctggctgg

SEQ ID NO: 5028872 - DNA, 25 bp, Homo sapien
tcagtccattggctggtatacctgg

SEQ ID NO: 5028873 - DNA, 25 bp, Homo sapien
tacaagttggcattactccactcca

SEQ ID NO: 5028874 - DNA, 25 bp, Homo sapien
cactccatgtgccattaattgtaca

SEQ ID NO: 5028875 - DNA, 25 bp, Homo sapien
ggttcctgggttaccacactgcaca

SEQ ID NO: 5028876 - DNA, 25 bp, Homo sapien
tgttgtgccatcaattcggaagact

SEQ ID NO: 5028877 - DNA, 25 bp, Homo sapien
taggtaaagttccagaccatgttcc

SEQ ID NO: 5028878 - DNA, 25 bp, Homo sapien
tgaaggtccagaaaggatgtatccc

SEQ ID NO: 5028879 - DNA, 25 bp, Homo sapien
gaaggatgtaaccagtatcacaagc

SEQ ID NO: 5028880 - DNA, 25 bp, Homo sapien
catggccgggagtacctggatcgcc

SEQ ID NO: 5028881 - DNA, 25 bp, Homo sapien
tggatcgccacatgtcccagtagca

SEQ ID NO: 5028882 - DNA, 25 bp, Homo sapien
tgccttccggtccaactgccattag

SEQ ID NO: 5028883 - DNA, 25 bp, Homo sapien
gaggttgtgatccactccaatggcc

SEQ ID NO: 5028884 - DNA, 25 bp, Homo sapien
gatgactggcctaaaagggaacgct

SEQ ID NO: 5028885 - DNA, 25 bp, Homo sapien
aaaagtatacttctcgccagacagg

SEQ ID NO: 5028886 - DNA, 25 bp, Homo sapien
tgcaggaatagtgaacagtagaccc

SEQ ID NO: 5028887 - DNA, 25 bp, Homo sapien
ctgcattaggaggaacgccagggtg

SEQ ID NO: 5028888 - DNA, 25 bp, Homo sapien
aggaacgccagggtgtccacagtca

SEQ ID NO: 5028889 - DNA, 25 bp, Homo sapien
acgccagggtgtccacagtcaatca

SEQ ID NO: 5028890 - DNA, 25 bp, Homo sapien
taggaggaacgccagggtgtccaca

SEQ ID NO: 5028891 - DNA, 25 bp, Homo sapien
tcattccgaggatgagtttaacagc

SEQ ID NO: 5028892 - DNA, 25 bp, Homo sapien
tccgaggatgagtttaacagcaaca

SEQ ID NO: 5028893 - DNA, 25 bp, Homo sapien
gaggatgagtttaacagcaacattg

SEQ ID NO: 5028894 - DNA, 25 bp, Homo sapien
gatgagtttaacagcaacattgtaa

SEQ ID NO: 5028895 - DNA, 25 bp, Homo sapien
gaataccacagtgccgtaagtaaaa

SEQ ID NO: 5028896 - DNA, 25 bp, Homo sapien
aaatatccaggattgcagtcataga

SEQ ID NO: 5028897 - DNA, 25 bp, Homo sapien
tgatacattctggtaaaggtttgtc

SEQ ID NO: 5028898 - DNA, 25 bp, Homo sapien
tacattctggtaaaggtttgtccca

SEQ ID NO: 5028899 - DNA, 25 bp, Homo sapien
ttgcacataggtggaggatggctcc

SEQ ID NO: 5028900 - DNA, 25 bp, Homo sapien
ttgttggcccttgcataagataccc

SEQ ID NO: 5028901 - DNA, 25 bp, Homo sapien
tattgcatgagaatgttaccacatc

SEQ ID NO: 5028902 - DNA, 25 bp, Homo sapien
cataaattggactaccagggtgacc

SEQ ID NO: 5028903 - DNA, 25 bp, Homo sapien
gaagaaccaatcaatcgaaaaccag

SEQ ID NO: 5028904 - DNA, 25 bp, Homo sapien
agttctggaattccacaatgacccg

SEQ ID NO: 5028905 - DNA, 25 bp, Homo sapien
tcctgttgacatatcctcactgaag

SEQ ID NO: 5028906 - DNA, 25 bp, Homo sapien
gctgaccagaccaattgtgatcctg

SEQ ID NO: 5028907 - DNA, 25 bp, Homo sapien
taaagatagctgttgagccatatga

SEQ ID NO: 5028908 - DNA, 25 bp, Homo sapien
tcccaagtcgcaggtaaagatagct

SEQ ID NO: 5028909 - DNA, 25 bp, Homo sapien
gagccatatgaagtttgagttccaa

SEQ ID NO: 5028910 - DNA, 25 bp, Homo sapien
cagcagagcccacaagcatgaatcc

SEQ ID NO: 5028911 - DNA, 25 bp, Homo sapien
tccaactccaagtaccattaggaag

SEQ ID NO: 5028912 - DNA, 25 bp, Homo sapien
gaagacattcgatggaggcaggacc

SEQ ID NO: 5028913 - DNA, 25 bp, Homo sapien
caggacctagtccatgataaccagg

SEQ ID NO: 5028914 - DNA, 25 bp, Homo sapien
taatgggagccattcacaattcgcc

SEQ ID NO: 5028915 - DNA, 25 bp, Homo sapien
tagtgagttctttggatgacaatcg

SEQ ID NO: 5028916 - DNA, 25 bp, Homo sapien
taactcgcgttcctaccaaatagtc

SEQ ID NO: 5028917 - DNA, 25 bp, Homo sapien
aatagtctgttgttagtattcctcc

SEQ ID NO: 5028918 - DNA, 25 bp, Homo sapien
gggtcttgttatgattgctccatgt

SEQ ID NO: 5028919 - DNA, 25 bp, Homo sapien
aactcagtcttcagtgtacttgccc

SEQ ID NO: 5028920 - DNA, 25 bp, Homo sapien
ttttggatgctaagagtgaaactca

SEQ ID NO: 5028921 - DNA, 25 bp, Homo sapien
caaagtaactggaatggaggatgta

SEQ ID NO: 5028922 - DNA, 25 bp, Homo sapien
tgatataatgctcagtgcctcgact

SEQ ID NO: 5028923 - DNA, 25 bp, Homo sapien
tgcatgatacccataggaagacttt

SEQ ID NO: 5028924 - DNA, 25 bp, Homo sapien
ggactggcgcatcccatgcatgata

SEQ ID NO: 5028925 - DNA, 25 bp, Homo sapien
aggcccaacggaccacactgttaag

SEQ ID NO: 5028926 - DNA, 25 bp, Homo sapien
caacaagtcggaatcctcgatcaca

SEQ ID NO: 5028927 - DNA, 25 bp, Homo sapien
ttaggatatatatgtcataacctgt

SEQ ID NO: 5028928 - DNA, 25 bp, Homo sapien
gaaacaaattggacttaggatatat

SEQ ID NO: 5028929 - DNA, 25 bp, Homo sapien
atagtaagaaacaaattggacttag

SEQ ID NO: 5028930 - DNA, 25 bp, Homo sapien
taggatatatatgtcataacctgtc

SEQ ID NO: 5028931 - DNA, 25 bp, Homo sapien
ctatatatcttatccggaagccttt

SEQ ID NO: 5028932 - DNA, 25 bp, Homo sapien
gaagaaatacttcatgaccattgct

SEQ ID NO: 5028933 - DNA, 25 bp, Homo sapien
atatcttatccggaagccttttttg

SEQ ID NO: 5028934 - DNA, 25 bp, Homo sapien
ttgttattgccatgatctgctgacc

SEQ ID NO: 5028935 - DNA, 25 bp, Homo sapien
agcactggactttgaatatttggtc

SEQ ID NO: 5028936 - DNA, 25 bp, Homo sapien
tacttaattgatgaatatccaataa

SEQ ID NO: 5028937 - DNA, 25 bp, Homo sapien
ttgatgaatatccaataaatataac

SEQ ID NO: 5028938 - DNA, 25 bp, Homo sapien
atatccaataaatataacccttggt

SEQ ID NO: 5028939 - DNA, 25 bp, Homo sapien
gaatatccaataaatataacccttg

SEQ ID NO: 5028940 - DNA, 25 bp, Homo sapien
gaagatttgggtaactgtcaggata

SEQ ID NO: 5028941 - DNA, 25 bp, Homo sapien
tgactccagtagaatctagccgtaa

SEQ ID NO: 5028942 - DNA, 25 bp, Homo sapien
tatccagggctcaatatgactccag

SEQ ID NO: 5028943 - DNA, 25 bp, Homo sapien
tgaaatgctccatgcacacatttga

SEQ ID NO: 5028944 - DNA, 25 bp, Homo sapien
gacaaactggaggtgctccatccat

SEQ ID NO: 5028945 - DNA, 25 bp, Homo sapien
cattaccaactaaagtaaatcctgg

SEQ ID NO: 5028946 - DNA, 25 bp, Homo sapien
gtcgttctcctaatctgcacgtcag

SEQ ID NO: 5028947 - DNA, 25 bp, Homo sapien
cctggaagacactgatacctaataa

SEQ ID NO: 5028948 - DNA, 25 bp, Homo sapien
ttccgtcaaaatttcagcattgggc

SEQ ID NO: 5028949 - DNA, 25 bp, Homo sapien
gtggaggttggcacacccttagttg

SEQ ID NO: 5028950 - DNA, 25 bp, Homo sapien
ggttggcacacccttagttgatagg

SEQ ID NO: 5028951 - DNA, 25 bp, Homo sapien
aaattcatcatcttccgtcaaaatt

SEQ ID NO: 5028952 - DNA, 25 bp, Homo sapien
tgccactgaactgaccgatctgagg

SEQ ID NO: 5028953 - DNA, 25 bp, Homo sapien
cacttgttgtgaaatcactgtggaa

SEQ ID NO: 5028954 - DNA, 25 bp, Homo sapien
gactgattccaaagcggtattgcca

SEQ ID NO: 5028955 - DNA, 25 bp, Homo sapien
tctgaggtgaattttggtctggtcc

SEQ ID NO: 5028956 - DNA, 25 bp, Homo sapien
ggacagtaaaattgatgtagatgcc

SEQ ID NO: 5028957 - DNA, 25 bp, Homo sapien
tgtagatgccattcccagggggtac

SEQ ID NO: 5028958 - DNA, 25 bp, Homo sapien
cttgaaagtttggatattcatcagg

SEQ ID NO: 5028959 - DNA, 25 bp, Homo sapien
ttgaaggacagtaaaattgatgtag

SEQ ID NO: 5028960 - DNA, 25 bp, Homo sapien
caaatgaaatggtttgacccacagt

SEQ ID NO: 5028961 - DNA, 25 bp, Homo sapien
cgactgactccgtgaaggcatgtga

SEQ ID NO: 5028962 - DNA, 25 bp, Homo sapien
cacaccttggaagtggatgattcca

SEQ ID NO: 5028963 - DNA, 25 bp, Homo sapien
ggcgtggatcaggacagctttgcaa

SEQ ID NO: 5028964 - DNA, 25 bp, Homo sapien
gatgggtactctaaattgtacagta

SEQ ID NO: 5028965 - DNA, 25 bp, Homo sapien
tagatgggtactctaaattgtacag

SEQ ID NO: 5028966 - DNA, 25 bp, Homo sapien
ttcagtagatgggtactctaaattg

SEQ ID NO: 5028967 - DNA, 25 bp, Homo sapien
attgtacagtataacttttccaaat

SEQ ID NO: 5028968 - DNA, 25 bp, Homo sapien
taagccggccaataacagtactagt

SEQ ID NO: 5028969 - DNA, 25 bp, Homo sapien
tactagtttctgaggatccacttcg

SEQ ID NO: 5028970 - DNA, 25 bp, Homo sapien
gtatttgaggaccactaagccggcc

SEQ ID NO: 5028971 - DNA, 25 bp, Homo sapien
cttggtatacaatatgaaacccttg

SEQ ID NO: 5028972 - DNA, 25 bp, Homo sapien
tttgtgcttcaatgagtatctattc

SEQ ID NO: 5028973 - DNA, 25 bp, Homo sapien
tgtgcttcaatgagtatctattcat

SEQ ID NO: 5028974 - DNA, 25 bp, Homo sapien
ggtttgtgcttcaatgagtatctat

SEQ ID NO: 5028975 - DNA, 25 bp, Homo sapien
ctggtttgtgcttcaatgagtatct

SEQ ID NO: 5028976 - DNA, 25 bp, Homo sapien
tgaggatcacaccactgaagtctga

SEQ ID NO: 5028977 - DNA, 25 bp, Homo sapien
tattgtccatgtgcaatctaaactg

SEQ ID NO: 5028978 - DNA, 25 bp, Homo sapien
aacctatgggtagatttattgtcca

SEQ ID NO: 5028979 - DNA, 25 bp, Homo sapien
ctaaactgctgggatagtttccagg

SEQ ID NO: 5028980 - DNA, 25 bp, Homo sapien
ttccatatcttgactgcctgacacc

SEQ ID NO: 5028981 - DNA, 25 bp, Homo sapien
tgacaccactaaagacatctcatga

SEQ ID NO: 5028982 - DNA, 25 bp, Homo sapien
tccatatcttgactgcctgacacca

SEQ ID NO: 5028983 - DNA, 25 bp, Homo sapien
accactaaagacatctcatgaggtg

SEQ ID NO: 5028984 - DNA, 25 bp, Homo sapien
gcatacatgtaatgtgagagtgacc

SEQ ID NO: 5028985 - DNA, 25 bp, Homo sapien
caaattgggattggataattccatc

SEQ ID NO: 5028986 - DNA, 25 bp, Homo sapien
cttacaggtcctggcatacatgtaa

SEQ ID NO: 5028987 - DNA, 25 bp, Homo sapien
taaacaaattgggattggataattc

SEQ ID NO: 5028988 - DNA, 25 bp, Homo sapien
accatatatctgtctccaattttaa

SEQ ID NO: 5028989 - DNA, 25 bp, Homo sapien
ggatactacatctccaaccatatat

SEQ ID NO: 5028990 - DNA, 25 bp, Homo sapien
gaagagaatatccttgatcacactg

SEQ ID NO: 5028991 - DNA, 25 bp, Homo sapien
aattccactgctaggagtttgtggt

SEQ ID NO: 5028992 - DNA, 25 bp, Homo sapien
ttattactcttcaccagtaaggaca

SEQ ID NO: 5028993 - DNA, 25 bp, Homo sapien
atttattactcttcaccagtaagga

SEQ ID NO: 5028994 - DNA, 25 bp, Homo sapien
tttattactcttcaccagtaaggac

SEQ ID NO: 5028995 - DNA, 25 bp, Homo sapien
aagatgaagcctgcaaaagcacacc

SEQ ID NO: 5028996 - DNA, 25 bp, Homo sapien
gaacaacgcacccaaacaatcagga

SEQ ID NO: 5028997 - DNA, 25 bp, Homo sapien
tcaagggatgccaaaacttttgtgc

SEQ ID NO: 5028998 - DNA, 25 bp, Homo sapien
gatcagctgcagacgagaacaaagc

SEQ ID NO: 5028999 - DNA, 25 bp, Homo sapien
tgtctgattgaaaatttagatacag

SEQ ID NO: 5029000 - DNA, 25 bp, Homo sapien
tacagattattagacgtactattca

SEQ ID NO: 5029001 - DNA, 25 bp, Homo sapien
tattagacgtactattcaaaagatg

SEQ ID NO: 5029002 - DNA, 25 bp, Homo sapien
agatacagattattagacgtactat

SEQ ID NO: 5029003 - DNA, 25 bp, Homo sapien
cctgtatgtaccagattggtgaact

SEQ ID NO: 5029004 - DNA, 25 bp, Homo sapien
tgtcaaagtgataaccagttttaac

SEQ ID NO: 5029005 - DNA, 25 bp, Homo sapien
ccagttttaactgcctgtatgtacc

SEQ ID NO: 5029006 - DNA, 25 bp, Homo sapien
tataccagaggcttctgattgtcaa

SEQ ID NO: 5029007 - DNA, 25 bp, Homo sapien
gcaactttgtggacctcacccctga

SEQ ID NO: 5029008 - DNA, 25 bp, Homo sapien
tttgtggacctcacccctgatgtct

SEQ ID NO: 5029009 - DNA, 25 bp, Homo sapien
tgcgcaactttgtggacctcacccc

SEQ ID NO: 5029010 - DNA, 25 bp, Homo sapien
aactttgtggacctcacccctgatg

SEQ ID NO: 5029011 - DNA, 25 bp, Homo sapien
agtcttggagcattgttgtctcccc

SEQ ID NO: 5029012 - DNA, 25 bp, Homo sapien
ctgtagcaaagctaacaacttgcac

SEQ ID NO: 5029013 - DNA, 25 bp, Homo sapien
cccaattatgttctgtagcaaagct

SEQ ID NO: 5029014 - DNA, 25 bp, Homo sapien
ccaagtcttggagcattgttgtctc

SEQ ID NO: 5029015 - DNA, 25 bp, Homo sapien
ttgcgcttagttaaaattccaccac

SEQ ID NO: 5029016 - DNA, 25 bp, Homo sapien
ggcactgtgatcttccacacacaat

SEQ ID NO: 5029017 - DNA, 25 bp, Homo sapien
gattgttgtcataaggctcagggta

SEQ ID NO: 5029018 - DNA, 25 bp, Homo sapien
caaaatagtccctttgcgcttagtt

SEQ ID NO: 5029019 - DNA, 25 bp, Homo sapien
gaaaataaagcagtccaagagaggg

SEQ ID NO: 5029020 - DNA, 25 bp, Homo sapien
agcagtccaagagagggagttaatt

SEQ ID NO: 5029021 - DNA, 25 bp, Homo sapien
ctgaaaataaagcagtccaagagag

SEQ ID NO: 5029022 - DNA, 25 bp, Homo sapien
taaagcagtccaagagagggagtta

SEQ ID NO: 5029023 - DNA, 25 bp, Homo sapien
ccatctatggactttcagtgtgaat

SEQ ID NO: 5029024 - DNA, 25 bp, Homo sapien
tgttaagtgtcctgtagtttaccat

SEQ ID NO: 5029025 - DNA, 25 bp, Homo sapien
tggaatttccctgtgttaagtgtcc

SEQ ID NO: 5029026 - DNA, 25 bp, Homo sapien
tgaatgttaccgcttcaaccctttg

SEQ ID NO: 5029027 - DNA, 25 bp, Homo sapien
taatatgtggattaatagagcaggc

SEQ ID NO: 5029028 - DNA, 25 bp, Homo sapien
agagcaggctttcaaatcaagcagc

SEQ ID NO: 5029029 - DNA, 25 bp, Homo sapien
tttaccaacaaaatatgctatagaa

SEQ ID NO: 5029030 - DNA, 25 bp, Homo sapien
gaaaaattagcagatacgcaatacc

SEQ ID NO: 5029031 - DNA, 25 bp, Homo sapien
cacctaattgctatggatccatgga

SEQ ID NO: 5029032 - DNA, 25 bp, Homo sapien
tccactgggccaaagaattgggcac

SEQ ID NO: 5029033 - DNA, 25 bp, Homo sapien
gaattgggcactgtttcacacctaa

SEQ ID NO: 5029034 - DNA, 25 bp, Homo sapien
tacaagtaggtaaggaatcattcca

SEQ ID NO: 5029035 - DNA, 25 bp, Homo sapien
aaagaaccgatgaaccgactgcaaa

SEQ ID NO: 5029036 - DNA, 25 bp, Homo sapien
tccgaatcttggttcaggcacagaa

SEQ ID NO: 5029037 - DNA, 25 bp, Homo sapien
agaactgcattgtgtagaacttgtt

SEQ ID NO: 5029038 - DNA, 25 bp, Homo sapien
ggattacaatcaaaaagaaccgatg

SEQ ID NO: 5029039 - DNA, 25 bp, Homo sapien
aaatcccttagctgttattggtcca

SEQ ID NO: 5029040 - DNA, 25 bp, Homo sapien
gtaaatcgaattgtgatctgattac

SEQ ID NO: 5029041 - DNA, 25 bp, Homo sapien
agctgttattggtccaactgaagta

SEQ ID NO: 5029042 - DNA, 25 bp, Homo sapien
ccttagctgttattggtccaactga

SEQ ID NO: 5029043 - DNA, 25 bp, Homo sapien
ctcaacaacatcgtggagtgatgtc

SEQ ID NO: 5029044 - DNA, 25 bp, Homo sapien
tcatacacctcaacaacatcgtgga

SEQ ID NO: 5029045 - DNA, 25 bp, Homo sapien
aagattgctgagttggcccatcata

SEQ ID NO: 5029046 - DNA, 25 bp, Homo sapien
ctgaatgggatcctgagagggaaga

SEQ ID NO: 5029047 - DNA, 25 bp, Homo sapien
gatgctggtgcctcaatccaatggg

SEQ ID NO: 5029048 - DNA, 25 bp, Homo sapien
aacaagctccgtggtggtctgtttc

SEQ ID NO: 5029049 - DNA, 25 bp, Homo sapien
ttttgcatgattaacaagctccgtg

SEQ ID NO: 5029050 - DNA, 25 bp, Homo sapien
ccaagtctgtgctgattatgccttt

SEQ ID NO: 5029051 - DNA, 25 bp, Homo sapien
gtgagctgcgttatgctgatttagc

SEQ ID NO: 5029052 - DNA, 25 bp, Homo sapien
agtgagctgcgttatgctgatttag

SEQ ID NO: 5029053 - DNA, 25 bp, Homo sapien
tgagctgcgttatgctgatttagca

SEQ ID NO: 5029054 - DNA, 25 bp, Homo sapien
gagctgcgttatgctgatttagcat

SEQ ID NO: 5029055 - DNA, 25 bp, Homo sapien
tttcaatctttgctatcactgttgt

SEQ ID NO: 5029056 - DNA, 25 bp, Homo sapien
cgtggctatttcaatctttgctatc

SEQ ID NO: 5029057 - DNA, 25 bp, Homo sapien
gctatttcaatctttgctatcactg

SEQ ID NO: 5029058 - DNA, 25 bp, Homo sapien
caatctttgctatcactgttgtcat

SEQ ID NO: 5029059 - DNA, 25 bp, Homo sapien
gtgtaataagcttttacaccacatt

SEQ ID NO: 5029060 - DNA, 25 bp, Homo sapien
attgtgtaataagcttttacaccac

SEQ ID NO: 5029061 - DNA, 25 bp, Homo sapien
taattgtgtaataagcttttacacc

SEQ ID NO: 5029062 - DNA, 25 bp, Homo sapien
agtataattgtgtaataagctttta

SEQ ID NO: 5029063 - DNA, 25 bp, Homo sapien
aatcttttccaaagtaggcactgaa

SEQ ID NO: 5029064 - DNA, 25 bp, Homo sapien
tcttttccaaagtaggcactgaatt

SEQ ID NO: 5029065 - DNA, 25 bp, Homo sapien
tctgaatcttttccaaagtaggcac

SEQ ID NO: 5029066 - DNA, 25 bp, Homo sapien
tgaatcttttccaaagtaggcactg

SEQ ID NO: 5029067 - DNA, 25 bp, Homo sapien
ggagcagttgctcatctgatttcta

SEQ ID NO: 5029068 - DNA, 25 bp, Homo sapien
gagcagttgctcatctgatttctac

SEQ ID NO: 5029069 - DNA, 25 bp, Homo sapien
tggagcagttgctcatctgatttct

SEQ ID NO: 5029070 - DNA, 25 bp, Homo sapien
gtgagtttatccaggtatgagcaac

SEQ ID NO: 5029071 - DNA, 25 bp, Homo sapien
ttggtgagtttatccaggtatgagc

SEQ ID NO: 5029072 - DNA, 25 bp, Homo sapien
accttggtgagtttatccaggtatg

SEQ ID NO: 5029073 - DNA, 25 bp, Homo sapien
tacatcggaaaacgcagagctgagg

SEQ ID NO: 5029074 - DNA, 25 bp, Homo sapien
tcccacatcgtagtttatagcagtt

SEQ ID NO: 5029075 - DNA, 25 bp, Homo sapien
gtttcccacatcgtagtttatagca

SEQ ID NO: 5029076 - DNA, 25 bp, Homo sapien
gtagtttcccacatcgtagtttata

SEQ ID NO: 5029077 - DNA, 25 bp, Homo sapien
caaacggtagtttcccacatcgtag

SEQ ID NO: 5029078 - DNA, 25 bp, Homo sapien
gacattgaacctcatgtcaaaataa

SEQ ID NO: 5029079 - DNA, 25 bp, Homo sapien
actgcagaacttatcacattggtaa

SEQ ID NO: 5029080 - DNA, 25 bp, Homo sapien
tgaaatagcctaacaggacaactgc

SEQ ID NO: 5029081 - DNA, 25 bp, Homo sapien
taatcttcggcagctttatgccacc

SEQ ID NO: 5029082 - DNA, 25 bp, Homo sapien
aacacaattatgtcccacactgtaa

SEQ ID NO: 5029083 - DNA, 25 bp, Homo sapien
aacctgttgaacgacttccacaggg

SEQ ID NO: 5029084 - DNA, 25 bp, Homo sapien
taaacacaattatgtcccacactgt

SEQ ID NO: 5029085 - DNA, 25 bp, Homo sapien
agtgccttctgaacctgttgaacga

SEQ ID NO: 5029086 - DNA, 25 bp, Homo sapien
gaaagcatacggatggtaactggta

SEQ ID NO: 5029087 - DNA, 25 bp, Homo sapien
taactggtattctttaagcgaataa

SEQ ID NO: 5029088 - DNA, 25 bp, Homo sapien
taaatggagatttagtaccgaaagc

SEQ ID NO: 5029089 - DNA, 25 bp, Homo sapien
ggtattctttaagcgaataagatca

SEQ ID NO: 5029090 - DNA, 25 bp, Homo sapien
gtagaatgagaaaagatgggcaaag

SEQ ID NO: 5029091 - DNA, 25 bp, Homo sapien
ctgaaaagtatgtagaatgagaaaa

SEQ ID NO: 5029092 - DNA, 25 bp, Homo sapien
agaatgagaaaagatgggcaaagag

SEQ ID NO: 5029093 - DNA, 25 bp, Homo sapien
atgagaaaagatgggcaaagaggag

SEQ ID NO: 5029094 - DNA, 25 bp, Homo sapien
agaatgagtttcctgattggtgagc

SEQ ID NO: 5029095 - DNA, 25 bp, Homo sapien
gaatgagtttcctgattggtgagcc

SEQ ID NO: 5029096 - DNA, 25 bp, Homo sapien
ttagggcgccttctgagggtagggc

SEQ ID NO: 5029097 - DNA, 25 bp, Homo sapien
tgtctggtgtgctcttctacactgt

SEQ ID NO: 5029098 - DNA, 25 bp, Homo sapien
gagcacactgtctggtgtgctcttc

SEQ ID NO: 5029099 - DNA, 25 bp, Homo sapien
ggtgtgctcttctacactgtaggtt

SEQ ID NO: 5029100 - DNA, 25 bp, Homo sapien
cagactcccatcaatttctgcatgt

SEQ ID NO: 5029101 - DNA, 25 bp, Homo sapien
gcctctataactgtcacagtccaga

SEQ ID NO: 5029102 - DNA, 25 bp, Homo sapien
ctctgcctctataactgtcacagtc

SEQ ID NO: 5029103 - DNA, 25 bp, Homo sapien
acagtccagactcccatcaatttct

SEQ ID NO: 5029104 - DNA, 25 bp, Homo sapien
gaagaacataaccagcatcacagta

SEQ ID NO: 5029105 - DNA, 25 bp, Homo sapien
gacaacttggcaaggctctattcca

SEQ ID NO: 5029106 - DNA, 25 bp, Homo sapien
tataatccattccaagtctggtgcc

SEQ ID NO: 5029107 - DNA, 25 bp, Homo sapien
tcatctcccatgatacaggtgagtg

SEQ ID NO: 5029108 - DNA, 25 bp, Homo sapien
tgtaactaacagatccatcactccg

SEQ ID NO: 5029109 - DNA, 25 bp, Homo sapien
tgtctggtccatcatagatatagag

SEQ ID NO: 5029110 - DNA, 25 bp, Homo sapien
tcactccgaaaagccaaatgcattg

SEQ ID NO: 5029111 - DNA, 25 bp, Homo sapien
cttgaaaacttccaatcagtgggct

SEQ ID NO: 5029112 - DNA, 25 bp, Homo sapien
ctgatgaacgccaaggagataacat

SEQ ID NO: 5029113 - DNA, 25 bp, Homo sapien
gccaaggagataacatagtctgcat

SEQ ID NO: 5029114 - DNA, 25 bp, Homo sapien
tagtctgcattgacggtgatagtcc

SEQ ID NO: 5029115 - DNA, 25 bp, Homo sapien
cagtctctgctatgcggatatggat

SEQ ID NO: 5029116 - DNA, 25 bp, Homo sapien
ttgtccacaaacacgctcaggtttc

SEQ ID NO: 5029117 - DNA, 25 bp, Homo sapien
tttgtccacaaacacgctcaggttt

SEQ ID NO: 5029118 - DNA, 25 bp, Homo sapien
tccactttgtccacaaacacgctca

SEQ ID NO: 5029119 - DNA, 25 bp, Homo sapien
ccactttgtccacaaacacgctcag

SEQ ID NO: 5029120 - DNA, 25 bp, Homo sapien
tcacgacacgcagtggcaacagaac

SEQ ID NO: 5029121 - DNA, 25 bp, Homo sapien
ttctacctgaatgcaggttattctt

SEQ ID NO: 5029122 - DNA, 25 bp, Homo sapien
tccccatttcgagtcccattcatgg

SEQ ID NO: 5029123 - DNA, 25 bp, Homo sapien
gctgccagaagtaccgattttctac

SEQ ID NO: 5029124 - DNA, 25 bp, Homo sapien
gactgaaatggtcttgggcctcaaa

SEQ ID NO: 5029125 - DNA, 25 bp, Homo sapien
cggcagaagggcttaagccctagct

SEQ ID NO: 5029126 - DNA, 25 bp, Homo sapien
caagatagaaatctgtagccacagc

SEQ ID NO: 5029127 - DNA, 25 bp, Homo sapien
cagcaattctgtagtgaccatggtc

SEQ ID NO: 5029128 - DNA, 25 bp, Homo sapien
tccttcaggaataagagatccacta

SEQ ID NO: 5029129 - DNA, 25 bp, Homo sapien
catgtgatgcttccgtatcaaaagc

SEQ ID NO: 5029130 - DNA, 25 bp, Homo sapien
tatcattttctggtggaccgtccca

SEQ ID NO: 5029131 - DNA, 25 bp, Homo sapien
tattgagggtgctatgaattccttc

SEQ ID NO: 5029132 - DNA, 25 bp, Homo sapien
aaggatagccaggagataagattct

SEQ ID NO: 5029133 - DNA, 25 bp, Homo sapien
caggttattgtcatatggaaaagga

SEQ ID NO: 5029134 - DNA, 25 bp, Homo sapien
tgattctcctttaaaacgacctcca

SEQ ID NO: 5029135 - DNA, 25 bp, Homo sapien
tcaatcatccacatgcaacgcaggt

SEQ ID NO: 5029136 - DNA, 25 bp, Homo sapien
ttatagctgctaaatttatttgatc

SEQ ID NO: 5029137 - DNA, 25 bp, Homo sapien
tttatagctgctaaatttatttgat

SEQ ID NO: 5029138 - DNA, 25 bp, Homo sapien
tccaactgtttatagctgctaaatt

SEQ ID NO: 5029139 - DNA, 25 bp, Homo sapien
tgtccaactgtttatagctgctaaa

SEQ ID NO: 5029140 - DNA, 25 bp, Homo sapien
cagaggatagtcccatgcccttctc

SEQ ID NO: 5029141 - DNA, 25 bp, Homo sapien
gcagaggatagtcccatgcccttct

SEQ ID NO: 5029142 - DNA, 25 bp, Homo sapien
agaggatagtcccatgcccttctct

SEQ ID NO: 5029143 - DNA, 25 bp, Homo sapien
ggtcactgatcttgtatccaaattg

SEQ ID NO: 5029144 - DNA, 25 bp, Homo sapien
atggtgctaccagcaaagtggcctt

SEQ ID NO: 5029145 - DNA, 25 bp, Homo sapien
cctggattgcatccataaatgatgg

SEQ ID NO: 5029146 - DNA, 25 bp, Homo sapien
tgagaaggctacttccgtggagagt

SEQ ID NO: 5029147 - DNA, 25 bp, Homo sapien
gtccgatgggtaatgtgcagacgtt

SEQ ID NO: 5029148 - DNA, 25 bp, Homo sapien
cacacaagtgtgaaaacctaatcat

SEQ ID NO: 5029149 - DNA, 25 bp, Homo sapien
ctaatcatcacacttttaaactaaa

SEQ ID NO: 5029150 - DNA, 25 bp, Homo sapien
tccgatgggtaatgtgcagacgttg

SEQ ID NO: 5029151 - DNA, 25 bp, Homo sapien
caaatgttctcgctcctgttctgat

SEQ ID NO: 5029152 - DNA, 25 bp, Homo sapien
tcaatgtgagtactgtgacctcctc

SEQ ID NO: 5029153 - DNA, 25 bp, Homo sapien
ttctgtcaatgtgagtactgtgacc

SEQ ID NO: 5029154 - DNA, 25 bp, Homo sapien
gacctcctctgcaatacctatgatt

SEQ ID NO: 5029155 - DNA, 25 bp, Homo sapien
ggtatacacaagttgaaagccttca

SEQ ID NO: 5029156 - DNA, 25 bp, Homo sapien
gaagtactactaagtgtcagtccgc

SEQ ID NO: 5029157 - DNA, 25 bp, Homo sapien
gtcagtccgcgcatagatgcaccag

SEQ ID NO: 5029158 - DNA, 25 bp, Homo sapien
tctgtcccttcagtatcggaattaa

SEQ ID NO: 5029159 - DNA, 25 bp, Homo sapien
catagttgagtggataatttggaga

SEQ ID NO: 5029160 - DNA, 25 bp, Homo sapien
gagtggataatttggagacagcaaa

SEQ ID NO: 5029161 - DNA, 25 bp, Homo sapien
tcattattcgttgcagatgcaccac

SEQ ID NO: 5029162 - DNA, 25 bp, Homo sapien
ctggctgaaatattgattccctttc

SEQ ID NO: 5029163 - DNA, 25 bp, Homo sapien
aaagaacttgtaccatattgtccca

SEQ ID NO: 5029164 - DNA, 25 bp, Homo sapien
tagtagctgcctcataccttgacag

SEQ ID NO: 5029165 - DNA, 25 bp, Homo sapien
catttgtgttcctaaggccagctac

SEQ ID NO: 5029166 - DNA, 25 bp, Homo sapien
ggccagctactcagtttgcacattg

SEQ ID NO: 5029167 - DNA, 25 bp, Homo sapien
tcactttgcctagcgggactttctc

SEQ ID NO: 5029168 - DNA, 25 bp, Homo sapien
gcctagcgggactttctcatctttt

SEQ ID NO: 5029169 - DNA, 25 bp, Homo sapien
atgttattcactttgcctagcggga

SEQ ID NO: 5029170 - DNA, 25 bp, Homo sapien
tattcactttgcctagcgggacttt

SEQ ID NO: 5029171 - DNA, 25 bp, Homo sapien
ctggcttggttcctggtatatttgg

SEQ ID NO: 5029172 - DNA, 25 bp, Homo sapien
cattagctcgttgtttatttgcaac

SEQ ID NO: 5029173 - DNA, 25 bp, Homo sapien
gtttatttgcaacatggcctggctt

SEQ ID NO: 5029174 - DNA, 25 bp, Homo sapien
tttatttgcaacatggcctggcttg

SEQ ID NO: 5029175 - DNA, 25 bp, Homo sapien
cgataacccgaagagcatgagaagg

SEQ ID NO: 5029176 - DNA, 25 bp, Homo sapien
gagtgtcaccaatcccaaagttgaa

SEQ ID NO: 5029177 - DNA, 25 bp, Homo sapien
taccatattgaggaatgccaggatc

SEQ ID NO: 5029178 - DNA, 25 bp, Homo sapien
gccaggatcttcacaaggttcaagg

SEQ ID NO: 5029179 - DNA, 25 bp, Homo sapien
gccagtggttgggtaaaactgccat

SEQ ID NO: 5029180 - DNA, 25 bp, Homo sapien
gatctgaaccagtcaggcgtgccag

SEQ ID NO: 5029181 - DNA, 25 bp, Homo sapien
gaaatgaaacgcaattgagccctga

SEQ ID NO: 5029182 - DNA, 25 bp, Homo sapien
gccctgaaatttccatagagaccag

SEQ ID NO: 5029183 - DNA, 25 bp, Homo sapien
aggtgataagattgttccactaggc

SEQ ID NO: 5029184 - DNA, 25 bp, Homo sapien
ttccatgggttacatcaacagtcca

SEQ ID NO: 5029185 - DNA, 25 bp, Homo sapien
gattgttccactaggccctctaaca

SEQ ID NO: 5029186 - DNA, 25 bp, Homo sapien
caacagtccatgtacaattcagaga

SEQ ID NO: 5029187 - DNA, 25 bp, Homo sapien
aaatcagcatattttgcatgtcaaa

SEQ ID NO: 5029188 - DNA, 25 bp, Homo sapien
atcagcatattttgcatgtcaaatg

SEQ ID NO: 5029189 - DNA, 25 bp, Homo sapien
atattttgcatgtcaaatgagttat

SEQ ID NO: 5029190 - DNA, 25 bp, Homo sapien
catattttgcatgtcaaatgagtta

SEQ ID NO: 5029191 - DNA, 25 bp, Homo sapien
gacggccatgtacaggtatgccagg

SEQ ID NO: 5029192 - DNA, 25 bp, Homo sapien
caatggagaaatcatgaccatagcg

SEQ ID NO: 5029193 - DNA, 25 bp, Homo sapien
aatgaaacagtagagccaatggaga

SEQ ID NO: 5029194 - DNA, 25 bp, Homo sapien
gggctcttcatgactcaacctgtat

SEQ ID NO: 5029195 - DNA, 25 bp, Homo sapien
aataaagagtaagcttggtgggatt

SEQ ID NO: 5029196 - DNA, 25 bp, Homo sapien
taaagagtaagcttggtgggatttg

SEQ ID NO: 5029197 - DNA, 25 bp, Homo sapien
aagagtaagcttggtgggatttgga

SEQ ID NO: 5029198 - DNA, 25 bp, Homo sapien
aaataaagagtaagcttggtgggat

SEQ ID NO: 5029199 - DNA, 25 bp, Homo sapien
gaaatccattctcattgaaaagcat

SEQ ID NO: 5029200 - DNA, 25 bp, Homo sapien
ctgaaatccattctcattgaaaagc

SEQ ID NO: 5029201 - DNA, 25 bp, Homo sapien
tgaaatccattctcattgaaaagca

SEQ ID NO: 5029202 - DNA, 25 bp, Homo sapien
ctgttgtctgttgtaaatagaaggt

SEQ ID NO: 5029203 - DNA, 25 bp, Homo sapien
gtgacagaagatttggcccatcatg

SEQ ID NO: 5029204 - DNA, 25 bp, Homo sapien
ttgtaagatccaagcaagggtgaca

SEQ ID NO: 5029205 - DNA, 25 bp, Homo sapien
gaaaccattattggaacgactgttg

SEQ ID NO: 5029206 - DNA, 25 bp, Homo sapien
aacctctattctatgatgtctgatc

SEQ ID NO: 5029207 - DNA, 25 bp, Homo sapien
cctgactctaacctctattctatga

SEQ ID NO: 5029208 - DNA, 25 bp, Homo sapien
caaaaccaagtctccctgactctaa

SEQ ID NO: 5029209 - DNA, 25 bp, Homo sapien
agtctccctgactctaacctctatt

SEQ ID NO: 5029210 - DNA, 25 bp, Homo sapien
gtttttgtcaatgctttgcatatag

SEQ ID NO: 5029211 - DNA, 25 bp, Homo sapien
tatcatacttgccagtcttttgcag

SEQ ID NO: 5029212 - DNA, 25 bp, Homo sapien
acaaaaaagtatccaacataattgg

SEQ ID NO: 5029213 - DNA, 25 bp, Homo sapien
taattggatgctttagtattaacca

SEQ ID NO: 5029214 - DNA, 25 bp, Homo sapien
aatcacccactcacaattcaaagag

SEQ ID NO: 5029215 - DNA, 25 bp, Homo sapien
attttgatagagtgtccaggttcag

SEQ ID NO: 5029216 - DNA, 25 bp, Homo sapien
aggttcagcttcaatcacccactca

SEQ ID NO: 5029217 - DNA, 25 bp, Homo sapien
attcaaagagtctttgtagtatcct

SEQ ID NO: 5029218 - DNA, 25 bp, Homo sapien
atatattcttgtctctccatcgtca

SEQ ID NO: 5029219 - DNA, 25 bp, Homo sapien
tatattcttgtctctccatcgtcat

SEQ ID NO: 5029220 - DNA, 25 bp, Homo sapien
taaaagattggataatcaaaagtac

SEQ ID NO: 5029221 - DNA, 25 bp, Homo sapien
gccgtgcattgattggtattccagg

SEQ ID NO: 5029222 - DNA, 25 bp, Homo sapien
caggatcagggcattcattatgtcc

SEQ ID NO: 5029223 - DNA, 25 bp, Homo sapien
agttgtccccaaaccgccgtgcatt

SEQ ID NO: 5029224 - DNA, 25 bp, Homo sapien
ggaatcagtccactccacattactt

SEQ ID NO: 5029225 - DNA, 25 bp, Homo sapien
gaataatatgcaaagaaaaatacac

SEQ ID NO: 5029226 - DNA, 25 bp, Homo sapien
ttagaataatatgcaaagaaaaata

SEQ ID NO: 5029227 - DNA, 25 bp, Homo sapien
tagaataatatgcaaagaaaaatac

SEQ ID NO: 5029228 - DNA, 25 bp, Homo sapien
ctttagaataatatgcaaagaaaaa

SEQ ID NO: 5029229 - DNA, 25 bp, Homo sapien
cacaatgagatttacagcttttaca

SEQ ID NO: 5029230 - DNA, 25 bp, Homo sapien
taggaaacaagggaaccaatataca

SEQ ID NO: 5029231 - DNA, 25 bp, Homo sapien
aaatgtgattggaaatgaaggaaga

SEQ ID NO: 5029232 - DNA, 25 bp, Homo sapien
tatacatgatcacttttcaactcaa

SEQ ID NO: 5029233 - DNA, 25 bp, Homo sapien
tgacattgagtggtcagcctgaaat

SEQ ID NO: 5029234 - DNA, 25 bp, Homo sapien
agtgatgttaaagccacgtcctgac

SEQ ID NO: 5029235 - DNA, 25 bp, Homo sapien
tgaaattccaatcgcagtatgtgac

SEQ ID NO: 5029236 - DNA, 25 bp, Homo sapien
ctagtaagatgggaaggcacctcag

SEQ ID NO: 5029237 - DNA, 25 bp, Homo sapien
actgggattccaggtcaaagtcatt

SEQ ID NO: 5029238 - DNA, 25 bp, Homo sapien
tgttcccattggtgcagtaaagtta

SEQ ID NO: 5029239 - DNA, 25 bp, Homo sapien
gatcagagattatcgtccagatgca

SEQ ID NO: 5029240 - DNA, 25 bp, Homo sapien
taatcaggagaaagaactgttccca

SEQ ID NO: 5029241 - DNA, 25 bp, Homo sapien
gcagtaaagttagacaggcagggaa

SEQ ID NO: 5029242 - DNA, 25 bp, Homo sapien
tcaatacaatacgtcaagttcccag

SEQ ID NO: 5029243 - DNA, 25 bp, Homo sapien
ggatttggcccacaatctgtttgcc

SEQ ID NO: 5029244 - DNA, 25 bp, Homo sapien
gaaggcagccatgcacaatcagtaa

SEQ ID NO: 5029245 - DNA, 25 bp, Homo sapien
gatctaaatgatccccacttggagc

SEQ ID NO: 5029246 - DNA, 25 bp, Homo sapien
aaaaataattacacggttgcagctc

SEQ ID NO: 5029247 - DNA, 25 bp, Homo sapien
caattatatgcaaggacagggtaac

SEQ ID NO: 5029248 - DNA, 25 bp, Homo sapien
gctctttgcaattaattacaaaagc

SEQ ID NO: 5029249 - DNA, 25 bp, Homo sapien
tggaagcaaagcatttggtactcac

SEQ ID NO: 5029250 - DNA, 25 bp, Homo sapien
caattaattcaaacccaaactggca

SEQ ID NO: 5029251 - DNA, 25 bp, Homo sapien
ccatataagggtgtaccaggatcac

SEQ ID NO: 5029252 - DNA, 25 bp, Homo sapien
catcacgattagaaaatccatcgcc

SEQ ID NO: 5029253 - DNA, 25 bp, Homo sapien
tctcttgacaaacaatggatttctc

SEQ ID NO: 5029254 - DNA, 25 bp, Homo sapien
gctcatgcaggcttacggacagaac

SEQ ID NO: 5029255 - DNA, 25 bp, Homo sapien
catgcaggcttacggacagaacaac

SEQ ID NO: 5029256 - DNA, 25 bp, Homo sapien
gcaggcttacggacagaacaaccat

SEQ ID NO: 5029257 - DNA, 25 bp, Homo sapien
tcatgcaggcttacggacagaacaa

SEQ ID NO: 5029258 - DNA, 25 bp, Homo sapien
gataggagatgcaagagtaactgag

SEQ ID NO: 5029259 - DNA, 25 bp, Homo sapien
gcttggagccaatatgcttatggcc

SEQ ID NO: 5029260 - DNA, 25 bp, Homo sapien
tgtgcaagtcagtgatactacagac

SEQ ID NO: 5029261 - DNA, 25 bp, Homo sapien
ctactggcggtatgtggacttttgt

SEQ ID NO: 5029262 - DNA, 25 bp, Homo sapien
ggtcatcgggtttctctgaaggcaa

SEQ ID NO: 5029263 - DNA, 25 bp, Homo sapien
tctctgaaggcaaatccctttgtcc

SEQ ID NO: 5029264 - DNA, 25 bp, Homo sapien
cttttggtcatgaagacaagcgtgg

SEQ ID NO: 5029265 - DNA, 25 bp, Homo sapien
aagcgtggtcatcgggtttctctga

SEQ ID NO: 5029266 - DNA, 25 bp, Homo sapien
atacagatgctttgcgtaagtcacc

SEQ ID NO: 5029267 - DNA, 25 bp, Homo sapien
agtagaggtcatttaatacagatgc

SEQ ID NO: 5029268 - DNA, 25 bp, Homo sapien
cttctgccagcagtagaggtcattt

SEQ ID NO: 5029269 - DNA, 25 bp, Homo sapien
gctttgcgtaagtcaccaccagatg

SEQ ID NO: 5029270 - DNA, 25 bp, Homo sapien
tgcagcaggttggactgggagagac

SEQ ID NO: 5029271 - DNA, 25 bp, Homo sapien
gattatcattagtaatgtgcagcag

SEQ ID NO: 5029272 - DNA, 25 bp, Homo sapien
tcattctgatgctggaagattatca

SEQ ID NO: 5029273 - DNA, 25 bp, Homo sapien
cattagtaatgtgcagcaggttgga

SEQ ID NO: 5029274 - DNA, 25 bp, Homo sapien
agatgaggtatgcaaaatagacaca

SEQ ID NO: 5029275 - DNA, 25 bp, Homo sapien
gttgaaatgtagcatgtgttctgca

SEQ ID NO: 5029276 - DNA, 25 bp, Homo sapien
gctaggagtctacagtgattgaaac

SEQ ID NO: 5029277 - DNA, 25 bp, Homo sapien
tttgtagatgcaattaaacgtgaat

SEQ ID NO: 5029278 - DNA, 25 bp, Homo sapien
ctttcgtccgtttgaaggtgcagcc

SEQ ID NO: 5029279 - DNA, 25 bp, Homo sapien
cagatccaacactttcgtccgtttg

SEQ ID NO: 5029280 - DNA, 25 bp, Homo sapien
tagttaaccttgaaaccaacagatc

SEQ ID NO: 5029281 - DNA, 25 bp, Homo sapien
tgtagttaaccttgaaaccaacaga

SEQ ID NO: 5029282 - DNA, 25 bp, Homo sapien
tcactatcaagtctggtacaaagct

SEQ ID NO: 5029283 - DNA, 25 bp, Homo sapien
ctcactatcaagtctggtacaaagc

SEQ ID NO: 5029284 - DNA, 25 bp, Homo sapien
gctcactatcaagtctggtacaaag

SEQ ID NO: 5029285 - DNA, 25 bp, Homo sapien
catggagatttgcacaggatacagt

SEQ ID NO: 5029286 - DNA, 25 bp, Homo sapien
aactgcaatggtgtatccgaaagac

SEQ ID NO: 5029287 - DNA, 25 bp, Homo sapien
tcagcagactccactcatgtgatgg

SEQ ID NO: 5029288 - DNA, 25 bp, Homo sapien
tttcagtttacagtcccgggcatgg

SEQ ID NO: 5029289 - DNA, 25 bp, Homo sapien
tattttgagttagccttctacttgc

SEQ ID NO: 5029290 - DNA, 25 bp, Homo sapien
tccatctggtgttaatgaacacacg

SEQ ID NO: 5029291 - DNA, 25 bp, Homo sapien
tgaacacacgttgttggtattttga

SEQ ID NO: 5029292 - DNA, 25 bp, Homo sapien
tgcagttcccacacaaatagggcct

SEQ ID NO: 5029293 - DNA, 25 bp, Homo sapien
tgcagtcacttatatgcgcgtccca

SEQ ID NO: 5029294 - DNA, 25 bp, Homo sapien
gcagtcacttatatgcgcgtcccac

SEQ ID NO: 5029295 - DNA, 25 bp, Homo sapien
agtcacttatatgcgcgtcccacat

SEQ ID NO: 5029296 - DNA, 25 bp, Homo sapien
cagtcacttatatgcgcgtcccaca

SEQ ID NO: 5029297 - DNA, 25 bp, Homo sapien
aaatgcctgctacagtgcaaatatt

SEQ ID NO: 5029298 - DNA, 25 bp, Homo sapien
gaaatgcctgctacagtgcaaatat

SEQ ID NO: 5029299 - DNA, 25 bp, Homo sapien
aatgcctgctacagtgcaaatattc

SEQ ID NO: 5029300 - DNA, 25 bp, Homo sapien
acttggagcactgtcctaggatctc

SEQ ID NO: 5029301 - DNA, 25 bp, Homo sapien
cccatcgccaattgtcaaggtatca

SEQ ID NO: 5029302 - DNA, 25 bp, Homo sapien
gtcctaggatctccaacttcgcccc

SEQ ID NO: 5029303 - DNA, 25 bp, Homo sapien
catagccaatctccagatcaaattc

SEQ ID NO: 5029304 - DNA, 25 bp, Homo sapien
ttgcagctattcttgaggtgttagg

SEQ ID NO: 5029305 - DNA, 25 bp, Homo sapien
tattcttgaggtgttaggtagctgg

SEQ ID NO: 5029306 - DNA, 25 bp, Homo sapien
atgttccagaaggttgagcatggcc

SEQ ID NO: 5029307 - DNA, 25 bp, Homo sapien
tggggtaggagacaatgttccagaa

SEQ ID NO: 5029308 - DNA, 25 bp, Homo sapien
ggcagcagcctattctgacttagaa

SEQ ID NO: 5029309 - DNA, 25 bp, Homo sapien
gggagtctccacaagaatatttcaa

SEQ ID NO: 5029310 - DNA, 25 bp, Homo sapien
ggtttccggtgactaatatcagcag

SEQ ID NO: 5029311 - DNA, 25 bp, Homo sapien
gcaaaatatctcagtgacggaaagc

SEQ ID NO: 5029312 - DNA, 25 bp, Homo sapien
tccttgaagattagagccacacgtt

SEQ ID NO: 5029313 - DNA, 25 bp, Homo sapien
cactgctgtgatgacccagacacat

SEQ ID NO: 5029314 - DNA, 25 bp, Homo sapien
tgcattgctgtcatactggaacgga

SEQ ID NO: 5029315 - DNA, 25 bp, Homo sapien
gagatgtaaaggtaccacttggtcc

SEQ ID NO: 5029316 - DNA, 25 bp, Homo sapien
gagctcctttatgtcagcaactaca

SEQ ID NO: 5029317 - DNA, 25 bp, Homo sapien
gctcctttatgtcagcaactacatt

SEQ ID NO: 5029318 - DNA, 25 bp, Homo sapien
tgagctcctttatgtcagcaactac

SEQ ID NO: 5029319 - DNA, 25 bp, Homo sapien
ctctgagctcctttatgtcagcaac

SEQ ID NO: 5029320 - DNA, 25 bp, Homo sapien
ttagagagcaatgagatatcatcat

SEQ ID NO: 5029321 - DNA, 25 bp, Homo sapien
tttagagagcaatgagatatcatca

SEQ ID NO: 5029322 - DNA, 25 bp, Homo sapien
gagagcaatgagatatcatcattac

SEQ ID NO: 5029323 - DNA, 25 bp, Homo sapien
agatttagagagcaatgagatatca

SEQ ID NO: 5029324 - DNA, 25 bp, Homo sapien
tgcctctggactcagatggcactca

SEQ ID NO: 5029325 - DNA, 25 bp, Homo sapien
ttcattgcctctggactcagatggc

SEQ ID NO: 5029326 - DNA, 25 bp, Homo sapien
ccattcattgcctctggactcagat

SEQ ID NO: 5029327 - DNA, 25 bp, Homo sapien
atattcagctgtgccattcattgcc

SEQ ID NO: 5029328 - DNA, 25 bp, Homo sapien
ggagagatgagctggcattcttcca

SEQ ID NO: 5029329 - DNA, 25 bp, Homo sapien
ctggaggagagatgagctggcattc

SEQ ID NO: 5029330 - DNA, 25 bp, Homo sapien
gagagatgagctggcattcttccat

SEQ ID NO: 5029331 - DNA, 25 bp, Homo sapien
gaggagagatgagctggcattcttc

SEQ ID NO: 5029332 - DNA, 25 bp, Homo sapien
tctgacatgccctgacaaacagcca

SEQ ID NO: 5029333 - DNA, 25 bp, Homo sapien
tttaaagacaggttgtcaggagaga

SEQ ID NO: 5029334 - DNA, 25 bp, Homo sapien
gtcaggagagaaatcctgataattg

SEQ ID NO: 5029335 - DNA, 25 bp, Homo sapien
aatcctgataattggccttgagtgt

SEQ ID NO: 5029336 - DNA, 25 bp, Homo sapien
aacttctggtgtgagattttgttcc

SEQ ID NO: 5029337 - DNA, 25 bp, Homo sapien
tatgtagatcttaaattccatgatc

SEQ ID NO: 5029338 - DNA, 25 bp, Homo sapien
gtgagattttgttcctacattaaca

SEQ ID NO: 5029339 - DNA, 25 bp, Homo sapien
atgatctggctataacttctggtgt

SEQ ID NO: 5029340 - DNA, 25 bp, Homo sapien
tcagctatccgttgacaggtgatgc

SEQ ID NO: 5029341 - DNA, 25 bp, Homo sapien
ggtgatgctctttgcgccctgtagg

SEQ ID NO: 5029342 - DNA, 25 bp, Homo sapien
tcatcacaagagaactgcacagttg

SEQ ID NO: 5029343 - DNA, 25 bp, Homo sapien
gcctgtgatcactccaagcagcaaa

SEQ ID NO: 5029344 - DNA, 25 bp, Homo sapien
ccagcagtacatgagcattcctgtt

SEQ ID NO: 5029345 - DNA, 25 bp, Homo sapien
cagtgtgactttcatagttggaggc

SEQ ID NO: 5029346 - DNA, 25 bp, Homo sapien
gggcagagactggtaattctatcca

SEQ ID NO: 5029347 - DNA, 25 bp, Homo sapien
tctcggcagcattttgtgttgtcag

SEQ ID NO: 5029348 - DNA, 25 bp, Homo sapien
aagctgttttaatacctccctcatt

SEQ ID NO: 5029349 - DNA, 25 bp, Homo sapien
gctgttttaatacctccctcattta

SEQ ID NO: 5029350 - DNA, 25 bp, Homo sapien
ctaaaatctgatccgattctcttcc

SEQ ID NO: 5029351 - DNA, 25 bp, Homo sapien
ggaagctgttttaatacctccctca

SEQ ID NO: 5029352 - DNA, 25 bp, Homo sapien
taaattaaacatcggattttgcatg

SEQ ID NO: 5029353 - DNA, 25 bp, Homo sapien
gactgcccaacagttatagttgtgg

SEQ ID NO: 5029354 - DNA, 25 bp, Homo sapien
ttctaaattaaacatcggattttgc

SEQ ID NO: 5029355 - DNA, 25 bp, Homo sapien
aagatagctatcagacgactgccca

SEQ ID NO: 5029356 - DNA, 25 bp, Homo sapien
tttgctgaacatactgactccacac

SEQ ID NO: 5029357 - DNA, 25 bp, Homo sapien
tgaacatactgactccacacatttg

SEQ ID NO: 5029358 - DNA, 25 bp, Homo sapien
tctgttcgctgttctgcaatttgct

SEQ ID NO: 5029359 - DNA, 25 bp, Homo sapien
catcacccaagtcccgttgtctgtt

SEQ ID NO: 5029360 - DNA, 25 bp, Homo sapien
tctagatttaaaatctatggccttt

SEQ ID NO: 5029361 - DNA, 25 bp, Homo sapien
ctagatttaaaatctatggcctttt

SEQ ID NO: 5029362 - DNA, 25 bp, Homo sapien
tttcggttgtttaccaactcattga

SEQ ID NO: 5029363 - DNA, 25 bp, Homo sapien
ttcggttgtttaccaactcattgaa

SEQ ID NO: 5029364 - DNA, 25 bp, Homo sapien
tcggttgtttaccaactcattgaaa

SEQ ID NO: 5029365 - DNA, 25 bp, Homo sapien
tgtttaccaactcattgaaaaagta

SEQ ID NO: 5029366 - DNA, 25 bp, Homo sapien
tatgtcctcgactctattgcaatgt

SEQ ID NO: 5029367 - DNA, 25 bp, Homo sapien
tctctgcatacacactgtaacttct

SEQ ID NO: 5029368 - DNA, 25 bp, Homo sapien
tatcttgtaccactagaatgggttt

SEQ ID NO: 5029369 - DNA, 25 bp, Homo sapien
taacttctttagtactttgatcaga

SEQ ID NO: 5029370 - DNA, 25 bp, Homo sapien
ctaaatgggcacaagtaaaataaca

SEQ ID NO: 5029371 - DNA, 25 bp, Homo sapien
gctttggctgtaactaaatgggcac

SEQ ID NO: 5029372 - DNA, 25 bp, Homo sapien
tgggcacaagtaaaataacatccaa

SEQ ID NO: 5029373 - DNA, 25 bp, Homo sapien
tagctttggctgtaactaaatgggc

SEQ ID NO: 5029374 - DNA, 25 bp, Homo sapien
tgagactcgtaacttgcactcgctg

SEQ ID NO: 5029375 - DNA, 25 bp, Homo sapien
tctatggatggtgacagctgtaaca

SEQ ID NO: 5029376 - DNA, 25 bp, Homo sapien
catctgcaggtgtgctagcaacagc

SEQ ID NO: 5029377 - DNA, 25 bp, Homo sapien
tagcaacagcaatagcaccagtggt

SEQ ID NO: 5029378 - DNA, 25 bp, Homo sapien
gatggattaaattatcatattccat

SEQ ID NO: 5029379 - DNA, 25 bp, Homo sapien
ggattaaattatcatattccatcag

SEQ ID NO: 5029380 - DNA, 25 bp, Homo sapien
gggatggattaaattatcatattcc

SEQ ID NO: 5029381 - DNA, 25 bp, Homo sapien
agggatggattaaattatcatattc

SEQ ID NO: 5029382 - DNA, 25 bp, Homo sapien
gaagatacaagtattgcaaggtcat

SEQ ID NO: 5029383 - DNA, 25 bp, Homo sapien
ggaagatacaagtattgcaaggtca

SEQ ID NO: 5029384 - DNA, 25 bp, Homo sapien
catgggataccgataaaatgaggtc

SEQ ID NO: 5029385 - DNA, 25 bp, Homo sapien
gagagcatctgtgttgggataagcc

SEQ ID NO: 5029386 - DNA, 25 bp, Homo sapien
gggcaataatgtgtaacctgtttta

SEQ ID NO: 5029387 - DNA, 25 bp, Homo sapien
catttggggtctatccaaccaggcc

SEQ ID NO: 5029388 - DNA, 25 bp, Homo sapien
tcttgagtttttcaataacagccgg

SEQ ID NO: 5029389 - DNA, 25 bp, Homo sapien
cacctcaagctgttttataactaca

SEQ ID NO: 5029390 - DNA, 25 bp, Homo sapien
ttctttcacctcaagctgttttata

SEQ ID NO: 5029391 - DNA, 25 bp, Homo sapien
cagccggtagtacctgaactaataa

SEQ ID NO: 5029392 - DNA, 25 bp, Homo sapien
caaaatgcagtctgagccagttttt

SEQ ID NO: 5029393 - DNA, 25 bp, Homo sapien
ttgatagggagcactaaatccacgg

SEQ ID NO: 5029394 - DNA, 25 bp, Homo sapien
ttgttgctgataattggtggtggta

SEQ ID NO: 5029395 - DNA, 25 bp, Homo sapien
tccacggtatcgatgattgctgtct

SEQ ID NO: 5029396 - DNA, 25 bp, Homo sapien
caaggctaactggtggttcgggcaa

SEQ ID NO: 5029397 - DNA, 25 bp, Homo sapien
gcagtgggaccaccacaaggctaac

SEQ ID NO: 5029398 - DNA, 25 bp, Homo sapien
cgatgcagtgaattatctagggtgg

SEQ ID NO: 5029399 - DNA, 25 bp, Homo sapien
tctagggtggaaataccttgcagtg

SEQ ID NO: 5029400 - DNA, 25 bp, Homo sapien
ggtcttatatgagaagctggcataa

SEQ ID NO: 5029401 - DNA, 25 bp, Homo sapien
aaggcttgcaaaccgcagaaggtct

SEQ ID NO: 5029402 - DNA, 25 bp, Homo sapien
caaaccgcagaaggtcttatatgag

SEQ ID NO: 5029403 - DNA, 25 bp, Homo sapien
gcaggacacagaaaggacccatgag

SEQ ID NO: 5029404 - DNA, 25 bp, Homo sapien
cacctcttgtcttttctgtggggcc

SEQ ID NO: 5029405 - DNA, 25 bp, Homo sapien
cctcttgtcttttctgtggggccat

SEQ ID NO: 5029406 - DNA, 25 bp, Homo sapien
ccacctcttgtcttttctgtggggc

SEQ ID NO: 5029407 - DNA, 25 bp, Homo sapien
acctcttgtcttttctgtggggcca

SEQ ID NO: 5029408 - DNA, 25 bp, Homo sapien
catgtatgccattattcctgttatt

SEQ ID NO: 5029409 - DNA, 25 bp, Homo sapien
tatcagctattttcatgtatgccat

SEQ ID NO: 5029410 - DNA, 25 bp, Homo sapien
aatgagcaaaaactgctatatcttc

SEQ ID NO: 5029411 - DNA, 25 bp, Homo sapien
tatttttacattctcgatatcagct

SEQ ID NO: 5029412 - DNA, 25 bp, Homo sapien
tgttggttgactaaccattatcccg

SEQ ID NO: 5029413 - DNA, 25 bp, Homo sapien
cacctgccttttgactaaccatgat

SEQ ID NO: 5029414 - DNA, 25 bp, Homo sapien
aaaaaagttaaagtcattgtagcag

SEQ ID NO: 5029415 - DNA, 25 bp, Homo sapien
tgtagaagggaccagtgagtttaaa

SEQ ID NO: 5029416 - DNA, 25 bp, Homo sapien
aaaatactgcccagcaatcctttga

SEQ ID NO: 5029417 - DNA, 25 bp, Homo sapien
tgctaaaatatcctaacctaccacc

SEQ ID NO: 5029418 - DNA, 25 bp, Homo sapien
aacatatgttgtgaaatctcaaccc

SEQ ID NO: 5029419 - DNA, 25 bp, Homo sapien
aatttctggtcactgcacttataaa

SEQ ID NO: 5029420 - DNA, 25 bp, Homo sapien
attttttatgtaaatagctcgatct

SEQ ID NO: 5029421 - DNA, 25 bp, Homo sapien
ttatacaagttttgaatttcatcta

SEQ ID NO: 5029422 - DNA, 25 bp, Homo sapien
tattttttatgtaaatagctcgatc

SEQ ID NO: 5029423 - DNA, 25 bp, Homo sapien
ttgtttatacaagttttgaatttca

SEQ ID NO: 5029424 - DNA, 25 bp, Homo sapien
tgtaagatcttttaaatatccaaac

SEQ ID NO: 5029425 - DNA, 25 bp, Homo sapien
tcaaaaatatccttcagctctgaca

SEQ ID NO: 5029426 - DNA, 25 bp, Homo sapien
tcagctctgacaacctcttcacata

SEQ ID NO: 5029427 - DNA, 25 bp, Homo sapien
cttcacataactttcctgtaagatc

SEQ ID NO: 5029428 - DNA, 25 bp, Homo sapien
acattcagttgttctttgttcctta

SEQ ID NO: 5029429 - DNA, 25 bp, Homo sapien
cagttgttctttgttccttagtttg

SEQ ID NO: 5029430 - DNA, 25 bp, Homo sapien
ctgtaaaagtccacattcagttgtt

SEQ ID NO: 5029431 - DNA, 25 bp, Homo sapien
tgtaaaagtccacattcagttgttc

SEQ ID NO: 5029432 - DNA, 25 bp, Homo sapien
atcaatgcaaggttaatagaagcta

SEQ ID NO: 5029433 - DNA, 25 bp, Homo sapien
ttcaacaacatcaatgcaaggttaa

SEQ ID NO: 5029434 - DNA, 25 bp, Homo sapien
catcaatgcaaggttaatagaagct

SEQ ID NO: 5029435 - DNA, 25 bp, Homo sapien
aacaacatcaatgcaaggttaatag

SEQ ID NO: 5029436 - DNA, 25 bp, Homo sapien
gctggatatgatgccactggatcct

SEQ ID NO: 5029437 - DNA, 25 bp, Homo sapien
ggtccaagtgcaatcagcattgtta

SEQ ID NO: 5029438 - DNA, 25 bp, Homo sapien
ggctctgctacaatggtccaagtgc

SEQ ID NO: 5029439 - DNA, 25 bp, Homo sapien
ggaaaactagggctggatatgatgc

SEQ ID NO: 5029440 - DNA, 25 bp, Homo sapien
tattgagataaatgcaattgttcag

SEQ ID NO: 5029441 - DNA, 25 bp, Homo sapien
cagttcaaatgtgataccaagtgca

SEQ ID NO: 5029442 - DNA, 25 bp, Homo sapien
tgtaagtaaagcaagtcaatatgtt

SEQ ID NO: 5029443 - DNA, 25 bp, Homo sapien
aatattcagttgtaagttattgaga

SEQ ID NO: 5029444 - DNA, 25 bp, Homo sapien
gctatgccattaaaaggcactacag

SEQ ID NO: 5029445 - DNA, 25 bp, Homo sapien
aagctatgccattaaaaggcactac

SEQ ID NO: 5029446 - DNA, 25 bp, Homo sapien
caaagctatgccattaaaaggcact

SEQ ID NO: 5029447 - DNA, 25 bp, Homo sapien
aaagctatgccattaaaaggcacta

SEQ ID NO: 5029448 - DNA, 25 bp, Homo sapien
tttctaaatggttaattttagcatc

SEQ ID NO: 5029449 - DNA, 25 bp, Homo sapien
ttctaaatggttaattttagcatcc

SEQ ID NO: 5029450 - DNA, 25 bp, Homo sapien
tctaaatggttaattttagcatcca

SEQ ID NO: 5029451 - DNA, 25 bp, Homo sapien
tatgctctcgtagaatactgtatca

SEQ ID NO: 5029452 - DNA, 25 bp, Homo sapien
cctgcggatcagttatatgctctcg

SEQ ID NO: 5029453 - DNA, 25 bp, Homo sapien
taaaatgacttgcaatgcctgatgc

SEQ ID NO: 5029454 - DNA, 25 bp, Homo sapien
aaaatgctctctttatgaccctacc

SEQ ID NO: 5029455 - DNA, 25 bp, Homo sapien
gccaaattcctaacataggacatgt

SEQ ID NO: 5029456 - DNA, 25 bp, Homo sapien
cctaacataggacatgtgatctggt

SEQ ID NO: 5029457 - DNA, 25 bp, Homo sapien
taggacatgtgatctggtctctgca

SEQ ID NO: 5029458 - DNA, 25 bp, Homo sapien
gacatgtgatctggtctctgcatct

SEQ ID NO: 5029459 - DNA, 25 bp, Homo sapien
tcaggccatgacaagtaaagaaggg

SEQ ID NO: 5029460 - DNA, 25 bp, Homo sapien
tcaggattgaacagatcaggccatg

SEQ ID NO: 5029461 - DNA, 25 bp, Homo sapien
tgtgacattagcttcttggatgagt

SEQ ID NO: 5029462 - DNA, 25 bp, Homo sapien
tttagaactgacatcgttctttcgg

SEQ ID NO: 5029463 - DNA, 25 bp, Homo sapien
aagccaatggaaactctttgagtca

SEQ ID NO: 5029464 - DNA, 25 bp, Homo sapien
gctaaaggttcatttgggaagccaa

SEQ ID NO: 5029465 - DNA, 25 bp, Homo sapien
tgaaataagcacagtccatagcaaa

SEQ ID NO: 5029466 - DNA, 25 bp, Homo sapien
tgtttcagccaaatataatgcatta

SEQ ID NO: 5029467 - DNA, 25 bp, Homo sapien
gaacttttaatacatggttcatgac

SEQ ID NO: 5029468 - DNA, 25 bp, Homo sapien
catggttcatgacatttttatattc

SEQ ID NO: 5029469 - DNA, 25 bp, Homo sapien
ttggcgtaaaagaggttaccactga

SEQ ID NO: 5029470 - DNA, 25 bp, Homo sapien
tatattcaatagtgcatttgagtcc

SEQ ID NO: 5029471 - DNA, 25 bp, Homo sapien
ccccgacgtcgaatcttgtgccata

SEQ ID NO: 5029472 - DNA, 25 bp, Homo sapien
tcaaggatgtatccagttacacagc

SEQ ID NO: 5029473 - DNA, 25 bp, Homo sapien
tgccatataatacacctttgggtgg

SEQ ID NO: 5029474 - DNA, 25 bp, Homo sapien
ggaaaatcccacgaagctgtattaa

SEQ ID NO: 5029475 - DNA, 25 bp, Homo sapien
cacttttggccttagaattaatcca

SEQ ID NO: 5029476 - DNA, 25 bp, Homo sapien
tttggccttagaattaatccactcc

SEQ ID NO: 5029477 - DNA, 25 bp, Homo sapien
cttttggccttagaattaatccact

SEQ ID NO: 5029478 - DNA, 25 bp, Homo sapien
ggccttagaattaatccactcctct

SEQ ID NO: 5029479 - DNA, 25 bp, Homo sapien
ctctaggaggtgctcctttctcctg

SEQ ID NO: 5029480 - DNA, 25 bp, Homo sapien
tcctgttctctaggaggtgctcctt

SEQ ID NO: 5029481 - DNA, 25 bp, Homo sapien
gcatcctgtagtcccctggcatttt

SEQ ID NO: 5029482 - DNA, 25 bp, Homo sapien
tctcctgcatcctgtagtcccctgg

SEQ ID NO: 5029483 - DNA, 25 bp, Homo sapien
ttctccaaaattgccttacgcttgc

SEQ ID NO: 5029484 - DNA, 25 bp, Homo sapien
tatacttctccaaaattgccttacg

SEQ ID NO: 5029485 - DNA, 25 bp, Homo sapien
ttgccttacgcttgcctagccacat

SEQ ID NO: 5029486 - DNA, 25 bp, Homo sapien
gatcctacacaatcctaccccttta

SEQ ID NO: 5029487 - DNA, 25 bp, Homo sapien
atttgtaataggcagaaatttatat

SEQ ID NO: 5029488 - DNA, 25 bp, Homo sapien
ctatttgtaataggcagaaatttat

SEQ ID NO: 5029489 - DNA, 25 bp, Homo sapien
tctatttgtaataggcagaaattta

SEQ ID NO: 5029490 - DNA, 25 bp, Homo sapien
tatttgtaataggcagaaatttata

SEQ ID NO: 5029491 - DNA, 25 bp, Homo sapien
gccatttattggtccattggctctt

SEQ ID NO: 5029492 - DNA, 25 bp, Homo sapien
ccatttattggtccattggctcttt

SEQ ID NO: 5029493 - DNA, 25 bp, Homo sapien
tacccgtaagtgccatttattggtc

SEQ ID NO: 5029494 - DNA, 25 bp, Homo sapien
actcttgccataagtctttgtgaat

SEQ ID NO: 5029495 - DNA, 25 bp, Homo sapien
tactcttgccataagtctttgtgaa

SEQ ID NO: 5029496 - DNA, 25 bp, Homo sapien
ctactcttgccataagtctttgtga

SEQ ID NO: 5029497 - DNA, 25 bp, Homo sapien
aatattaagtaatggagtccatcat

SEQ ID NO: 5029498 - DNA, 25 bp, Homo sapien
gctgaaatgttgcaactctgagttg

SEQ ID NO: 5029499 - DNA, 25 bp, Homo sapien
ggatgccagctctgttacttacata

SEQ ID NO: 5029500 - DNA, 25 bp, Homo sapien
cattgagactaggttttggatgcca

SEQ ID NO: 5029501 - DNA, 25 bp, Homo sapien
gactgccctcatttttggatctccg

SEQ ID NO: 5029502 - DNA, 25 bp, Homo sapien
taaatccatgagcactaactgcaaa

SEQ ID NO: 5029503 - DNA, 25 bp, Homo sapien
tcgtaatataccttaaatccatgag

SEQ ID NO: 5029504 - DNA, 25 bp, Homo sapien
cactggtcaaacgtagtgagaacac

SEQ ID NO: 5029505 - DNA, 25 bp, Homo sapien
aaatcactggtcaaacgtagtgaga

SEQ ID NO: 5029506 - DNA, 25 bp, Homo sapien
gacgcactacattattgatagctat

SEQ ID NO: 5029507 - DNA, 25 bp, Homo sapien
aacttggagtatttgggataaatgt

SEQ ID NO: 5029508 - DNA, 25 bp, Homo sapien
ttcttcttgacgcactacattattg

SEQ ID NO: 5029509 - DNA, 25 bp, Homo sapien
tgatagctataacaaacttggagta

SEQ ID NO: 5029510 - DNA, 25 bp, Homo sapien
attgtgttctactaggttgtttatt

SEQ ID NO: 5029511 - DNA, 25 bp, Homo sapien
tattgtgttctactaggttgtttat

SEQ ID NO: 5029512 - DNA, 25 bp, Homo sapien
ctattgtgttctactaggttgttta

SEQ ID NO: 5029513 - DNA, 25 bp, Homo sapien
tataaacacagtctggaacgggctg

SEQ ID NO: 5029514 - DNA, 25 bp, Homo sapien
tatactgcatgatgccaagccctag

SEQ ID NO: 5029515 - DNA, 25 bp, Homo sapien
tgatcaaacagcagtcagacgtgcg

SEQ ID NO: 5029516 - DNA, 25 bp, Homo sapien
caagccctaggacgtgaatgatcct

SEQ ID NO: 5029517 - DNA, 25 bp, Homo sapien
cagttcgatgtgctctaataggatt

SEQ ID NO: 5029518 - DNA, 25 bp, Homo sapien
taggattttgtagacatgcagcagg

SEQ ID NO: 5029519 - DNA, 25 bp, Homo sapien
acatgcagcaggttcatacacattt

SEQ ID NO: 5029520 - DNA, 25 bp, Homo sapien
tcatctgactggaagcagttcgatg

SEQ ID NO: 5029521 - DNA, 25 bp, Homo sapien
cagaggtagcgtagattgctcaaaa

SEQ ID NO: 5029522 - DNA, 25 bp, Homo sapien
tagccactataaagagatcaccact

SEQ ID NO: 5029523 - DNA, 25 bp, Homo sapien
tatgacatcagagacaccaagctaa

SEQ ID NO: 5029524 - DNA, 25 bp, Homo sapien
tgagatggctagaaccggccttact

SEQ ID NO: 5029525 - DNA, 25 bp, Homo sapien
caatttgtattctatttcgttcttc

SEQ ID NO: 5029526 - DNA, 25 bp, Homo sapien
cttgtcctaaagtttgtaggatgag

SEQ ID NO: 5029527 - DNA, 25 bp, Homo sapien
tgaggatgtccatcatataatgata

SEQ ID NO: 5029528 - DNA, 25 bp, Homo sapien
agtagtcgtattcttcttctagagc

SEQ ID NO: 5029529 - DNA, 25 bp, Homo sapien
taaagttccaccacatgtataaata

SEQ ID NO: 5029530 - DNA, 25 bp, Homo sapien
aaagttccaccacatgtataaataa

SEQ ID NO: 5029531 - DNA, 25 bp, Homo sapien
tgaacagcttccaatttgaacttca

SEQ ID NO: 5029532 - DNA, 25 bp, Homo sapien
gaacttcataactaaaggcaagcat

SEQ ID NO: 5029533 - DNA, 25 bp, Homo sapien
tttctattagttttctgcctgaaca

SEQ ID NO: 5029534 - DNA, 25 bp, Homo sapien
agttttctgcctgaacagcttccaa

SEQ ID NO: 5029535 - DNA, 25 bp, Homo sapien
catcaagagtttgattaacaatatt

SEQ ID NO: 5029536 - DNA, 25 bp, Homo sapien
tcatcaagagtttgattaacaatat

SEQ ID NO: 5029537 - DNA, 25 bp, Homo sapien
tgtcatcaagagtttgattaacaat

SEQ ID NO: 5029538 - DNA, 25 bp, Homo sapien
caagagtttgattaacaatattgat

SEQ ID NO: 5029539 - DNA, 25 bp, Homo sapien
tattttagtttaacggcagtgacag

SEQ ID NO: 5029540 - DNA, 25 bp, Homo sapien
gaattggctttcacacagctgtagg

SEQ ID NO: 5029541 - DNA, 25 bp, Homo sapien
gagtggaggttacagcctttggcac

SEQ ID NO: 5029542 - DNA, 25 bp, Homo sapien
gagcgacagctaagatgacattgcc

SEQ ID NO: 5029543 - DNA, 25 bp, Homo sapien
taggtagctcttctctagtttattt

SEQ ID NO: 5029544 - DNA, 25 bp, Homo sapien
cctaggtagctcttctctagtttat

SEQ ID NO: 5029545 - DNA, 25 bp, Homo sapien
aggtagctcttctctagtttatttc

SEQ ID NO: 5029546 - DNA, 25 bp, Homo sapien
ctcctaggtagctcttctctagttt

SEQ ID NO: 5029547 - DNA, 25 bp, Homo sapien
ggttctaagttgcctctgacaattc

SEQ ID NO: 5029548 - DNA, 25 bp, Homo sapien
aggttctaagttgcctctgacaatt

SEQ ID NO: 5029549 - DNA, 25 bp, Homo sapien
gctgtctgtcggtcaagctgtacag

SEQ ID NO: 5029550 - DNA, 25 bp, Homo sapien
gcccctttcccggatgatctggaag

SEQ ID NO: 5029551 - DNA, 25 bp, Homo sapien
cccctttcccggatgatctggaaga

SEQ ID NO: 5029552 - DNA, 25 bp, Homo sapien
tgcccctttcccggatgatctggaa

SEQ ID NO: 5029553 - DNA, 25 bp, Homo sapien
tctgcccctttcccggatgatctgg

SEQ ID NO: 5029554 - DNA, 25 bp, Homo sapien
ttttcgccagctggcgctggactcc

SEQ ID NO: 5029555 - DNA, 25 bp, Homo sapien
ctgcggcgtcgtccggctctccggt

SEQ ID NO: 5029556 - DNA, 25 bp, Homo sapien
ggcgtcgtccggctctccggtcctc

SEQ ID NO: 5029557 - DNA, 25 bp, Homo sapien
ccaagggctgcggcgtcgtccggct

SEQ ID NO: 5029558 - DNA, 25 bp, Homo sapien
tgcataagtgaagatattgtctgat

SEQ ID NO: 5029559 - DNA, 25 bp, Homo sapien
ttttgcataagtgaagatattgtct

SEQ ID NO: 5029560 - DNA, 25 bp, Homo sapien
ctatagtttttgcataagtgaagat

SEQ ID NO: 5029561 - DNA, 25 bp, Homo sapien
tatagtttttgcataagtgaagata

SEQ ID NO: 5029562 - DNA, 25 bp, Homo sapien
gaggctatactaaccaactcacgta

SEQ ID NO: 5029563 - DNA, 25 bp, Homo sapien
cgtattcgtttgagcatactgcaag

SEQ ID NO: 5029564 - DNA, 25 bp, Homo sapien
taaccaactcacgtattcgtttgag

SEQ ID NO: 5029565 - DNA, 25 bp, Homo sapien
ctagttagaggctatactaaccaac

SEQ ID NO: 5029566 - DNA, 25 bp, Homo sapien
tcaatcaccgcattgaacgccaaat

SEQ ID NO: 5029567 - DNA, 25 bp, Homo sapien
tcaccgcattgaacgccaaatctgg

SEQ ID NO: 5029568 - DNA, 25 bp, Homo sapien
cattgaacgccaaatctggcaagca

SEQ ID NO: 5029569 - DNA, 25 bp, Homo sapien
gccaaatctggcaagcaaaatgcat

SEQ ID NO: 5029570 - DNA, 25 bp, Homo sapien
cacaagacaccgtcaataaaaagac

SEQ ID NO: 5029571 - DNA, 25 bp, Homo sapien
tcacacaagacaccgtcaataaaaa

SEQ ID NO: 5029572 - DNA, 25 bp, Homo sapien
ctttcacacaagacaccgtcaataa

SEQ ID NO: 5029573 - DNA, 25 bp, Homo sapien
agacaccgtcaataaaaagacgagg

SEQ ID NO: 5029574 - DNA, 25 bp, Homo sapien
gtttggattcctttgctcggctttc

SEQ ID NO: 5029575 - DNA, 25 bp, Homo sapien
aggatgaagtctaggcggccacatt

SEQ ID NO: 5029576 - DNA, 25 bp, Homo sapien
tttagcgcatcttcgcttgccaggc

SEQ ID NO: 5029577 - DNA, 25 bp, Homo sapien
caggctcccagggtttggattcctt

SEQ ID NO: 5029578 - DNA, 25 bp, Homo sapien
aggactcaaccatctctccaacggg

SEQ ID NO: 5029579 - DNA, 25 bp, Homo sapien
cacagcaaccttgacgaggactcaa

SEQ ID NO: 5029580 - DNA, 25 bp, Homo sapien
tgcgcggtcacagctcggagtgaat

SEQ ID NO: 5029581 - DNA, 25 bp, Homo sapien
ggcacaaagtctccgctactctgga

SEQ ID NO: 5029582 - DNA, 25 bp, Homo sapien
gcaaccaccagaaaccactagtgag

SEQ ID NO: 5029583 - DNA, 25 bp, Homo sapien
caattctggctcgttatagcaacca

SEQ ID NO: 5029584 - DNA, 25 bp, Homo sapien
cactagtgagcctcttaaagcccac

SEQ ID NO: 5029585 - DNA, 25 bp, Homo sapien
gcagcccaagaaataatgttagtga

SEQ ID NO: 5029586 - DNA, 25 bp, Homo sapien
aatctggtcccctctcagcagtggg

SEQ ID NO: 5029587 - DNA, 25 bp, Homo sapien
tgtgtccccgggaccagtatgtcgt

SEQ ID NO: 5029588 - DNA, 25 bp, Homo sapien
taggcaactgattggtgatctgacc

SEQ ID NO: 5029589 - DNA, 25 bp, Homo sapien
tgatctgaccttttcgggaatctgg

SEQ ID NO: 5029590 - DNA, 25 bp, Homo sapien
aatctgcaggcgtaggaaggcttct

SEQ ID NO: 5029591 - DNA, 25 bp, Homo sapien
ttggctcgcgttggagctgcccgct

SEQ ID NO: 5029592 - DNA, 25 bp, Homo sapien
cactgcgagtgtccataggtttgag

SEQ ID NO: 5029593 - DNA, 25 bp, Homo sapien
tgagtggcgagtgagttcaatctgc

SEQ ID NO: 5029594 - DNA, 25 bp, Homo sapien
catggataagacatattacgttcac

SEQ ID NO: 5029595 - DNA, 25 bp, Homo sapien
tctgacatttgtctgatctggcatg

SEQ ID NO: 5029596 - DNA, 25 bp, Homo sapien
catttgtctgatctggcatggataa

SEQ ID NO: 5029597 - DNA, 25 bp, Homo sapien
ttgctactttgtacagagatgagca

SEQ ID NO: 5029598 - DNA, 25 bp, Homo sapien
taaatctagtgataagggaggtagc

SEQ ID NO: 5029599 - DNA, 25 bp, Homo sapien
ccaggtaaatctagtgataagggag

SEQ ID NO: 5029600 - DNA, 25 bp, Homo sapien
aggtagctagatggtctgagagcat

SEQ ID NO: 5029601 - DNA, 25 bp, Homo sapien
ctagtgataagggaggtagctagat

SEQ ID NO: 5029602 - DNA, 25 bp, Homo sapien
gcagtttgcaagtgtatgcctagaa

SEQ ID NO: 5029603 - DNA, 25 bp, Homo sapien
gtgtaaggtaaagcgcttctcagtt

SEQ ID NO: 5029604 - DNA, 25 bp, Homo sapien
ttccacatctaatacctcagcagtt

SEQ ID NO: 5029605 - DNA, 25 bp, Homo sapien
gctggaattgcatcagtgtaaggta

SEQ ID NO: 5029606 - DNA, 25 bp, Homo sapien
agtttcctctaaagatgagaattct

SEQ ID NO: 5029607 - DNA, 25 bp, Homo sapien
ctctttctggtagcccatatgccag

SEQ ID NO: 5029608 - DNA, 25 bp, Homo sapien
tttctggtagcccatatgccagcca

SEQ ID NO: 5029609 - DNA, 25 bp, Homo sapien
tctggtagcccatatgccagccagg

SEQ ID NO: 5029610 - DNA, 25 bp, Homo sapien
tctttctggtagcccatatgccagc

SEQ ID NO: 5029611 - DNA, 25 bp, Homo sapien
cttcttgtttgactgtgagggttcc

SEQ ID NO: 5029612 - DNA, 25 bp, Homo sapien
ttctatggttatgacagctggacag

SEQ ID NO: 5029613 - DNA, 25 bp, Homo sapien
actatttggccaacttctatggtta

SEQ ID NO: 5029614 - DNA, 25 bp, Homo sapien
acaggagcctccgatgagggtagca

SEQ ID NO: 5029615 - DNA, 25 bp, Homo sapien
cataatggacgatgagtaatggcat

SEQ ID NO: 5029616 - DNA, 25 bp, Homo sapien
tccataatggacgatgagtaatggc

SEQ ID NO: 5029617 - DNA, 25 bp, Homo sapien
gactccataatggacgatgagtaat

SEQ ID NO: 5029618 - DNA, 25 bp, Homo sapien
tttggactccataatggacgatgag

SEQ ID NO: 5029619 - DNA, 25 bp, Homo sapien
caccccacaagcctgcgttcctaac

SEQ ID NO: 5029620 - DNA, 25 bp, Homo sapien
ctgcaccccacaagcctgcgttcct

SEQ ID NO: 5029621 - DNA, 25 bp, Homo sapien
gcaccccacaagcctgcgttcctaa

SEQ ID NO: 5029622 - DNA, 25 bp, Homo sapien
tgcaccccacaagcctgcgttccta

SEQ ID NO: 5029623 - DNA, 25 bp, Homo sapien
acaggaacctggcaccctcagtggg

SEQ ID NO: 5029624 - DNA, 25 bp, Homo sapien
tgaagtgggctccacttccactgcc

SEQ ID NO: 5029625 - DNA, 25 bp, Homo sapien
tacgcagagccttctcccaaggcac

SEQ ID NO: 5029626 - DNA, 25 bp, Homo sapien
ctgcgctgctggctgggtccctgaa

SEQ ID NO: 5029627 - DNA, 25 bp, Homo sapien
acagtcacggactaacacaggcagg

SEQ ID NO: 5029628 - DNA, 25 bp, Homo sapien
tcaagaaggaggatccaagttgctc

SEQ ID NO: 5029629 - DNA, 25 bp, Homo sapien
gagaggcaacatccgataaaatgac

SEQ ID NO: 5029630 - DNA, 25 bp, Homo sapien
tgctgttatggtgatataggtcccc

SEQ ID NO: 5029631 - DNA, 25 bp, Homo sapien
ttagctaaagcagaaatgcctcctc

SEQ ID NO: 5029632 - DNA, 25 bp, Homo sapien
ctgagacctggaaaagaaggaccgg

SEQ ID NO: 5029633 - DNA, 25 bp, Homo sapien
tctggtcctggctaagaaagcttaa

SEQ ID NO: 5029634 - DNA, 25 bp, Homo sapien
tcaacaaatggaacagctagcagat

SEQ ID NO: 5029635 - DNA, 25 bp, Homo sapien
ttaaaagagatagctcttggctgct

SEQ ID NO: 5029636 - DNA, 25 bp, Homo sapien
tagctcttggctgctaaggctttac

SEQ ID NO: 5029637 - DNA, 25 bp, Homo sapien
aaagagatagctcttggctgctaag

SEQ ID NO: 5029638 - DNA, 25 bp, Homo sapien
gagatagctcttggctgctaaggct

SEQ ID NO: 5029639 - DNA, 25 bp, Homo sapien
ctgagaatatggcacttccgacgtt

SEQ ID NO: 5029640 - DNA, 25 bp, Homo sapien
aatatggcacttccgacgttcccga

SEQ ID NO: 5029641 - DNA, 25 bp, Homo sapien
tggcacttccgacgttcccgatctt

SEQ ID NO: 5029642 - DNA, 25 bp, Homo sapien
gagaatatggcacttccgacgttcc

SEQ ID NO: 5029643 - DNA, 25 bp, Homo sapien
gtaaaatctcatattgtacttgaat

SEQ ID NO: 5029644 - DNA, 25 bp, Homo sapien
atttgtaaaatctcatattgtactt

SEQ ID NO: 5029645 - DNA, 25 bp, Homo sapien
ttgtaaaatctcatattgtacttga

SEQ ID NO: 5029646 - DNA, 25 bp, Homo sapien
tgtaaaatctcatattgtacttgaa

SEQ ID NO: 5029647 - DNA, 25 bp, Homo sapien
caggtcttatcagatcttggattct

SEQ ID NO: 5029648 - DNA, 25 bp, Homo sapien
tatactcatctgacttattgttgca

SEQ ID NO: 5029649 - DNA, 25 bp, Homo sapien
tgcagctctatcaccaggtcttatc

SEQ ID NO: 5029650 - DNA, 25 bp, Homo sapien
gatagcatttaaacacctctgcagc

SEQ ID NO: 5029651 - DNA, 25 bp, Homo sapien
caagaccacttgatctagttcaggt

SEQ ID NO: 5029652 - DNA, 25 bp, Homo sapien
aagaccacttgatctagttcaggtc

SEQ ID NO: 5029653 - DNA, 25 bp, Homo sapien
taaagtaccagaccaaagattgcgt

SEQ ID NO: 5029654 - DNA, 25 bp, Homo sapien
tttgccaaagtggattaaagtacca

SEQ ID NO: 5029655 - DNA, 25 bp, Homo sapien
ctgtgttggaagtgggcccacaagt

SEQ ID NO: 5029656 - DNA, 25 bp, Homo sapien
aagattgcgttctcttcttgctgtg

SEQ ID NO: 5029657 - DNA, 25 bp, Homo sapien
tgctttgagaaatggactccacgtc

SEQ ID NO: 5029658 - DNA, 25 bp, Homo sapien
tacttggaaaatagatgctgctttg

SEQ ID NO: 5029659 - DNA, 25 bp, Homo sapien
tatcattttgttatgattcatcacc

SEQ ID NO: 5029660 - DNA, 25 bp, Homo sapien
ctacttggaaaatagatgctgcttt

SEQ ID NO: 5029661 - DNA, 25 bp, Homo sapien
agcagtttaaggattcaatgaacct

SEQ ID NO: 5029662 - DNA, 25 bp, Homo sapien
ttaaggattcaatgaacctgtcttt

SEQ ID NO: 5029663 - DNA, 25 bp, Homo sapien
cagtttaaggattcaatgaacctgt

SEQ ID NO: 5029664 - DNA, 25 bp, Homo sapien
gtttaaggattcaatgaacctgtct

SEQ ID NO: 5029665 - DNA, 25 bp, Homo sapien
tacttcaggcttaccaatttttgta

SEQ ID NO: 5029666 - DNA, 25 bp, Homo sapien
aaaggcagattacttcaggcttacc

SEQ ID NO: 5029667 - DNA, 25 bp, Homo sapien
tcatccaactttgttccgtttagaa

SEQ ID NO: 5029668 - DNA, 25 bp, Homo sapien
caggcttaccaatttttgtatccta

SEQ ID NO: 5029669 - DNA, 25 bp, Homo sapien
tttaaccaagtaaagagataatgac

SEQ ID NO: 5029670 - DNA, 25 bp, Homo sapien
aatatagaaggccagcaagctgtag

SEQ ID NO: 5029671 - DNA, 25 bp, Homo sapien
ccctagtatgaaagtcatctaactc

SEQ ID NO: 5029672 - DNA, 25 bp, Homo sapien
aacctcttgagagtctatggacaga

SEQ ID NO: 5029673 - DNA, 25 bp, Homo sapien
tctgtgcagtattgggtctccagga

SEQ ID NO: 5029674 - DNA, 25 bp, Homo sapien
ggctctgcactgcttgcagattata

SEQ ID NO: 5029675 - DNA, 25 bp, Homo sapien
tggtattgctatctcgatcattttc

SEQ ID NO: 5029676 - DNA, 25 bp, Homo sapien
tatgatcatctatgtgggctttttc

SEQ ID NO: 5029677 - DNA, 25 bp, Homo sapien
tgttcttgtggtttagcaaccagta

SEQ ID NO: 5029678 - DNA, 25 bp, Homo sapien
ggaagagctgttcttgtggtttagc

SEQ ID NO: 5029679 - DNA, 25 bp, Homo sapien
gtgcaactcgattttagcgagaggt

SEQ ID NO: 5029680 - DNA, 25 bp, Homo sapien
tagcaaccagtatttgtgcaactcg

SEQ ID NO: 5029681 - DNA, 25 bp, Homo sapien
tgatgattacagtcaagaattcact

SEQ ID NO: 5029682 - DNA, 25 bp, Homo sapien
tcaagtctgctgatgattacagtca

SEQ ID NO: 5029683 - DNA, 25 bp, Homo sapien
tggtttgtacagaacttcaagtctg

SEQ ID NO: 5029684 - DNA, 25 bp, Homo sapien
aagaattcactgttgataactgcca

SEQ ID NO: 5029685 - DNA, 25 bp, Homo sapien
caatcacttttataaccattccatg

SEQ ID NO: 5029686 - DNA, 25 bp, Homo sapien
caagatggcttcagggtagactaac

SEQ ID NO: 5029687 - DNA, 25 bp, Homo sapien
ggtagactaactttacacagcatta

SEQ ID NO: 5029688 - DNA, 25 bp, Homo sapien
tttataaccattccatgattttgct

SEQ ID NO: 5029689 - DNA, 25 bp, Homo sapien
gcagatttcagtgaaaattgtatgc

SEQ ID NO: 5029690 - DNA, 25 bp, Homo sapien
atgacattaaatgagctctgtgagt

SEQ ID NO: 5029691 - DNA, 25 bp, Homo sapien
cattaggtacaaggtacactgcttg

SEQ ID NO: 5029692 - DNA, 25 bp, Homo sapien
tcagaataatgacattaaatgagct

SEQ ID NO: 5029693 - DNA, 25 bp, Homo sapien
ctctcaactggctctcgctgataat

SEQ ID NO: 5029694 - DNA, 25 bp, Homo sapien
tttctactgaacacttctgcagggt

SEQ ID NO: 5029695 - DNA, 25 bp, Homo sapien
catgccagatctccttgaaatgatt

SEQ ID NO: 5029696 - DNA, 25 bp, Homo sapien
cgctgataatcagggctttctactg

SEQ ID NO: 5029697 - DNA, 25 bp, Homo sapien
tgtctgctcataaagtgatggagtt

SEQ ID NO: 5029698 - DNA, 25 bp, Homo sapien
caggcatcctttcgatggattcaca

SEQ ID NO: 5029699 - DNA, 25 bp, Homo sapien
ggcatcctttcgatggattcacaaa

SEQ ID NO: 5029700 - DNA, 25 bp, Homo sapien
tcctttcgatggattcacaaagctg

SEQ ID NO: 5029701 - DNA, 25 bp, Homo sapien
caccttcaggcatcctttcgatgga

SEQ ID NO: 5029702 - DNA, 25 bp, Homo sapien
ggctatggcagcctgtctagggaac

SEQ ID NO: 5029703 - DNA, 25 bp, Homo sapien
cattgcaatgcacagacaacactga

SEQ ID NO: 5029704 - DNA, 25 bp, Homo sapien
gaatcttaggttcacttggctatgg

SEQ ID NO: 5029705 - DNA, 25 bp, Homo sapien
catccacagtgtaatactcaagagc

SEQ ID NO: 5029706 - DNA, 25 bp, Homo sapien
ttgtgcccttaccttgatttctgtg

SEQ ID NO: 5029707 - DNA, 25 bp, Homo sapien
ttttgttcctttggaagtctcatgt

SEQ ID NO: 5029708 - DNA, 25 bp, Homo sapien
catactgtttatctatgttctcttg

SEQ ID NO: 5029709 - DNA, 25 bp, Homo sapien
tatcttttaggcagtttatacattt

SEQ ID NO: 5029710 - DNA, 25 bp, Homo sapien
gattatgacgtctgacatggaagat

SEQ ID NO: 5029711 - DNA, 25 bp, Homo sapien
tgtccactttgtcttgactttcagg

SEQ ID NO: 5029712 - DNA, 25 bp, Homo sapien
tttggatttacttagtagcaactcc

SEQ ID NO: 5029713 - DNA, 25 bp, Homo sapien
tagcaactccaaatgcataattttg

SEQ ID NO: 5029714 - DNA, 25 bp, Homo sapien
ggtgtcaatgacatagattccacaa

SEQ ID NO: 5029715 - DNA, 25 bp, Homo sapien
gaacatccaatcaaatattaccagt

SEQ ID NO: 5029716 - DNA, 25 bp, Homo sapien
tagattccacaatgtcgaacatcca

SEQ ID NO: 5029717 - DNA, 25 bp, Homo sapien
atattaccagtcatgtaataaagca

SEQ ID NO: 5029718 - DNA, 25 bp, Homo sapien
ggaggagactgctatcacagtagat

SEQ ID NO: 5029719 - DNA, 25 bp, Homo sapien
gaggagactgctatcacagtagata

SEQ ID NO: 5029720 - DNA, 25 bp, Homo sapien
cgtttcttcgtagtatgcatatttc

SEQ ID NO: 5029721 - DNA, 25 bp, Homo sapien
ttcctcgtttcttcgtagtatgcat

SEQ ID NO: 5029722 - DNA, 25 bp, Homo sapien
gcatttcaggagcatgcatggtctg

SEQ ID NO: 5029723 - DNA, 25 bp, Homo sapien
catttcaggagcatgcatggtctgt

SEQ ID NO: 5029724 - DNA, 25 bp, Homo sapien
tcaactcgcgtattctttccccatt

SEQ ID NO: 5029725 - DNA, 25 bp, Homo sapien
ttccatgttgatgaacggttttcca

SEQ ID NO: 5029726 - DNA, 25 bp, Homo sapien
tcgcgtattctttccccattcataa

SEQ ID NO: 5029727 - DNA, 25 bp, Homo sapien
tccatgttgatgaacggttttccat

SEQ ID NO: 5029728 - DNA, 25 bp, Homo sapien
caagttgattaggtctgcagcacca

SEQ ID NO: 5029729 - DNA, 25 bp, Homo sapien
gcttggagagacagcaagttgatta

SEQ ID NO: 5029730 - DNA, 25 bp, Homo sapien
ttaatctgtacacatgactgcttgg

SEQ ID NO: 5029731 - DNA, 25 bp, Homo sapien
atcagcatgcagacactcatcacta

SEQ ID NO: 5029732 - DNA, 25 bp, Homo sapien
gtcaggctcaatctcacatcttaaa

SEQ ID NO: 5029733 - DNA, 25 bp, Homo sapien
ttatttttgtcaggctcaatctcac

SEQ ID NO: 5029734 - DNA, 25 bp, Homo sapien
atctggaagtccaaagtttgcttct

SEQ ID NO: 5029735 - DNA, 25 bp, Homo sapien
ctggaagtccaaagtttgcttcttg

SEQ ID NO: 5029736 - DNA, 25 bp, Homo sapien
tgacatccagtctgaacatcggcgg

SEQ ID NO: 5029737 - DNA, 25 bp, Homo sapien
tacacataaagagtgttcagttgac

SEQ ID NO: 5029738 - DNA, 25 bp, Homo sapien
cagagactgatccattacgtttctt

SEQ ID NO: 5029739 - DNA, 25 bp, Homo sapien
cggcggagacgatgtactaccactt

SEQ ID NO: 5029740 - DNA, 25 bp, Homo sapien
aggatgctgactggttgaggcataa

SEQ ID NO: 5029741 - DNA, 25 bp, Homo sapien
tcaccaacagtagataagaattctc

SEQ ID NO: 5029742 - DNA, 25 bp, Homo sapien
gattgtcttcactgatggataggag

SEQ ID NO: 5029743 - DNA, 25 bp, Homo sapien
gaattctcaatgaggtaacccagtg

SEQ ID NO: 5029744 - DNA, 25 bp, Homo sapien
aatgtaagtaatagcagagtctgac

SEQ ID NO: 5029745 - DNA, 25 bp, Homo sapien
tcaagcagtttgtagctcgctagct

SEQ ID NO: 5029746 - DNA, 25 bp, Homo sapien
aataagcaaaagattaccctgagcc

SEQ ID NO: 5029747 - DNA, 25 bp, Homo sapien
tcttatcattaaggcctccactcat

SEQ ID NO: 5029748 - DNA, 25 bp, Homo sapien
ataccaagtaattttcacagctgca

SEQ ID NO: 5029749 - DNA, 25 bp, Homo sapien
acagctgcagggaagtcactcttca

SEQ ID NO: 5029750 - DNA, 25 bp, Homo sapien
aagtaattttcacagctgcagggaa

SEQ ID NO: 5029751 - DNA, 25 bp, Homo sapien
cagctgcagggaagtcactcttcat

SEQ ID NO: 5029752 - DNA, 25 bp, Homo sapien
actaaatccagctacaggagatgca

SEQ ID NO: 5029753 - DNA, 25 bp, Homo sapien
aaaatgttcaatctttctcccatct

SEQ ID NO: 5029754 - DNA, 25 bp, Homo sapien
tagggttttgactgacacagattca

SEQ ID NO: 5029755 - DNA, 25 bp, Homo sapien
cagattcatctgattccttccacct

SEQ ID NO: 5029756 - DNA, 25 bp, Homo sapien
ctgctgtagttgaagactgtctact

SEQ ID NO: 5029757 - DNA, 25 bp, Homo sapien
attacaatgacgttttctttctaca

SEQ ID NO: 5029758 - DNA, 25 bp, Homo sapien
ttttgtcttcaatacagcagcctgc

SEQ ID NO: 5029759 - DNA, 25 bp, Homo sapien
cctcattggttgaggctcctcctgc

SEQ ID NO: 5029760 - DNA, 25 bp, Homo sapien
tgtcggagagtagctacaaatcctc

SEQ ID NO: 5029761 - DNA, 25 bp, Homo sapien
caaatcctcgatcacaatggcttcc

SEQ ID NO: 5029762 - DNA, 25 bp, Homo sapien
gagagtagctacaaatcctcgatca

SEQ ID NO: 5029763 - DNA, 25 bp, Homo sapien
ctactcatggtgtcggagagtagct

SEQ ID NO: 5029764 - DNA, 25 bp, Homo sapien
gaacaatacatacacgagaaaccag

SEQ ID NO: 5029765 - DNA, 25 bp, Homo sapien
tagctgaatcgatgaacagcaagat

SEQ ID NO: 5029766 - DNA, 25 bp, Homo sapien
gaaaccagaagagtagaacgtgtct

SEQ ID NO: 5029767 - DNA, 25 bp, Homo sapien
gtttgtgaccctagaatttcatggg

SEQ ID NO: 5029768 - DNA, 25 bp, Homo sapien
tccatatcggaagaaaagttcctcc

SEQ ID NO: 5029769 - DNA, 25 bp, Homo sapien
tgaactgggaattgagtggagcact

SEQ ID NO: 5029770 - DNA, 25 bp, Homo sapien
tgtcatagctacctctccatatcgg

SEQ ID NO: 5029771 - DNA, 25 bp, Homo sapien
cacttctgtggctaccgagtctgct

SEQ ID NO: 5029772 - DNA, 25 bp, Homo sapien
tctgatgctttctgcctaactggtt

SEQ ID NO: 5029773 - DNA, 25 bp, Homo sapien
ccttgatatcatgaagagtctacat

SEQ ID NO: 5029774 - DNA, 25 bp, Homo sapien
acatgtcagggtcctattttctcca

SEQ ID NO: 5029775 - DNA, 25 bp, Homo sapien
gggatttgaacttgctctaacaagt

SEQ ID NO: 5029776 - DNA, 25 bp, Homo sapien
tcaacgagacagaaagtcaacaagg

SEQ ID NO: 5029777 - DNA, 25 bp, Homo sapien
cagaaagtcaacaaggatacccagg

SEQ ID NO: 5029778 - DNA, 25 bp, Homo sapien
agatcaacgagacagaaagtcaaca

SEQ ID NO: 5029779 - DNA, 25 bp, Homo sapien
cgagacagaaagtcaacaaggatac

SEQ ID NO: 5029780 - DNA, 25 bp, Homo sapien
tccaatattcttgtgcgagcgcagt

SEQ ID NO: 5029781 - DNA, 25 bp, Homo sapien
cgcagtgaacatgtattggagtcca

SEQ ID NO: 5029782 - DNA, 25 bp, Homo sapien
gatgaccacaaacattccaatattc

SEQ ID NO: 5029783 - DNA, 25 bp, Homo sapien
ggagtccatatgaatgcagattggc

SEQ ID NO: 5029784 - DNA, 25 bp, Homo sapien
gtaacccatttccactggaatgcat

SEQ ID NO: 5029785 - DNA, 25 bp, Homo sapien
aagtaacccatttccactggaatgc

SEQ ID NO: 5029786 - DNA, 25 bp, Homo sapien
agtaacccatttccactggaatgca

SEQ ID NO: 5029787 - DNA, 25 bp, Homo sapien
tgggttctggaatctctgtcttatc

SEQ ID NO: 5029788 - DNA, 25 bp, Homo sapien
gaatatcttcgaatggtaaaataac

SEQ ID NO: 5029789 - DNA, 25 bp, Homo sapien
tagaatttagctgcgagtttagcac

SEQ ID NO: 5029790 - DNA, 25 bp, Homo sapien
ttaagggccaatatccttctctggg

SEQ ID NO: 5029791 - DNA, 25 bp, Homo sapien
ttttcattactgattttggaaaaca

SEQ ID NO: 5029792 - DNA, 25 bp, Homo sapien
tttgttttcattactgattttggaa

SEQ ID NO: 5029793 - DNA, 25 bp, Homo sapien
tgttttcattactgattttggaaaa

SEQ ID NO: 5029794 - DNA, 25 bp, Homo sapien
ttttgttttcattactgattttgga

SEQ ID NO: 5029795 - DNA, 25 bp, Homo sapien
tgttctctggcatcctaaattcctt

SEQ ID NO: 5029796 - DNA, 25 bp, Homo sapien
gcacctcttactccacatactttta

SEQ ID NO: 5029797 - DNA, 25 bp, Homo sapien
agcacctcttactccacatactttt

SEQ ID NO: 5029798 - DNA, 25 bp, Homo sapien
cacctcttactccacatacttttag

SEQ ID NO: 5029799 - DNA, 25 bp, Homo sapien
caaccatgatcaatttggaagccat

SEQ ID NO: 5029800 - DNA, 25 bp, Homo sapien
aatttggaagccatacacatctctt

SEQ ID NO: 5029801 - DNA, 25 bp, Homo sapien
tcaaccatgatcaatttggaagcca

SEQ ID NO: 5029802 - DNA, 25 bp, Homo sapien
ttggaagccatacacatctcttgta

SEQ ID NO: 5029803 - DNA, 25 bp, Homo sapien
aggaggctggctatcaacagaatag

SEQ ID NO: 5029804 - DNA, 25 bp, Homo sapien
cacactgttcttgagtccattaagc

SEQ ID NO: 5029805 - DNA, 25 bp, Homo sapien
acactgttcttgagtccattaagca

SEQ ID NO: 5029806 - DNA, 25 bp, Homo sapien
ggctggctatcaacagaatagtcat

SEQ ID NO: 5029807 - DNA, 25 bp, Homo sapien
ccgggcccaagcgattcccctggct

SEQ ID NO: 5029808 - DNA, 25 bp, Homo sapien
caatctctgcttcccgggcccaagc

SEQ ID NO: 5029809 - DNA, 25 bp, Homo sapien
tgcaatctctgcttcccgggcccaa

SEQ ID NO: 5029810 - DNA, 25 bp, Homo sapien
gggcccaagcgattcccctggctca

SEQ ID NO: 5029811 - DNA, 25 bp, Homo sapien
tatatttaataaactcttgatctat

SEQ ID NO: 5029812 - DNA, 25 bp, Homo sapien
tttaataaactcttgatctatatga

SEQ ID NO: 5029813 - DNA, 25 bp, Homo sapien
tatttaataaactcttgatctatat

SEQ ID NO: 5029814 - DNA, 25 bp, Homo sapien
atttaataaactcttgatctatatg

SEQ ID NO: 5029815 - DNA, 25 bp, Homo sapien
tgaaaaactgcccatatgccaactt

SEQ ID NO: 5029816 - DNA, 25 bp, Homo sapien
ccatcatcatgaaaagctttaagaa

SEQ ID NO: 5029817 - DNA, 25 bp, Homo sapien
tgcccatatgccaacttgggaaact

SEQ ID NO: 5029818 - DNA, 25 bp, Homo sapien
gaaacttaataatcaaaatcttatc

SEQ ID NO: 5029819 - DNA, 25 bp, Homo sapien
aatcttattcctaaactcttctatc

SEQ ID NO: 5029820 - DNA, 25 bp, Homo sapien
tcttgtcatattgagcaataaacaa

SEQ ID NO: 5029821 - DNA, 25 bp, Homo sapien
cttcttgtcatattgagcaataaac

SEQ ID NO: 5029822 - DNA, 25 bp, Homo sapien
taaactcttctatctcaggcatcat

SEQ ID NO: 5029823 - DNA, 25 bp, Homo sapien
ttgttaaaattgcagggccggacac

SEQ ID NO: 5029824 - DNA, 25 bp, Homo sapien
gaattagtccatggttcaactgcaa

SEQ ID NO: 5029825 - DNA, 25 bp, Homo sapien
tgtagcttagatccatcaattgatg

SEQ ID NO: 5029826 - DNA, 25 bp, Homo sapien
tatgcttatccctgcccatctagta

SEQ ID NO: 5029827 - DNA, 25 bp, Homo sapien
tacagatataaagcttggagaacaa

SEQ ID NO: 5029828 - DNA, 25 bp, Homo sapien
agaagactgcaggaaacaatggtga

SEQ ID NO: 5029829 - DNA, 25 bp, Homo sapien
tcttttactcatctggcatgacgcc

SEQ ID NO: 5029830 - DNA, 25 bp, Homo sapien
gcatgacgcctagactcaaaagcag

SEQ ID NO: 5029831 - DNA, 25 bp, Homo sapien
cttcctaaagcctgggtgcgtcttc

SEQ ID NO: 5029832 - DNA, 25 bp, Homo sapien
tagaggtgatgctacacagcatttc

SEQ ID NO: 5029833 - DNA, 25 bp, Homo sapien
gctttgttcacccacttttgcaaca

SEQ ID NO: 5029834 - DNA, 25 bp, Homo sapien
aaatgcatgacagaagtttcttgag

SEQ ID NO: 5029835 - DNA, 25 bp, Homo sapien
catgacagaagtttcttgaggagat

SEQ ID NO: 5029836 - DNA, 25 bp, Homo sapien
tgttcacccacttttgcaacactca

SEQ ID NO: 5029837 - DNA, 25 bp, Homo sapien
gctttcaatcatgtcagtttgtttt

SEQ ID NO: 5029838 - DNA, 25 bp, Homo sapien
ttggctttcaatcatgtcagtttgt

SEQ ID NO: 5029839 - DNA, 25 bp, Homo sapien
ggctttcaatcatgtcagtttgttt

SEQ ID NO: 5029840 - DNA, 25 bp, Homo sapien
tggctttcaatcatgtcagtttgtt

SEQ ID NO: 5029841 - DNA, 25 bp, Homo sapien
attcactgagtttggctaatttcct

SEQ ID NO: 5029842 - DNA, 25 bp, Homo sapien
tcctcagagcaaaagctgaattatt

SEQ ID NO: 5029843 - DNA, 25 bp, Homo sapien
taatttcctcagagcaaaagctgaa

SEQ ID NO: 5029844 - DNA, 25 bp, Homo sapien
gagtttggctaatttcctcagagca

SEQ ID NO: 5029845 - DNA, 25 bp, Homo sapien
cttctgtagtggatcataatacctg

SEQ ID NO: 5029846 - DNA, 25 bp, Homo sapien
tagcaaaacacaagtcctgactcca

SEQ ID NO: 5029847 - DNA, 25 bp, Homo sapien
ctgtagtggatcataatacctgcta

SEQ ID NO: 5029848 - DNA, 25 bp, Homo sapien
agcaaaacacaagtcctgactccat

SEQ ID NO: 5029849 - DNA, 25 bp, Homo sapien
tcaactgctgctgctagtgatgctg

SEQ ID NO: 5029850 - DNA, 25 bp, Homo sapien
tgaagcaggcctgtagttaggcgtc

SEQ ID NO: 5029851 - DNA, 25 bp, Homo sapien
ggtccattctcattagacgtatccg

SEQ ID NO: 5029852 - DNA, 25 bp, Homo sapien
caacttagtattttgagaacaccag

SEQ ID NO: 5029853 - DNA, 25 bp, Homo sapien
cattagacgtatccgctgggtctga

SEQ ID NO: 5029854 - DNA, 25 bp, Homo sapien
gaatttttgctacagtgtttgacac

SEQ ID NO: 5029855 - DNA, 25 bp, Homo sapien
tcacgatgtaaggtcaaggtcatgg

SEQ ID NO: 5029856 - DNA, 25 bp, Homo sapien
tgtaaggtcaaggtcatggaacctg

SEQ ID NO: 5029857 - DNA, 25 bp, Homo sapien
cgatgtaaggtcaaggtcatggaac

SEQ ID NO: 5029858 - DNA, 25 bp, Homo sapien
tcttcctgaggctcctttgcattca

SEQ ID NO: 5029859 - DNA, 25 bp, Homo sapien
ctgaggctcctttgcattcattaaa

SEQ ID NO: 5029860 - DNA, 25 bp, Homo sapien
acagacacagattaaccgcagccct

SEQ ID NO: 5029861 - DNA, 25 bp, Homo sapien
ttaaccgcagccctttgccctgtgg

SEQ ID NO: 5029862 - DNA, 25 bp, Homo sapien
aatgaatcagtcatgttcaaaacag

SEQ ID NO: 5029863 - DNA, 25 bp, Homo sapien
tatatggtcattagtttaggagaga

SEQ ID NO: 5029864 - DNA, 25 bp, Homo sapien
cattcaagataagcacactgttttc

SEQ ID NO: 5029865 - DNA, 25 bp, Homo sapien
cagtaatatagacttcaatggcata

SEQ ID NO: 5029866 - DNA, 25 bp, Homo sapien
ggaatatgcaatcacttggctgcca

SEQ ID NO: 5029867 - DNA, 25 bp, Homo sapien
cacaagaccctctgagtgacgcaga

SEQ ID NO: 5029868 - DNA, 25 bp, Homo sapien
caatagaccagagggtcttctggct

SEQ ID NO: 5029869 - DNA, 25 bp, Homo sapien
ggaaaggaatcctcaagtccaatag

SEQ ID NO: 5029870 - DNA, 25 bp, Homo sapien
tagaggaacagattctggatttgaa

SEQ ID NO: 5029871 - DNA, 25 bp, Homo sapien
tcagtaacttgcaatagaggaacag

SEQ ID NO: 5029872 - DNA, 25 bp, Homo sapien
gacctgtatgccgtgatgtcagaga

SEQ ID NO: 5029873 - DNA, 25 bp, Homo sapien
cttgtaatgtgtggtgattgaatca

SEQ ID NO: 5029874 - DNA, 25 bp, Homo sapien
ccaactctattttgccaaggaccat

SEQ ID NO: 5029875 - DNA, 25 bp, Homo sapien
ttgcacactgtagaacaaacattgt

SEQ ID NO: 5029876 - DNA, 25 bp, Homo sapien
caaacattgttgtcatcagcaggct

SEQ ID NO: 5029877 - DNA, 25 bp, Homo sapien
gagtctgcactctgtcaaggttctt

SEQ ID NO: 5029878 - DNA, 25 bp, Homo sapien
agcagtgaactttcattgcagaggt

SEQ ID NO: 5029879 - DNA, 25 bp, Homo sapien
atcactacaaattcactgtagattt

SEQ ID NO: 5029880 - DNA, 25 bp, Homo sapien
gatttttaagcagtgaactttcatt

SEQ ID NO: 5029881 - DNA, 25 bp, Homo sapien
tttaagcagtgaactttcattgcag

SEQ ID NO: 5029882 - DNA, 25 bp, Homo sapien
gatcttgttagactgacctcttatg

SEQ ID NO: 5029883 - DNA, 25 bp, Homo sapien
caaacacattcatagcaagcaacct

SEQ ID NO: 5029884 - DNA, 25 bp, Homo sapien
taaaaccagcttcaagttcacatgc

SEQ ID NO: 5029885 - DNA, 25 bp, Homo sapien
ggccacaattagtatagcttctctg

SEQ ID NO: 5029886 - DNA, 25 bp, Homo sapien
ccaattaagtttgcaacattattca

SEQ ID NO: 5029887 - DNA, 25 bp, Homo sapien
taacaccaattaagtttgcaacatt

SEQ ID NO: 5029888 - DNA, 25 bp, Homo sapien
caccaattaagtttgcaacattatt

SEQ ID NO: 5029889 - DNA, 25 bp, Homo sapien
tttaacaccaattaagtttgcaaca

SEQ ID NO: 5029890 - DNA, 25 bp, Homo sapien
aagacttctaacaggaacaagcttc

SEQ ID NO: 5029891 - DNA, 25 bp, Homo sapien
agacttctaacaggaacaagcttca

SEQ ID NO: 5029892 - DNA, 25 bp, Homo sapien
cagtgccatcattcttcatccccat

SEQ ID NO: 5029893 - DNA, 25 bp, Homo sapien
aagatagcttgtcacagcaggcatc

SEQ ID NO: 5029894 - DNA, 25 bp, Homo sapien
ttcctaaagatagcttgtcacagca

SEQ ID NO: 5029895 - DNA, 25 bp, Homo sapien
taaagatagcttgtcacagcaggca

SEQ ID NO: 5029896 - DNA, 25 bp, Homo sapien
ctaaagatagcttgtcacagcaggc

SEQ ID NO: 5029897 - DNA, 25 bp, Homo sapien
aatttaataagtggctctcaggagc

SEQ ID NO: 5029898 - DNA, 25 bp, Homo sapien
gaggaagtctcccttgttgctcaaa

SEQ ID NO: 5029899 - DNA, 25 bp, Homo sapien
tctcaggagccagtacagccagctc

SEQ ID NO: 5029900 - DNA, 25 bp, Homo sapien
gcatgagcgacgatcctctaccaag

SEQ ID NO: 5029901 - DNA, 25 bp, Homo sapien
gataatgcaaaatcacttcacggca

SEQ ID NO: 5029902 - DNA, 25 bp, Homo sapien
catcacagttgctgacatagtcagt

SEQ ID NO: 5029903 - DNA, 25 bp, Homo sapien
gctggagttcacacatcaagaaacc

SEQ ID NO: 5029904 - DNA, 25 bp, Homo sapien
gaatgccttgggactatagttcaac

SEQ ID NO: 5029905 - DNA, 25 bp, Homo sapien
gaacactacacctttgactccagaa

SEQ ID NO: 5029906 - DNA, 25 bp, Homo sapien
tatgcaattccaagggctcagagca

SEQ ID NO: 5029907 - DNA, 25 bp, Homo sapien
gttttgctccattcctcacaggcct

SEQ ID NO: 5029908 - DNA, 25 bp, Homo sapien
tcacaggcctgatctaagcaggagc

SEQ ID NO: 5029909 - DNA, 25 bp, Homo sapien
gttggattataatcctgaaggccaa

SEQ ID NO: 5029910 - DNA, 25 bp, Homo sapien
gattataatcctgaaggccaaattc

SEQ ID NO: 5029911 - DNA, 25 bp, Homo sapien
tcaagttggattataatcctgaagg

SEQ ID NO: 5029912 - DNA, 25 bp, Homo sapien
ttcaaaacctagatcctccctctcc

SEQ ID NO: 5029913 - DNA, 25 bp, Homo sapien
acagggtagtacagcagcggcttga

SEQ ID NO: 5029914 - DNA, 25 bp, Homo sapien
gcttgagctattgttgcttctctga

SEQ ID NO: 5029915 - DNA, 25 bp, Homo sapien
gccacagggtagtacagcagcggct

SEQ ID NO: 5029916 - DNA, 25 bp, Homo sapien
gcagcggcttgagctattgttgctt

SEQ ID NO: 5029917 - DNA, 25 bp, Homo sapien
gctgggactcaggagaaagcatgag

SEQ ID NO: 5029918 - DNA, 25 bp, Homo sapien
tgggactcaggagaaagcatgaggg

SEQ ID NO: 5029919 - DNA, 25 bp, Homo sapien
agctgggactcaggagaaagcatga

SEQ ID NO: 5029920 - DNA, 25 bp, Homo sapien
agagctgggactcaggagaaagcat

SEQ ID NO: 5029921 - DNA, 25 bp, Homo sapien
agcctgagattcaaatttgccttgc

SEQ ID NO: 5029922 - DNA, 25 bp, Homo sapien
gaagcctattgtttcaactctaatg

SEQ ID NO: 5029923 - DNA, 25 bp, Homo sapien
tctttgtaactcctgaagcctattg

SEQ ID NO: 5029924 - DNA, 25 bp, Homo sapien
actctaatgtagtacacagcctgag

SEQ ID NO: 5029925 - DNA, 25 bp, Homo sapien
tgacctccattggtgacccggactc

SEQ ID NO: 5029926 - DNA, 25 bp, Homo sapien
ccaatgacctccattggtgacccgg

SEQ ID NO: 5029927 - DNA, 25 bp, Homo sapien
tcactggctgcttgattcttcaccc

SEQ ID NO: 5029928 - DNA, 25 bp, Homo sapien
ttggtgacccggactccacttccca

SEQ ID NO: 5029929 - DNA, 25 bp, Homo sapien
tcagcaacgtctccgtgagactgtt

SEQ ID NO: 5029930 - DNA, 25 bp, Homo sapien
tcctgattaacacctccagcattca

SEQ ID NO: 5029931 - DNA, 25 bp, Homo sapien
acagcagctccataaggtattggca

SEQ ID NO: 5029932 - DNA, 25 bp, Homo sapien
ataaggtattggcacctcttcagca

SEQ ID NO: 5029933 - DNA, 25 bp, Homo sapien
gctgctcaactctcagctttgtgtc

SEQ ID NO: 5029934 - DNA, 25 bp, Homo sapien
tgtcctgtcctccagtaatagatgt

SEQ ID NO: 5029935 - DNA, 25 bp, Homo sapien
cgcctgctcaacttgtggctcagaa

SEQ ID NO: 5029936 - DNA, 25 bp, Homo sapien
ttgctatcgcctgctcaacttgtgg

SEQ ID NO: 5029937 - DNA, 25 bp, Homo sapien
ttgaagatgaaagatcgaggtgcag

SEQ ID NO: 5029938 - DNA, 25 bp, Homo sapien
gaaagatcgaggtgcaggtgttaaa

SEQ ID NO: 5029939 - DNA, 25 bp, Homo sapien
cgaggtgcaggtgttaaatatttgc

SEQ ID NO: 5029940 - DNA, 25 bp, Homo sapien
gatttttgaagatgaaagatcgagg

SEQ ID NO: 5029941 - DNA, 25 bp, Homo sapien
aacagcttcttggggttttggtgct

SEQ ID NO: 5029942 - DNA, 25 bp, Homo sapien
ctaacagcttcttggggttttggtg

SEQ ID NO: 5029943 - DNA, 25 bp, Homo sapien
agcttcttggggttttggtgctgat

SEQ ID NO: 5029944 - DNA, 25 bp, Homo sapien
cttcttggggttttggtgctgattg

SEQ ID NO: 5029945 - DNA, 25 bp, Homo sapien
tgggaaaggaagactctattcagag

SEQ ID NO: 5029946 - DNA, 25 bp, Homo sapien
acactccataatgctctcgaagaag

SEQ ID NO: 5029947 - DNA, 25 bp, Homo sapien
cataatgctctcgaagaagcgccat

SEQ ID NO: 5029948 - DNA, 25 bp, Homo sapien
ttcagagtatgtgggtagccacaca

SEQ ID NO: 5029949 - DNA, 25 bp, Homo sapien
gcgaggtcttaacagtgctcctgga

SEQ ID NO: 5029950 - DNA, 25 bp, Homo sapien
cagatgtgcatacagggttcctcct

SEQ ID NO: 5029951 - DNA, 25 bp, Homo sapien
tgtgcatacagggttcctccttcca

SEQ ID NO: 5029952 - DNA, 25 bp, Homo sapien
caaaccctttgcgaggtcttaacag

SEQ ID NO: 5029953 - DNA, 25 bp, Homo sapien
tgaagttggaaaattattcacaggt

SEQ ID NO: 5029954 - DNA, 25 bp, Homo sapien
aacctgagatcaaatgcagtataat

SEQ ID NO: 5029955 - DNA, 25 bp, Homo sapien
tcaaatgcagtataatcaatttttc

SEQ ID NO: 5029956 - DNA, 25 bp, Homo sapien
gaaatacatgaatactctgatactg

SEQ ID NO: 5029957 - DNA, 25 bp, Homo sapien
caagttgagagagtccaggctttat

SEQ ID NO: 5029958 - DNA, 25 bp, Homo sapien
catataaaccataccaacgccgtta

SEQ ID NO: 5029959 - DNA, 25 bp, Homo sapien
catttcaattcagcagagcctgtat

SEQ ID NO: 5029960 - DNA, 25 bp, Homo sapien
ctctctggagaaagtagtatatatc

SEQ ID NO: 5029961 - DNA, 25 bp, Homo sapien
ctttattattcaagtttagatgtaa

SEQ ID NO: 5029962 - DNA, 25 bp, Homo sapien
aacatgtttgtgagtagaaatgaac

SEQ ID NO: 5029963 - DNA, 25 bp, Homo sapien
catgtttgtgagtagaaatgaacat

SEQ ID NO: 5029964 - DNA, 25 bp, Homo sapien
gaacatgtttgtgagtagaaatgaa

SEQ ID NO: 5029965 - DNA, 25 bp, Homo sapien
tactggctcaccaaagacgacttga

SEQ ID NO: 5029966 - DNA, 25 bp, Homo sapien
tgaatattagagctacgcgacaggt

SEQ ID NO: 5029967 - DNA, 25 bp, Homo sapien
tatttagccctatttccctgagcag

SEQ ID NO: 5029968 - DNA, 25 bp, Homo sapien
tgtggttgtcaaatagtccgcccta

SEQ ID NO: 5029969 - DNA, 25 bp, Homo sapien
tttcatgttggataaggcaggctct

SEQ ID NO: 5029970 - DNA, 25 bp, Homo sapien
tgaaatcactacagaagcatcgagg

SEQ ID NO: 5029971 - DNA, 25 bp, Homo sapien
gaagactaaattgagagggcgccat

SEQ ID NO: 5029972 - DNA, 25 bp, Homo sapien
ggtaaaaacagcgtgccaccatctg

SEQ ID NO: 5029973 - DNA, 25 bp, Homo sapien
tatttgtccgtgcaaagatgctggc

SEQ ID NO: 5029974 - DNA, 25 bp, Homo sapien
cccaggtctggaatgcttgatcgcc

SEQ ID NO: 5029975 - DNA, 25 bp, Homo sapien
tatatttactccagaaccgcagcca

SEQ ID NO: 5029976 - DNA, 25 bp, Homo sapien
gactcaagtagtgcggattcccagg

SEQ ID NO: 5029977 - DNA, 25 bp, Homo sapien
aaatgtcggctgtttaaagctgctc

SEQ ID NO: 5029978 - DNA, 25 bp, Homo sapien
tccactatgtgagggcacagataga

SEQ ID NO: 5029979 - DNA, 25 bp, Homo sapien
tggcttagtaaggaagacagccctc

SEQ ID NO: 5029980 - DNA, 25 bp, Homo sapien
tacatgcgtgcttctaaataattgc

SEQ ID NO: 5029981 - DNA, 25 bp, Homo sapien
ccagagagaggtctttgtggtcagg

SEQ ID NO: 5029982 - DNA, 25 bp, Homo sapien
cgagtgaagcttctggtagaggcca

SEQ ID NO: 5029983 - DNA, 25 bp, Homo sapien
gccacacgcgttgcatacatatccg

SEQ ID NO: 5029984 - DNA, 25 bp, Homo sapien
tacatatccgccatttgcattcttt

SEQ ID NO: 5029985 - DNA, 25 bp, Homo sapien
aattaaccctacagtgatggatgag

SEQ ID NO: 5029986 - DNA, 25 bp, Homo sapien
gatggctcctaaatgctgaacccta

SEQ ID NO: 5029987 - DNA, 25 bp, Homo sapien
ttcaattgtgtttaataggcaccac

SEQ ID NO: 5029988 - DNA, 25 bp, Homo sapien
tatggctttaatgatggctcctaaa

SEQ ID NO: 5029989 - DNA, 25 bp, Homo sapien
taattttggcttcaagactggaaca

SEQ ID NO: 5029990 - DNA, 25 bp, Homo sapien
catcgggtgtttcacaatgtatcac

SEQ ID NO: 5029991 - DNA, 25 bp, Homo sapien
gaagagtggtatccctgccaagaaa

SEQ ID NO: 5029992 - DNA, 25 bp, Homo sapien
gaaagggcatttgattcatcgggtg

SEQ ID NO: 5029993 - DNA, 25 bp, Homo sapien
cactgtgtacaatgtaacctggcag

SEQ ID NO: 5029994 - DNA, 25 bp, Homo sapien
cctttgaagttatcaacatccttag

SEQ ID NO: 5029995 - DNA, 25 bp, Homo sapien
gcaggacacagtaagggatttcctt

SEQ ID NO: 5029996 - DNA, 25 bp, Homo sapien
tatcaacatccttagcccaatcaag

SEQ ID NO: 5029997 - DNA, 25 bp, Homo sapien
tgaagggactctatcaggttcagcc

SEQ ID NO: 5029998 - DNA, 25 bp, Homo sapien
gctgtactgcatgtctttgcctgct

SEQ ID NO: 5029999 - DNA, 25 bp, Homo sapien
aatccgttgaaatgggctgtactgc

SEQ ID NO: 5030000 - DNA, 25 bp, Homo sapien
taaaattgtgaagaatccgttgaaa

SEQ ID NO: 5030001 - DNA, 25 bp, Homo sapien
attaccaacttgtctgcagtaccat

SEQ ID NO: 5030002 - DNA, 25 bp, Homo sapien
ttcaattaccaacttgtctgcagta

SEQ ID NO: 5030003 - DNA, 25 bp, Homo sapien
caattaccaacttgtctgcagtacc

SEQ ID NO: 5030004 - DNA, 25 bp, Homo sapien
tcaattaccaacttgtctgcagtac

SEQ ID NO: 5030005 - DNA, 25 bp, Homo sapien
aagaaaagaagtgggtgatttgaca

SEQ ID NO: 5030006 - DNA, 25 bp, Homo sapien
ttctaggttttgttgacagttataa

SEQ ID NO: 5030007 - DNA, 25 bp, Homo sapien
tctatactttctaggttttgttgac

SEQ ID NO: 5030008 - DNA, 25 bp, Homo sapien
aagaagtgggtgatttgacataaaa

SEQ ID NO: 5030009 - DNA, 25 bp, Homo sapien
agctagaggtctgttggccccacac

SEQ ID NO: 5030010 - DNA, 25 bp, Homo sapien
cagctagctagaggtctgttggccc

SEQ ID NO: 5030011 - DNA, 25 bp, Homo sapien
tgagtaatgttgattctgacagcag

SEQ ID NO: 5030012 - DNA, 25 bp, Homo sapien
ctgagtaatgttgattctgacagca

SEQ ID NO: 5030013 - DNA, 25 bp, Homo sapien
tcaaactgctttgttgtagagcggg

SEQ ID NO: 5030014 - DNA, 25 bp, Homo sapien
gcaaaggcttgtttgatgccattaa

SEQ ID NO: 5030015 - DNA, 25 bp, Homo sapien
gacagtttgcagacaatggcatctt

SEQ ID NO: 5030016 - DNA, 25 bp, Homo sapien
cccataattgatttattctgacaga

SEQ ID NO: 5030017 - DNA, 25 bp, Homo sapien
ctcacagtatgtcttgttggggcca

SEQ ID NO: 5030018 - DNA, 25 bp, Homo sapien
cacagtatgtcttgttggggccatc

SEQ ID NO: 5030019 - DNA, 25 bp, Homo sapien
gtatgtcttgttggggccatcagtg

SEQ ID NO: 5030020 - DNA, 25 bp, Homo sapien
cagtatgtcttgttggggccatcag

SEQ ID NO: 5030021 - DNA, 25 bp, Homo sapien
tcctgtgcaacgaagtgtggaatat

SEQ ID NO: 5030022 - DNA, 25 bp, Homo sapien
taggtatcctgtgcaacgaagtgtg

SEQ ID NO: 5030023 - DNA, 25 bp, Homo sapien
aaatactttcttatacaacatacaa

SEQ ID NO: 5030024 - DNA, 25 bp, Homo sapien
ttctattaggtatcctgtgcaacga

SEQ ID NO: 5030025 - DNA, 25 bp, Homo sapien
tactaagcaccagtcaatgttgtgg

SEQ ID NO: 5030026 - DNA, 25 bp, Homo sapien
aactaagggcaataacagctgctcc

SEQ ID NO: 5030027 - DNA, 25 bp, Homo sapien
tcatttgatgcgtccttgagcacct

SEQ ID NO: 5030028 - DNA, 25 bp, Homo sapien
tacaggatccttctttgctaccaca

SEQ ID NO: 5030029 - DNA, 25 bp, Homo sapien
tgcaaggcagagctaggaggaaatt

SEQ ID NO: 5030030 - DNA, 25 bp, Homo sapien
tgtggctcgccttttgcctcagagc

SEQ ID NO: 5030031 - DNA, 25 bp, Homo sapien
tattcaacatatagcctgtggctcg

SEQ ID NO: 5030032 - DNA, 25 bp, Homo sapien
ttatttccctaggaagcatggcttc

SEQ ID NO: 5030033 - DNA, 25 bp, Homo sapien
tgctcttacgtaacttgtagtctgg

SEQ ID NO: 5030034 - DNA, 25 bp, Homo sapien
tatgcacaagccacgagtattttgg

SEQ ID NO: 5030035 - DNA, 25 bp, Homo sapien
tagtctggtacaggaggcaacaaca

SEQ ID NO: 5030036 - DNA, 25 bp, Homo sapien
gaacacttcgtcaaaactatgattg

SEQ ID NO: 5030037 - DNA, 25 bp, Homo sapien
ctaaaacaattagggctcgtacgag

SEQ ID NO: 5030038 - DNA, 25 bp, Homo sapien
tccaaggttgagctaaagaatactg

SEQ ID NO: 5030039 - DNA, 25 bp, Homo sapien
caggctgcaagctcgttcgtttgtc

SEQ ID NO: 5030040 - DNA, 25 bp, Homo sapien
aactgttctactgtctgtctgcaaa

SEQ ID NO: 5030041 - DNA, 25 bp, Homo sapien
gaactgattgatcactcatgccagg

SEQ ID NO: 5030042 - DNA, 25 bp, Homo sapien
gcacagctcaacaagtcaatttgga

SEQ ID NO: 5030043 - DNA, 25 bp, Homo sapien
gacttggctggttatggacttatcc

SEQ ID NO: 5030044 - DNA, 25 bp, Homo sapien
tgcattttcagtggccaaagagcct

SEQ ID NO: 5030045 - DNA, 25 bp, Homo sapien
gataacagggatgtggtttaccacc

SEQ ID NO: 5030046 - DNA, 25 bp, Homo sapien
gaatatgcaccatggtaagacttgg

SEQ ID NO: 5030047 - DNA, 25 bp, Homo sapien
tctcagcaaagattagtaaaaggtt

SEQ ID NO: 5030048 - DNA, 25 bp, Homo sapien
caaatcccctgtgataaaccttttg

SEQ ID NO: 5030049 - DNA, 25 bp, Homo sapien
tttagtatggctgctaatgaaggag

SEQ ID NO: 5030050 - DNA, 25 bp, Homo sapien
tagccaataccagtgatcaaagttg

SEQ ID NO: 5030051 - DNA, 25 bp, Homo sapien
cagaaaaggcacatgccatttgtat

SEQ ID NO: 5030052 - DNA, 25 bp, Homo sapien
ggagtcattagttcaaacaactgtg

SEQ ID NO: 5030053 - DNA, 25 bp, Homo sapien
tactagaatggactcaacatgggtc

SEQ ID NO: 5030054 - DNA, 25 bp, Homo sapien
aacctgaagatgtttgaattagtag

SEQ ID NO: 5030055 - DNA, 25 bp, Homo sapien
tctgggtcatctactcaaactggta

SEQ ID NO: 5030056 - DNA, 25 bp, Homo sapien
tatctttcaacattctaaatcggtt

SEQ ID NO: 5030057 - DNA, 25 bp, Homo sapien
gctatgagctaggaaggagacgatt

SEQ ID NO: 5030058 - DNA, 25 bp, Homo sapien
aaaactaagctgaggcagtgacaca

SEQ ID NO: 5030059 - DNA, 25 bp, Homo sapien
cagagtagctaaacattatgaggac

SEQ ID NO: 5030060 - DNA, 25 bp, Homo sapien
gaatagaatcacaaatcagagtagc

SEQ ID NO: 5030061 - DNA, 25 bp, Homo sapien
taaaatctacaaatactggctgagg

SEQ ID NO: 5030062 - DNA, 25 bp, Homo sapien
tagtaggcccaatgagagaagactt

SEQ ID NO: 5030063 - DNA, 25 bp, Homo sapien
taaatgaagggctttgggtgccacg

SEQ ID NO: 5030064 - DNA, 25 bp, Homo sapien
ccacgaggatgataagaaggcagag

SEQ ID NO: 5030065 - DNA, 25 bp, Homo sapien
tcccgaaacaccatcagactggaga

SEQ ID NO: 5030066 - DNA, 25 bp, Homo sapien
tcaaattctgtctgaacatggtgtc

SEQ ID NO: 5030067 - DNA, 25 bp, Homo sapien
tcaagagggtaccatgattacaggg

SEQ ID NO: 5030068 - DNA, 25 bp, Homo sapien
gagagtcagagatagagcaagccct

SEQ ID NO: 5030069 - DNA, 25 bp, Homo sapien
gattgaagatctaaccctaatacca

SEQ ID NO: 5030070 - DNA, 25 bp, Homo sapien
gagattgaagctctaactgcagtac

SEQ ID NO: 5030071 - DNA, 25 bp, Homo sapien
gaagctctaacctcaataccatcat

SEQ ID NO: 5030072 - DNA, 25 bp, Homo sapien
gggagcaacattcagtcataacaca

SEQ ID NO: 5030073 - DNA, 25 bp, Homo sapien
ttaacataaatttgaaggtcagaat

SEQ ID NO: 5030074 - DNA, 25 bp, Homo sapien
catatagggggttcttcctttatat

SEQ ID NO: 5030075 - DNA, 25 bp, Homo sapien
gacggattagtgatgggtgaaacca

SEQ ID NO: 5030076 - DNA, 25 bp, Homo sapien
cagccaaagacaaggatagacggat

SEQ ID NO: 5030077 - DNA, 25 bp, Homo sapien
gcattttcccgtaatctctcaacag

SEQ ID NO: 5030078 - DNA, 25 bp, Homo sapien
acttgtggtgtttgatattccggac

SEQ ID NO: 5030079 - DNA, 25 bp, Homo sapien
gaaatctaagtcctgtacctccctg

SEQ ID NO: 5030080 - DNA, 25 bp, Homo sapien
aattgcagcccatcactaagtagcc

SEQ ID NO: 5030081 - DNA, 25 bp, Homo sapien
caacacgttcgatgctcatgtctgt

SEQ ID NO: 5030082 - DNA, 25 bp, Homo sapien
tggttctaagatatgcaagtgagca

SEQ ID NO: 5030083 - DNA, 25 bp, Homo sapien
taacaaatgttgcaagagtctctcc

SEQ ID NO: 5030084 - DNA, 25 bp, Homo sapien
tactcagacagacttaggaaccttg

SEQ ID NO: 5030085 - DNA, 25 bp, Homo sapien
tattccttgagttgtgtagttcgcc

SEQ ID NO: 5030086 - DNA, 25 bp, Homo sapien
actatgcagcaattgtaggatgggc

SEQ ID NO: 5030087 - DNA, 25 bp, Homo sapien
cagagctcaggccagtatatttcca

SEQ ID NO: 5030088 - DNA, 25 bp, Homo sapien
cagacaagactatgtgaagcagagg

SEQ ID NO: 5030089 - DNA, 25 bp, Homo sapien
tatttccactatgcaagccagtcgc

SEQ ID NO: 5030090 - DNA, 25 bp, Homo sapien
ttttaaagactagcagggcacagtg

SEQ ID NO: 5030091 - DNA, 25 bp, Homo sapien
tgaggtaactcaacaatgccaacta

SEQ ID NO: 5030092 - DNA, 25 bp, Homo sapien
tattttccatttgataagcgtgtgc

SEQ ID NO: 5030093 - DNA, 25 bp, Homo sapien
ccaaggtaaactagctgagaaagtg

SEQ ID NO: 5030094 - DNA, 25 bp, Homo sapien
catacattagtgagttcgccaaagt

SEQ ID NO: 5030095 - DNA, 25 bp, Homo sapien
gccatcaagggaataataaatcaac

SEQ ID NO: 5030096 - DNA, 25 bp, Homo sapien
tatggcagtttacaccatagagagg

SEQ ID NO: 5030097 - DNA, 25 bp, Homo sapien
taggcctcaggtatatccaagatat

SEQ ID NO: 5030098 - DNA, 25 bp, Homo sapien
tatcctaaataaacccacgcatctt

SEQ ID NO: 5030099 - DNA, 25 bp, Homo sapien
gactttcctgcctctctgatttagc

SEQ ID NO: 5030100 - DNA, 25 bp, Homo sapien
catgagatataaaacgtgccactgc

SEQ ID NO: 5030101 - DNA, 25 bp, Homo sapien
ttccataggcatcatacaaatactg

SEQ ID NO: 5030102 - DNA, 25 bp, Homo sapien
ggcagatggttagccaagttctatt

SEQ ID NO: 5030103 - DNA, 25 bp, Homo sapien
tcactctgtggtacctgacactctt

SEQ ID NO: 5030104 - DNA, 25 bp, Homo sapien
tctattccctatgacagcctacgtt

SEQ ID NO: 5030105 - DNA, 25 bp, Homo sapien
tcatctgaatgccttacaaacttgg

SEQ ID NO: 5030106 - DNA, 25 bp, Homo sapien
tatagcttagtcatggtaatgctgc

SEQ ID NO: 5030107 - DNA, 25 bp, Homo sapien
ggtcactttcatcatgatcacccat

SEQ ID NO: 5030108 - DNA, 25 bp, Homo sapien
tgtttctccacttaatccctagcct

SEQ ID NO: 5030109 - DNA, 25 bp, Homo sapien
tatgatctctgaaggaacataaaga

SEQ ID NO: 5030110 - DNA, 25 bp, Homo sapien
tgaaacccacaggagctaagtagaa

SEQ ID NO: 5030111 - DNA, 25 bp, Homo sapien
ttagtttctgcatccaaaattctga

SEQ ID NO: 5030112 - DNA, 25 bp, Homo sapien
ctactaaaattagtttctgcatcca

SEQ ID NO: 5030113 - DNA, 25 bp, Homo sapien
ttctgcatccaaaattctgatttga

SEQ ID NO: 5030114 - DNA, 25 bp, Homo sapien
ccaaaattctgatttgaacatctga

SEQ ID NO: 5030115 - DNA, 25 bp, Homo sapien
tagaggtaggtaattcggtatgata

SEQ ID NO: 5030116 - DNA, 25 bp, Homo sapien
tgggctgtttcttaattctgttagg

SEQ ID NO: 5030117 - DNA, 25 bp, Homo sapien
taataccaccaaagtagaattggtg

SEQ ID NO: 5030118 - DNA, 25 bp, Homo sapien
tttcagaataccaactaataccacc

SEQ ID NO: 5030119 - DNA, 25 bp, Homo sapien
cacattgcgaaggtcatcactggaa

SEQ ID NO: 5030120 - DNA, 25 bp, Homo sapien
ggacttgttttctcccgatgcagga

SEQ ID NO: 5030121 - DNA, 25 bp, Homo sapien
caagccataaataggtcgcgccaga

SEQ ID NO: 5030122 - DNA, 25 bp, Homo sapien
tcgccgttggctgtagtgatgtcct

SEQ ID NO: 5030123 - DNA, 25 bp, Homo sapien
aatggactcactgtccactttagca

SEQ ID NO: 5030124 - DNA, 25 bp, Homo sapien
ggttataatggactcactgtccact

SEQ ID NO: 5030125 - DNA, 25 bp, Homo sapien
caagatggttataatggactcactg

SEQ ID NO: 5030126 - DNA, 25 bp, Homo sapien
ggactcactgtccactttagcatat

SEQ ID NO: 5030127 - DNA, 25 bp, Homo sapien
ttggtatcattcattgccattcccc

SEQ ID NO: 5030128 - DNA, 25 bp, Homo sapien
ggtgttttggtatcattcattgcca

SEQ ID NO: 5030129 - DNA, 25 bp, Homo sapien
ctggtgttttggtatcattcattgc

SEQ ID NO: 5030130 - DNA, 25 bp, Homo sapien
gccattcccccatgtaccttaacca

SEQ ID NO: 5030131 - DNA, 25 bp, Homo sapien
ggcactgatgtttgactcgcgagct

SEQ ID NO: 5030132 - DNA, 25 bp, Homo sapien
tgataatgacggagaagtggcccca

SEQ ID NO: 5030133 - DNA, 25 bp, Homo sapien
cactacaattacatcagggccatgg

SEQ ID NO: 5030134 - DNA, 25 bp, Homo sapien
tctgggctgcaaagtcctctgggac

SEQ ID NO: 5030135 - DNA, 25 bp, Homo sapien
taactctggattaaggccgcctgac

SEQ ID NO: 5030136 - DNA, 25 bp, Homo sapien
ttctaattcggtggatgagttgccc

SEQ ID NO: 5030137 - DNA, 25 bp, Homo sapien
tgggcactgagtacccaacaggagt

SEQ ID NO: 5030138 - DNA, 25 bp, Homo sapien
ggtgttttccgtccaatgccaatga

SEQ ID NO: 5030139 - DNA, 25 bp, Homo sapien
gaataccttcatactattgactgct

SEQ ID NO: 5030140 - DNA, 25 bp, Homo sapien
ccttcatactattgactgctctttc

SEQ ID NO: 5030141 - DNA, 25 bp, Homo sapien
aatgaataccttcatactattgact

SEQ ID NO: 5030142 - DNA, 25 bp, Homo sapien
atactattgactgctctttcaaaag

SEQ ID NO: 5030143 - DNA, 25 bp, Homo sapien
tgtgctgtccaatagtacttcctga

SEQ ID NO: 5030144 - DNA, 25 bp, Homo sapien
taagtgttcggcttgtgtcagactc

SEQ ID NO: 5030145 - DNA, 25 bp, Homo sapien
tcaaatggctgaatccatcacggag

SEQ ID NO: 5030146 - DNA, 25 bp, Homo sapien
gaaccttagtctcctggcctctatg

SEQ ID NO: 5030147 - DNA, 25 bp, Homo sapien
acctgagattcgctggccacagtac

SEQ ID NO: 5030148 - DNA, 25 bp, Homo sapien
caaggcccctgagttacctgagatt

SEQ ID NO: 5030149 - DNA, 25 bp, Homo sapien
ctgagattcgctggccacagtactt

SEQ ID NO: 5030150 - DNA, 25 bp, Homo sapien
ggcccctgagttacctgagattcgc

SEQ ID NO: 5030151 - DNA, 25 bp, Homo sapien
cagctccttctacccaaacataaac

SEQ ID NO: 5030152 - DNA, 25 bp, Homo sapien
cagcatagtctaggatcagctgttt

SEQ ID NO: 5030153 - DNA, 25 bp, Homo sapien
tctattagttcaaactcagatagct

SEQ ID NO: 5030154 - DNA, 25 bp, Homo sapien
taggatcagctgttttatttctagt

SEQ ID NO: 5030155 - DNA, 25 bp, Homo sapien
tagactcagttccatgtttcgttct

SEQ ID NO: 5030156 - DNA, 25 bp, Homo sapien
cagttccatgtttcgttctattcaa

SEQ ID NO: 5030157 - DNA, 25 bp, Homo sapien
ccatgtttcgttctattcaaaatgg

SEQ ID NO: 5030158 - DNA, 25 bp, Homo sapien
ttatttagactcagttccatgtttc

SEQ ID NO: 5030159 - DNA, 25 bp, Homo sapien
gtacaaagagacaatacaaagtaca

SEQ ID NO: 5030160 - DNA, 25 bp, Homo sapien
ctaataactttttctgtacaaagag

SEQ ID NO: 5030161 - DNA, 25 bp, Homo sapien
acatgaatataagaattcacatttc

SEQ ID NO: 5030162 - DNA, 25 bp, Homo sapien
ttttctgtacaaagagacaatacaa

SEQ ID NO: 5030163 - DNA, 25 bp, Homo sapien
tgatgtcctgcagcacaccagaaaa

SEQ ID NO: 5030164 - DNA, 25 bp, Homo sapien
tgccgggtctgggttgtcattcacc

SEQ ID NO: 5030165 - DNA, 25 bp, Homo sapien
tgcaggccatatcttgagggtcatc

SEQ ID NO: 5030166 - DNA, 25 bp, Homo sapien
tttgtctccagtgagtcccctgagg

SEQ ID NO: 5030167 - DNA, 25 bp, Homo sapien
tgtcacctcatcatgcggaaaggag

SEQ ID NO: 5030168 - DNA, 25 bp, Homo sapien
acctcatcatgcggaaaggagggaa

SEQ ID NO: 5030169 - DNA, 25 bp, Homo sapien
ctcatcatgcggaaaggagggaaag

SEQ ID NO: 5030170 - DNA, 25 bp, Homo sapien
tcacctcatcatgcggaaaggaggg

SEQ ID NO: 5030171 - DNA, 25 bp, Homo sapien
tcttactgctagaagatggatcttg

SEQ ID NO: 5030172 - DNA, 25 bp, Homo sapien
tctgtacctataggctccaggatct

SEQ ID NO: 5030173 - DNA, 25 bp, Homo sapien
ttcacttgcaacgtttctcagaggg

SEQ ID NO: 5030174 - DNA, 25 bp, Homo sapien
ctcagaactgcgcttttcaagtcct

SEQ ID NO: 5030175 - DNA, 25 bp, Homo sapien
tctattagtcaactagcaggaggct

SEQ ID NO: 5030176 - DNA, 25 bp, Homo sapien
ttagaagacgctcagaagacacaga

SEQ ID NO: 5030177 - DNA, 25 bp, Homo sapien
gcaggaggctaatgcaattgtctta

SEQ ID NO: 5030178 - DNA, 25 bp, Homo sapien
tacccagcattgacttcataaggca

SEQ ID NO: 5030179 - DNA, 25 bp, Homo sapien
gatgttctcaagagggcaccttcac

SEQ ID NO: 5030180 - DNA, 25 bp, Homo sapien
tgaacagcccatataatgagaatgc

SEQ ID NO: 5030181 - DNA, 25 bp, Homo sapien
tgagaatgcatattatacgccaaga

SEQ ID NO: 5030182 - DNA, 25 bp, Homo sapien
gagtgcactatttctgttaccgtat

SEQ ID NO: 5030183 - DNA, 25 bp, Homo sapien
ggcgcacacaactgcttccgcagga

SEQ ID NO: 5030184 - DNA, 25 bp, Homo sapien
taaccggagggaacgggcgcacaca

SEQ ID NO: 5030185 - DNA, 25 bp, Homo sapien
aggacttcctgcgataacacgccca

SEQ ID NO: 5030186 - DNA, 25 bp, Homo sapien
agctcctgttgtgtcgccgctgccg

SEQ ID NO: 5030187 - DNA, 25 bp, Homo sapien
tgtacagctggcaatagaggcatct

SEQ ID NO: 5030188 - DNA, 25 bp, Homo sapien
gcatccactcctacatacagtctga

SEQ ID NO: 5030189 - DNA, 25 bp, Homo sapien
tagaggcatcttcaacagcatccac

SEQ ID NO: 5030190 - DNA, 25 bp, Homo sapien
tgcatttagcaaacaggagagctgg

SEQ ID NO: 5030191 - DNA, 25 bp, Homo sapien
taaagacagcttaacatattccgta

SEQ ID NO: 5030192 - DNA, 25 bp, Homo sapien
caatccttgaatgtgtaactactta

SEQ ID NO: 5030193 - DNA, 25 bp, Homo sapien
tacaaaggagaaacatctcttagtg

SEQ ID NO: 5030194 - DNA, 25 bp, Homo sapien
taccacatcatacatccaaagaatg

SEQ ID NO: 5030195 - DNA, 25 bp, Homo sapien
ttaagggactgcaactctaaacacc

SEQ ID NO: 5030196 - DNA, 25 bp, Homo sapien
tattaacagatgcagccataacatg

SEQ ID NO: 5030197 - DNA, 25 bp, Homo sapien
tagacttactccaagaaacttgcac

SEQ ID NO: 5030198 - DNA, 25 bp, Homo sapien
cacttaccagtaaacaatctgcgat

SEQ ID NO: 5030199 - DNA, 25 bp, Homo sapien
aactggtggaatatctgagagagcc

SEQ ID NO: 5030200 - DNA, 25 bp, Homo sapien
tgagcggcatgtaaaacttcacaac

SEQ ID NO: 5030201 - DNA, 25 bp, Homo sapien
gagagccttctaagcaaatgagcgg

SEQ ID NO: 5030202 - DNA, 25 bp, Homo sapien
tcaagaactggctgcccgcatgact

SEQ ID NO: 5030203 - DNA, 25 bp, Homo sapien
tggggccataaaacagttgctgact

SEQ ID NO: 5030204 - DNA, 25 bp, Homo sapien
tagagtcctggggccataaaacagt

SEQ ID NO: 5030205 - DNA, 25 bp, Homo sapien
cctggggccataaaacagttgctga

SEQ ID NO: 5030206 - DNA, 25 bp, Homo sapien
gtcctggggccataaaacagttgct

SEQ ID NO: 5030207 - DNA, 25 bp, Homo sapien
tctctagatcccaaacaggaaccag

SEQ ID NO: 5030208 - DNA, 25 bp, Homo sapien
gacagaaggcaaagcgtctgtccgc

SEQ ID NO: 5030209 - DNA, 25 bp, Homo sapien
caaagatgcgtttctctagatccca

SEQ ID NO: 5030210 - DNA, 25 bp, Homo sapien
gcgtctgtccgcttggatgtcccac

SEQ ID NO: 5030211 - DNA, 25 bp, Homo sapien
cgctgtcaggcatttaatcaccggc

SEQ ID NO: 5030212 - DNA, 25 bp, Homo sapien
gacacatggcgcatcaaccgcatcg

SEQ ID NO: 5030213 - DNA, 25 bp, Homo sapien
gcatcgcagaggaagtctgcccctt

SEQ ID NO: 5030214 - DNA, 25 bp, Homo sapien
aggcatttaatcaccggccagtgtc

SEQ ID NO: 5030215 - DNA, 25 bp, Homo sapien
atggtacggacagggcacagaccgc

SEQ ID NO: 5030216 - DNA, 25 bp, Homo sapien
ggtgcaccaagggatgcgacacccg

SEQ ID NO: 5030217 - DNA, 25 bp, Homo sapien
cctgccacatggtacggacagggca

SEQ ID NO: 5030218 - DNA, 25 bp, Homo sapien
aagctgtcctgagccgctctgaggc

SEQ ID NO: 5030219 - DNA, 25 bp, Homo sapien
tcacgagcccccagaaaacttgcag

SEQ ID NO: 5030220 - DNA, 25 bp, Homo sapien
ccagaaaacttgcagtggcggcggc

SEQ ID NO: 5030221 - DNA, 25 bp, Homo sapien
gcccccagaaaacttgcagtggcgg

SEQ ID NO: 5030222 - DNA, 25 bp, Homo sapien
cgagcccccagaaaacttgcagtgg

SEQ ID NO: 5030223 - DNA, 25 bp, Homo sapien
gaacttgaccctgctgactccaggg

SEQ ID NO: 5030224 - DNA, 25 bp, Homo sapien
tccccggcggctgaacttgaccctg

SEQ ID NO: 5030225 - DNA, 25 bp, Homo sapien
gctgcgcccggtaggagagaattaa

SEQ ID NO: 5030226 - DNA, 25 bp, Homo sapien
tcctccgctgcgcccggtaggagag

SEQ ID NO: 5030227 - DNA, 25 bp, Homo sapien
ctgcagtttgaagtcgctggtttcc

SEQ ID NO: 5030228 - DNA, 25 bp, Homo sapien
gcagtttgaagtcgctggtttccaa

SEQ ID NO: 5030229 - DNA, 25 bp, Homo sapien
ttgaagtcgctggtttccaaagctc

SEQ ID NO: 5030230 - DNA, 25 bp, Homo sapien
aagtcgctggtttccaaagctcaga

SEQ ID NO: 5030231 - DNA, 25 bp, Homo sapien
ttttgcgcgcacacgagcgggcgct

SEQ ID NO: 5030232 - DNA, 25 bp, Homo sapien
ctcgcgatcgcccacattttgcgcg

SEQ ID NO: 5030233 - DNA, 25 bp, Homo sapien
cagggctccccgctcgcgatcgccc

SEQ ID NO: 5030234 - DNA, 25 bp, Homo sapien
gatcgcccacattttgcgcgcacac

SEQ ID NO: 5030235 - DNA, 25 bp, Homo sapien
ctgttgattaatcgtcaagaacacc

SEQ ID NO: 5030236 - DNA, 25 bp, Homo sapien
caaagccatgaaccgtcttctgttg

SEQ ID NO: 5030237 - DNA, 25 bp, Homo sapien
cctcggcagcccgaaagatggtggc

SEQ ID NO: 5030238 - DNA, 25 bp, Homo sapien
gattaatcgtcaagaacaccctcgg

SEQ ID NO: 5030239 - DNA, 25 bp, Homo sapien
gcattacgtcagtttcaagacacca

SEQ ID NO: 5030240 - DNA, 25 bp, Homo sapien
aaagaggacgctagagattgcagta

SEQ ID NO: 5030241 - DNA, 25 bp, Homo sapien
ggacctcagtctccgcgcattacgt

SEQ ID NO: 5030242 - DNA, 25 bp, Homo sapien
gaaatgttatcgcttgtcaggacct

SEQ ID NO: 5030243 - DNA, 25 bp, Homo sapien
tatcctgagttggagaagtgcggac

SEQ ID NO: 5030244 - DNA, 25 bp, Homo sapien
ggattccccacgattttcacggcaa

SEQ ID NO: 5030245 - DNA, 25 bp, Homo sapien
tgaggagaacaacttgaactctatc

SEQ ID NO: 5030246 - DNA, 25 bp, Homo sapien
ttcacggcaagaaggcttgaggaga

SEQ ID NO: 5030247 - DNA, 25 bp, Homo sapien
cttcagttgggtgactttaagtggc

SEQ ID NO: 5030248 - DNA, 25 bp, Homo sapien
acatttcttgggcgtttggacttca

SEQ ID NO: 5030249 - DNA, 25 bp, Homo sapien
catttcttgggcgtttggacttcat

SEQ ID NO: 5030250 - DNA, 25 bp, Homo sapien
atttcttgggcgtttggacttcatt

SEQ ID NO: 5030251 - DNA, 25 bp, Homo sapien
cttttgcaagcacaaagcccttgag

SEQ ID NO: 5030252 - DNA, 25 bp, Homo sapien
ttttgcaagcacaaagcccttgaga

SEQ ID NO: 5030253 - DNA, 25 bp, Homo sapien
tgcttttgcaagcacaaagcccttg

SEQ ID NO: 5030254 - DNA, 25 bp, Homo sapien
gcttttgcaagcacaaagcccttga

SEQ ID NO: 5030255 - DNA, 25 bp, Homo sapien
tggtattcaaactcacacttacact

SEQ ID NO: 5030256 - DNA, 25 bp, Homo sapien
cagctttaaatagcctgtatctggt

SEQ ID NO: 5030257 - DNA, 25 bp, Homo sapien
ttgcctagttaaacagatgggcctt

SEQ ID NO: 5030258 - DNA, 25 bp, Homo sapien
ttccccctgcaatatcaggcaattg

SEQ ID NO: 5030259 - DNA, 25 bp, Homo sapien
tgaattatctccctcccctgctaaa

SEQ ID NO: 5030260 - DNA, 25 bp, Homo sapien
cagtgacttctatgatattgttcct

SEQ ID NO: 5030261 - DNA, 25 bp, Homo sapien
ttctaagtagcagttcatcacagtg

SEQ ID NO: 5030262 - DNA, 25 bp, Homo sapien
attctatagaatttgcttccatttc

SEQ ID NO: 5030263 - DNA, 25 bp, Homo sapien
gacaagttgaattgactgctccatc

SEQ ID NO: 5030264 - DNA, 25 bp, Homo sapien
agttgaattgactgctccatcaaga

SEQ ID NO: 5030265 - DNA, 25 bp, Homo sapien
catccagacaagttgaattgactgc

SEQ ID NO: 5030266 - DNA, 25 bp, Homo sapien
gtacatccagacaagttgaattgac

SEQ ID NO: 5030267 - DNA, 25 bp, Homo sapien
aataattgggctccattgtactcac

SEQ ID NO: 5030268 - DNA, 25 bp, Homo sapien
gatgctctacatacttcgctaattg

SEQ ID NO: 5030269 - DNA, 25 bp, Homo sapien
ttacaatgcgtagggcactgccttt

SEQ ID NO: 5030270 - DNA, 25 bp, Homo sapien
agttgagggtagtggatgctctaca

SEQ ID NO: 5030271 - DNA, 25 bp, Homo sapien
tgtcctctgtagcaagtattcacaa

SEQ ID NO: 5030272 - DNA, 25 bp, Homo sapien
aatctactgtagcagtcccagctgc

SEQ ID NO: 5030273 - DNA, 25 bp, Homo sapien
tcacaaatctactgtagcagtccca

SEQ ID NO: 5030274 - DNA, 25 bp, Homo sapien
ctgtcctctgtagcaagtattcaca

SEQ ID NO: 5030275 - DNA, 25 bp, Homo sapien
tctgcaatgtggctctggtggtgtc

SEQ ID NO: 5030276 - DNA, 25 bp, Homo sapien
tacactctctgcaatgtggctctgg

SEQ ID NO: 5030277 - DNA, 25 bp, Homo sapien
tctggtggtgtctattttatgttta

SEQ ID NO: 5030278 - DNA, 25 bp, Homo sapien
gcaatgtggctctggtggtgtctat

SEQ ID NO: 5030279 - DNA, 25 bp, Homo sapien
tccccttcaccattctgttttgatc

SEQ ID NO: 5030280 - DNA, 25 bp, Homo sapien
cctgaggattcttcctgacccttct

SEQ ID NO: 5030281 - DNA, 25 bp, Homo sapien
tcaccattctgttttgatccaggag

SEQ ID NO: 5030282 - DNA, 25 bp, Homo sapien
attctgttttgatccaggaggttgg

SEQ ID NO: 5030283 - DNA, 25 bp, Homo sapien
caacataccggggaaaatttgtgat

SEQ ID NO: 5030284 - DNA, 25 bp, Homo sapien
ctattggtagatcggcggctgcaca

SEQ ID NO: 5030285 - DNA, 25 bp, Homo sapien
acattttgctccctgcttcggcaac

SEQ ID NO: 5030286 - DNA, 25 bp, Homo sapien
ccggggaaaatttgtgattgatgac

SEQ ID NO: 5030287 - DNA, 25 bp, Homo sapien
cagtggattgaacctcaaagactcc

SEQ ID NO: 5030288 - DNA, 25 bp, Homo sapien
caaagactcctttgacgcaagtgtt

SEQ ID NO: 5030289 - DNA, 25 bp, Homo sapien
ttttgaccacgtgaacatggtttcc

SEQ ID NO: 5030290 - DNA, 25 bp, Homo sapien
caaaaatcgtttgcctgtctcagtg

SEQ ID NO: 5030291 - DNA, 25 bp, Homo sapien
attctgtattgctaatccaaaccag

SEQ ID NO: 5030292 - DNA, 25 bp, Homo sapien
gcccctccagaaccttgtggtttca

SEQ ID NO: 5030293 - DNA, 25 bp, Homo sapien
ttgtcaggattctgtattgctaatc

SEQ ID NO: 5030294 - DNA, 25 bp, Homo sapien
caggattctgtattgctaatccaaa

SEQ ID NO: 5030295 - DNA, 25 bp, Homo sapien
ctccgttaggagttgaaggaagatt

SEQ ID NO: 5030296 - DNA, 25 bp, Homo sapien
caattgcagggcttcgactgctgac

SEQ ID NO: 5030297 - DNA, 25 bp, Homo sapien
tgacatgtggacaagcagacgctca

SEQ ID NO: 5030298 - DNA, 25 bp, Homo sapien
tttcaggcagacatactccgttagg

SEQ ID NO: 5030299 - DNA, 25 bp, Homo sapien
aaagaaagattgaagacaggcttca

SEQ ID NO: 5030300 - DNA, 25 bp, Homo sapien
gaaagaaagattgaagacaggcttc

SEQ ID NO: 5030301 - DNA, 25 bp, Homo sapien
cgaatgggtcctcggttcaaggcca

SEQ ID NO: 5030302 - DNA, 25 bp, Homo sapien
tacacaatacatgtttgcaacacga

SEQ ID NO: 5030303 - DNA, 25 bp, Homo sapien
cataaaatgttggagtgcttgtagg

SEQ ID NO: 5030304 - DNA, 25 bp, Homo sapien
caggatgatggactctacacaatac

SEQ ID NO: 5030305 - DNA, 25 bp, Homo sapien
taggtgtgtcctttcatctagtcct

SEQ ID NO: 5030306 - DNA, 25 bp, Homo sapien
cccttcagctcaggtattgtaaaag

SEQ ID NO: 5030307 - DNA, 25 bp, Homo sapien
tcctctctctggtttatcctgggca

SEQ ID NO: 5030308 - DNA, 25 bp, Homo sapien
cctttttagtctcagagggagataa

SEQ ID NO: 5030309 - DNA, 25 bp, Homo sapien
gatgtgtggtcactgttaaacagag

SEQ ID NO: 5030310 - DNA, 25 bp, Homo sapien
tgcaagaagcatgttaggatctgct

SEQ ID NO: 5030311 - DNA, 25 bp, Homo sapien
ttgtgcagagaacgaaataagtgag

SEQ ID NO: 5030312 - DNA, 25 bp, Homo sapien
tgtcaacccatggtatgcaaagacc

SEQ ID NO: 5030313 - DNA, 25 bp, Homo sapien
tccaggctctgttattcatcatgaa

SEQ ID NO: 5030314 - DNA, 25 bp, Homo sapien
atcgtccaggctctgttattcatca

SEQ ID NO: 5030315 - DNA, 25 bp, Homo sapien
ctgggtgcaaagagcagcgatacac

SEQ ID NO: 5030316 - DNA, 25 bp, Homo sapien
gcgatacacatgtccaaatgcagtc

SEQ ID NO: 5030317 - DNA, 25 bp, Homo sapien
ggcacctccagggtcatactgtacg

SEQ ID NO: 5030318 - DNA, 25 bp, Homo sapien
tgtacgtaacacagaatactctctg

SEQ ID NO: 5030319 - DNA, 25 bp, Homo sapien
tccagccgagcgcttctttgaagcc

SEQ ID NO: 5030320 - DNA, 25 bp, Homo sapien
atcctgggtactccagccgagcgct

SEQ ID NO: 5030321 - DNA, 25 bp, Homo sapien
ggctatttagaccacaaggactgca

SEQ ID NO: 5030322 - DNA, 25 bp, Homo sapien
cagcttgcagctcctaaagagactc

SEQ ID NO: 5030323 - DNA, 25 bp, Homo sapien
gctaaaggagtgcttgcgccatctt

SEQ ID NO: 5030324 - DNA, 25 bp, Homo sapien
gccactgtgggctaaaatgctctgg

SEQ ID NO: 5030325 - DNA, 25 bp, Homo sapien
gaagcagggatatgtctttgcctac

SEQ ID NO: 5030326 - DNA, 25 bp, Homo sapien
ggaattgctctactctagaaaaggg

SEQ ID NO: 5030327 - DNA, 25 bp, Homo sapien
catgaaacattgacacacaagagtt

SEQ ID NO: 5030328 - DNA, 25 bp, Homo sapien
ttgacatgccactactcttgccttg

SEQ ID NO: 5030329 - DNA, 25 bp, Homo sapien
ttcttgtacctctgttcttgaaaca

SEQ ID NO: 5030330 - DNA, 25 bp, Homo sapien
ttaacttgtacttcttgtacctctg

SEQ ID NO: 5030331 - DNA, 25 bp, Homo sapien
tgatacgtatgtagattcaaatcct

SEQ ID NO: 5030332 - DNA, 25 bp, Homo sapien
tcttgaaacagttgatacgtatgta

SEQ ID NO: 5030333 - DNA, 25 bp, Homo sapien
ttccctctgagggaagcgtgagtta

SEQ ID NO: 5030334 - DNA, 25 bp, Homo sapien
gctgcggacatcctttagggtaacc

SEQ ID NO: 5030335 - DNA, 25 bp, Homo sapien
gagttaacattacggcattccttgg

SEQ ID NO: 5030336 - DNA, 25 bp, Homo sapien
caagctgcggacatcctttagggta

SEQ ID NO: 5030337 - DNA, 25 bp, Homo sapien
cagaaataggaaacagtgggatctc

SEQ ID NO: 5030338 - DNA, 25 bp, Homo sapien
ggatctctaagcctgttaacttcct

SEQ ID NO: 5030339 - DNA, 25 bp, Homo sapien
caattctacggatcttggtgacaaa

SEQ ID NO: 5030340 - DNA, 25 bp, Homo sapien
tggtgacaaagtagccctgagagct

SEQ ID NO: 5030341 - DNA, 25 bp, Homo sapien
tttttgacatttagacagattgagt

SEQ ID NO: 5030342 - DNA, 25 bp, Homo sapien
gacatttagacagattgagtttgag

SEQ ID NO: 5030343 - DNA, 25 bp, Homo sapien
gtgactctgagtccagactgccccg

SEQ ID NO: 5030344 - DNA, 25 bp, Homo sapien
acagattgagtttgagagaggaagt

SEQ ID NO: 5030345 - DNA, 25 bp, Homo sapien
gaacagagcccagtgaaaatgggcc

SEQ ID NO: 5030346 - DNA, 25 bp, Homo sapien
aagcactgggattccgattctcttc

SEQ ID NO: 5030347 - DNA, 25 bp, Homo sapien
tatgccgagtacattagagaacaga

SEQ ID NO: 5030348 - DNA, 25 bp, Homo sapien
gggtcaaatgatatgccgagtacat

SEQ ID NO: 5030349 - DNA, 25 bp, Homo sapien
gactaatcttaatttagatccagac

SEQ ID NO: 5030350 - DNA, 25 bp, Homo sapien
tcgccaaaaggtactttagagacta

SEQ ID NO: 5030351 - DNA, 25 bp, Homo sapien
tgttgggaaaacgaattagaagcga

SEQ ID NO: 5030352 - DNA, 25 bp, Homo sapien
tccagacactgctaagtcaaataca

SEQ ID NO: 5030353 - DNA, 25 bp, Homo sapien
gacccatgaagactctagttttccc

SEQ ID NO: 5030354 - DNA, 25 bp, Homo sapien
gagggattggcaatagaaccagaag

SEQ ID NO: 5030355 - DNA, 25 bp, Homo sapien
tctcagccttacttataacagttcc

SEQ ID NO: 5030356 - DNA, 25 bp, Homo sapien
tactcctcactgtataaggcctttc

SEQ ID NO: 5030357 - DNA, 25 bp, Homo sapien
cataggaccccttgtgttgactgat

SEQ ID NO: 5030358 - DNA, 25 bp, Homo sapien
cttcctggtcataggaccccttgtg

SEQ ID NO: 5030359 - DNA, 25 bp, Homo sapien
gactgattgttgtggaaacaggttt

SEQ ID NO: 5030360 - DNA, 25 bp, Homo sapien
tgttgactgattgttgtggaaacag

SEQ ID NO: 5030361 - DNA, 25 bp, Homo sapien
agggtcttgtacatcacacggcttc

SEQ ID NO: 5030362 - DNA, 25 bp, Homo sapien
agaagagtttcacttgggcgttgaa

SEQ ID NO: 5030363 - DNA, 25 bp, Homo sapien
gtactgctttgcctcccacaaaatt

SEQ ID NO: 5030364 - DNA, 25 bp, Homo sapien
ttattgtactgctttgcctcccaca

SEQ ID NO: 5030365 - DNA, 25 bp, Homo sapien
acttttctaatcagtaggtggctct

SEQ ID NO: 5030366 - DNA, 25 bp, Homo sapien
tctaatcagtaggtggctctcctcc

SEQ ID NO: 5030367 - DNA, 25 bp, Homo sapien
tcttccacaggaggcttgtaagatt

SEQ ID NO: 5030368 - DNA, 25 bp, Homo sapien
gaggcttgtaagattgtcatattca

SEQ ID NO: 5030369 - DNA, 25 bp, Homo sapien
ttttgcaattgcttgccagctgatg

SEQ ID NO: 5030370 - DNA, 25 bp, Homo sapien
tttgcaattgcttgccagctgatga

SEQ ID NO: 5030371 - DNA, 25 bp, Homo sapien
ttgcaattgcttgccagctgatgag

SEQ ID NO: 5030372 - DNA, 25 bp, Homo sapien
cttttgcaattgcttgccagctgat

SEQ ID NO: 5030373 - DNA, 25 bp, Homo sapien
tgggggcgattcctcctttaactca

SEQ ID NO: 5030374 - DNA, 25 bp, Homo sapien
gattcctcctttaactcatccacag

SEQ ID NO: 5030375 - DNA, 25 bp, Homo sapien
tcttattgcttgaaggaaatgcaac

SEQ ID NO: 5030376 - DNA, 25 bp, Homo sapien
taccatggcttgggggcgattcctc

SEQ ID NO: 5030377 - DNA, 25 bp, Homo sapien
tccataatgtcagatgttgttgggt

SEQ ID NO: 5030378 - DNA, 25 bp, Homo sapien
ttttacttccttctaggcttgacac

SEQ ID NO: 5030379 - DNA, 25 bp, Homo sapien
tgtgcctgtctcactctgctgtaat

SEQ ID NO: 5030380 - DNA, 25 bp, Homo sapien
tctgtatttaggtcaggttccaagt

SEQ ID NO: 5030381 - DNA, 25 bp, Homo sapien
tctgtctgatatagtgaaggctgct

SEQ ID NO: 5030382 - DNA, 25 bp, Homo sapien
gtctgatatagtgaaggctgcttct

SEQ ID NO: 5030383 - DNA, 25 bp, Homo sapien
tcatctgtctgatatagtgaaggct

SEQ ID NO: 5030384 - DNA, 25 bp, Homo sapien
tgtctgatatagtgaaggctgcttc

SEQ ID NO: 5030385 - DNA, 25 bp, Homo sapien
ttaacctctgttgcagttctttgct

SEQ ID NO: 5030386 - DNA, 25 bp, Homo sapien
aactttaacctctgttgcagttctt

SEQ ID NO: 5030387 - DNA, 25 bp, Homo sapien
ctttaacctctgttgcagttctttg

SEQ ID NO: 5030388 - DNA, 25 bp, Homo sapien
gaaactttaacctctgttgcagttc

SEQ ID NO: 5030389 - DNA, 25 bp, Homo sapien
tcagattgtcagcttgttggcattc

SEQ ID NO: 5030390 - DNA, 25 bp, Homo sapien
cagacccattcagattgtcagcttg

SEQ ID NO: 5030391 - DNA, 25 bp, Homo sapien
ggtaacgatctcagacccattcaga

SEQ ID NO: 5030392 - DNA, 25 bp, Homo sapien
tttgaagcatattgggtaacgatct

SEQ ID NO: 5030393 - DNA, 25 bp, Homo sapien
tttctcctaacttatatgattgacg

SEQ ID NO: 5030394 - DNA, 25 bp, Homo sapien
tgacgctgttgtctgtgattacaag

SEQ ID NO: 5030395 - DNA, 25 bp, Homo sapien
tgatttgtggcatatccatgatatt

SEQ ID NO: 5030396 - DNA, 25 bp, Homo sapien
tgaaacaatggcagaatgggtgtga

SEQ ID NO: 5030397 - DNA, 25 bp, Homo sapien
tttcttccacattttggcactacca

SEQ ID NO: 5030398 - DNA, 25 bp, Homo sapien
ccccatgaccatcaggttgtcagat

SEQ ID NO: 5030399 - DNA, 25 bp, Homo sapien
gagactaatcctctgtggtccaata

SEQ ID NO: 5030400 - DNA, 25 bp, Homo sapien
taccaccaacacgtgcattgaggtc

SEQ ID NO: 5030401 - DNA, 25 bp, Homo sapien
gcaactgatttgtatttgtgagtca

SEQ ID NO: 5030402 - DNA, 25 bp, Homo sapien
gagcctgacttcacaactgtctgca

SEQ ID NO: 5030403 - DNA, 25 bp, Homo sapien
gcctgacttcacaactgtctgcatc

SEQ ID NO: 5030404 - DNA, 25 bp, Homo sapien
tgtctgcatctgtcttatagcaact

SEQ ID NO: 5030405 - DNA, 25 bp, Homo sapien
tcattgttactccatgagtcaacat

SEQ ID NO: 5030406 - DNA, 25 bp, Homo sapien
gtcctgatgtcaacagagtcctggt

SEQ ID NO: 5030407 - DNA, 25 bp, Homo sapien
ctgaagtcctgatgtcaacagagtc

SEQ ID NO: 5030408 - DNA, 25 bp, Homo sapien
tcctcattgttactccatgagtcaa

SEQ ID NO: 5030409 - DNA, 25 bp, Homo sapien
ggcagagaaatccaagaaaccatac

SEQ ID NO: 5030410 - DNA, 25 bp, Homo sapien
gctggcagagaaatccaagaaacca

SEQ ID NO: 5030411 - DNA, 25 bp, Homo sapien
ctggcagagaaatccaagaaaccat

SEQ ID NO: 5030412 - DNA, 25 bp, Homo sapien
aagctggcagagaaatccaagaaac

SEQ ID NO: 5030413 - DNA, 25 bp, Homo sapien
tcattgccacctctcacaacagctg

SEQ ID NO: 5030414 - DNA, 25 bp, Homo sapien
ccatttcattgccacctctcacaac

SEQ ID NO: 5030415 - DNA, 25 bp, Homo sapien
atttcattgccacctctcacaacag

SEQ ID NO: 5030416 - DNA, 25 bp, Homo sapien
atccatttcattgccacctctcaca

SEQ ID NO: 5030417 - DNA, 25 bp, Homo sapien
aacacagggggaaaacatcttctga

SEQ ID NO: 5030418 - DNA, 25 bp, Homo sapien
gcatcctggcaaatcctgctttctt

SEQ ID NO: 5030419 - DNA, 25 bp, Homo sapien
catcctggcaaatcctgctttcttc

SEQ ID NO: 5030420 - DNA, 25 bp, Homo sapien
acacagggggaaaacatcttctgat

SEQ ID NO: 5030421 - DNA, 25 bp, Homo sapien
gtgggtggctgattagtggtgttcc

SEQ ID NO: 5030422 - DNA, 25 bp, Homo sapien
gattccagtacatgccctcatcgaa

SEQ ID NO: 5030423 - DNA, 25 bp, Homo sapien
cagctgcatcaacccacttaacagt

SEQ ID NO: 5030424 - DNA, 25 bp, Homo sapien
caacccacttaacagtgtgggtggg

SEQ ID NO: 5030425 - DNA, 25 bp, Homo sapien
actcccaccaaagccgtatcattca

SEQ ID NO: 5030426 - DNA, 25 bp, Homo sapien
ctcccaccaaagccgtatcattcat

SEQ ID NO: 5030427 - DNA, 25 bp, Homo sapien
catcttctgttttcccttgcagcct

SEQ ID NO: 5030428 - DNA, 25 bp, Homo sapien
ctgttttcccttgcagcctttgtaa

SEQ ID NO: 5030429 - DNA, 25 bp, Homo sapien
ctattccagaatcgtggaagacccc

SEQ ID NO: 5030430 - DNA, 25 bp, Homo sapien
tggaagaccccactatactcttaac

SEQ ID NO: 5030431 - DNA, 25 bp, Homo sapien
catggtaaggcagccaaatcaaatt

SEQ ID NO: 5030432 - DNA, 25 bp, Homo sapien
tgctacatgtttggcatatgtggga

SEQ ID NO: 5030433 - DNA, 25 bp, Homo sapien
gccatggtaaggcagccaaatcaaa

SEQ ID NO: 5030434 - DNA, 25 bp, Homo sapien
tctgctctgggcactttgctacatg

SEQ ID NO: 5030435 - DNA, 25 bp, Homo sapien
caccaaaggtatgctctatgaagga

SEQ ID NO: 5030436 - DNA, 25 bp, Homo sapien
tataacaccaaaggtatgctctatg

SEQ ID NO: 5030437 - DNA, 25 bp, Homo sapien
gacttttcagatataacaccaaagg

SEQ ID NO: 5030438 - DNA, 25 bp, Homo sapien
cagatataacaccaaaggtatgctc

SEQ ID NO: 5030439 - DNA, 25 bp, Homo sapien
tctttccttgtcctaagcatgtaac

SEQ ID NO: 5030440 - DNA, 25 bp, Homo sapien
gtcctaagcatgtaactacaacatc

SEQ ID NO: 5030441 - DNA, 25 bp, Homo sapien
catgtaactacaacatcttggtaag

SEQ ID NO: 5030442 - DNA, 25 bp, Homo sapien
tccttgtcctaagcatgtaactaca

SEQ ID NO: 5030443 - DNA, 25 bp, Homo sapien
ccaagatcagacgagattgggtgcg

SEQ ID NO: 5030444 - DNA, 25 bp, Homo sapien
tgggtgcgttcagggtggtacggcc

SEQ ID NO: 5030445 - DNA, 25 bp, Homo sapien
aagatcagacgagattgggtgcgtt

SEQ ID NO: 5030446 - DNA, 25 bp, Homo sapien
tatcccatccaagtattaaccagtc

SEQ ID NO: 5030447 - DNA, 25 bp, Homo sapien
agttgacgctatgccgcattgccca

SEQ ID NO: 5030448 - DNA, 25 bp, Homo sapien
taaacggtagttgacgctatgccgc

SEQ ID NO: 5030449 - DNA, 25 bp, Homo sapien
ggtagttgacgctatgccgcattgc

SEQ ID NO: 5030450 - DNA, 25 bp, Homo sapien
ttgttaaacggtagttgacgctatg

SEQ ID NO: 5030451 - DNA, 25 bp, Homo sapien
caccacagtcagctatggacaatgg

SEQ ID NO: 5030452 - DNA, 25 bp, Homo sapien
tacagaggaggtgcatctcattggc

SEQ ID NO: 5030453 - DNA, 25 bp, Homo sapien
cattggcggagcatagattaagtgc

SEQ ID NO: 5030454 - DNA, 25 bp, Homo sapien
tgaaaaatgagtccggtgagccctg

SEQ ID NO: 5030455 - DNA, 25 bp, Homo sapien
catctgtttctaaacgaatccaagg

SEQ ID NO: 5030456 - DNA, 25 bp, Homo sapien
gggctgtggcaaaagagtccacact

SEQ ID NO: 5030457 - DNA, 25 bp, Homo sapien
acatactcctggatgggctgtggca

SEQ ID NO: 5030458 - DNA, 25 bp, Homo sapien
gaatccaaggtcctcacatactcct

SEQ ID NO: 5030459 - DNA, 25 bp, Homo sapien
ccaataaagcaactggctggcatct

SEQ ID NO: 5030460 - DNA, 25 bp, Homo sapien
ccactggtaggtgtctgatccaaga

SEQ ID NO: 5030461 - DNA, 25 bp, Homo sapien
agtggccacgttttgtaacttgcag

SEQ ID NO: 5030462 - DNA, 25 bp, Homo sapien
ggttgcctgataccggtgctctgcc

SEQ ID NO: 5030463 - DNA, 25 bp, Homo sapien
caggacagtaaaaatcttgagcttc

SEQ ID NO: 5030464 - DNA, 25 bp, Homo sapien
actggctgggatacagggagcccat

SEQ ID NO: 5030465 - DNA, 25 bp, Homo sapien
acataactgactggctgggatacag

SEQ ID NO: 5030466 - DNA, 25 bp, Homo sapien
tgagcttcacaatcaacataactga

SEQ ID NO: 5030467 - DNA, 25 bp, Homo sapien
aaagttgaactggcaggactgatct

SEQ ID NO: 5030468 - DNA, 25 bp, Homo sapien
ttgaactggcaggactgatctaatt

SEQ ID NO: 5030469 - DNA, 25 bp, Homo sapien
agttgaactggcaggactgatctaa

SEQ ID NO: 5030470 - DNA, 25 bp, Homo sapien
aagttgaactggcaggactgatcta

SEQ ID NO: 5030471 - DNA, 25 bp, Homo sapien
taatttgaatctaaacttagaagaa

SEQ ID NO: 5030472 - DNA, 25 bp, Homo sapien
ttaatttgaatctaaacttagaaga

SEQ ID NO: 5030473 - DNA, 25 bp, Homo sapien
tcaaaatctgttcggcaagtgctcc

SEQ ID NO: 5030474 - DNA, 25 bp, Homo sapien
tcagggctacaaaagcatcagagga

SEQ ID NO: 5030475 - DNA, 25 bp, Homo sapien
tggagctgctagtttcaatcagggc

SEQ ID NO: 5030476 - DNA, 25 bp, Homo sapien
gatggaactctgcagctatactgag

SEQ ID NO: 5030477 - DNA, 25 bp, Homo sapien
caggaagcagtaaaccaaaagccat

SEQ ID NO: 5030478 - DNA, 25 bp, Homo sapien
agtgagtagcaggaagcagtaaacc

SEQ ID NO: 5030479 - DNA, 25 bp, Homo sapien
gagtagcaggaagcagtaaaccaaa

SEQ ID NO: 5030480 - DNA, 25 bp, Homo sapien
tagcaggaagcagtaaaccaaaagc

SEQ ID NO: 5030481 - DNA, 25 bp, Homo sapien
ccaataaatgacctagacactgttt

SEQ ID NO: 5030482 - DNA, 25 bp, Homo sapien
ataaatgacctagacactgttttct

SEQ ID NO: 5030483 - DNA, 25 bp, Homo sapien
aataaatgacctagacactgttttc

SEQ ID NO: 5030484 - DNA, 25 bp, Homo sapien
caataaatgacctagacactgtttt

SEQ ID NO: 5030485 - DNA, 25 bp, Homo sapien
accccacaccctggaattctgaagg

SEQ ID NO: 5030486 - DNA, 25 bp, Homo sapien
cacaccctggaattctgaaggtgag

SEQ ID NO: 5030487 - DNA, 25 bp, Homo sapien
cctggaattctgaaggtgagagtaa

SEQ ID NO: 5030488 - DNA, 25 bp, Homo sapien
agacagactggtggactgagatgcc

SEQ ID NO: 5030489 - DNA, 25 bp, Homo sapien
tccggtttcctcttccatcaagagg

SEQ ID NO: 5030490 - DNA, 25 bp, Homo sapien
tgggtgcccaaaacgaatggcttcc

SEQ ID NO: 5030491 - DNA, 25 bp, Homo sapien
tcttccatcaagagggatgggtgcc

SEQ ID NO: 5030492 - DNA, 25 bp, Homo sapien
ggatgggtgcccaaaacgaatggct

SEQ ID NO: 5030493 - DNA, 25 bp, Homo sapien
gagtgcttgccattatccagtcgat

SEQ ID NO: 5030494 - DNA, 25 bp, Homo sapien
aagtggaatggagtgcttgccatta

SEQ ID NO: 5030495 - DNA, 25 bp, Homo sapien
tatccagtcgatttcatctgctgtt

SEQ ID NO: 5030496 - DNA, 25 bp, Homo sapien
gccattatccagtcgatttcatctg

SEQ ID NO: 5030497 - DNA, 25 bp, Homo sapien
agttcgagaccagcctgtcaccacg

SEQ ID NO: 5030498 - DNA, 25 bp, Homo sapien
tcgagaccagcctgtcaccacggtg

SEQ ID NO: 5030499 - DNA, 25 bp, Homo sapien
agaccagcctgtcaccacggtgaaa

SEQ ID NO: 5030500 - DNA, 25 bp, Homo sapien
cagcctgtcaccacggtgaaaccct

SEQ ID NO: 5030501 - DNA, 25 bp, Homo sapien
ttcaaggactgtgccacaatgcagt

SEQ ID NO: 5030502 - DNA, 25 bp, Homo sapien
atagaaggttgtaggatcttttctg

SEQ ID NO: 5030503 - DNA, 25 bp, Homo sapien
cagatagaaggttgtaggatctttt

SEQ ID NO: 5030504 - DNA, 25 bp, Homo sapien
cttcagatagaaggttgtaggatct

SEQ ID NO: 5030505 - DNA, 25 bp, Homo sapien
gcagcagctattcatgctcttcaga

SEQ ID NO: 5030506 - DNA, 25 bp, Homo sapien
cgaggaggatccagtaatggacaca

SEQ ID NO: 5030507 - DNA, 25 bp, Homo sapien
agagctcattgaggtgaataggaga

SEQ ID NO: 5030508 - DNA, 25 bp, Homo sapien
caatttatacaaaacgaggaggatc

SEQ ID NO: 5030509 - DNA, 25 bp, Homo sapien
aaggtggccccacgatccagttact

SEQ ID NO: 5030510 - DNA, 25 bp, Homo sapien
ttaagggaaagtgatactatatgta

SEQ ID NO: 5030511 - DNA, 25 bp, Homo sapien
aaattaagggaaagtgatactatat

SEQ ID NO: 5030512 - DNA, 25 bp, Homo sapien
gggaaagtgatactatatgtaactg

SEQ ID NO: 5030513 - DNA, 25 bp, Homo sapien
aagggaaagtgatactatatgtaac

SEQ ID NO: 5030514 - DNA, 25 bp, Homo sapien
ttttgggctttatagcattggcaat

SEQ ID NO: 5030515 - DNA, 25 bp, Homo sapien
gaattcaagctccaagcagcacttt

SEQ ID NO: 5030516 - DNA, 25 bp, Homo sapien
gcagcactttatttgctgatttcag

SEQ ID NO: 5030517 - DNA, 25 bp, Homo sapien
ccaacaaagtctgagtaattcccac

SEQ ID NO: 5030518 - DNA, 25 bp, Homo sapien
gtaattcccacttagctggtctcca

SEQ ID NO: 5030519 - DNA, 25 bp, Homo sapien
taacagtttcctaacgtgaacaggc

SEQ ID NO: 5030520 - DNA, 25 bp, Homo sapien
ccagcagatgtactcagggagtcca

SEQ ID NO: 5030521 - DNA, 25 bp, Homo sapien
gcaaagtggttgatcgatctgacca

SEQ ID NO: 5030522 - DNA, 25 bp, Homo sapien
tatcaccatctacatactgaccggg

SEQ ID NO: 5030523 - DNA, 25 bp, Homo sapien
cacttggatgatatctgcaaccata

SEQ ID NO: 5030524 - DNA, 25 bp, Homo sapien
gatatctgcaaccataacctcgtaa

SEQ ID NO: 5030525 - DNA, 25 bp, Homo sapien
tgcaaccataacctcgtaaattctt

SEQ ID NO: 5030526 - DNA, 25 bp, Homo sapien
cataacctcgtaaattcttctctgg

SEQ ID NO: 5030527 - DNA, 25 bp, Homo sapien
tgcattcacaacttctgtcactctg

SEQ ID NO: 5030528 - DNA, 25 bp, Homo sapien
ggttctgatttagcacctgatctac

SEQ ID NO: 5030529 - DNA, 25 bp, Homo sapien
tatgtgcttggttatatcttttcag

SEQ ID NO: 5030530 - DNA, 25 bp, Homo sapien
agtgcggtctctaatattctggttc

SEQ ID NO: 5030531 - DNA, 25 bp, Homo sapien
cacaggccatactaaagagtttgca

SEQ ID NO: 5030532 - DNA, 25 bp, Homo sapien
gaacctctgctctgataggaagccc

SEQ ID NO: 5030533 - DNA, 25 bp, Homo sapien
catggcaaatctagggttcaaatcc

SEQ ID NO: 5030534 - DNA, 25 bp, Homo sapien
ggtacaatctggaaacaaggagggc

SEQ ID NO: 5030535 - DNA, 25 bp, Homo sapien
cacagatcctggtcgtctgttcaca

SEQ ID NO: 5030536 - DNA, 25 bp, Homo sapien
gtatggttgtcagctcacagatcct

SEQ ID NO: 5030537 - DNA, 25 bp, Homo sapien
caactctggtgctcacacagtatgg

SEQ ID NO: 5030538 - DNA, 25 bp, Homo sapien
cacacagtatggttgtcagctcaca

SEQ ID NO: 5030539 - DNA, 25 bp, Homo sapien
tatccaacctcttcaggtctgtagg

SEQ ID NO: 5030540 - DNA, 25 bp, Homo sapien
ggccacttccatggtccttatccaa

SEQ ID NO: 5030541 - DNA, 25 bp, Homo sapien
gcaggtggaaagccagtcgctactc

SEQ ID NO: 5030542 - DNA, 25 bp, Homo sapien
ctacataagttttagagggccactt

SEQ ID NO: 5030543 - DNA, 25 bp, Homo sapien
aggatgggctcttggtagcaatatg

SEQ ID NO: 5030544 - DNA, 25 bp, Homo sapien
cagacagcactctgatctctgatca

SEQ ID NO: 5030545 - DNA, 25 bp, Homo sapien
tgtctgaagacaggatgggctcttg

SEQ ID NO: 5030546 - DNA, 25 bp, Homo sapien
ctcttggtagcaatatggatttgca

SEQ ID NO: 5030547 - DNA, 25 bp, Homo sapien
tcgtaagatttaggcccagtaccca

SEQ ID NO: 5030548 - DNA, 25 bp, Homo sapien
gaggctgagcccgaaggatctatcc

SEQ ID NO: 5030549 - DNA, 25 bp, Homo sapien
tgtttgccacggttcttccacagag

SEQ ID NO: 5030550 - DNA, 25 bp, Homo sapien
catcaaatgtgtagacctagggtct

SEQ ID NO: 5030551 - DNA, 25 bp, Homo sapien
accagcagcttttctcacatagtag

SEQ ID NO: 5030552 - DNA, 25 bp, Homo sapien
taaaacgatcagtagaaatcagagc

SEQ ID NO: 5030553 - DNA, 25 bp, Homo sapien
tctcacatagtagatatggttccta

SEQ ID NO: 5030554 - DNA, 25 bp, Homo sapien
ctttctgcttttcatctaaattagg

SEQ ID NO: 5030555 - DNA, 25 bp, Homo sapien
tcagttgaaaggttctctgctccag

SEQ ID NO: 5030556 - DNA, 25 bp, Homo sapien
cctcagccagcatcgtttgtcatca

SEQ ID NO: 5030557 - DNA, 25 bp, Homo sapien
taggaattataggttgacgtcattt

SEQ ID NO: 5030558 - DNA, 25 bp, Homo sapien
ggattcctaacttttcaggtctgac

SEQ ID NO: 5030559 - DNA, 25 bp, Homo sapien
gaactattgttcctaagatgggcac

SEQ ID NO: 5030560 - DNA, 25 bp, Homo sapien
tcctgagaactattgttcctaagat

SEQ ID NO: 5030561 - DNA, 25 bp, Homo sapien
tgggttcactagaggcaagtctgag

SEQ ID NO: 5030562 - DNA, 25 bp, Homo sapien
tgagttgggttcactagaggcaagt

SEQ ID NO: 5030563 - DNA, 25 bp, Homo sapien
tcctggtgctcggtagtcctgtaca

SEQ ID NO: 5030564 - DNA, 25 bp, Homo sapien
ctgacagctcagtctcttggtggga

SEQ ID NO: 5030565 - DNA, 25 bp, Homo sapien
tacgtctagttaaccatcttggctc

SEQ ID NO: 5030566 - DNA, 25 bp, Homo sapien
ggtgggagatgttcctcctggctac

SEQ ID NO: 5030567 - DNA, 25 bp, Homo sapien
ttgcctctgattgcagggagaatgc

SEQ ID NO: 5030568 - DNA, 25 bp, Homo sapien
aattgcctctgattgcagggagaat

SEQ ID NO: 5030569 - DNA, 25 bp, Homo sapien
caaaattgcctctgattgcagggag

SEQ ID NO: 5030570 - DNA, 25 bp, Homo sapien
aaaattgcctctgattgcagggaga

SEQ ID NO: 5030571 - DNA, 25 bp, Homo sapien
tatttagagcatcagccgaagatcc

SEQ ID NO: 5030572 - DNA, 25 bp, Homo sapien
tttagagcatcagccgaagatccaa

SEQ ID NO: 5030573 - DNA, 25 bp, Homo sapien
atttagagcatcagccgaagatcca

SEQ ID NO: 5030574 - DNA, 25 bp, Homo sapien
gaaggcacagcgtcaggcaatcctt

SEQ ID NO: 5030575 - DNA, 25 bp, Homo sapien
ggagaaggagcagccacattacttg

SEQ ID NO: 5030576 - DNA, 25 bp, Homo sapien
ggcaatccttgctgaccactggagc

SEQ ID NO: 5030577 - DNA, 25 bp, Homo sapien
tggacaaacacttaggaaatagatg

SEQ ID NO: 5030578 - DNA, 25 bp, Homo sapien
gatacagtaatttaggaggaggagc

SEQ ID NO: 5030579 - DNA, 25 bp, Homo sapien
tggatacagtaatttaggaggagga

SEQ ID NO: 5030580 - DNA, 25 bp, Homo sapien
tacagtaatttaggaggaggagctt

SEQ ID NO: 5030581 - DNA, 25 bp, Homo sapien
gtaatttaggaggaggagcttgtcc

SEQ ID NO: 5030582 - DNA, 25 bp, Homo sapien
cacttgaaccaagaccatcacagga

SEQ ID NO: 5030583 - DNA, 25 bp, Homo sapien
aaaagggaggatgtttatcactggg

SEQ ID NO: 5030584 - DNA, 25 bp, Homo sapien
aatttcttcatggaccagaatggag

SEQ ID NO: 5030585 - DNA, 25 bp, Homo sapien
cactgggatctagaactctggcttc

SEQ ID NO: 5030586 - DNA, 25 bp, Homo sapien
cctgtggcagacttagaaggtggag

SEQ ID NO: 5030587 - DNA, 25 bp, Homo sapien
atgcctgtggcagacttagaaggtg

SEQ ID NO: 5030588 - DNA, 25 bp, Homo sapien
tgtggcagacttagaaggtggagga

SEQ ID NO: 5030589 - DNA, 25 bp, Homo sapien
tggcagacttagaaggtggaggagt

SEQ ID NO: 5030590 - DNA, 25 bp, Homo sapien
gggcctccattcacaatccaatttg

SEQ ID NO: 5030591 - DNA, 25 bp, Homo sapien
caatttgccttagcgcctgtgccca

SEQ ID NO: 5030592 - DNA, 25 bp, Homo sapien
atccaatttgccttagcgcctgtgc

SEQ ID NO: 5030593 - DNA, 25 bp, Homo sapien
ggcctccattcacaatccaatttgc

SEQ ID NO: 5030594 - DNA, 25 bp, Homo sapien
aggaattctatggtctcttgggtga

SEQ ID NO: 5030595 - DNA, 25 bp, Homo sapien
taagttcagcaacaatcacttggcc

SEQ ID NO: 5030596 - DNA, 25 bp, Homo sapien
ctttcgacacaggtaagttcagcaa

SEQ ID NO: 5030597 - DNA, 25 bp, Homo sapien
cctggtgccaggaattctatggtct

SEQ ID NO: 5030598 - DNA, 25 bp, Homo sapien
gggaatcaggtgatgtattgtacat

SEQ ID NO: 5030599 - DNA, 25 bp, Homo sapien
ggatgatgccgggagaattgttaaa

SEQ ID NO: 5030600 - DNA, 25 bp, Homo sapien
gaatcaggtgatgtattgtacatca

SEQ ID NO: 5030601 - DNA, 25 bp, Homo sapien
caaaattcagggatgatgccgggag

SEQ ID NO: 5030602 - DNA, 25 bp, Homo sapien
tctgcctttttagattagacttaga

SEQ ID NO: 5030603 - DNA, 25 bp, Homo sapien
ttactcaccattagtccacatttag

SEQ ID NO: 5030604 - DNA, 25 bp, Homo sapien
ttatcctcgcattttactcaccatt

SEQ ID NO: 5030605 - DNA, 25 bp, Homo sapien
acatttagagagcattttctgcctt

SEQ ID NO: 5030606 - DNA, 25 bp, Homo sapien
tccaatgggtaagcaccattctttc

SEQ ID NO: 5030607 - DNA, 25 bp, Homo sapien
aagggttattgcacagtaactctac

SEQ ID NO: 5030608 - DNA, 25 bp, Homo sapien
ttccaaagaggttatgattttatta

SEQ ID NO: 5030609 - DNA, 25 bp, Homo sapien
agtgtatgcaagaatccaatgggta

SEQ ID NO: 5030610 - DNA, 25 bp, Homo sapien
ttcacactgagatgaaattactttg

SEQ ID NO: 5030611 - DNA, 25 bp, Homo sapien
cttttccatttcacactgagatgaa

SEQ ID NO: 5030612 - DNA, 25 bp, Homo sapien
ttttccatttcacactgagatgaaa

SEQ ID NO: 5030613 - DNA, 25 bp, Homo sapien
catttcacactgagatgaaattact

SEQ ID NO: 5030614 - DNA, 25 bp, Homo sapien
gatgtcatccttaaagatgtcaaat

SEQ ID NO: 5030615 - DNA, 25 bp, Homo sapien
tccctttgggtcatgaattagcata

SEQ ID NO: 5030616 - DNA, 25 bp, Homo sapien
aatcttccttgagccgtactggaaa

SEQ ID NO: 5030617 - DNA, 25 bp, Homo sapien
catgaattagcatagttgtgcaatg

SEQ ID NO: 5030618 - DNA, 25 bp, Homo sapien
tcacaagccttaagaaccaaaatca

SEQ ID NO: 5030619 - DNA, 25 bp, Homo sapien
ttcttggtctgaagtaaactggcca

SEQ ID NO: 5030620 - DNA, 25 bp, Homo sapien
gagatttagctttcagcccttggct

SEQ ID NO: 5030621 - DNA, 25 bp, Homo sapien
aaaatcaactcaagagatttagctt

SEQ ID NO: 5030622 - DNA, 25 bp, Homo sapien
tcaccatttcatcctgtgtctttcg

SEQ ID NO: 5030623 - DNA, 25 bp, Homo sapien
ctttcgtggatcaattttatggcat

SEQ ID NO: 5030624 - DNA, 25 bp, Homo sapien
tcctgtgtctttcgtggatcaattt

SEQ ID NO: 5030625 - DNA, 25 bp, Homo sapien
acttcaccatttcatcctgtgtctt

SEQ ID NO: 5030626 - DNA, 25 bp, Homo sapien
gaagcaccacagtactagcagtact

SEQ ID NO: 5030627 - DNA, 25 bp, Homo sapien
tgtagaagcaccacagtactagcag

SEQ ID NO: 5030628 - DNA, 25 bp, Homo sapien
tactaccaattgaaattggcttgaa

SEQ ID NO: 5030629 - DNA, 25 bp, Homo sapien
gtactagcagtactaccaattgaaa

SEQ ID NO: 5030630 - DNA, 25 bp, Homo sapien
agtcacaggcttccaagttggaagg

SEQ ID NO: 5030631 - DNA, 25 bp, Homo sapien
gagtgcatctcagtcatccaacagg

SEQ ID NO: 5030632 - DNA, 25 bp, Homo sapien
taagtgaactcagggtcacccagtg

SEQ ID NO: 5030633 - DNA, 25 bp, Homo sapien
cacccagtgtgttcccaattagttc

SEQ ID NO: 5030634 - DNA, 25 bp, Homo sapien
ctttccttgtaggtggaaagtcgca

SEQ ID NO: 5030635 - DNA, 25 bp, Homo sapien
ccttgtaggtggaaagtcgcaagta

SEQ ID NO: 5030636 - DNA, 25 bp, Homo sapien
taatccaccgagctgttaacagcca

SEQ ID NO: 5030637 - DNA, 25 bp, Homo sapien
taatcgtgaactccataatccaccg

SEQ ID NO: 5030638 - DNA, 25 bp, Homo sapien
tctatgggtagaggtgactttcaca

SEQ ID NO: 5030639 - DNA, 25 bp, Homo sapien
tgatttctgataacagccgctgtgt

SEQ ID NO: 5030640 - DNA, 25 bp, Homo sapien
gcttcacaggccataaaatcatttg

SEQ ID NO: 5030641 - DNA, 25 bp, Homo sapien
ggtatcggtatgtggagtcctcagt

SEQ ID NO: 5030642 - DNA, 25 bp, Homo sapien
aacgtggaagaatttagcaggagag

SEQ ID NO: 5030643 - DNA, 25 bp, Homo sapien
cgtggaagaatttagcaggagagtc

SEQ ID NO: 5030644 - DNA, 25 bp, Homo sapien
tcaaaacgtggaagaatttagcagg

SEQ ID NO: 5030645 - DNA, 25 bp, Homo sapien
aaaacgtggaagaatttagcaggag

SEQ ID NO: 5030646 - DNA, 25 bp, Homo sapien
tgggccaggtcaggtcccactttac

SEQ ID NO: 5030647 - DNA, 25 bp, Homo sapien
gctcgtcgcacttcatacgctactg

SEQ ID NO: 5030648 - DNA, 25 bp, Homo sapien
ccatcaactatcatctgtgtacgtg

SEQ ID NO: 5030649 - DNA, 25 bp, Homo sapien
tattcagtgatctcttagcatgaag

SEQ ID NO: 5030650 - DNA, 25 bp, Homo sapien
cctggatttagcatggacttcactg

SEQ ID NO: 5030651 - DNA, 25 bp, Homo sapien
ctctccatatcagaaagggcctggg

SEQ ID NO: 5030652 - DNA, 25 bp, Homo sapien
gggatccttctggataatatgtagg

SEQ ID NO: 5030653 - DNA, 25 bp, Homo sapien
ctggataatatgtaggtttcttccc

SEQ ID NO: 5030654 - DNA, 25 bp, Homo sapien
cgagctgtttgggtggagagtcgac

SEQ ID NO: 5030655 - DNA, 25 bp, Homo sapien
tcatcgagctgtttgggtggagagt

SEQ ID NO: 5030656 - DNA, 25 bp, Homo sapien
gagctgtttgggtggagagtcgacc

SEQ ID NO: 5030657 - DNA, 25 bp, Homo sapien
atcgagctgtttgggtggagagtcg

SEQ ID NO: 5030658 - DNA, 25 bp, Homo sapien
tcctccagtaggaaagaatggcgcc

SEQ ID NO: 5030659 - DNA, 25 bp, Homo sapien
tgccgccctgcaagaaactcaaaaa

SEQ ID NO: 5030660 - DNA, 25 bp, Homo sapien
tccaaaagcctgcaaaacggcagca

SEQ ID NO: 5030661 - DNA, 25 bp, Homo sapien
gcacttgacatctacgcttaagcgt

SEQ ID NO: 5030662 - DNA, 25 bp, Homo sapien
ttaagattcattgttgcggtcataa

SEQ ID NO: 5030663 - DNA, 25 bp, Homo sapien
tcattgttgcggtcataagttgaaa

SEQ ID NO: 5030664 - DNA, 25 bp, Homo sapien
tgttgcggtcataagttgaaaggag

SEQ ID NO: 5030665 - DNA, 25 bp, Homo sapien
taagattcattgttgcggtcataag

SEQ ID NO: 5030666 - DNA, 25 bp, Homo sapien
tgaaatccttatcttcagttaatat

SEQ ID NO: 5030667 - DNA, 25 bp, Homo sapien
ctgaaatccttatcttcagttaata

SEQ ID NO: 5030668 - DNA, 25 bp, Homo sapien
gaaatccttatcttcagttaatata

SEQ ID NO: 5030669 - DNA, 25 bp, Homo sapien
cccagccatgatggacttggattca

SEQ ID NO: 5030670 - DNA, 25 bp, Homo sapien
gacagtactagagattctcttttcg

SEQ ID NO: 5030671 - DNA, 25 bp, Homo sapien
cttgacctgacagtactagagattc

SEQ ID NO: 5030672 - DNA, 25 bp, Homo sapien
tgacctgacagtactagagattctc

SEQ ID NO: 5030673 - DNA, 25 bp, Homo sapien
cctgacagtactagagattctcttt

SEQ ID NO: 5030674 - DNA, 25 bp, Homo sapien
gaatctctgggtacatgcgctcctc

SEQ ID NO: 5030675 - DNA, 25 bp, Homo sapien
caaatgttagcgtccctctgaatgc

SEQ ID NO: 5030676 - DNA, 25 bp, Homo sapien
tacatgcgctcctctagttcaaggg

SEQ ID NO: 5030677 - DNA, 25 bp, Homo sapien
cgtgatcccataggacaggttggac

SEQ ID NO: 5030678 - DNA, 25 bp, Homo sapien
tgcttcaccagtaacctctgcacac

SEQ ID NO: 5030679 - DNA, 25 bp, Homo sapien
cctgagggtagaccaatgtggaaac

SEQ ID NO: 5030680 - DNA, 25 bp, Homo sapien
tgagggtagaccaatgtggaaacct

SEQ ID NO: 5030681 - DNA, 25 bp, Homo sapien
ctgcaggctggcacccttggggata

SEQ ID NO: 5030682 - DNA, 25 bp, Homo sapien
agggtagaccaatgtggaaacctct

SEQ ID NO: 5030683 - DNA, 25 bp, Homo sapien
agggaaggtggaaaagagacaggag

SEQ ID NO: 5030684 - DNA, 25 bp, Homo sapien
tgtagggaaggtggaaaagagacag

SEQ ID NO: 5030685 - DNA, 25 bp, Homo sapien
ctgtagggaaggtggaaaagagaca

SEQ ID NO: 5030686 - DNA, 25 bp, Homo sapien
tagggaaggtggaaaagagacagga

SEQ ID NO: 5030687 - DNA, 25 bp, Homo sapien
taaagtttaagtctatcatagatag

SEQ ID NO: 5030688 - DNA, 25 bp, Homo sapien
tgtctaccaagaagtctgagtgcag

SEQ ID NO: 5030689 - DNA, 25 bp, Homo sapien
tagggtactggagtcctatacacca

SEQ ID NO: 5030690 - DNA, 25 bp, Homo sapien
gatactgctggtgtgcaatatgtat

SEQ ID NO: 5030691 - DNA, 25 bp, Homo sapien
gctccagtgaattactcggtagctt

SEQ ID NO: 5030692 - DNA, 25 bp, Homo sapien
ctccagtgaattactcggtagcttc

SEQ ID NO: 5030693 - DNA, 25 bp, Homo sapien
gtgaattactcggtagcttcaatgg

SEQ ID NO: 5030694 - DNA, 25 bp, Homo sapien
ggtagcttcaatggcttgggatccc

SEQ ID NO: 5030695 - DNA, 25 bp, Homo sapien
ctacctgttgtaccccagcacacca

SEQ ID NO: 5030696 - DNA, 25 bp, Homo sapien
ggcctctacctgttgtaccccagca

SEQ ID NO: 5030697 - DNA, 25 bp, Homo sapien
gtccttccggcctctacctgttgta

SEQ ID NO: 5030698 - DNA, 25 bp, Homo sapien
tgtccttccggcctctacctgttgt

SEQ ID NO: 5030699 - DNA, 25 bp, Homo sapien
gagtatggtgtcaagataacagtca

SEQ ID NO: 5030700 - DNA, 25 bp, Homo sapien
cagtcatatcattcgtcattgcaga

SEQ ID NO: 5030701 - DNA, 25 bp, Homo sapien
cctgggcttcttacaagtccttgtg

SEQ ID NO: 5030702 - DNA, 25 bp, Homo sapien
cagtttcaacatgggagagtatggt

SEQ ID NO: 5030703 - DNA, 25 bp, Homo sapien
tcccacaggtgttcttctgctgcca

SEQ ID NO: 5030704 - DNA, 25 bp, Homo sapien
ttagtcttcaatgactttcccacag

SEQ ID NO: 5030705 - DNA, 25 bp, Homo sapien
tttcccacaggtgttcttctgctgc

SEQ ID NO: 5030706 - DNA, 25 bp, Homo sapien
tgactttcccacaggtgttcttctg

SEQ ID NO: 5030707 - DNA, 25 bp, Homo sapien
cccaactgctgataacaatgttaaa

SEQ ID NO: 5030708 - DNA, 25 bp, Homo sapien
aaaggccatgtttccggctctccct

SEQ ID NO: 5030709 - DNA, 25 bp, Homo sapien
cctcccaactgctgataacaatgtt

SEQ ID NO: 5030710 - DNA, 25 bp, Homo sapien
gcctcccaactgctgataacaatgt

SEQ ID NO: 5030711 - DNA, 25 bp, Homo sapien
ttggcattctaagccttggcacctg

SEQ ID NO: 5030712 - DNA, 25 bp, Homo sapien
tctaattggcattctaagccttggc

SEQ ID NO: 5030713 - DNA, 25 bp, Homo sapien
tattacgtgtctgtctagagcctgc

SEQ ID NO: 5030714 - DNA, 25 bp, Homo sapien
taactgatttaagggtacagcaatg

SEQ ID NO: 5030715 - DNA, 25 bp, Homo sapien
agggactcgcctaagcacaagcctc

SEQ ID NO: 5030716 - DNA, 25 bp, Homo sapien
accacatgagggcatacttcagtca

SEQ ID NO: 5030717 - DNA, 25 bp, Homo sapien
ggaagatagtcatcactggctgcat

SEQ ID NO: 5030718 - DNA, 25 bp, Homo sapien
aaggatgactcccacagattgtact

SEQ ID NO: 5030719 - DNA, 25 bp, Homo sapien
taagtaagttcccatctgccacatg

SEQ ID NO: 5030720 - DNA, 25 bp, Homo sapien
gttctgctccggtactacccaaagc

SEQ ID NO: 5030721 - DNA, 25 bp, Homo sapien
attaaagcctcttcttcgctcagcc

SEQ ID NO: 5030722 - DNA, 25 bp, Homo sapien
gctttggttctgctccggtactacc

SEQ ID NO: 5030723 - DNA, 25 bp, Homo sapien
tcgctcagccctcaaggcggcatct

SEQ ID NO: 5030724 - DNA, 25 bp, Homo sapien
taaaattgagcattctttgtagaaa

SEQ ID NO: 5030725 - DNA, 25 bp, Homo sapien
aaaattgagcattctttgtagaaaa

SEQ ID NO: 5030726 - DNA, 25 bp, Homo sapien
ttaaaattgagcattctttgtagaa

SEQ ID NO: 5030727 - DNA, 25 bp, Homo sapien
catggtagctgccttcacattcgga

SEQ ID NO: 5030728 - DNA, 25 bp, Homo sapien
taatgtgttgttcccttaaggacag

SEQ ID NO: 5030729 - DNA, 25 bp, Homo sapien
ggagatggtagaagctgttccccaa

SEQ ID NO: 5030730 - DNA, 25 bp, Homo sapien
cggacaacctgttgggattggagat

SEQ ID NO: 5030731 - DNA, 25 bp, Homo sapien
tgctcctttttggaaacgagggcca

SEQ ID NO: 5030732 - DNA, 25 bp, Homo sapien
tgtgcagcattgagagacatgagca

SEQ ID NO: 5030733 - DNA, 25 bp, Homo sapien
gatagtttctctcgaaaccccagca

SEQ ID NO: 5030734 - DNA, 25 bp, Homo sapien
gacatgagcaactgagctgcaggag

SEQ ID NO: 5030735 - DNA, 25 bp, Homo sapien
cacatagatcattatgtggctcata

SEQ ID NO: 5030736 - DNA, 25 bp, Homo sapien
tagatcattatgtggctcatacatc

SEQ ID NO: 5030737 - DNA, 25 bp, Homo sapien
acatagatcattatgtggctcatac

SEQ ID NO: 5030738 - DNA, 25 bp, Homo sapien
catagatcattatgtggctcataca

SEQ ID NO: 5030739 - DNA, 25 bp, Homo sapien
ctgcctggaaatcctgttccttcct

SEQ ID NO: 5030740 - DNA, 25 bp, Homo sapien
gcctggaaatcctgttccttcctca

SEQ ID NO: 5030741 - DNA, 25 bp, Homo sapien
cctggaaatcctgttccttcctcat

SEQ ID NO: 5030742 - DNA, 25 bp, Homo sapien
tgcctggaaatcctgttccttcctc

SEQ ID NO: 5030743 - DNA, 25 bp, Homo sapien
gacttgatagggaaatgaaggcata

SEQ ID NO: 5030744 - DNA, 25 bp, Homo sapien
tgacttagaaggacagacatgccga

SEQ ID NO: 5030745 - DNA, 25 bp, Homo sapien
tcccaaccaggagctgagctagctg

SEQ ID NO: 5030746 - DNA, 25 bp, Homo sapien
gattggcttccgcttggtctcccaa

SEQ ID NO: 5030747 - DNA, 25 bp, Homo sapien
tcaagtaagactgtaactgccactg

SEQ ID NO: 5030748 - DNA, 25 bp, Homo sapien
agtaagactgtaactgccactgaag

SEQ ID NO: 5030749 - DNA, 25 bp, Homo sapien
aacggtctgggtggaagtcatcacc

SEQ ID NO: 5030750 - DNA, 25 bp, Homo sapien
agggaagtggctgcaaacggtctgg

SEQ ID NO: 5030751 - DNA, 25 bp, Homo sapien
agtgctcagttgaccataatacccg

SEQ ID NO: 5030752 - DNA, 25 bp, Homo sapien
tgtggacagtgctcagttgaccata

SEQ ID NO: 5030753 - DNA, 25 bp, Homo sapien
ttgaccataatacccgtcttcacag

SEQ ID NO: 5030754 - DNA, 25 bp, Homo sapien
gctcagttgaccataatacccgtct

SEQ ID NO: 5030755 - DNA, 25 bp, Homo sapien
ccgatggagctcctcagtgtaagct

SEQ ID NO: 5030756 - DNA, 25 bp, Homo sapien
agtagaggcacgacctggaagagca

SEQ ID NO: 5030757 - DNA, 25 bp, Homo sapien
taagctacacaacgatgccctttcc

SEQ ID NO: 5030758 - DNA, 25 bp, Homo sapien
cagagccctgcattagccgatggag

SEQ ID NO: 5030759 - DNA, 25 bp, Homo sapien
ctgctgctgtttgcttcagttccac

SEQ ID NO: 5030760 - DNA, 25 bp, Homo sapien
aggtttttctccctggcacagctgc

SEQ ID NO: 5030761 - DNA, 25 bp, Homo sapien
tttgcttcagttccacttccctcag

SEQ ID NO: 5030762 - DNA, 25 bp, Homo sapien
tgcttcagttccacttccctcagca

SEQ ID NO: 5030763 - DNA, 25 bp, Homo sapien
caatgctgctgttgaccggctggtt

SEQ ID NO: 5030764 - DNA, 25 bp, Homo sapien
tgtgttctgcgaaagtggacctggc

SEQ ID NO: 5030765 - DNA, 25 bp, Homo sapien
tctggaggcaatagctgccgtggcc

SEQ ID NO: 5030766 - DNA, 25 bp, Homo sapien
ctgcagtaacagtggcagaggtccc

SEQ ID NO: 5030767 - DNA, 25 bp, Homo sapien
atgctgtggcactgttctggaagtc

SEQ ID NO: 5030768 - DNA, 25 bp, Homo sapien
agcagcggcagctccccaagtgggc

SEQ ID NO: 5030769 - DNA, 25 bp, Homo sapien
tgggctgatgctgtggcactgttct

SEQ ID NO: 5030770 - DNA, 25 bp, Homo sapien
agctccccaagtgggctgatgctgt

SEQ ID NO: 5030771 - DNA, 25 bp, Homo sapien
taatcgtcagtgaaatgttgagcac

SEQ ID NO: 5030772 - DNA, 25 bp, Homo sapien
tttggagtgtgaagtaatgaagacg

SEQ ID NO: 5030773 - DNA, 25 bp, Homo sapien
tgagggtgacccagtggcagtttca

SEQ ID NO: 5030774 - DNA, 25 bp, Homo sapien
gagcacagctggattttctaagcca

SEQ ID NO: 5030775 - DNA, 25 bp, Homo sapien
gatgggcagataaatactccaggag

SEQ ID NO: 5030776 - DNA, 25 bp, Homo sapien
ctgtccacaaatccagacaacggat

SEQ ID NO: 5030777 - DNA, 25 bp, Homo sapien
acaacggatgggcagataaatactc

SEQ ID NO: 5030778 - DNA, 25 bp, Homo sapien
tccacaaatccagacaacggatggg

SEQ ID NO: 5030779 - DNA, 25 bp, Homo sapien
ctttgtatgaatttcctgctgctgc

SEQ ID NO: 5030780 - DNA, 25 bp, Homo sapien
tacctttgtatgaatttcctgctgc

SEQ ID NO: 5030781 - DNA, 25 bp, Homo sapien
ccgaatacctttgtatgaatttcct

SEQ ID NO: 5030782 - DNA, 25 bp, Homo sapien
gaatacctttgtatgaatttcctgc

SEQ ID NO: 5030783 - DNA, 25 bp, Homo sapien
agggagcactcctctcacgagaaag

SEQ ID NO: 5030784 - DNA, 25 bp, Homo sapien
tgtaattctccaagaggtcgctgag

SEQ ID NO: 5030785 - DNA, 25 bp, Homo sapien
acagtgtcagagctcaaggtgaggc

SEQ ID NO: 5030786 - DNA, 25 bp, Homo sapien
gaaaacactcaatgcgaatacagcc

SEQ ID NO: 5030787 - DNA, 25 bp, Homo sapien
tctgttcatcggtgtgtgcaagtga

SEQ ID NO: 5030788 - DNA, 25 bp, Homo sapien
ttcatcggtgtgtgcaagtgatcct

SEQ ID NO: 5030789 - DNA, 25 bp, Homo sapien
tgttcatcggtgtgtgcaagtgatc

SEQ ID NO: 5030790 - DNA, 25 bp, Homo sapien
ctctgttcatcggtgtgtgcaagtg

SEQ ID NO: 5030791 - DNA, 25 bp, Homo sapien
gattctgatacgctctccttgttgg

SEQ ID NO: 5030792 - DNA, 25 bp, Homo sapien
tccaacactggacgggctcagaaaa

SEQ ID NO: 5030793 - DNA, 25 bp, Homo sapien
gaaagtggcagatgatcccaaccat

SEQ ID NO: 5030794 - DNA, 25 bp, Homo sapien
tactacaggccactcatgggacaga

SEQ ID NO: 5030795 - DNA, 25 bp, Homo sapien
agcaggacctcgagtccctctaacg

SEQ ID NO: 5030796 - DNA, 25 bp, Homo sapien
tgtgccgctcgtctctgacagatgc

SEQ ID NO: 5030797 - DNA, 25 bp, Homo sapien
gagcctctccttcgtcaaagtcaaa

SEQ ID NO: 5030798 - DNA, 25 bp, Homo sapien
ttctttcgccctgaagcagcatctg

SEQ ID NO: 5030799 - DNA, 25 bp, Homo sapien
cctttacgttgctctgttctactca

SEQ ID NO: 5030800 - DNA, 25 bp, Homo sapien
tctgttctactcaggacaaaggggt

SEQ ID NO: 5030801 - DNA, 25 bp, Homo sapien
cttctcctttacgttgctctgttct

SEQ ID NO: 5030802 - DNA, 25 bp, Homo sapien
tctcctttacgttgctctgttctac

SEQ ID NO: 5030803 - DNA, 25 bp, Homo sapien
tccctctaagctcatgttctttcaa

SEQ ID NO: 5030804 - DNA, 25 bp, Homo sapien
atgtgccaaatcagttgtagactct

SEQ ID NO: 5030805 - DNA, 25 bp, Homo sapien
ttgtagactctttctcagcagtagt

SEQ ID NO: 5030806 - DNA, 25 bp, Homo sapien
gatgcaaataaactgcatgttccat

SEQ ID NO: 5030807 - DNA, 25 bp, Homo sapien
ttggtagggaggttggaaatctatc

SEQ ID NO: 5030808 - DNA, 25 bp, Homo sapien
tccttaggagtaatgtaagtccgta

SEQ ID NO: 5030809 - DNA, 25 bp, Homo sapien
ggaaatctatcacaaccaatggcag

SEQ ID NO: 5030810 - DNA, 25 bp, Homo sapien
aatgtaagtccgtaatttgtcataa

SEQ ID NO: 5030811 - DNA, 25 bp, Homo sapien
tcagtgcaaggttctgaagtggaac

SEQ ID NO: 5030812 - DNA, 25 bp, Homo sapien
gatgcggtatctacactgctcctgc

SEQ ID NO: 5030813 - DNA, 25 bp, Homo sapien
agtggctgctgcaatcagcacagcc

SEQ ID NO: 5030814 - DNA, 25 bp, Homo sapien
ttgctgttcttttggatgcggtatc

SEQ ID NO: 5030815 - DNA, 25 bp, Homo sapien
aaaacacattgggagcaggaatcca

SEQ ID NO: 5030816 - DNA, 25 bp, Homo sapien
gataccactacacctgagttcgatg

SEQ ID NO: 5030817 - DNA, 25 bp, Homo sapien
tcaaatgccgaacagaagctattcc

SEQ ID NO: 5030818 - DNA, 25 bp, Homo sapien
tagacctggtgctcaatttacgagc

SEQ ID NO: 5030819 - DNA, 25 bp, Homo sapien
agtggctgccacataccaaccagag

SEQ ID NO: 5030820 - DNA, 25 bp, Homo sapien
tcactatgggtaggagggcaaaaca

SEQ ID NO: 5030821 - DNA, 25 bp, Homo sapien
cagagcatatactccacaagggcag

SEQ ID NO: 5030822 - DNA, 25 bp, Homo sapien
tctggttgacaaaaagtgaggcaca

SEQ ID NO: 5030823 - DNA, 25 bp, Homo sapien
ctatgagtacggggactggttgacc

SEQ ID NO: 5030824 - DNA, 25 bp, Homo sapien
gagtacggggactggttgaccatca

SEQ ID NO: 5030825 - DNA, 25 bp, Homo sapien
tatgagtacggggactggttgacca

SEQ ID NO: 5030826 - DNA, 25 bp, Homo sapien
tgagtacggggactggttgaccatc

SEQ ID NO: 5030827 - DNA, 25 bp, Homo sapien
gctcatttgggagcagcgaagtata

SEQ ID NO: 5030828 - DNA, 25 bp, Homo sapien
aattcctgggcaagtacatgaagcc

SEQ ID NO: 5030829 - DNA, 25 bp, Homo sapien
ggcaagtacatgaagcctggacttc

SEQ ID NO: 5030830 - DNA, 25 bp, Homo sapien
ggagcagcgaagtataaaaattcaa

SEQ ID NO: 5030831 - DNA, 25 bp, Homo sapien
aagacactgttatagccaaaatcgg

SEQ ID NO: 5030832 - DNA, 25 bp, Homo sapien
gtgacttcaagagttcatgttaact

SEQ ID NO: 5030833 - DNA, 25 bp, Homo sapien
ttttattatggctagaaagacactg

SEQ ID NO: 5030834 - DNA, 25 bp, Homo sapien
ttcttccaagagttgccctggtgtg

SEQ ID NO: 5030835 - DNA, 25 bp, Homo sapien
ttgcctaagttttgggcagtgaact

SEQ ID NO: 5030836 - DNA, 25 bp, Homo sapien
gatgttctggcagtaagtgtttatc

SEQ ID NO: 5030837 - DNA, 25 bp, Homo sapien
ttctggcagtaagtgtttatctggc

SEQ ID NO: 5030838 - DNA, 25 bp, Homo sapien
agagcttgcctaagttttgggcagt

SEQ ID NO: 5030839 - DNA, 25 bp, Homo sapien
tctggcgctgcatattctcctgctg

SEQ ID NO: 5030840 - DNA, 25 bp, Homo sapien
ggctctggcgctgcatattctcctg

SEQ ID NO: 5030841 - DNA, 25 bp, Homo sapien
gcgctgcatattctcctgctggcga

SEQ ID NO: 5030842 - DNA, 25 bp, Homo sapien
cggctctggcgctgcatattctcct

SEQ ID NO: 5030843 - DNA, 25 bp, Homo sapien
ttagctctataactaaagatggata

SEQ ID NO: 5030844 - DNA, 25 bp, Homo sapien
cttagctctataactaaagatggat

SEQ ID NO: 5030845 - DNA, 25 bp, Homo sapien
tataatatagagtagctaacggtca

SEQ ID NO: 5030846 - DNA, 25 bp, Homo sapien
cactgccaaaccaattatagttagt

SEQ ID NO: 5030847 - DNA, 25 bp, Homo sapien
gtatctcttatttgcataaccttgg

SEQ ID NO: 5030848 - DNA, 25 bp, Homo sapien
ttggcattacaatctgagcttaaca

SEQ ID NO: 5030849 - DNA, 25 bp, Homo sapien
tgctgttgtttactagtattcctca

SEQ ID NO: 5030850 - DNA, 25 bp, Homo sapien
cagcaactgtagattcttccccaaa

SEQ ID NO: 5030851 - DNA, 25 bp, Homo sapien
tcctcatgtatgtgttgtatttaac

SEQ ID NO: 5030852 - DNA, 25 bp, Homo sapien
atttaactatatcttggctcatttc

SEQ ID NO: 5030853 - DNA, 25 bp, Homo sapien
gaaaaaatctgagtcaacttgttac

SEQ ID NO: 5030854 - DNA, 25 bp, Homo sapien
ctttccataccgaacttccaactat

SEQ ID NO: 5030855 - DNA, 25 bp, Homo sapien
aattatagctttgctactgctctaa

SEQ ID NO: 5030856 - DNA, 25 bp, Homo sapien
aagtaaatatactgacaagtcttac

SEQ ID NO: 5030857 - DNA, 25 bp, Homo sapien
cagtaatcacaggaaagaaccacac

SEQ ID NO: 5030858 - DNA, 25 bp, Homo sapien
tattgcagctcagttaccaacatcg

SEQ ID NO: 5030859 - DNA, 25 bp, Homo sapien
catggtaacgcctggacagctacta

SEQ ID NO: 5030860 - DNA, 25 bp, Homo sapien
aaacatgatgaagaggctcctttcc

SEQ ID NO: 5030861 - DNA, 25 bp, Homo sapien
gaaattgtggtgacttgaactagga

SEQ ID NO: 5030862 - DNA, 25 bp, Homo sapien
tttgggttcccgttcagggtgatga

SEQ ID NO: 5030863 - DNA, 25 bp, Homo sapien
ggcagagcaggcaatctttatttga

SEQ ID NO: 5030864 - DNA, 25 bp, Homo sapien
tctggcagctggttactacatttac

SEQ ID NO: 5030865 - DNA, 25 bp, Homo sapien
ctggcaaggctgagcaattcatgtt

SEQ ID NO: 5030866 - DNA, 25 bp, Homo sapien
gttcccacattaggacattgatcag

SEQ ID NO: 5030867 - DNA, 25 bp, Homo sapien
tacaatcggcacttcttcaaacatg

SEQ ID NO: 5030868 - DNA, 25 bp, Homo sapien
aattcatgtttatctgcaacagctg

SEQ ID NO: 5030869 - DNA, 25 bp, Homo sapien
ctgtatgcctttagtgagagagatc

SEQ ID NO: 5030870 - DNA, 25 bp, Homo sapien
ggagtcagtctgtatgcctttagtg

SEQ ID NO: 5030871 - DNA, 25 bp, Homo sapien
gtcagtctgtatgcctttagtgaga

SEQ ID NO: 5030872 - DNA, 25 bp, Homo sapien
cagtctgtatgcctttagtgagaga

SEQ ID NO: 5030873 - DNA, 25 bp, Homo sapien
tcctcagcaagaactagtaaccttg

SEQ ID NO: 5030874 - DNA, 25 bp, Homo sapien
gcacattctgttacatatcgcacaa

SEQ ID NO: 5030875 - DNA, 25 bp, Homo sapien
gaagcagactcaaagcactattgca

SEQ ID NO: 5030876 - DNA, 25 bp, Homo sapien
tggcattggttctaggcacattctg

SEQ ID NO: 5030877 - DNA, 25 bp, Homo sapien
gctaaccgctgaaacactccatgag

SEQ ID NO: 5030878 - DNA, 25 bp, Homo sapien
acttgctgcatgataacggctctgg

SEQ ID NO: 5030879 - DNA, 25 bp, Homo sapien
gtaagggagcttagcacttgctgca

SEQ ID NO: 5030880 - DNA, 25 bp, Homo sapien
caaggtctgatgatgcaatgtttcc

SEQ ID NO: 5030881 - DNA, 25 bp, Homo sapien
ttgcctacagttctgatacagcaca

SEQ ID NO: 5030882 - DNA, 25 bp, Homo sapien
gctggaaactatatgcaagtctgcc

SEQ ID NO: 5030883 - DNA, 25 bp, Homo sapien
ctgccagatatggcaaactgtgagt

SEQ ID NO: 5030884 - DNA, 25 bp, Homo sapien
ctataaagctgttaaattgcctaca

SEQ ID NO: 5030885 - DNA, 25 bp, Homo sapien
gattggtcagtcacgtacagagcca

SEQ ID NO: 5030886 - DNA, 25 bp, Homo sapien
agagccagacactctagcaatcggg

SEQ ID NO: 5030887 - DNA, 25 bp, Homo sapien
acttgagaaggcctgccagactgct

SEQ ID NO: 5030888 - DNA, 25 bp, Homo sapien
gaaacagtccaggttttgtacgctg

SEQ ID NO: 5030889 - DNA, 25 bp, Homo sapien
gagtgcccgggtaacgaatgagcca

SEQ ID NO: 5030890 - DNA, 25 bp, Homo sapien
aaactgagagtccaggagtgcccgg

SEQ ID NO: 5030891 - DNA, 25 bp, Homo sapien
tggactgataccagcccacgtgaag

SEQ ID NO: 5030892 - DNA, 25 bp, Homo sapien
caatgtttacatggcgaaggctccg

SEQ ID NO: 5030893 - DNA, 25 bp, Homo sapien
ggtggactgtccaacaactatccct

SEQ ID NO: 5030894 - DNA, 25 bp, Homo sapien
gatgcagttgagctcgtgccgcaaa

SEQ ID NO: 5030895 - DNA, 25 bp, Homo sapien
taaagcacctagagctaaatctgtc

SEQ ID NO: 5030896 - DNA, 25 bp, Homo sapien
ggaaagcctgctttacaacactgaa

SEQ ID NO: 5030897 - DNA, 25 bp, Homo sapien
taacaaggaacgaagttctgatgta

SEQ ID NO: 5030898 - DNA, 25 bp, Homo sapien
aacgaagttctgatgtatgctgcac

SEQ ID NO: 5030899 - DNA, 25 bp, Homo sapien
gatgtatgctgcactatgaatgaac

SEQ ID NO: 5030900 - DNA, 25 bp, Homo sapien
caaggaacgaagttctgatgtatgc

SEQ ID NO: 5030901 - DNA, 25 bp, Homo sapien
gaaaaggctgtaatagcagacattt

SEQ ID NO: 5030902 - DNA, 25 bp, Homo sapien
tgaaaaggctgtaatagcagacatt

SEQ ID NO: 5030903 - DNA, 25 bp, Homo sapien
aaaaggctgtaatagcagacattta

SEQ ID NO: 5030904 - DNA, 25 bp, Homo sapien
aaaggctgtaatagcagacatttaa

SEQ ID NO: 5030905 - DNA, 25 bp, Homo sapien
tacaaaacatatgaggcagaacagc

SEQ ID NO: 5030906 - DNA, 25 bp, Homo sapien
ttagggcacagagataacagtagtc

SEQ ID NO: 5030907 - DNA, 25 bp, Homo sapien
tagtctcactgtggacagccctggc

SEQ ID NO: 5030908 - DNA, 25 bp, Homo sapien
tatcatgcttagtcttctcgaggaa

SEQ ID NO: 5030909 - DNA, 25 bp, Homo sapien
gtccctggtgaatctcactctctta

SEQ ID NO: 5030910 - DNA, 25 bp, Homo sapien
ggggttgacagatcaccccaaagga

SEQ ID NO: 5030911 - DNA, 25 bp, Homo sapien
ctctcttagtgtccaaccaaattct

SEQ ID NO: 5030912 - DNA, 25 bp, Homo sapien
ctttttccaggggttgacagatcac

SEQ ID NO: 5030913 - DNA, 25 bp, Homo sapien
taccagaaacctctagctgagcttg

SEQ ID NO: 5030914 - DNA, 25 bp, Homo sapien
gggcataccctatatacttcaaata

SEQ ID NO: 5030915 - DNA, 25 bp, Homo sapien
gtctactgaataaagattggtcttg

SEQ ID NO: 5030916 - DNA, 25 bp, Homo sapien
ggccctgattactttgaattatgca

SEQ ID NO: 5030917 - DNA, 25 bp, Homo sapien
ggccggaagacatccataagtaaaa

SEQ ID NO: 5030918 - DNA, 25 bp, Homo sapien
ttatatagtttgatcagggaggccg

SEQ ID NO: 5030919 - DNA, 25 bp, Homo sapien
caaagatcaaatgcaagtatggctt

SEQ ID NO: 5030920 - DNA, 25 bp, Homo sapien
gccaaaagatggaacgtctctgtcc

SEQ ID NO: 5030921 - DNA, 25 bp, Homo sapien
gatatcctcggcgtcaataatcaga

SEQ ID NO: 5030922 - DNA, 25 bp, Homo sapien
caggaagatatcctcggcgtcaata

SEQ ID NO: 5030923 - DNA, 25 bp, Homo sapien
caaacaggaagatatcctcggcgtc

SEQ ID NO: 5030924 - DNA, 25 bp, Homo sapien
atcctcggcgtcaataatcagataa

SEQ ID NO: 5030925 - DNA, 25 bp, Homo sapien
tcatcggtcacaggaaagaagggct

SEQ ID NO: 5030926 - DNA, 25 bp, Homo sapien
catcggtcacaggaaagaagggctg

SEQ ID NO: 5030927 - DNA, 25 bp, Homo sapien
cgaaaggaattagtggctgatagct

SEQ ID NO: 5030928 - DNA, 25 bp, Homo sapien
gctgatagctgagtgttcgcatcat

SEQ ID NO: 5030929 - DNA, 25 bp, Homo sapien
ctctcctgtgaagtcatccccgaaa

SEQ ID NO: 5030930 - DNA, 25 bp, Homo sapien
catccccgaaaggaattagtggctg

SEQ ID NO: 5030931 - DNA, 25 bp, Homo sapien
ctaacccaagtgaagaagcagagaa

SEQ ID NO: 5030932 - DNA, 25 bp, Homo sapien
taacccaagtgaagaagcagagaaa

SEQ ID NO: 5030933 - DNA, 25 bp, Homo sapien
aacccaagtgaagaagcagagaaaa

SEQ ID NO: 5030934 - DNA, 25 bp, Homo sapien
gaaaggaaagcagttggtaatttca

SEQ ID NO: 5030935 - DNA, 25 bp, Homo sapien
aaccagacccaaaagcactccttga

SEQ ID NO: 5030936 - DNA, 25 bp, Homo sapien
tcaagccgatcttctacaaccagac

SEQ ID NO: 5030937 - DNA, 25 bp, Homo sapien
ccttcttcttgataatgtttgatta

SEQ ID NO: 5030938 - DNA, 25 bp, Homo sapien
gaagaaacagcctaagagagaatca

SEQ ID NO: 5030939 - DNA, 25 bp, Homo sapien
gagagaatcaatgcggttgtcagct

SEQ ID NO: 5030940 - DNA, 25 bp, Homo sapien
tgctcccgccaaagtggaaacgaag

SEQ ID NO: 5030941 - DNA, 25 bp, Homo sapien
ccacacggatggtgaagaaacagcc

SEQ ID NO: 5030942 - DNA, 25 bp, Homo sapien
tccaggaagggcttctgagaggata

SEQ ID NO: 5030943 - DNA, 25 bp, Homo sapien
ggggatccaggaagggcttctgaga

SEQ ID NO: 5030944 - DNA, 25 bp, Homo sapien
tagggggatccaggaagggcttctg

SEQ ID NO: 5030945 - DNA, 25 bp, Homo sapien
ccaggaagggcttctgagaggatac

SEQ ID NO: 5030946 - DNA, 25 bp, Homo sapien
aagaacaagccatcagccctatgaa

SEQ ID NO: 5030947 - DNA, 25 bp, Homo sapien
ctgaagaacaagccatcagccctat

SEQ ID NO: 5030948 - DNA, 25 bp, Homo sapien
tgaagaacaagccatcagccctatg

SEQ ID NO: 5030949 - DNA, 25 bp, Homo sapien
gaacaagccatcagccctatgaaaa

SEQ ID NO: 5030950 - DNA, 25 bp, Homo sapien
attttctatctacgtacttgaaggc

SEQ ID NO: 5030951 - DNA, 25 bp, Homo sapien
gcaatattttctatctacgtacttg

SEQ ID NO: 5030952 - DNA, 25 bp, Homo sapien
agcaatattttctatctacgtactt

SEQ ID NO: 5030953 - DNA, 25 bp, Homo sapien
ttctatctacgtacttgaaggcatt

SEQ ID NO: 5030954 - DNA, 25 bp, Homo sapien
acagacacaataaggatctgctgaa

SEQ ID NO: 5030955 - DNA, 25 bp, Homo sapien
aacagacacaataaggatctgctga

SEQ ID NO: 5030956 - DNA, 25 bp, Homo sapien
cagacacaataaggatctgctgaaa

SEQ ID NO: 5030957 - DNA, 25 bp, Homo sapien
tataacttattaacccaactgatgc

SEQ ID NO: 5030958 - DNA, 25 bp, Homo sapien
aaaatatgcctagttacccttatgg

SEQ ID NO: 5030959 - DNA, 25 bp, Homo sapien
ccatccaaggaatatttagtgacta

SEQ ID NO: 5030960 - DNA, 25 bp, Homo sapien
ctttaagacgcatcaatcagctgga

SEQ ID NO: 5030961 - DNA, 25 bp, Homo sapien
gaggaagtgatgaaacaggtctaaa

SEQ ID NO: 5030962 - DNA, 25 bp, Homo sapien
cagatacagaggaagtgatgaaaca

SEQ ID NO: 5030963 - DNA, 25 bp, Homo sapien
ggagggactgctacattacagatac

SEQ ID NO: 5030964 - DNA, 25 bp, Homo sapien
agggactgctacattacagatacag

SEQ ID NO: 5030965 - DNA, 25 bp, Homo sapien
gcctgcattttcaaagtattacaca

SEQ ID NO: 5030966 - DNA, 25 bp, Homo sapien
cccggcctgcattttcaaagtatta

SEQ ID NO: 5030967 - DNA, 25 bp, Homo sapien
ctgcattttcaaagtattacacaag

SEQ ID NO: 5030968 - DNA, 25 bp, Homo sapien
cggcctgcattttcaaagtattaca

SEQ ID NO: 5030969 - DNA, 25 bp, Homo sapien
ttgcttcacggctgaatctcccgag

SEQ ID NO: 5030970 - DNA, 25 bp, Homo sapien
ctgcgccggcggtggagctggaaga

SEQ ID NO: 5030971 - DNA, 25 bp, Homo sapien
gctggaagaggtggcagtagagccg

SEQ ID NO: 5030972 - DNA, 25 bp, Homo sapien
agtagagccggtaccttccttgcgg

SEQ ID NO: 5030973 - DNA, 25 bp, Homo sapien
tccaggcggtatcctttgtgcatgc

SEQ ID NO: 5030974 - DNA, 25 bp, Homo sapien
tctttccaggcggtatcctttgtgc

SEQ ID NO: 5030975 - DNA, 25 bp, Homo sapien
ctttgtgcatgcctactgtacattt

SEQ ID NO: 5030976 - DNA, 25 bp, Homo sapien
actgtacattttcgacctctttccg

SEQ ID NO: 5030977 - DNA, 25 bp, Homo sapien
gactctaggcaaacgaagctcttga

SEQ ID NO: 5030978 - DNA, 25 bp, Homo sapien
tgaacttcaggcacgaaaactgggt

SEQ ID NO: 5030979 - DNA, 25 bp, Homo sapien
tgacagtgaggaagttgaacccagc

SEQ ID NO: 5030980 - DNA, 25 bp, Homo sapien
gatactcgacagttagccacgggag

SEQ ID NO: 5030981 - DNA, 25 bp, Homo sapien
tgacgtaaaccaatgggcaggcccg

SEQ ID NO: 5030982 - DNA, 25 bp, Homo sapien
cagaggcgtttgcttccgtggccaa

SEQ ID NO: 5030983 - DNA, 25 bp, Homo sapien
tggccaaaggcgcttcatttccggg

SEQ ID NO: 5030984 - DNA, 25 bp, Homo sapien
cgcgctggtctggacatgacgtaaa

SEQ ID NO: 5030985 - DNA, 25 bp, Homo sapien
tccaggtaaaattgtcgcctctctg

SEQ ID NO: 5030986 - DNA, 25 bp, Homo sapien
aggtaaaattgtcgcctctctggtc

SEQ ID NO: 5030987 - DNA, 25 bp, Homo sapien
aaaattgtcgcctctctggtcccat

SEQ ID NO: 5030988 - DNA, 25 bp, Homo sapien
tttctccaggtaaaattgtcgcctc

SEQ ID NO: 5030989 - DNA, 25 bp, Homo sapien
cagcagccctgatttcgacagctct

SEQ ID NO: 5030990 - DNA, 25 bp, Homo sapien
tagctagtcaggtaggcagcagccc

SEQ ID NO: 5030991 - DNA, 25 bp, Homo sapien
ttagcatgtgctctccccatccgag

SEQ ID NO: 5030992 - DNA, 25 bp, Homo sapien
cccctgagaatggtggtaaagccag

SEQ ID NO: 5030993 - DNA, 25 bp, Homo sapien
cctgattcatgactgtcagtatcac

SEQ ID NO: 5030994 - DNA, 25 bp, Homo sapien
gtttcatagggtctccagccttcct

SEQ ID NO: 5030995 - DNA, 25 bp, Homo sapien
ctgtttcatagggtctccagccttc

SEQ ID NO: 5030996 - DNA, 25 bp, Homo sapien
ccagccttcctgattcatgactgtc

SEQ ID NO: 5030997 - DNA, 25 bp, Homo sapien
agctctcagcatgcttaactggtct

SEQ ID NO: 5030998 - DNA, 25 bp, Homo sapien
catgcttaactggtcttttactgtc

SEQ ID NO: 5030999 - DNA, 25 bp, Homo sapien
tgcttaactggtcttttactgtcat

SEQ ID NO: 5031000 - DNA, 25 bp, Homo sapien
tcagcatgcttaactggtcttttac

SEQ ID NO: 5031001 - DNA, 25 bp, Homo sapien
ttttataaaaatgtgcaccagagac

SEQ ID NO: 5031002 - DNA, 25 bp, Homo sapien
tgtgcctgtctaaaagctgaccgtc

SEQ ID NO: 5031003 - DNA, 25 bp, Homo sapien
tgaaccaacgacataaggaagcacc

SEQ ID NO: 5031004 - DNA, 25 bp, Homo sapien
tcaaagagtcattctgcctgagagc

SEQ ID NO: 5031005 - DNA, 25 bp, Homo sapien
ttctcacgtaacaatccactggcgc

SEQ ID NO: 5031006 - DNA, 25 bp, Homo sapien
ggcctttacaactggagagtctaat

SEQ ID NO: 5031007 - DNA, 25 bp, Homo sapien
tcacatgtagctctaggcctttaca

SEQ ID NO: 5031008 - DNA, 25 bp, Homo sapien
gacaagttggagtacaagggactga

SEQ ID NO: 5031009 - DNA, 25 bp, Homo sapien
gcagaggaagaggtacagaggacat

SEQ ID NO: 5031010 - DNA, 25 bp, Homo sapien
tgcagaggaagaggtacagaggaca

SEQ ID NO: 5031011 - DNA, 25 bp, Homo sapien
ctgcagaggaagaggtacagaggac

SEQ ID NO: 5031012 - DNA, 25 bp, Homo sapien
tgataattgggcctcaacagtcttt

SEQ ID NO: 5031013 - DNA, 25 bp, Homo sapien
tacaaagggcaggaacttgccagtt

SEQ ID NO: 5031014 - DNA, 25 bp, Homo sapien
tcaacagtcttttacaaagggcagg

SEQ ID NO: 5031015 - DNA, 25 bp, Homo sapien
tgggcctcaacagtcttttacaaag

SEQ ID NO: 5031016 - DNA, 25 bp, Homo sapien
catgccataggcactggacccaaaa

SEQ ID NO: 5031017 - DNA, 25 bp, Homo sapien
gcagttcggcagtggtatttatacc

SEQ ID NO: 5031018 - DNA, 25 bp, Homo sapien
gtatgtggttcccgtccctgtgtcc

SEQ ID NO: 5031019 - DNA, 25 bp, Homo sapien
atgtggttcccgtccctgtgtccat

SEQ ID NO: 5031020 - DNA, 25 bp, Homo sapien
tctaaacccaagttgaacagagatt

SEQ ID NO: 5031021 - DNA, 25 bp, Homo sapien
gattgacaggtctttccgagaagaa

SEQ ID NO: 5031022 - DNA, 25 bp, Homo sapien
catcgtagatgcttttggagttcca

SEQ ID NO: 5031023 - DNA, 25 bp, Homo sapien
gcactgtccgaattttaacctttga

SEQ ID NO: 5031024 - DNA, 25 bp, Homo sapien
gatatggagcaaagaaagggatttc

SEQ ID NO: 5031025 - DNA, 25 bp, Homo sapien
ctaagggggaggatatggagcaaag

SEQ ID NO: 5031026 - DNA, 25 bp, Homo sapien
tctgccagtgcaggtgtggttacat

SEQ ID NO: 5031027 - DNA, 25 bp, Homo sapien
acagcatctgccagtgcaggtgtgg

SEQ ID NO: 5031028 - DNA, 25 bp, Homo sapien
cttcatgtcttgttggaacttggta

SEQ ID NO: 5031029 - DNA, 25 bp, Homo sapien
tcttcatgtcttgttggaacttggt

SEQ ID NO: 5031030 - DNA, 25 bp, Homo sapien
attatcttcatgtcttgttggaact

SEQ ID NO: 5031031 - DNA, 25 bp, Homo sapien
tatcttcatgtcttgttggaacttg

SEQ ID NO: 5031032 - DNA, 25 bp, Homo sapien
cagagatgatgccacgatactggag

SEQ ID NO: 5031033 - DNA, 25 bp, Homo sapien
atgatgccacgatactggaggattc

SEQ ID NO: 5031034 - DNA, 25 bp, Homo sapien
gagatgatgccacgatactggagga

SEQ ID NO: 5031035 - DNA, 25 bp, Homo sapien
gtcagagatgatgccacgatactgg

SEQ ID NO: 5031036 - DNA, 25 bp, Homo sapien
cccctctgtgctgtctgagaggtaa

SEQ ID NO: 5031037 - DNA, 25 bp, Homo sapien
ccctctgtgctgtctgagaggtaat

SEQ ID NO: 5031038 - DNA, 25 bp, Homo sapien
cctctgtgctgtctgagaggtaatt

SEQ ID NO: 5031039 - DNA, 25 bp, Homo sapien
cctggaagaaatgggtaactaatgt

SEQ ID NO: 5031040 - DNA, 25 bp, Homo sapien
tggaagaaatgggtaactaatgttc

SEQ ID NO: 5031041 - DNA, 25 bp, Homo sapien
tgaggtaggggttagcttggtggcc

SEQ ID NO: 5031042 - DNA, 25 bp, Homo sapien
taagagccttttgataggtgaggta

SEQ ID NO: 5031043 - DNA, 25 bp, Homo sapien
tggctgcttcactcatttccatgac

SEQ ID NO: 5031044 - DNA, 25 bp, Homo sapien
ctggctgcttcactcatttccatga

SEQ ID NO: 5031045 - DNA, 25 bp, Homo sapien
gcctggccactaagcgtttgcacac

SEQ ID NO: 5031046 - DNA, 25 bp, Homo sapien
tgcacacatgacctagagcacagct

SEQ ID NO: 5031047 - DNA, 25 bp, Homo sapien
ggccactaagcgtttgcacacatga

SEQ ID NO: 5031048 - DNA, 25 bp, Homo sapien
taagcgtttgcacacatgacctaga

SEQ ID NO: 5031049 - DNA, 25 bp, Homo sapien
gaagccgttagtttttacagcatcg

SEQ ID NO: 5031050 - DNA, 25 bp, Homo sapien
ggatataggatttcgttgcaacgct

SEQ ID NO: 5031051 - DNA, 25 bp, Homo sapien
taaaacgaatctcaagagggtgacc

SEQ ID NO: 5031052 - DNA, 25 bp, Homo sapien
gcgtacacctctgctcattatggaa

SEQ ID NO: 5031053 - DNA, 25 bp, Homo sapien
aactgatagattcagctccagtttt

SEQ ID NO: 5031054 - DNA, 25 bp, Homo sapien
gctgtagaactttgcggcagcttgt

SEQ ID NO: 5031055 - DNA, 25 bp, Homo sapien
tgcggcagcttgttttctgttcgta

SEQ ID NO: 5031056 - DNA, 25 bp, Homo sapien
cgtatttcgacataactcaagcaaa

SEQ ID NO: 5031057 - DNA, 25 bp, Homo sapien
tgtctaggacattaaagcacaagga

SEQ ID NO: 5031058 - DNA, 25 bp, Homo sapien
ggaaaagtaacgtctgatgctacac

SEQ ID NO: 5031059 - DNA, 25 bp, Homo sapien
tccggcttactcttggcctaacagt

SEQ ID NO: 5031060 - DNA, 25 bp, Homo sapien
caaaggagttgtgtggtatgtcacc

SEQ ID NO: 5031061 - DNA, 25 bp, Homo sapien
ctgaagaccatgaagcatctgctga

SEQ ID NO: 5031062 - DNA, 25 bp, Homo sapien
gctgagcaatcacttagcatttaga

SEQ ID NO: 5031063 - DNA, 25 bp, Homo sapien
taaaagctcctaaattaccttgaga

SEQ ID NO: 5031064 - DNA, 25 bp, Homo sapien
gaagtatttctacatctcctaaaag

SEQ ID NO: 5031065 - DNA, 25 bp, Homo sapien
aaagctgacaaaacaagtccaatga

SEQ ID NO: 5031066 - DNA, 25 bp, Homo sapien
tcagtgtaaggacaattccatgtcc

SEQ ID NO: 5031067 - DNA, 25 bp, Homo sapien
gagagccaatgagttacagcgaagc

SEQ ID NO: 5031068 - DNA, 25 bp, Homo sapien
tcagcatcaattaagttagccccaa

SEQ ID NO: 5031069 - DNA, 25 bp, Homo sapien
taatgatgatcaataccacgaagaa

SEQ ID NO: 5031070 - DNA, 25 bp, Homo sapien
tggtattagctgacagatatttgga

SEQ ID NO: 5031071 - DNA, 25 bp, Homo sapien
actctggtattagctgacagatatt

SEQ ID NO: 5031072 - DNA, 25 bp, Homo sapien
tctttttctggcagaagttctaact

SEQ ID NO: 5031073 - DNA, 25 bp, Homo sapien
ctttttctggcagaagttctaactc

SEQ ID NO: 5031074 - DNA, 25 bp, Homo sapien
gaaactgactgcttatcctaaacca

SEQ ID NO: 5031075 - DNA, 25 bp, Homo sapien
caaataataggagtgaggacattgc

SEQ ID NO: 5031076 - DNA, 25 bp, Homo sapien
aactgcctagtactgaaggtgtgca

SEQ ID NO: 5031077 - DNA, 25 bp, Homo sapien
gaacatattctctcactccgagtgg

SEQ ID NO: 5031078 - DNA, 25 bp, Homo sapien
ctgactcatctatgtttgttctgct

SEQ ID NO: 5031079 - DNA, 25 bp, Homo sapien
gctgactcatctatgtttgttctgc

SEQ ID NO: 5031080 - DNA, 25 bp, Homo sapien
ctggaggcggcttggctcttcaata

SEQ ID NO: 5031081 - DNA, 25 bp, Homo sapien
tttgaacagtattatagaaccattt

SEQ ID NO: 5031082 - DNA, 25 bp, Homo sapien
gtacactaagacatacataatgctt

SEQ ID NO: 5031083 - DNA, 25 bp, Homo sapien
cataggtcatacagttttgaacagt

SEQ ID NO: 5031084 - DNA, 25 bp, Homo sapien
tttaaactagtacactaagacatac

SEQ ID NO: 5031085 - DNA, 25 bp, Homo sapien
cctgccagttctgaaccttaaaact

SEQ ID NO: 5031086 - DNA, 25 bp, Homo sapien
aattctttgaggaattcatccaaat

SEQ ID NO: 5031087 - DNA, 25 bp, Homo sapien
aggtcttctggtacaagcggtgtaa

SEQ ID NO: 5031088 - DNA, 25 bp, Homo sapien
cgataacatcacgctgctgatgctg

SEQ ID NO: 5031089 - DNA, 25 bp, Homo sapien
tgctgttgctggtcctctctaggaa

SEQ ID NO: 5031090 - DNA, 25 bp, Homo sapien
atcatcaatttcttggtgggcggtg

SEQ ID NO: 5031091 - DNA, 25 bp, Homo sapien
tgaataatcactaagttgggctcta

SEQ ID NO: 5031092 - DNA, 25 bp, Homo sapien
catcaatttcttggtgggcggtgcc

SEQ ID NO: 5031093 - DNA, 25 bp, Homo sapien
caatatctgaataatcactaagttg

SEQ ID NO: 5031094 - DNA, 25 bp, Homo sapien
ttggttcaacgggatccactgaatc

SEQ ID NO: 5031095 - DNA, 25 bp, Homo sapien
ttggcattggttcaacgggatccac

SEQ ID NO: 5031096 - DNA, 25 bp, Homo sapien
ttgatcagtcatggttggcattggt

SEQ ID NO: 5031097 - DNA, 25 bp, Homo sapien
catggttggcattggttcaacggga

SEQ ID NO: 5031098 - DNA, 25 bp, Homo sapien
atccatatcgtcatgtgcaggctgc

SEQ ID NO: 5031099 - DNA, 25 bp, Homo sapien
ctcatccatatcgtcatgtgcaggc

SEQ ID NO: 5031100 - DNA, 25 bp, Homo sapien
tcatccatatcgtcatgtgcaggct

SEQ ID NO: 5031101 - DNA, 25 bp, Homo sapien
atcctcatccatatcgtcatgtgca

SEQ ID NO: 5031102 - DNA, 25 bp, Homo sapien
gttagaagtagtagtgcttactaac

SEQ ID NO: 5031103 - DNA, 25 bp, Homo sapien
ataggaggttagaagtagtagtgct

SEQ ID NO: 5031104 - DNA, 25 bp, Homo sapien
tatcatccttatattgatcttcata

SEQ ID NO: 5031105 - DNA, 25 bp, Homo sapien
cattatctcacgatcatccattcca

SEQ ID NO: 5031106 - DNA, 25 bp, Homo sapien
ctctactctgattcaagctgaactg

SEQ ID NO: 5031107 - DNA, 25 bp, Homo sapien
ctactctgattcaagctgaactgct

SEQ ID NO: 5031108 - DNA, 25 bp, Homo sapien
cactctactctgattcaagctgaac

SEQ ID NO: 5031109 - DNA, 25 bp, Homo sapien
ccactctactctgattcaagctgaa

SEQ ID NO: 5031110 - DNA, 25 bp, Homo sapien
taaaatgaagagtcacatgtatctc

SEQ ID NO: 5031111 - DNA, 25 bp, Homo sapien
tatgggcaaacttaatcaagaaatg

SEQ ID NO: 5031112 - DNA, 25 bp, Homo sapien
caaaggatgcccaaataatatgggc

SEQ ID NO: 5031113 - DNA, 25 bp, Homo sapien
ggcccagtgatctttgatgctagta

SEQ ID NO: 5031114 - DNA, 25 bp, Homo sapien
cagtttacgtaagctttggcctaag

SEQ ID NO: 5031115 - DNA, 25 bp, Homo sapien
tggcctaagcttgtcaaaactctca

SEQ ID NO: 5031116 - DNA, 25 bp, Homo sapien
tacatttggaagctaatactactgc

SEQ ID NO: 5031117 - DNA, 25 bp, Homo sapien
taaagctgacatccacatgattttc

SEQ ID NO: 5031118 - DNA, 25 bp, Homo sapien
ttcaggtaaagtaatggcattataa

SEQ ID NO: 5031119 - DNA, 25 bp, Homo sapien
tcaggtaaagtaatggcattataag

SEQ ID NO: 5031120 - DNA, 25 bp, Homo sapien
tcttcaggtaaagtaatggcattat

SEQ ID NO: 5031121 - DNA, 25 bp, Homo sapien
cttcaggtaaagtaatggcattata

SEQ ID NO: 5031122 - DNA, 25 bp, Homo sapien
tattctcatagaaaggttgataaca

SEQ ID NO: 5031123 - DNA, 25 bp, Homo sapien
cataaattatctagggatcagaggg

SEQ ID NO: 5031124 - DNA, 25 bp, Homo sapien
tcagagggagataagtaggtataac

SEQ ID NO: 5031125 - DNA, 25 bp, Homo sapien
gctaagcttaaatatctagctaccc

SEQ ID NO: 5031126 - DNA, 25 bp, Homo sapien
tcccagtaagagatgtcctgatgtc

SEQ ID NO: 5031127 - DNA, 25 bp, Homo sapien
aactactcccagtaagagatgtcct

SEQ ID NO: 5031128 - DNA, 25 bp, Homo sapien
tactcccagtaagagatgtcctgat

SEQ ID NO: 5031129 - DNA, 25 bp, Homo sapien
ccagtaagagatgtcctgatgtccg

SEQ ID NO: 5031130 - DNA, 25 bp, Homo sapien
gcatttacagcacttccacgtcggt

SEQ ID NO: 5031131 - DNA, 25 bp, Homo sapien
gggtctcaaataaaagctcctctga

SEQ ID NO: 5031132 - DNA, 25 bp, Homo sapien
tatctagaggtgataaggacttcac

SEQ ID NO: 5031133 - DNA, 25 bp, Homo sapien
ggcattgccctgactgatgcttatt

SEQ ID NO: 5031134 - DNA, 25 bp, Homo sapien
tctaaattacactcgaacacatggg

SEQ ID NO: 5031135 - DNA, 25 bp, Homo sapien
tctctaaattacactcgaacacatg

SEQ ID NO: 5031136 - DNA, 25 bp, Homo sapien
aattacactcgaacacatgggcttt

SEQ ID NO: 5031137 - DNA, 25 bp, Homo sapien
taaattacactcgaacacatgggct

SEQ ID NO: 5031138 - DNA, 25 bp, Homo sapien
tcatctgacaatttaaatacttatc

SEQ ID NO: 5031139 - DNA, 25 bp, Homo sapien
cacaaatatgttactgacattctac

SEQ ID NO: 5031140 - DNA, 25 bp, Homo sapien
ccttcagcactctaatgtattaaga

SEQ ID NO: 5031141 - DNA, 25 bp, Homo sapien
aaatcagggacaatggtacagcaga

SEQ ID NO: 5031142 - DNA, 25 bp, Homo sapien
gactgaaagtcttggaatcacaaat

SEQ ID NO: 5031143 - DNA, 25 bp, Homo sapien
caatatagtatcaaaaccagggcac

SEQ ID NO: 5031144 - DNA, 25 bp, Homo sapien
gagtcacagggagtcatagatagca

SEQ ID NO: 5031145 - DNA, 25 bp, Homo sapien
gactagaaaatgatatatgccttgc

SEQ ID NO: 5031146 - DNA, 25 bp, Homo sapien
catatgcagatgtgtataatcacca

SEQ ID NO: 5031147 - DNA, 25 bp, Homo sapien
gaaatgcaaagacaagctatagact

SEQ ID NO: 5031148 - DNA, 25 bp, Homo sapien
acttttgctctacgaaagaaatgca

SEQ ID NO: 5031149 - DNA, 25 bp, Homo sapien
gttcttgctcaataaactcgccttt

SEQ ID NO: 5031150 - DNA, 25 bp, Homo sapien
gattaaatacgatctgaagaccaga

SEQ ID NO: 5031151 - DNA, 25 bp, Homo sapien
caaacaacggaatatagtcggtcct

SEQ ID NO: 5031152 - DNA, 25 bp, Homo sapien
catgaaactggtgatactggttacc

SEQ ID NO: 5031153 - DNA, 25 bp, Homo sapien
catccatggactaaaccaacccagg

SEQ ID NO: 5031154 - DNA, 25 bp, Homo sapien
tacctgtggcgtacacatgaaactg

SEQ ID NO: 5031155 - DNA, 25 bp, Homo sapien
aaattctatagactcgcactgcccg

SEQ ID NO: 5031156 - DNA, 25 bp, Homo sapien
gaagaaggccgctaagtctggcagc

SEQ ID NO: 5031157 - DNA, 25 bp, Homo sapien
tgtcaccccacactatcaaagcgga

SEQ ID NO: 5031158 - DNA, 25 bp, Homo sapien
tcagcgacgaaaagggcatcaagca

SEQ ID NO: 5031159 - DNA, 25 bp, Homo sapien
gttcggcggaaggttgctgctcccg

SEQ ID NO: 5031160 - DNA, 25 bp, Homo sapien
ccgagttcggcggaaggttgctgct

SEQ ID NO: 5031161 - DNA, 25 bp, Homo sapien
gagttcggcggaaggttgctgctcc

SEQ ID NO: 5031162 - DNA, 25 bp, Homo sapien
agttcggcggaaggttgctgctccc

SEQ ID NO: 5031163 - DNA, 25 bp, Homo sapien
gatgcgggcccaagctgcatgggtc

SEQ ID NO: 5031164 - DNA, 25 bp, Homo sapien
tgatgcgggcccaagctgcatgggt

SEQ ID NO: 5031165 - DNA, 25 bp, Homo sapien
cgaacaagcgatgatgcgggcccaa

SEQ ID NO: 5031166 - DNA, 25 bp, Homo sapien
acaagcgatgatgcgggcccaagct

SEQ ID NO: 5031167 - DNA, 25 bp, Homo sapien
ctctccgctgggagttgggcgggct

SEQ ID NO: 5031168 - DNA, 25 bp, Homo sapien
gccggcgcctcctttccgattcact

SEQ ID NO: 5031169 - DNA, 25 bp, Homo sapien
gaggtgtagcttccgagcagctccc

SEQ ID NO: 5031170 - DNA, 25 bp, Homo sapien
ggagcccttgcgaggtgtagcttcc

SEQ ID NO: 5031171 - DNA, 25 bp, Homo sapien
cctcggttcaaatcggcaggatgtt

SEQ ID NO: 5031172 - DNA, 25 bp, Homo sapien
aatcggcaggatgtttacggtcaaa

SEQ ID NO: 5031173 - DNA, 25 bp, Homo sapien
tacggtcaaaatggtacctgtgcgc

SEQ ID NO: 5031174 - DNA, 25 bp, Homo sapien
tgccgcccaaatcctcggttcaaat

SEQ ID NO: 5031175 - DNA, 25 bp, Homo sapien
ggcaaggttcgtctcactggctgga

SEQ ID NO: 5031176 - DNA, 25 bp, Homo sapien
gaaattggcattaaggatagttgtt

SEQ ID NO: 5031177 - DNA, 25 bp, Homo sapien
tggacagtcttgtgctccactcact

SEQ ID NO: 5031178 - DNA, 25 bp, Homo sapien
cattagctaagtggccatactggcc

SEQ ID NO: 5031179 - DNA, 25 bp, Homo sapien
cagtatccttagactactgtcttgt

SEQ ID NO: 5031180 - DNA, 25 bp, Homo sapien
tccagtatccttagactactgtctt

SEQ ID NO: 5031181 - DNA, 25 bp, Homo sapien
tgctccagtatccttagactactgt

SEQ ID NO: 5031182 - DNA, 25 bp, Homo sapien
tctgctccagtatccttagactact

SEQ ID NO: 5031183 - DNA, 25 bp, Homo sapien
caggtagagcggagctttggttccc

SEQ ID NO: 5031184 - DNA, 25 bp, Homo sapien
taaagcgtatccagggtgtatccca

SEQ ID NO: 5031185 - DNA, 25 bp, Homo sapien
tattagacgatcaaggcaaccagga

SEQ ID NO: 5031186 - DNA, 25 bp, Homo sapien
cattcactataaagtaccaggcggg

SEQ ID NO: 5031187 - DNA, 25 bp, Homo sapien
ttgtggagaattgtttctacttgga

SEQ ID NO: 5031188 - DNA, 25 bp, Homo sapien
gattctaaccatgccctttaggtgg

SEQ ID NO: 5031189 - DNA, 25 bp, Homo sapien
gtggagaattgtttctacttggatt

SEQ ID NO: 5031190 - DNA, 25 bp, Homo sapien
tggattctaaccatgccctttaggt

SEQ ID NO: 5031191 - DNA, 25 bp, Homo sapien
ttttgcctaagtaaattcaagctgg

SEQ ID NO: 5031192 - DNA, 25 bp, Homo sapien
taactgtacccgaaaagtgctgtct

SEQ ID NO: 5031193 - DNA, 25 bp, Homo sapien
ttgaattggactatctaactgtacc

SEQ ID NO: 5031194 - DNA, 25 bp, Homo sapien
ggagtttcatgacttgtatctagtg

SEQ ID NO: 5031195 - DNA, 25 bp, Homo sapien
taatcactgccagaatccctctgtg

SEQ ID NO: 5031196 - DNA, 25 bp, Homo sapien
gcagggcctagggtcccggcacaac

SEQ ID NO: 5031197 - DNA, 25 bp, Homo sapien
caaccatcagctctatttaccgctg

SEQ ID NO: 5031198 - DNA, 25 bp, Homo sapien
tgcctggaacctggcacgatgccct

SEQ ID NO: 5031199 - DNA, 25 bp, Homo sapien
cagtaggattcagatgggtggacac

SEQ ID NO: 5031200 - DNA, 25 bp, Homo sapien
ctgtgtcaagcactgcttctcaggg

SEQ ID NO: 5031201 - DNA, 25 bp, Homo sapien
ggtggacacctattacagtagcctg

SEQ ID NO: 5031202 - DNA, 25 bp, Homo sapien
tctcgtctggcagcctcttgttcca

SEQ ID NO: 5031203 - DNA, 25 bp, Homo sapien
ctgacgcagccttgatgatgacaga

SEQ ID NO: 5031204 - DNA, 25 bp, Homo sapien
cagcgtgagctgacgcagccttgat

SEQ ID NO: 5031205 - DNA, 25 bp, Homo sapien
gaccacagcgtgagctgacgcagcc

SEQ ID NO: 5031206 - DNA, 25 bp, Homo sapien
cgtgagctgacgcagccttgatgat

SEQ ID NO: 5031207 - DNA, 25 bp, Homo sapien
ggagcatagccaagagaaggttggg

SEQ ID NO: 5031208 - DNA, 25 bp, Homo sapien
gaaggcgttttggagcatagccaag

SEQ ID NO: 5031209 - DNA, 25 bp, Homo sapien
agcatagccaagagaaggttgggag

SEQ ID NO: 5031210 - DNA, 25 bp, Homo sapien
gagcatagccaagagaaggttggga

SEQ ID NO: 5031211 - DNA, 25 bp, Homo sapien
tagagagaaacaacagctcatagaa

SEQ ID NO: 5031212 - DNA, 25 bp, Homo sapien
gagaaacaacagctcatagaaggtg

SEQ ID NO: 5031213 - DNA, 25 bp, Homo sapien
ctagagagaaacaacagctcataga

SEQ ID NO: 5031214 - DNA, 25 bp, Homo sapien
gagagaaacaacagctcatagaagg

SEQ ID NO: 5031215 - DNA, 25 bp, Homo sapien
ttcaggccctttaactgagaattgg

SEQ ID NO: 5031216 - DNA, 25 bp, Homo sapien
actcccttttcagttgtgtctgcct

SEQ ID NO: 5031217 - DNA, 25 bp, Homo sapien
ttggcatatgcgacccgtagatatc

SEQ ID NO: 5031218 - DNA, 25 bp, Homo sapien
cgtagatatcttgctactccctttt

SEQ ID NO: 5031219 - DNA, 25 bp, Homo sapien
tggtgtacgtatttcctcttaagtg

SEQ ID NO: 5031220 - DNA, 25 bp, Homo sapien
tagaggcattccctgtaggaaaaaa

SEQ ID NO: 5031221 - DNA, 25 bp, Homo sapien
gtcttatagtcacccatctttagag

SEQ ID NO: 5031222 - DNA, 25 bp, Homo sapien
tacacaattcgattgctccatgaca

SEQ ID NO: 5031223 - DNA, 25 bp, Homo sapien
gactgctgtttttgacttgggttaa

SEQ ID NO: 5031224 - DNA, 25 bp, Homo sapien
ttgacttgggttaagatggttagga

SEQ ID NO: 5031225 - DNA, 25 bp, Homo sapien
taagcgactgctgtttttgacttgg

SEQ ID NO: 5031226 - DNA, 25 bp, Homo sapien
cgtggaggaataagcgactgctgtt

SEQ ID NO: 5031227 - DNA, 25 bp, Homo sapien
agcactggggacataagcattgtgt

SEQ ID NO: 5031228 - DNA, 25 bp, Homo sapien
cctattggcattggcctgagcactg

SEQ ID NO: 5031229 - DNA, 25 bp, Homo sapien
tcatcatcctattggcattggcctg

SEQ ID NO: 5031230 - DNA, 25 bp, Homo sapien
ctatttattcatcatcctattggca

SEQ ID NO: 5031231 - DNA, 25 bp, Homo sapien
cgttaagtaccgtgaagctcaggcc

SEQ ID NO: 5031232 - DNA, 25 bp, Homo sapien
tcttctttccgtctgctggctagca

SEQ ID NO: 5031233 - DNA, 25 bp, Homo sapien
gcatggacaactccttttcctctca

SEQ ID NO: 5031234 - DNA, 25 bp, Homo sapien
gtctgctggctagcaatccagtccc

SEQ ID NO: 5031235 - DNA, 25 bp, Homo sapien
gcttctgccgtcttcaataagatac

SEQ ID NO: 5031236 - DNA, 25 bp, Homo sapien
catcccgccattcggtgttttcatt

SEQ ID NO: 5031237 - DNA, 25 bp, Homo sapien
tagtgagaagtgagttgcttctgcc

SEQ ID NO: 5031238 - DNA, 25 bp, Homo sapien
tcttcatcccgccattcggtgtttt

SEQ ID NO: 5031239 - DNA, 25 bp, Homo sapien
tgcattaaacaaacgcgagccaggg

SEQ ID NO: 5031240 - DNA, 25 bp, Homo sapien
tagggaatttaacactggcctgcca

SEQ ID NO: 5031241 - DNA, 25 bp, Homo sapien
ctttcagcggtgtaactgggagcca

SEQ ID NO: 5031242 - DNA, 25 bp, Homo sapien
catcttgtggcgagaaggcgccttc

SEQ ID NO: 5031243 - DNA, 25 bp, Homo sapien
agccgatggccccgcggatctctgg

SEQ ID NO: 5031244 - DNA, 25 bp, Homo sapien
ttcagaccagccgatggccccgcgg

SEQ ID NO: 5031245 - DNA, 25 bp, Homo sapien
cgatggccccgcggatctctggcat

SEQ ID NO: 5031246 - DNA, 25 bp, Homo sapien
agaccagccgatggccccgcggatc

SEQ ID NO: 5031247 - DNA, 25 bp, Homo sapien
gctgtgatctcatttcgggctttac

SEQ ID NO: 5031248 - DNA, 25 bp, Homo sapien
agggccgagtctctttgatggctgt

SEQ ID NO: 5031249 - DNA, 25 bp, Homo sapien
tgcagggccgagtctctttgatggc

SEQ ID NO: 5031250 - DNA, 25 bp, Homo sapien
gtgatctcatttcgggctttaccca

SEQ ID NO: 5031251 - DNA, 25 bp, Homo sapien
aaacgagtagctccggagggacatc

SEQ ID NO: 5031252 - DNA, 25 bp, Homo sapien
tagctccggagggacatctcttctc

SEQ ID NO: 5031253 - DNA, 25 bp, Homo sapien
cactggatgtagaaacgagtagctc

SEQ ID NO: 5031254 - DNA, 25 bp, Homo sapien
gatgtagaaacgagtagctccggag

SEQ ID NO: 5031255 - DNA, 25 bp, Homo sapien
tcaaactcgtagagcaggactgtga

SEQ ID NO: 5031256 - DNA, 25 bp, Homo sapien
gcaggggcacatgacgaagcctttc

SEQ ID NO: 5031257 - DNA, 25 bp, Homo sapien
tgcaggggcacatgacgaagccttt

SEQ ID NO: 5031258 - DNA, 25 bp, Homo sapien
gcatgcaggggcacatgacgaagcc

SEQ ID NO: 5031259 - DNA, 25 bp, Homo sapien
ctttcagggggataaagtgtcctga

SEQ ID NO: 5031260 - DNA, 25 bp, Homo sapien
ggtcccagaggatccgatttattaa

SEQ ID NO: 5031261 - DNA, 25 bp, Homo sapien
gtcccagaggatccgatttattaat

SEQ ID NO: 5031262 - DNA, 25 bp, Homo sapien
aggtcccagaggatccgatttatta

SEQ ID NO: 5031263 - DNA, 25 bp, Homo sapien
tcccagaggatccgatttattaatt

SEQ ID NO: 5031264 - DNA, 25 bp, Homo sapien
tctgcagaatgcaccaaaggcttcc

SEQ ID NO: 5031265 - DNA, 25 bp, Homo sapien
ctgcagaatgcaccaaaggcttcca

SEQ ID NO: 5031266 - DNA, 25 bp, Homo sapien
ttctgcagaatgcaccaaaggcttc

SEQ ID NO: 5031267 - DNA, 25 bp, Homo sapien
ctccagataggctgtacttgtaggc

SEQ ID NO: 5031268 - DNA, 25 bp, Homo sapien
tgcagaggcctagtttgaaaaggac

SEQ ID NO: 5031269 - DNA, 25 bp, Homo sapien
gagctaccagcatctcacgaaccaa

SEQ ID NO: 5031270 - DNA, 25 bp, Homo sapien
tctagctctagggatgaaggcctgt

SEQ ID NO: 5031271 - DNA, 25 bp, Homo sapien
tggtgtcctggttgaagaccagact

SEQ ID NO: 5031272 - DNA, 25 bp, Homo sapien
tctggcaaggatcacagagctttgt

SEQ ID NO: 5031273 - DNA, 25 bp, Homo sapien
gagctttgtcgtgtctttggtgtcc

SEQ ID NO: 5031274 - DNA, 25 bp, Homo sapien
ttttagaaatgcttaagtcaattgc

SEQ ID NO: 5031275 - DNA, 25 bp, Homo sapien
tttcctcttaacagatttaatagta

SEQ ID NO: 5031276 - DNA, 25 bp, Homo sapien
acagatttaatagtaaactgcatga

SEQ ID NO: 5031277 - DNA, 25 bp, Homo sapien
caaatgacaccagatattaagttga

SEQ ID NO: 5031278 - DNA, 25 bp, Homo sapien
cagatattaagttgaatcattccta

SEQ ID NO: 5031279 - DNA, 25 bp, Homo sapien
gataattttaagtgtcatatggaca

SEQ ID NO: 5031280 - DNA, 25 bp, Homo sapien
aatgttccacagttggttagtcaga

SEQ ID NO: 5031281 - DNA, 25 bp, Homo sapien
cactggcaggccatatacgtctgac

SEQ ID NO: 5031282 - DNA, 25 bp, Homo sapien
tgagctcatgccttaaacatctgca

SEQ ID NO: 5031283 - DNA, 25 bp, Homo sapien
tattcctgagtggagccgaagtaac

SEQ ID NO: 5031284 - DNA, 25 bp, Homo sapien
tgctaacgccacattagaacttggt

SEQ ID NO: 5031285 - DNA, 25 bp, Homo sapien
tccattcaccatgaaggaagaggca

SEQ ID NO: 5031286 - DNA, 25 bp, Homo sapien
aaaagtgactctgtatgctaacgcc

SEQ ID NO: 5031287 - DNA, 25 bp, Homo sapien
gctctgtggtgatgttaggacccat

SEQ ID NO: 5031288 - DNA, 25 bp, Homo sapien
caagacattgtattctctccagcta

SEQ ID NO: 5031289 - DNA, 25 bp, Homo sapien
taagatttatctagggctctgtggt

SEQ ID NO: 5031290 - DNA, 25 bp, Homo sapien
gagtagtgaaatcaggtcaacttta

SEQ ID NO: 5031291 - DNA, 25 bp, Homo sapien
ggcttgctgggataaaggcatttac

SEQ ID NO: 5031292 - DNA, 25 bp, Homo sapien
gaagagcagaattgtcactccaagg

SEQ ID NO: 5031293 - DNA, 25 bp, Homo sapien
tactgagaggctgttacctagtgag

SEQ ID NO: 5031294 - DNA, 25 bp, Homo sapien
tcctgatcagtgaaacctccctatt

SEQ ID NO: 5031295 - DNA, 25 bp, Homo sapien
tgtcattctgttactgggcacctgt

SEQ ID NO: 5031296 - DNA, 25 bp, Homo sapien
ccaatgaaatatgatccagagagtc

SEQ ID NO: 5031297 - DNA, 25 bp, Homo sapien
cagtccagcgcaggcggatgttaaa

SEQ ID NO: 5031298 - DNA, 25 bp, Homo sapien
gatgaggccacttaacagtccagcg

SEQ ID NO: 5031299 - DNA, 25 bp, Homo sapien
tgtatcagtgtttcaacctgcctgt

SEQ ID NO: 5031300 - DNA, 25 bp, Homo sapien
tagctgcactatgcttcaagtaggg

SEQ ID NO: 5031301 - DNA, 25 bp, Homo sapien
gatccagtggtttccacaatagctt

SEQ ID NO: 5031302 - DNA, 25 bp, Homo sapien
ttcagcatctataggtgaaggcacc

SEQ ID NO: 5031303 - DNA, 25 bp, Homo sapien
gagttgttgtaaattttcattggca

SEQ ID NO: 5031304 - DNA, 25 bp, Homo sapien
catcctcctctaagaatctatttga

SEQ ID NO: 5031305 - DNA, 25 bp, Homo sapien
tatttgaaaaattcccaagttgatc

SEQ ID NO: 5031306 - DNA, 25 bp, Homo sapien
ttttcattggcagcatcctcctcta

SEQ ID NO: 5031307 - DNA, 25 bp, Homo sapien
gcaaagcccaagatctttgcccagg

SEQ ID NO: 5031308 - DNA, 25 bp, Homo sapien
ccagggcttcctagtccatttaaat

SEQ ID NO: 5031309 - DNA, 25 bp, Homo sapien
cttgagcaggggtccttcagcttca

SEQ ID NO: 5031310 - DNA, 25 bp, Homo sapien
aagcaaagcccaagatctttgccca

SEQ ID NO: 5031311 - DNA, 25 bp, Homo sapien
taggccaccaaccttggtgtttgct

SEQ ID NO: 5031312 - DNA, 25 bp, Homo sapien
aatggctccctaggccaccaacctt

SEQ ID NO: 5031313 - DNA, 25 bp, Homo sapien
gctccctaggccaccaaccttggtg

SEQ ID NO: 5031314 - DNA, 25 bp, Homo sapien
acagagagctctgccaatggctccc

SEQ ID NO: 5031315 - DNA, 25 bp, Homo sapien
ctcaataaagtatgctgtcatagaa

SEQ ID NO: 5031316 - DNA, 25 bp, Homo sapien
tcaataaagtatgctgtcatagaaa

SEQ ID NO: 5031317 - DNA, 25 bp, Homo sapien
caataaagtatgctgtcatagaaaa

SEQ ID NO: 5031318 - DNA, 25 bp, Homo sapien
tcctagacataaatctggcccagtg

SEQ ID NO: 5031319 - DNA, 25 bp, Homo sapien
tgacttggtaaatcctagacataaa

SEQ ID NO: 5031320 - DNA, 25 bp, Homo sapien
atcctagacataaatctggcccagt

SEQ ID NO: 5031321 - DNA, 25 bp, Homo sapien
tttgacttggtaaatcctagacata

SEQ ID NO: 5031322 - DNA, 25 bp, Homo sapien
ttagaaatatgagagccggaatcag

SEQ ID NO: 5031323 - DNA, 25 bp, Homo sapien
actggcgaaggtcagagggtctctt

SEQ ID NO: 5031324 - DNA, 25 bp, Homo sapien
gggcactgacttctttcgctgtaga

SEQ ID NO: 5031325 - DNA, 25 bp, Homo sapien
tggtttcaaggtgaccccacggagc

SEQ ID NO: 5031326 - DNA, 25 bp, Homo sapien
caagagtcccctttgaagtctcaga

SEQ ID NO: 5031327 - DNA, 25 bp, Homo sapien
gtcatctctggctaacaggtcaggg

SEQ ID NO: 5031328 - DNA, 25 bp, Homo sapien
tgagctagagctcgtgtcatctctg

SEQ ID NO: 5031329 - DNA, 25 bp, Homo sapien
taaaaaggtcctctgatggttccat

SEQ ID NO: 5031330 - DNA, 25 bp, Homo sapien
cgtgatttacgaccagatgaatgag

SEQ ID NO: 5031331 - DNA, 25 bp, Homo sapien
agatgaatgagtgccatctgcatgc

SEQ ID NO: 5031332 - DNA, 25 bp, Homo sapien
ctgcatgctgcacgtctggcgagga

SEQ ID NO: 5031333 - DNA, 25 bp, Homo sapien
atctgcatgctgcacgtctggcgag

SEQ ID NO: 5031334 - DNA, 25 bp, Homo sapien
agccacagggaagccgagacagcac

SEQ ID NO: 5031335 - DNA, 25 bp, Homo sapien
catcagcagatggaagccacaggga

SEQ ID NO: 5031336 - DNA, 25 bp, Homo sapien
catcatcagcagatggaagccacag

SEQ ID NO: 5031337 - DNA, 25 bp, Homo sapien
gccatcatcagcagatggaagccac

SEQ ID NO: 5031338 - DNA, 25 bp, Homo sapien
ctggcatttgctgggctggcgaaca

SEQ ID NO: 5031339 - DNA, 25 bp, Homo sapien
cacccaatggtgtctgaattagagc

SEQ ID NO: 5031340 - DNA, 25 bp, Homo sapien
gatgcttcttgatcatccccaaagg

SEQ ID NO: 5031341 - DNA, 25 bp, Homo sapien
tccccaaaggaatgactgcactctg

SEQ ID NO: 5031342 - DNA, 25 bp, Homo sapien
agaactgagaaaagacccccagtgg

SEQ ID NO: 5031343 - DNA, 25 bp, Homo sapien
aatgtgcctgtgcacgtgcgtacat

SEQ ID NO: 5031344 - DNA, 25 bp, Homo sapien
ccagtgggtactccatttttcacct

SEQ ID NO: 5031345 - DNA, 25 bp, Homo sapien
gcaaatgtgcctgtgcacgtgcgta

SEQ ID NO: 5031346 - DNA, 25 bp, Homo sapien
gcttcacactcaacaggatccagat

SEQ ID NO: 5031347 - DNA, 25 bp, Homo sapien
gaaggacatcatggacggagatggg

SEQ ID NO: 5031348 - DNA, 25 bp, Homo sapien
ttaaacaggaaggacatcatggacg

SEQ ID NO: 5031349 - DNA, 25 bp, Homo sapien
gggctggcttcacactcaacaggat

SEQ ID NO: 5031350 - DNA, 25 bp, Homo sapien
caaggccaaatttgtcttacttagc

SEQ ID NO: 5031351 - DNA, 25 bp, Homo sapien
ttagaacttcatccggctctctcaa

SEQ ID NO: 5031352 - DNA, 25 bp, Homo sapien
tcatgacatcggcacttagaacttc

SEQ ID NO: 5031353 - DNA, 25 bp, Homo sapien
attccactaaccacacgggacagga

SEQ ID NO: 5031354 - DNA, 25 bp, Homo sapien
aagctatactcaattgcatgctgca

SEQ ID NO: 5031355 - DNA, 25 bp, Homo sapien
gcagcattgcagtcaattccagggc

SEQ ID NO: 5031356 - DNA, 25 bp, Homo sapien
gggcagaagctatactcaattgcat

SEQ ID NO: 5031357 - DNA, 25 bp, Homo sapien
ttccagggcagaagctatactcaat

SEQ ID NO: 5031358 - DNA, 25 bp, Homo sapien
ttcttccctggacttaggaaactca

SEQ ID NO: 5031359 - DNA, 25 bp, Homo sapien
gacttaggaaactcagcattacatg

SEQ ID NO: 5031360 - DNA, 25 bp, Homo sapien
gcattacatgcacaaataaccaatt

SEQ ID NO: 5031361 - DNA, 25 bp, Homo sapien
ttaggaaactcagcattacatgcac

SEQ ID NO: 5031362 - DNA, 25 bp, Homo sapien
ctgatgtgactggaatttgtaaggc

SEQ ID NO: 5031363 - DNA, 25 bp, Homo sapien
gaaggcagaagttgtaattacagat

SEQ ID NO: 5031364 - DNA, 25 bp, Homo sapien
tgatgtgactggaatttgtaaggca

SEQ ID NO: 5031365 - DNA, 25 bp, Homo sapien
gcagaagttgtaattacagatttct

SEQ ID NO: 5031366 - DNA, 25 bp, Homo sapien
ctgtcttctgccctctgctcccaac

SEQ ID NO: 5031367 - DNA, 25 bp, Homo sapien
gctcccaactgctgtctccttccca

SEQ ID NO: 5031368 - DNA, 25 bp, Homo sapien
ctctgctcccaactgctgtctcctt

SEQ ID NO: 5031369 - DNA, 25 bp, Homo sapien
tcttctgccctctgctcccaactgc

SEQ ID NO: 5031370 - DNA, 25 bp, Homo sapien
tcctggtcttggtgaacttagcagc

SEQ ID NO: 5031371 - DNA, 25 bp, Homo sapien
tcttggtgaacttagcagctgaatt

SEQ ID NO: 5031372 - DNA, 25 bp, Homo sapien
ggtgaacttagcagctgaattaaaa

SEQ ID NO: 5031373 - DNA, 25 bp, Homo sapien
ggtcttggtgaacttagcagctgaa

SEQ ID NO: 5031374 - DNA, 25 bp, Homo sapien
taaagctgctctgtcatcttgcaga

SEQ ID NO: 5031375 - DNA, 25 bp, Homo sapien
tcctggcaaagtgcttgacaagctg

SEQ ID NO: 5031376 - DNA, 25 bp, Homo sapien
tcattcccagtagaagccgagactc

SEQ ID NO: 5031377 - DNA, 25 bp, Homo sapien
aacaattgccagtaccatggtgctg

SEQ ID NO: 5031378 - DNA, 25 bp, Homo sapien
agaaccagggcactgtcgttcctgt

SEQ ID NO: 5031379 - DNA, 25 bp, Homo sapien
tttaggaggctctgcatgatgagga

SEQ ID NO: 5031380 - DNA, 25 bp, Homo sapien
tagaagcccatgattagacccaact

SEQ ID NO: 5031381 - DNA, 25 bp, Homo sapien
gctctctcttggtctacgtaagtga

SEQ ID NO: 5031382 - DNA, 25 bp, Homo sapien
tggattttgccttgtcagaagagaa

SEQ ID NO: 5031383 - DNA, 25 bp, Homo sapien
ggcagtgagagttactgcaggtgtt

SEQ ID NO: 5031384 - DNA, 25 bp, Homo sapien
gattttgccttgtcagaagagaata

SEQ ID NO: 5031385 - DNA, 25 bp, Homo sapien
gaaggcagtgagagttactgcaggt

SEQ ID NO: 5031386 - DNA, 25 bp, Homo sapien
ctctatctggaatctgtgtatccat

SEQ ID NO: 5031387 - DNA, 25 bp, Homo sapien
tgttgacagcctctacggagctgcc

SEQ ID NO: 5031388 - DNA, 25 bp, Homo sapien
taaactgaacgtgcctgttgacagc

SEQ ID NO: 5031389 - DNA, 25 bp, Homo sapien
acagcctctacggagctgccgactg

SEQ ID NO: 5031390 - DNA, 25 bp, Homo sapien
cgtagagataaactgaacgtgcctg

SEQ ID NO: 5031391 - DNA, 25 bp, Homo sapien
tccaaggacaaggtccagcagagct

SEQ ID NO: 5031392 - DNA, 25 bp, Homo sapien
gaactgattgaattgagcccaaaga

SEQ ID NO: 5031393 - DNA, 25 bp, Homo sapien
gatagaattctccttcagagttgcc

SEQ ID NO: 5031394 - DNA, 25 bp, Homo sapien
ggcacatccaaaactcatagggcag

SEQ ID NO: 5031395 - DNA, 25 bp, Homo sapien
gagagaaacctcctgttagaatcct

SEQ ID NO: 5031396 - DNA, 25 bp, Homo sapien
tccttatgggaaatgcgtacaagca

SEQ ID NO: 5031397 - DNA, 25 bp, Homo sapien
tggtgggcataagggatctcagact

SEQ ID NO: 5031398 - DNA, 25 bp, Homo sapien
caaaattggcaatacaacgagccct

SEQ ID NO: 5031399 - DNA, 25 bp, Homo sapien
tcatctttgtcaattgtttcaccat

SEQ ID NO: 5031400 - DNA, 25 bp, Homo sapien
cttcatctttgtcaattgtttcacc

SEQ ID NO: 5031401 - DNA, 25 bp, Homo sapien
catctttgtcaattgtttcaccatc

SEQ ID NO: 5031402 - DNA, 25 bp, Homo sapien
ttcatctttgtcaattgtttcacca

SEQ ID NO: 5031403 - DNA, 25 bp, Homo sapien
ccagattctggtactaattgttgac

SEQ ID NO: 5031404 - DNA, 25 bp, Homo sapien
tctcagtactatggtagatgtgcag

SEQ ID NO: 5031405 - DNA, 25 bp, Homo sapien
tatactgcaatgtaaggtaagtacc

SEQ ID NO: 5031406 - DNA, 25 bp, Homo sapien
gagtgagacccgtgattacattagg

SEQ ID NO: 5031407 - DNA, 25 bp, Homo sapien
gaatctggtctgctaaatctccagt

SEQ ID NO: 5031408 - DNA, 25 bp, Homo sapien
tcagcatgttctcacgacagacatt

SEQ ID NO: 5031409 - DNA, 25 bp, Homo sapien
gaagtatagcgatgaaattgaccca

SEQ ID NO: 5031410 - DNA, 25 bp, Homo sapien
taagtcatatatgccagaatctggt

SEQ ID NO: 5031411 - DNA, 25 bp, Homo sapien
tagatgtacagaaaccattggttgt

SEQ ID NO: 5031412 - DNA, 25 bp, Homo sapien
cagaaaccattggttgttaagagca

SEQ ID NO: 5031413 - DNA, 25 bp, Homo sapien
tggttgttaagagcaactctacttt

SEQ ID NO: 5031414 - DNA, 25 bp, Homo sapien
tcattagatgtacagaaaccattgg

SEQ ID NO: 5031415 - DNA, 25 bp, Homo sapien
tgcgacatgagacaaatgagcccct

SEQ ID NO: 5031416 - DNA, 25 bp, Homo sapien
tctctcacaaaaaccatactgtgcg

SEQ ID NO: 5031417 - DNA, 25 bp, Homo sapien
ctggataggccatgatggcaaagaa

SEQ ID NO: 5031418 - DNA, 25 bp, Homo sapien
tggcaaagaacattaagggattcct

SEQ ID NO: 5031419 - DNA, 25 bp, Homo sapien
tttctccgggacatcatcccagctc

SEQ ID NO: 5031420 - DNA, 25 bp, Homo sapien
tccgggacatcatcccagctcacca

SEQ ID NO: 5031421 - DNA, 25 bp, Homo sapien
ccgggacatcatcccagctcaccat

SEQ ID NO: 5031422 - DNA, 25 bp, Homo sapien
tctccgggacatcatcccagctcac

SEQ ID NO: 5031423 - DNA, 25 bp, Homo sapien
ctgcagccgcgccatgtccacccct

SEQ ID NO: 5031424 - DNA, 25 bp, Homo sapien
gtctggccccttccggcctgaagct

SEQ ID NO: 5031425 - DNA, 25 bp, Homo sapien
acagcctcccaattccgggcagacc

SEQ ID NO: 5031426 - DNA, 25 bp, Homo sapien
cgttggccgcgtcggggatggcgcc

SEQ ID NO: 5031427 - DNA, 25 bp, Homo sapien
tttttgtctgtaagtttattcaatg

SEQ ID NO: 5031428 - DNA, 25 bp, Homo sapien
caatgcaaaataatcctctccaatt

SEQ ID NO: 5031429 - DNA, 25 bp, Homo sapien
ttgtctgtaagtttattcaatgcaa

SEQ ID NO: 5031430 - DNA, 25 bp, Homo sapien
gtctgtaagtttattcaatgcaaaa

SEQ ID NO: 5031431 - DNA, 25 bp, Homo sapien
ggttgttgacccagccccagtctcg

SEQ ID NO: 5031432 - DNA, 25 bp, Homo sapien
attcggttgttgacccagccccagt

SEQ ID NO: 5031433 - DNA, 25 bp, Homo sapien
atgtccacgaccaaatccgcctcta

SEQ ID NO: 5031434 - DNA, 25 bp, Homo sapien
ctgaccatgtccacgaccaaatccg

SEQ ID NO: 5031435 - DNA, 25 bp, Homo sapien
cagggggcacagcactccgtctgta

SEQ ID NO: 5031436 - DNA, 25 bp, Homo sapien
ccagggggcacagcactccgtctgt

SEQ ID NO: 5031437 - DNA, 25 bp, Homo sapien
cgtctgtaggtatctctgtcggctt

SEQ ID NO: 5031438 - DNA, 25 bp, Homo sapien
actccgtctgtaggtatctctgtcg

SEQ ID NO: 5031439 - DNA, 25 bp, Homo sapien
ctgcggcgtagggtggcaggaacaa

SEQ ID NO: 5031440 - DNA, 25 bp, Homo sapien
gcggcgtagggtggcaggaacaatc

SEQ ID NO: 5031441 - DNA, 25 bp, Homo sapien
ggctgcggcgtagggtggcaggaac

SEQ ID NO: 5031442 - DNA, 25 bp, Homo sapien
cggctgcggcgtagggtggcaggaa

SEQ ID NO: 5031443 - DNA, 25 bp, Homo sapien
tagctactgacatagagttttgtgg

SEQ ID NO: 5031444 - DNA, 25 bp, Homo sapien
tacctacagttaaccctagctactg

SEQ ID NO: 5031445 - DNA, 25 bp, Homo sapien
gaggatttagctctctacagcctct

SEQ ID NO: 5031446 - DNA, 25 bp, Homo sapien
caaggatatgatgtataaaaggact

SEQ ID NO: 5031447 - DNA, 25 bp, Homo sapien
ttggcaatgaggaactaagctgata

SEQ ID NO: 5031448 - DNA, 25 bp, Homo sapien
gaaatctcatctgggatataaatgc

SEQ ID NO: 5031449 - DNA, 25 bp, Homo sapien
cacatgttataccattgttttttcc

SEQ ID NO: 5031450 - DNA, 25 bp, Homo sapien
caaattatggatcaattacgaaatc

SEQ ID NO: 5031451 - DNA, 25 bp, Homo sapien
cttcagccccccagttattcaggtg

SEQ ID NO: 5031452 - DNA, 25 bp, Homo sapien
tacacaagtcaaaaacatggttata

SEQ ID NO: 5031453 - DNA, 25 bp, Homo sapien
tagactcttcagaccttgaactcct

SEQ ID NO: 5031454 - DNA, 25 bp, Homo sapien
agatgtgtggtattaaaatctcaat

SEQ ID NO: 5031455 - DNA, 25 bp, Homo sapien
taagaatcatagcttcctggaacac

SEQ ID NO: 5031456 - DNA, 25 bp, Homo sapien
tgctttagcctttcactacgtgagg

SEQ ID NO: 5031457 - DNA, 25 bp, Homo sapien
tggtaacagagcacaaaacctgggt

SEQ ID NO: 5031458 - DNA, 25 bp, Homo sapien
caaggactctcgcagggcattgaaa

SEQ ID NO: 5031459 - DNA, 25 bp, Homo sapien
gtcgacgcagcagttaccaggtaaa

SEQ ID NO: 5031460 - DNA, 25 bp, Homo sapien
tcaaggcgtaaacagggttggtcta

SEQ ID NO: 5031461 - DNA, 25 bp, Homo sapien
tttgagtcacagcaggtcgacgcag

SEQ ID NO: 5031462 - DNA, 25 bp, Homo sapien
tctaggctaagtccaaagaacaaag

SEQ ID NO: 5031463 - DNA, 25 bp, Homo sapien
tatggtaccccaacatgacaagaca

SEQ ID NO: 5031464 - DNA, 25 bp, Homo sapien
tgtgagcctaggaagactgtcaagc

SEQ ID NO: 5031465 - DNA, 25 bp, Homo sapien
gaatctttgctgcatcacccgtgac

SEQ ID NO: 5031466 - DNA, 25 bp, Homo sapien
caagttcaggatagctgtctacagc

SEQ ID NO: 5031467 - DNA, 25 bp, Homo sapien
ggccatagctacatgcgtattttac

SEQ ID NO: 5031468 - DNA, 25 bp, Homo sapien
tctttttccttatagagggcactcc

SEQ ID NO: 5031469 - DNA, 25 bp, Homo sapien
cttcaacctagctttgcctaaggct

SEQ ID NO: 5031470 - DNA, 25 bp, Homo sapien
gcctaaggctagagacatccttgat

SEQ ID NO: 5031471 - DNA, 25 bp, Homo sapien
tgcaatctagtctgctcttaagctg

SEQ ID NO: 5031472 - DNA, 25 bp, Homo sapien
gggtgtgaattggaccatggtttcc

SEQ ID NO: 5031473 - DNA, 25 bp, Homo sapien
tcagccaggatctcttgcaatctag

SEQ ID NO: 5031474 - DNA, 25 bp, Homo sapien
atagtggtggcagtattgtccacgg

SEQ ID NO: 5031475 - DNA, 25 bp, Homo sapien
gcgaatattcttggatgtcccacag

SEQ ID NO: 5031476 - DNA, 25 bp, Homo sapien
ccttgaattctcttgctcaatggcg

SEQ ID NO: 5031477 - DNA, 25 bp, Homo sapien
ttgctcaatggcgaatattcttgga

SEQ ID NO: 5031478 - DNA, 25 bp, Homo sapien
tcttggatgtcccacagatcaggca

SEQ ID NO: 5031479 - DNA, 25 bp, Homo sapien
ttttggttctgaactagtcagtgga

SEQ ID NO: 5031480 - DNA, 25 bp, Homo sapien
gttctgaactagtcagtggaatgtc

SEQ ID NO: 5031481 - DNA, 25 bp, Homo sapien
tggttctgaactagtcagtggaatg

SEQ ID NO: 5031482 - DNA, 25 bp, Homo sapien
tctgaactagtcagtggaatgtcac

SEQ ID NO: 5031483 - DNA, 25 bp, Homo sapien
cattagcaagggctacagcatgagc

SEQ ID NO: 5031484 - DNA, 25 bp, Homo sapien
agtgaccctgctgtagacacattag

SEQ ID NO: 5031485 - DNA, 25 bp, Homo sapien
ccaggccttaaatgagatgtgcaaa

SEQ ID NO: 5031486 - DNA, 25 bp, Homo sapien
cagcatgagccctttccgaggagaa

SEQ ID NO: 5031487 - DNA, 25 bp, Homo sapien
gcttggaccaatgaaggccttgcca

SEQ ID NO: 5031488 - DNA, 25 bp, Homo sapien
tgcttggaccaatgaaggccttgcc

SEQ ID NO: 5031489 - DNA, 25 bp, Homo sapien
tagtaaacattgtctgcaaatataa

SEQ ID NO: 5031490 - DNA, 25 bp, Homo sapien
agtaaacattgtctgcaaatataat

SEQ ID NO: 5031491 - DNA, 25 bp, Homo sapien
ggtggttgtggcatagacccaagac

SEQ ID NO: 5031492 - DNA, 25 bp, Homo sapien
gctcttgctgttagacacacgcaca

SEQ ID NO: 5031493 - DNA, 25 bp, Homo sapien
gacctatctgaagtttctgggaaat

SEQ ID NO: 5031494 - DNA, 25 bp, Homo sapien
tctgggaaatgttcctagctcttgc

SEQ ID NO: 5031495 - DNA, 25 bp, Homo sapien
cttgacctatctgaagtttctggga

SEQ ID NO: 5031496 - DNA, 25 bp, Homo sapien
caatccaatccttacatgactatca

SEQ ID NO: 5031497 - DNA, 25 bp, Homo sapien
ccttcctaagatgtttaatctgaac

SEQ ID NO: 5031498 - DNA, 25 bp, Homo sapien
taatctgaacatccctgtttcctat

SEQ ID NO: 5031499 - DNA, 25 bp, Homo sapien
ccttacatgactatcaaattctaga

SEQ ID NO: 5031500 - DNA, 25 bp, Homo sapien
ggtggaggcccaaaatacctagaga

SEQ ID NO: 5031501 - DNA, 25 bp, Homo sapien
catttaatggaaacgccaagagacc

SEQ ID NO: 5031502 - DNA, 25 bp, Homo sapien
aaagttgttcgacccacagagcaga

SEQ ID NO: 5031503 - DNA, 25 bp, Homo sapien
catttcagcaggtcaaagcacgaca

SEQ ID NO: 5031504 - DNA, 25 bp, Homo sapien
tctttgctgaactccgtggcttggg

SEQ ID NO: 5031505 - DNA, 25 bp, Homo sapien
gccgggtggcagtcaaattttagaa

SEQ ID NO: 5031506 - DNA, 25 bp, Homo sapien
cctgagagcccgttaaaaattggtg

SEQ ID NO: 5031507 - DNA, 25 bp, Homo sapien
gtgaactcaggaaaggcggcagcat

SEQ ID NO: 5031508 - DNA, 25 bp, Homo sapien
cctctgccaggatcatcagttagac

SEQ ID NO: 5031509 - DNA, 25 bp, Homo sapien
tgccaggatcatcagttagacccat

SEQ ID NO: 5031510 - DNA, 25 bp, Homo sapien
tctgccaggatcatcagttagaccc

SEQ ID NO: 5031511 - DNA, 25 bp, Homo sapien
tccctctgccaggatcatcagttag

SEQ ID NO: 5031512 - DNA, 25 bp, Homo sapien
ttcaatgcccatggctcaagaagca

SEQ ID NO: 5031513 - DNA, 25 bp, Homo sapien
ctgaggctcaatacaggtctggaaa

SEQ ID NO: 5031514 - DNA, 25 bp, Homo sapien
gggactatttaagcatgcagcatct

SEQ ID NO: 5031515 - DNA, 25 bp, Homo sapien
caggaaacccataggccaaagactt

SEQ ID NO: 5031516 - DNA, 25 bp, Homo sapien
aagtaacttgactaaggccatgcag

SEQ ID NO: 5031517 - DNA, 25 bp, Homo sapien
gggaaatctgttgggcctgcctgct

SEQ ID NO: 5031518 - DNA, 25 bp, Homo sapien
cagaggcagaatcgtatggaaaacc

SEQ ID NO: 5031519 - DNA, 25 bp, Homo sapien
tggaaaaccgacaagatcaggatct

SEQ ID NO: 5031520 - DNA, 25 bp, Homo sapien
tgaaaacttgtatccagaggaggct

SEQ ID NO: 5031521 - DNA, 25 bp, Homo sapien
aaagctacaggtggcaaaagctttc

SEQ ID NO: 5031522 - DNA, 25 bp, Homo sapien
ccaccgaaatcacactgaaaacttg

SEQ ID NO: 5031523 - DNA, 25 bp, Homo sapien
ccagaggaggcttgagacagccaaa

SEQ ID NO: 5031524 - DNA, 25 bp, Homo sapien
tagtaaacagctgtcacaaggtggc

SEQ ID NO: 5031525 - DNA, 25 bp, Homo sapien
taacttttgagaagatgagtcctag

SEQ ID NO: 5031526 - DNA, 25 bp, Homo sapien
ccaataagccaatgagggagatatg

SEQ ID NO: 5031527 - DNA, 25 bp, Homo sapien
cataagctctgcagttagtaaacag

SEQ ID NO: 5031528 - DNA, 25 bp, Homo sapien
gaaggtaggttaatagatagcccca

SEQ ID NO: 5031529 - DNA, 25 bp, Homo sapien
tacctttgcccacttatactcagag

SEQ ID NO: 5031530 - DNA, 25 bp, Homo sapien
tacgaatggagatggtaatcatgcc

SEQ ID NO: 5031531 - DNA, 25 bp, Homo sapien
tatacaatcccattagaaggtaggt

SEQ ID NO: 5031532 - DNA, 25 bp, Homo sapien
gaaatctccgtcacaaagccatcat

SEQ ID NO: 5031533 - DNA, 25 bp, Homo sapien
taagaaatctccgtcacaaagccat

SEQ ID NO: 5031534 - DNA, 25 bp, Homo sapien
gcatagataagtcttacatgtgtga

SEQ ID NO: 5031535 - DNA, 25 bp, Homo sapien
tcttacatgtgtgatcagaagtacc

SEQ ID NO: 5031536 - DNA, 25 bp, Homo sapien
cagtctttggataggcggctgtagc

SEQ ID NO: 5031537 - DNA, 25 bp, Homo sapien
tggagaaatcatgtgagcccctgaa

SEQ ID NO: 5031538 - DNA, 25 bp, Homo sapien
tacaaagcagatcctactcacaggg

SEQ ID NO: 5031539 - DNA, 25 bp, Homo sapien
ccaaggtgcaaacaggtccagtatc

SEQ ID NO: 5031540 - DNA, 25 bp, Homo sapien
cctgctgaatgatagctctctggga

SEQ ID NO: 5031541 - DNA, 25 bp, Homo sapien
taggcaaccaaccagaatccaatct

SEQ ID NO: 5031542 - DNA, 25 bp, Homo sapien
tagcagctgactagaccatctgttg

SEQ ID NO: 5031543 - DNA, 25 bp, Homo sapien
tctagccttgaaagccccttccaga

SEQ ID NO: 5031544 - DNA, 25 bp, Homo sapien
tatgtccatcactgtcctgtagctg

SEQ ID NO: 5031545 - DNA, 25 bp, Homo sapien
tgtgatagcttccagtagcccaaga

SEQ ID NO: 5031546 - DNA, 25 bp, Homo sapien
gtcatgggcgtgcatcctcagtcct

SEQ ID NO: 5031547 - DNA, 25 bp, Homo sapien
agatagatgaatcttagcaggcccc

SEQ ID NO: 5031548 - DNA, 25 bp, Homo sapien
tcctgcagtcacttcagtacgttcc

SEQ ID NO: 5031549 - DNA, 25 bp, Homo sapien
ctcgtcctgcagtcacttcagtacg

SEQ ID NO: 5031550 - DNA, 25 bp, Homo sapien
tcgtcctgcagtcacttcagtacgt

SEQ ID NO: 5031551 - DNA, 25 bp, Homo sapien
ctgcagtcacttcagtacgttcctt

SEQ ID NO: 5031552 - DNA, 25 bp, Homo sapien
ggaatgcaaagaccaaggatttggg

SEQ ID NO: 5031553 - DNA, 25 bp, Homo sapien
tcaatactaacctgctcaatccttt

SEQ ID NO: 5031554 - DNA, 25 bp, Homo sapien
cctttttactttgtgttggaatgca

SEQ ID NO: 5031555 - DNA, 25 bp, Homo sapien
ggaaatgccactgcttccaagctct

SEQ ID NO: 5031556 - DNA, 25 bp, Homo sapien
gaagaatatagactgagtatgaagc

SEQ ID NO: 5031557 - DNA, 25 bp, Homo sapien
agaatatagactgagtatgaagcac

SEQ ID NO: 5031558 - DNA, 25 bp, Homo sapien
gagaagaatatagactgagtatgaa

SEQ ID NO: 5031559 - DNA, 25 bp, Homo sapien
gaatatagactgagtatgaagcacc

SEQ ID NO: 5031560 - DNA, 25 bp, Homo sapien
gaatatgcacttcagcatgtacccc

SEQ ID NO: 5031561 - DNA, 25 bp, Homo sapien
tatgcacttcagcatgtaccccttc

SEQ ID NO: 5031562 - DNA, 25 bp, Homo sapien
atatgcacttcagcatgtacccctt

SEQ ID NO: 5031563 - DNA, 25 bp, Homo sapien
aatatgcacttcagcatgtacccct

SEQ ID NO: 5031564 - DNA, 25 bp, Homo sapien
ttggagaatcccaccaaggtcaagc

SEQ ID NO: 5031565 - DNA, 25 bp, Homo sapien
tctggattcatagccacgatgaggg

SEQ ID NO: 5031566 - DNA, 25 bp, Homo sapien
tttgccctttttagctggtctagtg

SEQ ID NO: 5031567 - DNA, 25 bp, Homo sapien
tagctggtctagtgggcaactgcag

SEQ ID NO: 5031568 - DNA, 25 bp, Homo sapien
tttgcatctttgcatttttggtccc

SEQ ID NO: 5031569 - DNA, 25 bp, Homo sapien
tgtttttctaccacatctttgcatc

SEQ ID NO: 5031570 - DNA, 25 bp, Homo sapien
tctttgcatctttgcatttttggtc

SEQ ID NO: 5031571 - DNA, 25 bp, Homo sapien
ttcttgtttttctaccacatctttg

SEQ ID NO: 5031572 - DNA, 25 bp, Homo sapien
gactgactgcttccctccaaactta

SEQ ID NO: 5031573 - DNA, 25 bp, Homo sapien
cagctctagaagcaactttaagcca

SEQ ID NO: 5031574 - DNA, 25 bp, Homo sapien
tattcatgccatagtcctgaactat

SEQ ID NO: 5031575 - DNA, 25 bp, Homo sapien
catagctagatcattacatgcagga

SEQ ID NO: 5031576 - DNA, 25 bp, Homo sapien
tggtagtccttgagcagaatggcct

SEQ ID NO: 5031577 - DNA, 25 bp, Homo sapien
taagcaatggtatagttctcagacc

SEQ ID NO: 5031578 - DNA, 25 bp, Homo sapien
aaggaaacactagagcaactgcggg

SEQ ID NO: 5031579 - DNA, 25 bp, Homo sapien
gataaacagctagagggatgagcct

SEQ ID NO: 5031580 - DNA, 25 bp, Homo sapien
catctccgtattgaccaatgctgct

SEQ ID NO: 5031581 - DNA, 25 bp, Homo sapien
agtttccctgggacattgctccatt

SEQ ID NO: 5031582 - DNA, 25 bp, Homo sapien
aagagaagcatctccgtattgacca

SEQ ID NO: 5031583 - DNA, 25 bp, Homo sapien
aaattgtggccactctagcatgagc

SEQ ID NO: 5031584 - DNA, 25 bp, Homo sapien
gtctctcatttctatcgttgtgtgc

SEQ ID NO: 5031585 - DNA, 25 bp, Homo sapien
catttctatcgttgtgtgccaacag

SEQ ID NO: 5031586 - DNA, 25 bp, Homo sapien
tcgttgtgtgccaacagggaaatgg

SEQ ID NO: 5031587 - DNA, 25 bp, Homo sapien
aacatcatcaggatgctctgtgtga

SEQ ID NO: 5031588 - DNA, 25 bp, Homo sapien
tgcagaacttttgctgattcaatga

SEQ ID NO: 5031589 - DNA, 25 bp, Homo sapien
aattctgtttagtgcatatttgcag

SEQ ID NO: 5031590 - DNA, 25 bp, Homo sapien
tttgctgattcaatgaatgcctcac

SEQ ID NO: 5031591 - DNA, 25 bp, Homo sapien
gaacttttgctgattcaatgaatgc

SEQ ID NO: 5031592 - DNA, 25 bp, Homo sapien
caatcatgtgtaaatcagcgttttg

SEQ ID NO: 5031593 - DNA, 25 bp, Homo sapien
gaatactttagggccggctgaactg

SEQ ID NO: 5031594 - DNA, 25 bp, Homo sapien
tggggaatactttagggccggctga

SEQ ID NO: 5031595 - DNA, 25 bp, Homo sapien
ctttagggccggctgaactgacagc

SEQ ID NO: 5031596 - DNA, 25 bp, Homo sapien
tactttagggccggctgaactgaca

SEQ ID NO: 5031597 - DNA, 25 bp, Homo sapien
agatggcgcattctcggtagtggca

SEQ ID NO: 5031598 - DNA, 25 bp, Homo sapien
aagcacagtgatgaaagggccccgt

SEQ ID NO: 5031599 - DNA, 25 bp, Homo sapien
tcaagtttcaggttatctctagccc

SEQ ID NO: 5031600 - DNA, 25 bp, Homo sapien
cgacttcacacctcaagaagaaggg

SEQ ID NO: 5031601 - DNA, 25 bp, Homo sapien
tgtgtactcattgcctgatcaggcc

SEQ ID NO: 5031602 - DNA, 25 bp, Homo sapien
ttggttgcaaagttcacagtactcc

SEQ ID NO: 5031603 - DNA, 25 bp, Homo sapien
ggtgtgcttgatttgccctcgaaac

SEQ ID NO: 5031604 - DNA, 25 bp, Homo sapien
tgcgtctgcccgtgtttggttgcaa

SEQ ID NO: 5031605 - DNA, 25 bp, Homo sapien
tttgtaggtatgctgtgtgcattgg

SEQ ID NO: 5031606 - DNA, 25 bp, Homo sapien
tggaatttgtaggtatgctgtgtgc

SEQ ID NO: 5031607 - DNA, 25 bp, Homo sapien
ggaatttgtaggtatgctgtgtgca

SEQ ID NO: 5031608 - DNA, 25 bp, Homo sapien
aatttgtaggtatgctgtgtgcatt

SEQ ID NO: 5031609 - DNA, 25 bp, Homo sapien
tccaaaaggcctaagtgaaagcagc

SEQ ID NO: 5031610 - DNA, 25 bp, Homo sapien
catgttgtctatagtcacagctggg

SEQ ID NO: 5031611 - DNA, 25 bp, Homo sapien
tcttcatgacaagtggcttcccaca

SEQ ID NO: 5031612 - DNA, 25 bp, Homo sapien
gatccagcagggatacctcagctct

SEQ ID NO: 5031613 - DNA, 25 bp, Homo sapien
gactagcacaaaaggagatctgcta

SEQ ID NO: 5031614 - DNA, 25 bp, Homo sapien
ttgaacttgctgacaggcacttcgc

SEQ ID NO: 5031615 - DNA, 25 bp, Homo sapien
aattgaatgactagtggactcttgc

SEQ ID NO: 5031616 - DNA, 25 bp, Homo sapien
ggagcatgataaggtagactatcca

SEQ ID NO: 5031617 - DNA, 25 bp, Homo sapien
cgatgcagtagttgaaaccaaaggg

SEQ ID NO: 5031618 - DNA, 25 bp, Homo sapien
aatgccagtgtgacatacgcctcgc

SEQ ID NO: 5031619 - DNA, 25 bp, Homo sapien
gcctcgcaagccagcaattcatgaa

SEQ ID NO: 5031620 - DNA, 25 bp, Homo sapien
ccaaaggggtaatggccacagctgt

SEQ ID NO: 5031621 - DNA, 25 bp, Homo sapien
caaccgaaaggacagggatgtattc

SEQ ID NO: 5031622 - DNA, 25 bp, Homo sapien
caatctatcttggatggcgaaaccc

SEQ ID NO: 5031623 - DNA, 25 bp, Homo sapien
caattctgggtagctcactgaggtt

SEQ ID NO: 5031624 - DNA, 25 bp, Homo sapien
gagactgtgctatcctgagggctca

SEQ ID NO: 5031625 - DNA, 25 bp, Homo sapien
tccaaatgggagaagaacacgctag

SEQ ID NO: 5031626 - DNA, 25 bp, Homo sapien
tagggtcccaatggcgagacatctc

SEQ ID NO: 5031627 - DNA, 25 bp, Homo sapien
tgtgttgatacgaccaggtaggccc

SEQ ID NO: 5031628 - DNA, 25 bp, Homo sapien
cagcacatgttagcccacttaggga

SEQ ID NO: 5031629 - DNA, 25 bp, Homo sapien
taaaaaagtttaaacctgcatagca

SEQ ID NO: 5031630 - DNA, 25 bp, Homo sapien
tctaagtttttggatagttggcaca

SEQ ID NO: 5031631 - DNA, 25 bp, Homo sapien
caacctagtcttgggacacagaagc

SEQ ID NO: 5031632 - DNA, 25 bp, Homo sapien
tttggagcagtctggtgcagtccca

SEQ ID NO: 5031633 - DNA, 25 bp, Homo sapien
ctggctctgctgatgagtggatctg

SEQ ID NO: 5031634 - DNA, 25 bp, Homo sapien
gtggatcagcggcatgtagccaaac

SEQ ID NO: 5031635 - DNA, 25 bp, Homo sapien
tcatctgagagtggatcagcggcat

SEQ ID NO: 5031636 - DNA, 25 bp, Homo sapien
tcaatgtctcggtatttcttcctca

SEQ ID NO: 5031637 - DNA, 25 bp, Homo sapien
ggcaaacgtattcatgcagctctgt

SEQ ID NO: 5031638 - DNA, 25 bp, Homo sapien
gaaactcgactactacagtgactca

SEQ ID NO: 5031639 - DNA, 25 bp, Homo sapien
ccattgacgtgactccatgaggatg

SEQ ID NO: 5031640 - DNA, 25 bp, Homo sapien
tggtcagtccacgacttagcaactg

SEQ ID NO: 5031641 - DNA, 25 bp, Homo sapien
tcccaaggtatgctacgttcctcag

SEQ ID NO: 5031642 - DNA, 25 bp, Homo sapien
catatatgcaactagaaatactgtc

SEQ ID NO: 5031643 - DNA, 25 bp, Homo sapien
tcaggtatcgttttgcttctagatg

SEQ ID NO: 5031644 - DNA, 25 bp, Homo sapien
cactcattcccaaagggtgctgtac

SEQ ID NO: 5031645 - DNA, 25 bp, Homo sapien
ggtgctgtacccaggcaaaatactc

SEQ ID NO: 5031646 - DNA, 25 bp, Homo sapien
caataggctatagtaggctgtacca

SEQ ID NO: 5031647 - DNA, 25 bp, Homo sapien
gagaacaaggcacatgcaaagcccc

SEQ ID NO: 5031648 - DNA, 25 bp, Homo sapien
aacatgaggcctagctaagatttcc

SEQ ID NO: 5031649 - DNA, 25 bp, Homo sapien
tgccagactctttgctaaggacagc

SEQ ID NO: 5031650 - DNA, 25 bp, Homo sapien
gcagagggctatctatgaatcagga

SEQ ID NO: 5031651 - DNA, 25 bp, Homo sapien
agggctttaattctgctgagggctg

SEQ ID NO: 5031652 - DNA, 25 bp, Homo sapien
tgtgaagacacaatgagcagagggc

SEQ ID NO: 5031653 - DNA, 25 bp, Homo sapien
aaaaggaccctagagaactctcttg

SEQ ID NO: 5031654 - DNA, 25 bp, Homo sapien
caattggccaattggtccaccatgt

SEQ ID NO: 5031655 - DNA, 25 bp, Homo sapien
actttgattggaggcaattttgtca

SEQ ID NO: 5031656 - DNA, 25 bp, Homo sapien
tgtcctcacaattggccaattggtc

SEQ ID NO: 5031657 - DNA, 25 bp, Homo sapien
gtaatgggagtataggtagtgataa

SEQ ID NO: 5031658 - DNA, 25 bp, Homo sapien
tagtcgttcgtccactttgatgtgt

SEQ ID NO: 5031659 - DNA, 25 bp, Homo sapien
tccttagagttatcccagaagtggc

SEQ ID NO: 5031660 - DNA, 25 bp, Homo sapien
tttgatgtgtatccccaccgctcct

SEQ ID NO: 5031661 - DNA, 25 bp, Homo sapien
tcctgtcaacaccatggagtagtcg

SEQ ID NO: 5031662 - DNA, 25 bp, Homo sapien
ttgccgtatctcttctggataagca

SEQ ID NO: 5031663 - DNA, 25 bp, Homo sapien
tattttgagtcctggcactgtgatg

SEQ ID NO: 5031664 - DNA, 25 bp, Homo sapien
ggaaatttcatctgtttcgcaaata

SEQ ID NO: 5031665 - DNA, 25 bp, Homo sapien
ctcgttatctttgccgtatctcttc

SEQ ID NO: 5031666 - DNA, 25 bp, Homo sapien
ttctgcgcaactgctcacaactgtg

SEQ ID NO: 5031667 - DNA, 25 bp, Homo sapien
agttctgcgcaactgctcacaactg

SEQ ID NO: 5031668 - DNA, 25 bp, Homo sapien
ctcagttctgcgcaactgctcacaa

SEQ ID NO: 5031669 - DNA, 25 bp, Homo sapien
tcagttctgcgcaactgctcacaac

SEQ ID NO: 5031670 - DNA, 25 bp, Homo sapien
tagggcagaaaacggctgctcataa

SEQ ID NO: 5031671 - DNA, 25 bp, Homo sapien
accgtgtcctcgtcaaggctgagca

SEQ ID NO: 5031672 - DNA, 25 bp, Homo sapien
tctgtgatgatgttgtcgtagggca

SEQ ID NO: 5031673 - DNA, 25 bp, Homo sapien
tctgttgttgaaagcaccgtgtcct

SEQ ID NO: 5031674 - DNA, 25 bp, Homo sapien
gtcattctggcgcaaaggtgtgagc

SEQ ID NO: 5031675 - DNA, 25 bp, Homo sapien
gactatttccttcacaatgcgtaag

SEQ ID NO: 5031676 - DNA, 25 bp, Homo sapien
tcaaggaggaggtagcatgcaaacg

SEQ ID NO: 5031677 - DNA, 25 bp, Homo sapien
tgtgagccactctcttatgacctga

SEQ ID NO: 5031678 - DNA, 25 bp, Homo sapien
ttgctctctccttcaatgacgacga

SEQ ID NO: 5031679 - DNA, 25 bp, Homo sapien
cttgctctctccttcaatgacgacg

SEQ ID NO: 5031680 - DNA, 25 bp, Homo sapien
cacagcagtggcaggccagcggtgt

SEQ ID NO: 5031681 - DNA, 25 bp, Homo sapien
tggtaggggcttgtcacaattccat

SEQ ID NO: 5031682 - DNA, 25 bp, Homo sapien
caggccagcggtgtttggctggtag

SEQ ID NO: 5031683 - DNA, 25 bp, Homo sapien
gtaggggcttgtcacaattccatag

SEQ ID NO: 5031684 - DNA, 25 bp, Homo sapien
gcagccacgagaagcttcaacactg

SEQ ID NO: 5031685 - DNA, 25 bp, Homo sapien
gggtcaccgcatggatgactgcagt

SEQ ID NO: 5031686 - DNA, 25 bp, Homo sapien
ccacgagaagcttcaacactggctg

SEQ ID NO: 5031687 - DNA, 25 bp, Homo sapien
cacagtactgggacttggctgcagc

SEQ ID NO: 5031688 - DNA, 25 bp, Homo sapien
aactgttacgtgatatgtgcttgaa

SEQ ID NO: 5031689 - DNA, 25 bp, Homo sapien
gatgaatactgtggtagtacgaaca

SEQ ID NO: 5031690 - DNA, 25 bp, Homo sapien
aatcctccaggatgtttgttccata

SEQ ID NO: 5031691 - DNA, 25 bp, Homo sapien
ggaaaatctcccagataagatgaat

SEQ ID NO: 5031692 - DNA, 25 bp, Homo sapien
attcccatcaggtctttggatggta

SEQ ID NO: 5031693 - DNA, 25 bp, Homo sapien
gtcacaaaatgggtcatcattccca

SEQ ID NO: 5031694 - DNA, 25 bp, Homo sapien
acaaaatgggtcatcattcccatca

SEQ ID NO: 5031695 - DNA, 25 bp, Homo sapien
aggtctttggatggtatgcttgtca

SEQ ID NO: 5031696 - DNA, 25 bp, Homo sapien
cacaactttgccacattgacgctgg

SEQ ID NO: 5031697 - DNA, 25 bp, Homo sapien
tggttggctggcttgcctaagtctt

SEQ ID NO: 5031698 - DNA, 25 bp, Homo sapien
tctgctgtcccgcaatgccattgga

SEQ ID NO: 5031699 - DNA, 25 bp, Homo sapien
ctaagtcttgagaattctgctgtcc

SEQ ID NO: 5031700 - DNA, 25 bp, Homo sapien
tgctaggattttatcctgatgaata

SEQ ID NO: 5031701 - DNA, 25 bp, Homo sapien
cctcccacaagaattgtgtctgctg

SEQ ID NO: 5031702 - DNA, 25 bp, Homo sapien
tgtctgctgtctaagtgctaggatt

SEQ ID NO: 5031703 - DNA, 25 bp, Homo sapien
taggattttatcctgatgaatagac

SEQ ID NO: 5031704 - DNA, 25 bp, Homo sapien
tgactaatccgacagatatgggagt

SEQ ID NO: 5031705 - DNA, 25 bp, Homo sapien
cataacatatgactaatccgacaga

SEQ ID NO: 5031706 - DNA, 25 bp, Homo sapien
gcttgcctccataacatatgactaa

SEQ ID NO: 5031707 - DNA, 25 bp, Homo sapien
tctttctgcatgcttgcctccataa

SEQ ID NO: 5031708 - DNA, 25 bp, Homo sapien
ctgcaacttcttttcagaatatatt

SEQ ID NO: 5031709 - DNA, 25 bp, Homo sapien
tgcaacttcttttcagaatatattc

SEQ ID NO: 5031710 - DNA, 25 bp, Homo sapien
tcttttcagaatatattctggggac

SEQ ID NO: 5031711 - DNA, 25 bp, Homo sapien
acttcttttcagaatatattctggg

SEQ ID NO: 5031712 - DNA, 25 bp, Homo sapien
tggacgggggcagcaataatctgct

SEQ ID NO: 5031713 - DNA, 25 bp, Homo sapien
aataatctgctgatgtgttgaaggc

SEQ ID NO: 5031714 - DNA, 25 bp, Homo sapien
tttgaaagtttggacgggggcagca

SEQ ID NO: 5031715 - DNA, 25 bp, Homo sapien
gcaataatctgctgatgtgttgaag

SEQ ID NO: 5031716 - DNA, 25 bp, Homo sapien
tggcaactcccatccattgctgagc

SEQ ID NO: 5031717 - DNA, 25 bp, Homo sapien
ccattgctgagcatcacagggacgc

SEQ ID NO: 5031718 - DNA, 25 bp, Homo sapien
gcctatgacggcagcttggttccaa

SEQ ID NO: 5031719 - DNA, 25 bp, Homo sapien
caattaatcacttcagagaatggca

SEQ ID NO: 5031720 - DNA, 25 bp, Homo sapien
aggacccaagcctgcgaccacgagg

SEQ ID NO: 5031721 - DNA, 25 bp, Homo sapien
tgtgcagcatttcccgataatcata

SEQ ID NO: 5031722 - DNA, 25 bp, Homo sapien
ccaagcctgcgaccacgaggaacca

SEQ ID NO: 5031723 - DNA, 25 bp, Homo sapien
ttgtgcagcatttcccgataatcat

SEQ ID NO: 5031724 - DNA, 25 bp, Homo sapien
gaggaaggaggttgggttgctgcat

SEQ ID NO: 5031725 - DNA, 25 bp, Homo sapien
gttgggttgctgcatgaagagtaaa

SEQ ID NO: 5031726 - DNA, 25 bp, Homo sapien
gaaggaggttgggttgctgcatgaa

SEQ ID NO: 5031727 - DNA, 25 bp, Homo sapien
gctgcatgaagagtaaacatgaatc

SEQ ID NO: 5031728 - DNA, 25 bp, Homo sapien
gcagtgcaatttagctggacacaca

SEQ ID NO: 5031729 - DNA, 25 bp, Homo sapien
ccatgttccattagattaagtgtgc

SEQ ID NO: 5031730 - DNA, 25 bp, Homo sapien
gcatttgtatggagggtgcacatac

SEQ ID NO: 5031731 - DNA, 25 bp, Homo sapien
taaatgatctaagaaagcagtgcaa

SEQ ID NO: 5031732 - DNA, 25 bp, Homo sapien
ctggtagtaaaagcctgggccaaag

SEQ ID NO: 5031733 - DNA, 25 bp, Homo sapien
tatgcagtataattggtgccattct

SEQ ID NO: 5031734 - DNA, 25 bp, Homo sapien
ttggacactgtgtttgggccctggt

SEQ ID NO: 5031735 - DNA, 25 bp, Homo sapien
tcaggttggccttcacagtgctgga

SEQ ID NO: 5031736 - DNA, 25 bp, Homo sapien
gggacaacatgggccccagtatagt

SEQ ID NO: 5031737 - DNA, 25 bp, Homo sapien
gctcagctagttgtaaatatgggcc

SEQ ID NO: 5031738 - DNA, 25 bp, Homo sapien
tatgggcctagcttcactttattgc

SEQ ID NO: 5031739 - DNA, 25 bp, Homo sapien
gaaggtctatggcaaccctaagcaa

SEQ ID NO: 5031740 - DNA, 25 bp, Homo sapien
tttccaacaacgtgctcaattcctg

SEQ ID NO: 5031741 - DNA, 25 bp, Homo sapien
tactatgcactagaacccagactgg

SEQ ID NO: 5031742 - DNA, 25 bp, Homo sapien
actggaacggtagtggtctgattcc

SEQ ID NO: 5031743 - DNA, 25 bp, Homo sapien
tatggtgcttaattttccagatgct

SEQ ID NO: 5031744 - DNA, 25 bp, Homo sapien
acaataactctaaaaggcaagtact

SEQ ID NO: 5031745 - DNA, 25 bp, Homo sapien
gggttctgtacatggactccccaaa

SEQ ID NO: 5031746 - DNA, 25 bp, Homo sapien
gaatctgggttctgtacatggactc

SEQ ID NO: 5031747 - DNA, 25 bp, Homo sapien
gcgcactagatatctctgcaaagtt

SEQ ID NO: 5031748 - DNA, 25 bp, Homo sapien
tccccaaaggacagtaaatcagcgc

SEQ ID NO: 5031749 - DNA, 25 bp, Homo sapien
ttcaggggaataccaactgagtttc

SEQ ID NO: 5031750 - DNA, 25 bp, Homo sapien
caggggaataccaactgagtttcta

SEQ ID NO: 5031751 - DNA, 25 bp, Homo sapien
aggggaataccaactgagtttctat

SEQ ID NO: 5031752 - DNA, 25 bp, Homo sapien
cattcaggggaataccaactgagtt

SEQ ID NO: 5031753 - DNA, 25 bp, Homo sapien
tagaacaaccaatctctgcagataa

SEQ ID NO: 5031754 - DNA, 25 bp, Homo sapien
agaacaaccaatctctgcagataag

SEQ ID NO: 5031755 - DNA, 25 bp, Homo sapien
ctgcagataagaatatccagtgctg

SEQ ID NO: 5031756 - DNA, 25 bp, Homo sapien
gaatatccagtgctgtaaatgcaac

SEQ ID NO: 5031757 - DNA, 25 bp, Homo sapien
tcatcaccacaagtccaggtttaga

SEQ ID NO: 5031758 - DNA, 25 bp, Homo sapien
aagtccaggtttagaatcttccagt

SEQ ID NO: 5031759 - DNA, 25 bp, Homo sapien
gaatcttccagtgattccattctag

SEQ ID NO: 5031760 - DNA, 25 bp, Homo sapien
ctcatcatcaccacaagtccaggtt

SEQ ID NO: 5031761 - DNA, 25 bp, Homo sapien
tgaaagctatactcctttgttgaga

SEQ ID NO: 5031762 - DNA, 25 bp, Homo sapien
ttgactaataggataataaggtggc

SEQ ID NO: 5031763 - DNA, 25 bp, Homo sapien
tgctcttgagcagctgtaattgact

SEQ ID NO: 5031764 - DNA, 25 bp, Homo sapien
gctatactcctttgttgagaatgcc

SEQ ID NO: 5031765 - DNA, 25 bp, Homo sapien
tacaggcacaggctaccacacccgg

SEQ ID NO: 5031766 - DNA, 25 bp, Homo sapien
caggcacaggctaccacacccggct

SEQ ID NO: 5031767 - DNA, 25 bp, Homo sapien
agtccaacggcccgatctcggttca

SEQ ID NO: 5031768 - DNA, 25 bp, Homo sapien
acggcccgatctcggttcacttcaa

SEQ ID NO: 5031769 - DNA, 25 bp, Homo sapien
tggagtccaacggcccgatctcggt

SEQ ID NO: 5031770 - DNA, 25 bp, Homo sapien
tccaacggcccgatctcggttcact

SEQ ID NO: 5031771 - DNA, 25 bp, Homo sapien
tgccacacattcagcaataggaaat

SEQ ID NO: 5031772 - DNA, 25 bp, Homo sapien
tagcacaggctgctgttcctaagcc

SEQ ID NO: 5031773 - DNA, 25 bp, Homo sapien
ccaagttgcagctaccaaagtaagt

SEQ ID NO: 5031774 - DNA, 25 bp, Homo sapien
tgctatatttgccaagttgcagcta

SEQ ID NO: 5031775 - DNA, 25 bp, Homo sapien
aaggtctctagggacaataacacgc

SEQ ID NO: 5031776 - DNA, 25 bp, Homo sapien
aagtagaatgagtgcactctaaaaa

SEQ ID NO: 5031777 - DNA, 25 bp, Homo sapien
ggtctctagggacaataacacgcat

SEQ ID NO: 5031778 - DNA, 25 bp, Homo sapien
gtagaatgagtgcactctaaaaata

SEQ ID NO: 5031779 - DNA, 25 bp, Homo sapien
agccctgacttctctataaaggatg

SEQ ID NO: 5031780 - DNA, 25 bp, Homo sapien
caaagtctactaatatcctgattat

SEQ ID NO: 5031781 - DNA, 25 bp, Homo sapien
ccccaaacaattctcagatcaaaca

SEQ ID NO: 5031782 - DNA, 25 bp, Homo sapien
gtagctttcctcaaggtatcccttc

SEQ ID NO: 5031783 - DNA, 25 bp, Homo sapien
caaagggttggagagaacaatcgac

SEQ ID NO: 5031784 - DNA, 25 bp, Homo sapien
tgaattcacctgcttactgttgagc

SEQ ID NO: 5031785 - DNA, 25 bp, Homo sapien
gttgagcacgctaacactttcagta

SEQ ID NO: 5031786 - DNA, 25 bp, Homo sapien
tcagtgggaaccctattgccttaaa

SEQ ID NO: 5031787 - DNA, 25 bp, Homo sapien
taaacatcggatacatttctatttc

SEQ ID NO: 5031788 - DNA, 25 bp, Homo sapien
aattaaagggcaatcgtaaacatcg

SEQ ID NO: 5031789 - DNA, 25 bp, Homo sapien
taaagggcaatcgtaaacatcggat

SEQ ID NO: 5031790 - DNA, 25 bp, Homo sapien
gggcaatcgtaaacatcggatacat

SEQ ID NO: 5031791 - DNA, 25 bp, Homo sapien
tacactgaattactgcgacagccag

SEQ ID NO: 5031792 - DNA, 25 bp, Homo sapien
cttcctgtgagagcttgagactgcc

SEQ ID NO: 5031793 - DNA, 25 bp, Homo sapien
cagttaaaccacacgagtaagggca

SEQ ID NO: 5031794 - DNA, 25 bp, Homo sapien
ttgctacttggaactacagcctggg

SEQ ID NO: 5031795 - DNA, 25 bp, Homo sapien
atgcagctttaaacagcacgagatg

SEQ ID NO: 5031796 - DNA, 25 bp, Homo sapien
tctgccaaatgacttccttgctgag

SEQ ID NO: 5031797 - DNA, 25 bp, Homo sapien
gcacagctatctgccaaatgacttc

SEQ ID NO: 5031798 - DNA, 25 bp, Homo sapien
cttgctgagcttcaaagcctcccgt

SEQ ID NO: 5031799 - DNA, 25 bp, Homo sapien
ggagacctttgttttagcctcacac

SEQ ID NO: 5031800 - DNA, 25 bp, Homo sapien
gagacctttgttttagcctcacaca

SEQ ID NO: 5031801 - DNA, 25 bp, Homo sapien
tggagaagtgggtcagcattatcat

SEQ ID NO: 5031802 - DNA, 25 bp, Homo sapien
gctgcatttcctgagagtaatgact

SEQ ID NO: 5031803 - DNA, 25 bp, Homo sapien
aataaaggctttgggcaaagcctcg

SEQ ID NO: 5031804 - DNA, 25 bp, Homo sapien
cgcctgcaactcctctagccagcat

SEQ ID NO: 5031805 - DNA, 25 bp, Homo sapien
aaagcctcgcctgcaactcctctag

SEQ ID NO: 5031806 - DNA, 25 bp, Homo sapien
tatctcccgaggtctaagtaaacaa

SEQ ID NO: 5031807 - DNA, 25 bp, Homo sapien
tgtcacagtcagtaaccgatccacc

SEQ ID NO: 5031808 - DNA, 25 bp, Homo sapien
cgttactagagtaggttggtagcca

SEQ ID NO: 5031809 - DNA, 25 bp, Homo sapien
catacagagtactttcccaaggagt

SEQ ID NO: 5031810 - DNA, 25 bp, Homo sapien
ggatgtgggtggctcgaggagactg

SEQ ID NO: 5031811 - DNA, 25 bp, Homo sapien
ggtccctgtaatccccaggtagctg

SEQ ID NO: 5031812 - DNA, 25 bp, Homo sapien
tccctgtaatccccaggtagctggc

SEQ ID NO: 5031813 - DNA, 25 bp, Homo sapien
cctgtaatccccaggtagctggctg

SEQ ID NO: 5031814 - DNA, 25 bp, Homo sapien
tttacttgacttaaagaagcggctg

SEQ ID NO: 5031815 - DNA, 25 bp, Homo sapien
tacttgacttaaagaagcggctggg

SEQ ID NO: 5031816 - DNA, 25 bp, Homo sapien
attctcagcatgtttacttgactta

SEQ ID NO: 5031817 - DNA, 25 bp, Homo sapien
tgaattctcagcatgtttacttgac

SEQ ID NO: 5031818 - DNA, 25 bp, Homo sapien
ttcgtatcacgtgggagcatgctag

SEQ ID NO: 5031819 - DNA, 25 bp, Homo sapien
gcgtgactggaataacactctctga

SEQ ID NO: 5031820 - DNA, 25 bp, Homo sapien
aaagctgcatcttggctcagtggga

SEQ ID NO: 5031821 - DNA, 25 bp, Homo sapien
gcaacacggagtataaagatgaccc

SEQ ID NO: 5031822 - DNA, 25 bp, Homo sapien
agctggattacaggcgcacaccatc

SEQ ID NO: 5031823 - DNA, 25 bp, Homo sapien
tagctggattacaggcgcacaccat

SEQ ID NO: 5031824 - DNA, 25 bp, Homo sapien
caacagcctgtggatctatactcca

SEQ ID NO: 5031825 - DNA, 25 bp, Homo sapien
tgtcacagactccactagtccactg

SEQ ID NO: 5031826 - DNA, 25 bp, Homo sapien
cattacatccatatccatgttctcc

SEQ ID NO: 5031827 - DNA, 25 bp, Homo sapien
gatgaggacctgagcctattccaac

SEQ ID NO: 5031828 - DNA, 25 bp, Homo sapien
tttaaactgtgttgaggggccaggc

SEQ ID NO: 5031829 - DNA, 25 bp, Homo sapien
caccacttgggaactgtctatcttc

SEQ ID NO: 5031830 - DNA, 25 bp, Homo sapien
ccaaattgctgattaacttacaaac

SEQ ID NO: 5031831 - DNA, 25 bp, Homo sapien
gagaagtcaacctagaaccctgata

SEQ ID NO: 5031832 - DNA, 25 bp, Homo sapien
tacaatggtaaaaaggagtgtgcca

SEQ ID NO: 5031833 - DNA, 25 bp, Homo sapien
gaaacccttcgagcatccatcagta

SEQ ID NO: 5031834 - DNA, 25 bp, Homo sapien
tggaagcctcccttgcctgtaaaaa

SEQ ID NO: 5031835 - DNA, 25 bp, Homo sapien
aatttggacccaatgcccactggca

SEQ ID NO: 5031836 - DNA, 25 bp, Homo sapien
tacacgaggaccagtcgtgggctcc

SEQ ID NO: 5031837 - DNA, 25 bp, Homo sapien
aatggagccaatcctatacacgagg

SEQ ID NO: 5031838 - DNA, 25 bp, Homo sapien
cacctggcaccgttcggagggattt

SEQ ID NO: 5031839 - DNA, 25 bp, Homo sapien
aaacagcaggcattgatccagggca

SEQ ID NO: 5031840 - DNA, 25 bp, Homo sapien
ccttaaccatgagcatatattcctg

SEQ ID NO: 5031841 - DNA, 25 bp, Homo sapien
tgttctgcccaattcaatcccgtga

SEQ ID NO: 5031842 - DNA, 25 bp, Homo sapien
aagatacccgcctccgtgaaggagg

SEQ ID NO: 5031843 - DNA, 25 bp, Homo sapien
gagtgcaaatacaccagagtgggca

SEQ ID NO: 5031844 - DNA, 25 bp, Homo sapien
gtttcagttgaaatggacttcctta

SEQ ID NO: 5031845 - DNA, 25 bp, Homo sapien
caacagatgttgaggtgatcttatc

SEQ ID NO: 5031846 - DNA, 25 bp, Homo sapien
gaaagcatatctgtgcagttcaaga

SEQ ID NO: 5031847 - DNA, 25 bp, Homo sapien
aaatgctaattccagctcaaagttg

SEQ ID NO: 5031848 - DNA, 25 bp, Homo sapien
ctctgtccatcactcgcttctgctt

SEQ ID NO: 5031849 - DNA, 25 bp, Homo sapien
tgtccatcactcgcttctgcttcat

SEQ ID NO: 5031850 - DNA, 25 bp, Homo sapien
ctgtccatcactcgcttctgcttca

SEQ ID NO: 5031851 - DNA, 25 bp, Homo sapien
tctgtccatcactcgcttctgcttc

SEQ ID NO: 5031852 - DNA, 25 bp, Homo sapien
tggcatatgggccttaggataaaaa

SEQ ID NO: 5031853 - DNA, 25 bp, Homo sapien
tatagtgaatgtaagcaaaaccagc

SEQ ID NO: 5031854 - DNA, 25 bp, Homo sapien
atttgcaagcatgaaacatacgtgc

SEQ ID NO: 5031855 - DNA, 25 bp, Homo sapien
gatcattggcttgaatatgctttgc

SEQ ID NO: 5031856 - DNA, 25 bp, Homo sapien
cacatcttgggaaattcgggctaca

SEQ ID NO: 5031857 - DNA, 25 bp, Homo sapien
tcttccccaccatgaacaaagggta

SEQ ID NO: 5031858 - DNA, 25 bp, Homo sapien
cagctagttagcatagggaccaggt

SEQ ID NO: 5031859 - DNA, 25 bp, Homo sapien
taacctggagtggaatcagtgccgc

SEQ ID NO: 5031860 - DNA, 25 bp, Homo sapien
gaaggaaaatgcgaaaagcagaccc

SEQ ID NO: 5031861 - DNA, 25 bp, Homo sapien
gacccagtccagaggagttaccatc

SEQ ID NO: 5031862 - DNA, 25 bp, Homo sapien
gagaagccccattatttggaatcca

SEQ ID NO: 5031863 - DNA, 25 bp, Homo sapien
ggcagggtccaaatcttttatgaga

SEQ ID NO: 5031864 - DNA, 25 bp, Homo sapien
tcttggtgatctaagtgctcacatc

SEQ ID NO: 5031865 - DNA, 25 bp, Homo sapien
catagtgggttagttgaaattcttg

SEQ ID NO: 5031866 - DNA, 25 bp, Homo sapien
accacactttgagcatagtgggtta

SEQ ID NO: 5031867 - DNA, 25 bp, Homo sapien
ctttcaagggattccaaggtacttg

SEQ ID NO: 5031868 - DNA, 25 bp, Homo sapien
cggaatcacacactagaggagagca

SEQ ID NO: 5031869 - DNA, 25 bp, Homo sapien
cacaagcggtgaatcctgggtaatc

SEQ ID NO: 5031870 - DNA, 25 bp, Homo sapien
gagaagatcctcatgccctgttatg

SEQ ID NO: 5031871 - DNA, 25 bp, Homo sapien
tgtatccatggagtgcagcagttct

SEQ ID NO: 5031872 - DNA, 25 bp, Homo sapien
attttttagttatatgccaatgcat

SEQ ID NO: 5031873 - DNA, 25 bp, Homo sapien
aattttttagttatatgccaatgca

SEQ ID NO: 5031874 - DNA, 25 bp, Homo sapien
accaaaagtgctgttaataacacag

SEQ ID NO: 5031875 - DNA, 25 bp, Homo sapien
tgcactgcctatgaacaaaggattg

SEQ ID NO: 5031876 - DNA, 25 bp, Homo sapien
taatgcatgagtaaggttgttccaa

SEQ ID NO: 5031877 - DNA, 25 bp, Homo sapien
gaaacttcgctctggttttccaaca

SEQ ID NO: 5031878 - DNA, 25 bp, Homo sapien
ggagggctgtaactaatctttgcac

SEQ ID NO: 5031879 - DNA, 25 bp, Homo sapien
caaacccactatttacgatgcaaca

SEQ ID NO: 5031880 - DNA, 25 bp, Homo sapien
tatgtgtttactgcaaagggctaca

SEQ ID NO: 5031881 - DNA, 25 bp, Homo sapien
ctctgaatttatcaacgttggctga

SEQ ID NO: 5031882 - DNA, 25 bp, Homo sapien
gcagcgttcttaggtatgatgacac

SEQ ID NO: 5031883 - DNA, 25 bp, Homo sapien
tgtggcaattaaggaacgcctccct

SEQ ID NO: 5031884 - DNA, 25 bp, Homo sapien
gctgaagcgggttgaacaagcatct

SEQ ID NO: 5031885 - DNA, 25 bp, Homo sapien
gcacattctgaaggcctgatggaga

SEQ ID NO: 5031886 - DNA, 25 bp, Homo sapien
tgtagacaggaagccgagtgccatg

SEQ ID NO: 5031887 - DNA, 25 bp, Homo sapien
ttatcttcaaacctgctcgggctgg

SEQ ID NO: 5031888 - DNA, 25 bp, Homo sapien
ccaagtgttgataggacagtcagtc

SEQ ID NO: 5031889 - DNA, 25 bp, Homo sapien
tgtagggcacaagcagcactttttg

SEQ ID NO: 5031890 - DNA, 25 bp, Homo sapien
tgcattctatctgcgcaggcactgg

SEQ ID NO: 5031891 - DNA, 25 bp, Homo sapien
aacactgaggtggtccctgtggaca

SEQ ID NO: 5031892 - DNA, 25 bp, Homo sapien
gcaaccgctgcctggtaatgccaaa

SEQ ID NO: 5031893 - DNA, 25 bp, Homo sapien
cagggaagtctactccaatgcgaag

SEQ ID NO: 5031894 - DNA, 25 bp, Homo sapien
gatagtagaggcaatggacgcaacc

SEQ ID NO: 5031895 - DNA, 25 bp, Homo sapien
aataaaaaatctgacaggtgcagtg

SEQ ID NO: 5031896 - DNA, 25 bp, Homo sapien
ctaaaaataaaaaatctgacaggtg

SEQ ID NO: 5031897 - DNA, 25 bp, Homo sapien
aggatcaatggggccaggagtttga

SEQ ID NO: 5031898 - DNA, 25 bp, Homo sapien
aaaataaaaaatctgacaggtgcag

SEQ ID NO: 5031899 - DNA, 25 bp, Homo sapien
ctaactgtcggatgcaatcagatac

SEQ ID NO: 5031900 - DNA, 25 bp, Homo sapien
tagccagtcatggtgatacacgtct

SEQ ID NO: 5031901 - DNA, 25 bp, Homo sapien
caacaagctgttttagtcaatctag

SEQ ID NO: 5031902 - DNA, 25 bp, Homo sapien
gatccatggagctagcaagtctaat

SEQ ID NO: 5031903 - DNA, 25 bp, Homo sapien
caatgatatccccttgggctatgga

SEQ ID NO: 5031904 - DNA, 25 bp, Homo sapien
tggttttcaatatgcatggcgtggg

SEQ ID NO: 5031905 - DNA, 25 bp, Homo sapien
gccagcatggtatgaggattctcta

SEQ ID NO: 5031906 - DNA, 25 bp, Homo sapien
tccaggattcctgctgataggcaac

SEQ ID NO: 5031907 - DNA, 25 bp, Homo sapien
gagcttcattatcatcaactgccat

SEQ ID NO: 5031908 - DNA, 25 bp, Homo sapien
tcacatttttatgagcttcattatc

SEQ ID NO: 5031909 - DNA, 25 bp, Homo sapien
ctatacatgccttcccaaccacctc

SEQ ID NO: 5031910 - DNA, 25 bp, Homo sapien
ccttcccaaccacctccttcacatt

SEQ ID NO: 5031911 - DNA, 25 bp, Homo sapien
tgctccccaaggaacccccaagatg

SEQ ID NO: 5031912 - DNA, 25 bp, Homo sapien
agtgaatcaccctgactgagcagcc

SEQ ID NO: 5031913 - DNA, 25 bp, Homo sapien
tgaatcaccctgactgagcagcctt

SEQ ID NO: 5031914 - DNA, 25 bp, Homo sapien
aatcaccctgactgagcagcctttc

SEQ ID NO: 5031915 - DNA, 25 bp, Homo sapien
ccaagcccatgcgaggtaaactgtt

SEQ ID NO: 5031916 - DNA, 25 bp, Homo sapien
catcagcattaggaaacatgagcca

SEQ ID NO: 5031917 - DNA, 25 bp, Homo sapien
tagcatcatgggcatgtctcaaagc

SEQ ID NO: 5031918 - DNA, 25 bp, Homo sapien
tccctgactaccttgacaaaggctg

SEQ ID NO: 5031919 - DNA, 25 bp, Homo sapien
tataaaccagtgattccaagaacag

SEQ ID NO: 5031920 - DNA, 25 bp, Homo sapien
taatgagggttacaactacgtaaga

SEQ ID NO: 5031921 - DNA, 25 bp, Homo sapien
tacacactctgctttactgacataa

SEQ ID NO: 5031922 - DNA, 25 bp, Homo sapien
gggctacacttagaaaaccatgacc

SEQ ID NO: 5031923 - DNA, 25 bp, Homo sapien
gagggatttccacgctattatatga

SEQ ID NO: 5031924 - DNA, 25 bp, Homo sapien
ctgcacagtatcctatggtattggc

SEQ ID NO: 5031925 - DNA, 25 bp, Homo sapien
gcattatgtatttaattagacacac

SEQ ID NO: 5031926 - DNA, 25 bp, Homo sapien
tttcacttcatgtattatggaggga

SEQ ID NO: 5031927 - DNA, 25 bp, Homo sapien
caagaaagctaagtctgattcaggg

SEQ ID NO: 5031928 - DNA, 25 bp, Homo sapien
tacctgagttgctaaagtaaacagt

SEQ ID NO: 5031929 - DNA, 25 bp, Homo sapien
tgattcagggacttatctcccctca

SEQ ID NO: 5031930 - DNA, 25 bp, Homo sapien
tcaccacactggtatgcagacactc

SEQ ID NO: 5031931 - DNA, 25 bp, Homo sapien
atgtggaaggcatctggaccgagcc

SEQ ID NO: 5031932 - DNA, 25 bp, Homo sapien
caactgtttccaaccgtaattggct

SEQ ID NO: 5031933 - DNA, 25 bp, Homo sapien
acaaccctgcacacgatcatgtaca

SEQ ID NO: 5031934 - DNA, 25 bp, Homo sapien
gaccgagcccagcactgccaaaaga

SEQ ID NO: 5031935 - DNA, 25 bp, Homo sapien
cagtataaggcttagcacccacgta

SEQ ID NO: 5031936 - DNA, 25 bp, Homo sapien
taagtgcaagaagtggaccaataga

SEQ ID NO: 5031937 - DNA, 25 bp, Homo sapien
tttctggaatgcaacgagacaggtt

SEQ ID NO: 5031938 - DNA, 25 bp, Homo sapien
ggcaaggtcccaatatttcctggaa

SEQ ID NO: 5031939 - DNA, 25 bp, Homo sapien
ggaaatcagatcacaggaggcatga

SEQ ID NO: 5031940 - DNA, 25 bp, Homo sapien
ttaacagaagaacaggaagtgggcc

SEQ ID NO: 5031941 - DNA, 25 bp, Homo sapien
gtgctaaatgccctaaatgaacagt

SEQ ID NO: 5031942 - DNA, 25 bp, Homo sapien
gaggcatgatccttgtagagcatga

SEQ ID NO: 5031943 - DNA, 25 bp, Homo sapien
caaaagtttctgacaatcactgcca

SEQ ID NO: 5031944 - DNA, 25 bp, Homo sapien
caagaaatgagaacccgaatcctga

SEQ ID NO: 5031945 - DNA, 25 bp, Homo sapien
caaagcggttttaggcacaggagaa

SEQ ID NO: 5031946 - DNA, 25 bp, Homo sapien
catgtcagctgatagtgagaattca

SEQ ID NO: 5031947 - DNA, 25 bp, Homo sapien
catatcatggatgtattagcaaaat

SEQ ID NO: 5031948 - DNA, 25 bp, Homo sapien
agatggcgagaagctaaggattaat

SEQ ID NO: 5031949 - DNA, 25 bp, Homo sapien
acatatcatggatgtattagcaaaa

SEQ ID NO: 5031950 - DNA, 25 bp, Homo sapien
cctttggaatcttgctgtgggtgat

SEQ ID NO: 5031951 - DNA, 25 bp, Homo sapien
gccaccttaagacaacgtttctgca

SEQ ID NO: 5031952 - DNA, 25 bp, Homo sapien
gagaaaactgttaaaggctgacaac

SEQ ID NO: 5031953 - DNA, 25 bp, Homo sapien
tctgcaacctgtacagaatctaatg

SEQ ID NO: 5031954 - DNA, 25 bp, Homo sapien
cagagggttacactcatcactggga

SEQ ID NO: 5031955 - DNA, 25 bp, Homo sapien
gattcagttaccaccagaaaagcag

SEQ ID NO: 5031956 - DNA, 25 bp, Homo sapien
gatgttcctacttgtacacagaggg

SEQ ID NO: 5031957 - DNA, 25 bp, Homo sapien
gatatggtctacaagtctaggctgc

SEQ ID NO: 5031958 - DNA, 25 bp, Homo sapien
ttttgaatatcaagcccgggcaagt

SEQ ID NO: 5031959 - DNA, 25 bp, Homo sapien
catggtgtaacttaaccctcaggct

SEQ ID NO: 5031960 - DNA, 25 bp, Homo sapien
tcctactcaatgtggtttgctagcc

SEQ ID NO: 5031961 - DNA, 25 bp, Homo sapien
ccgggcaagttagaaccatgcatca

SEQ ID NO: 5031962 - DNA, 25 bp, Homo sapien
ttggaatttggaggctccaagtcac

SEQ ID NO: 5031963 - DNA, 25 bp, Homo sapien
agtcactctccagagtcggtgtgcg

SEQ ID NO: 5031964 - DNA, 25 bp, Homo sapien
gaatttggaggctccaagtcactct

SEQ ID NO: 5031965 - DNA, 25 bp, Homo sapien
cggtgtgcggtaggcctgcaattcc

SEQ ID NO: 5031966 - DNA, 25 bp, Homo sapien
gccacaaatccaattactaataaga

SEQ ID NO: 5031967 - DNA, 25 bp, Homo sapien
taaaactaggatgcaatccttgtca

SEQ ID NO: 5031968 - DNA, 25 bp, Homo sapien
aagttcagcattttaaaactaggat

SEQ ID NO: 5031969 - DNA, 25 bp, Homo sapien
ctgccacaaatccaattactaataa

SEQ ID NO: 5031970 - DNA, 25 bp, Homo sapien
tactgtaacctaagaatgagccctt

SEQ ID NO: 5031971 - DNA, 25 bp, Homo sapien
cagtttagtcacaaacccttgagga

SEQ ID NO: 5031972 - DNA, 25 bp, Homo sapien
tctcttgcctgggatagtaaatcgc

SEQ ID NO: 5031973 - DNA, 25 bp, Homo sapien
tgcttaatgacaccagtattcaggc

SEQ ID NO: 5031974 - DNA, 25 bp, Homo sapien
tgctttgtcctaagaatctccaggg

SEQ ID NO: 5031975 - DNA, 25 bp, Homo sapien
tgttatccaggtatactcaagcaag

SEQ ID NO: 5031976 - DNA, 25 bp, Homo sapien
gaaacactggcctcaaaaacactcg

SEQ ID NO: 5031977 - DNA, 25 bp, Homo sapien
gaaaatgccaatgtctgccctcgag

SEQ ID NO: 5031978 - DNA, 25 bp, Homo sapien
tctccactgaaaaccgaaagactca

SEQ ID NO: 5031979 - DNA, 25 bp, Homo sapien
tttgatgatgtgtctgcttccaggc

SEQ ID NO: 5031980 - DNA, 25 bp, Homo sapien
tattttgggtgagttagttccagcc

SEQ ID NO: 5031981 - DNA, 25 bp, Homo sapien
ggcagcaggaacatatactatagag

SEQ ID NO: 5031982 - DNA, 25 bp, Homo sapien
gaagacctcaacaggttttgtgcca

SEQ ID NO: 5031983 - DNA, 25 bp, Homo sapien
tgtaacaactccgaagggcagacgt

SEQ ID NO: 5031984 - DNA, 25 bp, Homo sapien
cagacgcactccaacaagaagaatg

SEQ ID NO: 5031985 - DNA, 25 bp, Homo sapien
gaagaatgtaggtcccctcagggca

SEQ ID NO: 5031986 - DNA, 25 bp, Homo sapien
gtacaatgaaaagaccaccgactgg

SEQ ID NO: 5031987 - DNA, 25 bp, Homo sapien
accgactggtactatcaacatgcca

SEQ ID NO: 5031988 - DNA, 25 bp, Homo sapien
tacaatgaaaagaccaccgactggt

SEQ ID NO: 5031989 - DNA, 25 bp, Homo sapien
accaccgactggtactatcaacatg

SEQ ID NO: 5031990 - DNA, 25 bp, Homo sapien
ccatgctacaattgcaacaaggcag

SEQ ID NO: 5031991 - DNA, 25 bp, Homo sapien
gcttccttcaagaacacccatgcta

SEQ ID NO: 5031992 - DNA, 25 bp, Homo sapien
aattggatagcaaacctactgggcc

SEQ ID NO: 5031993 - DNA, 25 bp, Homo sapien
tgggccagtgtcatcttcaactctg

SEQ ID NO: 5031994 - DNA, 25 bp, Homo sapien
tgctctggtgtctcccctgttaaag

SEQ ID NO: 5031995 - DNA, 25 bp, Homo sapien
ggagcacaaagaaggattctaagaa

SEQ ID NO: 5031996 - DNA, 25 bp, Homo sapien
gccagctgcataaatgaggaccccc

SEQ ID NO: 5031997 - DNA, 25 bp, Homo sapien
gggagccccataaggtctttgatac

SEQ ID NO: 5031998 - DNA, 25 bp, Homo sapien
gcttgtatgcctaacaccaaattaa

SEQ ID NO: 5031999 - DNA, 25 bp, Homo sapien
caagttcgtacaacaccatgtccaa

SEQ ID NO: 5032000 - DNA, 25 bp, Homo sapien
tctgtcattagattaccctgcttgt

SEQ ID NO: 5032001 - DNA, 25 bp, Homo sapien
ctgaactccaagatggacagttgct

SEQ ID NO: 5032002 - DNA, 25 bp, Homo sapien
tggaaagcttcaggcaacgcacaga

SEQ ID NO: 5032003 - DNA, 25 bp, Homo sapien
tccatgagcatcagctaaggcctgc

SEQ ID NO: 5032004 - DNA, 25 bp, Homo sapien
ggaactcaaaccaaggcagtgactg

SEQ ID NO: 5032005 - DNA, 25 bp, Homo sapien
taaaggaatggccacatagagcgac

SEQ ID NO: 5032006 - DNA, 25 bp, Homo sapien
aagccaactaaatccaactccaggg

SEQ ID NO: 5032007 - DNA, 25 bp, Homo sapien
cagtctggctgtgcattaaaatcgc

SEQ ID NO: 5032008 - DNA, 25 bp, Homo sapien
gaatatgtgatcgaacctgaaggcc

SEQ ID NO: 5032009 - DNA, 25 bp, Homo sapien
ggaacctgcattggaattctgactc

SEQ ID NO: 5032010 - DNA, 25 bp, Homo sapien
aaaggtttgaaatgacactcccaca

SEQ ID NO: 5032011 - DNA, 25 bp, Homo sapien
gccagaaggacaagaaatgccccat

SEQ ID NO: 5032012 - DNA, 25 bp, Homo sapien
taagcagcagattcagacagcaacc

SEQ ID NO: 5032013 - DNA, 25 bp, Homo sapien
taaaccttcatcttcacgcagggaa

SEQ ID NO: 5032014 - DNA, 25 bp, Homo sapien
tctgtgtgaacagaggacctgaggt

SEQ ID NO: 5032015 - DNA, 25 bp, Homo sapien
gaacagaggacctgaggtaaggcaa

SEQ ID NO: 5032016 - DNA, 25 bp, Homo sapien
cctgaggtaaggcaatgaacccgaa

SEQ ID NO: 5032017 - DNA, 25 bp, Homo sapien
gcaatgaacccgaaatatttgtaac

SEQ ID NO: 5032018 - DNA, 25 bp, Homo sapien
tgtgcaaggccatagaagaagctcc

SEQ ID NO: 5032019 - DNA, 25 bp, Homo sapien
ggtcagttgcttcaggtaaacccaa

SEQ ID NO: 5032020 - DNA, 25 bp, Homo sapien
ggtgaaggcaccacaaaacattggc

SEQ ID NO: 5032021 - DNA, 25 bp, Homo sapien
tgtttccaaacacggagtgctggtc

SEQ ID NO: 5032022 - DNA, 25 bp, Homo sapien
tctgcattccactcataacatctac

SEQ ID NO: 5032023 - DNA, 25 bp, Homo sapien
tcagttaccactctgcattccactc

SEQ ID NO: 5032024 - DNA, 25 bp, Homo sapien
cagttaccactctgcattccactca

SEQ ID NO: 5032025 - DNA, 25 bp, Homo sapien
accactctgcattccactcataaca

SEQ ID NO: 5032026 - DNA, 25 bp, Homo sapien
gtccccaggggccttagaggatcaa

SEQ ID NO: 5032027 - DNA, 25 bp, Homo sapien
ttgtacactctcaggaagccagtcc

SEQ ID NO: 5032028 - DNA, 25 bp, Homo sapien
gatggcaaccaccaacttgtacact

SEQ ID NO: 5032029 - DNA, 25 bp, Homo sapien
gccttagaggatcaaggaggttctc

SEQ ID NO: 5032030 - DNA, 25 bp, Homo sapien
ctggtgacttgctggtaagggccat

SEQ ID NO: 5032031 - DNA, 25 bp, Homo sapien
tgatgggaccacctacttcacaaca

SEQ ID NO: 5032032 - DNA, 25 bp, Homo sapien
tagtaactatagtgctaatcaaggc

SEQ ID NO: 5032033 - DNA, 25 bp, Homo sapien
cagtctggacagaggtgaaccatga

SEQ ID NO: 5032034 - DNA, 25 bp, Homo sapien
aagctttgctgaagtgccaactgcg

SEQ ID NO: 5032035 - DNA, 25 bp, Homo sapien
caaattcagcagactgttttgctgt

SEQ ID NO: 5032036 - DNA, 25 bp, Homo sapien
tccttgcttcggtttacaactagac

SEQ ID NO: 5032037 - DNA, 25 bp, Homo sapien
tacacttagtaagaccagagctaca

SEQ ID NO: 5032038 - DNA, 25 bp, Homo sapien
tacaactagactctcctgtgagatc

SEQ ID NO: 5032039 - DNA, 25 bp, Homo sapien
taagtatctgcctgaccttggacat

SEQ ID NO: 5032040 - DNA, 25 bp, Homo sapien
tctgaagtggatacaaggaaagatc

SEQ ID NO: 5032041 - DNA, 25 bp, Homo sapien
ggtgaggaactaaactgtggcaaaa

SEQ ID NO: 5032042 - DNA, 25 bp, Homo sapien
gcatattgtgttgggcattcaggaa

SEQ ID NO: 5032043 - DNA, 25 bp, Homo sapien
tacagggagatcacaccagtttttg

SEQ ID NO: 5032044 - DNA, 25 bp, Homo sapien
ttaactcagcaaggataagaccagt

SEQ ID NO: 5032045 - DNA, 25 bp, Homo sapien
tgcaagtctggcaaactccgaagtt

SEQ ID NO: 5032046 - DNA, 25 bp, Homo sapien
taagcaggttggttcggcaaagctg

SEQ ID NO: 5032047 - DNA, 25 bp, Homo sapien
tgggactctagtatcacgtgaacaa

SEQ ID NO: 5032048 - DNA, 25 bp, Homo sapien
tattcaatagacaagagactttcct

SEQ ID NO: 5032049 - DNA, 25 bp, Homo sapien
tttattcagtccaagcctaagctgc

SEQ ID NO: 5032050 - DNA, 25 bp, Homo sapien
agctttagagcttccactattgccc

SEQ ID NO: 5032051 - DNA, 25 bp, Homo sapien
caaggaccagggtgaaaatctacct

SEQ ID NO: 5032052 - DNA, 25 bp, Homo sapien
tacagtaatgtaacaccgatggtgc

SEQ ID NO: 5032053 - DNA, 25 bp, Homo sapien
ttgagagccatgtcgtcaacagcag

SEQ ID NO: 5032054 - DNA, 25 bp, Homo sapien
ataaagattagctatgatccaggcc

SEQ ID NO: 5032055 - DNA, 25 bp, Homo sapien
caggagcgggaaccttctggaaatc

SEQ ID NO: 5032056 - DNA, 25 bp, Homo sapien
tgtaactgttccctccatcctggct

SEQ ID NO: 5032057 - DNA, 25 bp, Homo sapien
caagaggtatgagcactaaaaaggg

SEQ ID NO: 5032058 - DNA, 25 bp, Homo sapien
gctagaaaagggatctcaagaggta

SEQ ID NO: 5032059 - DNA, 25 bp, Homo sapien
gattgccatctaatgatagtacctc

SEQ ID NO: 5032060 - DNA, 25 bp, Homo sapien
tatcatgtaagtgggtgtagtaaac

SEQ ID NO: 5032061 - DNA, 25 bp, Homo sapien
tagagcattttgcagtgtctgtcag

SEQ ID NO: 5032062 - DNA, 25 bp, Homo sapien
taattgtgccagtgcctggtctcag

SEQ ID NO: 5032063 - DNA, 25 bp, Homo sapien
ctgtattaatatgggataaaattac

SEQ ID NO: 5032064 - DNA, 25 bp, Homo sapien
atagttctttgtttgcgctgacaca

SEQ ID NO: 5032065 - DNA, 25 bp, Homo sapien
ttctttgtttgcgctgacacagtga

SEQ ID NO: 5032066 - DNA, 25 bp, Homo sapien
tagttctttgtttgcgctgacacag

SEQ ID NO: 5032067 - DNA, 25 bp, Homo sapien
agttctttgtttgcgctgacacagt

SEQ ID NO: 5032068 - DNA, 25 bp, Homo sapien
cagaggtaatggtgcagtgagtttt

SEQ ID NO: 5032069 - DNA, 25 bp, Homo sapien
agaggtaatggtgcagtgagttttt

SEQ ID NO: 5032070 - DNA, 25 bp, Homo sapien
gaggtaatggtgcagtgagtttttt

SEQ ID NO: 5032071 - DNA, 25 bp, Homo sapien
tatctcacaagaaacgaatgctgca

SEQ ID NO: 5032072 - DNA, 25 bp, Homo sapien
gatgatacctctttagcttgctaca

SEQ ID NO: 5032073 - DNA, 25 bp, Homo sapien
gcacttggtactggagttttaagac

SEQ ID NO: 5032074 - DNA, 25 bp, Homo sapien
gcttgctacaggaattcttcagacc

SEQ ID NO: 5032075 - DNA, 25 bp, Homo sapien
tgtggacggcattcatcagaaatag

SEQ ID NO: 5032076 - DNA, 25 bp, Homo sapien
gagcaagaatgacctgatactggac

SEQ ID NO: 5032077 - DNA, 25 bp, Homo sapien
cctccatcggtgaagcatgctgtgg

SEQ ID NO: 5032078 - DNA, 25 bp, Homo sapien
tatagccatccaagacacgaggagc

SEQ ID NO: 5032079 - DNA, 25 bp, Homo sapien
gagaaaggggccagcgacccgtgaa

SEQ ID NO: 5032080 - DNA, 25 bp, Homo sapien
ccagcgacccgtgaagagccaggaa

SEQ ID NO: 5032081 - DNA, 25 bp, Homo sapien
tctgtcccagacattcgcccctttt

SEQ ID NO: 5032082 - DNA, 25 bp, Homo sapien
caggaatgcatccgagggagctcca

SEQ ID NO: 5032083 - DNA, 25 bp, Homo sapien
tattgtgctcccgtgaagttcaaag

SEQ ID NO: 5032084 - DNA, 25 bp, Homo sapien
tgctcccgtgaagttcaaaggaaag

SEQ ID NO: 5032085 - DNA, 25 bp, Homo sapien
gaaaggaccgtctgtccgggctgct

SEQ ID NO: 5032086 - DNA, 25 bp, Homo sapien
aaggaccgtctgtccgggctgctga

SEQ ID NO: 5032087 - DNA, 25 bp, Homo sapien
cgcggccaccaccttagttgcctcg

SEQ ID NO: 5032088 - DNA, 25 bp, Homo sapien
gcggccaccaccttagttgcctcgt

SEQ ID NO: 5032089 - DNA, 25 bp, Homo sapien
ccaccaccttagttgcctcgtaggg

SEQ ID NO: 5032090 - DNA, 25 bp, Homo sapien
ggccaccaccttagttgcctcgtag

SEQ ID NO: 5032091 - DNA, 25 bp, Homo sapien
cccaggccactctagttttaggcac

SEQ ID NO: 5032092 - DNA, 25 bp, Homo sapien
tcccgatactgcagctggacaaaag

SEQ ID NO: 5032093 - DNA, 25 bp, Homo sapien
gaagagaggctgatctatgtgttcc

SEQ ID NO: 5032094 - DNA, 25 bp, Homo sapien
taggcaccttgaccgtgttgtgtct

SEQ ID NO: 5032095 - DNA, 25 bp, Homo sapien
ggtcaccaatgagcaaggagcttcc

SEQ ID NO: 5032096 - DNA, 25 bp, Homo sapien
tccttactgaggcatatgcagccag

SEQ ID NO: 5032097 - DNA, 25 bp, Homo sapien
caaggtagtatgctaggaatgccaa

SEQ ID NO: 5032098 - DNA, 25 bp, Homo sapien
taacaaggcttcctaggtcatgacc

SEQ ID NO: 5032099 - DNA, 25 bp, Homo sapien
tttgcctaaggatttattcagaggg

SEQ ID NO: 5032100 - DNA, 25 bp, Homo sapien
cgtaaggtattgcaatcctaaggcc

SEQ ID NO: 5032101 - DNA, 25 bp, Homo sapien
tcagccggctggtgtttttgtactt

SEQ ID NO: 5032102 - DNA, 25 bp, Homo sapien
tattcagaggggtgacaatacctgc

SEQ ID NO: 5032103 - DNA, 25 bp, Homo sapien
tgttggccctcctttactaaataca

SEQ ID NO: 5032104 - DNA, 25 bp, Homo sapien
tctgcaggcgttgggcataatcaaa

SEQ ID NO: 5032105 - DNA, 25 bp, Homo sapien
tttttgccaccgaaagaacctgagc

SEQ ID NO: 5032106 - DNA, 25 bp, Homo sapien
ttaaaactcggccaataataatgcc

SEQ ID NO: 5032107 - DNA, 25 bp, Homo sapien
tttcctacccacatgcccggtgaaa

SEQ ID NO: 5032108 - DNA, 25 bp, Homo sapien
acatgcccggtgaaatctctgctgg

SEQ ID NO: 5032109 - DNA, 25 bp, Homo sapien
atttcaaatggttttctcacacgtc

SEQ ID NO: 5032110 - DNA, 25 bp, Homo sapien
caaatggttttctcacacgtctttc

SEQ ID NO: 5032111 - DNA, 25 bp, Homo sapien
tggtatttccagtaagcacgcaaag

SEQ ID NO: 5032112 - DNA, 25 bp, Homo sapien
gcccagcgctggatagaaacaatga

SEQ ID NO: 5032113 - DNA, 25 bp, Homo sapien
tgaattcgccacttcaaggctcgtg

SEQ ID NO: 5032114 - DNA, 25 bp, Homo sapien
cattacacaactgggaacaagagcc

SEQ ID NO: 5032115 - DNA, 25 bp, Homo sapien
cagagtgctctctgacctaaaaaag

SEQ ID NO: 5032116 - DNA, 25 bp, Homo sapien
cggttttagaatccacagagtgctc

SEQ ID NO: 5032117 - DNA, 25 bp, Homo sapien
cacagagtgctctctgacctaaaaa

SEQ ID NO: 5032118 - DNA, 25 bp, Homo sapien
ttctggaaggcggttttagaatcca

SEQ ID NO: 5032119 - DNA, 25 bp, Homo sapien
gatggtcccttggtaactgctagag

SEQ ID NO: 5032120 - DNA, 25 bp, Homo sapien
tgtagaaaaccatgcatgtccctgg

SEQ ID NO: 5032121 - DNA, 25 bp, Homo sapien
gactcagactggaggcaaggctttt

SEQ ID NO: 5032122 - DNA, 25 bp, Homo sapien
tgtgcaagcacaagccttcagagga

SEQ ID NO: 5032123 - DNA, 25 bp, Homo sapien
tgcagacagttagcaaggaggctct

SEQ ID NO: 5032124 - DNA, 25 bp, Homo sapien
tttgcagacagttagcaaggaggct

SEQ ID NO: 5032125 - DNA, 25 bp, Homo sapien
tcatttgcagacagttagcaaggag

SEQ ID NO: 5032126 - DNA, 25 bp, Homo sapien
cagacagttagcaaggaggctctgg

SEQ ID NO: 5032127 - DNA, 25 bp, Homo sapien
tcaaagaacataaactgcacccggc

SEQ ID NO: 5032128 - DNA, 25 bp, Homo sapien
gaagttgctagagagttccgctaca

SEQ ID NO: 5032129 - DNA, 25 bp, Homo sapien
ctactatttcgaacctcaaggaggg

SEQ ID NO: 5032130 - DNA, 25 bp, Homo sapien
caaatgggattcaagggctacagcc

SEQ ID NO: 5032131 - DNA, 25 bp, Homo sapien
cctgtctaaattccagaattttcca

SEQ ID NO: 5032132 - DNA, 25 bp, Homo sapien
tgcccctgtctaaattccagaattt

SEQ ID NO: 5032133 - DNA, 25 bp, Homo sapien
tgtctaaattccagaattttccaag

SEQ ID NO: 5032134 - DNA, 25 bp, Homo sapien
tctaaattccagaattttccaaggc

SEQ ID NO: 5032135 - DNA, 25 bp, Homo sapien
gaaagacataaggaggacgatccaa

SEQ ID NO: 5032136 - DNA, 25 bp, Homo sapien
taaggaggacgatccaagcctgaat

SEQ ID NO: 5032137 - DNA, 25 bp, Homo sapien
ctgaaagacataaggaggacgatcc

SEQ ID NO: 5032138 - DNA, 25 bp, Homo sapien
gacataaggaggacgatccaagcct

SEQ ID NO: 5032139 - DNA, 25 bp, Homo sapien
tgtaatacaagcacctgatgatgag

SEQ ID NO: 5032140 - DNA, 25 bp, Homo sapien
ttcgaaagtccctccgcacgtgttg

SEQ ID NO: 5032141 - DNA, 25 bp, Homo sapien
cacctgccggtgtggacagaaaaac

SEQ ID NO: 5032142 - DNA, 25 bp, Homo sapien
tatacagggcaagagaataccggga

SEQ ID NO: 5032143 - DNA, 25 bp, Homo sapien
ggagaaacttcccatttgaacatga

SEQ ID NO: 5032144 - DNA, 25 bp, Homo sapien
gacaagaaactctgggtgaaccagc

SEQ ID NO: 5032145 - DNA, 25 bp, Homo sapien
ggaatgcctgagctacaaaccaaag

SEQ ID NO: 5032146 - DNA, 25 bp, Homo sapien
gaacttggagtaggaacaggaatgc

SEQ ID NO: 5032147 - DNA, 25 bp, Homo sapien
tgtctgaggcatcaaggaagtgact

SEQ ID NO: 5032148 - DNA, 25 bp, Homo sapien
tctggaagaagtcagatgcagctgg

SEQ ID NO: 5032149 - DNA, 25 bp, Homo sapien
agtgactctggaagaagtcagatgc

SEQ ID NO: 5032150 - DNA, 25 bp, Homo sapien
gactctggaagaagtcagatgcagc

SEQ ID NO: 5032151 - DNA, 25 bp, Homo sapien
cctgaggagggtgtagaacacattc

SEQ ID NO: 5032152 - DNA, 25 bp, Homo sapien
ggtgttggacttggaagcacattca

SEQ ID NO: 5032153 - DNA, 25 bp, Homo sapien
cattcttgggcattgggccagctgt

SEQ ID NO: 5032154 - DNA, 25 bp, Homo sapien
acaggcagggcagtaggtgttggac

SEQ ID NO: 5032155 - DNA, 25 bp, Homo sapien
cttatatttgggttaccagctgtcc

SEQ ID NO: 5032156 - DNA, 25 bp, Homo sapien
tatttgggttaccagctgtcctttc

SEQ ID NO: 5032157 - DNA, 25 bp, Homo sapien
tttcttcccagtactatctgcaaga

SEQ ID NO: 5032158 - DNA, 25 bp, Homo sapien
actatctgcaagaatccctctttca

SEQ ID NO: 5032159 - DNA, 25 bp, Homo sapien
caagagtggcaacatgacagggcag

SEQ ID NO: 5032160 - DNA, 25 bp, Homo sapien
gatatggcttcaacagcgcctgcca

SEQ ID NO: 5032161 - DNA, 25 bp, Homo sapien
taatatgaatggctctccccagcaa

SEQ ID NO: 5032162 - DNA, 25 bp, Homo sapien
gctgttttcacaagaggatgaccac

SEQ ID NO: 5032163 - DNA, 25 bp, Homo sapien
aaaagtcaatccgactggtctcctc

SEQ ID NO: 5032164 - DNA, 25 bp, Homo sapien
agtcaatccgactggtctcctccag

SEQ ID NO: 5032165 - DNA, 25 bp, Homo sapien
tggaaaagtcaatccgactggtctc

SEQ ID NO: 5032166 - DNA, 25 bp, Homo sapien
ggaaaagtcaatccgactggtctcc

SEQ ID NO: 5032167 - DNA, 25 bp, Homo sapien
aaagactggccagtggttggaagac

SEQ ID NO: 5032168 - DNA, 25 bp, Homo sapien
ccagtggttggaagacacacacagg

SEQ ID NO: 5032169 - DNA, 25 bp, Homo sapien
tggacgagagaattcaggaaagact

SEQ ID NO: 5032170 - DNA, 25 bp, Homo sapien
gtggttggaagacacacacagggcc

SEQ ID NO: 5032171 - DNA, 25 bp, Homo sapien
ttcgagaccagcctgaccacatgga

SEQ ID NO: 5032172 - DNA, 25 bp, Homo sapien
catggagaaaccccgtctctactaa

SEQ ID NO: 5032173 - DNA, 25 bp, Homo sapien
aaatacaaaattagccgagtgtggt

SEQ ID NO: 5032174 - DNA, 25 bp, Homo sapien
gtgggcggatcaccgaaggtcggga

SEQ ID NO: 5032175 - DNA, 25 bp, Homo sapien
gcctgtgtataacgcttataatttt

SEQ ID NO: 5032176 - DNA, 25 bp, Homo sapien
ctcagcctgtgtataacgcttataa

SEQ ID NO: 5032177 - DNA, 25 bp, Homo sapien
gctcagcctgtgtataacgcttata

SEQ ID NO: 5032178 - DNA, 25 bp, Homo sapien
cagcctgtgtataacgcttataatt

SEQ ID NO: 5032179 - DNA, 25 bp, Homo sapien
caaataacaggtactcagcaaatct

SEQ ID NO: 5032180 - DNA, 25 bp, Homo sapien
ttaattccgcacaacctgaagcatg

SEQ ID NO: 5032181 - DNA, 25 bp, Homo sapien
tgttctgatgacatggccactgcat

SEQ ID NO: 5032182 - DNA, 25 bp, Homo sapien
gaagcatgtacatgttccatgcagg

SEQ ID NO: 5032183 - DNA, 25 bp, Homo sapien
gcattctggtgctacccttgtcact

SEQ ID NO: 5032184 - DNA, 25 bp, Homo sapien
tcaagggtgcctgagaatagaaatg

SEQ ID NO: 5032185 - DNA, 25 bp, Homo sapien
gaaatgaaagactgcagatcaaggc

SEQ ID NO: 5032186 - DNA, 25 bp, Homo sapien
taagagaaatcccataacaaacacc

SEQ ID NO: 5032187 - DNA, 25 bp, Homo sapien
tagagcacccctgaagcagtctgaa

SEQ ID NO: 5032188 - DNA, 25 bp, Homo sapien
ttttcaatctagtcatcaggctgca

SEQ ID NO: 5032189 - DNA, 25 bp, Homo sapien
tcaaaagtcacaccatgagtcagta

SEQ ID NO: 5032190 - DNA, 25 bp, Homo sapien
cacaggtgagacagaagtcattgct

SEQ ID NO: 5032191 - DNA, 25 bp, Homo sapien
gatcacgtctacagacctaacttca

SEQ ID NO: 5032192 - DNA, 25 bp, Homo sapien
agacctaacttcaatatcgcctcca

SEQ ID NO: 5032193 - DNA, 25 bp, Homo sapien
gtctacagacctaacttcaatatcg

SEQ ID NO: 5032194 - DNA, 25 bp, Homo sapien
acagatcacgtctacagacctaact

SEQ ID NO: 5032195 - DNA, 25 bp, Homo sapien
ggcatatcttgacttgaggagttct

SEQ ID NO: 5032196 - DNA, 25 bp, Homo sapien
ttgacttgaggagttctgcatctca

SEQ ID NO: 5032197 - DNA, 25 bp, Homo sapien
gactggcatatcttgacttgaggag

SEQ ID NO: 5032198 - DNA, 25 bp, Homo sapien
gagagactggcatatcttgacttga

SEQ ID NO: 5032199 - DNA, 25 bp, Homo sapien
ggtgctccaggcttttcagtttgcc

SEQ ID NO: 5032200 - DNA, 25 bp, Homo sapien
gcttttcagtttgcccgaggagctc

SEQ ID NO: 5032201 - DNA, 25 bp, Homo sapien
cacccgaaccggatttgctcagttc

SEQ ID NO: 5032202 - DNA, 25 bp, Homo sapien
gaggagctccaactctctgtcccca

SEQ ID NO: 5032203 - DNA, 25 bp, Homo sapien
ggcattcctggtgtctgatcctatc

SEQ ID NO: 5032204 - DNA, 25 bp, Homo sapien
tctgtcacagcgagaatccttgtgc

SEQ ID NO: 5032205 - DNA, 25 bp, Homo sapien
tatggacgtgatataaggcattcct

SEQ ID NO: 5032206 - DNA, 25 bp, Homo sapien
gagcacaacgtcctccccgttatgg

SEQ ID NO: 5032207 - DNA, 25 bp, Homo sapien
ccccttgaataccagcatgtacttc

SEQ ID NO: 5032208 - DNA, 25 bp, Homo sapien
tcttccccttgaataccagcatgta

SEQ ID NO: 5032209 - DNA, 25 bp, Homo sapien
tccccttgaataccagcatgtactt

SEQ ID NO: 5032210 - DNA, 25 bp, Homo sapien
ttccccttgaataccagcatgtact

SEQ ID NO: 5032211 - DNA, 25 bp, Homo sapien
tagaaacatcaaagttgggtcggaa

SEQ ID NO: 5032212 - DNA, 25 bp, Homo sapien
tagaaaagaggggaatagaaacatc

SEQ ID NO: 5032213 - DNA, 25 bp, Homo sapien
cggaagttttcagtactgatgctgg

SEQ ID NO: 5032214 - DNA, 25 bp, Homo sapien
ttgggtcggaagttttcagtactga

SEQ ID NO: 5032215 - DNA, 25 bp, Homo sapien
gtcaggccaagtgccggaatataaa

SEQ ID NO: 5032216 - DNA, 25 bp, Homo sapien
tcctcggtgtagtcaggccaagtgc

SEQ ID NO: 5032217 - DNA, 25 bp, Homo sapien
gatgtcaaaccccacgtcctcggtg

SEQ ID NO: 5032218 - DNA, 25 bp, Homo sapien
ccagcatcgcctggccgatgtcaaa

SEQ ID NO: 5032219 - DNA, 25 bp, Homo sapien
actttggatctcaaattgtgcacat

SEQ ID NO: 5032220 - DNA, 25 bp, Homo sapien
gttccacaagtggagactctgcact

SEQ ID NO: 5032221 - DNA, 25 bp, Homo sapien
cattgttccacaagtggagactctg

SEQ ID NO: 5032222 - DNA, 25 bp, Homo sapien
tttggatctcaaattgtgcacatac

SEQ ID NO: 5032223 - DNA, 25 bp, Homo sapien
agactcaggacaaagaggcacgcct

SEQ ID NO: 5032224 - DNA, 25 bp, Homo sapien
tgtctaaagtatccagactcaggac

SEQ ID NO: 5032225 - DNA, 25 bp, Homo sapien
aactggtctctgtctaaagtatcca

SEQ ID NO: 5032226 - DNA, 25 bp, Homo sapien
ctcaggacaaagaggcacgcctggc

SEQ ID NO: 5032227 - DNA, 25 bp, Homo sapien
gaaatgtgcacgctggaatcctcgt

SEQ ID NO: 5032228 - DNA, 25 bp, Homo sapien
ggtgaaatcgaagcaggactccatg

SEQ ID NO: 5032229 - DNA, 25 bp, Homo sapien
ggtggtgcaagccattcctaccgct

SEQ ID NO: 5032230 - DNA, 25 bp, Homo sapien
ggctgtggctcctcgatgccctaaa

SEQ ID NO: 5032231 - DNA, 25 bp, Homo sapien
agcaggatgaaatagcgttttttgg

SEQ ID NO: 5032232 - DNA, 25 bp, Homo sapien
ataaaacaaaagggcgagacaagag

SEQ ID NO: 5032233 - DNA, 25 bp, Homo sapien
ggatgaaatagcgttttttggcctg

SEQ ID NO: 5032234 - DNA, 25 bp, Homo sapien
aaacaaaagggcgagacaagagcca

SEQ ID NO: 5032235 - DNA, 25 bp, Homo sapien
acaagtcagccgatcccgggttcag

SEQ ID NO: 5032236 - DNA, 25 bp, Homo sapien
tctttgggttgcacaatgcacggga

SEQ ID NO: 5032237 - DNA, 25 bp, Homo sapien
ttcagccggctagtgcatcttgcag

SEQ ID NO: 5032238 - DNA, 25 bp, Homo sapien
tctcggcagcgtggaaaatgagccc

SEQ ID NO: 5032239 - DNA, 25 bp, Homo sapien
ggctccaagactccggcggtgttta

SEQ ID NO: 5032240 - DNA, 25 bp, Homo sapien
gcagcggctccaagactccggcggt

SEQ ID NO: 5032241 - DNA, 25 bp, Homo sapien
gactccggcggtgtttactcctgcg

SEQ ID NO: 5032242 - DNA, 25 bp, Homo sapien
ttctgcagcggctccaagactccgg

SEQ ID NO: 5032243 - DNA, 25 bp, Homo sapien
cagtgccggccccgagcagcgcttc

SEQ ID NO: 5032244 - DNA, 25 bp, Homo sapien
agcagcgcttcgcaggcccccgcgc

SEQ ID NO: 5032245 - DNA, 25 bp, Homo sapien
ccgagcagcgcttcgcaggcccccg

SEQ ID NO: 5032246 - DNA, 25 bp, Homo sapien
aggcccccgcgcgaacgctgccgac

SEQ ID NO: 5032247 - DNA, 25 bp, Homo sapien
cgccgcgttcggtcgccgaatgtta

SEQ ID NO: 5032248 - DNA, 25 bp, Homo sapien
gccgcgttcggtcgccgaatgttac

SEQ ID NO: 5032249 - DNA, 25 bp, Homo sapien
cattccattcccgacacgacagcgc

SEQ ID NO: 5032250 - DNA, 25 bp, Homo sapien
ccattcccgacacgacagcgctgac

SEQ ID NO: 5032251 - DNA, 25 bp, Homo sapien
attccattcccgacacgacagcgct

SEQ ID NO: 5032252 - DNA, 25 bp, Homo sapien
tccattcccgacacgacagcgctga

SEQ ID NO: 5032253 - DNA, 25 bp, Homo sapien
cggtgcttccgctgcgcccattcat

SEQ ID NO: 5032254 - DNA, 25 bp, Homo sapien
gccattggccgagcgtcacgtccgg

SEQ ID NO: 5032255 - DNA, 25 bp, Homo sapien
atccatccacgcagcccgcgctgcc

SEQ ID NO: 5032256 - DNA, 25 bp, Homo sapien
ccgcgctgccattggccgagcgtca

SEQ ID NO: 5032257 - DNA, 25 bp, Homo sapien
gaaattgcccttctctaagtcagga

SEQ ID NO: 5032258 - DNA, 25 bp, Homo sapien
caacttggaatgagctactttttcc

SEQ ID NO: 5032259 - DNA, 25 bp, Homo sapien
tttccagtgataggacagcctcttg

SEQ ID NO: 5032260 - DNA, 25 bp, Homo sapien
gacaaatggtgacaagaaattgccc

SEQ ID NO: 5032261 - DNA, 25 bp, Homo sapien
gatccctggatgctccaaggttgtt

SEQ ID NO: 5032262 - DNA, 25 bp, Homo sapien
atgatccctggatgctccaaggttg

SEQ ID NO: 5032263 - DNA, 25 bp, Homo sapien
gaataagatggaccatagagctagt

SEQ ID NO: 5032264 - DNA, 25 bp, Homo sapien
ttgttatgagcacacgaataagatg

SEQ ID NO: 5032265 - DNA, 25 bp, Homo sapien
actgtctatgagaatcacctgcaga

SEQ ID NO: 5032266 - DNA, 25 bp, Homo sapien
aaaatacacattccagggactcatt

SEQ ID NO: 5032267 - DNA, 25 bp, Homo sapien
ttaaaatacacattccagggactca

SEQ ID NO: 5032268 - DNA, 25 bp, Homo sapien
taaaatacacattccagggactcat

SEQ ID NO: 5032269 - DNA, 25 bp, Homo sapien
tcaaaaatgacatctcggccaggca

SEQ ID NO: 5032270 - DNA, 25 bp, Homo sapien
gtggccaagactgtagccaaatcct

SEQ ID NO: 5032271 - DNA, 25 bp, Homo sapien
caaatccttttgtaacctcttctca

SEQ ID NO: 5032272 - DNA, 25 bp, Homo sapien
tggccaagactgtagccaaatcctt

SEQ ID NO: 5032273 - DNA, 25 bp, Homo sapien
ggtactagtcccatgctgaactgct

SEQ ID NO: 5032274 - DNA, 25 bp, Homo sapien
tccagtgagtactccccatttacag

SEQ ID NO: 5032275 - DNA, 25 bp, Homo sapien
gcagtgtccccaattctgcaatggg

SEQ ID NO: 5032276 - DNA, 25 bp, Homo sapien
gggaatgcacaaccccagagtgttc

SEQ ID NO: 5032277 - DNA, 25 bp, Homo sapien
acagctcttaggagctacttcctgg

SEQ ID NO: 5032278 - DNA, 25 bp, Homo sapien
ccactctgaattctccagagccttt

SEQ ID NO: 5032279 - DNA, 25 bp, Homo sapien
gctgcatccaacagctcttaggagc

SEQ ID NO: 5032280 - DNA, 25 bp, Homo sapien
ctacttcctggagccactctgaatt

SEQ ID NO: 5032281 - DNA, 25 bp, Homo sapien
tcatggctgcttacaaaaactgtgc

SEQ ID NO: 5032282 - DNA, 25 bp, Homo sapien
caaactctgtcagttaggatcttct

SEQ ID NO: 5032283 - DNA, 25 bp, Homo sapien
caatcctctagggtgataagcacat

SEQ ID NO: 5032284 - DNA, 25 bp, Homo sapien
gctggaaggcgctggacttcctttc

SEQ ID NO: 5032285 - DNA, 25 bp, Homo sapien
cagggagttttgaaccagcagacag

SEQ ID NO: 5032286 - DNA, 25 bp, Homo sapien
tgaagcaagagacacaagtctcatt

SEQ ID NO: 5032287 - DNA, 25 bp, Homo sapien
gaagcaagagacacaagtctcattt

SEQ ID NO: 5032288 - DNA, 25 bp, Homo sapien
ctgaagcaagagacacaagtctcat

SEQ ID NO: 5032289 - DNA, 25 bp, Homo sapien
agcaagagacacaagtctcatttcc

SEQ ID NO: 5032290 - DNA, 25 bp, Homo sapien
cttttgctgtgccacctgactccat

SEQ ID NO: 5032291 - DNA, 25 bp, Homo sapien
tcaattcttcaaaccctaactcagg

SEQ ID NO: 5032292 - DNA, 25 bp, Homo sapien
tctcaattcttcaaaccctaactca

SEQ ID NO: 5032293 - DNA, 25 bp, Homo sapien
ctcaattcttcaaaccctaactcag

SEQ ID NO: 5032294 - DNA, 25 bp, Homo sapien
caattcttcaaaccctaactcaggt

SEQ ID NO: 5032295 - DNA, 25 bp, Homo sapien
tacaccatgggttgaggattactct

SEQ ID NO: 5032296 - DNA, 25 bp, Homo sapien
gagatgaccagaggctacaccatgg

SEQ ID NO: 5032297 - DNA, 25 bp, Homo sapien
tacgagactggtccatgctccaggc

SEQ ID NO: 5032298 - DNA, 25 bp, Homo sapien
aagccaacttacacaggtagcccag

SEQ ID NO: 5032299 - DNA, 25 bp, Homo sapien
ctgtttgcgttgatgaagttaccaa

SEQ ID NO: 5032300 - DNA, 25 bp, Homo sapien
taccaactgtggacctatgtgcttg

SEQ ID NO: 5032301 - DNA, 25 bp, Homo sapien
actgtggacctatgtgcttgtatca

SEQ ID NO: 5032302 - DNA, 25 bp, Homo sapien
tatcattgctctaattgtggtccga

SEQ ID NO: 5032303 - DNA, 25 bp, Homo sapien
gaattgcatctatcgtccagctgtg

SEQ ID NO: 5032304 - DNA, 25 bp, Homo sapien
ccagctgtgctcgacactaaagagt

SEQ ID NO: 5032305 - DNA, 25 bp, Homo sapien
caattatgctggtgggatttggtgc

SEQ ID NO: 5032306 - DNA, 25 bp, Homo sapien
tcaccagtcattgcaattatgctgg

SEQ ID NO: 5032307 - DNA, 25 bp, Homo sapien
gccatgcacataaggagtcaagtaa

SEQ ID NO: 5032308 - DNA, 25 bp, Homo sapien
taaacatcttatgccctggaagcca

SEQ ID NO: 5032309 - DNA, 25 bp, Homo sapien
tcacagatacaagggaggcaaacat

SEQ ID NO: 5032310 - DNA, 25 bp, Homo sapien
ttttccagcctgatagagatcatgc

SEQ ID NO: 5032311 - DNA, 25 bp, Homo sapien
gagagcaccccatactgaagagcag

SEQ ID NO: 5032312 - DNA, 25 bp, Homo sapien
tacacataagggatattggaggcac

SEQ ID NO: 5032313 - DNA, 25 bp, Homo sapien
tcattgaataaagcctgcagcccag

SEQ ID NO: 5032314 - DNA, 25 bp, Homo sapien
ttcaccttggtagatcatggagctc

SEQ ID NO: 5032315 - DNA, 25 bp, Homo sapien
aaaagaactgggtcaggcacttcga

SEQ ID NO: 5032316 - DNA, 25 bp, Homo sapien
gagagccctaaaattgcctacgagc

SEQ ID NO: 5032317 - DNA, 25 bp, Homo sapien
cacagtacaaagtcaagagcctggt

SEQ ID NO: 5032318 - DNA, 25 bp, Homo sapien
gaggcctccctttctggtgatctga

SEQ ID NO: 5032319 - DNA, 25 bp, Homo sapien
tattaatactctgcacatgaggcaa

SEQ ID NO: 5032320 - DNA, 25 bp, Homo sapien
ggcaaaagccatatgaaaccaacca

SEQ ID NO: 5032321 - DNA, 25 bp, Homo sapien
tccttgaggttcacatcagtagggc

SEQ ID NO: 5032322 - DNA, 25 bp, Homo sapien
aaggcaaccagcagagtcttcagtg

SEQ ID NO: 5032323 - DNA, 25 bp, Homo sapien
gacaagtctagttgtcaagtaacaa

SEQ ID NO: 5032324 - DNA, 25 bp, Homo sapien
gagtctaagacgattgacaagtcta

SEQ ID NO: 5032325 - DNA, 25 bp, Homo sapien
gagacttttgttgttcctatgcaaa

SEQ ID NO: 5032326 - DNA, 25 bp, Homo sapien
gctcatgtactagaaagaggaggtt

SEQ ID NO: 5032327 - DNA, 25 bp, Homo sapien
tcaggactaaggaccgttagcctct

SEQ ID NO: 5032328 - DNA, 25 bp, Homo sapien
gagcaactgcgaagtgactctggag

SEQ ID NO: 5032329 - DNA, 25 bp, Homo sapien
agctgatacgccttttctccttgaa

SEQ ID NO: 5032330 - DNA, 25 bp, Homo sapien
ccaggattccggaggtagaagtgaa

SEQ ID NO: 5032331 - DNA, 25 bp, Homo sapien
ccctggaagagttggctgtatctga

SEQ ID NO: 5032332 - DNA, 25 bp, Homo sapien
gatacagtttcataagggcaggtgg

SEQ ID NO: 5032333 - DNA, 25 bp, Homo sapien
gagaattacggtctgcagagggcct

SEQ ID NO: 5032334 - DNA, 25 bp, Homo sapien
tagaactgaaccacatgagatgggc

SEQ ID NO: 5032335 - DNA, 25 bp, Homo sapien
ctgccgaagggccagatcttggtgg

SEQ ID NO: 5032336 - DNA, 25 bp, Homo sapien
gcttgtggtgagtcatcctgctgct

SEQ ID NO: 5032337 - DNA, 25 bp, Homo sapien
cttgtggtgagtcatcctgctgctg

SEQ ID NO: 5032338 - DNA, 25 bp, Homo sapien
ggtggtgactgcaacttctctgagt

SEQ ID NO: 5032339 - DNA, 25 bp, Homo sapien
tccgaagtgttaacgtcagaccaca

SEQ ID NO: 5032340 - DNA, 25 bp, Homo sapien
ccaaggatatcttctggcagtgcca

SEQ ID NO: 5032341 - DNA, 25 bp, Homo sapien
taaccgtgtttatggagaaccctca

SEQ ID NO: 5032342 - DNA, 25 bp, Homo sapien
ccttggaggagccaaatagaagcct

SEQ ID NO: 5032343 - DNA, 25 bp, Homo sapien
tccttgtattgctagagggactgca

SEQ ID NO: 5032344 - DNA, 25 bp, Homo sapien
tggaatacgaagatatgaaggcctc

SEQ ID NO: 5032345 - DNA, 25 bp, Homo sapien
tgtgccaactgcctgagagatctaa

SEQ ID NO: 5032346 - DNA, 25 bp, Homo sapien
tcatgaagagacaggtataccaggc

SEQ ID NO: 5032347 - DNA, 25 bp, Homo sapien
tttttgctcagaacagtctccctcg

SEQ ID NO: 5032348 - DNA, 25 bp, Homo sapien
taatacttaattgagaccacagcac

SEQ ID NO: 5032349 - DNA, 25 bp, Homo sapien
acagcaccatgaaaataagatccat

SEQ ID NO: 5032350 - DNA, 25 bp, Homo sapien
taagatccatgtttcgctttttgct

SEQ ID NO: 5032351 - DNA, 25 bp, Homo sapien
tcagtgatgatttggtgaatgagtt

SEQ ID NO: 5032352 - DNA, 25 bp, Homo sapien
agtgatgatttggtgaatgagttaa

SEQ ID NO: 5032353 - DNA, 25 bp, Homo sapien
cagtgatgatttggtgaatgagtta

SEQ ID NO: 5032354 - DNA, 25 bp, Homo sapien
gtgatgatttggtgaatgagttaaa

SEQ ID NO: 5032355 - DNA, 25 bp, Homo sapien
tcatggcagtaccagtgacagcaat

SEQ ID NO: 5032356 - DNA, 25 bp, Homo sapien
tcatgtgggccacataagtggtaat

SEQ ID NO: 5032357 - DNA, 25 bp, Homo sapien
gacagcaattaagagggaagacgtt

SEQ ID NO: 5032358 - DNA, 25 bp, Homo sapien
agtggtaatgaaggcccgaatcatg

SEQ ID NO: 5032359 - DNA, 25 bp, Homo sapien
tatgtattatagatgcctgcaggac

SEQ ID NO: 5032360 - DNA, 25 bp, Homo sapien
tcctgggttggctctaagacaggtg

SEQ ID NO: 5032361 - DNA, 25 bp, Homo sapien
tgacctagagtgtcatgaacctctg

SEQ ID NO: 5032362 - DNA, 25 bp, Homo sapien
cagcagaggaccttggatttgggct

SEQ ID NO: 5032363 - DNA, 25 bp, Homo sapien
cagcctcgagaatgggtatgacagt

SEQ ID NO: 5032364 - DNA, 25 bp, Homo sapien
gctgttaaaacacactgaacgggta

SEQ ID NO: 5032365 - DNA, 25 bp, Homo sapien
gaatgtgatgcatccctcagcagag

SEQ ID NO: 5032366 - DNA, 25 bp, Homo sapien
tctttagtgaatcaccaggtggctc

SEQ ID NO: 5032367 - DNA, 25 bp, Homo sapien
taaagggagacagagattcccagcc

SEQ ID NO: 5032368 - DNA, 25 bp, Homo sapien
ggaatcttcatgggggctgtgtgca

SEQ ID NO: 5032369 - DNA, 25 bp, Homo sapien
aggtaattaggcatgatcttggtca

SEQ ID NO: 5032370 - DNA, 25 bp, Homo sapien
gaggtaattaggcatgatcttggtc

SEQ ID NO: 5032371 - DNA, 25 bp, Homo sapien
ggaggtaattaggcatgatcttggt

SEQ ID NO: 5032372 - DNA, 25 bp, Homo sapien
aagccaattaaaatgcgatcagcac

SEQ ID NO: 5032373 - DNA, 25 bp, Homo sapien
tcaacttgttaacatacaccacctt

SEQ ID NO: 5032374 - DNA, 25 bp, Homo sapien
gatcagcactaactgacaaaaagcc

SEQ ID NO: 5032375 - DNA, 25 bp, Homo sapien
tatacatcagaagatgtacaccctc

SEQ ID NO: 5032376 - DNA, 25 bp, Homo sapien
catactataggaactgtgcttgctt

SEQ ID NO: 5032377 - DNA, 25 bp, Homo sapien
ataggaactgtgcttgcttaccaca

SEQ ID NO: 5032378 - DNA, 25 bp, Homo sapien
aaacttacatactataggaactgtg

SEQ ID NO: 5032379 - DNA, 25 bp, Homo sapien
cttacatactataggaactgtgctt

SEQ ID NO: 5032380 - DNA, 25 bp, Homo sapien
aacactagcccttccgatagctgtg

SEQ ID NO: 5032381 - DNA, 25 bp, Homo sapien
gatagctgtggtcataggtatgtgc

SEQ ID NO: 5032382 - DNA, 25 bp, Homo sapien
tctgtcctacacaggactgccatat

SEQ ID NO: 5032383 - DNA, 25 bp, Homo sapien
aggttgcacagcttaatcctgaggc

SEQ ID NO: 5032384 - DNA, 25 bp, Homo sapien
gagaagtggtgagggagcccacaca

SEQ ID NO: 5032385 - DNA, 25 bp, Homo sapien
tcctgctgagtatggcagtgagatg

SEQ ID NO: 5032386 - DNA, 25 bp, Homo sapien
ggtccatcacagacagcattggctg

SEQ ID NO: 5032387 - DNA, 25 bp, Homo sapien
tgtggtaccactgctgagaagtggt

SEQ ID NO: 5032388 - DNA, 25 bp, Homo sapien
aaaatggcagtgatgtaacacttaa

SEQ ID NO: 5032389 - DNA, 25 bp, Homo sapien
aatagcctttatcagtgctgcagcc

SEQ ID NO: 5032390 - DNA, 25 bp, Homo sapien
gtgatgtaacacttaatcttcccaa

SEQ ID NO: 5032391 - DNA, 25 bp, Homo sapien
caggagggtgaagaacagttgcaaa

SEQ ID NO: 5032392 - DNA, 25 bp, Homo sapien
atgacaggcctttctaacactccgg

SEQ ID NO: 5032393 - DNA, 25 bp, Homo sapien
tgcacggctgtgctgttccttcagc

SEQ ID NO: 5032394 - DNA, 25 bp, Homo sapien
aatgagtcatgagagtccctctgct

SEQ ID NO: 5032395 - DNA, 25 bp, Homo sapien
caggtcaggacttgtccctccttga

SEQ ID NO: 5032396 - DNA, 25 bp, Homo sapien
ggaatcatgacaaacaagcagtctg

SEQ ID NO: 5032397 - DNA, 25 bp, Homo sapien
gaaggacagctgattcaatctgcta

SEQ ID NO: 5032398 - DNA, 25 bp, Homo sapien
cacatggtgcatagttcgagttcaa

SEQ ID NO: 5032399 - DNA, 25 bp, Homo sapien
ggtcacaaaatgctagtgccagtgt

SEQ ID NO: 5032400 - DNA, 25 bp, Homo sapien
ggtgatgagccttctgtaaagagga

SEQ ID NO: 5032401 - DNA, 25 bp, Homo sapien
tgagaacaagcaagtgctcaactcc

SEQ ID NO: 5032402 - DNA, 25 bp, Homo sapien
tcccaatctgaatcggcacataaga

SEQ ID NO: 5032403 - DNA, 25 bp, Homo sapien
gaagggagatccatcctgggatctg

SEQ ID NO: 5032404 - DNA, 25 bp, Homo sapien
ggatttcctaactctgaatggtttg

SEQ ID NO: 5032405 - DNA, 25 bp, Homo sapien
tttccgtgagagatccaatagtccc

SEQ ID NO: 5032406 - DNA, 25 bp, Homo sapien
gcctagattatgcattacatgggtg

SEQ ID NO: 5032407 - DNA, 25 bp, Homo sapien
agtgggtacccatgagtctgaaatc

SEQ ID NO: 5032408 - DNA, 25 bp, Homo sapien
cagtttcatttggtggagtaaacca

SEQ ID NO: 5032409 - DNA, 25 bp, Homo sapien
catttggtggagtaaaccagtcaaa

SEQ ID NO: 5032410 - DNA, 25 bp, Homo sapien
tttcatttggtggagtaaaccagtc

SEQ ID NO: 5032411 - DNA, 25 bp, Homo sapien
gcagtttcatttggtggagtaaacc

SEQ ID NO: 5032412 - DNA, 25 bp, Homo sapien
ggtgtgttacccaatcatgttaatt

SEQ ID NO: 5032413 - DNA, 25 bp, Homo sapien
cccactgcaactggtcaattgagca

SEQ ID NO: 5032414 - DNA, 25 bp, Homo sapien
tttcacaatatagaccaggctgatt

SEQ ID NO: 5032415 - DNA, 25 bp, Homo sapien
cagtaaaatataggatccagatctt

SEQ ID NO: 5032416 - DNA, 25 bp, Homo sapien
tgtttaagggaaggtcacgtcacta

SEQ ID NO: 5032417 - DNA, 25 bp, Homo sapien
gactaatttcacaggagcagcatac

SEQ ID NO: 5032418 - DNA, 25 bp, Homo sapien
atagagacaccaccttccgaaggga

SEQ ID NO: 5032419 - DNA, 25 bp, Homo sapien
gaatgtcactaaagccctgatggtc

SEQ ID NO: 5032420 - DNA, 25 bp, Homo sapien
gcatcttgtattgtgaacagtagca

SEQ ID NO: 5032421 - DNA, 25 bp, Homo sapien
catcttattcatgggagcttcagga

SEQ ID NO: 5032422 - DNA, 25 bp, Homo sapien
cagtagcatctcgaatttgtagcca

SEQ ID NO: 5032423 - DNA, 25 bp, Homo sapien
tcttgaattgttaaggtcgcatctt

SEQ ID NO: 5032424 - DNA, 25 bp, Homo sapien
ggccataatccatgtcctggttcta

SEQ ID NO: 5032425 - DNA, 25 bp, Homo sapien
ggagaataacgagaggatatataat

SEQ ID NO: 5032426 - DNA, 25 bp, Homo sapien
catggtgccatgagcaacagttaat

SEQ ID NO: 5032427 - DNA, 25 bp, Homo sapien
cagttaattaaatccaggccataat

SEQ ID NO: 5032428 - DNA, 25 bp, Homo sapien
tcacaatgtcagacgggtggtcttg

SEQ ID NO: 5032429 - DNA, 25 bp, Homo sapien
gagttgctgtcctcacaatgtcaga

SEQ ID NO: 5032430 - DNA, 25 bp, Homo sapien
tgtcctcacaatgtcagacgggtgg

SEQ ID NO: 5032431 - DNA, 25 bp, Homo sapien
tgtcagacgggtggtcttgttcaga

SEQ ID NO: 5032432 - DNA, 25 bp, Homo sapien
gatcatgtatgtccagtgctgccta

SEQ ID NO: 5032433 - DNA, 25 bp, Homo sapien
tacctggagggcaaacgagtgcatg

SEQ ID NO: 5032434 - DNA, 25 bp, Homo sapien
gtagaaagaagattgcccagtcgca

SEQ ID NO: 5032435 - DNA, 25 bp, Homo sapien
tgcagtaagcggaggtcatgtcaca

SEQ ID NO: 5032436 - DNA, 25 bp, Homo sapien
aaggaaaggtattaatgccatttct

SEQ ID NO: 5032437 - DNA, 25 bp, Homo sapien
ctaactcctaatcctagaagcagag

SEQ ID NO: 5032438 - DNA, 25 bp, Homo sapien
tttctaactcctaatcctagaagca

SEQ ID NO: 5032439 - DNA, 25 bp, Homo sapien
actcctaatcctagaagcagagttg

SEQ ID NO: 5032440 - DNA, 25 bp, Homo sapien
tatcatgactgaaagcatgtgccct

SEQ ID NO: 5032441 - DNA, 25 bp, Homo sapien
tttcaagtacgccatgcagtattat

SEQ ID NO: 5032442 - DNA, 25 bp, Homo sapien
tggattaataaaccaggtctagcaa

SEQ ID NO: 5032443 - DNA, 25 bp, Homo sapien
gtaccagaagtcttactctctaggg

SEQ ID NO: 5032444 - DNA, 25 bp, Homo sapien
aacattttgccagcgctctgctgag

SEQ ID NO: 5032445 - DNA, 25 bp, Homo sapien
agcagggcggcttactttggaaaca

SEQ ID NO: 5032446 - DNA, 25 bp, Homo sapien
cttcacgccggaagcccatggattc

SEQ ID NO: 5032447 - DNA, 25 bp, Homo sapien
tctgctgagcatactaaaaatgcat

SEQ ID NO: 5032448 - DNA, 25 bp, Homo sapien
gatattacttaatcacacctggtgc

SEQ ID NO: 5032449 - DNA, 25 bp, Homo sapien
gaggatggattaactctctaatgcc

SEQ ID NO: 5032450 - DNA, 25 bp, Homo sapien
ataatagtgccctgctccactgttg

SEQ ID NO: 5032451 - DNA, 25 bp, Homo sapien
tctctaatgcctgccaatccattgc

SEQ ID NO: 5032452 - DNA, 25 bp, Homo sapien
aagaagaactcgcttgtatggaaca

SEQ ID NO: 5032453 - DNA, 25 bp, Homo sapien
tacagaagatatggagacacaggcc

SEQ ID NO: 5032454 - DNA, 25 bp, Homo sapien
tctggaactagacaggatatcatcc

SEQ ID NO: 5032455 - DNA, 25 bp, Homo sapien
caccaatgtagccattctgaaagaa

SEQ ID NO: 5032456 - DNA, 25 bp, Homo sapien
tcagaatctattgagcaaaggcagc

SEQ ID NO: 5032457 - DNA, 25 bp, Homo sapien
ggagaatcaagaatgagccgccact

SEQ ID NO: 5032458 - DNA, 25 bp, Homo sapien
caaaggcagcaaattaactactggt

SEQ ID NO: 5032459 - DNA, 25 bp, Homo sapien
gacatcgatactctagctcactggg

SEQ ID NO: 5032460 - DNA, 25 bp, Homo sapien
gtgtgacgtccgctcaccgcaagct

SEQ ID NO: 5032461 - DNA, 25 bp, Homo sapien
tgttttgatcctttgctccgtgcta

SEQ ID NO: 5032462 - DNA, 25 bp, Homo sapien
ggcacagacaacaatcctgtggctt

SEQ ID NO: 5032463 - DNA, 25 bp, Homo sapien
aatgaagttatttccagctcaagct

SEQ ID NO: 5032464 - DNA, 25 bp, Homo sapien
aatctactctttctcaccacgtggg

SEQ ID NO: 5032465 - DNA, 25 bp, Homo sapien
caggcagtgagggacgtacctctca

SEQ ID NO: 5032466 - DNA, 25 bp, Homo sapien
gattgacacctcgtaaaatggtctg

SEQ ID NO: 5032467 - DNA, 25 bp, Homo sapien
gggtcaattagagttcctgtccagg

SEQ ID NO: 5032468 - DNA, 25 bp, Homo sapien
catttacaagagtccatcatggtca

SEQ ID NO: 5032469 - DNA, 25 bp, Homo sapien
caaatggttgtagatcagtaagaca

SEQ ID NO: 5032470 - DNA, 25 bp, Homo sapien
ggttgtagatcagtaagacagtaag

SEQ ID NO: 5032471 - DNA, 25 bp, Homo sapien
tccatttacaagagtccatcatggt

SEQ ID NO: 5032472 - DNA, 25 bp, Homo sapien
catattactttaggtgaactcctga

SEQ ID NO: 5032473 - DNA, 25 bp, Homo sapien
taaaccattagtacgtgagatgatg

SEQ ID NO: 5032474 - DNA, 25 bp, Homo sapien
taaatccttaatgtagctttgaggc

SEQ ID NO: 5032475 - DNA, 25 bp, Homo sapien
gccacatgactctctcttgggctct

SEQ ID NO: 5032476 - DNA, 25 bp, Homo sapien
acatacatttaagatgccaatcagc

SEQ ID NO: 5032477 - DNA, 25 bp, Homo sapien
catatgtattaaagccagtctctaa

SEQ ID NO: 5032478 - DNA, 25 bp, Homo sapien
tctttgtgtcaaacaaacctgcaaa

SEQ ID NO: 5032479 - DNA, 25 bp, Homo sapien
taagaatattgctctggcagtttct

SEQ ID NO: 5032480 - DNA, 25 bp, Homo sapien
aatatactcatacatttcatcaaac

SEQ ID NO: 5032481 - DNA, 25 bp, Homo sapien
agttaatatactcatacatttcatc

SEQ ID NO: 5032482 - DNA, 25 bp, Homo sapien
gttaatatactcatacatttcatca

SEQ ID NO: 5032483 - DNA, 25 bp, Homo sapien
taatatactcatacatttcatcaaa

SEQ ID NO: 5032484 - DNA, 25 bp, Homo sapien
cgttttccaaatagcactgtgacag

SEQ ID NO: 5032485 - DNA, 25 bp, Homo sapien
cacattgctggacctctaggttgct

SEQ ID NO: 5032486 - DNA, 25 bp, Homo sapien
tcctcccaccttgtatgacttacgt

SEQ ID NO: 5032487 - DNA, 25 bp, Homo sapien
tggttggcatatttacttgcagtcc

SEQ ID NO: 5032488 - DNA, 25 bp, Homo sapien
ccagtaaattcaccattggaaatct

SEQ ID NO: 5032489 - DNA, 25 bp, Homo sapien
taaatcacttagtataccagtaaat

SEQ ID NO: 5032490 - DNA, 25 bp, Homo sapien
tcaaatttaaatcacttagtatacc

SEQ ID NO: 5032491 - DNA, 25 bp, Homo sapien
taccagtaaattcaccattggaaat

SEQ ID NO: 5032492 - DNA, 25 bp, Homo sapien
gaatcactcaaatgctaaagcgccc

SEQ ID NO: 5032493 - DNA, 25 bp, Homo sapien
caattggcgcaggtgaagatagcta

SEQ ID NO: 5032494 - DNA, 25 bp, Homo sapien
gaatagtcatctttcagggagcaca

SEQ ID NO: 5032495 - DNA, 25 bp, Homo sapien
gccaatgaaggttgatagcatccaa

SEQ ID NO: 5032496 - DNA, 25 bp, Homo sapien
tctgtcctaatagtaaggtggtctt

SEQ ID NO: 5032497 - DNA, 25 bp, Homo sapien
taaatctgtatactattttctatga

SEQ ID NO: 5032498 - DNA, 25 bp, Homo sapien
taatagtaaggtggtctttcttcta

SEQ ID NO: 5032499 - DNA, 25 bp, Homo sapien
tccctgactcctgtctgtcctaata

SEQ ID NO: 5032500 - DNA, 25 bp, Homo sapien
gtagatttctgacttcttctcgcac

SEQ ID NO: 5032501 - DNA, 25 bp, Homo sapien
tgtagatttctgacttcttctcgca

SEQ ID NO: 5032502 - DNA, 25 bp, Homo sapien
gagcacctgttgtaagatgtgctgc

SEQ ID NO: 5032503 - DNA, 25 bp, Homo sapien
cctgttgtaagatgtgctgccggag

SEQ ID NO: 5032504 - DNA, 25 bp, Homo sapien
acctgttgtaagatgtgctgccgga

SEQ ID NO: 5032505 - DNA, 25 bp, Homo sapien
gcacctgttgtaagatgtgctgccg

SEQ ID NO: 5032506 - DNA, 25 bp, Homo sapien
tcagtaagtctcagcagggctcgcc

SEQ ID NO: 5032507 - DNA, 25 bp, Homo sapien
tcgctcgagctttttgtcagtaagt

SEQ ID NO: 5032508 - DNA, 25 bp, Homo sapien
ttttgtcagtaagtctcagcagggc

SEQ ID NO: 5032509 - DNA, 25 bp, Homo sapien
gctttttgtcagtaagtctcagcag

SEQ ID NO: 5032510 - DNA, 25 bp, Homo sapien
tgcagacaccctgggctatggtcag

SEQ ID NO: 5032511 - DNA, 25 bp, Homo sapien
tgtgcagacaccctgggctatggtc

SEQ ID NO: 5032512 - DNA, 25 bp, Homo sapien
cagtgtgcagacaccctgggctatg

SEQ ID NO: 5032513 - DNA, 25 bp, Homo sapien
agtgtgcagacaccctgggctatgg

SEQ ID NO: 5032514 - DNA, 25 bp, Homo sapien
caaattctcctccactctgtgcttg

SEQ ID NO: 5032515 - DNA, 25 bp, Homo sapien
tgtgatttccatcaaattctcctcc

SEQ ID NO: 5032516 - DNA, 25 bp, Homo sapien
tttccatcaaattctcctccactct

SEQ ID NO: 5032517 - DNA, 25 bp, Homo sapien
atcaaattctcctccactctgtgct

SEQ ID NO: 5032518 - DNA, 25 bp, Homo sapien
gatctaacctagtctgggcaccagg

SEQ ID NO: 5032519 - DNA, 25 bp, Homo sapien
cctgggtacagtgatgaacacagca

SEQ ID NO: 5032520 - DNA, 25 bp, Homo sapien
taacctaggacttaaggaggaagca

SEQ ID NO: 5032521 - DNA, 25 bp, Homo sapien
gacaaggaaggtagctcatggcaaa

SEQ ID NO: 5032522 - DNA, 25 bp, Homo sapien
gtgtgagccaccactagagaaaagg

SEQ ID NO: 5032523 - DNA, 25 bp, Homo sapien
tgcccggactgatctcaatcacctg

SEQ ID NO: 5032524 - DNA, 25 bp, Homo sapien
aatcacctgagctcgatctcctggc

SEQ ID NO: 5032525 - DNA, 25 bp, Homo sapien
gagaaaagggattttgactcagttc

SEQ ID NO: 5032526 - DNA, 25 bp, Homo sapien
ttgagacatagttggatgatggctt

SEQ ID NO: 5032527 - DNA, 25 bp, Homo sapien
tagttggatgatggctttatcctct

SEQ ID NO: 5032528 - DNA, 25 bp, Homo sapien
gtcacctagtagacccaggctagtg

SEQ ID NO: 5032529 - DNA, 25 bp, Homo sapien
tcacctagtagacccaggctagtga

SEQ ID NO: 5032530 - DNA, 25 bp, Homo sapien
ccctcaggtgaaatgtatggtacat

SEQ ID NO: 5032531 - DNA, 25 bp, Homo sapien
caaatggctttacgacgcttaaggg

SEQ ID NO: 5032532 - DNA, 25 bp, Homo sapien
gcttgggtgcaaatcaccaccatga

SEQ ID NO: 5032533 - DNA, 25 bp, Homo sapien
gaaggaagtcgagctcataccatga

SEQ ID NO: 5032534 - DNA, 25 bp, Homo sapien
tcatgtggtgacacttagatcctcc

SEQ ID NO: 5032535 - DNA, 25 bp, Homo sapien
taaggactaaagaactccccagctg

SEQ ID NO: 5032536 - DNA, 25 bp, Homo sapien
gacagctgacagtccttctgggaat

SEQ ID NO: 5032537 - DNA, 25 bp, Homo sapien
tggatctaagaagagccaccttgct

SEQ ID NO: 5032538 - DNA, 25 bp, Homo sapien
tggtagaagaaggaggttagcccta

SEQ ID NO: 5032539 - DNA, 25 bp, Homo sapien
ttcaatagtcgccatcctaatggcc

SEQ ID NO: 5032540 - DNA, 25 bp, Homo sapien
tatgtatggacaaatgcctcagcct

SEQ ID NO: 5032541 - DNA, 25 bp, Homo sapien
cctaatggccatgaagtgacatatc

SEQ ID NO: 5032542 - DNA, 25 bp, Homo sapien
gactcccttgataagtatcctcaaa

SEQ ID NO: 5032543 - DNA, 25 bp, Homo sapien
actcccttgataagtatcctcaaac

SEQ ID NO: 5032544 - DNA, 25 bp, Homo sapien
cagactcccttgataagtatcctca

SEQ ID NO: 5032545 - DNA, 25 bp, Homo sapien
agactcccttgataagtatcctcaa

SEQ ID NO: 5032546 - DNA, 25 bp, Homo sapien
tcttcctggtagttgtgggtgtttg

SEQ ID NO: 5032547 - DNA, 25 bp, Homo sapien
atcttcctggtagttgtgggtgttt

SEQ ID NO: 5032548 - DNA, 25 bp, Homo sapien
catcttcctggtagttgtgggtgtt

SEQ ID NO: 5032549 - DNA, 25 bp, Homo sapien
tacgacctacaaagccaaatggctc

SEQ ID NO: 5032550 - DNA, 25 bp, Homo sapien
caaatggctctcctatctggtcctt

SEQ ID NO: 5032551 - DNA, 25 bp, Homo sapien
gttgtgacaaagaccctacgaccta

SEQ ID NO: 5032552 - DNA, 25 bp, Homo sapien
ggttggcaaactacgaccctctgag

SEQ ID NO: 5032553 - DNA, 25 bp, Homo sapien
catcagggcaacacttggaaaagag

SEQ ID NO: 5032554 - DNA, 25 bp, Homo sapien
gattagcacaggatatttaccagcc

SEQ ID NO: 5032555 - DNA, 25 bp, Homo sapien
tcaatgagcatgatagaggagatcc

SEQ ID NO: 5032556 - DNA, 25 bp, Homo sapien
gatataacatgcttcctcaatgagc

SEQ ID NO: 5032557 - DNA, 25 bp, Homo sapien
ccgaaagctattttctggccacttg

SEQ ID NO: 5032558 - DNA, 25 bp, Homo sapien
tccaagagtattgggattcccacag

SEQ ID NO: 5032559 - DNA, 25 bp, Homo sapien
catcatagggctggtaaatgcacac

SEQ ID NO: 5032560 - DNA, 25 bp, Homo sapien
aatgcacactggctgaagtcccgaa

SEQ ID NO: 5032561 - DNA, 25 bp, Homo sapien
ggcagagagttagtattattatatt

SEQ ID NO: 5032562 - DNA, 25 bp, Homo sapien
gggcagagagttagtattattatat

SEQ ID NO: 5032563 - DNA, 25 bp, Homo sapien
agggcagagagttagtattattata

SEQ ID NO: 5032564 - DNA, 25 bp, Homo sapien
tggtaagggtatgggaaaggctatc

SEQ ID NO: 5032565 - DNA, 25 bp, Homo sapien
taagggtatgggaaaggctatcgtg

SEQ ID NO: 5032566 - DNA, 25 bp, Homo sapien
tcatggtaagggtatgggaaaggct

SEQ ID NO: 5032567 - DNA, 25 bp, Homo sapien
aagggtatgggaaaggctatcgtga

SEQ ID NO: 5032568 - DNA, 25 bp, Homo sapien
atgtcatgctgtttgaatgactcac

SEQ ID NO: 5032569 - DNA, 25 bp, Homo sapien
agttatgtcatgctgtttgaatgac

SEQ ID NO: 5032570 - DNA, 25 bp, Homo sapien
cagttatgtcatgctgtttgaatga

SEQ ID NO: 5032571 - DNA, 25 bp, Homo sapien
ttatgtcatgctgtttgaatgactc

SEQ ID NO: 5032572 - DNA, 25 bp, Homo sapien
tccatagagccaccggtttagatag

SEQ ID NO: 5032573 - DNA, 25 bp, Homo sapien
agatctgatactgattcggacaatg

SEQ ID NO: 5032574 - DNA, 25 bp, Homo sapien
agacatcctgctgggtccatagagc

SEQ ID NO: 5032575 - DNA, 25 bp, Homo sapien
ggtttagatagcttcaccgtagctg

SEQ ID NO: 5032576 - DNA, 25 bp, Homo sapien
gcagacctgcagttgaaagactctt

SEQ ID NO: 5032577 - DNA, 25 bp, Homo sapien
tagaaggtggactaaacttagctgc

SEQ ID NO: 5032578 - DNA, 25 bp, Homo sapien
gaatgactttagctgagtcgcccaa

SEQ ID NO: 5032579 - DNA, 25 bp, Homo sapien
catggaaagcaatagataacctggt

SEQ ID NO: 5032580 - DNA, 25 bp, Homo sapien
gagaatagataattactagtgaatg

SEQ ID NO: 5032581 - DNA, 25 bp, Homo sapien
tatagagaatagataattactagtg

SEQ ID NO: 5032582 - DNA, 25 bp, Homo sapien
tagataattactagtgaatgctgac

SEQ ID NO: 5032583 - DNA, 25 bp, Homo sapien
aatagataattactagtgaatgctg

SEQ ID NO: 5032584 - DNA, 25 bp, Homo sapien
tatgagtaattgtgctattaaaagc

SEQ ID NO: 5032585 - DNA, 25 bp, Homo sapien
tattatgagtaattgtgctattaaa

SEQ ID NO: 5032586 - DNA, 25 bp, Homo sapien
atgagtaattgtgctattaaaagca

SEQ ID NO: 5032587 - DNA, 25 bp, Homo sapien
cagttgtaaggacttttagcagtca

SEQ ID NO: 5032588 - DNA, 25 bp, Homo sapien
tgaagcaatttcatcgtgtactcca

SEQ ID NO: 5032589 - DNA, 25 bp, Homo sapien
aaattattcaattacctagtctgca

SEQ ID NO: 5032590 - DNA, 25 bp, Homo sapien
cttttagcagtcaccattatttggt

SEQ ID NO: 5032591 - DNA, 25 bp, Homo sapien
cagcaatggtacaaacacagtcctc

SEQ ID NO: 5032592 - DNA, 25 bp, Homo sapien
tgtctcttcccaattgtcagcaatg

SEQ ID NO: 5032593 - DNA, 25 bp, Homo sapien
tgaaccgtttccaatccagacacat

SEQ ID NO: 5032594 - DNA, 25 bp, Homo sapien
tccagagagcctatcatgaaccgtt

SEQ ID NO: 5032595 - DNA, 25 bp, Homo sapien
taattcagggaacccgaagaggtca

SEQ ID NO: 5032596 - DNA, 25 bp, Homo sapien
tatgaggaacttgggcatccacaga

SEQ ID NO: 5032597 - DNA, 25 bp, Homo sapien
tgctttaaagctgtccatggatcag

SEQ ID NO: 5032598 - DNA, 25 bp, Homo sapien
tggaagcctcctctgtactgaagtg

SEQ ID NO: 5032599 - DNA, 25 bp, Homo sapien
tttattgccctgcttgtgtcatcta

SEQ ID NO: 5032600 - DNA, 25 bp, Homo sapien
tggatttgtacaccaaaaaagactg

SEQ ID NO: 5032601 - DNA, 25 bp, Homo sapien
ggatttgtacaccaaaaaagactga

SEQ ID NO: 5032602 - DNA, 25 bp, Homo sapien
gggccctagcaactctacagttctg

SEQ ID NO: 5032603 - DNA, 25 bp, Homo sapien
tgaaaagacaaatcaaacttgccct

SEQ ID NO: 5032604 - DNA, 25 bp, Homo sapien
gggcttcacaatggcatatagatca

SEQ ID NO: 5032605 - DNA, 25 bp, Homo sapien
tctacagtggaataaaggtttgcat

SEQ ID NO: 5032606 - DNA, 25 bp, Homo sapien
cctggctccagccacgtaagatgcg

SEQ ID NO: 5032607 - DNA, 25 bp, Homo sapien
cgtaagatgcgtctgcttccacttc

SEQ ID NO: 5032608 - DNA, 25 bp, Homo sapien
tagcaagatagtacagggacaactc

SEQ ID NO: 5032609 - DNA, 25 bp, Homo sapien
cagttgcttacatcagatcagagta

SEQ ID NO: 5032610 - DNA, 25 bp, Homo sapien
tacagcagggcagactagtccttaa

SEQ ID NO: 5032611 - DNA, 25 bp, Homo sapien
tagggagccctgcagaaaatctcaa

SEQ ID NO: 5032612 - DNA, 25 bp, Homo sapien
tatagattgctatcctgggtacagc

SEQ ID NO: 5032613 - DNA, 25 bp, Homo sapien
tctcctaagagaggactagcagttc

SEQ ID NO: 5032614 - DNA, 25 bp, Homo sapien
ttctatttcagacaaatctattgat

SEQ ID NO: 5032615 - DNA, 25 bp, Homo sapien
ggattttgtattagagacctgtcag

SEQ ID NO: 5032616 - DNA, 25 bp, Homo sapien
tacctttcacactacttccatattt

SEQ ID NO: 5032617 - DNA, 25 bp, Homo sapien
ttctcttattgagagataagtgctc

SEQ ID NO: 5032618 - DNA, 25 bp, Homo sapien
gataagtgctcactgtcatttattc

SEQ ID NO: 5032619 - DNA, 25 bp, Homo sapien
tcgggcttcttccaagactgggctg

SEQ ID NO: 5032620 - DNA, 25 bp, Homo sapien
tgcttaatacacacattcgggcttc

SEQ ID NO: 5032621 - DNA, 25 bp, Homo sapien
gactgggctgtgctgacgatctcta

SEQ ID NO: 5032622 - DNA, 25 bp, Homo sapien
gaccttcagcgcgttctatgcttaa

SEQ ID NO: 5032623 - DNA, 25 bp, Homo sapien
ggctaaatgaatcttacccaattat

SEQ ID NO: 5032624 - DNA, 25 bp, Homo sapien
taggcaagcacacatttctagaatg

SEQ ID NO: 5032625 - DNA, 25 bp, Homo sapien
tctccatgccaaataaccggggcta

SEQ ID NO: 5032626 - DNA, 25 bp, Homo sapien
tgtccttcaccaataaagtcttcct

SEQ ID NO: 5032627 - DNA, 25 bp, Homo sapien
gatttgcgagggctgaaagtcagtc

SEQ ID NO: 5032628 - DNA, 25 bp, Homo sapien
gagtgtacacggttgctccagggat

SEQ ID NO: 5032629 - DNA, 25 bp, Homo sapien
gattgaaggatgcacaatagggcca

SEQ ID NO: 5032630 - DNA, 25 bp, Homo sapien
catgagaggtgtctctagggtttca

SEQ ID NO: 5032631 - DNA, 25 bp, Homo sapien
aatcccaggcaattctaaacaccac

SEQ ID NO: 5032632 - DNA, 25 bp, Homo sapien
tagtcttcgcccaaagtggaggaaa

SEQ ID NO: 5032633 - DNA, 25 bp, Homo sapien
tatgcataggtcatcattaggactc

SEQ ID NO: 5032634 - DNA, 25 bp, Homo sapien
gaattagggtatctacttcttcaaa

SEQ ID NO: 5032635 - DNA, 25 bp, Homo sapien
cattgggaactgagcccagcaaaca

SEQ ID NO: 5032636 - DNA, 25 bp, Homo sapien
cagactcattgggaactgagcccag

SEQ ID NO: 5032637 - DNA, 25 bp, Homo sapien
catcagtttgctttacagtaggctc

SEQ ID NO: 5032638 - DNA, 25 bp, Homo sapien
gaacagaaggccacatcagtttgct

SEQ ID NO: 5032639 - DNA, 25 bp, Homo sapien
tgaaagattagtgcgagcttgccac

SEQ ID NO: 5032640 - DNA, 25 bp, Homo sapien
ggtaacagataaacgcagagatggc

SEQ ID NO: 5032641 - DNA, 25 bp, Homo sapien
tgccactcgtgaccagggaaaaagt

SEQ ID NO: 5032642 - DNA, 25 bp, Homo sapien
tacaacagcatgttccacaggcacg

SEQ ID NO: 5032643 - DNA, 25 bp, Homo sapien
gcagccactgttgtttcctcgtcct

SEQ ID NO: 5032644 - DNA, 25 bp, Homo sapien
cacactgtagtaattttaactgttc

SEQ ID NO: 5032645 - DNA, 25 bp, Homo sapien
acaaattctttgtctaagctttctt

SEQ ID NO: 5032646 - DNA, 25 bp, Homo sapien
atcacactgtagtaattttaactgt

SEQ ID NO: 5032647 - DNA, 25 bp, Homo sapien
gctttcaaatctccgtaattaactg

SEQ ID NO: 5032648 - DNA, 25 bp, Homo sapien
aggctgcagctttcaaatctccgta

SEQ ID NO: 5032649 - DNA, 25 bp, Homo sapien
gtagctggactacaacatataaagg

SEQ ID NO: 5032650 - DNA, 25 bp, Homo sapien
gactacaacatataaaggctgcagc

SEQ ID NO: 5032651 - DNA, 25 bp, Homo sapien
caatttgcagtttaataccttcagc

SEQ ID NO: 5032652 - DNA, 25 bp, Homo sapien
ttttaatggattgagattccacacc

SEQ ID NO: 5032653 - DNA, 25 bp, Homo sapien
cagggtgatcaataccccgtggatt

SEQ ID NO: 5032654 - DNA, 25 bp, Homo sapien
ctgcagtcgcttgggagttcctttc

SEQ ID NO: 5032655 - DNA, 25 bp, Homo sapien
ccaggtctccacttcatcaataatc

SEQ ID NO: 5032656 - DNA, 25 bp, Homo sapien
catcttccccaggtctccacttcat

SEQ ID NO: 5032657 - DNA, 25 bp, Homo sapien
gtctccacttcatcaataatctttt

SEQ ID NO: 5032658 - DNA, 25 bp, Homo sapien
ttccccaggtctccacttcatcaat

SEQ ID NO: 5032659 - DNA, 25 bp, Homo sapien
tccagccagcttccgtgactcaaaa

SEQ ID NO: 5032660 - DNA, 25 bp, Homo sapien
aaaagtccaactctctattcggcac

SEQ ID NO: 5032661 - DNA, 25 bp, Homo sapien
tccgtgactcaaaaagtccaactct

SEQ ID NO: 5032662 - DNA, 25 bp, Homo sapien
gcactccatttaggccatagtttcc

SEQ ID NO: 5032663 - DNA, 25 bp, Homo sapien
aagagttgaggggtgcattggcatc

SEQ ID NO: 5032664 - DNA, 25 bp, Homo sapien
tgtcattcccaagaacaagtgcatc

SEQ ID NO: 5032665 - DNA, 25 bp, Homo sapien
tctctgctcacagtgatgctagaag

SEQ ID NO: 5032666 - DNA, 25 bp, Homo sapien
gaagtgccaggccttgttttctctg

SEQ ID NO: 5032667 - DNA, 25 bp, Homo sapien
tgtcagatctttgaataacctgtcc

SEQ ID NO: 5032668 - DNA, 25 bp, Homo sapien
cacactgattgcttctatgtcacaa

SEQ ID NO: 5032669 - DNA, 25 bp, Homo sapien
gtcacaaatcacagttattttcttg

SEQ ID NO: 5032670 - DNA, 25 bp, Homo sapien
aagcttttagagaccccagattatc

SEQ ID NO: 5032671 - DNA, 25 bp, Homo sapien
taggcaagcacctaccaaggcctaa

SEQ ID NO: 5032672 - DNA, 25 bp, Homo sapien
taacctctccagaatatgactcatg

SEQ ID NO: 5032673 - DNA, 25 bp, Homo sapien
tagggtcagagtaccctcatggtac

SEQ ID NO: 5032674 - DNA, 25 bp, Homo sapien
gacatttgagaattagaagtcctcc

SEQ ID NO: 5032675 - DNA, 25 bp, Homo sapien
tggtggcccttgctctatcagtcat

SEQ ID NO: 5032676 - DNA, 25 bp, Homo sapien
ttcctggtggcccttgctctatcag

SEQ ID NO: 5032677 - DNA, 25 bp, Homo sapien
tgctactacatctaaattcctggtg

SEQ ID NO: 5032678 - DNA, 25 bp, Homo sapien
cttctctaagtgctactacatctaa

SEQ ID NO: 5032679 - DNA, 25 bp, Homo sapien
gaacacaaataccttctgcggcagc

SEQ ID NO: 5032680 - DNA, 25 bp, Homo sapien
gagtcaggatttgccgaatagaaca

SEQ ID NO: 5032681 - DNA, 25 bp, Homo sapien
gcagattcttgcacccacactttag

SEQ ID NO: 5032682 - DNA, 25 bp, Homo sapien
ggtgctgctacattccacttcagaa

SEQ ID NO: 5032683 - DNA, 25 bp, Homo sapien
atcagaattacacttctggtctccc

SEQ ID NO: 5032684 - DNA, 25 bp, Homo sapien
gagcttcttgtgttctatgaaggga

SEQ ID NO: 5032685 - DNA, 25 bp, Homo sapien
ggcaggacagagcttcttgtgttct

SEQ ID NO: 5032686 - DNA, 25 bp, Homo sapien
cagaattacacttctggtctccctc

SEQ ID NO: 5032687 - DNA, 25 bp, Homo sapien
gtgcataggacgaagggccctcgac

SEQ ID NO: 5032688 - DNA, 25 bp, Homo sapien
tgaggggggccaaccaagcatcccc

SEQ ID NO: 5032689 - DNA, 25 bp, Homo sapien
agcttccggatgacgcacctgggct

SEQ ID NO: 5032690 - DNA, 25 bp, Homo sapien
cctcgacccaatcccagtccaagct

SEQ ID NO: 5032691 - DNA, 25 bp, Homo sapien
gatatcgtttcgcatcagggacact

SEQ ID NO: 5032692 - DNA, 25 bp, Homo sapien
agggacactcgtctccacacctcct

SEQ ID NO: 5032693 - DNA, 25 bp, Homo sapien
tcctacctcaaagtcctacgcacct

SEQ ID NO: 5032694 - DNA, 25 bp, Homo sapien
gggccaaaacctcatgccggatcct

SEQ ID NO: 5032695 - DNA, 25 bp, Homo sapien
ccttggcggcgcaggtgagtgccaa

SEQ ID NO: 5032696 - DNA, 25 bp, Homo sapien
taaagcgcctactggccttggcggc

SEQ ID NO: 5032697 - DNA, 25 bp, Homo sapien
gcaactgaattaaagcgcctactgg

SEQ ID NO: 5032698 - DNA, 25 bp, Homo sapien
gatcgccaagcttcatcggggatgt

SEQ ID NO: 5032699 - DNA, 25 bp, Homo sapien
gagcttaaaaatgccccaagcgtcc

SEQ ID NO: 5032700 - DNA, 25 bp, Homo sapien
tgcgcgggttaagagggagcttaaa

SEQ ID NO: 5032701 - DNA, 25 bp, Homo sapien
taagagggagcttaaaaatgcccca

SEQ ID NO: 5032702 - DNA, 25 bp, Homo sapien
tggggtgcgcgggttaagagggagc

SEQ ID NO: 5032703 - DNA, 25 bp, Homo sapien
tctcgctttcgcctaaatattctgc

SEQ ID NO: 5032704 - DNA, 25 bp, Homo sapien
tctgcgcttatctgctccaggacca

SEQ ID NO: 5032705 - DNA, 25 bp, Homo sapien
tcagagcttccctaacgcatgcata

SEQ ID NO: 5032706 - DNA, 25 bp, Homo sapien
cataattttcttggccgaggtactc

SEQ ID NO: 5032707 - DNA, 25 bp, Homo sapien
ctgccgcggtcacgcaaagcgaggc

SEQ ID NO: 5032708 - DNA, 25 bp, Homo sapien
tcacgcaaagcgaggcagccggctc

SEQ ID NO: 5032709 - DNA, 25 bp, Homo sapien
cgcggtcacgcaaagcgaggcagcc

SEQ ID NO: 5032710 - DNA, 25 bp, Homo sapien
aaagcgaggcagccggctcccggct

SEQ ID NO: 5032711 - DNA, 25 bp, Homo sapien
acccagtcactcatatataatgtta

SEQ ID NO: 5032712 - DNA, 25 bp, Homo sapien
cccagtcactcatatataatgttaa

SEQ ID NO: 5032713 - DNA, 25 bp, Homo sapien
agtacaaaaatcggattcttcccat

SEQ ID NO: 5032714 - DNA, 25 bp, Homo sapien
ctgagtcattccggagcccactgtg

SEQ ID NO: 5032715 - DNA, 25 bp, Homo sapien
agtcattccggagcccactgtgatt

SEQ ID NO: 5032716 - DNA, 25 bp, Homo sapien
ccactgagtcattccggagcccact

SEQ ID NO: 5032717 - DNA, 25 bp, Homo sapien
gagtcattccggagcccactgtgat

SEQ ID NO: 5032718 - DNA, 25 bp, Homo sapien
ctttgatgcattgccttcaggtcta

SEQ ID NO: 5032719 - DNA, 25 bp, Homo sapien
actttgatgcattgccttcaggtct

SEQ ID NO: 5032720 - DNA, 25 bp, Homo sapien
gatgcattgccttcaggtctatgtc

SEQ ID NO: 5032721 - DNA, 25 bp, Homo sapien
ttgatgcattgccttcaggtctatg

SEQ ID NO: 5032722 - DNA, 25 bp, Homo sapien
catcatagatcctgatgatgtgtaa

SEQ ID NO: 5032723 - DNA, 25 bp, Homo sapien
tgctgtcaccaattgaacttccaca

SEQ ID NO: 5032724 - DNA, 25 bp, Homo sapien
agggatacaccccagtatagatgtc

SEQ ID NO: 5032725 - DNA, 25 bp, Homo sapien
gaacttccacagggaatgcaaagac

SEQ ID NO: 5032726 - DNA, 25 bp, Homo sapien
caaatatgcgtagagtaaatcaagg

SEQ ID NO: 5032727 - DNA, 25 bp, Homo sapien
aatcaaggtttctcagtcgtggcat

SEQ ID NO: 5032728 - DNA, 25 bp, Homo sapien
gagtaaatcaaggtttctcagtcgt

SEQ ID NO: 5032729 - DNA, 25 bp, Homo sapien
aagccaaagagcaaatatgcgtaga

SEQ ID NO: 5032730 - DNA, 25 bp, Homo sapien
ggtttgccttgtttatctgcatgtt

SEQ ID NO: 5032731 - DNA, 25 bp, Homo sapien
tcttgccacttattaatgcagcttc

SEQ ID NO: 5032732 - DNA, 25 bp, Homo sapien
cacttattaatgcagcttctccctt

SEQ ID NO: 5032733 - DNA, 25 bp, Homo sapien
gccacttattaatgcagcttctccc

SEQ ID NO: 5032734 - DNA, 25 bp, Homo sapien
tttcatgcaagcctgagcctacagg

SEQ ID NO: 5032735 - DNA, 25 bp, Homo sapien
cactcggcagacagccatttctgtt

SEQ ID NO: 5032736 - DNA, 25 bp, Homo sapien
tacagggcatacctcccatggagat

SEQ ID NO: 5032737 - DNA, 25 bp, Homo sapien
gatgctgtcattccatctagagaag

SEQ ID NO: 5032738 - DNA, 25 bp, Homo sapien
tgtcttttgaatatagtgacttctt

SEQ ID NO: 5032739 - DNA, 25 bp, Homo sapien
ggctgagtggtattttctttatcca

SEQ ID NO: 5032740 - DNA, 25 bp, Homo sapien
cagttttttaaaggcatctccacac

SEQ ID NO: 5032741 - DNA, 25 bp, Homo sapien
ggcatttagactgattccacatttt

SEQ ID NO: 5032742 - DNA, 25 bp, Homo sapien
gaacctggttgttacagctggctcc

SEQ ID NO: 5032743 - DNA, 25 bp, Homo sapien
ccagggtactgcgagggcctcttta

SEQ ID NO: 5032744 - DNA, 25 bp, Homo sapien
gaggcaatggtttctatcagcacat

SEQ ID NO: 5032745 - DNA, 25 bp, Homo sapien
gctttgccctccagctttaattggg

SEQ ID NO: 5032746 - DNA, 25 bp, Homo sapien
cactctggcttgaggtgactgtaac

SEQ ID NO: 5032747 - DNA, 25 bp, Homo sapien
caagtacatggaactgagtggcagc

SEQ ID NO: 5032748 - DNA, 25 bp, Homo sapien
caccaaataaatgccccgtctcagg

SEQ ID NO: 5032749 - DNA, 25 bp, Homo sapien
tcacataggtcaagatttctggcac

SEQ ID NO: 5032750 - DNA, 25 bp, Homo sapien
tcattcgatgcctttggctattttt

SEQ ID NO: 5032751 - DNA, 25 bp, Homo sapien
tccatttgaagcacatccctgaagt

SEQ ID NO: 5032752 - DNA, 25 bp, Homo sapien
tactttaagtccatagccctgtgga

SEQ ID NO: 5032753 - DNA, 25 bp, Homo sapien
gtgccctagggctaactctggaggt

SEQ ID NO: 5032754 - DNA, 25 bp, Homo sapien
tgctccctgctgaaggcattggcca

SEQ ID NO: 5032755 - DNA, 25 bp, Homo sapien
tctcagtactgatcatgctccctgc

SEQ ID NO: 5032756 - DNA, 25 bp, Homo sapien
gctccctgctgaaggcattggccag

SEQ ID NO: 5032757 - DNA, 25 bp, Homo sapien
ctagatctcagtactgatcatgctc

SEQ ID NO: 5032758 - DNA, 25 bp, Homo sapien
caagctctgagggatttgggagtcc

SEQ ID NO: 5032759 - DNA, 25 bp, Homo sapien
gactggccgctgtggctccttattt

SEQ ID NO: 5032760 - DNA, 25 bp, Homo sapien
ggagtccaggactggccgctgtggc

SEQ ID NO: 5032761 - DNA, 25 bp, Homo sapien
atttgatttaccctcctccactgtg

SEQ ID NO: 5032762 - DNA, 25 bp, Homo sapien
gtgaagagctggtgtcaaggtatca

SEQ ID NO: 5032763 - DNA, 25 bp, Homo sapien
tccgctctcccatgagtgactcagg

SEQ ID NO: 5032764 - DNA, 25 bp, Homo sapien
tggtgtcaaggtatcagctccgctc

SEQ ID NO: 5032765 - DNA, 25 bp, Homo sapien
acttgtgtgcgtgctcttgtgtgaa

SEQ ID NO: 5032766 - DNA, 25 bp, Homo sapien
tgcctgatttttcccagatccaaat

SEQ ID NO: 5032767 - DNA, 25 bp, Homo sapien
tttgcctgatttttcccagatccaa

SEQ ID NO: 5032768 - DNA, 25 bp, Homo sapien
gtggttttgcctgatttttcccaga

SEQ ID NO: 5032769 - DNA, 25 bp, Homo sapien
ggttttgcctgatttttcccagatc

SEQ ID NO: 5032770 - DNA, 25 bp, Homo sapien
gcaacgcccactgaagtcagcaata

SEQ ID NO: 5032771 - DNA, 25 bp, Homo sapien
gaaacttggcttccattgccacaaa

SEQ ID NO: 5032772 - DNA, 25 bp, Homo sapien
gaagtcagcaatagaaacttggctt

SEQ ID NO: 5032773 - DNA, 25 bp, Homo sapien
ctttgacatggaaataagcagcaac

SEQ ID NO: 5032774 - DNA, 25 bp, Homo sapien
gatcatgtctctttcgtcaaccagg

SEQ ID NO: 5032775 - DNA, 25 bp, Homo sapien
ccagcaccagtagcttccttccagg

SEQ ID NO: 5032776 - DNA, 25 bp, Homo sapien
cctgtgtcgggcagtaatttccttt

SEQ ID NO: 5032777 - DNA, 25 bp, Homo sapien
tccttccaggaatgcattgcccatc

SEQ ID NO: 5032778 - DNA, 25 bp, Homo sapien
ccttgcgggcttcatgagatcgatt

SEQ ID NO: 5032779 - DNA, 25 bp, Homo sapien
cggtccttgcgggcttcatgagatc

SEQ ID NO: 5032780 - DNA, 25 bp, Homo sapien
tccttgcgggcttcatgagatcgat

SEQ ID NO: 5032781 - DNA, 25 bp, Homo sapien
ttgcgggcttcatgagatcgattcc

SEQ ID NO: 5032782 - DNA, 25 bp, Homo sapien
gggaagctcattggcatcgaagacg

SEQ ID NO: 5032783 - DNA, 25 bp, Homo sapien
cagcttgggaagctcattggcatcg

SEQ ID NO: 5032784 - DNA, 25 bp, Homo sapien
gaagctcattggcatcgaagacgct

SEQ ID NO: 5032785 - DNA, 25 bp, Homo sapien
agctcattggcatcgaagacgctcg

SEQ ID NO: 5032786 - DNA, 25 bp, Homo sapien
tacctcaggtttaagggcatctcaa

SEQ ID NO: 5032787 - DNA, 25 bp, Homo sapien
tgcacttgcattgacatacctcagg

SEQ ID NO: 5032788 - DNA, 25 bp, Homo sapien
tttgggccaaccaatccaggcagtc

SEQ ID NO: 5032789 - DNA, 25 bp, Homo sapien
tggtccctaaggtattacaatgtct

SEQ ID NO: 5032790 - DNA, 25 bp, Homo sapien
ttgacaccagtctaaccaatgggag

SEQ ID NO: 5032791 - DNA, 25 bp, Homo sapien
gctattatatcaagggtcccaggaa

SEQ ID NO: 5032792 - DNA, 25 bp, Homo sapien
tgcatggtgtctctaaacctcaggc

SEQ ID NO: 5032793 - DNA, 25 bp, Homo sapien
tccttgatgggaagcctatgagtaa

SEQ ID NO: 5032794 - DNA, 25 bp, Homo sapien
ccctttgagctttacttcctctatc

SEQ ID NO: 5032795 - DNA, 25 bp, Homo sapien
tgagctttacttcctctatccacaa

SEQ ID NO: 5032796 - DNA, 25 bp, Homo sapien
gctttacttcctctatccacaatgc

SEQ ID NO: 5032797 - DNA, 25 bp, Homo sapien
tttacttcctctatccacaatgctt

SEQ ID NO: 5032798 - DNA, 25 bp, Homo sapien
gagcgagaaagctaagataaaatct

SEQ ID NO: 5032799 - DNA, 25 bp, Homo sapien
gaaggtttgccagaattcgcttcat

SEQ ID NO: 5032800 - DNA, 25 bp, Homo sapien
aagataaaatctctggacaataaag

SEQ ID NO: 5032801 - DNA, 25 bp, Homo sapien
ctggagcgagaaagctaagataaaa

SEQ ID NO: 5032802 - DNA, 25 bp, Homo sapien
aggttgaagctatttaccacatgac

SEQ ID NO: 5032803 - DNA, 25 bp, Homo sapien
ctgcttgaaggctctctattcaggt

SEQ ID NO: 5032804 - DNA, 25 bp, Homo sapien
gaaggctctctattcaggttgaagc

SEQ ID NO: 5032805 - DNA, 25 bp, Homo sapien
tgaagctatttaccacatgaccaaa

SEQ ID NO: 5032806 - DNA, 25 bp, Homo sapien
cctctgtctcccactggttgcagtg

SEQ ID NO: 5032807 - DNA, 25 bp, Homo sapien
tctctgacggttaagccctggcttt

SEQ ID NO: 5032808 - DNA, 25 bp, Homo sapien
ttctctgacggttaagccctggctt

SEQ ID NO: 5032809 - DNA, 25 bp, Homo sapien
tgccgatcaataactccctttactg

SEQ ID NO: 5032810 - DNA, 25 bp, Homo sapien
aaagtaatagtagactagctatttc

SEQ ID NO: 5032811 - DNA, 25 bp, Homo sapien
tgtgactgtgacgagggcaccaggg

SEQ ID NO: 5032812 - DNA, 25 bp, Homo sapien
ggagaacttgatccgatgtccacag

SEQ ID NO: 5032813 - DNA, 25 bp, Homo sapien
gcttatagttagtaagctgtgactg

SEQ ID NO: 5032814 - DNA, 25 bp, Homo sapien
tctcaggccgttcacctggaccagg

SEQ ID NO: 5032815 - DNA, 25 bp, Homo sapien
gccgttcacctggaccaggttaata

SEQ ID NO: 5032816 - DNA, 25 bp, Homo sapien
cgttcacctggaccaggttaatagc

SEQ ID NO: 5032817 - DNA, 25 bp, Homo sapien
caggccgttcacctggaccaggtta

SEQ ID NO: 5032818 - DNA, 25 bp, Homo sapien
tctgctctaacatgaccatcaaaac

SEQ ID NO: 5032819 - DNA, 25 bp, Homo sapien
ctgctctaacatgaccatcaaaacc

SEQ ID NO: 5032820 - DNA, 25 bp, Homo sapien
actctgctctaacatgaccatcaaa

SEQ ID NO: 5032821 - DNA, 25 bp, Homo sapien
tcactctgctctaacatgaccatca

SEQ ID NO: 5032822 - DNA, 25 bp, Homo sapien
gcccttgcactcgactatgatttat

SEQ ID NO: 5032823 - DNA, 25 bp, Homo sapien
tgaagagcggtgctaagattccaga

SEQ ID NO: 5032824 - DNA, 25 bp, Homo sapien
gcaacagtcaagcagccagtaggta

SEQ ID NO: 5032825 - DNA, 25 bp, Homo sapien
cagctagagagaagacgggtttgaa

SEQ ID NO: 5032826 - DNA, 25 bp, Homo sapien
catcttggtgccagtggaatttacc

SEQ ID NO: 5032827 - DNA, 25 bp, Homo sapien
taattaagaaagtacatcctccagg

SEQ ID NO: 5032828 - DNA, 25 bp, Homo sapien
gtttgaatgggatcagcagtcttct

SEQ ID NO: 5032829 - DNA, 25 bp, Homo sapien
tacgttaaactgatccttgaatggg

SEQ ID NO: 5032830 - DNA, 25 bp, Homo sapien
gtttctttggacaccctctgtactg

SEQ ID NO: 5032831 - DNA, 25 bp, Homo sapien
tctcctcgtgcatcctgtcgtcttg

SEQ ID NO: 5032832 - DNA, 25 bp, Homo sapien
gtcttgtcttctccgtaagcagccc

SEQ ID NO: 5032833 - DNA, 25 bp, Homo sapien
tgtgctgtgagcctgctccgcagga

SEQ ID NO: 5032834 - DNA, 25 bp, Homo sapien
tgtattatactgaaaacctgaaatg

SEQ ID NO: 5032835 - DNA, 25 bp, Homo sapien
aatggactagtgaggtattctggat

SEQ ID NO: 5032836 - DNA, 25 bp, Homo sapien
tattctggatagtggaaaatgaatt

SEQ ID NO: 5032837 - DNA, 25 bp, Homo sapien
tagtaatcacacttaactcacactg

SEQ ID NO: 5032838 - DNA, 25 bp, Homo sapien
tgcaaaacagtgtgtcaaaactgat

SEQ ID NO: 5032839 - DNA, 25 bp, Homo sapien
aataggacaactttccgtagccttg

SEQ ID NO: 5032840 - DNA, 25 bp, Homo sapien
tgatgggaagctatcggcaggaaaa

SEQ ID NO: 5032841 - DNA, 25 bp, Homo sapien
ttctgcaaaacagtgtgtcaaaact

SEQ ID NO: 5032842 - DNA, 25 bp, Homo sapien
cgacttaaggctggtactccaaggg

SEQ ID NO: 5032843 - DNA, 25 bp, Homo sapien
gaagctgcttttgcctaagcgatga

SEQ ID NO: 5032844 - DNA, 25 bp, Homo sapien
gatgagatgctaaggattttgtgac

SEQ ID NO: 5032845 - DNA, 25 bp, Homo sapien
tatgagtccggcatttgaagctgct

SEQ ID NO: 5032846 - DNA, 25 bp, Homo sapien
caatggacccccaatggctgctcca

SEQ ID NO: 5032847 - DNA, 25 bp, Homo sapien
catccagcaatggacccccaatggc

SEQ ID NO: 5032848 - DNA, 25 bp, Homo sapien
tccagcaatggacccccaatggctg

SEQ ID NO: 5032849 - DNA, 25 bp, Homo sapien
agcaatggacccccaatggctgctc

SEQ ID NO: 5032850 - DNA, 25 bp, Homo sapien
cctcctgcaaagtcccgtgggcagc

SEQ ID NO: 5032851 - DNA, 25 bp, Homo sapien
gttacttagagcctctttccaccac

SEQ ID NO: 5032852 - DNA, 25 bp, Homo sapien
tggaaggaaattgggcaacttcttg

SEQ ID NO: 5032853 - DNA, 25 bp, Homo sapien
agtcattttgaggttacttagagcc

SEQ ID NO: 5032854 - DNA, 25 bp, Homo sapien
gtaatagatgcctgggagtcatttt

SEQ ID NO: 5032855 - DNA, 25 bp, Homo sapien
taaggaatagcccaaacgttcagct

SEQ ID NO: 5032856 - DNA, 25 bp, Homo sapien
ttttaatgccgcctctaacactacc

SEQ ID NO: 5032857 - DNA, 25 bp, Homo sapien
tgctacccaggatgagcaaggaatt

SEQ ID NO: 5032858 - DNA, 25 bp, Homo sapien
tcttgcattgtgacctgggtgctac

SEQ ID NO: 5032859 - DNA, 25 bp, Homo sapien
ctgaaatatattttgagtatgtact

SEQ ID NO: 5032860 - DNA, 25 bp, Homo sapien
acctccagtctgagttgtctgttta

SEQ ID NO: 5032861 - DNA, 25 bp, Homo sapien
ccacctccagtctgagttgtctgtt

SEQ ID NO: 5032862 - DNA, 25 bp, Homo sapien
ctccacctccagtctgagttgtctg

SEQ ID NO: 5032863 - DNA, 25 bp, Homo sapien
ctccagtctgagttgtctgtttact

SEQ ID NO: 5032864 - DNA, 25 bp, Homo sapien
ctccatcctccggtgccagcctcct

SEQ ID NO: 5032865 - DNA, 25 bp, Homo sapien
gaaacagtttactcatccatgggat

SEQ ID NO: 5032866 - DNA, 25 bp, Homo sapien
gcctcaagtgcctgagaaacagttt

SEQ ID NO: 5032867 - DNA, 25 bp, Homo sapien
tagtttcttttagtaccctgtggca

SEQ ID NO: 5032868 - DNA, 25 bp, Homo sapien
tagtcagtagataacgatccagatc

SEQ ID NO: 5032869 - DNA, 25 bp, Homo sapien
ttataagcagcttatttttactgat

SEQ ID NO: 5032870 - DNA, 25 bp, Homo sapien
tataagcagcttatttttactgatt

SEQ ID NO: 5032871 - DNA, 25 bp, Homo sapien
agcagcttatttttactgattggac

SEQ ID NO: 5032872 - DNA, 25 bp, Homo sapien
taagcagcttatttttactgattgg

SEQ ID NO: 5032873 - DNA, 25 bp, Homo sapien
tagtgcgtgcattaggcccttcaag

SEQ ID NO: 5032874 - DNA, 25 bp, Homo sapien
ctcgaaggtgaggttagcatgtcca

SEQ ID NO: 5032875 - DNA, 25 bp, Homo sapien
tttattcgccacaaactgagcagct

SEQ ID NO: 5032876 - DNA, 25 bp, Homo sapien
cattgtgaagctgtgaaggaacctg

SEQ ID NO: 5032877 - DNA, 25 bp, Homo sapien
taggcgtaaactttgtaggaacagc

SEQ ID NO: 5032878 - DNA, 25 bp, Homo sapien
tcagcagctggaaagtctgttcttg

SEQ ID NO: 5032879 - DNA, 25 bp, Homo sapien
tctgcgtttactttggtgccaggca

SEQ ID NO: 5032880 - DNA, 25 bp, Homo sapien
taggaacagcaaacctgaagaatgc

SEQ ID NO: 5032881 - DNA, 25 bp, Homo sapien
atttgtgtgttttctacagggtgct

SEQ ID NO: 5032882 - DNA, 25 bp, Homo sapien
tccacatttttgagttgattcactg

SEQ ID NO: 5032883 - DNA, 25 bp, Homo sapien
tgtttccggaacatatgttgtcgtg

SEQ ID NO: 5032884 - DNA, 25 bp, Homo sapien
cctttctgagttagcaggagaccaa

SEQ ID NO: 5032885 - DNA, 25 bp, Homo sapien
taccaagcaatttagtaccttctcc

SEQ ID NO: 5032886 - DNA, 25 bp, Homo sapien
tgccctcttaacacagttttggaaa

SEQ ID NO: 5032887 - DNA, 25 bp, Homo sapien
aatttagtaccttctcctcaaatcg

SEQ ID NO: 5032888 - DNA, 25 bp, Homo sapien
caaatcgtttcccagcagatgccct

SEQ ID NO: 5032889 - DNA, 25 bp, Homo sapien
cctccgctgagtggcagtaaggccg

SEQ ID NO: 5032890 - DNA, 25 bp, Homo sapien
gaaattagtacccattgaatgctgc

SEQ ID NO: 5032891 - DNA, 25 bp, Homo sapien
ttacctacaaaacgctcatgaaatg

SEQ ID NO: 5032892 - DNA, 25 bp, Homo sapien
ggtgttcattagtccagcctccgct

SEQ ID NO: 5032893 - DNA, 25 bp, Homo sapien
ccttgcattcgcacacgcggttgtg

SEQ ID NO: 5032894 - DNA, 25 bp, Homo sapien
tatagacactcgtcactggtgtgcc

SEQ ID NO: 5032895 - DNA, 25 bp, Homo sapien
gaactctatctcaaggtagcgccct

SEQ ID NO: 5032896 - DNA, 25 bp, Homo sapien
gagggcagctcctatgtttcaagca

SEQ ID NO: 5032897 - DNA, 25 bp, Homo sapien
ctagtgaaagcatcttcttgaattt

SEQ ID NO: 5032898 - DNA, 25 bp, Homo sapien
tcctggggcttttaattgtctcagg

SEQ ID NO: 5032899 - DNA, 25 bp, Homo sapien
ctgagagtttctagtgaaagcatct

SEQ ID NO: 5032900 - DNA, 25 bp, Homo sapien
ttgtctcaggtggagtgggttgaca

SEQ ID NO: 5032901 - DNA, 25 bp, Homo sapien
cctcctccaggatgacggtagatgg

SEQ ID NO: 5032902 - DNA, 25 bp, Homo sapien
tcctccaggatgacggtagatggcc

SEQ ID NO: 5032903 - DNA, 25 bp, Homo sapien
cctccaggatgacggtagatggcca

SEQ ID NO: 5032904 - DNA, 25 bp, Homo sapien
ctccaggatgacggtagatggccat

SEQ ID NO: 5032905 - DNA, 25 bp, Homo sapien
cacgagcgcgcagcacagcaagttg

SEQ ID NO: 5032906 - DNA, 25 bp, Homo sapien
gcgcgcagcacagcaagttgttcat

SEQ ID NO: 5032907 - DNA, 25 bp, Homo sapien
cgagcgcgcagcacagcaagttgtt

SEQ ID NO: 5032908 - DNA, 25 bp, Homo sapien
agcgcgcagcacagcaagttgttca

SEQ ID NO: 5032909 - DNA, 25 bp, Homo sapien
gctgggcgagcgctccggtgcgtct

SEQ ID NO: 5032910 - DNA, 25 bp, Homo sapien
gagcgctccggtgcgtctccgcagc

SEQ ID NO: 5032911 - DNA, 25 bp, Homo sapien
cggcggctgggcgagcgctccggtg

SEQ ID NO: 5032912 - DNA, 25 bp, Homo sapien
ggtgcgtctccgcagcccgtgcgct

SEQ ID NO: 5032913 - DNA, 25 bp, Homo sapien
cacgttatatatagcgtcccggcaa

SEQ ID NO: 5032914 - DNA, 25 bp, Homo sapien
tctatcctggaccaaactttgcacc

SEQ ID NO: 5032915 - DNA, 25 bp, Homo sapien
ctccagggttaacgctttcagggct

SEQ ID NO: 5032916 - DNA, 25 bp, Homo sapien
gaagtatcgcctgcctttgatcagt

SEQ ID NO: 5032917 - DNA, 25 bp, Homo sapien
caagctatcgacagaagtttggcac

SEQ ID NO: 5032918 - DNA, 25 bp, Homo sapien
tacgcgctgaacttctggagtagcc

SEQ ID NO: 5032919 - DNA, 25 bp, Homo sapien
tggcactttgctctagggttcgctg

SEQ ID NO: 5032920 - DNA, 25 bp, Homo sapien
ggtatcggagcttcctacgcgctga

SEQ ID NO: 5032921 - DNA, 25 bp, Homo sapien
gggacatccttccaccacgagttca

SEQ ID NO: 5032922 - DNA, 25 bp, Homo sapien
caagggacatccttccaccacgagt

SEQ ID NO: 5032923 - DNA, 25 bp, Homo sapien
ccaccacgagttcaaagtggatcca

SEQ ID NO: 5032924 - DNA, 25 bp, Homo sapien
ccttccaccacgagttcaaagtgga

SEQ ID NO: 5032925 - DNA, 25 bp, Homo sapien
tgttctaactcctgtaagtgtatgg

SEQ ID NO: 5032926 - DNA, 25 bp, Homo sapien
gcctcacggctgaagctttcaaatt

SEQ ID NO: 5032927 - DNA, 25 bp, Homo sapien
ggaatgcctcctcggcaagaaaaag

SEQ ID NO: 5032928 - DNA, 25 bp, Homo sapien
tcaaattcatgaacactatgggtct

SEQ ID NO: 5032929 - DNA, 25 bp, Homo sapien
aagtccaactgagaagaataactga

SEQ ID NO: 5032930 - DNA, 25 bp, Homo sapien
tctgctggggcagcacgttgaagtc

SEQ ID NO: 5032931 - DNA, 25 bp, Homo sapien
tggggcagcacgttgaagtccaact

SEQ ID NO: 5032932 - DNA, 25 bp, Homo sapien
tgaagtccaactgagaagaataact

SEQ ID NO: 5032933 - DNA, 25 bp, Homo sapien
tattcgtgtaacttcatttccacca

SEQ ID NO: 5032934 - DNA, 25 bp, Homo sapien
cacctagtgtgatttgaaacttcca

SEQ ID NO: 5032935 - DNA, 25 bp, Homo sapien
agttatgttgggcttgtaaccaaat

SEQ ID NO: 5032936 - DNA, 25 bp, Homo sapien
tcttgatggtcatatgtgccttgag

SEQ ID NO: 5032937 - DNA, 25 bp, Homo sapien
ttttactccattcttggctccgaga

SEQ ID NO: 5032938 - DNA, 25 bp, Homo sapien
tccattcttggctccgagagctact

SEQ ID NO: 5032939 - DNA, 25 bp, Homo sapien
tggctccgagagctacttccatgtt

SEQ ID NO: 5032940 - DNA, 25 bp, Homo sapien
tcttggctccgagagctacttccat

SEQ ID NO: 5032941 - DNA, 25 bp, Homo sapien
cccgaatttcaaaggctagtataga

SEQ ID NO: 5032942 - DNA, 25 bp, Homo sapien
gcttcccagcaaccacatgggctta

SEQ ID NO: 5032943 - DNA, 25 bp, Homo sapien
tctgagccgttgctctgaacttagc

SEQ ID NO: 5032944 - DNA, 25 bp, Homo sapien
tggtgttccacagaattagagtgag

SEQ ID NO: 5032945 - DNA, 25 bp, Homo sapien
aacaattatgcccaagacagggact

SEQ ID NO: 5032946 - DNA, 25 bp, Homo sapien
taggagctggcaggaattactactg

SEQ ID NO: 5032947 - DNA, 25 bp, Homo sapien
gactccctgcagatgaactacagca

SEQ ID NO: 5032948 - DNA, 25 bp, Homo sapien
tctacaatcagtgcagtaggagctg

SEQ ID NO: 5032949 - DNA, 25 bp, Homo sapien
gccttagctgctattgcctctatta

SEQ ID NO: 5032950 - DNA, 25 bp, Homo sapien
acataacgcttggtactgcactctg

SEQ ID NO: 5032951 - DNA, 25 bp, Homo sapien
tgcctctattacataacgcttggta

SEQ ID NO: 5032952 - DNA, 25 bp, Homo sapien
tttttaaagccttagctgctattgc

SEQ ID NO: 5032953 - DNA, 25 bp, Homo sapien
tttgggaaaagtgaatgtcaagtgt

SEQ ID NO: 5032954 - DNA, 25 bp, Homo sapien
ttgcacaggagtataaaggacagac

SEQ ID NO: 5032955 - DNA, 25 bp, Homo sapien
agatcagctaccatcattcaatcac

SEQ ID NO: 5032956 - DNA, 25 bp, Homo sapien
gaatgtcaagtgtaaaagacacata

SEQ ID NO: 5032957 - DNA, 25 bp, Homo sapien
ggaagctggaggcatgatcattaaa

SEQ ID NO: 5032958 - DNA, 25 bp, Homo sapien
gctgaaaccaagtccaaagttgagt

SEQ ID NO: 5032959 - DNA, 25 bp, Homo sapien
taaaatgcacaagaacagatgttgc

SEQ ID NO: 5032960 - DNA, 25 bp, Homo sapien
ggatatgcttttttcgtatcctgga

SEQ ID NO: 5032961 - DNA, 25 bp, Homo sapien
cctgagttccaacgtagaggatgga

SEQ ID NO: 5032962 - DNA, 25 bp, Homo sapien
gggtagaagaattgcagctgcctaa

SEQ ID NO: 5032963 - DNA, 25 bp, Homo sapien
aaaatgttctcaagtacagccaagg

SEQ ID NO: 5032964 - DNA, 25 bp, Homo sapien
tatgagataattacaagccagagtg

SEQ ID NO: 5032965 - DNA, 25 bp, Homo sapien
tattttcctgtgaccgtcattacag

SEQ ID NO: 5032966 - DNA, 25 bp, Homo sapien
gagtgccatcttaccatgtactttg

SEQ ID NO: 5032967 - DNA, 25 bp, Homo sapien
tactttgtctgtgagttcatcaaga

SEQ ID NO: 5032968 - DNA, 25 bp, Homo sapien
tacatttgatctgagtcaacatagc

SEQ ID NO: 5032969 - DNA, 25 bp, Homo sapien
tggcccaaagccagacatgtacaag

SEQ ID NO: 5032970 - DNA, 25 bp, Homo sapien
gagcactctgtgtctatcccagtgg

SEQ ID NO: 5032971 - DNA, 25 bp, Homo sapien
tattgacccaataactcgccaggtt

SEQ ID NO: 5032972 - DNA, 25 bp, Homo sapien
atggttaggctaacctgccctggcc

SEQ ID NO: 5032973 - DNA, 25 bp, Homo sapien
tgaaaacctagaaacacctgtagga

SEQ ID NO: 5032974 - DNA, 25 bp, Homo sapien
cgggcaacttcatgttaaggatcca

SEQ ID NO: 5032975 - DNA, 25 bp, Homo sapien
gacatcaaacgccagtatccttgga

SEQ ID NO: 5032976 - DNA, 25 bp, Homo sapien
cttttgagatgatagtacatgacac

SEQ ID NO: 5032977 - DNA, 25 bp, Homo sapien
ttaatgaacattgaagtgaatatcc

SEQ ID NO: 5032978 - DNA, 25 bp, Homo sapien
ttgaagtgaatatcctcaatacaat

SEQ ID NO: 5032979 - DNA, 25 bp, Homo sapien
acattgaagtgaatatcctcaatac

SEQ ID NO: 5032980 - DNA, 25 bp, Homo sapien
gaatatcctcaatacaatattggca

SEQ ID NO: 5032981 - DNA, 25 bp, Homo sapien
gattcactgactatcaagcctatgg

SEQ ID NO: 5032982 - DNA, 25 bp, Homo sapien
gaggctcaagattcaattgtcagga

SEQ ID NO: 5032983 - DNA, 25 bp, Homo sapien
caccctgataagtggtagagacaca

SEQ ID NO: 5032984 - DNA, 25 bp, Homo sapien
tgatatgctttaggcagcaccctga

SEQ ID NO: 5032985 - DNA, 25 bp, Homo sapien
gtcttactcattatgatgtgaacaa

SEQ ID NO: 5032986 - DNA, 25 bp, Homo sapien
tgtcttactcattatgatgtgaaca

SEQ ID NO: 5032987 - DNA, 25 bp, Homo sapien
gacattcagacgatagtatctgctg

SEQ ID NO: 5032988 - DNA, 25 bp, Homo sapien
tctctcagtgaagctctacatgttt

SEQ ID NO: 5032989 - DNA, 25 bp, Homo sapien
tcattgtggcacgaagtccaaggca

SEQ ID NO: 5032990 - DNA, 25 bp, Homo sapien
cacgccattcttcctggtaacctag

SEQ ID NO: 5032991 - DNA, 25 bp, Homo sapien
tgtcagtatccagtgcgatggtcat

SEQ ID NO: 5032992 - DNA, 25 bp, Homo sapien
tatcccgcgatgtcagtatccagtg

SEQ ID NO: 5032993 - DNA, 25 bp, Homo sapien
gcgatgtcagtatccagtgcgatgg

SEQ ID NO: 5032994 - DNA, 25 bp, Homo sapien
tcccgcgatgtcagtatccagtgcg

SEQ ID NO: 5032995 - DNA, 25 bp, Homo sapien
cttagcatttgtcccggagtcggtc

SEQ ID NO: 5032996 - DNA, 25 bp, Homo sapien
agagatatgttagttgaaaatggaa

SEQ ID NO: 5032997 - DNA, 25 bp, Homo sapien
ccggagtcggtcttagtcaaaagag

SEQ ID NO: 5032998 - DNA, 25 bp, Homo sapien
cggtcttagtcaaaagagatatgtt

SEQ ID NO: 5032999 - DNA, 25 bp, Homo sapien
tgggcagtgtgatgaatgattcaga

SEQ ID NO: 5033000 - DNA, 25 bp, Homo sapien
gatgtagattgtgggttgaactcta

SEQ ID NO: 5033001 - DNA, 25 bp, Homo sapien
ggcagatgtagattgtgggttgaac

SEQ ID NO: 5033002 - DNA, 25 bp, Homo sapien
gagagggcagatgtagattgtgggt

SEQ ID NO: 5033003 - DNA, 25 bp, Homo sapien
tagagtcaagtacaagatgggaaga

SEQ ID NO: 5033004 - DNA, 25 bp, Homo sapien
aatgtgggatcaatacgagcatcac

SEQ ID NO: 5033005 - DNA, 25 bp, Homo sapien
ctgaagaataaggaacggtgagagt

SEQ ID NO: 5033006 - DNA, 25 bp, Homo sapien
tacgagcatcacgaaaatgccttcc

SEQ ID NO: 5033007 - DNA, 25 bp, Homo sapien
acaggtggagagcacaggtgcaaac

SEQ ID NO: 5033008 - DNA, 25 bp, Homo sapien
gcgagggcgcgctgtgagagctggg

SEQ ID NO: 5033009 - DNA, 25 bp, Homo sapien
acctgtgtatctgtcaaactgagca

SEQ ID NO: 5033010 - DNA, 25 bp, Homo sapien
tgtatctgtcaaactgagcacagtg

SEQ ID NO: 5033011 - DNA, 25 bp, Homo sapien
gtagccgatgactgggtgacctggt

SEQ ID NO: 5033012 - DNA, 25 bp, Homo sapien
ctgccattttgttgggtggtgcaaa

SEQ ID NO: 5033013 - DNA, 25 bp, Homo sapien
tgggtggtgcaaaggtgtagccgat

SEQ ID NO: 5033014 - DNA, 25 bp, Homo sapien
tggtgcaaaggtgtagccgatgact

SEQ ID NO: 5033015 - DNA, 25 bp, Homo sapien
ccatcattagtggcctttggattgg

SEQ ID NO: 5033016 - DNA, 25 bp, Homo sapien
ccttgccatcattagtggcctttgg

SEQ ID NO: 5033017 - DNA, 25 bp, Homo sapien
gccatcattagtggcctttggattg

SEQ ID NO: 5033018 - DNA, 25 bp, Homo sapien
ttgccatcattagtggcctttggat

SEQ ID NO: 5033019 - DNA, 25 bp, Homo sapien
tcctgaaacatgtctcacactcttg

SEQ ID NO: 5033020 - DNA, 25 bp, Homo sapien
tctcacactcttggctacgtagaac

SEQ ID NO: 5033021 - DNA, 25 bp, Homo sapien
tcacactcttggctacgtagaacag

SEQ ID NO: 5033022 - DNA, 25 bp, Homo sapien
ctcacactcttggctacgtagaaca

SEQ ID NO: 5033023 - DNA, 25 bp, Homo sapien
gaagaaggcacaagatttaccctgg

SEQ ID NO: 5033024 - DNA, 25 bp, Homo sapien
tccattttagggtcggtgtcagcta

SEQ ID NO: 5033025 - DNA, 25 bp, Homo sapien
cagctgaattggaggtttaggtcac

SEQ ID NO: 5033026 - DNA, 25 bp, Homo sapien
tctaatgcaggtctatgccagggcc

SEQ ID NO: 5033027 - DNA, 25 bp, Homo sapien
tacactctgttggtctaacagtctc

SEQ ID NO: 5033028 - DNA, 25 bp, Homo sapien
gattcttacactctgttggtctaac

SEQ ID NO: 5033029 - DNA, 25 bp, Homo sapien
cactctgttggtctaacagtctcct

SEQ ID NO: 5033030 - DNA, 25 bp, Homo sapien
cttacactctgttggtctaacagtc

SEQ ID NO: 5033031 - DNA, 25 bp, Homo sapien
acatgtacatgggttgaagaagcga

SEQ ID NO: 5033032 - DNA, 25 bp, Homo sapien
gaagaagcgagtccaacctgaagat

SEQ ID NO: 5033033 - DNA, 25 bp, Homo sapien
tacaggtgtggagttggatcagttc

SEQ ID NO: 5033034 - DNA, 25 bp, Homo sapien
gtttaccgccatatacaacagctgc

SEQ ID NO: 5033035 - DNA, 25 bp, Homo sapien
caaggatgggtcatgtttgtgtccg

SEQ ID NO: 5033036 - DNA, 25 bp, Homo sapien
tgtgtccgtgacagcgtttttcttt

SEQ ID NO: 5033037 - DNA, 25 bp, Homo sapien
ctctactacaaggatgggtcatgtt

SEQ ID NO: 5033038 - DNA, 25 bp, Homo sapien
ttcttttcgctcctctttctgggca

SEQ ID NO: 5033039 - DNA, 25 bp, Homo sapien
tgtagcctcgggcacaattattaac

SEQ ID NO: 5033040 - DNA, 25 bp, Homo sapien
cgtggttacagtcctgcatgggctt

SEQ ID NO: 5033041 - DNA, 25 bp, Homo sapien
aattattaacctctctcgattttag

SEQ ID NO: 5033042 - DNA, 25 bp, Homo sapien
catagatctggtttgcttagtagct

SEQ ID NO: 5033043 - DNA, 25 bp, Homo sapien
ctcattctattctgggaaaataagg

SEQ ID NO: 5033044 - DNA, 25 bp, Homo sapien
tggttttgaaacagcttttctgtat

SEQ ID NO: 5033045 - DNA, 25 bp, Homo sapien
aggagattttggttttgaaacagct

SEQ ID NO: 5033046 - DNA, 25 bp, Homo sapien
attctgggaaaataaggagattttg

SEQ ID NO: 5033047 - DNA, 25 bp, Homo sapien
tacatgacatctccgttcactggag

SEQ ID NO: 5033048 - DNA, 25 bp, Homo sapien
catactgcagatccatttctccata

SEQ ID NO: 5033049 - DNA, 25 bp, Homo sapien
ttctccatatacatctgggagtcac

SEQ ID NO: 5033050 - DNA, 25 bp, Homo sapien
gagagaggttagagggatacatgac

SEQ ID NO: 5033051 - DNA, 25 bp, Homo sapien
ctgagagagtcagggcccctggcaa

SEQ ID NO: 5033052 - DNA, 25 bp, Homo sapien
tgagagagtcagggcccctggcaac

SEQ ID NO: 5033053 - DNA, 25 bp, Homo sapien
agagagtcagggcccctggcaacca

SEQ ID NO: 5033054 - DNA, 25 bp, Homo sapien
gagtcagggcccctggcaaccacat

SEQ ID NO: 5033055 - DNA, 25 bp, Homo sapien
tagagtgcagatttgtacacaggac

SEQ ID NO: 5033056 - DNA, 25 bp, Homo sapien
caggttctgatagttgctggcttcc

SEQ ID NO: 5033057 - DNA, 25 bp, Homo sapien
ccccaaaagggtgaggacattatct

SEQ ID NO: 5033058 - DNA, 25 bp, Homo sapien
tctatggatcataagccccaaaagg

SEQ ID NO: 5033059 - DNA, 25 bp, Homo sapien
atgtataaaatttctcaggcagagt

SEQ ID NO: 5033060 - DNA, 25 bp, Homo sapien
tgtataaaatttctcaggcagagtc

SEQ ID NO: 5033061 - DNA, 25 bp, Homo sapien
taacctacctgtagagatcctcgtc

SEQ ID NO: 5033062 - DNA, 25 bp, Homo sapien
catagaacaaccatgaatgagtggc

SEQ ID NO: 5033063 - DNA, 25 bp, Homo sapien
gatcctcgtcatggaaaggtgccaa

SEQ ID NO: 5033064 - DNA, 25 bp, Homo sapien
actttctggctgaagcatccccttg

SEQ ID NO: 5033065 - DNA, 25 bp, Homo sapien
tatagcaggcttatgtttggtggca

SEQ ID NO: 5033066 - DNA, 25 bp, Homo sapien
ctttggtggcacttttgtaaacaga

SEQ ID NO: 5033067 - DNA, 25 bp, Homo sapien
tctagacttgtgagttgaatgacaa

SEQ ID NO: 5033068 - DNA, 25 bp, Homo sapien
gattgttacaaaccaagcctaagac

SEQ ID NO: 5033069 - DNA, 25 bp, Homo sapien
aaattatccagccttccagggatgt

SEQ ID NO: 5033070 - DNA, 25 bp, Homo sapien
tcccaaattatccagccttccaggg

SEQ ID NO: 5033071 - DNA, 25 bp, Homo sapien
cagggatgtctggaactgacttcag

SEQ ID NO: 5033072 - DNA, 25 bp, Homo sapien
cttacattgagtcagccttttccca

SEQ ID NO: 5033073 - DNA, 25 bp, Homo sapien
tgctgctttcaaatttacaaatgcc

SEQ ID NO: 5033074 - DNA, 25 bp, Homo sapien
tctagtcccatgattaagccaaaat

SEQ ID NO: 5033075 - DNA, 25 bp, Homo sapien
gattaagccaaaatctctgttcagc

SEQ ID NO: 5033076 - DNA, 25 bp, Homo sapien
ctattcttctagtcccatgattaag

SEQ ID NO: 5033077 - DNA, 25 bp, Homo sapien
tccccaatcactatagccttctctt

SEQ ID NO: 5033078 - DNA, 25 bp, Homo sapien
caggaagcaaactgggaccggaact

SEQ ID NO: 5033079 - DNA, 25 bp, Homo sapien
aaataacctccccaatcactatagc

SEQ ID NO: 5033080 - DNA, 25 bp, Homo sapien
ccttctctttagactctacaggttc

SEQ ID NO: 5033081 - DNA, 25 bp, Homo sapien
atatgcaaagtccctcacagtatgg

SEQ ID NO: 5033082 - DNA, 25 bp, Homo sapien
tgcaaagtccctcacagtatggggt

SEQ ID NO: 5033083 - DNA, 25 bp, Homo sapien
tatgcaaagtccctcacagtatggg

SEQ ID NO: 5033084 - DNA, 25 bp, Homo sapien
caaagtccctcacagtatggggtag

SEQ ID NO: 5033085 - DNA, 25 bp, Homo sapien
tactccacggatggaaattcaaaag

SEQ ID NO: 5033086 - DNA, 25 bp, Homo sapien
cattccaatttggaccccaggggat

SEQ ID NO: 5033087 - DNA, 25 bp, Homo sapien
tagacggcggctctgatttggttca

SEQ ID NO: 5033088 - DNA, 25 bp, Homo sapien
ggttcagaataatcatactccacgg

SEQ ID NO: 5033089 - DNA, 25 bp, Homo sapien
tatacccattatgttggcaaaaatt

SEQ ID NO: 5033090 - DNA, 25 bp, Homo sapien
tataagaaacgtgaatatgaaatgc

SEQ ID NO: 5033091 - DNA, 25 bp, Homo sapien
aacaccaccaagcatataagatgcc

SEQ ID NO: 5033092 - DNA, 25 bp, Homo sapien
caaggaattcttgcaaatgtacttt

SEQ ID NO: 5033093 - DNA, 25 bp, Homo sapien
cttggagacaacacactattggaaa

SEQ ID NO: 5033094 - DNA, 25 bp, Homo sapien
gggatgctgaatgtcgttacacagt

SEQ ID NO: 5033095 - DNA, 25 bp, Homo sapien
caacacactattggaaatgaggtta

SEQ ID NO: 5033096 - DNA, 25 bp, Homo sapien
acacagttaatctttatggagctcc

SEQ ID NO: 5033097 - DNA, 25 bp, Homo sapien
tgctgcggctaagccacaataccag

SEQ ID NO: 5033098 - DNA, 25 bp, Homo sapien
taagccacaataccagagtagctat

SEQ ID NO: 5033099 - DNA, 25 bp, Homo sapien
gttctgcatagttgctgcggctaag

SEQ ID NO: 5033100 - DNA, 25 bp, Homo sapien
ctaatggtttggttctgcatagttg

SEQ ID NO: 5033101 - DNA, 25 bp, Homo sapien
ctcaaaacctccttctaaagtcaca

SEQ ID NO: 5033102 - DNA, 25 bp, Homo sapien
ttctaaagtcacacaaggggccctc

SEQ ID NO: 5033103 - DNA, 25 bp, Homo sapien
aaacctccttctaaagtcacacaag

SEQ ID NO: 5033104 - DNA, 25 bp, Homo sapien
taaagtcacacaaggggccctctgc

SEQ ID NO: 5033105 - DNA, 25 bp, Homo sapien
aatggggccatcacttcaaatgcag

SEQ ID NO: 5033106 - DNA, 25 bp, Homo sapien
ttgacatttggagaagagtacaata

SEQ ID NO: 5033107 - DNA, 25 bp, Homo sapien
gcagtttttgttcgatcatcatttt

SEQ ID NO: 5033108 - DNA, 25 bp, Homo sapien
gacatttggagaagagtacaatatg

SEQ ID NO: 5033109 - DNA, 25 bp, Homo sapien
ctgttcagaagctcatgcttttgga

SEQ ID NO: 5033110 - DNA, 25 bp, Homo sapien
ctgtgactgtgcgagtcacttgaaa

SEQ ID NO: 5033111 - DNA, 25 bp, Homo sapien
gggtattgactgttcagaagctcat

SEQ ID NO: 5033112 - DNA, 25 bp, Homo sapien
aggcactgtgactgtgcgagtcact

SEQ ID NO: 5033113 - DNA, 25 bp, Homo sapien
ggaaaacagaggttagtctgggaga

SEQ ID NO: 5033114 - DNA, 25 bp, Homo sapien
cagaggttagtctgggagaaagatg

SEQ ID NO: 5033115 - DNA, 25 bp, Homo sapien
gaaaacagaggttagtctgggagaa

SEQ ID NO: 5033116 - DNA, 25 bp, Homo sapien
aaacagaggttagtctgggagaaag

SEQ ID NO: 5033117 - DNA, 25 bp, Homo sapien
caatctacagcgaagaaagtctcgt

SEQ ID NO: 5033118 - DNA, 25 bp, Homo sapien
aagtctcgtttggtaaaagcgagag

SEQ ID NO: 5033119 - DNA, 25 bp, Homo sapien
ggcgtgatcggcaagcaccggacca

SEQ ID NO: 5033120 - DNA, 25 bp, Homo sapien
gagcgcgctataaaacctgtgctgg

SEQ ID NO: 5033121 - DNA, 25 bp, Homo sapien
gagacgtgcagttcagaagctctga

SEQ ID NO: 5033122 - DNA, 25 bp, Homo sapien
tatgttaacactgaatgtgagacgt

SEQ ID NO: 5033123 - DNA, 25 bp, Homo sapien
ttacatcaactcagtatgttaacac

SEQ ID NO: 5033124 - DNA, 25 bp, Homo sapien
gtgagacgtgcagttcagaagctct

SEQ ID NO: 5033125 - DNA, 25 bp, Homo sapien
aaatgtaacctgtcactcaagaagc

SEQ ID NO: 5033126 - DNA, 25 bp, Homo sapien
aagaagcacacctacagagcacctg

SEQ ID NO: 5033127 - DNA, 25 bp, Homo sapien
aggcagagtttcagtgctccccagg

SEQ ID NO: 5033128 - DNA, 25 bp, Homo sapien
caataccaaaaccatccaggcagag

SEQ ID NO: 5033129 - DNA, 25 bp, Homo sapien
aaagatgactggtccctcatagccc

SEQ ID NO: 5033130 - DNA, 25 bp, Homo sapien
tactaagtggactggtgtcataaac

SEQ ID NO: 5033131 - DNA, 25 bp, Homo sapien
catttatatattggaagctgctgag

SEQ ID NO: 5033132 - DNA, 25 bp, Homo sapien
tcaacatgactggtggtgagagacc

SEQ ID NO: 5033133 - DNA, 25 bp, Homo sapien
aaataaccaccatagccttcagatt

SEQ ID NO: 5033134 - DNA, 25 bp, Homo sapien
tagccttcagattcatcctggtctc

SEQ ID NO: 5033135 - DNA, 25 bp, Homo sapien
accatagccttcagattcatcctgg

SEQ ID NO: 5033136 - DNA, 25 bp, Homo sapien
aaccaccatagccttcagattcatc

SEQ ID NO: 5033137 - DNA, 25 bp, Homo sapien
ttaatgaaggttccactctacttgg

SEQ ID NO: 5033138 - DNA, 25 bp, Homo sapien
cactctacttggttctgtttgattt

SEQ ID NO: 5033139 - DNA, 25 bp, Homo sapien
aggcattggcccgagttaatgaagg

SEQ ID NO: 5033140 - DNA, 25 bp, Homo sapien
tttatgaggacagggctagagcaga

SEQ ID NO: 5033141 - DNA, 25 bp, Homo sapien
agcagacagcaagccaaattcagcc

SEQ ID NO: 5033142 - DNA, 25 bp, Homo sapien
ctgtcttctgcattgctcacgctgg

SEQ ID NO: 5033143 - DNA, 25 bp, Homo sapien
ctctattatacggcaaatttttgta

SEQ ID NO: 5033144 - DNA, 25 bp, Homo sapien
tattatacggcaaatttttgtaaca

SEQ ID NO: 5033145 - DNA, 25 bp, Homo sapien
attgcccctattactaagaactgtt

SEQ ID NO: 5033146 - DNA, 25 bp, Homo sapien
gaattgcccctattactaagaactg

SEQ ID NO: 5033147 - DNA, 25 bp, Homo sapien
tgccatcaggggattatcctcatgg

SEQ ID NO: 5033148 - DNA, 25 bp, Homo sapien
tcaggggattatcctcatggctggg

SEQ ID NO: 5033149 - DNA, 25 bp, Homo sapien
ggtgccatcaggggattatcctcat

SEQ ID NO: 5033150 - DNA, 25 bp, Homo sapien
catcaggggattatcctcatggctg

SEQ ID NO: 5033151 - DNA, 25 bp, Homo sapien
gtgctggtatgaagaaccatccgat

SEQ ID NO: 5033152 - DNA, 25 bp, Homo sapien
tcccggtgctggtatgaagaaccat

SEQ ID NO: 5033153 - DNA, 25 bp, Homo sapien
gccacactcccggtgctggtatgaa

SEQ ID NO: 5033154 - DNA, 25 bp, Homo sapien
cactcccggtgctggtatgaagaac

SEQ ID NO: 5033155 - DNA, 25 bp, Homo sapien
tccagaactggttcttccaacttct

SEQ ID NO: 5033156 - DNA, 25 bp, Homo sapien
tcttccaacttctgcttgggactgg

SEQ ID NO: 5033157 - DNA, 25 bp, Homo sapien
tggggaggcctgaactccagaactg

SEQ ID NO: 5033158 - DNA, 25 bp, Homo sapien
cttggggaggcctgaactccagaac

SEQ ID NO: 5033159 - DNA, 25 bp, Homo sapien
ggagtctgggccttgcctgatgcct

SEQ ID NO: 5033160 - DNA, 25 bp, Homo sapien
cacaggctgtgggacaaactaaaag

SEQ ID NO: 5033161 - DNA, 25 bp, Homo sapien
taccatgcatcagctgaacgtgctt

SEQ ID NO: 5033162 - DNA, 25 bp, Homo sapien
tgcttcccgtgctcattcctcatgt

SEQ ID NO: 5033163 - DNA, 25 bp, Homo sapien
catgaacaggcggtcacactcccaa

SEQ ID NO: 5033164 - DNA, 25 bp, Homo sapien
cccaggactggccactttcttattt

SEQ ID NO: 5033165 - DNA, 25 bp, Homo sapien
ggcggtcacactcccaacacgtcca

SEQ ID NO: 5033166 - DNA, 25 bp, Homo sapien
gactggccactttcttattttccat

SEQ ID NO: 5033167 - DNA, 25 bp, Homo sapien
gaattttgagttgcaggcttaatgc

SEQ ID NO: 5033168 - DNA, 25 bp, Homo sapien
aattttgagttgcaggcttaatgct

SEQ ID NO: 5033169 - DNA, 25 bp, Homo sapien
caggcttaatgctcaaaggcaagtt

SEQ ID NO: 5033170 - DNA, 25 bp, Homo sapien
ccagcacaatagtaattccaaattc

SEQ ID NO: 5033171 - DNA, 25 bp, Homo sapien
aagtaacggctgtctttgagctgaa

SEQ ID NO: 5033172 - DNA, 25 bp, Homo sapien
gagggctcttgaaatatagcccaat

SEQ ID NO: 5033173 - DNA, 25 bp, Homo sapien
aatatagcccaattggccaggactg

SEQ ID NO: 5033174 - DNA, 25 bp, Homo sapien
cgtctgaaattggaacagcaaccca

SEQ ID NO: 5033175 - DNA, 25 bp, Homo sapien
ttggaacagcaacccaccaagtaca

SEQ ID NO: 5033176 - DNA, 25 bp, Homo sapien
tgccagcaaaacgtctgaaattgga

SEQ ID NO: 5033177 - DNA, 25 bp, Homo sapien
ccaagtacatccaaatctttcatca

SEQ ID NO: 5033178 - DNA, 25 bp, Homo sapien
tacttctacctctgtttgcaggcct

SEQ ID NO: 5033179 - DNA, 25 bp, Homo sapien
ggttgacctctgaattgtcatcatt

SEQ ID NO: 5033180 - DNA, 25 bp, Homo sapien
aaggttgacctctgaattgtcatca

SEQ ID NO: 5033181 - DNA, 25 bp, Homo sapien
tcgctgctccatcgtcttacttcta

SEQ ID NO: 5033182 - DNA, 25 bp, Homo sapien
tcagtgtttccatacagtacaggac

SEQ ID NO: 5033183 - DNA, 25 bp, Homo sapien
ttgataagactgtactgcagatgct

SEQ ID NO: 5033184 - DNA, 25 bp, Homo sapien
tctgcagcaccatttagaagcttcc

SEQ ID NO: 5033185 - DNA, 25 bp, Homo sapien
gaacacaaggctacctaaatcaagc

SEQ ID NO: 5033186 - DNA, 25 bp, Homo sapien
tagctgcggctggtctttcggaaga

SEQ ID NO: 5033187 - DNA, 25 bp, Homo sapien
tgttcaatgtcacgcaccctagctg

SEQ ID NO: 5033188 - DNA, 25 bp, Homo sapien
tccaggctggtgagatgttcaatgt

SEQ ID NO: 5033189 - DNA, 25 bp, Homo sapien
tacccattttgattcgtcctctgag

SEQ ID NO: 5033190 - DNA, 25 bp, Homo sapien
ccgcattcctatgggtaatgtgcca

SEQ ID NO: 5033191 - DNA, 25 bp, Homo sapien
tggtcagtttactccaagtccacaa

SEQ ID NO: 5033192 - DNA, 25 bp, Homo sapien
caacgcatgttgatccttcctggcc

SEQ ID NO: 5033193 - DNA, 25 bp, Homo sapien
tcttgcacacagagccaacgcatgt

SEQ ID NO: 5033194 - DNA, 25 bp, Homo sapien
ttttcaacagcaattaactgtacca

SEQ ID NO: 5033195 - DNA, 25 bp, Homo sapien
tgactcaataggttctcagaacata

SEQ ID NO: 5033196 - DNA, 25 bp, Homo sapien
tgtaccaaataaacgagacatgtgg

SEQ ID NO: 5033197 - DNA, 25 bp, Homo sapien
cagagggcatttgactcaataggtt

SEQ ID NO: 5033198 - DNA, 25 bp, Homo sapien
caagtaacttggaatatgcttctgc

SEQ ID NO: 5033199 - DNA, 25 bp, Homo sapien
tcaaattgcaatattgagcacagag

SEQ ID NO: 5033200 - DNA, 25 bp, Homo sapien
cacgaaatgatgtgtgtgcattcct

SEQ ID NO: 5033201 - DNA, 25 bp, Homo sapien
gaacttaagcctaatgcacgaaatg

SEQ ID NO: 5033202 - DNA, 25 bp, Homo sapien
aatgggctttctcggaaagctccaa

SEQ ID NO: 5033203 - DNA, 25 bp, Homo sapien
ctgcaatgggctttctcggaaagct

SEQ ID NO: 5033204 - DNA, 25 bp, Homo sapien
ggctttctcggaaagctccaaccca

SEQ ID NO: 5033205 - DNA, 25 bp, Homo sapien
gcaatgggctttctcggaaagctcc

SEQ ID NO: 5033206 - DNA, 25 bp, Homo sapien
tctccccaggtttgtgaattcaagt

SEQ ID NO: 5033207 - DNA, 25 bp, Homo sapien
gaactctacaagaagtgcctccaga

SEQ ID NO: 5033208 - DNA, 25 bp, Homo sapien
tgacccttcaacgagaagcatgctg

SEQ ID NO: 5033209 - DNA, 25 bp, Homo sapien
cagcttctacatgaacaggtgaccc

SEQ ID NO: 5033210 - DNA, 25 bp, Homo sapien
ttgtcaggccggtgaggcaggatga

SEQ ID NO: 5033211 - DNA, 25 bp, Homo sapien
cgtcacacttgtcggcaggctgagt

SEQ ID NO: 5033212 - DNA, 25 bp, Homo sapien
agagggccgtcacacttgtcggcag

SEQ ID NO: 5033213 - DNA, 25 bp, Homo sapien
tgatgctgtagtagtgagttggaac

SEQ ID NO: 5033214 - DNA, 25 bp, Homo sapien
gattggtccacttatcacgttaact

SEQ ID NO: 5033215 - DNA, 25 bp, Homo sapien
gtcttctgtgtcatgtaagccatca

SEQ ID NO: 5033216 - DNA, 25 bp, Homo sapien
taagccatcatagtcatagtcgaag

SEQ ID NO: 5033217 - DNA, 25 bp, Homo sapien
actccatttctttccgaagcatatt

SEQ ID NO: 5033218 - DNA, 25 bp, Homo sapien
aaccatattggttacaaggaatgca

SEQ ID NO: 5033219 - DNA, 25 bp, Homo sapien
cattggaaccatattggttacaagg

SEQ ID NO: 5033220 - DNA, 25 bp, Homo sapien
aaagcaggatacattggaaccatat

SEQ ID NO: 5033221 - DNA, 25 bp, Homo sapien
aggaatgcatcatatttagcctctg

SEQ ID NO: 5033222 - DNA, 25 bp, Homo sapien
ctcggagaaacacggacatcaggcc

SEQ ID NO: 5033223 - DNA, 25 bp, Homo sapien
gaatccgtaggacatctgcttatca

SEQ ID NO: 5033224 - DNA, 25 bp, Homo sapien
cagttctgactgaaactcggagaaa

SEQ ID NO: 5033225 - DNA, 25 bp, Homo sapien
gccggacgcaactggtcagatggtc

SEQ ID NO: 5033226 - DNA, 25 bp, Homo sapien
gatgtatctcctctaaatagactat

SEQ ID NO: 5033227 - DNA, 25 bp, Homo sapien
ttaaacatgcctcaactgccaaata

SEQ ID NO: 5033228 - DNA, 25 bp, Homo sapien
gaatgtacaagaacatacgtatgtg

SEQ ID NO: 5033229 - DNA, 25 bp, Homo sapien
gggcagtagaagtgttctcctcctt

SEQ ID NO: 5033230 - DNA, 25 bp, Homo sapien
tagtgatctaccttcaaagtttaac

SEQ ID NO: 5033231 - DNA, 25 bp, Homo sapien
tatcttacaataaatccaacatagg

SEQ ID NO: 5033232 - DNA, 25 bp, Homo sapien
taccagaacattgaataaaggctaa

SEQ ID NO: 5033233 - DNA, 25 bp, Homo sapien
taagcaaggaatcattgtattaaca

SEQ ID NO: 5033234 - DNA, 25 bp, Homo sapien
gcattaggaatatttcactataacc

SEQ ID NO: 5033235 - DNA, 25 bp, Homo sapien
gaaacagtatatgatgtccagagtg

SEQ ID NO: 5033236 - DNA, 25 bp, Homo sapien
caggtcgcccatagaggaggtgtct

SEQ ID NO: 5033237 - DNA, 25 bp, Homo sapien
tatctagtccgataaagcactgcag

SEQ ID NO: 5033238 - DNA, 25 bp, Homo sapien
taattattttgacccctgaagaggc

SEQ ID NO: 5033239 - DNA, 25 bp, Homo sapien
tgatcacctaaccatgggtcaagct

SEQ ID NO: 5033240 - DNA, 25 bp, Homo sapien
gagggaagttcatcagttaccaaag

SEQ ID NO: 5033241 - DNA, 25 bp, Homo sapien
tctgcccactttggataggctaaag

SEQ ID NO: 5033242 - DNA, 25 bp, Homo sapien
aagaccctcccagatagaactgcgg

SEQ ID NO: 5033243 - DNA, 25 bp, Homo sapien
ctgttctgggtagttcggctgctcc

SEQ ID NO: 5033244 - DNA, 25 bp, Homo sapien
tattacaacacaagcctgttctggg

SEQ ID NO: 5033245 - DNA, 25 bp, Homo sapien
ggatttgagacaaagcggcccacac

SEQ ID NO: 5033246 - DNA, 25 bp, Homo sapien
attagaacataatctgacaatatta

SEQ ID NO: 5033247 - DNA, 25 bp, Homo sapien
caccagcaaatcgtaacagtagtac

SEQ ID NO: 5033248 - DNA, 25 bp, Homo sapien
caaatcgtaacagtagtacttaggg

SEQ ID NO: 5033249 - DNA, 25 bp, Homo sapien
aaaacaccagcaaatcgtaacagta

SEQ ID NO: 5033250 - DNA, 25 bp, Homo sapien
tccttgttttcatttctgctgcctc

SEQ ID NO: 5033251 - DNA, 25 bp, Homo sapien
tctaggttcaaaatttccattaatg

SEQ ID NO: 5033252 - DNA, 25 bp, Homo sapien
gctgcctctgaatttcctggtttca

SEQ ID NO: 5033253 - DNA, 25 bp, Homo sapien
ctgcctctgaatttcctggtttcag

SEQ ID NO: 5033254 - DNA, 25 bp, Homo sapien
cattgcatggaaagtcggccaagac

SEQ ID NO: 5033255 - DNA, 25 bp, Homo sapien
cactattggaacatgcagcttttac

SEQ ID NO: 5033256 - DNA, 25 bp, Homo sapien
ggcatgcaattaagacctggagtct

SEQ ID NO: 5033257 - DNA, 25 bp, Homo sapien
gtttagcaagcagcttagatggcca

SEQ ID NO: 5033258 - DNA, 25 bp, Homo sapien
taagaaactcacgttccactcagag

SEQ ID NO: 5033259 - DNA, 25 bp, Homo sapien
gagcaatggagatgtaaccttacta

SEQ ID NO: 5033260 - DNA, 25 bp, Homo sapien
tagctccttatagccctgagagtca

SEQ ID NO: 5033261 - DNA, 25 bp, Homo sapien
tttgtcatataaggacactgccacc

SEQ ID NO: 5033262 - DNA, 25 bp, Homo sapien
cctttataggagtgccccacagtgt

SEQ ID NO: 5033263 - DNA, 25 bp, Homo sapien
tagataccttcaggataggcaccag

SEQ ID NO: 5033264 - DNA, 25 bp, Homo sapien
tacactgactctcgaggtagatacc

SEQ ID NO: 5033265 - DNA, 25 bp, Homo sapien
ccttcatatgaggagggagttctga

SEQ ID NO: 5033266 - DNA, 25 bp, Homo sapien
tatgaagccgtttgttgagttcatc

SEQ ID NO: 5033267 - DNA, 25 bp, Homo sapien
gaagccgtttgttgagttcatccaa

SEQ ID NO: 5033268 - DNA, 25 bp, Homo sapien
agccgtttgttgagttcatccaact

SEQ ID NO: 5033269 - DNA, 25 bp, Homo sapien
tgaagccgtttgttgagttcatcca

SEQ ID NO: 5033270 - DNA, 25 bp, Homo sapien
tcccatgtgggtactgatgatgact

SEQ ID NO: 5033271 - DNA, 25 bp, Homo sapien
ggatagtcaccacagtaccaatttc

SEQ ID NO: 5033272 - DNA, 25 bp, Homo sapien
tataccctagcatatgcgtgcaaga

SEQ ID NO: 5033273 - DNA, 25 bp, Homo sapien
tgacattctgggctccacctctagc

SEQ ID NO: 5033274 - DNA, 25 bp, Homo sapien
ctcagcctcccagcgccaccatgcc

SEQ ID NO: 5033275 - DNA, 25 bp, Homo sapien
ggagtgtggtgacacaatcccggct

SEQ ID NO: 5033276 - DNA, 25 bp, Homo sapien
tcagcctcccagcgccaccatgccc

SEQ ID NO: 5033277 - DNA, 25 bp, Homo sapien
gctggagtgtggtgacacaatcccg

SEQ ID NO: 5033278 - DNA, 25 bp, Homo sapien
aacaaacttctccataataaacata

SEQ ID NO: 5033279 - DNA, 25 bp, Homo sapien
taataaacataaagattatttctac

SEQ ID NO: 5033280 - DNA, 25 bp, Homo sapien
ccataataaacataaagattatttc

SEQ ID NO: 5033281 - DNA, 25 bp, Homo sapien
ccaacaaacttctccataataaaca

SEQ ID NO: 5033282 - DNA, 25 bp, Homo sapien
cttatcatcacaagtgcagcccagg

SEQ ID NO: 5033283 - DNA, 25 bp, Homo sapien
gataattgggtctggtaacttcctc

SEQ ID NO: 5033284 - DNA, 25 bp, Homo sapien
cagactgaaggtacataatccctgg

SEQ ID NO: 5033285 - DNA, 25 bp, Homo sapien
gatgattcaaacttccatgggtccc

SEQ ID NO: 5033286 - DNA, 25 bp, Homo sapien
aaccaaatgtagatggcaggcaccc

SEQ ID NO: 5033287 - DNA, 25 bp, Homo sapien
tacccaagttcattgcctgaccatg

SEQ ID NO: 5033288 - DNA, 25 bp, Homo sapien
tatctgcgatagttacaacccaagg

SEQ ID NO: 5033289 - DNA, 25 bp, Homo sapien
caacccaagggtgatcaatgtcagt

SEQ ID NO: 5033290 - DNA, 25 bp, Homo sapien
aggcactttagtcttgtacttaaat

SEQ ID NO: 5033291 - DNA, 25 bp, Homo sapien
cataacattgtaaagttcaatgttt

SEQ ID NO: 5033292 - DNA, 25 bp, Homo sapien
gcactttagtcttgtacttaaatgt

SEQ ID NO: 5033293 - DNA, 25 bp, Homo sapien
acacataacattgtaaagttcaatg

SEQ ID NO: 5033294 - DNA, 25 bp, Homo sapien
ctgcatgctgttgaccttgttatca

SEQ ID NO: 5033295 - DNA, 25 bp, Homo sapien
gttgaccttgttatcaaatccgtgg

SEQ ID NO: 5033296 - DNA, 25 bp, Homo sapien
tcaaatccgtggtctccctggaaaa

SEQ ID NO: 5033297 - DNA, 25 bp, Homo sapien
ccttgttatcaaatccgtggtctcc

SEQ ID NO: 5033298 - DNA, 25 bp, Homo sapien
gactccaataattcctgttcttcgt

SEQ ID NO: 5033299 - DNA, 25 bp, Homo sapien
aattcctgttcttcgtacatctttc

SEQ ID NO: 5033300 - DNA, 25 bp, Homo sapien
caactgttttagaagactccaataa

SEQ ID NO: 5033301 - DNA, 25 bp, Homo sapien
ttttagaagactccaataattcctg

SEQ ID NO: 5033302 - DNA, 25 bp, Homo sapien
taaggcttaaagtgctgatctggtt

SEQ ID NO: 5033303 - DNA, 25 bp, Homo sapien
cctcaattcttctgttgttggcata

SEQ ID NO: 5033304 - DNA, 25 bp, Homo sapien
tgttggcatagtgcaaacgtttggg

SEQ ID NO: 5033305 - DNA, 25 bp, Homo sapien
ccatctgcgttccaccaataaatgg

SEQ ID NO: 5033306 - DNA, 25 bp, Homo sapien
gattggcaataatggctttggggtc

SEQ ID NO: 5033307 - DNA, 25 bp, Homo sapien
ttggcaataatggctttggggtcat

SEQ ID NO: 5033308 - DNA, 25 bp, Homo sapien
tgagattggcaataatggctttggg

SEQ ID NO: 5033309 - DNA, 25 bp, Homo sapien
cgtgagattggcaataatggctttg

SEQ ID NO: 5033310 - DNA, 25 bp, Homo sapien
cccacagaagactatcactttagtg

SEQ ID NO: 5033311 - DNA, 25 bp, Homo sapien
gaaataacaaccattaccaagagaa

SEQ ID NO: 5033312 - DNA, 25 bp, Homo sapien
tcagtcattgacatgcagctaagca

SEQ ID NO: 5033313 - DNA, 25 bp, Homo sapien
gctaagcaagtggaacaaatcctat

SEQ ID NO: 5033314 - DNA, 25 bp, Homo sapien
ataaatcatattcctcaaagggacg

SEQ ID NO: 5033315 - DNA, 25 bp, Homo sapien
agcaagccaggcctcataaatcata

SEQ ID NO: 5033316 - DNA, 25 bp, Homo sapien
catattcctcaaagggacgaaataa

SEQ ID NO: 5033317 - DNA, 25 bp, Homo sapien
ttgagcaagccaggcctcataaatc

SEQ ID NO: 5033318 - DNA, 25 bp, Homo sapien
tttggatcgaattcttcctagagtt

SEQ ID NO: 5033319 - DNA, 25 bp, Homo sapien
taatatcatccacattagttaggta

SEQ ID NO: 5033320 - DNA, 25 bp, Homo sapien
gttaggtaattactcaagaactcag

SEQ ID NO: 5033321 - DNA, 25 bp, Homo sapien
tcctagagttccaggcactaaagta

SEQ ID NO: 5033322 - DNA, 25 bp, Homo sapien
gtcagccaattttcatcctccgaac

SEQ ID NO: 5033323 - DNA, 25 bp, Homo sapien
tcatcctccgaactccactagaagg

SEQ ID NO: 5033324 - DNA, 25 bp, Homo sapien
ctccgaactccactagaagggagaa

SEQ ID NO: 5033325 - DNA, 25 bp, Homo sapien
ttttcatcctccgaactccactaga

SEQ ID NO: 5033326 - DNA, 25 bp, Homo sapien
gacacaccgatgcagttttagttgt

SEQ ID NO: 5033327 - DNA, 25 bp, Homo sapien
catggtctccgacaaagatgacgtt

SEQ ID NO: 5033328 - DNA, 25 bp, Homo sapien
tgtttcagtccatccattaattgcc

SEQ ID NO: 5033329 - DNA, 25 bp, Homo sapien
caattttgtcgatttccctcagagg

SEQ ID NO: 5033330 - DNA, 25 bp, Homo sapien
tatttcaagtcctatcccaaggagg

SEQ ID NO: 5033331 - DNA, 25 bp, Homo sapien
tcttcatgacgggagtcagtatttc

SEQ ID NO: 5033332 - DNA, 25 bp, Homo sapien
catgtgcagaataatcggaagggac

SEQ ID NO: 5033333 - DNA, 25 bp, Homo sapien
gcatgaatgtcctcacatactagag

SEQ ID NO: 5033334 - DNA, 25 bp, Homo sapien
cctgacgagtttccgcagcataatg

SEQ ID NO: 5033335 - DNA, 25 bp, Homo sapien
tttgtcctgacgagtttccgcagca

SEQ ID NO: 5033336 - DNA, 25 bp, Homo sapien
acgagtttccgcagcataatgatcc

SEQ ID NO: 5033337 - DNA, 25 bp, Homo sapien
tgtcctgacgagtttccgcagcata

SEQ ID NO: 5033338 - DNA, 25 bp, Homo sapien
tggaggagcaactggtctttcctgt

SEQ ID NO: 5033339 - DNA, 25 bp, Homo sapien
ggcaactttcctcttaggtctctta

SEQ ID NO: 5033340 - DNA, 25 bp, Homo sapien
taaaaggtgagccataactactctc

SEQ ID NO: 5033341 - DNA, 25 bp, Homo sapien
tcttagccggagtaaaaggtgagcc

SEQ ID NO: 5033342 - DNA, 25 bp, Homo sapien
gagatgtctggactcagaagtcgtc

SEQ ID NO: 5033343 - DNA, 25 bp, Homo sapien
ctgtactggcggatagagatgtctg

SEQ ID NO: 5033344 - DNA, 25 bp, Homo sapien
tctggactcagaagtcgtctgtccc

SEQ ID NO: 5033345 - DNA, 25 bp, Homo sapien
cggatagagatgtctggactcagaa

SEQ ID NO: 5033346 - DNA, 25 bp, Homo sapien
ctgagtcagatataaagcttacact

SEQ ID NO: 5033347 - DNA, 25 bp, Homo sapien
gtcagatataaagcttacactttcc

SEQ ID NO: 5033348 - DNA, 25 bp, Homo sapien
cagatataaagcttacactttccca

SEQ ID NO: 5033349 - DNA, 25 bp, Homo sapien
gagtcagatataaagcttacacttt

SEQ ID NO: 5033350 - DNA, 25 bp, Homo sapien
ttagcctgaatttagaaattttagc

SEQ ID NO: 5033351 - DNA, 25 bp, Homo sapien
ttgctcagaatagaaggcatagacc

SEQ ID NO: 5033352 - DNA, 25 bp, Homo sapien
tttgtgtccagagaaatcaggttgc

SEQ ID NO: 5033353 - DNA, 25 bp, Homo sapien
tgtccagagaaatcaggttgctcag

SEQ ID NO: 5033354 - DNA, 25 bp, Homo sapien
ctcagaatagaaggcatagaccgaa

SEQ ID NO: 5033355 - DNA, 25 bp, Homo sapien
tattctccgctcgtgagggatgaca

SEQ ID NO: 5033356 - DNA, 25 bp, Homo sapien
gggtgagccactgcaatatggttaa

SEQ ID NO: 5033357 - DNA, 25 bp, Homo sapien
atggttaatattctccgctcgtgag

SEQ ID NO: 5033358 - DNA, 25 bp, Homo sapien
taatattctccgctcgtgagggatg

SEQ ID NO: 5033359 - DNA, 25 bp, Homo sapien
gaggaacctgtcttgctaatcagaa

SEQ ID NO: 5033360 - DNA, 25 bp, Homo sapien
taatcagaaactccactacaagcag

SEQ ID NO: 5033361 - DNA, 25 bp, Homo sapien
ggtgtgacctctcttgaccactcgg

SEQ ID NO: 5033362 - DNA, 25 bp, Homo sapien
caaggaaagggcatgtccagtgcgt

SEQ ID NO: 5033363 - DNA, 25 bp, Homo sapien
cactctttcccaacagggagcacaa

SEQ ID NO: 5033364 - DNA, 25 bp, Homo sapien
tcaggggaaattcacccactctttc

SEQ ID NO: 5033365 - DNA, 25 bp, Homo sapien
gagtgatatctttagtcaggggaaa

SEQ ID NO: 5033366 - DNA, 25 bp, Homo sapien
ttttcactccccgatccaagaccag

SEQ ID NO: 5033367 - DNA, 25 bp, Homo sapien
acagaccaaaagaatgttccagctt

SEQ ID NO: 5033368 - DNA, 25 bp, Homo sapien
agctttcaccccttgcttggtggct

SEQ ID NO: 5033369 - DNA, 25 bp, Homo sapien
cttgcttggtggctgtaatccatag

SEQ ID NO: 5033370 - DNA, 25 bp, Homo sapien
gttccagctttcaccccttgcttgg

SEQ ID NO: 5033371 - DNA, 25 bp, Homo sapien
cagcctgggcgactatactaagatg

SEQ ID NO: 5033372 - DNA, 25 bp, Homo sapien
actacgtatgagaaatgcagggtcc

SEQ ID NO: 5033373 - DNA, 25 bp, Homo sapien
tattagaaattgcaggaccgtagca

SEQ ID NO: 5033374 - DNA, 25 bp, Homo sapien
ttcaggagacttggatcatgatggg

SEQ ID NO: 5033375 - DNA, 25 bp, Homo sapien
taggccattatggacttctgggagt

SEQ ID NO: 5033376 - DNA, 25 bp, Homo sapien
aggccattatggacttctgggagtc

SEQ ID NO: 5033377 - DNA, 25 bp, Homo sapien
cctaggccattatggacttctggga

SEQ ID NO: 5033378 - DNA, 25 bp, Homo sapien
ccattatggacttctgggagtccag

SEQ ID NO: 5033379 - DNA, 25 bp, Homo sapien
aaatggttctgaaattcacctcatc

SEQ ID NO: 5033380 - DNA, 25 bp, Homo sapien
ctttgtcaaaatggttctgaaattc

SEQ ID NO: 5033381 - DNA, 25 bp, Homo sapien
atttctttgtcaaaatggttctgaa

SEQ ID NO: 5033382 - DNA, 25 bp, Homo sapien
tcaaaatggttctgaaattcacctc

SEQ ID NO: 5033383 - DNA, 25 bp, Homo sapien
tctcgccctcgcagatgaaaagtgg

SEQ ID NO: 5033384 - DNA, 25 bp, Homo sapien
gttgacctccccaccatctatgatt

SEQ ID NO: 5033385 - DNA, 25 bp, Homo sapien
gaaaagtggcatcaaatacaggatc

SEQ ID NO: 5033386 - DNA, 25 bp, Homo sapien
caggatcatacattgaattgccaac

SEQ ID NO: 5033387 - DNA, 25 bp, Homo sapien
atgtgtatcattcgaaaaaatactt

SEQ ID NO: 5033388 - DNA, 25 bp, Homo sapien
gaatgtgtatcattcgaaaaaatac

SEQ ID NO: 5033389 - DNA, 25 bp, Homo sapien
ttgaatgtgtatcattcgaaaaaat

SEQ ID NO: 5033390 - DNA, 25 bp, Homo sapien
aatgtgtatcattcgaaaaaatact

SEQ ID NO: 5033391 - DNA, 25 bp, Homo sapien
agtggccaaagtgtataagttagga

SEQ ID NO: 5033392 - DNA, 25 bp, Homo sapien
tggccaaagtgtataagttaggaaa

SEQ ID NO: 5033393 - DNA, 25 bp, Homo sapien
gtacaccggcctcatgtagggagag

SEQ ID NO: 5033394 - DNA, 25 bp, Homo sapien
tttagttgggtacaccggcctcatg

SEQ ID NO: 5033395 - DNA, 25 bp, Homo sapien
catgtatgatgcacggaagccatcc

SEQ ID NO: 5033396 - DNA, 25 bp, Homo sapien
gatgattaatggagggcgaacaaac

SEQ ID NO: 5033397 - DNA, 25 bp, Homo sapien
caatattaggcatgactttgctgcc

SEQ ID NO: 5033398 - DNA, 25 bp, Homo sapien
tccacggagaagatgattaatggag

SEQ ID NO: 5033399 - DNA, 25 bp, Homo sapien
gttcttcatgcctgcgaagatcatt

SEQ ID NO: 5033400 - DNA, 25 bp, Homo sapien
tgttcttcatgcctgcgaagatcat

SEQ ID NO: 5033401 - DNA, 25 bp, Homo sapien
ttcttcatgcctgcgaagatcattt

SEQ ID NO: 5033402 - DNA, 25 bp, Homo sapien
gaccatggagatttgacccagccac

SEQ ID NO: 5033403 - DNA, 25 bp, Homo sapien
ctgcagggcattctgcggcctttat

SEQ ID NO: 5033404 - DNA, 25 bp, Homo sapien
gtcatcatcaacccaatgcgactct

SEQ ID NO: 5033405 - DNA, 25 bp, Homo sapien
tcatcatcaacccaatgcgactctc

SEQ ID NO: 5033406 - DNA, 25 bp, Homo sapien
cattctgcggcctttatttcctcac

SEQ ID NO: 5033407 - DNA, 25 bp, Homo sapien
cattagatggaacattcttttctcc

SEQ ID NO: 5033408 - DNA, 25 bp, Homo sapien
tagaaagcatggcaaaacttccctt

SEQ ID NO: 5033409 - DNA, 25 bp, Homo sapien
tgtttggtcattagatggaacattc

SEQ ID NO: 5033410 - DNA, 25 bp, Homo sapien
cctccagaaataaactgtttggtca

SEQ ID NO: 5033411 - DNA, 25 bp, Homo sapien
gcaaaccacttggtaattggtacag

SEQ ID NO: 5033412 - DNA, 25 bp, Homo sapien
cacttggtaattggtacagcagtct

SEQ ID NO: 5033413 - DNA, 25 bp, Homo sapien
gtaattggtacagcagtctcccctg

SEQ ID NO: 5033414 - DNA, 25 bp, Homo sapien
tctccacatctgtccttagtacact

SEQ ID NO: 5033415 - DNA, 25 bp, Homo sapien
agtcatggcagcaactggtatagct

SEQ ID NO: 5033416 - DNA, 25 bp, Homo sapien
tgtcttcaaacacagctcatcaaag

SEQ ID NO: 5033417 - DNA, 25 bp, Homo sapien
gctcatcaaagtcatggcagcaact

SEQ ID NO: 5033418 - DNA, 25 bp, Homo sapien
tggcagcaactggtatagctcttac

SEQ ID NO: 5033419 - DNA, 25 bp, Homo sapien
aagcacctgcccttgcaagatccgg

SEQ ID NO: 5033420 - DNA, 25 bp, Homo sapien
aggtccagcctcttgaagttcaaag

SEQ ID NO: 5033421 - DNA, 25 bp, Homo sapien
tgtcacagcgacaatcaggaggtcc

SEQ ID NO: 5033422 - DNA, 25 bp, Homo sapien
ttgcaagatccggagatgttggtcc

SEQ ID NO: 5033423 - DNA, 25 bp, Homo sapien
cgcccagccatgctgctatcttttt

SEQ ID NO: 5033424 - DNA, 25 bp, Homo sapien
cactgcgcccagccatgctgctatc

SEQ ID NO: 5033425 - DNA, 25 bp, Homo sapien
tgcgcccagccatgctgctatcttt

SEQ ID NO: 5033426 - DNA, 25 bp, Homo sapien
actgcgcccagccatgctgctatct

SEQ ID NO: 5033427 - DNA, 25 bp, Homo sapien
caacggcaaaagtgaacagggatat

SEQ ID NO: 5033428 - DNA, 25 bp, Homo sapien
tctgctctcttaattcgatgtgcag

SEQ ID NO: 5033429 - DNA, 25 bp, Homo sapien
cgatgtgcagtgaatcctaagcaga

SEQ ID NO: 5033430 - DNA, 25 bp, Homo sapien
gcagatattgactccaacggcaaaa

SEQ ID NO: 5033431 - DNA, 25 bp, Homo sapien
ctgacacgactggaacgagctcctc

SEQ ID NO: 5033432 - DNA, 25 bp, Homo sapien
tgacacgactggaacgagctcctcc

SEQ ID NO: 5033433 - DNA, 25 bp, Homo sapien
cacggagtgcactgctttgaggctc

SEQ ID NO: 5033434 - DNA, 25 bp, Homo sapien
tttgccttcacggagtgcactgctt

SEQ ID NO: 5033435 - DNA, 25 bp, Homo sapien
ccttttgcagcgtgttctctttgcc

SEQ ID NO: 5033436 - DNA, 25 bp, Homo sapien
ggaaagccttttgcagcgtgttctc

SEQ ID NO: 5033437 - DNA, 25 bp, Homo sapien
gatcgatgccgacctggccaacatg

SEQ ID NO: 5033438 - DNA, 25 bp, Homo sapien
gtcaggagatcgatgccgacctggc

SEQ ID NO: 5033439 - DNA, 25 bp, Homo sapien
aggtcaggagatcgatgccgacctg

SEQ ID NO: 5033440 - DNA, 25 bp, Homo sapien
caggagatcgatgccgacctggcca

SEQ ID NO: 5033441 - DNA, 25 bp, Homo sapien
ttgtatgtcgaagtctgccaattct

SEQ ID NO: 5033442 - DNA, 25 bp, Homo sapien
ccatcatctcccgaaagttctacaa

SEQ ID NO: 5033443 - DNA, 25 bp, Homo sapien
cttctcatcgtcccttagcagtggg

SEQ ID NO: 5033444 - DNA, 25 bp, Homo sapien
caatatctggcttagaaagtgttga

SEQ ID NO: 5033445 - DNA, 25 bp, Homo sapien
gcattcccaaccaggcttgtgacct

SEQ ID NO: 5033446 - DNA, 25 bp, Homo sapien
tacccgcattcccaaccaggcttgt

SEQ ID NO: 5033447 - DNA, 25 bp, Homo sapien
cgcattcccaaccaggcttgtgacc

SEQ ID NO: 5033448 - DNA, 25 bp, Homo sapien
cccgcattcccaaccaggcttgtga

SEQ ID NO: 5033449 - DNA, 25 bp, Homo sapien
agggactgctttccggcaaacctgg

SEQ ID NO: 5033450 - DNA, 25 bp, Homo sapien
cgtggtgaaccgagagtcctgcaag

SEQ ID NO: 5033451 - DNA, 25 bp, Homo sapien
aacttgaaatgagttgagctccgca

SEQ ID NO: 5033452 - DNA, 25 bp, Homo sapien
tcctgcaagttggacgggctcgctt

SEQ ID NO: 5033453 - DNA, 25 bp, Homo sapien
tcatgctgcgggagtctcggcgtct

SEQ ID NO: 5033454 - DNA, 25 bp, Homo sapien
cactggccgtttgcttttgggattt

SEQ ID NO: 5033455 - DNA, 25 bp, Homo sapien
agccccgcgacctgggagctgtgct

SEQ ID NO: 5033456 - DNA, 25 bp, Homo sapien
gctgctgcggactgctcttgtttgc

SEQ ID NO: 5033457 - DNA, 25 bp, Homo sapien
tcgggaggctgaagacggggcgtcc

SEQ ID NO: 5033458 - DNA, 25 bp, Homo sapien
catggaataacaaggcactctcttt

SEQ ID NO: 5033459 - DNA, 25 bp, Homo sapien
aataacaaggcactctctttctccc

SEQ ID NO: 5033460 - DNA, 25 bp, Homo sapien
atggaataacaaggcactctctttc

SEQ ID NO: 5033461 - DNA, 25 bp, Homo sapien
ggaataacaaggcactctctttctc

SEQ ID NO: 5033462 - DNA, 25 bp, Homo sapien
ttctgtgcactgtagattccctctc

SEQ ID NO: 5033463 - DNA, 25 bp, Homo sapien
taaacacattaaagtccctcccaca

SEQ ID NO: 5033464 - DNA, 25 bp, Homo sapien
gattcttcacatacacggataaata

SEQ ID NO: 5033465 - DNA, 25 bp, Homo sapien
tataaagcaactataatcaagcgtc

SEQ ID NO: 5033466 - DNA, 25 bp, Homo sapien
ttgaatgggcttgcctgcacatctg

SEQ ID NO: 5033467 - DNA, 25 bp, Homo sapien
aagttgtgtagcataattagtggac

SEQ ID NO: 5033468 - DNA, 25 bp, Homo sapien
aacctttgctcagattccgctccac

SEQ ID NO: 5033469 - DNA, 25 bp, Homo sapien
ccactgctttgaatgggcttgcctg

SEQ ID NO: 5033470 - DNA, 25 bp, Homo sapien
tctcagttgagtccattggcagcgc

SEQ ID NO: 5033471 - DNA, 25 bp, Homo sapien
gtcattagggccttgtgagtttcct

SEQ ID NO: 5033472 - DNA, 25 bp, Homo sapien
ggcagcgctgacagtttctaaggac

SEQ ID NO: 5033473 - DNA, 25 bp, Homo sapien
tctgcatgagtctctcttaagagca

SEQ ID NO: 5033474 - DNA, 25 bp, Homo sapien
gtccacactcattattgtctgtctt

SEQ ID NO: 5033475 - DNA, 25 bp, Homo sapien
ctattttacatttccgccagtagtg

SEQ ID NO: 5033476 - DNA, 25 bp, Homo sapien
agggctatctcattatgactgtggt

SEQ ID NO: 5033477 - DNA, 25 bp, Homo sapien
tttccgccagtagtgtatgagggtt

SEQ ID NO: 5033478 - DNA, 25 bp, Homo sapien
ccatcgagcgtgcagtatttgggag

SEQ ID NO: 5033479 - DNA, 25 bp, Homo sapien
gtcctcttccatcgagcgtgcagta

SEQ ID NO: 5033480 - DNA, 25 bp, Homo sapien
ctcttccatcgagcgtgcagtattt

SEQ ID NO: 5033481 - DNA, 25 bp, Homo sapien
cttccatcgagcgtgcagtatttgg

SEQ ID NO: 5033482 - DNA, 25 bp, Homo sapien
ttagcccggtatttctcaacttgag

SEQ ID NO: 5033483 - DNA, 25 bp, Homo sapien
aagctgagggacagtaatgagagtc

SEQ ID NO: 5033484 - DNA, 25 bp, Homo sapien
taattgtccagtaaagtgtgggaca

SEQ ID NO: 5033485 - DNA, 25 bp, Homo sapien
tatggttgtctaatcactggacatg

SEQ ID NO: 5033486 - DNA, 25 bp, Homo sapien
gaatttctgtaggagaggcgaatcc

SEQ ID NO: 5033487 - DNA, 25 bp, Homo sapien
taaattccaacatcgtaaccgccga

SEQ ID NO: 5033488 - DNA, 25 bp, Homo sapien
gaagagtactgtagaaaagccactg

SEQ ID NO: 5033489 - DNA, 25 bp, Homo sapien
actttggcggtacacatggagacca

SEQ ID NO: 5033490 - DNA, 25 bp, Homo sapien
tgaaagggaaggagaacgaatagac

SEQ ID NO: 5033491 - DNA, 25 bp, Homo sapien
ctgaaagggaaggagaacgaataga

SEQ ID NO: 5033492 - DNA, 25 bp, Homo sapien
aaagactgagagtggagcgcttgcc

SEQ ID NO: 5033493 - DNA, 25 bp, Homo sapien
tgtgtttggaggctgtagattcctt

SEQ ID NO: 5033494 - DNA, 25 bp, Homo sapien
tgccgctggatgcatactcatctcc

SEQ ID NO: 5033495 - DNA, 25 bp, Homo sapien
tggatgcatactcatctccaaaggt

SEQ ID NO: 5033496 - DNA, 25 bp, Homo sapien
tcctgctgatgatacggaaagccag

SEQ ID NO: 5033497 - DNA, 25 bp, Homo sapien
cccaaatgaattcctgctgatgata

SEQ ID NO: 5033498 - DNA, 25 bp, Homo sapien
cctgctgatgatacggaaagccaga

SEQ ID NO: 5033499 - DNA, 25 bp, Homo sapien
taaaaatacccaaatgaattcctgc

SEQ ID NO: 5033500 - DNA, 25 bp, Homo sapien
tctcttgaggtacatgaagtctact

SEQ ID NO: 5033501 - DNA, 25 bp, Homo sapien
gattagttagcaccaaggacaaagg

SEQ ID NO: 5033502 - DNA, 25 bp, Homo sapien
caccattggagattgctagtcaaca

SEQ ID NO: 5033503 - DNA, 25 bp, Homo sapien
tgtgatagactgaaaatgactgctc

SEQ ID NO: 5033504 - DNA, 25 bp, Homo sapien
gaccctacgtggacactgatttaaa

SEQ ID NO: 5033505 - DNA, 25 bp, Homo sapien
gccaactgcaatgtggaccctacgt

SEQ ID NO: 5033506 - DNA, 25 bp, Homo sapien
tacaaaggctatatcagccaactgc

SEQ ID NO: 5033507 - DNA, 25 bp, Homo sapien
taacggcatttagagtcaactgaaa

SEQ ID NO: 5033508 - DNA, 25 bp, Homo sapien
tcataggagcataatgaggtcatct

SEQ ID NO: 5033509 - DNA, 25 bp, Homo sapien
cagatttgggacacacaagtttact

SEQ ID NO: 5033510 - DNA, 25 bp, Homo sapien
ggcagtaacaggagaacaaatcatc

SEQ ID NO: 5033511 - DNA, 25 bp, Homo sapien
ccagctctaatctaacgtggtaaga

SEQ ID NO: 5033512 - DNA, 25 bp, Homo sapien
ggagacagtccagtcacctcaagct

SEQ ID NO: 5033513 - DNA, 25 bp, Homo sapien
taaacagactactgggtgcggcata

SEQ ID NO: 5033514 - DNA, 25 bp, Homo sapien
tgcggcataagagatcacacgcctt

SEQ ID NO: 5033515 - DNA, 25 bp, Homo sapien
tatcaccgtgggaaccataaaggcc

SEQ ID NO: 5033516 - DNA, 25 bp, Homo sapien
ctagctggccgatatttcgagagcc

SEQ ID NO: 5033517 - DNA, 25 bp, Homo sapien
gggtattaaagcagatcgggagcta

SEQ ID NO: 5033518 - DNA, 25 bp, Homo sapien
cgtgcaagttccaaactccactggg

SEQ ID NO: 5033519 - DNA, 25 bp, Homo sapien
tgttcccttccgtgcaagttccaaa

SEQ ID NO: 5033520 - DNA, 25 bp, Homo sapien
gttgacggcctttcaagcatgttta

SEQ ID NO: 5033521 - DNA, 25 bp, Homo sapien
atgaaggcctggctatcatgaacag

SEQ ID NO: 5033522 - DNA, 25 bp, Homo sapien
gaacagtatccatatcaatctcctc

SEQ ID NO: 5033523 - DNA, 25 bp, Homo sapien
gagttgacggcctttcaagcatgtt

SEQ ID NO: 5033524 - DNA, 25 bp, Homo sapien
aaagaaccattacatcatgttatgt

SEQ ID NO: 5033525 - DNA, 25 bp, Homo sapien
cattacatcatgttatgtttggata

SEQ ID NO: 5033526 - DNA, 25 bp, Homo sapien
tgtttggatattagctcttaggaaa

SEQ ID NO: 5033527 - DNA, 25 bp, Homo sapien
gcagagaggccataggatatacccc

SEQ ID NO: 5033528 - DNA, 25 bp, Homo sapien
gagtttgactttactgctatcctca

SEQ ID NO: 5033529 - DNA, 25 bp, Homo sapien
tcttcactccctgctgatgagctga

SEQ ID NO: 5033530 - DNA, 25 bp, Homo sapien
cagtatttgaccaggttctagtggg

SEQ ID NO: 5033531 - DNA, 25 bp, Homo sapien
agtggtgtatcagacttcctcttca

SEQ ID NO: 5033532 - DNA, 25 bp, Homo sapien
gattaagaaccaacccaagctctgg

SEQ ID NO: 5033533 - DNA, 25 bp, Homo sapien
ttggttgcctgctactgactctgga

SEQ ID NO: 5033534 - DNA, 25 bp, Homo sapien
tgaaatccaactagctgtgggtgac

SEQ ID NO: 5033535 - DNA, 25 bp, Homo sapien
tgtgaagtacaagtccacagcacca

SEQ ID NO: 5033536 - DNA, 25 bp, Homo sapien
tcaagtgaccagatagcccagaagc

SEQ ID NO: 5033537 - DNA, 25 bp, Homo sapien
gaactgccatgatattcttacctag

SEQ ID NO: 5033538 - DNA, 25 bp, Homo sapien
cagataacgcttatctcaagtgacc

SEQ ID NO: 5033539 - DNA, 25 bp, Homo sapien
gataagatgatccttctgaactgcc

SEQ ID NO: 5033540 - DNA, 25 bp, Homo sapien
accagggcttcattgcataagggag

SEQ ID NO: 5033541 - DNA, 25 bp, Homo sapien
ccaaagttgatctaccagggcttca

SEQ ID NO: 5033542 - DNA, 25 bp, Homo sapien
ggtgggttcttagtcaacatgttga

SEQ ID NO: 5033543 - DNA, 25 bp, Homo sapien
gttgatctaccagggcttcattgca

SEQ ID NO: 5033544 - DNA, 25 bp, Homo sapien
cattctgaatcatattaagtagcca

SEQ ID NO: 5033545 - DNA, 25 bp, Homo sapien
cttacatagggtacagggtcattct

SEQ ID NO: 5033546 - DNA, 25 bp, Homo sapien
gggtacagggtcattctgaatcata

SEQ ID NO: 5033547 - DNA, 25 bp, Homo sapien
tcatattaagtagccattgcagttc

SEQ ID NO: 5033548 - DNA, 25 bp, Homo sapien
tgaagtacccgtatggctctcaaac

SEQ ID NO: 5033549 - DNA, 25 bp, Homo sapien
caaagctgctatcctaatgtccaca

SEQ ID NO: 5033550 - DNA, 25 bp, Homo sapien
caaagtggccatattcagcataaga

SEQ ID NO: 5033551 - DNA, 25 bp, Homo sapien
tggatcacttggcacatgtccgttc

SEQ ID NO: 5033552 - DNA, 25 bp, Homo sapien
gagtcgcacatcaggatttaagtta

SEQ ID NO: 5033553 - DNA, 25 bp, Homo sapien
tgtaacagagttggccagggcatca

SEQ ID NO: 5033554 - DNA, 25 bp, Homo sapien
gatttcttcaagaatgagtcgcaca

SEQ ID NO: 5033555 - DNA, 25 bp, Homo sapien
cagtgatggtatgcctgtaactcgg

SEQ ID NO: 5033556 - DNA, 25 bp, Homo sapien
tggcataaggcatggaacacacaag

SEQ ID NO: 5033557 - DNA, 25 bp, Homo sapien
tatagtatttatttcagcggtctgg

SEQ ID NO: 5033558 - DNA, 25 bp, Homo sapien
cagtgagtcttatgtggttccacaa

SEQ ID NO: 5033559 - DNA, 25 bp, Homo sapien
aaatgggtagcagggccttacagca

SEQ ID NO: 5033560 - DNA, 25 bp, Homo sapien
tggagcccttctgagagcccatgct

SEQ ID NO: 5033561 - DNA, 25 bp, Homo sapien
tcagctgttactgcctgaggcttcc

SEQ ID NO: 5033562 - DNA, 25 bp, Homo sapien
acctgcgtattctgccaccaactca

SEQ ID NO: 5033563 - DNA, 25 bp, Homo sapien
tgacaggtctgtgatcaaccctggg

SEQ ID NO: 5033564 - DNA, 25 bp, Homo sapien
tacttgattaagtctaaaataaatg

SEQ ID NO: 5033565 - DNA, 25 bp, Homo sapien
tctcttaataaagccattgcaactg

SEQ ID NO: 5033566 - DNA, 25 bp, Homo sapien
catctcttaataaagccattgcaac

SEQ ID NO: 5033567 - DNA, 25 bp, Homo sapien
tgaacatctcttaataaagccattg

SEQ ID NO: 5033568 - DNA, 25 bp, Homo sapien
ggtcctgtccatgtgctcaccattg

SEQ ID NO: 5033569 - DNA, 25 bp, Homo sapien
caaaacatcctagtgaagagtgact

SEQ ID NO: 5033570 - DNA, 25 bp, Homo sapien
cacaatgtttggacaacttttacaa

SEQ ID NO: 5033571 - DNA, 25 bp, Homo sapien
agagtgacttcatggctggtggtcc

SEQ ID NO: 5033572 - DNA, 25 bp, Homo sapien
tatcactaataccaatttataaact

SEQ ID NO: 5033573 - DNA, 25 bp, Homo sapien
caaatcaacgtgaataattattaca

SEQ ID NO: 5033574 - DNA, 25 bp, Homo sapien
agtgggataattaagattaatcaat

SEQ ID NO: 5033575 - DNA, 25 bp, Homo sapien
tagtctaccattctaagttacttat

SEQ ID NO: 5033576 - DNA, 25 bp, Homo sapien
taaaaatgtggttggcaattcaaca

SEQ ID NO: 5033577 - DNA, 25 bp, Homo sapien
caccaaatatattcttcgctttaaa

SEQ ID NO: 5033578 - DNA, 25 bp, Homo sapien
aaccaaggaattgctcaccaaatat

SEQ ID NO: 5033579 - DNA, 25 bp, Homo sapien
aaaaatgtggttggcaattcaacaa

SEQ ID NO: 5033580 - DNA, 25 bp, Homo sapien
ttggcaaaagctttcaaagaatcag

SEQ ID NO: 5033581 - DNA, 25 bp, Homo sapien
tggcaaaagctttcaaagaatcagc

SEQ ID NO: 5033582 - DNA, 25 bp, Homo sapien
ctttgcaagacagaagcaagctgac

SEQ ID NO: 5033583 - DNA, 25 bp, Homo sapien
tttgcaagacagaagcaagctgaca

SEQ ID NO: 5033584 - DNA, 25 bp, Homo sapien
ttgcaagacagaagcaagctgacat

SEQ ID NO: 5033585 - DNA, 25 bp, Homo sapien
gccaaaatggattcctgctgtgcaa

SEQ ID NO: 5033586 - DNA, 25 bp, Homo sapien
tgctgtgcaacaacatctctctcat

SEQ ID NO: 5033587 - DNA, 25 bp, Homo sapien
tatcagtgagtgcaagccgagatgc

SEQ ID NO: 5033588 - DNA, 25 bp, Homo sapien
tcatagcggagctgatactgccaca

SEQ ID NO: 5033589 - DNA, 25 bp, Homo sapien
ttatccacagcaaaggggaatcagc

SEQ ID NO: 5033590 - DNA, 25 bp, Homo sapien
cttatccacagcaaaggggaatcag

SEQ ID NO: 5033591 - DNA, 25 bp, Homo sapien
tatccacagcaaaggggaatcagca

SEQ ID NO: 5033592 - DNA, 25 bp, Homo sapien
tccattgcagaaagatccatatcaa

SEQ ID NO: 5033593 - DNA, 25 bp, Homo sapien
ccattgcagaaagatccatatcaac

SEQ ID NO: 5033594 - DNA, 25 bp, Homo sapien
ttgcagaaagatccatatcaacttc

SEQ ID NO: 5033595 - DNA, 25 bp, Homo sapien
cattgcagaaagatccatatcaact

SEQ ID NO: 5033596 - DNA, 25 bp, Homo sapien
cagggtatatcatgtttaaggctgt

SEQ ID NO: 5033597 - DNA, 25 bp, Homo sapien
tcttcaatttgcagtgtatgattga

SEQ ID NO: 5033598 - DNA, 25 bp, Homo sapien
gaaggatccatctaactcctgcact

SEQ ID NO: 5033599 - DNA, 25 bp, Homo sapien
tggcagggtatatcatgtttaaggc

SEQ ID NO: 5033600 - DNA, 25 bp, Homo sapien
taaaattttaccactccactctgat

SEQ ID NO: 5033601 - DNA, 25 bp, Homo sapien
cataaaattttaccactccactctg

SEQ ID NO: 5033602 - DNA, 25 bp, Homo sapien
aaattttaccactccactctgatct

SEQ ID NO: 5033603 - DNA, 25 bp, Homo sapien
aaaattttaccactccactctgatc

SEQ ID NO: 5033604 - DNA, 25 bp, Homo sapien
attgtaaaggaaagtttacatactg

SEQ ID NO: 5033605 - DNA, 25 bp, Homo sapien
gaaagtttacatactgaaacgaata

SEQ ID NO: 5033606 - DNA, 25 bp, Homo sapien
gtttacatactgaaacgaatatgta

SEQ ID NO: 5033607 - DNA, 25 bp, Homo sapien
tgtaaaggaaagtttacatactgaa

SEQ ID NO: 5033608 - DNA, 25 bp, Homo sapien
tattaacggctgaatatctttgcca

SEQ ID NO: 5033609 - DNA, 25 bp, Homo sapien
gatgtggaaaccaacatctgactcc

SEQ ID NO: 5033610 - DNA, 25 bp, Homo sapien
agtactagccagacttagcagttta

SEQ ID NO: 5033611 - DNA, 25 bp, Homo sapien
acatatgtgactggaacttctgaga

SEQ ID NO: 5033612 - DNA, 25 bp, Homo sapien
ggtgggctttacactgaaacatact

SEQ ID NO: 5033613 - DNA, 25 bp, Homo sapien
tttcaatcaatctcatcacaaggtg

SEQ ID NO: 5033614 - DNA, 25 bp, Homo sapien
aacatactgtagtattcccaggaca

SEQ ID NO: 5033615 - DNA, 25 bp, Homo sapien
ccaggacagtgtatgtggatgcttt

SEQ ID NO: 5033616 - DNA, 25 bp, Homo sapien
tacaatcagtgcaattccaatcaat

SEQ ID NO: 5033617 - DNA, 25 bp, Homo sapien
cccaacattgaagcatgcactaaaa

SEQ ID NO: 5033618 - DNA, 25 bp, Homo sapien
cctcaggagaatatataagcaattt

SEQ ID NO: 5033619 - DNA, 25 bp, Homo sapien
gaaacaaacaccaagctcctagatg

SEQ ID NO: 5033620 - DNA, 25 bp, Homo sapien
accccaccagtttttagttcatatg

SEQ ID NO: 5033621 - DNA, 25 bp, Homo sapien
tttcctccaccaaatatgggatgta

SEQ ID NO: 5033622 - DNA, 25 bp, Homo sapien
cccaccagtttttagttcatatgcc

SEQ ID NO: 5033623 - DNA, 25 bp, Homo sapien
tatgggatgtagtaaaaccccacca

SEQ ID NO: 5033624 - DNA, 25 bp, Homo sapien
ctctttaatccaatggcggtactca

SEQ ID NO: 5033625 - DNA, 25 bp, Homo sapien
atccaaagtccatagatatagcctg

SEQ ID NO: 5033626 - DNA, 25 bp, Homo sapien
tggcggtactcattaacaccaaaag

SEQ ID NO: 5033627 - DNA, 25 bp, Homo sapien
gaaattcccttcagcacccattcat

SEQ ID NO: 5033628 - DNA, 25 bp, Homo sapien
caagacattctagatatgaaacaac

SEQ ID NO: 5033629 - DNA, 25 bp, Homo sapien
tgggctaaacaccttctagtcaaag

SEQ ID NO: 5033630 - DNA, 25 bp, Homo sapien
aactgctgggccaaggattgggcta

SEQ ID NO: 5033631 - DNA, 25 bp, Homo sapien
caaggattgggctaaacaccttcta

SEQ ID NO: 5033632 - DNA, 25 bp, Homo sapien
gaagacagtcttaaaacaggagtat

SEQ ID NO: 5033633 - DNA, 25 bp, Homo sapien
taagcagccacttcaacataagcct

SEQ ID NO: 5033634 - DNA, 25 bp, Homo sapien
caggagtatgggtaacgacatgtaa

SEQ ID NO: 5033635 - DNA, 25 bp, Homo sapien
aaatgctcatggaagcataagcagc

SEQ ID NO: 5033636 - DNA, 25 bp, Homo sapien
tggtccaatggccaaggagatattt

SEQ ID NO: 5033637 - DNA, 25 bp, Homo sapien
catgcatgtatggatctaccagtat

SEQ ID NO: 5033638 - DNA, 25 bp, Homo sapien
actgtctccaccaaatcgccattag

SEQ ID NO: 5033639 - DNA, 25 bp, Homo sapien
ggagatatttgacgctgctgtagga

SEQ ID NO: 5033640 - DNA, 25 bp, Homo sapien
attcagagtatgaatcaacacaagg

SEQ ID NO: 5033641 - DNA, 25 bp, Homo sapien
actgtaaattctaatttccatgtac

SEQ ID NO: 5033642 - DNA, 25 bp, Homo sapien
gcatctactgtaaattctaatttcc

SEQ ID NO: 5033643 - DNA, 25 bp, Homo sapien
tacacaattcagagtatgaatcaac

SEQ ID NO: 5033644 - DNA, 25 bp, Homo sapien
tccctctacactgggtaccacaaaa

SEQ ID NO: 5033645 - DNA, 25 bp, Homo sapien
cacaaaatgaagacctcctttgggc

SEQ ID NO: 5033646 - DNA, 25 bp, Homo sapien
gaaaaattgatgtgtatcttcagga

SEQ ID NO: 5033647 - DNA, 25 bp, Homo sapien
ctctgccatacttccctctacactg

SEQ ID NO: 5033648 - DNA, 25 bp, Homo sapien
gcagctgcataagcattggaaaaat

SEQ ID NO: 5033649 - DNA, 25 bp, Homo sapien
catcaacgtgtttccatagctctga

SEQ ID NO: 5033650 - DNA, 25 bp, Homo sapien
ctgatggaaccttaatgcaaagttc

SEQ ID NO: 5033651 - DNA, 25 bp, Homo sapien
tgtttccatagctctgatggaacct

SEQ ID NO: 5033652 - DNA, 25 bp, Homo sapien
gctgttcaacttgattctattcaag

SEQ ID NO: 5033653 - DNA, 25 bp, Homo sapien
gattcactgtgacaaacttccaagg

SEQ ID NO: 5033654 - DNA, 25 bp, Homo sapien
aaagcagcctctaaatcattgatcc

SEQ ID NO: 5033655 - DNA, 25 bp, Homo sapien
ccttactcggtatattctacactgt

SEQ ID NO: 5033656 - DNA, 25 bp, Homo sapien
acatatgctctccaagtatcttaat

SEQ ID NO: 5033657 - DNA, 25 bp, Homo sapien
gctctccaagtatcttaatttcaaa

SEQ ID NO: 5033658 - DNA, 25 bp, Homo sapien
atacatatgctctccaagtatctta

SEQ ID NO: 5033659 - DNA, 25 bp, Homo sapien
tctccaagtatcttaatttcaaaca

SEQ ID NO: 5033660 - DNA, 25 bp, Homo sapien
gtgagttatgtatactttatcatcc

SEQ ID NO: 5033661 - DNA, 25 bp, Homo sapien
gagttatgtatactttatcatcctg

SEQ ID NO: 5033662 - DNA, 25 bp, Homo sapien
ggtgtgagttatgtatactttatca

SEQ ID NO: 5033663 - DNA, 25 bp, Homo sapien
tgggtgtgagttatgtatactttat

SEQ ID NO: 5033664 - DNA, 25 bp, Homo sapien
tgtttcaggcctagacaactgttcc

SEQ ID NO: 5033665 - DNA, 25 bp, Homo sapien
taaaagacacaggtcctacaaggtg

SEQ ID NO: 5033666 - DNA, 25 bp, Homo sapien
tgttgatagctcagagggttcctcc

SEQ ID NO: 5033667 - DNA, 25 bp, Homo sapien
tacccttctggctgggttggtccaa

SEQ ID NO: 5033668 - DNA, 25 bp, Homo sapien
gaaatttatgttgttgatgcagacg

SEQ ID NO: 5033669 - DNA, 25 bp, Homo sapien
tctggaaatttatgttgttgatgca

SEQ ID NO: 5033670 - DNA, 25 bp, Homo sapien
tctctggaaatttatgttgttgatg

SEQ ID NO: 5033671 - DNA, 25 bp, Homo sapien
aatttatgttgttgatgcagacgac

SEQ ID NO: 5033672 - DNA, 25 bp, Homo sapien
tgggctttcaaagcccttgtctcct

SEQ ID NO: 5033673 - DNA, 25 bp, Homo sapien
tttatatggccttgggctttcaaag

SEQ ID NO: 5033674 - DNA, 25 bp, Homo sapien
cgggctctacaccagtcagcggcat

SEQ ID NO: 5033675 - DNA, 25 bp, Homo sapien
agccgccgtcgacaagcttctgtca

SEQ ID NO: 5033676 - DNA, 25 bp, Homo sapien
tcgactagctcctagaagccgccgt

SEQ ID NO: 5033677 - DNA, 25 bp, Homo sapien
agagatgctcctctccgcaagggct

SEQ ID NO: 5033678 - DNA, 25 bp, Homo sapien
cattactagtctttggcacctcaca

SEQ ID NO: 5033679 - DNA, 25 bp, Homo sapien
tttcatgttcatgacaataaaactt

SEQ ID NO: 5033680 - DNA, 25 bp, Homo sapien
aaagacatttcgaagccatcgtgtt

SEQ ID NO: 5033681 - DNA, 25 bp, Homo sapien
catttcgaagccatcgtgtttgtat

SEQ ID NO: 5033682 - DNA, 25 bp, Homo sapien
gaagccatcgtgtttgtatttcatg

SEQ ID NO: 5033683 - DNA, 25 bp, Homo sapien
gaagttttcgagtgagcattgcctg

SEQ ID NO: 5033684 - DNA, 25 bp, Homo sapien
taattgatagcacctagaggcttcc

SEQ ID NO: 5033685 - DNA, 25 bp, Homo sapien
aaagcgcatgtctacgccaggcaga

SEQ ID NO: 5033686 - DNA, 25 bp, Homo sapien
taaagcaacttgagtcctgaagaaa

SEQ ID NO: 5033687 - DNA, 25 bp, Homo sapien
gaaatgggtcttctcgaattataaa

SEQ ID NO: 5033688 - DNA, 25 bp, Homo sapien
agaaatgggtcttctcgaattataa

SEQ ID NO: 5033689 - DNA, 25 bp, Homo sapien
caccattttgcatcgaagaatgaga

SEQ ID NO: 5033690 - DNA, 25 bp, Homo sapien
ccattttgcatcgaagaatgagaat

SEQ ID NO: 5033691 - DNA, 25 bp, Homo sapien
attttgcatcgaagaatgagaatat

SEQ ID NO: 5033692 - DNA, 25 bp, Homo sapien
acaccattttgcatcgaagaatgag

SEQ ID NO: 5033693 - DNA, 25 bp, Homo sapien
taaaacgttcctgattatcctcagg

SEQ ID NO: 5033694 - DNA, 25 bp, Homo sapien
gagtgtctatccaccagcgctaaac

SEQ ID NO: 5033695 - DNA, 25 bp, Homo sapien
tgaatatatggagcaatatcttctt

SEQ ID NO: 5033696 - DNA, 25 bp, Homo sapien
tcctcaggtaaatcatctactttca

SEQ ID NO: 5033697 - DNA, 25 bp, Homo sapien
caagtatacgccacatgccaggtag

SEQ ID NO: 5033698 - DNA, 25 bp, Homo sapien
gagttgaaagtccttagcgcagtcc

SEQ ID NO: 5033699 - DNA, 25 bp, Homo sapien
tattccgtcagaaagtcatccgtga

SEQ ID NO: 5033700 - DNA, 25 bp, Homo sapien
taacttgatgttgtagctccctgag

SEQ ID NO: 5033701 - DNA, 25 bp, Homo sapien
gattgaatttcaccgcattctgaag

SEQ ID NO: 5033702 - DNA, 25 bp, Homo sapien
gaagtagcattcgtgctgctgctct

SEQ ID NO: 5033703 - DNA, 25 bp, Homo sapien
tgatcaagactagttaccattcctt

SEQ ID NO: 5033704 - DNA, 25 bp, Homo sapien
tcttgaaactcagcgagattgaatt

SEQ ID NO: 5033705 - DNA, 25 bp, Homo sapien
taacatttaagacagtgttctatca

SEQ ID NO: 5033706 - DNA, 25 bp, Homo sapien
tttaagacagtgttctatcatttcc

SEQ ID NO: 5033707 - DNA, 25 bp, Homo sapien
aacatttaagacagtgttctatcat

SEQ ID NO: 5033708 - DNA, 25 bp, Homo sapien
catttaagacagtgttctatcattt

SEQ ID NO: 5033709 - DNA, 25 bp, Homo sapien
aatcaaattcaagaatcctccaata

SEQ ID NO: 5033710 - DNA, 25 bp, Homo sapien
cagaatccacaagctgagttacatg

SEQ ID NO: 5033711 - DNA, 25 bp, Homo sapien
tggctccaatggtccgagttcctga

SEQ ID NO: 5033712 - DNA, 25 bp, Homo sapien
ctgaaggcatgtgttcaaaggaact

SEQ ID NO: 5033713 - DNA, 25 bp, Homo sapien
tctgatgcccaagctaaagaatagt

SEQ ID NO: 5033714 - DNA, 25 bp, Homo sapien
taaagtcactggtagcagattgacc

SEQ ID NO: 5033715 - DNA, 25 bp, Homo sapien
ttggacctttcttaatctaacatgg

SEQ ID NO: 5033716 - DNA, 25 bp, Homo sapien
cagattgacctcatgtaaagatgaa

SEQ ID NO: 5033717 - DNA, 25 bp, Homo sapien
gcagtagggtgaagatgtccaaaaa

SEQ ID NO: 5033718 - DNA, 25 bp, Homo sapien
ctctcccttatgatgcccaatttca

SEQ ID NO: 5033719 - DNA, 25 bp, Homo sapien
gatgcccaatttcatcattgttaaa

SEQ ID NO: 5033720 - DNA, 25 bp, Homo sapien
tgtccaaaaacttctctcccttatg

SEQ ID NO: 5033721 - DNA, 25 bp, Homo sapien
tgcctgaatttgatcaagcaaatct

SEQ ID NO: 5033722 - DNA, 25 bp, Homo sapien
tagaacttgtaattgggtcattatt

SEQ ID NO: 5033723 - DNA, 25 bp, Homo sapien
gatcaagcaaatcttcagttgtata

SEQ ID NO: 5033724 - DNA, 25 bp, Homo sapien
cctcacttgcctgaatttgatcaag

SEQ ID NO: 5033725 - DNA, 25 bp, Homo sapien
gactgtcaggtccttcatatggatt

SEQ ID NO: 5033726 - DNA, 25 bp, Homo sapien
gtctacgtcttcttaattcccaata

SEQ ID NO: 5033727 - DNA, 25 bp, Homo sapien
tctttttgactgtcaggtccttcat

SEQ ID NO: 5033728 - DNA, 25 bp, Homo sapien
tgggtctacgtcttcttaattccca

SEQ ID NO: 5033729 - DNA, 25 bp, Homo sapien
gttttgtctttactgcacagcacag

SEQ ID NO: 5033730 - DNA, 25 bp, Homo sapien
tcttcaactggtccggagttttaca

SEQ ID NO: 5033731 - DNA, 25 bp, Homo sapien
cacagcttgctcgtctttatcacca

SEQ ID NO: 5033732 - DNA, 25 bp, Homo sapien
aagtgtctgctatcttcaagtcgta

SEQ ID NO: 5033733 - DNA, 25 bp, Homo sapien
tggattccacacagcaagcattggg

SEQ ID NO: 5033734 - DNA, 25 bp, Homo sapien
aaccctctaggcttgcagaacttag

SEQ ID NO: 5033735 - DNA, 25 bp, Homo sapien
gcaagacagatccatagaggccaag

SEQ ID NO: 5033736 - DNA, 25 bp, Homo sapien
ttgggccaactgagagccacacaga

SEQ ID NO: 5033737 - DNA, 25 bp, Homo sapien
gcgatctgcagcgtcgcatccacct

SEQ ID NO: 5033738 - DNA, 25 bp, Homo sapien
tccagcaggcagaagtcgccggctg

SEQ ID NO: 5033739 - DNA, 25 bp, Homo sapien
aggcagtgcaccgccggcagcagct

SEQ ID NO: 5033740 - DNA, 25 bp, Homo sapien
gcgtcgcatccacctcgtcgcgggt

SEQ ID NO: 5033741 - DNA, 25 bp, Homo sapien
cctgagcgtttgaaagcgcgccaag

SEQ ID NO: 5033742 - DNA, 25 bp, Homo sapien
tggctgcgggcttggcgggcaagaa

SEQ ID NO: 5033743 - DNA, 25 bp, Homo sapien
ccaaggcggccatgggcgtgtttcc

SEQ ID NO: 5033744 - DNA, 25 bp, Homo sapien
cagccggaaggtaggaaacctgagc

SEQ ID NO: 5033745 - DNA, 25 bp, Homo sapien
ccatgtacagcacttgcaaagctcc

SEQ ID NO: 5033746 - DNA, 25 bp, Homo sapien
gtgaagttgatgttaccatcacatt

SEQ ID NO: 5033747 - DNA, 25 bp, Homo sapien
gcaaagctccttcgaatttctcatt

SEQ ID NO: 5033748 - DNA, 25 bp, Homo sapien
gttgatgttaccatcacattcatgg

SEQ ID NO: 5033749 - DNA, 25 bp, Homo sapien
tcagcgcaaggagacagctccgact

SEQ ID NO: 5033750 - DNA, 25 bp, Homo sapien
caagttgtcctgaaacactgctcac

SEQ ID NO: 5033751 - DNA, 25 bp, Homo sapien
tctagggattatgcagctggaggct

SEQ ID NO: 5033752 - DNA, 25 bp, Homo sapien
gattaattggctcatctgatctggg

SEQ ID NO: 5033753 - DNA, 25 bp, Homo sapien
gccttcctgcagaccaactccgact

SEQ ID NO: 5033754 - DNA, 25 bp, Homo sapien
cgccttcctgcagaccaactccgac

SEQ ID NO: 5033755 - DNA, 25 bp, Homo sapien
catttaaataggacatcacaggagc

SEQ ID NO: 5033756 - DNA, 25 bp, Homo sapien
taggccggcgttccttattgattac

SEQ ID NO: 5033757 - DNA, 25 bp, Homo sapien
tgaagtatctttaatgcagcagatg

SEQ ID NO: 5033758 - DNA, 25 bp, Homo sapien
gcagcagatgtcaaaagtggtagcc

SEQ ID NO: 5033759 - DNA, 25 bp, Homo sapien
catagggattccctctccagccaat

SEQ ID NO: 5033760 - DNA, 25 bp, Homo sapien
gggattccctctccagccaatccag

SEQ ID NO: 5033761 - DNA, 25 bp, Homo sapien
tagggattccctctccagccaatcc

SEQ ID NO: 5033762 - DNA, 25 bp, Homo sapien
ccatagggattccctctccagccaa

SEQ ID NO: 5033763 - DNA, 25 bp, Homo sapien
aaaccctcggcggacagcggagcca

SEQ ID NO: 5033764 - DNA, 25 bp, Homo sapien
tgtgagggcagactgatccgagcac

SEQ ID NO: 5033765 - DNA, 25 bp, Homo sapien
cccgaacaaagatggcgcgggaagc

SEQ ID NO: 5033766 - DNA, 25 bp, Homo sapien
acagcggagccagtggtagccgcac

SEQ ID NO: 5033767 - DNA, 25 bp, Homo sapien
ctaaaaccatggaggagggcggcag

SEQ ID NO: 5033768 - DNA, 25 bp, Homo sapien
agcgcatggctgaggtcttggtcac

SEQ ID NO: 5033769 - DNA, 25 bp, Homo sapien
cgcagcaaagggagctggagcgcat

SEQ ID NO: 5033770 - DNA, 25 bp, Homo sapien
agcgggagtggcggggcgcagcaaa

SEQ ID NO: 5033771 - DNA, 25 bp, Homo sapien
cgcctcatccgcgaagagagcaaga

SEQ ID NO: 5033772 - DNA, 25 bp, Homo sapien
gaccaacgatagtcttcactaggtt

SEQ ID NO: 5033773 - DNA, 25 bp, Homo sapien
agcccctctactccttgataaaagg

SEQ ID NO: 5033774 - DNA, 25 bp, Homo sapien
tccttgataaaaggagcaagaccaa

SEQ ID NO: 5033775 - DNA, 25 bp, Homo sapien
ctggctcctgcaagaattaagactt

SEQ ID NO: 5033776 - DNA, 25 bp, Homo sapien
cttgcggcgtctcacggaacttggg

SEQ ID NO: 5033777 - DNA, 25 bp, Homo sapien
ctcgcacgttttgggcagcaggatc

SEQ ID NO: 5033778 - DNA, 25 bp, Homo sapien
tgtcgggctgccttgaggctgtgcc

SEQ ID NO: 5033779 - DNA, 25 bp, Homo sapien
ccgagatcagatgggatctggcacg

SEQ ID NO: 5033780 - DNA, 25 bp, Homo sapien
ggcctgtaatcacaggattacaggc

SEQ ID NO: 5033781 - DNA, 25 bp, Homo sapien
tccgagatcagatgggatctggcac

SEQ ID NO: 5033782 - DNA, 25 bp, Homo sapien
gattacaggcctgtccctgcttagc

SEQ ID NO: 5033783 - DNA, 25 bp, Homo sapien
agcctagcagatcaagctgagcctc

SEQ ID NO: 5033784 - DNA, 25 bp, Homo sapien
gtcacatccaccaattccttgggtc

SEQ ID NO: 5033785 - DNA, 25 bp, Homo sapien
gctgagcctctgaggtcacatccac

SEQ ID NO: 5033786 - DNA, 25 bp, Homo sapien
ctagcagatcaagctgagcctctga

SEQ ID NO: 5033787 - DNA, 25 bp, Homo sapien
gaaaggctttgtccacgcaaaccaa

SEQ ID NO: 5033788 - DNA, 25 bp, Homo sapien
aaacatccccgcttaattgcagtcc

SEQ ID NO: 5033789 - DNA, 25 bp, Homo sapien
cgcaaaccaaggctccctcggttgg

SEQ ID NO: 5033790 - DNA, 25 bp, Homo sapien
tgttaagcgcagagatgattccaag

SEQ ID NO: 5033791 - DNA, 25 bp, Homo sapien
ttctcctagtccatgctgagatggt

SEQ ID NO: 5033792 - DNA, 25 bp, Homo sapien
gatcatcccaacaccttttgtgtgg

SEQ ID NO: 5033793 - DNA, 25 bp, Homo sapien
gacaaggtaattgaccagatcatcc

SEQ ID NO: 5033794 - DNA, 25 bp, Homo sapien
tgagatggttgagagtcaccaagca

SEQ ID NO: 5033795 - DNA, 25 bp, Homo sapien
tgcacaccagtggctcctgcttgct

SEQ ID NO: 5033796 - DNA, 25 bp, Homo sapien
gcctgcacaccagtggctcctgctt

SEQ ID NO: 5033797 - DNA, 25 bp, Homo sapien
ctgcctgcacaccagtggctcctgc

SEQ ID NO: 5033798 - DNA, 25 bp, Homo sapien
acaccagtggctcctgcttgctgtt

SEQ ID NO: 5033799 - DNA, 25 bp, Homo sapien
tgaagttagtcactgatgctttggc

SEQ ID NO: 5033800 - DNA, 25 bp, Homo sapien
ctttggctctgatgaaccccttctg

SEQ ID NO: 5033801 - DNA, 25 bp, Homo sapien
gctttggctctgatgaaccccttct

SEQ ID NO: 5033802 - DNA, 25 bp, Homo sapien
ctagactgaagttagtcactgatgc

SEQ ID NO: 5033803 - DNA, 25 bp, Homo sapien
ggtatgtgtttgcagtggctcgtac

SEQ ID NO: 5033804 - DNA, 25 bp, Homo sapien
gtatgtgtttgcagtggctcgtact

SEQ ID NO: 5033805 - DNA, 25 bp, Homo sapien
tggtatgtgtttgcagtggctcgta

SEQ ID NO: 5033806 - DNA, 25 bp, Homo sapien
tttggtatgtgtttgcagtggctcg

SEQ ID NO: 5033807 - DNA, 25 bp, Homo sapien
tcaggttagtgtcaaactcatgggc

SEQ ID NO: 5033808 - DNA, 25 bp, Homo sapien
gccacattcttttggtaagcaattc

SEQ ID NO: 5033809 - DNA, 25 bp, Homo sapien
catttccagccaaattaccgtctgt

SEQ ID NO: 5033810 - DNA, 25 bp, Homo sapien
caaagtaattagcattttatggtgg

SEQ ID NO: 5033811 - DNA, 25 bp, Homo sapien
gggcctgatgtacaacctgcactat

SEQ ID NO: 5033812 - DNA, 25 bp, Homo sapien
atgagacttccgcatgatggtgacc

SEQ ID NO: 5033813 - DNA, 25 bp, Homo sapien
gagtccctgatgactctacagacag

SEQ ID NO: 5033814 - DNA, 25 bp, Homo sapien
tatttccatattgactaatgaggtt

SEQ ID NO: 5033815 - DNA, 25 bp, Homo sapien
ggtcctttctgactgatttcattgg

SEQ ID NO: 5033816 - DNA, 25 bp, Homo sapien
cactgccacactgctcgttactgag

SEQ ID NO: 5033817 - DNA, 25 bp, Homo sapien
tgctcgttactgaggaccaaggtcc

SEQ ID NO: 5033818 - DNA, 25 bp, Homo sapien
tcattggatttcaccttcaccccgg

SEQ ID NO: 5033819 - DNA, 25 bp, Homo sapien
gactgtctttatgcctagggtagcc

SEQ ID NO: 5033820 - DNA, 25 bp, Homo sapien
ggtggcagcacaagtaagaaggttt

SEQ ID NO: 5033821 - DNA, 25 bp, Homo sapien
ttcacggtgtgcttgctctgacccc

SEQ ID NO: 5033822 - DNA, 25 bp, Homo sapien
tagggtagccctgaatcagccttac

SEQ ID NO: 5033823 - DNA, 25 bp, Homo sapien
tctctagcccaaacagcgacatgct

SEQ ID NO: 5033824 - DNA, 25 bp, Homo sapien
gatggttttggacatacgagtcttc

SEQ ID NO: 5033825 - DNA, 25 bp, Homo sapien
gagtcttctccgcacatacatgtct

SEQ ID NO: 5033826 - DNA, 25 bp, Homo sapien
gacatgctaaagtccccttcttcag

SEQ ID NO: 5033827 - DNA, 25 bp, Homo sapien
taagggaaggctaaaactttgctga

SEQ ID NO: 5033828 - DNA, 25 bp, Homo sapien
catattctaaggacatgacatgctg

SEQ ID NO: 5033829 - DNA, 25 bp, Homo sapien
taaaaatcaacccttctggcaagat

SEQ ID NO: 5033830 - DNA, 25 bp, Homo sapien
cctcaaagtgccaaattaggcagtc

SEQ ID NO: 5033831 - DNA, 25 bp, Homo sapien
aaaaacacgtgggtctcatatctga

SEQ ID NO: 5033832 - DNA, 25 bp, Homo sapien
gagaggttattcagactacactcaa

SEQ ID NO: 5033833 - DNA, 25 bp, Homo sapien
cctacctaggtcagtattgatgggt

SEQ ID NO: 5033834 - DNA, 25 bp, Homo sapien
ttctcctatgtagccaaaagtgcca

SEQ ID NO: 5033835 - DNA, 25 bp, Homo sapien
agaggctgtatctgctggtggattc

SEQ ID NO: 5033836 - DNA, 25 bp, Homo sapien
tctatgggatgctggctacaatggg

SEQ ID NO: 5033837 - DNA, 25 bp, Homo sapien
ttccagcgctcattgaatgctgagc

SEQ ID NO: 5033838 - DNA, 25 bp, Homo sapien
caatctgttacgtctccttatcagc

SEQ ID NO: 5033839 - DNA, 25 bp, Homo sapien
taactcatgattaggacaaggtggt

SEQ ID NO: 5033840 - DNA, 25 bp, Homo sapien
gagcccacggtatcaattccacaga

SEQ ID NO: 5033841 - DNA, 25 bp, Homo sapien
tgagcatggtcctagagcttttgga

SEQ ID NO: 5033842 - DNA, 25 bp, Homo sapien
tgaaatctgtggactatagtggcct

SEQ ID NO: 5033843 - DNA, 25 bp, Homo sapien
cttctgctgaatccaactctgcaaa

SEQ ID NO: 5033844 - DNA, 25 bp, Homo sapien
ccaactctgcaaactggttggagag

SEQ ID NO: 5033845 - DNA, 25 bp, Homo sapien
ctgaaaagattgataggaatgcccc

SEQ ID NO: 5033846 - DNA, 25 bp, Homo sapien
gattgataggaatgcccctcttctg

SEQ ID NO: 5033847 - DNA, 25 bp, Homo sapien
tacagctaccctggttccaccatgt

SEQ ID NO: 5033848 - DNA, 25 bp, Homo sapien
cgcagcgggcatgtaggacaccttc

SEQ ID NO: 5033849 - DNA, 25 bp, Homo sapien
acccacattcgggttctgccttggg

SEQ ID NO: 5033850 - DNA, 25 bp, Homo sapien
ttggggcagccctatcctttgccgc

SEQ ID NO: 5033851 - DNA, 25 bp, Homo sapien
tttcatgatgtttagcagcgtcttg

SEQ ID NO: 5033852 - DNA, 25 bp, Homo sapien
cgtcttgggagatgggaccctagat

SEQ ID NO: 5033853 - DNA, 25 bp, Homo sapien
cactttgtccccacataataatcca

SEQ ID NO: 5033854 - DNA, 25 bp, Homo sapien
ttaggttctctcttcaagctccact

SEQ ID NO: 5033855 - DNA, 25 bp, Homo sapien
gaggaatgcttcatcattggttcaa

SEQ ID NO: 5033856 - DNA, 25 bp, Homo sapien
catgactttgatctgggccatggag

SEQ ID NO: 5033857 - DNA, 25 bp, Homo sapien
catgaaaggcaattgtgagaaaggg

SEQ ID NO: 5033858 - DNA, 25 bp, Homo sapien
cacatgaaaaacttggctgctgtta

SEQ ID NO: 5033859 - DNA, 25 bp, Homo sapien
cagctttgctattgtaagatcgggg

SEQ ID NO: 5033860 - DNA, 25 bp, Homo sapien
caaataggggtgtcccagaagcagg

SEQ ID NO: 5033861 - DNA, 25 bp, Homo sapien
ggtagtcagcatggatgggggatca

SEQ ID NO: 5033862 - DNA, 25 bp, Homo sapien
cagaagcaggaatggggtagtcagc

SEQ ID NO: 5033863 - DNA, 25 bp, Homo sapien
catttgtaaagaatcgggcatgcag

SEQ ID NO: 5033864 - DNA, 25 bp, Homo sapien
cagttggaatgtcggagggactacc

SEQ ID NO: 5033865 - DNA, 25 bp, Homo sapien
ttctatcgggattctcagctgggca

SEQ ID NO: 5033866 - DNA, 25 bp, Homo sapien
aacttaggccaattccgagcgagac

SEQ ID NO: 5033867 - DNA, 25 bp, Homo sapien
cagcaggctccgtgtcatggtgtta

SEQ ID NO: 5033868 - DNA, 25 bp, Homo sapien
tggctcccagatgcttgctggcggc

SEQ ID NO: 5033869 - DNA, 25 bp, Homo sapien
taaggcctggattgatttcccatgg

SEQ ID NO: 5033870 - DNA, 25 bp, Homo sapien
agactggcatgactgtgacagcagg

SEQ ID NO: 5033871 - DNA, 25 bp, Homo sapien
gccaacagctgatgctctccattta

SEQ ID NO: 5033872 - DNA, 25 bp, Homo sapien
ggtgccaacagctgatgctctccat

SEQ ID NO: 5033873 - DNA, 25 bp, Homo sapien
caacagctgatgctctccatttacc

SEQ ID NO: 5033874 - DNA, 25 bp, Homo sapien
aaggtgccaacagctgatgctctcc

SEQ ID NO: 5033875 - DNA, 25 bp, Homo sapien
tcttttttacagtcagggtagttga

SEQ ID NO: 5033876 - DNA, 25 bp, Homo sapien
gaagcacaaattggcttgccattca

SEQ ID NO: 5033877 - DNA, 25 bp, Homo sapien
attggcttgccattcaaacttgaag

SEQ ID NO: 5033878 - DNA, 25 bp, Homo sapien
cagggtagttgaaatgaagcacaaa

SEQ ID NO: 5033879 - DNA, 25 bp, Homo sapien
ctccctgcttctgaataacgaccat

SEQ ID NO: 5033880 - DNA, 25 bp, Homo sapien
tttcctcggaagcccagactttgta

SEQ ID NO: 5033881 - DNA, 25 bp, Homo sapien
gctccctgcttctgaataacgacca

SEQ ID NO: 5033882 - DNA, 25 bp, Homo sapien
tggaatcctttcctcggaagcccag

SEQ ID NO: 5033883 - DNA, 25 bp, Homo sapien
cgtgttagactgataagggaatccc

SEQ ID NO: 5033884 - DNA, 25 bp, Homo sapien
ccagagatcacttcatttagtggcc

SEQ ID NO: 5033885 - DNA, 25 bp, Homo sapien
gaattttgagtgaacaccacaccca

SEQ ID NO: 5033886 - DNA, 25 bp, Homo sapien
cagcttgcaggtccaatgtcctaca

SEQ ID NO: 5033887 - DNA, 25 bp, Homo sapien
tcatctgtgggtacttcttaggacc

SEQ ID NO: 5033888 - DNA, 25 bp, Homo sapien
accccaaggtccttctggccagcct

SEQ ID NO: 5033889 - DNA, 25 bp, Homo sapien
tattgtgacccctcatcatgttctg

SEQ ID NO: 5033890 - DNA, 25 bp, Homo sapien
gaccaagaggcccaccaggtcatct

SEQ ID NO: 5033891 - DNA, 25 bp, Homo sapien
tccattggccccagacatttagctg

SEQ ID NO: 5033892 - DNA, 25 bp, Homo sapien
atttagctgtggatacagaactgtc

SEQ ID NO: 5033893 - DNA, 25 bp, Homo sapien
tagctgtggatacagaactgtcctg

SEQ ID NO: 5033894 - DNA, 25 bp, Homo sapien
tgcccctaacaatggacactctgct

SEQ ID NO: 5033895 - DNA, 25 bp, Homo sapien
tgttattcttggagagttgccaaca

SEQ ID NO: 5033896 - DNA, 25 bp, Homo sapien
tttggacaccatacatagaattgct

SEQ ID NO: 5033897 - DNA, 25 bp, Homo sapien
cactggctgcttgcttgttattctt

SEQ ID NO: 5033898 - DNA, 25 bp, Homo sapien
gaattgctgctaactaaatctccct

SEQ ID NO: 5033899 - DNA, 25 bp, Homo sapien
tagaactgtcccctagaggatggga

SEQ ID NO: 5033900 - DNA, 25 bp, Homo sapien
tcggaggctgtcttggcatgagtac

SEQ ID NO: 5033901 - DNA, 25 bp, Homo sapien
ccttgcatatgcatgagacatgagc

SEQ ID NO: 5033902 - DNA, 25 bp, Homo sapien
tgttaactttcaatctcggaggctg

SEQ ID NO: 5033903 - DNA, 25 bp, Homo sapien
tctcaccactgtccgccgtggctct

SEQ ID NO: 5033904 - DNA, 25 bp, Homo sapien
tgccagtgagtctgctgcactctca

SEQ ID NO: 5033905 - DNA, 25 bp, Homo sapien
ccgtggctctgggtaatgtcatagt

SEQ ID NO: 5033906 - DNA, 25 bp, Homo sapien
gctctgggtaatgtcatagtaagca

SEQ ID NO: 5033907 - DNA, 25 bp, Homo sapien
gggaggataacagtacctccattac

SEQ ID NO: 5033908 - DNA, 25 bp, Homo sapien
catataaagtggttgtgcctggcac

SEQ ID NO: 5033909 - DNA, 25 bp, Homo sapien
cactgtgtcccctttaaattgggag

SEQ ID NO: 5033910 - DNA, 25 bp, Homo sapien
tcccatcctacaatagactctttga

SEQ ID NO: 5033911 - DNA, 25 bp, Homo sapien
tattattatcaactataacattcaa

SEQ ID NO: 5033912 - DNA, 25 bp, Homo sapien
ttattattatcaactataacattca

SEQ ID NO: 5033913 - DNA, 25 bp, Homo sapien
ttattatcaactataacattcaaat

SEQ ID NO: 5033914 - DNA, 25 bp, Homo sapien
tttattattatcaactataacattc

SEQ ID NO: 5033915 - DNA, 25 bp, Homo sapien
aattacaatttcctattgaaggact

SEQ ID NO: 5033916 - DNA, 25 bp, Homo sapien
ttacaatttcctattgaaggactat

SEQ ID NO: 5033917 - DNA, 25 bp, Homo sapien
acaatttcctattgaaggactatac

SEQ ID NO: 5033918 - DNA, 25 bp, Homo sapien
ttaattacaatttcctattgaagga

SEQ ID NO: 5033919 - DNA, 25 bp, Homo sapien
ttccccacagtgattcggcacataa

SEQ ID NO: 5033920 - DNA, 25 bp, Homo sapien
acagtgattcggcacataaaacagg

SEQ ID NO: 5033921 - DNA, 25 bp, Homo sapien
tgattcggcacataaaacaggtgct

SEQ ID NO: 5033922 - DNA, 25 bp, Homo sapien
ccccacagtgattcggcacataaaa

SEQ ID NO: 5033923 - DNA, 25 bp, Homo sapien
catcagaagaaagtttcaatcactt

SEQ ID NO: 5033924 - DNA, 25 bp, Homo sapien
atcagaagaaagtttcaatcacttc

SEQ ID NO: 5033925 - DNA, 25 bp, Homo sapien
ttttctcctgactgatgaggattat

SEQ ID NO: 5033926 - DNA, 25 bp, Homo sapien
aaatcaacatatttcttcatgaatc

SEQ ID NO: 5033927 - DNA, 25 bp, Homo sapien
ttctcctgactgatgaggattattt

SEQ ID NO: 5033928 - DNA, 25 bp, Homo sapien
ttgttttctcctgactgatgaggat

SEQ ID NO: 5033929 - DNA, 25 bp, Homo sapien
ctcctttgcaggcacatttctaata

SEQ ID NO: 5033930 - DNA, 25 bp, Homo sapien
cacatttctaatagcacactctaga

SEQ ID NO: 5033931 - DNA, 25 bp, Homo sapien
aggcacatttctaatagcacactct

SEQ ID NO: 5033932 - DNA, 25 bp, Homo sapien
atttctaatagcacactctagagta

SEQ ID NO: 5033933 - DNA, 25 bp, Homo sapien
caagcatgtattgatgctgaagctt

SEQ ID NO: 5033934 - DNA, 25 bp, Homo sapien
caggtttctgttataaaaacctgtg

SEQ ID NO: 5033935 - DNA, 25 bp, Homo sapien
tagcttctctacaaaggtgagagtt

SEQ ID NO: 5033936 - DNA, 25 bp, Homo sapien
ctgtgttcaagcatgtattgatgct

SEQ ID NO: 5033937 - DNA, 25 bp, Homo sapien
ttttcctggtcacacacttttcacg

SEQ ID NO: 5033938 - DNA, 25 bp, Homo sapien
gactaactggacttgatgtcagctc

SEQ ID NO: 5033939 - DNA, 25 bp, Homo sapien
tgtcagctcaaatgtgcagggagaa

SEQ ID NO: 5033940 - DNA, 25 bp, Homo sapien
tacaagttaacatatgcgtgtgact

SEQ ID NO: 5033941 - DNA, 25 bp, Homo sapien
taatcatatggttgaggaaacagag

SEQ ID NO: 5033942 - DNA, 25 bp, Homo sapien
gagtttatttgtaggtagtagctgc

SEQ ID NO: 5033943 - DNA, 25 bp, Homo sapien
tcattcctaaagactaccatcagcc

SEQ ID NO: 5033944 - DNA, 25 bp, Homo sapien
gaacatcctcgcacttatctagcaa

SEQ ID NO: 5033945 - DNA, 25 bp, Homo sapien
tatttttcgtggttgaggaagctcc

SEQ ID NO: 5033946 - DNA, 25 bp, Homo sapien
caatcttgggaaggcgtctatttct

SEQ ID NO: 5033947 - DNA, 25 bp, Homo sapien
ttcttgtgtgtactcatctagacgt

SEQ ID NO: 5033948 - DNA, 25 bp, Homo sapien
catctagacgtttaggtatttttcg

SEQ ID NO: 5033949 - DNA, 25 bp, Homo sapien
aagtatatgtactgggtctaccggg

SEQ ID NO: 5033950 - DNA, 25 bp, Homo sapien
cattcagcgtagagcatgtggaaca

SEQ ID NO: 5033951 - DNA, 25 bp, Homo sapien
taggctgggtcactatcaacataca

SEQ ID NO: 5033952 - DNA, 25 bp, Homo sapien
caagtgggaatccaatatctggcca

SEQ ID NO: 5033953 - DNA, 25 bp, Homo sapien
tttttggcagcatgccataaatagc

SEQ ID NO: 5033954 - DNA, 25 bp, Homo sapien
tgccataaatagctagttttacaat

SEQ ID NO: 5033955 - DNA, 25 bp, Homo sapien
ttttggcagcatgccataaatagct

SEQ ID NO: 5033956 - DNA, 25 bp, Homo sapien
agcatgccataaatagctagtttta

SEQ ID NO: 5033957 - DNA, 25 bp, Homo sapien
gtgaaacaacatgtacatgcaaaaa

SEQ ID NO: 5033958 - DNA, 25 bp, Homo sapien
ttagtaaatatcaaagaccttcctc

SEQ ID NO: 5033959 - DNA, 25 bp, Homo sapien
aaaaagtaattctagctgtacagac

SEQ ID NO: 5033960 - DNA, 25 bp, Homo sapien
tatatcccagggtacgtgccatttg

SEQ ID NO: 5033961 - DNA, 25 bp, Homo sapien
tcagatctaaactctaagaattatg

SEQ ID NO: 5033962 - DNA, 25 bp, Homo sapien
cagaagactattgaaactgatcaac

SEQ ID NO: 5033963 - DNA, 25 bp, Homo sapien
tataaattgcggacctacaaaggcc

SEQ ID NO: 5033964 - DNA, 25 bp, Homo sapien
tacaaaggccacaaatattagaatc

SEQ ID NO: 5033965 - DNA, 25 bp, Homo sapien
actggatccctcaggtgaagctgag

SEQ ID NO: 5033966 - DNA, 25 bp, Homo sapien
ctggatccctcaggtgaagctgagc

SEQ ID NO: 5033967 - DNA, 25 bp, Homo sapien
gaattaagttcatactctagacagc

SEQ ID NO: 5033968 - DNA, 25 bp, Homo sapien
cacttggttctgaattaagttcata

SEQ ID NO: 5033969 - DNA, 25 bp, Homo sapien
aaatgttggtagtccacttggttct

SEQ ID NO: 5033970 - DNA, 25 bp, Homo sapien
ttcatactctagacagccagtaatc

SEQ ID NO: 5033971 - DNA, 25 bp, Homo sapien
aatgggcaaaggctggctcaaggaa

SEQ ID NO: 5033972 - DNA, 25 bp, Homo sapien
catgaatgtattttaaggggaggaa

SEQ ID NO: 5033973 - DNA, 25 bp, Homo sapien
gaagcaaaacagttgttccaaatat

SEQ ID NO: 5033974 - DNA, 25 bp, Homo sapien
aagacggatgtaaattcagttttgt

SEQ ID NO: 5033975 - DNA, 25 bp, Homo sapien
tataacaacatgatccccacagtca

SEQ ID NO: 5033976 - DNA, 25 bp, Homo sapien
ttataacaacatgatccccacagtc

SEQ ID NO: 5033977 - DNA, 25 bp, Homo sapien
ccagtatgcgaagagtatacttttt

SEQ ID NO: 5033978 - DNA, 25 bp, Homo sapien
tcattataacaacatgatccccaca

SEQ ID NO: 5033979 - DNA, 25 bp, Homo sapien
ggtgatacatgaacactattttttt

SEQ ID NO: 5033980 - DNA, 25 bp, Homo sapien
gtgatacatgaacactatttttttt

SEQ ID NO: 5033981 - DNA, 25 bp, Homo sapien
aggtgatacatgaacactatttttt

SEQ ID NO: 5033982 - DNA, 25 bp, Homo sapien
catagcagcaagtttgccaggtggc

SEQ ID NO: 5033983 - DNA, 25 bp, Homo sapien
aatccctgaagtcttatagatgcca

SEQ ID NO: 5033984 - DNA, 25 bp, Homo sapien
gtgcatggtacacaggtttatgtaa

SEQ ID NO: 5033985 - DNA, 25 bp, Homo sapien
gaagtcttatagatgccatagcagc

SEQ ID NO: 5033986 - DNA, 25 bp, Homo sapien
gagataccatattctagcaaaagtg

SEQ ID NO: 5033987 - DNA, 25 bp, Homo sapien
ctaagagataccatattctagcaaa

SEQ ID NO: 5033988 - DNA, 25 bp, Homo sapien
agataccatattctagcaaaagtgg

SEQ ID NO: 5033989 - DNA, 25 bp, Homo sapien
aagagataccatattctagcaaaag

SEQ ID NO: 5033990 - DNA, 25 bp, Homo sapien
gagtgctccttttgacaccaggtca

SEQ ID NO: 5033991 - DNA, 25 bp, Homo sapien
gaacagtctattctcgacccagcag

SEQ ID NO: 5033992 - DNA, 25 bp, Homo sapien
gacgaacgacattaagtgcttgcca

SEQ ID NO: 5033993 - DNA, 25 bp, Homo sapien
ttgccagactgacgaccctcttgtg

SEQ ID NO: 5033994 - DNA, 25 bp, Homo sapien
tcttggccgagggtctcggcttccc

SEQ ID NO: 5033995 - DNA, 25 bp, Homo sapien
cttaatctgccggaaccaacgctct

SEQ ID NO: 5033996 - DNA, 25 bp, Homo sapien
tcaagccataagagtccgagctcac

SEQ ID NO: 5033997 - DNA, 25 bp, Homo sapien
tccttctgccagtataatgaacccc

SEQ ID NO: 5033998 - DNA, 25 bp, Homo sapien
tggggcgccctagagaaactcgaca

SEQ ID NO: 5033999 - DNA, 25 bp, Homo sapien
ctggggcgccctagagaaactcgac

SEQ ID NO: 5034000 - DNA, 25 bp, Homo sapien
ggggcgccctagagaaactcgacat

SEQ ID NO: 5034001 - DNA, 25 bp, Homo sapien
tatctcgcttggtggaaaaactgcg

SEQ ID NO: 5034002 - DNA, 25 bp, Homo sapien
agttcctagcccgtcgagcacttgt

SEQ ID NO: 5034003 - DNA, 25 bp, Homo sapien
gaggacataatttccagccgaccta

SEQ ID NO: 5034004 - DNA, 25 bp, Homo sapien
gggaaacgctaacacccaagcagga

SEQ ID NO: 5034005 - DNA, 25 bp, Homo sapien
tcccataatactaccttaggtgatc

SEQ ID NO: 5034006 - DNA, 25 bp, Homo sapien
tattgcatgtgtaaactactagaaa

SEQ ID NO: 5034007 - DNA, 25 bp, Homo sapien
tacttagagcatattgtcttcccat

SEQ ID NO: 5034008 - DNA, 25 bp, Homo sapien
gaccccagatttctcaattataaga

SEQ ID NO: 5034009 - DNA, 25 bp, Homo sapien
gattaagtgtcatatccaggatcac

SEQ ID NO: 5034010 - DNA, 25 bp, Homo sapien
taaagtacaacagattagatcaggc

SEQ ID NO: 5034011 - DNA, 25 bp, Homo sapien
gaacttacatttgttgaaccacact

SEQ ID NO: 5034012 - DNA, 25 bp, Homo sapien
taacatgagaggagccagttggttt

SEQ ID NO: 5034013 - DNA, 25 bp, Homo sapien
cataggatagccaaataactttgta

SEQ ID NO: 5034014 - DNA, 25 bp, Homo sapien
gtttgaagataacctgtaagcctga

SEQ ID NO: 5034015 - DNA, 25 bp, Homo sapien
tgtgaacatgctggataaacttttg

SEQ ID NO: 5034016 - DNA, 25 bp, Homo sapien
cagttaacctgattgaaagcaaaag

SEQ ID NO: 5034017 - DNA, 25 bp, Homo sapien
gaatatgtgagacactcttaacagc

SEQ ID NO: 5034018 - DNA, 25 bp, Homo sapien
gactttaccatgtcttgatgactat

SEQ ID NO: 5034019 - DNA, 25 bp, Homo sapien
cactaggagagtgaaaatgtaaccc

SEQ ID NO: 5034020 - DNA, 25 bp, Homo sapien
tgcctctaaacaccaactagaatga

SEQ ID NO: 5034021 - DNA, 25 bp, Homo sapien
tgggtatggctttcatcagtagact

SEQ ID NO: 5034022 - DNA, 25 bp, Homo sapien
tgacgattaccacatcacacattgg

SEQ ID NO: 5034023 - DNA, 25 bp, Homo sapien
cactgtcaataaagagagacctgtc

SEQ ID NO: 5034024 - DNA, 25 bp, Homo sapien
ggaaaccccgtatctgttggcagta

SEQ ID NO: 5034025 - DNA, 25 bp, Homo sapien
gccttagtttgaaggccgtagttga

SEQ ID NO: 5034026 - DNA, 25 bp, Homo sapien
gaaattgcttactttttggactgcg

SEQ ID NO: 5034027 - DNA, 25 bp, Homo sapien
gaggaagaagttccttactctcttg

SEQ ID NO: 5034028 - DNA, 25 bp, Homo sapien
agaagttccttactctcttgtgcgg

SEQ ID NO: 5034029 - DNA, 25 bp, Homo sapien
tcccaggccctggtccaagccaagg

SEQ ID NO: 5034030 - DNA, 25 bp, Homo sapien
tcacagccatgaggccaagcatgag

SEQ ID NO: 5034031 - DNA, 25 bp, Homo sapien
tgagaagaacgttttctttcaacat

SEQ ID NO: 5034032 - DNA, 25 bp, Homo sapien
gaaaatatcactggctttgtttctt

SEQ ID NO: 5034033 - DNA, 25 bp, Homo sapien
ccatgggatgccttttcctgaccat

SEQ ID NO: 5034034 - DNA, 25 bp, Homo sapien
tctgagatcagagtcagcaggaggg

SEQ ID NO: 5034035 - DNA, 25 bp, Homo sapien
ggctttgtccatgggatgccttttc

SEQ ID NO: 5034036 - DNA, 25 bp, Homo sapien
aggaggggctttgtccatgggatgc

SEQ ID NO: 5034037 - DNA, 25 bp, Homo sapien
tctcagtcacatgggatgtctctca

SEQ ID NO: 5034038 - DNA, 25 bp, Homo sapien
gagaaatcatgcctcacataagtac

SEQ ID NO: 5034039 - DNA, 25 bp, Homo sapien
tctctcaggatagagggtgtacaga

SEQ ID NO: 5034040 - DNA, 25 bp, Homo sapien
gtgacattagtgcttcatgaggccc

SEQ ID NO: 5034041 - DNA, 25 bp, Homo sapien
ttcaaccaagcagagtcaacaagga

SEQ ID NO: 5034042 - DNA, 25 bp, Homo sapien
tgactgtacccaagcatgatccaga

SEQ ID NO: 5034043 - DNA, 25 bp, Homo sapien
tggcttaaaaggatgtcactgcacc

SEQ ID NO: 5034044 - DNA, 25 bp, Homo sapien
aattaagtaaatgcctctgcctggg

SEQ ID NO: 5034045 - DNA, 25 bp, Homo sapien
catacttcatgtagaaccgagcacc

SEQ ID NO: 5034046 - DNA, 25 bp, Homo sapien
cggatttcgccttgaagaaccacaa

SEQ ID NO: 5034047 - DNA, 25 bp, Homo sapien
taaaatcttcaaggaggcaatcgtg

SEQ ID NO: 5034048 - DNA, 25 bp, Homo sapien
tcaagccccttggaactagcgtcat

SEQ ID NO: 5034049 - DNA, 25 bp, Homo sapien
ggtgcgctgctcactacagatggtg

SEQ ID NO: 5034050 - DNA, 25 bp, Homo sapien
cacgttctctggtggcattgcagcc

SEQ ID NO: 5034051 - DNA, 25 bp, Homo sapien
cagaccttggtgtgagtatagtccc

SEQ ID NO: 5034052 - DNA, 25 bp, Homo sapien
tattcggcccttgcgtacctggtga

SEQ ID NO: 5034053 - DNA, 25 bp, Homo sapien
gaaaacaattggcttggggcaggaa

SEQ ID NO: 5034054 - DNA, 25 bp, Homo sapien
gtcttgtaatcttagctgacaggaa

SEQ ID NO: 5034055 - DNA, 25 bp, Homo sapien
aagcccagtcttgtaatcttagctg

SEQ ID NO: 5034056 - DNA, 25 bp, Homo sapien
ccaccaagcccagtcttgtaatctt

SEQ ID NO: 5034057 - DNA, 25 bp, Homo sapien
aagcacgtatgccacatctctggga

SEQ ID NO: 5034058 - DNA, 25 bp, Homo sapien
ttatgcttcttgatgtgttccttga

SEQ ID NO: 5034059 - DNA, 25 bp, Homo sapien
tctagtcttgaactgtttaagcacg

SEQ ID NO: 5034060 - DNA, 25 bp, Homo sapien
gtgttgtcaccatcctctagtcttg

SEQ ID NO: 5034061 - DNA, 25 bp, Homo sapien
tgtggcgctcatggcaagaaacctg

SEQ ID NO: 5034062 - DNA, 25 bp, Homo sapien
taactctcagaaagtgaatgtcagc

SEQ ID NO: 5034063 - DNA, 25 bp, Homo sapien
gaaacctggtactgtcttggtgcca

SEQ ID NO: 5034064 - DNA, 25 bp, Homo sapien
caagtgtcagccacgaggaatggcc

SEQ ID NO: 5034065 - DNA, 25 bp, Homo sapien
gagcttttcataaggagactgtatg

SEQ ID NO: 5034066 - DNA, 25 bp, Homo sapien
gcatcctgattccatcatctgaaga

SEQ ID NO: 5034067 - DNA, 25 bp, Homo sapien
cactcctggtttttgtaggtgcaag

SEQ ID NO: 5034068 - DNA, 25 bp, Homo sapien
tgtatggtcaaacggcactcctggt

SEQ ID NO: 5034069 - DNA, 25 bp, Homo sapien
aagagatgtgtttcaatcccttgcc

SEQ ID NO: 5034070 - DNA, 25 bp, Homo sapien
tgatttcagcaatgagttcagcaga

SEQ ID NO: 5034071 - DNA, 25 bp, Homo sapien
taccagttcgcgttgcaaaggacag

SEQ ID NO: 5034072 - DNA, 25 bp, Homo sapien
aaccctgtactatgctccttgtcca

SEQ ID NO: 5034073 - DNA, 25 bp, Homo sapien
ttgtataagacccaaattggtgatc

SEQ ID NO: 5034074 - DNA, 25 bp, Homo sapien
acccaaattggtgatctgctctcat

SEQ ID NO: 5034075 - DNA, 25 bp, Homo sapien
agacccaaattggtgatctgctctc

SEQ ID NO: 5034076 - DNA, 25 bp, Homo sapien
tataagacccaaattggtgatctgc

SEQ ID NO: 5034077 - DNA, 25 bp, Homo sapien
agactgggtgacacagtgagactcc

SEQ ID NO: 5034078 - DNA, 25 bp, Homo sapien
ccaagatcgtgccactgcactccag

SEQ ID NO: 5034079 - DNA, 25 bp, Homo sapien
cctgggaggcggaggttgcagtgag

SEQ ID NO: 5034080 - DNA, 25 bp, Homo sapien
ggcagaaaactgcttgaacctggga

SEQ ID NO: 5034081 - DNA, 25 bp, Homo sapien
ctatcacagaaactagcatatggtt

SEQ ID NO: 5034082 - DNA, 25 bp, Homo sapien
gaaactagcatatggtttgtgctcc

SEQ ID NO: 5034083 - DNA, 25 bp, Homo sapien
tcacagaaactagcatatggtttgt

SEQ ID NO: 5034084 - DNA, 25 bp, Homo sapien
aactagcatatggtttgtgctccat

SEQ ID NO: 5034085 - DNA, 25 bp, Homo sapien
tacctggtgggtatgctgtaataaa

SEQ ID NO: 5034086 - DNA, 25 bp, Homo sapien
tggatacagcattacacaccttgaa

SEQ ID NO: 5034087 - DNA, 25 bp, Homo sapien
tggcttaatgaaacgtatagtactg

SEQ ID NO: 5034088 - DNA, 25 bp, Homo sapien
ttgatttgccatctgaggaacagca

SEQ ID NO: 5034089 - DNA, 25 bp, Homo sapien
caactggccagattgcttacatggt

SEQ ID NO: 5034090 - DNA, 25 bp, Homo sapien
ccctaatggagtctgggcgtcaaga

SEQ ID NO: 5034091 - DNA, 25 bp, Homo sapien
cttacatggttctggcgagctcaaa

SEQ ID NO: 5034092 - DNA, 25 bp, Homo sapien
gctaggagtagccaatcaattgcct

SEQ ID NO: 5034093 - DNA, 25 bp, Homo sapien
tgagggatattgactataagaaacg

SEQ ID NO: 5034094 - DNA, 25 bp, Homo sapien
gaaacgaacaacttagtacaggtga

SEQ ID NO: 5034095 - DNA, 25 bp, Homo sapien
ggcaagatcccatgtctcagaaagt

SEQ ID NO: 5034096 - DNA, 25 bp, Homo sapien
agcaaaacagcttggagtcaattcc

SEQ ID NO: 5034097 - DNA, 25 bp, Homo sapien
ctgagcgcactgctataaactgtac

SEQ ID NO: 5034098 - DNA, 25 bp, Homo sapien
tcctgagcgcactgctataaactgt

SEQ ID NO: 5034099 - DNA, 25 bp, Homo sapien
ctttggctaagcaaaaaatgttctc

SEQ ID NO: 5034100 - DNA, 25 bp, Homo sapien
aaacttcctgagcgcactgctataa

SEQ ID NO: 5034101 - DNA, 25 bp, Homo sapien
catgttgtgagcatttctggtgcca

SEQ ID NO: 5034102 - DNA, 25 bp, Homo sapien
gcaccattgaagtttggcagtggaa

SEQ ID NO: 5034103 - DNA, 25 bp, Homo sapien
gcagtcgacaccaggaacatgttgt

SEQ ID NO: 5034104 - DNA, 25 bp, Homo sapien
aaacatctctgcatggcagtcgaca

SEQ ID NO: 5034105 - DNA, 25 bp, Homo sapien
tgctgaacgaagctccctagctctg

SEQ ID NO: 5034106 - DNA, 25 bp, Homo sapien
tgaactctttgagggcataacttga

SEQ ID NO: 5034107 - DNA, 25 bp, Homo sapien
ggccattccctcttgtgctgaacga

SEQ ID NO: 5034108 - DNA, 25 bp, Homo sapien
tggccctactacgtgtgtttatgaa

SEQ ID NO: 5034109 - DNA, 25 bp, Homo sapien
atttttggagacattttgttggctt

SEQ ID NO: 5034110 - DNA, 25 bp, Homo sapien
atatttttggagacattttgttggc

SEQ ID NO: 5034111 - DNA, 25 bp, Homo sapien
gagatatttttggagacattttgtt

SEQ ID NO: 5034112 - DNA, 25 bp, Homo sapien
gatatttttggagacattttgttgg

SEQ ID NO: 5034113 - DNA, 25 bp, Homo sapien
ggtttaggctattcatctgctttac

SEQ ID NO: 5034114 - DNA, 25 bp, Homo sapien
tgggtttaggctattcatctgcttt

SEQ ID NO: 5034115 - DNA, 25 bp, Homo sapien
ttatgggtttaggctattcatctgc

SEQ ID NO: 5034116 - DNA, 25 bp, Homo sapien
tatgggtttaggctattcatctgct

SEQ ID NO: 5034117 - DNA, 25 bp, Homo sapien
gtcacttgtgaacctgtagcagaca

SEQ ID NO: 5034118 - DNA, 25 bp, Homo sapien
agacactttcagtgctccactcaaa

SEQ ID NO: 5034119 - DNA, 25 bp, Homo sapien
ttgcttttaaggaatcacacttagg

SEQ ID NO: 5034120 - DNA, 25 bp, Homo sapien
aatcacacttaggactttcctgctt

SEQ ID NO: 5034121 - DNA, 25 bp, Homo sapien
cttgaaatatggctaaggagggtga

SEQ ID NO: 5034122 - DNA, 25 bp, Homo sapien
ctctcaagacccctgtaaggtcagg

SEQ ID NO: 5034123 - DNA, 25 bp, Homo sapien
ctagtggctaccatgctaagcagtc

SEQ ID NO: 5034124 - DNA, 25 bp, Homo sapien
acaggtggctattggacccttgaaa

SEQ ID NO: 5034125 - DNA, 25 bp, Homo sapien
ccgtatgtggtgctctaactgggcc

SEQ ID NO: 5034126 - DNA, 25 bp, Homo sapien
gcaaaattggattcagcagtcactc

SEQ ID NO: 5034127 - DNA, 25 bp, Homo sapien
tcaacatgacttctactgcaaggag

SEQ ID NO: 5034128 - DNA, 25 bp, Homo sapien
gttcataatgcccagaaactgtgag

SEQ ID NO: 5034129 - DNA, 25 bp, Homo sapien
tatgtcaataccgtgatgaagtgct

SEQ ID NO: 5034130 - DNA, 25 bp, Homo sapien
taataaatgtgcactgaaggacctg

SEQ ID NO: 5034131 - DNA, 25 bp, Homo sapien
aggacctgaaaaaccgagcctggca

SEQ ID NO: 5034132 - DNA, 25 bp, Homo sapien
tccacaggaagcgtcatggaactga

SEQ ID NO: 5034133 - DNA, 25 bp, Homo sapien
ttcctccgtggcatgctgtcataga

SEQ ID NO: 5034134 - DNA, 25 bp, Homo sapien
gctgtcatagattaaaaggtctttc

SEQ ID NO: 5034135 - DNA, 25 bp, Homo sapien
cctccgtggcatgctgtcatagatt

SEQ ID NO: 5034136 - DNA, 25 bp, Homo sapien
gtatgtgtgaactgggctgaaccag

SEQ ID NO: 5034137 - DNA, 25 bp, Homo sapien
ctcaaaaaaaaggagaagagcagaa

SEQ ID NO: 5034138 - DNA, 25 bp, Homo sapien
tctcaaaaaaaaggagaagagcaga

SEQ ID NO: 5034139 - DNA, 25 bp, Homo sapien
catttcccttcattaggtgtgagcg

SEQ ID NO: 5034140 - DNA, 25 bp, Homo sapien
ccttcattaggtgtgagcggtccat

SEQ ID NO: 5034141 - DNA, 25 bp, Homo sapien
gagcggtccatactcagcttccaga

SEQ ID NO: 5034142 - DNA, 25 bp, Homo sapien
taggtgtgagcggtccatactcagc

SEQ ID NO: 5034143 - DNA, 25 bp, Homo sapien
tctgcagaagtaggtaccacacaaa

SEQ ID NO: 5034144 - DNA, 25 bp, Homo sapien
aaaagtcagcatcgtggattctcag

SEQ ID NO: 5034145 - DNA, 25 bp, Homo sapien
tggaattaccaacgtgaaacactgt

SEQ ID NO: 5034146 - DNA, 25 bp, Homo sapien
tctggaatgaaatacctgcaaggca

SEQ ID NO: 5034147 - DNA, 25 bp, Homo sapien
taacagggccggtgaatctgctgta

SEQ ID NO: 5034148 - DNA, 25 bp, Homo sapien
aggtaacagggccggtgaatctgct

SEQ ID NO: 5034149 - DNA, 25 bp, Homo sapien
cagggccggtgaatctgctgtatac

SEQ ID NO: 5034150 - DNA, 25 bp, Homo sapien
gtaacagggccggtgaatctgctgt

SEQ ID NO: 5034151 - DNA, 25 bp, Homo sapien
ctggaataacgctgccggcgttctg

SEQ ID NO: 5034152 - DNA, 25 bp, Homo sapien
tggaataacgctgccggcgttctgt

SEQ ID NO: 5034153 - DNA, 25 bp, Homo sapien
aacgctgccggcgttctgtaaatat

SEQ ID NO: 5034154 - DNA, 25 bp, Homo sapien
aataacgctgccggcgttctgtaaa

SEQ ID NO: 5034155 - DNA, 25 bp, Homo sapien
aggggacataccaaactcttcaggg

SEQ ID NO: 5034156 - DNA, 25 bp, Homo sapien
catctggaaagctatctggggattc

SEQ ID NO: 5034157 - DNA, 25 bp, Homo sapien
tatttttaaagctggcccaaattca

SEQ ID NO: 5034158 - DNA, 25 bp, Homo sapien
aatacaaaaggtccttgtctggaag

SEQ ID NO: 5034159 - DNA, 25 bp, Homo sapien
tgggattcctctactttcttaataa

SEQ ID NO: 5034160 - DNA, 25 bp, Homo sapien
actctatggactcaccctgaattat

SEQ ID NO: 5034161 - DNA, 25 bp, Homo sapien
gtgttgggattcctctactttctta

SEQ ID NO: 5034162 - DNA, 25 bp, Homo sapien
agaatcctctcttagggtctggatt

SEQ ID NO: 5034163 - DNA, 25 bp, Homo sapien
tgttcaatgacatacgttcaatgcc

SEQ ID NO: 5034164 - DNA, 25 bp, Homo sapien
ctgtgtgtgttcaatgacatacgtt

SEQ ID NO: 5034165 - DNA, 25 bp, Homo sapien
tgatcaatatgttgagctgcttttt

SEQ ID NO: 5034166 - DNA, 25 bp, Homo sapien
aatgacatacgttcaatgcccctgc

SEQ ID NO: 5034167 - DNA, 25 bp, Homo sapien
ccagtgtctctctacataacatgca

SEQ ID NO: 5034168 - DNA, 25 bp, Homo sapien
catgcatacattaaggcacacattc

SEQ ID NO: 5034169 - DNA, 25 bp, Homo sapien
gctacaaaccaatcatgacccaatg

SEQ ID NO: 5034170 - DNA, 25 bp, Homo sapien
caaaggtcgacattcactaaaccaa

SEQ ID NO: 5034171 - DNA, 25 bp, Homo sapien
cagtagggactaagagacttgtcag

SEQ ID NO: 5034172 - DNA, 25 bp, Homo sapien
agtagggactaagagacttgtcagg

SEQ ID NO: 5034173 - DNA, 25 bp, Homo sapien
tcagtagggactaagagacttgtca

SEQ ID NO: 5034174 - DNA, 25 bp, Homo sapien
gtagggactaagagacttgtcaggc

SEQ ID NO: 5034175 - DNA, 25 bp, Homo sapien
gaatcctgctcttccagggttccat

SEQ ID NO: 5034176 - DNA, 25 bp, Homo sapien
atcctgctcttccagggttccatac

SEQ ID NO: 5034177 - DNA, 25 bp, Homo sapien
aggaatcctgctcttccagggttcc

SEQ ID NO: 5034178 - DNA, 25 bp, Homo sapien
tcaaaaggaatcctgctcttccagg

SEQ ID NO: 5034179 - DNA, 25 bp, Homo sapien
gaaaggtggcattggtccagatcct

SEQ ID NO: 5034180 - DNA, 25 bp, Homo sapien
tgaaaggtggcattggtccagatcc

SEQ ID NO: 5034181 - DNA, 25 bp, Homo sapien
gtgtctgcgagtgaaaggtggcatt

SEQ ID NO: 5034182 - DNA, 25 bp, Homo sapien
aggtgtctgcgagtgaaaggtggca

SEQ ID NO: 5034183 - DNA, 25 bp, Homo sapien
ctgtgttccttaaactgaagacaac

SEQ ID NO: 5034184 - DNA, 25 bp, Homo sapien
gcgtaggtccatactagagtttttc

SEQ ID NO: 5034185 - DNA, 25 bp, Homo sapien
tctgaggtagaaagagttcagtgtg

SEQ ID NO: 5034186 - DNA, 25 bp, Homo sapien
caatgagtagaccaggcgtaggtcc

SEQ ID NO: 5034187 - DNA, 25 bp, Homo sapien
ccccgagccatcagaagagactgct

SEQ ID NO: 5034188 - DNA, 25 bp, Homo sapien
gcaggacaccccgagccatcagaag

SEQ ID NO: 5034189 - DNA, 25 bp, Homo sapien
gctgctggtgaagtatgcagttccc

SEQ ID NO: 5034190 - DNA, 25 bp, Homo sapien
gctggtgaagtatgcagttccctcc

SEQ ID NO: 5034191 - DNA, 25 bp, Homo sapien
gtcaatatgagagtatctttgggga

SEQ ID NO: 5034192 - DNA, 25 bp, Homo sapien
ctttggggagcgctgccaagccctg

SEQ ID NO: 5034193 - DNA, 25 bp, Homo sapien
agtatctttggggagcgctgccaag

SEQ ID NO: 5034194 - DNA, 25 bp, Homo sapien
tatgagagtatctttggggagcgct

SEQ ID NO: 5034195 - DNA, 25 bp, Homo sapien
ttattagcacaattcaaagagtagt

SEQ ID NO: 5034196 - DNA, 25 bp, Homo sapien
cttattagcacaattcaaagagtag

SEQ ID NO: 5034197 - DNA, 25 bp, Homo sapien
caatgatcacatcttttctggcaga

SEQ ID NO: 5034198 - DNA, 25 bp, Homo sapien
catgacaacgaggaggtgcacacaa

SEQ ID NO: 5034199 - DNA, 25 bp, Homo sapien
tcccaataagcactttgcaccatga

SEQ ID NO: 5034200 - DNA, 25 bp, Homo sapien
cacatcttttctggcagaatcccaa

SEQ ID NO: 5034201 - DNA, 25 bp, Homo sapien
ccttggtgggcataatagcgtgtcc

SEQ ID NO: 5034202 - DNA, 25 bp, Homo sapien
taatagcgtgtccaaccttgctcca

SEQ ID NO: 5034203 - DNA, 25 bp, Homo sapien
ttgggcttcctcgtgcattttggat

SEQ ID NO: 5034204 - DNA, 25 bp, Homo sapien
tccctagctctgagaccggaggtct

SEQ ID NO: 5034205 - DNA, 25 bp, Homo sapien
cattgtccctttcgttctttgaaat

SEQ ID NO: 5034206 - DNA, 25 bp, Homo sapien
gcattgtccctttcgttctttgaaa

SEQ ID NO: 5034207 - DNA, 25 bp, Homo sapien
agcattgtccctttcgttctttgaa

SEQ ID NO: 5034208 - DNA, 25 bp, Homo sapien
gacagcaatcatgtgtaaggacaat

SEQ ID NO: 5034209 - DNA, 25 bp, Homo sapien
cagcaatcatgtgtaaggacaatgg

SEQ ID NO: 5034210 - DNA, 25 bp, Homo sapien
gcaatcatgtgtaaggacaatggca

SEQ ID NO: 5034211 - DNA, 25 bp, Homo sapien
cagattattcccaaagtccagtgtt

SEQ ID NO: 5034212 - DNA, 25 bp, Homo sapien
ggatcaccgtgtgcttagcatctgg

SEQ ID NO: 5034213 - DNA, 25 bp, Homo sapien
ttaacgttggaatggatggcactga

SEQ ID NO: 5034214 - DNA, 25 bp, Homo sapien
tcagcaatcactcgggtcagcaggt

SEQ ID NO: 5034215 - DNA, 25 bp, Homo sapien
tgcaagccagccaagatgcctaatc

SEQ ID NO: 5034216 - DNA, 25 bp, Homo sapien
ctgtggtgtaaaggcatgaattggc

SEQ ID NO: 5034217 - DNA, 25 bp, Homo sapien
atattcattgagaaattgtgcaaga

SEQ ID NO: 5034218 - DNA, 25 bp, Homo sapien
attcattgagaaattgtgcaagatt

SEQ ID NO: 5034219 - DNA, 25 bp, Homo sapien
tattcattgagaaattgtgcaagat

SEQ ID NO: 5034220 - DNA, 25 bp, Homo sapien
tggttctagaacttcatggtcactt

SEQ ID NO: 5034221 - DNA, 25 bp, Homo sapien
tcagcctcagcaatgtgatgtctcc

SEQ ID NO: 5034222 - DNA, 25 bp, Homo sapien
gagtcagcctcagcaatgtgatgtc

SEQ ID NO: 5034223 - DNA, 25 bp, Homo sapien
ttcagagtcagcctcagcaatgtga

SEQ ID NO: 5034224 - DNA, 25 bp, Homo sapien
cagggttgcttttacatccctaaga

SEQ ID NO: 5034225 - DNA, 25 bp, Homo sapien
ttgatgccagggttgcttttacatc

SEQ ID NO: 5034226 - DNA, 25 bp, Homo sapien
agattttgatgccagggttgctttt

SEQ ID NO: 5034227 - DNA, 25 bp, Homo sapien
gatgccagggttgcttttacatccc

SEQ ID NO: 5034228 - DNA, 25 bp, Homo sapien
tcaaatctataagtaactgaacaac

SEQ ID NO: 5034229 - DNA, 25 bp, Homo sapien
gtcaaatctataagtaactgaacaa

SEQ ID NO: 5034230 - DNA, 25 bp, Homo sapien
caaatctataagtaactgaacaaca

SEQ ID NO: 5034231 - DNA, 25 bp, Homo sapien
tattgtgacatcatcaatttgcaaa

SEQ ID NO: 5034232 - DNA, 25 bp, Homo sapien
ttgtgacatcatcaatttgcaaaac

SEQ ID NO: 5034233 - DNA, 25 bp, Homo sapien
ttttattgtgacatcatcaatttgc

SEQ ID NO: 5034234 - DNA, 25 bp, Homo sapien
cttatttttattgtgacatcatcaa

SEQ ID NO: 5034235 - DNA, 25 bp, Homo sapien
atgtttctgcgtcattcttctctac

SEQ ID NO: 5034236 - DNA, 25 bp, Homo sapien
taatgtttctgcgtcattcttctct

SEQ ID NO: 5034237 - DNA, 25 bp, Homo sapien
tctgtaatgtttctgcgtcattctt

SEQ ID NO: 5034238 - DNA, 25 bp, Homo sapien
tgtaatgtttctgcgtcattcttct

SEQ ID NO: 5034239 - DNA, 25 bp, Homo sapien
cagtaacaatgtatgccccaatctc

SEQ ID NO: 5034240 - DNA, 25 bp, Homo sapien
tgatgccgagttaaaatcctgtaag

SEQ ID NO: 5034241 - DNA, 25 bp, Homo sapien
gcatcagctgggtcattattaacac

SEQ ID NO: 5034242 - DNA, 25 bp, Homo sapien
caatgtatgccccaatctctgagat

SEQ ID NO: 5034243 - DNA, 25 bp, Homo sapien
ataagaaaaggaaccagggatattg

SEQ ID NO: 5034244 - DNA, 25 bp, Homo sapien
tcaataagaaaaggaaccagggata

SEQ ID NO: 5034245 - DNA, 25 bp, Homo sapien
caataagaaaaggaaccagggatat

SEQ ID NO: 5034246 - DNA, 25 bp, Homo sapien
cctaatgctatcccctcctcactcc

SEQ ID NO: 5034247 - DNA, 25 bp, Homo sapien
gaatgatggtttccacttcattcat

SEQ ID NO: 5034248 - DNA, 25 bp, Homo sapien
gatggtttccacttcattcatgtcc

SEQ ID NO: 5034249 - DNA, 25 bp, Homo sapien
ctaatgctatcccctcctcactccc

SEQ ID NO: 5034250 - DNA, 25 bp, Homo sapien
tctagatattagccctttttcagaa

SEQ ID NO: 5034251 - DNA, 25 bp, Homo sapien
agatattagccctttttcagaagag

SEQ ID NO: 5034252 - DNA, 25 bp, Homo sapien
ccctttttcagaagagtagattgca

SEQ ID NO: 5034253 - DNA, 25 bp, Homo sapien
gccctttttcagaagagtagattgc

SEQ ID NO: 5034254 - DNA, 25 bp, Homo sapien
caagttaatgagagttgtggccgta

SEQ ID NO: 5034255 - DNA, 25 bp, Homo sapien
aaaagagctatatgaggttcctgtt

SEQ ID NO: 5034256 - DNA, 25 bp, Homo sapien
gctacaattagctgttgaagtctct

SEQ ID NO: 5034257 - DNA, 25 bp, Homo sapien
tcatagcctgagctaatcagtgact

SEQ ID NO: 5034258 - DNA, 25 bp, Homo sapien
catgcatattgaaacagaaaatccc

SEQ ID NO: 5034259 - DNA, 25 bp, Homo sapien
taatgaaggtgataacattcacagg

SEQ ID NO: 5034260 - DNA, 25 bp, Homo sapien
cggagtaagaaacatgcaatgctgt

SEQ ID NO: 5034261 - DNA, 25 bp, Homo sapien
aaagtcctgactcatacactgacct

SEQ ID NO: 5034262 - DNA, 25 bp, Homo sapien
atctagacaacttccttgctggctg

SEQ ID NO: 5034263 - DNA, 25 bp, Homo sapien
tctgtaaaggacagtaccctcgact

SEQ ID NO: 5034264 - DNA, 25 bp, Homo sapien
aggacagtaccctcgacttccttct

SEQ ID NO: 5034265 - DNA, 25 bp, Homo sapien
ggctgatgagccctacatttctgga

SEQ ID NO: 5034266 - DNA, 25 bp, Homo sapien
gaccactgcttgatgaattgtgttt

SEQ ID NO: 5034267 - DNA, 25 bp, Homo sapien
tagttcagcgataaagttctctttt

SEQ ID NO: 5034268 - DNA, 25 bp, Homo sapien
gtgtttatctgtagttcagcgataa

SEQ ID NO: 5034269 - DNA, 25 bp, Homo sapien
ctgaccactgcttgatgaattgtgt

SEQ ID NO: 5034270 - DNA, 25 bp, Homo sapien
agagtaattttcttcccctcttgct

SEQ ID NO: 5034271 - DNA, 25 bp, Homo sapien
ctcttgctctctcaaaggctttcat

SEQ ID NO: 5034272 - DNA, 25 bp, Homo sapien
cccctcttgctctctcaaaggcttt

SEQ ID NO: 5034273 - DNA, 25 bp, Homo sapien
gagtaattttcttcccctcttgctc

SEQ ID NO: 5034274 - DNA, 25 bp, Homo sapien
gggaatccaggagaattcaaaccac

SEQ ID NO: 5034275 - DNA, 25 bp, Homo sapien
tcttgctggcttgcagcaacttcgg

SEQ ID NO: 5034276 - DNA, 25 bp, Homo sapien
cattatggtcgccttcagttcctca

SEQ ID NO: 5034277 - DNA, 25 bp, Homo sapien
aacacagatgaaactagtcaggagg

SEQ ID NO: 5034278 - DNA, 25 bp, Homo sapien
atcaggaagtaaatgtgcatagaca

SEQ ID NO: 5034279 - DNA, 25 bp, Homo sapien
aatgtgcatagacatgcatagactc

SEQ ID NO: 5034280 - DNA, 25 bp, Homo sapien
gtgcatagacatgcatagactccat

SEQ ID NO: 5034281 - DNA, 25 bp, Homo sapien
ggaagtaaatgtgcatagacatgca

SEQ ID NO: 5034282 - DNA, 25 bp, Homo sapien
tcatccataagaaacgacgcctgca

SEQ ID NO: 5034283 - DNA, 25 bp, Homo sapien
attgcaaaaattcggtcacatcttc

SEQ ID NO: 5034284 - DNA, 25 bp, Homo sapien
atttaggatggtatatcctttccag

SEQ ID NO: 5034285 - DNA, 25 bp, Homo sapien
ttcagagttacccatgagggttgga

SEQ ID NO: 5034286 - DNA, 25 bp, Homo sapien
cctcaatggttttgtggtcgtggaa

SEQ ID NO: 5034287 - DNA, 25 bp, Homo sapien
tccacatgtgaggaagaatagacag

SEQ ID NO: 5034288 - DNA, 25 bp, Homo sapien
gcccagtaatgtacctgcctcaatg

SEQ ID NO: 5034289 - DNA, 25 bp, Homo sapien
tacagctggctctagtgtgccacca

SEQ ID NO: 5034290 - DNA, 25 bp, Homo sapien
gagtgaacaactgcgtgtggccctg

SEQ ID NO: 5034291 - DNA, 25 bp, Homo sapien
tgtggccctggtaattttttcatag

SEQ ID NO: 5034292 - DNA, 25 bp, Homo sapien
tttttcataggtgccaaacattgtg

SEQ ID NO: 5034293 - DNA, 25 bp, Homo sapien
ttacaggagtgaacaactgcgtgtg

SEQ ID NO: 5034294 - DNA, 25 bp, Homo sapien
tatagttcccgttactccatcttgg

SEQ ID NO: 5034295 - DNA, 25 bp, Homo sapien
ttggtcacagtggaagtcttctacc

SEQ ID NO: 5034296 - DNA, 25 bp, Homo sapien
gcattgcagtatcacacattttacc

SEQ ID NO: 5034297 - DNA, 25 bp, Homo sapien
tgcctgatgtccaaggttttgagca

SEQ ID NO: 5034298 - DNA, 25 bp, Homo sapien
caccacttgttggttcccgagacag

SEQ ID NO: 5034299 - DNA, 25 bp, Homo sapien
gaaaaaccatacatgctgctgtcct

SEQ ID NO: 5034300 - DNA, 25 bp, Homo sapien
tcaggaccagtgcagtaagctaact

SEQ ID NO: 5034301 - DNA, 25 bp, Homo sapien
tgtggccgactatggctctgagcaa

SEQ ID NO: 5034302 - DNA, 25 bp, Homo sapien
gaggatgcctgcatgatagcattgg

SEQ ID NO: 5034303 - DNA, 25 bp, Homo sapien
gcctgcttgaatagaggatgcctgc

SEQ ID NO: 5034304 - DNA, 25 bp, Homo sapien
gatgcctgcttgaatagaggatgcc

SEQ ID NO: 5034305 - DNA, 25 bp, Homo sapien
gcctgcatgatagcattggagttat

SEQ ID NO: 5034306 - DNA, 25 bp, Homo sapien
aatctaggtggagatagccatgtcc

SEQ ID NO: 5034307 - DNA, 25 bp, Homo sapien
gcctcacagccctagtggacattgc

SEQ ID NO: 5034308 - DNA, 25 bp, Homo sapien
ccacacggcgtcctttgaaatctag

SEQ ID NO: 5034309 - DNA, 25 bp, Homo sapien
ccctagtggacattgccctagtggg

SEQ ID NO: 5034310 - DNA, 25 bp, Homo sapien
aatagcattgggatttcacctactc

SEQ ID NO: 5034311 - DNA, 25 bp, Homo sapien
gagggcagcctaagccatgcctggg

SEQ ID NO: 5034312 - DNA, 25 bp, Homo sapien
ggccctggcagccttaaatctccaa

SEQ ID NO: 5034313 - DNA, 25 bp, Homo sapien
ggcagccaaggatcaacataacaca

SEQ ID NO: 5034314 - DNA, 25 bp, Homo sapien
tccactgtgggtctagctgactgca

SEQ ID NO: 5034315 - DNA, 25 bp, Homo sapien
tagagaggagttcccgctacctatg

SEQ ID NO: 5034316 - DNA, 25 bp, Homo sapien
ggttctcaggttttagctcccagga

SEQ ID NO: 5034317 - DNA, 25 bp, Homo sapien
tgcttatagttcaggcgagctgctc

SEQ ID NO: 5034318 - DNA, 25 bp, Homo sapien
gacctgaagtcccttcggaaccatc

SEQ ID NO: 5034319 - DNA, 25 bp, Homo sapien
gaaccatctggcttagctggattct

SEQ ID NO: 5034320 - DNA, 25 bp, Homo sapien
aagcagtttgggacctgtctggacc

SEQ ID NO: 5034321 - DNA, 25 bp, Homo sapien
tgtctggacctgaagtcccttcgga

SEQ ID NO: 5034322 - DNA, 25 bp, Homo sapien
ctatgtataatcgtcaatggtggac

SEQ ID NO: 5034323 - DNA, 25 bp, Homo sapien
tactggcttgatatacagactgaag

SEQ ID NO: 5034324 - DNA, 25 bp, Homo sapien
aaacttattctcctctactggcttg

SEQ ID NO: 5034325 - DNA, 25 bp, Homo sapien
tgacgagcaccaatataaaagtttg

SEQ ID NO: 5034326 - DNA, 25 bp, Homo sapien
catcagatcattgggagatgggact

SEQ ID NO: 5034327 - DNA, 25 bp, Homo sapien
gaattcatcacatctgaaaactttg

SEQ ID NO: 5034328 - DNA, 25 bp, Homo sapien
taaccaggatatcgactgcaggccc

SEQ ID NO: 5034329 - DNA, 25 bp, Homo sapien
aaaggagacttagagtaaccaggat

SEQ ID NO: 5034330 - DNA, 25 bp, Homo sapien
gctttcttgtacaactggccaatcc

SEQ ID NO: 5034331 - DNA, 25 bp, Homo sapien
cttgctggctttcttgtacaactgg

SEQ ID NO: 5034332 - DNA, 25 bp, Homo sapien
ccctcttgccgatacttgctggctt

SEQ ID NO: 5034333 - DNA, 25 bp, Homo sapien
tcttgccgatacttgctggctttct

SEQ ID NO: 5034334 - DNA, 25 bp, Homo sapien
tagggcgtggcttctcgcatgtact

SEQ ID NO: 5034335 - DNA, 25 bp, Homo sapien
gattcaggcggaggtgtttcccacc

SEQ ID NO: 5034336 - DNA, 25 bp, Homo sapien
tcggccaaggccatactccgagtga

SEQ ID NO: 5034337 - DNA, 25 bp, Homo sapien
gatcctttcttcacatagggcgtgg

SEQ ID NO: 5034338 - DNA, 25 bp, Homo sapien
gatgaatcggttccaccaactagtg

SEQ ID NO: 5034339 - DNA, 25 bp, Homo sapien
caggagattgggctaagtccctcac

SEQ ID NO: 5034340 - DNA, 25 bp, Homo sapien
ggttaacagggcaacgagattcttg

SEQ ID NO: 5034341 - DNA, 25 bp, Homo sapien
tcagagttacaaaatcatgggtgac

SEQ ID NO: 5034342 - DNA, 25 bp, Homo sapien
gagccggaaagtccgtctgatgtgt

SEQ ID NO: 5034343 - DNA, 25 bp, Homo sapien
tctaaggagccggaaagtccgtctg

SEQ ID NO: 5034344 - DNA, 25 bp, Homo sapien
taaggagccggaaagtccgtctgat

SEQ ID NO: 5034345 - DNA, 25 bp, Homo sapien
ggaaagtccgtctgatgtgttcaag

SEQ ID NO: 5034346 - DNA, 25 bp, Homo sapien
cctcaatggcattttcccaggtcat

SEQ ID NO: 5034347 - DNA, 25 bp, Homo sapien
ccaaggcaaacctcccagaagcaaa

SEQ ID NO: 5034348 - DNA, 25 bp, Homo sapien
ctttctgcccaaggcaaacctccca

SEQ ID NO: 5034349 - DNA, 25 bp, Homo sapien
gcccaaggcaaacctcccagaagca

SEQ ID NO: 5034350 - DNA, 25 bp, Homo sapien
tctgcccaaggcaaacctcccagaa

SEQ ID NO: 5034351 - DNA, 25 bp, Homo sapien
ttgcagcaagccagtgggtgtaagt

SEQ ID NO: 5034352 - DNA, 25 bp, Homo sapien
cagcaagccagtgggtgtaagtttc

SEQ ID NO: 5034353 - DNA, 25 bp, Homo sapien
agttgcagcaagccagtgggtgtaa

SEQ ID NO: 5034354 - DNA, 25 bp, Homo sapien
tgcagcaagccagtgggtgtaagtt

SEQ ID NO: 5034355 - DNA, 25 bp, Homo sapien
attctcctctacatgcacagctcca

SEQ ID NO: 5034356 - DNA, 25 bp, Homo sapien
ccagatttcacctttgctcacatca

SEQ ID NO: 5034357 - DNA, 25 bp, Homo sapien
tctcccagatttcacctttgctcac

SEQ ID NO: 5034358 - DNA, 25 bp, Homo sapien
tcccagatttcacctttgctcacat

SEQ ID NO: 5034359 - DNA, 25 bp, Homo sapien
agatttcacctttgctcacatcagt

SEQ ID NO: 5034360 - DNA, 25 bp, Homo sapien
cctctgtgaaaatgtatccaggcaa

SEQ ID NO: 5034361 - DNA, 25 bp, Homo sapien
tctgtttgacagttgaagtgggtgt

SEQ ID NO: 5034362 - DNA, 25 bp, Homo sapien
tcagaatgcggcaaactcctctgtg

SEQ ID NO: 5034363 - DNA, 25 bp, Homo sapien
tagcaatgaacagtgggagccaatg

SEQ ID NO: 5034364 - DNA, 25 bp, Homo sapien
tacaaagttaatggaagagtcagag

SEQ ID NO: 5034365 - DNA, 25 bp, Homo sapien
tagagtaacctgtctatacccaggg

SEQ ID NO: 5034366 - DNA, 25 bp, Homo sapien
ggaggatcataactaccatgtgaca

SEQ ID NO: 5034367 - DNA, 25 bp, Homo sapien
ggaaatcagtcaatggccctaagag

SEQ ID NO: 5034368 - DNA, 25 bp, Homo sapien
caatgcttggaagagtacatctaca

SEQ ID NO: 5034369 - DNA, 25 bp, Homo sapien
gcagaagatggatcattctcacccc

SEQ ID NO: 5034370 - DNA, 25 bp, Homo sapien
caatcatttgtcttagcccctctac

SEQ ID NO: 5034371 - DNA, 25 bp, Homo sapien
tggaagctgactcatctgcagaaga

SEQ ID NO: 5034372 - DNA, 25 bp, Homo sapien
aggaccttgcccgatatagccccat

SEQ ID NO: 5034373 - DNA, 25 bp, Homo sapien
ctgccaggaccttgcccgatatagc

SEQ ID NO: 5034374 - DNA, 25 bp, Homo sapien
caggaccttgcccgatatagcccca

SEQ ID NO: 5034375 - DNA, 25 bp, Homo sapien
gccaggaccttgcccgatatagccc

SEQ ID NO: 5034376 - DNA, 25 bp, Homo sapien
gcagccaggcagactcaagcattta

SEQ ID NO: 5034377 - DNA, 25 bp, Homo sapien
gcaaaagactagaatggcactaaag

SEQ ID NO: 5034378 - DNA, 25 bp, Homo sapien
gggcagcattctagtttcattaaac

SEQ ID NO: 5034379 - DNA, 25 bp, Homo sapien
gcatagtaagaaatagcccaggcat

SEQ ID NO: 5034380 - DNA, 25 bp, Homo sapien
cattacagtactgaagtggccacag

SEQ ID NO: 5034381 - DNA, 25 bp, Homo sapien
tacttttctgatacatgagtccact

SEQ ID NO: 5034382 - DNA, 25 bp, Homo sapien
caaagtatgcgtgtttgaaagtggc

SEQ ID NO: 5034383 - DNA, 25 bp, Homo sapien
tcaggaagcgcaatacatcaatgtc

SEQ ID NO: 5034384 - DNA, 25 bp, Homo sapien
caaatgctgcataaccactgagaac

SEQ ID NO: 5034385 - DNA, 25 bp, Homo sapien
ggtatgaccgattataaagcccaca

SEQ ID NO: 5034386 - DNA, 25 bp, Homo sapien
cagtggccatgatagctagagtttc

SEQ ID NO: 5034387 - DNA, 25 bp, Homo sapien
taaaattattcagtactcagcagcc

SEQ ID NO: 5034388 - DNA, 25 bp, Homo sapien
ggattgttctgagccttaaatgcaa

SEQ ID NO: 5034389 - DNA, 25 bp, Homo sapien
tggattctgacactcattactgtga

SEQ ID NO: 5034390 - DNA, 25 bp, Homo sapien
caccaaaaaggtagtagaaggatct

SEQ ID NO: 5034391 - DNA, 25 bp, Homo sapien
tgtttagaacataggctctacagcc

SEQ ID NO: 5034392 - DNA, 25 bp, Homo sapien
gaaatgggagatgccacttctttac

SEQ ID NO: 5034393 - DNA, 25 bp, Homo sapien
tgggagatgccacttctttacttcc

SEQ ID NO: 5034394 - DNA, 25 bp, Homo sapien
tggatgaaatgggagatgccacttc

SEQ ID NO: 5034395 - DNA, 25 bp, Homo sapien
ctgatggatgaaatgggagatgcca

SEQ ID NO: 5034396 - DNA, 25 bp, Homo sapien
tgtgcgagtaccctacagccagtag

SEQ ID NO: 5034397 - DNA, 25 bp, Homo sapien
gatgttaccgcagtctcctatggaa

SEQ ID NO: 5034398 - DNA, 25 bp, Homo sapien
tcctatggaatgcattgacctcatg

SEQ ID NO: 5034399 - DNA, 25 bp, Homo sapien
cactagaacttcagccatgtgcgag

SEQ ID NO: 5034400 - DNA, 25 bp, Homo sapien
cttcagagctttataaaggggacat

SEQ ID NO: 5034401 - DNA, 25 bp, Homo sapien
tatcttcagagctttataaagggga

SEQ ID NO: 5034402 - DNA, 25 bp, Homo sapien
atcttcagagctttataaaggggac

SEQ ID NO: 5034403 - DNA, 25 bp, Homo sapien
tcttcagagctttataaaggggaca

SEQ ID NO: 5034404 - DNA, 25 bp, Homo sapien
ggctttgaatcccagcgacattcat

SEQ ID NO: 5034405 - DNA, 25 bp, Homo sapien
caggctttgaatcccagcgacattc

SEQ ID NO: 5034406 - DNA, 25 bp, Homo sapien
tgcaggctttgaatcccagcgacat

SEQ ID NO: 5034407 - DNA, 25 bp, Homo sapien
ctttgaatcccagcgacattcattc

SEQ ID NO: 5034408 - DNA, 25 bp, Homo sapien
actaaccacatcctggtgatcccag

SEQ ID NO: 5034409 - DNA, 25 bp, Homo sapien
ctacagagtaatgagacacaaggag

SEQ ID NO: 5034410 - DNA, 25 bp, Homo sapien
ggagggtgcctgagccatttctaca

SEQ ID NO: 5034411 - DNA, 25 bp, Homo sapien
aggatgcctgactcctacagagtaa

SEQ ID NO: 5034412 - DNA, 25 bp, Homo sapien
catttctacagactccaagaggttc

SEQ ID NO: 5034413 - DNA, 25 bp, Homo sapien
ccgagccacactaatcagatccctt

SEQ ID NO: 5034414 - DNA, 25 bp, Homo sapien
gaattggaatattcttggtgtggaa

SEQ ID NO: 5034415 - DNA, 25 bp, Homo sapien
atttggaattggaatattcttggtg

SEQ ID NO: 5034416 - DNA, 25 bp, Homo sapien
ttggaattggaatattcttggtgtg

SEQ ID NO: 5034417 - DNA, 25 bp, Homo sapien
gatgaagcctaatgttagtatatta

SEQ ID NO: 5034418 - DNA, 25 bp, Homo sapien
tgcgtgcaatacaccttccaccatg

SEQ ID NO: 5034419 - DNA, 25 bp, Homo sapien
tagggctgcgtgcaatacaccttcc

SEQ ID NO: 5034420 - DNA, 25 bp, Homo sapien
atgtgtctagggctgcgtgcaatac

SEQ ID NO: 5034421 - DNA, 25 bp, Homo sapien
tctagagggactgagcaactaacag

SEQ ID NO: 5034422 - DNA, 25 bp, Homo sapien
tcaattgggacatgctgagctctag

SEQ ID NO: 5034423 - DNA, 25 bp, Homo sapien
tataatatgctcagacagacaagca

SEQ ID NO: 5034424 - DNA, 25 bp, Homo sapien
gagacatctgagtcaatactggtgc

SEQ ID NO: 5034425 - DNA, 25 bp, Homo sapien
tctataatgccctgtccaagagcag

SEQ ID NO: 5034426 - DNA, 25 bp, Homo sapien
ccctcttgtaggtatctgcatggta

SEQ ID NO: 5034427 - DNA, 25 bp, Homo sapien
gcttctttagggcaatgttctagta

SEQ ID NO: 5034428 - DNA, 25 bp, Homo sapien
ccatgggctaccacagcatctcata

SEQ ID NO: 5034429 - DNA, 25 bp, Homo sapien
gataatgttagttcagtgagacctg

SEQ ID NO: 5034430 - DNA, 25 bp, Homo sapien
tgatgtgagaaggaattagaccgcc

SEQ ID NO: 5034431 - DNA, 25 bp, Homo sapien
tggaatgggaccaaaagccaaggca

SEQ ID NO: 5034432 - DNA, 25 bp, Homo sapien
tagaccgccattgcaggctttcaaa

SEQ ID NO: 5034433 - DNA, 25 bp, Homo sapien
aattctgtggcggaatctatgccta

SEQ ID NO: 5034434 - DNA, 25 bp, Homo sapien
tcttaaaaagcccttgaggtgatcc

SEQ ID NO: 5034435 - DNA, 25 bp, Homo sapien
tagaggtagtaactctccaccaggg

SEQ ID NO: 5034436 - DNA, 25 bp, Homo sapien
catacaggcggtggttggagtacta

SEQ ID NO: 5034437 - DNA, 25 bp, Homo sapien
gggtggcaattgactatgaagacat

SEQ ID NO: 5034438 - DNA, 25 bp, Homo sapien
cagggtggcaattgactatgaagac

SEQ ID NO: 5034439 - DNA, 25 bp, Homo sapien
ggtccagggtggcaattgactatga

SEQ ID NO: 5034440 - DNA, 25 bp, Homo sapien
tccagggtggcaattgactatgaag

SEQ ID NO: 5034441 - DNA, 25 bp, Homo sapien
gtggaccgtgacataccagggagtt

SEQ ID NO: 5034442 - DNA, 25 bp, Homo sapien
ccaggaggtggaccgtgacatacca

SEQ ID NO: 5034443 - DNA, 25 bp, Homo sapien
cgtgacataccagggagttgcatca

SEQ ID NO: 5034444 - DNA, 25 bp, Homo sapien
gccaggaggtggaccgtgacatacc

SEQ ID NO: 5034445 - DNA, 25 bp, Homo sapien
agccccttgaagatcttgctgatga

SEQ ID NO: 5034446 - DNA, 25 bp, Homo sapien
tcggctccgttcacggacaggatgg

SEQ ID NO: 5034447 - DNA, 25 bp, Homo sapien
tgcaccgcctcgtcgtgggtggcgt

SEQ ID NO: 5034448 - DNA, 25 bp, Homo sapien
gggcttgggtctggtccgccgccag

SEQ ID NO: 5034449 - DNA, 25 bp, Homo sapien
accagggcgtcctcgctcaagttca

SEQ ID NO: 5034450 - DNA, 25 bp, Homo sapien
caagttcaccagaactttgtgccag

SEQ ID NO: 5034451 - DNA, 25 bp, Homo sapien
gtcccgatgccgttgtacgccgcag

SEQ ID NO: 5034452 - DNA, 25 bp, Homo sapien
cctgcagaacgagccattggtggcg

SEQ ID NO: 5034453 - DNA, 25 bp, Homo sapien
cgcctcccgcgccagccggcccagc

SEQ ID NO: 5034454 - DNA, 25 bp, Homo sapien
ctcccgcgccagccggcccagccgc

SEQ ID NO: 5034455 - DNA, 25 bp, Homo sapien
cctcccgcgccagccggcccagccg

SEQ ID NO: 5034456 - DNA, 25 bp, Homo sapien
gcctcccgcgccagccggcccagcc

SEQ ID NO: 5034457 - DNA, 25 bp, Homo sapien
ctttccggcattcttaaaatgccat

SEQ ID NO: 5034458 - DNA, 25 bp, Homo sapien
tttccggcattcttaaaatgccatg

SEQ ID NO: 5034459 - DNA, 25 bp, Homo sapien
aaaatgccatgtgattggaaaaggg

SEQ ID NO: 5034460 - DNA, 25 bp, Homo sapien
gccatgtgattggaaaaggggggaa

SEQ ID NO: 5034461 - DNA, 25 bp, Homo sapien
ggagagtgcgtcccgcggggaggtg

SEQ ID NO: 5034462 - DNA, 25 bp, Homo sapien
gagagtgcgtcccgcggggaggtgg

SEQ ID NO: 5034463 - DNA, 25 bp, Homo sapien
tccgctccgggagttcgcagacgca

SEQ ID NO: 5034464 - DNA, 25 bp, Homo sapien
gcgggactccgctccgggagttcgc

SEQ ID NO: 5034465 - DNA, 25 bp, Homo sapien
ggactccgctccgggagttcgcaga

SEQ ID NO: 5034466 - DNA, 25 bp, Homo sapien
actccgctccgggagttcgcagacg

SEQ ID NO: 5034467 - DNA, 25 bp, Homo sapien
ctgcactcaggctggttccccctcg

SEQ ID NO: 5034468 - DNA, 25 bp, Homo sapien
ctcgcctgatcctgaccggggtgga

SEQ ID NO: 5034469 - DNA, 25 bp, Homo sapien
ctcaggctggttccccctcgcctga

SEQ ID NO: 5034470 - DNA, 25 bp, Homo sapien
ctggttccccctcgcctgatcctga

SEQ ID NO: 5034471 - DNA, 25 bp, Homo sapien
gcagccagttgcaaaaccccaaagc

SEQ ID NO: 5034472 - DNA, 25 bp, Homo sapien
cagcagccagttgcaaaaccccaaa

SEQ ID NO: 5034473 - DNA, 25 bp, Homo sapien
agcagccagttgcaaaaccccaaag

SEQ ID NO: 5034474 - DNA, 25 bp, Homo sapien
cagccagttgcaaaaccccaaagca

SEQ ID NO: 5034475 - DNA, 25 bp, Homo sapien
ctcactcggtcctcctgagccgact

SEQ ID NO: 5034476 - DNA, 25 bp, Homo sapien
ttcgccgggtgcgtgcgtcccgcct

SEQ ID NO: 5034477 - DNA, 25 bp, Homo sapien
actcggtcctcctgagccgacttcc

SEQ ID NO: 5034478 - DNA, 25 bp, Homo sapien
cggtcctcctgagccgacttccctt

SEQ ID NO: 5034479 - DNA, 25 bp, Homo sapien
taaaagggaatacgctgtcccaaga

SEQ ID NO: 5034480 - DNA, 25 bp, Homo sapien
aaagggaatacgctgtcccaagatt

SEQ ID NO: 5034481 - DNA, 25 bp, Homo sapien
caggagttaaaagggaatacgctgt

SEQ ID NO: 5034482 - DNA, 25 bp, Homo sapien
ccaggagttaaaagggaatacgctg

SEQ ID NO: 5034483 - DNA, 25 bp, Homo sapien
agaaatgcccacataacccatgtca

SEQ ID NO: 5034484 - DNA, 25 bp, Homo sapien
tggtccactcaaggtgtttcatgct

SEQ ID NO: 5034485 - DNA, 25 bp, Homo sapien
ttcccagagcaatccagaaatgccc

SEQ ID NO: 5034486 - DNA, 25 bp, Homo sapien
aagctttcccctaactctaagcagg

SEQ ID NO: 5034487 - DNA, 25 bp, Homo sapien
cagagcctgagtatctgcgttgaaa

SEQ ID NO: 5034488 - DNA, 25 bp, Homo sapien
tgagtatctgcgttgaaatccagat

SEQ ID NO: 5034489 - DNA, 25 bp, Homo sapien
attcttcagtgaaaccagagcctga

SEQ ID NO: 5034490 - DNA, 25 bp, Homo sapien
cattcttcagtgaaaccagagcctg

SEQ ID NO: 5034491 - DNA, 25 bp, Homo sapien
ggcaagtccttggtaaactagatag

SEQ ID NO: 5034492 - DNA, 25 bp, Homo sapien
gtccttggtaaactagatagaccat

SEQ ID NO: 5034493 - DNA, 25 bp, Homo sapien
cctgggcaagtccttggtaaactag

SEQ ID NO: 5034494 - DNA, 25 bp, Homo sapien
caagtccttggtaaactagatagac

SEQ ID NO: 5034495 - DNA, 25 bp, Homo sapien
accagtgctccaacgctcggcagaa

SEQ ID NO: 5034496 - DNA, 25 bp, Homo sapien
aacgctcggcagaaataaggatggc

SEQ ID NO: 5034497 - DNA, 25 bp, Homo sapien
gattccacgtgagactaactgcttt

SEQ ID NO: 5034498 - DNA, 25 bp, Homo sapien
taaggatggcagacactttgttttc

SEQ ID NO: 5034499 - DNA, 25 bp, Homo sapien
agtaaggaagagtgggctgaaccat

SEQ ID NO: 5034500 - DNA, 25 bp, Homo sapien
tgagtaaggaagagtgggctgaacc

SEQ ID NO: 5034501 - DNA, 25 bp, Homo sapien
ctgagtaaggaagagtgggctgaac

SEQ ID NO: 5034502 - DNA, 25 bp, Homo sapien
gagtaaggaagagtgggctgaacca

SEQ ID NO: 5034503 - DNA, 25 bp, Homo sapien
gtacccattgacaacatactcctca

SEQ ID NO: 5034504 - DNA, 25 bp, Homo sapien
tatgtgcactcatcatgataatgct

SEQ ID NO: 5034505 - DNA, 25 bp, Homo sapien
ttccttgctcgcctaacatcttggg

SEQ ID NO: 5034506 - DNA, 25 bp, Homo sapien
atgctgcttccttgctcgcctaaca

SEQ ID NO: 5034507 - DNA, 25 bp, Homo sapien
tggggtctgctttctctgcctgcat

SEQ ID NO: 5034508 - DNA, 25 bp, Homo sapien
ctggggtctgctttctctgcctgca

SEQ ID NO: 5034509 - DNA, 25 bp, Homo sapien
gtagcatcaaacatcaaggttagca

SEQ ID NO: 5034510 - DNA, 25 bp, Homo sapien
tagcatcaaacatcaaggttagcaa

SEQ ID NO: 5034511 - DNA, 25 bp, Homo sapien
tcagtaattgacttacagacacatt

SEQ ID NO: 5034512 - DNA, 25 bp, Homo sapien
aatatctggcagaactagcatgtct

SEQ ID NO: 5034513 - DNA, 25 bp, Homo sapien
tttctgcatatcctaagaaagacta

SEQ ID NO: 5034514 - DNA, 25 bp, Homo sapien
ggaaatcagtaattgacttacagac

SEQ ID NO: 5034515 - DNA, 25 bp, Homo sapien
caaaggtgcttgagaggttgatttc

SEQ ID NO: 5034516 - DNA, 25 bp, Homo sapien
ttgatttcagcttttgcacgtagga

SEQ ID NO: 5034517 - DNA, 25 bp, Homo sapien
taaaagtcaaaggtgcttgagaggt

SEQ ID NO: 5034518 - DNA, 25 bp, Homo sapien
tttgcacgtaggaccactgatttac

SEQ ID NO: 5034519 - DNA, 25 bp, Homo sapien
cacgcatggacctctggtagaggag

SEQ ID NO: 5034520 - DNA, 25 bp, Homo sapien
ggtctgcatgggctgcaatgaactg

SEQ ID NO: 5034521 - DNA, 25 bp, Homo sapien
caagtaaggaaatggtctgcatggg

SEQ ID NO: 5034522 - DNA, 25 bp, Homo sapien
cctctcacgcatggacctctggtag

SEQ ID NO: 5034523 - DNA, 25 bp, Homo sapien
gcttcctgagtcatgtgtcctaagt

SEQ ID NO: 5034524 - DNA, 25 bp, Homo sapien
catgtgtcctaagtgaaagccaccc

SEQ ID NO: 5034525 - DNA, 25 bp, Homo sapien
atcctgggctgactgtccatcccag

SEQ ID NO: 5034526 - DNA, 25 bp, Homo sapien
acatgttgtagtaaggagcagcttc

SEQ ID NO: 5034527 - DNA, 25 bp, Homo sapien
acctggtccatctcttcaccactct

SEQ ID NO: 5034528 - DNA, 25 bp, Homo sapien
ctagcacctggtccatctcttcacc

SEQ ID NO: 5034529 - DNA, 25 bp, Homo sapien
agcacctggtccatctcttcaccac

SEQ ID NO: 5034530 - DNA, 25 bp, Homo sapien
ctggtccatctcttcaccactcttc

SEQ ID NO: 5034531 - DNA, 25 bp, Homo sapien
catcattatggttctgatgcctgtt

SEQ ID NO: 5034532 - DNA, 25 bp, Homo sapien
gcctgttgtgcctttcttaatcttc

SEQ ID NO: 5034533 - DNA, 25 bp, Homo sapien
tgatcgcctcctgaaaacttcgttg

SEQ ID NO: 5034534 - DNA, 25 bp, Homo sapien
aacttcgttgactcttttgtcttca

SEQ ID NO: 5034535 - DNA, 25 bp, Homo sapien
ccgggtacttgctatggccttacag

SEQ ID NO: 5034536 - DNA, 25 bp, Homo sapien
cagatgttccataaccgtagccggg

SEQ ID NO: 5034537 - DNA, 25 bp, Homo sapien
gacttctttggatctaacacagtac

SEQ ID NO: 5034538 - DNA, 25 bp, Homo sapien
acagtacttggcatcctgctaggtg

SEQ ID NO: 5034539 - DNA, 25 bp, Homo sapien
aaatggcctggtagggtagctggcc

SEQ ID NO: 5034540 - DNA, 25 bp, Homo sapien
agctgaaatggcctggtagggtagc

SEQ ID NO: 5034541 - DNA, 25 bp, Homo sapien
agggtagctggcctctaccttgaat

SEQ ID NO: 5034542 - DNA, 25 bp, Homo sapien
ggtagctggcctctaccttgaataa

SEQ ID NO: 5034543 - DNA, 25 bp, Homo sapien
aatgcagccactggtaggactgatc

SEQ ID NO: 5034544 - DNA, 25 bp, Homo sapien
acttgcattacagaaggccttcggg

SEQ ID NO: 5034545 - DNA, 25 bp, Homo sapien
cactggtaggactgatcagatcttc
